(19) United States
(12) Patent Application Publication
(10) Pub. No.: US 2008/0220983 A1
(43) Pub. Date: Sep. 11, 2008

(54) Functional arrays for high throughput characterization of regulatory elements in untranslated regions of genes

(75) Inventors: Nathan Trinklein, Redwood City, CA (US); Shelley Force Aldred, Hayward, CA (US)

Correspondence Address: WILSON SONSINI GOODRICH & ROSATI, 650 PAGE MILL ROAD, PALO ALTO, CA, 94304-1050, US

(73) Assignee: SwitchGear Genomics a California Corporation, Menlo Park, CA (US)

(21) Appl. No.: 12/074,856

(22) Filed: Mar. 5, 2008

Related U.S. Application Data
(60) Provisional application No. 60/905,727, filed on Mar. 8, 2007.

(51) Int. Cl. C40B 30/06; C40B 40/06; C40B 40/02; G06Q 30/00; C40B 60/08

(52) U.S. Cl. 506/10; 506/16; 506/14; 506/37; 705/1

(57) ABSTRACT

This invention provides libraries of expression constructs having different untranslated regions (UTR) from a genome. The expression constructs include transcription regulatory sequences operably linked with a reporter gene and a 5′ UTR, a 3′ UTR or both, wherein the translation of the reporter gene is under the regulatory control of control regions in the UTR sequence. The libraries of this invention are useful for determining the impact of regulatory sequences in the UTRs on translation of open reading frames under a variety of conditions, such as different cellular environments.

### CROSS-REFERENCE

[0001] This application claims the benefit of U.S. Provisional Application No. 60/905,727, filed Mar. 8, 2007, which application is incorporated herein by reference.

### SEQUENCE LISTING

[0002] A CD containing a formal sequence listing was filed in this application and the contents of the CD are expressly incorporated herein in their entirety by reference. SEQ ID NOs: 1-17520 are provided on a compact disc as file name SGG08_UTR_SEQ.txt enclosed with this filing.

### BACKGROUND OF THE INVENTION

[0003] In the post-genome era, high-throughput genomics studies have made great leaps forward. The relatively recent ability to study gene regulation on a genome-wide scale, such as with expression microarrays and ChIP-chip, has yielded new insights into genetic pathways and networks. These technologies provide observational data but leave gaps in network and pathway knowledge such as identification of the functional elements that affect the mRNA levels measured on a microarray. For example, if a group of mRNAs show an increase in steady-state levels after induction with a particular compound, a researcher will be left with questions about what caused the change in steady-state levels. The difference may result from changes in transcriptional regulation or mRNA stability, or a combination of both. Untranslated Region (UTR) sequences can play a major role in regulation of protein translation from a mature mRNA, and a change in transcript stability may affect total protein expression. To more completely understand the mechanism of gene regulation, researchers need the ability to interrogate the function of transcriptional and post-transcriptional regulatory elements on a large scale.

[0004] Promoter-reporter assays have been a standard approach for studying transcriptional regulatory element function for many years. However, it has only been in the last few years that progress has been made in applying this approach to studying hundreds of promoters in a single experiment (Cooper et al. 2006). On the other hand, though studies of the function of UTR sequences using hybrid reporter-UTR assays have been used for a handful of genes, a gap exists in tools available for studying these elements on a large scale. Indeed, evidence continues to accumulate regarding the importance of UTR function in regulating transcript stability and localization along with playing a role in the regulation of translation (reviewed in Conne et al. 2000).

### SUMMARY OF THE INVENTION

[0005] The present invention relates to high-throughput methods for structural and functional characterization of gene expression regulatory elements, specifically those in the untranslated regions of gene transcripts in the human genome. In preferred embodiments, the regulatory element is an untranslated region (UTR) in an mRNA transcript. Each of the UTR regulatory elements can be characterized in terms of its genomic location, sequence, variation, mutation, polymorphism, mRNA stability and localization regulatory activity in different cell or tissue type, and binding affinity with other regulatory factors, such as RNA binding proteins.

[0006] In one aspect this invention provides a library of a different expression constructs, each of a plurality of members of the library comprising a transcription regulatory sequence operably linked with a different transcribable sequence, wherein the transcription of the transcribable sequence is under transcriptional control of the transcriptional regulatory sequence, and wherein each transcribable sequence comprises a different nucleic acid segment from a genome, wherein the segment comprises untranslated region (UTR) sequence of at least 10 nucleotides, at least 50 nucleotides, at least 100 nucleotides or at least 1000 nucleotides operably linked with a reporter sequence that is heterologous to the UTR sequence such that expression of the reporter sequence is under post-transcriptional control of the UTR sequences. In one embodiment the UTR sequence is a 3′ UTR sequence and is positioned 3′ to the reporter sequence. In another embodiment the UTR sequence is a 5′ UTR sequence and is positioned 5′ to the reporter sequence. In another embodiment the transcribable sequence comprises a 3′ UTR sequence positioned 3′ to the reporter sequence and a 5′ UTR sequence positioned 5′ to the reporter sequence. In another embodiment the transcription regulatory sequence is common among the constructs and is heterologous to the UTR sequences. In another embodiment the UTR sequence comprises the entire transcribed UTR sequence of a naturally occuring transcript. In another embodiment a plurality comprising at least 20% of the UTR sequences of said expression constructs in said library are part of a common pathway that can include: UTR sequences that control the expression of genes involved in the same biological process; UTR sequences that are all bound by the same protein, complex of proteins, other nucleic acid binding proteins, other nucleir acid molecules such as microRNAs, or other small molecule; UTR sequences that control the expression of genes whose transcript levels or proteins levels change upon treatment or exposure to the same stimulus; UTR sequences that contain the same sequence motif or collection of sequence motifs wherein a sequence motif is string of 2 or more nucleotides; UTR sequences that control the expression of genes whose sequences, transcripts or proteins are connected via metabolic transformations and/or physical protein-protein, protein-DNA and protein-compound interactions. In another embodiment the UTR sequences are selected from the group consisting of SEQ ID NO: 1-17520. In another embodiment the library comprises at least ten, at least 50, at least 100, at least 200, or at least 1000 expression constructs. In another embodiment the expression construct is a plasmid or viral construct. Each nucleic acid segment comprises at least 20%, at least 40%, at least 60%, or at least 80% of the nucleotides that make up a UTR sequence. In another embodiment the reporter sequence is common among the constructs. In another embodiment the reporter sequence encodes a light-emitting reporter molecule, a fluorescent reporter molecule or a colorimetric molecule. In another embodiment each reporter sequence comprises a pre-determined, unique nucleotide barcode and/or a reporter that reports a visible signal. In another embodiment the genome is a mammalian genome, human genome or a mouse genome.

[0007] In another aspect this invention provides a library of isolated nucleic acid molecules, each of a plurality of members of the library comprising a different, pre-determined nucleic acid segment from a genome, wherein the segment comprises UTR sequences, wherein a plurality comprising at least 20% of the UTR sequences in said library are part of a common pathway. In one embodiment the library comprises at least 10 different pre-determined nucleic acid segment from a genome, wherein about 50% of the UTR sequences of said library are part of said common pathway.

[0008] In another aspect this invention provides a library of cells, wherein each of a plurality of cells in the library of cells comprises a different expression construct, each construct having a transcription regulatory sequence operably linked with a different transcribable sequence, wherein the transcription of the transcribable sequence is under transcriptional control of the transcriptional regulatory sequence, and wherein each transcribable sequence comprises a different nucleic acid segment from a genome, wherein the segment comprises untranslated region (UTR) sequence of at least 10 nucleotides operably linked with a reporter sequence that is heterologous to the UTR sequence such that expression of the reporter sequence is under post-transcriptional control of the UTR sequences. In certain embodiments are human cells or non-human cells.

[0009] In another aspect this invention provides a device comprising receptacles, each or a pluraity of receptacles containing a different expression construct, each expression construct having a transcription regulatory sequence operably linked with a different transcribable sequence, wherein the transcription of the transcribable sequence is under transcriptional control of the transcriptional regulatory sequence, and wherein each transcribable sequence comprises a different nucleic acid segment from a genome, wherein the segment comprises untranslated region (UTR) sequence of at least 10 nucleotides operably linked with a reporter sequence that is heterologous to the UTR sequence such that expression of the reporter sequence is under post-transcriptional control of the UTR sequences, wherein each member has a known location among the receptacles. In one embodiment the plurality has a diversity of at least 10 different nucleic acid segments. In another embodiment the constructs are in the form of a dried nucleic acid or are in solution. In another embodiment the constructs are in a stabilized transfection matrix. In another embodiment the receptacles are comprised in a microtiter plate such as a 96-well plate, a 384-well plate or a 1536 well plate. In another embodiment at least at least 10 different expression constructs wherein about 50% of the UTR sequences of said expression constructs in said library are part of said common pathway.

[0010] In another aspect this invention provides a device comprising a solid substrate comprising a surface and nucleic acid molecules immobilized to the surface, each at a different known location, wherein each molecule comprises a nucleotide sequence of at least 10 nucleotides from a genomic segment comprising UTR sequences. In one embodiment the device comprises UTR sequences from at least 10 different genomic segments. In another embodiment the device comprises at least 10 different UTR sequences from genomic segments wherein about 50% of the UTR sequences in said device are part of a common pathway.

[0011] In another aspect this invention provides a method comprising: providing a device comprising receptacles, each of a plurality of the receptacles containing a different member of a library of cells, wherein each of a plurality of the cells in the library comprises a different member of the library of expression constructs, each of a plurality of the expression constructs characterized by having a transcription regulatory sequence operably linked with a different transcribable sequence, wherein the transcription of the transcribable sequence is under transcriptional control of the transcriptional regulatory sequence, and wherein each transcribable sequence comprises a different nucleic acid segment from a genome, wherein the segment comprises untranslated region (UTR) sequence of at least 10 nucleotides operably linked with a reporter sequence that is heterologous to the UTR sequence such that expression of the reporter sequence is under post-transcriptional control of the UTR sequences; wherein each member of the library of cells has a known location among the receptacles; culturing the cells; and measuring the level of expression of the reporter sequence in each receptacle. In one embodiment the library has a diversity of at least 10 different nucleic acid segments. In another embodiment the step of providing the device comprises: providing a device comprising at least one plate comprising a plurality of receptacles, each receptacle containing a different member of the library of expression constructs, wherein each member of the library of expression constructs has a known location among the receptacles; delivering cells to each of the receptacles; and transfecting the cells with the expression constructs. In another embodiment the method further comprises: perturbing the cells in each receptacle; measuring the level of expression of the reporter sequence in each receptacle; and determining whether the level of expression in any receptacle changed after perturbing the cells. In another embodiment perturbing comprises contacting the cells in each receptacle with a test compound, exposing the cells to different environmental conditions, or genetically modifying the cells either permanently or transiently such as by inducing mutation, overexpressing a transcript for example by transfecting with a cDNA or decreasing expression of a transcript by siRNA. In another embodiment perturbing comprises contacting the cells in each receptacle with a test compound. In another embodiment the method further comprises identifying a compound that alters UTR activity. In another embodiment said cells in said library of cells comprises cells associated with a condition. In another embodiment each cell in said library of cells comprises a DNA polymorphism such as SNP (single nucleotide polymorphism), STR (simple tandem repeat), VTR (variable tandem repeat) and RFLP (restriction fragment length polymorphism), or DNA mutation.

[0012] In another aspect this invention provides a method to determine the functional effect of a DNA polymorphism or DNA mutation in the post-transcriptional activity of a polynucleotide comprising: providing a first library of cells wherein said first library comprises cells comprising said DNA polymorphism or DNA mutation; providing a second library of cells wherein said second library comprises cells not comprising said DNA polymorphism or DNA mutation; providing a device comprising a plurality of receptacles, each receptacle containing a different member of said first library of cells or said second library of cells, wherein each cell in said first and second library of cells comprises a different member of the library of expression constructs, each expression construct characterized by having a transcription regulatory sequence operably linked with a different transcribable sequence, wherein the transcription of the transcribable sequence is under transcriptional control of the transcriptional regulatory sequence, and wherein each transcribable sequence comprises a different nucleic acid segment from a genome, wherein the segment comprises untranslated region (UTR) sequence of at least 10 nucleotides operably linked with a reporter sequence that is heterologous to the UTR sequence such that expression of the reporter sequence is under post-transcriptional control of the UTR sequences; wherein a plurality comprising at least 20% of the UTR sequences in said device are part of a common pathway and wherein each member of the library of cells has a known location among the receptacles; culturing the cells; measuring the level of expression of the reporter sequence in each receptacle; and comparing the level of expression of the reporter sequence to each UTR sequence between said first library of cells and said second library of cells thereby determining the effect of said DNA polymorphism or DNA mutation in the post-transcriptional regulation of a polynucleotide. In one embodiment said DNA polymorphism is selected for the group consisting of SNP, STR, VTR, RFLP, deletions, and insertions.

[0013] In another aspect this invention provides a business method comprising commercializing the compositions, devices of methods of any of the foregoing inventions.

[0014] In one aspect of the invention, a method is provided for determining the effect of a particular UTR sequence on mRNA stability, translation efficiency, and localization of a plurality of different nucleic acid segments. The method comprises: operably linking each of the plurality of different nucleic acid segments with a reporter sequence in an expression vector such that expression of the reporter sequence is under transcriptional control of a common promoter sequence and each of the different UTR nucleic acid sequences has been added to either the 5′ or 3′ end of the reporter sequence (yielding a hybrid transcript); expressing the reporter sequence; and determining the expression level of the reporter controlled by each of the different nucleic acid segments.

[0015] The present invention also provides compositions, assemblies of articles, and kits, preferably for carrying out the methods of the present invention. For example, an array of different gene expression regulatory elements is provided, preferably an array of different UTRs. The diversity of the array is a plurality, preferably at least 10, optionally at least 50, 80, 120, 160, 200, 400, 500, 600, 800, 1000, 1500, 2000, 3000, 5000, 8000, 10,000, or 25,000. Also provided are a library of expression vectors each of which comprises a different UTR, preferably operably linked with a reporter sequence such that overall expression (amount of protein produced) of the reporter sequence is under the control of each of the gene expression regulatory element. Examples of the different gene expression regulatory elements include, but are not limited to at least 2, optionally at least 5, 10, 20, 50, 100, 200, 500, 1000, 5000, 10000, or 25000 nucleotides selected from the group consisting of SEQ ID NOs: 1-17520 or fragments thereof. Examples of the reporter sequence include but are not limited to genes encoding luciferase, fluorescent protein (such as green fluorescent protein), and β-galactosidase.

[0016] In addition, kits are provided which comprise reagents and instructions for performing methods of the present invention, or for performing tests or assays utilizing any of the compositions, libraries, arrays, or assemblies of articles of the present invention. The kits may further comprise buffers, restriction enzymes, adaptors, primers, a ligase, a polymerase, dNTPS and instructions necessary for use of the kits.

[0017] In addition, the present invention provides a method for determining regulatory activity of a plurality of UTR regulatory elements in the genome of an individual. The method comprises: providing a nucleic acid sample from the individual; amplifying a predetermined region of a plurality of UTR regulatory elements in the genome to produce a plurality of nucleic acid fragments; inserting each of the nucleic acid fragments into a reporter construct to generate a library of hybrid reporter constructs; expressing the library of reporter constructs in cells; and determining the transcriptional and translational regulatory activity of the UTR regulatory elements in the cells by correlating with the levels of reporter expressed in the cells. The method may further comprise: comparing the regulatory activity of the UTR regulatory elements with a profile of the same UTR regulatory elements obtained from a reference sample. Examples of the plurality of UTR elements include, but are not limited to at least 2, optionally at least 5, 10, 20, 50, 100, 200, 500, 1000, 5000, 10000, or 25000 polynucleotides selected from the group consisting of SEQ ID NOs: 1-17520 or fragments thereof.

[0018] The method can be used for diagnosing a disease or condition associated with aberrant activity of a UTR regulatory element, such as beta-thalassemia, cardiovascular disease, Alzheimer disease, schizophrenia, bi-polar disorder, glaucoma, epilepsy, multiple sclerosis and lupus. The activity of a particular regulatory element, such as a UTR, or a panel of UTRs in the individual being tested can be compared with those of a panel of UTRs in a reference sample derived from the same individual or another individual. A difference in the regulatory activity may indicate that the individual being tested has a disease associated with aberrant UTR regulatory activity.

### Incorporation By Reference

[0019] All publications, patents, and patent applications mentioned in this specification are herein incorporated by reference to the same extent as if each individual publication, patent, or patent application was specifically and individually indicated to be incorporated by reference.

### BRIEF DESCRIPTION OF THE DRAWINGS

[0020] The novel features of the invention are set forth with particularity in the appended claims. A better understanding of the features and advantages of the present invention will be obtained by reference to the following detailed description that sets forth illustrative embodiments, in which the principles of the invention are utilized, and the accompanying drawings of which:

[0021] We have developed two luciferase reporter vectors to enable high-throughput cloning of UTR sequences proximal to a luciferase reporter cassette. The vector also enables efficient shuffling of different promoters of varying strengths to drive the hybrid transcript to optimize detection of increased or decreased protein output.

[0022] FIG. 1 diagrams a 3′UTR expression vector in which nucleic acids ranging in size from 1 to 5,000 nucleotides representing 3′ UTR fragments are cloned into the multiple cloning site (MCS) 3′ to the reporter gene (luciferase) to produce a hybrid transcript that contains the reporter gene fused to the UTR of interest.

[0023] FIG. 2 diagrams a 5′UTR expression vector in which nucleic acids ranging in size from 1 to 5,000 nucleotides representing 5′ UTR fragments are cloned into the multiple cloning site (MCS) 5′ to the reporter (luciferase) gene to produce a hybrid transcript that contains the luciferase gene fused to the UTR of interest.

[0024] FIG. 3 depicts a method for producing a 3′ UTR expression construct of this invention. A gene in the genome encodes a gene comprising a transcribed region that includes a 5′ UTR, an open reading frame and a 3′ UTR. The 3′ UTR is amplified, e.g., by PCR. The amplified fragment is cloned into a multiple cloning site of a plasmid comprising ampicillin resistance. For example, fragments containing restriction sites can be ligated to the ends of the amplified sequence for this purpose. The expression construct comprises a transcription regulatory sequence (basal promoter) operatively linked to a segment comprising a reporter gene and the 3′UTR and a polyA signal. The expression construct produces an mRNA transcript comprising the open reading frame and the 3′ UTR. The translation of the open reading frame is regulated, in part, by regulatory sequences in the 3′ UTR.

[0025] FIG. 4 is a table containing luciferase reporter data showing that the effect of DFO on luciferase output depends on the UTR present in the construct (hTR whole IRE, up IRE, or down IRE). The sequences of these UTR fragments are listed below the table.

[0026] FIG. 5 is a bar chart comparing how luciferase reporter constructs containing different hTR UTR versions function in the presence of DFO.

[0027] FIG. 6 is a bar chart comparing how luciferase reporter constructs containing different hTR UTR versions function in the absence of DFO.

[0028] FIG. 7 depicts an mRNA comprising a 5′ cap, a 5′ UTR, an open reading frame comprising a start codon, a coding region and a stop codon, a 3′ UTR and a poly A tail.

### DETAILED DESCRIPTION OF THE INVENTION

[0029] This invention provides expression constructs that allow determination of the regulatory activity of untranslated regions of mRNAs on the translation of open reading frames to which they are operably linked. The expression constructs of this invention comprise a transcription regulatory sequence (e.g., a promoter) operably linked to a nucleotide sequence that comprises a reporter gene and at least a portion of an untranslated nucleotide sequence from an mRNA. In these constructs, the UTR is operably linked with the reporter gene, so that any regulatory elements in the UTR regulate the translation, and, therefore, the expression, of the reporter gene, when transcribed under the control of the transcription regulatory sequence. Using transcriptional regulatory sequences of known function and reporter sequences of known activity allows controlled experiments to determine the function of the UTR on the translation of the reporter gene. In certain embodiments, the sequence from the UTR is a partial sequence of entire UTR, e.g., at least 10, at least 50, at least 100, at least 500 or at least 1000 nucleotides. In other embodiments, the UTR includes a majority of, at least 90%, at least 98% or the entire UTR of the mRNA that is its source.

[0030] This invention also provides libraries of the expression constructs of this invention. In certain embodiments each construct in the library contains a common transcriptional regulatory sequence, a common reporter gene and a different UTR, e.g., from a genome of a particular organism or species. In this way, when used in an expression system, differences in the expression of the reporter gene in each construct can be attributed to the activity of the UTR in that particular construct.

[0031] As used herein, an untranslated region (UTR) refers to any sequence in a mature mRNA transcript that does not code for the amino acids of a protein. The UTR typically includes the sequence upstream (5′) of a start codon, called the 5′ UTR, or downstream (3′) of the stop codon, called the 3′ UTR, of an open reading frame of an mRNA. The 3′ UTR does not include the poly A tail unless specified. Databases of mRNA sequences that can function as the source of the sequences for the UTRs include RefSeq (http://www.ncbi.nlm.nih.gov/RefSeq/), Mammalian Gene Collection (http://mgc.nci.nih.gov/), and the I.M.A.G.E Consortium (http://image.llnl.gov/).

[0032] UTR sequences often contain regulatory sequences that regulate the stability of the mRNA transcript, transport of the transcript, or the translation rates of the open reading frame contained in the transcript. Indeed, evidence continues to accumulate regarding the importance of 3′ UTR function in regulating transcript stability and localization along with playing a role in the regulation of translation (reviewed in Conne et al. 2000). 3′ UTRs are, on average, longer than 5′ UTRs in all genomes studied so far, and the average length of 3′ UTRs increases with organism complexity while the average length of 5′ UTRs remains roughly the same across a spectrum of species (Pesole et al. 2002; Mazumder et al. 2003). This and other data has led to speculation about the relative importance of the two types of UTR in post-transcriptional regulation. First, it has been suggested that the 5′ UTR's relatively short length, location, and likely structural constraints related to its standard role in transcription and translation initiation make it a less-rich element set for the study of gene-specific post-transcriptional regulation. Second, the 3′ UTR's apparent length flexibility and possible correlation with increasing organism complexity suggests that studies of the 3′ UTR are of high priority in the study of gene regulation. Finally, a number of recent studies have highlighted the importance of the combination of 3′ UTRs and miRNAs in gene regulation. For example, Xie et al. (2005) recently estimated that more than 40% of miRNAs interact with conserved motifs in 3′ UTRs. miRNAs are thought to regulate transcript stability by binding to a complementary sequence in an mRNA and targeting that transcript for degradation.

[0033] The scientific literature reveals a handful of genes for which studies of the function of both transcriptional and post-transcriptional regulatory elements have been carried out, and in all cases such studies have yielded valuable insight into that gene's regulation. One of the best-studied cases is that of the human Transferrin Receptor gene (hTR). hTR protein levels are known to increase more than 10-fold upon addition of an iron-chelator (DFO) to cells in culture. A panel of literature has shown that both the promoter and the 3′ UTR play necessary roles in mediating the change total protein output from the locus needed for an adequate response to iron depletion, and each is sufficient to supply moderate increases in gene expression response on its own (Casey et al. 1988; Mullner et al. 1988). An iron response element (IRE) has been characterized in the 3′ UTR of the hTR gene. The IRE forms a secondary stem-loop structure in the 3′ UTR of the hTR transcript, and there is a protein called the iron response element binding protein that recognizes and binds to this secondary structure. The binding of this protein to the IRE is thought to stabilize the hTR transcript and make it more readily available for translation.

[0034] Other combination functional studies include the globin gene family and a gene involved in cancer. Early mutagenesis studies of the beta-globin promoter indicated the importance of promoter function in proper regulation of the locus (Myers et al. 1986), and studies in subsequent years have revealed naturally occurring mutations in globin promoters that are associated with thalassemias (Collins et al. 1985; Kulozik et al. 1991). In addition, globin family mRNAs are known to be exceptionally stable, and functional studies of globin 3′ UTRs have revealed motifs essential to this stability (Weiss and Liebhaber 1995). A final example involves the CCND1 locus which is often involved in hematopoetic malignancies and its overexpression is known to cause a neoplastic pathology. Overexpression of CCND1 can result from either one of or the additive effect of two independent genetic events. In the first event, a common translocation places the transcription start site of the CCND1 locus within range of a strong transcriptional enhancer. In the second event, rearrangements and deletions in CCND1's 3′ UTR, often associated with genomic instability, act to increase the half-life of the mRNA (Rimokh et al. 1994).

[0035] The present invention relates to high throughput methods for structural and functional characterization of untranslated region (UTR) gene expression regulatory elements in a genome of an organism, preferably a mammalian genome, and more preferably a human genome. The inventive methods can be utilized as a high-throughput and easy-to-use system for characterization of UTR regulatory elements on a large scale, preferably on a genome-wide scale. Compositions, assemblies, libraries, arrays and kits are also provided to allow one to measure activity of the regulatory element in the genome in multiple experimental conditions in an efficient and economic way. In preferred embodiments, UTR macroarrays and microarrays are provided for determining RNA-binding factor binding and UTR regulatory activity on the same DNA fragment. Such functional libraries or arrays of the UTR regulatory elements can have a wide variety of applications in research, diagnosis, prevention and treatment of diseases or conditions.

[0036] In one aspect, by using the invention, activity of a large number of different UTR regulatory elements can be assessed or determined across diverse cell types or through a differentiation time-course to find tissue-specific and ubiquitous UTR regulatory sequences. The activity of the UTR regulatory elements can be detected or determined under different conditions, such as before and after the addition of an siRNA, microRNA, cDNA, or other compound or drug to identify elements that are up-regulated or down-regulated in response to a specific treatment. Effects of RNA-binding factors binding to the UTR regulatory element can also be assessed efficiently. The collection of these UTR regulatory elements can be further analyzed for a sequence motif that is functionally relevant.

[0037] In another aspect this invention provides a library of isolated nucleic acid molecules, each member of the library comprising a different, pre-determined nucleic acid segment from a genome, wherein the segment comprises UTR regulatory sequences, wherein: (a) the library has a diversity of at least 50 different nucleic acid segments; and (b) each nucleic acid segment is naturally linked in the genome with a sequence expressed as a cDNA.

[0038] In another aspect this invention provides a library of expression constructs, each member of the library comprising a different nucleic acid segment from a genome, wherein the segment comprises UTR regulatory sequences, operably linked with a heterologous reporter sequence in an expression vector such that the reporter gene transcript produced from the vector includes a UTR regulatory sequence, and the expression of the reporter gene protein is regulated by the UTR sequence that affects mRNA stability, translation efficiency, and localization, wherein: (a) the library has a diversity of at least 50 different nucleic acid segments; and (b) each nucleic acid segment and is naturally linked in the genome with a sequence expressed as a cDNA.

[0039] A number of different transcriptional regulatory elements can be used to drive expression of the hybrid transcript containing a UTR fragment. A ubiquitously active transcriptional promoter is of general utility to provide consistent levels of expression across many different cell lines and conditions. Viral promoters that are expressed ubiquitously also are usefull. Promoters of housekeeping genes, e.g., genes involved in the basal metabolism and functioning of cells, such as beta actin (ACTB), glyceraldehyde-3-phosphate dehydrogenase (GAPDH), ribosomal proteins such as “ribosomal protein, large subunit 10” (RPL10—used in the Examples herein), and thymidine kinase (TK1—“thymidine kinase 1”) have been shown to serve this purpose. In some cases, very strong promoters may be useful to drive high levels of expression in order detect UTR activity that down-regulates reporter gene activity. A strong promoter causes expression of a reporter gene at levels at least 1000 times above background. Conversely, in some cases weak promoters that drive low levels of expression may be useful to detect UTR activity that up-regulates reporter gene activity. A weak promoter causes expression of a reporter gene at levels between 10 times and 50 times above background. In some specific cases, it may also be useful to use a tissue or cell-type specific promoter to drive expression in a limited number of cell types of interest.

[0040] In one embodiment the step of providing the device comprises: (i) providing a device comprising at least one plate comprising a plurality of wells, each well containing a different member of the library of expression constructs, wherein each member of the library of expression constructs has a known location among the wells; (ii) delivering cells to each of the wells; and (iii) transfecting the cells with the expression constructs. In another embodiment the method further comprises: (d) perturbing the cells in each well; (e) measuring the level of expression of the reporter sequence in each well; and (f) determining whether the level of expression in any well changed after contacting the cells with the test compound. In another embodiment of the method perturbing comprises contacting the cells in each well with a test compound, exposing the cells to different environmental conditions, or genetically modifying the cells either permanently or transiently such as by inducing mutation, overexpressing a transcript for example by transfecting with a cDNA decreasing expression of a transcript by siRNA, or altering levels of a microRNA in the cell.

[0041] While not wishing to be bound by theory, it is believed that functional assays are important because although experimental tools like expression microarrays and RNA immunoprecipitation produce valuable observations, they do not explain the mechanism or function of the DNA or RNA regulatory elements themselves. Functional data from UTRs can show that changes in UTR activity and thus changes in rates of RNA turnover or localization result in different transcript levels detected in a microarray experiment rather than transcription initiation mechanisms. In addition, some UTR sequences may effect the rate at which a particular transcript is translated into a mature protein, thus affecting the total protein output without disrupting steady-state levels of the transcript. Such changes in protein output will not be detected by using an expression microarray. Furthermore, the UTR functional assay localizes the activity of interest to a specific RNA fragment and enables the discovery of the exact functional motifs contained in that region.

[0042] It is also believed that any one experimental platform alone is not sufficient to fully describe a biological system. A gene may be highly expressed as measured by a microarray based on nucleic acid hybridization, but it cannot be determined why. A transcription factor may bind near a particular gene in the genome, but the functional consequences of binding cannot be determined. A stretch of sequence may be highly conserved, but the reason natural selection has acted to preserve this sequence is unknown. A promoter may be methylated in one cell type and unmethylated in another, but the functional consequences of this difference is not immediately clear. In addition, a UTR may show increased RNA turnover activity in a cell-based functional assay upon the addition of a compound, but one can only make guesses as to why its activity changed without other lines of experimental evidence. Each experimental approach also has its own inherent biases and unique issues related to that particular approach. Thus, the inventors believe that when researchers integrate the information gathered from many diverse techniques they are able to gain a full picture of a biological system, independent of the limitations specific to any one experiment.

[0043] The present invention provides an innovative methodology and products to facilitate an integrated approach to regulatory element network analysis and use the information generated therefrom for researching the molecular genetic mechanisms of predisposition, onset and/or development of diseases, for development of effective measures for diagnosis, prevention and treatment of diseases.

[0044] In a preferred embodiment, an array of diverse, different gene expression regulatory elements is provided, preferably an array of different UTRs. The diversity of the array is preferably at least 10, optionally at least 50, 80, 120, 160, 200, 400, 500, 600, 800, 1000, 1500, 2000, 3000, 5000, 8000, or 10,000. Also provided are a library of expression vectors each of which comprises a different UTR regulatory element, preferably operably linked with a reporter sequence such that transcript stability and translational efficiency of the hybrid reporter transcript is under the control of each of the UTR regulatory element.

[0045] In another embodiment, a highly diverse array of expression vectors is provided which comprise at least 20 different gene expression regulatory elements in the expression vectors. The functional arrays of this invention are useful for performing high-throughput experiments to screen activity of the UTR regulatory sequences of this invention. The increase in throughput provided by these arrays of UTR expression vectors and functional assays is important for several reasons.

[0046] First, removing limits on the numbers of regulatory elements that can be assayed in a single panel allows researchers to interrogate elements corresponding to entire biological networks in a single experiment. For example, there are well over a thousand genes that are implicated in cancer development and progression. By scaling the UTR functional assays to include UTRs of over a hundred of genes, for example over a thousand genes, researchers can study all of the UTRs of all cancer related genes at once.

[0047] Increasing throughput will also enable the study of UTR sequence variants on a much larger scale. Since each UTR in the genome will likely have several SNPs on average, increasing the throughput will allow a comprehensive analysis of all existing haplotypes of a given set of UTRs rather than having to pick the most common haplotypes.

[0048] Further, assaying a large number of regulatory elements in a single experiment will allow researchers to conduct statistical analyses with much greater power. The previous UTR activity experiments have shown that UTR activity data often breaks down into clusters of similar activity, just like gene clusters in microarray expression experiments. In an experiment with a small number of UTRs, each sub-cluster is often too small to make any statistically significant claims as to important features unique to that cluster, such as the over-representation of certain motifs or higher-order sequence characteristics. The larger the dataset, the more power there is to perform these statistical analyses; and a diversity of UTRs beyond 200 or 1,000 in a single panel would be very desirable.

[0049] This invention provides a library of genomic nucleic acid segments comprising UTR regulatory elements. Each genomic nucleic acid segment selected for the library is operatively linked in nature with a coding sequence in the genome that aligns with a known or newly identified cDNA molecule.

[0050] In preferred embodiments, the regulatory element is a UTR regulatory element. Each of the regulatory elements can be characterized in terms of its genomic location, sequence, variation, mutation, polymorphism, transcriptional or translational regulatory activity in different cell or tissue type, and binding affinity with other regulatory factors, such as RNA-binding factors. Information on the structure and function of the gene expression regulatory elements can have a wide variety of applications, including but not limited to diagnosis and treatment of diseases in a personalized manner (also known as “personalized medicine”) by association with phenotype such as disease resistance, disease susceptibility or drug response. Identification and characterization of the regulatory elements in terms of cell- or tissue-specificity can also aid in the design of transgenic expression constructs for gene therapy with enhanced therapeutic efficacy and reduced side effects. “Disease” includes but is not limited to any condition, trait, or characteristic of an organism that it is desirable to change. For example, the condition may be physical, physiological or psychological and may be symptomatic or asymptomatic.

[0051] In one aspect of the invention, a method is provided for determining transcriptional and translational regulatory activity of a plurality of different nucleic acid segments. The method comprises: operably linking each of the plurality of different nucleic acid segments with a reporter sequence in an expression vector such that transcript stability and translational efficiency of the hybrid reporter transcript is under the control of each of the UTR regulatory elements.

[0052] The plurality of different nucleic acid segments are preferably DNA segments derived from the 5′ or 3′ UTRs of different genes. The diversity of the plurality of different nucleic acid segments can be at least 10, optionally at least about 50, 80, 120, 160, 200, 400, 500, 600, 800, 1000, 1500, 2000, 3000, 5000, 8000, or 10,000. Examples of the plurality of different nucleic acid segments include, but are not limited to at least 2, optionally at least 5, 10, 20, 50, 100, 200, 500, 1000, 5000, 10000, or 25000 nucleotides selected from the group consisting of SEQ ID NOs: 1-17520, or fragments thereof.

[0053] The plurality of different DNA segments can be derived from the 5′ and 3′ UTR regions of different genes by using a computer-aided method for predicting putative gene expression regulatory elements, such as UTRs. The computer-aided method comprises: aligning a library of cDNA for different genes with a genome of an organism; defining transcription start and end sites along with coding regions for each of the different genes; and selecting a segment in the genome that comprises a UTR, the selected segment constituting a member of the plurality of different DNA segments. A detailed explanation of UTR identification is provided in Example 1.

[0054] The methods of the present invention for selecting putative gene expression regulatory elements can be implemented in various configurations in any computing systems, including but not limited to supercomputers, personal computers, personal digital assistants (PDAs), networked computers, distributed computers on the internet or other microprocessor systems. The methods and systems described herein above are amenable to execution on various types of executable mediums other than a memory device such as a random access memory (RAM). Other types of executable mediums can used, including but not limited to, a computer readable storage medium which can be any memory device, compact disc, zip disk or floppy disk.

[0055] The present invention also provides compositions, assemblies, and kits, preferably for carrying out the methods of the present invention. For example, an array of different gene expression regulatory elements is provided, preferably an array of different UTRs. The diversity of the array is preferably at least at least 10, optionally at least 50, 80, 120, 160, 200, 400, 500, 600, 800, 1000, 1500, 2000, 3000, 5000, 8000, or 10,000. The UTRs can be selected from the group consisting of SEQ ID NOs: 1-17520, or fragments thereof. Also provided are a library of expression vectors each of which comprises a different UTR element, preferably operably linked with a reporter sequence such that expression of the reporter sequence is under transcriptional and translational control of each of the UTR. Examples of the reporter sequence include but are not limited to genes encoding luciferase, fluorescent protein (such as green fluorescent protein), and β-galactosidase.

[0056] The present invention also provides a library of gene expression regulatory elements, preferably a library of UTRs, preferably with diversity of at least 10, optionally at least 50, 80, 120, 160, 200, 400, 500, 600, 800, 1000, 1500, 2000, 3000, 5000, 8000, or 10,000. Examples of the UTRs include, but are not limited to, at least 2, optionally at least 5, 10, 20, 50, 100, 200, 500, 1000, 5000, 10000, or 25000 nucleotides selected from the group consisting of SEQ ID NOs: 1-17520, or fragments thereof.

[0057] The UTR library (or the regulatory element library) may exist in an in silico form and a physical form. The in silico form is a database of sequences from the human genome representing UTRs and related genomic information such as the gene model and transcript it is associated with. The physical form of the UTR library may be a set of a plurality of individual nucleic acid fragments of the UTRs, or plasmids each of which contains a unique UTR fragment from the human genome that is cloned either 5′ or 3′ to a reporter gene cassette thus yielding a hybrid transcript of the common reporter gene with a unique UTR.

[0058] The physical form of the UTR library may be represented in several ways. One form may be as an archived library of plasmids that are frozen in small E. coli cultures. These frozen cultures can be stored indefinitely and expanded in liquid culture to produce more of the plasmids. Another form of the library may be purified plasmid DNAs that can be immediately ready for transfection. Based on the library of gene expression regulatory elements, preferably a library of UTRs, a wide variety of tools or kits can be built, such as plasmid functional macroarrays and spotted UTR microarrays, which are described below.

[0059] The UTR library includes a panel of plasmids, each made up of a common vector/plasmid backbone with a unique insert representing a single UTR from the human genome. The UTR fragment may be cloned immediately 5′ or 3′ to a reporter gene cassette to be included in the transcript. This library can be a starting point from which two types of arrays: a plasmid functional macroarray and a spotted UTR microarray are built.

[0060] The plurality of different DNA segments can be derived from the 5′ or 3′ untranslated regions of different genes by using a computer-aided method for predicting UTRs. The computer-aided method comprises: aligning a library of cDNA for different genes with a genome of an organism; defining transcription start and end sites along with coding regions for each of the different genes; and selecting a segment in the genome that comprises a UTR, the selected segment constituting a member of the plurality of different DNA segments.

[0061] In another embodiment, this invention provides libraries of expression constructions comprising the genomic segments of this invention. The library comprises a collection of members, each of which contains a different nucleic acid segment from the genome. The expression constructs are recombinant nucleic acid molecules comprising a nucleic acid segment of this invention operably linked with a heterologous reporter sequence. A nucleotide sequence is operably linked with an expression control sequence when the nucleotide sequence is under the transcriptional or translational regulatory control of the expression control sequence. The reporter sequence is heterologous to the genomic segment in that it is not naturally under the transcriptional regulatory control of the genomic segment sequence in the genome from which the nucleic acid segment comes. This recombinant nucleic acid molecule is further comprised within a vector that can be used to either infect or transiently or stably transfect cells and that may be capable of replicating inside a cell.

[0062] This invention contemplates a number of different reporter sequences that may be under the control of the transcript stability or translational regulatory elements of the genomic segments. In libraries using proteins that emit a detectable signal it may be useful, but not essential, for all of the reporter proteins to emit the same signal. This simplifies detection during high-throughput methods.

[0063] Alternatively, the expression constructs in the library may contain different reporter sequences which emit different detectable signals. For example, the reporter sequence in each of the constructs can be a unique, pre-determined nucleotide barcode. This allows assaying a large number of the nucleic acid segments in the same batch or well of cells. In an embodiment, in each construct a unique UTR sequence is cloned upstream or downstream of a unique barcode reporter sequence yielding a unique UTR/barcode hybrid reporter transcript combination. Thus, in a library of expression constructs, each UTR's activity affects the transcript stability and localization of a unique transcript whose level can be measured. Since each reporter is unique, the library of expression constructs can be transfected into one large pool of cells (as opposed to separate wells) and all of the RNAs may be harvested as a pool. The levels of each of the barcoded transcripts can be detected using a microarray with the complementary barcode sequences. So the amount of fluorescence on each array spot corresponds to the effect of the UTR on the nucleotide barcode's transcript stability or localization.

[0064] Optionally, the expression constructs in the library may contain a first reporter sequence and a second reporter sequence. The first reporter sequence and a second reporter sequence are preferred to be different. For example, the first reporter sequence may encode the same reporter protein (e.g., luciferase or GFP), and the second reporter sequence may be a unique nucleotide barcode. In this way, transcription can yield a hybrid transcript of a reporter protein coding region and a unique barcode sequence. Such a construct could be used either in a well-by-well approach for reading out the signal emitted by the reporter protein (e.g., luminescence) and/or in a pooled approach by reading out the barcodes.

[0065] By using the unique, molecular barcode for each member of the library, a large library (e.g. a library with diversity of at least 100, 150, 200, 500, 1000, 2000, or 25,000) can be assayed in a single container (such as a vial or a well in a plate) rather than in thousands of individual wells. This approach is more efficient and economic as it can reduce costs at all levels: reagents plasticware, and labor.

[0066] The expression construct may be any vector that facilitates expression of the reporter sequence in the construct in a host cell. Any suitable vector can be used. There are many known in the art. Examples of vectors that can be used include, for example, plasmids or modified viruses. The vector is typically compatible with a given host cell into which the vector is introduced to facilitate replication of the vector and expression of the encoded reporter. Examples of specific vectors that may be useful in the practice of the present invention include, but are not limited to, E. coli bacteriophages, for example, lambda derivatives, or plasmids, for example, pBR322 derivatives or pUC plasmid derivatives; phage DNAs, e.g., the numerous derivatives of phage 1, e.g., NM989, and other phage DNA, e.g., M13 and filamentous single stranded phage DNA; yeast vectors such as the 2 μ plasmid or derivatives thereof; vectors useful in eukaryotic cells, for example, vectors useful in insect cells, such as baculovirus vectors, vectors useful in mamnalian cells such as retroviral vectors, adenoviral vectors, adenovirus viral vectors, adeno-associated viral vectors, SV40 viral vectors, herpes simplex viral vectors and vaccinia viral vectors; vectors derived from combinations of plasmids and phage DNAs, plasmids that have been modified to employ phage DNA or other expression control sequences; and the like.

[0067] In another aspect this invention provides recombinant cells comprising the expression libraries of this invention. Two different embodiments are contemplated in particular.

[0068] In a first embodiment each cell or group of cells comprises a different member of the expression library. Such a library of cells is particularly useful with the arrays of this invention. Typically, the library is indexed. For example, each different cell harboring a different expression vector can be maintained in a separate container that indicates the identity of the genomic segment within. The index also can indicate the particular gene or genes that is/are under the transcriptional or translational regulatory control of the sequences naturally in the genome.

[0069] In a second embodiment, a culture of cells is transfected with a library of expression constructs so that all of the members of the library exist in at least one cell and each cell has at least one member of the expression library. The second embodiment is particularly useful with libraries in which the reporter sequences are unique sequences that can be detected independently.

[0070] Useful cell types include primary and transformed mammalian cell lines to which exogenous DNA may be introduced by lipofection, electroporation, or infection. Libraries in such cells may be maintained in growing cultures in appropriate growth media or as frozen cultures supplemented with Dimethyl Sulfoxide and stored in liquid Nitrogen.

[0071] In another aspect, this invention provides devices comprising multiwell plates, also called macroarrays, each well of which contains a different member of expression library of this invention. While this invention contemplates multiwell plates in a variety of formats and array layouts, there are a number of standard formats well known in the art. In particular, it is contemplated that a library of expression vectors can be contained within the wells of one or more 96-well, 384-well or 1536-well microtiter plates.

[0072] In a preferred embodiment, an array of diverse, different gene expression regulatory elements is provided, preferably an array of different transcriptional promoters. The diversity of the array is preferably at least at least 10, optionally at least 50, 80, 120, 160, 200, 400, 500, 600, 800, 1000, 1500, 2000, 3000, 5000, 8000, 10,000, or 25,000 nucleotides selected from the group consisting of SEQ ID NOs: 1-17520, or fragments thereof. Also provided are a library of expression vectors each of which comprises a different UTR regulatory element, preferably operably linked with a reporter sequence such that transcript stability and translational efficiency of the hybrid reporter transcript is under the control of each of the UTR regulatory element.

[0073] For the plasmid functional macroarray, each member of the UTR library may be transfected separately into E. coli. Each E. coli stock may be grown up to make >100 ug of each plasmid and then the plasmid DNAs are purified from the rest of the parts of the bacterial cells. Small aliquots of each plasmid (with appropriate transfection reagents) may be arrayed in a 96-well, 384-well, or 1536-well format. This macroarray of plasmids can be used for a number of different applications. Its primary use is preferably in the transfection of living cells. Once the plasmids are delivered to living cells, the amount of activity detected from the reporter gene product reflects the transcript stability and translation efficiency effects provided by the UTR fragment. Thus, the plasmid macroarray enables the high-throughput study of UTR function in living cells. UTR functional assays may be conducted in a variety of cell types, in response to a change in the cellular environment, in response to an alteration in a gene sequence or function, or in the presence of a small molecule or protein sequence of interest.

[0074] In one embodiment, this invention contemplates microtiter arrays in which the wells contain expression vectors outside of a cellular environment. In particular, microtiter arrays are contemplated in which each well contains an expression vector of this invention in dried form. Such devices can be stored and shipped easily and are ready for use. In other embodiments the wells contain a solution comprising the nucleic acids. In another embodiment, the solution can contain all the elements necessary for transfecting cells that are added to the plates.

[0075] Microtiter arrays in which each well comprises a recombinant cell containing an expression vector of this invention are useful for carrying out high-throughput screening assays. To generate such arrays, DNA may be mixed with serum-free media and a transfection reagent (such as a lipofection reagent), incubated, and added to a group of cells. After an incubation time, the exogenous DNA will be present in the cells. Alternate methods for delivery include electroporation and infection.

[0076] In an embodiment, a kit is provided for a functional macroarray of UTRs. The kit includes: transfection-ready set of UTR plasmids arrayed in 96 or 384 wells. The kit may further include: reporter assay substrates; reagents for induction or repression of a particular biological pathway (cytokines or other purified proteins, small molecules, cDNAs, siRNAs, etc.), and/or data analysis software.

[0077] In addition, kits are provided which comprise reagents and instructions for performing methods of the present invention, or for performing tests or assays utilizing any of the compositions, libraries, arrays, or assembles of articles of the present invention. The kits may further comprise buffers, restriction enzymes, adaptors, primers, a ligase, a polymerase, dNTPS and instructions necessary for use of the kits, optionally including troubleshooting information.

[0078] In another embodiment, a kit is provided for a RNA immunoprecipitation assay. The kit includes: a spotted UTR microarray or UTR-specific oligo-based microarray; and one or more immunoprecipiatation-grade antibody. The kit may further include: DNA/RNA amplification and labeling reagents; and/or data analysis software.

[0079] In still another embodiment, an assembly of articles is provided for a comprehensive UTR analysis, comprising: a plasmid functional macroarray kit and a UTR microarray kit for RNA immunoprecipitation. The assembly may further include: analysis software for data integration.

[0080] Methods of Use

[0081] In one aspect of the invention, a method is provided for determining UTR regulatory activity of a plurality of different nucleic acid segments. The method comprises: operably linking each of the plurality of different nucleic acid segments with a reporter sequence in an expression vector such that expression of the reporter sequence is under transcriptional control of a common promoter sequence and each of the different UTR nucleic acid sequences has been added to either the 5′ or 3′ end of the reporter sequence (yielding a hybrid transcript); expressing the reporter sequence; and determining the expression level of the reporter controlled by each of the different nucleic acid segments.

[0082] A multiwell plate array of cell harboring the expression constructs of this invention is useful for high-throughput screening of UTR activity. In the basic method, a multiwell plate having a member of an expression library of this invention in each well is filled with a cell type of interest under conditions so that the cells are transfected with the vectors. The cells are then incubated under conditions chosen by the operator. The investigator then checks each well of the device to measure the amount of reporter protein produced. Generally, this involves measuring the signal produced by a reporter protein encoded by the reporter sequence. For example, if the reporter protein is a fluorescent protein, then light is directed to each well and the amount of fluorescence is measured. The amount of signal measured is a function of the effect of the UTR on transcript stability and translation efficiency.

[0083] By expanding from 96-well plates to 384-well plates and pre-aliquoting the plasmid DNAs, throughput can be expanded from hundreds to >1,000 UTR assays in a single experiment. Scaling this experiment to more than 1,000 independent UTR fragments greatly improves the scope of the research project and gives more power to the downstream statistical analyses of these data. The larger the dataset, the more amenable it is to approaches such as principle component analysis and hierarchical clustering. By studying more than 1,000 UTRs at once in multiple experiments, sub-clusters of UTR activity data are large enough to look for over-represented motifs or higher-order sequence characteristics.

[0084] In another embodiment of the methods of this invention, the investigator can test the effect of a system perturbation on the activity of a library of UTR regulatory sequences. The basic method described above is performed under a first set of conditions to determine the effect of the UTRs on overall reporter expression. Then the cells are perturbed, i.e., subject to different conditions, in a manner chosen by the investigator. Perturbations can include, for example, exposing the cells to a test compound, changing environmental conditions such as temperature, pH or nutrition, or genetically modifying the cells to introduce new or modified genetic material or changes in amounts of genetic material. After perturbation, the amount of reporter protein output associated with each UTR in the library is examined and compared to its activity in the first state. UTRs that show altered activity can be isolated and studied further. In this way it can be determined, for example, which UTR regulatory sequences have their activity modulated by a compound of interest.

[0085] In a variation of this method, the test is performed in parallel. That is, two identical devices of this invention are examined for UTR activity. However, one device is subjected to a first set of conditions and the other device is subjected to a second set of conditions. In this way, the relative activity of the UTR regulatory sequences under the two conditions can be examined, and sequences that have different activity can be identified and isolated.

[0086] It also can be useful to identify differences in UTR regulatory sequence activity in two cell types. For example gene expression differs when cells transform from normal to cancerous. UTRs that are overactive in cancer cells may be targets of pharmacological intervention. The arrays of this invention are useful to identify such UTR regulatory sequences. Accordingly, the investigator provides two sets of arrays comprising expression constructs in the wells. Once cell type is used for transformation in a first device and a second cell type, for transformation in a second device. The expression of reporter sequences between the two devices is compared to identify those UTRs which be have differently in the two cell types.

[0087] Using expression constructs in which the UTR regulatory sequences are operably linked to unique reporter sequences opens the possibility of performing tests without the use of multiwell plates. In such situations a single culture of cells contains the entire expression library distributed among the cells. The culture can be incubated under conditions chosen by the investigator. Then the expression products are isolated. As described in the section entitled “Reporter Sequences” because each one has a unique nucleotide sequence tag or barcode associated with its partner nucleic acid segment, the amount of each of the reporter sequences can be measured by measuring the amount of transcript comprising each unique sequence. For example, the molecules can be detected on a DNA array that contains probes complementary to the unique sequences. The amount of hybridization to each probe indicates the amount of the reporter sequence expressed, which, in turn, reflects the activity of the UTR regulatory sequences.

[0088] There are many published accounts of sequence changes in UTR regions causing changes in human phenotypes or disease status. Association studies and efforts such as the Hap-Map project often detect potentially biologically interesting variation in the sequences of UTRs between individuals in the human population. The significant questions then revolve around whether or not those sequence changes actually affect the function of the UTR or if they are essentially silent, non-functional changes. The assays provided herein can be used to compare the activity of UTR variants.

[0089] This invention provides methods for identifying variants in UTR regulatory sequences that are associated with phenotypic differences in a population. The methods involve the following steps. First, one identifies and selects UTR regulatory sequences that exhibit sequence polymorphism in a population, such as SNPs, from a database of sequences or other information source. Then, one tests these variants for transcript stability and translation efficiency activity in an assay of this invention. Polymorphic forms that exhibit differences in activity in these assays are selected for further study. In such a study, two populations are selected that have different phenotypic traits. For example, a first population having a disease and a second population not having the disease are selected. Generally, the investigator will select a UTR that regulates expression of a gene suspected to have some connection with the phenotype in question. The population is large enough to provide statistically significant results. Each individual in the two populations are then tested to determine which form of the variant the individual has. Statistical analysis will indicate whether the polymorphic form is associated with the phenotype. Polymorphic forms found to associate with a specific phenotype then can be used in diagnostic tests to determine how likely it is that the individual has the phenotype.

[0090] More generally, the products provided in the present invention can also be used to correlate polymorphisms in a UTR regulatory element with a phenotypic trait more efficiently. Correlation of individual polymorphisms or groups of polymorphisms with phenotypic characteristics is a valuable tool in the effort to identify DNA variation that contributes to population variation in phenotypic traits. Phenotypic traits include physical characteristics, risk for disease, and response to the environment. Polymorphisms that correlate with disease are particularly interesting because they represent mechanisms to accurately diagnose disease and targets for drug treatment. Hundreds of human diseases have already been correlated with individual polymorphisms but there are many diseases that are known to have an, as yet unidentified, genetic component and many diseases for which a component is or may be genetic.

[0091] Many diseases may correlate with multiple genetic changes making identification of the polymorphisms associated with a given disease more difficult. One approach to overcome this difficulty is to systematically explore the limited set of common gene variants for association with disease. The functional studies enabled by a regulatory element macroarray will facilitate the sorting out of sequence variants that affect the function of a regulatory element away from those that do not. Therefore, researchers may look for correlation of functional sequence variants with phenotypic traits, changing the focus from finding variants merely correlated with a phenotype towards identifying variants that may cause a particular phenotype.

[0092] To identify correlation between one or more alleles in the UTR regulatory region and one or more phenotypic traits, individuals are tested for the presence or absence of polymorphic markers or marker sets and for the phenotypic trait or traits of interest. The presence or absence of a set of polymorphisms is compared for individuals who exhibit a particular trait and individuals who exhibit lack of the particular trait to determine if the presence or absence of a particular allele is associated with the trait of interest. For example, it might be found that the presence of allele A1 at polymorphism A in the UTR region of a gene correlates with heart disease. As an example of a correlation between a phenotypic trait and more than one polymorphism, it might be found that allele A1 at polymorphism A and allele B1 at polymorphism B correlate with a phenotypic trait of interest.

[0093] Markers or groups of markers in a UTR regulatory region that correlate with the symptoms or occurrence of disease can be used to diagnose disease or predisposition to disease without regard to phenotypic manifestation. To diagnose disease or predisposition to disease, individuals are tested for the presence or absence of polymorphic markers or marker sets that correlate with one or more diseases. If, for example, the presence of allele A1 at polymorphism A correlates with coronary artery disease then individuals with allele A1 at polymorphism A may be at an increased risk for the condition.

[0094] Individuals can be tested before symptoms of the disease develop. Infants, for example, can be tested for genetic diseases such as beta-thalassemia at birth. Individuals of any age could be tested to determine risk profiles for the occurrence of future disease. Often early diagnosis can lead to more effective treatment and prevention of disease through dietary, behavior or pharmaceutical interventions. Individuals can also be tested to determine carrier status for genetic disorders. Potential parents can use this information to make family planning decisions.

[0095] Individuals who develop symptoms of disease that are consistent with more than one diagnosis can be tested to make a more accurate diagnosis. If, for example, symptom S is consistent with diseases X, Y or Z but allele A1 at polymorphism A correlates with disease X but not with diseases Y or Z an individual with symptom S is tested for the presence or absence of allele A1 at polymorphism A. Presence of allele A1 at polymorphism A is consistent with a diagnosis of disease X.

[0096] In addition, the products provided in the present invention can also be used for pharmacogenonics. Pharmacogenomics refers to the study of how your genes affect your response to drugs. There is great heterogeneity in the way individuals respond to medications, in terms of both host toxicity and treatment efficacy. There are many causes of this variability, including: severity of the disease being treated; drug interactions; and the individuals age and nutritional status. Despite the importance of these clinical variables, inherited differences in the form of genetic polymorphisms can have an even greater influence on the efficacy and toxicity of medications. Genetic polymorphisms in drug-metabolizing enzymes, transporters, receptors, and other drug targets have been linked to inter-individual differences in the efficacy and toxicity of many medications. The functional studies enabled by a regulatory element macroarray will facilitate the sorting out of sequence variants that affect the function of a regulatory element away from those that do not. Therefore, researchers may look for correlation of functional sequence variants with phenotypic traits, changing the focus from finding variants merely correlated with a phenotype towards identifying variants that may cause a particular phenotype.

[0097] In a manner similar to that above, UTR regulatory sequences in genes suspected to be involved in drug metabolism are screened to identify those that exist in polymorphic forms in a population. These sequences are tested for functional differences in the assays of this invention. Those that exhibit functional differences are then examined in populations having different responses to a drug to determine whether a polymorphic form is associated with differences in drug reaction.

[0098] An individual patient has an inherited ability to metabolize, eliminate and respond to specific drugs. Correlation of polymorphisms in a UTR regulatory region with pharmacogenomic traits identifies those polymorphisms that impact drug toxicity and treatment efficacy. This information can be used by doctors to determine what course of medicine is best for a particular patient and by pharmaceutical companies to develop new drugs that target a particular disease or particular individuals within the population, while decreasing the likelihood of adverse affects. Drugs can be targeted to groups of individuals who carry a specific allele or group of alleles. For example, individuals who carry allele A1 at polymorphism A may respond best to medication X while individuals who carry allele A2 respond best to medication Y. A trait may be the result of a single polymorphism but will often be determined by the interplay of several genes.

[0099] In addition some drugs that are highly effective for a large percentage of the population, prove dangerous or even lethal for a very small percentage of the population. These drugs typically are not available to anyone. Pharmacogenomics can be used to correlate a specific genotype with an adverse drug response. If pharmaceutical companies and physicians can accurately identify those patients who would suffer adverse responses to a particular drug, the drug can be made available on a limited basis to those who would benefit from the drug.

[0100] Similarly, some medications may be highly effective for only a very small percentage of the population while proving only slightly effective or even ineffective to a large percentage of patients. Pharmacogenomics allows pharmaceutical companies to predict which patients would be the ideal candidate for a particular drug, thereby dramatically reducing failure rates and providing greater incentive to companies to continue to conduct research into those drugs.

[0101] The present invention relies on many patents, applications and other references for details known to those of the art. Therefore, when a patent, application, or other reference is cited or repeated below, it should be understood that it is incorporated by reference in its entirety for all purposes as well as for the proposition that is recited. As used in the specification and claims, the singular form “a,” “an,” and “the” include plural references unless the context clearly dictates otherwise. For example, the term “an agent” includes a plurality of agents, including mixtures thereof An individual is not limited to a human being but may also be other organisms including but not limited to mammals, plants, bacteria, or cells derived from any of the above.

[0102] Throughout this disclosure, various aspects of this invention are presented in a range format. It should be understood that the description in range format is merely for convenience and brevity and should not be construed as an inflexible limitation on the scope of the invention. Accordingly, the description of a range should be considered to have specifically disclosed all the possible subranges as well as common individual numerical values within that range. For example, description of a range such as from 1 to 6 should be considered to have specifically disclosed subranges such as from 1 to 3, from 1 to 4, from 1 to 5, from 2 to 4, from 2 to 6, from 3 to 6 etc., as well as individual numbers within that range, for example, 1, 2, 3, 4, 5, and 6. The same holds true for ranges in increments of 10⁵, 10⁴, 10³, 10², 10, 10⁻¹, 10⁻², 10⁻³, 10⁻⁴, or 10⁻⁵, for example. This applies regardless of the breadth of the range. “At least” in combination with a series of numbers means at least any of the series.

[0103] The practice of the present invention may employ, unless otherwise indicated, conventional techniques of organic chemistry, polymer technology, molecular biology (including recombinant techniques), cell biology, biochemistry, and immunology, which are within the skill of the art. Such conventional techniques include polymer array synthesis, hybridization, ligation, and detection of hybridization using a label. Specific illustrations of suitable techniques can be had by reference to the example hereinbelow. However, other equivalent conventional procedures can, of course, also be used. Such conventional techniques can be found in standard laboratory manuals such as Genome Analysis: A Laboratory Manual Series (Vols. I-IV), Using Antibodies: A Laboratory Manual, Cells: A Laboratory Manual, PCR Primer: A Laboratory Manual, and Molecular Cloning: A Laboratory Manual (all from Cold Spring Harbor Laboratory Press), all of which are herein incorporated in their entirety by reference for all purposes.

[0104] Definitions

[0105] As used herein, the term “nucleic acid” refers to single-stranded and/or double-stranded polynucleotides such as deoxyribonucleic acid (DNA), and ribonucleic acid (RNA) as well as analogs or derivatives of either RNA or DNA. Also included in the term “nucleic acid” are single-stranded and/or double-stranded polynucleotides as normally found in nature (“natural nucleic acids”), e.g., methylated nucleic acid or unmethylated nucleic acid. Also included in the term “nucleic acid” are analogs of nucleic acids such as peptide nucleic acid (PNA), phosphorothioate DNA, and other such analogs and derivatives or combinations thereof. Thus, the term also should be understood to include, as equivalents, derivatives, variants and analogs of either RNA or DNA made from nucleotide analogs, single (sense or antisense) and double-stranded polynucleotides, including double-stranded RNA. Deoxyribonucleotides include deoxyadenosine, deoxycytidine, deoxyguanosine and deoxythymidine. For RNA, the uracil base is uridine.

[0106] As used herein, the term “polynucleotide” refers to an oligomer or polymer containing at least two linked nucleotides or nucleotide derivatives, including a deoxyribonucleic acid (DNA), a ribonucleic acid (RNA), and a DNA or RNA derivative containing, for example, a nucleotide analog or a “backbone” bond other than a phosphodiester bond, for example, a phosphotriester bond, a phosphoramidate bond, a phophorothioate bond, a thioester bond, or a peptide bond (peptide nucleic acid). The term “oligonucleotide” also is used herein essentially synonymously with “polynucleotide,” although those in the art recognize that oligonucleotides, for example, PCR primers, generally are less than about fifty to one hundred nucleotides in length.

[0107] Nucleotide analogs contained in a polynucleotide can be, for example, mass modified nucleotides, which allows for mass differentiation of polynucleotides; nucleotides containing a detectable label such as a fluorescent, radioactive, luminescent or chemiluminescent label, which allows for detection of a polynucleotide; or nucleotides containing a reactive group such as biotin or a thiol group, which facilitates immobilization of a polynucleotide to a solid support. A polynucleotide also can contain one or more backbone bonds that are selectively cleavable, for example, chemically, enzymatically or photolytically. For example, a polynucleotide can include one or more deoxyribonucleotides, followed by one or more ribonucleotides, which can be followed by one or more deoxyribonucleotides, such a sequence being cleavable at the ribonucleotide sequence by base hydrolysis. A polynucleotide also can contain one or more bonds that are relatively resistant to cleavage, for example, a chimeric oligonucleotide primer, which can include nucleotides linked by peptide nucleic acid bonds and at least one nucleotide at the 3′ end, which is linked by a phosphodiester bond or other suitable bond, and is capable of being extended by a polymerase. Peptide nucleic acid sequences can be prepared using well known methods (see, for example, Weiler et al. Nucleic acids Res. 25: 2792-2799 (1997)).

[0108] As used herein, to hybridize under conditions of a specified stringency is used to describe the stability of hybrids formed between two single-stranded DNA fragments and refers to the conditions of ionic strength and temperature at which such hybrids are washed, following annealing under conditions of stringency less than or equal to that of the washing step. Typically high, medium and low stringency encompass the following conditions or equivalent conditions thereto:
[0109] high stringency: 0.1× SSPE or SSC, 0.1% SDS, 65° C.;
[0110] medium stringency: 0.2× SSPE or SSC, 0.1% SDS, 50° C.;
[0111] low stringency: 1.0× SSPE or SSC, 0.1% SDS, 50° C.

[0112] Equivalent conditions refer to conditions that select for substantially the same percentage of mismatch in the resulting hybrids. Additions of ingredients, such as formamide, Ficoll, and Denhardt's solution affect parameters such as the temperature under which the hybridization should be conducted and the rate of the reaction. Thus, hybridization in 5×SSC, in 20% formamide at 42° C. is substantially the same as the conditions recited above hybridization under conditions of low stringency. The recipes for SSPE, SSC and Denhardt's and the preparation of deionized formamide are described, for example, in Sambrook et al. (1989) Molecular Cloning, A Laboratory Manual, Cold Spring Harbor Laboratory Press, Chapter 8; see, Sambrook et al., vol. 3, p. B.13, see, also, numerous catalogs that describe commonly used laboratory solutions). It is understood that equivalent stringencies can be achieved using alternative buffers, salts and temperatures.

[0113] The term “substantially” identical or homologous or similar varies with the context as understood by those skilled in the relevant art and generally means at least 70%, preferably means at least 80%, more preferably at least 90%, and most preferably at least 95% identity.

[0114] The term “fragment,” “segment,” or “DNA segment” refers to a portion of a larger DNA polynucleotide or DNA. A polynucleotide, for example, can be broken up, or fragmented into, a plurality of segments. Various methods of fragmenting nucleic acids are well known in the art. These methods may be, for example, either chemical or physical in nature. Chemical fragmentation may include partial degradation with a DNAse; partial depurination with acid; the use of restriction enzymes; intron-encoded endonucleases; DNA-based cleavage methods, such as triplex and hybrid formation methods, that rely on the specific hybridization of a nucleic acid segment to localize a cleaveage agent to a specific location in the nucleic acid molecule; or other enzymes or compounds which cleave DNA at known or unknown locations. Physical fragmentation methods may involve subjecting the DNA to a high shear rate. High shear rates may be produced, for example, by moving DNA through a chamber or channel with pits or spikes, or forcing the DNA sample through a restricted size flow passage, e.g., an aperture having a cross sectional dimension in the micron or submicron scale. Other physical methods include sonication and nebulization. Combinations of physical and chemical fragmentation methods may likewise be employed such as fragmentation by heat and ion-mediated hydrolysis. See for example, Sambrook et al., “Molecular Cloning: A Laboratory Manual,” 3rd Ed. Cold Spring Harbor Laboratory Press, Cold Spring Harbor, N.Y. (2001) (“Sambrook et al.”) which is incorporated herein by reference in its entirety for all purposes. These methods can be optimized to digest a nucleic acid into fragments of a selected size range. Useful size ranges may be from 100, 200, 400, 700 or 1000 to 500, 800, 1500, 2000, 4000 or 10,000 base pairs. However, larger size ranges such as 4000, 10,000 or 20,000 to 10,000, 20,000 or 500,000 base pairs may also be useful.

[0115] Methods of ligation will be known to those of skill in the art and are described, for example in Sambrook et al. and the New England BioLabs catalog, both of which are incorporated herein in their entireties by reference for all purposes. Methods include using T4 DNA ligase, which catalyzes the formation of a phosphodiester bond between juxtaposed 5 phosphate and 3′ hydroxyl termini in duplex DNA or RNA with blunt or and sticky ends; Taq DNA ligase, which catalyzes the formation of a phosphodiester bond between juxtaposed 5′ phosphate and 3′ hydroxyl termini of two adjacent oligonucleotides that are hybridized to a complementary target DNA; E. coli DNA ligase, which catalyzes the formation of a phosphodiester bond between juxtaposed 5′-phosphate and 3′-hydroxyl termini in duplex DNA containing cohesive ends; and T4 RNA ligase which catalyzes ligation of a 5′ phosphoryl-terminated nucleic acid donor to a 3′ hydroxyl-terminated nucleic acid acceptor through the formation of a 3′→5′ phosphodiester bond, substrates include single-stranded RNA and DNA as well as dinucleoside pyrophosphates; or any other methods described in the art.

[0116] “Genome” designates or denotes the complete, single-copy set of genetic instructions for an organism as coded into the DNA of the organism. A genome may be multi-chromosomal such that the DNA is distributed among a plurality of individual chromosomes. For example, in human there are 22 pairs of chromosomes plus a gender associated XX or XY pair.

[0117] “Polymorphism” refers to the occurrence of two or more genetically determined alternative sequences or alleles in a population. A polymorphic marker or site is the locus at which divergence occurs. Preferred markers have at least two alleles, each occurring at a frequency of preferably greater than 1%, and more preferably greater than 10% or 20% of a selected population. A polymorphism may comprise one or more base changes, an insertion, a repeat, or a deletion. A polymorphic locus may be as small as one base pair. Polymorphic markers include single nucleotide polymorphisms (SNP's), restriction fragment length polymorphisms (RFLP's), variable number of tandem repeats (VNTR's), hypervariable regions, minisatellites, dinucleotide repeats, trinucleotide repeats, tetranucleotide repeats, simple sequence repeats, and insertion elements such as Alu. The first identified allelic form is arbitrarily designated as the reference form and other allelic forms are designated as alternative or variant alleles. The allelic form occurring most frequently in a selected population is sometimes referred to as the wildtype form. Diploid organisms may be homozygous or heterozygous for allelic forms. A diallelic polymorphism has two forms. A triallelic polymorphism has three forms. A polymorphism between two nucleic acids can occur naturally, or be caused by exposure to or contact with chemicals, enzymes, or other agents, or exposure to agents that cause damage to nucleic acids, for example, ultraviolet radiation, mutagens or carcinogens.

[0118] Single nucleotide polymorphisms (SNPs) are positions at which two alternative bases occur in the human population, and are the most common type of human genetic variation. The site is usually preceded by and followed by highly conserved sequences of the allele (e.g., sequences that vary in less than 1/100 or 1/1000 members of the populations). It is estimated that there are as many as 3×106 SNPs in the human genome. Variations that occur at a rate of at least 10% are referred to as common SNPs.

[0119] A single nucleotide polymorphism usually arises due to substitution of one nucleotide for another at the polymorphic site. A transition is the replacement of one purine by another purine or one pyrimidine by another pyrimidine. A transversion is the replacement of a purine by a pyrimidine or vice versa. Single nucleotide polymorphisms can also arise from a deletion of a nucleotide or an insertion of a nucleotide relative to a reference allele.

[0120] The term genotyping refers to the determination of the genetic information an individual carries at one or more positions in the genome. For example, genotyping may comprise the determination of which allele or alleles an individual carries for a single polymorphism or the determination of which allele or alleles an individual carries for a plurality of polymorphisms.

[0121] As used herein, “profiling” refers to detection and/or identification of a plurality of components, generally 3 or more, such as 4, 5, 6, 7, 8, 10, 50, 100, 500, 1000, 10⁴, 10⁵, 10⁶, 10⁷, or more, in a sample. A profile can include the identified loci to which components of a sample detectably bind or are otherwise located. The profile can be detected, e.g., in a multi-well plate, or as a pattern on a solid surface, in which case the profile can be presented as a visual image. The profile can be in the form of a list or database or other such compendium.

[0122] As used herein, an image refers to a collection of data points representative of a profile. An image can be a visual, graphical, tabular, matrix or other depiction of such data. It can be stored in a database.

[0123] As used herein, a database refers to a collection of data items.

[0124] As used herein, in an addressable collection of components of interest, such as a library of transcription regulatory elements (with pre-determined sequences), expression vectors encoding transcription regulatory elements, and cells containing expression vectors encoding transcription regulatory elements, each member of the collection is labeled and/or is positionally located to permit identification of each of member of the components. The addressable collection is typically an array or other encoded (such as bio-barcoded with unique nucleic acid tags) collection in which each locus contains a single, unique component and is identifiable. The collection can be in the liquid phase if other discrete identifiers, such as chemical, electronic, colored, fluorescent or other tags are included.

[0125] As used herein, an address refers to a unique identifier whereby an addressed entity can be identified. An addressed moiety is one that can be identified by virtue of its address. Addressing can be effected by position on a surface or by other identifier, such as a tag encoded with a bar code or other symbology, a chemical tag, an electronic, such RF tag, a color-coded tag or other such identifier.

[0126] As used herein, a nucleotide barcode refers to a specific type of address, more specifically, predesigned, predetermined and unique nucleotide sequence tag which can be used to uniquely identify each member in a collection of transcription regulatory elements, expression vectors encoding transcription regulatory elements, and cells containing expression vectors encoding transcription regulatory elements. Such a nucleic acid barcode may be 3-200, 5-200, 8-100, or 10-50 nucleotides in length, and discrete and tailorable hybridization and melting properties. Barcodes are heterologous to the molecules they tag.

[0127] A “panel” is a collection of a plurality of physically separated items belonging to a defined category. Thus, this invention relates to panels of expression vectors or cells. The items can be physically separated, for example, in different test tubes, in different wells of a microtiter plate or at different locations on an array to which they are attached.

[0128] An “array” comprises a support, preferably solid, comprising a plurality of different, known locations at which an item can be placed. Arrays include, for example, microtiter plates with addressable wells and chips comprising bound molecules at addressable locations. Members of the array may be identified by virtue of an identifiable or detectable label, such as by color, fluorescence, electronic signal (i.e., RF, microwave or other frequency that does not substantially alter the interaction of the molecules of interest), bar code (such as bio-barcode with unique nucleic acid tags) or other symbology, chemical or other such label. For example, the members of the array may be positioned in a container such as a well of a multi-well plate (such as a microtiter plate with 96, 384, or 1536 loci) or a vial, or immobilized to discrete identifiable loci on the surface of a solid phase or directly or indirectly linked to or otherwise associated with the identifiable label, such as affixed to a microsphere or other particulate support (herein referred to as beads) and suspended in solution or spread out on a surface. A microarray, which is used by those of skill in the art, generally is a positionally addressable array, such as an array on a solid support, in which the loci of the array are at high density. Examples of hybridization arrays, also described as “microarrays” or colloquially “chips” have been generally described in the art, for example, U.S. Pat. Nos. 5,143,854, 5,445,934, 5,744,305, 5,677,195, 5,800,992, 6,040,193, 5,424,186 and Fodor et al., Science, 251:767-777 (1991).

[0129] Arrays may generally be produced using a variety of techniques, such as mechanical synthesis methods or light directed synthesis methods that incorporate a combination of photolithographic methods and solid phase synthesis methods. Techniques for the synthesis of these arrays using mechanical synthesis methods are described in, e.g., U.S. Pat. Nos. 5,384,261, and 6,040,193, which are incorporated herein by reference in their entirety for all purposes. Although a planar array surface is preferred, the array may be fabricated on a surface of virtually any shape or even a multiplicity of surfaces. Arrays may be nucleic acids on beads, gels, polymeric surfaces, fibers such as fiber optics, glass or any other appropriate substrate. (See U.S. Pat. Nos. 5,770,358, 5,789,162, 5,708,153, 6,040,193 and 5,800,992.)

[0130] As used herein, a support (also referred to as a matrix support, a matrix, an insoluble support or solid support) refers to any solid or semisolid or insoluble support to which an item, e.g., a molecule of interest, typically a biological molecule, organic molecule or biospecific ligand can be linked or contacted. Such materials include any materials that are used as affinity matrices or supports for chemical and biological molecule syntheses and analyses, such as, but are not limited to: polystyrene, polycarbonate, polypropylene, nylon, glass, dextran, chitin, sand, pumice, agarose, polysaccharides, dendrimers, buckyballs, polyacrylamide, silicon, rubber, and other materials used as supports for solid phase syntheses, affinity separations and purifications, hybridization reactions, immunoassays and other such applications. The matrix herein can be particulate or can be a be in the form of a continuous surface, such as a microtiter dish or well, a glass slide, a silicon chip, a nitrocellulose sheet, nylon mesh, or other such materials.

[0131] As used herein, matrix or support particles refer to matrix materials that are in the form of discrete particles. The particles have any shape and dimensions, but typically have at least one dimension that is 100 μm or less, 50 μm or less and typically have a size that is 100 mm³ or less, 50 mm³ or less, 10 mm³ or less, and 1 mm³ or less, 100 μm³ or less and may be order of cubic microns. Such particles are collectively called “beads.” They are often, but not necessarily, spherical. Such reference, however, does not constrain the geometry of the matrix, which can be any shape, including random shapes, needles, fibers, and elongated. Roughly spherical “beads”, particularly microspheres that can be used in the liquid phase, are also contemplated. The “beads” can include additional components, such as magnetic or paramagnetic particles (see, e.g., Dyna beads (Dynal, Oslo, Norway)) for separation using magnets, as long as the additional components do not interfere with the methods and analyses herein.

[0132] As used herein, a “library” is a collection of items. In certain embodiments the library is “addressable,” i.e., members of the library comprise an identifying tag or are physically located at a different, discrete, known locations, such as contained within different wells of a multi-well plate or different containers.

[0133] As used herein, “array library” refers to the collections of addressable elements or components created by physical separation of the mixed library into a number of discrete collections.

[0134] As used herein, biological sample refers to any sample obtained from a living or viral source and includes any cell type or tissue of a subject from which nucleic acid or protein or other macromolecule can be obtained. Biological samples include, but are not limited to, cell lystates, cells, body fluids, such as blood, plasma, serum, cerebrospinal fluid, synovial fluid, urine and sweat, tissue and organ samples from animals and plants, such as humans, non-human mammals such as monkeys, dogs, pigs, horses, cats, rabbits, rats, and mice, and other vertebrates such as birds and fish. Also included are soil and water samples and other environmental samples, viruses, bacteria, fungi algae, protozoa and components thereof. The methods herein can be practiced using biological samples and in some embodiments, such as for profiling, can also be used for testing any sample.

[0135] As used herein, “a reporter gene construct” is a nucleic acid molecule that includes a nucleic acid encoding a reporter operatively linked to a transcriptional control sequence. Transcription of the reporter gene is controlled by these sequences. The activity of at least one or more of these control sequences is directly or indirectly regulated by transcription factors and other proteins or biomolecules. The transcriptional control sequences include the promoter and other regulatory regions, such as enhancer sequences, that modulate the activity of the promoter, or control sequences that modulate the activity or efficiency of the RNA polymerase that recognizes the promoter, or control sequences are recognized by effector molecules. Such sequences are herein collectively referred to as transcriptional regulatory elements or sequences.

[0136] As used herein, “reporter” or “reporter moiety” refers to any moiety that allows for the detection of a molecule of interest, such as a protein expressed by a cell, or a biological particle. Typical reporter moieties include, include, for example, light emitting proteins (e.g., luciferase, fluorescent proteins, such as red, blue and green fluorescent proteins (see, e.g., U.S. Pat. No. 6,232,107, which provides GFPs from Renilla species and other species)), enzymatic reporters, the lacZ gene from E. coli, alkaline phosphatase, secreted embryonic alkaline phosphatase (SEAP), chloramphenicol acetyl transferase (CAT), hormones and cytokines and other such well-known genes. For expression in cells, nucleic acid encoding the reporter moiety can be expressed as a fusion protein with a protein of interest or under to the control of a promoter of interest. The expression of these reporter genes can also be monitored by measuring levels of mRNA transcribed from these genes.

[0137] “Operatively linked” or “operably linked” refers to a functional arrangement of elements wherein the activity of one element (e.g., a promoter or a UTR) results in an action on the other element (e.g., a nucleotide sequence). Thus, a given promoter that is operably linked to a coding sequence (e.g., a reporter gene) is capable of effecting the transcription of the coding sequence when the proper enzymes are present. A UTR that is operably linked with a coding sequence is capable of effecting translation of the coding sequence. The promoter or other control elements need not be contiguous with the coding sequence, so long as they function to direct the expression thereof. For example, intervening untranslated yet transcribed sequences can be present between the promoter sequence and the coding sequence and the promoter sequence can still be considered “operably linked” to the coding sequence.

[0138] As used herein, regulatory molecule refers to a polymer of deoxyribonucleic acid (DNA) or ribonucleic acid (RNA), or an oligonucleotide mimetic, or a polypeptide or other molecule that is capable of enhancing or inhibiting expression of a gene.

[0139] As used herein, the terms “transcription regulatory region” or “transcription regulatory sequence” mean a nucleotide sequence that influences expression, positively or negatively, of an operatively linked gene. Regulatory regions include sequences of nucleotides that confer inducible (i.e., require a substance or stimulus for increased transcription) expression of a gene. When an inducer is present, or at increased concentration, gene expression increases. Regulatory regions also include sequences that confer repression of gene expression (i.e., a substance or stimulus decreases transcription). When a repressor is present or at increased concentration, gene expression decreases. Regulatory regions are known to influence, modulate or control many in vivo biological activities including cell proliferation, cell growth and death, cell differentiation and immune-modulation. Regulatory regions typically bind one or more trans-acting proteins which results in either increased or decreased transcription of the gene. In certain embodiments, the regulatory regions are cis-acting.

[0140] Particular examples of gene regulatory regions are promoters and enhancers. Promoters are sequences located around the transcription start site, typically positioned 5′ of the transcription start site. Enhancers are known to influence gene expression when positioned 5′ or 3′ of the gene, or when positioned in or a part of an exon or an intron. Enhancers also can function at a significant distance from the gene, for example, at a distance from about 3 Kb, 5 Kb, 7 Kb, 10 Kb, 15 Kb or more.

[0141] As used herein, a promoter region refers to the portion of DNA of a gene that controls transcription of the DNA to which it is operatively linked. The promoter region includes specific sequences of DNA that are sufficient for RNA polymerase recognition, binding and transcription initiation. This portion of the promoter region is referred to as the core promoter. In addition, the promoter region includes sequences that modulate this recognition, binding and transcription initiation activity of the RNA polymerase. These sequences can be cis acting or can be responsive to trans acting factors. Promoters, depending upon the nature of the regulation, can be constitutive or regulated.

[0142] Regulatory regions also include, in addition to promoter regions, sequences that facilitate translation, transcript stability, splicing signals for introns, maintenance of the correct reading frame of the gene to permit in-frame translation of mRNA, leader sequences and fusion partner sequences, internal ribosome binding sites (IRES) elements for the creation of multigene, or polycistronic, messages, polyadenylation signals to provide proper polyadenylation of the transcript of a gene of interest and stop codons and can be optionally included in an expression vector.

[0143] As used herein, a composition refers to any mixture. It can be a solution, a suspension, liquid, powder, a paste, aqueous, non-aqueous or any combination thereof.

[0144] As used herein, a combination refers to any association between among two or more items. The combination can be two or more separate items, such as two compositions or two collections, can be a mixture thereof, such as a single mixture of the two or more items, or any variation thereof.

[0145] As used herein, a kit refers to a packaged combination, optionally including instructions and/or reagents for their use.

[0146] As used herein, two nucleic acid segments are “heterologous” with respect to each other if their sequences are not found in the same genome or are not normally linked to one another within 10000 nucleotides in the same genome.

[0147] As used herein, a nucleic acid molecule is “isolated” if it is removed from its natural milieu in a genome and/or cell.

[0148] A nucleic acid molecule is “pure” or “purified” if it is the predominant biomolecular species in a mixture.

### EXAMPLES

### Example 1

### Description of Algorithm Used to Predict Human 3′ Untranslated Regions

[0149] The algorithm first downloads every RefSeq human cDNA sequence at NCBI. Next, the open reading frame (ORF) is identified for each cDNA sequence by finding the longest string of codons that begins with a methionine (AUG) and ends with one of the three stop codons (UAG, UGA, UAA). Each Refseq cDNA sequence with annotated ORF is then aligned to the human genome sequence to identify the exon structure and genomic location of each gene.

[0150] The algorithm then analyzes the exon structure at the 3′ end of the gene. If the last intron on the refseq alignment is less than 100 bp, it merges the last 2 exons and designates that as the last exon. The algorithm then looks at where the ORF ends and determines whether the UTR is spliced or not based on whether it is interrupted by an intron. If the UTR is spliced, the algorithm determines the length of the intron and also determines how much of the UTR is located in the second to last exon and also whether the coding sequence ends before the second to last exon.

[0151] The algorithm then merges overlapping UTR sequences to eliminate redundancy. First the algorithm sorts based on the coordinate of the UTR beg, then it merges UTR coordinates if any of the following criteria are true:
[0152] 1. the difference between the last beg and the current beg coordinate <500 bp
[0153] 2. if the difference between the last end and the current end coordinate <500 bp

[0154] For each group of merged UTR coordinates, the lowest coordinate and highest coordinate are recorded, and the Refseq IDs for every UTR are recorded.

### Example 2

### Pilot Experiment Demonstrating the Function of the Human Transferring Receptor UTR

[0155] The scientific literature reveals a handful of genes for which studies of the function of both transcriptional and post-transcriptional regulatory elements have been carried out, and in all cases such studies have yielded valuable insight into that gene's regulation. One of the best studied cases is that of the human Transferrin Receptor gene (hTR). hTR protein levels are known to increase more than 10-fold upon addition of an iron-chelator (DFO) to cells in culture. A panel of literature has shown that both the promoter and the 3′ UTR play necessary roles in mediating the change total protein output from the locus needed for an adequate response to iron depletion, and each is sufficient to supply moderate increases in gene expression response on its own. Specifically, Casey et al. (1988) found that the TFRC promoter's activity increases ˜2.8 fold upon treatment with DFO (an iron chelator). And to explore post-transcriptional regulation, Mullner et al. (1988) constructed a TFRC “minigene” on a plasmid and showed that when the entire 3′ UTR is deleted, the expression response to DFO is decreased by ˜3 fold.

[0156] To test the SwitchGear 3′UTR reporter vector for measuring the effect of different 3'UTRs and mutations contained in 3′ UTRs on protein expression, we cloned different fragments of the hTR 3′UTR downstream of a luciferase reporter cassette on a plasmid driven by a moderately strong promoter. We transfected vectors containing different regions of the hTR 3′UTR into tissue culture cells and measured luciferase output from each at normal intracellular iron concentrations and then in the presence of DFO (a small molecule that reduces available iron). Previous published research has utilized similar approaches, though with different reporter cassettes and vectors. The results summarized in FIGS. 4 through 6 show that the full IRE-containing UTR increases the amount of transcript ˜3 fold upon treatment with DFO, which is consistent with what we expected based on previous published reports.

[0157] The three UTR sequences analyzed in the hTR experiment are segments of SEQ ID NO. 12265. They are labeled: “Whole IRE”, which contains both of the IREs in the hTR UTR; “UP IRE”, which contains the most 5′ IRE in the hTR UTR; and “Down IRE”, which contains the most 3′ IRE in the hTR UTR.

### REFERENCES

[0158] Casey, J. L., B. Di Jeso, K. Rao, R. D. Klausner, and J. B. Harford. 1988. Two genetic loci participate in the regulation by iron of the gene for the human transferrin receptor. Proc Natl Acad Sci USA. 85:1787-91.

[0159] Collins, F. S., J. E. Metherall, M. Yamakawa, J. Pan, S. M. Weissman, and F. G. Forget. 1985. A point mutation in the A gamma-globin gene promoter in Greek hereditary persistence of fetal haemoglobin. Nature 313: 325-6.

[0160] Conne, B., A. Stutz, and J. Vassalli. 2000. The 3′ untranslated region of messenger RNA: A molecular hotspot for pathology? Nature Med. 6: 636-641.

[0161] Cooper, S. J., N. D. Trinklein, E. D. Anton, L. Nguyen, and R. M. Myers. 2006. Comprehensive analysis of transcriptional promoter structure and function in 1% of the human genome. Genome Res. 16:1-10.

[0162] Kulozik, A. E., A. Bellan-Koch, S. Bail, E. Kohne, and E. Kleihauer. 1991. Thalassemia intermedia: moderate reduction of beta globin gene transcriptional activity by a novel mutation of the proximal CACCC promoter element. Blood 77: 2054-8.

[0163] Mazumder, B., V. Seshadri, and P. L. Fox. 2003. Translational control by the 3′-UTR: the ends specify the means. Trends in Biochem Sci. 28: 91-98.

[0164] Mullner, E. W., and L. C. Kuhn. 1988. A stem-loop in the 3′ untranslated region mediates iron-dependent regulation of transferrin receptor mRNA stability in the cytoplasm. Cell 53:815-25.

[0165] Myers, R. M, K. Tilly; and T. Maniatis. 1986. Fine structure genetic analysis of a beta-globin promoter. Science 232: 613-8.

[0166] Pesole, G., L. Sabino, G. Grillo, F. Licciulli, F. Mignone, C. Gissi, and C. Saccone. 2002. UTRdb and UTRsite: specialized databases of sequences and functional elements of 5′ and 3′ untranslated regions of eukaryotic mRNAs. Update 2002. Nucleic Acids Res. 30: 335-40.

[0167] Rimokh, R., B. Francoise, C. Bastard, B. Klein, M. French, E. Archimbaud, J. P. Rouault, B. Santa Lucia, L. Duret, M. Vuillaume, B. Coiffier, P. Bryon, and J. P. Magaud. 1994. Rearrangement of CCND1 (BCL1/PRAD1) 3′ untranslated region in mantle-cell lymphomas and t(11q13)-associated leukemias. Blood 12: 3689-96.

[0168] Theodorakis, N. G., and R. I. Morimoto. 1987. Posttranscriptional regulation of hsp70 expression in human cells: effects of heat shock, inhibition of protein synthesis, and adenovirus infection on translation and mRNA stability. Mol Cell Biol. 7: 4357-68.

[0169] Trinklein, N. D., S. J. Aldred, A. J. Saldanha, and R. M. Myers. 2003. Identification and functional analysis of human transcriptional promoters. Genome Res 13: 308-312.

[0170] Weiss, I. M., and S. A. Liebhaber. 1995. Erythroid cell-specific mRNA stability elements in the alpha2-globin 3′ nontranslated region. Mol Cell Biol. 15: 2457-65.

[0171] Xie, X., J. Lu, E. J. Kulbokas, T. R. Golub, V. Mootha, K. Lindblad-Toh, E. S. Lander, and M. Kellis. 2005. Systematic discovery of regulatory motifs in human promoters and 3′ UTRs by comparison of several mammals. Nature 434: 338-45.

[0172] While preferred embodiments of the present invention have been shown and described herein, it will be obvious to those skilled in the art that such embodiments are provided by way of example only. Numerous variations, changes, and substitutions will now occur to those skilled in the art without departing from the invention. It should be understood that various alternatives to the embodiments of the invention described herein may be employed in practicing the invention. It is intended that the following claims define the scope of the invention and that methods and structures within the scope of these claims and their equivalents be covered thereby.

The application's sequence listing, which the Patent Office published only in electronic form, follows.

SEQUENCE LISTING (17520 sequences)

SEQ ID NO: 1 - DNA, 428 bp, Homo sapiens
ggttgccgggggtaggggtggggccacacaaatctccaggagccaccactcaacacaatggccctgcctcccaccgctttatttctttcggtttcggatgcaaaacaaaaaattttaaaagaaaatgtgacttcaaaggaaaggaacaaattttcaaagacttgggggagtgaaggcagagcctggtgcagatggacgaggtctgcagacggagggcagaggtggtggaaggggccaggggcctgcaggcctccccctggaactgggactggtctcggtctgctgacgtcagggtcagctcccccgcggagctgacttcagcagcccacagctgtggggcttcagcagccacaccagcccagcccagcccagctctcgatacgtttggtctttcatgctgaaaaataaataataaagcctgtcccgtg

SEQ ID NO: 2 - DNA, 524 bp, Homo sapiens
cccacctaccaccagaggcctgcagcctcccacatgccttaaggggaccgtggcccccaccagggacgtcctgcgccatccgttcacgtctctgcatccattccttcatgtctttatttagttgtttatttatttagttatttatcttatttattgaggggtgaggagtgccacggctgcccgtttacacctttagcgtctggtcctcctgcgtgtcctcccctccactgcctgcatggggggcgcggggagtgaccaggcgggggcctcaccgccccagggccgttgcctgctcagaccttgcaggctgtggagcaagaggccctgggtctctccaagcagctgcagaccccagctcgaattttgcacatggcggggtcccgggaagggtggggagcagttgtccttcctgtcgtcgtctgccgtgtgccatctttcctggatcttgtagtgggtgcacacgcgtgcactgggaccccacacagcaatacgagtccaacttaataaacacatttctggggttc

SEQ ID NO: 3 - DNA, 523 bp, Homo sapiens
tggccgcggtgaggtgggttctcaggaccaccctcgccaagctccagggtacctgcccctctaacccacttcaaattacaagtcagggtctgaacccagtgtgatggggggagtctctggggccctgagttcagagcccgtccctcagctcctgttccttggtgccagcagctggggcagggaagggtgggaggggccccatccaaaggatgccctggccagcgaggctgggtcacaggtcagggaggtcctggccgtccacagggtcggccctcagctcagcccgccaggagtcagggaggagactcgctgggagtgggagggcagcacgggcgtgaaggtcggaggacagagaaaggtcagcagggtcagagtatgtgaggtcagagggcatgagggtcacaggtcagcaaggtgtgaggagcacaagccagggtgccccgaggaggagggtgggtgggtccttgtgtggcctggcgcgcaccacagggcagcacgggagacgttgacaccaccggacgag

SEQ ID NO: 4 - DNA, 59 bp, Homo sapiens
gggcctccaccagcatccgagcaggatcaagggccggaaataaaggctgttgtaaagag

SEQ ID NO: 5 - DNA, 1131 bp, Homo sapiens
gctggcaccagagccccgcgcccgctgtaattattttctatttttgtaaacttgttgctttttgatatgattttcttgcctgagtgttggccggagggactgctggcccggcctcccttccgtccaggcagccgtgctgcagacagacctagtgccgagggatggacaggcgaggtggcagcgtggagggctcggcgtggatggcagcctcaggacacacacccctgcctcaaggtgctgagcccccgccttgcactgcgcctgccccacggtgtccccgccgggaagcagccccggctcctgaatcaccctcgctccgtcaggcgggactcgtgtcccagagaggaaggggctgctgaggtctgatggggcccttcctccgggtgaccccacagggcctttccaagcccccatttgagctgctccttcctgtgtgtgctctgggccctgcctcggcctcctgcgccaatactgtgacttccaaacaatgttactgctgggcacagctctgcgttgctcccgtgctgcctgcgccagccccaggctgctgaggagcagaggccagaccagggccgatctgggtgtcctgaccctcagctggccctgcccagccaccctggacgtgaccgtatccctctgccacaccccaggccctgcgaggggctatcgagaggagctcactgtgggatggggttgacctctgccgcctgcctgggtatctgggcctggccatggctgtgttcttcatgtgttgattttatttgacccctggagtggtgggtctcatctttcccatctcgcctgagagcggctgagggctgcctcactgcaaatcctccccacagcgtcagtgaaagtcgtccttgtctcagaatgaccaggggccagccagtgtctgaccaaggtcaaggggcaggtgcagaggtggcagggatggctccgaagccagaaatgccttaaactgcaacgtcccgtcccttccccacccccatcccatccccacccccagccccagcccagtcctcctaggagcaggacccgatgaagcgggcggcggtggggctgggtgccgtgttactaactctagtatgtttctgtgtcaatcgctgtgaaataaagtctgaaaacttt

SEQ ID NO: 6 - DNA, 719 bp, Homo sapiens
gatccctcggggcgggggtgtgtggtcaggctgggcaccaggcacacagatgtccgtggcgtgcgtgggcggctgcgctgaagtgtgacctgaccgtgtggaaccaaacccttccagcgtctctgctcacttagctggcagtgcctgtccccagcagccagcaaaggcccggacggaaagcccagtcgggggtctgtcggcacgagtcccgcgggcagcctcgccgtagggtcaggggacagctcggcttcagtgacagccaccatgtgaagagtctttgttcctttcagatcctccacttggcaggcagggccaacagcagcccccgggccaggtgtcctggagcagcagcagctgcccgtgcaggcccggactctccctagctaagggccatgtgcggtggagtgtcctaattttgcagggttcctttctgtgggggtacctgtggggtacttcaaacagccctagcagcaaaggcccttgagcagcgcggtgtgaaactgggataaaaacggggcttggccgaaggacttttatctgtcttggtcaccccggccaggccccggaagcagcagccagggatggtccttcctcacccacaggcgtgtgtcactgtggctgggacggcagcgctcagaggagcctccagttactttcctcacatctcccaaactctctcttaattgcgataattcacagaacataaaattcacgatctt

SEQ ID NO: 7 - DNA, 1770 bp, Homo sapiens
gccgccgcggcccggccctccgggacacctgcttcacccggcggcgccttggggcaggtgccgagcgggcgcactacgcccgggccccaaggcccccgtcccgcagccacgcttgtggtcgctgcgtcccggtctgcgtttgggagacccctgggggttgccggggcagcgcgccgtgtccaggtggaggtgcccgttcctggacctcagcgagcctgagccgggcccggccgcacgctgacccccgtgctgtccccgaccggctcacggggctgggctccgatcttccgtgtctcttatcagtggcgtttctcacgtctgcgtctcagatctaacgtggtttcacatcaatccgctttcatgggattttggtctctgtccagtgacttcgtggtaaatgtaactcagtgtttgcttgcgacttatttataaatattgtaagtttgtgtcgatgagtgtaagttggcagtgcgcacgtctcggtttttttacatgatttaaggaaagacttttatgtcagaacttggtgcctgtaccgtcaaccccgctgctgcccgtgtttaaacgcaggagaactttaaaactggccatctatcttttcagtgtacaagtcactgaacccattgtttctttctgaagagactttcctttcaaggcttcccatgggtccgcgccacacagggccggtgctgctttatttcagactctgccccaggttccaggaatccgaaccccggagtgctgacgcggttccccaacttccgccttaagaaaacaggaccagccggcaccaggcccgtctctcacgtactttaacacatccttgaaagcccctcgtttaatgagaaaagcgaacactgcggtccttgccaaagtaaaatgaagctgccccaggacaaggggttaccatgagctccctggagtccgacgcgggttttctctctgggggacctgggtggtccccgctgtggtctttgttgtcccactttgggaccgggtccagtctggggtctagtctcgagcatcagggtcaggctcggggcagggctgggttaggctccgggtcagtcttgccatgggtttgggagcaggtttgggttacttgcgtttgaaggcagcagtggtctcaggaggaagaaacgggggcgggagagagtggtgatctgtggtcagtgggtcagtgacctgcacggtgattctcccacctccaaaaggtaggggtgggactggaggcgtccctaggtcaggccgttgagttcgagctccgatgggccaccttgaatccaggactgaccgcccgtgtgtgcacagtttgttcttggacgaggactcgtgaggatcgagggctggggaccccggtgtgagcaggatggggccctgccctcccgtgggagttgtggactcgagcccaggggctgcccgtcacagcggtgtcccaggtccctgccatccgattttacctgggatgtcttctctggagtttggaattgcttgaggaaccctgcgtgtgcttggagaggccagagggcttgctgagaaccccatggacagtggagagcgggattcgaaccaagggctggactcccacacctctggcctgcgtcgcccagttctttgtggctctgaagaattggccgctgtggaaaagagcaaatgtccgagacccccaacaggaagagtctaaaaatccagtttgcaaccacttctgacctacaaaaaaatggaaatttagtgtttttcagcctaagacattaaatttcatatcagaac

SEQ ID NO: 8 - DNA, 419 bp, Homo sapiens
accagacctgccagggctgtgcgatctcttggcctggtccttgcagctgtggcagcagcaggctccccagcggcccagggtgggccagaccagcagcccaggaagcagcacacgcggccgtggggaggcaggcaccgggcatgtcggcgcctctggtcaaaccacctacactgcctggggtgggtctcaaggaggcccggggcggaggggggttcccgcgtgcacacgagtgcggctggacgtgccgacacgcggtgatgtacccatgctccgtgtgtctgtgtctgcatgtccacacgtctgatgcacctgtgtacgtgtgtcaagcctagccacctcagctgcagggaggcagaaggcaaggcaggccccacggacacacttgggctgctctgaaataaagctgttgactccacctg

SEQ ID NO: 9 - DNA, 297 bp, Homo sapiens
ccctggacactcaagccaaagttaggccacaccaggcccaaccctgtgctggtcaagccagggcagtcacagctgcttggggcccacagcactgctgcctggtctccacagtagcctccctgcccgggtcccagcaccctggatgcccgtctctgtcccaggcgggatggggcacagtgcaggacacagccatgtacaccaagaagagagtaccaagtagtcttttgttcagcttttactggaaactgctgtctaggaccacctgccctaaccaggaataaaggcaagacagcctgg

SEQ ID NO: 10 - DNA, 1132 bp, Homo sapiens
gggcgggaagccagggccgcaccggctttcctgctgcagatctgggctgcggtggccagggccgtgagtcccgtggcagagccttctgggcgctgcgggaacaggagatcctctgtcgcccctgtgagctgagctggttaggaaccacagactgtgacagagaaggtggcgaccagcccagaagaggcccaccctctcggtccggaacaagacgcctcggccacggctccccctcggcctattacacgcgtgcgcagccaggcctcgccagggtgcggtgcagagcagagcaggcaggggtgggggccgggcctgcaagagcccgaaaggtcgccaccccctagcctgtggggtgcatctgcgaaccagggtgaagtcacaggtcccggggtgtggaggctccatcctttctcctttctgccagccgatgtgtcctcatctcaggcccgtgcctgggaccccgtgtctgcccaggtgggcagccttgagcccaggggactcagtgccctccatgccctggctggcagaaaccctcaacagcagtctgggcactgtggggctctccccgcctctcctgccttgtttgcccctcagcgtgccaggcagactgggggcaggacagccggaagctgagaccaaggctcctcacagaagggcccaggaagtccccgcccttgggacagcctcctccgtagcccctgcacggcaccagttccccgagggacgcagcaggccgcctcccgcagcggccgtgggtctgcacagcccagcccagcccaaggcccccaggagctgggactctgctacacccagtgaaatgctgtgtcccttctcccccgtgccccttgatgccccctccccacagtgctcaggagacccgtggggcacggaacaggagggtctggaccctgtggcccagccaaaggctaccagacagccacaaccagcccagccaccatccagtgcctggggcctggccactggctcttcacagtggaccccagcacctcggggtggcagagggacggcccccacggcccagcagacatgcgagcttccagagtgcaatctatgtgatgtcttccaacgttaataaatcacacagcctcccaggagggagacgctggggtgc

SEQ ID NO: 11 - DNA, 978 bp, Homo sapiens
gccggcgtccccgcccagccgagagggccggcgcctacctgagggcccctgtgtcccgaacccggagcggaggcgcccaacccggcagacgggtgcaggcccggcctttccccacgcggactccgcgcgaccccggccctctccctgcggccgcagggcttccccgcctggcgcctgccctccagggctggggcctcgcctggcgggaccccgcagcagccccggccccatccccgcccagagccgggcgtcgtgtgggtccgtgggtgataattgagagcgtcagacccaggactgttcagggaggagccccggtcagactcccacgtgtgaagaccgggccccaagtggcaagggctggcctggggcgggcagcttgggtcctggacgttgataggaagcggaaggggaatcgcgggaagctggcccaggtcaggtccgcaaaggcttctgaagaagaggaagggcgagtaggggcacctggacgctgatggtggccaggatgctcagctggccaggagggcagcacctgctggggacggtggccctgccttcatgcccaggacaccagctgggtccagctagcagccactgggaatcagaggaatggggcagagctgggcattcaggaccttgaggacacgtgaccccacccgcccaccgccactatcaggccccgggaccgcactgacaggaaaccttccgtcgtgagggagcacttcccaggggccgcagggacgacactctccagggaggccccagcaaccacaccatcttcttgctgtgagaggtctcaccccgggctacctcctgtcactactcactgccctggggtccgtgggcaagttgcccagggtgggggtgcctagccaggtgcagtccccgccccgcctagtcctcggcgtcacgcaatgctcacctcgcctcttccccactaacatcccagactttaaaattcagtaaatcagatgtacaccg

SEQ ID NO: 12 - DNA, 384 bp, Homo sapiens
gcactggctagggaggggcaggcctccttcctgcccctcgagacactcttgggagatgcattttccgtctggctcacagggggagggtgaggctttgtaccccagcccctgcccaggccactgtgagggtgggtgctggctgagcccctggggcagaaggagtggggcaggcggggtctttgttctcggctcccacagcagagccaggtgagggggggcctgccaggactagacagaagtggggcggcctgaaccctgcttccagccatggccaggggccacggaacccggcaggggtgtctgaggccgccctgtcagctggccggtccaagcctgtggctggagctggtgtgtgtttatctaataaagtcccacaggtgcctc

SEQ ID NO: 13 - DNA, 612 bp, Homo sapiens
gtccacagggagatccacagctcacggagcctggccgcggacccctcccacccctgccttgccggcccctgcacatttaggatatgctcctgggtggggactgggctgtgcccagggcctctgtcccccaggatgtcttgtggtgcgggtcggccgttctgccccccagggcaccccctgttgtaggcactggctagggaggggcaggcctccttcctgcccctcgagacactcttgggagatgcattttccgtctggctcacagggggagggtgaggctttgcaccccagcccctgcccaggccactgtgagggtgggtgctggctgagcccccggggcagcaggagccaggcaggtgatgtctttgttctcggctcccacagcagagccaggtgagggggcgcctgccagggccagacccaggtggggcagcctgaaccctgcttccccctgtggccggcatgccccgatctttcacacactggtgaccctgagagaggagggaggagggaacctggcgggggtgtctgaggccgcactgtcagctggccggtccaagcctgtggctggagctggggtctgtttacctaataaagtcccacaggtgcctc

SEQ ID NO: 14 - DNA, 101 bp, Homo sapiens
gtgcagctgccgcagccgggggaggcctgcccgggaaggctgctgcccctgccccctggcccccactcccccggctccgtgtaaaataaatgttccagccc

SEQ ID NO: 15 - DNA, 469 bp, Homo sapiens
gcacaggactcaggccaccctcgcttgtcctggcgcccggcggcagctgcccagaaacttcctgggagaaagagccctcgggctgccttcccctctgcgtgtttcgaagtgggatgacagtcggccacggaaaacaagaggaagcctcggcctccctgagctctgaccccagcctcacccgaaaggccagcctggggctctccggcaggcagcccgagacctgcacagatgaaggagcagaggttctgaccgagaggctgagccaggccggggtctgggcccttcagggagccgcggatttttatgttcagaaagtgatcctggtttctaggtctttgctctgcaggatcgggatcagagcgtgggaggaggtgggggtggacgtccatccggtgaacagtgaaggcgtttgtgaggtctttctggtcccagcatgaaataaagccttggcctgggggccgcttcattc

SEQ ID NO: 16 - DNA, 384 bp, Homo sapiens
ggccgcgtgcgtctctgtcgtggacacgcgtgattgaccctttaactgtatccttaaccaccgcatatgcatgccaggctgggcacggctccgagggcggccagggacagacgcttgcgccgagaccgcagagggaagcgtcagcgggcgctgctgggagcagaacagtccctcacacctgggcccgggcaggccagcttcgtgctggaggaacttgctgctgtgcctgcgtcgcggcggatccgcggggaccctgccgagggggctgtcatgcggtttccaaggtgcacattttccacggaaacagaactcgatgcactgacctgctccgccaggaaagtgagcgtgtagcgtcctgaggaataaaatgttccgatgatgtgg

SEQ ID NO: 17 - DNA, 1252 bp, Homo sapiens
attccgtgcctgccgccgcagcgccgccgacaacgcgggtgcaggggggcgcggctgggcggtgcagctccgcccggctccgcccctgcagcccacacagcacaacgtcttaccgtgcctattaccaagcgagtgtttgtaaccatgtagttttggaacccactgcaaaattttctactggccaagttcaagtgagtaagccgcgtcccccaactacagctggagacggggccagctcggcggcctgctggtcctctgcttgctggaacattctaacatttacacttttgttataagctatttaaaaccagtaaggagacttgaaattcagaaaatcaacacatttttaaatgactaacttctaaaagccccaacacatgacgccatctgaagacccgcaacggagtgggggtggcggccgccccaccctccccacccggggaagccatcacagctcatctgcccgcggctgcgtgaggacagcaggggtttttcttcagagtctattttttcagcgacaaggacccaggtcttcctgctgctgccagggagagcagggacagtgccgcgtgcgagatgagctcgaacactgcccgccttactgccgcctaccccgcccgccacgccgccgtcgatgccagcgctgtccccacgggtaccaggaagtgcagagccgcacaggagctgccccggagctgaggggacggtcttcggctcctctgcaccccgtgattctgcccacgctcctccaccacgaggcactgacctgcgtcgggtggtgaccgtggctggcggtcacgccctcagcccctccgggcacacgtgccgcctgaccgggcgacccttttcagttcggcaaacgtcgctcccttcattttgggactgaggctgcagcattggaacaaaagagcattatttcaatttttctttctttttttttgttcgttcatttaaacgtatatttagaactgcactttgtccacaaccttcccttctctttctattccccagtgaactgaggtttttaccgatttatagagcagtcaaatccgaagtgctcgagtgcttagaaaccccctctggtgcttggttgaacaagggaatcacaagaaaacgaaaatgcaaaaactgaacttcgggggtcgttctgtgccttccagcatcttgtacagcaaatcctgactcgtgtctttttacccccaagatatctgtcttcagtagcgactgaatctgccactctcagaataagttc

SEQ ID NO: 18 - DNA, 2311 bp, Homo sapiens
aagcgggactgaggctgcctcacgtgttgcaagaacagttttgagccattgttaacaatgccttttttcttcacataaagtagttgattacgagggagtcaaattttctttttaaaaaggagcttcaatgatttgtaactgaaatatcaggttctagaagaaactggcgcttaaaccaaatcgcatggatttctttttcagtgacgttcaagtgtttctcacggatggaattctagtcagctgcaggcgggaagccaggcgggtggagcccatgggagcaagggcgagtggccggtccccgctgtgccaggtgggcaggcaggagcaaggcctgcgagggaggaacgggccgctccccgccagccgccttccccagcagccgcaggtggtgccagccactccacagagcccgagggatgatctagcctgattcctgcgtgtccgaaagaacttaacgttttaaaggtgattgtcaagtaactgtgtggggttctaatgccagtttcctaattccatctcactggagatgtttaaagttggcctctatcctaatgactcaaaacttggttcttaactaccatgattgcttttgagggcccggaattataaatatatattatattttaattgtttgagattattttgacacatttctttgatacgtagagtgttttgtttttaatttaaatctgtcctcatgcaaccctccatgaggggcagcgaagctggcagggagcagactggctttgtaggttcagcactcggccccccactgcgggagaggcggaacccacttgcatgtcagcgtttttgattcgagaaaagaaatactctcaacgttttaccaagtgattttacctccacctttactaaagtctttacctaaaacatggcagtcgctggacacaggaaagcccaccttttgtttggccttttcgaaaggtgacccatattgcacagcagaacatcacagctgtggtcccagatgagacactgacatgcgagtgaaggcctctcctcctgggccccgggctgcgcaggctcctcactctgggcggtgtttcctgtctcagaattgacacggtgaatgcttagtgtctggattttcttgtaccagtgtttacatatctgacatcgagctcctctaagaggccacgttcaagcttgtgtgtccctgacccaagatagccagtgctgctcccaggtggtacttctggtaccgtgttgagacacttgggattctcagactgtggacaggagtgtttgtcatttttcatactgttttcttaataagcgctcaggcctaaggtgtgacaggaagtcgcacgcgcttggccagagcacagtgaagcaaaggactgggtgctgatggatggagccacggcggcatctgcccacccggccgcagcccccagtgcctctcctggtggtcctcccagtctagagggtcacggcccccccgccctcctccgtctctggcaagctgaccttgactaacccaggaatacagggtcatcctcattcctaagtaagtcaaacagcaagacatggtttgcgcgggtctttgccggaagccggtcctgctggccaggtgttttacgtcagcagggaaatgtggcacacgccctcgaggcattttaacactgcgcttcaggaaatctcaagttccatcttgtgttagtaacgtacccacattttgctggagttagtttattaaagatgcctacggtgaactctctggcgcaggttaaatgcagttttgaaaacctggaaacatcaaatggaggcgggaaataggctggggccgagctgaggggctgaacacagcagtgaccgtgggtcagcaggtcgcctgcccagcaggccccccaggagagggctcgggcgcccctggcagcccccatacccccaggacctggctcgtgagtgcgtctgggtcaggaagagacctctctgtgcgtctcaggctgagatgcagatttctgttttctaaaactggaagcgaccttgacgtgtattgaaggtgtgtgtgccaaatgcttccgacggaggtgctggccttggttggtttctctctgccccgtgtggtcatcaagtcctgggggatgtgctctgcccagccgccctcggggagagcagcgccgcctcccatggggccgtggggctgctgttctcactgcactggctgaagcaacccgccagcctccgtgccccaccccacccagcacgcactcattcagtccattgccttaacacaagcctgatggggctgttttctcacaatataaacgaataaagtgtcttctggcct

SEQ ID NO: 19 - DNA, 312 bp, Homo sapiens
ccgtcagtggtgggaacctgggcggctctggaggcccagggcaggggtgggcgtgttgtttgctcaggaaacagggcagccaggcccccaaaactgtgtccccctggctgccctgtgtcccctccacccctgcctccctcctgcccctgctcccggggaggaaaggctaaagctgctggcccggggcccacaggaggggcttcgaggctggccctgccaggcagttttcccggcgttttaggatctgtacatagagaaatatttaaatttttagaagcaaaacttatacaacattaaaatgataccaagtcc

SEQ ID NO: 20 - DNA, 2036 bp, Homo sapiens
gggaggcgaaggccctggcctccgaggatctgggtggcgtctgctgccctaggtgtgctggaagtccacttggaagaactgttccggaggcgctgggtcgggatgccgaacctctcctgatccgccggcagcaacgagccattaaaactgcagttcctgaccacgcactgcttcgcaggctccgagccctgcatcctccacagcccccgccttgctcactgttgggccctcagggcgggcagggtggctgtgagtcccaggtgtcatcttcctgctctgcgactttctctggagaccttgggcctttggcctgtggggcactggggatggtaacctcactgccccgtcactcccttcaaaggcgacagacccaagcccacgtcaggagaggagcgtggggtcagctccagcagggtcggggtcagtgcctgtgtctggtgggggccactcaggagagttgggttttcagggcagagatgggcttgattccacctggtggggtgggtggaccctggagactctcaggtgatgggccagcctgccccaaggctctttactgatgtcagaatcattgtttgcacctgctgggtatggcctttggggcggccggcccgggagggtcttagtctaattaggtgtgtccagcttcttggccacctttccctggggaccctaacaggcccagagcagagccccttacctcccaggtcagactacctgctcaggccctcccctcccatgcaggccgatgacaactgcagccctctctgcactccctagtccagacctggggaccactgtgggttcctgtgggtctcccggctcccttcctgcccccaatgccacccttgcagtggccatttaaaaatgcatagcaggtgacccactgcgtccctttgcgttcagcccctcctctggctttcagttacaccaagctaaaatttcaggttcccagctgcagctctctgggtcccccggtgccccagtggggctccccgcatctgaatgtgtggtccctgggggtgggcacttgggggcatcctggtcactgctggccctagcattggaccctaggagacctgactggaactggctccctccccatcagctcccagctgtcactctctcccacccccgggcagctgttttgcccaagaccactgctacctgtttacccaccctggtccctcccagacaagcaaggcctctgatttctttgaagcatttacttagctcaagtctgaagctgtagatactggaagacaatgcaccttggagggtgggcaggacacagttgattgtctctacagagctgtgacgggggcactgagccccgcgggtgtctgtggagggggctccggtccaggtactgcactggacactgctcatccctgggtgtcaggcaggtggctgcaccctaggccaggcgcagaggcctggcaggcaggcttggcatggttggccggggcgggacgtacactgggtcgccgctagctgcaccttcgcacagatgcctccgagcagcgggtgggcgtgggccgcacagcgcggcagggccttggctaccacacgcggcatcgctccttggggtgcatgggggtgccccgggcacagtggaacgtgtctgcgaaggcggccaggttctgcagcgaccccagtaccctgtgggtgggtgggtgtgacagcaggagcattgccatcttggacaaacatggccattttaagttctccgtgattaaaaaccagcccaaaacatcagcctaatggctcatgtcagtatgagcagaaacatttcaaccatgagataaacccccatctgaccagaaacatgccaatcctgagaataacctcccctccagccagagatattccaactctgcaataaaactctccttcacacagaaacattcgcagcctgcggtaggctcccccttcctaaacccttaaatgcccttagtctgtaagagaatgtccctgaccgaaatcggccagaagcccctctcaggtttattcccaaaataaacctgtctctgttg

SEQ ID NO: 21 - DNA, 81 bp, Homo sapiens
aggccgcttctcgttgggtaccgtggggggtgaaccctagccccagctttgggaggatgttcaataaaggaccaatgccgg

SEQ ID NO: 22 - DNA, 4808 bp, Homo sapiens
cgggctgggcagccgggggccggtggccagagcgagggcaccagccacgaaggacggaggcgggcggggccccggagaaccctgtccctgcgtgtggccactcctcagcatcctccccacccaccatggttcattccgacttttccaatggaaactcagatcccaaaagtccctaaagcagtcgtagagtctcaccatctccaaggattggtcttgagaacactgttcagtgacggccatgcaggtggccgtccaaagacagccaacggagctgcctcgcagaatcagccagtgggcaggtggacgctctgctgagacagaagctggtggccactgccgggtgcccgcgtggggtcgcggaagggaatggatagactggtgtgctcaaaagagagagatcactcaaatgatttttataatgaaatgacaagaataacccttttggtaaccgtattgactgcagagtctatttaagcatgtggttttaaaaatagacagtattttttaaaaatcaaaaaatgacttgcaaattgttttttaaaagtaattttgcattgctttgaaatttgagctcatttgcaaacccgagtctgcctgggaacccgcactgtgcctgggtgtattctttatactgtagataatggagaaattttctatctctgtccctatttgtataagccaaggtgatgctgggtgccccgaggcagaacaagaggcgcggggccacacccgtgaaccatgcagacggccgaagaagtcttaggcagggcgccctgggctgcaggcctgcccgaggctgggatgggaagtgtgcctgccctcgtgtgacatggaattggtgtcaggaccgccacgtggccttcagaggaatccacaggtccccacccaagatccctcaattatatggggaagtcgagggcctgtggcttggatccgccatgcagagatgtggccgggcacccatcttccttccctcctctgtccctgcctcggccaccccacgcgggaacccagcgccgtcctctgaaggcagggccttggccacgtcctgggtctcccacctcccacctgaccccagcggctccggtgtcctccacgtggctgccctggggagcaatcccagcggatcgctccgggccaccaagccgcacctgtgcctgagactccggatggacgacacagtcgtcacgtcgctcttcctgcgggttcttggcgagacacagcttgagaacagaagggcgtcgggggaacctgccgcaaggagcagagacagcacagccccccgggcccagccgcctccctctcttgggacgcaacttcttccccactcggatgggctttaaattattcccataggggccaatttcaaataataatttttttccctgatggaatttaccttaatctgtatataacttgtaattttttctaattcatttcttttcttattttatttcctccttaacagtatttttggcattagacattcttattgtgaagaaataatgttaatataagtatctggtgaaggaccaaaaccgtgtgataaggttgtgtgtcgtgtgggagtggggcgattttttatgtgccaaatacccccgtcccccccatgaatcctgctgtccctgctgccgtttaccagacaatcatatgtttttgttaaatttgcgtttcagttacatttgcatttaagacaagtgttctatttatttcttgtattgtttggaagaaaaaatgatgatagagtcccaaaaagaagagaaaaaaaatgcccaagttgccctttaaaaaaaaagagcgtaaatacaaacaggagtggtgcaagccgccttggtgtgggtttgtgtcacgtgtggacatctcctcaggctttgtgtcacgcgtggacatctcctcaggctgtccccagcggtgacgggaggtgtcctggctgctccaggacaaaagacaatcgtctctgtgggtgccgggtggtccaggcttgcactgaagacgtgccacggggaggctcctgcaggaggctcaacccgacggatcacagtgaaagggattcctcccacgccagatctgcacaacgaggcaagacaggacccacctgtgcgtgcgctggggccatggggtggccccgccggggcagcgggggagctgcctgcagaagagccagctggcgtgtcgggaaggatccaggatctgcaaacacaactgctcaggccttctcacgcgtttccacaacatcccctgggtcagacccaccaggtaccccgtaggaatttccagtttcccttgatctagatgggattcttataaaaattcaacctcagacataaacaccccatttctgtaaacccaaattatatggtttcttctgcgaaagagtaaggtgtgtgcttttttttttttgcaatatgaccccgtctctctgaagtgggacattcggacggatggagccctcagcgtgtcttttcagcaggagcagaaccgatgagagccgcccttaccgttggtctccggatcccccagtcccatcccgccgttttcggctgtcttcctaaccgtcctgtcttctcttggcgctctttccttccacctttcccaagagtcctggttgcacgttttaagtcatatattttcgtccccctgaaaatgatggcaagcccagtttctcctgagcattcagacccccaggccccagcacttggcgttttcaggaggccctgttcttagagcccctgacaaaggcagcacttatttcctgggctggtgcgccccaaaacacggccccgacacttagtgtggccccaggccccagcgagcctcgccctcccagttttgctctgcccagcagtgttggtgcccagagatgacaagggccagggagcctggcccgggtgtgagaattcagagattctggcctccagctgtcaccacaccgtaacggggccatgtaactgtgcagcatggacagggatgcgacggggcagctggctgtgtccatggccaggtggccagggtcagggctgcaagccaggggtccagggcccttccgttcagcccaaatgctgccccaatgctaactccttggattgtcaacccccatcccccaaatggaaattccgaaggaggcctcctcgcacctgccctccgctgctcctcagaccccagcccccagcgagccgacgtccccacccgttcctgctctcatccccaggttgggcacgtggggttcctcctctgtgggcctggcagacccttcatgagtgggacccaagatatcactgacttcaacccagaggatcgagcccctgcaccctgcctggggccctggggtgtggagcagtggctggggtgggcgtggtgtggcctgagagactgcccagctggagaggccttcctttacaaggccacgcgtgcagctgtcccatccagaccccgactggccaagacctccacgtccccagagtccagccctggaaattccaagggccctggcgtcctctgccttccccgcttccccatgagcgtctgcaaaacacttgcctgaatacatatcacgtattttagactcgaagcctcaaagcactggattgtggtcccctgccccctctgtcccgtccccctgcccaagtgactgaaacctactgagctatattcactgtgctgtcctagggggagggagagcagagctcgcccctgcactgcagccttgtgggggagggcaaggctctcctcccagccagggacgccaggacatagctgctcctggtcagtggaggtcagccgggtatcaaaagccatgaaactgtgtctctgtagcaatgagtgatactgtgacaaaaccatccttgcattcttcctagaagagttcctctgctccttccattccatttttgtgtttgttttgttcttttctgtcactgatccgtattaccacttttggaaaaaaataaataaataaataaataaaaggcagcttgagtttccaaacgtgtgattcacttgtgaacaaaagtcattctaacaattgccttcagcgtcacgtgcattgccactgcgctttcggcacgagggatgctgagccctggtgtcagagtcgtaatttaaagcgtgtgtgtatatggactttgtcccttaaggtcgatataaagaatcctcgcagaatcacagacctgtgccgcccgccaccttctgccattgttacattacagatttggtttagttttgttttgttttgttttttcttttagaactgtatagtattgaaaaagaaatcaaatgtaaatgtctggttttcatataatgtttaaaaagaccattgagaaggaggctggcgctcgccccatgtcccccttgattgtaaattgcttctgttctgtttataagtaaactgtgcatgactcctgcttagcggtcattatcgtgtctgttggtgaaatttttattaaaaggaaaattctgtagatgcacttattgaatatgtgattaggatctacgtctgagactaggagtcctgaactgctgacgcgaaagaggcgcagttcccaattaatacggaaatcgctgtgggagaagaatgaaataagacgtgaagtgtaggaaatcatgaaaagaacaattttgcaaattgcattctgatgcttgtgatgaacacaaatgtacttgtgtagagacatttccttaagagaaagcctaggagaagccgatttggaggttaatgctgtagaataggactgtataccaaatgtaatctttccaatgctccaatgaatttatacatgagattgatatgcaataaatctgtgtgcttttct

SEQ ID NO: 23 - DNA, 524 bp, Homo sapiens
ccctggcgaggccagccggcggcagcacagcctgtctccaatcagcaagtggtcgtgcctggctctagagagcgtggggagctggtctcaaggacccagcatggttccctggggcttcccaagagcctgtggctgtggtgccgggctccagacacttcacggaaggaagatcacatgtccccagagaggcacccccaggcaagctcgagggggccacaccgtgtcccagggagcccagcctattcccgttggctggctgggcccctcagctgctgggccccacctccccactgcacccagggggcaactccacctggactgatgggcacaggaggcaccaatagcgattattgggggcaatgcgaggtctcctcctatgcccttcctacccctgagtgggacaagaagggccctgagtgcccaggagtgccccacgttctgagaaggggccggccggagggaggggacccggcagggagatttcggttttgaggtttctaaatacattaaagttatttcttaag

SEQ ID NO: 24 - DNA, 1525 bp, Homo sapiens
ccgctgcgttctgggagctcctcccccttctgggagctcctccccctccccagaaggccaagggatgtgggggctgggggactgggaggcctggcagtcttcatgctgccctgctgctgctggaaggatggggatctttcacctttagggatctcagcacaattagaatcgtaaagtgaattctatctatttaattggatattggactctgctcatataagctacagacaaaagccaaaagactctcgctgtccctgtgctgctggtatttcattctctgtaacttcagttctggtgttttccttgagtatctacttggcttctcgtggtttttcccaccccagctgccccagcacgcgggacccatagcacaccccttagcgcttgcctaggttgctgaaaacagggaggcacctggtatctcgagtgcctgcagttgcaagtatgtttacacctggtgtccaattttgtattttaaaatgtaatccatttttacttcagctcatccaaaagcagccagcagaccggttgactgagaccggtctgtggctgtgggccccttggtgacccgctgctcttttggaaatgggtgacctgaagtgacactttttccacaattaacccaagttgtgttaatacttcaggtctgtttcccagacccagaaagctttacagaaaatcattgtaagacaatttattaatttgagaaagtcaccttgacagttctttgcacacaagttttacacctctctggattcgaagtttgtattgtattcatagttaaagggaatcgggtactttgcttgttgaataatgcactttaaaacaaggaaccgtatcaggccagcatggtggctcatgcctgtaatcccagcattttgggaggctcaggcagacaaatcgctctagctcagaagttgcagagcagcctgggcaacatggtgaaacccgtctctaccaaacagacaaaaagcagccaggcgtggtggcacatctgtggtcccagctacttgagaggctgagccaggaggatcgcttgagcccaggaggcggaggttgcagtgagctgagatggcaccacttattgcactccagcccgggcgacagagcgagactccatctaccagatccttatgacgcagctgatgcctgccttggttcctaccactctggtgtagacagaggactttgtccaagtctcacactaaacatgcccgggcttcgatgtgcctggaggatttccccacagggacccacgcacctccctgtatctgcgcagcttgctcgtgtggctggaagcgctgtcgataagcttcacgcactggcttgccagttcttcagctctaggacttgtagctttaagcaaacggtgtggcatgggttgagtgtggccacctgcaggatgtgcagggctgcctcagaagctggctggggactctagcctctgtgttcataaagacattaagaagtggatggatgttgttccttttttgaagttgtcattaaagtaggtgcaacaaccaag

SEQ ID NO: 25 - DNA, 213 bp, Homo sapiens
gggcctcgcctggctgcagcctgcgccaccgcccagagacccaagctgcctcccctctccttcctgtgtgtccaaaactgcctcaggaggcaggaccttcgggctgtgcccggggaaaggcaaggtccggcccatccccaggcacctcacaggccccaggaaaggcccagccaccgaagccgcctgtggacagcctgagtcacctgcagaacc

SEQ ID NO: 26 - DNA, 122 bp, Homo sapiens
gcccagccaggcccccaaatacggtcagcccagcagaggccggggcccagctccagaaccacccgcccccaccatgcgtcctgctctcagactcagaattaaaccccggtgttggcactgtc

SEQ ID NO: 27 - DNA, 1687 bp, Homo sapiens
cacgtacacaccacgtcctggtctttgtttgaggcctgacgtgggcatcattttaacaggtgccttttttgtttttttgtttttcgtttttttggtcactccagtagctcctggaaaaaaccttaaaaaatgtttcctccaaatctgatttcattacatttctgaattgttggggttttttttgttgttttgttttgttttgtagatggagtttcacttttgttgcccaggctggagtgtagtggcgcgatctcggctcagcctcccgagtagctgggattacaggcatgtgccaccacgcccggctaatgtttgtatttttagtagagacggggtttcaccatgttggtcaggctggtctcaaactcctgacctcaggtgatccgcccacctcagcctcccaaagtgctgggatgacaggtgtgagccactgcgcccagcctgaatcatttcttataccttctgacagcccaacttccagaggacagctctggggtactcgttggatgtctgtgagtacctggtcatacgggtcagtagggataagaattgtctctgggctgaggaattcttctgttctctggtttcaccagcgttgggtttgctcatgtaatgtggtcaccatactcaaatggtgtcatggctgaagttggccaccttgcttgagggacaagttgtttatgtatcagctctctgctgggtctccctttccatggcaaatgggcagctccatcctcttgactcttctaaatgcccaaaagaggtgtcatgctttgggggtacgatgtttatactccgtaaagaacatacaaggacattcactgctgatttttttttttgtttgtttgagacagggtctcactctgtcgctcaggctggagtgcagtgatgcaatcttggctcactgcaacctccgcctctcaggttcaagtggttctccttcctcagcctcccaagtagctgggattacaggcacctaccaccagggccagctaatttttgtatgtttagtagaaacggggtttcaccatgttggccaggctgttctcgaactcctgacctcaggtgatctgcccgcctcggtctcccaaagtgctgggattacaggcatgagccactgcacctgacctgctgaattgtttataatggcaagaaataggaaaccccccaatgtctgttgaacagctatcacgttgaaccacgtgaaactgctgttttctaggccaaaaatggtgagcgatcatttatttcatgattcaacctgatacatttacatagtgcaaaactgtgtcacagtttcaggcttttatgaggaaagcgtttctgtgtagaaactggaagctgttcagggcatcggcagctgaaccctgctccgttggtcagcgttactatcatctcggatcatatggagctcatgtcagccgtgtgggtggcgggtgcacagagacggtctggaaggaaacacgcggatctgaacagcagtaatcctgggggatacgggggttgggctagattacagagggctcattttctacgtcatgtattttatgatacttgaattttttgaaatgggcatttattttataacatgttaaaatgtactttttaaattaagtcattttgtaatatttgaatttttacatttgttgtacaatcaggaaaagcaataaagatttttcaaaaatag

SEQ ID NO: 28 - DNA, 1246 bp, Homo sapiens
gattccgttggtgaacctgtaaaaacaaaacaaacaaaacaaaacaaaaaagacaaaacctaaaactgagctatctaagggggagggtccccgcacctaccacttctgtttgccggtgggaaactcacagagcaggacgctctaggccaaatctatttttgtaaaaatgctcatgcctatgggtgactgccttctcccagagttttctttggagaacagaaagaagaaaggaaagaaaggaaccagaggcagagagacgaggatacccagcgaaagggacgggaggaagcatccgaaacctaggattcgtcctacgattctgaacctgtgccaataataccattatgtgccatgtactgacccgaaaggctcggccgcagagccggggcccagcgaatcacgcagagaaatcttacagaaaacaggggtgggaatctcttccgatagagtcgctatttctggttaatatacatatataaatatataaatacaaacacacacacacactttttttgtactgtagcaatttttgaagatcttaaatgttcctttttaaaaaaaagaattgtgttataggttacaaaatctgatttatttaacatgcttagtatgagcagaataaaccagtgttttctactttggcaactcacgtcacacacatattacacacatgtgcgcattacacacacacaatacacatacatgcatatagacgcatctattggaaatgcagttccacaggtgagcatgttctttctggtgacctggtattccatcaccattcaccccaggggacagcctcgaccgagacaaggaggcccttaaatgacagcctgcatttgctagacggttggtgagtggcatcaaatgtgtgacttactatcttgggccagaactaagaatgccaaggttttatatatgtgtgtgtatatatatatatatatatatatatatatatatatatatgtttgtgtgtgtatatatatatatatatatatatgtttgtgtgtgtatatatatgtttgtgtatatatatacacatatgcatacatatgatttttttttttcatttaagtgttggaagatgctacctaacagccacgttcacatttacgtagctggttgcttacaaacgggcctgagcccctggttgggtgggtggtggattcttggacgtgtgtgtcatacaagcatagactggattaaagaagttttccagttccaaaaattaaaggaatatatcctt

SEQ ID NO: 29 - DNA, 1889 bp, Homo sapiens
gccgcccccgcccgcctgctcggacagtttccgttccctcctagtctctgttcgctcgcttaagctgttttgaagccaagtgaagagtgtggtttgcatccaagagaaaacaccacactgtgatgtcatcgggaaatgatctcccaagtcgctgccagacaccacccactgcttcgccggacaatgtcgaagtccagtctgtgccggggaaggcactggttaggaaggatgttcaaacggtcccacccaagcctgtcacctctgctcatcctccaagaccacccagctttctcccagccacagccaagattcccaaagtcaaggcccaaagatttccaaggttcccaaagtcaaggccaggccaaggcctggttgggtccttggggcgggcagggccagcctctcctctgctgagaatccccacttggtgtagggggagaggggaaaggggtctggcccatcgaggggccccttctgccagggccttggttgctggggcagggcctccccactgggggtcttcctccacctcccactttccaagggctccaggaatctggggcctgaccacagattcctctcccatccttttctgctccaacctgccccactgggtcccggcaggggccatgcctaccaagctcgagctggcccttgacccccacccacccccacccttgctggcaggggcagggaccccagggggattgactctgcagtttgggagccacaaaaagcgtagcggtgtgatttctagctcagcctcccaccgtcttcctcctacacaccaatgatgagcctcatgccagtgaggcccggagcgcttgggaggggtcccagtggggcaggcccctctgtctggccacccctctgtcctggccccggaaggccctgtggtcatgtgctcctagctgcacggtggctgctggccacaccacggcaagtggcagcaggggccggccctgtgcacaaggatgcactcctctcggcccctgtagactttctctaaagccgcccgccagcccaggccgctgctctgcaccgagctggtgggcttgggttttgtggagcgcatgcttggaccctttcagtaaggaagggtctttggggttttctgtgcccatgacttgggggctgcacccccacagcacccccacaatgtaggaaaagacctcagggaacctctccctggaaagacgggcagggctggttagcccctcccactgcctgacacctgggacaggctgggcagaggggagagagggcaggacaggccagagtgacgcccccgtgcagcttgggccggagggcaagggatgccagtaagtctgcaggtgcggggtgccacctacaggcccaggcctgtgtcccaagcagtacccaggctttgcagaccacgcggggcagggctccactgaagccacccccacccctcgccagctagctccatagggaagcctgtgtctcctgcccccagggcgcaccctcagtgcaggcacctctgttcccgctttgcccctggaggagccactattccagaaggctccaccctgccgtcctgcgggagcctgctgtccagtcctggccgggccaaggcctgggaaactgtgaaagtcagaaaggccagcggggagaggctggggcgaggggaggagggggatcagcttctgctattaccgaccccccttcatgctgcccctggcgcctagaacccttgcccctcctcatagaccaagtcccgggggtctccactcagtcctgctgcctgcttcaccagaagcagccctgtgagtgtggggtggggaagtcccttcccaacggaggtcccagcctatggccctgggcccaggtgggggtcgcctgcttccttcccggacagggtcctgcag

SEQ ID NO: 30 - DNA, 1892 bp, Homo sapiens
caaatgggaccggtccccagggtcaggctcttagagcaggcacaagactgggacactggacagaaggttgttcccatgatggttttttttattttttatttttgagatggagtttcgctctgttgcccaggctggagtgtaatggtgcaatctcggctcactgcaacctctgcctcctgggttcaagcgattctcctgcctcagcctcccgagtagctgggattacaggcgcctgacaccacgccccgctaattttttgtatttttagtagagatggggtttcaccatgttggccaggctggtctcaaacgccagacctcaggtgatccacctgcctcagcctcccaaagtgctgagattacaggggtgagtcaccgcgcctggccaatgttgttgttgtttttaagacagaatttcactctttgttgcccaggctggagtgcaatggcgcaatctctggctcaccgcaacctccgcctcccaggttcaagcgattctcctacctcagcccccagagtagctgggattacaggcatgtaccatcacacccggctaattttttgtattttaagtagagagggggtttctccatgttggtcaggctggcctcgaactcccaacctcaggtgatccgcccacctcggcctcccaaaatgctgggattacaggggtaagccactgtgcccggccggttatttctttaaaaggtaatcatttgtcaagagtaaaacccagaagctctgacaggccataatttcagatcctttggcttgggcagttttgattttccccgtgtttgcatggcatgaagtcttcgtccttgtcacagtagcttgggatgactcccagtccacatggaaaacatcagggagtgacaatccagcaagaaatccctcgctagttccacacctacgcaccgagcgtcggtgtgccaggccctgtgctgggcagagtgtggtatgtcagggtgtgccggttttaggtaacaagactccaccactgagtggcacctgccctattgcaaaggaatccagttcctccggaataacagtcccactgttaacctggtgctactgggaagttccacacagtaatctgagcagtgactcatggaaggatgaggaacgtttgctccagcttctctccctttccagcaagggcagagctcctaaagccaggggttagcacctggccagcttatgtggcagatggtctcagttacaacttcgctgctttcccaaactcctgcagccctcctgagtccgacttccgttgatagcaaggcactgggtggcagcaaccttttttctagtagttttttcccagcagttttccatttctccacagtatccttttcatttagaggagcttaataaatgctttttaaaaagtaacccacgtgacgtaaaattttacaagtttttgtggcaaaatgatgcccagatagtcacatttaagcaaatattcagcttgattcagtgattaacagcaaatgggtctacgtgctaacatggcagcacattcaacacataacacatcactcacattgacgtccactgtccctgcacctgctacttcaggggcactgaggctcctgttccaaggccttacaaacctatgtggtggcctgcagggcaaaaggaattatcattacaactggttagaggtaggaattcagaaagaaattgaggaggccaaacacacgtcgtttgaggctaaaggcttaagacgcttcttacccaagagtgacctcagagtttcacatcccagacaatcacactgtggttgagtgaaatcaagtgcagttttatttaagaactggaaagaataatcagtatctgtgaaagaaaatccaatttagaatatttaaataaacatttatgtaaaaagaa

SEQ ID NO: 31 - DNA, 71 bp, Homo sapiens
aggcgctccctatttggtctcgcgacacagggactattttcagcacgcccacagtgactgccaggaccccc

SEQ ID NO: 32 - DNA, 797 bp, Homo sapiens
aggccgcagactcctgtccgcagcctcgcagctccgtggggccctccgccccagccccagccagccaggccctggtggaaaggctgggagccgcacagccctcccctcctgcgctggaaaccctccctgacccccaccctggccccccgtatccccagcccttggcaacactggagtgcacacgccgccacggttgcccagaaaaagtgcccaagctgctgacgcaaacaacaacaaatgctgcttatttgcatgccgacttacatatatttgcatgttcgttgactatcaaagagtgcagagctctccccagccccgtgggtggtgactttgttttcctgcggggctcagccccctccaggatgcagccccctcccccgcaccccggaaccggcgtcgctggcgcatcctgggtggaggcaggccccgagctcggggaaggggttttcccttcctctctgacccagatctgcgcgcggcctagcccgggcctcatttcttatccccgccaagggtttcctctcagtcatttgtttaccagaaacatgaaaactgcctgtctggccgggccgcacttgtggcccccgggaccccacctctggccccacctccctcaagtctgcgccccgtccccagccagacccactcgctgccgggaccctttcactgccccggtggagtgaatagaggatgaggggccctgaccctgtgtctccaactgctgcaccccatcccgaccctgtctccgccacctcgcagccccattaaagcgctctcatctgggctccggttcactc

SEQ ID NO: 33 - DNA, 921 bp, Homo sapiens
acacccctgtggtgaggtcagcagggggccgcctgtgctttcttatgctgggctccctggcagcaggtagtggcagcctctatggcttctttggggaacccacaaggcctgcgtgcttgctacgccaggccctctttgcccttggtttcaccatcttcctgtcctgcctgacagttcgctcattccaactaatcatcatcttcaagttttccaccaaggtacctacattctaccacgcctgggtccaaaaccacggtgctggcctgtttgtgatgatcagctcagcggcccagctgcttatctgtctaacttggctggtggtgtggaccccactgcctgctagggaataccagcgcttcccccatctggtgatgcttgagtgcacagagaccaactccctgggcttcatactggccttcctctacaatggcctcctctccatcagtgcctttgcctgcagctacctgggtaaggacttgccagagaactacaacgaggccaaatgtgtcaccttcagcctgctcttcaacttcgtgtcctggatcgccttcttcaccacggccagcgtctacgacggcaagtacctgcctgcggccaacatgatggctgggctgagcagcctgagcagcggcttcggtgggtattttctgcctaagtgctacgtgatcctctgccgcccagacctcaacagcacagagcacttccaggcctccattcaggactacacgaggcgctgcggctccacctgaccagtgggtcagcaggcacggctggcagccttctctgccctgagggtcgaaggtcgagcaggccgggggtgtccgggaggtctttgggcatcgcggtctggggttgggacgtgtaagcgcctgggagagcctagaccaggctccgggctgccaataaagaagtgaaatgcgt

SEQ ID NO: 34 - DNA, 67 bp, Homo sapiens
cccattctggccaccagagcccacttggccccacccctcaataaaccgtgtggctttggactctcgt

SEQ ID NO: 35 - DNA, 2359 bp, Homo sapiens
ctgctggctggcgaggaggctgcgagcgtggaatcggaagcgaccgcgggcttttttgcccttctcttagttgagcacagaaccctcagctctggtgcgggcagatccctgccatttaggtgcctaagcaaaaggacaggctgtccaaggtagaaactgtacatagccggtgaccgaatgcgacctttgccagccagagctgctgccagagctgcgttccctgcagtggaggtggactggacacccacgtgcagcgggtttggctcatttgaaaatgagggtccgtggtagctgtgcgttttgctatcattgctaagagattcccgctgattgggctcagtgccagctgttattctgcttccactgtgttggggagaggtgttcggtttccccagcctgttaatgaacagccatacgtgtaagctttttcttgagtgttaagtcttttaccaaaagtgtctgtacagcagccatccaagttgcccctacttagtggcttgccctctgcctgcctcagctgctgcctgaccggctgggggaggcactggcgggaggcctcgggctcccctggaagggcgctgggctggcgggtcagctggtggttcttaggtttccttctgtttgttaaaagggacaatgtggccacttctctgtggaaagggagttggttggggggttgagatggcccgtgttcataactcagtttcctgttttgcacgatgtaaaaaccctgtctttttgcacgatacagccaaaagtattggctgatttcttgctgagtgccctcttagttggtgtgtgaggtcttggtgggctcaggccagctgtttgcgagtgtgggaactcataggttctgtctttgtctcttcctttcacctcattctggtagcagcataaaggttaggcaatcactgggacccgcatggtgttcctccaaagaatagggtaaaggagagctgggagggagccctctccgttgggtgactcttgtgtgccctttagacaggctggcctgccggttccacagggtacagttaggacttgagtctttctttttctgttttgagttggtgagtgagtgatagggtaacatgggccttcaggatgaccccttggaactgtgccgagttccttaaatctcagctgggatcctggacctgggaggcccctgtgagggccagctctggaaaaacctgggagttgatgccggaggctgtggaagaactctgctcgagggcagggtgccctggaacactggtagttctggggctgggagggagaggggctccggctttctctgaaatgaacactgctcttcagcagttcaagtacttgttctcaaaacattttctaattgattggtaggttttcataagcattgtttctttaaggcatggaaagggaagaatgctcaagcaagtcatgtttgttttcagtgggatgggcccgcgttctcactgctgggggcttccccttcatgtggcacctttgtgccaggccaccaggcagactcttcccaccttctcccactgaagcaccaaggggcttgaaccgtaatttggctaatcagaggcattttttttgtcctagtatctttcacacttgtccaaccgtcttatttttttaaaagttctgttgcttgtattaacacgaaactagagagaaatagtttctgaagccagtttattgtgaagatccccaagggggaggttcggtagagaaaaatagtaagctggtttagaaactgacgagggcaaacagccaggacgcattggagaggaatttgccaaagatctaccctgagataacgcctgtccagtgtcttcaccacgtgaataaccagcgctccaaagtgtttttctgctttgaaaaaaaaaaattccacaagcttttaaaggtgcatttaagaatccatgtgactttagaatggaactgccggccctggcaactgtcacgtgtgctagaaggttcgatgcctctggaatgcatgtgatactcatctccattttgtttccttgattgcatttttgttcttttagcagatctgtccctgtgggtggtgtctaagaagtcggacaccttggtttttgtgttagattgagctgggcagctgcaatcagcttctttatatgcaaattaggcacgacccatctgtggttcctggttggtggctaatgaagtgaggggagggagggatgtcaccccaaaagtaggccctcccattggctttggccaggccagacacttcacatcgtttacatggttctgtgtaattttaaagtttatgtgtataaagcgaagctgtttctgtgaaactgtatattttgtaaataaatatattgctactttgaggttcatg

SEQ ID NO: 36 - DNA, 1497 bp, Homo sapiens
aggatggggaggaggcctctggggaaggggttccctccctcctgaagatgaacacacaatacacggaagagcgccagcctctgctttcaggaaaggtttattgtggtgagtgccttctgtacagtcgactgcaaatgaaacgcagaggatgggtgcccagaagcacctgcggcagaggcgcacgggaagcccggggcccaggctcatgcaacacgacgctcaccgcggctcgggccgtggggccgtcagagaaacctttttaaaaaatggagatgaatgttacagaattggacaacccgaactgcttttcaaaaccagaggaaggaggttcttagccgttactcagataccagtgctggggagggaggcctgacttcagcaacagctgtgggtgggctggaggccggcgcagcttggggccccccgcgccagctgtctcagccaccacctgtgcggcgcttgctccgaggggtcagcaagagcaactgatggctgccacttccaggccccgagagacaggcctcacgtaactttactgcagccgaggtccaggccgtggagggggtcctagctccgctgcattctgcatcccaagtgggcacgtggaggaagggtctgaaggaaggctccggagcacaggccctggtgttcctgtgaggacgctggacctgcaggagcggggagctgcagtgccacctgctgggtaccacgggccgggcctggggtccacgcctttgggttgggtgtgtctgatgtcttgccaagcgcctggtcctgtcctcttgagctgcccttgcccagcactgcactctggaggtgggtggtgcaggcggtggagggacacaggccagctcaagcccgctggtggcagggcgttttcccaccgggatacgggaagccacctgtgtcagggctaggccctgggatcgggagttacactaccctgtcccaagccgagggggccggtggaatgacttgagcagctctgggagtggggaaaaaagacgactaatttccaaacccgtttgttctcagataaaaagcagttttataaacccgcaatctgctccagattcaagcagtaatatttcagcaagaggaggtggtcatgggaagccagcacagcagaggctccctgaccgggaggcctgcctgcttttcaggttgtttcccatgttcagcgtggactgcagaagtggctcacgctcctgtggtgagggcagggtgctccacagacacctccagacccagccaagaactacagggcggcgggctgcggtcagcacgtgtgctcgggacacagcggagtcagggccagagcccttccctccaggaactgatccttgggaaaacagccatgggccaggctgcagtctggttcccagtggggctgcctcagtcctacccccagcaccctcaaaagctggggtgtctgcatgtcccttcacataattgataatggtaccaccttctataataataatataaaataaaaac

SEQ ID NO: 37 - DNA, 3212 bp, Homo sapiens
agacatacagcagcatcccttagcaatgtgacattgcttttcagactgttttcatttctgtttttagcagagacatgcaacaacaacacacacgcacacacgcacacacacacacgtacacacacatacaaaatccctctgcagttttggggagatcagctgcaggattttaacaggaatgttttggtcattgcatttgcactttcatggacaacttttaatttgatcagcaagacatcttggaactcaatcttctgttggatcacgggaaatcaagacacccaggaggaattgaaagaggcttcctcttctcaggaagaagccatttccttctcatatagggctgtattcaaacatcgtgtggaactgtacaaatatttataccaaaaatatagataagaaaaggtggggctatactagcaacaaaaaaagaatgctgttcctgcacctgccggttatttccaagaagctgaatctttgggactgattctcagtggagggcttagatcatacaaaaatctttattgggtccgtgtgttctcatttccttcactgtttatttttgtttgtttgtttgtttgttttaatctctacagcacatttaatgcaacttttgaaatctgcaggtttttaatgtcttgtggaaatttgcagaggggcaggtgtgtggtaaacgggtaatgcatgggaaataatgagaagcagctcacagagtttaaactattttcttgtccccaccaccttccaagaacctgcgagggtagtaatcatcttgtcccctttttcatgttcagcactttaatttttttgccttactttcatgtgcaatgagaattacttaagaattggtaacgcatgtagccttttttagtaaccttggaagctgtagtaattctaaggaatcatgaaccttgcctggacatttgccacctaaacgatcagtgtggtgctgcgttctggccagtaaattccatgtttttggctatatctcatccaaactgagcagtttctgtgtatatatagaaggtagaaatgaaaagtgagaaaatatttgaaagggattatattaattgctaaatattttattcacaaaggtcaataacatggcaagataaaattatttgtatagttttgtctgaatgagcgagaaaaatgtggatgtactgtttgtatatattgtatatattaaaacagagatatgtgcatgaaatcaagaaaaaagaaatgaacaaaagcaaagcattagtggctatggtctgtaaaatgaaacaaaaaaactttatttcactataagagtactttattttaaatgttctttaggagaacattttgctaaagcatgactaaactgcaaaaaaaaaaaaagagctactgtatttagacttaggaaaaaaggcagagtaacattacttaaaaaaaaaaggatatgtttacatttaattttggctaccaggagtttagtttattttatttaaaatttttttgccaatggtgccaagtaatgtgaatgctaatactgcttaagaaaattaagttacttttgcaaaacagataatcataagatgaatcagtatgtagcttaacaccatccactcactccaacaaagaacacttagaatgataaaaaaaaaaaaaaaaaacctgacaaaagaaatagtatgaaaagtagaaaaatgtcacgtttccatatctcctgctggaaatcagaaaatataataaaattgcacaaaaaaaaaaatgaaaaagatgcagactggtcttttagagacggcatggtatattactatttccacataatgaggagccaaagaaatctgatgtttttaacaattaaactgctaatgttaaattgagagaataaagttcgtatttgctgatgccagtttaaaattcccaggttacgtctgaggatcagttggtgtaaagctgagatgttttttcttggttctggctgccaactgtgagttaaaactcaaggcttgttgtgaagcctaaaaatattcacaaataagcttttaaactggtgtctttggaaggaaggtagatacaaaaagattgtggtaaaaactggggtcagtgctcttggtgccttttctataattgtacttgttttttaattacttcctttcactgccaacctcgaattactgtacagtatatgtctttctgcttgtgatcagctttgacaacagtgacagccccacaactagtagccacctgtacatttgtaaactgacctgactccattttgtttttaaatgtgtgggttatgttgcagctgttgcagtcccccagatacctattattttacacaatttgacctataggaggacactgagtaatttacaaacacaactgcattcataaatgggaatagaacgtgaaagccagctctttcagaatatcctctattaatactgaatttagatatctttattccatttattatggtacaaataactgatgttttaaccagagtaatgacctcagtggatttgctttaaccctcacattttttttttaatgtttcacatgttacattattagctgaatacgttagaaaatgacagatggtagagacttccatagaattaagagggttctcatggaggggataggaagtaggtttaaagcctaccagtgtaacctaccagtacaactgtgaatcctaggcaaggcaaaaatgcacttccactgaaacgaagcatttctgaccgctttttcttggttatgaatcttaatttcgaatataagatgataggtaagcgcagctttcttggataatctgaattcccaagtgccaggagtaggatttcattataaaattaatagctaatcttattctatctcctgaagatttaattgctattgttacccattcgaaatcagctgtactgtgtgaacgaaataaagacaataatacgaacccctctctggctgcacggtcgcttatggcagttccacacagtagttggcgcccaatggggggtccctgagacttgcatgtaaaactagtctagatgtcttctttttttgtaagttttatttttgtaattgtgcatgtaaagcatcattgaatcaatggatctgttgaagaactcagctgctggaaaccatgcaaaatgttttgaattgcccttaaaatatggaaaatgttttctgaatgctttatattctttctgctgtaaattaaaaatgaagaaaatttcccc

SEQ ID NO: 38 - DNA, 1786 bp, Homo sapiens
agaaccagcggaactcaaaactgctgttcaagaaacctcttcaagacttttgacttagaacctgctatattatcaagcttacctactgttatctctaaaattttttttgtgttaatgtaaagttgaatttctaggaaacgtgcctttgttttttaatatgcactccaaattagaaggccggccccgtccacattttgcacagtgcctttacagatttacgtatgggctgatgaagaggccttcttaagttccagagtgctataatctagatgtaatgttgtcactaattaattgccattactcccagttagttacccttgtcatttggcattattttcagaaccacattttaaacctttgggtaatcagatttccaacttatgccttccagaaaaaaacactactgcctaacacaaatctgtgataacaacaggctgtgccttattttgataattttctgattccctagaagagaaccctctactttttgtaagcactactgactctcgctgtatttaagatgctggtgaagagcttttgctcttgcattagatttgaagatgtttacattgttgttattgttatgtatcacttgctaaaaatattgttttaatcagagataacctctttaaaaaaatttttaaagaactatggctatgaccaaagcttctattttgccaaaaagttaaataccgataaaatggccttaagtgtattcctgacagttaaattcagaaacgtgccaaatggaactcaaggtgccccttcagaattaaaatcattaccttgtgtgtgaaccttctacatcttcataggcctttcttccttttgaaaggctgtagacagtgtggctccccttctgattcagtattttgcatgggggttagagaaggtttgaggtagactctgaccgtctcataaaagagttctacccagcagttggcagattatcagctgtggactccagcatgtttctgataattatgcaagcaacaattctgtagcctcaagtaagaccacctgtgaacttgatcattatctggcccaaatatgaagataaactataactttggagtttgtttcctatttgtattcacattctgcttcctaaatcagttttctaaattatgcctgcaattaggcattggtcaggggtgaatggctcttttcacagagagtagccaaccagagacctttgctttgatatcatcaactgcagagaatgctgttgatgggaatgctggaagcagaaactttgtcatcggaaaaacttttcttgtatgcatgagactcaacatcaggatccacagcttaaagatgggaattcaggtatgaaagaaaacaggcaaggaggcactgagggagaaagacacagactttatcgctctgtggctcattgttactggaatattctaaaactcttgttcacatgctattatgacttataaagcagcaacagctgaggcgcaccaggacacagcttccatttctttaacgtctgttcccttaacatcgctgaaatgatttactgttgaagagatgccttgcggtgtggccagctgtgaggagaaagcagctggcagtgttaggacattagtccaccttcagcgcagggtctctggccgggtctgactcagaaaccttggtactcgccccttggccacagtgcccagacccatgtaacccactggctcctgcattaacccagaaatacctcgcttctatctgtgcacttagctgggaacttacccactgtaatcacctaaataaagtgtttataaacatg

SEQ ID NO: 39 - DNA, 2421 bp, Homo sapiens
gtgactgtgaggatgaaccttcataccctttccaagacgtgttacacagacagacctttttaagtcctggacttttaaatgaccatgaagttatcattgaatgttaagattttttcttcttgattttttaatacacgtaatctttttgaagcagacattgtatacagaatcttacttctctttgttcctgatatattaaaatggccagttaggctctttttgtagttgaattgtcttctaaagagattggatggcctctaaagaggtatgtgtatctttatttcagatgtcacccagagtaaattataattagaagtatagctagaatgagccccaaaccttagcctcatttattttgttctgttacataagtcattttccccttagagtgcttgaagaaatgccacctacaggttgtgtacttttcataatggtttccatgaatgtagtacgttcatacaggcttcattcaacctggcgttcccctccataattaagatgaaacattccggttttctcacaacacattagcacatactgtccattagcatatctgggataaccaggttttgggggttgagttttggccttcatccttgtagatccctttcctattgatttcccaccttccagtgaaattctgaaagtcttatcttaaaaatcgatccgcttaccatgggcctattcttgtaagtttcagttagcatttgcatgtgtaatattaaaatgaaagagcttcttacccagtgctgttgcccttttgagtatttttgtttttaaaataatgattgtaaaatgttttacaagtaatgtaaaagctagtatcattcttacatacttctgtgtttaaattttcattcttaccaaaacagttaactctttctttccaatcaatttatacaaaagaggtcgctccagccctaccacaggtctgactggcactgccttttgtttgcccttgaacagggcagtgttgtggggactgcaaaagagaaaacgtccaggcgagcccagttgtcctcgcccacagggtcctgcaggctccatcagtcaccgctttctatggcgtttgtagttgtgtcttttaagaagtgagtgtgattgtttacttgataaatcagctcactctctggtgctttttagagaagtccctgattccttcttaaacttggaatgatagatgaaattcacacccctgcagatcagaaaaaacaaatagaagaaaatgagggttacagtaacctgttgtctttatataacttgcaacaaactaatttatttttttttcctttttttgtttttggttttttatggttttttaaggaaaatacttttctcctttgaagttttacagctttttgtaaatgcgtcctgataatgattaggaaaatcgaccttttcatccatgatgaccatcctcatagctcagatctcctttcaaagtagtggctttctggatggtaattccatcttaaggtgtcagaactattttcaaatgctgcctttgacagttcttggaattttctgatattaagcagttccatgcaaatattcgtgttttataaatagctctcatagtctgctccatcttgatagttaagtgatttctgaagcgtttgtgtgtgtgttgatcaggttgtgtgatatttttgcttgatagagaatcaaatttgaaacaattaaccagccagtagattgtctgtcagtgaccttctgtagtaataaagtttttgccactgtaaataaaaacagtatccgtagctatcaggatcattgcgcactcatatatgctaagccttctgttctctaatagaagcctttcttttccattgtttctggatatttgtattatccaaatgtgcttatttctttgccttagcacacgttttatggagtacttgttatactaggtttgatttgaaactggtgcttgtcgcagaactgtcagagcatgaggagcgctcctcctgtgggtggacgcattcacgcactcccaggttgcacctgctgctggcggtgagcagggggttcagcagcttgaccgatgccccccgagggggctctccccagcttaaactttgttgtttaaatttgttaactttttatattaatgactattgaaagtggtaataaaaatttatattataggcttcaatgttttcatgaatgttacccaaaaagctgtgttttctttggtcagaggtcaaaatttatgaaaaacaaaatgctgtatgaatggaaatcattttgcaattgagtgacacttcattgtaattcacagtgtaaatttaatccaaactgaaattttgtttcaactgaatttgtaattaactctgaatttgtttttaatcattagtaatatttcagttgggtatctttttaagtaaaaacaacaaataaactctgtacatgtaaaacgtg

SEQ ID NO: 40 - DNA, 222 bp, Homo sapiens
agcagcgaactgcgacgatcacttagagaaacaggccgttaggaatccattctcactgtgttcgctctaaacaaaacagtggtaggttaatgtgttcagaagtcgctgtccttactacttttgcggaagtatggaagtcacaactacacagagatttctcagcctacaaattgtgtctatacatttctaagccttgtttgcagaataaacagggcatttagc

SEQ ID NO: 41 - DNA, 383 bp, Homo sapiens
ggaaagctaagaggaagattcaatattaactagcttgaagcctgacctagccagaagtgcctgtccgctgcagccgcaccctaccttgtctaagaaaccatgtgtgtctggaacacgctgctccccctggggcagctgttgggattctgattaaaagaggggaaacgatcatcctggacaggaagtgagatggcttcagttcatgagacgggatctgagttagacatcaccagtggaaattgattggaatagaaacttaaaggaaatggaaccctaactattctcccatcaaatcatatatgttgacctgtctgaattataaaccagcctgacctttcctttagcattagatgtaataaaataactttggaaatttgtcattt

SEQ ID NO: 42 - DNA, 6464 bp, Homo sapiens
gggcgcctgtgccccttgcccgcttcgctcctgtgctttccttcgcccgtgtcttccctcccttctcggccccgccacctgcccagcgtgccctggctctccagaaccttctatcccacagtcaggccccagagagggcaggacaagccttgtcccgatgcctttgaccggcagctctgtgtattggtggatagatgcagaaacaaggaagaaatggagtctgctcctgagaagcttcaaattcaggccaggagagaagtcttaagaaaagacctccagcagttacacattcatatcaaccagcacaacacgggatggcgcccaaactccggcgttcacaagaggagacgtgacgtggtgggctgaggttaatcagggaaggtttcctgggggaggtgatccttgaactggctcccggggaacattcagagcatgattggtagacagaagggtgcagaggcgcccaggggagtacattgccccgtgcaaagcaggggcattggggactgtcttgagaccctgagggggtcaagcccctccttccccagctgcccctccttctagaacctctgcacatctagcctctggccctcctcttcactgcctccacctgctcccgcttgccatccctgtctcctccatcctggctgtgcagtaggaattccaggctcctccctgtgtctttgctgttcttcagactccatttatagagaatgagggctgataacaggaatacagtggcaaagactagactgtggaaagggttccagaaatcttttttcttttttaattaaaaaaaatatttgcagagatgagctcttgctatgttgcccaggctggtctcaaactcctgggctcaagcgatcctcccatctcagcctcccagagtgctgggattacaggtgtgagctactgcgcccagccccagaaatctcagtgctgtttggagctccatttctcatttgatgacttgctctgcgtggggaggtggggtctcattcccccaacttcctcagggaggacccctgccctccgctgctcctctgtcctgctagccttcctccaggaagcacactgggtgcagataatcaggacattccagagatccccaatttaagagggtcatttccatctcaggggactcccggatgggtgtttccgctctcaatagcccctcttgttttaccaggaaagatccagttaaatcacccactgaggtgacagctcattagcggggagagagatggagcatcgagtgacactgggccatccaggcggctctgctcccaccagacaggagctaggcctcactggcaggggggctgcccacagccttttcaggggctcgcttggcgggtgacggggccgcagccaggccttctctccctgccccttggtgaccccgtggcttcctgtctgctggcctctcctgctacttatcacttcaccacgaactctctgcctgagactggggaagtaagcgggtatcttctcagtgagcataggttggggactgtgatcttgagaagccatgggccagcaatacctgcttttctgaagcccccaaggagggctctgacattctttttaaaaacaccacaaagcaaaattcccaggacatgtgtagttttgtttgttcagtatcccacaacttaaggctgggagatggaactcttggttaaggtcgatttttctgtctggcttctccgcaccttccacttgctctctggatcaggcagatataaactttctagcgcattttgagagagggctttcttgggtgagggagcatggcaaagtcggtttctctctggactgtttacacttcaaggcggtggatttagaggaatcctggctttcattttcaatgccagtctgagacatgttcccaagccggggctcttgttcacaccacttactctggccaccaacaacaacccaggccagacagagcatctcttttttttttttttgagacagagtctctgtcgcccaggctggagcccagtggcgagatcttggctcactacaacctccacctcccgggttcaggcaattctcgtgcctaagcctcccgagtagctgcgactacaggcgccggccagcatgcctgtctaatttttgtattttagtagagacagggtttcaccatgttgcccaggctggtctcgaactcctgagctcaggcagtctacccacctcagcctcccaaagtgctgggattacaggcgtgagccaccgcgcccagccagaacatctgtttttacacccagagagcgcccctcgttaggacagaaccacggtgcccagagccaggaagccgccctcctggcgcccagcatctgagcttctacacgtgatgggcgggctcaggagaggacagggagtcgtggtggaagttccacagctggccgcgtgggggggcccttgcaccgcactgccgcctcctgactgcccctatccccgcagcccctgtgccggatttcatttccctcctctctcccagggtacctggccccagcactctcccatctgttcttcaggaaccgactcctctccagttgcaacaccagggagaaaggggcctccacatgcccaagtacccctgcaggatgaagggcaggccggcccttgatgtgccatttctgaataatagtcactgccgccgagtctaggatgtcctgttctaactcagccctgcctcggatgcaccaccgatctgtgcagagtgggtgtgggagtgtgggtgagggtcgaaatgccaaaggtctactttccagaatcaagtgccttctgcaaatcatgttggaaaagtccaaacctggagatgtccctgtgcctccgcccctacccaccccttttccttcagctgtgttaggaaggagaagttttcagaaccctctaggctggtggctttcaaacttcagaccatgatctgcagcaagaaacgtgccttccatcataaatcagtccatttgtttacaactgtgttccaagcaggtttcataaagaaattcttaaccttagaacctcggatatcctctatgttttagttttcatttttttaaaatgcttcttaaaattcactaaattgggctaggtgtggctcatgcctgtaatcccagcactatgggaggctgaggtgagaggatcacttgagcccagaaggttgaaaccagcctgggcaacatagtgagaccccatctctacaaaaagttttaaaaccaggtatggtggtgccctcctgtggtcccagctactcgggagtctgaggtgggaggatcacctgagcccaggagactgaggctgcagtaaggtgtgattgcactattgctctctagcctggaaaacagagtgagaccctatctcaaaaaaaaaaaaaaaaaaaaaggaaagagtgatgacaacagcccagggagcagccccgctcagaacccaagtcccaagttccagcactgtgttcccaggcaggctgtttgcctcttcctggtctggaagcccttgggtcctatggtggcggcagctcccacagtccaggttccctggtggggaccaatgattccatccgcatggaagcccacgtgtgcacttaggggcccataaatggcagaagggcccctcctttgggagaccttgtcagtcagcatctctagggcaaccgtgattgccatttgtagaggggaaggaatcaagggactttaagctagatcaaaatctggggacaaattctcctgctaactgcaagttaaaataggcccttcttactgaatttccctgtttgtttctctgcagacaatgctttagccctactcttgggcccccaagttagcagagtaatcaaagcttcctaccgtttggcctactattccagactagtccctcgaggggttcccttccaaaatatgcagggctcaggctcccaattccgggcctgtctgctttgcttgtgtttctcctgtccctgttctcccggagggcccaggtggaactcacgacagggagggagacgcttcccaaaaacctgcagggctatttcccagaatttggttttcaagtacaaaactttttgtcctgtaagatatatgcagcctcacagaagcagcctctgcctccactttaccagctacgtttttatcttaagcacatggggctcccttagaacttactccactgatttaaaaaaaaaaaactgcctggcagcatctcagtgtcagagtgagcacggcacaggaaaggcccgtggtgacgagggtgaggtggccacagtgaccggacgacaaatgagactctgcaaatgagactccagagggtgaagatctgcggtctccagacatcataggccatgtgacccactaggggccgcttacccctggccgtccgctggctgaactgaacgcattccctctctccgcaactctcccgtgaggctgcacccgtgtgggtagcactggaagcggcactgtttgcattgtacataggaaggaaggaagttcttccagcctcaccagcacctggcagcgagtcagagcctgtgagggcatccgaagcagtgatgcagtgtcaacctcccagctggtgccactctgccctcgggggctccaagcattgtaactcagtcatgggagctgcctctttggaagtgcagatttattcctgtaataatcctgcctgcttttacctctcgtccactgaccagcaagtgtgagtcccggtgtcagtcggcacagtccagtgtccatctgcatttgctcatgcagagggggtgagttgggcactccctgttgttggttttccttttgcagcacactgggcagtctccctataaaacaaaaaccccaccttctgtgccttctgctttagagcagagctccccctcccatttcctcagtcttccctgcaaaatctgtccaccggggaaggcagcaggaaccctgggcagcgggtgttctgggaaggctagtgacagcagatgtcatccaggaacagccacacacggttctccaggccgccgtcagcagctcaaggtggggtatgagtgagaagctgaggatctcgcagcttgttgctgagcaaggtgcaaccgggctcatgctgtcatcagcacaagacgggatggcaagggctttcagacgcatttccaagagtccagcaagccagggggaagatgatccctttgccgaagtgtaccctctagccaacttttgggagcgcttctgtttgcaaagcgctggggatgtgcctgtctctgtgtgacccacgaacgggaagggagagcactggagtaatgacacttctgctgctgctttgattctcaaggctgatctttaaaaccctcgccttgctgacaggtgctttaaaggcagtctgcatcttttcttcccttggtgtgggagaggtaaacactttgatttgctgaaagctgtatggagtatatttgaacagctagtagttagctttgaaagtggaagtgtgaacagacactacttgtgtcgctttgggtccttcactttacccccacagaagtctagaggcgtctgttataaagcgttacggggcgcctgcatgcaggaggaaggacctgtattagctggaaatcatcaggaacccagcttgcctccatctctctgagatgtgctgggtacagcctgcccctcctagttctgtccaccgggaagagccggctggcggcagatccccaggggcagagcccctgctggatcctgggagctcatctttacctgtgccggagtgggaactgtgattccagccgggcaggtcagagtggagcagtgctaagaggctgttgcaggagaactagacgggcggggcctgctgcatctggatcatgtttctgtgctctgccccgcgctagggactcagggtctgggcttctgccaggtgaggagcagagagactgttcccttgggtggagaggtgtgggcatgagagccacccattgccaagcagcaagaatgttcgtgcttttttccagagaggggaaccccactggtttttgtggaaacaatggaaacttacagatgcctgcctgggatgatgaggcacattcagaacaaatgcttttttttttttgagacagagtctcgctctgacgcccaggctggagtgcagtggcgcgatctcggctcactgcaaactttgcctcccaggttcaagtgattctcctacctcagcctcccgagtagctgggattacaccaccatgcccagcaaatttttgtgtttttagtagagacggagtttcaccatgttggccaggctggtctcgaactcctgacctcaggtgatccatccgccttggcctcccaaagtgctgggattacaggcgggagccaccatgcctggccagaacaaatgcctttttaaaccttttaagaacatttttaaaatgtctttttctatgtcaaatgtaacgtttatttttttaaacaataaaattgatttgcc

SEQ ID NO: 43 - DNA, 1954 bp, Homo sapiens
cgttcgccatcataccgccagcgcgacagccacctggtgccaactcactgagccgcctgccgctggggccgccgcaccctgcaccttggaccggcatccgtagccatggacagaggtccctggtcttccctcatcctccgtggctgcctccatgggacaaggaccgattccaacacaggctcctctttcccccttcccgacatcagcagaaggcagcatccctgcatgccgtccgtatacaacccctctttgaaaaaagacacagagaataaactcctacgaaagccctacattgagctccaatctgctcggggtgggacgggtgcttcccacacctctgggagaaggctgcagccacctgggggtcccagggtggtgggggtggcaggtggtaccacagctctgagagcagataccaggggtactaagaggtgcttagacaagggctggtgcccggcccagggtgcccagcggggccatgccatggcagataaagctcaggacgtcaaaaactcaccatggaccccaaggcagaaaccaagaactgtctgcaggcaaataagcacccagcacccatcctggctgccggtgccccgtaccctgtatttattcttttaacaataacaaaagccatttatttattccatctagaaaggaaaccctgtttcagtcccctctctctggctgttctgttactttccttccacctgtgccctccctgggatatgtatgcctcgcccgccctccctgggcacatgtgcacacgtgcccaggcacaagtatgtctctgggtcccttgccctgcagtttccagggggctctgctccaagttccctagcgggcccctcagggagaaatagcctcacgtgcaatctgggtgtcttcgggggcccgtctggaagggctgcagcaattcccctgtgtctccaggtaaccagctaactcttgggctcaggcacccttgcacagggttgcatttctttagtcttctgtgggtcttttgatgtgggtttgattttgcttttgcttttctagctgagatttcccaagtgcatcctcagaagctctgggtgtgccagaggacccccagaactaagaagggagggcgagtgggtctccattccccgagaagccgggggcagggtgggatggggaagaccaggagcagagtcgagcctcacagaagccagcgcgggtctctgctcagcaccccagccggggctctggacccagggtaacagccccagttcatcccaacccctctcagagcctcaagaggggtagctcggctgccggaagagaggggtgccctatccctggcaacccctccacgtagcgtaccccagcacctgccaccgcctttgccatttctttgagcttgaagttaactctcttagagtctaactttggttcatttctgcacaggtacaatagatgactttatttgtttaaaatgtttaatatatatacatacatatatatatatttgtctgtaagaattatgttttaaacagctgctgtagagtacctttttttaagtaaatcttacagtggagtatattttttaaagcacaaaattggtgccaagactgggtgagaaatgtacattacccccttattattttgacggttttttttttcggggcaggggaccttacctgtaagacttttaaagattttcctccctcctgtttcaggtgggtcacattctgatgaatgtttcccttgtacagatcccagcttatggccttgacccagccgtcctcacagatgccgggtgaccctctagctctctctgcatctcccaccccccgacaccctgggaccctcgaccccacccttctttcctaccagcccagagccttgtggcttgtacagttttgaaactcccgttctattttatgatggttgataatagtcagtaacctaataaaggaacgtttgttaaaatatc

SEQ ID NO: 44 - DNA, 271 bp, Homo sapiens
caggccggaaaattgtgctctagaagaataaaactgaaaaactctagagaattttttttccccattgatgtttagaaagtttgagactgaaacaggaaaggccataaaatatctggttcatatcacctgttggacatttccttttggattcatgctttctggaaggtttaaattcattaacgttaatagttaattataactttttttttaacttaagaggattcagggttaagcaccaactaaattaaatcatgctatttaatttaagtat

SEQ ID NO: 45 - DNA, 2657 bp, Homo sapiens
ctgcggggggaggacacacggatgctcaggcccaggctttgccaggtccgaagcgggcccctctctgtcctgcctcttttcacctgctcacgccctcccacccccaccctacagccccaggtcctggcccagtccctccactgcctcgaagagtcagtctgccctgccttttcctttcgggcaccaccagccatccccgagtgccctgtagccactcaccactgctgccacctctctggccaatggccctttcactggcctggtgactggaatgtgggcagcgcccacacaggctctggcccatggcttcctactggcagctccaggcacccccctctcaccacgccgtttgctggctctgacactgttgggtgagggtcctggtcctgctgtcttcccttctggcctctgcacaggggtggtgacagtggctacaggctgggcccctggcgtgccctgaccgtgcagcagagtgaggctggggcagcagagagccccagcctcacccctgaggagcacctgtggtctgtccccttggtcctgcttatggctggaccggccctgcaggaggtggtggagccgtgaaggaggccgagctgcagctctggctgctgcttggcctcctgctccaagaccctcccgagtccccggaaatggagagtgcagttcttgggcccagcctggccttcgccatgagtttggggagcgagaccccacctgagacaggcagtaggagcctgtgctgaccttggggaatctgagcttttccaagggtaaggggcccagggtatgcaggccttcagtgacatcaggtcgttgtcatcctttccctccctgacctgtcacgagcctctgcaggtgcctgctcaccatggcccagcgccactctgtcctccgactcaggtgagggggcagcccacagacctgctcctcagtagcagggcctggccaggcccctgctgttctcagcctcagtttgccatctatgaaatgaggtggacccctctccatagcccttgggtgccagctcagtgggtgtggggatcacatgaggtggctcatgaggacacactctggaagtcgaggggctgccacgtgcagaggaagttcccggcctgggggctttatccaggggtcccagtcgagagtggcccgaggccgtccctcaccgggcatgttccctctggctgcccactccctcagggcccacatgtcctgccactcgccactctgagcacgagttcaccttccagatgtggccagggtgtgccagctcctctctcctgtgcgttggaaccccgggggaggcaagagcagatcacaggtgcatgagggttacacccgtcacctgggtctgccgggatgggttgggggggcaggtgccaggcctcactgctgtgaatctgccacgcctgggggtcctagaggctgccccaccccagtgattgggtagcagctcacatcccacccagcttcacaagtgaggaacccaggtgcatcgggagaccctcgggggcttctgtggcctctgtgcccgatgacctgcgtggcttcagacaaggccccagcgttactgggctcagcttgttgttctgtgtggagcgtgaggtgagaaaacccctctgaaaagatgtggtcggggccacgcttcccactggttctgcagtgaggagttggggcgggtgagccaaagcggccccccatggtgtctacctgaggggcagggaaccgcctgcctgtgcactcacgccaccccccagcccacaaagagcccatctgagagaaggacgtggtggagccaggacgggaaagcgtcctgtcggctggccatgctgttgcttgcgtctcgaatcttcggttctcgaggaagtgttgacagtgtgatgctaatgtctgcttttcttggcgttgggtagaagcaggacatctgtgtgtatgtgcgtatttaaattagattatttataataaccagagccagccctcgcgctggccaggatcctcctgccgagctgatgtcgctcctgccctctgccggggtccggaagcgacatctcaggaggtagctctcagcagagtgaggattcctgcctttcgtagagttttgtgtgactttttaaattattcatgtgtcccttaaaagtttcactacgtggagaaaattccagcaccaagtgttgtggcaacagctgagagagtgcaggcaccactgtgttgtggcttgttgaccgggaatgtgtcacccctgccagggaactcttctcctcgcgggggacttgggatggccatcagaccttctagggtctggctggggtcatcctaggtatgggtgaccgtccctgagacataagcgaggtagattcagccatcctcaccctcagacttgaggtccccacccaggccaagccggccccccgtaccccttgcctgggagcaaaccgccaggacgcagcctccacgccgcacctgccacattcagccctgcccaggaaggaacacatgacccttctgtctgtgactgttgctgagtctctgtctcatgtcgtagaattgtggataattgtctagtgaccctctcatcactgtaaccatcgcgcctggcctagatgtcgtgttttggatgctgtgttttcaataaatgcctctggggccctgctttt

SEQ ID NO: 46 - DNA, 1865 bp, Homo sapiens
tggctcctcccagccctgggcccaagaggaggcggctgcgggtcgtggggaccaagcacattggtcctaaaggggctgaagagcctgaactgcacctaacgggaaagaaccgacatggctgccttttgtttacactggttatttatttatgacttgaaatagtttaaggagctaaacagccataaacggaaacgcctccttcatgcagcggcggtgctgggccccccgaggctgcacctggctctcggctgaggattgtcaccccaagtcttccagctggtggatctgggcccagcaaagactgttctcctcccgagggaaccttcttcccaggcctcccgccagactgcctgggtcctggcgcctggcggtcacctggtgcctactgtccgacaggatgccttgatcctcgtgcgacccaccctgtgtatcctccctagactgagttctggcagctccccgaggcagccggggtaccctctagattcagggatgcttgctctccacttttcaagtgggtcttgggtacgagaattccctcatctttctctactgtaaagtgattttgtttgcaggtaagaaaataatagatgactcaccacacctctacggctggggagatcaggcccagccccataaaggagaatctacgctggtcctcaggacgtgttaaagagatctgggcctcatgtagctcaccccggtcacgcatgaaggcaaaagcaggtcagaagcgaatactctgccattatctcaaaaatcttttttttttttttgagatggggtcttcctctgttgcccaggctggagtgcagtggtgcaatcttggctcactgtaacctccgcctcccaggttcaagtgattcttctgcctcagcctcctgagtagctgggattacaggtgtgcaccaccgtacccagctaatttttgtattttagtagagacgggggtttcaccatgttggctgggctggtctcgaactcctgacctcaggtgatccacccgcctgagcctcccaaagtgctgggattacaggcatgagccaccgcgcccggcccactctgccattgtctaagccacctctgaaagcaggttttaacaaaaggatgaggccagaactcttccagaaccatcacctttgggaacctgctgtgagagtgctgaggtaccagaagtgtgagaacgagggggcgtgctgggatctttctctctgactatacttagtttgaaatggtgcaggcttagtcttaagcctccaaaggcctggatttgagcagctttagaaatgcaggttctagggcttctcccagccttcagaagccaactaactctgcagatggggctaggactgtgggcttttagcagcccacaggtgatcctaacatatcaggccatggactcaggacctgcccggtgatgctgttgatttctcaaaggtcttccaaaactcaacagagccagaagtagccgcccgctcagcggctcaggtgccagctctgttctgattcaccaggggtccgtcagtagtcattgccacccgcggggcacctccctggccacacgcctgttcccagcaagtgctgaaactcactagaccgtctgcctgtttcgaaatggggaaagccgtgcgtgcgcgttatttatttaagtgcgcctgtgtgcgcgggtgtgggagcacactttgcaaagccacagcgtttctggttttgggtgtacagtcttgtgtgcctggcgagaagaatattttctatttttttaagtcatttcatgtttctgtctggggaaggcaagttagttaagtatcactgatgtgggttgagaccagcactctgtgaaaccttgaaatgagaagtaaaggcagatg

SEQ ID NO: 47 - DNA, 2796 bp, Homo sapiens
gaattctacagcatgatatttcagacttcccatttggggatctgaaacaatctgggagttaataactggggaaagaagttgtgatctgttgcctaaactaaagcttaaaagtttagtaaaaatcgtctgggcacagtggctcacgcctgtaatcccagcactttgggaggctgaggcaggtggatcacggggtcaagagatcgagaccatcctggccaatatggtgaaaccccatctctactaaaaatacaaaaattagctgtgtgtggtggcacgtgcctgtagtcccagctacttgggaggctgaggcaggagaatcacttgaccccaggtggtggaggttgcagtgagccaagattgcaccattgcactccagcctggcgacagagcaagactctgtctcaaaaaaaaaaaaaaatttagtaaaaatcaatggtaagctaaaataagtttttgtttgtttatttgtttttgagatggagtctctactaaaaatacaaaaaattagccaggcatggtgccgcataactataatcccagctacttgggaggctgaggcaggagaatcgcttgaacccgggaggcacaggttccagtgagccaaggttgtgccactgcactccagcctgggcaaaaaagcaaaactccatctcaaagagaaaaaaaaaaaagaccgggtgtggtggctcacacctgtaatcccagcactttgggaggcctaagtgggtggatcacgtgaggtcaagagttcaagaccagcctggccaatatggtgaaaccccatctctactaagaatacaaaaaattagctgagcatggtggtgggctcctgtagtcccagctacttgggaggctgaggcaggagaatcgcttgaacctgggaggcagaggttgcagtaagccaagatcgtgccattgcactccagcctgggtgacagagcgagactccatctcaaaaaaaaaaaaaagcctgacagctagcaggtttcaggatccatctgccaagttagtgaaaggctggagcctcaaatcatacagatgagggtcattttctcctccttagcttcttggagtttaagagttgaaggagtcctgaaaagtaatgatagagcaagatgaagctatcagaactgaatttggacttcctctgggaaactacacctagttcatctgaagtgtcacgtaaactgcagaaagtttccaatgctggaaacttctctcatactatcgtgccttcctactcagaagtgcctgtgccctgctcagctgtgactactgacctcaggacctcactggacaaggcatgtggggacccttgcaggagccctggtaagggtacaatgatcctattgttttttgtttttgagatggagtctcactctgtctcccaggctggagtgcagtggtgcgatctccgctcactgcaacctccgcctcccgggttcaagcaattctcctgcctcagcctgctgagtagctgggattacaggcacccactaccatgtccggctaattttgtatttttagtagagatggggtttcgccatgttagacaggctggtcttgaactcctgacctcaggtgatctgcccacctcggccttccaaagtgctgggattacaggcatgagccactgcacccagcctgatcctattgttgcactatttatggagcaacaactttgtacaaagaacaagctttgtacagagaacaagcttggctttttctcccaacgccgaggatgctgttgatgctgccacgtaatagcataattttgggtgtcctcaaggacagaacttccactttgaataatggaagttagaacaatgaatttcacaggggaataaatattaatgactgacgtgaagaaaatatgccattgtttattccctcctgcatcatttccataatttgcttttgtactgtcaatttagaggaaatgtgtgatgctggtgttttgtttggcctgtttgtttgatgctgggggttttatgtgttgtaccctttaccccttacattgtgtaatttgaaagtggcaaacaaacctgcagtaaaagtccttgattggcatcttcattcggatgatggagagcctttgtggtagtgtttgcttatgtgaacagcaggcctttcagataagagaagtggcttttccttggtgatgaaggggtagagattgagccatggggatggtttaggttaaagaatgcttttttttggccatcatgaggatctaacaacagagtagaaggaaggatgccctaggtcagcatgcagggtggtgggagggctttcatcttccttacccaagcctctcttttcacttttctagaagtccagaagttgttatatgatgaaatagcctcctttaacgtttatttctgggtgccaacggaggcccattcctctaacattctcataatttttctcaaaggcctatgatctaaacatttcaccacggcatccactcagctgtgaggctgcgtacacagtctccacctctgaaatctgaacttcgtttaccagtggtgctgtttgaacttcataatgtcagcacttcctgaacacttactgtgtgcttggcttgtgctcctgagtgccttatatcataaggaaacggcaaaatcaggggactggtataaatggtgagctgagcttgaatctaagctttgtcttcagagccagtacccctaatctctctttctgtaaaatattacttttcaaagaatgaagttgtagccaaatcttgaaatttttcatttaccctaagtgaggacaaataaagctttcaacaac

SEQ ID NO: 48 - DNA, 187 bp, Homo sapiens
tccacatccagcagcagagcccacttgtggctgcagctttatgccaaattatattgcagactgaacagacgtttatctatcccatttggcgacgaggactcgtggctggagagagccacacagcgtgtaacctgaagtcatctagattatggggaaactgctcagcttcaataaacctgtccaaatg

SEQ ID NO: 49 - DNA, 1280 bp, Homo sapiens
accgttccgccgcccaccctctgctagacacagccaaggccaacgaggcaagcagaagcagcggccgcagcgaagctgccgttcatgtgttggaggccaaatgtggcaaaccaaccccaggcccacccagagcgagcaaacgctgagacctgaaaggacatggatgagaagaggagcccgcttcctgtacatatatttaagtgacaaacacggtcaaaagcttaagggacaggttttatggttgcttgtgtaataaagcatgtccttcgtatgtcacagtttggggcaacggaagtcttttagtgatggctaatgggtctgggcagcatcccttcatgaatttttttttaatccaatatccgttgatttgattgtgattagagaaccttggacattttgctgctaaagaatcttttttcccctctcccccttcctgaccctacttgcactgctgtggatttttttaagagaagcaaaaacaaaagtaaactcctttccctggccctccaaacatatattctgtgagataactgtgcctgctaccaagtgttaatcctgggatcgtatttttatatcatattcacatatttgtttttttaattggtgttagatgacatgattaataaaaaaggcaagatattttcagaatttgaatttcagttttttttttcttttgaaatgtccctttaagatttttttattctaaacaaaataaagaaaatcctgctgctctggtccttgtgataagcctctcttcggcatctgaggagcagctgcagcaaaatctaggggtgtaagtgtatcaggacttatgtgacttatattttggggagatgagggttgggttttttttttaatgctacgtgacagtttgaaaccttcacagttatcctctgggggtaaatcaattcttcaacccttgggtgtgtgagtttgaggcagggtcatttgtgtgatgtgtttggccttaccaaagcaaaagagggtgcaagaatgtgggagtatgtctgccggtttcaacacacacagacaaacacagccacacgcgcacacaagtataagactttttgtattactgctccctacttaacatacttgaattctcaaatttcctttggggtaaaaaaaaaaaaaggatttgaaaccataaagtgttctgaagaaattaagtctataaaaagcatactttcttttttcttttccttttttccctccacagacaatgtcctctgttcaattcctaacgcaaactacaataaatggtgacacacgttcagaag

SEQ ID NO: 50 - DNA, 5009 bp, Homo sapiens
gtgactctgccgagtgccctcactcgccttcgagagataaagaaagcgttacctctcatttctctttgtgattcttgacggtgactcttgtatgtaatcctgtggcttaactacttctccctccttgtccagcacttttctagctctcccgttccccatctccattgctctgtactcttttcttttttcttgtgctgagaatctcgttagtagcatgtggcctaacaaaaggaaaaaatgtttttaaacacacacacacacacacacacacacacacacatacacagacaaaaacacaaaaactctgaggggatctggtgaatctccaaattattgtgggtgtactttggcttccttttgtatgataggtccccatcatgaccacctctgatgtctgtgctgctgtcaccaggcacctttgtttttcaagacaacatactttttttttcttttctctgtttgtgatatcactttaatttttcttgggtggcttagagactaagggaggagacatctggcctttttagaacctgagaggaaaaaaagagtctttttttcccctctgtctctttttgccatggctaatccctgcatttccattcagggaaaaggtggtagtgagcatagaactgcaacagttatattctgagtcaaagttggggctttttacggcataattatggaatttttatttactggtagagaggagacgagaggctttttcagtgggcctgggacagtggctgctcttgactttgtgtgaagggaaatgccaaggatgcttctggtggacttcaggggaccccagggtttggccgtgggccgtgatggcagcaggcggtgggatgcttgtagctcctcacagcaggattcctgcccactgttttttctctgttgggagggaagctcttttctaggagtgtctcagttctgcttttggcattagtgatggtggtggtacagttggaattagtgccatgtcatacacaaatgttccacaaggcgggagtgtttcactttctggtgataaacttgatggtcattgttatgattaagataatgccgggcaggccgggcacagtggctcacgcctgtaatccaagcacttggggaggccgaggcgggcagatcacgagatcaggagttcaagaccagcctggccaatatgatgaaaccccgtctctactaaaaatacaaaattagtcgggtatggtggcacatgcctgtaattccagctgcttgggagcctgaggcaggagaactgcttgaacccaggaggcagaggttgcagtgagccaagatcgcgctattgcactccagcctgggtgacagagcaagactctgcctcagaaaaaaaaaaaaataataatgctgggtagtgaccttgtgattgttacagctccctttgatcaaagaaatatagctttcaggcataaacctggaagtctccctctgaatccagcagttgttttcattgatgcttgtcaggttgaagatgctttcagtgatgctctctatactcataaataagcaaatgtggcaggctttgctttctggatcccaggattaaaactaaccgtgaccactactccaaacaaaacacaatatgcctaggggcacggatgaacgtccagggagcccgggccccaggctttgttgcgtgttccctgctcctctccatctggtgtggaaacactgcccagggagaaaggaggaagctcactgtggacagtcttctttccttctgacagaccaggtcatctggcttccgagatcatcagagaagataagtctgtctctttcagctgccagtaagttttccaggatgagaggggaaaaagaaagcctccagtgacttcagttgctttgccagttgtcttgggattgttttacaccatcctttacttcccttgctcagacctctctgtttcaccattgctcaggcattcaggaaagtatctgctcactcccacttggtgagtcctcggccttgaggttgctgactctcaggcgttaggcagctggatgacttcccgcttcacgcagcaaaggccaggggcttgcgcgcctctgcagagttgttgctagggagacttgtgtcatcatccacaaccttgtttctcacttcctggttgggctcatctctgaagaacaggtctcccagcttcgctccttatcactgcattgtgaagaggaggaaaagtgaatcacggagagagaaaggaaaggatagaatcacaggctgcgtctgcacctgaaaagtgacccgcggaaactctatggcggattttttttttaactttcttcttcctgttaaaacataggtcactaactgtgatgttatttgttttctaagtggtatgtgagattttctaatgtagttagaagtttcattgtctgatggacacaatatgcccttccggttctattcaaaccagcaggatctgtcggtgcttagagatggctgcctggactggaatcaaatctaatttcagggaaatgaagatggaatttgaaggtcacttttaaaattaagtcattgatgctgctgttacagagtgtgacagaggatccatgtctgtgacacaggacggtgggaagcctgagagagagtgaaattatgtgatacactgaaatgacttttgtttttcttctaactcatacaaaactggtttggaaagtctttgctttggaagcgtcagacattagaacaggccaaactggactgtctgttcatagcgtgcctgaataagaaggcctcttagggagccagagggagcagagtggtcgtgtcctgcgtgctcttcaccctctggggcgcccctgctgcggctggcaggtgcagacagcctttgctggtccccagcacgtccagggtgggtgctcccttgcccgacagaaccatccccactgtgaggctgtgagagatttgtggcaggaactgtttatgaggctctagttgttgctgttgtggcgggaaagttaagaaacatagcccttaaggaaaccacctttatgtattttcttaaagcacgcctttaaataagcaaaaactttaaaaggcaggaaagagaattcttaggcaaattcagagaaataagtgctagttaatactaatcacctcctcctctgtctctcatcctcctttctcccatcaaagcaaaatatggcctcaccaccagccccaaatcagtgctcagaccctctctgtgtctgtgtgccctcctgggagtcagtcagcgctcaggccaggactgtgcagggccagccagcccatgcgctagtcaggagcacaggcaaggggtgcttgtggcagtggccgggcacctgagccccagctcgttgttaaacgtgctgacggcaaggggcaatggagtgagtttcccaactaagaaaccactattatatattttttcccttcagtcacatagacttcagacaactctcctattttttatggatttttcagctcatttcagatgaaggaactaagtcattgtgaactgtctcttgagatctaaaaacaagatgacttttcctggcacatattccaaagcaaagactttgttgcctgctgcttattgtctaatttacagggatatttaattttgtcaggtctatgtatatttatccagctatacttacttgcacagtggattggagagaaaggattctccagtgtgcacactcatcggtactctttctgcatttccctcgtgctgtgtcccgctcgggttccaatggacagtatcagggcttgtttgacttaggtctttcagttttcctttcggttcccttttaaaaatgtgattgttaacctgcctcttgaaagattcaaccgggtgtggtggctcacgcctgtaatcccagcacattgggaggccaaggcaggtggatcacctgaggtcagaagtttgagaccagcctggccaacatggtgaaaccccgtctctactaaaaatacaaaaagtagccaggcgtggtggcgtgtgcctgtagtcccagctacttgggaggctgaggcaggagaatagcttgaacctgggaggtggaggctgcagtgagttgagactgcaccattgcactccagcctgggtgacaaagcaggactccgtctcaaaaaaaaagaaaagattcatgatgctgctgctcccagaaggtttgctggatgtgtttacataggactctaacttgtgtgcactacagttgttcaccagggccagtgattcaccccagtgtgtggccagaccatgactgtgtagcaggaatgttttaatttgtgcttccttagtaaattgaaatatcagctgagagattatttgctgctgttattcaaaaggccatttatgaagttagtatttgagccccataagatctttaaaaagcctccaatcatttaaaggaagaaatcagagttgctataaaattcagtaaaaagctcatagccaaacggctgtgctcagatggaaagtctgagctgaggttggtctcttgccaaaccgtggctgttgtgtgttgttcttcatgtcttcgagttcattttttttcattctgcctattctggcatcagctcacttgaggagtccctcagccttcttgtatttaaggcatcgtcttagactttgtggctctaaagtacctgtctgttgagatttcaagtctcttgtcaccatcctcacacatgacaacaaaacccataatgcataagtggcctttttgaaccaagactttgcaaactgatctctcccccgtgaaggagttgagcacattagcaacaatgtacattaattttggattttcattttcatgttttattttgtaaatattatctgatgtttggagcttgagtatacagactgtaaatatagttcttgtatttgtactaattctgattcttttgctgtatagccttagatgtgcaatgcagacactatctaactgtgtgtggtaaccttgcgtcacggagctgttagtgaacgaggtaaaaataataaaggtacagccagtgc

SEQ ID NO: 51 - DNA, 2110 bp, Homo sapiens
atcagttactggacaaacttgaaatcatggtggaagaaacagacagtgttagctcatgatttgatttggttctacctttggccttgagttcttattatttacattataaatattaactggttttatattgttaagacaaaacactggtaaaagtttcaacacctcccttttgcttgtataccataaatgggcagtttctgaaattttggataaagcatcaagaactcctttttctgaaacgttcctccttttttagtgcctaattaatatacttacttacacagacttgtcccatcttgatgtaagtttgttatgtttttataatgcctataaattaatctgacatccagaaagacctgcctcttagtttatgcagacattcaaaaggagaatttgataagcagaattaaatgtctgttattcataaatgttagaaattggtttaaaaataataacatgcaactgggtgggcacagctttggatttctcatccacgtctgttcccttctttaaatatgattagaattttcgtaagccaaaactaaaggtcttcaaacatatcttgcaatacatagctttgcatcttccacacaacttccacgtcttcttttattctgtattttacaaaaaactcatataatggttttttcttttgaatgtatcagaatatgtatgaaatttgtcatatcagaatctataaattggcactgtgtctgggattctgtttgtggtttgcattttgaagttcaatgtatcatttgacacacatgcacacaaagtgaactattcaccaaaatcatgccaacagaaataccaacaaaaaacttgtgtagcttgtaaggaggttatttggcttgagagggaagaggtgggacagacatgggggacaaagctacagcatatggctctgtggtgctgcttttttccaatagttgatgaaatagtgaaataaaagttaactttggttgggcttggaataaaggagatgatacataataaactattctttggttagcattagtaatgcttgtagacactcaaacaaggaaggcgaagtcctgatgatgatttattgtatcaatacctcattttatttggttgtggtctcagtttgcctcactggagaatccactaagaaagatggattttaatgggaagaaaagaattattttctacatcgttcctcatctcttgagtttgtcaaaaagttttctaagaggcagtgtgaagagccagagatgtccgaaattgcctgacttcatgttttggaagattcctaagtcacatgaaatcatctatcaaacacttgtcttccaaacggtgtgaaaaactacagccaagatagcagttagcattcaaggaagccttaaagattgtgattatgtttttttttcctttgcgtgtgggcactatgctttattagaacacattatttttaatcatagtattttttctttgcctctaagaaaatactttcttaatgctcagaaagttgcttccaattaatgtttttttccccttaaaaagagaagctttgagagatatttttgctttcatagctagaacagttgaagtcttcaactgaggttttatagcagattagacatgggtaaatgatgtctgtaatgggttgagttactgagatgacaatctcctgtgccatttggtttgaatgtacttgataggctgcttcaaatcagtcacttcaatgcattttgtgtaaacccagttgtccttttttattcctctttagacataaatgtgctaactattcctttctatacacaatttattttctaagattaaaaataataattgctaggtttggtggcacatgcgtacagccccagctacttaggaggctgaagcaggaggatccctagagcccaggagttctgggctgtggtacactatgccagttgggtgtaagtttggcatcaatatggtgatgtccctgaagcaggaaaccacaaacttgcatcaggacgggtgaacccagcccaggttggaaatggagcaggccaaaactcccaggctgatcagtaatgggatcttgcctatgaatagccagtgcactgcagccaggacaacagagtgagaacctgtcttt

SEQ ID NO: 52 - DNA, 394 bp, Homo sapiens
tcatgctgctcctgtcaccctccacgattccacagaccaggacattccatgtgcctcatggcactgccacctggccctttgccctattttctgttcagttttttaaaagtgttgtaagagactcctgaggaagacacacagtttatttgtaaagtagctctgtgagagccaccatgccctctgcccttgcctcttgggactgaccaggagctgctcatgtgcgtgagagtgggaaccatctccttgcggcagtggcttccgcgtgccccgtgtgctggtgcggttcccatcacgcagacaggaagggtgtttgcgcactctgatcaactggaacctctgtatcatgcggctgaattccctttttcctttactcaataaaagctacatcagactg

SEQ ID NO: 53 - DNA, 556 bp, Homo sapiens
aacctcacccatgaatgctcacgcaagtgtaatgacagacctgaataaaatgtattaagcagcagtgatctttcctctcctccttcccaagtcatttgaaaagtgtttgttatttaaattccaataatgcccaatactgacgtgtcttgagtaatttggaacccaaagtgaagatctttgataaagatttttttgtggttcgactggactgtgctgagtgcgggcactgggcttttcttctgatgttcattatggtgctgggaagctctgtctttgatttaaaataaaatagctaaaggctacacaattaagagttcagaataacatcttatttcagtttatgaattgatatgaattgtctaatttaaaaaatatttccctcacattaaaagcaaatttttaatatcaggctcgaagagcaaaatgattattcctcatgttttagctgaaattaattttaaaacatattaaacagaaaacctgctgacatgcctgtgaaactgatactcgaacttgctgttatgtaccagttttaattagtagcttaatgggttgc

SEQ ID NO: 54 - DNA, 402 bp, Homo sapiens
agtccctcgccgcttggaaagtgcagccttctacaggtagagccacctagaaatgcatatggctgcaaaggaaactttgaagggttaaatagagatttaaaaaaataaaataaaaaggctgggctagggtgctttttgtgctgaattctccacattgttaactgccaaagctagttttagagaatgagaaagtcttaagcaaaatactcccaggtctcactccagaacataaaaatggtgtgtgatcaaatggtatatattagaaattacatctgttgtaattaaaattgtgtgagcaattaaacatggttgactttttcaagcaaaaatcagttcatcttttgatgtaattttctaggctaaatggcaatctctgaaagatgaataaagctatatttattt

SEQ ID NO: 55 - DNA, 769 bp, Homo sapiens
ggctgcgcctgctgcctccagccctgaggatggcatctagtgtgcccgtgcgtggccataccctgcctccctctctggccctgggagggcagcttggagcccaggtagggggcagagctgtcctcagctgcactgcggcctggtggcagtgtggggagtcacacttctgtccacctggcctcctctcgcctggccgccagccccagccccagccccagccccaggcccagctgcctttggctttgatctcaagtcaggctgaaggcagcgaagcctcggggcccaagcccctccccagccccctctcccggacagacgccttgcccagggtgtgtttgctgagtgtcttgactaccgtgacaccacgcatggccagagctagcgtccctactgcctcccgactcctcagtggaggaggagctgcggtccctctggtgtctgccatccccctccctccctgggcccggccctggacccgtcaggtgcctgtccccagccccaaccccactcatgccccgtcgtcctcccagacaaatgaaaccacgctgcgcttccgatgcccccgcttgccgtgtaatggttcagctaatcccatggcgagatgggggctcactccggaggaggagccaggcagcagggccttcctgaccaacagccagctctgtccttccccccaggaaacacatgttcatttgtgtgatcatgtatagacctcagaacggaagataggactgtatataattgtaataaataccagttgccactattt

SEQ ID NO: 56 - DNA, 2837 bp, Homo sapiens
acagtggggttgtggttggttggtatagaatggtgggaattcaaatttttctaaactcatggtaagtatattgtaaaatacatatgtactaagaattttcaaaattggtttgttcagtgtggagtatattcagcagtatttttgacatttttctttagaaaaaggaagagctaaaggaattttataagttttgttacatgaaaggttgaaatattgagtggttgaaagtgaactgctgtttgcctgattggtaaaccaacacactacaattgatatcaaaaggtttctcctgtaatattttatccctggacttgtcaagtgaattctttgcatgttcaaaacggaaaccattgattagaactacattctttaccccttgttttaatttgaaccccaccatatggatttttttccttaagaaaatctccttttaggagatcatggtgtcacagtgtttggttcttttgttttgttttttaacacttgtctcccctcatacacaaaagtacaatatgaagccttcatttaatctctgcagttcatctcatttcaaatgtttatggaagaagcacttcattgaaagtagtgctgtaaatattctgccataggaatactgtctacatgctttctcattcaagaattcgtcatcacgcatcacaggccgcgtctttgacggtgggtgtcccatttttatccgctactctttatttcatggagtcgtatcaacgctatgaacgcaaggctgtgatatggaaccagaaggctgtctgaacttttgaaaccttgtgtgggattgatggtggtgccgaggcatgaaaggctagtatgagcgagaaaaggagagagcgcgtgcagagacttggtggtgcataatggatattttttaacttggcgagatgtgtctctcaatcctgtggctttggtgagagagtgtgcagagagcaatgatagcaaataatgtacgaatgttttttgcattcaaaggacatccacatctgttggaagacttttaagtgagtttttgttcttagataacccacattagatgaatgtgttaagtgaaatgatacttgtactccccctacccctttgtcaactgctgtgaatgctgtatggtgtgtgttctcttctgttactgatatgtaagtgtggcaatgtgaactgaagctgatgggctgagaacatggactgagcttgtggtgtgctttgcaggaggacttgaagcagagttcaccagtgagctcaggtgtctcaaagaagggtggaagttctaatgtctgttagctacccataagaatgctgtttgctgcagttctgtgtcctgtgcttggatgctttttataagagttgtcattgttggaaattcttaaataaaactgatttaaataatatgtgtctttgttttgcagccctgaatgcaaagaattcatagcagttaattccccttttttgacccttttgagatggaactttcataaagtttcttggcagtagtttattttgcttcaaataaacttatttgaaaagttgtctcaagtcaaatggattcatcacctgtcatgcattgacacctgatacccagacttaattggtatttgttcttgcattggccaaagtgaaaatttttttttttcttttgaaatctagttttgaataagtctgggtgaccgcacctaaaatggtaagcagtaccctccggctttttcttagtgcctctgtgcatttgggtgatgttctatttacatggcctgtgtaaatctccattgggaagtcatgccttctaaaaagattcttatttgggggagtgggcaaaatgttgattattttctaatgctttgtagcaaagcatatcaattgaaaagggaatatcagcaccttcctagtttgggatttgaaaagtggaattaattgcagtagggataaagtagaagaaaccacaaattatcttgtgcctgaaatccattaagaggcctgatagctttaagaattagggtgggttgtctgtctggaagtgttaagtggaatgggctttgtcctccaggaggtgggggaatgtggtaacattgaatacagttgaataaaatcgcttacaaaactcacactctcacaatgcattgttaagtatgtaaaagcaataacattgattctctgttgtacttttttgtaactaattctgtgagagttgagctcattttctagttggaagaatgtgatatttgttgtgttggtagtttacctaatgcccttacctaattagattatgataaataggtttgtcattttgcaagttacataaacatttatcaatgaagtcatcctttagacttgtaatcgccacattgtttcattattcagtttcctctgtaaagggatcttgagttgttttaattttttttttctgcatctgaatctgcatgatttccaaaccctgtaccatctgaattttgcattttagcacttgcactattactcagcagcagtaacatggtaacacttaaaatggtactcggggacctccaaagactaaactgacaagccttcaaggagcccaggggtaagttaacttgtcaacggcatggtttaatcccttctttacacttgtgtaaatttcagttactggtcatagaaggctttcaatgttgagtggccttttattaacatgtttatggtactgcatagatacgggtatttattttaccctaagaagattttgaagtttaaaagtacttaaactatttggcaaagatttgtttttaaaaatctatttggtcaatctaaatgcattcattctaaaaaattttttgaaccagataaataaaatttttttttgacaccac

SEQ ID NO: 57 - DNA, 957 bp, Homo sapiens
aaggaggctgccgtggagcacggatacagaaactgagacacgtggagactggatgagggcagatgaggacaggaagagagtgttagaaagggtaggactgagaaacagcctataatctccaaagaaagaataagtctccaaggagcacaaaaaaatcatatgtaccaaggatgttacagtaaacaggatgaactatttaaacccactgggtcctgccacatccttctcaaggtggtagactgagtggggtctctctgcccaagatccctgacatagcagtagcttgtcttttccacatgatttgtctgtgaaagaaaataattttgagatcgttttatctattttctctacggcttaggctatgtgagggcaaaacacaaatccctttgctaaaaagaaccatattattttgattctcaaaggataggcctttgagtgttagagaaaggagtgaaggaggcaggtgggaaatggtatttctatttttaaatccagtgaaattatcttgagtctacacattatttttaaaacacaaaaattgttcggctggaactgacccaggctggacttgcggggaggaaactccagggcactgcatctggcgatcagactctgagcactgcccctgctcgccttggtcatgtacagcactgaaaggaatgaagcaccagcaggaggtggacagagtctctcatggatgccggcacaaaactgccttaaaatattcatagttaatacaggtatatctatttttatttactttgtaagaaacaagctcaaggagcttccttttaaattttgtctgtaggaaatggttgaaaactgaaggtagatggtgttatagttaataataaatgctgtaaataagcatctcactttgtaaaaataaaatattgtggttttgttttaaacattcaacgtttcttttccttctacaataaacactttcaaaatgtg

SEQ ID NO: 58 - DNA, 150 bp, Homo sapiens
ggggacaagtagctccccccacgacatgtctccctttcttagaatatattaaagtcagagtctctgaggaaggaatgtgatttggcagtcagggtactaagcatgggtgggaactcctgccttataaaaattgtttttgtgttcttaaag

SEQ ID NO: 59 - DNA, 2053 bp, Homo sapiens
caccccctgagcccccatctgctgaaccctgactggtaaacaactgctgtcagaaaagggctgggcttgggaaggggaggtggaggccaggtgtccccagacctctaacccttgcccctagcagcctcttctttgtggagcctctcagtgtgggcagccctcgcatgctggggtcgggccagctctccccgaaaggtcttgacctgaatgatggccggggaagcctgcgtgtgcccctttcagagacggagcacctgagatgtgggaggtgcagcatgttcccctgggcccctcagaaagtcgagcttggaggccagcctggatctgtctctcccttcccctcctgggaccattctacctgtgttctttgaccctcggagcagggacaggcaagacaactggcaagcttgcagctgccctgatggtgcaggtgcagggaggtgaccatgtaactctgaccaatctgggaagtggagggtgggctcatgggccgtgctctgcccctgtctgctgctcccagtctctcgctctgcctgcctgctcagaagaggtggctttggcccagaggctcaggccgggactgagatggacagacccagggtggggtggggtccaggtcgggtgtggactgtcctcactgtcagtggagccccagaagctagatgggtaccaggtggggttaggttcccagaggactgagggaatcctgtacaggatgtcccagggtagatggggagcaggattgggacctgctctgacagctggacacatgagccctggatgagtatggtagggggtttgaagaatcccctgtccacctcccaaatccaggcccggccccctctggcttggagagcattccaagcccccaccccacccctagaactgccattcccaagacctctgtctcccagccaaccacccttggaacttgcctcttgtcctgctggaaagatagcagtgttctcctgacttcgccctactgcatgcagccaaataaaaggtgtgcccagtctaacctgtgccctgtggtttctggaaggaaaggcagactttaggtggtcctgcctggacctgcagatggtacaatggcatggcttctgtctaaggtacagaggggttggcatttcaggaaccaggccatcacagaaacaggttcatgggcagacccctcagtgagctgcaggtatctcacctggcagccgtccagtactgctggcttcctctggaggcccagccacaggctggggttggggtgtgtggacatctctgggcagctcttgagtccaccttgtgccagatcagcagtgccacccaggctctgcctcctggtgttactctttgccaacagctttacggacattggatgaagccgaagcatttagaatggtgcctggcacacagttggtgcgtgatatggttaagctttgtgtccccacccacatctcatcttgaatggtaatcctgggtgtttagggagagacctggtgggaagtgattggattatgggagcggttttcccccatgctgttctcatgatagtgagtgagttctcacgagatctgatggttttacaagtgacggtttccccggctccctcctgccgccatgtgaagaaggtcgttgcttccccttcaccttccaccaccatgattgtaagttccttttttcttttcttttcttttttttttttttttttttgagatggagtctcgctctgtcgcccaggctggagtgcagtggcgcaatctcagctcactgcaagctctgcctcccaggttcgcgccattcacctgcctcagcctctggagtagctgagactacaggcgcccaccaccatgcccggctaattttgtttgtatttttagtagagatggagtttcaccatgttggccagggtggtctcaatctcctgacctcgtgatccacccacctcgacctcccaaagtgctgagattacaggcgtgagccaccgcgcccagcgattgtttcttgaggcttccccagccatatggaactataagtcaattaaacctctttccttttataaatc

SEQ ID NO: 60 - DNA, 499 bp, Homo sapiens
cagctgtccatcctgtgtctgggtcagccagaggttcctccaggcaggagctgagcatggggtgggcagtgaggtccctgtaccagcgactcctgccccggttcaaccctaccagcttgtggtaacttactgtcacatagctctgacgttttgttgtaataaatgttttcaggccgggcactgtggctcacgcctgtaatcccagcactttgggagaccgaggcaggtggatcacgaggtcaggagatagagaccatcctggccaacacggtgaaaccctgtctctactaaaaatacaaaaaattagccgggcgtggtggcgggcgcctgtagtcccagctactcgggaggctgatgcagaagaatggcgtgaacccggaaggcagagcttgcagtgagccgagatcacgccactgcactccagcctgggtgacagagcgagactctggctcataaaataataataataataaataaataaaaaataaatgttttcagt

SEQ ID NO: 61 - DNA, 583 bp, Homo sapiens
cggccccgcgggactggggactgagcccaggaggtttgcacaagccgggcgatttgtttgtaactagcagtgggagatcaagttggggaacagatggctgaggctgcagactcaggcccaggacactcaaccccaggaggggagccgctcggcgaatgagctgggtgggtgcccaggagccggcccgcagcacctgcacacacgaagtccggacccacgcagcctccatcccgcgtgtcttgctctccgcgatggcaatgccgagagtgccctctactgtccgactccagcactgcaacagcttcaagttcaaaaccaagaggcgtttttgagagtggaaaagaaatttaaacttcccgaaagaaggtccaccatcaggagatgaatatggaacatctcctatgtaccaggcactgtgctaagtgctggaatacattatctcattgaattatcacaacgaccttttcaagtaggcattatcaccatgcgacaggttgaggaccgtgaggcacgctggagttatttgactcgacttgcccagggtcccaggtcagtgctcctcaaacctgaacatgctaagagt

SEQ ID NO: 62 - DNA, 578 bp, Homo sapiens
agccagccacgctgcgcccggccctgccccgggccttcctcgtgcctgggaggtcgttctagggatgctcctgacctccgtctcttggacctaagatggaatgtgtccccagctcagggattgcctgaaccaagaggccaggagcccccatgggccgcccagtaccatgcacactcctgtcccgaactccctgaggcctcccctcccttcagggcacccactggttcccaggctggaaccagggtctctctttacctcctaccccatggtggcaccacagaggccctcagccgagtcctgcctgagtgttgcaagctcaggcctttaaggactgctgatgccccctcaggcctcccccaagtttgctgggctttggtggaagccctgagagcttcaggtcctgctcagcccgaggagcagtctggcatgggagtgaggccccgtccttctcactgcctggtcacatggtgcctagggatgcagggctggaggccagaggtgtcagcaacactgtgtcccaccacaacctccagcctcccttttcagagcacagcattaaagtttggggaattctgtag

SEQ ID NO: 63 - DNA, 2921 bp, Homo sapiens
cagcccagcccaccctctcctggtgctgcctggggaggcaaatcatgctcactccggcgggcacagctggctggggctgttccggggcatggaagattcccagtcacccactcactcagaaagccgggagtcatcggacaccttgctggtcagaggtcctgggggtggttttgaaccatcagagcttggacttttctgacttccccagcaaggatcttcccacttcctgctccctgtgttcccaccctccagtgttggcacaggcccacccctggctccaccagagccagaagcagaggtagaatcaggcgggccccgggctgcactccgagcagtgttcctggccatctttgctactttcctagagaacccggctgttgccttaaatgtgtgagagggacttggccaaggcaaaagctggggagatgccagtgacaacatacagttcatgactaggtttaggaattgggcactgagaaaattctcaatatttcagagagtccttcccttatttgggactcttaacacggtatcctcgctagttggttttaagggaaacactctgctcctgggtgtgagcagaggctctggtcttgccctgtggtttgactctccttagaaccaccgcccaccagaaacataaaggattaaaatcacactaataacccctggatggtcaatctgataataggatcagatttacgtctaccctaattcttaacattgcagctttctctccatctgcagattattcccagtctcccagtaacacgtttctacccagatcctttttcatttccttaagttttgatctccgtcttcctgatgaagcaggcagagctcagaggatcttggcatcacccaccaaagttagctgaaagcagggcactcctggataaagcagcttcactcaactctggggaatgctaccattttttttccaaagtagaaaggaagcacttctgagccagtgaccactgaaaggtatgtgctatgataaagcagatggcctatttgaggaagagggtgtctgcccttcacaaacacctctctctcccctgcactagctgtcccaagcttacatacagaggcccttcaggagggcctcctgtgccgcagggagggtgcgtggggaagatgcttcctgccagcacgtgcctgaaggtttcacatgaagcatgggaagcgcaccctgtcgttcagtgacgtcattcttctccaggctggcccgccccctctgactaggcacccaaagtgagcatctgggcattgggcattcatgcttatcttcccccaccttctacatggtattagtcccagcaggcatccctggggcagacgtgctttggctcaagatggccttcatttacgtttagttttttttaaaaccgtggaggttgcccacgggcctcggcacctggccctggcagcacagctctcaggcccagccctgggcgacctccttggccaagtctgcctttcaccctggggtgagcatcagtcctggctctgctggtccagatcttgcgctcagcacactctagggaataattccactccagagatggggctgcttcaaggtcttttctagctgattgtggcccctccattttccccattttcttatctccctgaccaaaattgctttgacttctaaatgtttctgcttcccagaatgcacctgacttatgaaatggggataatactcccaggaaatagcgcaggacatcacaaggaccaaaaaggcaattcttatttaaatgttactatttggccagctgctgctgtgttttatggcagtgttcagagcttgatcacgttatttcttccttttattaagaaggaagccaattgtccaagtcaggagaatggtgtgatcacctgtcacagacactttgtcccctctccccgccccttcctggagctggcagagctaacgccctgcaggaggaccccggcctctcgagggctggatcagcagccgcctgccctgaggctgccccggtgaatgttattggaattcatccctcgtgcacatcctgttgtgtttaagtcaccagatattttgttcccatcagtttagcccagagatagacagtagaatgcaaatacctccctcccctaaactgactggacggctgccaaggaggccccaaacccaggccccatgcaaaggcacgtggtttccttttctcctctctctgcatctgcgctttccagataagcccaaagacagcaacttctccactcatgacaaatcaactgtgaccctcgctccttccatttctgtccattagaaaccagccttttcagcatctcacccattagcagccccatcacccagtgatcagtcgcctcagtaaagcagatctgtggatggggagcctacgggtggtaagaagtggtgttttgtgtttcatctccagcttggtgttccatggcccctaggcgaggtgatcagggagtggggccaatgggcccccggccctggctttgggaccttgtgctgagggatgatttgctcctgaccttgattaacttaacagttcccagctggaagggacactttcaggacccagtccactgtatggcatttgtgatgcagaattatgcactgacatgaccctgggtgacaggaaagcctttcgagaggcccaaggtggcctcgccagccctgcagtattgatgtgcagtattgcaccacagctctgcggaccttggccattgccgcagtcgcagcttccttttttctgtttgcactgtttgtttgtatgatgttagctaattccactgtgtatataaattgtattttttttaatttgtaaaatgctatttttatttgaacctttggaacttgggagttctcattgtaaccctaacatgtgagaataaaatgtcttctgtctcctctgtctccttta

SEQ ID NO: 64 - DNA, 728 bp, Homo sapiens
ttggccaggcctgaccctcttggacctttcttctttgccgacaaccactgcccagcagcctctgggacctcggggtcccagggaacccagtccagcctcctggctgttgacttcccattgctcttggagccaccaatcaaagagattcaaagagattcctgcaggccagaggcggaacacacctttatggctggggctctccgtggtgttctggacccagcccctggagacaccattcacttttactgctttgtagtgactcgtgctctccaacctgtcttcctgaaaaaccaaggcccccttcccccacctcttccatggggtgagacttgagcagaacaggggcttccccaagttgcccagaaagactgtctgggtgagaagccatggccagagcttctcccaggcacaggtgttgcaccagggacttctgcttcaagttttggggtaaagacacctggatcagactccaagggctgccctgagtctgggacttctgcctccatggctggtcatgagagcaaaccgtagtcccctggagacagcgactccagagaacctcttgggagacagaagaggcatctgtgcacagctcgatcttctacttgcctgtggggaggggagtgacaggtccacacaccacactgggtcaccctgtcctggatgcctctgaagagagggacagaccgtcagaaactggagagtttctattaaaggtcatttaaacc

SEQ ID NO: 65 - DNA, 1943 bp, Homo sapiens
tgggcacctgaggcggagtctgcgtggagaggggcggtgctgccagccctaagtgccatgtgggctcccccaggggcacgtgtggctcctgccccctggccactgccaagagaatgaagcacccagtctcgtaccattttgagccctccagcactacttattttcccccacctttgcctgctgttgctggaagagctggctcatacccccaaaggacactttcagcgacagctatggacagcatggtaccaaggagttaagttgaggctttttccagctttctctggttcatttgattgcttgataaggcctcaggatctcagcattgcacaatgcctcatggaagcctttgagggtatcacacagacacccccaccttcctccagcctgtgcgcacctgccctccttgcagcccagcacacctgcaggtgtaagggacgattggagtttcttcccagagagtctgtcccagaaggactgtggcttgtgtgtgtccatctcgcctgttggctcagtgcttcatcccatttgcagagcctcagacacgtcttggtggtgaggctcagttacccctgggcttaggctgaggcgggccctgtgctgggggtggtagaaaggatgctgctgaggcagctggaggagtgggagtagctcagaggggagggctgttggatgtatggggagctggcagagcaggtggcagtcactgggacaaggagggacttgcctctcttctcattattgtgtcctttgctttagtgtcagtcctggacttgtgcaggcctgttttgtgtagatctgttttggaagatggcatggtctaggtggttgaaggatgtagtagaaggatggatggtggaaggtggggacgttggtggctggctgaggtgcatgggccccacacaggacagctggagaatgggccgtccacttggcctcgttctgcgaggggctcatgggtctgagagcccccacccactaggcttgattgcatccctgttgtgccctttaagagacatgtttccaccccacccccaaccttgtcccaagtgccctggactaaatttcctgtgccagtgactgcagttggccaagggacaatgtggaaaacccagtgtccatctttccaccctccctgatctccagaaccttcgactgacccccttgtctttatgctgatgttgagttttgggattgttactggttgaagtgggggcagatgcctgtcaccaaggtgttgactgtgtgagaaaagcagtttgggtgacaaatcctgtgtggcacaagttggatcgcttcctagaaataagcaacacctctcccaaaaagcagcccacaaggcaggggcccagcagcccagccatcactcatctttgaggaaatgagttggtagcctctgtgcactgtttggtggccacatcacaggtgatgtcctgttcacatacctgcttgtatttaaagccctcagtctgtcctgttgtgtggggcgaagtgatggactctgccaggtggacatgctgtgggtggatgttcccggcgtgtgccgggcctgaatggacaggggccacttcacagcatgtcagggaaaatcactgtcacacaattccaatggattttgtgctctttttgaaaaaaaaaaattctttagcgtaaacatgaattttttttcaatgtagcccctggggaatgaatgaaattttgagcttcttcaatacgtaaaattaaatttataccactgagggagagaccctttctgaaagaagtatggccaaaagcactttaatgctgctgacattgttgtttttatgttcatttgctggagcgcaagacgtgctgacacagtgagttttctctgatgtatttaaggtgatgtatttgcttgagttactcctgtatcattgctcataatattggaaactaaaataaaacctagttggaaatcc

SEQ ID NO: 66 - DNA, 241 bp, Homo sapiens
ggactgactcctgggggagaacagcattcccgccgcctccagcctctcccctctggcaggcgcacccaggagatggaatcccctgcccgcccagctcaggcccagctgtcctaggttgggcaggtgggtggacccaagcttgtctgctgcctgagttccagagagggaggaccctggggtggagggtgagggattctgtggaagtttgtaaataaagctcagtgctctgcagctcaagtcc

SEQ ID NO: 67 - DNA, 1674 bp, Homo sapiens
ggcctgggctgggctggggctaggagggcagcagggtggcctctgggaggccaggatggcactgttggcaccgaggttgggggcagaggcccatctggcctgaactgaggctccagcatctagtggtggaccggccggtcactgcaggggtctggtggtctctgcttgcatccccaacttagctgtcccctgacccagagcctaggggatccggggcttgtacagaagagacagtccaaggggactggatcccagcagtgatgttggttgaggcagcaaacagatggcaggatgggcactgccgagaacagcattggtcccagagccctgggcatcagaccttaaccaccaggcccacagcccagcgagggagaggtcgtgaggccagctcccggggcccctgtaaccctactctcctctctccctggacctcagaggtgacacccattgggcccttccggcatgcccccagttactgtaaatgtggcccccagtgggcatggagccagtgcctgtggttgtttctccagagtcaaaagggaagtcgagggatggggcgtcgtcagctggcactgtctctgctgcagcggccacactgtactctgcactggtgtgagggcccctgcctggactgtgggaccctcctggtgctgcccaccttccctgtcctgtagccccctcggtgggcccagggcctagggcccaggatcaagtcactcatctcagaatgtccccaccaatccccgccacagcaggcgcctcgggtcccagatgtctgcagccctcagcagctgcagaccgcccctcaccaacccagagaacctgctttactttgcccagggacttcctccccatgtgaacatggggaacttcgggccctgcctggagtccttgaccgctctctgtgggccccacccactctgtcctgggaaatgaagaagcatcttccttaggtctgccctgcttgcaaatccactagcaccgaccccaccacctggttccggctctgcacgctttggggtgtggatgtcgagaggcaccacggcctcacccaggcatctgctttactctggaccataggaaacaagaccgtttggaggtttcatcaggattttgggtttttcacatttcacgctaaggagtagtggccctgacttccggtcggctggccagctgactccctagggccttcagacgtgtatgcaaatgagtgatggataaggatgagtcttggagttgcgggcagcctggagactcgtggacttaccgcctggaggcaggcccgggaaggctgctgtttactcatcgggcagccacgtgctctctggaggaagtgatagtttctgaaaccgctcagatgttttggggaaagttggagaagccgtggccttgcgagaggtggttacaccagaacctggacattggccagaagaagcttaagtgggcagacactgtttgcccagtgtttgtgcaaggatggagtgggtgtctctgcatcacccacagccgcagctgtaaggcacgctggaaggcacacgcctgccaggcagggcagtctggcgcccatgatgggagggattgacatgtttcaacaaaataatgcacttccttacctagtggcccttcacacaacttttgaatctctaaaaatccataaaatccttaaagaactgt

SEQ ID NO: 68 - DNA, 2199 bp, Homo sapiens
ccaggccggtgtgggctgtgtcgtagccaaggtgggctgagccctggcaggatgaccctgcgaaggggccctggtccttccaggcccccaccactaggactctgaggctctttctgggccaagttcctctagtgccctccacagccgcagcctccctctgacctgcaggccaagagcagaggcagcgagttgtggaaagcctctgctgccatggcgtgtccctctcggaaggctggctgggcatggacgttcggggcatgctggggcaagtccctgactctctgtgacctgccccgcccagctgcacctgccagcctggcttctggagcccttgggttttttgtttgtttgtttgtttgtttgtttgtttctccccctgggctctgccccagctctggcttccagaaaaccccagcatccttttctgcagaggggctttctggagaggagggatgctgcctgagtcacccatgaagacaggacagtgcttcagcctgaggctgagactgcgggatggtcctggggctctgtgcagggaggaggtggcagccctgtagggaacggggtccttcaagttagctcaggaggcttggaaagcatcacctcaggccaggtgcagtggctcacgcctatgatcccagcactttgggaggctgaggcgggtggatcacctgaggttaggagttcgagaccagcctggccaacatggtaaaaccccatctctactaaaaatacagaaattagccgggcgtggtggcgggcacctatagtcccagctactcagaagcctgaggctgggaaatcgtttgaacccgggaagcggaggttgcagggagccgagatcacgccactgcactccagcctgggcgacagagcgagagtctgtctcaaaagaaaaaaaaaagcaccgcctccaaatgccaacttgtccttttgtaccatggtgtgaaagtcagatgcccagagggcccaggcaggccaccatattcagtgctgtggcctgggcaagataacgcacttctaactagaaatctgccaattttttaaaaaagtaagtaccactcaggccaacaagccaacgacaaagccaaactctgccagccacatccaaccccccacctgccatttgcaccctccgccttcactccggtgtgcctgcagccccgcgcctccttccttgctgtcctaggccacaccatctcctttcagggaatttcaggaactagagatgactgagtcctcgtagccatctctctactcctacctcagcctagaccctcctcctcccccagaggggtgggttcctcttccccactccccaccttcaattcctgggccccaaacgggctgccctgccactttggtacatggccagtgtgatcccaagtgccagtcttgtgtctgcgtctgtgttgcgtgtcgtgggtgtgtgtagccaaggtcggtaagttgaatggcctgccttgaagccactgaagctgggattcctccccattagagtcagccttccccctcccagggccagggccctgcagaggggaaaccagtgtagccttgcccggattctgggaggaagcaggttgaggggctcctggaaaggctcagtctcaggagcatggggataaaggagaaggcatgaaattgtctagcagagcaggggcagggtgataaattgttgataaattccactggacttgagcttggcagctgaactattggagggtgggagagcccagccattaccatggagacaagaagggttttccaccctggaatcaagatgtcagactggctggctgcagtgacgtgcacctgtactcaggaggctgaggggaggatcactggagcccaggagtttgaggctgcagcgagctatgatcgcgccactacactccagcctgagcaacagagtgagaccctgtctcttaaagaaaaaaaaagtcagactgctgggactggccaggtttctgcccacattggacccacatgaggacatgatggagcgcacctgccccctggtggacagtcctgggagaacctcaggcttccttggcatcacagggcagagccgggaagcgatgaatttggagactctgtggggccttggttcccttgtgtgtgtgtgttgatcccaagacaatgaaagtttgcactgtatgctggacggcattcctgcttatcaataaacctgtttgtttt

SEQ ID NO: 69 - DNA, 3018 bp, Homo sapiens
agccccgctgctgagatgggcgctcccgacacagcgcagacccaccaggaggaaagaggcccagctctcagctgacgatggaggcagaaccggagtcgggtttggggaagttgtcaaggaatgagggaaagtaaatcctcatgaggaaaagtacaaatggaaatcgtattaatttgtgaggcagggagttattttagattatgggaaataatttttaaaggtattggttaaataacgtttaaaaacatgtactgagatgaatctaatttttagattgccctgtattttgttaacatgtatatatgtacaacagtgtgtttgtaaatatataggaacgtttctgaacagggtctgtgctatgtgtaaaggtttgttaactgtaaagtaatataaagttatattggatcttctattgcactaattctagatgtctaattcaggatactgtctatagaaaggcattcttaaaagttaaagaatgttacgtcttagttttggagactaaagtattcccagtaaagtgggttgaggtgagggctgtggtcctgaaagggacgcctttgacatcgtggctgtccagttgggctgtgagctgtggcacccaggactggcgctggcccttcagaaggatctaggagaggggcttgggagcccacttttaatttctcacccccattttacaaagagtgcttagattcttacaaattatgatgtaagttatccatttggctttttcctaactagtcttaccaaacttagggggaaacctgtgctccattaccacatgggtgcaagtcagcattgtaagttttctcaggttattattattagagaggttggaaacattggtaaactctgttgattgagaaggaaaaaaaaagtcccattgaactgttgcaacaaatcagaaatccacataaaagtgctctcctgcctgggcagcaacaaccaagaacaaagccccgggactgttttctttttaataaagccacaggcaggcatcgtagctccacagcccgaggggacacaggatggaaaccccaggatgagaagggagcagggagagttccagaaagggggatgaaataggagtattaaaaagctgcgttggtaagtttttcatggaaccaagatttgacaaaggcatctcttatccttggttttaaattcctgctgggagcaaggcctggtatgagcgccctgggtcttgtttttggtgtttcgcttttctgtaaggattaagcagatagggagaagggaaaaggggcctcactttagaatgaatgagtcaccttgtgatttttaaatttttattttaataaagctaatcaatttctacaaccttgtcacatgtagctgagtctgggatgactcagtggatcagtggatgcgtggaaggttttggtgtttataactcatgacccaaatccttccaagacacaaatgaagctaatcttcttcccctccctttcctctcccacttcccctctgtgtctgtgtctgtgtgtgtgtgtgtgtgtgtgtgtgtgcgcgcgcgcgcgtgcatgcagagaggaaggaagggagctttagcacaagtagctacatagtgttcaaggatcagctttcttgaactccgaggcttggttgcctttgctgaactccaagttagtggattgcagaatggaaacttggcttttgcggcactgggtgagttttagtttgtgtgtgtcttgctggggggtggtgatgattgtctcagcactcacgcactgcacaagatggcagcaggatacagcactgcacaagatggcagctcctctgcagcttcctcctcagcctccctccttgcacccccacaggtttggcttgtggtttttgtcatcagtaacctactgcctgagatcatgatctcttaaaagatgagactctcggaagggttgattgtatgcgtcagtgagccttctatcaccttctggaacaaagtcacttgaaatctcttgatgagattaaggagtttagtgttactaagaaaatctgctttgggccgcagcagtgctgggtgttctcagacctgactgaggaagttagctgcgggctgccctgtgggctggtgcttcaggaggaatccagagaagtgttcagatgccccccttgggctcctttctaattttaatcagctctttaaatagctgcccatctcctgtgattgcacaaccaagcactttgacatttgcaccttaggagaggcagatgttaaaatggaatccaaagaccacctagggcggggctgggtgggagatgggagggccaactgcgagctgctccacttctcagctctcccctgccctgcagccctgggccagacaaggccagaaggtttcaggggcatttgacatcccctcctggttctcaccaggaaaacatccaaagctttggaggaaacaggccctgcccctggctccttaaatgccccgtctctttgtaaactgatattcagccagcaatgcctaagactttgttaagatcatttctactgcttttctttctgcttcaaacacacagttcgtctctgaggaaagtaaaataaatggaataagagtaaattgggtaaggagatatccaaagctacccagtcccttgacccagcacagttggccgacccgtgtcactccctggctgtcgctgcttctctgtgctcactgaagggtgagccaggccagtgcttccccagcccctgggcctggtcactacacagtggaaaacagacaagcggccccttccccaaatcccaagagtgtcttgctgcttggtgggtgctcatcgcaatgttctgaaggctccagggccactttgtttgtaagtatgatctgggcctcaaaataccatagtagctgcttgataaaattctaaaaatatctggttctctattatgtaaacactattacagtcaccagtgtgtgaagactcttgagtctggttctcatatcagagtcatcatttttcttcctgtggaataaaatgccttgtggacttccc

SEQ ID NO: 70 - DNA, 350 bp, Homo sapiens
tagtaaccctggggccccgaggaggaaggggcaagtatggactctaccagaaaccgggtgctttagtgagttctattttattgactaaagaggtgctacatcaatgcttggggcagctgggaagggtgagaagtaagctaacagtcttgcttagtattcaagaaaatccaaactgtgtctgtttccttccagcactaacaatgtccattgctggatctagcgacattctctaacattcccatttaggtgaaataaatatcaaaaggagaaaaaaatgcctttaaaaatttctcaaagccccaacatataagatctgtgcagaataaatgccaacaactggtcataccgtc

SEQ ID NO: 71 - DNA, 217 bp, Homo sapiens
gagctgccaccccaggagcagctcagatagaatcagctggagaccacagcatcactggacttgccagacaacaagtggcgcagataaactcagagtacgagatctggcccgtcaaaggtgctctcagaatcatcatctgcatttggcggtacctgtcccccctcaaaacccacaggttcctttcttttccatccaacaattaaagatctttgacact

SEQ ID NO: 72 - DNA, 78 bp, Homo sapiens
ggaaggcgtgcccagtggggtagagaaatccaaagttctcttccaggcacttggacactaaaatctactatgtgggtg

SEQ ID NO: 73 - DNA, 130 bp, Homo sapiens
ggaaggcgtgcccagtggggtagagaaatccaaagttctcttccaggcacttggacactaaaatctactatgtaggtgcaaactatttttctcttttcttatttatttcattttttaataattccaaaat

SEQ ID NO: 74 - DNA, 334 bp, Homo sapiens
aatgcctgccatcagggtggatatatttcaagctttcttctggtcatttcggagctgaaacctaggccatgagtgcatgttaaagggagcacagacccatcgtttcaaatgcctcctcagtgtgaatgggaaaggaatgaggatgcaggaggggcaggactgggggaaaagttgacttggagtggatgggctctttagagacctgtgtcccagagaatcagaaatgggaatctgaattgctagagtgagaatcagggaggagagacacatgagagggttacccctgcacagatggttgtaaagtaacagtcagaaataaagggaaactgagtgg

SEQ ID NO: 75 - DNA, 324 bp, Homo sapiens
atgcctgcctatttgggtggatatgtcaaacgctttcttctggacacttggaaactaaaacctaggtcttaggtacatcctatagggagcacagaacccatcatttcacacatgggctctgaaagtgggaaaggaaaggtgatcaagcaggggcaggacttgggggaagtgttgccatggattcgatgggactttggggacctgtgtcctgtagagtggaaaatgggaatttgaatgtctagagtggaggcttgagaatacttgagggagttactcttggatgcatggttgtaaagaaacaatcagaaataaaggaaaactgag

SEQ ID NO: 76 - DNA, 332 bp, Homo sapiens
atgcctgcctatttggatgggtatgtcaaacgctttcttctggacacttggaaactaaaacctaggtcttaggtacatcctaaagggagcacagaacccatcatttcacacataggctctgaaagtgggaaaggaaagctgatcaagcaggggccggacttgggggaaatgttgccatggattcgatgggactttggggacctgtgtcctgtagattcgaaaatgggaatctgaatgtctagagtggaattcaggcttgagaatacatgagggagttactcttgcatggatggttgtaaagaaacaatcagaaataaaggaaaactgagcag

SEQ ID NO: 77 - DNA, 332 bp, Homo sapiens; identical to SEQ ID NO: 76

SEQ ID NO: 78 - DNA, 2044 bp, Homo sapiens
agagctgaagggttacgccctgctgccaacgtgcttaaaaaaagaccgtttctgactctgtgccctgtccctgagctcgtgggagaagatgacccgtggaacacttgcctggcccactcagaatccacggtgacctctccgcttgccaaaataaccgaaggaaagaccgttcaccagacttggctcctctaaacatttgctgttcaaacatgtttttgaatatacattctataaaagattatttgaaagacaaaattcatagaaaatggagcaaaactgtataaactgatttgtaactaacactggaccattggatcgatattatatgctgtaaccatgtgtctccgtctgaccattcttgttattgttaaaatgcagaggaatctggaaatatttatatccacggagtccttggatccagtgctacgtcagtaaatagcaccagcattttgcaattgctgatctgctgaaatgtacacattctggtctagtttggtctatcttttaaagcctgatctggtgtgaataatcaactaggaaatctaaacttggataacacgtggtgaacaactgcctttagctggtccagattaatcatttcaaagacatccattttagatcacaagcaggaagtcgatagtctcaaaggcactttgtttctcccaagtaggccaccaggcagcctctagagttgctttacccaaatccttctccagccatgacttggtgactctaagcttgctcccacctgccccctccacttccctcagatgatgaggagccagggctaagggggcagccttctctcttcccagtgatgcacatccttcacattggctgctttgttctggaatatggatatctcagcctggatgccgaggaagctgctggatgcttaatggtgctagaggctcaagtgtgtttgaaaccaagagccagttgtcccccatgcagaaagaaatcctgtgtgagcctctggtatgagaaataaaatctgccagttttataacattcactttctgcctctgaggaaagatacagggaacaaaaatcaatttgtacagtcttaatattaaaagcagcttgactaaatacctgatttaaaaatagaagacatccccagtcctcatgacataccgcaaatatctgtggggtcctgttgaaaagaacaaaataaaggagcccaaggggtcattctgtctcagcaccatccagcctggcacttctcttcccatatatccattggatttttttttttttttcctaaacaaagtttttacactgagcagatgctctgtcatgatggcggttgtgcaattctggtatcctctaaatttgtaagcattcataaaacaggaaaaagtaaactatcattcggaagcacagcccattcctcccattttttgcaatgatgtctggatgttattttaaacagtgtgtctgtgtgttcccaaatccagctggccccaccagctcagattccattttttttgtgtgtgtgtgtgaaacgtagtctgcaactctgcctcccggcaattatacatgtgtcaggatgtcaaaaagcaattctcctgcctcagcctcctgagtagctgggactacaggttcctaccaccacacccggccaatttttgtatttttagtagagatggggtttcaccgtatcggcgaggatgatctctatctcttgacctcgtgatctgcccgcctcggcctcccaaagtgctgggattacaggcgtgtgccactgcgctcggcctcagattccatatttgaacaccagctgattgagagaaggggaatgagaagagctggatgagtttaaataactcattgttcagattcctgaacaggagttgggataatggccatcttttctttcctatcctttcttcccccctcactgtgaaaaataacagtccaccccaagtcatacactggacccagtgcctgcggggacaggactgtgggtttcttggtcacacctgtgttggtgctcaatgcagtgtagacatgttttcaaataaaacaaatgattgtgtac

SEQ ID NO: 79 - DNA, 1922 bp, Homo sapiens
cacctgaagtgacctggaatcagtgaagccaaagggactggcagtctgccctgcagggagtaccgacctatcccagttgtgtgaggctgcgagagaaagggagtgcatgtgcgcgcgtgcatgtgtgcgtgcgtgtgtgttcacgtgttctcgtgcgggcgcgtgagtggtcttcaaacgagggtcccgatccccggggcggcaggaagggggccgactccacgctgtcctttgggatgatacttggatgcagctcttgggaccgtgttctgcagcccagccttcctgttggggtggggcctctcctactatgcaatttttcaagagctccttgaccctgctttttgcttcttgagttgtcttttgccattatggggactttggtttgacccaggggtcagccttaggaaggccttcaggaggaggccgagttccccttcagtaccacccctctctccccaccttccctctcccggcaacatctctgggaatcaacagcatattgacacgttggagccgagcctgaacatgcccctcggccccagcacatggaaaacccccttccttgcctaaggtgtctgagtttctggctcttgaggcatttccagacttgaaattctcatcagtccattgctcttgagtctttgcagagaacctcagatcaggtgcacctgggagaaagactttgtccccacttacagatctatctcctcccttgggaagggcagggaatggggacggtgtatggaggggagggatctcctgcgcccttcattgccacacttggtgggaccatgaacatctttagtgtctgagcttctcaaattagctgcaataggaaaaaaacaaattgggaaatgaaaaaaaaatgggaagattaaaaagcacagggggaagaagaagagatttcggaggccatcctgccaggggcggacggggctgactcctgctctctggaggacggtcagtccatgtctcggagaaacgggtgagctgagcttggcgtttggacccagttcagtgaggttcttgggttttgtgcctttggggcagaccccaggcaaggatgtctgagaccacttgggcgctgttttctcagctccaatttcaagagtgagctatcaaacccagagcggaaggagggagctctgatgagcacggtttgtcacacgataaagggattttttttttcagggctactacggttgatcttgcaactctgtaaatatgtatgtagacacttttaaaagcacgtatttatgtccctgactgtaaatgctccatttttaaagttttataacttgtgttatttaatgagtcagtcaatcggctgcagtatgggatctgataaggatctaggagaagggtctcatgcggaccctcacatgggcagaaaaatggtggtcattggccgacatcacagttttcctgtttcccacccagctaaaaaccgttgtttgctttaaattttcataaactggaatcctttcacccgctcctacagctaaccctcacaagcatgaagtgctgtggctgttccttatcctaatgatgcgcttttgtcccgtaaatgttaacactcatgaagcataccccggcctctcagttcttgagggcctccccaccgcagcagcaaggaaagctcacgaaccccaaacctggcaagtcacctgcagcccatggtgagctctgggaagtgtggttgaggccttggggtcactccttttttgcatgtgcaaatgtgctggtcacccttcaacgctcccagacggtcaggaaaactgttccaatcatgaaaaggggggatgattttgtaaaagtggcatttcctggtcagtggtggtcttcaagacgacagctctgtatctgccatgtgaagagaattaacaataaaagtgtgaagagcgattgtgaggaacaag

SEQ ID NO: 80 - DNA, 1547 bp, Homo sapiens
aaaagcccccaaaacaaaacaaaccttaattgactaaaaagtattgcatgctcaacttaggataagcactacggcaaaggatacgaaatctaccaagcttgcaagaccagttgaagctgactcaaaaatcctaacattcagctgattgccggcaggcttagagtcaggcatctgctgcttcggtgggggcccaacgcgcatgctgggcgcccgggtgattgagatccaaagagaagggcactgtaagacaggccagatgaactggctcctcgtcatgggactggtacctcagatctgagcatggcccttgtttttggcacgtagcagagaaaggattgatttgaacttaaccttgcaaagcaagttgcctgttttagcagtagtttgttgtaggtttcagggatgacagatttggatgcactcatttaaaacgttttggtcacatatcagctcttgatgcctttcttttaaattaattatagacagagagaggcatttagctgatctcttacccctggtatttcttttttttgttgttttcgtttttttaaatcacaagtagattgccagcgtaatggagaggaaaccagattggatatggactcttttttatgcctattctggtgttgcgtttgtatatccaaatggacgttatcctctcagattcttatctggcactaatttataactattatattatcagagactatgtagcaatatatcagtgcacaggcgcatcccaggcctgtacagatgtatgtctacacgtaagtataaatgaatttgcataccaggttttacacttgcatctctaatagagattaaaaacaacaaattggcctcttcctaagtatattaatatcatttatccttacattttatgcctccccctaaattaatgactgagttggtggaaagcggctaggttttattcatactgttttttgttctcaacttcaaaagtaatctacctctgaaaaatttgtagtttaatatttgtttggtgaatttgtgccactttaatccttccactatcattcccattttgttacatttctgttatggggactttatgttgaaatattgtataaagcatttgtagcaatttaaaaataaaatatttaaaattatttaaattgttttggacgcttcaattgtattatatgtgatttacatttcactttttttgttggcgttgttaacccggagagtgctcctgtattgaactttgctgttagttattttattgcttctttttggagagtgctataaaagactattctaatgaaaacattaaaatttacaatttgacatacaaaaaggggttgtccattgattttaaccaatgtagcactgagagagagagaggttaattatagatagacaagagtggtgtttgttgtttttcccctcccagcattgaaatcattggggcttgtcagatgtattaaaaaaagatttgttgtgctattgctgcaaacacttaataactagaggagaatttaaacaatgcattttatattattgtaaccaataaaaaactttct

SEQ ID NO: 81 - DNA, 280 bp, Homo sapiens
atacgcgctcccctgcgcctgctgcccgcaggcgtgtctgtgcgtgtgggcgtgtgtgcaagcgagcgtgggtgcgcgtgtggccgtgcgtggggtgcgtgtgcacgtgtgcgctggcacacatgggtgctgggtgtggccgagcgcctctaacaagtgaaaacacgagtgtgaacctctctcccctgcgtcgccacctctgtaattgatgtacataccgcaaaccgtgtgtgaacctgtcaactctctgtcgtctttggagcgatacagttgtgttgtt

SEQ ID NO: 82 - DNA, 3407 bp, Homo sapiens
ggaactggtggctccaccagacccaacgtgagagacccaggaaggaagagaagccagatggccccaggtgtcgttctcactgtacatagcggccgcaggctgaggatgtcccttgctcctgggcaaaatcccgatggactctgcggtttcagctccacagcgcccaggagagagaagacaccagcccacctgtcttgggtgggccatggactttcctgttcagctggagatgggcccagaggacctgtcacagtgtccggccctgcctccatccaggatacacaggctccacctcagagtgaccgtcactgtggagcagccaagcagtccctggagccttaaacggagctgccaaggtgggaggaggcccacagttccctaaaacacccttccggcgggagcaggggggaccccaaccccacaccccagcgcccagtgcattggcagagccgggtgcaggaagtgctgcctcttgccgagacgtcggacagggcgggggttggggaactctcggctacagcatcttacccttgactgagaacttgggtcctgacttggctcactgaatctctcttgggagaatgcaaaatccttccacctgaaaagctctgtgacacatgggggtggacgtattgaagagctgtttgccgatccacccaggagtggctacgctgagtggggagccggtgaatgatccgtgcaggagtggggcttagcagccacatttctaggagatgcagatatcctatcaccagaatgaaagctattgggacaacaggatcggggatgaccgacggccccatatggtgaatctctggcctgtggtttggctttactgagattccaaaccccactatctgcactccgtgacagtggtatggagtgtggcaatgagtttggggtctggggcagggaaatgcttgacattgttaacccaacaaacctttgttgtgatgtccctgtcacctgaaacataggtgacatagctcaccaatgtcctaaccgagacacaaactccacagagcaaaatcatttggtattggtggggagaaccccagcccttttcttgacctgccactgttatgctgtgtggcttcttcccagtggcctcacctctctgtgcctcgatgtcttcatctacgatacttctggttccctcccagggacatcgtgaggattaacacttgctaatatctgtaacacaatttgtaacctctcaggagacaatgggaagttatggggtagctaatttcccatttacaacacagaaatgatatagagctagttcgctccaactctttaggttgaagcagtgtgcaaaaggaagaaaagaaatgtttaatgttcagacctgccaagagcctccaacagggctcaagaaacatataaatcccatgagcacagccttgaaaaccagtttgactcaagccttcgggcctcagttcattgaccagatgacagccacgtgatgattagggaaggacggatgcattgcgattctgcttacacatcgggttatcaaagcgagtcacttgttggaaccatgatgctcgacctccttcaaggccgtttgcactggggcttgagtttccaagattcacaacaggtgtcagcctctgagaaccctcaaagcgtgtgttcttcaacctggcaaattgtttcctctcatgggggaagccgagctctgatgaacttgagaattacacctctctcatgccgaagaccgtggtgttccccctaatgacataaacgcagcctttcttgctgtctgagaccaaatgtctagttggtagacaggtggatgtttggcctcctaagggcacacttctgatcctgggccccaggtggtgaatctctggcatgtggcttggctttgttgagactccaaattccattatcttcatgacattcggcctcatccatagggtcctgaagctgcagtccacagctcagaaaggagaggtgagacctccctccaacctggtgccacaggtctctcccaagccacatccagcctggatgacctgggaccccagaaactgccgtttgggaggcagcaacagcaacgtgcccaggcaggcagttattcccacagagtgagccagaattgtagcagggcacttgaatgcagagctgatgatttgaaaccaacgttcacccaacttgtcagaaatggcacttacatggttcgatcttgctggagacaagtggacaattgggggtcactggcagagacagtattgcccaaaatgttcacagcaggaggccagcaggcctgaggcaacacgggcaaccgcgaatgcctcttttggtttaaattatgccatcacaaccctctttcacccatgaggctccccatccctgacagccaggtgagcatttggagctggtttctcaacatgaggatgggttggttgttaaattaacaacctccacagtatcagattgagtgagctttgtctgctggaaaaacctgaaacgtcaactctgcttcaaggtcggcaagaagaacagaaggcggagacttggcagagagactcaagctgattgtcacaggctacagaggggccagctccagaacagtgaccagctacatcctgtccaagcagcccgagtgtggtcttggtccctgcagggcaatgtgggcatctggacctggggacgatgtggatgcacttcttggaaagctgttgtagcttgtgcctgtgggtggagaaggcacctgcctggtagactctcagctttctgacccccaggagcctctgcgaggcccctttgtccttggctgagccggacctttcttttggaaatctgtctgtctgttggcatcgctgttttcagaccccaggctgcagaggaggggagaagccacacaacaatctggacccaataaagtggagagaagggcgtctctacacagcccggccagcgtggagggccccaggacagggacccaaaagcttgacgtcactgaacagggctgggtactggcagaacaggaagatttggccagaggtgacctcagtgttccctccaggggcatccaggcccctctgacctggggagaagaaggcccatgctcaggcccacctccctcttcccatcagagcccatgcgtcctgggcaccaccacttccactctgcttttcgaggctccggagggctcttcctgctgtgaaaggaaaggagaagaaagcctgtgggcaatggcaacctctgagtctggcattcttgccaatggctggccagcgaggagaatctcccgagccctgacacacaaaggcattttgtggctgcagaggaaatgggttggctctgaacaaagatgcagtttctagggccgtggccccaaatcgcttccccgagagtgaattttaacactgtaacaataaatactactgcacagc

SEQ ID NO: 83 - DNA, 633 bp, Homo sapiens
atggccccacttgagccacgctccctcctgtctctcacacctttcacccccaagactctaacaaagccacatgagccacagttgagaagcggaggggccagctgtgcatggagccatttggatggcggcgggcggggggggattctctgtatcaggagtgactttgttgccccacacagcctcctgctgcaggtgctttggaaagagatgctgccttggagctggtgaatctgtggaccacattcaagggtgtggcacaggcatcttcccatccttttcactccgaatcgctggcgacacattctcctttccagctaggaaagggttcctcgcggctggtttagattgtggttgtttgttttgcttctactaagactgttttgtttcaaaaaggaaacaagttttgtgtttgctgtctacgctggagtcctgaactgtgggtagaaaacacgacctggctttgtagaaaggacacagggctgttttatgaactaagcggtgaggctcaggtggcggctctcgcagagcccctgatgctgttgttctttgagggcttaaggcctgatgaacgtaggcacgtgatgcataatagtcttcaatggtacacttaactagtctcttctgtgtaacagc

SEQ ID NO: 84 - DNA, 1614 bp, Homo sapiens
cgggggctgcagccgaccgccctgctccggccccagtgtggtgggcgagggtggcgcatgggaggccgagcctgaatccttgcctgtgtctgacgggaccactactaaaaacctaaaaatatctgtgaatggagcaagttcaggggtcttatggaggtggcccggcccctccccgctcccttccactctgcacgaggccgccacaccggcgctggctccctgcccggcccggccctccctggcaatccctgggctctcttgcacccctaactgccccctgcctgctccggcactgccccaggcccagctcctggccctaggtccctcccagccccatgtgcctgccgcctgccctccacacatccctgtccccccaacccgggaacccctgccctcctccagcaggccgcaccgcccctggggccccctgccagccccttcccaggctgggagacggcagaagagatagaatcagggctgcccccacagagtgggacccaaggggctaattggaggcacgaggggacccctccccagggccttttcctcctctgcgtcttccatctactgaaatgggagagggggtggggagcttctgttctggtgaagggacccgggcaggcccccagcaccccatgctgacttggagaaccccagatctctggggcccagccaggcagggtgtgggggcagctgtgccaatctacctcacaggcccaccccctgccgggcatgccgtgggatcatgggcagggaaggctctgggggtcggagacaccgctgcttagcacccccagccagaacaccctgagggtctcggggctctggagagagtggggcgggaggaagaattggcaccttcctagggaaggagacgagcgcttcgccttgattctccgagaagcctccgagaagtgctttaagtgtgtttgcatgcgccaggcggtgggcagcgggggcctgtccagccctctcccgccatccttccccaagtgacgtccactgccttgtcaccagcgacctgcctgtcatgcccaccccctgaggaagcatggggaccctaacaccctggtgccctgcaccagacaggccgtggtcaggcccaggccaccggccgggttctgccacagcttcccacgtgcttgctgacatgcgtgtgcctgtgtgtggtgtctgttgctgtgtcgtgaaactgtgaccatcactcagtccaaacaagtgagtggccctcgaggccacagttatgcaactttcagtgtgtgtcataacgacgtcactgctttttaaactcgataactctttattttagtaaaatgcccaggagtcctggaagctacgcggacttgcagaggttttattttttggccttagaatctgcagaaattaggaggcaccgagcccagcgcagcagcctcggacccggattgcgtttgccttagcggatatgtttatacagatgaatataaaatgtttttttctttgggctttttgcttcttttttcccccccttctcaccttcccttctccccgaccccaccccccaaaaaagctacttcttcattccgtggtacgattattttttttaactaaaggaagataaaattctatattctt

SEQ ID NO: 85 - DNA, 69 bp, Homo sapiens
tttgttgctgggagcggcggcagcgagtccctgcaacagcaataaacttccttctcctcgggccacctg

SEQ ID NO: 86 - DNA, 78 bp, Homo sapiens
ccaaaagaagtccctgggactgtttcagacttggaaaggtcacagaaggaaaataatataataaagtgacaactatgc

SEQ ID NO: 87 - DNA, 87 bp, Homo sapiens
ccaaaagaagtccctgggactgtttcagacttggaaaggtcacagaaggaaaataatattatataaagtgacaactatgcaaatcac

SEQ ID NO: 88 - DNA, 3554 bp, Homo sapiens
gaggattttccaaagagatttgaactcttcagactttttaacatgcccctgtgaacaggtattttcaggactcaaactaccacaatgaacagagtatagattttagattgctcttctagaaccatggctagaagaatctttcctttgtcctgttctaacctaggaatgaaaaacaccaccagtttgaatcgcctagatgaaaatcttttcctctgggtgttatttttccccactgaatgccacaccattgaaaatagactgctcatcccctcttcctttcttgtccttgtcccatgctcaccccaccctcctgtcctgtgtcttggagaagcacagggctccaccctgcaagcggcatctggcggaccctcatgagcctgtcgtgcaggccaggtcattggccccttccccaatcccggccctgctgtgctgctgccatggcgcatgctcctaactctgaacaacccacggcagcttctagccccgcatctggaaaaaggcccctttccaagcaatctcacgtttactggttgttctgggagtaagtggctaaatgtatattttgggggtatcccccaacaacagtttgttggccacaggttgaaaaggaaaggaataaacgggagttctgcatgtgagttctcaagaaaaggaaagggaggctgagcagtggctgaagcgatgcagccttgagacacgctgtgagcatcccatccgccgccccagcgctgctggtagccaggggaggggtctgcacagcgagaagtactgtgatgactttgagccgttgacatgtatgtcttcagatgcctttctgcctctgtcgattttagggtatggatattaggagccataacttgtaatcttgttctctgaacgtagagataagctgctataaagccagtagatgttaaactgaagagaaattattcccacctgctatgagtcaggcttaaggaatctcttcaatagtgtctctttagtaaaataccaaacatgtctttgtatcaaggaacttaaaatttctcaacaattgtattttgaacactgttaccctaaaagtgctgtctcttcaagtcatcttttgcaggaagtgagccaagatttgttctagactcccattttgcaaaaggcttactttccacttctgggctgtattttgatgtctcatcttcattgttttcactcttaacttagagctgcttcaccagtattggggtcagactggccatcagcacctgagcgtgctgagctccaggtatagtggaccccagggtgcctcataccagccagttagagagcataccttttatttttcagggcagaatgaccagtggttctgagtttgagtttggacagcttcaaagagtggtccgttcaaatgtcaaagcaaggtgcctttggtggctttgtgaagggtgaaaatcagtgatgggacatttactaagtatttctttttttttttttttttttagttgttgagacagagtttcactcttgttgcccaggctggagtgaaatggtgcgatctcggttcaccgcaacctccacatcccaggttcaagtgattctcctgcctcagcctcctgagtagctaggattacaggcatgtgccaccatgtaattagcccggctaattttgtatttttagtagagacgggatttctccatgttgatcaggctggtcatgaactcctgacctcaggtgatctgcctgcctcagcctcccaaagtgctgctgggattacaggcgtgagccaccactcccggctaagttagtatttctttaatcttaatgctttaaactaagccacttggatcctgaataatttaaatcttgagctacattggtaagtaataaattatttaaggccaggaattcctgtagttttcatggagtctgtagctttattaaaaaataaatcactgccaggcttcattcttccatatgatcctctaaaaatggacacttcctctgaatgctgtatctcatggcacctggtccaactagaaatggtcaaggaattcatttggctccttgatacatcagtcctcaatattactttctaggtattttatggccagattgcttatatgagtggtcttttggtttggtagtaggtttttatttttaatttctgtactaatgaaattcctgactttaatttctgaaaaccaaaaactctccaagtgtatttatttatattttttttaatagagacgaggtcttgctatgttgcccaggctggtcccaaactcctggcctcaagcagtccttccaccttggcctcccaaagtgctgggattatcaatatgagccaccatgccagatttgttcatttttaaacatttttatctcttcaagtcatcttttgatcttttaaaaagcaccttcaaacagctgcaccttccatttgcactaggaaatgaaggtagtgatgggattggcaatgttcctggcagatgtttcagcccaaaagctcttctacagaccggtttagagctggtgccctatgagaatattagggagcttttattttaaattgaactttacccttgtccatgcaaggcattcctcctgaatgcatccatgaatttgtttacttttgcgtcaaacatatgagccattgtcatgctcagcctgtgccaccattgctctgtctgatgtatgtaatcatacaagacctgattttggttctaacacagtggtctttgactatcaacattgatgtttttagagatgggttcttctggttgatacagactatgcattgcgtttagcagatggggtaaaactggcctaaaacaagtctttgcagaatacatgccaatttccaaaaaaaaaaaaaaatttgttgctcaggtgttgcacaatttttatctaacactgaggctatcagctccaactaaacaacatttcagtgggtgaggctgccctaacttccattaggggccatggtctcactgccatcacttattagccatgagaatttggttgtagttttcaggtaggttggtttcttcctcatttgcagcttgttgatacttgttcctttttatttattaacatcccaatcaatttgcagctgccatcattacataaatatttttctgttataaaaagaagtgtgatctgtttttttagtgatttcctttgtttgggaatagagattggaagcacatactcagacctgttttgttaactagaattctttaaaagctgatgccaaacatctttacagaggaactgtagttcacatccacctgtctgacattgtcccctaaaaacaagtgcagtgtggcagctgctgaatctgtctgttcagtttgtcaaggaggataattatgcttgggagagatctgaaaagaaggtgaatattttgcacttttgatactcttaggaacaaataacttatttggcaaattgtttcttttttatgttttgggtgttgtttttgttttttgactttttttgtattgtgaacaggcactgaagctgatgttattttaagattacagaatggaaaaagaaataaactattttaatgtctgat

SEQ ID NO: 89 - DNA, 417 bp, Homo sapiens
agaaaagtggtaaagaatctacctcactgggaatgtcatcattaccaacttcagatgggtttaaccatcccgcccgttcttcaggacagagtcctgatgttggtaatcctatgagtcttgctcgctctgtctctgcttcagtctgccctatcaagcccagtgactcagatcgcattgaacctaaagctgtgaaggctttgaaggcttcagctgaattccagctaaactctgaaaagaaagaacatctttctttacaagatctttctgatcatgcttcctcagcagaccatgctccaacagaccagagtccagctatgcctatgcagaattcatccgaagaaataactgttgcaggtaatctggagaaatctgctgaaagaagcacccagggcctcaaatttcatctccatacaagac

SEQ ID NO: 90 - DNA, 1983 bp, Homo sapiens
acgacggccctcacccccacgtcctgacacggccggcacttggccggaagtgagagcctgctccaggacaactggctgtcccggggcgggccatgggcccaggccctgccagaggtcccgggagagtgtggacagctctggtccatccagccccttggcccacccaggtccagagcatccacttcaagttaccacccattctgtcttccagacagttctcttccttctctgtactgcgtactgggtcaccacatcccagagccttgctcagttatagcaactgctgcgggcgtgcacatggcataggcccagtaacttacatacatcggctcacttaggcctcagacagcagcacgaggcaggcacttttacttcttttaccattagaaagccaaggcctagagtggtgggctttgaccacagccacacaattttgaagtggcagagccaggactggagcttagccctgctcaccctagacctatgcgcttgacaagtgcgtgactgtgacaggcccatgggcccggactgcccataggggtcactgtaccatggcaaaggctgaggtgcaccaggaggctgtggcgtcgtcacctgccttatttgctggagaagctgtagcaaagaaccacagactgggcgacttagacaatagaaatgtattttctcacagttctggaggctggatgctggagaccaaggtgtcagtgggctggtttcttctgaggcctctgtccatggcttgcagatgctgctttctctctgtgtctgcacatggtggtccctcgatgtgcgtctgggtcctgatctcctcctcttataaggacacaaatcatgttggcttagggcccaccctcatgaccccactttaatttttttttttttttttgagatgaagtctcactctgccacccaagctggagtgcagtggcacgatctcggttcactgcaaccttggcctcctaggttcaagcaattctcctgccccagcctcctgagtagctgggattacaggtgtgtgccaccacacccggccaatttttgtatctttagtagagatggggttttgccatgttggccagactggtctcgaactcctgacctcaagtgatccactggccttggcctcccaaagtgctgggattacaggcatgagccacctcacttggcccaattttaacttaattatctctgtcaagagcctatctccatatacagtcacatcctgagctactagggggtaggacttcaacatgcacttctgcaggggccgcagttcagccaacatcatctttttttttgagatggagtctcgctttgttgcccaggctggagtgcggtggtgcaatctcggctcaccacaacctccacctcccaggttcaagtgattctcctgcctcagcctcccgagttgctgggactataggtgtgcgccaccatgcccagctaattttgtatttttagtagagacaggctttcgctgtgttggccaggctggtcttgaatgcctgaccttgccgcccgcctcggcctcccaaaatgctgggattacaggcgtgagccaccgcgcctggcctcagccaacatcatctaagggctctcacggagggcctcccagctgcccgccctgtgggcatttgcacatatcctgacaagcctgaaagaagctccgggtgcccattgttcagtccaggtgcccattgttcccgggactgaggcccgggaaagggaagcgacgtggcagggccagcagcagaccctgggcctttctctagactgagcaccattccccgtgggtgtgctctcagcgccgcaccgaccttcacactgcagagatggatgccaactccctggcaggggcaggactgctgccgagcagccccacctgccctcccagccacaccccaagtctgtaagggccgctcccaggaacacctgctactgcacactccaaaccaataaagttttatattttgtttactt

SEQ ID NO: 91 - DNA, 348 bp, Homo sapiens
cctgcctcagggaggatctggagtctgtctcaagcccactagcctgatctccgaggccttgaccccagggcgatgcctggaggcagagtggcagagctggcctcctgcccagagctcagcacaggccctgggagccccgagaagggaaggcaggatttggggatgggagcctctggagaggggacacctggggacccctggttgaaccctctttttcttggggtgggcaatgatgcagcctctcagacctgccttcctgggcaggggtgggggtgcatcctcaggagggctccccctttactggtctcccttcccttctccatgaacaataaagacgatgtctttctc

SEQ ID NO: 92 - DNA, 1930 bp, Homo sapiens
gagtgcccgctgggcagtgaacagaccactagccccggctggggcccttccctgacttggtttcccttcctaacctgctcttgcacactttccttctgagcctccatggagaccagcctgcaagccggcccagcctgtccaggatacagtggggctgagcacccccaggccttccactcctctaccctctgggcaccagaaggctcctggaccatgagcttcacccccagaattccctgctgaccctgccccacttccagggaaaagctgggggaggttggacccctctcactgactagctgtctggtaggggtgctaggaccagcctcgcctgtggggttgagctgtttgaggacaaactccaaggtcccttaaaaagtgccttttagaggctgggcatggtggctcacgcttgtaatcccagcactttgggaggccaaggtgggtggatcacctgaggtcaggagttcaagaccagcctggccaacatggtgaaaccctgtctctactaaaaatacaaaaattagccaggcatggtagcaggtgcctgtaatcccagctactggggaaagctgaggcaggagaattgcttcaatctggaaggcagaggttgcagtgagattgcaccattgcattccagcctgggcaacaagagggaaactccgtctcaaaaaaaaaaaagtgccttttaggccggatgtggtggctcatgcctgtaatcccagcactttgggaggccaaggcaggcagatcacttgaggtcaggagtttgagaccagcctggccaacacggcaaaaccccgtttctactaaaaatacaaaaattagctgggtgtggtggcgtgcgcctgtaatcccagctactcaggaggctgaggcaggagcattgcttgaacccgggaggcagaggttgcagtgagctgagatggcaccactgcactccagcctgggagacacagcgagactctgtctccaaaaaaaaaagtgctttttgaaaatgttgaggttgaaatgatgggaaccaacattctttggatttagtggggagcataatagcaaacacccccttggttcgcacatgtacaggaatgggacccagttggggcacagccatggacttccccgccctggaatgtgtggtgcaaagtggggccagggcccagacccaagaggagagggtggtccgcagacaccccgggatgtcagcatcccccgacctgccttctggcggcacctcccgggtgctgtgttgagtcagcaggcatggggtgagagcctggtatatgctgggaacagggtgcaggggccaagcgttcctccttcagccttgacttgggccatgcaccccctctcccccaaacacaaacaagcacttctccagtatggtgccaggacaggtgtcccttcagtcctctggttatgacctcaagtcctacttgggccctgcagcccagcctgtgttgtaacctctgcgtcctcaagaccacacctggaagattcttcttccctttgaaggagaatcatcattgttgctttatcacttctaagacattttgtacggcacggacaagttaaacagaatgtgcttccctccctggggtctcacacgctcccacgagaatgccacaggggccgtgcactgggcaggcttctctgtagaaccccaggggcttcggcccagaccacagcgtcttgccctgagcctagagcagggagtcccgaacttctgcattcacagaccacctccacaattgttataaccaaaggcctcctgttctgttatttcacttaaatcaacatgctattttgttttcactcacttctgactttagcctcgtgctgagccgtgtatccatgcagtcatgttcacgtgctagttacgtttttcttcttacacatgaaaataaatgcataagtgttagaagctctt

SEQ ID NO: 93 - DNA, 189 bp, Homo sapiens
catggtgaaaccccgtctctactaaaaatacaaaaaaaattagccaggcatggtggcgggcgcctgtagtcccagctactcgggaggctgaggcaggagaatggcgtgaacctgggaggcagagcttgcagtgagccgagatcacgccactgcactccagcctgggcaacagagtgtgagactccgtct

SEQ ID NO: 94 - DNA, 1028 bp, Homo sapiens
gccactgagtggttatcacctcagtgaatcttcccagggctctgcagtaaaaacaaaggacaacccagccaagcagaggaagaagctgccgaaggggacagactccactgccagacggccagccgtttgctgtcctgccgcccggctcagtcggccagacttcctctaggagtggtgctgctaccttgtatgtttacataatgctttagcccaaggacacatcaccaacccatggactcgcagacaccggggctgggtttctctttcctctttttggagaaaaggaacagggcagtggaatgaaaattttttgtttgtttgtttttaagaaacaagaaaacagaactgcctttgcactaaattagtgacttggacttttgcccagtgaagacaggctgtgacactctggatgtcttggtgtgtgtagacacacattgcagactcttaacgcaggaaggacttcaaacttctgctgagaccttggggtcaaggaacatttcattggttttttttgtccacccccatctcccttgctcatttggatgcgtcaccttaattctcctgctgccaccgtctttgattcaccgggatgtacagtttacagttgaagagcaaacagaaaggttttctcttggtgggatatgcagaacttgggatgtgtgtatatataaatatataatatatataaatatatataatactgacttaaaaaatcaaatcccccgacatacgttttttttaatctgtgccaaaaatgtgttttcagaggaaatcttattttcatattcagactttgtattgcccactcatttgtataagtgcgcttcggtacagcacgggtcctgctcccgcgatgtggaagtgtcacacggcacctgtacaaaaagactggctaacccctcttcctattaccttgatctcttcccccaacttcctaacacttattaatttatgaaactgtttttctcagcgcagttttgttttgtgtgtccattggattacaaactttattaaaaaatataaaacac

SEQ ID NO: 95 - DNA, 339 bp, Homo sapiens
ctggaagggccgggctctgatgcccagaggctgcaattcccagggcctggccctgcttccccagctaagcaggagtcttttgtgcttgagccaaggaaacatcattagatccgctaaggggcatctgaaacatccgtcgagtggcagaggcaggataagtcacctgcacatgaagagactcattcattcatacagcaaatattactggtacatcttccacatgccaggccctgcaaagtgctggggagataccatggttttcctggagctggtatttttggggtggagggaacccaccctgaataaataaagtaacccaataaataaagaagatgattt

SEQ ID NO: 96 - DNA, 391 bp, Homo sapiens
gccggcccagcaagatgaaacagggcaccccagctgacctggtactgaggttgggctgagaccctgcttctcttcccccatcaccacctgcccctccctccagcccagctccattctttggcataacaggcaactctaacctagcccagaagaggatggctcatcctgggtgggacgatggctcctgccttgaaagacaaaaatcccaccttgggcagagctgagtgtgagaagatggaaaaccagtatctgccaggtgctcagtgactggccatcacattaatgaatgacgagattggagtacactgtcaccaagggcaggcaaagatgccctctggggttgtctggttcccagtgagaggctcctgagaaaaataaagctggttcccag

SEQ ID NO: 97 - DNA, 392 bp, Homo sapiens
gccggcccagcaagatgaaacagggcaccccagctgacctggtactgaggttgggctgagaccctgcttctcttcccccatcaccacctgcccctccctccagcccagctccattctttggcataacaggcaactttaacctagcccagaagaggatggctcatcctgggtgggacgatggctcctgccttgaaagacaaaaatcccaccttgggcagagctgagtgtgagaagatggaaaaccagtatctgccagttgctcagtgactggccatcacattaatgaatgatgagattggagtacactgtcaccaagggcaggcacagatgccttctggggttgtctggttcccagtgagaggctcctgagaaaaataaagctggttcccaga

SEQ ID NO: 98 - DNA, 1229 bp, Homo sapiens
atgcaggcaagaaaagatgccgccgttgctgccgtcaccgcctcctgggtcgtccgccacgggttgcactgccgtggcagacagctggacttgagcagagggaacgacctgacttacttgcactgtgatcccccttgctccgcccactgtgaccttgaaccccatgcactgtgacctccccccttctcccccttcccactgtgattggcacatcgacaagggctgtcccaagtcaatggaaagggaaagggtgggggttaggggaaggttggggggacccagcaaggactcagagagtcagacagtgccacttggccacttggggtaaagccagtgccagcaataacagtttatcatgctcattaatttgggatttcaaaacacaaatgaaaactcacacccacccacccccaagtgcatgtctccatcacttaaaaagtaagttccatttgaaaatatcctttcttttttttttcttcctatttttgtttgtttatacaaatatctgatttgcaagaaaaagtgcatgggaggggttttagtggtttaatgaatttttaattaagaaagggtagtttggtagtctacttaaaaatgtttctgggaaattcactagaaacattaaccaataggattttggtgagcttagcttctgtattcctactgccgcccagaaaaggggcagggctctgcagccgccaggacagacgagcaccccatgcctatacctccctccccgagctaagtcccagggcatctgggccttgcctggagactgggctagctctgtaggctcggagagcctggggagggtgccaaccccacctctagtattttgggagatagggaaagtgaaccgacttccccttcccatacccctcagggtggttccctaccagccaggcttactacttctagaagaaagcagagtgccagggagtgagattgcatccctgggcttagaagtgacggagagaagacttgtttagtattttgccatcagcacaaggaaaaccaggagagagtctgcctccaggactctgagccttctgcctcgtatgttcagaaggtggataggtcttcccactccagcatggcttgaactcttaggggtctgcagtgctccatctccattggtggccccagctcagtaactatacctggtacatttcctgtgtgcaatcagtaccttgaaggcagaacattctgaataaagttggaaaaagaac

SEQ ID NO: 99 - DNA, 1187 bp, Homo sapiens
cctgagcacggtttttcctcatgtgacttctgggaaggcgctccctcatctgggccaaaggaaggaggacgaagccctcctcagctggcctgtgtttggggcatgaatctctcctctcctccttgtctggctctgttgacaaaccgggcatgtttggcagtaaattggcaccgtgtcacactgtttcctgggattcaagtatgcaaccagaacacaggagaagaaaagctccaggatccctgtccccatctgtcctcttgatgtgagagagactctgagacttcttccatcgcaatgacctgtattaaacacaagccccccaagcaaaagaagaggttgagtttgctgccaggattcagatcagcccttcccagggtctgcaggtgtcacatgatcacagttcagcgggaggctttccgtacccacactggctgtagccacttcagtccatctgccctccagaggaggggtttcttcctgatttttagcaggtttagaggctgcagcttgagctacaatcaggagggaaattggaaggattagcagcttttaaaaatgtttaaatattttgctttgctaatgtgctgatccgcactaactcatctttgcaaaaggaactgctccctcggcgtgccccagctggggcctctgaagggattcctcactgtgggcagctgccctgagcttcaggcagcagtgtttatctctggccagttgtctggtttccatgtattctaggccaggtaggcaacacagagccaaggcgggtgctggaagccagacggaacagtgttggggcaggaaggtggatgctgttgtcatggagctgtgggagttggcactctgtctgctggtggccctctcggctcacatgttcacagtgcagctcctggcagacttgggttttctctttggtggtttctaaagtgccttatctgcaaacaacttcttttctccttcaggaactgtgaatggctagaagaaggagctcagtaaactagaagtccagggttgcttggtttactggtttataagaaatctgaaagcacctctgacattccttttattaactcacctctcagttgaaagatttcttctttgaaaggtcaagaccgtgaactgaaaaaagtgttggcctttttgcgggaccagatttttaagataaaataaatatttttacttctgtc

SEQ ID NO: 100 - DNA, 533 bp, Homo sapiens
gctcctgctggcatctggagaacacccctgtgcctgggacaggggaggacccttcttttggacagcccccccacccagagcccggtcccttgggggcctcaagctggggtgggatgaggaggcgctctgctggcagtgctgaggacgggtactccagctccaggcctggagaggcttcccagcaacacctgcagtccagcccccctcttctaggatgagccactgtagatcattaaagttcctccttgagaggctgagccgtagccaggattggggagagcccttgtctctggtcagccctggagcatgggatcgtgggaaagaggagggggaccaggcccagggcaggggtcagaggcccaggccctgacttcggcttcccagagatctctccgccttagttaagagcatgtgtcgggaaattcctcagagtgctcagagtccctgtatttttatacctttttacaatgttaactgttcagaactgttttttgtaacaaaaccttgtttttaaaaaagtttgtacagctgtg

SEQ ID NO: 101 - DNA, 1763 bp, Homo sapiens
gcctgcccccacccgccatcctctctgccctcttgctagggaaccctgccagggtgaaggcaaggaacaaccacctggcctccattctcttgggggagtcttggcactttgcaaacatcctggccaccatgggcaccaggacacagggatggataccacctaccctcgcctctggaatggcctacccaacccgagaagaatgcacctcattcttccctggcctctttcccacccacagcccccagaggctctagatcaacaatgttagcatgttccagaatggctgtgggaggcctagggagatgggccccacttagaattgctcccccttcattctgatgcctccctggggaacaaggataatgactttgcatctgcacctggaacggggcctgggggacctggggtctggtgtgccaggcaccaggctgcctctgctcttggaaaactaggaaaggggatcagaaacatcctctccccgctctaggtttcttctcccaaaggggacccaaggctgtgacacttacctccacccccatccagcacccttcagctgtgtgtggacaaacaaggacagaaaaacccagtgtccaagggccaatttaaatagaaaaaaagacaacaaaattttaatagctgactccgacctcagaagagtgattgctacctttctggaaagactttaattaccagagctggcttctcccagctcagaaatgctgagaagccaacgtgaggcctgaggacacacaaaggatgacggggcaggaggggatgaggtcagggtagcagagtgtgtgacgacggatttgggggcctagaggtgtccgtggttcctgggctgggattttggactctggatttgaagggagctggagcttccagatgtagcaggggtagggggccagatgttagaagagggtgtgtgtgttgggaggaaattaggttatctctgaaggtggagtttaatttcctttaatagtctttaattattccccttcattctgcaggcagtgggaggggaaggcttgcccggtctctctcagcaacccagggaccctgcacatagcttaggtttcatccctgaataaaccgctgtgcaggcccatgtcccctcccacagtagggaagacagctgccacgggaggttaatagcccggagtgaggtcactgagacatgcacaggcaggctggttcagctgggctgcagggcacgggcaggaggaagccagcctaccctcttcccccactgccagtgaggccattgtagggcagttggccctagggcttcggtccatctaggttttcagtggcccctgctgagacctcacactgagccaactactgtcactgttttaaccaacaaaagctagcctggaactgctatggttaaagtgggtgagcgggaacctgaaaatccccttctggaaggttctacagaactctatttgcaagctcctgctttaacctgagcgtcctctgctcaggatcataccccagcctgcactgagtcaagaaggagaaggaggctctgaaggggccgggggtgtgagctggggttgggactcccctgagaaagagctgtgggtaggaagggagtgagcattgcagagatagggctgggggtcggggccacactgagtgtgggaagctctggagttgctgctgggccatcgaggggccctggtgttggctctgagaatgttctgggtgaccagtcacctactttctgatcaataaaaatgtcgacatgcatttcttac

SEQ ID NO: 102 - DNA, 1153 bp, Homo sapiens
gacagctcccacccaccatcctgtccccctggggcgggcattggcccaggtggtggagacagagacaggcccctgaacgataagcaccaagagaccccaaggctccagatggaacactgagggtgaccgtccctctcagaagccttttccctggaagtgtccatgcctcacctgcaacccatgtggttctcagacttgaatcttctcggccccccaaaaagaaggacctcatttcttatagcctctcctgtgattcaacacaacccatggagatgtccccttctcactctgaaatcatccatttggggacaaatccacattggggtctagaaacatccacgtatctcatcagccatcttgtcctgtgcatcctaacagaggaaggatccatgattctgctttggtccaattgcttcctctctgcagaggaacaaccctaaaaccagaccactccacgcaggacaggcaggagagattcttcctaaagcctcccccataaaaagggagctgtggatccacttagatcagggcggaaccatctttcacccggccaagctcctgcccagatgttgaccctcacccagcgtgagctgtcacatagtaggagcttctagatgcatgtggaagcaatgagagttgtcccttagccttataaactccccatgatctgacatgcagaaatccagccttgtccagaatcctcctggaatttcttggagacgaaagtatctgggggattgttgggtactagggagactgggtacaagggtgaaaagtagttcccataatacacatggttgactatggtgatccaccttgtgatggttaatattaggtgtctggagaaggttgcttcattggccctgggacttctctctgcaggaggagagaacgctgcctctcctctggattggtctcaggctctctgttggcctttggtcagcgtttccacatcctgctctgctgcaggagagggggctaaggggctggatccaccaaggcagctcacagcgggaaaactctgggaatgaaccactgaattcaggggatgggggtgggggggcggttctcgaggtgtgtgccagctacacgtgtgttctgtatgggtccagctgcgtttccatcactcgctaataaatcaacagaaacacaa

SEQ ID NO: 103 - DNA, 245 bp, Homo sapiens
gcccatcttccctggcgtcctctccctcctggccagatgtcgctgggtcctctgcagtgtggcaagcaagagctcttgtgaatattgtggctccctgggggcggccagccctcccagcagtggcttgctttcttctcctgtgatgtcccagtttcccactctgaagatcccaacatggtcctagcactgcacactcagttctgctctaagaagctgcaataaagtttttttaagtcactttgtac

SEQ ID NO: 104 - DNA, 261 bp, Homo sapiens
acccaggccctggagctgccagctctgccccagcgtggatggcccactgtcaccatgcaacagcatgattctttgcccagtagaggaggctggagagtccaggcaacagaaccctttcttccctgtctgccccgaccgaccctcggacccagtaggatggcaaatgccgccagcttgaacccctatggggaaaagatgcaaaagtgttcagccaagtgacgtttactaaatagccaataaagggctggtgggtgtgaatgc

SEQ ID NO: 105 - DNA, 494 bp, Homo sapiens
cgcctcccctctcccctcagagggcacagctgcaggcctgaccaaggccacgcccggctctcgtgctctaggacctgcacgggacttgtggatgggcctggactctccagaaactacttgggcagagcaaaggaaaacctcttgttttaaaaaaatttttttcagagtgttttggggaggagttttagggcttggggagagggaggacacatctggaggaaatggccttctttttaaaagcaaaaaacacaaaacctcacaactgcctggcaagcccagtatcacttgtttgggccctagcgggactccaaggcagccacacgcccctcctggaagggtgtgtgcgtgtgagtgtgtgcgagtgtgtgggctggtgtgtgaatatctataaataagtatatatggtgtatattatatgtgtataaataaagtctgtacatattggagctctgggagatgctggaataaaagacaagagttacatctggacttgg

SEQ ID NO: 106 - DNA, 542 bp, Homo sapiens
ccctactggctcactcctgagaatgggctcctgttagatgggcacgggcggattaattttagcaaaatgttctgggtgggggtagaatgaggtggggtggggtgagctggctttggaattctaggggcatgagggtattttttaggttctaaggttttatcttgttgcaagagtgggacctacccaagggggaagacaagatgtcatccttggaaaccctgcaggggacagtttttccagggtggcctatcattggggtatgagtggctgactgccatctccatgcctgagagccactgatttttcattggcatttcccctggtttgtctcattcttcttggttgagtaggttttaactggggtagcactcctgctaggagtcccaattatttttgactaggggatgggggacagttgacatttctggtcctacaggccctttctggccagggaggcattgctgcaggtgagcctgggatgcccttgccacccgtggttggatcttgttttatatctgcaaataaatagcttgtttggaagc

SEQ ID NO: 107 - DNA, 156 bp, Homo sapiens
aggcacccgccccggccactccatcaggcactgacatctccacgaccggttttcatttcttttctaaactatttccagtcttgttcttagtctctttccatctgtgtcttggcttcttcagtcggtttaattaaaacaaacagaacaattttcccc

SEQ ID NO: 108 - DNA, 2669 bp, Homo sapiens
cagtccctcaactgagctcctcatgcaaagctgggggccaccgggctccactgccagccgtccctctgggggccatttctaggcaaacaggcaacccaggaatgtggccatcaagaggtgaattccggtcctttctcctcccctagctggggagagagggatcttagatgagtcttacccttcatgggctgcagaggccccactgcagaaaagaggaccaggagctggtgttccaaggcagaaggcattcatgtcttcagggatgaccgcccttgcttcaactctgaattcttggggggatacaccgggaccccaccaaagcttagggggcatagtctttttgcaatcacaattctaggagccagttgaccccagcagcccctcgctagttgctctggagaggggttggctctctgagccatcagtgccccttcctaaacatcagccactgggccccacctccacagttcccagaagcaccgggacacacaggtgggaaagatggaggcaggtgacttgggcagggccaggaaggagccgagggagccccaggggccctggccagagggagtggtggtttgaaaagtagaacagctgaagctggggccagcctaggagactcttgcttgcgagaaaatataccaaagcccacattacttttctccttattggaagaaagagaagcagccattgtaccaagctatcttctggtggaggtctgctaaggatacacggaggtctcagcaaagggaagaaactatgtgatccaagggccaccctgctcctcggccctgcccatgttaactgaccattgcactcattctcagatctgtagccgtcttcctgtctggaagctggggcaaccaccaccagtcagcacttcagggtgacagcataatttgccctccttgtgccaggtacggtcacctggtttgccgcattcacattttcaggtggatgaccaagcggaggaactagaagagtctagtgaagcatccagagactggatctcctttcacatctggtttgataaactccgaatgaaggagacccccagcctcaggaaagcacctgtccttccaggagggacgggagagagcctgacccagtgtattaccacagcccttgttccacctctgagggagacagtgacagatgggaaggcagtgatgctcttggtcccagccagaagccaggggagatgggaggtacaccagagcagggcctgacaaggaagaaaataaggatgctttggacctcagtgtccttgtcttgaaaatgggaaggacaattcatgtccctgtctgccctggggataaatgagaggataaaagagaaagttcttcccagtttcccaggtggtcccagctagatcctgtgtccacggaagctgctggtgcccaggctgtgggtcttgttggaagaagcaggactggaacaaaggatgaaaaggaggttggcatggacataagaggagagcttgcactggaccaccgaagaccaccatccctggtctgggctctggcaccaggctctgccagtggcagctcagaggccacagggtgacattggccacacccccaccccacttccctggcctgggcctcgaaagatgaagcaactgaatttattcttaaatcagagaccaggaagggaaagtcagctggggccatggctaccttcttgggagagtgacccctgaacccagccaaggccacattcaagctcagtgtcaacactaggcatgaacctccaagggacctgtgggctggggcagaatggcttcagtgacaagactcaaaggaggcactagcattgtgctgctggactgggggaaggacttgcttgggaggagaactctacataggagctgggggcaggtggacctagatccaaccttcaacccctagtgaggggccaggcagaggacaaggcaacaactaagctaggtaaagttctggaaagtttccaagcccaggaggaacaaggaccactctggaaaaacattccaaagcccattgcatacctgtggtagagactaggggagtgattccagggataagacggacaaatgtgttccaggccccagctgatggtgggtgtggtcttcataatgagaggtggagctgagatttgggcctgggctgggaagaggagtacacagtccatctgatccacctctcttatggttccattggcaaaatcattcatcagtcgtcctatcttttcctggcgagcgctcacaatggcttcataagtgtttcaatacagtgtcccaggcagtcactacctatagattagagctgatgtgctggcctggggctctagagctgggcttcaggaagaatgtggtcagggccatcagggtggaacaaggtagctcaagaccttggaaagacaccctgagggcacaatcgtccttgcagtttaagatgacactttaaaaataaattctttcctaatgatggcttgagtcctgccactcaatgggagcatcagcggaacccgtagcatcttatttggaattgacattctctattgtaattttgttcctgtttatttttaagttttctttttgtttcactggaaaggaaagatgatgctctgttttaaacattaaaagtatacaagttgctttgttacaataaaactaaatatgtacacacacc

SEQ ID NO: 109 - DNA, 98 bp, Homo sapiens
aatgacactgagttgggcaaaacccaggacatctcctggctaagcctctgcttccgtactatggctccaacagaaataaaatacacaacacaaatatc

SEQ ID NO: 110 - DNA, 1297 bp, Homo sapiens
aagggactcgggactgaaggtctcctggaagcttctgggtctcactggaccatcaggactgctgccgcccctctggagagagcagctttttatttgtctgtagacagggaacatgatgggcactgacctcctgtaaagaataaaactgtgggccgggcgcggtggctcacgcctggaatcccagcactttgggaagccgaggtgggcagatcataaggtcgggagattaagaccatcctggctaacacggtgaaaccccgtctctactaaaaatagaaaaaaaaactagttgggcatagtggcatgtgcctgtagtcccagctactcaggaggctgaggcaggagaatcacttgaacccgggaggtggaggttgccgtgagttgagattggaccactgctctccagcctgggcaacagagtaaaactctgtcccaaaaaaaaaaaaagaatacaaccttgcaggatgtctctcctggagacagcaagagggagaggagggagagggctctttcttagaaaagaggcctttggtgagcccagaagtttgaaaccagcctgggcaattcagcaagatcccgtctctacaaaaaataaaaaaaaattagtcgtggtgccacttgcctgtggtccccactgcttgggaggctgaggtgggagaattgcttaagcctgagagttggaggctcagtgagccatgatcatgccactgcactccagcctgggtggccattgaattctgcgtggattgcctcagtttgccttgtcagccaacttccactggctgccttggcactgccatgacagcacagctccacaccagagctggggtttctcttcagtcctgggtaccccttggcagagggatttgctgaggaaaattaggtatccttcctagccctccacacacttccaaaccagggctgcggatctgatggatgccaggaagacagccttgggctgagagtgacatcactgcaagagttgagagccagcgtctaaagtgtccacggcatcctgggaggttttatccttggtgactctaatggtagatttttgtccaccttgttctatttgcttttgtttgtttttgatttttctgttttaaaattttaaggagagatggggtttcaccatgttgcccaggctggtctcaaactcctgagctcaagcgatctacccaccttggcctcccaaagtgctgggattataggtgtgagccaccgcatccagcccacattgttctatttgtatttcatgaaagcagttctgaatgagagtaaatcagcttcagggtgt

SEQ ID NO: 111 - DNA, 656 bp, Homo sapiens
ccagaaccaggctgagcgcaggaggacaggcaccaccggatgccacaccaggcaggaggaggtgtggacagtgatggtacggcggccctgcatcagcctgcgggtggcctctggatcctccgtggaccgaaccgtccccccaggaacacaccttcaggtagaccccgaagcctcaaggccggggctggagcggagaccccagggcctctcaggagacagtgaggctgcccctcctaccacctacctcattctgcctactcaccccaggggccacagccacagcctgctggactcaggactgtcctgtcaactccagacaactgaataaacaggccgggtacagtggctcgcacctgtaatcctagcactttgggaggccgaagcgggtggaccacttgacgtccgtagttcgagaccagcctggccaacatggtgaaaccccatctctactaaaaatacaaaaattagccaggtgtggtggcacacatctgtagtcccagctacttgggaggctgaggcaggagaactgtttgaacctgggagacagaggttgcggtgaaccgagatcgtgccactgtactccagcctgggtgacagagtgagactccgtctcaaaaaaataaaaaagataaccgaggaaacggtacctccccatg

SEQ ID NO: 112 - DNA, 2279 bp, Homo sapiens
cttcacctgagaacatcccagcgggaggacaagagaaatcatgtttattcctcaggaatactgaagtgccctggagtaagctgccattcttctgtaacaatgttatcagtaatgctttaaactccagcacctggttatgcatttgaaaccaagtctgtttcttgttttgtattttctctctggaagttgtaaggaggtggtcttaaataaattaaacaaaaagaggaagtccattgcatggcctttgtttcttcacctttggtctctgagcatgaggaggactgtgtgtgaactgccagcagctgtagccacctgctcacagcctctctgagaaccccctgaaaccagttgttgggtatccttcccatttgccccctcaggcgtagttttcagaactgcttccacctcgtaatcagaagttgaagattgctgctgcgtggcctgatggagatgactgatgtcttaaggcgcctttccttctgtggcacctcttcgtgtgttctcacctggggacctggcagggcacatctccgctgtgcctactgcaaggcggtcccactgctgctgtattagcaggggaagaatcctggctgtgtggatggcccactccattgaagtcaagtcctgcagcttcatagagcttgagacagtccaagcttcagctctggagggcggaggaaagctcatggcatacccacctggccggaggagcccgattggggttaattttatcttcacgtagcagctgaagtttgaggacaaaagggccacttctgatgcccctctgagtttgttcctgtggtttcacttgaaccagggatgctagatgcaaaagtcatattttagcaatttcttcagacgatatacagaaccccagcgctcagccgttcttatttctttttccttatcgtagaattaagatagggagagcccgatcccacttgcccctgtatcctgtaaatgttgatttatcatctactgtaagcgaggcactgttgtaagcagcagagataaatggataaatagacacaggcttctgccttcaaggagcttagagtctgatggaaagacagacgtgcaaacacaactctgaaagaagtgttttaatggagaagagaggtgtaggcaaagtacactgagaacaaaggagaaggagcaactatgtctccctaggatggccccacaggcgacggaatgcctgcgctgggacccgaagttgactgggaatcccagacagaaggagggtagcctctgtgtttgctcaggatcatgtaatgcatattatagctgggaaatcgcaagtagttcagcatagccagggtgtgtaggggcaggggaaaggcatggagggggaggctgggcaatagggtacaactcatgtctgactccagttctggaacattgattagaccttagttcttgcaagtgctatagtgagtacattcagggtagcaaataccctccctcagcctccccactcccttttccagaaaggtctgctaggctctgccctgcaaactgtccaggctcctctgccctctgggcttgttttcctctttattgctacttggctgtttttcacttggtcctcttcattctatgattaaggcaacccatataattgaaagaaaaataatgtgcagcctgtttcatcccttccacttgttttcttactatttatttatttatttctgagatggaattttgctcttgttgcccaggctggagtgcaatggtggcgatctcggcctgctgcaacctccgcttcctgggttcaagcgcttctcctgcctcagcctcccgagtagctgggattacaggcatgcgccatcacacctggctaattttgtatttttagtagagacggtgtttctccttggtcatgctggtctccaactcccgacctcaggtgatcctcccgcctcggcctcccaaagtgctgggattacaggcgtgagccaccgcacccagcctcctatttgctttaaaagtaatttcctggccggatgcggtggctcacacctgtaatcccagcactttgggaggccaaggcaggtggatcatgaggtcaagagatcaagaccatcctggccaacattgtaaaaccctgtctctactaaaaatataaaaatcagctgggcatggtggcgcacacctgtagtcccagctactcaggaggttgaggcaggagaatcatttgaacccgggaggcagaggttgcggtgagctgagatcgcgccactgcactccagcccggcgacagagcgagaatctgtctc

SEQ ID NO: 113 - DNA, 1323 bp, Homo sapiens
ggcccccccaactcttcctcccctctcatccccctgtggaatgttgggtctcactctctggggaagtcaggggagaagctgaagcccccctttggcactggatggacttggcttcagactcggacttgaatgctgcccggttgccatggagatctgaaggggcggggttagagccaagctgcacaatttaatatattcaagagtggggggaggaagcagaggtcttcagggctctttttttggggggggtggtctcttcctgtctggcttctagagatgtgcctgtgggagggggaggaagttggctgagccattgagtgctgggggaggccatccaagatggcatgaatcgggctaaggtccctgggggtgcagatggtactgctgaggtcccgggcttagtgtgagcatcttgccagcctcaggcttgagggagggctgggctagaaagaccactggcagaaacaggaggctccggcccacaggtttccccaaggcctctcaccccacttcccatctccagggaagcgtcgccccagtggcactgaagtggccctccctcagcggaggggtttgggagtcaggcctgggcaggaccctgctgactcgtggcgcgggagctgggagccaggctctccgggcctttctctggcttccttggcttgcctggtgggggaaggggaggaggggaagaaggaaagggaagagtcttccaaggccagaaggagggggacaaccccccaagaccatccctgaagacgagcatccccctcctctccctgttagaaatgttagtgccccgcactgtgccccaagttctaggccccccagaaagctgccagagccggccgccttctcccctctcccagggatgctctttgtaaatatcggatgggtgtgggagtgaggggttacctccctcgccccaaggttccagaggccctaggcgggatgggctcgctgaacctcgaggaactccaggacgaggaggacatgggacttgcgtggacagtcagggttcacttgggctctctctagctccccaattctgcctgcctcctccctcccagctgcactttaaccctagaaggtggggacctggggggagggacagggcaggcgggcccatgaagaaagcccctcgttgcccagcactgtctgcgtctgctcttctgtgcccagggtggctgccagcccactgcctcctgcctggggtggcctggccctcctggctgttgcgacgcgggcttctggagcttgtcaccattggacagtctccctgatggaccctcagtcttctcatgaataaattccttcaacgcc

SEQ ID NO: 114 - DNA, 193 bp, Homo sapiens
cccgggcttggggctggccaatggggagctggattgagcagaacccagaccctgagtccttgggccagctcttggctaagaccaggaggctgcaagtctcctagaagccctctgagctccagaggggtgcgcagagctgaccccctgctgccatctccaggccccttacctgcagggatcatagctgactcag

SEQ ID NO: 115 - DNA, 1208 bp, Homo sapiens
gcctccccagcgagctcctcccagaccaagacttttgttctgtttttctacaacacagagtactgactctgcctggttcctgagagaggctcctaagtcacagacctcagtctttctcgaagcttggcggacccccagggccacactgtaccctccagcgagtcccaggagagtgactctggtcataggacttggtagggtcccagggtccctaggcctccacttctgagggcagcccctctggtgccaagagctctcctccaactcagggttggctgtgtctcttttcttctctgaagacagcgtcctggctccagttggaacactttcctgagatgcacttacttctcagcttctgcgatcagattatcatcaccaccaccctccagagaatttttacgcaagaagagccaaattgactctctaaatctggtgtatgggtattaaataaaattcattctcaaggctaataaaaaccacattggcattttcctctgctgtgggggatcgctggtgcctctttctctgccactggggcaataaacccaaagatgtctacattatctccgaaacagaagggaagattagtaaatgcagggttttctgggatgagcttcaggctttctcttgggctaattttcttacaccttggggtcctctccagtattgggtctcattcttcctcgatggggtcagggaaagataactggtgattatgccagcttcagcttccaggccagagagggtggcattcaaatcccagtgctggcttcttcagctgtgtggtcttggacccgttactgaacctctttgactttcagtctctttgagaaataaactgtcttgttccttgcaatgtaaaatgagacttctaaagcccaccttgatgctgatatggagaatgctgaggttctaggatttcacacagcaggaatttttttttaataggtgtcagctgtggggtttattttttacaaagtaaggacattaaaaaaaccaacccgtctatcaattcataaaagaaaggatgttctgataccaagactgaaagaagaaaggatgtattccaaaacaaaggaacatccttccaagaaaggacctatggcttctttattccgacataccccaaaataactgcatgataaataggtctatatttaaaaagctctagtgtcgaatgttttcaaaataaaatttaattttatgag

SEQ ID NO: 116 - DNA, 1985 bp, Homo sapiens
agcctctgaggtttgagagagagagcgggaggagggtctggcttggggaccagacgaggtgcagggagggtaggagccaggccaggagcctgagggttgctggttgcctcctccctggagctctccagtgagggctcagctctcagaggactcaggaaggcctgggtcctgactcccccagcccagccccaggcatgggtgcctcctgctgctggttctggactgggtgggaggcacggagcttataggggtctctcctgagggtggccggggagacctgagagagaggaggaggggcctctgagtggggcctctgttgctggcgccagtttaactccccggagccttagaaagtctgagccttagaaagtctgggcctgagcatccaggcccagagctggatgcatcctcggcccaagatcacaggaaggcagattgctggtcacaaagcatgggttccgggagcccctcagctgatcccacaggatggcctggggtggtggctactttgggcttgaagctctctagagccccattcacagagcaggtgccccaccccagccctcactgaggtggccatgagtccaggttcagaccctaggggatgtgcagtgctgagtgtcccagccctgaagtctagcctcagagcaggctcctgggcactgacagagccacacacccaggtacaccccccaggctaatatggggacacacaaaaatatggccttcaacacctacaagtcttctctgtgtcccccatcgacccatgcacatcaccccaaccctgctctgccacaccacgtgggtctgaggagcactcctaccccccggctccgggtccctgacagacactgccctcctggcctgcacctggaatggcagccagaacactggagggggacccacaccctctctccctgggctgtggatgggtgttgcaagtcccatccctcctggcctgcacctggaacagcagccagaacaccggagggggacccacaccctctctccctgggctgtgggcaggcgtcacaagtcccattggtggggaagaggctgagggctgagacccacctcagtgaagagggaaacgtaagcagggagagcatcaaggcgggaggcagcctggaaacttctagaagagggtcaaggtaggaggctacatggaagcttctagaaggcagtaaggaacagggtggtgaaggagaggggagaagatgggagcatggagagacgaggtgagtgacagccaccagcagggacgggcctccaggcaacacagaggagctgggggccagggccttacggggctgggttcctgtgtggggcgtggagctggggctgaagtggaggggacggccctgcggcccccagcactgttgtttctccaggtgcaccttaccttcctccttacctgcccgagcctcaactcagggtcagcagcctccacggagccagccccacctgcccgaaaaccactgaagccaccctccgcccggactcaacagccgccagcaagctcgcctggcagtgcccctggagcaccattgtcgctggggagggagagccgggaagggtggagaaggaggcagaagggacatgtatgaaaaaaggacaggaaacctgaccagaggcggtttccagagccccagccttggagacaaggacactgccacccagcgccacagtcagtctgggaggggcccacgccccccaccccccatgccacactgccgcctcttgctggccatggttctccggcttgggggaacgcaggttcccagctgcgcccctcccccgcgcacacacaccctcccctgtccctcggaaagactaggccagggtctggggatgggattctgctgccaggggtcctgcctgcccccactcaccccagacgcttcggatgctgcagctcctggataatctccacaggactcggcttcctctcctcaaatgaataaaggcctcctacctcaactccc

SEQ ID NO: 117 - DNA, 2045 bp, Homo sapiens
gtccacagccacccagctgaggtcctgggtctctgagcaaaggagcatgcttgggcgttgtggcctcttaggcagcctgtttcaagtgccatgtggacctggtgcagctgggaagcttgggactctcgtctgcactgcgtgtcctctgaagcagtgaagtctgtgcctatgccgagcgcgctaagaagtctcccttccagctgttccattctctccaccaccagcgtaactggcaagttaccaaggttgttcctgaaacagcagtgatcatgacttctcctttccagagttttgggtccttctgaattaatggtccttttcgaacaccggcttgcctttacagtgaactgtgattctctcgaagccaatgctttcctgtctgtatttgatgcaggattaaacacttcccagagaggattctagtctggtaaataaccacagtgtaggaactatctaactggcatttgtgtttcttgcgagtattttgaagaaacaggccgttgaccccatctttggaagtagccctttaccatgcatggtcagtttcttagggatttactatttgtgtgaggtggcatctaagggaagaatgggttttcttccccaaaacatcagcatttctaaaatagtcctaaagcttgaaagtaagttgcttccatgagcatggattacccagtagctactttttaatagagactgactaggtttacaacttctgggagctactctgtgggctgaattcttccaaaaccgagaaaagccagtgcagtctgatttcttttgcttttgtcagtaatggaatcttttgtttttaaaatgtacaaacctataagtttaaacaggtttgtactgacaacctccttggcttatttgggggtggagcaattgttttattccccagtttcagtgcgttgcccacttcaaacatggtgtgtcctttggagctgtgacagaggtgcctgttctgacttagaacctctggaggaggaggggggtgccttggtctcgtgttactttgctgtgcctgtgctgagagaccatgtgcccgagcatctggttgaccggcatgaagtacatcagcctgtcttagcctgagctgctttgaagaccatggggtcttgtgtttccaacttcgaagtgctgatgtggacagtttgccaatgttctcttctattgcaagttcagccagactccatgactcatctgatcccttttatggccaaatcatccttcagagtagggaacactcagacattctgtgcatgttgttcccccaaagcatggtcatcacaaagtcctgagttctggtgtgtgctcccgcctcctgggtatacagagagaaggcaggaatcaggagttccagaagcatatacatgtggctaccccagcaacaagcgcatcctgtgctcagataagctgcatggttgggagtgttttttctcgcacgttgaggcttagtggagatgggcaccactgccatttgctcagaagaaggctggtctggtcctaactgcatcccacactgcccagatcattctagaataggttatttctgaatgttttatagaatttcttaataccatcctggtttggtcagccattcctttgattggaaaggtcagctggggccagtggtgcctcaggcaggcccacacaactggccacctcttcccgttaatgaccacagcagacagaatttgagcccagcacctaaaagtacaggaatttcacttcccaccaggacttgagcacataactctatgtctgatctaggaggctgggggaagagcctcccataaaatcacacctactctgtggtaagaataaaatcccacccacctgggacttggtaatttctccagacaggaaagctttagaaaacttgagtgaaatggagcaagcttgaaggagttagaatcttctgtgcttagggtttgctgctgctggtgagcttagaattttggggttgggaaaaagtggaaggcataagcatagaaatattttaggatattttaggatatgtgaataaagctagactcaaacca

SEQ ID NO: 118 - DNA, 1044 bp, Homo sapiens
gagccgaaggacaggactcgcagccccaggcccgacccgccagactcacagcctccaaccccggccctgcccgcttcggctgccccggcccccggcccgtgtctcccccgtggtctccgtgttgtccgccccgccgcctcattttggctcagggtgatgcctgatacgcccttggttattggggggtgttcctctctccccacacccggagtttcccgggcctgccattgtggacccgccccctatgctttacacctagtctctttgcccacagacctcctcattccctcccaaaacatcctctcaagagaagggaggagaagtttcaagaaatcaggaggggtgggtttggaccctgggcagggtggaggcagtgaccttgcccttggtccctctagccttcttccctgtgcaaaaaaaaatgaccctggagaggcattcttgtaggagaagaatctagcggccggggagaattggggccgggccggcggtgggcagagtccgctgctatacacacagggaggaattctcacgcccaagccccgcctctctacgccttggaggactcctgtgacttcactgctctgcctctggagaacactgggagagtcctaccgacgttcaaacaacaggttaggccaggtaacagccctgcaccaggccgctgcccacgcctctgccctggcacccccaggggattccttgcccatcccatctctctgcagacggatgtgtgtggccccctcctaggtgccccacaaccaggaccaagatggggctcccaaaggaggtaaggagaacctttggcaggtgcttaggacactgactacctagaaagtagacgcagcagagttgctcccaagtcgaggctcctcagagcaggtgggtcctgacagcagtggattctcccagcaggatgaggaaggagggtgtgttaaccaaccaagggagtgggccccccacccaggtgtctccgcaagaccacaaaaagcccaaagatctatgtgtcactgatcattgtaaataaagtggacctgcttttac

SEQ ID NO: 119 - DNA, 337 bp, Homo sapiens
cagccagagaatgcccactgcctgtaacagccacctggagaacttcataaagatgtctcacagccctggggacacctgcccagtgggccccagccctacagggactgggcaaagatgatgtttccagattacactccagcctgagtcagcacccctcctagcaacctgccttgggacttagaacaccgccgccccctgccccacctttcctttccttcctgtgggccctctttcaaagtccagcctagtctggactgcttccccatcagccttcccaaggttctatcctgttccgagcaacttttctaattataaacatcacagaacatcctggatc

SEQ ID NO: 120 - DNA, 819 bp, Homo sapiens
tgtccctgcatggagctggtgaattactaaaagaacatggcatcctctgtgtcgtgatggtctgtgaatggtgagggtgggagtcaggagacaagacagcgcagagagggctggttagccggaaaaggcctcgggcttggcaaatggaagaacttgagtgagagttcagtctgcagtcctctgctcacagacatctgaaaagtgaatggccaagctggtctagtagatgaggctggactgaggaggggtaggcctgcatccacagagaggatccaggccaaggcactggctgtcagtggcagagtttggctgtgacctttgcccctaacacgaggaactcgtttgaagggggcagcgtagcatgtctgatttgccacctggatgaaggcagacatcaacatgggtcagcacgttcagttacgggagtgggaaattacatgaggcctgggcctctgcgttcccaagctgtgcgttctggaccagctactgaattattaatctcacttagcgaaagtgacggatgagcagtaagtaagtaagtgtggggatttaaacttgagggtttccctcctgactagcctctcttacaggaattgtgaaatattaaatgcaaatttacaactgcagatgacgtatgtgccttgaactgaatatttggctttaagaatgattcttatactctgaaggtgagaatattttgtgggcaggtatcaacattggggaagagatttcatgtctaactaactaactttatacatgatttttaggaagctattgcctaaatcagcgtcaacatgcagtaaaggttgtcttcaactg

SEQ ID NO: 121 - DNA, 1513 bp, Homo sapiens
gcagcccttactaagctgagagatgtcattgctgcaggcaggacgtataggcacatgtaggtttgaatgaaactgtagttccctttggaagcccagtcataggatgggaaagtgggcatggctctattcctattctcagaccatgccagtggccacctgtgctcagtctgaagacgttggacccaagttaggtgtgacacgttcacacgactatgtagcacatgccgggagtgatctgccagacattctaatttgaaccagatatctctgggtagctacaaagttcctcaggggtttcattttgcaggcatgtctctgagcttctatacctgctcaaggtcagtgtcatctttgtgtttagctcatccaaaggtgttaccctggtttcattgaacctaaccccattctttgtatcttcagtgttggtttgttttagctgatccatctgtaacacaggagggatccttggctgaggattgtatttcagaaccactgactgctcttgacagttgttaacccactaggctcctttgagtagagaagccatagtccttcagcctccaattgatatcaatacttaggaagaccacagctagacggacaaacagcattgggaggccttagtcctgctcctttcaattccatcctgtaaagaacaggagtcaggagccgctggcaagagacagcatgtcacctgggactctgccagtgcagaatatgaacaatgccatgttcttgcagaaaatgcttagcctgagtttcataggaggtaatcaccagacaactgcagaatgtagaacactgagcaggacaactgacctgtctccttcacacagtccacgtcaccacgaatcacacaacaaaaaggaggagagatattttgggttcagaagaagtaaatgataatgtagctacatttctttagttattttgaaccccaaatatttcctcatctttttgttgttgtcattgattttggtgacatggacttgtttgtagaggacaggtcagctgtctggctcaatggtctacattctgaagttgtctgaaaatgtcttcatgattaaattcagcctaaacgtttcatcaagaacactacagagtcgatactgtgagtttccaacctcagcccatctgtgggcagagaaggtctagtttgtccatcagcattatcatgatatcaggactggttacttggttaaggaggggtctaggagatctgtcccttttagagacaccttacttatgatgaagtatttgggagagtggtttttcaaagtagaaatgtcctgtattccagtgatcatcctctaaacgttttatcatttattaatcatccctgcctgtgtctattattatattcatatctctacgctggaaatttgctgcctcaatgtttactgtgcctttgtttttgctagtgtgtgttgttgaaaaaaaaacattctctgcctgagttttaatttttgtccaaagttattttaatctatacaattaaaaacttttgcctatc

SEQ ID NO: 122 - DNA, 763 bp, Homo sapiens
gggcccagggcccgggcacccacaagcccgtgacagatgccaacttcccacacggcagcccccccctcaaggggcagggaggtgggggcctcctcagcctctgcaactgcaagaaaggggacccaagaaaccaaagtctgccgcccacctcgctcccctctggaatcttccccaagggccaaacccacttctggcctccagcctttgctccctccccgctgccctttggccaacagggtagatttctcttgggcaggcagagagtacagactgcagacattctcaaagcctcttatttttctagcgaacgtatttctccagacccagaggccctgaagcctccgtggaacattctggatctgaccctcccagtctcatctcctgaccctcccactcccatctccttacctctggaaccccccaggccctacaatgctcatgtccctgtccccaggcccagccctccttcaggggagttgaggtctttctcctcaggacaaggccttgctcactcactcactccaagaccaccagggtcccaggaagccggtgcctgggtggccatcctacccagcgtggcccaggccgggaagagccacctggcagggctcacactcctgggctctgaacacacacgccagctcctctctgaagcgactctcctgtttggaacggcaaaaaaaaatttttttttctctttttggtggtggttaaaagggaacacaaaacatttaaataaaactttccaaatatttccgaggac

SEQ ID NO: 123 - DNA, 3006 bp, Homo sapiens
agccctcatcaaagactcaggaggcccctggcggggatagcaccgtttattaagaaaaatcaagacaaagaccacaggagggtcccttctaggacacagaggccaggcgtcccaaccccacagtctgggggccactggcaggatggcacttgagctggatcttcaggctcctgcagatggggcagggtggtcatatccccctcctctctctctcagtcgtgagtcctgccttcccccacctaaggcactagctcttcctgagcaccagcggcatccgtccgtccgttgtctgttggaggagtccctgggccttcacttccagatgggtggggatgtggcctggggtgggcggggcccggtgggcggggccctatcagtgctgggctctgcctgtagcagctcctggtaagagttggggtgggccttcccttacagcccctgagggagggaccccaggctgtgtgctggcaggagggggtgggaatgcaggccaggaggacgtggtaggagggggagtctgccagaggaggtgccaggggctgggtggaggtgggtgggggtgctgaaaaacgagctggtggggatggggaccgcctgcccaggggtgagctgccttttgctccacagccggcactaaagacaattcccaatcctgagtgggtggcagagactcctgcgatgcccgtctcaggtagctgtggggcaccagcccacaagccgaggttggctctcctaggagtgagaactgcccaagggctgcagaaacaggccacccagctctatctgggggctccatcggtgggtagggggacagtgggggcagttctgggcccacccagccactgttcctgaccccaagtcctggtgactttctgaggtgcccactcccatccaacctgccttgctggccagccttgtggctttgcccagctgtgtgtgtgagggtggcatgcccacctccagtccagcccagggcggtagcagcaaagcgtggcatcgcctcggtttcttacaaaaattcataataatattaataataatatactcgacattgtcgggctggggcgtggcccgggagtccgtgtggggcaggcaggtgcctacgaggggcaggggcgtgtgttggccccggcctgggcgcggtgctgcaggtccaggggctgtgggggcggggcgccgggtcgggccgagtgcagcaccaggttcttgacacagcctgtgatgcctgaggagaatctgcccccggtcagcgtggccacgtcaggggctccgcctgccgggaggtgagaggacagggcctgtgggctccagcagcccaggaggcgaggaaggctgggcgagctctagccctaagggagtgccgttcctgcccctgccctgagaaggagccccagacttaccgatgtagacgctgcccttggcgttgactgccacgttgggacctggggaccggccgctgaccagctcctcaccgtcgacttggatggaacctctgcggccctccctgcagtggaactgggtcaggcccctttccacaaacttcctggtcctccccggccccacgacagagtcccctccctctgatatcgagactccagactcagaagtctgtccctgtttcccaagctctttctttcccccgctgaacgagagatcgggccccacaaacacagcttcctcatttctgcacccaggtttcctcccactcctggggcactcgcctgcccccagcggagttcagtccgagatggaagcccgagccctggctggtgggttctcccctcccctggcttcaagttctgtctccacagagctcaatacctgcctctctgcccatggtagggggcgtcctgccccactccagaacgctgggccccatcccgagtgcccggcagggtcccttaccgcagtgctgtcacccggtgccactcgccgtcattgatggggtcctcagagaccaggcgggcctccccactacccagctggtacctgcagtcatccaggcccaagaagtatgagctggggcaggaccggggggtggggtgctgggaccagggaagggagaggaagggccaggtgccaggacctacctgaagacaaggtgcccgtcttgaagcccgaggctgatgaagtccttgccttggccggcctctcccacctcctgccagggaagcacagggtctctggggtccccagcctggagagcagaggctgccgaggccagggggctctgctttcccctccccccaccactccggccaccaggaagccagcttcctgccccaggagccccaagagcccagccggatacccacactcaccacaccctgccagagcaggaggccactggctgtgctggtccgaacctccagctcgatggtctcgggcacctcgggcaggctgcggaggaagagcgggtgaggggacagaagtcccagattcccatcctccccattaggcccatgggcccttccaatgccagtctcacctcctggagaagacatggccagggaaggcgaggaagccatcatcgtggaaataggctccgtactgcccaggggcatctgtgggagagaggagggtggtgccatacctgctgcatcaggcatcaaaatcccccgtcagttcccctgacccccacctccacgccaacatgcaggactagggggctccgagcctgcagtccctggggacccacgggggctgccaacagaattcagggagcctatgaccttggatgggaaagcattacacctcaatttcactcacttctcactgaaattgagcagttctttcaatgagatgtaggcaagaaaccaaagtagcagtggtaggacctgcaactttgttactagtatttgcttatcacatgacagtagctgcaaatatttcaaaatatcatttacacatattgctgctttgaaattgtggtagctactgagatcaccagatcttgttatttgatgtgttaataaagaagcacatatatagcaagtcaggaaactt

SEQ ID NO: 124 - DNA, 73 bp, Homo sapiens
aaccaaggcccagctggcagtgctgatcgatcccacatcctgaataaagaataaagatctctcagaaaattcc

SEQ ID NO: 125 - DNA, 73 bp, Homo sapiens; identical to SEQ ID NO: 124

SEQ ID NO: 126 - DNA, 1425 bp, Homo sapiens
acatctctccagagccctttctgcacagctggtgtcggcatcatactaaaagcaatgtttaaatcaaactaaagattaaaaattaaaattcgtttttgcaataatgacaaatgccctgcacctacccacatgcactcgtgtgagacaaggcccataggtatggccccccccttccccctcccagtactagttaattttgagtaattgtattgtcagaaaagtgattagtactatttttttttgttgtttcaaaaaaaaaatttttgtgtgtgtgtgttttttttttttttttttttgttgtttaaaagcaaggcatgcttgtggatgactctgtaacagactaattggaattgttgaagctgctccctggttccactctggagagtaatctgggacatcttagtgttttgttttgtttttttccctcctcttttttttgggggggagtgtgtgtggggtttgttttttagtcttgtttttttaattcattaaccagtggttagcccttaaggggaggaggacggattgattccacattccacttcctagatctagtttagaaaacatgttccccatctggtgctcttaggaaggagtatagtaaatgcctcatttaataacatactcctttttgaaagttgccttttctctccacccttgagtagatccagtatttgatgaaactcatgaaagtgggtggagcccatcttgcccctcctcttttctaggacgcactatatgtgactgtgactttcaaggacatttgtttgccatttgctgatttttttgggaagttaatttctaacttctttcactgataaatgaagaaaagtattgcacctttgaaatgcaccaaatgaattgagtttgtaattaaaaaaatttttttccctttcagtcattgtcttatatgcttagcatagatttgcagctcagtagtatatggtgttcctagaatgcagctgaagacctgttatgtagaggaaatacgaggggtggtgctagaagacagacatctgtggaatgattcacatcctctcaagttaggaggatggaggcctgcttcattaagaagctgggggtagggtgggggtggggagaacacttaacaacatggggaccagtcaggggaatccccttatttctgttttgcatatgaggaaccctagagcagccaggtgaggctctctagtttaataaaaatcatggaaagactcttaatgcagactcttcttaagtgttaatagggattttttcagcttattttggttgcagtttccaatttttaaaaatgttgaggtaatctttcccaccttcccaaacctaattcttgtagatgcattagtgttgaaccaatgctttctcatgtctcaattctttgtatatgcattcttttcagatgtattaaacaaacaaaaacccttc

SEQ ID NO: 127 - DNA, 770 bp, Homo sapiens
actgttttctccttcccttctttgctgctgcttcctgtcccactactgtagaaagatcgtttaaaaacaaaggaataaaaccatcctgtttgaaagcctctgcgtctttttactcaccaccttagagcaacctctgtattagtttttgatcaagaatgcaatatcatataaattttttgtgatcagtagtcaagttggacttgttttaacgttctgctgcttgagttgcctgatgctcagagctttttggtttggattactattgcaaaagggaacttggtctggctttaagaatgtcctcttggagaaaataacaagagttttaacacttctagatcttagttctagatggagaaagtaacacaaacatcattttactcttatgatcaattgttaattgtaattgcatgacaaaccttatggaaaaggggtgacctagtagagtgtaatggggaagggaggattcttttctggttttcctttgtgcggtgaaactttgtgttgctgttgctttggctgtctgtgctgtagtggagtatttgtcagtctggggtggggaagatattgatgtatctgctactgctttatgagttcatttgttacattatcttttaagaataacatccatttaaacagttgacttacagtttgttaatgctgagatgtaaagctgccacctttatattttcctgcttctgattttattgtgagggaaatatacaattgtggttaccttcaaattttgaaattaaaaatatacaaccgtttgt

SEQ ID NO: 128 - DNA, 4761 bp, Homo sapiens
gcagcctttcatccggcagagccttcctgcgtttgcagcagagaggaggccccacagcttgccctttgccctccatccctggctgtcctgagtggtgagcatcttagcttagcaccaaccaacacagtctcacctagaaaacagatggaagcttcgttgttctcatagaaccaacagcatctgagccctcaacaccaacagcaccatcctctgtagcagacaggcctccctccccacaggcccgctgctgcggcctctatgacactgtccatccccaagtgacatgtggcttcagaagtagagtctgaaagagcagtgggatgggagctggtgaccagggtaccccaggaggcatgatgtgccgacagcgctcagtgggcagaatggcagttagatatgggacttggcccacagtgggggctgcaaatgctgccactgcctctggccatttaaagtgagaggggcaccaacagacaattcggggaccttaggccccttcctgaggcacacttggccccttcctcggtcctatcatcctaccctctgctggggttccccctccacccagtggccacgcccagcaccctattgatggctataggacaggtagccctcatttccatgcctgataaccccttgtcagttgtcagctcttcccaaaacaaagctctggagtttctgctggaagtgtttaatgtgaggcatcagctgctagacagtgtctgcctttccaggacattcttcttggtattccttacctgaagcctggttcccacagctcttccgtgtcatcttcatccccttcctttaatcaaaggctgaaatctctgcctgacctggcagcctggctccctctgggtcatatggtgcagactgtgaccagcaccaggcaggcagtcctgtctgcgtgtggaggagcagccgtgactgcccgtggctctgctgccgcccactccctgccttgtgagtggcctgctgcctcacctcccgcaggccgccacacttattgcaggtcagtgatcctttggagtttgaatttcacaaagctttttttatcttcagttcctaaaatataatctgataattaatggtttgtggaatccattatgaagtgcaattagatagatgtaggttcctgccgtttggagagaatgactagcatttatcttcttttccttccatgccaaaggttggagtctgctggtgcggtgtttacacaccaggcagggctgtctgccaccttgtgtggcttgaccccctgtggaggggagtgcctggttggatcccacactggcagagatggggccaccccttccttccaggcacatctcacattgccatgtacagaggcaggagtcacgtttggtcaccatggaagcttttattgctcccacatggtcaggtctcaccctgcttgaagcgcagaaggcacagccttactgaccagcacgcccactgactggcatctgccggctttgtgcaggcagccccgacggtttccacagcgagcgccagctccggccagcctgggacagctcatcccagccgactacacctgcttctggtcctgtccacattttgatacgcagatcacttgagcttgtcaattagggttctgccattctgaaataaatgaagtttctaaagcagagtcggcctcagaagccaaaaactgaccagaagatggtgctcaaacctttaagacttcatctccatgtgaagggctcactgtttctaccaaggctgtgcctgtattaaggcttttccgtcctgggaactgtcagtctgggagagctcttgatctgcaggtggcaaaatggcactgaatatccccttggcagcagagaaaacccactgaaagatcgtagagtggcacatgcttacagggcattggtgccaagtccagtggatgagaatccagcccctcacaagctgtgggatggggcttgggagttgcagtgaatgtcattaaaatttcttccaaaacaaaactagaaataattgctgagggcttatagggaagtgatttaaaaagaaaaaacaaacaacaacaaaaaaaactcttcggaataaagagggctgtaaattttgaattccagtgtcagatcctttcaagcactgagaaattctttctcaggtttctttttttgggggagacagggtcttgctctgtcacccagactggaacacagtggcacgatcttggctcactgcaacctctgcgggctcacgcaatcctcctgccacagcttcccaagtagctgggaccacaggcgtgagccaccactgctggccagtttttgtatttttttttttttttgtagagacagggtctcgccatgttgcccaggctggtttaaaactcctgagctcaagcagttctcccacctgggcctcccaaagtgctaggattacagacatgagccactacgcctggccaggtttctgttggagacccagattgtgacaagacatttgttttcttcggaatcaccagatttgcagcttactgtgccgagagtggactggctgccggggcccatcagatgccctctggcccatggcacactcagcagaaggcacaaacccagtgctggttctcatcaagaaagaggggaaggcccttcccgagtttactgtctgctctgagtgggctccgcactggctgactgattttatagtcttgctctctagagaagcccaggcatggatcttataggaaaactttctgactctgcttggccattttatccttttctcctacttctgcccaagagacctgaattgctgccatagaggacagtgtttgtgtggtctcctgagtccacatcgctcgcttccatggggtcccggtgttgtttttgcctcgttccccataggctgctgcccttatggcctctggactgaactctggggcctttggggtggtgtgaaggagtctgtgggcttcttggaacacatggatctgttcggtgggtccccagacctctgctcccagagctcatggcccaggtggtgaggagggaaaggcagtcagattccaggctggagtgtgattctgtgggaatactggggtcagttatggaacaggacttgcccatcataggtaagtgagacagcaaatagatgattcaagagcaaggattactgcgggaaggtgagactcctactgtccacgcgcatgagcagaacctggaaccagaggggcagggaccaggggtctttactcatttattttatgggtaaagagacatgaagagacagcctctctcttctgtctcagaagctctgtgtttgggaaactttgagcccagtgagtagcagggtctgcagtgtgagtaccaggtttccctggcaatccaggtctcctctgaggaagcattctgacttcccactgaccacggaaggcatgtcagcttcatgcctcgggctagagttctgataatcggggctgaggggtgaaaagaaatccagtcagacagacagtggggagacaggtccctgccctttatttgcgggatcaatcagggactcccagaaaggaaggagaatggtgagaagggccctaagagttcgtctctcacctgggggctggtgacgtggtcaccacaagctgaagacaggctaatggggtggcgggtgtgtgtttaaacctcacgtgcctggaagctgcacattgaccaaaggagggagggaagtgctaaccatgtatagagtgggcaggcggttccagggagacaagcagcatgttattaaattgggcctaggcagttggacgataatggagaaaaagcagggatgctataatgagtcctccccaagggtgagttcagcaccccagccctgttctgcttgtatcccagtgatacttgggaggtaggaagaaaatgggagtaagagaacaatttggggctgaagggagtgtcagaggcacgttgatccttgttttgttgtcatggaaacttcggggctggtgggacttaggccaaaagctcagaggcacagccaaaatttagaagcttgctactcctacgactcggcctataaggaagagagaagctgtctgtactttggggactacattgctgaaggaaaaaaatcactccctggctaattaagattgcttccaaattgggggaatgtgtgtcatttcctttaccaaggccagtcatccctgcttccacccatggtcaggacagtcagccactacgtgatgctgtataaattggattacaaaccatattcttgttcagcttgcactaatctatataaataaaatatgtactttgaaaaaaattaggctacatgagtttcaaatggactgtgatgttatagacctgctttctctttggttctgggccagtgtcagacggggacaggggtgataggcctggtgtcctaggggccatttgtgtaccttgaggccgtgttaacatggcctgggggaaagaaagctctcctgtcacttggagtctcattcctaaaccctccttcccagggagcaagtgtggggcagggtttcagagcacaggctttggtgtccagcctgggtacatccagctgtcccgctgtctaactgacattgtgtgagatgcttactctctctgagctccctcctcctggctcccaactttattataaaatggggaaaatgattgtgcttgccctacagaattgtagtatgaattaaaagtctggatttaatgtatttaatatagaaaattttagcttttattaataaaagtttttggcatacaagtc

SEQ ID NO: 129 - DNA, 1853 bp, Homo sapiens
tgtacagccagcagggcccaggcagccaccaagcccaccccaggtcatgccagcggcagaggacgtgaggggctggcagcaggcagggcggccccaggcctctgccctcctctcaggtgctggaggagctgaaggcttcgccacaggacctggagttatcaggggtcaggcgcctgggaaggggcctttggtggccaccctggtgaggacacctgtcccccagggcaggcaccttctcttttccagagcctggggcctccacgtcacagagtccaacagggacatcactcgcctgcctctgtgtgcgtgcatgtgtgtgtgtggtggggggtgttctcacaaggtcatgggatctcatgtgaacagtgtgtgatcaagtgtgtccaccccttcgggtctcagcatggacgtgtgcatgttatgagcgtgtgcttatccgttaaggctggaggcacatgtgggtgatggtggatgatgtgtcatgaatgaggaggtgtgtgagcagggaactcagtgtgacaccgccaggtccagcacccatgggggcgggggagaggctcacccctacgtccccccacacctggaggctggagccaggggccacttctgaactgcaccagcaccaggcccaccctcgtctctgcctgggtgagcccaccccggctgtatctcaggtctgggtcctccctctagccgaggaggccacctgcagcctccacccggctctcaccgctgcttcaacaggaaaacagggttcccggtcagtccggctggccgccttcatggaggcatcatggcagagcacatgagatgtcctcagctgggcttggctgcctggccagggccgggggctcagcagcctcctctagcctctgatgccttccctccacggcccaggtctcctcactcaaagtcccttcgccaacctttcaatgcccagccctgacacctgccctttgtcccccaggcctaggatcagggaccagaggatcctatcttctcagcacccagcccaccccttcctgtagcatatggggagactaaggcctggagagaggggtgatgccccgtcccaggttgcactgcaaccaagtgtcagagtcggggctccggcctcctgccaaggctcttgtccccatacaccatcccacaagggcgctgggggtggaagtgccctggaagcccctcccctctcacactgacctccccccttacggcccaccagggtatgtaaatatctcttttctaccatgtcagaatattttttcctcactcctgacaatgcaaaaatggtcttcaaagcacataaaaagcacccagggtgagaaagccccatcccgggggccgttggcaggcagggaagcaggaaccccaccgtgtgccccctgccagccccagagggagtggcgagcccagctgcccagccctgccccccctccccatagccagcacagctatcccgcggggacaccagcactgagccccctctccctcctgcaataattcggggagtctcagccccatccaggtgccgcggccagctctctacacctctatatattatattactatatagccgagctgttcttccttcctatggaagtcggaaacatggtcagaacacgatctgggggggggatcctgtcttcctccccaccccaccccactcttacccaatttctgggctctggatcctcacagtcatggaggcaccgtgggcctggcacttgcaaaagtgtggcccctcactctagtgtgtggtccctctcagggtcctggggatctgcctctctgtggtctccatcctgactcttgaacttacccacaataagaataaattctgcctcatcttt

SEQ ID NO: 130 - DNA, 231 bp, Homo sapiens
aaaagtggaacacattctataagtaagagaaatcccaaaagctcagaggcaggctagtgtggccgtcgaaagcctaggttccagaactttccctctctgtgcctcagtttcctccctggtgcaatgggaataatagtacctgcctgaggtcctctcaggaggcttaaatgagaggaatgaaattgcttagcccagcacctggcccgtggtaaatgctcaataaatgtcatt

SEQ ID NO: 131 - DNA, 274 bp, Homo sapiens
gccagggaaggaccccctcccccacccacctctctggcttccatgctccgcctgtaaaatgggggcgctattgcttcagctgctgaagggagggggctggctctgagagccccaggactggctgccccgtgacacatgctctaagaagctcgtttcttagacctcttcctggaataaacatctgtgtctgtgtctgctgaacatgagcttcagttgctactcggagcattgagagggaggcctaagaataataacaatccagtgcttaagagtc

SEQ ID NO: 132 - DNA, 326 bp, Homo sapiens
ggcgggcagatgcgctcgagccccacgggccttccacctccctcagcttcctgcatggacccaccttactggccagtctgcatccttgcctagaccattctccccaccagatggacttctcctccagggagcccaccctgacccacccccactgcaccccctccccatgggttctctccttcctctgaacttctttaggagtcactgcttgtgtggttcctgggacacttaaccaatgccttctggtactgccattcttttttttttttttttcaagtattggaaggggtggggagatatataaataaatcatgaaatcaatacat

SEQ ID NO: 133 - DNA, 149 bp, Homo sapiens
cctgtgggctgcttcacatccaccccggctccccctgccagcaacgctcactctacccccaacaccaccccttgcccaaccaatgcacacagtagggcttggtgaatgctgctgagtgaatgagtaaataaactcttcaaggccaaggg

SEQ ID NO: 134 - DNA, 1759 bp, Homo sapiens
cattcacctgcctcggctcacctcttcctccaagccccgccccctctgccccacgtgccggccctcctggtgctctatccactgcagggccagccactcgccaggaggccacgggccacgggaagaaccaagcggtgccagccacgagacgtcaccaagaaaacatgcaactcaaacgacggaaaaaaaaagggaatgggaaaaaagaaaacagatcctgggagggggcgggaaatacaaggaatattttttaaagaggattctcataaggaaagcaatgactgttcttgcgggggataaaaaagggcttgggagattcatgcgatgtgtccaatcggagacaaaagcagtttctctccaactccctctgggaaggtgacctggccagagccaagaaacactttcagaaaaacaaatgtgaaggggagagacaggggccgcccttggctcctgtccctgctgctcctctaggcctcactcaacaaccaagcgcctggaggacgggacagatggacagacagccaccctgagaacccctctgggaaaatctattcctgccaccactgggcaaacagaagaatttttctgtctttggagagtattttagaaactccaatgaaagacactgtttctcctgttggctcacagggctgaaaggggcttttgtcctcctgggtcagggagaacgcggggaccccagaaaggtcagccttcctgaggatgggcaacccccaggtctgcagctccaggtacatatcacgcgcacagcctggcagcctggccctcctggtgcccactcccgccagcccctgcctcgaggactgatactgcagtgactgccgtcagctccgactgccgctgagaagggttgatcctgcatctgggtttgtttacagcaattcctggactcgggggtattttggtcacagggtggttttggtttagggggtttgtttgttgggttgttttttgttttttggttttttttaatgacaatgaagtgacactttgacatttcctaccttttgaggacttgatccttctccaggaagaaggtgctttctgcttactgacttaggcaatacaccaagggcgagattttatatgcacatttctggatttttttatacggttttcattgacactcttccctcctcccacctgccaccaggcctcaccaaagcccactgccatggggccatctgggccattcagagactggagtgagatttgggtgtggagggggaggcgccaaggtggaggagcttcccactccaggactgttgatgaaagggacagattgaggaggaagtgggctctgaggctgcagggctggaagtccttgcccacttcccactctcctgccccaatctatctagtacttcccaggcaaataggcccctttgaggctcctgagtgccctcagatggtcaaaacccagttttccctctgggagcctaaaccaggctgcatcggaggccaggacccggatcattcactgtgataccctgccctccagagggtgcgctcagagacacgggcaagcatgcctcttcccttccctggagagaaagtgtgtgatttctctcccacctccttccccccaccagacctttgctgggcctaaaggtcttggccatggggacgccctcagtctagggatctggccacagactccctcctgtgaaccaacacagacacccaagcagagcaatcagttagtgaattgaatggaaataaacgctttagttataatatg

SEQ ID NO: 135 - DNA, 327 bp, Homo sapiens
gacagatgcattctaagggaagaggcccatgtgcctgtttctgccatgtaaggaaggctcttctagcaatactagatcccactgagaaaatccaccctggcatctgggctcctgatcagctgatggagctcctgatttgacaaaggagcttgcctcctttgaatgacctagagcacagggaggaacttgtccattagtttggaattgtgttcttcgtaaagactgaggcaagcaagtgctgtgaaataacatcatcttagtcccttggtgtgtggggtttttgttttttttttatattttgagaataaaacttcatataaaattggc

SEQ ID NO: 136 - DNA, 2107 bp, Homo sapiens
gctgcattcagctggagttcctcggaacgggaggactcgcagctctccctttccccagccaggatgagggaattagacaatggaagtcgagcactggggaaagcaggcattctgcgtggggaagagctcccagctcgctgtagccttggagagggaagtgatggaaaaagaatatagcagcttattagggactcccaccctcttcaagttataaatatccccagaaccttggctacgtgcccggaagcctgttgtctctaactgtacaggagacttctctgcctgggctgggaaaggggcctttcttttgttttgcagatagatccacccactgaggaacttgaaaatttttttcaaacataactccaggccttgcttttattagtgagtgtcctgttcccagtgcccggttatttatgattaaattactgaagtgtctaaaaagaacagaaggacccaccccagccataatgcagactttcccattccttctctttccacccgcaactgtggggctaagaattcttaagatgtcacagaattataccatcctacctcatctaaagtcgatccgaggctggtccgatggtagtgggttaccagaacttaataacattaataactctaaagttagtatacaaccccccactgctaaatttggctataaaaataaaattgatctgagcaccatataaaatggaatcctggagggtcccctagaggcagtatccccagtggaaagagcgtgggcctcaaggtcagacaagcctggtttggaatccaggctgtgtatcctttggaaagtcattgaatccaggcccatttccttttctctaaaatgagggtcatcatacctaaggatgttgtgaggcgtgagtgagatgattaaagcgttccagagagtgcgctcttggatgatagccgttactttttattaaccctggctttggtggtaagggaaacttccagaaatgcttgtgggtatattggatagctcagaaaatctgggaaatcaaagtggctcaatagctgtgaggaactgtgggtgactttatcctcacatcgtgtttcttccagaaattcagacgcaacagaggttaggccagtttggtgggttccagtgagcggtgtgttgagcctagtagagcataggtacttggggttgccaaaaccccagcaagttgaggcttcacgctcagggaaacttctgggtcagaggttaataaccacgctccttggagcaaggaggaggggagcctttctgactagctgaagtaattgcaggtttctaactgggcctaaggtgagctgagggcttgagcccctcagcccagcgggggtcccttttcatcccttctctgacagattgctttgtaaactttcttaggccttccccccacccctttgccccagtgctttaagcccttctttgtcttcttgctgtttcttttattcctcaggcctgcggggcgggggcggggtggcgcccaggacgactccccgggctcagcttggctgcctgcctccttctgtaagtgctttttttttcttcacctgggaccctctagaggttggaaagagaagagaggctgggagcggatggaaagcatgactgcatctggagcccctggggggagtggggaagagggagtggaaggacagtggctgaggggcttcctgttgcagccttcagctggactcagggttggggtcactggaggaggaggtggcttcctgccccattgttctggactgcagtgtttcttgggaatacttactgtatgtggattttcagtaaccaacttggaaagctgtatttgttcccatgattcagcaaacaatgagtacctactgtgtgtagaagcagcaggacagcctgtcatcactgggaaagaggccagaagagccgtttggccagggtctccaatttaggctttcaacattatctctaaagaaggttatacattatgtcggctccactggctgatgggatcaaagaccctccttgtatatccttaaacctgtactctattaccaggccactgtgcctgtggagcactgtaagttcctaccttttaataaattttataattatcttgtgagcagc

SEQ ID NO: 137 - DNA, 50 bp, Homo sapiens
attcccgtttctatccaaaagagcaataaaaagttttcagtgaaatgtgc

SEQ ID NO: 138 - DNA, 320 bp, Homo sapiens
actgaggacttgccttggaaatggaatctggggaggcaggaatacaaggacagtgggggttggggaatggaattctacaggagactggagtcttgctttgtggatccttttggtctccgagtcctgcagtctgcaggtgctgcccctgggaacctgcgtgccacagccccgcctccctgcctggagcacactttagaattctgaagatgtgaagcctctgtctcactgaggattttaaaggtcaattatacttttgttgttcattagcatctttgtaaactataagacgtagttttaattaataaatattgcccccagat

SEQ ID NO: 139 - DNA, 856 bp, Homo sapiens
gggctggccaaggctcccatagaggcgctgtgtcagtgaagatgtacgactacctgttgggaaggacaaagggatgaggctccagagagagttggctgccacagcctctgccaagctttgtctttggggcttgctgcagaaacctggcctacggaagatacgacaccactgggagggttgtgtaggtgccaggggaccatcgtggttctctagggcgctgtggaaattgggtcttgggctgggtggcatctggcagtcatgggtaacacttgcttttccagttaatgtggccatgtgattccaagtgtcatgttgctttgtggcaagattgttgtgtgacttgtttttttgtttttgtttttgtttttttaaaggaaactatttgtgggctataggaaactttctgatgcctccggattgtgttagtagtagccatcaggagggtctccaactaaaacacttgttcctgcttgctcctttcccctctcattgttcagcattcttgtcaagttgcccagcttggagttgtctgtcacgcacatgtgtcctgtggttatagctagaaggacaggagtctcctgctgatgcgtgatagcttaagcttggggagaaggtcttttccactgcctagctaagcagtctggggagagcatggggatcatttctatgtgtgtgggtaatctggtcagtaagattgagacttagttaagattccccttggaaattccttaatgtttattagcttctaactagtgttgtaagtccgatgccagaatttggagatttgagttcttcttttcatggcttttattcactgtgactaataagcttcctaataaatccttgccagacttaa

SEQ ID NO: 140 - DNA, 805 bp, Homo sapiens
ctagtcgctggccccagtgcagtaccccagctcatgggggactcagcaagcaagcgtggcaccatcttggatctgagccggtcgagcccctgtccccacccttcctgacctgtccttttcccacaggcctctgggggcaggtggcaaggcctggccgggccttccttcctggccttagccacctggctctgtctgcagcaggggcaggctgctttcttatccatttccctggaggcgggcccccctggcagcagtattggaggggctacaggcagctggagaaaggggcccagccgctgacccactcactcaggacctcactcactagccccgctttgggccccctcctgtgacctcagggtttggcccatggggcccccccaggcccctgccccaactgattctgcccagataatcgtgtctcctgcctccactcagctgcttctcagtcatgaatgtggccatggccccggggtccccttgctgctgtgggctccctgtccctgggcaggagtgctggtgaggaggtggagccttttgaggggggccttccctcagctgtttccccacactggggggctgggccctgcctccccgttaccctccttccctgcaggcctggagcctgtagggctggactgaggttcaggtctccccccagctgtctcacccccactttgtccccactctagagcagggaggcagtgggggaggagttgtgtctcgtcttctgtctccatgtggtttttgggtgtttttcttgttgtgtcctggattccgataaaattaaagaaattgcttcctc

SEQ ID NO: 141 - DNA, 1564 bp, Homo sapiens
aataagacaaatgtttaaatttagttatgttcacggatagttgtcaattggtctgaaacaaattcgctagggaatctatttgtgtagaactaattaatgtaaaaaaaatagaccatctcgtgttgtgtgcactgtgatataatggtagtatcagtgcaacttaaactaatgattgtacttgatattaagtgttctcaactgagtaacttttaagtggaaaccaagtttagatttggggagtggtaaaggaatcagctttttctattgttaggggaagacagtaatttatcattcatggaccagtagattgttgaaagttggtgaatcggattataagcttctagctaacacaaggattcagaattaggtaaacatctgaaggtttagtatattagaaacacccaaaccagtaatatgctaacctgatgcactgctgaaagaaaatgtgaatttttcgtaataattgcattttagtgaattgtacagtgggtggaaagggcatttggagctcattagaatgagacatagtacaccccaatggccctgtttattaaatgtagtggattaagtgtctgtcaacaaatacaccaaaaccattttttatagaaacagtatttaatggtcactcaatagctttcaaaatacatttttgtattacagcactgcacaagctattctaatagtgctctggcctcatcattcctgcaaagcttgctttggggagttggataatgtgaaaattttaagtacctaggggagaaagagccatgtaaatatctgtaataaacttgtagcatatgtaaagttttcttggcctttatcttacaaaaatggagtattttagtatgaatttgctgaatgtaagaccgtggactgttttttataatatggcctaattttaaaggtccaaaataacttgtttttaaagtttgcccttgtgctaaagtgccagtgtatgtatgttatacttgatttggttgtaaactatatttcaaagtaaaccctagtgtaataagttttataactaaaaaggtttaagctgctaaaactatttttaagagatgtgaaatgcagtatgggactatctttttttcctcctctaagcccaaagattaactagagtccctccaaccttatagattgttggctttcacaatcttataacctaggatacaggtagtttcgagtatggtgccagtgatgttttgtttttgtttggtcaaggggtaggtgcaacccaatggaccacttatgcaaaagatgtaaactcttgcataatacattgataacatgttttgccaactttaaatgcttaaacataagcgaaaccagtagcaagtatgtgggtcagcttaaaaattttgattgttaatgccctattttctaatttggcacctcttgatgcctaagcaggtaagcagatgcctaagctgtatttctccaaataaatcaagatgaagtactgcccaagttaaatattgatagcctaaagacaagtttatgtagtacttaatgtacatgatatgaatgtgaagcataaaattaaataaaatttttccccatt

SEQ ID NO: 142 - DNA, 829 bp, Homo sapiens
ggcctctcgagcatccaaaccctcacgacctgcaaggggccagcagggacgtggccccacgccacacacaacctctccacatgcctcagcgctgttacttgaatgccttccctgagggaagaggcccttgagtcacagacccacagacgtcagggccagggagagacctagggggtcccctggcctggatccccatggtatgcttgaatctgctccctgaacttcctgccagtgcctccccgtaccccaaaacaatgtcaccatggttaccacctacccagaagactgttccctcctcccaagacccttgtctgcagtggtgctcctgcaggctgcccgttaagatggtggcggcacacgctccctcccgcagcaccacgccagctggtgcggcccccactctctgtcttccttcaacttcagacaaaggatttctcaacctttggtcagttaacttgaaaactcttgattttcagtgcaaatgacttttaaaagacactatattggagtctctttctcagacttcctcagcgcaggatgtaaatagcactaacgatcgactggaacaaagtgaccgctgtgtaaaactactgccttgccactcactgttgtatacatttcttatttacgattttcatttgttatatatatatataaatatactgtatatatatgcaacattttatatttttcatggatatgtttttatcatttcaaaaaatgtgtatttcacatttcttggactttttttagctgttattcagtgatgcattttgtatactcacgtggtatttagtaataaaaatctatctatgtattacgtcacatt

SEQ ID NO: 143 - DNA, 3725 bp, Homo sapiens
gactcgcctccctctatttataactgtcccctccaggctgacagtggttcaaccctgaatcctaaaacttgcctttcaagtctcattttgtttctaactgagaactctatggatgatgatctcaaaaagcctttgtctctgggaaaggatgcgttatcttggtcttggaaatttcaaatgatgagggttgggggatggaagcattattccaggtggacgggatagaatccagcctctgcctggattagcccagggggatttggaaagcctttctaccatccttgaggatggtaactgagcttcctctgacagtgaccaaaggatgctgtatccttcagagctaaggcaagacagagagtctgctgttaattctcaaatccagcgaaaggctggacatctctaaatctcgtcttcctccacctcatgtgcatgcctgatctcaccctgacactcctgatgccgcatctgtgatagcactcgtgttgccttcacatggcaggctgggccaaccctgggtggaaggttctgacatttgtgttttcagaaatgtacatctgccttccagtcatctgtgcccttctagggaagatgtgcttgatatgttcaaattggatctactctgaaaacgaaacttggttttggtcctgtgaggactacttgtttgtccacctcctccaccaaaggaattaggaagttaagagaaggggaagaatatggaggataggagagggtgatgatgctttagcccattaaggaagaaaagttccccttactcttacaaaaggtgattgcaccacttaaaaaaggataggtagaaaatctggccattttatgtgttatttttttcctgcataccagtgccccctggaaagatggggatgctcatttcagagacagcctcttcacctgtcctccgtctctccattacagagccacaagccaagcttgagttactggttaatttccttgaagtcaatagagactctctgggtcctcatccccatgcatatatgtctgggagaagcaagcattctccaaaacagggctgttgctttcttcctggccgcatatgtgactgtcttcccctagactgatggtatacttttgagaggggcggataaaggtttgcaaactttaatgggcataaggatcccctagaagcatatgtaaaatgcagattcctgcaccccaactgcagacactgttaagtgggactggagtggggcccacgggtctgcattcttaactggtaccaccagtgattctgatgcgatgcttcaatcccgagatttcacatctggaaagcctaagaatttacaaagatgttctgctaaaacccccagggccccatgcagtcttgctagaaaatttcctccctagggttcctttggaaggttaaatactccccataggatctgtggcatttctccatccaatgaatactacttagagctacactcaccacttccctagacagcctttaataggcatgataacagtgttaatagaccagtgtgatagatcacttatctttatggattgtgcttaatactgatttagtatcttgactccaaaaactgacatctgttgtctgtgataaccacttctgtattgcgtcttaaccacttctgtattgtgtggtcttaactgcctaaggcggcaatgggcagtgggcccctttcccttaggatgggtatcaattcaacaatatttataaggcatttactgtgtgctaagcatttggaagacccaggctacaaaataagacatagttcctgccctccaggccagcagagggaggcacaaatacccaggaatctctgatgggtgtgaagtgcggtcgtgggccacagaaaatgaccgtcatggagaccctgctaaaggtcggaccctgagcccaaaggggtattcagaagtggagatgattttggccccactcatagatgggtggcaaatctaagatttgtataaagcatataaaatagggtgatcacccccgaggcagaggggccagcatttgcaaaggcacagagctaagaggagctgggcaaagaaaggaaagccagggaaggtggtgggagatgagtctcaaagctaagtagtggaagctgggcacagtggctcatgcctgcaatcccagcactttgggaggccaaggctggaggatcacttgagcccaggagttttatatcagcctgggcaacatagcaagacctcatctctgctaaaaattaaaaataaataaattagctgggtgtggtggtgcatgcctgtgatcctagctactcaggaggctgaggtgggaggatcgctagagcccagagagccaaggctacagtgagccatgatcatgctactgcactccagcctgggtgacaatgagaccatggctcaaaaaaaaaaaaaaaaaaaagataagcagtggaggccgaatcatggagggtcttgaatacctggctaaggagtttaaagtgtatccaagaggacgtgggagccactgatggttcatgaggaagagaagggcaggaccagcactgattgaaaaggagggcttgttcagtgtggaggaagaatcagaagggggaataagttaccttctccgagcctgcaagaacaaaaaacaaaaagcagaaattaaaatcaggtttcactgctatttatatatttctcctttcccaaatgatttttctaaagctgggagtggaggcaggagggagaaacagaaggtgagcagggaggctatttagatgtgtcaaacccgggtgatcattaataatttgggcatatatatgctcccaaacttactctgcccccttccttcccttttttttttttttttttggtatgggccttttaggcttgggccagccagctttcttgagatgagtgaataaaagcgtattgtaatttcatgtctgcttcagatcatggggacagtgccacccaggaactgctgctgaggcctgggaagctcccttgccttcgggtttggagcagtggcatcatcccaccaacctgagccatgaaagggctgagcagaaagttaaatggtagtttcctgactggaagccacacgtaggtcacttgagtagtcaggaagcacagtgggtgtggagccatcatctgtcttgggctggttcctcccaatctttgtccagtggtataaatggactgtctgctgatggccatacgcagcactggctgttaagatggggaaggggtacatcaggattccactcatagccctggttcgttattgttactcatggctctgacgtccccaagccctcttgaatgttgcaagcaatgttaaatatcacacctcggtctccttttgagcagcccaggtacctaaagcaaggtcaccaaacttgggtttaaacttcagttgccatcacagcagggttcaggttatgcagtttttgcagtgtggagttgaacgctgggtaaagaagggagagctgactctccattgcttttctagtggaaaccagccagtttgacggcacggtgcggatacaggactccatcaggctagtgttggggaaccagcccggcagccttccatgtgaattccaaagctgtttcaacactggctgataggcagacaaaaggttacttgtgtgtttctctgagaagcggtgtaaatgaagtcaccttagaatatattctgtgcggatgcttatattttgttaacttcacgacttatggcatgtcttatttaa

SEQ ID NO: 144 - DNA, 658 bp, Homo sapiens
ggcccttggttgtggtgcgaggcggctgccctggtgggctctggccatggcgctctgtgcctgcggccgatgcgttgctgcgaacagcataggtgagactctgccgagtgaggtataggtcttctcaccacgcctgtactgcagacacggtcgtgtagagtagcagctgatttgacctgtcccagattttaagtgatattccaaaagggactttacattaaaggagaagcccccaagatgtggccacccttaaccatttttaaatagtaacaaattaggaaaacagctcccctcccctccagccatgtaagtcctcctgattctgtatcacatgagacaccaaaaactggaaatgtagtcacacccagtacagtaccatttttatgaatttaaaaatagtcttataattttaattgtttgtgggtatttttctactggtataaatagcttctaattaataaatcgatcaaaggttgttactcagtatacatgaaattttttgcaggaaaagaaaccagaaatacagaataattcatagaaatcatggttctcaagtatttgttcaattagctttggggaagaaatgccaaatccactttgaggatgagtcttacgacacagatccacccacatgttgctcttatctggaatttgggac

SEQ ID NO: 145 - DNA, 3578 bp, Homo sapiens
cctctaccctggcgctatctccaccactgtccaaagagcctctccagagtcaagacccagaggcacactctctggcagcttcacaatgagcttcttctggtcaggtcgacagagacatctttgacgcaatctctgatgcttccagcaatcctcaaccttgtctgccctgccctaccccaactgtgtccacatccctgccgccaccccaccaaaaagctgcagaacattcttttgtcatctgatgaggtagagctatgttgggaatccaccaatgtgggcttggctttcccccacactgtagttagacagatagacagatagcccaggagccaggtgtcagggagcactgctgagagtatcacaataggatctgtcacggggttcatatcagatgaagcgccgtatccactgcttcacagagcaaaacattcaatcccataaccaggcacaggggaactaacttggactaactaaccagaaaaccttgttaacgtataacttgttccagtactacatctctgcctgctggctcatgacaattgctcagcacattttcccctcttgaagaaaggttgcaagaagaactaaattatcctcaaaagatttctgcttcattagtaaagagtcagtgatggaatagggtgactctgcagaatagtggcctctagggtaggagcttgttgtgttgtccgtgggcctggaatgatcctggtggctgatcagggtccttctcccactctgggctgtatcaaccctgacggtcttggtctttggctcccctttatctggattctgagcacgctgactgtcctgttaatgccttccctccaaggaccagtatttggagattaattagattacaactctatctatgttacctttgtccttcctggtcaccttgcagattcaagacatgttcaaagcaacacattcacaacccatttctattctatagcaacctcgtctgtgactccttagcctggagaacaatctaccaagaagagaaagtatctggaattaagaagtcctaccatccaagccctacttcctggttgtgtggccttggaaaagtgactcaacctctttatattcagtttcctaaccatgaagtggaaatgataacacctgcctcattggggcactataacaagtgaaggacttaggaaaacatctggagtatagcgcctggcacccaggagatgcttaataaatgggaaccaggattctttttcttttcttttttcttttcttttttttttttttttgagacagagcctcaatctgtcacctgggctggagtgcagtggcacgctcacagctcgctgcagccttgaactcctgggctcaagggatgctccctcctcagcctccagagtagctgggactacaggtatgtgtcacctcaccaggctaatttttttattttttatttttgtagagatggggtctcgctgtgttgcccaggctggtcttgaacccctggcctcaagtgatccttctgctttggcctcccaaagtgctgggattacaggcatggactatggtgcccagcctaggagccaacattattattattataggcttttttttcaattgcaagatagacatttcttcacattttaatgattctgaaatcagaacatatcttgcaattgatgggttcattaatataattgtagttctttacttcctctcaaaaacttgtgatcttataattgatggcatcttggaaacaaggtaataaatctctattctgttaaagaaagtgacacactttgacatttaacctcaaattttaggagtctctccctcttggggtcagaaatcccttctgaggccaggtgtcgtggctcatgcctgtaatcccagcactttgggaggctgaggcaggcgggtcacttgaggtcaggagtttgagaccagcctggccaacatggcaaaaccctgtctctactaataatacaaaatttagctgggcatggtggcatgcacctgtaatcccactactagggaggctgtggcatgagaatcacttgaacctggaaggcagaggttgcagtgagccaagatcgtgccactgcactccagcctgggcaacagagtgaaactgcatctcaaaaaaagaaaaatccattatgaggggaaatcaagagtcagggaggtaagaggtcttacccagggtcacacagctcatgatatcccactgtaaaaatactctgtggaatagctctggagaaatactggcacattcttcctctctggtcattatttcttcctactgtgtttaaatatccaccaagtgtcaaggactttgtaagatgctttcacataaattatctcataggattaaattttcccaaaaacctggggaggaattattttttccaaaacagatgataatttctgattcaaagagaaagaaaacaaagtacttttccaaagtcacacagctagtaagtcacaaagacaagactcaaaaccaggtctcttgactccaaagtctgtcttttttgtgaagtcacactcctctgctggcccagctcaaagcagcacagattctttatgggctgaacaaggggagtacgggtttgtccatgtgtttgagtagagatcagggttctggcttccaggctgaaggtgagggaaaagccacttctaactcctttgggcatccatgctcacggccaaaagagccccttctcaacacatccaagtgctaaggattcctgcttcattcaagctactacttaggcccaaggagcaaggggtagaatggcatctaaccagagcaaagccatttctttgagggctcaagccataaacaaatatgctcccctaaacatattcggcttgaaaaagttgttttggggcagctgtggtggtgcacccctgtaatcccagccctttgggagtcagaggcagtcagtcacttgagcccaggagttcaagactagcctgggcaacacggcgaaacctcgtctctacaaaaaatacaaaaattaaccaagcgtggtagtgcacgcctgtattcccagctacttgggaggctgaggtaggaggatggcttgagcctgggaggcagaggttgcagtgagctgagatcgcgccactgcactccagccggggtgacagagccagaccctgtctcaaagcatatttcaaccctaaaactagactcttctgcccacagtgcagtcttctaagggttaccctctggtatatgttcttttgctaaatgaaggcttggagttggagggaagaaggggagatggagtggtgagggcgagtcaaataaaaggatttgagtgtctcgtttttgactaatgaagatgattcaataaacatcctgtaagaagggttcctatgtgcaagttgaggtgctactaagtacattaagacacaattgctgctctcaaggagttagcagctggtctcatgcagggatctcaccacgtggttatgtattttgtttctgatgaggtgcctttcttagcagatgctgccttatttggccactgaaacaatcaaagctaataaatgcttaaagaaaaatatctgacaataaaaaggtttaaatc

SEQ ID NO: 146 - DNA, 994 bp, Homo sapiens
ggggaaatgtttgttatgatgtaaattttatttggtttgtacgcagttcaatttcaaaattgctaaaatgtgtttgagctttagactataacatttgttgtaataattgctaggttgaagttcaacatgtaaaaaaagggggcatggatttacattgcaaaaggtgtccacagtgtattagtgacattctttcattgacagctgacataattcattgagtgaaatattttaagccaaaaaaaaattccctttttaaaaaagggggtttaaatactgttggcatttttatggttcctttaaatgccctagctattcccagaggggtttttttgtttgtttttttggttttgattttctttttgtttttctttcttcttcttatttttttcatttgagtcttagctcccatttaagttatgcttctgaccttgtatggtctgtaagcttgcccagaaataagaccactgttttgaactaccacaaaagtataaatgaatattttaatgccacaatctttcctgttgcctgtggagtctctgctgaaatgaatcaggattcgagctctaggatgagacagaaaatgaaagcatgttgtttgccaggacactgtgggtttatattgatgtgtaacaagttgatttggaacactggactctcattctgttattctggttttgttttttttgttttgttttttttcttttgtaaaggcaatgagctagtcccagaaaggatccttcagttacatacaatttgtttaatgaaatgtcatggctctgttcatatttttgtcttgttcttccaattggtatatacaactttcagagcctcttgtatttggaaggctggaagggcccagactttggaatagtgtcttggtttcactgtttttgttttgattttttttttgttttgattttttttaaactaaagctatataaagcttgtggattaaacagaataaatttctaaatttaaaaattttgccactctt

SEQ ID NO: 147 - DNA, 3330 bp, Homo sapiens
aatcgcgtttgtaaaagagatgtcttcatgtcttcccctaagaatacgcttttcctaacaggctactccttcctgtagagcagaaattgtattttgcacgaacatgcagttattgaagattaggatcaaggatagacaaggtatagtagttatcttaaaatatacactcctaagcagtattattttaaaatcctttaccctggctacctcccctacccgggttcccctctctttaatttggagacactccaccacaaacttttcactttagaggtagcttgccatctctcaggagccctcaccattgtgtccattcactgtgtatagatggcagaacttttgaggtgcaatgtttaattgttaaaaatagtagccacgactttatcaggcagccccaaactggtgcataatgcatggtacaagaaatatttatgtattttttggaattttgtaatatttagtaagagtatatgaaaggattgctactgtatcagaaatattgtttcaatttagtctatcctggatatgtactaacgaatattaccaccagagaagagagctttctacaaaagtcactacagattttgctatattgctttgtagatagatttttacttttgcctaaaagcatttatccttcataccaattgtaacatctgacaccatgtagaagctaaaagtttagagggagtgagggttttctcaagaccttcctcaagcattttatctttagaagagaaactgatgggcacctgatactctgtctaaatacgtttgttatatgtgttttgccctgtgccattcatttggaactttattgcattctttattttaaaaagcttgtttttacgtaatcatagagcttgctatttgtacatctgttgagcaacactacataactgatttttagttgacttagctatagcagtacaatgattagtaatgtaaaaattaacacagaaattaacctaaggaatgaagggtgggtttgtcaaaatatcaagtaaatttttgtttctaaagtacatttaatgtagatgacctaaagaatgcgttatccatcctatataaaagaaagataaaacacaggtcaccaattttctcatttcaccccatttaccttgtatagaggattgttcattcctttgggactaagttatagttatggtgagtgtgtatttactgtagttttgcctgatctcactcattgcacttcctggagttaaattttccaacagccatgttgaggaatagcactctgcatgtttttgttttgtttttcggggttttttttaattgaagccctaaaccaggaattatttgtgttctaacaggaggatgaacttgctgaaaataaaactttgctatgtatttactcttttttaaaagacaaaagcaaaaccagactttctacgtactactccaaagactgtgattgtgactataatacatttttggtaatttttttatacctaatttgtataggaagtgctatttctcataggctgtttcttgaaattttaagtttattgctttaaaatggcagtgtttctcccactttgatatgctaacatttagtaagcactggctttatgaaagcggctttttataagtatactgcattttttgagcctatcattaattagcttagtatgaaagataagaaaatctccatgttgtatccatttggctcaggaagattctttgccttacctttcttagaactctttattgcttatcaaaagtttgagtacccgcttggtttttttttggtaattaaatattgtatgatttatctggttcaaggaagatgcactattcagttatctattgagaaattattttgcagtggttttagtgggtgaaaatgtcccatctgcaccagtacacaggcaggcattatcattcttcacctactttttaaatagtggcaacttgggattcattctggtgattctgaaccttgcctcatagcttaaagtataaaaaagattcaagagcagtgaggtttgttctttccagtgaatggtggactgagtggtgcgaggtggagggctaacaagaggaaagaactacattcttcagaatacagtgatgaaaattcattttgaaactcaaatattttcattttggatattctcctgtttttattaaaccagtgattacacctggccatccctctaaatgttctaggaaggcatgtctattgtgattttgatgaagacagaattatttttctctgtagaaacacagataccactttatcagggaagttagtcaaatgaaatggaaattggtaaatggacaaaagctagctagtaaaaaggacgacccagcaacatgctttaaccccattgtatgtttgtggaaagagcatagtttaacatcttgagaaatttgggacataaagttttcatggtagacagttcatgcagtatatgaattgccataatggaaataatctgattttatttttacaactaacatccattccccttcatttaaacaccttttgtgttttacttcagtgaggagattggagtctgaatggatctgttttccaagagattctgagaaatttttgtattcagcagttggaaagctctctattctagttgataaaacttcccttttttgatgtagatgcagatattctatacagttctgttgtcttttactaggactgtaaacttttgtgataaaattcaaataagattttatttcttggtaattttggctttcacaatttatctttaaatccttgagcaatctgtatacaattaagagatttctgacatttattcttacactaaatggatcaactctaggatttaggcatgttaacttctgttgtgttttgaatctctccagagttgcatgtagatagcatttatttctgtgcccttaaacccatttagaaaataactacaaagtaaaaatgtagaggaaatagaaatgtattttttcatgaacattttgatacaaatttcatcatttaatgattcaccaatttcttgcattaatttgaatttaagcatttaattcaaagagaggggagcatccattattgatacatgtgggcttttaaaaactccatcctttataaatagtcaaggtttgggccacacaaagtatatttttatcatggaaaaatttcaactcctcaagccgtaatgttgaacagaattggagtattttctttataatttcttgaacaggcaaatgaaagcttattatagaatgcatgtattttcttttatctttggaacatcagcaccagtatattgctggcagctattgtattaaaaaataaagtatattttcactatc

SEQ ID NO: 148 - DNA, 1520 bp, Homo sapiens
gcaaaagcatccaagaaaaacaaggcctgttcaaaaacaagacaacttcctctcactgttgcctgcatttgtacgtgagaaacgctcatgacagcaaagtctccaatgttcgcgcaggcactggagtcagagaaaatggagttgaatcctttctctgccactctttgaggagaatctcaccatttattatgcactgtagaatacaacaataaaatacagccatgtaccacataacaacatcttggtaaacaacagactgcatatatgatggtggtcatccagtaagctaaggttaatttattattattccttgtttttttttttttttttttttttttgagatgtagtcttactctgtcacccaggctagagtgcaatggcaccatcttggctcactgcaacctctacctcctgggttcaagcaaatctcctgcctcagcctccaaagtagctgggattacaggcacccaccacatctggctaattttttgtatttttagtaaagatggggtttcaccatgttggccaggctgatctcaaactcctgacctcaagtgatctgcccgcctcggcctcccaaagtgctggaaccacaggcctgagccactgtgcccagccttgtttgcttttttaacagataacagtgtgctcatagaaactgctttgacatgactgcaatcatgtgcttcatagaaacttaattagattataccactagagtcttcagatttttatactttttttttttgaaacggagtctcactctgtcaccaggctggagtgcagtgccgcaatctcggctcactgcaacctccgcctcccaggttcaagcaattctcctgcctcagcctcccgagtagctggaattacaagtgcgcactaccacacccagctaatttttgcatttttacttgacagggtttcaccatgttggctaggatagtttcaccaggatctcttggcctcatgatcagcctgcctcggcctcccaaagtgctgggattacaggtgtgagccaccgtgcccagcctatacttccctttttgaataccatttggtgttttgaagaattaacagctttgtgaacgtggcagtgcttgtgattcaggcttccattgagaccaaggggagaacctggttgcaggacaaacagacggacagcgtgtggcagtgtttaaatgctcttctgaaggctgatacgacagctctctgtgcactgattgcatatgcatcccaagattatattattgttttctactgctatgtgtcacactttgccaaacaggatgtggaaaatgaataagcggttttcttaggcacttcttaacagacaattggtcaaaatgaactccattgcttaagaaacacataaacaccatttagtcactgaacatagctatatgtatggttgttactatgggaaatcttgttttgccaattttctttgaaaattctggcagaccaaggttctttttgtttacataatacttgaaaaataaaaatgaacaagctaacaaact

SEQ ID NO: 149 - DNA, 1654 bp, Homo sapiens
acacatctgatttcccacagcacaacagccctgcatgggtttgtttgtttttttactgctcactcccaaccttttgtaatgccattttctaaacttatttctgagtgtagtctcagcttaaagttgtgtaatactaaaatcacgagaacacctaaacaacaaccaaaaatctattgtggtatgcacttgattaacttataaaatgttagaggaaactttcacatgaataatttttgtcaaattttatcatggtataatttgtaaaaataaaaagaaattacaaaagaaattatggatttgtcaatgtaagtatttgtcatatctgaggtccaaaaccacaatgaaagtgctctgaagatttaatgtgtttattcaaatgtggtctcttctgtgtcaaatgttaaatgaaatataaacattttttagtttttaaaatattccgtggtcaaaattcttcctcactataattggtatttacttttaccaaaaattctgtgaacatgtaatgtaactggcttttgagggtctcccaaggggtgagtggacgtgttggaagagagaagcaccatggtccagccaccaggctccctgtgtcccttccatgggaaggtcttccgctgtgcctctcattccaagggcaggaagatgtgactcagccatgacacgtggttctggtgggatgcacagtcactccacatccaccattgaaggaaaggaaaaaagggcagagacttgacactccagtcttagacaggggacaatttctttgtagttgttctgataataaactgggttccatgttgcatttcatctgtgtactgaaccactagcctaatagaccagcacggtcaactagaatgacaaacattagctactgggaactcttgttgtctcttcctcttcagaactcttgtccccccaggctccccacctctgcaagatgggatacactcttcaggaccacagtttgaaatgtctttcataaaatgtgctacaattagccttcggaatatttgctgggtgatttaaatgtgtgggtctcatttccatgctagccatggtcatctgacagtctctacactgtgaatattgcctggtgatcaagactctcctcaaagaaatgacttgctgtcatcccacatgaactcctgatgttttttctacaaaagtccataaaatgtgaaaactggagaagatcttagaggttgaagcccaccttctcttttcacataggagggaacagaccatggaaatttaaacgacttcctcacggtcacagaactagttttttaatcctcaggcagtgcatccccccaccctacaactgagcacaacctctttccccacagtgcaattcagaatatgctcagggaatgccagccaccttgtaaaactgctgggagaaaagcatgattcccacaaggactaagtatcagtgatttgtaattttcctgttttgtattatctgctttgctgatgtagacaagagttaactgagtagcatgctttattaagcatgagaaagaatcttaagaattgtcaataaaattaacccaaaactttaataatgtgtctgtaaccaagaaaatattgatagcatcatcctaatgaaactaaacatttattttaaacttattaaattgactcttaaact

SEQ ID NO: 150 - DNA, 1894 bp, Homo sapiens
gggcccggggccagccggacacaagcggccctgacacgtgatggaccaaagccacctgctgcgggggagccagttctggggcccgcctgccacctctcccagccctcagcattgtcagcctgaagatcagagctgcagccagtcaggcaggggagagatttttcttttaagccctgctctttctctgagaaccaaaagatgccttgaatatttattcagtgacttctggcttatgctcagaagccagtctgcgtcaggcacgtctcctgctgcgtgacatgtgcagtgctgtaatcggctcccgcttgctctcctggagcaagctctgccctggctgtgggtatcaggactgtgaccaaagcatttctagtcccttctctctttctaaggacccaaatttccctgggggcatcctgcttcctgaaagctgttggatttcagtgatttttccccccaccccccagcacaggagagcacccacagccgcagaaggggaatgtgtcctcctgctctgcttcctcagggcccagcaggcgggggtttgagccctggaccccaggctcttagagactaaggggcagctcctgaccaaagacgatacagcttggcactttaaagcattaacagcaggtgtgaccctgagggctcctccatggtgctgcattgagtccagctttccttctgcccttcctccaggagaaggggcccaaggtccccgtggatggtctccacctgtgcttggaaccagtgtaactggctgctccctgctcccagggactgacacggggatcatctctgtgaccgccctccgtcgggcccctgcctgccttctcccctccacgcaaggctgtgctcttcctctggtttctgtgtgtccgtttgagtgtctgcgccccgcctccccatacttcctgggatgatgtgtgaaacctgacacctagatttatttggaaatattctatgaccactttacagatgaggaaacaggcctcaagcgtggaggggtagagtgaagagtagaacccaggtctgatgccaaagctgctttcttctctgcctcctcctcacgcaactcacacctccttttcttctagctttgttgtcctcccaggaaccaaaaaaccccagctattttctgaccaaaatgtgtttcataacaaaccatctggtgcctttccacacagaactggcaggagcctcgtgtcctgctagctgtctctcttgttgatttccgtgaaaatgcaagtgtttgaagtctgctcattccgagggtgaaacaaaatccaaccctgtcagaatcatgctgttctctttgctgacactgtgaccctgggtcgggacagaccagcagcaatctgtctttagaatcgctttccttcctccccttttgcccccgtggggctcccggcatcctgaaagccagcaaagcctccagcatcttttccatcctgaggtgcctcccagtggcctggcttgtcggagcaagtttcatcagccctagggaaaacacggccctcctgggaacctccttacctggagtaaccggacaccttagacggaggtgcctgagggtggggtgggatttgcagggtcattatcagaacatgaggataacttccttgcccctgctctgtagccacctccttggcaccggcctctatttgtcataaggcggcgtgggcgaggcctgacacaggccagccttggcacgaggggggccaggggttctgagaagcgctgccctgtgagagccacgctggccttcgtctccatctctggttgacgggctgtccgtgtgcctcctgtgtgtctgcagacaagtcttgctgtgctttatttgtgaaactttaatgaggaaaaaacaaataataaatgttctcgttttgaaactcaa

SEQ ID NO: 151 - DNA, 978 bp, Homo sapiens
ccccatctcctgccgccgccctggggccgccgcagggatgccttgccttttcaggatttgagactgttctcaaagggattgggaacgaaggccccatctcgggcagacccccagcagatgtgtcggacaagcaacttcttttcctctgtgaggagacaagacttggagactcagcgatgtcaggccagggccatggccacactggcccacacattcctttctacagagaatttctatgaagcccactcacttgccattccagggccaaaggaccggaggtttgcatatccgccccttgtatttgatttgcttccttttggtttcttggtttttgtttttgcttgattttgtcttttctctacagtttagttttgtcacaattacacatatagttttcaaaatcatgcactttctaaaatggtgtcatcctgaaaaacaaaacccagtgtttgcacacacacaaaatcttgaccccgttatctatattttaaatgctttttgcccaacactgaccctatgttcaactttgtgtcatttaccttataatttgaggaggggtttccctttgggcctcagtgttacaaattactagtgctattttcattattattgtaatggaaaaatctgtggactagaataaaagagtttattgaataagaaatatgattgggctcattgcacatcagtgactcctagaaaaaccattgcaatgttaccatcagaaataataatcagccagcagttgatttaaggtataatttagtaaacgattccaacttctattacctcccctgaaatcggtcctgatatattcgagaagcatgaggccagcccttcagatgcagttgtttatttatactcaggtttagattgggaagaggcccagggaggagcagcaacttgcctgaggtcacacagcccaaaaaaggcaaaggagagtctcgcccctgccgtctcctggccaccccagttgagtgt

SEQ ID NO: 152 - DNA, 2504 bp, Homo sapiens
agtgcctggacgggatctgatgcacaggcccccacgcctcagagccagagtggtcctcagcccatttcagactgcagatgccgcccactcccaccccactcctaggctgccttggagggtacaagatccactgagggtggccaccacagccttggctccatggtggcgggtagacaagggatgcctgggctgactgggcagaggaacctctagctctgactgtcactcggctctccctacccatttggctctggaagctgcttggcccccccagatcagggcctgggtgaactccctggacctttcctagccagccgcacagtctaggcccttgtggggtgaagaatggagggaggagcaggctaggaagacggggccaccaccctctccttgctttcagcccttcccacaggaaacatcaagaagccccagccaggaggggccaggctgccaaggcggctcccctgtttatctagagccttcgttcctggccataccccggactgccctcctgtgcctgatgtccccagctggggtcagtctcaacaggagccagtcttctggagcctctgggcagaaccctccatcagagtggaaatcagacgggaccccctgcagcttccctgaccacgccactgaccagctatctggggaagtttactgtgaaggggtttctgcctttagcaatggggttcactaagggggttcccgaggcccagggccaaggcactcccaccgcctaccttagcacagggtctctgcaggactgcgggagccagcgctcctgccgcccctcttgcccctcagaccttgcatccacagaagcacaacccagccaaacaccacagccttctccagagccggcactgtcccggcaaccaggggtgccccaggctagctcttctacctctggggcaccacggactccccttggccactcttgggactttggtccacgtcctgagccactgaccacggccagtctctctttttatatgtgcagaaaagtgtttttacacaaactttctcatggtttgtaggtatttttttataaccccagtgctgaggagaaaggaggggcagtggcttccccggcagcagccccatgatggctgaatccgaaatcctcgatgggtccagcttgatgtctttgcagctgcacctatgggaagaagtagtcctctcttccttctcctcttcagctttttaaaaacagtcctcagaggatccatgatccccagcactgtcccatcctccacaaaggcccacaggcatgcctgtactctctttcattaaggtcttgaagtcaggctgccccctccccagcccccagttctctccccaccccctcaccccacccggggctcactcagcctggcagaggaagaaggaaggcagacatctccgcagccactcctgggccttttatgtgccgagttaccccacttgccttgggcgtgtccactgagccttccccagccagtcttgttctcaattttgttttgttttgttttgagacggagtcttgctctgtcacccaggctggagtgctatggctcgatcttggctcactgcaacctccacctcccaggttcaagcaattctcttgcctcagcctcccgagtagctgggattacaggtgcatgccaccatggctggctaatttttgtatttttagtagagatggggtttcaccatattggtcaggctgatctggaacttctgacctcaggtgatccacctgcctcagcctcccaaagtgctgggattacaggcgtgagcaatcgtgcccagccttgttcttaattttgtatcatccagtcatcgctaatattacacgcaccttctcacttaatcctcacgacaagcctgtgaggcagatgctcattgttcccatcttgatgaaacttgagtctcagggaagtgaagtgacttgcccagggtcactcaggtagagttgagattcaaacccacatgtggctccaaagtctgcatctggatttgggggtgttttttggcatggcaccctcacctctctccctgcctgttttccccaaagtggaaaggaaggcctttcaaaccagagtgtctcactcccctctgacctccagaccagatggggcatgagccagccagctcagccaggctccctgtgtcctgggaggaagtgtccccatcccccatgccccttatggggagggagggcgtctgatgctctctctctgcctccccccccatcctgtcaggcacaggtgacgggggcagcccatgcgagcccttctcctgctgctctgggagggccagttccacattgagccagcctggtcccatggaaaatgatggcctgggctttctgaggccttatctgatgcctctgcagttcatgtcccccaccaggcctcgaggctcagggtgggagagggccccgggctgccctgtcactcctctaacacttccctcccctgtccccaacatgccctgtaataaaattagagaagactaac

SEQ ID NO: 153 - DNA, 916 bp, Homo sapiens
caaccctcagctctgcaaactcagtctcatgctcctggaataccttcaatagctgccttcctcaccgcagatgtttctgcctcttaaggatagatcttctgcaacagtcttgctgacaagctagagcttggactgaaagagaagagctggattatatatttcccagacttcaaaccctagcagaagctaaggcttgtgatttgacctgagacatttgtttcaggtaatcgtgtagaatgaagtatcttagtttaaagggtaagagagaagttgtttctggtttttccttgcccctgtgtgaaaataggtcctaaatgactgacttcactgcattagaccctatagctggtctcacaagacactttgtgcccagctgtcactcactcagcagcttccttgcagcagagcagggctgaggggaaggggctatgaatgtttgtatacatgttcacagggcacggaaaatcttatgctgctccgtcataaacctacaccaatgcccagcaatcaccctcctcacttccttgtctagatgtagaggtcaggctgctgaaccagccaacacatgggctactgctgggaagcctgggctgttttttttcttaaacacattttatattactgaacaaccaaatctaccctccacggccctgaggccttatcagttccactgattaaaaactttctcttccacggactttaagcccggtaggaaagagagaggaggagggggaaagagcaaaccatctttcttccaggcccttgactgctcctttgggctgggccaaggtttgtatgtaccacaccatgcatgactcagatgccctcaggtccctttctctatggtatgtatactgcttgtgtttgggttgaagcactacctgacattaaaggaaggacttggagagagaatgca

SEQ ID NO: 154 - DNA, 1114 bp, Homo sapiens
gggggcgacccgcggagaccccagcagaggtcgcagcccagctcccagggggcccggcgcctgccggcgggctccgctcttgggacaccggagaacctatcatgtcagccagcgggcccacacgtcggaccccggttggccaatcacaacaggggggcgtggccttaccttctcctgctcgccctcagccgcggagcctctgcggaggctgagccccgcgaccggagcgccgctctccgcttctccacccagctaacttctgctcgtctttcagagcattgtctcctccagggacttgcctggccctcctccccctccgcccccaatgggttcggtctcctttgcgctttcgcagtccagtgtttgccgcggttcccgcacggtcaggccccaggactggcttgcgagccccggggggcgggtcgtgtcgtgtccttttctctctggctaggcaggtgtgccgcaaatatttgacgaatagatggatggcagacattaactgcgtgcctggccctatgagggcggcggcgggacagggtgagcggagagacagaactgtccccgccccaccccgccacccattcctagggttcctagtcccgggaaggcaactacccaaagacgcctgggttgtcaggctcaatccttgagcctcaaccaaggagcagaggggtgcgggtaaacgaggagtggggcgaggaaagcgggatgggaacaagtggcctgtccccgcacggcccgcggctcagcctcggccgtctgccctgcactaccaaggccgaccactagaggtcagcgtcgcgccgcactcttcacccgcatgtccagagggcggccgggatgtggagggtgagcgctgtgggcagctcgggggctgaaagctgggaagagaaatctgaagaacagccccatctctttcgcctgcacacttggaactcagcaagaagggactgtttctaggtgggctgggcgcgagcagggactgtcccgagcggtataggtgagaatggagttggggggggacactaggtcctccggggttcacccacctggagctggaattatcacttccgaaataaagcgcgtgtccttgccccctcacgctccaggctat

SEQ ID NO: 155 - DNA, 2971 bp, Homo sapiens
cacatattatttgcaaataccatggatgatatgctgcttctgtttaacagtgatgcaacattatgtggctgaaaaagaatataaaaagctagactctaccctctaagggtttagattttttgtgggattttttttttcctcatttttcttaaatccaagttggccgttttattagtatgtttcaaatgtgtattaccaatgtgggtgtaaatttttaaaaaatgattattgatagaagtttggcaggaaaattctttaagagctaacaagagaagagagtccagttttctggaaatatgtctttaagtattttagacattcctcgtcagtattaggaatttccatgggaaaagaggtttgcatgctggtaatgcaacctttgaaactttgtaaaggaaacatatatgtatatatttatgtatatgtaagtatgtgaatgtgcgcattttgcattccatatgaaaaaaatgccacgtctgtttaaattatttgatgtaggtttgggtttttgagatttgctggtgaagtcagtgacgaaaaataaaccttcccttatcttcctactctgcccctccccctaatgaaatcatattaagttgtttttttttttttttgtaatatacagctttttttttaaggcatcattttcgagggtctaaaattatctggtaaaacaaatgaaattaagtgatccaaagctgctgaagtatgtttgaactctccagtgccctatagctgcaagagttgaattagtcatgcagtcatatggcagcaggttggtgattcagtccgaccttctttaggtaaccgagcatttatttaaccaactataccactgcattgggacgtctgcacttgagcttctacaatctgatataaatctgaatacaggattattctgtttgaaaactttgctatgtgtgaactgtaatacttgatacatttttggtttgaagactttgtctaagcctcattatactgaagttgaagaaaccaaatgagctccaccctcactttgcctgccctgatatgatcacttgttgagtcactggagttcctttcattttggcactgatgctgttttctcttgtctgatttgaaacagtactggtaataatatggttgttgaaaatgtgatcacctttatctaaagtgggagaagatacatacacagtatggcaaatggataaaatattgtggcatcaactacttttaaagtagaaaagctatccattttatacaatcactgatacagtctatgtcaaaaaaccaacagaccattattcctcttgaagttagtttgattttatctttgtatggttgtctacaatttgttttcctgtaaatgcagatagttaaaatctaaaggatagaatgctttcctaaaacagaacattagcctttaaggttaaatagactttacattgtatctaagttaatctttataaagcactagaatttttggtcaaaagtcaaaatagtattagaatattgaaattattgatagctttcataatctcagcttttttgaacttccacaatttttggaatatgtcataatttttttccctgtttcaaatgtgttcagaggaaatagaatgtaaaacatcacaaaaaaaattgcagtacataaaatttctggactatgttagttacttgatctggaagtttaaaatttggactaaaaggttttattgaaataaagcctcttaaaatgaaaaatcatatacttttaacatcacttttaagctaataaatataagaattcttttggaaattagaggtggaaacacactggaacctcatgataattgaccctctggatcaccagattagtttaatttaacagatatgtccaaggaagttgagctatagggagtaagaaaaagcatcatgataacgtctagtcaataacatggcacttcagcagagattcatagatgatggtatgcccatgcatcatttgctcttcaaatatctatgtgcttggagccacagtttcctaagcgcatagtttttggtcctgcctcatgtaaaatagttaatgattatcatttacttggaaagattttacctgtgaagtgaaattctttcattgggggtaagggtatgaggtgatcaggaagtttcttctggaattttatcaagtccttgtattctaaaatagccaagcaaaatgatagtaaattctttgtctttgttctttcagtcagaggtatttattaagtacctactgtgtgctcagcactaaaggtttgttgataaaatgacaattaaaaaatggcatttagccaaaggccttttcagccaggagtaagaaaagatggttagtgatatttggaaatacctggatatttgctagaggaaaaatgaaagcaaaacttcgtacacagtgccttgcccataataggtactcaataagcaattgttcctcatagagtcttttgccatgatttatggtgttttttgaaatttgtcttaattgaaaaaagaccaaatatttcaaatgagcttataggcagctgtggccagtgaaaatatggggttgtacagttagttcctagaatgttattttgcactagttgtcacttagaaagatggggttcctgtagattttttggtgctaagggatactttgtcattatgatgaagtaagtgttaagtgtcagataaatagcacacagaatagttctttctgctggtctgttttttctcttcgttgttgttgtttttaattgtaaattgttatcaatcaaactattgtagcagctacaaagtaattcaccagcatgacaaaatggtcaaaaaataagtcatcagcacttaagaaatgaaagcaacttttgaaattttctgttaaaattgtcaaatatattttatgaagaatttataaaaggggaaaatgattgtaatttattgttcatgacttttttttttaaataaagtgagtttcaacaaaaaaaaaactgaa

SEQ ID NO: 156 - DNA, 520 bp, Homo sapiens
ccgccgcggctccggactggccccgggactggccccgggcacggaaaaggacacccctcttctggcgcgctgggtgcctttgcgtaagcccttccttctggaactcagtttcgcgtctgaaccttggggaggtggaacaagttgctgccgaaggcccttccctgctcccgcggcgaagggggagggagaggcctcttggtccctgtggagacccggtctggggagtcacgattggggtgggagatgagcaaacctgctgaataaagttaaaacgttatttaaatggggagctgaggaaggagcaaacgggttttcgcggttaaacccgtgggttttggaatgtgtgttcccggctgtgtgatcctgggcaagaacttgacctccctggacgcagcggcacccctcggttattaaggagggaggagtaggggatagaagtatttcaaaatagttgtaatgcgcatggcaaagtgcccagcatatagaaagtgctcaataaacgataactgctgtgacttct

SEQ ID NO: 157 - DNA, 157 bp, Homo sapiens
catggcctgaagatgcagggcagaggaattgcccatggacagtgacgcaaggactaggctgggagggagcgtgccaaccccttttgcctctgggtttggggagcggagggcctcttcttggtgccctgccccaaataaaggaactggacaaagagaa

SEQ ID NO: 158 - DNA, 334 bp, Homo sapiens
ccctggccagcactctagctcctgacctttgacccgagggccacctcaaccccagcttctgacgtgtccaggacagagcatccctggattctgttcagggtgggaagtagtactgctagtcatggtctcaccccgagctgacccctctgcctgggctttgtgccaccctctcccttgccaaagaagaaactctccccccaaatcctccaacctctggggccacagccctgcccctccagttccttggcagttctcccccaaaccaggtctgtacaggtgttctttattttacatgagggctactttccaaccaaataaagtcaatttttctaag

SEQ ID NO: 159 - DNA, 1515 bp, Homo sapiens
ggaattctgggggattcccccagggaggagctgggctgctgagagcctagtccagcaggtttctgccctgacattctcttgtctgctattcccagagaggtctcagaggggaggggagagcctgcatctgggggccaagggctgattagggaactgtgtcctacccacactggcatgttggattacgtttgtcctgttaattcactctagacggtgagttactaattaacttttggcaggtacaacagataagtcctcacaaactgttcccagccctaggctgacatgagagacgaacaggctgtccacctttcttctccatccaatgggatggatccatgttcattcccacttcacaccttggtcctgctgattagagagctcatcagaggggcctggaaaggctgagcaagtaccagtgacaatggccatttaagaattctcaggccccatgtgccagccttcttgggaactgagctggctttctgggttttctcatgcctggtcttactgcttcttcctcagggctcttgttctcccagaagcctcagggtaatgtgttggttagcacgtaactactaggattggggccctagggattatagccaggactctaatctgcctaccatgccatttaacaagagatcccactctccagctgccttgtgtccctagggtcctggccatgtgtttagtgtgctaaactttctcctttgttctcaggccttccaggtagtccccttcctggacttaagagtgcaaactcttctctgtggttctagccttgggcagaattatatcccagagaccacagagcaactgtcaagctgcttaccccctcacccagggctacagcctgtgcccagccctctaatttgtgcctctcttgtgttgggggtggtgggggttattcctttccctttcctgctctggcctccttgaaagttcagagtacccagtacaagtcagctttaaagtacagcttttagtgtttcctgggttgtttctctggggctttagtgagggacctttgccctctggtttttcttgcctcctggtttagggagcatctcacacttgttagtatctggttgttgggccagccgtgcctcctctagatctggagccaggccaggcaggggccacgtgtgggccagtcagccactacaagatttttgctaagctttgggctgttggcagcatcttggacctcatgcctgggcctgaatgaggctctttcttaagtgtttttacaagtttgtgttttatttatggagtgacttatcccttccattcagagcagccccacccagccagcccttcagcctctgggctcctgctgcttaaaggcagagccgcctggttggtctccaccctgtgcattgggagcccagccaccatgctgacgggtatttttcctcataaagtttataaccagttatttatatgaatctttgttatgtccatttgtttgtattgcgtattttgattataaaataaagtatcttaacagac

SEQ ID NO: 160 - DNA, 398 bp, Homo sapiens
gtcaagcctgtccagagttcccctgctggactccatcaccacactccccccagccttcacctggccatgaaggaccttttgaccaactccctgtcattcctaacctaaccttagagtccctcccccaatgcaggccacttctcctccctcctctctaaatgtagtcccctctcctccatctaaaggcaacattccttacccattagtctcagaaattgtcttaagcaacagccccaaatgctggctgcccccagccaagcattggggccgccatcctgcctggcactggctgatgggcacctctgttggttccatcagccagagctctgccaaaggccccgcagtccctctcccaggaggaccctagaggcaattaaatgatgtcctgttccattggc

SEQ ID NO: 161 - DNA, 220 bp, Homo sapiens
ggtgacacgtctcagccttagccctgtgccccctgaaacagctgccaccatcactcgcaagagaatcccctccatctttgggaggggttgatgccagacatcaccaggttgtagaagttgacaggcagtgccatgggggcaacagccaaaataggggggtaatgatgtaggggccaagcagtgcccagctgggggtcaataaagttacccttgtacttgc

SEQ ID NO: 162 - DNA, 3269 bp, Homo sapiens
gccacaatgggtgggggctattcttttgctatcaggaagttttgaggagcaggcagagtggagaaagtgggaatagggtgcattggggctagttggcactgccatgtatctcaggcttgggttcacaccatcaccctttcttccctctaggtggggggaaagggtgagtcaaaggaactccaaccatgctctgtccaaatgcaagtgagggttctgggggcaaccaggaggggggaatcaccctacaacctgcatactttgagtctccatccccagaatttccagcttttgaaagtggcctggatagggaagttgttttccttttaaagaaggatatataataattcccatgccagagtgaaatgattaagtataagaccagattcatggagccaagccactacattctgtggaaggagatctctcaggagtaagcattgtttttttttcacatcttgtatcctcatacccacttttgggatagggtgctggcagctgtcccaagcaatgggtaatgatgatggcaaaaagggtgtttgggggaacagctgcagacctgctgctctatgctcacccccgccccattctgggccaatgtgattttatttatttgctcccttggatactgcaccttgggtcccactttctccaggatgccaactgcactagctgtgtgcgaatgacgtatcttgtgcattttaactttttttccttaatataaatattctggttttgtatttttgtatattttaatctaaggccctcatttcctgcactgtgttctcaggtacatgagcaatctcagggatagccagcagcagctccaggtctgcgcagcaggaattactttttgttgtttttgccaccgtggagagcaactatttggagtgcacagcctattgaactacctcatttttgccaataagagctggcttttctgccatagtgtcctcttgaaaccccctctgccttgaaaatgttttatgggagactaggttttaactgggtggccccatgacttgattgccttctactggaagattgggaattagtctaaacaggaaatggtggtacacagaggctaggagaggctgggcccggtgaaaaggccagagagcaagccaagattaggtgagggttgtctaatcctatggcacaggacgtgctttacatctccagatctgttcttcaccagattaggttaggcctaccatgtgccacagggtgtgtgtgtgtttgtaaaactagagttgctaaggataagtttaaagaccaatacccctgtacttaatcctgtgctgtcgagggatggatatatgaagtaaggtgagatccttaacctttcaaaattttcgggttccagggagacacacaagcgagggttttgtggtgcctggagcctgtgtcctgccctgctacagtagtgattaatagtgtcatggtagctaaaggagaaaaagggggtttcgtttacacgctgtgagatcaccgcaaacctaccttactgtgttgaaacgggacaaatgcaatagaacgcattgggtggtgtgtgtctgatcctgggttcttgtctcccctaaatgctgccccccaagttactgtatttgtctgggctttgtaggacttcactacgttgattgctaggtggcctagtttgtgtaaatataatgtattggtctttctccgtgttctttgggggttttgtttacaaacttctttttgtattgagagaaaaatagccaaagcatctttgacagaaggttctgcaccaggcaaaaagatctgaaacattagtttggggggccctcttcttaaagtggggatcttgaaccatcctttcttttgtattccccttcccctattacctattagaccagatcttctgtcctaaaaacttgtcttctaccctgccctcttttctgttcacccccaaaagaaaacttacacacccacacacatacacatttcatgcttggagtgtctccacaactcttaaatgatgtatgcaaaaatactgaagctaggaaaaccctccatcccttgttcccaacctcctaagtcaagaccattaccatttctttctttcttttttttttttttttaaaatggagtctcactgtgtcacccaggctggagtgcagtggcatgatcggctcactgcagcctctgcctcttgggttcaagtgattctcctgcctcagcctcctgagtagctgggatttcaggcacccgccacactcagctaatttttgtatttttagtagagacggggtttcaccatgttgtccaggctggtctggaactcctgacctcaggtgatctgcccaccttggcttcccaaagtgctgggattacaggcatgagccaccatgctgggccaaccatttcttggtgtattcatgccaaacacttaagacactgctgtagcccaggcgcggtggctcacacctgtaatcccagcactttggaaggctgaggcgggcggatcacaaggtcacgagttcaaaactatcctggccaacacagtgaaaccccgtctctactaaaatacaaaaaaattagccgggtgtggtggtgcatgcctttagtcctagctattcaggaggctgaggcaggggaatcgcttgaacccgagaggcagaggttgcagtgagctgagatcgcaccactgcactccagcctggttacagagcaagactctgtctcaaacaaaacaaaacaaaacaaaaacacactactgtattttggatggatcaaacctccttaattttaatttctaatcctaaagtaaagagatgcaattgggggccttccatgtagaaagtggggtcaggaggccaagaaagggaatatgaatgtatatccaagtcactcaggaacttttatgcaggtgctagaaactttatgtcaaagtggccacaagattgtttaataggagacgaacgaatgtaactccatgtttactgctaaaaaccaaagctttgtgtaaaatcttgaatttatggggcgggagggtaggaaagcctgtacctgtctgtttttttcctgatccttttccctcattcctgaactgcaggagactgagcccctttgggctttggtgaccccatcactggggtgtgtttatttgatggttgattttgctgtactgggtacttcctttcccattttctaatcattttttaacacaagctgactcttcccttcccttctcctttccctgggaaaatacaatgaataaataaagacttattggtacgcaaactgtc

SEQ ID NO: 163 - DNA, 2171 bp, Homo sapiens
atgaggctggccacctgccactttgccctgccctctgcctccagggctccactccccttccttttcttggtgaaaggcacctcctttcctgataatgaatggtgttccctttgcttggctggggagccccccaggccaggtttgctggccatagatacctttgggctgcctgggacaggctcctgaggaggattgagggtgaaagtctcccacgagtacactaaacctaggtctggtcaccaatagggtttggagagcaaagggccacaactcatcagctgcctgtctcttagatgcactttctttttccaccagcacatccttcaacacacagaatttcagggaagagttctccccaaaaccctagctctttacccttccattttagccttccacccagcttccacaaaagatttggctctaccttggatctgctagtaaataactaataggcaggcagttatttgggtaaggaaaaaaggggtgggagagacagaaaatttgcccatctgctgctcctcccccttggctctccacctgggatttgctattgaatctctaccctctcccaccacacagtactgattgctcactgaaagactcagcacccccaatggtgcgcggaagccaggcgggcgattacaatccaattacctattgtcgactcagcccacacaagcttttctcctcctcttgcagggcatggggccaggctccactcccaaatgagactggccccctccatggttcagggtaacagaagggcctgtaggccctggtgaactgaatccagcacaggcctcccctgtaacacaacaggactgagcagaaccaaacacttcttccaactgactctgctccctgccctcaccatctcaaactctgattcccactccactcttcgaggtttctctcagctttttgacctggctccctaagtaggccctagatgatttattcttggcatggcaaagcttgttctaggtcctctgcttgtgagggtcaaagctgtgtcctttcccttacctccctctgccaggacttgctgcagagctgctgagaggattagtgcctttgaagagctgtctgcctgagcaactctatttcaggtgccccacaccggcaagtaccagccagcaacaccaaccaaatgctactctctttaaagtccattttccttcttctttttttttttttttttggagacagcatctcaccctgtcctggctggtctcgaactcctgacctcaggtgatccgccggcctcaccctcccaaagtgctgggattacaggcatgagccaccatgccagacttcccattttactttctgcaagctgtttccctagcagctccctctaggggagaggtgaaatcttgcaagttgtagcaagagcacacaggaaacccctaactttcctataccccacccgcctcttcccctttctgtcccgggatacctggcggcaagagacttcttggctattgtccatgctcccagaatcaagcataaatgccagacacggcgattgagaagccaatcagtgaaccctttggcaaagcccccatccacacctggcactcccctctaccaatccctggcacagggttcctggagagcaggtgctgtacattttacagctttacaatggggctgttgacagccataattagggaggcatgaattatgcggctataatgcagagccctacaattaaggcgggaatgaggggctggaggcagcaaacggaatctgccctatgagcgtggctgttgagtcctgtctcctgggtctgactttccgtaatatgattggggtacagtagaggtgattaatggggctggcatctctctttggcctgaggttctgtattctgggaaaggtacacagggtggagtagggagaagctgccccaggaggcgatgtagtggtggaaagaagaggcagagaggtcgtcgtcgtcgcccagcagcaagggctgcaaaatagtagaactcgtggttgctttggacaggtgtgatttgtgcaagccaggttcaacccttgcctcaagaaatcagatgggaccaatttagtgtccttccacctgtgagccaagcccccatttgaggacatctatcgtattcttgtgtgctgggtctcaaatagaatttttaaagattcttagatgt

SEQ ID NO: 164 - DNA, 1494 bp, Homo sapiens
agtgtgtgcatttttgataactgtgtacttctggtgactgtacagtttgaaatactattttttatcaagttttataaaaatgcagaattttgttttactttttttttttttttaaaagctatgttgttagcacacagaacacttcattgttgtttttgggggaaggggcatatgtcactaatagaatgtctccaaagctggattgatgtggagaaaacacctttcccttctagttttgagagacttcctcttggctcccaggaggagggattccctgactttgacacacatggccaccttggcacaaaagccttgtggtatagaaaaacaaatttgtttttatgtcctcttctccctttccatcgttcagcatagacttaactcccttaagcccagacatctgttgagacctgacccctagtcattggttaccagtgtgtcaggcaatctggactttccagtgatgccactgagatggcacctgtcaaaagagcagtggttccatttctagattgtggatcttcagataaattctgccattttcatttcacttcctgaaagtcagggtcggcttgtgaaaagttgttaaacaacatgctaaatgtgaaatgtcaaccctcactctaaactttccctgttcagagcatcagatgaagacttcattgggttttatagtggctttctgatttttggtagtccattgaagaagggagtttgaaagttgttgtatactgttaacgattgtctgcccatgtcctgcctgaaataccatgattgtttatggaaagtatctttaataaagctggatacagtttggcttggaatgctgcctctgatcttttcccacaagtggggtaacctggtttatccaagtctcttggaacagggtacgttctgctttgaggtactccatgtacagtctaatgatgatctttcactgatttatagtcagcttccaaaacacacagtgctaggtgcagttaggaaggattccaggagtagacttagctgatggtgaaaggctgggagtatggagtgatttctgtacttggttatgcagcattccctgcagtgtttgttttttgcatgactccgaatacatgaagtgtattaaatgcagatttttggtagatctgcggttttggctgggtagctgacaggagcctctctacttccatctgcatttgcaacttctataaaattagcaaattaatagactcatgtcagagagtgtctctgtgaatgtgtacacagttgtccatttgtaaggtagatgacactttgctcctaagtagacctgcaaacaaagacaatggggtctttcctgattcctttagtttggagatgcagagaaccccacgtttctctaagtgaaatggcaagaagttatttgttagaatatggaactggtaacaaattcatgtttgcaccttgaatttgctttcacagacctggctgtattgttggacaggaataaagtaaattggagactaa

SEQ ID NO: 165 - DNA, 828 bp, Homo sapiens
ggcaccagggcattcgggccacagggcggtgctagcttgacacagtcagcatgcttcccagagggagcaggccggaaccacagggccagagggagctggaacccgaggggccggggaagctgccagcccagaacacccctaatgagggtgtgagaagtgccttctccttccccaggatggactcttctcggctcaggctctgctggtggaaagcgattcactgtataaacttttttttatgaaaaaaatggcatcaaccaccatggatttttacaagatccatttgcctttctgggagcagaaacagccattgcggccccaggaggggaactgagtcacgctggggctctctgagactctttagagcagctttgggatcccaccctggggacccccacgattggccacctgtagccatctgcacacacctccgagacagtccagtgtcacctctctcagagcatctggctgtttagcagaactcattctatccccaatcagctccttttccgttctgttctgctgggagttctagaaccacttcctgctacaggaggggtctcatgtcctgctggcttccagcttcaggcaccagcatccaccttggctctgccagtggatcccctgcggtcaggctgggcagccccagagagaggatgtggaaagcactttttggctgacttcatctggggttggcaacaggacagagttcacaggaggccagtgggcgggccatgagggacagggtcttttttcatttcttcctcagctggttactcagggttcatctgtccatggcctttctaataaactgttgagttgaagcac

SEQ ID NO: 166 - DNA, 1354 bp, Homo sapiens
cagccgtgggacacctcccccccccgtgtgtgtgtgcgtgtgtggagaacttagaaactgactgttgccctttatttatgcaaaaccacctcagaatccagtttaccctgtgctgtccagcttctcccttgggaaaaagtctctcctgtttctctctcctccttccacctcccctccctccatcacctcacgcctttctgttccttgtcctcaccttactcccctcaggaccctaccccaccctctttgaaaagacaaagctctgcctacatagaagactttttttattttaaccaaagttactgttgtttacagtgagtttggggaaaaaaaataaaataaaaatggctttcccagtccttgcatcaacgggatgccacatttcataactgtttttaatggtaaaaaaaaaaaaaaaaaatacaaaaaaaaattctgaaggacaaaaaaggtgactgctgaactgtgtgtggtttattgttgtacattcacaatcttgcaggagccaagaagttcgcagttgtgaacagaccctgttcactggagaggcctgtgcagtagagtgtagaccctttcatgtactgtactgtacacctgatactgtaaacatactgtaataataatgtctcacatggaaacagaaaacgctgggtcagcagcaagctgtagtttttaaaaatgtttttagttaaacgttgaggagaaaaaaaaaaaaggcttttcccccaaagtatcatgtgtgaacctacaacaccctgacctctttctctcctccttgattgtatgaataaccctgagatcacctcttagaactggttttaacctttagctgcagcggctacgctgccacgtgtgtatatatatgacgttgtacattgcacatacccttggatccccacagtttggtcctcctcccagctacccctttatagtatgacgagttaacaagttggtgacctgcacaaagcgagacacagctatttaatctcttgccagatatcgcccctcttggtgcgatgctgtacaggtctctgtaaaaagtccttgctgtctcagcagccaatcaacttatagtttatttttttctgggtttttgttttgttttgttttctttctaatcgaggtgtgaaaaagttctaggttcagttgaagttctgatgaagaaacacaattgagattttttcagtgataaaatctgcatatttgtatttcaacaatgtagctaaaacttgatgtaaattcctcctttttttccttttttggcttaatgaatatcatttattcagtatgaaatctttatactatatgttccacgtgttaagaataaatgtacattaaatcttggtaagacttt

SEQ ID NO: 167 - DNA, 551 bp, Homo sapiens
cctggactctccagggacaggttggaagccaacttaacccaggggtctgaaagtaaaaatacacattggaactgcctctgctgccctgggatcattactgtgtccattataatctttctctttctctttgaaagctggtcaggaatgggagaagtgtcagacactagagagccccttctggtcctggctagggcaaattttagacaactattttctctgtaagtgaagattgtcgtattccaagtctaaaatacacctggatctgtctagtcaatcaacatagcagagacagtcttaaacctaccattgacctgtgtgtaaatttaaatgtcaatttattgaagtgtaaatttcatcaaaggcattagctgacaggctggtaacagtccacacaagatggtataggcctgaacagtgtagtggcagtaataaagtgggaccattttttccaaatgcgacattgtttctgatgtttttttttatgatttgtgcatgtatttttatatgaaaaaaacttacaaagatatgcaaattaaacttctttcagttat

SEQ ID NO: 168 - DNA, 1873 bp, Homo sapiens
ccacggctcagtacttgccacctgctggcctgtctgaccctccgcactcacctgccgggaccctccctattccatccaagggaagcagaactgccaaagactcaagtcttttcatatttatttcccatcctgcgtggctttccctgaactgttccgtggctgtgccctctgctccccaaacccaggttcccacagccttgggccctaggtaccccagctgatcagtgccaggagagaccagagcctctggaggctacccaggggaccacaccaagtccttgcctgtgccgggcgagccctgtgtgagtgaggctgtgaactgagcgtgaggcctcccaggtgggggaactgcttgggccttgctgagccagggtcctcagggtgaagcaggactgaggagtggccagctctggatagctggctgtggagaggaagcctccatgggctgctttggtctgtgggctccttcattcccttggtgataatttccctttattctgtgggatttttggtggggttttccccccttttttatggagttggccaataggattgagttggggctccagtagagaaggcagggttggtggtgggtgggggcagcctgtatcagacaaaggtaaatcagccagccaggcacccacagcctcagctcctgtgcagttcctgggcagcacagtggaagtgggagcctggtccttcccctgcccatggagagctctttaagggatcccagcctgcccctccacttctctcccaagccaggtcccggcatgggtgggttatgctcatgctggcaatacttgaaacgggtttattaatgctgggtattttgcacaattttatagacctcttttctacatagtcttttttaaatggaaggagaaaatgtcagccacattactgtctgtgtagtgccaggtgaagggttatcagaaggctggttggttttaataagtttattccaagagaccttctggctggaatgagtgagagtgtgtgtgcatgtgtgtgtgtgttcatgtgtgccctgtatgaatgtggctggctcccatatcccctgggctgccccctgccccatcccctttgagtgtcagaagcactctgagccaaggggacagggggcacgtgcactggtcacgagaaaaccctgggctcccactggggctcagcccagcctcctatctttccttcttctatggacttcagacagccagtgtctggggactctgccactctacccccagccctacccaccagcccccaggtgaggcttccagctgggacctgcccagacaggctgagcctgggcgtggtgggtggggtgatggctctggggagcggctgccatcctacaagccacaccccctcctctgagctctgaatatgggacccagtgccaggagctggaagacaaggtgtttctgccaaacggggacctccatccagagaaaaggaagaaggtgcagggtgggccaagaggcaagtgaaggttggcctgagtctgggccggaaactcagaggatgtttctcctctgctgggagctgtagtttcttatcaaaatagatattgttccaccatccccctccttggcccttcaagtgggctgaagcccttggaaagtgacataggaagtccccagatcttgcccttctcactccagaggctagtggtcacagacagctgggaatggcagccacagagggtcccctctgggagaaacagcttcaccccagcctcagggccctgggccatcactgcagtggccctgggaggtgaggaagaagctggctagaggagggggctcccacctaccttttatttaagccagtattctttgttcctgcttgtaataaaacttcagtttataag

SEQ ID NO: 169 - DNA, 497 bp, Homo sapiens
gtgttgcccgccaccgccccgccctgccccctccagtcccccaccctgccgagaggactagtatggggtgggaggccccacccttctcccctaggcgctgttcttgctccaaagggctccgtggagagggactggcagagctgaggccacctggggctggggatcccactcttcttgcagctgttgagcgcacctaaccactggtcatgcccccacccctgctctccgcacccgcttcctcccgaccccaggaccaggctacttctcccctcctcttgcctccctcctgcccctgctgcctctgatcgtaggaattgaggagtgtcccgccttgtggctgagaactggacagtggcaggggctggagatgggtgtgtgtgtgtgtgtgtgtgtgtgtgtgtgtgtgcgcgcgcgccagtgcaagaccgagattgagggaaagcatgtctgctgggtgtgaccatgtttcctctcaataaagttcccctgtgacactc

SEQ ID NO: 170 - DNA, 215 bp, Homo sapiens
cccctgttttttcctccctgaactcttggggctgagctgcaaccacccaactttctttcccactcttctctgggacttgtgggcctcagggcttggggcaggcatgggactggcccaggcacacaggtcccggggcatcaggagaaaggctgggtcttgggaccttgtcctccccagttggcctactgttacacattaaaacgatttgcccagct

SEQ ID NO: 171 - DNA, 1040 bp, Homo sapiens
ctccttccaactcctcagaacctccactctatggatctggacctctggattcggctttctccctgggcactgccttcaggaagacgttgagaattgaccttacacaatcccagcgccctcctcacaggagcctttcactttacagtggcaaggggctggttctggagaactggctgatgctctgaatttcttcatataccccacatttgactttggcttacactgtacaattggagatgttgctacaggtccctgagatgcaatcagattaagcgtagcaagcattgccaatgggaaagtcaaaataatttattttttttccctttccccctaccccatccccagccaagaatttcttttcaagatatcgtcatcattcttaaacaacattcttaacccccagctggggtccccattttaatagatgtcattgcttcaagtctaacggcgccgggaggcctgtttgagggaaaacattagtttgaaaaatccccgttcccttcatccactgcccttgttctccacgtgggagtgtgcttgtggcccctcagaaagatagtctgctggctcctaggggttggggtgggggacacacctttttctcaggaagaggtgatggcaatgtaaaacatctaagcaaagttttaaatgaaaaaaaggaaacacatttaaacatcctgataatggagggaaggggggcacatttacacatagcccagaacttgtagaattctgcatagtgaatgtatattgaattagtctcctgccttatacattcaggaggaataaatttccataatgtaaggcaaatgcatggggttctgaggttcactttgcaagtgcccttgctgcctttcctctgtgtctattatggctctttaagttgacggttcctggagcagcttgtatttagtttcgtttggcagtctggccctgttgactttgatttgcagaccaattctcccttgacctgactcacagccgcctgctcttacccccctcctcaggaagtcttcctcattaaaggatgtgatgacgga

SEQ ID NO: 172 - DNA, 1861 bp, Homo sapiens
accctccagccctggtccccagcccctgctactggctggaccctctgccctgggcaggaggtcaggggattctgttttggtttgtcttccccaccacccttttttttcatttcccctgttttgtttgttagtttggcgttaggggtggaggttgctacaacttgctggctttcggactctgggctgattgtcccctgactatccccagccctgaaaaaaagagcaggaggggacacccctccatatgcccccccccatctcctgctttcatgtccctggagggctctggcctgcctcaaaaccccttctgcctcaggtggggaggaacaagctgaactgtcttcagggactgtcctgccctttagctggcagcagcaggaggagtgggattcccaattggtaagggctcgccttggcctgttgccactcttgctccctagcctgcaaggctagctcccctgtggtcttcaggaaaggttttgaaaaaggatgggtcccaccctccctccagagccaccagtgttagagcggagcccaaaggaaggatgggagccctggagtgggcaagaccaggccacctgctgaggtcgctgtggagcaccctcgctcctctcctggctactagctctggccctgcacctactctcactggccacctctggaggctctgcctttcccaagggccctggcagagggtggggcactgcaccttaccccacccatccatgccagcacttctgcactacggccattctcctcttgggcgctcctcagcctcactgtgacctttctgccagagctcccagccaggcctactctgctgaggtggcgcttcctgctaagggcccttctctgccctttctgccctccttcccatcccacatgctgagccgccacaaagaccaaagaagtgatggcttttctctgtcccctgctgctctgaggggagaggggtgggtctcctgagccactcagatgggaaagtcccttactcggcccctccctccccagcagccccaagctttacactggatgcagcgatcaacccaccactcaccaggcctctcctcccctctgcccccggctcttagctccagctgctccaggtagttggttcatccttccccctctctccctccctgcttccccttcagtgcttacttggctccagccctccagctgcagcccctggggaaaagcagcctcccttctcctctccctccactccctcgctccctccctcagcccctgtctctgccaggtgcctcctctcagtcaggcttcagagcagccctggagacaggagggccatgttaaaagctttttcacagttttaagaagacaagtggagggtgaggatagtggtggggggtctggcaccatctcattgctttaatcccagcaacacaggtggcagcttctcccccttccttcccaccccagtccctcttcccacccctctcttctagcttggtaatgaagtatatttattggtgaaggaaacagctgctgctgcttctcctgctgctgggacctgctcccctgtctcttctccgtgacctttctctagccagggagaagggagagcaggagtattggggctgggccctggggcccaaggaccagctgggtcccctttgctttcttgtgttccagccacctgccatttcctccctgcctcccaccctccctccctgccccctgtcctgcttcccaccccctgcctgcccagcctgggccctgcagtgtggagagacacataagccttactgtcctctgggggcaggagccgagcctttttgttgctccgctcccaggagagtgagggtgacgcaattgattaaaaccattttgttctagg

SEQ ID NO: 173 - DNA, 934 bp, Homo sapiens
tggctgctcggtggccccacacccaccagggtcccgaggaaacagccgccatcccttttggttccagatttttttctcctcaccccaaaaggcagggttgggcctgctgttgtggaccgggggtcggggctggcaggatggaaggactgaggaccagcatgaagtgggggtttgttgtctccctgcctctcagaagcaccctgtcccctcctccccaggcctgtgactccggccctggaagcccctttgttcttctgttgaaaggctttggcttcccgctgtagagctgctcccgccaccacctgctggggtcctgcctcagcccagtgcccagtatggggagaggaggacatttgggctcacctgtcaaggtggccctgggaccagagctggtcccagcatggggtgcaccgggtacacttaacgtgtctctataagccaagttgcttcaggaccttcaccactggcctctagaatggtccagaggggctggctgggtccctttgtcagactcctgccggcagctgccctgggggacatgtgtgcccatctggcatcctccagcccgtgcagtccgctcttcactgttccacggcctcccagtgcctcccagcattggacccatctccccctgcagtttgaggccagagaggtgagtggacctgacaagtgccagagtaaccgtgtagacagagcagtgtagacagcactcagccccagccccaggtgtggacctcatgctggtgatggctcccctgggtggcctgccagcacagccagtgccatcagggagctgaaggggctgtcccccacctaactccagctcccccttcacgttgtcaccaaggccctgtgccgcccgcctcgcccccctgctctgtggattcctttgggaagggctccctgggcaggacaataaagagttttgactcca

SEQ ID NO: 174 - DNA, 78 bp, Homo sapiens
ccccaccaagcctctctctctggacccccatctcagggcctgcccttggctaaagtcaataaagtctattctaagagc

SEQ ID NO: 175 - DNA, 1020 bp, Homo sapiens
ctgagtcttcatgacccttcaaccctgattactacagaattccagaatgttaggctctccagggcttctttccaaacccccagctccacaccccccagacccagctggttctggagttctaggacattgggtgtttcaaggttctgttcagatccctatgggggcccagctggctccacggttccagaatgttcaggtggtcagtgttctactcagaaatgtctcacagcccagctgggttgcaattccagaatgctgggagttttacagtgccattccaagtcccagatgtccctcttcccccaaacttgaccttgaccatgtcactttacgtttgaatttctgagctaaagagtcagagagattagtcacatagttgcctaaataggagagagaaagattatatatgcacatatacaaagacagtgtctatttatgattgatttatttatttataaatttacttatgggtggtaaggggcaaaaaagaggcccacaccttgatatccaggccataccagggtatcccttgtcccttcacccccatttctgacctcagttcctggaggggggaaagggtgaaagagaaaccacgtattttgttattattttggattattttttatcgaagagatcatagaaaccagagccttctccccaggcctgccctcctcgggtttggaaggggaacacaccagcctctggttttttatttttttaagaagccatcacctgagcaaccaaaaattcctctgcgctggggtccgactgccctctggtggccatttggggaaaactgcagcccggccaggcagctgggaccagaatgcaaccccagctccactccagcctggcgtccagggccacagccatggcctgggggccaagcctcaccctgcggtgccctaaaggagggggggcacgagccaacaccccacccctctgccaaccggggtatggcccccagtgcattccctgttcccgtctccaacccaactcaataaaaaatgattttgtcat

SEQ ID NO: 176 - DNA, 1022 bp, Homo sapiens
cagacctcaaggaggctccctagcaacagcaaatggagttgtccagggttagggttggagacctggctgttctgtgggaattgcaagctttcttaagaaatctctattttattacagttatccttctttgtgcgattgcagtgggctgaatggaaacacctggtttgtgctgtgttagactgcatgcttgagtgtttgggatttcaagctcgctctctttctctcactattaggacttttctttttcttcttcctcttctctctattttggttctattctttttttttcttttttctttttttttttttttttttttttgtggtggtcactgctcagtgtaatgtgcagaatgatttgttttttgtttttttttttttttttggtccttcattgcatcctgccatacccatgagcaaacagtttggcattaattatatatcactgccaccctctgaactttgaaaactgccatcttcagacttggtataatggaagaggctttctctctccaataaaccttttgcttcagggtatactcttcggtttttttccagatgtattatgtatgaactttgtactatgtatagccagagttttatttattttttaaaaaagaaactttttcttgataaaggaataatggtggtctagctagttcttgtaaaagtgatgcctcttgaaaaaaaaacagtcctattcactagcttttagtaaaagaatcagatcttttctttcttgttaccttggagtcttaaaaactgattgctaaggtgaaacaattcaatgcataagtatggagctaagtgccttttggaggatttcttggaagagcatttatggagatacttaagggaggtagcaaagatttgaaccgtctgtctttttaagtaagggcagaaagcaaggttgtccaggttgtactggacacttctctccccacccctttcctgattgttttatgtgattgattttaaattctcacactgccacttctttaaaaaataaaatcctttatttgctt

SEQ ID NO: 177 - DNA, 2123 bp, Homo sapiens
ttgcctccgatcgttctcccgctgagctgttttcaagggcaagtgcttgttgaagtcttgccagaacaaactgatcacaagaagacagcatatatcagaacgtcctgtaatcatttagttagaaactaactactaactagtctttggaattcgtgacctatggagacagtaattatcaatttattgattctattgatttctcaaattaggaattaacttatgtggattttgcttcctcttgtattctgattgcccttcatcccaagtgtttactgaaaattccattctagatattcttgttttgacaaatgacactacagtctcgtaatattgtcttttatgtatatacaaaatttacctttttactagcatctgagatagagttactttctggtacccagtatattggagtctgtcagaaactctataataggccaccagtttttattatttaacatttttatttgaatttctaagaagcctattctctatctattttgaaagattttggcactatatttaattggaaggtaaaatattgtacatgtgatccagagtaaatgagaagtctctatctgagctggtcagttactggagtacatgttactaatctgggtttaaagtttacttcattatctgctagtgtcatccacagcagttcatcctcatccacactaagccatcctgttagcttttaaaggaagttaatttaattaacattaatatactctatgggctccctctcccacctgtctgcatagaaaggcagaattagacatagcatgctttggaaaagcaaataggaattgttgggaatgatttaatcttgttgttgttgttgttgttgttcacttgtggttctacattcctggtgaatgatgaatgttgctgtcaaagggctgccccctaccttataagggttgctgggcatttgaaggcaggaagatttttaaagatagattgaggttggtttaaaattattcctgtaaaccaacaataaagcaaagaagaggttcatttttgtaaataacactggtttcaaatagtgatgttagacttaacctaatttataaacaagagattaatatctccatgcatagttttagacaaaaaaagatgtttcaataaaattactgtcttgtaatataaatgttgtccacttcccttttccacaggcctagaacagttaaagggaacataatttgtttaggctcccacataaatgtgaatctggccaacaactttggttcatcctttagtgaattagaggatttggctaccctgagtatatttatattcatttcttctgttctccttctgttattatacttaatcttctaaactaaactaatgtgaacagtagggaagcaagggcccaaatgcataagtttctttgcactgttgcacttacttaatacaaataaatgttttttaaagcttttgtagtatgtttttatgagttaacatcctaatgtggtaggtattaggtaatgtgctgtcatgagaaaaattgagacttccaagaaaactggacaccaggtgagggttggtttggagacggaataggtgtagctgcctttccttgaaaaacagtgtgtagagatggctgagtgcaatggctcacacttgtaatcccaacactttggaaggctgaggcgggaggatcagtatatcggtacgtctgagcccaagagttcaagatcagcctgggcagtatagcaagaccccatctccattttttttttaatgattttttaattaaaaaaaagaacaacaggatagagctgttggggtggcacagtggcccaaagagcagcttcagagataattccttggttctatgatccctgtttaactccaaattacagtcggacttggatacatcatttgtaacattgtaggaaagaaaaaagtcttggttgtgaaaaacgatttgcatttgggtaaaataaagtgaccatgcttttgttctgtaatactgtgtgacctgtggttgttgtaatggtgatcatggagagcaaatatgaacttggcctggattttaaatggcctagaatttgtggtagttgccaaagaggttctcctaggtggtcttaataaacctattcacagaattctcctta

SEQ ID NO: 178 - DNA, 1226 bp, Homo sapiens
tatttttggtcatggagaagggtgggattgggtgggaatggggtggaagggtgatggggagctaatgaactagggagaaaaactttccatgtgtgcggtatcgtctttcagaatgtctcctggcatcctaaccatgtaatatgacaattgggggtggggttgaaatagcccataaagacctgtcttcacaacacttgcattgtagagaaaggcttcttatatccttttcaatagactgccctggctctttcctaggccttccactacctcctttctttctcccactttctaggatcatttttatgtaaagtcacatatcccaggccctcaggttgaatccagagctgtagaggttacagtagcatcaccagccttgggggtccagagcctaatttatattcactatccttccaagtcccgggtagcagaagggttgccatagatctcagtttgatcaaaaagaaggcttagaattctgcagttaagctgaggtttaaactaaaaaatgtttccttgggtcagtggttttgaggtccagtagctaggcttttctcttttgtccttcctgttggaatgaaaacatttcgattttccttcatctgtgactggtgccatagacacaggtttatagttttaacttacagtattgtttgaaatttacctgtttttcttgtcaaacctgagcactcctcctgctgaagtttcttatttaattccagagtactgtcctctactctaaggcattacttttaagtgtattatgaaggcagttttcaaaggatatgaccagttggggtaattcaaattaaaaaggaaaagatttgtttggaagtaactggtgtctctaagaggaatttttagatgtcagtttggaggctctttcccccctcaattgagagctcttgttattcagagctccaagactagacctggctaacaaacataggagacaaagttaggaaacattgatacaagctttgtacagagatttgtacatttgtgtaataggccttttcatgctttatgtgtagctttttacctgtaacctttattacattgtaaattaaacgtaacttttgtcatttgggtgcaggctgtgaatttgtctctcagtcactgattgccactgccatctggaaatgtttgctaaaggcacagtcactgggcttgggaggcaatgctccatccccattatattacaaataaagatgccctaaatgagtgtg

SEQ ID NO: 179 - DNA, 815 bp, Homo sapiens
atgatgatgaacatgattatgaagaaatacttgagcaatttcagaaaaccatctaagtgctggaggaaccacgcttcctaactgctgcttctcagggaatccgacaccagccaaccattttaagcctctaaaagacctcgggcaagtctcacagaaactgagctgcagacggggagtagctttgtggaaactgatttgatggacactgcaccagcttccttcaggttctagattcttgctacttagggcgggctggtttggacctaacatctcgcacgtgactccctcagcctcagagccttgggatgcagagcagctggcagggttcctctcaatcctgcaaccccagctgtcccaccggtggatgcagaggggaatccgaggccatcaaccttggtgacagcagcgcagtgccaatgctgatcacactgcatgggagattttgttaacgtctgccacccccactctcacccccaagctctaagcccccgggaggcctggactgtcttcctcatctctgtagcaccaagcctgatagatctgtatatggtaaacaggggtttaaccacatgtggttaacatggattaatgtgggaacttggcttcaagaacacaaccttaggaccttgggccccaaaagctggtggtgaaatgaggaggagccaatttaagaagacccttatggagacctgaggctgcagaaactggtaggtttcatcaggtggttaaagtcgtcaaagttgtaagtgactaaccaagattatttcattttaaaaccatagaataaaaatgacacctgagcttctctatgaatg

SEQ ID NO: 180 - DNA, 313 bp, Homo sapiens
cctgccaggctcaccttcttcctggtaacgggtaacgggggcagcgcccaggatcacccagagctgggccttccaccatttcctccgcgcctgaggagtgaactgaaataggacaaccgaatcaggaagcgaagccccaggagctgcagccatccgtgatcgcgccactgcactccagcctgggtgacaaagccagactctctccaaaaacaaaccagaaacagaaaagaaatgacgacccaagacccccctacaagcatacttcttttgcgtattatgtttaactcacaaaacaaagctcatcatgcgtttg

SEQ ID NO: 181 - DNA, 280 bp, Homo sapiens
gctccttccacccttctccagctcaggatcagaaccctggaggcacctgccaccgagtcagggcagtgcctcaccaagtcaccttttcccctggatgactgtcacagcttcatacctggtctccctgcctctggccctgccctgctatggcccatccgctacacaagagagaagaaactaatctcctatagcaccactttcatcttgtctccgtcctgctcaaaaaccttcagtggctccccagtgccttcaagataaagttgtgtctccttgacctagt

SEQ ID NO: 182 - DNA, 893 bp, Homo sapiens
gtgaacggcgtcctttgaagcaggatcagacccagccagcagagatggagagtgactctgttggcagaaggcaggcgaggataagctaacgatgctgctgtggcctctatgcactcagcaagagcgggacgcctgtgctgggccgggcaccagggatggtgctgagtcgggcagaggcctcctttcaaggagttcacagtgaacaagatgagaagggctgggccctggagggtcaagagccccaattatgtacaagacactttgggaggaaagaagactaccttttccccctgccattggtatagctggtgccccaaaacttccacctccctccctggctacctctaaaatgactggtataggtgctgccccaccccttagctcccctatcctgggctaggaggccacaggggctgtcctctagaattcttccttccctcccccacaccattcattcaattcatgaaacaaatctttgccaagagcagtttatgtgccaggaacatcattctgtccttgcaacctggaacaagaccagctaccagcctagcttcatccgctacttgcaccaaccagtcccgggttagatcccaaatgctagaagccagggatgcccaactctgggtggccccagtcagaacctctgggatctcagtgaagctggcctggcctctgctcctgctctcaaggggctgcttttcaaccaagagccttgtgagcctggtctgagccttgcacagccactgagtattttttttgccttagccagtgtacctcctacctcagtctatgtgagaggaagagaatgtgtgtgcctgtgggtctctacaagtgacagatgtgttgttttcaacagtattattaggttatgaataaagcctcatgaaatcctc

SEQ ID NO: 183 - DNA, 1642 bp, Homo sapiens
ggctcaccgggtcccaagtccagccctggatctcccaatggccttccaatccttaaactgccaatcgccccacccgttcctacctggtgccttgggcgccccatcccccaacagaactcccgggccccaatccagtataccctaacccttgatgtcccgaccgttgccacgtatagggcactcccagttacctgcacaacagtttcaggcccccaaaccgtttccaccggcgggtctccaaaacaacccacggctcaactcctcctttatcattaccatctcccgcgtggagttctcctcaggtcgtgcgaaacacccccagattcttcgcacagtgtctagatccgaccgcccaacgtttgcctcccagcctgactccctcggcccttacccacctgtcaccccctctacgctctccttcctcgccagcacgccttagctttgcaagcctgcatgcattcaggcttctcaggtgtttctagacccccgactccgcaagagtgaggatgatgggagctggtcatgggagctacttatggttggacaccatcttctaaaggcttttgccctactcagcccaacctagacctgtagatttccctctcctgcttaggagtatggagtgggctgggcctccctttgccagccttgagttatctttaactgacttctgtccactctggagagcagtgaggaattaatcttgcttttgcttgtcctttggcctttcacttctgccttctgttgagaattatcaccatgacacctgccataccgtatagagagccaaggtacagccgttagagactatctaattgagcccctacattttgtagttaaggaaaactgaggcctaaatgtgaccaaaccaacattgtaatccagtcccttcttggaacctaaattgaactgccaagtactgcgcatgcaagagaccctttattggccttacagtgggccattcatttctataggcaaagaaagctctagacagattggaataggaaatggatatttgccttttagctacacccctttgtctgtcttcctcattttgttcctttttttttccctaaaggggagtcaagttccctgggttgttcccctcataaggtattagggacttgtgtcacatctctctggagttttctattttaaagaggaatctgaaagcaataagctctttggtcttcttaagatggctacacctcaatttaagatggggtattctttcactagttgaggagtagaagaggatgaccagctagactcccatggaattggaactcctattccttgcttagacattacaggttatgctttgagatctctttggggtgaaggattgaaattaaaccctgagccaccgtgtccttgtagagcacagagtagagaacaactggcagctttgaaaaaacaccatgaagaagaaatcgttcatcataagaaggagattgagcgtctgcagaaagaaattgagcgccataagcagaagatcaaaatgctaaaacatgatgattaagtgcacaccgtgtgccatagaatggcacatgtcattgcccacttctgtgtagacatggttctggtttaactaatatttgtctgtgtgctactaacagattataataaattgtcatcagtg

SEQ ID NO: 184 - DNA, 1688 bp, Homo sapiens
ctcctgagcaggacctgggcccggttcagctccccacaaggacttctctgtctggagacagccccagacccttttgtgtcccatgcccaccctccccacgctgcagtgggcttgtgtgtgatgtgcagtcccgaagccacaccctcccttttcctcactggaatggacagttcattgcactgactctgggatctcagccctgctcctgggagctggaagagcacttggagatcctaagggaccacacccttcctccttcccctgcccacagaggcagagggcacaggaaagaagccgggccaagctcggaattaatgtgccacaagtgttgtggccttcctgaactgggaagtccctggctggcccccgggggagaggggcaaatgcctccgggactgacactccaggcagctttgccttctctcccctgtcatttccagatttcattacctcctacttgccattcacccatcaatgtgaaagtcagggtcacagctggtctgtgtgtccagttccctaaaagcctgttctgttgggcagcctgaggctgttgcccgaatcctagttcagttttttgacttcctttgccctttttcccttttctccatgcttaatggtgtgaggcgtcaggagagaggccaagtacataaaaaaaaaaaaagcagattatctctagagagtttgagcctttgctggtcacattgccttctgaagaggagggagtattagattataaatcctctttattttggtcctttatgcttgaggttccaacctggagccacagtgtgtgagaggaggaggagagggagaattctgttctcccagagctgcacctgcctcgcagaggccagcaccccactctcctgcctccagtggccctgccgcagatgtctcccaaaaagttgagcctttctagatggcttaggtggcaccatggctcagcaggaggggcgggaggcaccagggttcttgtttggaccctgcccctgggccatggccaggtgaccatggctacattgccaaacctctgactgccacagctgcagactgagagggtgggtctgagtccccacaatgtctgaagctgcccctgggattctcaggccaacctgccaacagcaagcggattttcttgcaagatcagggaccccatttctgcagccagtgtctcctgggtgccttctgaggactcccacccccatcccagtatctcatctgtcccctctcctggggcttaagtgggttgcttccaggcagaagcagccaaggaccgattccaggcactttctgtagcaaatgactgtgaattacgacttctcttgcccttcttctagcagtctgtgcctcctctctgaccagtttggagggcactgaagaaaggcaagggccgtgctgctgctgggcggggcaggagaggagcctggccagtgtgccacattaaatacccgtgcaggcgcggagaagcaaccggcacccccttccggcctgaaagccctccctgcaagaaggtgtgcaggagagaagaggccccggcatggggatctgggttctagagggcatgtgatgactgtaaatgttcactgggtgggtagggagtggtatccagtgttcaagtgcagaaatctttggctttgctaccagttccatatgatgagaaataaacgttcgctgaggttttgtttcat

SEQ ID NO: 185 - DNA, 994 bp, Homo sapiens
ctaagaggatctgtccacatttggggcctatccttacttgtttgaaaaaatatgtttgctttttttggtttttgttttgttttgtttttgagacagagtctcgctttgtttcccaggctggagtgcagtggcacgatctcggctcactgcaacctctgcctcctgggttcaagcaattctcccacctcagcctcctgagtagctgggattacaggcacatgccaccatgctcagctaatttttgtatttttagtagaaatggggattcaccatgttggtcaggctattctcgaactcctgacctcgtgatccacccaccttggcctcccaaagtgctgggattacaggcatgagccaccacgcctggccaaaaaaatatgttttaaatgtcccatttcaccattgccaggcaggcattcttccttcagggagaggatggtgagaattaattggttctttgcactgttctcctcatgtggcgatttcactttcatgacagcctttctatattaaaggctcaggatgtcacggagaatctatctaatcccactgtattaagaggggaaaccgggccaagcgcagtggctcacacctctaatcccagcactttgggaggctgaggtaggtggatcacccaaggtcaggagtttgagaccagcctggccaaatggtgaaaccccatctctacgaaaaatacaaaatttagccgggcatggtagcaggcgcttgtaatcccagctacttgggaggctgaggctggagaatcgcttgaacccaggaggtgaaggttgcagtgaccagagatgacgccattgcactccagcctgggtgagaagagcgaaactccgtctcaaaaaaaaataaaaatgaagaggggaaaccagaataaattatcttttggaaaggacaatttcttgtttggccatttgtgtataaggttggtaacattagaggctgtgagcttgtgttacatggtaataaagccaatgaagag

SEQ ID NO: 186 - DNA, 1088 bp, Homo sapiens
tgaagcctctgagggcctggcttctgtcctgcacaacctccctcacagaacagggaagcagtgacagctgcagatggcagcgggcctctccccagccctgagcactgtgtcagttcctgccttttctcatcagcagaacagaatccttttcctcttttccttcctcctctttggaattttcctgggacctacagaataaagggggggatggacagggggttttcaaaaggaacatggctcactcagagctatatggttagacgtttctccccttttccctaccttccatggtcctggttggccctggctttgcctactagaaaaccaaaacttcccccctggggttttgtgcccactctctgagaagttggggctccatcaagccccattctagtcatgtgcccctttcctgtccctaacagtccacaggcaaacaaatggtacagtcataagagccatctgtcacggacccacgcccagaggaacgtgcagaaaaaagcagagctacatggctgtgggcaactataagccaaatatttggctcagaacaggtgtccatgggacaaaaaagaacgatcctccacttgaccaagaaaaaagtgattctcccagaagcacaaagcatactcttgcccctcaggtgttgcttgtgtacatcgtacccatccattcggcttcacctgcagccaacggcctggaatcgcaaagagacaccactctgggcagagcagagcagggtatggggtggggagagagggtggagggttttataaacaaacttaacagcaatattgaaaggaggtgggggattgagggagggacagagtgttggagggccagagactagtcctgagatggaaacagcaacttgtacagtggctgagaaaataggatatagttttgatttttttaattgtaaaatattttggagggagaacaaaatcttttaacattttgaataaatttagagttttataaaataggccacttgttttctacacattccctgctttttaagggagcacatattatgtgccaggcactgctgggaaagacagaataaactataaacctggtgttgaggctac

SEQ ID NO: 187 - DNA, 908 bp, Homo sapiens
ccaggccaaaggacaagccaggttgcatgatgtgagggagatgagagactcctttttaaaaattgtgaaacctttttggaaatatgatttgtaagattttaataatgactgtttttggagatcatgaatgtttctacaacactgctgcattcatttgaccatttgagtttgaagaccaagggaacaacttttaaacaaggttcaaattggtttccttcacaggaatcctttgtccaggtagttatccacataggacagtttgggattatccaaaactgggatgagcagcttgggataattcacacactaaagcctgagttcaaggtttctcagttgacaggtaggtatgtaaatcagggttctctggagtatttgtaggacctgccatatttgagtcctaacttggtgcaagtctggcagctaggtagaaaaggcactctagcaggtgtggtaggagcacgccccagaaggtagaatgtggtggggtgtgatggaacaggccagttggcctaagaattagtacttgctctaataatgggtttcatctattttcatgagttgcagcatctgcatatacaaggcctggatcactttaggatcaatattttgacacgggagaaggcagctcagaaaggattaaggaagatagctcaaagccaaagcagaccctccgtgtgaactttatactgctcacttccgtgtttcccaagtaaatggggaaactgtccaaccttgtcatgtgttgggacttactgcttgaggcaaagcattcatcctacatcataaaaaatctccaaagatctctttaagggctgggcatggtggctcactttgggagatggattgcttgagctcgggaagagaccagttcggtctctacaaaaaaatacaaacacaaatatactttt

SEQ ID NO: 188 - DNA, 457 bp, Homo sapiens
ctctaggagagaaagggttaaagcagtcccagccttagcccacctggtgggatggggagtgttaatatctctctggaggacaaatgacagaagggttcatataaacagtatcctgacacagtcatgcttcctggattttggagtcgaggctttctacagaaaagaaagttctgatggccaggcatggtggctcacgcctgtaatcctagcatttttggaggccaaggacagtggatcacctgaggtcaggggttcgagaccagcctggccaacatggtgaaaccctgtctctactaaaaatacaaaaattagccaggcgtggtggtgcatgcctgtaatcccagttactccagaggctaaggcaggagaattgcttgaacctgggaggcagagattgcagtgagccaagactgcgccactgcactccagcctgggcaacagagtgagactctgtttc

SEQ ID NO: 189 - DNA, 100 bp, Homo sapiens
ctggggatctcagggccaggagttatgttttgatttggaattttaattatttgtttatttttatcattgtcccactcatttccacataggaccctttttt

SEQ ID NO: 190 - DNA, 822 bp, Homo sapiens
aaggcagttctacacagactgcagcaacggttgcatctgcatatcctaagaggaaaaaatgaccttcaagagaattaggacttttttcttaatttcactgacttcagagacgattgcagacttgcagtttaagtattggaatttcacaaaagacataggacttaactggaaaatgaaaaaaaaaagaaaaagaaaaaactaaacaaaaaatccctctaggtagtttaggtgaaaaatgtcccttttattttggctttggttgtgatttcagagcataatgctatgtttttttgtctttttactatgtttttcggatttttaagtccgtaagtgcatacagttttctctaatttttaaaccctttcctcctcccattttgacatttgcacttggagaacacttgagttgtgaaggttttgggcatccaccccagaaagtgggaatttgattttatccttccgaactggaagaacatttttatgaagaatttttgtctaggagaatataacagtgttacccaaggttgtgtctttaagggtggttcattttctctgaccttttgttactcaaagtaaagtactaggagtcctaagaaatgttctgttcttgtacattatactgattaagtcaggattaatttgatttcaaagctgagaacagtggtaaaaactcgtttacagaaatgcattttggaagagaaaaatactgtaaaacgtgtcgtgaatgtttcttcagtttcttgttcagccaatgaggaaagggcattgcctttctttttaccattaatcacttctcaataaacgtgagatcctgttgagcatc

SEQ ID NO: 191 - DNA, 413 bp, Homo sapiens
ccaggccatccggcccccagagcgcccctccctagtgacccggaggccacatgagtcccagtgggaggcgcgagccatgatgtggagtggggcagtagaaggtcggaggcttgggaccgccagatggggcctctgtttcggagacgggaccgggccgctagatgggcatggggtgggcctctggtttggggcgaggcagaggacagatcaatggcgcagtgcctctggtctgggtgccccgtccacggctctaggtggggcgggaaagccagtgactccaggagaggagcgggacctgtggctctacaactgagtccttaaacagggcatctccaggaaggcggggcttcaaccttgagacagcttcggtttctaacttggagccggactttcggagttgggggtccgggccc

SEQ ID NO: 192 - DNA, 3628 bp, Homo sapiens
gaactaacctaccccaactctgcccttctcccatccaagagaaaccagcaaaatgataaagaagctaacctgccatagtcagacttcagactttcaagattattctaaatcaccagaaaattaatttcagtttctattgggagtttataccaagagattcttctagatctcattgatccttttgaagagctttttctatattaggatatcagaattgttcaacttttcactctatagactgttttaagagttttggggtttttttaattgggtggtttgtaaccccttcagcctagcctctctgcccatttatttccaaccccaacagacactgacagggtccatggaattcttcgggaaatcctccaaggactcttgtcagctgtgttggaagccaaagccagcttagtgggacttccgcgtctctccctagtcttatcccctttggatgatggcagaaacttcatgaaccagccctttctcagagccagtgatgtgagtgtatcagaatgccagggagggcaccagccctgatccacagacctcggaaagatgcccctgttcctttgttgcgggtggttttggtaaggcagagccctctgctgagaatgtagtattgtttttcccctctccctcctgctttctttttggagcttctttgggtcaaagacatggaagttgcttcagatatctgatactgtgaatgtttgaacatatccgtggccttcacctctccagctacccttttacctcatcagaagcagtggctcagctaagtgctccccctagctcccatctcaggagaccaaatctcacagaaaaataggcactttgggccaaaagctctaatggaacatttttagtggtgatttggggaaggaaagttaatgaggtttttaaaataaggttttctagttttgagagtgtgcacttcacacaggggaatggggttacttctgtctgatcctgggcctttctttcatcccaaatgacaaggaatgtggctcagagaagggtttttcttttttgacctttcttctctcaacaggaacctgcctgaggacacccttctagagcaaggaattgacttttaggagccgttctccccacaagacaccacatgacaaggggtataagccccagccctgctcattcccactcaccagctgaggtctgtcaggttttgaaggcttgattttgtggtgggtttggggcttagttttcctttttttcattttgatttttgaaagtgaagatgatgccctaattcctggtaaggatttggggcatagttttttgtttttttgagacggagtttcgctcttgttgcccaagctggagtgcagtggcgcgatctcggctcactgcaacctccgcctcctgggttcaagcagttctcttgcctcagcctcccaagtagctgggatgacaggcgcacaccaccacgcccagcaaattttttgtatttttagtagaaacgggatttcaccttgttaggctggtctcgaactcctgacctcaggtgatccacccaccttggcctcccaaagtgctgggattacaggtgtgagccaccacgcccggccgatttggggcatttttatttaacagaacttctctaaccttccaactgcttcccacaaacacattggcctcaaggctccttagaatcccagttccagcttcctaaaatagacagtgggtatcgggcagcagtcactggggctcaagggcagtgagcaagagaaatgtctaaagctgcttctcccaacaccgtccaaagtctccactgcctgagttttgtttcggctggtttgaactcatttcgggtgtgtgcatttttcttttggtacccatgtgagacatgaacaacaggagggagggaaagagcccaggtgggacgtgggacaggcttaggggaaagagcttgtcctatctcaggaacaaaattataggctgtgggcagagggtctgaaaggtgggctttggggtagtgcccaagcctggtcgtgttgccaggagtggtgacaagaaatgcagcttacatcaaacgaacatgtagtgcatgcccactgcctgatggccagatggcctgtaggaagagctaccagggcttccagacctgtggaacgaagaggatggggaaaaggcagagggcactgagtgtccctttaaaaactaacccactgaatattccgtgtgatctagaacagtgtggcagctttcacagcacaggaccgttcatcgggggcctaaacgtttccctcagctctgtcaccaactcacttctctcggcttcgttgtctgtaaattggatgaaaagagctctaatgcctttcaggctcttagaagccatagatttggacaagcccagcaagatgggtgtccttccaggcctcttcccctttcctccatctctggcaacagttcttggggtttggcaattgtttggattttttttctttctgcagttgtgtgtatgtgtgtttgtgtgaagaaaaacagactctgtccaggtagaaatggtgaggagggggaagagaattacatttccagggtcagaaacttggcaacagttttcctagagtgactcagacacaccacagtaacaactctcgctgcaattttattttaatttgagaaataaagatttcctccaagccacatgaggactctggcacccacccacaaagcaagacctgtatttataagccgagggctcagggagcctaactgcgggacccgtcagggccccgtgacccatccccgtccccacccccccctccaccgctgggcccatcagtgtgtgttggggggatgcttggcagctgggggtgaggagacaacaaacctcgggaactggagccagagctgcggcctgactgacgccttttgatgctcacgggaaatttctgcccaggatctcagccccaggctggttgtttctacaaatctctctcaaatgtattattttggtgacaaaaatgaaggagctttgtaaattttttttaaaattatgaatcatatcaagtagttgtttacatttcttgaaaaaataggaactcgggcagcagaatcagattggcagaatctttagactacacaggcaataatcaagtctgctgttttggcctttcgtagtagaagtggttgtagtgtttagatatctgtttggtcttgcttcttgtattgcatttttttcaataaacaacaacaaaaagaactctctctgtgaggattgatccacttttaaatttctcttctaccagcaacttgggaaaaattaaatatgggtgggggagacctaaactcaagtcattttctaaagtaagttacccacattgaccaaaatgcagcttcaacgttgagtaaagggatttctgagagctggccaatgccttttgccagctgcagtgagattctgcagcataggccacgataaaggaaggagagaaggggcttctcagacttatttgcagaagggcccagaactcagtatgaaggcattggcagtagtgtagctctagagggatataccccagatggctgagggaagaaagggattgaggtggtaggagttcaaggctcagtccccgtcccagatggcagtggagagtctcatcccgtg

SEQ ID NO: 193 - DNA, 1142 bp, Homo sapiens
cggggccctggcctggggcacccactgcacactcagggccagacccaccatcctggactggcgaggaagatcagtgcctcctgctctgcccaaacacactcccatggggcaagcactggagtggatgctgggctatcttgctcccccttccactgtgggcagggcctttcgcttgtcccatgggcgggtggtgggccaaggaggagcttagcaagtctgcagcccagccccacctccatagggtcctgcaggcctgtgctgagaggcctggtgctgcctggcagagtgacaaaggctcaggacggctggctctgggggactcaggccaagccccttggcaccatcctggcttttggcagggatgagtgaggccctgcagagagcatcccaggccaaggttcccactcagcctgccccctctgcatgtgggtagaggatgtactgggacttggcatttaggattccatctggcccagcccctgaaggtcctggggaagcaggtctcaattctgaatagccagtggggcacactgactgtcctccccaggggaactgcagcgccctcctccccactgccccctgcagcccctgagatattttgctcactatccctccccacttgcttccctgatatgtgctctgagcttccctgaaccaggatctgcctattactgctgtgccccatggggggctccttccctgcctgacccactgttgcagaatgaagtcacctcgcccccctcttcctttaatcttcaggcctcactggcctgtcctgctcagcttgggccagtgacaatctgcaaggctgaacaacagcccctggggttgaggcccctgtggctcctggtcaggctgcccgttgtggggaggggcagtgttagagcagggctggtcataccctctggagttcagaggaagaggtaggaccagtgcttttttgtttcttttgttatttttggttgggtgggtgggaaggtctctttaaaatggggcaggccacacccccattccgtgcctcaatttccccatctgtaaactgtagatatgactactgacctacctcgcagggggctgtggggaggcataagctgatgtttgtaaagcgctttgtaaataaacgtgctctctgaatgccacag

SEQ ID NO: 194 - DNA, 740 bp, Homo sapiens
gagtataaagagtgtagggggtggttgagagtaagaaaccaggagccttgtgccttgagactcctggaaagactcaatagtgagaatatagcctcccaccccattaacttcgctcccatgggagatggcttcccctcatgcaacaggcaggtttgggagttagaggtcaaaagcagctgcctgaatgagttgttgtttccttatcactcctggtccctttgcaagtgaaccctgcagctcacccattcattcacccaacttccttcattcagcaggaggtcctattaccctctccagctgccactgccagagctggattcctgtaaaggagtccaggctagagccacagagactgttgtggaggtgagttcggctgtagttagagtgattggacccttcctattggtctgtcctgggccaactggtgggtgatctctgctgcatccaacatgggagcagagactggcagcaggaggggggaacatggtgagaagtggtgctcacttttcccattcctcctaacatagttctactatgctagaagtggcatccagcggccacagctagaaaacagtctgcagtgtgacttaacttgtgtattgcattccagcagaccactgaaccagacagcgaagccaagatcattgttctactttgtatttactactgtgtgaatcagttgattctacttcaggtccttgcttaaattcctgtcactaaatggaaatgtgtttggtttt

SEQ ID NO: 195 - DNA, 478 bp, Homo sapiens
ggcagcctcacagcctgccatctggtgcctcctgccacctggtgcctctcggctcagtgacagccaacctgccccctccccacaccaatcagccaggctgagcccccacccctgccccagctccaggacctgcccctgagccgggccttctagtcgtagtgccttcagggtccgaggagcatcaggctcctgcagagccccatccccccgccacacccacacggtggagctgcctcttccttcccctcctccctgttgcccatactcagcatctcggatgaaagggctcccttgtcctcaggctccacgggagcggggctgctggagagagcggggaactcccaccacagtggggcatccggcactgaagccctggtgttcctggtcacgtcccccaggggaccctgcccacttcctggacttcgtgccttactgagtctctaagactttttctaataaacaagccagtgcgtgtacc

SEQ ID NO: 196 - DNA, 705 bp, Homo sapiens
ggctgcgggcaccacgcggggtccggcctgggatccaggctaagggccggcggaagaggccccaatggggcggtgaccccagcctcgcccgacagagcccggggcgcaggcgggcgccagggcgctaatcccggcgcgggttccgctgacgcagcgccccgcctgggagccgcgggcaggcgagactggcggagcccccagacctcccagtggggacggggcagggcctggcctgggaagagcacagctgcagatcccaggcctctggcgcccccactcaagactaccaaagccaggacacctcaagtctccagccccactaccccaccccactcctgtattcttttttttttttttttagacagggtcttgctccgttgcccaggttggagtgcagtggcccatcagggctcactgtaacctccgactcctgggttcaagtgaccctcccacctcagcctctcaagtagctgggactacaggtgcaccaccacacctggctaatttttgtattttttgtaaagaggggggtctcactgtgttgcccaggctggtctcgaactcctgggctcaagcggtccacctgcctccgcctcccaaagtgctgggattgcaggcatgagccactgcacccagccctgtattcttattcttcagatatttatttttcttttcactgttttaaaataaaaccaaagtattgat

SEQ ID NO: 197 - DNA, 133 bp, Homo sapiens
gcgagggctgccctggaggctccggctcgggggatctgcccctacccctcatggaaagacagctggatgtggtgaaaggctgtggcttcagtcctgggtttctgcctgtgtgactctggataagtcacttcct

SEQ ID NO: 198 - DNA, 1246 bp, Homo sapiens
aaacaaacatgaggggaaaatatcagttatgagcaaagttgttactgatttcttgtatctcccaggattcctgttgctttacccacaacagacaagtaattgtctaagtgtttttcttcgtggtccccttcttctccccaccttattccattcttaactctgcattctggcttctgtatgtagtattttaaaatgagttaaaatagatttaggaatattgaattaattttttaagtgtgtagatgcttttttctttgttgtttaaatataaacagaagtgtaccttttataataaaaaaaagaagttgagtaaaaaaaaaaaacacacaaacctgttagtttcaaaaatgacattgcttgcttaaaggttctgaagtaaaggcttgttaagtttctcttagttttgatttgaggcatcccgtaaagttgtagttgcagaatcccaaactaggctacatttcaaaattcagggctgtttaagatttaaaatcacaaacattaacggcagtaggcaccaccatgtaaaagtgagctcagacgtctctaaaaaatgtttcctttataaaagcacatggcggttgaatcttaaggttaaattttaatatgaaagatcctcatgaattaaatagttgatgcaatttttaacgttaattgatataaaaaaaaaaacaacaaaattaggcttgtaaaactgactttttcattacgtgggttttgaaatctagccccagacatactgtgttgagagatacttagagggagggagtaggttttgaagaggttgatggtggtggggagggaaggcctcctgaattgagtttgatgcagagctttttagccatgaagaatctttcagtcatagtactaataattaaattttcagtatttaaaaagacaaagtattttgtccatttgagattctgcactccatgaaaagttcacttggacgctggggccaaaagctgttgattttcttaagttgacggttgtcaatatatcgaactgttcccaagttagtcaagtatgtctcaacactagcatgatataaaaagggacactgcagctgaatgaaaaaggaatcaaaatccactttgtacataagttaaagtcctaattggatttgtaccgtcctcccattttgttctcggaagattaaatgctacatgtgtaagtctgcctaaataggtagcttaaacttatgtcaaaatgtctgcagcagtttgtcaataaagtttagtcctttttt

SEQ ID NO: 199 - DNA, 191 bp, Homo sapiens
gccctggggtcacctcagggacagcgtccaggcttcagccaagggctccctggcaaggggctgttgggtagaagtggtggtgggggggacaaaagacaaaaaaatccaccagagctttgtatttttgttacgtactgtttctttgataattgatgtgataaggaaaaaagtcctatttttatactcccaac

SEQ ID NO: 200 - DNA, 5671 bp, Homo sapiens
tatctgcctccagggaggggaggggatgggaagcaccaccagccagcggaagagcagccctctggtgggcgggaaaccagtgtccccaccatcagccaccacacacctctgctgccctggagactgtgctcttgacctgctccgcccccttccctggagggagcaccctctggacagacagaaccatctgaggctcacctttgggttttgtgacaagaaggggacgtgttgggtttttcttccttacactatattttggctgcacacatgtctttaacccaggagcccaggggtagacaaaggaggactaaggtaatcaatttgcacctttttttatttttattttttttctttttttcttcagtggtgacttccttccctttatcttttttcattcttcccggtcctctgccctgatctgtgtaactcttatcttgggtacttgagcagacggtatattccagaggtgggaggtgggaggggaagggagaaatccaaaacaaagtgttcttgctctgacagaatattaatcttgtacgcttggattgagttatttaatttttttttcttttgcacatttttcttgtattaagattgctcttcccaagagccacaagttcctggttttagtaaacccagctgcctgcattgcctgggactagaggctggggaggctaccatgaaacaaaggtccctccctccctctgactctttgcccagacctctttagtttgggggatcctcctcactctcctgaagtgtctcaagtataccagtgggagtgcaggggaggagcacaggccttcagatggggcttcccacgtgtagctactgatcccatatttcctactcaccttccaaatggtgcgacccaacttcatttgtttacttgaaaattccccctcgaggttgagagaacctctgaggtggctgtattttctcctaagcttgagatagggggctgtggtccttcctttctcctgaggagaaagtccttgctctggtgacctgtaagttgcagaggagggtggagtgagagtgtcatgtattgggatagtcagggatccctgcctttggcctttcttcttcttcttcttcctcttccatagttggatcatgtatattttacttctaaaggagagaatgtcaaaaagttctgtatttttttatattctatatattaggtaggtcaatcttaattggtctcaagaggaagaactgtctgtcatttcggtaagtaggatactgtgaggaagaccaaaaagagatatggatgcttcctcgctcaggaggcctgagcttggtccttttcctctctgcttggattctggaccaccacctgggaccaaccttcagctctggaaccttcataaagcaggtcagcgtggcctgattgtcccaggacctgaagggagcaaggatggcctcagggcctggtgaagtctgctactctgtccttactgctgaacatcctgcttgtatcaggaaactcagaagcagtttgccttgtcaaattcaatctcaatggccattgtccacataactgatcacccatggctgcctctcctattatctattatcactgaaacttagtagcctgctttttttttttttttttttagagctattgcgtatcttccctgtttgggatccttgtacctggtttgggttttcccttccttgtgacaattataatccagatgcctcttctttctgtttgaattacggtagtgcattgccttagtggcttgcctgtgcctctgggtggattacatatgatagtaaagcccacctgtttggatgggagtagaggaagttggtgtagaccagctgtggagctgaaggcacagtctgccccacccccacctccccactgtggttagtcagaggcatcctgctccaagctctgcttttccttcctctgaaacaatgccattcttgcttctattgctacacatctccttctggctcaggtgaaatccatgcccttctgcttatagacctaaagttcaggtacttattattggccattgatcttgaatttgccctctcctagtgctgcagtcccacttcaaagccattttctgaggaggatggtttaggtctggcaattgtccttgaaaaatcccacccatgttgtaccaccttggtgagtcatatgccactcatcagcttgggaatgatggctgccaactcccaatctcccaggaaggcagggggcagaatctttttttcacttggcctgctacctccattaaaaaaccattctcttacagtttaaaaaaaaaaaaaaaaaaaaagccttcccctacccaacctccgcccattgttctcttccaaagggcaatttagtaggatctactttgtacatctcaagtaagagttaagtccctgatacagggaccagtttcttagtgtaagacatacacatcctgcttgtccagctgttcctccaaaatctactttggcttcagctccgggtcctgtaccagatggaaaatgtttttggtgatctggctgctgcttaaagccagttttccctaagaactccaaaggctaaagtctactaggggcagagtgtgaggatagatttctaatcagagaaaagtggcctccaggagctttcatttatgtcttctccagaccaggttttcctgttatcttcctttaatcccctttcaaccaacaggtgaagttcttccagcccacagaggtagtaatatcatcttttctatctcctcctctcctttggccatgtaatgaagcaaaatattatttatttagcccaggcttgagagccactgtttgtggacagtcttcatctagattccataccctggcctaggcgaggtaaggctctctggttattgccaggatggagcccctctaccccagtctgctgtagggaataccctaattagttgaggcatgcttttggaatcctggcatgttggcatatggctggtctatcctttttaagatctctggttgggggtatctggatatggattaggagggacaaggagcctttttcttggctaatgttttccaatacttttttgaatggtgccagcccctccaggcatcccacccccaaatcatcatctttagtactaacagggtgtctggtcttagaagcctcccttcagatcccagctgaccctggtgactgcctggccttgatgttggctgcagccttctgatagaaccacatggattccacccacagctggccaggcttgttacatgggtcagggaatacaaatggcccccccccagggagcaggtgttggcctcagttttcagggacccttggtgttgctccttacctagagcccattaatctaccccatcaactctctgccatgaaagccatcttccaggagccctgttttttggagctgaactgcacagattatagctgctattgtacttaaataagggagaggaaaagaaggttctcaggcacagactttctatttttctcaagccaaaccagtttaaaatgtctagcagaatgaactgtatttccatttcttcatgtctacctgccttccccccacaccctaaagttgtacttgtttctagcaaactagaaggaaaagataggaaagcctggcactactaacctcacctctcatacacctctttgaaggccccagctcttttgttcaggcctctcttctcccctagactcactcagcttggtatccatcatcttgagcattcttcagtagattcatctagggttcagattccagactctcagctgaagacagggagccaatttcccccaggtccctgcaggtaatccagggaccccatagggagaacaggctgactggggcattaggaatgtttgtacctctctgcttccctggcagcctggggaagggtgcagggctcagtgcgctaaaccatggtaaacatcttcaatagaactaccctagaatttagtgagtgtgagactgagatattgctcagaataaatttattccatagccatttaggattgcatgttctggaccaaccttgtccagtatgttttctgtttgagctttttcattcttttgttaagccaacaagttgagaatttggccctgctgggatccatgtagtgggcactagctgctctttggccaaggccttcataaatgattcagtctctcattatctgtcctctagccccacaccctgatttagaccgtggcaaaggaagaacttgaggtcaagaccaaccaaatctgtgaattaaagctgttatttttttctctgcaagggcgctttgcttcaggtctgggctatgtgcagaacctaagcaggctgtgagagttagaagaggcagtattacatgttaggcccagaacaccatgggaaaaggtttatgtagtgtatcttagtggcctgcctagctgcctctgggccaggctgacttctgatgtccacattagctcgtacctgaaccctgttgctgaatgccagccctgttctcctgtaactattatatacgccatggcctggggggcattgaaggaagtaagctctcagagatcctaacactggctgggaacctctgactcagagcatgtctttaaagagtccacatctggccaggcgcggtggcacatgcctgtaatcccagcactttgggaggccgaggcgggtggatcacgaggtcaggagtttgagaccagcctggcaacatagtgaaaccccatctctaataaaaatacaaaaaattagctgggcgtggtggcaggcgcctgtaatcccagctacttgggaggctgagacaggagaatcacttgaacccaggaggcggaggttgcagtgagccaagatcatgccactgcactccagcttgggtgacagtgcgagactccatctcaaaaaaaaaaaaaaaaaaaaaatccacatcttcagctgggcgcggtggctcatgcctgtaatcctagcactttgggaggctgaggcgggcagatcacttgaggttaggggttcaaaaccagcctgaccaacatagtaaaaccccgtccctacaaaaataaaaaaataaaaaaaataagccaggtgtggtggtgggcacctgtgatctcagctacgtgggaggctgaggcaggagaatctcttgaacctaggaggcagaggttgcagtgagccaagattgtgccagcctgggcgacagggtgaggctcttgtctcaaaaaaaaaagtccacatcttcatgaaccctcagactctggagttgggtgtcggcttttttagccagcttttgtgggaattgcctttgacctattaaagaaggaaagtgggtaatggagtcccagccactcaagagactggatatcccccgagaatggcttgggttaccagctatggacccttggaagatgaatctaatccttctcactggtttttctttgcaaattcatttgcttttatttttctaataacaataaactctattttccatgttctcagggcccctgggtagacagacacagcttgatttcagagcagacataggcgaagaaaacatggcattgagtgtgctgagtccagacaaatgttatttatatacacatccaaatttgaagagaaaatgtatttctttaggtttcaaacactgtaatagatataaagcaaaaataaaaacctgttgcaaagttct

SEQ ID NO: 201 - DNA, 3089 bp, Homo sapiens
agagcctggtgttgggtcatgctgggaagggagcggcagcccagccaggcctggcccataaaaggctcccatgctgagcagcccattgctgaagccaggatgttctgacctggctggcatctggcacttgcaattttggattttgtgggtcagttttacgtacatagggcattttgcaaggccttgcaaatgcatttatacctgtaagtgtacagtgggcttgcattggggatgggggtgtgtacagatgaagtcagtggcttgtctgtgagctgaagagtcttgagaggggctgtcatctgtagctgccatcacagtgagttggcagaagtgacttgagcatttctctgtctgatttgaggctcagacccctccctgcccttcagagctcaagacaagtaatacacccaggtcttgactgcatttgtcttgtgagcagggcttgcttggtcagctcaggccctcctagctgctctggaggctcctttgattctctagacctggaaaaggtgtccctaggcagagccctggcagggcgctcagagctggggatttcctgcctggaacaagggacctggagaatgtttttgcgtgggatgatgtgctggtcaggagccccttgggcatcgcttcccctgccctttggtagtgccaggaccaggccaatgatgcttctcagtagccttatcattcacaggtgcctctctagcctgcacaaatgattgacaagagatcacccaaaggattatttctgaaggtgtttttttctttatttctttttctttttttttttttttctttttcttttttttttgcacatgacagtgtttgtattgaggaccttccaaggaagagggatgctgtagcagtggtgcctgggtgcctggcctccagtgtcccacctccttcaccaccccacttggctcctttgccatcttgatgctgaggtttcctgtttggtgagatcaggttgtttgtggtaaaagaaaggaaagggcttctgatggctttgccacaagcttacctgtgggtttcagtcctgagaggccaccaccagttcccatcagcactgtctccatgcagcagttgctgggtcccatgtccagctgcctctttggcttcatgggtttttctgcttcctgcccccacccccacatgtgcaatcctcaagatttgtcctgattctatttcctggcacctccctgcctgtccttggggattctacttcttcctgtgtgggagcccatagctgttgtctaacaggtaagaaatgaaattgaactattgactgggccccagaaatccataaaatggctgcagacagttgtttctgtgtcctgttctacccccactccagtacataactactatgtactgtgtagagccattctatatgctgaatgttctgctgttgcaaacttgccagggtattagccagtgtttgtgccaagcagttttctgggacaacagaatgactcagaccaagatggataggatggttagggctttgcttcttgctgtttttctttgaagctagttcattgtcctgcaggtcccttcatcttccatacctagcccactcttttagcccttaccttaaatctctcagataagttggttcacaaagaatgttaagtactgaatcatgtgtgactgagaccagagatggcaaatgaatggcacaccatttctccttctcctgccccagggcaggtaccactgatctgcatcagagttgcctgctattctctggtgtatccttcacatctaggtgccctcaagcagctgtgtgagtgttgagatctctgccatctctggctgagatactgctgtcctgtgaagtgtttcccatgacctttttcttcccctttgaatccctctgtctggagtagtccttgcctcttcctgctccagtagggccttttccctaccccagcccctgtgccaggctaagctggtacaagagctgccaacctcacagagtgtttgctaggcgagagaggtgcagggaagaggcagaggtatgcaccttcccccttgaagagaggggaaaggcctacagtggcccacataattgcctgactcacacttcagctacctcttaatgcctgtggagggactggagctgctggatcccagtgtggtggtgtaggaggccacagtgagcaggtggccccagctgggtttcccaggtcaggaatgtgggccccaggcaaggtgcagcctttgctcacagctccatccatgtctagaccttcaggccagtctgcagatgaggttccctacctttttcttctcttcattgaccaaatcaaccaatcactacagctgctctgcttctgctttccaaagtagcccaggtcctgggccagatgcaggggaggtgcctatccatgagtgaaggccagtgtcttcctcacctgggtgggtcccacacttgtgacctcagttttaggaccaagatctgtgttggtttcttagattgctagcttttcctccaggggaccacagcaggtgaagctcaagagcgcatggctctgctaatagtaaattgttttcagggccttgtccagctgagagcttcatgtccaccagattctgagaggtgtcagcagcactttttttttttatttgttgtttgttttccatgaggttatcggaccatgggctgagctcaggcactttctgtaggagactgttatttctgtaaagatggttatttaaccctcctccaccccatcacggtggccctgagggctgacccggaggccagtggagctgcctggtgtccacgggggagggccaaggcctgctgagctgattctccagctgctgccccagcctttccgccttgcacagcacagaggtggtcaccccagggacagccaggcacctgctcctcttgcccttcctgggggaagggagctgccttctgtccctgtaactgctttccttatggcccagcccggccactcagacttgtttgaagctgcactggcagcttttttgtctcctttgggtattcacaacagccagggacttgattttgatgtattttaaaccacattaaataaagagtctgttgcctt

SEQ ID NO: 202 - DNA, 142 bp, Homo sapiens
gcgtcccacgcaggcccacactgcccctctcattctcttcaaactgtgactttttacagactcgggcgggtgttctgcggccccccaggtgctatgggggaggggggcgttgaatggaattaaaccagaaagaaagcaagcg

SEQ ID NO: 203 - DNA, 605 bp, Homo sapiens
accctaggaagccaggagaggatcaggttccaaaggggaatgctatgaaagggcagtgagacaagacctcatcctacctccctgaccagctctggcttctgctcctgcccctggccattggtgactagtggggccaagagaagctggagcagagagctggcatgagtatagggaaggaggaaggacacattttcaatcctctgcctgtagctcaatccaaatttgtggataaggggccgggtgcagtggctcacacctgtaatcccagcactttgggaggccaaggtgagtggatcacctgaggtcagaagtttgagaccagcctgaccaacatggtgaaatgaaaccccatctcaactaaaaatataaaaattagccaggcgtggtggtgcatgcctgtagtcccagttactcgggaggctgagacaggagaatcgcttgaacccaggagatggagattgcagtaggccaagatgatgccactgcactccagcctgggctacagagcgagacacggtctcaaaaaacaaatgtgtggctaaggagttacctgggggaagtagaatgagaggtctgttgggaataaaggtttttcttagattctg

SEQ ID NO: 204 - DNA, 407 bp, Homo sapiens
gaagctggatctcctgccgggcgtggtggctcatgcctgtaatcccaccactttttttttaaggcaggcggatcacctgaggtcaggagtttaagaccagcctgaccaacatggagaaacctcgtctctactaaaaatacaaaaattagccaggcatggtggcacacgcctatagtcccagctactcaggaggctgaggcaggagaatcacttgaacccaggaggcagaggttgcagtgagctgagatcacgtcattgcactccatcctgagccacaagagcaaaactccgtctcaaaaaaaaaaaagaagaaggtggatctccaaccaggccagagaagattctcacagaaggttttgaactctaagaaataaattggtttggtaataaatggcttctggtcagat

SEQ ID NO: 205 - DNA, 257 bp, Homo sapiens
ggaacacctgtgccccccgactccccgccccctctcccaatgccgcttcccctgcctgcctgggaagaggaaagggaggggtgccccagaggcaccagctcctggcgggggaggaggaacattcaggtttctgagagctgaattccaagagtgcaaaaccccagcatcctgtttcctctgctgacccagctgggagggggaggaggaggagctcacaccctcaaactcctcaataaacgctttctctggttcccatc

SEQ ID NO: 206 - DNA, 448 bp, Homo sapiens
gaggccttgagaggccctggggttctccccctttctctccagcctgacttggggagatggagttcttgtgccatagtcacatggcctatgcacatatggactctgcacatgaatcccacccacatgtgacacatatgcaccttgtgtctgtacacgtgtcctgtagttgcgtggactctgcacatgtcttgtacatgtgtagcctgtgcatgtatgtcttggacactgtacaaggtacccctttctggctctcccatttcctgagaccacagagagaggggagaagcctgggattgacagaagcttctgcccacctacttttctttcctcagatcatccagaagttcctcaagggccaggactttatctaatacctctgtgtgctcctccttggtgcctggcctggcacacatcaggagttcaataaatgtctgttgatgactgttgt

SEQ ID NO: 207 - DNA, 579 bp, Homo sapiens
atggacctctccagctctggcttcctgctgagtccctcacgtttcttccccaacccctcagattttatattttctatttctctgtgtatttatataaaaatttattaaatataaatatccccagggacagaaaccaaggccccgagctcagggcagctgtgctgggtgagctcttccaggagccaccttgccacccattcttcccgttcttaactttgaaccataaagggtgccaggtctgggtgaaagggatacttttatgcaaccataagacaaactcctgaaatgccaagtgcctgcttagtagctttggaaaggtgcccttattgaacattctagaaggggtggctgggtcttcaaggatctcctgtttttttcaggctcctaaagtaacatcagccatttttagattggttctgttttcgtaccttcccactggcctcaagtgagccaagaaacactgcctgccctctgtctgtcttctcctaattctgcaggtggaggttgctagtctagtttcctttttgagatactattttcatttttgtgagcctctttgtaataaaatggtacatttct

SEQ ID NO: 208 - DNA, 65 bp, Homo sapiens
taaaagcaatggcaagtgctctccaataaagtagggggagaaagcaaacccaaaaacccgcttct

SEQ ID NO: 209 - DNA, 946 bp, Homo sapiens
atatgtctttacttgttgtgattttagactccccttttttcttctcaaccctgagagtgatttaacactggttttgagacagactttattcagctatccctctatataataggtaccaccgataatgctattagcccaaaccgtgggtgttttctaaatattaataggggggcttgattcaacaaagccacagacttaacgttgaaattttcttcaggaattttctagtaacccaggtctaaagtagctacagaaaggggaatattatgtgtgattatttttcttcttatgctatatccccaagtttttcagactcatttaagtaaaggctagagtgagtaaggaatagagccaaatgaggtaggtgtctgagccatgaagtataaatactgaaagatgtcacttttattcaggaaatagggggagattcaagtcatatagattcctactcgaaaatcttgacacctgactttccaggatgcacattttcatacgtagaccagtttcctcttggtttcttcagttaagtcaaaacaacacgttcctctttccccatatattcatatatttttgctcgttagtgtatttcttgagctgttttcatgttgtttatttcctgtctgtgaaatggtgtttttttttttgttgttggtttttttttttttttttttaacttgggaccaccaagttgtaaagatgtatgtttttacctgacagttataccacaggtagactgtcaagttgagaagagtgaatcaataacttgtatttgttttaaaaattaaattaatccttgataagagttgctttttttttttaggagttagtccttgaccactagtttgatgccatctccattttgggtgacctgtttcaccagcaggcctgttactctccatgactaactgtgtaagtgcttaaaatggaataaattgcttttctacat

SEQ ID NO: 210 - DNA, 2083 bp, Homo sapiens
ccaccaggcacctcactggcactgctgacccatcccagaaacacaatctcagggacccgagcagctccaaggacgagaggatacagcagacacaacctaatagagagggcgcctgcagccttaacctccacggccttcgatacttatgcaagcctggtgttgctcctgtcctcagagtcatcctgcgctcatgccttttcccgaatgggttcacctctggcagttgccgcttcagtcttggccttagcctcatcttgaagtgggtagctggcgggagagggtggctgcgccccctgctggccctgaggctgcagagttgggagcaggacacctcacctgagtttcattttttttcatgtccaaaccatgcacatactatagtccagaatcaaagcacttttgaaaagtggctgcatggccatcctccagggcccaggaagttgcattccaagggcctgtttacatggcagcagaatccatccccggcagtcagcccatagcttgggaccagtctgtgccctcctgcccagtccagtttactcctcttggttcctgaaggtggccaagtcattgtgttcccacaggcttctctaggctgggggcaggtgtggggctgtggaattccaaagcacaaaaggtgcagaggggattggccttcctgtgcctcaactcaccaaccaccctcctgccttccagttctgccaggtgctccatgctggggacaagtaggagactgccagggcccaaagaaatgggtgagcagtagagtcatctcggggcacttggcagtgtcaagcacctgccccttgcctccttgaccacactggggtgggtgggcccccagcacttcagaggcaggagcctttgggctgagcaagcactgaggaggtggatggaagggagcatctggagggggggagcttccttgagcagtgggcccaggcctggccctccacacttcattctctgacctttctctctcctcatttcggtgcatgtcctttctgcagctgcctttcagcacaggtggttccactgggggcagctaacgctgagtgacaaggatgggaagccacaggtgcattttactcaagtcttctctagtcaatgaggggcacccagtgcttctagggcaggctgggtggtggtcccctaggtatcagcctctcttactgtactctccgggaatgttaacctttctattttcagcctgtgccacctgtctaggcaagctggcttccccattggcccctgtgggtccacagcagcgtggctgccccccagggccaccgcttctttcttgatcctctttccttaacagtgacttgggcttgagtctggcaaggaaccttgcttttagcttcaccaccaaggagagaggttgacatgacctccccgccccctcaccaaggctgggaacagaggggatgtggtgagagccaggttcctctggccctctccagggtgttttccactagtcactactgtcttctccttgtagctaatcaatcaatattcttcccttgcctgtgggcagtggagagtgctgctgggtgtacgctgcacctgcccactgagttggggaaagaggataatcagtgagcactgttctgctcagagctcctgatctaccccaccccctaggatccaggactgggtcaaagctgcatgaaaccaggccctggcagcaacctgggaatggctggaggtgggagagaacctgacttctctttccctctccctcctccaacattactggaactctatcctgttaggatcttctgagcttgtttccctgctgggtgggacagaggacaaaggagaagggagggtctagaagaggcagcccttctttgtcctctggggtaaatgagcttgacctagagtaaatggagagaccaaaagcctctgatttttaatttccataaaatgttagaagtatatatatacatatatatatttctttaaatttttgagtctttgatatgtctaaaaatccattccctctgccctgaagcctgagtgagacacatgaagaaaactgtgtttcatttaaagatgttaattaaatgattgaaacttg

SEQ ID NO: 211 - DNA, 2836 bp, Homo sapiens
tttgtgtcatcccatcagcaatgaaggtccctatccagggtcctgcttggagcagcatttcatgttcttttgctgttttgtgctttgccgattttggattttatttttcacaaaatttttatttaaaaaactcgtcaccttttggaaatgcccattgccgacttgaatttttttgtatgaagtccctcctgattttgtgtgtgtgtgtctgtgtttaagcaagcgttcggttggtatagtttttttttgtttttttaatttaaattgaaggtagctgcctcctgaaagccagcattaagccagaacacccaggttcaagcaaaagacccacctctctgcagaggcaaagtctactttctggtacctcaaagaaatcattgttcaatcttccataaggaagagattctttaccaggctgtgagccagtgttagataacttgtgaatggatataagttacttttaacaacccctcttacttttttatttgaatcctctgaatacctgtcagtattttaaagttggcaatccaggacattataagtaggatggagcaggagaagaatcctattgaaaggacaaattaaaatagtaaatcctctcctctcccttctgtaggtactagctgccttgatttttttttgtgggtgggggggattttttcattccttattgaacttattttgcacaatagtgtttacaaatcttatacatcttactttgacagaagacttataataccttgtggtcttgagactggttgtctcctttgcctttcttcaaggattttcctttttctttttaccccccagtgaccactctgctctttaggattctagtggcagtattcttgtaacctgttagacgtggatatacctcttcaggatggcctccttgctgtctttattgaagagctgcccacccagagtcttgactctagggcaggctagtgctattgtggtgtcagttgatatttagtttcatttgctgaaccccaaatttgagtgttagttagggagcctccattctgtgggagagtgtggaaaggcactcttttttctccatattagttaacaagaggtgtctttaggccctggatgttaccatctcatttggtcaagcccctgatacctagtttcacatggatgctaacgtggatgtaatatagttgtgacagcctatgcacaaaagcattacctgatcttaaggtttggtattctaaccaaagttgacagactgtgcgtctgtcttaatggatgtcttaggagttggttattctctcttttttttttgagacggagtttcgctgttgttgcccaggctggagtgcaatggcgtatctccactcaccacaacctccgcctcctgggttcaagggattctcctgtcttagcctcctgagtagctgtgattacaggcatgcgccaccatgcctggctaatttcatattttttagtagagacaggatttctccatgttggtcaggctggtcttgaactcctgacctcaggtgatctgcccacctcggcctcctaaagtgctgggattacaggcatgagccactgcacctggccggttattctctctttacagatagctatagacatcattttaggaagtgttgcagtctggcatttgtgctattgttcattctctgtgaaggctgttcatagttgctatagcctgtgtttagttttgtgatttcatcaatcccatctttctgtgtgagtaatgcattctaaacatcctaccccactttagaaacggacgtggggaacgcttggtcatttaagccaacaataaatttaggtgaatgtccctaagtgtttactgtttttatccagtcaaggatttgcttttccttgaacatttgttttaaattctggggccaaaatgcaaaggagaagttctattcaaaggcagtagttgaaatctattattttagttagcctacttggcatttactacatcggtcacttctccaggctgccctaaattaggttgatggagtgagacatgccaaacatccacctttgggaccatagcatagttaaaattaaatgtagttggaatagctagcattgcagctacagtagggaactgtagtctagttccctacagaaaacccaaggagtgaagggacaggattttgcctaggcaaaaatctaagactcgtgccctcctggtacatggggttttaagactgaatgtgtaataggagcactgcctttgccaaatcaaatgagtgacaggttaactagaaaatgtgacaatcacatttcctcttagctcaaataattctgtttttccaaagctttagcagcttaattaaatctgttggactgggggaggagagagctgttctctagtggttaacatggtattctttaagaagaaaaaacaaagccaaagaaaactcattatctggcatgttcgccttaaagatggtactgggtagaatctggagttttcatctcttttcaaagctgcatatctcttatatttggtattggcctctaagtctaatattgcagttggaattcttgctgtattattttttaagcaagtgttaggtgcatttaactgctttcttcatccatgacgacattcccaccatgggggtcttgacaaagcagagtaaaaatatgctgtttacattgtttacttacaagtaaggagcctgaaataacctgtagtttcgaatgcaggccctgatttactggcgttgtcagtttcaattatgaaactgaagtttggtgcctcctctttatcatgttttttcccttgtagcagttgtgtttaatgtcattaaaaagaaataaaagttctttgtcagtg

SEQ ID NO: 212 - DNA, 200 bp, Homo sapiens
gcgcagtggctcatgcctgtaatcccagcactttgggaggctgaggcagatggatcatctgaggtcaggagttcaagaccagcctgactaacatgatgaaacctgtctctactaaaaatataaaaattagctgggcgtggtggtgggcgcctgtaatcccagctactcgggaggctgaggcaggagaatctcttgaaccc

SEQ ID NO: 213 - DNA, 783 bp, Homo sapiens
gaggagccaggttccccttcctccctcccttcaccggccccctcccggctcttagcttccactcccttgtgtgtattctggctgggggccagattggggaagcccttctccccgggtctgccctgtggggggcttccggaaaagggaaccctgcggtacccccaggccaaagcaagtaagcggttagcaccccccaatcccagaggcaacaatagagacacaggctgggttggtctgcccctcagtcaggcccccttacccacccaccagccccaaggcccgacccctcccccaaaggggcagtccccttcttgcaggtctcagcttgcggggtggggggagtcatgcccaggggaggagactttttatctggaggggagagaaggattctaggggtgtggagttggagaaagaggcttccttgagccacccttcccaccccagcccttgctggtccctaggccaagccaccaagtgaaaccttccaggatactagcccgccagctgtgggccccagaaagccagcctgccttttagcacttggatacacacagacccacggagctctctgtgtttggcctctcacacacacacaggcccatagacagatgggcagatgcacccagagccccatgcacagtgtcctgcgtgggaaagagacacggtccccctggctgagcccctgtcctcccctctgtccccccaaccgccccccctgcatgcagccaaatggagcatctctgttctttttaataatttcagaataaagtctcatttcagtgc

SEQ ID NO: 214 - DNA, 211 bp, Homo sapiens
gtgggcctcgttccccccggagaatcccagcggggcctcagagatgcatctgggagaggtggggaagatggcaggcaagggtacccttggccaggactctggtgcccaccctgccacccccgcgctccacctgcagtgtttctgccctgtaaataggaccagtcttacactcgctgtagttcaagtatgcaacataaatcctgttccttcc

SEQ ID NO: 215 - DNA, 1673 bp, Homo sapiens
gcccactggaggcgccgccccacccggcccactggcagacacagacccaggcagcaccaggccccagctccctccgggggccctccaggaaccaccaagctctctcacgaccttcccaatcttccagaaagcttggtccgcagaagccctgcctggtccagtccgggggcggccaggccaactgcaagattctggactgttttggtggcatccaaagacgatctcagagcactttgaacctctctgttgagttttctttttgttccccacccttcacttgcttcactgtttttttttttttcgttttttttttttaagtttgttttggaaataacagaaaagatatttattggccaggaagttggtgctgctaagaccgagaaatttaaagaatcggacagatggacgcagagaaccagagggcaatgtgggaccttctcttgccatggcctcaggtcttgagggaaggctcgggcctaggtttctggactgcaaaggggacccccaggtgggaggggcaggaagcagccggagtgagcccttcgcccctgagtgcctggctcgcacctctcgagctgtgccctgggcatcactgagcagaggggtgcggcagcttcaggaggcagaaacgagaggggtgggagatccacaggaccaaagggtgcagtgatgggctgggtggcgggcccagggaaatggggtggggatgggctgggtaagacctggccctcccctgctgccctgaagaccaccccagtctacctcggtgctggccaggaaacctttcggctacctctcccaccatcccagactgtgggcagggggatggggagggagtgggcctggatctgggacctccctccagaatttcctccagatgggggcagtgcccagggaggggttatttgtcttccctgccatggagtgggaatccccagccgaggccctaggcccctcagcagggaagggatccccggggaggcaggtcccaggagcagaccctgcccccagcccccacagacacaccccaatctgaaagccatgcgtgtcggtgtatataggaaccatgtacagagcccagagaagccccctacatccccccgggaaaaaaaagaaaactagacagaaactcatctatatattctgtatctggagttccgttttgaatattaactgtgttatttttatacactttttaagccttaactcgccattgatttaccagtttaacgtttcctggggtttctttgcccatggggttctctgcccccacccccggccctttgtttgacttgcgtcgtctgatactcagtattgtagctttttgtccgcatgttactccctgtaaatacgctgttatacatactgttaacacccctttgctttttctatgggacctccaggccaccatatttagaactagttaccttattaaaaaagaaaaaacagtctgttggcttctcagtctgcatcttggaggcagggaggtgagggcaggtgcccctcagacacttcaggaaggtagtttgcattctatttaaaaaagggagtggggagcaaatgaaaatcaaatgtggggggaaaacactaaagggggcaagaaacaaaggaattacaaaccctctgctctttgtatttctctgttgtgaagaataaactgtacctgcacccgg

SEQ ID NO: 216 - DNA, 919 bp, Homo sapiens
gggacagtttcctcaacaacaaaggaggactcaatgtatatatcttatatcataagatgtatgctagagataaactttccaatttttaagcttggtgtgtacccagggaagttatcttggtataaaccaggtaatttggaagtgaattacaaatactaaggatccagatttgaaggcacttttaagtgtaatttgtttttcttctgtaaagacccacacagaatcctgactgtccttgtatttgctatcatgtaagagctgtgtcagtatttgagccaaactggcaacttacgagattagagttaaatcagtggtcctgagcagtgattccaaactctcactgtgccttcacaccatccatgtgtaatccaccccatcagcagtggttctcctactttctcagtgggggcatatcctcaagggagaatgttgtgactctggtgagagaggagttggcctagagcaggccactgtgagctcagcacagagtaggaagaacagtgacatcattacaaaatcatcaatagcagcaatagctggtgtttattgagctgttgctctttggcaagctctgtgctaagaactttgtatacatcatctcatttaatcttcacaacggccccaggagataagtactaactttctccccatttcctagaggcttgggaaattaagtaactcgcactggtcacacatctgtaagtgggagaggcaggattcaacagatctgtctgtcttgagtctatcgtgctcttattgctatactgaattcccattcatgttaggtaacttaggggccagaatctccatgcactttgtagaccacatttcctgttatgaaatttccacattttgaattttttaaacaaatatggaaactgagaatccctaaggattaaaggacttgggatatccagaa

SEQ ID NO: 217 - DNA, 38 bp, Homo sapiens
tggatccagtttgaaaaaacaaaatgccattcaaccgt

SEQ ID NO: 218 - DNA, 367 bp, Homo sapiens
atctcctcttctcccttctcctcccttagcccttggatcaggactaggggctctgatttttggattctgcaaaagcttggtatgaagtttggaaaagcaaggttctgaccaggtcacagacaaaacagcaagaccagattcatctattggccaacactgacacaaaaatagccctcctcacacatggcacaagctacacacacacacacacacatgaccctcatattcatacttgcttgctcaaccacttatgcatctatatttagctaacatgagtgatttttgtttttgtttttgttggtaaaatagaagtaagacacttaattttagaaagtttgtattttatgataaaagtatgagctacttg

SEQ ID NO: 219 - DNA, 359 bp, Homo sapiens
ggggctgcctggactggtctggcaggttgggcctggatggggaggctctagcatctctcataggtgcaacctgagagtgggggagctaagccatgaggtaggggcaggcaagagagaggattcagacgctctgggagccagttcctagtcctcaactccagccacctgccccagctcgacggcactgggccagttccccctctgctctgcagctcggtttccttttctagaatggaaatagtgagggccaatgcccagggttggagggaggagggcgttcatagaagaacacacatgcgggcaccttcatcgtgtgtggcccactgtcagaacttaataaaagtcaactcatttgctgg

SEQ ID NO: 220 - DNA, 271 bp, Homo sapiens
cctgcgagatcagcagataagatcaacaggtcccccccacatgaggccacccaggaaaaaaggcaggggcagtggcatccttgccgtagcagggtggtgaggagggtggctgtgggggctcaggaagctcgcccaggggccaatgtgggaggttgggggtagtttggtccctgggtcctgagcctcaggggagggaggttgatagctactggggattttgtatatggcaacagtatatgtcaaacctcttaataaatatgattttcccagt

SEQ ID NO: 221 - DNA, 790 bp, Homo sapiens
ccacagggcaggggtggggcaacatgcgggctgccaatgggacatgcagggcggtgtggcaggtggagaggtcctacaggggctgagtgaccccactctgagttcactaagttatgcaactttcgttttggcagatattttttgacactgggaactgggctgtctagccgggtataggtaacccacaggcccagtgccagccctcaaaggacatagactttgaaacaagcgaattaactatctacgctgcctgcaaggggccacttagggcactgctagcagggcttcaaccaggaagggatcaacccaggaagggatgatcaggagaggcttccctgaggacataatgtgtaagagaggtgagaagtgctcccaagcagacacaacagcagcacagaggtctggaggccacacaaaaagtgatgctcgccctgggctagcctcagcagacctaaggcatctctactccctccagaggagccgcccagattcctgcagtggagaggaggtcttccagcagcagcaggtctggagggctgagaatgaacctgactagaggttctggagatacccagaggtcccccaggtcatcacttggctcagtggaagccctctttccccaaatcctactccctcagcctcaggcagtggtgctcccatcttcctccccacaactgtgctcaggctggtgccagcctttcagaccctgctcccagggacttgggtggatgcgctgatagaacatcctcaagacagtttccttgaaatcaataaatactgtgttttatac

SEQ ID NO: 222 - DNA, 530 bp, Homo sapiens
aggcctgtggcttatgtcacccaacagaggggtcctgagaagtctggctgcctgggatgccccctgccccctcctggaaggctctgcagagatgactgggctggggaagcaggtgcttgctggccatggagcctcattgcaagttgttcttgaacacctgaggccttcctggtgcccaccaggcactacggcttcctctccagaatgtggctttgcctgagcacagacagagtcagcatggaatgctcttggccaagggtactgggggccctctggccttttgcagctgatccagaggaacccagagccaacttaccccaacctcaccctatggaacagtcacctgtgcgcaggttgtcctcaaaccctctcctcacaggaaaaggcggattgaggctgctgggtcagccttgatcgcacagacagagcttgtgccggatttggccctgtcaaggggactggtgccttgttttcatcactccttcctagttctactgttcaagcttctgaaataaacaggacttgatcac

SEQ ID NO: 223 - DNA, 594 bp, Homo sapiens
tacatgctcatttgaacttacctaaaagacttgtatttccattgggatgttttcatttcaaaattgttcaaaattcaaaagacacagaacgataaacagtgaagtctccttccctcctttagaactcattttctcttcccaaaaagtgttatcttttccttaaatatccctctagaggtatttttcctaagtggtattgtacggtgtatactgttcttcagcttgtcttctctgtgtaacatatttttgagattgtcccatgtcgttacatgaagagtttcttgattcttggtctataattgcagatgttattgtatgaatgtaccataatatatttgagcagtccctgctgacatttttttcctaaccttttgctattataaataatgattcattttataaccttttatataggtcacattgcacatgagtgagtttactgtaagctggaaatctaaagttagaattactaggttaagatatgtgcatttttacttttgatagatattggcaagttgccatctataaggattgtgccagtttacagtcccacccacaatgcatgagagtgcctattaaatctttgtaagtgtt

SEQ ID NO: 224 - DNA, 2266 bp, Homo sapiens
aacggaagtgaggttcttattttcatacatattggtatgcaccaaactgtgaatgcatccagctgttggaaaatgatgtataagtctaagtcctcttgacttgaccataagatcatggaaaacagatgacttgtgaaccccacagtgtggatgtgcaaatgaaaattgaaggaaagaatatgaactgagaaatgttctttggcagtgatatagttcttagacatcttcagaatgactaatttctccgagtggtgcataatcttattttgtttgggagtaacaaatcgtggaatatttttaaggaaaactgttgtataaaactttaccatagtaaccttagaccttagagaggtagctttggagtgaaactttggctgcaataggctactttggcaagccctccgtaaaagtcagaggagagatcagtacagagctaagagtgacatcaaatgaggactgtgggacccagatttgaagacccaataaaaatactcaactttttaaaaaagatagtgaagtggtcttgattgattttgattttcactgccaagccaatcatgtgaaggacagaagcttttgccatgggcccctcacatcagggaaaatgaccttcactgctgttaacagtaatgtgtccctttcattttctggatcaagccttctcagcggtgggtctggatgtgggtaaactaaggtaaaggggatgatattccacaaactaattatgcacacagaaaatctgtggagcctatcagaccccaagtgtcttgaaatgtttgtagaaacccactaaaatgccccttctctgggtgtgggcccttattgcagctgtctcacagcctgagctgtggtacagagaaatgggggttctccttttattttcattttttttccccaatggcagcttttctcccgttgttttaccttcctatttcccaaacagttcctcttattttgtcttttgcaccagtttctggaggcccttgtcatttcaaaaaggatagtctcttttcttactctggcaaacctgtgagtgattccacaaagatacagtattacttagctatctgaattatgatagaaaaggtcctagttaggttcctatataaagcatttggaagatgaccttgttgcccttgaaacttgaaaatagggattctggggtgaggatacaaagacattgtcttgcatatccataagcaggtcttagagcattattccaaactctagctgtttcagtagttctatgaggattgcaagtcataggtgtgtgtggcatatcagtccatctccctcatctccattctcagtttcttccccacaaaatttggaatcaaagcttttatgacgtttgccaattgcagaacttcttcagctaaggttaatttgacgctatgataaaactgagagatgtcaaaaagcctcttagaaattttaatcttgaaagacttttcagggtatctcattttttaggtgggggtggcaggtgtatttcttttttaacaaataaaaggcatttaagtaaaactaaaatgaaaaaagtaggccttctgacattgtgtacttggtggttctgtccctctgcctgtaacaaatctcatttttgttaccaagaactgtatgaaagaagtaaatccaccccgattctgtatgattaattccatctgtgtttgtcatttctgactggaaaacttcttactccataccttgttcgatatggaggacaaataattggattgtctgataagtctgccaataaactatccagaaatagcaagtgtaatagtccccactatacgaattttatggtttgtataaacactaacattttccccttctgtagttgtatgaaaaaacaaatattgttagcatagtagataaattgttatgaaataccagaaaaaaaaatctgtatcttttactgagaacacccaatacccagataaatgactgtatcaggatttcatttgcatgttagtccacagagttgcccagaaccctaaatttattcataagagaaaatattgattaattattggtcattcctcataagtgtagctgttgatgtgtgcgtctgattattgcttttttaattttatgaaaattgtgtaaaattacattttttttccaggggagaaaaaaacatcaaacaaaaacatctaaatcatcctttttgttctttttcagtttttaaccacttttaggttttccccttacagaaaccacagaaatattcccttagaataaaatagtatatttgtatttg

SEQ ID NO: 225 - DNA, 1114 bp, Homo sapiens
ggggtgtccaccggggacagacccaggggcgggcagagagggaaggagggaggaggcatcttccctgaagcccccaatctggcccccccctccccagacttcctccccaaaacaccccagctttctggcttttctgagggcaagggcatggtgcccacccctcaagtgtaaggaactgcgttccgcccctcaggcccccatgggggcagggatcggcttggaaatcaacgtggttgtccccgccaggccggggaaggttggagcagcccccagggaggggggcactaggtgtcattgtgcccgatgtctggctcccctgcaggagggaggctccagggtaagacagggctggcaggagcagactgcctcagcccatgtgccctgccggccagggcgtgggctcccctcggctgtggtgcctcctctggccccccaggtccacgtcctttaaattggccctttggctcttgcccttggctcccttgggcagacagcaggcttaggccattgatatcgcagttcttcctatcagcttcagtgacccagggtctgaactgcctccatcctagggcaacctggggcagacaggcctggtggggggtggggaaacctccttccacctgagcttgcttgaagggacccagagtctttgggcccagatctttaaacctttgtgtcgtgttgcagcagagtgacgatgggggttggggggttatttattttgcctgtccttatccctgcttggacacctgagcatctgattcctgtccccctggtgccatctggcctggctggagccaggaacaggagggacacttccccagaatccgcatgtttccccagtgattacactccactgccaccgtggtgcctggctttaactcccacccctgctatgactcctctctgcagagacgcgactggcggctccagcagggactacctttcttataaacccagggggaccacacacacacacacacacacacacacacacacacacacacacacacacactcttgatcccttgcttccctcccccagtgcgttctgtgatcgccaagttcaaagctgtgcacatgtggacactcaataaatgttcattggtgacgag

SEQ ID NO: 226 - DNA, 648 bp, Homo sapiens
ctgcttctcccaccccatccctaaggggctcccaggccctgaaatagggacttagctcttgggggtgggcctggaaggactgaaaggtgggattagagtcaggccagaaagagaacattcatccagagatcccagagttggggatctggcttggagtaagggagggtggcctctctgtggtggtgtgttggtaagttaagggcccaggtatttgtctcatgtgtgcaattttctgacctttgatggttgagaagggtttggacagaaaattgacatgaaaagatctggctcatggggcagagccctttccattagcgtggctgggtggccgtgggtgcttctagaggccaaagcctttgtgtttttcactggtggcaggaggaaaattgataaatcagaggtgctactgaggagttggtgcccctcattccagaatctcctacccccagaaaaggggtgctggaaggaggccccagtggactctttgtacccttcctactctcagagagaagtgggcaggaggggtcctcaaggaacaaagaagataaagcacaaatcgcagaacttgaatccaggctgctgctcatcatagtcctgttgctgtctgtcctatttatttatgtatgttgtaattaaatttgaaatttt

SEQ ID NO: 227 - DNA, 1982 bp, Homo sapiens
gagtctcagaaaaagaactcaaccaatttggcaccccatgcagcctcaaaatgtttcaaatgcctaccgcctctagatcgagccacgttgacttcaggtggtcttctaccagcagctcggaatagttgcactgaatctatactttgcagcactgtctgatgcgtcaacaaaattgagccatttttttaaagtaatagatactaatagattatcttttctgatgcactggactgaatttttacctcaatgtgcaaaggctgatcagcctgaactttctaaaggactttacaagaagggtttctatggaatattttgctagctgtggtgttcaccgcatccctctagtcttagaagagaagattattccttttttctgtagtcattgagtggggtatatgcataagtgggagagaaaaaccaaacaatctacttcagttcagtgtaactatttaattgtgtgggtccatagactttttaatgaagatttctgactttgccactgtaaatgcctttaatgagcattaatttttgaaagttttacagagttttattagttttactactttatcttattgatctctgcagacttgtgctggtgcaagtacatgctgacaggcaatttgcactatatttggctgcagattcaaataggcagttctcttatttggtcgacttttgtgaatgtgtgacataaacagatgtaatgcatgtcacagtgacggagataacactgccatgataaaagtactcatgtttcccctatttggaaaaaaaaattgcttttagtatttttccaagttttcaaaagtgcccattttatgctgctgtgtggtttgttaaatctaaatgatttttaaacttttctcatagaaacttaactttggcaataaacattttttaaggtctctcctcttccttccccaacaatgtagttttctagatgagatttcagtatgattttatcagctatttcttatatatcataatctggcaatttctgaaaccagtcagaaaagacatatatttccatgcctttttaaagaattatttttacctgttttatattcacagttggtgtcctgtcactttgttttaaaataagctagaaccaggatgcttccttattggaaaggctttgccagtccttaaggtacaatgagtgatgctgcaacttgcaaatgtaccagcatttaaaatttcttttcctgggaatcaaggtaactcacacgactacttgcagtacaaattttttgcttctctttcgacatgaaatgtacttggtgggttttccttccttttattaaactaaaactgtgtggaaaaggttgatttttcttaatagattctggattccactcacagggagatgggattcctttcttgtccaaacaaagggagttgctctaaagcgagcatcagttaaaatgtaggggaaaatgtattctgtatgtagtgtagataatactttgtgaatggacaacagttacatagtgtcttggtagcaccagccagtgtttcccagcccagagtttactgacttgtaattctctatccaggacatcaggagtgagggatggaaaaggggataaaaggcctggagccacactctatatggctgaggaaggagctagggaaagagatagacacaatggggtgaaaacaattttgccgcccctgcctggaaactgctggtggggaaatgatggtgaagggtgtttgcttgaactcatgagacggtccaaatctcataaactagccttctcaaaatcccagcaatataaagcactgtttttcttcagtcgtttaaataaacttgtaaatacattgaagtttacatttccatgtgctgttgatcaacggcgccacctgtgtttgctgagactggtctctgagagagttttatgtcgatcgaggcctgttgctcattaagctgagtgcagacgtccttaatccctgcagatagtgggatgaaagcaagttct

SEQ ID NO: 228 - DNA, 4689 bp, Homo sapiens
aggcagaacgctgttacctcactggatagaagaaagctttccaagccccaggagctgtgccacccaaatccagaggaagcaaggaggagggaggtggggtagggaggagtgtaggatgccttgtttccttctatagaggtggtgtaagagtggggaacagggccagcaagacagaccaccagccagaaatctctgatatcaacctcatgtcccccacccctcaccccatcttgtcacatctggccctgaccccactggaccaaaaggggcagcactggtgcccaccatacacacaggtgtctcatgtgactcacagtgctaaagactcatgcttgacagcttggtaaggtcaactctgtagccctgcagacaaaagctggttaggtttgggtttgatactttagatgggaaagtgaggggcttgagaaagtgggtgggaggagggaaggattttttaggagccttaatcagaaaaggactagatttgtttaagaagaaaaatgaaaccagacccagatcaatattttaggatactagatgttttaatgggttcagaatccagtttgtaggaagattttttaatggttttggttgctcctcccccagctgccaccccccaccttacccttattcctctctgtccacattttctgccccaccttacttctcctccctgacagacatccagcccctagtaatacttaaggcactatggcacttagctttgaagtgacacgaccctgtcttccttccgcccgctggtgggtaaccagtgccttccctgtaacggtaatgctgcagaactgcaaccttttgtacctttctttggggaatggggtgggggtgggagaggaggtagatggggaagaaataccccagacccaacaaacctccagccagaaagccagctattttgcatttgaaggaattgacttcctcattcattgagctttttaaaagatcacaacctcaagatggttaaaatccattgacatttgcactttcaaacatgacaagtctcggagctgctgagatgacaggcccctggcctttccacttatgcctccttttctccttattcctcctacctcccgccccgcccaggtctggagttactttcatagcatttttcactcttggcttcttttctcccttgatggtcaagtctcttatgtttcaatatttcttaactggggtgtcttataacaaaaaactcttaggtctaaaatgagaaaaaagagagaaaacaaaatgttatttttataccataacttgagtgtattgccaaaatttggaaatccttcccatgcctgatgagtttatatcccagaaacattgagccatcagaatgaactgtgtacctgatttgttctctgacctggctaggtagggagggggtggttatcgccccaagatggggtccaggctccatccttcctctgtgcagataatacctttttcttgctatagcctccctcctctgcactgtcctgcactctttcttgcaagtgcatctttttccttcccctggactgtcctctgaccctttggctcatcctagattgcagtgtgtcctgtggacaggctggggaattttgctgctccctattgcttctgtttacaaaaatgaatttttcctggtttcccactagggcatgtgggtgggtggcatggacttttttttttttttttttttgtcttgagacatggggtttggctgtcttgcaggactggagaaggtggtggttctagcttggtctctgttggccttgaagcaagcatcccccctgccctttttccttgactgttcatttttttcctgccccactgcttgggatggggagttgcaacttcagtgtggaatttcctctttgaggagcctgggcttggatctatcctgatctggtgatgaagccatgattactttagacctagcccaggcttggaggccagctggaggaagaagggtctaaatcctggcctgtagagttagaactaccatttcctccccttagctgcccttgtatgacccggatttgctatgcaaaacaatctatcccaggttctgttctggttggctacattgttcagcaactcacaaaacgtagcacaaacattcattatggagaaagcatcaggactgttgagtaactcctcctttacttttttcctgctggctacagcatggggtgccctataggcacaagcccagctgaagaacagaatggagggctctgggaggaggcagctcactggagagcctacattccttacacaagtgcctaaagagagtgatgctaacactccatctgccctgtccattgccttcatatacagtctacttcgtgttctgtcaccctttggggaggggagttctcctgggacagtgggctctgcatgttctccacttggatacattttggggctaggatcagggcactattcctggagggtccagtcattcaccagcatttgcaaatgtccatagggagcaggtggcagcctctactcccagcaacaagtttgtgttctctccttttctctctttgcctcactctctccagttggttttcagctggggcttgaaatgcatttttagccctttgacgtggcttatgccattcaagaaataaaaagcaagagaatcagctttgggcaatgacaagaaatgagttcttactctgatttttttgtaaaaagataatttttgagacttgaaaaataccccgaccttgagattattcctgtttgaaaggtggtgcatgcagatggagaagtggtgttggcagcaagctttggctcatgtggatttggtttaagtggtgcttcttacccaagcttcaaggaagtgcttgggggacccccagcctcatcctcttagttgggtctcttgttccctttgtaccactgttttgccttccttttcctcttctctctttgcctggcttcctttcccttttcttctattcactctgcttgcttgctggccggcctgcctgcctgcctgcctgcctgcctgcctgtctgcctatgtgatgatgaaatctctgcatggctgcaatgatcccactgttagctggcagggtcaggcttagctccttgactgcagaagaccaagaacctgttccccaagcccagagatgtccacctgggctggactgccctcaagcttatactagagaagagcaactgacctgcccaacttgtgtgaagtcaggagggtttctggcattttccacacctgtccactccttggagctggtttctctcattgctttttctaaatctggttctttttctctttacctggggcctggcttttctgagattgtcttagggttgagctatttgggtatcctgggtttgagtgttaggggatggacataaaggaaaaagagtgatgagaagagaatggagagaatttgaataaaaggtgggaaaggagagcactgttctttgattgtttatccagtccaacctgatccattagggatcgaggtgctacactggcctccagggataagcctggggctactgttgctgggaacttaggcttaacataaagccgaagaaggtacctagaaatttgaaacttccctaaaaagctcctaatgcccacctgctagatagcttctctgtggcctcctatttagctaagcagcagtgtttttggatactttttttttctgtttgtgaataaggccagcactcaagatgggcagccaagggtgcactgactattagctggcccataggatatctgtaaggctggtgggacagttttggacctggaatcatgtgtaactaacaaggttggacgtttcttccccatcagggtagaaaaatcatctcaaactagccaaaaggcagttttggaaactacattgggggacgttatttttatttatatatggggcctaggccaatccaggatggtagctggaataccttccttcttaaaatctgatcatggcagggatatgcagggcactttttactatttggccttctaagcagattgggaaggaggtattttctggttttcgctttcctccgacttaataggacttgccttctccctgggcagggagagaggctgggttggtgctctcccttactctactcatactgacttagagcctctggctgctgtttgggcatccaagaaagggaggggaaggaatgagctaaaaacaaaacagaatgaggtgggaaagggagattttcttctttacagaggaaaataggaaaccctccaagaattgtgcaagtaaagacatttgttgaatgcactgagtcccttggtgtagtagcaataaggaaaaatgaaattactttcctgtgcacacagtccagcctaattggtatgtgatgttgcacttagcagccatgtggtgggcatgtgtgactactctggttttcactttagtttctaaactttttatccctctcaagtccagcatggatggggaaatgtctctggatccccacagctgtgtacttgtttgcatttgtttccctttgagatttgtgtttgtgtcctgctttgagctgtaccttgtccagtccattgtgaaattatcccagcagctgtaatgtacagttccttctgaagcaagcaacatcagcagcagcagcagcagcagcacaattctgtgttttataaagacaacagtggcttctatttct

SEQ ID NO: 229 - DNA, 716 bp, Homo sapiens
atagtccaagtatattctctgagaggaagtactgaaagatgaattgacatacaacgtatgtttccagtgaagtcaattgagtaaggacacctccagccatacagaaaccaacactgtgtgggggccaaggtctgatccttatgttaatacaaggaagattgtttacttcatcaaggaacacagcatcattatgcaatatgaaaccagccaactgctttttgtgcggtctcctataggaagtatcgcaattgttttgttttcatttcttgtagtctaacccttttaatgcctttacctcaagttgcttggcagcacaactatctttgcaaaaaaaagtaaagaaaaagtaaatgatggtttaaaaaatacacaccttcatgaataatcaaagtgatttttcagaattatgtgtgcaaaaaattaatgtgcattcatatattcttgtaaaaggtgtctgtgtatttttaaaatatatacatccatacttcatatgcatatatatctagatctggattgataatagatatatatgtgtctgttatatattttagagttcattccattggggaattttctttcccttttattctacccccactaccgcctttatttctctatttcccttgccttcatcacctacatttttttcccagtcctaccagtgacattcaaatgttgatgtatctggttcgtttgaatataaaatatggcaaact

SEQ ID NO: 230 - DNA, 88 bp, Homo sapiens
ccttggaggactgcaggaggagggcagggttgggtgggcaatggaaggagggaggagagaaatgaatggaataaatgcagaggatctc

SEQ ID NO: 231 - DNA, 545 bp, Homo sapiens
tgagggctacagctgttggggctctgccaggtcccctgggaccaactacagctccaatcagaaaccctgcgcttccttgagtgtggcttcccacttttcctgcattgtggagctgactgagtacaccggtgaggctggggtctctgcaggggaggtcactggaacagcgagcaagggactggtgcctcgctggtgctgggtctctggtttgctgcagagccgtaggacactcctggctcctcagtaggacagacagacgcaggcgggtttattttggaggggtacttgtggcattttcctgtattgtcttggacatgggatgtggggaggtggaaatgatgagcagtagcatcatttctccctgttgggttttagccagtttgccagcaagcgcatcctagcagggtccccgagcagcaggttgtgtggatgaagggacaggcacttgcatccagctgatctaggtcacacctggctcttggctgccatgtggcttattaacagcttccagtggaagtcgcaataaacagtttttggtaaatctc

SEQ ID NO: 232 - DNA, 577 bp, Homo sapiens
gagggtttgccttggatccgggcacagttgtgagggctcctctgcatcacctaccaggatgtctggaggagaaaaagacagaacaaagatggaagtggcctgggcccctgggggtgggtcctctctgttgtttttaatctgcaccttatagactgatgtctctttggccggagccagatctgcccctcagtgcattcgtgtgctcgcacgcgcagacatcccttctcccccatacacacatatacactcacagcctctctggcctcttcccttggggaggggccacctgtagtatttgccttgatttggtggggtacagtggatgtgaatactgtaaatagcttgtgctcagactcctctgcgtggagagggtgggtgcaggaggcagaccctccccccaaagccccctggggagatcttcctctctctatttaactgtaactgagggggatcccaggtctggggatgggggacaccttgggccacaggatactggttgcttcaggggtacccatgccccctgccctcgcctggaatcagtgttactgcatctgattaaatgtctccagaaataaag

SEQ ID NO: 233 - DNA, 539 bp, Homo sapiens
gggccacccttgacgggattcctgcccaggggagagaggcgctgggaagatggctggtgaggagcttaacagaggaacctcaagaagattctgaaaatcctacccccaccccccaccagccgcacagattgtactaccgcgagaggcatccctggcgctgtctcccactggacagaggaggctggccatggggcccaggggtcaggcccagcttttgagcagaatacaacgcattgggctttagctgtttttctcatttgttggtgtgtggggtgggggcaggggtagggcgggagagcgatgcttggatttttgtttcctattagaaaccaacagttttgttctaatttcatttcatttggagctaagatgactaatttgatgattttcgatctcttttcccctgtcctgattttaaaagccccctcctttttttttttttttttctttttttaggcatatgtagtaatattagaaacatttaatttgggaaactttgattcttgaaagagaaaacaaaagcatgtgaataaactttg

SEQ ID NO: 234 - DNA, 944 bp, Homo sapiens
atcaaataaacggagtcttggagagattgaattgactttaccaaaaccgtcaggatttgaatctgctgctctctgatcctaaagcctgagctagaaaccaccgctccccctcctaggaggccccttccaggcaaagctgcttctcttccccagacccatgctggactggaagggaggggactgtccacccctccttccagggcccaggcttgaatgtgtcccctggccgagctctggtctagtcacgcagggttaatgattgttggactccagctttgagccagggcccggccagcagtctcgcagaccccagcgtggggcctctgtgcctgcgagctcctgcgctcttgtgcaccaagcagcttgtggcggcttgtggcagatcccaccccatcccgtcccccaccccaaggctaaacctgcctgtgctcacacacgcatttcccacctgggcttgtgcatgcaatgtggtgtgtgatcagtgtgtgtggcggggggcttccttctgccctgtctccacggggcccccccatcatggacctcccctcccttgctggagctagaatgagggggaggccgccttggcgggagccttagagaggaggaggaaagggggagaggaaattgcagacatagctgaaggcgctgcctgaggcctgtgggccagcgaccctctccctgtccgggctgcagacccctactcccccagtcccgagactgggttcaagtagagggcagatctagatgggggaggactaggactgactcctatggggatggaaaagggactcctgggtgtctttgtgactgtttagtgtgttctgtgaatgtgcgggcaggtatttttgcccacatctgtatatttgtctattaatgtgatgtatttgagtattgttgtgggggcgggtatgtctgtatataaatctgtgcagccactagtcaac

SEQ ID NO: 235 - DNA, 764 bp, Homo sapiens
gctgcctgtggctggcaagggcagcacccccagcctccaagggccgtcaggctgggctttgggccattgagcagcccattcccagccctgaggcccaccccagaggctggacagagggaggattcaagtcgggaaggaaacccacaaaccaaagatactgtaggattggttctggcccatgcagcacctctagctgtctgcctcagtgggtcagaagcgatcaccctgttgatacacattgtatctctgtagtttaaggagacgctgccggtaacggcgtcggtccgtggctgaggcccaaaccgtcttttctctcagagggtggggagggaggtgggggcagcagaggcctgggctgggtgccctgtgcacgccaccccacttccgccctacccctgggacgttggccttggctggctagttgggcaccgtgtgcctgccctccaagggcctcctctacgccaatgaggcctcatctgtgctctcgctgggcacgtggcttcatgtcagtaagcaagatgcttcttaataacccaccttctgccccactctattccttatcctgctgcccctgtaggggtcaagggccctccgtctacaccctcttcttctcctccatcctttattcagagtcatctcgcccttccccatgggtgggggaacctgtgtttgtttgtgtgcacatgtaaattttaaatattttaagcagaaagtccttacctcctgtaacacatcaataaagtacaatcattgtgagccctttc

SEQ ID NO: 236 - DNA, 1795 bp, Homo sapiens
taatttccacatgattaatttccaacaagacacttgggagttatttactgtgttcctctggcagccaataaaatcatcataagccctttgtaataaaaagctagtttcctgagtgaacaagccataacctcccctaaacaccacctaggtatttgttagaagtcacactattactccaatgtcatcagacacctaaggtctgccagccaggctcctggctgggcaatggaagatggtgtggccctgttagtctccgtgtgtggcttactagccagccttgggaactgccaactcaaattctaagaaagccactgctttctcatcatcactctataccaatacttatttctggccaaatgaatctgcttctctgcccctcaaacttttagttcacaattcatcttctaccttaacttgggcttcttgggcctctggccttccttacttaatgtcttcttttccctactctaatgcatttctaactcactttggagctttggttttctaatgtattatccccacttgccagtcaactggaccccttcctcctcggtttcagactgcctacattaggaaacaatggcagtcaaacccatggctttggagaaagtaaatgtttgccagaaaggaatactagtcacagtggcctttgtgagttgtctgcaactcagctcttcccccagcacagatctgttccccttatcctgcagaaaatcaagccctgactctgcactccccgaagtagtgatgttaattaacaactgaagaggtaactaaatctcacatgcaggtctaatgactaataattggagtacggctgctagacaactgcattttagtatttctcttccattctcctggttttgtagacccagaagattgaatgagtgacataaatctttagttcggggcaagccagggtgggctagggtggtaagctggaggacttcatccttcagttaggctgcacaagtaacattacctaaaaggcactaacatgctcaggttccccagaaagaggcgtaagaagggcctctccttagcagagcttccacctgccatccgtcttgggttcagtgagcttcaaggctcacaatggaagcactgtcatttccccagaaaagctgtgttccctatgctgaacacaccatacacattctcatctggaatctaaggagcagcttttaccctgatccagtatcctgaggaattttaagcctccactcaaatgacctgcctgtgttgtcatttccatgggaaagaactctttccacgagatctgctagttccaggcctctaagacaggaacgtatgtgccataagtgggtctacttcacagactcaatgaggcagaaattattgtagttttctcctatttcttctgcacccaactttctccttgtatttcaaaggccaggccatgtacactaacgtccttgaaatttgcagttctgtatgcttctattccaaatcattcattaccaataaaaacgaaataccaccctttccattttatagacctcatcccctatttctgtcagacagttatatgacagggtgactgtggaacctcttagttcatccaaagtctacctgaagtgctagactttcagactcttatcactgaaatccttaaggttgaggaggctttatttccctagcactggtgaagggcttcaactgtcaaacctcagaacaaatgcattagggccttagaaatgtcaatggggcaggaagaaaacacaatttctaactgcctgtttttgtataatttaataaaaaccttttaaacatt

SEQ ID NO: 237 - DNA, 1351 bp, Homo sapiens
gacaccaaagttgacaggatggacttttaatgggcacttctgggaccctgaagagacttcttcccttcaggcttattgtttgagtgtgaagttccagagcaaggagccatgttcctctaagggaattcaggaattcagacgtgctagtcccacaccagttaggtagagctgtctgttcaccctcccatcccagctgatcccagtcactgcttgctggggccatgccatggaagcttcccatcagtctcccagctgaatcctccctgctctctgagctgctgccttttgcctcctgcaactcaacatcctcttcaccctgccctgcctgcagttgagggggcgaagaagaaccctgtgttctcaggaagactgcctccaccaccgctacccagagaacctctgcatctggcatttctgctctctatgcttgagaccgggaggtttaggctcagataagtgagctctgggccatgagagggtaggtccagaaggtggggggaactgtacagatcagcagagcaggacagttggcagcagtgacctcagtagggaacatgtccgtctaccctctcgcactcatgacacctccccctaccagccctcctcttcctcctcctcctcctcctgtgggaggtggtcagtgggacttagggatctttcacctgctgtgcccagtagttctgaagtctgcttgtggagcagtgttttatgtttatccctgtttactgaagaccaaatactggtttggagacaacttccatgtcttgctcttctacctccctagttagtggaaatttggataagggaactgtagggcccagattctggaggttttatgtcattggccacagaataactgtctctaagctatccatggtccagtggtccctgccaagtctgtagacttcagagagcacttctctcttatggggttcatgggaacaggggtgggtgtgacttgcttggtggcctcattccatgtgtgcctgtgcctggggcatggactttgttaagcagagtcagcagtgaggtcctcattctccagccagcctctctgccctggagaatcatgtgctatgttctaagaatttgagaactagagtcctcatccccaggcttgaaggcacatggctttctcatgtagggctctctgtggtatttgttattattttgcaacaagaccattttagtaaaacagtcctgttcaagttgtattcttttaagttcttttattctcctttccctgagatttttgtatatattgttctgagtaatggtatctttgagctgattgttctaatcagagctggtacctactttcaataaattctggttttgtgttttcttttgt

SEQ ID NO: 238 - DNA, 1689 bp, Homo sapiens
agaacttttgtgatgccaacaacctcatgttcatccccagtgtggggcctggctacatagacaccagcattcggccctggaacaaccacaatacgcgcaacagggtcaatggcaagtactatgagacggccctgcaggcggccctgacagtgaggcccgagatcgtttccattacctccttcaatgagtggcacgagggcacccagattgagaaggccattcccaagaagacacccacccgcctgtatttggactacctgcctcaccagcccagcctgtacctggagctgacacgccgctgggcggagcacttcatcaaagagaaggagcagtggctcatgtgaggggcctgtaaatgggcgtgaggtgctgatgtccttgccttgctggaagatgtcaccatgtggggttcagctgaggttgtagccactcactcgttcccaggtcagaggtcagcagatgggtgtttctgggtgggccgtcaggcatgggcctgtgcaacacagagcccgttcctcaggcgagtggtgctgaggtgctctgtggtgatgggaacggcagaggctggcaggtgactgaacttagcccagggcagctccacatcctgggaacactttcatgtaaccccttctagttttgaactctgcagcaggctggtgctgtgtagtggccacccagtcaccacccttggaagggtgtcagggtctgggctcgcatgcaccctgctcccttctgccagcctgcatcctctcctcaggcctccttcccacatcatctgtcttctctaagttagggaaccatatttgagactttcaaaaagggaacttctaggtttaagctcctcccagtagattcctgaacccaattatcaggaaatcatcctgagcactcacaggttcatttaacactcactcatcaagcaccttcctatgtgctaggtgctggggaaaacttgaccaaggaagagttcctgtcctgaagcttccaggacccagctttccttttctggtgtggccttgtagctagtgcctgggcacaggtgtttttctttttgcagttttacctagtgctgggagttcagttctttttcctctagaaaaatacctctgtgctccagagcctaatttttcccagatgcatatttagctctagggagaggactaggaggaaatccccctccctttagctgcctgaactgactgaggcccactcactagagccatgttcagtgctactgtgattagtagtaattaaatatgaactggtattctcaagtaagcattccttttgctctctttaagacctcacagattctgaccttagattctgtgacaaactgatacaggagctgggctggctatggctttaccacaacaagtaggtttgcttaagaaattactaaacaatggctgggcgtggtggctcactcctgtaatcccagcactttgggaggccgagatgggcggatcacgaggtcaggagatcgagaccatcctggctaacagggtgaaaccacgtctctactaaaaatacaaaaaaattagccaggcgtagtggtgggcgcctgtagtcccagctacttgggaggctgaggcaggagaatggcgtgaacccgggaggcggagcttgcagtgagccgagatcacgccactgcactccagcctgggcgacagagcgagactccgtctc

SEQ ID NO: 239 - DNA, 238 bp, Homo sapiens
cagctgggttcactcccacttcatcctggctgaaagcagtgctgtgctttgaaatgcagccaatgaatacccagtctgattacccagatttgggcagaccagcagtgctcgccagagtggtctggcctgctatgggggatccaggtggtgttacatgtccatttcatgttttgggggcttttagccccacaaaacaccttcagtagagccttgattaaaaggaaacctgcagactctc

SEQ ID NO: 240 - DNA, 191 bp, Homo sapiens
cgtgttatagataagccttgtcattctgtatcaaaaatctgttgtcgttttctagtaacttcaaattccattactccaaatggcatggttttccggtttgtaaccataactaaattgtcagtctgacatttaatgtctttctatggacaacattaaatctccctcccttctgtaattgtttttggattgtg

SEQ ID NO: 241 - DNA, 1252 bp, Homo sapiens
agctttgtcacatatctgggtaccaggtttgacctcaagagatggctgctgtacactttttgcaactggtttgatgtcacatttcagctccaactttgcatcctgagaacacttaaacgtttctgcaggtccattttatacaacttgaaagaccgtaaaactttctggttgccacaagcatatctttcttttctgctcatccaataaacagctgtgccctactgtgatagattttccaaacaaaaatacctggagcagcagtttagcaaaatatgccttcagtggcattcaacaaatggagtttccccaagcacagttctgtaagaagtgcgtgtgagagtgtgtgtatatgtgtgtatgtgtattttaagttattatttgtattgtgcaaaaatttttttttgatcttggggattctggctgtgaatttggtgcacgacaattatggtaaaaaaacatttgcttggtctaaagaagatcattaatgttttgtgaccatacaagttgtaacagtggattgtttttatgtgtaggtattgttaaatacagggactgtttccaggcacagaatatgaatcgtaagttaggatggacattagatgtgattatgatgataaagcgaaggtctgcggtcctatatctacagacacgtggtgagaaattagaacaaactggagacgggccattgacacatggactctgcctgggcatgttaggttaattctttgactccaagccttaaaatactcacatggagtcagcgctcacctcattcacacaattatcatagagctccctggacactgaacctctaaagggaaaaggtctaccctggagccaggagcatcagggttggcttgggagcatgagaggtgagcccagggctaggcctgggccaggccccggcagcactgctacttgggaggagccacttcacctttgtattagttattaaaaaatataatttgggctgggcgcagtggctcacgcctgtaatcccagcactttgggagtccgaggcatgcggatcacttgaggtcaggagttcgagaccaccctggccaatatggtgaaaccccatctctactaaaaatacaacaaagttagccgggcgtggtggcaggcgtctgtaatcccagctgcttgggaggctgaggcaggagaatcacttgaaccctggaggtggcggttgcagtgagcacagatcatgccactgcactccagcctgggcaacaaaacgagacttcgtctc

SEQ ID NO: 242 - DNA, 118 bp, Homo sapiens
acagagcagctgctgatgtctggaggctgattttcctgttctctgttctccactggaaaggttgtttacgacaaacctccttgtcaaagtgtgtaaaaataaaggattgctccatcct

SEQ ID NO: 243 - DNA, 1323 bp, Homo sapiens
cactgtctaagcacccccaagccactatccactttgaatcctgctccatacattgggtgtatatttattctgaacgggagaagttatattgttaaaagtgtaaaagaataattgtgttatgaagctgccttattttttttctttttgtaagttactattttcatgtgaatatttatgtagataaaatttgcctcctggtaaccctgtaatggatggggcccagaaatgaaatatttgagaaaaacaagtgaaaaggtcaagatacaaatgtgtattaaaaaaaaaaaagcctattaatagggtttctgcgcggtgcagggttgtaaacctgctttatcttttaggattattcctaaatgcatcttctttataaacttgacttgctatctcagcaagataaattatattaaaaaaataagaatcctgcagtgtttaaggaactctttttttgtaaatcacggacacctcaattagcaagaactgaggggagggctttttccattgtttaatgttttgtgatttttagctaaagagagggaacctcatctaagtaacatttgcacatgatacagcaaaaggagttcattgcaatactgtctttggatattgtttcagtactgggtgtttaaaggacaaatagctgctagaattcaggggtaaatgtaagtgttcagaaaacgtcagaacatttggggttttaaactgatttgttgctccctatccagcctagacaccagtaactcttgtgttcaccaggacccagacccttggcaagggataggctcgttggtgacattgtgaatttcagatttgttttatccactttttttgctatttatttaaatggtcgatcaacttcccacaaactgaggaatgaattccacgagcctgttctgaaaatgtggacgtaagacaaacacgtgctcgtcctttaatggagttcaccagcacacttgttaaccagtcctgtttgctttcgtctttttttgtgcgtaataaagtcaactgaccaagtgaccatgaaaaggggctgtctggggctcctgttttttagctgctgttcttcagctccgaccatgttgctgtgtgattatctcaattggttttaattgaggcagaaactgaagctctaccaatgaactgtttagaaacaagacacacttttgtattaaaattgcttgcagtaacaaatattttgtatttcctgattttcttttcaactattaccttatctataaatgttaccctggggtataatcatgttgtaggtacttaaatgcattccgcaaatcaaaatatcttgatggataaattatagagctt

SEQ ID NO: 244 - DNA, 4071 bp, Homo sapiens
gtcagcccgcccagccctactgcagccacccttctcatctggatcgggccctgcagaggcagaaaacccttaaatgctgtcacagctcaagcaggagtgtcaggggccctcactctcggtgcctacttcctgtcaggcttctggtcctttctcggtacctctgtgcccctcccctggggtttgtggctgtcactctgcccgacactttggtggcctaaggcacacagcagcctcagagcctgtgctgactgcactgtctggagtcagcacagaagtcctatcttaggacctgtcagactgtggctggccccggatggtctgaggttggctgacccgagcttttctccattcaccagagggtttaggtgtgaggagaagggctctgcctcttcccaggtacaacactggccatttctgggcaaaattggacacgcttatgttctcagcacagtgtgttctgggattcttctcatttggtccagggtgcagttagcatattagaaaaagaataagctggacatccccacgaagccactggggattttttttttttttttccagatagagtctcactctgtcacccaggctggagtgcagtggtgcaatcctggctcactgcaacctctgcctcccaggttcaagcaattctcgtgcctcagcctcctgagtagctgggattacaggggcccaccaccacgcccagctcattcttgtatttttagtagagacggggtttcaccatatcggccaggctggtcttgaactcctgacctcaggtgatccacccgcccggcctcccaaagtgttgggatgacaggcatgagccaccgtgcctggccactggggatattttatgtcatgtgtattcccttgccctgggcctgccccttctcctgcctgggaaagaggtatgactcccacaggagcaaagaatcctgggggcttccagttccctccaccatctctaccatgctgacccatttggggctcagcactgagacagaggcaagaccagcagctccaacatgtagtgtaggctggcacagagcaaatgcccccgcagcctgctccccttgcccatggctcatgtcagtaatcaacctacgtacctttcccactgaaccaggacagggcctccaggcctcagcacagaactgcagacagccaccaccaggcattgtcaataagacctcagttccccctcctgccccactgcagagcaatccattccatccaaagcagggtgactggcagtctccggccaggcatggggcaagggtggggactgccagtgtttgcttgtgtctaggagttatgaacaagctggccaccaaaattggcgtcaccctgggtgcccaccagcgctgtcctgtgtcttgggtctgtgagtcaaagaaaaggtccctgtcccagggagtgacaggcagtaattaggctgagttgggtggggaggtttgtctcggcctccactgttcccggaaaccgctgttctccttggaacagccactgggagttggagtgtttatttgatttctgacttgctaagcctgtaatttacctgctggaacagacagagtccagctgcccaaaccgtgtcattaaaagcagatcctgggcccgccccatccacaggcacagcctggcagagtggttccacctccccatgggcccaaggatgcgcctctctggagttcacgtgctgcacccccagggaggggcctggggagagctggtccagcagcaggggtggaggctggggccacactgcgggacagcagcccctccacctggaccagggagggcctccatgtgcaagcgcagaggaagagaccctctcatgtacataaagggtgggcccaggctgtctggaagatggtgagttccccactagtctaaggcttcaagctcagctagcagagattggaagaggcaatggcctgagtgttaggagacaggtattctggttccaactcagccactgacttggtgtcaggacaagtcccctttcttattcacgcttcagtttctcatctgcaacatgaggacataggactctttaattccaaaggctcttccaacccagagaacccatctgcccccatgaccttctcccagagcttgagacatggcctgagccccctgctgccataggacttggggcctatctgccattgcaggacctgatttaacagctctcttcttccaatactgggcagtagagtttcggaaactgacaaatgtgtggtctcttcagtgcccagtgtgtaacctggcatggtttgggtgtgctaggagtttgtgaaatgaatgttttcaagacgcaaacgctgctatgcccatcaggtgtgcacagcaggcctgaggatcatgatgagactccctttttatgcagcaaagcacaaagtgtgacagtcgtggccttcctggtggccagacttctagcaactttagccacccaccaaatgacatcacatacagaaggcctcagaaagggaggaggtcgtaaggacacacagctgatgaagggtcagtgctcagctatcaaggtcatcttctggcctggttgcctcccacagcccaggatgcattcaaggctgcacatcaggagcataaataagggtggtcagctcaggcccactggctgcaacaagtagccactgacagggagtctggggccatttggtgcagaacaacccccaacccagtggccatcttcacaactgcagcacagtgctggccctaatgccaggtgagcgtgcaaagtcctgtttctttgtctttacatagggaccgggcgatgcgctttagagaaattccctattatttcacaggaaaggaggctgtgaaaaggagagggcaggttttggagccaagtcgacctggcatcaggtcctggctgcctttttttttttttttttaaagacatacatggtcttgctttgtcgcccaggctggagtgcagtggcagtgtcatggctcactgcagcctcaacctgctgggctcaagcaatcctcccacttcagcccgagttgctgggatgacaggcacacgccaccatacccagctaatttttaaattttttatagaaaccaggtctcactatgttgcccaggccggtcttaaactttgcccaggccagtcttgaactcctgagctcaagcaatcctcctgcctcagcctcccaaagtgctaggattacaggcgtgagccacttacccggcctctgcctcttgttaatttgaccacatcatgtacctgctgtgcccgttccttcctccgtagaagagggtgctggtcctgcccttttgaggcctccatgagggccaaatgtgccatgggacacttagtgccatgcctgcgcagacctgtggaataaacagcaattctgagcaggctcattttaaagggacttgcaaatttgggcgttccttgtgtgccttcctcataaaacccactcctcccagaatatgcttagaggtgctgctgtatttacctgagagctatgcttttcatcaaaaacctaaacgtgatcatctcttggatgaggtgtggccctgcacactcgcctgctcgtggaaggagtctgggccagcagtgacccacgcgctagggtctctgctgaggaagtggcaggtgtgcggccctgccctggccccgtagtgagtgtggggcccacctgtgccctcatgggcagctgaagggggagctttctaccccaggttcctttccttactgaaaagtcttgagcaaacagttgccgctctccaccccctgctttttaaaaaaaattttttctcacgtaagaaaatgttatctgtgtgctggggaaaattttgaaaataacaaaaaccagaatacaaacacccataatcaatcacagagataaccactgttcataattccttccagtcttcttacttggcacatatacatttgtctttctttatatatgacatatggatattttacaaagttaggatcctactctatgcactgcttggtgatcggatctattcaatgtacaaaatattttgaaagtttctgtgattaaatgttctttgaaaacataa

SEQ ID NO: 245 - DNA, 351 bp, Homo sapiens
ggcggcactctctctgcttccccctccgctcttgaccctgcatatccaggaaggaactgccagcctcagaggaggcagcaccgagggtgcctgtttgaagcaagcagcatttgggatatgtgcccttcctcagggtctgcttggagcagctcctctgcaggcacagcctggactattcccaggcacagctgtgggcccaggagccagctcaggtgctcccctccaccatgggcaggctgtgcaaaaagccactggcttttctcagcatttgctgctgggcctctcctgggactaccagtgtggctcttacgtgttttctttgctaaaataaaccctagttcttatattgct

SEQ ID NO: 246 - DNA, 171 bp, Homo sapiens
agctcgtgccgacggcagacctgccggccgtgggagccgtggacgtcatctgcagggacagaaggggcaaggtcttttctggggttcctactgtgtgcagctactatggggtaccagggtgggggatgccctgatgagcacatttgtcaaataaatgaatgacaggaaacc

SEQ ID NO: 247 - DNA, 387 bp, Homo sapiens
ggcccgccacgttgcccgaagccaccatgcagaaggccacagaagggatcaggacctgtctgccggcttgctgagcagctggactgcaggtgctaggaagggaactgaagactcaaggaggtggcccaggacacttgctgtgctcactgtggggccggctgctctgtggcctcctgcctcccctctgcctgcctgtggggccaagccctggggctgccactgtgaatatgccaaggactgatcgggcctagcccggaacactaatgtagaaacctttttttttacagagcctaattaataacttaatgactgtgtacatagcaatgtgtgtgtatgtatatgtctgtgagctattaatgttattaattttcataaaagctggaaagc

SEQ ID NO: 248 - DNA, 1115 bp, Homo sapiens
gcgaagtgccactgggttctttgccctcccttcacaccatgggataaatctgtatcaagacggttcttttctagatttcctctacctttttgctcttaaaactgcttctctgctctgagaagcacagctacctgccttcactgaaatatacctcaggctgaaatttggggtgggatagcaggtcagttgatcttctgcaggaaggtgcagcttttccatatcagctcaaccacgccgccagtccattcttaaggaactgccgactaggactgatgatgcattttagctttgagcttttgggggttattctaccaacaaacagtccattggaaagaaaacagtccctggaattaacagatcagaatgttcacactggttaatctttttttaacaatgagcatgaaggtagcagaagctggtgtgtttccagatggttcttctaaccaaactaatttttcactgttgacaagcgaggcaagggttgcactggaccaaaggctgaggcttggccatctagcattccatacaaaattgtttcctataagcattccttttattctctattctatcctgggtctgcctcaaccgtgagataggagagtctctggtactagctgctgtagcagtgcccttcatccagggcagttaatggagtcttggaccctttctttctctgggatccctgcccagcaccttcctatagagatgactttaaaaggaaaaaaaaaaaaaaaaaaacccacatgatttcaaggagtctggcattcctgaatccttcttccctgccaggtgcctgtcacctgtcttcactgcctccttttccctgtcatgctcatcagcttatggcttctgtctaagcacctgaacagaggactgaaacctccactgcaggctggttttaggtcttgaattatgtaagaatcttgcacagcactgctaatgtaaatttcagttgtttttccctctaggacaaacacttaccaaaatatgcaacttttttttggtgggaagagagattgtcctgtgatttctacccatttcctgaggcctgtggaaataaacctttatgtacttaaagttatacagaaaatagaataaagttaataccaaacttg

SEQ ID NO: 249 - DNA, 472 bp, Homo sapiens
gtagcaattttgttttagtaacagactggctccaacactgcaacatggggacatttgccaactcgaacaaaggctgagaagcagccacaccgttgtttagggtagaataggctgtgtatttacatgaatgtataatatctatgtcagcagtattggctgagtccattagctctccagttggtttaatgattgggtttatttttgtttgtttgtttattaaaaaaatggaactgtacacttgtttggtgctaattaatacatcaaaatatactggggcttcctttttcaaattaagtgtgcatgattgtatatggaacaaatactaaggtcccagggtgggagggctagggaaagggatatggagttcttacttgacttgaatgtgcacctgagggtgctttgtgtaatatattgtacactacagcatcttatattttttgagttgagtttcaataaattacaatttttcacc

SEQ ID NO: 250 - DNA, 97 bp, Homo sapiens
aatgtgatggactccaatcttttccaggaaagcactgtttccctcatgtgtgcagtggtgtatcaataaagatagagaacgctattgaaattaccgt

SEQ ID NO: 251 - DNA, 1515 bp, Homo sapiens
gatgtccaggatctgtgactgaagacatttctgattatttctgtcctggcagcatgttccagctcttgatgtttttaaacttttttttagaagaaaaattaagtacagaaaagcccagatttaaatacatttaatatgtcattttaaaaatgattttaataattcatttcttaaaacactgaatgaattttgaagcttaatgtttttaaaggcatagttttatctttgacatctaatttaccatcaagttgtaaaattatttggaaaaatacagaactcgttttatttgtatacttatatggaatctgcatgtgaggtgtttgagggcatatgtttgaaagagggagcatcaccacaggaatcctttctgtgaggtggaaacagtggtcctgaatcattgtgctcacacctaacttgaaatctggtcttactttcatgctgttatgatttcacctggtgaatcagtgttttaaataagaaaggtaatagttggtaaggccaatgttatttaaatgaaagtagttagaaaaatgctctcctattctaccaaatttttaatttctttcttccctttcttgctacacagtgatcaagagtttctcatagtgctttgaagttagaaattatgtataggatattttaaatcattgagttttgtggggtttttttgtttgtttgtttcttttgttttttggaaaatccgtgtctttatctttttttcccacgtggtagatatgatcccattggaggtaaattgtagcttcttctcattcatgcagtaaataatacatcctttcactcagcagagatggccatattaaacacgttttgctatgttaaaagtggcagaacaggaaagacgaattaaaaataacattttttaagcgacataaggatgaaatactgatgaatctctgtgacattacagggaaaaaaatatagttttctatctctttcaagggcagaagagttttcatttttatttttgtaattttatctgtaagtcataaatattacttaatcaggcctgattctacttttgaaaattacagttcttgaaatgcagataatgtttactttgaaaacaaatgtcatgaatgatttccagtttttaaagctatatgtttcactgcttcatatctctgtccactttctgaatgagaacttattttgtgcctagagctctcactcactgataatgcttattaccttctgggcatttattccaaagtgggatcaactgtacgcctttggtatctgaccataaagtcttttgctccgctgacatttgggtgatgtcttcacatggaaatataataaaaataaaaatctagtttaatactgcattatttattttcctaaggctaaagaggagcagtcctatgcttttattcagcatcctttatctgtgacttcatgctctgataactgcctttccttccttctgtgcctttgaatacaaatttcagttctgcaaaagtgaaacattaaacattgccaacgcaaatgtatgta

SEQ ID NO: 252 - DNA, 1219 bp, Homo sapiens
aaacaaaacacctgtatggctgccattctcttcagccctcgctctcccctttccacagcctccacccctgacccccatcctcttttcctacctctctgtttggtttagaaattgctcaataagtcatttggggtttggcatcctgcccagccacttcccaaacatgaagacctctctgttgctttatgttgtacatgccccatagccatcccaacgtcctccccagtcctctcctggcaccagcaccttagaagttgttggcagaaggcacttaaactgtgggagaagtgtgcacacctttgagtcccttccctcaaggttaaagctcctgtcagactctcagaagggtctgtgggtgttgtatattaggcaaacaggggaaagcttagaggtccttctatatgtgttaataagctgtttctaagtgtttaaatttgaaaagcatcatgttctcatgatttatgggaatgaagcaagtactgaaatcaaattaaatactccctgggtcctgggtcagtttgaccctagccctggggtgaggcaagccccctcctatgaggatgagcaaaaatactactctcttcgccctgagttgctttctggatctggggcttcaggacttgctgcttcagtcagcctttattagcaccaaagactttatgaagatcccacacacagacacacatcccttcccgcctcccccctgccttcagtaggatctggctccgtggctggaggaccaacccctatagtgggaatgcagagcttaacgtgtactgcttgtgtgtgtgcgtgagtgtgtgtgtgtgtatgagtgtgtgttccgcctcccaccctctccccatctgctctgggtatttttgtttttgtttagttttaggtttacaacagagaggaattaatttatcagcagcctaaaactgttgtgtttttcttatggtttaaaaaacgccatgtcattgataactccctttctcccttcccttctcccggtctgctgatcactctttcatgcctgtgtatccagggtgctctgtttccccaccgttcccaggtgtacgaggcagagggccgggacagctttcctctcagtcattgttcaccccacttgaaaattcagacaagaaaactttgcttaaaagatttcatgtgtgggaaccacagttcctggctgcctttctcctgtgtatgtgtaaattccttaataaatattgcaggg

SEQ ID NO: 253 - DNA, 91 bp, Homo sapiens
aatatactaaacatcaaagaatctatgttggagcacaagattctaaatcagtggttccctgatccctcaaaaatccatttgtttttggatt

SEQ ID NO: 254 - DNA, 283 bp, Homo sapiens
aaacagatatttgacttgagaacaaaagccaagtgtaaattggtgatttagagtgctttaaaatttcaggactcagatatgaggaattgatgtaatgatgccaacttttaatttttcccattgtaaataaacattacattgacaggtattgactactaacacctctaaaaagtacttaagattaaaatctggtccttaaaattaaatgaattcagcattatgaaaaattcataacagtttttttctgatttcatggtggattaataaattattcttcatgggt

SEQ ID NO: 255 - DNA, 874 bp, Homo sapiens
atagaaggtatgctttcaagaatgttgatccttcctgctcctgttgtacctaagcaaaagaggaccagtctctgagcttggcttttatggagagtgttcttattttggttcttttttttatttccacaacctctaaccacattcagtccaggaccaaggctcagggatgagtgggagagatgggttatactgtccctggagcttcatcatgattgcctgagaagacagatgctcatcatggctggaatgaaggtatccttcagtaaactttgctttcctaagaaaattcttcagtttctgataagtcatccctatttttatcttgatcaaggctttctacagttacataataaaatgaaatgctgtccaggacagttgaactgatggttttttcataactgcagtccttcaaagatgaccaccatatatagttgtgtacgtgttattccaagcctttaaatatatacataaacatattttggaatcagaatgagcagaccaaaacataaacaataaatattctcaaagagacaagggaagatgaagtagaaacaggaagtcataaatattagatacgaaaaacataatacatggctgggtgcggtggcacatgcctgtaatcccagcactttgggaagctgagatgggtggatcacctgagctcaggagttcaagagcaacctgaccaatacggtgaaagcccgtctctactaaaaatacaaaaattagcctggggtggtggcgtgcgcctgtagtcccagctacttgggaggctgagagaggagaatagcttgaacctgagaggcagaggttacagtgagctgagatcatgccactgcactccagcctgggcaacagagtgagactctgtctt

SEQ ID NO: 256 - DNA, 707 bp, Homo sapiens
tattcactttatgaatatgagaaggccttattaaatatttgctaaatcttattaaatactaaagaattcatggtgagaagtctacaatttaaatgaatttggaagagtagattcccataaaaaacaaccaatgccaatcatgttctggaagtgataataaactttttacagaaaatatgacagaaaacaactataaataatagagcataaagcttggaaagtaagcataacttaaaaaatcaaagaaccagtgaaaactacatttgccattcctgacttttaatttttataataaaataattatgcaagtgtgagtttaaaatatatgcttatacattatattaaagtatgcctattaacagtttctgcagtaaataacattttttcttccagtctcaacatacataattaatcaagtgagaaaatgtgttttaatatgtcatatgaatttcagtgatattttcatccatttgctggcacttttaatgggcatgacagtgtttctgaatctgagtctcctttaattatacaagtgaagacttcttattaaaattaatataaagatattttcctatgtatgtaaataccagaacaaaaaacaagacactaattgaggagagaaaggcacttgtattctgtattacagtaagtattcagttgaggaaaagaattatttaaatatgtaaataaataatttgcacttcaaa

SEQ ID NO: 257 - DNA, 773 bp, Homo sapiens
gggcctgagctggcaaggccaaggacacccaacacaatttttgccatacagccccaggcaatgggcacagccttcctccccagaggacccggccgacctcagcgcctcctgcaggctaggacactggtgcactacaccccatgcctgggggccgagattctccagcagaaagatgcaatattttttgtttcctttttttccatttttttctctaaggaatcaatatttcaatatgttgagtgtgtgtccaatgctatgaaattaaaatattaaataacatatttatggcattttcttgaagagtgtggttgaagaaatatttctccttttgtttttcttttttttttgtttgttactgccacttctttttaggagcaaatctccccaggggtgtacggtatttcttgactctgggaacagctgctacccccaagacttgccacgttgttctgccctcagatggaattaggtgaatgtgtgtagctgctttttcactcgtggtcctctccccatcccttgctctgaccccagagctctgtgtatttgcatccagaggccatggaaacattctttgcatttaagagacagatttattccctgtggagagtgggtggattcattgccacactcttttctcccagggacccaggaaactaggactttgtgtgtttgctgcccacctcccttttattttttaaatgcattaaaaactgtgctagtctcctttgcatggacttcaagctgcatgaaatgcaataaatctcattttagat

SEQ ID NO: 258 - DNA, 165 bp, Homo sapiens
gggacttctcagaggcagggcagcacacggccagccccgcggcctggcgctccgactgccctctgaggcctccggactcctctcgtacttgaactcactccctcacggggagagagaccacacgcagtattgagctgcctgagtgggcgtggtacctgctgtggg

SEQ ID NO: 259 - DNA, 906 bp, Homo sapiens
ggatgattcttcaagagacccttcaaacttgggtagagtttacagctctgactttacactcggctttggagactttctttaaattatgtttttattaagattattttattatgcggaaaggtatttgggaaacttgtcacttgcatgtcccatcacgtgtactggctcctctgtggtgtctgcctgttgcgtgacactctccttgcagttcttgagttgcggcagaacatcgcgatgggaaccgatggtgggtggggctgcagagtgccccatcggtcaccttgtttctcaactacctcgcatcattgcagatgctagcgcgttgcctgtcgctttcccttggatacctagaccgttataaagtgtgccacatggacttaccgagcatggagagaggattttagctaggatttgaacacttggtgctgggaacctcagggtattgcttgccactaagccatgaaaccagagacaaaatctctatactgccctgagttggggggaattctcagtgccaactgtggctggtcctcattcaaagggacggtcagtttggtgtcaacatgaaacaccaagatgtctgtctctgaagcgtgattttaaaatccccatgcctgtggctgcgcttcctatttctagggctgggaaacactccttgcatcaaggggtcacttacagaacaaagaatcttttgggggaaacttcctctaaaaccctctcatatatagacagctttgactggagggtccatttttcttccaggatggtgttactgcagttgaaagggcaatatgaagttactttcttaatgtgacctagcaataggcatagctacgtggcactatattctggccagactcgatgtgtactctaacttaagaaataaatcagtaaggcagaacaaga

SEQ ID NO: 260 - DNA, 228 bp, Homo sapiens
gatagccctgggtaccctgagcccaccagggacacctcgcccttcagcccaccaccctggcaggcttccatccccgtccatgctcaagatgggtccctggccaccatggtcatcaccacccttccagggcctgagcagctggatctggtacaaagcaatcggacatagagttggagggggaggcccctgaggcagcccagctcctgaataaagattctacaacacacg

SEQ ID NO: 261 - DNA, 205 bp, Homo sapiens
attcctgctttttggcagcatttaaaccaaatcctactgcttccctagtagttttgagtgaataaaatctggactaatgtgatttcatttgcacagaaactagaaatcccatctgggcactcagcattttttctaacgatgatttaagcaaatggcctagctttgtggtttttacaaagacaaatataaaaacactcaagaacaa

SEQ ID NO: 262 - DNA, 488 bp, Homo sapiens
agtaaaaagcccttataggatcaaaaattgttcagggctcttagagatggtgaaaactacaaaaaaaaccatggctttcatatggacagataaaatgaaagaaagggaaaaggcagtggtgtgtaggcaaatatggtttggcatttgtcttttaatgacacctgatatgatgtcattttgattttgaaattgaacactagaactgttaatcacctttaaaaagaagagcttattgggaattatatattccttaaaatatacatgggggcctgaatgtcagccatctttatactatagaaaaaggattatggatgcatgaatggtcatgctttggagatcaaatattggttgaatgcctatgtatgtcaggccctgtgctgagccatgaggattaaaaagatgaataaacatatcttgtttaggaaatggatgtataaaaaaatcaagtgcaataaagtgtgtgtccaaaagctgacacaatggaaagg

SEQ ID NO: 263 - DNA, 174 bp, Homo sapiens
gccttcccttcttcttggtggtgttcttgagtaagataatctggactggcccccgtctttgcttccctgcctgctgctgccccatttgatcaagagaccatggaagtgtcagagattcagaatccaagattgtctttaagttttcaactgtaaataaagtttttttgtatgcgt

SEQ ID NO: 264 - DNA, 366 bp, Homo sapiens
tttagtcatccaacaagaagaaatatgaaattccagcaataagaaatgaacaaaagattggagctgaagacctaaagtgcttgctttttgcccgttgaccagataaatagaactatctgcattatctatgcagcatggggtttttattatttttacctaaagacgtctctttttggtaataacaaacgtgttttttaaaaaagcctggtttttctcaatacgcctttaaaggtttttaaattgtttcatatctggtcaagttgagatttttaagaacttcatttttaatttgtaataaaagtttacaacttgattttttcaaaaaagtcaacaaactgcaagcacctgttaataaaggtcttaaat

SEQ ID NO: 265 - DNA, 345 bp, Homo sapiens
gagtgggctttgacaaacagctctcacaggacctggctgtcaacctccttgttgcccccactgttgccttgagaattgaagacatgtaggtgactcacaaacttcttggaaagagaccctgtgtgaatgtaaatgctgtcattatgacttttaattgggatgggaataatcattgagacagagtcactgtctttcgggatcctctttggaccacagatacccaagtcagtcagtttcagagtattggccagtgtactttccttcttcctctccatcacttcttcccttaagttaaagtgttagagaagaccttcttcccataaaaaggttggtggatcgttttcc

SEQ ID NO: 266 - DNA, 1757 bp, Homo sapiens
ggatatgccacattacctgctcccatcaccatccagcccagcaccctggacttcagtcgcctggcccaaccccatgattatggaacgtctcttcaccttaacccaaatccagacccttttgtggtttctatttgtaccacttttctcccaggcctcagttctgaagcttacctttcttctaaggaattgaagctcccagtgacctggagggaggattcctggaaaccaaacaatcagtttaggtgcaggtggagatgttgaatatgtgttaccaagatacagcacaggttcagggaaaagagttcgctactccaggggttatttagaagacactttctctgcctcatcctgccctcaagctttagtcaagaagttatggcccccagtccctgacttcttacttatcccattgaggactgcctttctctctctcagttctggcctctgccccccaaagtcagctctctaaaagcaagcatgttttagaccactcactctttccctctttcttcaggaatgaattgggaaaggctgatgagtaaaacataccatccttttctattttcttgatgctgtttacaacatagtttggtgatatccagagctaatgtacatgctttcaaaagctaatctgcctgttgatggtaactaggtacagcgactttaaatacagttgctataatcctgaaaagccccaggagcacatcagggagctgggaaacacagttgcagagaactcagctgtatgttgccctctgaccttggcccagaccttcagaggctcagtctgttgagtctgttgtgactgtcttatgaatcaatctgttgtgccaaccctttctgagattcagagaggtccagctagaaaaagtggcagttttaaccaccaacgtagaagcttttttttccccacaagaccattgtactgcaatacttgagtatttgtgtagcaaacagcctcttaggttggagagtattgatttcaaataggaagttggtagactaggtgtgaggatgaaataatgaccttgatttttgggtgtgtattgcagaagcctcgtcgctttcaagtcacatcatatatgcgatctggcctaaccatggagatattggttatcagtttgcagatgaatacacagttctatccaacagaaactgtatctttctgtttgtcagaagttctccgttagttcctgtattagtcaaggttttccagagaaacagaatcaatatatattggggcaggggggcggtggttattataaggaattggctcacgtgattatggaggcggttaaatcccaagatctgcaggataagtcagcaagatggagtcccatgagagctgatggtttagttccagtctgatggcagcaggcttgacgccaaggaagagatgatgtttaattcaagtccgaaggcaaggaaaaagctgatggtcctgtccaaaggctattaggcaggaagaattctcttagggcagagttagctcttttgttctattcaggccttcaactgattcagcaaggcccgcccacatttgggaggacagtctgcattactcagtctactgatttgaatgttaatgtcattgagaaacaccctcacaggaacactcagaataatgtttgaccaaatagctgggcatcttgtgacccagttaagtggatacataagattaactatcacagtgactcagtggaattttttgtttgcttttgtacagttttaaaataaaagtttggtatttgtgtttt

SEQ ID NO: 267 - DNA, 660 bp, Homo sapiens
aggagagccccatttagagtgagggagagagagtgagagaccctaacctattggaggaagatcttcagcatcttttgctgctaccttgacctcaagcccttcatcccactttggagaatggttttgtatagcctctgaagtcaggatctcaggaagtcctgaggagggactctggaataaaaacccttgcctctttccaggccaatttctcgtgttggaaagtcagaagacccagtcttggctttactttcttggggtgaaagagaaatagggtaggctcagaacatgctcatgttattaaggcagcagtccccctggcctttgaggaagtacttatgagatgggtgtcactgtctgaaggttctccaaattgtctgtgaactgcttaggtaggagtgcactgcagtttcctgctagttcccacctgttgtgccccaactttgcttctagatctctggggtgggaggagtgaccttctcaatggaaggggcctccttggtctggagaagagatctgaggtcccaccttagaaatgaaagggaaaccctcagggagccatgacccagggaccttcacactcccccatgtttgttacttgttatccctcccccaacctgcctctgttttccccagagtgattagcagtaaaacccttcaatg

SEQ ID NO: 268 - DNA, 794 bp, Homo sapiens
actacttccaggaatttagcctaggaaatcatcagagatacacctaaaaatgtatgtacaacgttttcaccataatattatgcataataaggggccgtttggtggatgccgtagctgccgtgagtgtgggctgcacttgaccacagctgcctcctcctccagagaatgccccagactgaaaggagccatagccctgaagattggcccctacctctccctgagggtacaaaaggccaccccaggggcaataccatgagtacacatttgtaaattgtccttccattcacccttctcataaagtagtatctatgttcaacagtcaaaatgtggaagcaaccaagcatccatcgacagacgaatgcataagcaaaagatggtatatctatacaatggaacaataccctgcctaaaaaggaagggaattctgcaatgtgctaccacatggatgaaccttgaggatgttatgctaaattaaataaggccaaccacaaaaagataagtacagtgtgattccacttttaggagatacttggagcagtcagaatcacaaagacagagtggtggttggcaggggctgcaggaagggggaatgaggaatgattgtttcataggtatagagttttggttttacaagacaaaaggattatgggggtagttggtggcaatggctgcacaacattacaaatgtatttaataacatgaactgtacacttgaaaatggttaagatagcaaattttacagaatatgtattttacgacaattttaaaaatgaaataaaaaagaattatcttgc

SEQ ID NO: 269 - DNA, 619 bp, Homo sapiens
cggagccagagccgtccttcttctcacagcggcctcagcgtccccagagccgagccagggtgtgagtgcatgtgaacgttgagtacacatgagtgcgtgtatgcccccaggctgggtcagctcttctgtggattgcatggcgtgtgattaaaagcccatgtgttcccacacatccacatcatgggaaggttaatgtgtgcctccttggaactgggtgttggtgtccatggaacttcctctctgtatctcaggtcagtaggcgcagaaacgcctcatgatgaagattcttgagccccatttccaagacccctcacatccaatcctgtcctgtaacatccatcaaggatttccataggggtgactggtgcccacccaagactgcaccagtgcctgctcattgaggagagtaactgctggccaggcagaaagaatatgggctctgcaatgagacagacctggaggggactctcccgttgagcactagcagctggaggagttgggagttcatggctatcatggttgtgttaatcgattgtggggatgaaatgtcattgtgtatggaaggcggggctcatggctgattggcaataaaatggcggctgccgttgtcattgtctcc

SEQ ID NO: 270 - DNA, 385 bp, Homo sapiens
gctgccatccagccagaacgtggctctgctggccggagcaaactctgctgtctaacctgtgaccagtctgacccttacagcctctgacttaagctgcctcaaggaatttttttaacttaagggagaaaaaaagggatctggggatggggtgggcttaggggaactgggttcccatgctttgtaggtgtctcatagctatcctgggcatccttctttctagttcagctgccccacaggtgtgtttcccatcccactgctcccccaacacaaacccccactccagctccttcgcttaagccagcactcacaccactaacatgccctgttcagctactcccactcccggcctgtcattcagaaaaaaataaatgttctaataagctcc

SEQ ID NO: 271 - DNA, 1691 bp, Homo sapiens
ggacaggctcctcactcccagttccctggacagagctaaactctcgagacttctctgtgaacttccctaccctacccccacaacacaagcaccccagacctcacctccatccccctctgtctgccctcacaattaggcttcattgcactgatcttactctactgctgctgacataaaaccaggaccctttctccacaggcaggctcatttcactaagctcctcctttactttctctctcctctttgatgtcaaacgccttgaaaacaagcctccacttccccacacttcccatttactcttgagactacttcaattagttcccctactacactttgctagtgaaactgcccaggcaaagtgcacctcaaatcttctaattccaagatccaataggatctcgttaatcatcagttcctttgatctcgctgtaagatttgtcaaggctgactactcacttctcctttaaattctttcctaccttggtcctgcctctttgagtatattagtaggttttttttatttgtttgagacagggtctcactctgtcacccaggctgcagtgcaatggcgcgatctcagctcactgcaacctccacctccgggttcaagcgattcttgtgcctcggcctccctagtagctgggattacaggcgcacaccaccacacacagctaattttttttttttttttttttttttttttttagacggagccttgctctgttgccagactggagtgcagtggcacgatctcggctcactgcaacctctgcctcccgggttcaagccattctgcctcagcctcccaagtagctgggagtacaggcgtctgccaccatgcctaatttttttctatttttaggagagaccggttttcaccacgttggccaggatggtctcgatatcctgatctcgtgatccgcctgcctctgcctcccaaagtgctgggattacaggtgtgacccactgcgcacagccccagctaattttcatatttttagtagagacagggttttgccatgttgcccaggctggtcttgaactcctaacctcgggtgatccacccaccttggcctcccaaagtgttaggattacaggcatgagccactgcgcccggctgagtgtactagtagttaagagaataaactagatctagaatcagagctggattcaattcctgtccttcacatttactagctgtgcaaccttgggcacataacttaatgtctttgagccttagttttttcatctgtaaaacagggataataacagcaccccatagagttgtgacgaggattgagataatctaagtaaagcacagtccctaggacatagtaaatgattcatatatccgaactactgttataattattccttcttactctcctcttctagcatttcttccaattattacagtccttcaagattccatttcttaacagtctccaatcccatctattctctgcctttactatatgttgaccattccaaagttcttatctctagctcagacatctactacagcactgtgatgctttatgcaactaactgtttacatatctgtcccctgctactagattgtgagctccttgagggaaaggaacatgatttatttgtccttttcccccagcacctagagtagtgcttggtgcatgatagtaggccttcaataaattttttctaaatgaatg

SEQ ID NO: 272 - DNA, 71 bp, Homo sapiens
agaccaacccatcacctcagttgttttttatttttctaataaagtcatgtctcccttcatgtttttttttt

SEQ ID NO: 273 - DNA, 566 bp, Homo sapiens
cctcaagtgatccacctgcctcagcctcccaaagtgctgggattacaggcatgagctactgtgcctggcccaaagcagcatttgaactgagttttgaagaaagaattgaggttaaccattcaaagaaggggaaatggacttttctgacagagggaccagcaaaagcaaatacatggtactatgaacctgtactctcaatcacaggtgttttagggaactacatattattcagtgtcaacagagtaaaatttgaatgtggaaagggatggtaaagaggagactgtagacataagtgggagctggttatgaaaggccatgaatgtgacactaaggactttgtgctttattctatgggggagttcagtgtggaggataagagcactggatctggaatcacattgcctgtgtttgcttcctggcagtaccacttactggttgtgtgtccttgagcaagttacttaacctttctgtgcatctgtgacctttttccaaaggggatattaacattgcttatatcatatggtgattgaattaatacatgtcaagcacttagaactgtgcttgcc

SEQ ID NO: 274 - DNA, 2153 bp, Homo sapiens
gggagtggactggaccactgaatgtcactgttccttgaatcatgggcctaccagattgcctgccagaggcaggactgaccagcccttctgggccccagggcaagccagacactgagtgacaccaaaggctttgtaactatgtcttgagggtctgctgccccagcctggcagcaggaaccgccctccccaaacacccacagccactgacccatccaggactccagagagtcaggtcaaccccgaggaccccttgggcccttctggggtactcctttcggcccccctggtagagtctcgggagttcacacagggtggcaaacaccccctagagctcctctgcctgaatcctgccccctagcctttgaccactgtcagccacctgtgtcccttgagccttcgggtcttcacttcccacttggacatcactgctggacattcccatcgagatgacacctgggttccaatcccagctctgcctttgaagcacttgtggccaccgtcaagtccctttgctctcggaccctgggtttctcatcctttaatgaggtgggttcagaagctctcccatcttcacagcaaccctggcactggcttctcaatgggagggaagcagcagagaaactgaagtgttagacactatgtgtcccaccaccccattacagagacatatgacaatgttcagcaggtcatctttaatgcagaggaggagatgggatgtcactcgctgtctggaggcacgtgggtggtgtgcgggccctcactggccagcctctgggtggccccgcctatcccagtatgaacgtagccaactcaagccctctactgtgtctcctgcagggagagggaggcctcggcacctcagcccacaaggagaaaacagcccctgtccgggtccctccagagctcccttccccagggccacgcctcacctcgaggctgatactcacagcccacgaagcctttgtagccttcatcttccagcagttgaaacagataggggaaattcagctctccggggctgctgggctcccctcggcctgggacctgtgccacctgcacatgccctggggacagatgtggacaaatgtggggtccaggctcctgccagggcctgaaggacagatgtggggattgaaagggtgggagggcaaaggaaggtcctctcaccaacaatgggcaggaactcccggatgtttcctgtcaggttcccatccatgatctgccagtggaatatgtcctagggaagaggatactacattccgagaccccgcaggccccgccctccttccgatctgcgaagtacccccttccacttaccatttgtaattggaggttgggtcttcctaccttctgtaagatggctgccgctgtaagagaagccagggaggggaccgtgagcctcaagagcacaggaatcaaaagggacagaaggagagacagggctggggtcgtaccctgctggggcgtgtccaggaagtactgggggtcagtgatgcgggtgttgatgggctccagcagtcccacgaggtcctcctagcagcatgtcgggtgctgtgaatagagctccttcccaagtttgtcccccatcagtcagtcactggtcaaggccctcacctgttcctctgacctaggctggcagcctcacgtgctgtccccactgtgcacccccttctccgcacacccacagagacatgtaagtacgtgtgtgtttccacctttctcacctgagccaaaaccccagctgcatgcctcaggttctccagaaaaacggcctccatctcagccttgactgctattcgatcagctccctggggtactcggccagccatcaggtggatcctgtggggaagatggactggaggccttgcctcccttggctctctctgcacctcttccaggattccctgactgtgccagccctcgtccgtctccccaggtctccagtccatggcacctgggtcacgatgcccaggtatcccagcactttcagagacacttcagtgatggctgaggggcaagccctttcccagacatctcagtgtccacccaccgcctcctgcctccagtactttccaaaacctttccttccctcggtccttctccgcaacctgtaacctgctaaattctcacctttaaaaattgtcctgaccttt

SEQ ID NO: 275 - DNA, 1668 bp, Homo sapiens
ctaccgctcccctctcctccgccacccccgccgtggggctccggaggggacccagctcctctgagccataccgaccatcgtccagccctcctacgcagatgctgtcactggcagagcacagcccacggggatcacagcgtttcaggaacgttgccacaccaatcagagagcctagaacatccctgggcaagtggatggcccagcaggcaggcactgtggcccttctgtccaccagacccacctggagcccgcttcaagctctctgttgcgctcccgcatttctcatgcttcttctcatggggtggggttggggcaaagcctcctttttaatacattaagtggggtagactgagggattttagcctcttccctctgatttttcctttcgcgaatccgtatctgcagaatgggccactgtaggggttggggtttattttgttttgtttttttttttcttgagttcactttggatccttattttgtatgacttctgctgaaggacagaacattgccttcctcgtgcagagctggggctgccagcctgagcggaggctcggccgtgggccgggaggcagtgctgatccggctgctcctccagcccttcagacgagatcctgtttcagctaaatgcagggaaactcaatgtttttttaagttttgttttccctttaaagcctttttttaggccacattgacagtggtgggcggggagaagatagggaacactcatccctggtcgtctatcccagtgtgtgtttaacattcacagcccagaaccacagatgtgtctgggagagcctggcaaggcattcctcatcaccatcgtgtttgcaaaggttaaaacaaaaacaaaaaaccacaaaaataaaaaacaaaaaaaacaaaaaacccaagaaaaaaaaaaagagtcagcccttggcttctgcttcaaaccctcaagaggggaagcaactccgtgtgcctggggttcccgagggagctgctggctgacctgggcccacagagcctggctttggtccccagcattgcagtatggtgtggtgtttgtaggctgtggggtctggctgtgtggccaaggtgaatagcacaggttagggtgtgtgccacaccccatgcacctcagggccaagcgggggcgtggctggcctttcaggtccaggccagtgggcctggtagcacatgtctgtcctcagagcaggggccagatgattttcctccctggtttgcagctgttttcaaagcccccgataatcgctcttttccactccaagatgccctcataaaccaatgtggcaagactactggacttctatcaatggtactctaatcagtccttattatcccagcttgctgaggggcagggagagcgcctcttcctctgggcagcgctatctagataggtaagtgggggcggggaagggtgcatagctgttttagctgagggacgtggtgccgacgtccccaaacctagctaggctaagtcaagatcaacattccagggttggtaatgttggatgatgaaacattcatttttaccttgtggatgctagtgctgtagagttcactgttgtacacagtctgttttctatttgttaagaaaaactacagcatcattgcataattcttgatggtaataaatttgaataatcagatttcttacaaaccagg

SEQ ID NO: 276 - DNA, 1147 bp, Homo sapiens
gtgcttccagggtccaagggattctcagccatccaggcaagagcactctgggttccacagcacagcagacatggaacgctgaagtctctgaaagtgaagttgtaaaaagaaaaggaatgaaataaccgacccatcatcttctcacccaccctcattgcattccgctgtagtgaaaggacgagccatttctgggcacgtggcagcagtcgctgatctcccagctgaggggctgagcactggaatgctgtggctgcactggccccagtccatagaggggtcaactatgctggctggactggctgccttgttcctggcctaggacttagcttcataactatcacctgcaccgactaggctgaggtgctggtacttgccccaacccctacttttgtatttatatgtgtgtgtgtgtgtgcgtgcgtgcgtgcgtgcgtgtatgtttggtctggaccagcttctgccagcccctggcctttactttcttccttgcctatgcagggcaaacaaaatgtgaaattctgccctcagctgagctgagtaagggctcctgggggttggctggagatgggtgtggcatctgtccaggcctggaaccgtctcaagacagtgctggcaaagctgcagtattgagatgctaaggagctgatgccacctctttgtcttcccctaaaggagaacatggggataacatgggtgtgtgcccacaacactctaggtgcagagcccctgtggcaaagtattacagggtgtgggtggggattaccctgaatcggggattttaatgatggaagcaggcagagcctggtgggtgattctgtcaacagaaaattgcaatcatgcaggggctgggagggttaggatgaaaaaactggggccattggaggcccactgtaggtgggagggagctgattttggggtggggggtgggactagagggcaatactgaaggggttaaacaggtttttgctcctcaagaatttgtttgcctgggcccaggattggagggcttcacaccaataccctgtgtatacaagaatcagatttataatacttccccttttttgttacgtatgaacactataaaccaaattattttgaaaactggtgcatcaccttgtccttagcaataaaatgtgttgagcagagg

SEQ ID NO: 277 - DNA, 956 bp, Homo sapiens
tctaagcagtggcatctgagtgggcccagcacatggccatagaggcccaggcaccaccaggagcagcagccagcaccacctacacaggagtcttcagacccagagaaggacggtgccaagggccccaggggcagcaaggccttggtggagcagccagagctgtgcctgctcagcagccagtctcagagaccagcactcagcctcattcagcatgggtccttgatgccagagggccagcaggctcctggctgtgcccagcaggcccagcatgcaggtggtgggacactgggcagcaaggctgctgccggaatcacttctccaatcagtgtttggtgtattatcattttgtgaatttgggtaggggggagggtagggataatttatttttaaataaggttggagatgtcaagttgggttcacttgccatgcaggaagaggcccactagagggcccatcaggcagtgttacctgttagctccctgtggggcaggagtgccaggaccagcctgtaccttgctgtggggctacaggatggtgggcaggatctcaagccagccccctccagctcatgacactgtttggcctttcttggggagaaggcggggtattcccactcaccagccctagctgtcccatggggaaaccctggagccatcccttcggagccaacaagaccgccccagggctatagcagaaagaactttaaagctcaggagggtgacgcccagctccgcctgctgggaagagctcccctccacagctgcagctgatccataggactaccgcaggcccggactcaccaacttgccacatgttctaggtttcagcaacaagactgccaggtggttgggttctgcctttagcctggaccaaagggaagtgaggcccaaggagcttacccaagctgtggcagccgtcccaggccacccccatggaagcaataaagctcttccctg

SEQ ID NO: 278 - DNA, 447 bp, Homo sapiens
gggctcgctccagggctttgcagactggacccttaccggtggctcttcctgcctgggaccctcccgcagagtcccactagccagcggcctcagccagggacgaaggcctcaaagctgagaggcccctgccggtgggtgatggatatcatccccgaacaggtgaagggacaactgactagcagccccagagccctcaccctgcggatcccagcctaaaagacaccagagacctcagctatggagcccttcggacccacttctcacagactctggcactggccaggcctcgaacctgggacccctcctctgatgaacactacagtggctgaggcatcagcccccgcccaggccctgtagggacagcatttgaaggacacatattgcagttgcttggttgaaagtgcctgtgctggaactggcctgtactcactcatgggagctggcccc

SEQ ID NO: 279 - DNA, 70 bp, Homo sapiens
ggggtgcccccatcccatccaccccttctcttcatccttccctattcccaaagagtaaacctggaccctc

SEQ ID NO: 280 - DNA, 832 bp, Homo sapiens
taccatgtggggctggagacatagatggacttatgaatggctgctaggacctttagtgctccctgcaccaacctcccatccccctgccaagatccttgaaggaccctggaaggagggagagcaggcagcccttcacaggataggatccgtctctgtcctgtcctggcactggcacaagctcagcacatgcccagtaatgcgtgttgtttggctgatggaataaagggcttagggacttccctgaggcctctggacccatctgtcttcctgagggcagcccaggacctttggccaatcccagttcccaggctgcagttgagggtctgtccttgtcaaaaggcaggtgctagacagtctagaccagggtttctcaaactcgtacttgacatttggggccagataattctttgttgtggggctgtctggtgtatggtagggtgctcagcagcatccctggcctctgcccactagacatcagaagcactcccccagttgtgacaaccaaaaatatctccagaccttggcaaatgttatctgtgggggaaaattgccctcaattgagaaccactggtctagctagacctgcactgtccagtacagtagccactaaatacatgtggctaaacttaaatttaagttaattaagattaaaagctcagtttctcagtcacattagtcattcaagtgttcagacagccacatgaggggacagtgcagctacaggatatgccatcatggcagaaagttctattggttggacagcgttggtctatactgactcttatttctcagggagatcacagcaacctaaataaaccagataccttttctc

SEQ ID NO: 281 - DNA, 292 bp, Homo sapiens
atgatatgtgtgggtggggccgtgcctcacttttatttattgctggttttcctgggacagctggagctgtgtcccttagcctttcagaggcttggtgttcagggccctccctgcactcccctcttgctgcgtgttgatttggaggcactgcagtccaggccgagtcctcagtgcggggagcaggctgctgctgctgactctgtgcagctgcgcacctgtgtcccccacctccaccctcaacccatcttcctagtgtttgtgaaataaacttggtatttgtctgggtcagtgc

SEQ ID NO: 282 - DNA, 719 bp, Homo sapiens
cactaatggacagaggctctcggtgccgaagattgcctgccagaggactgaccacagcctggctggcagctgctctgtggaggacctccaggactgagactgggctctgttttccaagggtcttcactaggccccctagctacacctggaagtttcagaacccactttggggggcctcctgcctgggcaggctcttcaagtgtggccctctttggagtcaaccctccttcccgaccccctccccctagcccagccccagtcactgtcagggtcgggccagcccctgcactgcctcgcagagtggcctgggctaggtcactccacctctctgtgcctcagtttcccccccttgagtcccctagggcctggaagggtgggaggtatgtctagggggcagtgtctcttccagggggaattctcagctcttgggaacccccttgctcccaggggaggggaaacctttttcattcaacattgtagggggcaagctttggtgcgccccctgctgaggagcagccccaggaggggaccagaggggatgctgtgtcgctgcctgggatcttggggttggcctttgcatgggaggcaggtggggcttggatcagtaagtctggttcccgcctccctgtctgagagaggaggcaggagccccagggccggcttgtgtttgtacattgcacagaaacttgtgtgggtgctttagtaaaaaacgtgaatgg

SEQ ID NO: 283 - DNA, 364 bp, Homo sapiens
agggctggtcaccgagtaggctctggcttctgccacagcgcacctgtctgccgctgccgcctcagctgctttggcccagccagcttcagatctggtcttggcgagctctcgccaggaccccaaggctgttggtctgtctggcccttgccccacccccttgccagatccctggtgtctggagctgagtggccgggcatcggtcccaagcatcaaagcctttggcctttctcctcccaggcctccacaaaggcctggcagacagaggtctcattccagcctgactcttgtcccctgggggacccagacaaagcacagcagccgctcagagacaggaatagaaatttcattaaaatctatggacttt

SEQ ID NO: 284 - DNA, 1898 bp, Homo sapiens
gtgaatgaagaaggaagaggattccaggctgagagcactggacgtggcaactgttcagaggagaggcagtcttcaagttctacattcattcagaaaaatgttttttgagcctacaatactgagcgcaacaaggctgtggagacccatggtgaggagcatggagttaactaaaggatgtgtcagggaagaaagacttctcaaggaggtgcctccatcagacccaaaggactcatgggggctagctgcacctcacatttcttggacatataccgttggacatgtctatcttctggaaactatggcatggacagtaaggattcagaagtgcatgaaggcaccctgcctctgcagagcagaaagatcatagacaacatttatgaatgtgcccagtgctgccaagaagagaagccggtcctctgcaggctcaagcctatctgggcctctggggaagccccacagccttggctgtgcctgcccctgccctctcacccctaccctgaccttgtcctacttcactgcctttgtctgtgttactagtggccccagtatacctgggatggacatccaggtgcccttcatccaagctcctatgtgaggggaatggacattattaaaagaacaggggcagaagtggctcatttatgacccattcactagccccagggattgaagtcttgggtactcaaagtgtctttctaccagggcaccagatcccttccatggagcaggtcatctcgggttcactgggccagggatggtctctgttccccagcccacctggctcacacacagcctcatgggtagggtcagcaaaccagatggcttgttgttggaatgtaggatgagaggcctgcttggtgacctagcattttcaccaagaagtggacgtggagaggaccagagtgatcaagggtgtatgatgtgcactacaatggtgggcaaaacaggctcctgctcttgtggaggtcacaatctagcggagaaaggatgttactagaagtacacaaattgggcccggcgcgatggctcacgcctgtaatcccagcacttttggaggccgaggcaggcggatcatttgaggttagagattcgagaccagccgggccaacatggtgaaaccccatctctacaaaaaatacaaaaattagcctggcatatggcgggtaccgtaatcctagctactcgggagactgacgggagaatcgcttgaacccaggaggcggaggttgcagtgagctcagatctcaccattgcactccagcctgggcgactgagcgagactctatctcaaaacaatcaaaacaaaaaagacctgtggactctagtagattttgaatcctgcctctgccatttcctggctatgaggtgtcttgagaaatttacttgtcactcttgcttctgatagtaaaggggatggtgcgatagattcaagatggagagataaggttaagtgttttctttggctgcaacatggagattagattagagcaaggatgtaagggagaggaagggacatagcagtatttcaggtgagagtcaaggtggctttggctagggtgtgagagtggaggtagggagaagtaggaaagtgatagttaactggatttgttaggtgagggtgaggccaagggtgacttccaggttcctgacttgtgttataagtaacacagaagaagaatggatgaacttgattcgttttccattgattgtgatatctatcatacctgcaaaaaatattttgtatatatccaatttaataataaatgcactcatgttaggaaggtcaaaaaaaaggaaaaaagaaaaataataaaaaataataaaaatccttaggataacttgaggccaggagtttgagaccagtgtgaccttgtctctgtaaaaaataaaattaaaag

SEQ ID NO: 285 - DNA, 61 bp, Homo sapiens
gaggccccacggggtgtgggcgacgctgttatgtaaatagagctgctgagttggaccaggc

SEQ ID NO: 286 - DNA, 949 bp, Homo sapiens
gctatctgccccaggcaggcctcgcctccagcagccccacctgcccccagcctctgtgacagtgaccgtctccctttgtacatacttgcacacaggttccccatgtacatacatgcacatactcaaacatgcgtacacacacacacatttacacacgcaggactctggagccagagtagaggctgtggcccaggcactacctgctggctcccacctatggtttgggggccatacctgttccagctctgttcccagggtggggcagggaggtgggggttgggggagtagtggggcacggctcctaagatccagcccccatactgacagacggacagacagacatgcaaacaccagactgaagcacatgtaatatagaccgtgtatgtttacaatgttgtgtataaatgggacaactcctcgccctctacctgtcccctccccctttggttgtatgattttcttcttttttaagaacccctggaagcagcgcctccttcagggttggctgggagctcggcccatccacctcttggggtacctgcctctctctctcctgtggtgtcccttccctctcccatgtgctcggtgttcagtggtgtatatttcttctcccagacatggggcacacgccccaagggacatgatcctctccttagtcttagctcatggggctctttataaggagttggggggtagaggcaggaaatgggaaccgagctgaagcagaggctgagttagggggctagaggacagtgctcctggccacccagcctctgctgagaaccattcctgggattagagctgcctttcccagggaaaaagtgtcgtctccccgaccctcccgtgggccctgtggtgtgatgctgtgtctgtatattctatacaaaggtacttgtcctttccctttgtaaactacatttgacatggattaaaccagtataaacagttg

SEQ ID NO: 287 - DNA, 555 bp, Homo sapiens
cgactgcaaataaaaatctgtttggtttgacacccagcctcttccctggccctccccagagaactttgggtacctggtgggtctaggcagggtctgagctgggacaggttctggtaaatgccaagtatgggggcatctgggcccagggcagctggggagggggtcagagtgacatgggacactccttttctgttcctcagttgtcgccctcacgagaggaaggagctcttagttacccttttgtgttgcccttctttccatcaaggggaatgttctcagcatagagctttctccgcagcatcctgcctgcgtggactggctgctaatggagagctccctggggttgtcctggctctggggagagagacggagcctttagtacagctatctgctggctctaaaccttctacgcctttgggccgagcactgaatgtcttgtactttaaaaaaatgtttctgagacctctttctactttactgtctccctagagatcctagaggatccctactgttttctgttttatgtgtttatacattgtatgtaacaataaagag

SEQ ID NO: 288 - DNA, 54 bp, Homo sapiens
atccttgttttgtcttcacccatgtaataaaggtgtttattgttttgttcccac

SEQ ID NO: 289 - DNA, 316 bp, Homo sapiens
gacccaagccctgaggcctgaggcctgtgcctgtcaggctctggcccttgcctttgtggccttcccccttcctttggtgcctcactgggggctttgggccgaatcccccagggaatcagggaccagctttactggagttgggggcggcttgtcttcgctggctcctaccccatctccaagataagcctgagccttagctcccagctagggggcgttatttatggaccacttttatttattgtcagacacttatttattgggatgtgagccccaggggggcctcctcctaggataataaacaattttgcagaattgg

SEQ ID NO: 290 - DNA, 171 bp, Homo sapiens
gtgtatacctttaccctcaagtaccactaacacagatgattgatcgtttccaggacaataaaagtttcggagttgaactattgtgtagttttgtttgtgaaagattgtgcccatatcctcagttcttcttagcctctgctccttccctgggaaccctctctatatcctctt

SEQ ID NO: 291 - DNA, 408 bp, Homo sapiens
ggatgcccagggctgggtgcagccagctgtcctgcagctctggggagaccagcacagaactgaggaacatctgcaggaggcccaactagtgaaaggctttgcctccggggggcaggtgtgacttccatttcatcagtgcctgccagaagctgtgtctctcattgggctccaaagaggtgggattttttaaaactaaaacatttcttatatacagtctataataaatatgtaagatacaaagaacaataaaagaattacacactaggaaatagaacataaccaatactttcgagtcctccctgtgtcccgctgtgattctatttcctcccacccactcctcaaatcctgtcattattagccctttgcttttctgtattgtttcactccgtatgtaacataaccctaaat

SEQ ID NO: 292 - DNA, 1852 bp, Homo sapiens
ttttctcccatgtggaccctgatttatggtggtacttgctaggacttaattggctttggcaaagcaaaaggttttgagtacaagattactatttttgataatatagtagagatcttccatgaagataacaaggctcaaggaagttaggtttggccaagataaaggccagggaaccagaattcccatctgccttcaaatgagttttttttttttttttagacagagtcttactctgtcacctaggctggagtgcagtggcacagtctctactcactgcaacctctgcctcctgggttcaagcaattatctgcctcagcctcctgagtagctgggatgacaggtgcctgccactacacctggctaattttttgtatttttagtagagatggggtttcatcatattggccaggctggtctttaactcctgacctcgtgatccacccatcttggcctcccaaagtcctgggattacaggaatgagccaccgcacccagccaagactctatctgttcccatttctaagcagttccccaagatgttgttacagggcctaaggggcaaatatcctctaaagagtacctaccagcagggtgtggtggctcccgcctgtaatcccagcactctgggaggccgaggcaggtggatcatgaggtcgagtttgagaccagcctggccaatacagtgaaaccccgtctctactaaaaatgcaaagttagccgggcatggtagcgcaggcctgtagtcccagctactcaggaggctgaggcagtagaatcatttgaaccagggaggcagagattgcagtgagccgagattgcatggctgcactctagcctgggtgacagtgtgagactctgtctcaaaaaaaaaaaaaaaagtacctacctcaggtagggactgaataaacacgtgtaaggcactttggaaaaatacctggcatatatagtaagcagtatgttggccattaccaaaggccctgggaattctgtactgctgctcatgggtgtagtcggttctagaggggtgggcaggtgggagtagctgaggaagacaagtggctggaatggtatcacatgatacacagaagtatcctcagttctgaatctaccttggcctcaagggcccaggagaataacttttcccagctgacagcctctctgaggacaatgacatatgaatgaggatcaaaacgagctttggccaggcactgtggcgctcacctgtaatcccaccattttgggaggctgaggcggaggaccgcctgaggcaaggaattcagaaccactctgggcaacataatgacactaaaaaagactatctctaatcaaggctagaaccaagggaaggctaagaattgcccagtactgtgcaactacgaaagccctacccaaggccaccagccttgtcttcctctttcctctgtcagttcaaaaagaacagaaacctccagctcttttacatagcaggtaccaggcatttatcagaagaggccaagcttctggttcccatgcagccctttgaatagtgtgtctaaacaaaaataggtgtccaagtagtcacactgagactttaactggtaacccagcctgtggcgtcagtcgcagtgctctggccaacactatagcagggcttattcttctccctcatgtgtagtgaaacaaaatgtaacaccttgggttcattcagttccattccctatatctacctgtgtcaatataattccctgatttggaggcagctctcctcattttccccaaaacagggaaagcaaggagtaaattcctcttaaaatcaaaagctaataatatgcttcctaaaataaagactcatcaaggtctcagttcaagtttaa

SEQ ID NO: 293 - DNA, 92 bp, Homo sapiens
gaccacagcttcttggcctcccttccagctctgcagctaatgaggtcctgccacaacggaaagagggagttaataaagccattggagcatcc

SEQ ID NO: 294 - DNA, 754 bp, Homo sapiens
gagggggcacagccctcctcccaagggaaagtgtttttgtatataatgtattttttcacttttggaggattctttttgtataacttcaataaagattgtaagcaaaggttgaggctttgatggtttttttcttaattattggctgaatctgccttggagcactgctggttttatatattagccaaaggttttgttctggccttctgtactgatctgtgttcctgatcctaattcctatctgtctaacgtggaggtgatcaagtgtggctgtaggcctttgttttccaatggtgctatattctgttttcaaacacttcactgaacccagctgtcttgcaaactttcagtggtgctgtccctggatgggggctacaaaaacaagaattggtgaagatcttgctcttcagtgctgaaaatggatgatggactttggctgtgagccaggcctaggatggttcttgtcctatatccacctagtcttcacctggggctataattctgtcctggaaaaagaactctgaaaacctgggtcaggggaatgattcctaaggaaaacggtctgcatttgagctctggtttgaaagtagccaaggggactgatggtggacactccagatgtggttggaagcatatgtggggaggctggctggttgagttttgttattttctgtatagaaaggttgagatatatcaacacttggaattgttacccatctgcagaattgacttctcaaataaagatgctaaaaatctc

SEQ ID NO: 295 - DNA, 531 bp, Homo sapiens
aaaatataaaagtctgggaagtgaggagcacctctgcccagctgctgccccgtctgggaagtgaggagcgcctctgcctggccgcctgaccatctgggaagtgtgacaagcgcctctgcccggccgctgtgcaaccttccacgtgtgaagtgacagccttgtgtgtgatcttttctgtcttccccaagtttgcattttcgacattaaagtttactttttagttaaaagttttaaaaatatatatatataaatacactgtagataacatttgtatgccagctacacctttttctacttctgtttggctttttttccccacaccaatggtaatttatcttcacagattgttcttcatttctagaaattgttacttcatggtaattacttgagcaaaagcttgaaaatccctgacaagtacttttcatctcatagtatattagttttcactcagtcattttatgaataatatagttatccacttaaacatttcaatattttaaccatcttgaaaattaaagattaaaaatcccc

SEQ ID NO: 296 - DNA, 58 bp, Homo sapiens
cagttgtttgccatttcttgcactcagacctgtgtaatatatgctcctggaaaccatc

SEQ ID NO: 297 - DNA, 425 bp, Homo sapiens
gtccacttctgcctctgccactactgctgccacatgggaactgtgaagaggcaccctggcaagcagcagtgattgggggaggggacaggatctaacaatgtcacttgggccagaatggacctgccctttctgctccagacttggggctagatagggaccactccttttaggcgatgcctgactttccttccattggtgggtggatgggtggggggcattccagagcctctaaggtagccagttctgttgcccattcccccagtctattaaacccttgatatgccccctaggcctagtggtgatcccagtgctctactgggggatgagagaaaggcattttatagcctgggcataagtgaaatcagcagagcctctgggtggatgtgtagaaggcacttcaaaatgcataaacctgttacaatgtt

SEQ ID NO: 298 - DNA, 20 bp, Homo sapiens
gtgacagagcaagactccgt

SEQ ID NO: 299 - DNA, 191 bp, Homo sapiens
taaccagctggtctgggtgtagctcttagaggaaggagatagggaaaaggggctccttgctccacagggccctgttgaattttgttctctgggagaaaatcatcaagaagggctgcatgatgtttgcccaaaatttattttataagaaaaacttttttggttaaaaaaaagaataaaggtatgaaagggtt

SEQ ID NO: 300 - DNA, 189 bp, Homo sapiens
atgtgtggacttaattcaccccagtcttcatcatctgggcatcagaatatttccttatggttttggatgtaccatttgtttcttatttgtgtaactgtaagttcacatgaacctcatgggtttggcttaggctggtagcttctatgtaattcgcaatgattccatctaaataaaagttctatgatctgc

SEQ ID NO: 301 - DNA, 3172 bp, Homo sapiens
tatcacccaatccctgaagcaagaatacaaagggtatactctgttggatgcaccagaaactggaaactgggaccagtggcagagatgcactctcggtcctgtctccatcctgttcgtgtctttctgcagttttcggcaataagaagtagaagatttgctgtcctgctgtccaattgtggagcatcagcaggtttccaactcactcattaacccctaccccatctccaggcctgtactaaagtttgctgcccgcttaggggcttagaaggagaagccagtgagcaggctcacactaagttgtaaacataggagaagcatttggccaataaagttgttgaaactctatagacctggggctgcagttggggacttcatgtcagtgcaaatgccattagttccatttgtaccagccagttactgagcccctgtcacccttgaagtgagttccacctgaccagtcttgagcagccaacaggctcaattaagcccgcctggtttttccatatggctcatgatctaatttaaggaacaagtaactaaaaatgttaagccagtgcaaaataatctgcttacctactcacattggaaaaaccctctgagctgaataattctggccattcctgctgtcaacaatactgctgcccaaatgtggcttaggaggctgcttctgccacaaaaccgtcatactcttgtgcgtgccttgttctttgttcattcatctagcaggtattcccagacctcgtgtatgacaggtagctagggagctcttggagatgtagcagttgggattgtgggagattactgggcttcctcatcctttagaatggtaactctccttttgctttctgaacacctaggaatttcctgatgttttgttttgttggattccagactttttgttgtttctagtctgcagctgagctctggtgcctgttctttggcccaccccctaatccctaactcttccctcagcatcacagggcttcactgcacacactgtgttcagggcaagatttcatcatttactgactgcatactcgatatgttgtttttgtaactttagccaaaagaaagtaacctttagtggcagggatataaaaaattgctcagggtcacttgcagatattttatttttaaactttttttttttttcctggaaaacatcctgtgcagaaaagggtatataattttagaatacctgaaggcttcttggcttttccactttccttattcctcctcttcctgccactctttttgtcccttctgtctttcctgctcatccttatttgggtattagaggtgtcagttgaggagggactttagctgaggttaagccttcttttgggatttgcattgtaattgagggccctggaagatctctgagactcaaaatcaggtgaagctaggaagatggagctttaaggagcatggctagtgctctgagtaggaccgtaaccgcctccgtgcgtggcatatggtccctgcatgctgttcactctgtatagtacttagtattcgctgaggctaagaggcctcaggtgcctgggcttctgcccttggactcctggatatccagcctagtgctaattgaatgctaagcagtggtaattcaaaatgagagggtcccctgcctctagagtcatcatctaattggggacaggcagacctagataagaaaagcagagaactactttggaaaacagtttatctgctgtaattgaacattcagctaccctataacccagttaatccaatactggggataaatcctagagaaactcatacatgtacaccaggagatgtgtacaagaatattcatagcaaccctattcacaaaagcaaaagcctagaaataacccagatgcccatgagcaagagagtggacaagtaaactggaatattcacataatagaacattatacaattgtcaaatgaactataatgatacctaaccatatggatgaatctgagcaataaaataattaagtgaaaaaagtttaatcccagaagagtaaatgtagcatgatgccctttctaaatgaaaggttttttcttttctatggagttattctttacatacaatatagttcataaattttaaatatattgtttaataaattttgataattgtatataatagtatagtcaccatcaagatgtagaaaatagaaaataggctaggcacagtggctcacgcctgtaatctcaacactttgggaggccaaggtgggaagatcacttgatcccaggaattctagatcagcttggacaatgtagtgagacctggtctttaccaaaaaaaaaaaaaaaaaaattagctgggtgcgctggcatgtgcctgtggtcccagctactcaggaggctgaggcaggaggatcacttgagcacaggagtttgaggctgcagtgagcagcctgggcaagagagtgagactccgttttgtgccactgcactccagccagggtgacagagtgagactctgtctcaaaaaaaaaaaaaaaaaaaaaggcattgggatttataatgtgctgtttaaagtctgaagctcggccaggtgcggtggctcacgcctgtaatcccaaaactttggaaggctgaggcaggtggatcacctgaggtcaggaggagttcaagaccagcctggccaacgtggtgaaaccccatctctataaaagtacaaaagggcatgatggcaggtgcctgtaatctcagctactcagtaggctggagcgggagaactgcttgaacctgggaggtggaggtttcagtgagccaagatagcgccattgcactccagcgtgggcgacagcaagagacttcatttcgataaataagtaaataaataaataaagtctgaagctccactggtcactccttttattgattatttgcagctggtctaaccagttacgtatgtctggcttgattacatggccagagcaacataaaagccctgctgggaacttctgatttgagctcttccaaaaccaggatggatgcctcacatagatcatgatgattcaatccaaaggcactttgcagtgcagtccacatgtgcataaggaccatggggagcttgtatttgggaattctgagattcctgatgtttacctacctagtctttctcttgctgccctgtatcctttgcctttaaataaaaatcttaagtgat

SEQ ID NO: 302 - DNA, 265 bp, Homo sapiens
tggctctggctccagaggacctgagactcacactctctgcagcccagcctagtcagggcacagctgccctgctgccacagcaaggaaatgtcctgcatggggcagaggcttccgtgtcctctcccccaaccccctgcaagaagcgccgactccctgagtctggacctccatccctgctctggtcccctctcttcgtcctgatccctccacccccatgtggcagcccatgggtatgacataggccaaggcccaactaacagtcaag

SEQ ID NO: 303 - DNA, 1718 bp, Homo sapiens
ctgtctggcttccaacccagccaggggtcttaggtgtcccctcctagccctgtggttatccctaggtggctctcgaggagttaactccatgagcccagggatcctagggcctggggtcctgttccctgctccgcttccccataccccagcccgaggtgaagcccacacctacacaccctctgcatggccctgcctggaccccatggaggccgaatagggaggaggtgagaggctggggtgccccaagcttccctcggagaagtgagaggctctccctggctagatcctcatctcaatagcacctcctcccttttctccctatccttctgccccctagtaagtctacgtgtggaatgtgagatataaatataaatatataaagctatattttcaggctcctgcctgccccaggccccctgccccactcccatctcttcttccctgccacccctccctgcagcctccgcggctcactccagccatcccttctgtttctccttctctctccttccttcttcccttgatctccctcttcctgtctctgtcctggtccctgcccccgtctcggcccagcctctgtattctccacccttgatctttctccttgtctctcccgctgcccctggtttcttcctttggtgttggctgtgttggtatcatcagttcttgagctatattttgtttggggttgtggctggttttggttttagtaattttgcgacttcccgttgctctccttctattcccttccttctgccctgcctgcctccctgcacctgcggcctctctaggaagctgttcctttctatgcccaatagaagcaacaaggccctagctggagactctggggatctggagctgcaggcaggaggtggcactggctcccactcccacccctgcccaggctggcatctagaaggcgtcatgaattactttctcttctctcttctcaattttgaggtcctcattcccaagattgaggaggcagtagttaatctgggaaggcagtagaatggccagcattcctgcctgtaagtcttcccaagacagaggcccggtgacacagttcagccaggactgaccacagggctctagagctctctttggtgagacttccctggatggagagcagcagcaggggaagaggtgctctcagagacagcagggctggtgctcttctcccacaagctgagcctccacgttcagcagatactgtccaaggcaggggtacggctgaccaggaatgaaggttgaactctgctcctgagcacggtgcgtgcaaagcatatagcagcacataggctcaggcttctgtaggcttcctgtcccagagccaattatggaagtaagggcttccctccagctagtcactggaatggaaaagtgtgttcctgttcatagccaggaaacccagctcagcaaactccctttcaaagctgtgtgaccggctgggcatggtggctcacacctgtaatcccagcactttgggaggccaaggcaggcaatcacctgaggtcaggagttcaagaccagcctggctaacatgtgaaactaataataatacaaaaattagctgggcgtggtggcacatgcctgtaatcccagctacttgggaggctgagttgggaggattgctgcaatctgggaggtggaagttgcagtgagccgagatcatgccactgcactccagcctgggcgacggagtgagactccatctc

SEQ ID NO: 304 - DNA, 535 bp, Homo sapiens
ctctgatgagaatggggtcccagatggctcaggctgtgacctccctgggcaccaccctccccaggctgggtgtggaggagttggggccccctgccttcaggaggcttgtagtttagaagggaagtaggcattaccatagacgactcctagaggacagtgctatgtaaaaatgtgtgtctataaatgtttatcatgcatgtattctagagctcattcatttattcaacaaacatttggtgagcacctatttcgttcgagaaacttcatttatctcctataattggcaaacttaaaaatgcagcagaaacttacattccaaccttagagactcatagtgagcacaaggaaagttttgccctgagattcatggttatggctgggtaccaccaaatagaagaatggcttaggggagtgccccttcactgagatgtgtttctttgttgaactttgtgtgtgtgtgtttagaatataacagacataagaaaaaattacctaaatgaagactgtacaaaataataaataattctgaagcaga

SEQ ID NO: 305 - DNA, 576 bp, Homo sapiens
atctcagggtacaatgattaaacgtactttgtttttcgaagttaaatttacagctaatgatccaagcagatagaaagggatcaatgtatggtgggaggattggaggttggtgggataggggtctctgtgaagagatccaaaatcatttctaggtacacagtgtgtcagctagatctgtttctatataactttgggagattttcagatcttttctgttaaactttcactactattaatgctgtatacaccaatagactttcatatattttctgttgtttttaaaatagttttcagaattatgcaagtaataagtgcatgtatgctcactgtcaaaaattcccaacactagaaaatcatgtagaataaaaattttaaatctcacttcacttagccgacattccatgccctgaccaatcctactgcttttcctaaaaacagaataatttggtgtgcattctttcagactttttcctatacattttatatgtagaaatgtagcaatgtatttgtatagatgtgatcattcctatattgttattgatttttttcacttaataaaaattcaccttattcctt

SEQ ID NO: 306 - DNA, 386 bp, Homo sapiens
ttttaagtcctttcgtataagaattaatgagacaattttcctaccaaaggaagaacaaaaggataaatataatacaaaatatatgtatatggttgtttgacaaattatataacttaggatacttctgactggttttgacatccattaacagtaattttaatttctttgctgtatctggtgaaacccacaaaaacacctgaaaaaactcaagctgacttccactgcgaagggaaattattggtttgtgtaactagtggtagagtggctttcaagcatagtttgatcaaaactccactcagtatctgcattacttttatctctgcaaatatctgcatgatagctttattctcagttatctttccccataataaaaaatatctgccacc

SEQ ID NO: 307 - DNA, 57 bp, Homo sapiens
gggcctccacctgccatcctgtcttcctgacccccactcctatctcctgcctgtctg

SEQ ID NO: 308 - DNA, 2093 bp, Homo sapiens
ttctaaacctgaaggcatccttgaaatcatgcttgaatattgctttgatagctgctatcatgacccctttttaaggcaattctaatctttcataactacatctcaattagtggctggaaagtacatggtaaaacaaagtaaatttttttatgttcttttttttggtcacaggagtagacagtgaattcaggtttaacttcaccttagttatggtgctcaccaaacgaagggtatcagctattttttttaaaattcaaaaagaatatcccttttatagtttgtgccttctgtgagcaaaactttttagtacgcgtatatatccctctagtaatcacaacattttaggatttagggatacccgcttcctctttttcttgcaagttttaaatttccaaccttaagtgaatttgtggaccaaatttcaaaggaactttttgtgtagtcagttcttgcacaatgtgtttggtaaacaaactcaaaatggattcttaggagcattttagtgtttattaaataactgaccatttgctgtagaaagatgagaaaacttaagctttgttttactacaacttgtacaaagttgtatgacagggcatattctttgcttccaagatttgggttgggggcactaggggttcagagcctggcagaattgtcagctttagtctgacataatctaagggtatggggcaaggatcacatctaatgcttgtgttccttatactctattatatagtgttattcatgattcagctgatcttaacaaaattcgtagcagtggaaccttgaaatgcatgtggctagatttatgctaaaatgattctcagttagcattttagtaacacttcaaaggtttttttttgtttgttttctagacttaataaaagcttaggattaattagaagaagcaatctagttaaatttcccatttgtattttattttcttgaatacttttttcatagttatttgtttaaaaagatttaaaaatcattgcactttggtcagaaaaataataaatatatcttataaatgtttgattcccttccttgctatttttattcagtagatttttgtttggcatcatgttgaagcaccgaaagataaatgatttttaaaaggctatagagtccaaaggaatattcttttacaccaattcttcctttaaaaatctctgaggaatttgttttcgccttacttttttttcttctgtcacaatgctaagtggtatccgaggttcttaatatgagatttaaaatcttaaaatgtttcttattttcagcacttacatcatttggtacacagggtcaaatagggcaaataattttgtctttgtataatagatttgatatttaaagtcactggaaataggacaagttaatggatgtttttatattttaatagaatcatttatttctatgtgttatgaaattcacttaatgataaatttttcaacatacttgccattagaaaacaaagtattgctaagtactataacatattggccactaaaattcatattgagattatcttggtttcttggaagagataggaatgagttcttatctagtgttgcaggccagcaaatacagaggtggtttaatcaaacagctctagtatgaagcaagagtaaagactaaggtttcgagagcattcctactcacataagtgaagaaatctgtcagataggaatctaaatatttatagtgagattgtgaaagcaaccttaaagttttgaagaagactgatgagactaggtgctttgcttcctttcatcaggtatctttctgtggcatttgagaacagaaaccaagaaacatggtaattactaaattatgaggctttgctttttgtttgcttttaagtagaaaaacatgttggcaacattgagttttggagttgattgagataatatgacttaactagttttgtcattccatttgttaaagatacagtcaccaagaatgttttgagttttttgaaagaccccaatttaagccttgcttatttttaaattatttccattcagtgatgttggatgtatatcagttatttagtaaataatctcaataaattttgtgctgtggcctttgct

SEQ ID NO: 309 - DNA, 776 bp, Homo sapiens
gcctgcgccgcgcgggcaggcacctgtgcgacctgtgccccggacctgcggcgccgccctcgagcgccccatctctaccccccaccctggcttggagcacaccctgcgcctctcgtcgtggcctcctggactcaaactcctgctacatccttctccgtcccccatccctggggaggctcccaccatctcgccactggacagaagcgtcccctttgacctgccagcctctcatttcttctccctccacttgtgagcgcccccagctttgcggcgccccccaccccagcgctgtctgtgggtcccttgccccggagctgactcgcctccagtgagtccataccccaggtttcctggtgagttccaagcctttggaagccagatctgtgatcccaagccgcctcctccaccgactgtacttcatcaaccttctctcatgtttttccgacactcctgggtcagactcctgggttcatgacttacttgctagcgtcccttcattttcccacaagtttgccccccacctccacttacctgtctgccctcagcttcttcctgggagagagcccccctttcacgtagacacacctggctgccttcttcacgccctgaggacacttcttggagatttcagacaggcagcaccagggctcctgactgaaaggggagttggtgggcctttaggtctgccccatcccctggaaaacttaggacttattgggttattattatttttaattaaagctggtttaattaaaaagaaagaaacttttttctgg

SEQ ID NO: 310 - DNA, 1068 bp, Homo sapiens
ccgcagcaggcccagggccggttaggtccgcactcctcagcctctcccgggagttcctgcggtcccagcggaactcagggagtctatttatgaagtctccagaccttgggccggcacgcgtgacacggcacttcaggctccacgcacagaatctcgcagatagttgggactaagcgggctctatcgctcagggcgacaggcccggggctacgcgaagaagtcgcaggccaagattctttacagtttgagaaataaaagcaggggggtgggggcttcgtttttttccctgcctctgcgcctctcggggaacacattccgggagagatgcctggccaggctccacggatcccgccagaaacaccaacagagggtctccctttctgcctttcccctctcacttcttccccaacgttgagaccctgcttgtccaatattataatttaaagacatctattatctgctttgtgcttaaaagaaaaattcaacctttttttttttttttttttttttgctgttctccaaggaagttcgtttcctctgaagcctaaaccagtgtctacgcaggcggagctgaacggagaggtgaagcagggggtctttatattccctgcagaaaccctggatcccactccactgaggaaaatcctttctcttttgtgtttgggtgcttttaaaggaatttctttcctttcccttggctggctgggtccagccatctccggccagcaaccctgtcagtgttccaccctgtcccaggccctgtgatatttattgtggctaaaggcaatgagattgggtggaagagaagggtctgggccagggactggagaggtgggggtggagtgggcaagggcacaccctgtggcagggggtcctataattttgtgtaaatatctgtacagcgcgctgctctcggcgttctctgtccactgggtgtgcattgatttaaacttctccactgtggggaagctctgtgaaatcgtctgatggtctgtgtggaagaaaagaaaaatctgtctgccgcctatttcccattggtgtcgattgaataaatgtatgtgaacttca

SEQ ID NO: 311 - DNA, 1101 bp, Homo sapiens
ttccacagacctggcttcagtgtagacagattaaacaaagcccaagcctgtcagccacagaaacaggctctcctcttactttgctgtctaaactggagatcacagaagtcaagactgcaagctcccctgaagagaatccaactcaacctgcacacttgacaagtggagaaacagaagcccagagagagcactgggtttgttcaggaccacccagaaggtgtcacacggggtttccccactctttctgatatattgccttacagacctacctcaaacacactgtttccaccctcttcttgaatgtattcagtagcctttactgaatgtgtgtcttgagagtagaaaaatggaggatacaagaaaaggagcaggaagaaatttgcaaaaatccaagagcacctttgctcccccttatcctccttcctcttcccctttctagttcccctacctctctatctttctattctcaccaataatctctttgttgcatgaatttacccaggagagtcctatatttccattggtggctccacagtggtggctgtcagacccgaaggggtggggagccaagggtggactttaagcatggtgacagatggtattttgggcagaaagctcttagacaatggactatccaaagcactatttaaattctgcctcttcctactctctaacccaaatatgcacaaactctctatggccttgagaagcagttggagagacatgacttgttaaaacctcaaggaatcaagacatgttactctgtatttaagggtaagccccacagcgggcagcacaaacagcctgggagccactgtgcctgtgcttctctgtccttctccctttgcttgccatgaatccgcataccttggaatacactgtgaccccagttaagtgtcccttcgccaggaagctgccgcaacgtccagacctgggtcaagttcccactcctgctcccatagccttgacctgcttctgtcacagcactgatcacactgagatggaagactccagggggcaaggaccaagggccatatcccaagtgactttgtacccagaaaataacagctgttcaataaatgtgtattgagttaattagtt

SEQ ID NO: 312 - DNA, 204 bp, Homo sapiens
atttcccattcttacttactaaaatatatatagaaatatatacgaacaaaacacacgcgcgcacacacacacatacacgaaagagagagaaacaaacttttcaaggcttatattcaaccatggactttataagccagtgttgcctaagtattaaaacattggattatcctgaggtgtaccaggaaaggattttataatgcttag

SEQ ID NO: 313 - DNA, 365 bp, Homo sapiens
acgtggggagggctcccccacgttgcctctactttatcaattaactgagtagctctcctgacttttaatgtcatttgttaaaatacagttctgtcatatgttaagcagctaaattttctgaaactgcataagtgaaaatcttacaacaggcttatgaatatatttaagcaacatctttttaacctgcaaaatctgttctaacatgtaattgcagataactttgactttcttctgaatattttatctttccttggcttttcccttgcttccccttttgccaatctcaacacccaagttgaagactttgtttttaaaatggtttgtcctgatgcttttgtctaattaaaacactttcaaaacaggac

SEQ ID NO: 314 - DNA, 2215 bp, Homo sapiens
gccagggtctcttatctgacttcaagtgaaccaccattttggtggttttgatcttttgtcactgagcccaaagagccagggattaggaattaagatcgtgcacaaaagtttccttaaaattcctggatggctgcagatgttgggggaaaaagtacgtgatattttagaaacttagtgggaaaagtaggatggtatttttatgtaaagccttgacccaatgtttaaaaatataattgtatttagatcttgttattgctccagtacataggaattgtgtaaagtgttaacagcagctgtatttgtttaaattgtgtgtattgaagattaggaaaaagatagtagttatttttcctaaatgaaataactttcttctcttccccttccccacccgaattcttttctgaagttgctggcatttgggtcaaggttttattaaaagctacattttataacactggcacacacaaaaaagtagttttaagcttgtttgcacagttctttttttccattggaaatggaattcattgccttaggtctttttaaatagtgtattattatcgttggggctggctctatgcttgaaaaccagtttatttataacctgttataagtgctatattctgtttgcagttaggaaatgcagaattcaaagtgatctcctagcttgtaagcaaactgagatgcactatcccttttctataaaaaataagttaatgtgtcaagaaaccaactctattaaggtggggtttaatattaccctttcctatgtgttttatctaattattttggttgttaatatggtgataatggaaagtcaagttaaattttaaatattaagaattctgatttattgagattgaattatgccaccacgtttatgtaaaaatgaaggtggcaccgtggtgagacctaatgagaaatagttactcagttgtaaaaattttgatttattctctttcttctgacctccttgcctcttgtcttgaaccatagcaaaaggatactgcatctctcattactgtagtgctgaggttattgaagttatacaaaacacatctcagtctctgtttcttggaaaggtatctattacatcctgctagctgactgacaaaactaagcagggagaataaagataattgtattttatgttttgcacacaaacgcagaatttgtataaccatatgacttcatagttgtgatctcaaaaaagaaggaatttctcctttgtttcttgcagttaatgtaagaatactttaaatctctaagcttctgaagtgttagaggtagagatggtctagtaaagatgtagtagtaatgttttatccatttagcatgtgtttattttttcatatgtactcaaaggtgacttattggttcacctcagtgatattacagctaaaaaaatcattcattagcaaaaggaaaagtggtctcaacctaacatcagaagtgtttcttattattattttatattgagttgaatattgaactctaacagttttctacatacaaaacacagtgtcatgaaggttattcataattgcattatagaggaatgtagtatgtcataagtactttgtaaagatttgacattcaactgtagtatccatatgttgcttaaatttccttatgagccccatgatggaaagacttaaagatgaatttgagaaaaattgaaagaaattagattatcaggttctgttaaattgttacatgtatcttgcttaaatttctgtttattaatttatatccacccaagtacataaagcaaatttggaggaaacaactgaagttgtgcaatattttctgataattgctttttttattcttgtgttttctacttaaacataatgtctgtgtcatcaagtattatagtcagacttttctttttttctagattgttaaaattggcaaatgaacttttttaaaaatcatcttccatgttgcagttagtctttcttttcattacaagtctttcacagaagtttggtggtaatattgaaagaactagcattgggcagaatgtgtcttttttaggcactttatattctcaacatacaatgttaagaaccatcaattttgacttttactaagttgttaaataaagttataatacagctgtgaagggctaaagttagagttgattacataagtaagtattccccatataatcttttaaaaagttgtgtatgattattttaaaatctctctctct

SEQ ID NO: 315 - DNA, 675 bp, Homo sapiens
gttggaagatgcaaagtttatacctgatgatcagggcagtaggcataattcagcaacaaacaatcttcctttgggagaaacctgttcattccaatcttctaattacagtggttcctatctcagggatactggactttctgacgcagatgaacaattaaggggaaaagcttcccttttccctctgtggcagttacgattttgacttcagtcctgagaaaaacttcaggttttgaaaatcagatgatgtcttctccttttccaaacaccacacgttgaaagcatttataaatccaagtctgaaactctgcgctctagtactgctgttaagatacacaacttgtttcttagttcatataatctcgggatacacacacacacacacatatatatacacacacatacgtatacacacacatacatatatataaatatacctgatgccagatttttttcataaatattctgcctactgtaaatatgggttcctctgagttgttttagaaaattagcgcaatgtattaaaatcaagtgttaggaaatttcatggtcttacctacaataacttttattttggaattgaactattattaaattgtatctaatcctggattacagtttaattaattattcttagtgcttaaggcttcataaagtaatttttccaacctttttttt

SEQ ID NO: 316 - DNA, 1632 bp, Homo sapiens
aagtttggtttttggaagctggcatggactagatttaacaaatcagctatgtggttccaaagttttacagacatggagaacatcacctgttactagttcagtaatataaatattttgtatattaataatgctgtttgttcagcatttttcggtcatttgattttgcattttgcacttcctcccaggatatttttttggtcaaaatatgaagtattggtgcagtttgagggtgttttggtttttgattcctggtttttttgttttttgtttggggtatttttggtgtatgtatgtttatgtatgtgtgtgggtatgtgtgtatacagtggagagcaaattggaaaacagttctatttatcctcctccctccccagtagaaataaaaaaaatctttacatttgttacttttcttttccccccgtaagacacagaattaatggaaagtgagtatcttggatttcaaatctgaagagatttttaccattagtggtttgattttaatttgcttggttaactatcatatttttcatacacttctctggatttaaaatatcttgaggtattttgccactggcttcatgctggagtaatgggtaacatatctttggtatggttgccttagattaacttacctagtcagacccagaagaacttcttttactagcttgcttcctaaatgccttttttcctctccttttggtctccaaatggcctggtcagcttttggtaatattcttcctcatcttccacctagcttgagaaggatgttctccatatagagtttagcgagtgcctaatccctccttttgtaagattttgttccctcagcttgaggaacaacttcatcttcaactttttatttctccctgatgttacagtttggtagatttcaaactggaatagctagcatgtgcttgctaaataattttatgccagccttatcctgtatcctagctgttcttaacagcaggtacaaaaatgcctgtttttcagcaaggttgaaattgggaatgtccttttgaatcagaagaaaataggccatagactcatctcccagcacaaatgggcattctatgaaatggtactggccctaggaggatttcctcaaccactctcctactcttggccttgaacctacctctgggttggatcttactattgtagctgctcactataccctcctgcatgcttagaataatgctttgaggggagcactggtaaaacacagtatttatttttttacctcctttaagaggacttggaggtaagttgcattcattcactcaagtttccctcttgctgtctaatagaagcttactttttgctatatcagcatttgttacagccaatatttaaggacaaaatttagaaaatatatcatttcctggcccatcatcaaactaatacagcttaaccttgcagctaccaacttttgtgtcaagctagatatctttatttgatatctaaggtgcaagaccaacaatatattaagagatctgtagacatgaaggcaaagctcttgtattttttttcatccaaacacctcaatttattttataaattcgttcatttttcctgttatgttttatataatatatggactaaacaaaataaaataacagtgcaaaagag

SEQ ID NO: 317 - DNA, 464 bp, Homo sapiens
acagagaagacttcatttttttctgttcagacttgttgcaacagcagtcatacccaaatcatttgcactttaaaactggaagattaagcttttgttaacactattaatggggtggggaatagggtgggagtgggggtttgggagacgggtgggaaagggtggttggggggaccgatgttccataattctaagtcttctatgcattgtccaccaagaagatctgggcagcttctgttcctgcacaacagttatgctatccttgcagctaatccccttctgttactgtttagacaagaattccgctcctctctcaagatttacttatggtcatgtgctcagaaatgctcaaatgggtacaaccatcaccaagggtgggatgggagggcagaggggaaataaaatataaagcatcagttcttgcactctttgtacagaattggtataaaaaggataattccacactg

SEQ ID NO: 318 - DNA, 163 bp, Homo sapiens
aacaggttgatttcatagttattgagacaaaacaagggaattacgatgagaagacttttttccccctgcctttctttacaagttgctcaccttctcaaatgtcataactttaactgaaaatatttagctaaatttccatgttttgaaagtatcttagcatttc

SEQ ID NO: 319 - DNA, 1630 bp, Homo sapiens
tggactcagtttggttttagtccacatggcctcctgtggatataaggatatctgtatgtggaaggattaagatctcccccaggcagctataagaatattttagtttttttcttatcaagtttctcaacctttatttttaatgaaggaggtgctgagttttgtatctttttaatcataatcaacatcagtttttgacccaactaaccttgactgtattcaaacttatgagagtataaaggatctggaggttggggatatgactgacaaggaaaggctgtggccacctgatgaccctttccctttttattaaaccggacacacctgtttcccatttcgctgtagtttagtttttggtttgttgtggttggaactgctttgagaatcctgggatttgtgctgctgctgttattcaaagatcaaaggagtaaaacatagttgctcctaacttttttccagcagcagcaagtggtaataaacatgaaaactggtttgtagcagttttgaaagaatagaatgcattcaaatgtaaggctgcttctggatcattaaagccagtttcatcaaacagttcaacagagagcagcacttaataccctttatacagcccattttttcatagtttcatttgttcttgcccacaagcttgaaatccaggttaaggtatccagcctttatcatataagcattgacattatccaggcctagtcagtagcagtagggtaacgggattgaaaaagatttgatggagaggaaagtatctaatattagtcatggttttgacctaaattgctagacagtcgtgccattcacaaagtcagaaaatacagcaggaagagacagcttttagaggggcagagaattagaggatggtggtagtaatgaaaatgatgcattcagtttaacaagtttaatttgagacagctatggtatagctaaaaacaaaagcccataaagttggagatagggaccagagtttaacatagcgatctaggccagaattgacaatgtttaagtaatggtggaatctgtcaataagacttcccagagtgttaatatatatcagaaatgcacacaacagaaccataggcaacaccaacacaggaagaaatagaagtcacctattgaaaactggaatggcccattcagaaagacaggagaattaggagagagtgagtgaaagaagccaagggtcaagaatgcagaagcaaaggaaggactaaaaagcctccacggacatcgataatcaagagattattaagatctttgctagaagagttcctttacctgtacttaactcccttaaaaagagaaaagtgatggaatgacttctgcaactgtagtcccagcaggaactgtgaagaccagctgccctgcaggatccagtttttcttgggaggttgtatctggtcataaggtaaacattctatatattctatgcctgctctagaattgaaagacttcagcagtattaaagcattttttaatcttatttgagctttcatattcttcaatggttcctttcgtaatacctgagttaataaaagtggtctgaaagagctcttacggtttctgatagaactatataggactaccttttaagattaaatataagcatctgtacgtaaatgta

SEQ ID NO: 320 - DNA, 625 bp, Homo sapiens
ccaccgcgtctcctcctccaccacctcatcccgcccacctgtgtggggctgaccaatgcaaactcaaatggtgcttcaaagggagagacccactgactctccttcctttactcttatgccattggtcccatcattcttgtgggggaaaaattctagtattttgattatttgaatcttacagcaacaaataggaactcctggccaatgagagctcttgaccagtgaatcaccagccgatacgaacgtcttgccaacaaaaatgtgtggcaaatagaagtatatcaagcaataatctcccacccaaggcttctgtaaactgggaccaatgattacctcatagggctgttgtgaggattaggatgaaatacctgtgaaagtgcctaggcagtgccagccaaataggaggcattcaatgaacattttttgcatataaaccaaaaaataacttgttatcaataaaaacttgcatccaacatgaatttccagccgatgataatccaggccaaaggtttagttgttgttatttcctctgtattattttcttcattacaaaagaaatgcaagttcattgtaacaatccaaacaatacctcacgatataaaataaaaatgaaagtatcctcctc

SEQ ID NO: 321 - DNA, 4024 bp, Homo sapiens
tagccataagtattggatagttgaatcacaggaatcctttttgtgattggtccatttggaatatcttaccctccctgatgttttgggggtttctatgacaagagtcataaaatcagtttgggattgataatgtgtagtactgcccatgtgaacagtctctaatttgtcttgtgattttaaacttatgagtcaagaagggtctcttcctttatcattgccttttaggaaattttccacatctttcagtgtttgaacttacttgtgcttgagattctacagttttatggtaaagtttgcacgaacccttaggccagacttttctgatctcagagtcccttccaatcaatttgcagcttcacataagctgttgacctgatttctgacactgcttcagttgtaaattttatactgcttctgtataaaatgcctttcttctctatctgtgtatattttataagatgtccttcttagtgtgaaagaagggaaatgtggatcatcttgtggaagctaatcactggcaggagcctggatggctggcggaaagatatatgagaaagaaaaattatgaaggtagaacagagtgtaggaactgggaattggtttcatggtataggttttaaaatgagacaggctacccttcgggagtccacctctcttgaggcggtgagcagaagcttgtcctccatatttatacctagaagtgtggactgctggttcctgcacagactgccggttattcactaggaatatttccccaagcaccacagtataaaatactacagcactctgtgttaaagactaactgtctacatctccatatgttgtagtgttgtgaaaatgtgattttaaaaaattatcgccagttaaaactggctattcttttcctctatttcaaagtcatttttgttcagtggaatagagacagcaacatggtgttaacctctcaattaaaatacaattgacaccagtaaattttgccataaaaagttaaaatctcttgttcaaaatatgtgtatcttcttaatgtgttcatgttagagaaagtgtccccatctcactgccaaaaatgaaagaaaataattaaactctttaaatgattaaatgtaatgattctactcgcagtgcataacagcacatatttttgacagattattttttaggcaattacctttccttaaggtatctgatacagtatagtaaagaatcacttatatcagtaatagcacttgagagatagcaagtcaccaagaaacttaattttcatttaaaattttattttgtgaataaggtcaatctacaatcccagataactacattttttttcatagatggccagtgttttcaacagagatttaaaatggaatattaaaattatagtgattattcagaagcattttaatttagaaaggagctggtttgttagttcactgatgacattttttgacaaacattttataccattatcacaataatcagacttgaattttttttggagttccttcatgtgaatgaaaactgagttaaaagaaagtaggcatttaggtctggatgcagtggctcatgcttgtaatcccagcactttgggaagctgaagcaggaggattgcttgagcccagaagttcaagactagcctgggcaacatagtgagactcggtctctaccaaaaaaaaaaattttttttttttaaattagctgggtgtggtggcacctgggaaacagagcgagacgctgactcaaataaatatctaaatagatatttagaatcactgaaaaccatattaaatgctgggttaatgctgacttaattggcttaaggaatttttataggcgtaagataaattttcacagactaagtttatttcagacaaaatagagaattcttttaaaagttttttttttttttttcctttttcgaatgttaatgtctaagacaaagttcagaaaacgagatggcctgtggtagtttggaaattgctagatatgttgaccgtttccaggtcttttatctagtgtagttaagggaaagcctatttaagaagtttggcttcaagtttctgttttataagacaaaagtgcatatttctttacaggctaatgctaggtttttgtctttacaaattattttcagaaatggctaaaagtgtacagaaaacagtaaatcccttctttactcagaataacttcttaatagttgaagcatccaaaatatgtaaaagcaagggtgggcgtagtggctcttgcctgtaatcccagcattctgggaggccgaggcgggcagatcacttgagatcaggagttcgagaccaccctggccaacgtggtgaaaccccgtctctactaaaaatacaaaaactagctgggcatggtggcttttttgcacgcctatagtcccagctactcgggaggctgaggcacgagaatcacttgaacccaggaagtggaggttgcagtgagctaagatcgtgccactgcactccagcctggacaacggagtgagactctggggaaaaaaaaaattaaacttcctactttttttctttttgtagagacagagtttcactctgtcgcccaagctggagtgcagtggcacaatcatacctcactgcagcctcttgggcttatgtgatcttaccccctcagcctctggagtagctggaactacaggctaaatttcctactttgtaaacatcagtagtggccagatacttctgagtcttaaaagcataataggccgggcgcggtggctcacgcctgtaatcccagcactttgggaggccgaggtgggtggatcacaaggtcaggagttcaagaccagcctggcccaaatggtgaaaccctgtctctactaaatatacaaaaattagctgggtgtggtggcgggcacctgtaatcccagctactcaggaggctgaggcaggagaatcgcttgaacctgggaggtggaggttgtggtgagccaatatcatgccactgcactccagcctgggtgacagagtaagactccgtctcaaaaaaaaaaaaagcataataatttattacatcccaaatatataaaaatttgagtgcctttgcagttgggatggttcctaaaattgcgtatagaattaaggcacagaattgtgtgtaaggtcctgaatctggctaaaatacagtggatgtatgtattggaattatgaggcataagtagccagtatctatagttagaatctacaaggcctcctttttgcacctgtagactagaatataactgttattggtgcctttgagtgttatctctcagtggctagaggtgctgtttcaagcacaatttagactagggttgaaccactcattgttcaaatcattggtgggctccaatgtaaaatatcactacatcagtccacaagcaacattaaggaaatctaaaggaaatggaatttgactttttagagtataatgatgttctagggcataatgaggaaaatttttaaaaaatagattataatgatacatattggtatcattaagacaacagatttgagcaaatacaattaaggtgtcttattttttgcatcaagtaattattgctgtggtctttctactccacaaaataattttttctttttgcagttgaaaattaactgcattattaactaattaataaaataaatcaagtggtataagggattagtttaccctcaagccgatgactccatggctactgatattagttagtttaggatttttaaaaagcatatcagacccccagtttcaggaattgagtataaatattgcttcttgtcaccctgggacagtaatgccttatagtggcactagtcaccttaagtagattacacatggttgaggtgaataaagctgcatgggaatttgctttcgtgatatatttcatttgcaaacttctacataatcaagttttatgtttaaaaccatcggttctatatatctagctttaggaagttgcccttacaggtgggaccttttgtgttaatctgttttctccccagtcatcttatttggctatgtt

SEQ ID NO: 322 - DNA, 1002 bp, Homo sapiens
gccttctttcaaggcaaattgaaaatcactggcaacatgggtctcgctatgaagttacaaaatcttcagcttcagccaggcaacgctaagctctgaagaactccctttggctacttttgaaaatcaagatgagatatatagatatatatccatacattttattgtcagaatttagactgaaactacacattggcaaatagcgtgggatagatttgtttcttaatgggtgtgaccaatcctgtttttcctatgctctgggtgaatagagcctgatggtatactactgctttgcggaattgcatacaactgtgcattacaaagttaatatggtaattatggtctggggtaaaattgagtttcagaataaaattaggaacagtaaaatccaaagaactatgtaaacaaaaaagcttttgttttgcttacaaagtatatttaaggattattctgctgaagattcagtttaagagttttccttgggagaactaagtaagaaacacaatgccaacagctggccagtaattagtgttgtgcacttcatgtcattaatcaatttctcaatagttcttaaaattagtgagattaaaaatctaaaaattttgcatttcatgctatcagaaacagtattttcttcccaaatcaaaataaaagaaatatgatcagagcttgaacacaggcttatttttaaaataaaaatatttttaacatgggtttccttattgaaaaatcagtgtattagtcataaaacaccatcattaagaataattgaacaataaagtttgctttcagatgcagttttcaaattataatctcatttcaatttataacgttctcagtcctttgttataattttcctttttcatgtaagtttaattatctgcatttatcttttttcctagtttttctaatactaatgttatttcttaaaattcagtgagatataggataaaataatgctttgagaagaatgtttaatagaaaattaaaataactttttctggc

SEQ ID NO: 323 - DNA, 953 bp, Homo sapiens
aatttcctgataacccggacaagttcatggaaagcttgatctacattcatcctaatctttgctgatgcctccatgtatgttaccttaagttgccgtgctaactgccgtccttcttcctgtgttacctgtctttgatgatccagatctgctttattaccaattaaaatcattgggaactcatcacgatcctttactctgagaatctgtctttgaaacttatagatttcttcaaaactgcctctatctgtgactgaaaagaccaacaggaagccctcgccagtcctcatatactgttctctcatggctccaagctcttcttgtcctgctgtatccaaaatatctagccgggctgctctgtcatctatcacacactgctttgtgtaagaatcttcattggttggatcataatccgttacaaaataggactcccaacttaggaaacaaaacatttgtaatatgattgaagactcctgcatgcctcctcaataatattcccctctctcctcccccagcaccaagaggtaatcaatatcctgaatttggtatctgtcattctcatgcatttatacaacattagtaatcatatgatagtattcctaagctatgttttggagaggacaccactgcaaatcttcagccctatactagcttttatcggtagccatcaattgcagttttaatagaaatacaaatacatcaagtgtctgttctttaatttgtaaagaaaatttgttttctagcgtgacaccctcaaggtaccgtatctgtatgtaaatgttgtgcccaatgctacacagacattattttaaaactattttctgcctttggtaaatagactaaactgttttctttattcctcaaaagaattagatcatacttcagtgttgattttgttgctaatgggacatggagatgtctggatgataataaatattcctgtggtatggtcactg

SEQ ID NO: 324 - DNA, 989 bp, Homo sapiens
gacgatggaccgccggactcttttctgcagcacacgcctgtgtgctgtgagccccccactctgccgtgctcacacagacacacccagctgcacacatgaggcatcccacatgacacgggctgacacagtctcatatccccaccccttcccacggcgtgtcccacggccagacacatgcacacacatcacaccctcaaacacccagctcagccacacacaactaccctccaaaccaccacagtctctgtcacacccccactaccgctgccacgccctctgaatcatgcagggaagggtctgcccctgccctggcacacacaggcacccattccctccccctgctgacatgtgtatgcgtatgcatacacaccacacacacacacatgcacaagtcatgtgcgaacagccctccaaagcctatgccacagacagctcttgccccagccagaatcagccatagcagctcgccgtctgccctgtccatctgtccgtccgttccctggagaagacacaagggtatccatgctctgtggccaggtgcctgccaccctctggaactcacaaaagctggcttttattcctttcccatcctatggggacaggagccttcaggactgctggcctggcctggcccaccctgctcctccaggtgctgggcagtcactctgctaagagtccctccctgccacgccctggcaggacacaggcacttttccaatgggcaagcccagtggaggcaggatgggagagccccctgggtgctgctggggccttggggcaggagtgaagcagaggtgatggggctgggctgagccagggaggaaggacccagctgcacctaggagacacctttgttcttcaggcctgtgggggaagttccgggtgcctttattttttattcttttctaaggaaaaaaatgataaaaatctcaaagctgatttttcttgttatagaaaaactaatataaaagcattatccctatccctgc

SEQ ID NO: 325 - DNA, 600 bp, Homo sapiens
cttctgggcagatgaaaagctaccatcacttcctcatcatgaaaactgggaggccgggcatggtggctcatgcctgtaatcccagcattttgagaggctgaggcgggtggatcacttgaggtcaggagtttgagaccaacctggccaacatggtgaaaccttgtctctactaaaaatacaaaaattagctgggtgtggtggcatgtgcctataatcccagctacttgggaggttgaagcagaattgcttgaacccaggaggtggaggttgcagtgagctgagatcacaccactgcactccggcctgggcgacagagcgagactgtctcaaaaaaacaaaaaagaaaaaaaaactggggcctgtgtagccagtgggtgctattctgtgaaactaatcataagctgcctaggcagccagctacaggcttgagctttaaattcatggttttaaagctaaacgtaatttccacttgggactagatcacaactgaagataacaagagatttaagttttaagggcatttaatcaggaggaaaggtttggaaaactaactcaggtgtatttattgtttaagcagaaataaagtttaatttttgcttg

SEQ ID NO: 326 - DNA, 823 bp, Homo sapiens
gccccaggcccgccctcctggccagcagagtggggcactggggggcaacagcaacagttttcttgtcttcattcagtgatatgtagggaggaaggaggttgatagcatagatggcaactgattcccagtttaagataggaggaaggagagcaatttctaagtttcaatcctgcgctgtacagttgaagaagagtgtggaggaagctattaccaggggagggccagggctctgaggagtgggcgctgggagaagctcccatttaggaatgaatttaactgtccttgggttacactaccatttattggaacaagccccagaggcagtatttgatttcctcaggccccactctaggacaggaggcaccatctatttcagccttctgctgcctttgcctggtcctccaggttgctgggggcaccacagacatcaagattccagttcatccaggtggctggagccagcagccaggaccagggtcgttgacagcaggttctgcagcatcctgccttgctgctctgtcccccacatcttcctggccacagccccttgcccctcctctaaggggttttactagcaagcatcctggctgctggggctacttcattccccctccataaagtttcagccattatgggcactggttttaaaaaatttattagtttgactatttgatgtttttatagtgattgccaactttaaaaagtaggctgttcataagcactgatgcagtccctagggaatagaatggtgcttctgatcacctgtgacatgaacagtttcttctgtgaggacagttggctattgaaataaaatgagcaatgg

SEQ ID NO: 327 - DNA, 1086 bp, Homo sapiens
tctggacagatacctcaattctaggtgaccaacgggagggcttctcaaggcttagctctccctgagacccagctggcttttacccttgacctgtgtccctagctgaatcactagctcagatttttctgatctaagcaaacaactcccagctgaggaatgcaggccacagcacccaatcaagacaaattgttattatcagaaaatgaagcaacacttgagctgttcaggccagttccctgttgaagaaacagttccctgttgaagaaagtagagcctgacactgctcccactttggagaccacattccctgcacacggtctttgagagagcagttgcactctacaggcacacttctgaggtacggtatctctctccagccactctgataccaagtaattcaagctggcattccttctattagggaaattcattttacccaatttgcatttatggaattgatcatttaagacactaaattagtttttagaaccaattatgggaagaattccagttgttaggaagagatgaggagttggaagaggagggattagaaacaggaggaggcagtcatcctctccttgccaaaagatttaaacctgtccacattggtggtgatgatgggtgagtttccatggtaacacatccctaattttaccagggaagaggagagtactcactttaccatctttgaatatatttcatagaaatctagctctctgtaccctgaaatcttccactagcctcacttttcaacagagtcatctagaagggagggttggcttcccaaaagcataaccttgaccaaaccaaacaataggcaccagcaatgctgtcattcagttatgcagaagctcatttgtgaaattctgtttctctgatttcttcgcaagtctcttaatggtcatttgtgttagattacatcaaactgatggatagccattggtattcatctattttaactctgtgtctttacatatttgtttatgatggccacagcctaaagtacacacggctgtgacttgattcaaaagaaaatgttataagatgcagtaaactaataacagaattattaaaatatatcaggct

SEQ ID NO: 328 - DNA, 227 bp, Homo sapiens
ttagtagatacaagttgacctttctctggcccccagctctagtgtttgagtaaaggagactgaggatgatttactttttgtttgaatttacctatggcattagcatagtaagcagatatttctacttttgtggtgtgggaggggaatgctatggaagtatgtaataatttctaatgtatattttcaatacatagtaattttttcaaataaacatttttgctgtcctt

SEQ ID NO: 329 - DNA, 3270 bp, Homo sapiens
cctgaggacggttccagccctgggccaggcagagaggaaaatgggcctgtctctgccgttcaaagacgcttttgagtttgggtgatggctgatgctggctgtgctagattttcccatggtgccgttcctttgcagacagaggattcggagagccctaggagacaggcctgcaggaatgtgcttcattagctgcagtgcgctggtgctgcctaacagaacgcacactggctgtcactaggaagcgccatacggttgctatcacccaacatggtgaaagggtgatggatttcactgtgaatatgccaaggacacctctaaacttcccccatgtcagtcagatgaagttactactatatttcaccaccctgcaggtaactgaaactcaattaccgctgccgctcactcggttccatccccctgagtttagatagctctggtgcctctcagaactcccctgtctgttctctttgctctatcccaggggtgagcctgcgagagccagccaactaccccttcttcccagagctcacttatctgaacgtttcagctctccctggaagaccttctgcgttggtctccagagcccccatgctgaggctactaatgaggaactggcccgaagcctcccacacctcagggtttatttgaatacgctggcgctctcagtttagggctctgtagaagatacataatgaaatttctcttgaaatgaattactgcagtagaaaaaagtacatacatatatatgttaaaatgaaatatctctacacaggcctgttttaacaattacgtaaataatacttgtttttttaaaagtaatagtaagctgggaacttttttttctaaaacaaaaggtggagttcgttcactgaaaagtgttttgagttgagaaggggtacagttggtgaaatttaaaaatgatggaacaaggatttgaggaatgtagaagactcaaggaagtggggattagattaggggagactggagcacgtttgtaatctgaaaggaaagagctggtagaaggggagagatttaaaatccaaaaaaaaggaagatgagttgaaaagcaaggggagaagggacgggactaacattattgcctaccttctaaatactaggcacttttcctaagacagtttattaacctttacctggatctttatatagttttgtaaaaatattgcttacttctctcacccattgtattaagtaggtattgttgttttcattttttagatttattcgtttatttagcaaccatttcctgagcatccattctgtggggtaggtgtatactgagcagtagttacaaatgggagcctgaggctcactgaacagaaacatcaccttcaatttcctactgctagtaactattggagctagaataataataatcgagcgtttaccctgggcccagcactgtggtaaccattttacaaaaagaaaatacccagttaaacatgagaaaagtgaggctcagaaaggtatagtaacttactcaaggtcacgcagatagtgaatgacagatctaagattcaaaatccgggtctatttgattgtatatggttgccttggatgatttcatctactctcatgttttcaagcatcatttacatgctgatgacattccagtttgtatcgtcagcccagacctgtcccctgactttcagatgatatttcctagatgccccatagacatctcagatataacatgtcttctttccattggcagtaccagcaagccagacactccagctaggaactcaaggagtcagcctagaccccacatctcccaccctcagccaaccaagtcctggtggtttgattaggttggtgcaaaagtaattgtggtttttgccattacttctaatatattacttctttgcatttgctgttccagttgcaatgctctttccccagacatctgcatgttcttgtcctcacttgctttaggtctctctttcccttatcaaaaaggcttttgctgactatcctaaatacaatagcactccctcccaactattctttaatgctgtacctagctttatttttcttcagaatatttattactctttaacatagttatttctttattgtctatctccccactcccagaatgtaagcttcatgaaagcagagtctctgttctgttccctgttatatctccagcatctggaacagagcctgggacaagctaggtctccataactatttattggatagttgagtgactggttgtggatgtacagtataagcatctaattcaatcagggagtgcttcctggaggagctgatacctgtgttcagtcttaaagggcaggagtttggataggggaatgttagttaatagaatgaaaatttcaaaattaaagggcaggagtaattaattgggtggttgagatgcatgcctggcagagcaagcagagtatggaaaaacccagaagtggagatatctggaaggtgattggtatggctggagtagaggacactggcaggagagtagctggagatgaggcaggagaggaaggcaaggaccaggatcaggtttgaagggtcttgagcatcaggtgaaggcgttagactgatttgaagcaggaactggtcacttttgtgttaataggctatgtggaagagaagctggggtagggagacaggaagtagcaagcttcatgtttaaagaaccaaagagttctgctaacttaggaacccagagtaagttgaaaacaaattgctctctggctgaaagccttcagtggtgatagttggaaagtagaatgattgcagagatgtgctttggagatttggaaagcaggctgtgttatttgtggctgttttctccttgatgcatgtgcagaatttccatgaacgctaatggagctattctgagcatttgctgaagggaaggaagcttgcagacatccctcccaatcttgcccacacactgagaagtaactcggagctacagtctgttaaaaatgaaaaggttgaggccgggtgcattggttcatgcctataatcccagcgctttgggaggtcgaggcaggcagatcacctgaggtcaggagtttgaaaccagcctggccaacatggcgaaaccctgtctgtactaaaaatacaaaaattagccagatatgatggcaggcgcctgtaatcccagctacttggaaggctgaggtatgagaatcgcttgaacctgggagatggaggctgcagtaagccaagattgtaccactgcactccagcctgggcaacagagtgagactctgtctc

SEQ ID NO: 330 - DNA, 128 bp, Homo sapiens
gcggaggacccctctgaatcctgaaacccctcttgcctctcttccacggaagagggcctgggccccgtggagcctcagtgcccgtttggcctgctgctctcgctgacaataaagagcccttgcgttgc

SEQ ID NO: 331 - DNA, 1215 bp, Homo sapiens
atgccctcagtggccacatcatgcccactcccactccatcctgtccccaaggactcacatacagtgcctggagaaagccaaagacctttatttcttcctgcctccccgtgggaagcctccgccctgaggtccgctggcccaccacccctgggtgctcagtttctaccaacatgagccagcaagtccttgtggtagccctggggtagcctgtagtagactcgggtcctgtccacagccctagctgccagcaatgctgtcctcacagaggcatagtcgcccccagctgggttgtgctccactgtgacggtggcccggggggaggatgccagcagcctgcctatggctccagctgtgctgtggcccagcagcatggcctgcatctggaaggacacaggttgccagagcccctggcacaactctagcatatctgtgagcagctgttccctgtagccactgcccagcacctcctcaggccagcctggtgccacagtcacgtgggggaagacctcagccacagctgtaagcagctctctgccagccacatggccggggaccgaaaaactcccgtgggagattttggccccaacccacacaggccaatgcaagaggccaaggctggagaggcgtgccagcaaggccagggatggccggagggctgcgggctccgctatttgcaaatggatgccccagtgtccgggatgtgtggccagctgctgcaggcaggactccagcgtcaggatgttgccacttggagtatgaacaatgggcacggggttttcagccacagttccctcgaggccagtgttcagcaggatcatgccttctgtgtctggaagaggcggcagaggcaacagtgtttaggatttgggttatcataaggtgttaagagtcccttgttaaaggggcagtgggagttatggggtcatcaaggaccttgcctctctggaatctgtcaacccagttttgggctccaggtggatgggttgctttataaatgtgcctggtgcatgagaaactcttgtttcagctcttggcctttacccatgactcagcctgggggctggtgccggccttgcctgcagcaatgtagctgaggactggtctgaaggccaggagccctgtgctcttgacatcactgtactccctctccctccccgcaaccctgccccaccttgcatccagggtatggtgtaaataaacctgtgttgccatggc

SEQ ID NO: 332 - DNA, 15 bp, Homo sapiens
aaccttatcatgagc

SEQ ID NO: 333 - DNA, 794 bp, Homo sapiens
ctaagccagggcccctggatctcctcccttaccctcctctgctgggaacctagcacacctgaatcagctggacatactgctggagtccagtgctttctttccgtcaccctggggatagtccttcctggcatcgtggtgggggaggagcctctggcttccctaaactgcagcctctctggctggtcttcactttcctcagttgatataaaactctgggtcttggccatgatgtccttggactccatcgctaaagggaccatctgctgcagttaccacagcaactgacctgagcggcaccctggtctgtggagatggactcaggatccagtgacatgattctgaacttttgtggagtttgacaccttagagaagctacccctcaaactgcacatctacacacaaacaaacaatgcataggattccaaggctttaaagctgagagaccctggcctcaagttatttcatgcgcacagagggaagccatgtggggttgctgaagatgccttgaggtgaaatgggggcaggaaagccacatcttgctctgcatttataaagaccgtacaaactcagatccttggtacccctaaaaagattgccaattttcttcatctttgccatatggaggactgtgacagactttggacagtggcctcttgagttcctctgcagttttgacatttaggattttgtgtcttttaaactggaaaatcttctagcatgttgggttgttacagagtatatttttgtctgcagctgtttgttgccccattcctaagaggagtttatccatcctg

SEQ ID NO: 334 - DNA, 574 bp, Homo sapiens
gatctcctgtgaagcagaaccaacaggtacctgttcattccctatgggtgtccctccagggatgaggagctcactcccttccaagggatcacttccttttttaattttttctgtctttttaaagggaaaggatcacaccatttactaagggaaagtgccctccaactgtggattacaattcagatcctactccttaaagccacatgcgaaggacagcctgcagtgaccagagagcccaaaggcctgaagacaaatctgggggtgacagcatgggcatgggagtggggtgtcttagagaaaggacacatgggcttgggagaggggagagatgtatggggatcacctttgccagagctgcatacctgaaggtcacagtgtcttccgggacagctggggacaggtatcttttgttgcaggagatcaattatcctgagaactcaactcagccagtgacatgaacatgggggccagagagcagatggactgaagggatgggacgtagttgacacttgtgggaccctttctattctaaagccagagtgcttggctccttgtttattaaagttcagaaagt

SEQ ID NO: 335 - DNA, 189 bp, Homo sapiens
aggctcctagcaggtcctgaatccagagacaaaaatgccgtgccttctccagagtcttatgcagtgcctgggacacagtaggcactcagcaaacgttcgttgttgaaggctgttctatttatctattgctgtataacaaaccaccccagaatttagtggcttaaaataaatcccattttattatgtctc

SEQ ID NO: 336 - DNA, 163 bp, Homo sapiens
gatgtttgtgctccgtagcttctagtctggaactgctgctgacccctgtgtgacatcacagggcctcagtttccctatctgcaaaatgggatgatatggaggttcaatgagatggtggcattttgagaatggtaaagaaatacacagggaggggatgatgact

SEQ ID NO: 337 - DNA, 1266 bp, Homo sapiens
cagccccatcccaggatgggtgtctggggagggtcaagggctggggctgagctttaaaatggttccgacttgtccctctctcagccctccatggcctggcacgaggggatggggatgcttccgcctttccggggctgctggcctggcccttgagtggggcagcctccttgcctggaactcactcactctgggtgcctcctccccaggtggaggtgccaggaagctccctccctcactgtggggcatttcaccattcaaacaggtcgagctgtgctcgggtgctgccagctgctcccaatgtgccgatgtccgtgggcagaatgacttttattgagctcttgttccgtgccaggcattcaatcctcaggtctccaccaaggaggcaggattcttcccatggataggggagggggcggtaggggctgcagggacaaacatcgttggggggtgagtgtgaaaggtgctgatggccctcatctccagctaactgtggagaagcccctgggggctccctgattaatggaggcttagctttctggatggcatctagccagaggctggagacaggtgcgcccctggtggtcacaggctgtgccttggtttcctgagccacctttactctgctctatgccaggctgtgctagcaacacccaaaggtggcctgcggggagccatcacctaggactgactcggcagtgtgcagtggtgcatgcactgtctcagccaacccgctccactacccggcagggtacacattcgcacccctacttcacagaggaagaaacctggaaccagagggggcgtgcctgccaagctcacacagcaggaactgagccagaaacgcagattgggctggctctgaagccaagcctcttcttacttcacccggctgggctcctcatttttacgggtaacagtgaggctgggaaggggaacacagaccaggaagctcggtgagtgatggcagaacgatgcctgcaggcatggaactttttccgttatcacccaggcctgattcactggcctggcggagatgcttctaaggcatggtcgggggagagggccaacaactgtccctccttgagcaccagccccacccaagcaagcagacatttatcttttgggtctgtcctctctgttgcctttttacagccaacttttctagacctgttttgcttttgtaacttgaagatatttattctgggttttgtagcatttttattaatatggtgactttttaaaataaaaacaaacaaacgttgtcct

SEQ ID NO: 338 - DNA, 735 bp, Homo sapiens
tctgtctctagtttctttctgttattgcactatgaaaatcagttatattctttaaatttttatcttacttttggataatatccactgcaatactaattgagaaacatgaattatttccaggggcacacaatgctattgaaattactgaaaacaaaatatctgacatcttatttacttgtagaaatctgtaattctattgtgcctatgataaattcacataggcaatatctttaataggttaatatcaatgaagatttttaattacaataatgagttcactacagacgattaacacaccacactggcgaaccatctcaatgtaagggtggtttggcaacacctccttgctttgctgtttggtgtaggtaaatctagtttacttcctaaatttcagtaggctttatgctgtgtttatgcccccaatttattttaacaaaagaagattaaaaagtaaaagaaccacgagtaagatattatttaaatgttgaaatcttaaaaacctgcctccaagatttcagaagccaagtttttctaacagtatttgtacaaatactgcctagtgtattcaacagaaggactgtggtcatgtaacaggtaaccacaattttcaggtttcttaaaaacagctgtaactaactcaggatttttatcttgagatttccctgaataatatatttatcttaagagccttcaagtttcaaattaatattggaacatctggaattgcaacaactt

SEQ ID NO: 339 - DNA, 505 bp, Homo sapiens
gggcctctggacacaggctggaccagatgctgtggatgtcgacccctgcactgactattggataaagacttctttcaactaagagaagatgcaaatcagcacacttttttctttgttctgccagcttccaggcctaagactaggttttgctgtctacagccaactattctattagttacaaaactcaatcattttattcagcaactggatgttgactgttaactagaagctctgtcctacttacagcactttggatcatcaaaaaaataaagtaaaatagaaaactgagaaaactcaatccatgaccagggagaacttacaggatgttagagacaaaacaagcagacacctgaaacaatcaacgcccaataaaacaaagtaggatgaaaattctcttagttctttgataacaatttgttcactcatagaaacattattaattggtagggtaagcagacactctgaaacaatgagaaaaatactaaaaattgacttgagttatttc

SEQ ID NO: 340 - DNA, 142 bp, Homo sapiens
acagggcttgcaggtgctgatgccagaagcttctgtgccattgcattaaagacttgtcatttgatccatgttcaagacccttgaggtattgtttcatcatttctgtattgtctttcaataaagaaaacaaacatgtgcaacc

SEQ ID NO: 341 - DNA, 3412 bp, Homo sapiens
actgcaaaaaaaacaaaacaaaacaaaaaaaccacataaaatagaagtgtccttaaaatattttgtacctttcaactaactaccagattgaaaaagagtttatgatgcgggatatcaggtattttaaaatcaacatgcatcaaattaattttgccagttgactttaaaaacaaattatagaattagccatctctctgagggagcacatttgaataattggagatgcagttatacacacatttcaaacaaacatttgtcttttgagagtattataatttcaaattggccttgtatattttagttaaatgttttcagttgtattagtaacttaattaattttcaatagctattcagtaatacttaatcttagaacattaattggatttgtttaatctttttttgttttttgttgatttatatgaaaacagtcttgaggcagggacatggagaactatgcaagggtgatttctttgacttaatatatacaaggctttacttctgtcccctaattcttccattgaatgtgtacctctaccttgtcatgtcatggaagatacaacatttggaagatctgacaattggaatgactttggaataataaaattgactaattggaaattttgcatattctgaaaatctaatctcatagttctaatttgtacctatggcaaataagggcttctggacatcatgtttaaaatgttaagcataagaaataaactgacatttgtaataggtgactttctgatggaaagcaagctatatatatatatatatatatatatatatatatatatatactttttgtgaaatgtctatatactttttaaggtaattaatgaagatttcagttattgcttttaagcataaagttgtatttagcttctgctgaaaaattgtatcatataataattttgcttcattgaaaagggatgttgcagtgatgaaacaaggtgggatcagtttgattttgtttacttattaaggagtttatcttgggctcagtttgtggtattcagttcgtttctgcccaaagctcttattttcagaggtgttacttttgaacttttggggtcatttttaaaagttagcacttttgaattttagttgtgttaaatatgtgctgtcgtatatcatagccatgagccatatatgacaatttaaatttaattaattataaactcagtctcttggttgcaccagccacatttcagatgctcaatagccacatgtggctagtgggtaccatattggacagggcagctatagaatatttccatcattgcagaaagttctattggatagtaccataatctttttatagtaacttggaaatactatttgatattagatgttagaccacaaaaagaagaaaaatgttaggactatttcagatataaaaaggaactgaattgtgacataattagcatcttacattccatacagttgaataccttatgctgtgacaaccatagttaatcatttcagtgctgttcaacatacatacctatcagcagtgtgtttagaccaggggtctgcaaactttctgtgaatggacaaagagtaaatactttagtaaatgtcttaggctttgtggcctacatgatctttgttgcaagtactcaactctgccattatagagttaaagcagccatacacaatatataaacaaaatgggcatagttgtatttcagtaaaactttatttacaaagacaggcggtaggccagatttggcttgcatgctgtagagctgtggtctaaattttattcatagactttctttgcaaatacagtgtgagtattgttccatttacagtattattattttttagatacctggtttttagattcttgcctggtaactttttactgaaaatacaagaatttcgtactgcatttgcatctccgagattagggagcacctgtcaggatatgttgttctatcagggttacttctgttgactacctcttagattttgatacagttatattgttgagtttcattttcatatattcttgtagtgtctgcttgcctgtgacttctggtaaaataaaataagcctttgaaaatattttagcatggtatttaacattttctaaatattatggcattttgacatattttagtcagcgaagacatctgcccctttggtgtttctacttgcttatgattgagattttacaagcccttcaaactccgttttaaaggaatttattgtaaaacattaactttaataaattagtgttttcacagatcagatcattatacttggaacttctaaatcatgcaatttctgaataaggacataaggctagattcatttttcttaatagagaaaaaggaaatttctgatttatcacttttctagttgataagtaggattcaaaacgtttgatatgtaagtatttatataagactaatgtaatttaaagttctgtattattgtgattaatcatacagaaattcaggaactgatcagaagtgagattcttttccacatctggttaatgtagtgagttgacaccctgtgggtggtaaagcattataaacatttcatcttgaaccatgatttatacacatctgtgttataagggaggcttgagtacatataccaatgaagagatattcagcatttgtctatttgataaggaattaaatgtcctagtgattataaagtaaaaccacagaccaatttgcaaatgatcttcaatgttaagcacttgctctaagattaaaattccttttctttttaaggttaagggtgtgtacgtatggcagtgatgtctatgttgagattaacttatgtattgaggaaaatttgaagtttattttttcgatgaataaggctgtcaaatgatttagtatagattaatgacatcttttttagaaatattaaagtgagtattcctcattatgtcatcatttctgataattagagtgctaatttgaatgttagataatgtttccacatctatacctatttctttctagggcacttctgaccctggggcttggggatggcctttaggccacagtagtgtctgtgttaagttcactaaatgtgtatttaatgagaaacattcctatgtaaaaatgtgtgtatgtgaacgtatgcatacatttttattgtgcacctgtacattgtgaagaagtagtttggaaatttgtaaagcacaaaccataaaagagtgtggagttattaaatgatgtagcacaaatgtaatgtttagcttataaaaggtcctttctattttctatggcaaagactttgacacttgaaaaataaaaccaatatttgatttatttttgtaagtatttaggatattattttaaataaatgattgtccattatcaatataatagttgtgaaatgatttaagtaaataaactttatgcttctgtgtctgttg

SEQ ID NO: 342 - DNA, 978 bp, Homo sapiens
catggacgcaacctcaacccagcgcagttacaacttcactatcagcggaaggggagaaaaaccgattcaaatcaacttgtacatggaaacagcaagcattatggtcaaacagcaaaggccataaccttttgggatttttttttttttaaaatactttagggactgttgtaatttctcatatggtgctggaaatggttgggctttgtaacatttgaagtgtttccatggtagcgtgagcattaggtgacgtggctagcggaggactacccttgctcactgacttcctgttgtaacacactttccttacggagcctggctgtttcacagtatttcatgaatttacccacacaggtgtgatcctccttgagcattgaggaggcacatggagaactaaatcttttgtagtagctgagatctgcaatatataacgggacagtcaaagggcaatgtttttctgtaacatattggaaaaagaaaatgcagttatattccttttttatttgttcctttagtttgttttggttcagcagtcagcagttaagtatataacatggcccgcaaggacaatgaatccactcacattgcagaacaattccgaaaatggcaaactactactactactgttcagttttttaaaagttttgaaatgctgcacttacatttaaaaaaacaacaacaacattttttcaacaatttcaacaatgacacaaaaattcacatggaaatggggaagatggtctgttttgacagaaactgacaggaatcaatcaaaacaatcgaattttgaattgagtaaagtgcaatttcattggatagctaaatatctttgtaagatagagattgttgaaaattctatttttgtttttctagtcctttcaccccaggactctaaattattggggtaaaaaacagccttgcaagaaaaaggggagctatttttgctttttatgttttttattgttaaacttgtatcccttt

SEQ ID NO: 343 - DNA, 2982 bp, Homo sapiens
aacgaggggatcagattttagctgttaatggcgagaccctggaaggtgttactcatgagcaagcagtcgccattctaaaacaccagagagggactgtaaccttaactgtgctgtcatgagcctcgggcctgatcacaagatagatgttgttgtttagaatatccacaggcagatgaagttctgagtgggtatgaaaagcaccctcaactaaaatgcaccttcattcttatttcttgccctctctgctcaggagaaatggctgaggtttcatgtgaatttcccaaatcaacaatcatctcctaatgtttcccagttcctgtcacctgttggcgaggttgatttctaaaacttaaatgagtctacctgttttgcatttaatttcagtgttccgatttctttttttttttttttttttttttttgagacggagtctcactctgtcacccaggctggagtgcaatggcgcaatcttggctcactgcaacctcggcctcccaggttggagcgattctcctgcctcagcctcccgagtagctgggattacaggcatgcatcaccacactgggtttatttttgtttttttagtagagatggagcttccccatgtgggccaggctggtcttgaacttctgacctcaggtgatctgcctgccttggcctcccaaagtgctgggattccaggcgtgagccactgcgcccagcccagtattctgattttaaccaactggttctgattatatttaccaaaactggagttaacttctctttccttatactcttctctccctatcccctactcacaccgaggcttaacagcaacctcagatctcatccaatggacagaaacaaatgttaagcaacttgtcatctcactcatgatttacttatgctaattgtctcttcaagtaagcaagaaaacattagcagtgtaattaatttaccagtgatccccaagatgaaataccagattctcctatgggaaattactgtgctgtcttctgtatgacttatggtcaaataagtctcaaattcatttctctggatagatctttatatgctagtcattggtgattttgatgagtcaatttacagactgtaatcttctaaaaattctgaaagactaattgttttctgtgccatataaatgcataccactgagcaaatgaaccttattctcagcaggaacaactagcatacatgttctgaattctaacagtgctaaattacattcaagtccaggaagatcacctggaattaatggcatttcagttggcaggcatcattcccacccctcggtcttaggaaaaggaggtagaagccccagaaccacacggcagagatcagcaagttttgtctcaagtcagacaaggtctaggtggccttggccttatgcaaagtgggtgacatatttgattatatttccctttacctccatagtagtcaggccagcagcatggactgcaagaacctaagggagcaacatacttagctgcaaagtgagcaaatgaattgagcctaggaatatgtgatgaaaatgcatggctgatgtttcctgatctccaaggagactcccatttgctgaagttttgcatgctaagaaatcaactacagcagaaaatacaagaatacctttaagttgattattggcaatcttattcatatattagcaagaaaaagggagagatgcttactggtggatgctatagagtcctctgtttttaaaagtaccatggccgggtgcagtggctcacgcctgtaatcccagcactttgggaggccagggcaggcgaatcatgaggtcaggagttcgagaccagcctggccaatatggtgaaaccctgtctctactaaaaatacaaaaattagctgggtgcagtggcaggcgcctgtaatcccagctactccggaggttgaagcaggaaaattgcttgaacctgggaggtggaggttgcagtgagccaagttcgtgccactccactccagcctgggtgacagagcaagactctgtctcgaaaaagaaaaaaaaccatgaaggatgagtactagagtcagtaatagaagtagttcagcattatttaactacaacacaatgctgcaaatatttcacagtaattatcaaaatttaatgggctctaatttaaaatgttatttaataagtatagattttaattgagaattatctttgagtagatgtaatcacaaagtgcattaactcttgttggaatattttatggctattccaaagtatagagtgcctaaattttgtgttgaaaatgtctttcatgacggtattaagttttctgaaattacacatggcttttaaaatttctaatgtatccaagatgtgcaatgttgttaggatctcattcttcagtgcatgaaaagctactaccctcagaacattttgtgttaattgtacctgcaagaacacctcaggcaagccaagaagaaatgaaacccaaataaaacttgaaaatgcaccttaaaaatatatatacatataatagttttgaaatgggattctgctttattttgatggaatggccattaaatacacattttgagataatacattgttgtggtgtttctttatacattatccttttaggtcgtgctagtaaaagtatattgatgaaggaattatgatgctttatacttcttactgcactaaattgatagaactagtacttgtcataatcggttctgtctccgctcacatgactaatacgtaattgcctttccaaaaagatatttttgcctcagaacttactgacaagctgagaggctatgaagatggaaatttgtgaaagaagtagtgctcttatatttggcctcatcatttgggccatttcagtatagtaatgatatcactaatcggaattagcatgagagggaagtaagccaggaagaataaaactgctgaatgtttgtatgtgtaagatatttccaaagattctaaataaatgtagttgcctacagagc

SEQ ID NO: 344 - DNA, 174 bp, Homo sapiens
cacgccagggtgactacaaacaatatgctttcctcccccagcatgcatccaaaaatcaacaagtaaaacgaaaatacacttctacccagaaggatggacagctaatagcgtacttggggatgaggagcaaggaatattacagatattacctagatgttaataaagggtatgttt

SEQ ID NO: 345 - DNA, 821 bp, Homo sapiens
agtgagtgtattttccttgtgtatatattaaacacacccatacaaacattggtaaagttgattacatcaaagaatctttagcttatcttttgaagctactggatattattggtctctctaggtttttatataaatagtgaaatttgaattactgaaaaccatgttaatttttagaactcattttcctcagtagagactagtgatgcattagcttctgggaacaaacttgtatcggttcttaattaaattatccaaaacggaggcatttaaacacttggatttacaccagtcttttgtgtttgctttttaaaataaagtgctcgtatttgtattctccatattttggagtaattatctacatgatgtttatagttcctgtggtttttcacccaagaagcagaatctcattcagtacatttagttttataagagtcatgaagctaaatccttgggctatgtcagaggcacaaagtctagaatgtgtgtattcacaatggtgtatgtacattttgtgccttgattcacttagaagtgtctcagaaaacctggacagttcgcttctacacaagaattttatatgtatttatgaagatgattctgtaccctagtatatctttttgggcatggactaatttgtatctgtttaactcatattctgcacgatctgtatatagtacatcaaacttagaggtgtgaccttaaatttaactttttttaaaaactgggaggtcaataaaatttaaactgcttaactatgtatatgaatatttgaattttttacttgtatatttttataaatacagctgagttttcttaaagcg

SEQ ID NO: 346 - DNA, 692 bp, Homo sapiens
actgaggcaaatttaaaaggcaataatttaaacattaacctcattccaagttaatgtggtctaataatctggtattaaatccttaagagaaagcttgagaaatagattttttttatcttaaagtcactgtctatttaagattaaacatacaatcacataaccttaaagaataccgtttacatttctcaatcaaaattcttataatactatttgttttaaattttgtgatgtgggaatcaattttagatggtcacaatctagattataatcaataggtgaacttattaaataacttttctaaataaaaaatttagagacttttattttaaaaggcatcatatgagctaatatcacaactttcccagtttaaaaaactagtactcttgttaaaactctaaacttgactaaatacagaggactggtaattgtacagttcttaaatgttgtagtattaatttcaaaactaaaaatcgtcagcacagagtatgtgtaaaaatctgtaatacaaatttttaaactgatgcttcattttgctacaaaataatttggagtaaatgtttgatatgatttatttatgaaacctaatgaagcagaattaaatactgtattaaaataagttcgctgtctttaaacaaatggagatgactactaagtcacattgactttaacatgaggtatcactataccttatt

SEQ ID NO: 347 - DNA, 219 bp, Homo sapiens
agattagcacatttgtgcttgataagaagaattccattgaaaggggaaaaatgaagagaaacaagtatatctgaaatgtttattttcacaaatatcttaattttatatgttctttaaaaaagaacatttgaaaatataacagttaaagatatttttctaaaagagaaatgatttaatgaatcttgctttctaataaataaattgagtgattctggttgc

SEQ ID NO: 348 - DNA, 185 bp, Homo sapiens
ctgtattcctaaacaaattgtttcctaaacaaatgtgaaaatgtgaacagtgctgaaaggttttgtgaactttttgctatgtataaatgaaattaccattttgagaaccatggaaccacaggaaaggaaatggtgaaaagtcattgttgtctacacaaaataaatgtatatggagaccaaagacc

SEQ ID NO: 349 - DNA, 176 bp, Homo sapiens
ataattatacttagaacttaccaaactaagaattatttcagatttagtctgttatttattaaacaactaaatgctacttaactgatgtacctaaataataatctattcaatttatatgcattttcattttatgtccatggtatgtactttattattaaaatataaataatgctttc

SEQ ID NO: 350 - DNA, 568 bp, Homo sapiens
gaagacaggcctgatgtggtacgtccctccacccccggacccatccaagtcatctgattgaagagcatgacagaaacaaaatgtattcaccaagcattttaggatttgactttttcactaaccagttgacgagcagtgcatttacaaggcactgccaaacaagatgcccttgggagctgtgagggaaagaggacctgcgggcttagatcaatctcaattccttttcatgccctcctgcattgctgctgcgtgggtatttgtctccttagccatcaggtacagtttacactacaatgtaagctataggtggagcatcagcagtgagtgaggccattcttcatccttaggatgtggcaatgaaatgatggtgcaagttcctttctcttttgtgaatctttccccccatttcctgtttacatgtaacccaacaaaatgcaatttctagtgccttctgtccaatcagttctttcctctgagtgagacgtacttggctacagatttctgccttgttttgcgacattgtcccattcacacagatattttgggataataaaggaaaataagctac

SEQ ID NO: 351 - DNA, 169 bp, Homo sapiens
aatgcacaacttttgtaaatgtggtatacaggacaaactagacggccgtagaaaagatttatattcaaatgtttttattaaagtaaggttctcatttagcagacatcgcaacaagtaccttctgtgaagtttcactgtgtcttaccaagcaggacagacactcggccag

SEQ ID NO: 352 - DNA, 211 bp, Homo sapiens
aaaatctttctttggaagcagcataggggaagagcatgagcttcagagtcaaacagatgttggagaaattcttaaccactctgaacttgtttttttatctgttaaatggagataaccttacctatcttgcaaagttgttttgcatttgacgcttattattttatatatatgatttcattcgagatataaataaaaattatataaaaatgtg

SEQ ID NO: 353 - DNA, 1497 bp, Homo sapiens
caatctcctcacctccacgccaagatgagatctgggagctacagaatgttctggaaagaaaaagaaccggcttaaaacccacagcaagagacctcccttgtgtttgtgctttgtgcagagttgtttgagtcatttcctgcctgtcgacatggttaaaaacgagagaaacaacaacacagtcacatttgtgaagatgtgaggctggttctgaaatggaggggaaataagcctgatgaacagacctgccataacactaatggaaggtaacagaaggcgaacctccaaacacagagacggaacctgcaagtgaagctgagccagaggaatgttccaaagagccagaagcattcagctctccttaactggaagagagaaaaatctgctcacccagagactggaatgtggcacatgcagatacaaatgtgtgcattgaagatttcgctttgtttcttagcggtacctggataccacagttgctgtatggaactcatgttatgctctaaacgatgcatctcagaatttctaagtaaaggattatttttctactatttattgaactttcaaacattctcaaactttggggaaaaggaaaggaaacacaggagaagttttcagcagttgccccgagctgttttgtgtgtaatgaagtggttctttgattaaggagctctatttcttatttaactgatatcccactgccccactccacaaaataggaaaatgaagaaatctttctctctgacttgtttacatcatttcacggaaacacatctttgtttgtaatgcagtattctttctctgtgtttgacagagatggggaggggcagaggaatttaagaggttttaaaagaaatgttatgtttcttatgacttgtttccactcctcgtacaatgctattcttaggtttctacgaaacctaatgttagaaccgcatcctttcagctaagggagggttggatttattttccttgttttagagactacaaatttttaaatatcccattttgactgagaatattgacatataagggaagaagttttctaaattgtgaaagtctggttcttaattaaagaattttttttttaatatcacggttaaaagctgctgccagttagccaagacattatccaccaaattgctttgtgatttatacagggattaatcaaatctggctactataacatggggcattgtaactttaaagtagtgttttaattacagtgatgtattttagactcacattttgtgattcaaatatgttataaaggcattcttgcaccatggtaaagaatgtgtgtggtaaatctccgtttatatgtagttggaaaaaattcactgaataatgttttaatgatagggtattatgatacaatgtaaaaaacaattggttcttcagcagtacagaaagtaaactatatatgtgctatcaggaaaccccttcatactgtgtataaaattgcaatctagtgaaataaaccgtatgcaatggaccatt

SEQ ID NO: 354 - DNA, 2244 bp, Homo sapiens
gttaagctctctcctaataaccccctaaggttctctgcagtatctctgctgttcatcgctgccttaacttcattcaaactagccatatcctttaaatacgggtttatagtttcccagaaggaactgtgttgtgcagcaggcagaaatgccaaataaaaaatagcaataagaagagacatcaattgaggacattttccactagagtcagatgcatcttaatcagtgtgctaacttacaatccattggagaaactaacaatgttccaatattccttgatttaggactgggaataattctgacaccatatataaaagaagtttgaagcaataaatgggaaacagtgttgtttcctgagccttagaagaatgagtttcttataagccaatgtgcatttcaatttactttccctagaagtaattgcatttatagatttttaggacttttcctagaactacaagggtgcaagtaccaaatgtgctgatggtaatattataaagatgctctacatgcacactcaattacgcccacaccagccatgcaaaattaaacccggtaagagagtgacagtgatatccaaggtatccactactaccgatgctttaagatgttgtttaccatttataccttctgtgaaaaatagaaggtattttaagaaaagtaactttggtgatctaataaaagggtttggcaaactacaccctgggtccacatttggtctaccacccgcttttgtgctgcctgcaagctaagactaatgtttacatttttaaatggttggaggaaaaaagaaaacttatgacatgaaatttatatgaaattcagatttcagtgtccataaataaacttttattgggacgttgccatgctcattcatttacgtgttgtctgtggcactcttacgctacaagggcagaactgattagcttcaacagagactgtatggcctacaaagaccatatggcctaaaatttcaagtatctggccatttatatatagtttgctgatccctgatctaatagcactaattctaatagcaactattcctttcaattcacctaaagacagacctttagcctttagacagacttgtaagtggaaaggaacatgggtttctgtgctcatttcatagcgtagactagtaatgatctaatgactagaatggggcctattttgatcactaaatgccctattatttccacaatatagtatagtaaagcagtcaatactgcactttctgatggagtcttaaggagtcacagtatttataaccattttgagctaataagctatacctcactctctgctttctctctcactctttttgatagtgtgttagggtgaaaaatcagttatttaacccaatttacttgtgaaagaagttttatctttatggactatgatgacttttgacatcaccatttcttgaagaccttggtattaaatgcatgagaaaccttttgccatctagaaatttctaagtttgtttatgttataagactgtaattaattgatagggaatttgggatctcaatccggggctttttgaaatcagatcattaaatatctcgtcactttggggacttgttatttttaactatgatgtggatatcctgttttaattatgaagtctagaattggtacatatgttgtatgctttgtaaagaatttcacttggtctaatttattgcatatactagcttctgttggaaaatgactgacagctagaaagtttaaggtaatttctaagtatactacctataagtaactgataagaattaggcatcattcagtgatatagcagatgactaatgggtttttcaggccctgcacttctctttcccattttcctgttgcattcagcctcttcaatgcttagtcacacctccactatagtacaaacaaacaaacaaacagaagaaaggaaagatggtgaattttgcaacagagctgcaaaaagtcagtcagtcaaagcaggaagaggttgaaggaactaaaacaaacaaacaaaggtgtctggactacagcacagtggacatgccatccatactggcctgtgccccgttatcaatcactgggcacaacagtgaagaagtgcaaatcaagtggtgtttgtttgtttgttagtagtaaggaccgtaacccaccccttcctccccccaaaactatactgttatttttctatgtaagcaaattgtttgaaatgctttgaaaatgaaatcttaatattaaaaggcatatgcatgt

SEQ ID NO: 355 - DNA, 1315 bp, Homo sapiens
gaccctgcccaatggaagaaccaggaagatgtggtcattcattcaatagtgtgtgtagtattggtgctgtgtccaaattagaagctagctgaggtagcttgcagcatcttttctagttgaaatggtgaactgataggaaaacaaatgagtagaaagagttcatgaagaggccctcctctgcctttcaaaaggctggtcacctacacatgtttaaggtgtctctgcacatgtctcaagcccatcacaagaaagcaagtacagtgtggatttcaaatggtgtgtaacttcagctccagctggtttttgacagctgttgctgtggtaatatttttgacatgtgatggtgatagtctctggttctccccatccccacaaaggctgttgaaccacagcaccaggaagcctgagaatgaatcctgagggctctagcccaggctttgtcccaggctttctggtgtgtgccctcctggtaacagtgaaattgaagctacttactcatagtggttgtttctctggtcttgagtgactgtgtccacagttcatttttttccggtaggaataactccttttctacatccacgctccatagagtctctccttttcagacatcctgggatgaaagaatttggcttttttttttctttttttttttggacatctgttttcactcttaggcttttaaacaatagttattgcttttatccctctcagattctaataactgagagcgatggggctatattgaatctctgtatgcactgagaactgagctatgaagaggatcttattaaactgctggtctgactttatggattgacactgttcctttcttttattgtgaaaaaaaaaaaaaaccctgaaagtcttgggaaccccctaaagtcttttgggaatcctcaaaaagcatgggaagttaagtatttagctacataaatgttgtaagatcatatcttatgtatagaagtaataagaccatttggaattactggactaattgaatagttaaggtttctattcgggacaataaaatgtattttgaaagtgctgctaactattgatgctgacagtgtttcactcctatgagtgacccaaacatattataaatatgtggtaaagggaatggagcctgtggggttgagcagaatgttgtactagctgtgcctggactgagtataacagctttatgattatgagaaaacaaattctttattttttttttctgttccaaagattcatcctatggggtggccataaagtctagaattagatactaatattttgtcattcattataacatatcaataaaccatttgtt

SEQ ID NO: 356 - DNA, 2844 bp, Homo sapiens
tttatgagcttttccatctctgctgcagacctgtgctaatgcttagtgtgtgtcacaattctgaggttttcgcagatgaaccaaaaactccagtaacatgttttcagtactaaaccgttaagttactcatgaattaatttctcattgataaggaatgtggatgtttggtttctccaaagttcccaccataaaagatccaaagcatgagaggaacttctagtcagatgaccttgcagaaccaccgcattccaccctgccctttggggagcctactcagcattctacctggggaaatggaaaacagaggccaccacccatgaaggcataacacccatcacattgtctgagaataggattaatgagcaaaagttatgataatagagttatatgatggtttaatggtttctagatttttcttggaaagatataatttgagcagtggctttatgcagactccaagaacaaaaccaccaggtatttttttttaagtaaaaatttactaaggcctttagcataatactgtaaatgtcttttggtcaagagaactaacaaatataaaggaacttgaaatgtggggagtgataatagtccagtgattaaactacagtccagtgattaccaccaactttctgactaagctaaaaatgaatgaaaatggtggctaaagaaaatagggactctgaagatgtcgaaatctttattcctggttaggaaggtgggccgctacccttctttccctttagaaaactgtgattaattaaataaaaagtcttactactataacaactctaaacctggtttaaatgaaacatctaattttgctgtaaggcttaatgctcttcttttgtttagccaagaaaacattcttagttggaaacaggtggtaaagtagtttggcctgttcacaacttatcaggaccaatatctagtgtggactcagtgttctctaggtttgtgagcagttgtggtaagagaatggaaggcaacactgaataggagttaagggaatggcacgatcacagtgagagagctgcactcacctgcagacccagtcagatggcttgtcagtatctgctctgaggaaccaggtcccacctccccacaaggcaaatctagacccattaaattattacagtgggcttttttgttttaaaagtggttggggatccacaggaacgacattcatacagggacatttgtgaaagcaaagcaagaatgaatgctttcccgatctcagactggctggattcagatcagtgtgttggctggttctcattttaaggggtaagcagtttgctattctgtgactttagtagatctcttttgtgtgcacatatacaatgtgcattatacatatatattaaatatatccacaaagcagatgggcaaaaagattttcatgctaatcttcaaaggttcatgctcaatattgtgaaaagcttttaaaagttgttttgaaaagacaatcattttttgtttttgttttaactttcttgtggcaagctataccggaaaagcggcatgtcaaaaatactttaggttctacatagatctctttctctcttttgttttgtttgtttgtttgttaaagttcattatttattttaccttttactgacaatgtgaaactcgaagaaaatgttctctttttaaatatacagtcataaactgttcaaggtaaccataacaaactaggtgttatttattaacgtattataaaataatgtttgatccagtatgtgcttgtcttatttaaaattggaatgtgagacatgttgctgtgacctgtttttctttctcattcacatttgtagatattgtgtgaactacagtatataatgataacaattaaaaggatattctgtggatgtcacgtattttgaaatgatagaactacattagctttgtatcatgtttggataattcatcaatgttcacagtttaaaacatcattaaacattatgtaattacaatgagaaagaatcttacttaaatttggagattttcccccacatctcttttccggatacattataattctggacccctatttatctcaaaactcttaatatatgcagaccaacaggtctttgcattccttttaaataactggttgtgacaaagcttgttgttgatcagattcactgtttcatcatatttattgtaatatattttttgttttgtaaatatgttacaacaaaatgtgattggtctaaaatatttgtaatgtatattaaaaggttcaaaaatatttgtataaatctaagttatttgggtacttgtaggaatacaatgaggagcttgaatgccaccttctgacatgatttacttttaaggaaagttatgaggagagaatacaaaaagcatgcaccaaaatgtaatctgacaggatttctggatttatacgtaatcactcctgccccaacacacacacacacacacacacacacacacacacacatgcacgcacacatgattttgattatgctacatgatatatgtttcaaaaagaattagcatagaaatcctggtctcctagccaaaaaaatcaaaggattttcaaaaaaacgaatctgtatgttgaggcaaaaggattgaacctggaagtctgggactttatcatagaaacaaagtctcagatattttagttctttggaaacaaatgctgtaattcaaaagcatttgacctgtcactgtactatctacatgtggaagaatgttcaagttgaatcctaatgccgtgaatgaaacacagtctgtgtagggaatgagcaaaaaagttgaattccaattgctttttggccttttggctaaaataaatgtagcatctaattttatcagttt

SEQ ID NO: 357 - DNA, 2258 bp, Homo sapiens
agtctaatcatgatcactacagatgaacccaatgtgccaacttcccaacagtctatagagtattagaagatttttacattttgaagaaggggagcaaatctaaaaaaaattcagttgaacttctgagagttaacatatggtggattatgttgatttagaacttaaaatagatgtgtaaatttgggttcaaaatgtagatttgagtccagtttggatgtgtgattaattttcaaatcatctaaagtttaaaagtagtattcatgatttctggcttttgatttgtcatattcctggtcataaaacattaagaaaattatggctgttgctgtcattacatatctattaaatgtcatcaaatatgtagtagacaatgctgtaattaggtgaactctaaaactgcaacatctgacaaatagctttaaaaatacaatgattataagtatggaatcagtgaaaatatttagtttgtatttttatgtccaaacttttccattttagattcctttatagacacgtcagcctaaaaatcagcctattcgggtgttcttttgaatatctcctggcatttttgtatctaactttgttcaatctgggaatttcagttttcaatatccttgaaaatggcttaagtgataacttccgtttcagttaaaaggaagcccgaagttgtgtttgtgctgcccacaggacagtgggagttacagttcatatcaggatgaccctacatacccaggtcagattgacgggaccagaagggaacatcgacttctaatccagctttcttgtttaattatgacctaaatctaatttacttccactgaaccatccaagacctctggcaggcagggaaatgggcagtgatgcaaaaaagggagactctttggagcttttatgaatagttcatggtgaggacagaacttttctactttcagacagactgcttgctagttttatgaattcagcacacgaattatgctgcgttgctcacattcaaaccaaaccaacgactatgtttaatgaactcagtattcaaatttattatatatgcgtatatatgtatatatggatcccttatatttagatttaactcgtagttttatttgaaagtagaaaagaactctacaaaaacgggaagaatgtgtctttcttcccttcttgacttctaataggtgtcattgaaatgtaaaatctaagtatgaaattatgaaaggacattctttaattactgcccactcaacacatatttaatatgtgcccagattattctaaaatcttaaaaaaagatgcatatagtgaaattttttaaatggatatacttttaataaagttttataactcactgacaaaacatatttcaatagtatatgagtatgagatttcttatcaattatgagtgaaatattctatctgaatgcattggaaggcatttacagtatttgctttcaacagttactgagtatgacattttagcatgaaatatatcaaacacatcatttgaaggacatatgtaatcttgactatggttatggtttttttgtatgtattccttgttttcatattgatagcatctaattcttttgacaatcttaatatgtaggttcatttaaattttaagacagttcagtgcatatatagtagaagccttaagaaaaaagaaaatgagcaagcaaatatttgaagaaatgtataaaaccatagatttctttcagaaaaaaaaaacaggcataggaacagttttctcttcatatattatgattatgaataataggaaagttgtattaattcagtatttgtcattatgcagtattttaatacctacataagtctattccattattatattttgcgcttggcatatttattcctttatgcttttaatcactaacatattttacttaagagtataaaactatgctaaataaattgtattgtatatggaatatgcttgccattatgaagaacagctgggtataccattatttcaagtaataaatctgaattctattagtttaaaaattgtaaaattcaagttaaatgacgtgtatgatatataagctgaacacattttctatagcccttaatttagttgtgttaatttttcaaggtgatgtatcaacagctttttttattttgcatttgttttttcaatgtgtttacattgtatgaattgagctttttgcccacagattcttgatttgtagttgtttggcaggatttttctttgtgatataatcacttctataaaaaatatgatgtac

SEQ ID NO: 358 - DNA, 647 bp, Homo sapiens
cactttattctgattacagtgcattgaatttcttagaactcatactatctgtatacatgtgcacatgcggcattttactatgaaatttaatatgctgggttttttaatacctttatatatcatgttcactttaagaaagacttcataagtaggagatgagttttattctcagcaaatagacctgtcaaatttagattatgttactcaaattatgttacttgtttggctgttcatgtagtcacggtgctctcagaaaatatattaacgcagtcttgtaggcagctgccaccttatgcagtgcatcgaaaccttttgcttggggatgtgcttggagaggcagataacgctgaagcaggcctctcatgacccaggaaggccggggtggatccctctttgtgttgtagtccatgctattaaaagtgtggcccacagaccaagagcctcaacatttcctagagccttattagaaatgcagaatctgaagccccactctggacccaggacattttgatgagatccaaaggagttgtatgcacatgaaagtttgagaagcatcatcatagagaagtaaacatcacacccaacttccttatctttccagtggctaaaccacttaacctctctgggtgttacctgctcatttgttt

SEQ ID NO: 359 - DNA, 122 bp, Homo sapiens
tttcactgaagaaaccttcagatttgtgttataatgggtaatataaagtgtaatagattatagttgtgggtgggagagagaaaagaaaccagagtcaaatttgaaaataattgttccaaatg

SEQ ID NO: 360 - DNA, 1900 bp, Homo sapiens
tccccctctccctgtggagatgaacattctatccttgatgagcatgccagctatgtggtagggccagcccaccatgggggccaagacctgcacaggacaagggccacctggcctttcagttacttgagtttggagtcagaaagcaagaccaggaagcaaatagcagctcaggaaatcccacggttgacttgccttgatggcaagcttggtggagagggctgaagctgttgctgggggccgattctgatcaagacacatggcttgaaaatggaagacacaaaactgagagatcattctgcactaagtttcgggaacttatccccgacagtgactgaactcactgactaataacttcatttatgaatcttctcacttgtccctttgtctgccaacctgtgtgccttttttgtaaaacattttcatgtctttaaaatgcctgttgaatacctggagtttagtatcaacttctacacagataagctttcaaagttgacaaacttttttgactctttctggaaaagggaaagaaaatagtcttccttctttcttgggcaatatccttcactttactacagttacttttgcaaacagacagaaaggatacacttctaaccacattttacttccttcccctgttgtccagtccaactccacagtcactcttaaaacttctctctgtttgcctgcctccaacagtacttttaactttttgctgtaaacagaataaaattgaacaaattagggggtagaaaggagcagtggtgtcgttcaccgtgagagtctgcatagaactcagcagtgtgccctgctgtgtcttggaccctgccccccacaggagttgtacagtccctggccctgttccctacctcctctcttcaccccgttaggctgttttcaatgtaatgctgccgtccttctcttgcactgccttctgcgctaacacctccattcctgtttataaccgtgtatttattacttaatgtatataatgtaatgttttgtaagttattaatttatatatctaacattgcctgccaatggtggtgttaaatttgtgtagaaaactctgcctaagagttacgactttttcttgtaatgttttgtattgtgtattatataacccaaacgtcacttagtagagacatatggcccccttggcagagaggacaggggtgggcttttgttcaaagggtctgccctttccctgcctgagttgctacttctgcacaacccctttatgaaccagttttggaaacaatattctcacattagatactaaatggtttatactgagcttttacttttgtatagcttgataggggcagggggcaatgggatgtagtttttacccaggttctatccaaatctatgtgggcatgagttgggttataactggatcctactatcattgtggctttggttcaaaaggaaacactacatttgctcacagatgattcttctgaatgctcccgaactactgactttgaagaggtagcctcctgcctgccattaagcaggaatgtcatgttccagttcattacaaaagaaaacaataaaacaatgtgaatttttataataaaatgtgaactgatgtagcaaattacgcaaatgtgaagcctcttctgataacacttgttaggcctcttactgatgtcagtttcagtttgtaaaatatgtttcatgctttcagttcagcattgtgactcagtaattacagaaaatggcacaaatgtgcatgaccaatgtatgtctatgaacactgcattgtttcaggtggacattttatcattttcaaatgtttctcacaatgtatgttatagtattattattatatattgtgttcaaatgcattctaaagagacttttatatgaggtgaataaagaaaagcatgattagatt

SEQ ID NO: 361 - DNA, 1989 bp, Homo sapiens
tgaaatcttatgcaaggatttggaggattcatataatggagaactgatgtatgagaaacagattttaattttggtttgatgaaaacaaaccaatatctgcacttgggatatatcaggtggaaagtcaatgactttcatctgtgatttccctcacacactaccatgatgaccagtcctacagtatttacttctaggtgtaatattgttaatggttttaaaatgtaattattgtatttgtaaattgtactctcattccagtaaggcagttagacacttgagttttagcattttaccattcctgaaatggatgtaatttaaactgtggtatgtaaatttaatagtagtattgttgaatggcacaatgcttacagaggtagattgcattttgtcaatatataaaatttaaatataatattgatagctgtcataaagggggtgccacatattaaagaaacttaagtggaaccagaagaaaaagaaacaaacttacttttcttcaatgcttagtatgttttactctagtgctaaataaaaactctatcttcaaatgtttagtgggttaaattgagaaactatttcagaaaaaaattctaaggttacagcatattcaaagaaaagcattagttaccactttttaaaaagcttttttttcaaactgcaaatttcataaaaatgcaaactgtgtaaacagggcctcttatttttataacttgtgtaaaaagggaaagcaattcatatttaaagtttaagtatattaaattataatcaagagtaaagaagatgttgaagtcttaactacttgcccctctctacagtttcgcaaatgtggggattgctgaataatcagtcagactaaaaccaaaattgtgattttaagatttcaagactttccgtagttgaactggttaagaatttttgcttagttactctgaatagatgatcttactcatccagtatgggggaatgatacctcacgtcttcctctttacccacaggaatcaaaacgctgagactgagaattttagggaaaaaaaagtccactgtttagatccagaaggagagttttaatcattgtttatatcatttgagaatgaaaaaataagcttcataaatgaaattctattcacattactgtgtaataaatttccttttggatgattaggattcattgtataaaactgtaaatctttgccattcttggagaagcaaaaggagagttatcaaaaatgtatgtcgtttcatcgttgcaaggtataataaaaactgtaattattcaatctggccctgccatatgaacatttagaaagacaaacttcttcgggagtctcagttgtaaaaccttccctcattaatatctgaaaatgttagtcttcctttaagtcatagaacttatttaaacataaaccaatttctattacaggttatgctattaaatagctgtaattattaagttattatttttataattagttgttaaatttcattttacacccactcaaatttaacaaagaatctttagcccctttaaattttagaattaaattaaatttttaaagttttacttctaaaatgagattgtgactggcaattgtttatagtgaaactttttaaattaatctttgtactcctctatcagtgcttgctaccaagagaatgtccaaaatgatttgttttaccatgggaaaattcttactattcaacaaactctcagttggccccctacagcagtctggtgttgaagtttctttgaacgaactaaatatactcattttatgtaaaggtatccaatttgattttgaaaccaaaatagaaaatgcaaaattctaaattccatgaaacatggaatttatgacaccaaaatcaatggagagtaagcagcagcaaactgagaattatccagcatatgaatataacaatgtgtttttaagtaatcaattcatttaaaaaattgaatattaatacaaagcatattaaaaacatgtaaatatt

SEQ ID NO: 362 - DNA, 1333 bp, Homo sapiens
ttgaaaataagaaatctagctcttacttttgaaaattctgaggcaggctgtatgtctgtacacaaaagttttactgccaaaaactttgagaaagaaacaacactgatatttcaagcaactggaagcttttgaattttttcatattctagtaaagatttggggaggggagggtagccacagaaagaatcttgtttatctaaagcaggaacttgatcttggttttgctggattgctttccatagacatagattcttattaaatatttgttttggtactaattattttaattattctttaattagagtgttacaatttcctgcattgttttttaataaaaagaagctttagaaaaactatggctatataccctgaccaataaatgatagtagaatattcaacatggtatacacaaatgataaataatgtgcctcagtgctgcatataaaagaatactggttttcattttgtacttaataaattgagcagcattcattaagtgcaattattgttacatgtacctgacagttgaaactgctgaggtagaattaatggcttcataacaattatcgtggtcccacgggctgcaagctaaaactagaagctcttgtggcttgcctgcactttacacaattgtgggagaaccgaaagttggctcttcagtaatggaaactataaagtgaataaaggctttttgggacactgaagtagacattgtgatattaaatatacatgatgcttaatactaaatgtgtctgtaacacataaaatcatttattggaaagagacattgcttttaaatatcctaggctaacaaactttttcacaaaatatatggctggcaccttaacaaataaagcatgtgtagttaccattttactcctatgaatttaatactaaagtgacccagtgaggtttttgaatagacgggtgctaaaatttacagggctgaaatagcttattattctgctggttaatgtatcttacgccacggatcatttatttttatgaagctttcaagtctttgtgtgcaagtaaaatgatgttgtggcgttgttcttggatggtaagtggactgcctagaggacatttgttaaaggtcaaagacaaattgtacacatatggagaaaattagcaatgctgtagtcttaaggaaaaaatgatttatcattcatatcaaaaagagtttagcaaatggaaaaccagttaatgctttaattttaaaatgttttggtgtcttacttttccctaaaaatgacatgtagtaaaaaatggatacttttaaaatcccttcccttctgctattttctggcttttaaagtgattattcaaaatg

SEQ ID NO: 363 - DNA, 3719 bp, Homo sapiens
attttagacctattttactttctttggagtaaattctggtgtgactaaaattttcagggttgatgggttaccttaaaaagttgatttccttgaagcagtttgaaaatttgaattgagtcttaactttaggaaatgaggtttcataattctgccttttgcagatttttttactttaaagctgtcagactcttttaagggtattttaaaaattagtaaatttgaatgaactaaagatatatctctaccttctcatttgaatatctttagttcattcagatttactaattttggtaaatctgaatgaactaaagatgtatctgtaccttctcatttgatgtattaatcataaaatttcactacaaggtaatttttgcttagtttgatggatgaatgggaaactcaagtccaaatttctgcttaataccaatttctctgagtttcttgaaatgtctttaaaacagacatttttctcaccaaacagtttgagtatctttattaaggaaacccttacgaatcctgaaaattatgctagcatgatttttttatatatagaagtttaaaaataaaccaggtcaggtttgtatatgtaaaattgttgacatcaatgatgtctttccatattcttatctgggcttaagaaatacattctgtatttttccagattctttgtagcctttgaaagatttttacagtacatatgtcttgactgagctgtcctttcttaatacaaaagcgtgtataattttcttaacttgtacagttggtaaacttttatgagaggaattgttattctgagtctgtcagctttcattttattttgctaaggtttttctaatgaatttttaagtgtttgtgtagtaattaagtcatatttcttatccaggtggttaaagcattcataaaggattataaaatttttttttttttttttttttttaaatttctacttaagggcaagtaatttgagaattctgaaattaagcatgatgcttagattgcagtttgttttgcatttgctataattttcaaaattatttttgaagcaagacaaaagtttaatgtcagcttaagtgcttaaatatatcatgctgaccagaatcctgttatttttatatgcatcataaaatttcccatttctgcattaaataaacagaggaggggggtcaagtgatacttagatattggcacacacaaggaacaactgttggcaggcagtatcgattttatgaagagaaagtgaagtttgaaaacttttcaaacttttctagttacaatccaatttttcagatttgataatgcttttccaaagtgaaaataagatacacaataatcattgctctgtgtgattacagataggattatccatctgcatagccttgtaaaagtgccattttatttttagtgctaaattcttgttaaataatgtagttttatatagctgatagaccaacctatatccaaacttttataaaatattaattattcttgtttttctcacacaggcatactccaaatgcttcttccagttcatttttcagccatcagttcaagagccaatgcctttttaaaataaagcttctgtggtcttgtttttaatggctcaactgtctgatgtaattgagtgaaggtttgcactgagaaattagcattcaggccttacccccatgaagtattactgttaacatatgttcggactgcttcccttcaccaatgtgaacaactttttttcccaaacagtgttaaaagccactttgcaacacttgacttcatcttaatgtacattcactgttgttacatacatatctaagtaaatcaaagttttgggtggaagtgttgagaagtatgagttttttgttgtttttgttttacttaaaacttttaatttatccagaatggcagtagctttagcaagcagatggtcacaatctgttttctaaatcattttttattaaatgaatccaaagtatcctagctctttgtcaaagatggtctgtagaaatgtttttaaagattagggatgctgtactttttgaattgttgcagtgttggagatgccattttcacctttttaaaaagatgcattttatttgcaggtttgtgaagttcttgcaaactcttactacagaaatgttttaaatacattctcaggcatgtttgcaaaaatatggcacatgtatacattttaggaaatgttacttttgttaatctttaaaaaatacacctaatgaaagacattccactattatgcgtaatgctcagctttttgtaaagaaatatttaattgtattttgtgtttatacaggtatttcacacaataatttgttcttaatgcagccactataacttgataagtcattgcactatttaaaaagttttagtaatatcatgaatttaatttgcttaagatttagtacatttcagaacttttgaacttttgacaaattgcattggaaaaagaagtctgttaatagtgatttagtctccccgcctcattcccacccccaacaaagcactatcattttcatttggaatgggtattttctgtttcatgatgtattttcaaatagagttcaggatctgcaattcagttcaacacaagtttgttgagctttaaaatgtatttgaagtaatatttaaataggcatttaaaatttcaaattagatgttaaatttatgcatagtaattttgcactgtaaaataattcccttctcccattccttgtctgccattctgaatatgcttattaaaatatttttttaaacatatttgcctacataatactgtgtgaatattttcattagattaattcactaagattttattagagattgtttgaatgatgcatgttattgacaaggcaaatatatatatatacacagtctgtttcttctattcctagacatattgcactactttttcagtggttcttggtcccctttaccacatcttgggtgatgtatttttgtcttcttcccctttgccacaagagatcctttcagtccctagacctccattcactctgtttctcttctgctggattatataatttaaaaataatgtgttcccgtattttgtagtggagttcatatcacattatgttttgcaaaataaaacttgttttgtcacaatattttctttgctatcgatggataattaggagtgggcacttggaataactgagggctggtgaatataataggcaatatttacatggggtgtgtaactaaataccaaatcagatagtaaggttttcccaactataatccatattcatgaaaaatgccagtgtggaaaaccatgtaacatacagaagaacaggagtttccaaattttaaccttttattctaaaaatgactctcttctctcaaaatgactttttctgtatcacataattctactgatacaactttttaccgtaaaaattaactctcttctttaatatcaagttcatcctttgcagaatcttaaagggttttccacacatccatccacccacttacagactgatttcatgtatctgaatatctgattaacctttcttttctaataccagttttccataaactcttgtcatgtacccttagtattgtgctgatcttttgccaactatacggacgtggagtttttccttttcagaatatgattattttcaatttgtctttagttagtataaagaattatagaatgtataatgtaattaaaatgtcattttgcttgc

SEQ ID NO: 364 - DNA, 837 bp, Homo sapiens
agctgtgtggtcaaaatcaatatgagaaagctgccttgcaatctgaacttgggttttccctgcaatagaaattgaattctgcctctttttgaaaaaaatgtattcacatacaaatcttcacatggacacatgttttcatttcccttggataaatacctaggtaggggattgctgggccatatgataagcatatgtttcagttctaccaatcttgtttccagagtagtgacatttctgtgctcctaccatcaccatgtaagaattcccgggagctccatgcctttttaattttagccattcttctgcctcatttcttaaaattagagaattaaggtcccgaaggtggaacatgcttcatggtcacacatacaggcacaaaaacagcattatgtggacgcctcatgtattttttatagagtcaactatttcctctttattttccctcattgaaagatgcaaaacagctctctattgtgtacagaaagggtaaataatgcaaaatacctggtagtaaaataaatgctgaaaattttcctttaaaatagaatcattaggccaggcgtggtggctcatgcttgtaatcccagcactttggtaggctgaggtaggtggatcacctgaggtcaggagttcgagtccagcctggccaatatgctgaaaccctgtctctactaaaattacaaaaattagccggccatggtggcaggtgcttgtaatcccagctacttgggaggctgaggcaggagaatcacttgaaccaggaaggcagaggttgcactgagctgagattgtgccactgcactccagcctgggcaacaagagcaaaactctgtctgg

SEQ ID NO: 365 - DNA, 810 bp, Homo sapiens
gtggtgaggcttcaagccttaaagtcagtgtgccctcaaccagcacagcctgccccaattcccccagcccctgctccagcagctgtcatctctgggtgccaccatcggtctggctgcagctagaggacaggcaagccagctctgggggagtcttaggaactgggagttggtcttcactcagatgcctcatcttgcctttcccagggccttaaaattacatccttcactgtgtggacctagagactccaacttgaattcctagtaactttcttggtatgctggccagaaagggaaatgaggaggagagtagaaaccacagctcttagtagtaatggcatacagtctagaggaccattcatgcaatgactatttctaaagcacctgctacacagcaggctgtacacagcagatcagtactgttcaacagaacttcctgagatgatggaaatgttctacctctgcactcactgtccagtacattagacactaggcacattggctgttaatcacttggaatgtgtttagcttgactgaggaattaaattttgattgtaaatttaaatcgccacacatggctagtggctactgtattggagtgcacagctctagatggctcctagattattgagagccttcaaaacaaatcaacctagttctatagatgaagacataaaagacactggtaaacaccaaggtaaaagggcccccaaggtggtcatgactggtctcatttgcagaagtctaagaatgtacctttttctggccgggcgtggtagctcatgcctgtaatcccagcactttgggaggctg

SEQ ID NO: 366 - DNA, 562 bp, Homo sapiens
tggcatctgaatgaaaataactgaaccaaattgcactgaagtttttgaaatacctttgtagttactcaagcagttactccctacactgatgcaaggattacagaaactgatgccaaggggctgagtgagttcaactacatgttctgggggcccggagatagatgactttgcagatggaaagaggtgaaaatgaagaaggaagctgtgttgaaacagaaaaataagtcaaaaggaacaaaaattacaaagaaccatgcaggaaggaaaactatgtattaatttagaatggttgagttacattaaaataaaccaaatatgttaaagtttaagtgtgcagccatagtttgggtatttttggtttatatgccctcaagtaaaagaaaagccgaaagggttaatcatatttgaaaaccatattttattgtattttgatgagatattaaattctcaaagttttattataaattctactaagttattttatgacatgaaaagttatttatgctataaattttttgaaacacaatacctacaataaactggtatgaataattgcatcatt

SEQ ID NO: 367 - DNA, 1599 bp, Homo sapiens
atattttttataaatagtgaagatacgtctagccagacctaatgttcaaaaataaatttatacatagaaacaaattttgccaattgctggaccaatggcaaacattagtgccaaatgtataatactatatgttagcactgaccatccttaaaaaatgttaactctataaatatgatgttcatgtggttatgtattagttttaattgtcagcctctggctgtgcattggtgcagttttgtttctgtttttgtttttgtttttaatcaaataagtttcttctcaaaatggatttcatataatttcggagcacggaagcacacacaagctctttatgaattctgctctccatcagaaacactgcctcaaagttgtatatgcctttatatagaaaatacaaatataaagaattgtaattcccataaaatatttctagcacaaggtatatgttggcatatatacaaaaagaatatagagaaaaacaatattttcataaactaaacatctcagatagagaaaaaatatatcttaaaataagactttactatattgaatctttttcaataaaaattacatgataatgccttatgaaagtaactgtacatatggtataaagtgtttatatttggttccatattcatttgctaaattctcatgacacagagtgaaatatttcataaattagccatttatctctgggacccaaataaaaataggatgaactaatttgttcaatgcctttagctaattacaatacatgcagagtttagaaacagactaaaggtcattgtagttaagtctttttcaccacaaatttaagcagtggatgatgggtggcaggaaaggtattgctttatttctttcaagttcatgttgattataaactgtagcccctgtgatttctttacttgtaaatgtggaatttatttgtgtgttgcttaatctaatttgctgctttttaaattatttaaaacgaattttggaaattgataaaatttatcattacgaaagactgctgttagaaagttatggtaggtgattttaaatccttggtatttaaatatgaaacttcaaatataatttctcagagctgtggtctacctgtatcattaatttcaatggctgtttttctgggcagaaatagataaaatactttttttccaaaaacagtttcaaggtatgtaaaatcctgaatgctttttcactgaagagaaagacaagcatggttaatgtagaattatttacttttccattgaaactattttcctgcataaatgatcaaaatttattttataatcctttaaaatacttatctttcatattagtcattaatttaattacaatattaatttgaatttccaggataatttcccggagttggttgcatgcattatctttcataattttacatagttcttttgttatataatgaatttactttacatgctagtgtttcaagtattgtatgaggattttcacaatagtatcactgaatgatgtcaccagagctctgagaataatatttgtaagttaactgttttatggggacattgaaaatattgtatttttgtagggtctattaaaatgagtgtcacttattag

SEQ ID NO: 368 - DNA, 1195 bp, Homo sapiens
atattgcctctgagggagtccaactgtatacctgcatcagtgtcattcctttgtgtgatttcttaatgctgtatttgttcatctcaaacctagatgtatacagctctgagttataaatggttataaagctcctgttactcatattagttatttacatcaaaaagcttttagaaaatggtacgaggtaaccaattcttgtcatggtgaaatctgattgagtaaccaagcagttttactattctggtgctgcttcataacaaaaatgaaaagctgcatgcatctacagcaggcatggattgtttatgtcgtatgatatcctttattaagtaagttcacttatagtatttctataatttgattcattgccgtaatagagccatgtaggaaatgcactgattgcatgttattgtggcaagaatatcctaaatgtcattaaaatcctccaacatgatggatctacttatggtcttgtttgttgacatgacaaattaacattcttatagttacatctggaaatgagcatttgaaatagataatcctttaagccttgtggcaaaatttttgtggcttttgtttaactttgaaaggttattatgcactaaccttttttggtggctaattagggtttaaatacagaaacaagatttcaaataaaactgtctttggcagtgagtaaatagcatattttgaagtagagttgtatactttttcataagatgtttgggaatttttttcctgaagtaataatttattccacatctacatcagtgaaagctatctacctatcctgagtctatcttaaaggaaaaaaagaaaaaaaccttatctcttgcccttattttgaattttccactctttcattaatttgttttaagctccgtgttggaaaaaaggggtagtgcattttaaattgaccttcatacgcttttaaaataagacaaatctacttgataatgtacctttatttgatctcaagttgtataaaaccaataaatttgtgttactgcagtagtaatcttatgcacacggtgatttcatgttatatatgcaaagtaggcaactgttttcttagttacagaagtttcaagcttcacttttgtgcagtagaaacaaaagtaggctacagtctgtgccatgttgatgtacagtttctgaaattgttttacaagactttgataataaaacccttaaactt

SEQ ID NO: 369 - DNA, 404 bp, Homo sapiens
cttagtgatgtgtgtcagacctctgagcccaagcaaagccatcatatcccctgtgacctgcatgtatacatccagatggcctgaagcaagtgaagaatcacaaaagaagtgaaaagggccggttcctgccttaactgatgacattccaccattgtgatttgttcctgccccaccttaactgagcgattaacctgtgaacttccttctcctggctcagaagcttccccactgagcaccttgtgacccccgcccctgcctgccatagaacaaccccctttgattgtaattttcctttacctacccaaatcctataaaacggccccacccctatctcccttcgctgacactctctttggactcagcctgcctgcacctaggtgattaaaaagctttattgctcacgc

SEQ ID NO: 370 - DNA, 442 bp, Homo sapiens
tattccagagctgctattagaagctgcttcctgtgaagatcaaatcttcctgagtaattaaatggaccaacaatgagcctttgcaaaattttcaagcggaaattttaaggcacctcattatctttcataactgtaattttcttagggatcatctctgttaaaaagttttctgtatgtcatgttataattacaggtcaattctgttaatatctttttgttaattttgctctatgtttgcctctgaaggaggtgagatttgtgctactttgggagattatgttcttttttcatgtctaagatttattttgatcatgtttataatataatggtaattcatttttgatgttttgtgaagaatttaaatttaaacgaatgttcttaaatcaagtgtgatttttttgcatatcattgaaaagaacattaaaagcaatggtttacactt

SEQ ID NO: 371 - DNA, 1604 bp, Homo sapiens
agatattttaaatattgtacactttgcctttttgagtaacattccagagataggtattttttgtaggctgtttcactgaactcagttaatgaaaactgtattaacataattgttgtagcataatattaatagtgcaaaagtacatataagtcattttgatgaaaaatattccaagactaagttgagaaaagagatactattttggatgtgtatcagtatttttgtttttaataatgattgatttgtggagcattgttttttcacataattagttttaaaggtaattttctaagcatacctttggaatttttccatcttttttgaggcttttggtccagtgaagttctaagtattcactggcacttctctcctcaactgtaattctatttttaataataaaaatggcatactgtagggtcttcagagtagtgtaggaatactgtagaaatactttttcagaaacgaatccatagctgacaaattcactcagtgcccaatatattgtgattattttcgttgataaagaactagatacaaagacctctgaaattgatgataaaatttgtatctcattaattttatcaaaatgaaactaaaagtacatatgtattatacacttgaacatgtgtttgtatatctttaaaattttcctttatgttccattccataggaaaacacacatatgcacacaaaactcagttatctgtggggaaagtggtagtaataattgagattcatcaataatcatataatttcactatagacattacttgcattatctcctatcagtccttctaacaaaacttcaattaccagatgaactgactttagttttcatcttattttttgtccacatgctggtgatgctgagaaacaataattggcccaaatgcagacatcaagaagcaggcaggaaaatggaaaaactgagataatacacaggtgataaacagtttcgagaaaataaaaattggctagaatctcaagttatgtgtttctatattggtataagcatataagtgaaaagtcttataagtgtaatagagaaaagatttgtcagtgtgtttttttaaatgaaataactagtctgtgctactttatgtcaatataaaaattggtaaactagaagtaacttgtccacaaccctcagttatgatacttatgtgcgtgtttttttttccaaagtttttcccaaggagaagatacaaatatatggtagctattgtttaaaaatgattgatttacttgcagatttttcagaggatgttatgtctttgtcattcattaaatgttcaaaattgtagttttaccaaatctgaagtgccatcagttataagaatcaccattattttatgttccattaagaaaaacacaataaaacatgacactgctttttttgttacttgaaattttcatatttattggagagctcttttagatgtttttaaatacagatttttatttaaccctcttgcatatacatataaaataacaaaaaaataaaatattgagatatcatcaagaaatttctacagcttcacattcaaactcttcagcactttcagagctattgatatgcatatgtccacctagtaccatcttct

SEQ ID NO: 372 - DNA, 442 bp, Homo sapiens
cagcattcggcgtatacctaaggagagttttttccccgaactgacagcaacgattccaaccacggcaagctggcttccaactataacattttactctcaaaggtctccttaaattgggcttgtttttacttgtcctatttaattccccactattagcaggctttggatttgtgcctaaggaataatatgcaaaagaaccaagacagaatgtatatgaagaattgtttttaattttgtaaattaaaaaaaaatttagatcgttacttggaaatggagcctaagtctgtggtggacagataataattatgttttcctgggctgaattatgtagacttgtgtttgacagctatgggtttatttcttagaacattgttcattttcttttctcattatgttacttctagtgttcacctctgtgattaaagattctttggtgaaatag

SEQ ID NO: 373 - DNA, 1511 bp, Homo sapiens
gctttggttctgatgtgtcttggccgtaatgtttctagtaggttttataaagctgctcttcataagagtattttagtttgttgagtgtatcagccattcataagccagtaatgacaagtgcagagcttcaaactataactttgttgcccagaggatgtgcagttgtcatctaagctctcagcagtacccggcttatcctacgacttcacctgaaatgctatagttatccctacttttttaccagtttctcccagaagcacctgcttaataaatcaaagatgtttgaatggtgtcttattctgaaataacctgacctaagacaggtatttagattattttggatacattttgaaaagggatagcataaatattttaagtaaaaagacctttattttaaataatagtggatattttaatgctggaaattagcattatagttgatatgccagaaattatatctttggttgtgatttaaacttatgctataaactaaattaatgatgtaaatacatagttttaaacattcttttagggacatgtaacttttaagtatcacttcaataatacgtattattataggaacaaagatttgggaataattgattacaggtgaggaagtactggaattccagttcaaggagataccatttcatttaggactaaaaggacaagatacaagttcacatgatgggaaaaatcagaaaacctctcgcagacaaagggtatataatggatatgaggcatcaaaaagcatggtatagtcagtgatggggaatagtccagaaaggctgaaacacagcatgtgatgcgagtcaaggtagttgatgcccaactgtgaagggccgttctaatctagcatggaggtagacagtgtttccttaatatggctgcatatcagaattacctaggtcaggacgaggcatggagatgctactttaataggccctgccgcagatcttccaaaccagaatcttaatcctggagtctaggaatctttatttttcacacaactcatccaagtggttctgataaaatcagtccagcacttttagaacccactgataacagacttattcctggagacagcatttgaggaggaattgaagatttttctaatgaaaagaaaaagggtcacatgaacagatgttgcagtgtacctgtgccagggatttcatgtgtacactttataggagaataagcaagagcttaggtaagttatagtccttaccattgggtctaaggcagtttccaggaaagcatggcaactcgttcagctatgtaagttgaactctgtaccacttgggagggaacattcccctagatgacaatgtcagtggcactcgaagttgtgcagtgcacattcttatctaccaacatatacagcagtccttctgggaaggaaatttgggcaggaaagggaactcacagtgtcggaatgcctggagcatttcttctagtctggtggacagaatatgaaagtatctgcctggcagtgcagtaaatgaaaagag

SEQ ID NO: 374 - DNA, 636 bp, Homo sapiens
ttcttttttcagggatagacttgattaaggatataaatttgtcatttattatgtataaaataccattgaaaagatattactgttaattttttatttaacacctaaagcatttccaacatcactttgctgcccaggtatgtatctatagttggcctgcaagacacttttattaattcttcattttttgtaaaacttatgtttacaagaagaaaacaaatcaaaacattttttgtattgtctggaaatagttcactctagtgtgtatctgttaatttatttgtcatcaaaagagcactttgcctaaaagaaaggactgacaagtgtgcaaaatgtttacaatcttttgtgaaattgtagtttatcattagtttgtatctgtaagttattgtaataaatattacctgtattttttgttatatacaactttatactttgaagcttgtatctgtgaatttgcaactgaaatttattttgccaatgttttctgaatgaactgaataaagcttctgttgtagcatgccatgcaaacacattattgtgtttgtggttgatgaattatggctgtaaataacactatagtttaataagcccaccattctgagtttattaaacattttccattcttgtgaaaatttc

SEQ ID NO: 375 - DNA, 735 bp, Homo sapiens
aaaaattactgtagaaatattgaataactagaacacaagccactgtttcagctccagaaaaaagaaagggctttaacgttttttccagtgaaaacaaatcctcttatattaaatctaagcaactgcttattatagtagtttatacttttgcttaactctgttatgtctcttaagcaggtttggtttttattaaaatgatgtgttttctttagtaccactttacttgaattacattaacctagaaaactacataggttattttgatctcttaagattaatgtagcagaaatttcttggaattttatttttgtaatgacagaaaagtgggcttagaaagtattcaagatgttacaaaatttacatttagaaaatattgtagtatttgaatactgtcaacttgacagtaactttgtagacttaatggtattattaaagttctttttattgcagtttggaaagcatttgtgaaactttctgtttggcacagaaacagtcaaaattttgacattcatattctcctattttacagctacaagaactttcttgaaaatcttatttaattctgagcccatatttcacttaccttatttaaaataaatcaataaagcttgccttaaattatttttatatgactgttggtctctaggtagcctttggtctattgtacacaatctcatttcatatgtttgcattttggcaaagaacttaataaaattgttcagtgcttattatcat

SEQ ID NO: 376 - DNA, 429 bp, Homo sapiens
attcattgaattgaaagttgcatagtatagttttgccattttaacatttctgtatttgaagtgcttatcgaatctaaaagtgactactgttaatattttgtatattgtgttaaattaattttaataaattatataattatacatattgtaaaataaagaccggtattttattttctgctttttattctgaagtcctgttattctgactacagttctttgtgtatacttctgtgtctgttatgttcaataactgagctaacataaaataactctaggtttctacttgatttttcccccatgtatacctttcatctgttctatagcaagttgatgtaaattggtttgtcaacaagaatgttaactgatgaaagtggatagaacccatacatgaattaaatgatgcacaaaataaatggctgttgaaatttg

SEQ ID NO: 377 - DNA, 351 bp, Homo sapiens
tcacaattctaatgtaataatatatcttaattcaaggaacctagaatttatttttctccttagagataaggaaaataacatttgccaaatttcatattttaattgaaaattacattatattaacatcacaattgtcatctatatattctatatgaaaaatatttattataacttaacaaatgagaactacttaaaggaatggtttttatgttaggagaaaatacaatacaccacttttttctcacaaaaattcacattattaagacctaagttcatttatacttacaagttatagtttaaaatattattgtaaataccctagtttaataaacacctttctttttaggtctg

SEQ ID NO: 378 - DNA, 2141 bp, Homo sapiens
taatggttttcctgatcttgccgcatcacttaatgtgatccccatactgcaactgtgatgctgatgatgctaatggagatgatggtaatgataaagacaacaacaatgattatcaagttcctgtacactctcagatgtggatggtgactctgctagtaatttaaacttggcatttcatggaggatggttgtgctcatgatgttctttctggaggttcaacactacgtaccgcactttataatttaactggaattgagatgaaggccagtgacatgacaactgtgacctaagaaatgggaagattatctttcaagatagctgcctagaattgttcaacagtgagtaacttccagaagccaaaagagtttggcttcatgaggcaaggtgattgactcaatggcttgttgaatctcagcagttccgccatcttgaagaatgattgattgtcaaacactgacccaagaactgctatcagggtgcaagtatcttactacttagcctaaggatgggaaaatatctcttcctaatataccatctttctacagtatttcctacagctaaagcctcaggccattgcctaattaacaatgaagatttcatggacatcctacacttcaggattacttgactatctcaaacacataaatcaaaatgggccaagtagcaaatcttgatgaatttccactcttaccatccattcttactaccaacagtataactgaacatgtgattagaatgatctatattaatgtttagttatttttggttgagtgctaaatatttcagaaggctacttaacatgtaagataccaacttcaacactgtaataacatatactgtgaaaacattcctaaaaagtaaccaaagggtttgctaactctgcttcaacatccaacaacacaaaactatatgatttttaaaatcatgaaatagagacagcaaagcatatttttacatcaatttgtatcctatcatacttcataatatatatttgtatattcaaatttctattttataggcccaaggtgtgtttctccaaacattacattctcattgccaagtgccagctgttacacatggagaggaaatgattccttatattaaacctgaccagagctttttgccttctagggatttatttttcccatagtgtatcagttgttatgccacaataacaacaataataatgttcttaatgtccaaagtgctttgtcatttagagtcctttaacatctgttataccatgtgatgcccttgaacaccccattgggctattgtctgtgtattctgctctctttagcagatgatctgtaatttggtcattgttctgttatattccagattgctctacttgctaatatttgtatagaatagaatttatgtaaactagtaaccagttgatctctgtgccaaatacattatatcaggattacacaaaaagtatcacaaaggatggtcttggccatatgctagggcccctgtgaaaataagtagttttgagaagtttttctatatacgtatatatacacgtgtggttctatttaggtggggaaaaaatgaaaaagcagggacaacaggaggaaatgaaggcagagaaatatagtttcctttcctaggattgagacaattctatttttcatatactcgttgctcattaaatagtaaagggttgatttgctgcaagagtagctgagaattcaaaaacatccttgcagaatgattcaaaagacaaaagccaggctcaacttatagaatgttttggaaactggaagtaatgatacatttcacttcagaagcacttgtaggtctttactagtgctaagtattatggtgagctatcattaaagtgtgccatcttggataaaggccttttgcctactctcttctgcaattttgacacctcaatattcacacccataaacattactaagccccagttctatcgttggaaggagttgttattcttttgttgttcccttatgcaatttttaattctatgaatgttaagtttttttgagctaatgatagatagaaatgcccactcaaagaaaaataaacagagacaaatgttaaaattgccatacagactgtttttccccctgttgtttcactttaaaataaaaagaaatccttgattaatc

SEQ ID NO: 379 - DNA, 844 bp, Homo sapiens
ggaatgagcatgccagactgtaatcccaggtattcactgcatcagacaccgagacactgaacttcctgagccaccagacaggaaagggtagcagaaaacagcttcactcctcaggaagtaccatggacagacgcctaccaggggtgacaaagcagtgcagttggattgtaaggaaaaattccggaattaatgcatcctaatgaatgttgtccccttcaatggtgttaccttaggagctgaacattcaattcagttacaccactatgactaaaaacagtttggatctcttagtattgcctttgaaactgcaacataagcaactcaacaatattagttgcattcctttatagacataccatgtcaaagacgtttttctatcaagttgtattctttcctgttctataacctttgtcatctgttagactctgtatgtgtgatttgtaaaaagcaggctgaaactatggacatgatttctgaagagcacatctccactgactttcataaagcaaatgtccaatatttatttattgagagttttttagtgcaatctgggccagtatttttatagattatgattatgtggtaatttatccttcctaactctttaatcctgaatgatggttggaaatggcctagaattaggttactctgttcacaatgctcattgttagcatgcaattggtatttgacttggaagtgttgtgttgtattttttgaacccctaggcttcaggaaaactgctcttttgtaaaaagaatagcgatgacattttctaatgtgcagaaatgttccaaaaggacaaaattgaaaaccaaaaactatgttattaaaacaaaaaaatgct

SEQ ID NO: 380 - DNA, 1297 bp, Homo sapiens
aggcaaaaatgcatgtttgttagaatggaaacagaaaaacattaaaaagttcattccttaacacaatgtttcaagttaaaccttttgtgtcaccgcccccaccaaccaccacctcctaaatcctgacagcactgtttgcttcccagctagacctgtgtgagaggtgtctggaaatcatgcatggtgtatttgggactatatcaacctattctccacacttcagacaactgtctgcactcacggcacacacactttgtatcatgcaggccacactcagagctagtcagtacatgaacagtggtgcggtgccagtctgtgtccgttgtgatcacaggccttgctagaccctgatcatctggttctcctctcattaagcatccctaacccccagtcacaccttcctcttacatactgttccccaatggaggcccctggcataggggacagccctgggcatcttcctttggtgtctggctgttttgtcaactctcatccactggtggctcagagccataaggtgggttgattacacaatgccttgtacatgatatagaggcatcaagcaagtaaaatttgacagaaattttaaaatatgaagatgtatagctttcccaagatgatggtaaaacccaggttagtcatcagtaaccttctctattattattattttttagaaacttggaatactgtcgtcatggctaagagaacaaatctgataaattgtgtaacctagtctcttctctacatggtgatgcatttcagcaattataaattaatataaatgaccaaaagtaacttaaaagcatgagatatttgctatttcattcattgggcacatatcaaattataattttgattttaaatggtcacccatgtatttatttgttgccaagcaagtaaaaaaataccctaacaaacctgatgtgggtgggaggggcatgtcagtaagtggtgtgttcaatgtgtttgtttcatatgggccctttccaggagtttgcaaaccttgtcatacccatatgcaaaactgtgtttccttgcattaaaccagtgaagtttgggttctcttttgtgctatcaatcagttgtaaaatcagagctgcttatatattctactggaataactgcatcttccactcagtcactacaaaaaagcatagtttcagtttgcatgaatttttttttttttcttcaatggctgtgcagataaggatccatttctgggatagaattgtattttttaagtcatttttttttcttgaaatggatatgtacaaataaaataaatggaagacaggat

SEQ ID NO: 381 - DNA, 3332 bp, Homo sapiens
gtaccataagaatcatacaatttgagtgtgctatgaaatattttaaggtaactattgattttgtaacatatattacaaagttaacagaattgatgcatgtggattcagggaggaaaaaaaaatctactaaaaaatgagcaactgtactgtatttatacagaagttctgtcattgaattcctgtgtagtgtagtcatagtggctttttgcattcattaggtaataattgaagtcatgaaatgtatattttacagaaatatcgcttgaattgaagccaatatttgggagttaattggtttgtcttcttgaagctgtcattctcaaaagctctgtttttatgctttgcacctttaaaatgtacactttagccaaggtctttgtggcccacacatgcaagaatatattacttctaatgtcaatatatttaactttgcctagaaacatatttttaattataaagttattcatttgtttaatcaagtttaggcagtaatgatgtttaatatgtactgcatacattattgcttgtgcatttgcttatgtatttgaatcaaagaaattgtaatcactgaatattgttatagaacatttaaatgggccacttgcagtggctcatgcctgtaatacattgggaggctgaggcaggaggacagtttgaggccaggaggttgagactagcctggacaacataaggagatgcctgtctctacaaaaacataaaaataaattagctggtatcaagcagagttccatggaaatattaaaatttttttaaaaaataaaaataggctgggtgtggtggttcatgcctgtaatcctagcactttgggaggccaaggtgggcggatcacctgaggtcaggtgttcgagaccagcctccccaatatggtgaaaccccgtctctactaaaaatacaaaaattagccaggtgtggtggcgggcgcctgtagtcccagctactcgggaggctgacacaggagtattgcttgaacccaggaagtggaggctgcagtgagccgagatcgcaccactgcactccagcctgggcaacaaagtgagactctgtctcaaaaaataaattaattaaattaaattaattagttgggtgtggtggcatgtgtctgtggtcccagctacttgggaggctgaggtgggaggatcacttgagtccagaaggtcaaggctgtcatgagctgtgattgcatcactgcactccagcctgggcgacagcaagaccctatctcagaagtgaataaataaaacaaatacagcatttaaatgaattgacattgagaaatttacaatttacaaatttatattaactgtagtttccaaaatatgttactgttggtcctgtaagttacaaagagactgaagaactttctttttatacattagagcattttcccctggaatgagtattgattaaaaagataacatttattaattaataaaggcaatttaaaatttagtgttatttgaagactgtcaacatctgaaggtatgaaacttggtacagtgaaataatttctcctttctccttccttttagttattcccacagaaaactcagcccagtgggaatttgtcatattatgcccatgttttaaaaatattcatagtttgaatcttattgacattttaaagaagagttttttcctccctggaatgtaaaacaaaaatattttttaatgatgtggaagtatatatttcatgttcattatgataaatctacaaacaaatgaattgtttttatgggtggagttcttctataagagtatattaaatgctttcagagttgtattaattttgtttctaaataatataccacttatttggagtgactaactcagtatgtaagtagatgagatttgttgattttgcccctaaaacgggctttagtcattttaggagtgagttgcacaaaaggacctaaaatgcattgttttttgccttcttttaagagatggggtctcgctctattgcccaggctggagtgcagtgtgctatcatacatagctcactgcagtctccaactcctcataccagaggcatgtgtcaccatgtcttactcctaaaatgcatttttaaaaagcgaatttttagattaaagtgcctagtttctgattaataaatagaagatgaaaaaagtgggcgggaaaagcataatcttttaagatttgtaattttctgtatgtgccacatttatgtaaattaactataaaatatggaattcaggatcatgctgttttgcatgtactttataggttatatagcatgaaacatacaaattatcactgttctttagtatatagctccttgccttttcttacatagatgcttaatttaacaattacctatttatagttcttattattgacgggaatatgattagaagtaccaaaactaaaaattccattatgtactgtttactttttatttaatattacatgtttttaccttgttgcggtatctttggccttcacacacacatgtgtgcgtgcacgtgcatttcattaccatgtagacaagacagttattgcttatagtaatttacccatttgagggctaagtgttttaagctgtggttttataagcaaagctgtaagtaaatgtaatttattttagaaagatattatttgaaatcaattttgaagaattgcactatttgataatgctgctactacatgagataactctggggaattaattttatgagataagatgaatggctttctagaaggtgttgctttttgttttttctttttcttttttacatttcatcttagaaaaagttgcttatattcagcaggttggtttgtcaaattcagtgtttgagtttgtttctggtcagttcagtagctgctactttagcaagatgtggcctttcacaaaagaggtaagagtgaccaaatagaattttaggacaataagtataggaaatatctctttatcgtaagataagaaacttgaactttttaaaggaaatgtcctcttgaaaagaacatttctgactgcatgcagaagggtacttaagacatatataacaggccaggagcagtggctcacgcctgtaatcccagcactttgggaggcccaagtgggcagataacctgaggtcaggagtttgagaccagcctgaccaacatggtgaaaccccatctctactaaaaatacaaaaattagccaggcatggtggcgcatgcctgtaatcccagctactcgagaggctgaggcaggagaatcgcttgaacccgggaggcggaggttgcagttagccgagatcgtgccattgcactccagcctgggcaacaagagtaaaactctgtctcaa

SEQ ID NO: 382 - DNA, 1064 bp, Homo sapiens
tcactctttttatcttttattctattaatttttttttccttaaaatcacttttcttcttctcttttttagctgatgactactagctcccctcccctctccctggaactttctctttcactccaactttcttactacatccatcttttctgtggcggggccaaaaaaggaaaccaggagtgccactatgctgacttcttattccttttcataacagtcttcaaagcacagctcatctaaagaatgcctacttcttttccaaataagcatcagatttatcgcctattatgcagtaacagtcaataaaatgtacttatgggggggaattactcaattattctatcagaacctattataaagactgtatttcccatagacgtttacagcaactatgtttaaaaaacaaaaacaaaaaaaaaacacacaaacctaagtagaatacattattttgcatgaaggaatgtcatttctgagctttttacacctaaaattaggctgaaatagctgagataattaatttggaacctatcaatttgagtggactttttctttagtagtacaccattttggttgttgtagtttcaaagtctttctgaagcagatatattgggattggagcggggtggggaaaactgtcactcctttcagaggaaaaggggaggagcatggagaaaaacaaaaattaaaggacttaaagaatggctatacagtgttgagtgttgaggatattaaacatgttatttttcaaacgtatgtaatatatattaaatttataaagcaaatttatgttgtgatcttgcctgaacaaattatattttaatgaaaaaactttctattaatagttcacgcaagagaaaacactttcaacatagtcgaaggcttcaagatctaagtgtatcagacttagggaaaaagtggcacaaccttcgatttaaaattctagtctttaaaatgagtttgtaaataattagctattacgttctattaagttgttttatattttaattttctggaagacaattttattttacaacgtgaacccaaataaagtaacttctgtatttaa

SEQ ID NO: 383 - DNA, 1062 bp, Homo sapiens
aatgaagaactttgttacacatattttgataaggcactgaaaatataaaaggactggtagtttactgatgtagatgtgaattctgtataaagatgtgtaaattcttttgagggttcattaaattgcatgaatagagacgggtcaaataaataggcaaaagggatttttacagttagagataaaagagaaaaccattcactgtattttatttcatttctcctgattcagatatttttagtaatttgcttatatgtaaaagttgtttttgtggagtcagtggatatatttctaatgaagtgctagactatccaattacttaatttcttatacctttagataatcagtatgaaaagttcccatttataatggaaatgaaaattcttaactaaactatacatgtaatatgtatttctagaagagaataaaaacccaagtcagttattagatttaaatcaccttctgaaatgctgctatagggctggtatctgtaaaagaatatcctgatgcatctgtttcaccattttgatttttaaagtatgctgtagcatttcttaataacatcgttgtgatgttcttaaggcagatctttcttcataaaaaggaaagtaatggcaatttctctcctgtggaaatcccaattgcttgaattactgatattttagaatagactttttaaaatgccatatgtaattttatgcaagttgactatatatcttgtacttaataaattataggctcattttgttctctgctagtttaaagtaattcgtttaataatagatgtgtttttagaggaaatgctgttacttggaattaattttccagttatacagtcttctataacttactaataatattctatatgtactttatgtaatttccctaaaaagaatgaactaccactacactatggtgttaaaccaaaatatagggaaaataaacactaactgctgcttatggataatgttgcaactacttgttatgcatataaatattttactttttcacatgtatagattgcatttcttaggtgttttaattttttaaatatatttatgtttt

SEQ ID NO: 384 - DNA, 1684 bp, Homo sapiens
tgtgtacactccatctctgaagaaacaacccatcgttcttttttttctcttttttaaaaagtcctataagatctgtttttggacacctttactaactctggtttaatttcatgtgtatggaatatattctttgaaatataattttggtaattttgatttctgggcactttttaacattgctgatgtagtatgcttaagagaaatgacctaaataaggatcaattgtaatattcattcaaaaggtttttaaaagtaagttttaaggagtatttctcgacagatgattttcttctccattaatacccatgctttgtttttcacatataaatagatgatttcaatagctttgtagttttttttcaaaatcttaatgtaaactaggattggagtatgatttacctcatagtatcttcactgtgttatcctagtttgaacaggatatgttcaggaaatgaaaggtgaattatgccccttattggtctagaagcattggtttttttttgatcctctgagtaagggaaggaagattcctgtggcatgttgatttctatggccaactttctctctttgtaaaacaaagattgattgattttcttgtatgcttctttatacatgctcttaaaacttgtggttgaaatctgtgctgtgtgtgtgtgtctctgcatgtgtaaaagaagggtaaaaaagagatgggtagggtagaactacttgcatttgatttttttttcagtccttaaaacattatttctttttttcactcatagccacttttatgttaccttttataagcactccagggaagattttatatttttttgtagagtttttggaaagatatttactcaaaataactatgctttagaactttttttttttttttttttttggttaaacagcagcactttttagttccctaaactttagaagaaatgctatcagaaatagatttccttccagtggaaagaaaggaggaagggagaattgagaaaatatattagtctattattttagagttctaatacactctaaattaaagagaaaattgagagtaaatgactgtcttatcactcttatttgacatttcgtaggtgtaagagaaatggaaatgaatggtttcaacaaagatcatttaatacagcagagcatggcatgaccaagcatctttgtaaagtgttagatggaaaatgctgtgtgctgccatggtaatcagaaataataacctgttagggatgtattctaggaaatcagaagtagttctcttttcttgctggattattgcttagataactcttgttttctggtaaaactttagttgtattgccatccactcctttttcaaatgagtttaatgccataaagctgatattctttgtccgattaatttgaaatctgcacagaagctgttttagtcattaatgtgtaacaaaagtagcttatagaatatggactgccttattgctgttgcttatcatttgaaaataaaatccagctcaggttgtaacttgttggtactcgtttagtgagttcgttttggaggttctgaaatacctattaattcttaatattacctctcttggaaagacacaaaaaaagagctgttatttttaggcataagatgacttaggaggcccatagaaacattctcgtttaaacaacaacaacaaaataaatttatcagcactag

SEQ ID NO: 385 - DNA, 4013 bp, Homo sapiens
cttaataggacagtaaatctgtgtggggctagaacaaaattaagacatgtttggcaatatttcagttagttaaatacctgtagcctaactggaaaattcaggcttcatcatgtagtttgaagatactattgtcagattcaggttttgaaatttgtcaaataaacaggataactgtacatttttcacttgtttttgccaatgggaggtagacacaataaaataatgccatgggagtcacactgaaagcaattttgagcttatctgtcttatttatgctttgagtgaatcatctgttgaggtctaatgcctttacttggcctatttgccagagaacatcttaatgcagcctgcatagtgaaatggttattttgagatcaccgctctgtagctaacccttataaactaggctcagtaaaataaagcactcttattttttgatctggcctattttgcccctcattgtgtagcctcaattaacacatgcatggtcatgacacccagaattcatgatggtttgttataacaacctctgcatattccaggtctggcagacaggttgcctgaccctgcaatcctatctagaatgggcccattcttgtcatatttgacaaataggactgcctacatttattattatgaaggtcgattgttgttggaagtgttttttcatgtcatagattagcaattttcaaataattattttttctctgaaaattttgtgtgtgattgcacaataaataatttttagagaaacaaaggctctttctcagcacattgatgggcaactagaattacagcagtttcaaaactctaccatggataatgcaaacaaaccgaagctacatgccaatgataggtgcaaagaatattggcaaaaggtgctttaccttgagccattatttgtgtcagagaacaaaagaaacagaatcaatatataaaattcaaagactatctgcagctagtgtgtttcttctttacacacatatacacacagacatcagaaaattctgttgagagcaggttcattaaatttgtaagatggcatattctaaagcctgtgctaccagtactaagaggggaagactggcaatttgccaagcacttggggattattataacaattaactaggagatcaagagataataatctctccccaaattttccaataataattgagactttttctttgcttgtttgtgtaattcaaccaaaagaatttcaatacccattcaaattgtcctaggtctatcagaaattagggaaggtagtcctgctttataataggaaaatgtatttctgtataagagttctttgctttcattaacttggattcatttaaaaattaatcttccctgttaggctgatttcagattctctaggaaatctgtgtaagtaaccagaagacctttcagatggtttatttgctttcagcagagaatttatttcatacagttacttaagagtgttgatgtcttgtgaacagagatataaggaaccattctccatccttccttatcatgctgggtacaatgcttctatgaatatttccatgtattttgactggggagaggcatggagaagaaactctcattcaggggctccaggatccttctccttgaggcttctaaataaatggcagaattcttgctgtattgccatgatgtcaccctggccatgtgtactgacttgaggagatcttgcaacatggccatgtgcaaggctttaaggagtgagagagatgtgtacatatcttaggagggttatctatgttatctgagtatatgtttgggtaaccaaattggtcttaaaaatgatgttaacccaagaagtagacatcaaaaattaaaaaaaaaaaaaggaatgtgttttcattgttttaagtttttcttctgagtaaaacaaaattatagaaaacaaatgcaacaatgtgcacatctgacttaagagtttcatttctgttattatatgtgttgcatgtagcttggcgatttactgtgtaatgaataatagactggaacatctaccaataactttcacataaatgttcaaaatagaagtgtattttttcaggtttctggaaataaatagtaaaataaatggcacaaatagtttcaataaatttaccaatttgagtgttttcagctctatttcaaaactcataactaatcttcagaattactgaatttccttttgaactgggtaaggcattatccaagcaacttcacatactatttaaacatgatttctcggtaattatatattctgggcaaataacataaacatgtcaggatttttacaggtgttagtgaatttttctaaaaagatgagacaaaagcaaaaatatcacacataggtttttatgactatgaatacaaagataatgctgattcacaattagctatgggtaagtccaaaacatcagaccttttactgatgggttaactaggtgaaagaaatgggcccttatttttttttttccctagaggcagaaagttacttctaatgatctatatagctaaaacgaaaaatacctgaaagttaatacatacatatgtagatatattttgttatgtgataaatgtttcttgtttgcacacttttggacttgagaaatctgcttttgttttgtgcctactctgagtttagaacccaaataagaggacttgttaaatatagagtgtactttttgttaaaactattgctagcttcacctgtataccatcattgttccaaattaaataactgttttgggtcagaatataaatgctgggaatatacattttattacttcttaatctgggtgtcaaagattttaccacctggtaaataatgttggacttcaacttgttactggcacattttaatagtagatgaaacatgtttttcttggttatgtgaataaatgtatgttgtgctcttcatacttgttggattgtatagagattaaatagtgatatgtatattttgttgtttgctttggtatgcaactcatgtaattttagtgctttgactagcttaaaacttcaaacaagtaattttataataaagttggactaatgtttttcaagagtgattatttttagaaggaccatataaaacttgaaacgcttgaacctaaactcccgttttatctgctactggatgagaagaatttcaacttaatttccattattaccttttgctctcccaccctgcccaatcttctgtgatatcttctctcttttacctgtgtctcaacttacctaggcaagtcataatttagatagaaatctgatttcccaaacctccaggtttagatatatcattcagaaaagcctcaatgtgtctgtaataagaaacaatctccaaattacagcgccataaacttcacaaaagtttgtatctcccacatggttcctgtccactctgaaggggagctctgctgttgtaatcactcagagaactcaggtgaaaaaacagccaccattatatgtggctgtttctcaaactacagagcatggtgaatcacacacaggctgttagaatatccatctggaggcaacacacatttgcatacacttctccagctaacataaataatgtggctttactaacttcccagggggcagctaagtgcaatactatatgttaggaaaacggaaactaatttgtagacagcactaatgatttccacattaggtaaaaaaaattttcattcttgtcttcctaatagcatttaaacagaaacgatttttaaaagttgttttaaacatttagaaacatcatggcatagaaacatttaggactcactctttgtaagtactgacaagcatggtcttgtaatctgtaaagataaggtagaataaatgaactaaaagaaattttagatgactaaaaggactatataatagaaagagggaaatcttggttcttaaaaattcaggcaattgaaacatttctgtataataccaagcattgttgcagtattgtctgaaatggttgcttttctaataaatgaaaatgactaaaatgt

SEQ ID NO: 386 - DNA, 261 bp, Homo sapiens
atatgtgaaaggttcacgtaaatttcctcacatcacagaagattaaaattcagaaaggagaaaacacagaccaaagagaagtatctaagaccaaagggatgtgttttattaatgtctaggatgaagaaatgcatagaacattgtagtacttgtaaataactagaaataacatgatttagtcataattgtgaaaaataataataatttttcttggatttatgttctgtatctgtgaaaaaataaatttcttataaaactcgg

SEQ ID NO: 387 - DNA, 575 bp, Homo sapiens
gataagttgccttgattctgacatttggcccagcctgtactggtgtgccgcaatgagagtcaatctctattgacagcctgcttcagattttgcttttgttcgttttgccttctgtccttggaacagtcatatctcaagttcaaaggccaaaacctgagaagcggtgggctaagataggtcctactgcaaaccacccctccatatttccgtaccatttacaattcagtttctgtgacatctttttaaaccactggaggaaaaatgagatattctctaatttattcttctataacactctatatagagctatgtgagtactaatcacattgaataatagttataaaattattgtatagacatctgcttcttaaacagattgtgagttctttgagaaacagcgtggattttacttatctgtgtattcacagagcttagcacagtgcctggtaatgagcaagcatacttgccattacttttccttcccactctctccaacatcacattcactttaaatttttctgtatatagaaaggaaaactagcctgggcaacatgatgaaaccccatctccactgc

SEQ ID NO: 388 - DNA, 1277 bp, Homo sapiens
tcatacagctaaggaattccaagggccacatgcgagtattaataaataaagacaccattggcctgacgcagctccctcaaactctgcttgaagagatgactcttgacctgtggttctctggtgtaaaaaagatgactgaaccttgcagttctgtgaatttttataaaacatacaaaaactttgtatatacacagagtatactaaagtgaattatttgttacaaagaaaagagatgccagccaggtattttaagattctgctgctgtttagagaaattgtgaaacaagcaaaacaaaactttccagccattttactgcagcagtctgtgaactaaatttgtaaatatggctgcaccatttttgtaggcctgcattgtattatatacaagacgtaggctttaaaatcctgtgggacaaatttactgtaccttactattcctgacaagacttggaaaagcaggagagatattctgcatcagtttgcagttcactgcaaatcttttacattaaggcaaagattgaaaacatgcttaaccactagcaatcaagccacaggccttatttcatatgtttcctcaactgtacaatgaactattctcatgaaaaatggctaaagaaattatattttgttctattgctagggtaaaataaatacatttgtgtccaactgaaatataattgtcattaaaataattttaaagagtgaagaaaatattgtgaaaagctcttggttgcacatgttatgaaatgttttttcttacactttgtcatggtaagttctactcattttcacttcttttccactgtatacagtgttctgctttgacaaagttggtctttattacttacatttaaatttcttattgccaaaagaacgtgttttatggggagaaacaaactctttgaagccagttatgtcatgccttgcacaaaagtgatgaaatctagaaaagattgtgtgtcacccctgtttattcttgaacagagggcaaagagggcactgggcacttctcacaaactttctagtgaacaaaaggtgcctattcttttttaaaaaaataaaataaaacataaatattactcttccatattccttctgcctatatttagtaattaatttattttatgataaagttctaatgaaatgtaaattgtttcagcaaaattctgcttttttttcatccctttgtgtaaacctgttaataatgagcccatcactaatatccagtgtaaagtttaacacggtttgacagtaaataaatgtgaattttttcaagt

SEQ ID NO: 389 - DNA, 3191 bp, Homo sapiens
agaggaacaagatgacatctgagctcacactcagtgtttgcactctgttgagagataaggtagagctgagaccgtccttgttgaagcagttacctagttccttcattccaacgactgagtgaggtctttattgccatcatcccgtgtgcgcactctgcatccacctatgtaacaaggcaccgctaagcaagcattgtctgtgccataacacagtactagaccactttcttacttctctttgggttgtctttctcctctcctatatccatttcttccttttccaatttcattggttttctctaaacagtgctccattttattttgttggtgtttcagatgggcagtgttatggctacgtgatatttgaagggaaggataagtgttgctttcagtagttattgccaatattgttgttggtcaatggcttgaagataaactttctaataattattatttctttgagtagctcagacttggttttgccaaaactcttggtaatttttgaagatagactgtcttatcaccaaggaaatttatacaaattaagactaactttcttggaattcactattctggcaataaattttggtagactaatacagtacagctagacccagaaatttggaaggctgtagatcagaggttctagttccctttccctccttttatatcctcctctccttgagtaatgaagtgaccagcctgtgtagtgtgacaaacgtgtctcattcagcaggaaaaactaatgatatggatcatcacccagattctctcacttggtaccagcatttctgtaggtattagagaagagttctaagttttctaaaccttaactgttccttaaggattttagccagtattttaatagaacatgattaatgaaagtgacaaattttaaattttctctaatagtcctcatcataaactttttaaaggaaaataagcaaactaaaaagaacattggtttagataaatacttatactttgcaaagtcaaaaatggcttgatttttggaaacaatatagaggtattcatatttaaatgagggtttacatttgttttgttttgtaaccgttaaaaagaagttgtttccagctaattattgtggtgtactatatttgtgagcctagggtaggggcactgctgcaacttctgctttcatcccatgcctcatcaatgaggaaagggaacaaagtgtataaaactgccacaattgtattttaattttgaggtatgatattttcagatatttcataatttctaacctctgttctctcagtaaacagaatgtctgatcgatcatgcagatacaatgttggtatttgagaggttagtttttttcctacacttttttttgccaactgacttaacaacattgctgtcaggtggaaatttcaagcacttttgcacatttagttcagtgtttgttgagaatccatggcttaacccacttgttttgctatttttttctttgcttttaattttccccatctgattttatctctgcgtttcagtgacctaccttaaaacaacacacgagaagagttaaactgggttcattttaatgatcaatttacctgcatataaaatttatttttaatcaagctgatcttaatgtatataatcattctatttgctttattatcggtgcaggtaggtcattaacaccacttcttttcatctgtaccacaccctggtgaaacctttgaagacataaaaaaaacctgtctgagatgttctttctaccaatctatatgtctttcggttatcaagtgtttctgcatggtaatgtcatgtaaatgctgatattgatttcactggtccatctatatttaaaacgtgcaagaaaaaaataaaatactctgctctagcaagttttgtgtaacaaaggcatatcgtcatgttaataaatttaaaacatcattcgtataaaatattttaattttcttgtatttcatttagacccaagaacatgctgaccaatgtgttctatatgtaaactacaaattctatggtagctttgttgtatattattgtaaaattattttaataagtcatggggatgacaatttgattattacaatttagttttcagtaatcaaaaagatttctatgaattctaaaaaatatttttttctatgaaattactagtgcccagctgtagaatctaccttaggtagatgatccctagacatacgttggttttgagggctattcagccattccattttactctctatttaaaggccgtgagcaagcttgtcatgagcaaatatgtcaagggagtcaatttctgaccaatcaagtacactaaattagaatatttttaaagtatgtaacattcccagtttcagccacaatttagccaagaataagataaaaacttgaataagaagtaagtagcataaatcagtatttaacctaaaattacatatttgaaacagaagatattatgttatgctcagtaaataattaagagatggcattgtgtaagaaggagccctagactgaaagtcaagacatctgaatttcaggctggaaaactatcagtatgatctcagcctcagttctcttgtctgtaaaatggaagaactggattaggcagtttgtaagattcctcctaactttcacagtcgatgacaagattgtctttttatctgatattttgaagggtatattgctttgaagtaagtctcaataaggcaatatattttagggcatctttcttcttatctctgacagtgttcttaaaattatttgaatatcataagagccttggtgtctgtcctaattcctttctcactcaccgatgctgaatacccagttgaatcaaactgtcaacctaccaaaaacgatattgtggcttatgggtattgctgtctcattcttggtatattcttgtgttaactgcccattggcctgaaaatactcattgtaagcctgaaaaaaaaaatctttcccactgttttttctgcttgttgtaagaatcaaatgaaataatgtatgtgaaagcaccttgtaaactgtaacctatcaatgtaaaatgttaaggtgtgttgttatttcattaattacttctttgtttagaatggaatttcctatgcactactgtagctaggaaatgctgaaaacaactgtgttttttaattaatcaataactgcaaaattaaagtaccttcaatggataagac

SEQ ID NO: 390 - DNA, 804 bp, Homo sapiens
tatgaacaaaacaaaactttgagaaaaattaacagacaaggcagtgatttatttttgaagaatttgagaagtgtagactctcaagaggactaaaggtcatatgaagaatgatgagagaaccaaaatacattaaaatcacaaatggaagaagaatattttactaatacaaaaactaagaatgtaaatgttataataattgtttcaaatcatttaattgacagtaattataaagttcttgaatctttactatattacttttatttatattcatataagaaatccaattttctaacaaggatactgtcataactaaatttacatttattaagaaaaactgctttagttaaaattaatgtgtcttcatttttatgcattggcctcgatttgccaatcattctctattggttaaattttatattcagctgtttatgaatatatattcattttatatcaaactttaaaattttgtatctaataatcagcatatattctaaaatcataacagtctaaatcctgggcaccttagaagaatgacaccagaaaaccttattatatcacaatattctgttttccccttcatttatttagaaatatgacaggatatttggtgtacttttgttttttaactaaaagtaccagattatctctccccatgtgggatataaaattatccccatctcttactccctttactcatctaaagtagaagtcatgaaagtggaatttttgccattaaaaggctctgtattatgtgaagttagattgtattaaccatttcccaataaatcatctgtttcaaaactc

SEQ ID NO: 391 - DNA, 1022 bp, Homo sapiens
tacagtcaaattggggtcttcgacctcaaaaaatacataatgacataatttagtttcatgtaatgaaactttgtaaacagaatacatacatgtgtatatgtaaagaatttcaatcaaatgaaacgttatcctattggatagactaggcaattcatcagctcacctgaaatcagccaggaggagcaaggacaagatgcgcacagggtggttttcctcatggattttgtcaaatagatgatctttgacacgattagacactcctccccacaaaggctttgaaatcataaggattttcctcatctctttatagctttcccaaaatcttttaaaaaagaatttaattaaatgacagtcttttggttacagacttaggatgagtaaaaacaagaaaatttggggagggggagaaagaagaaagggattgctgtctcccttgaattcctctgttccttagagcttgtgttacttggacggaattgccaacacccttttttatagagggttctccacttgaccttattaaggttttattgggatatgctgcagtgtttgaaatgaacatgcatcatggccccttcaggagcagaatcatagctctgaaaagagaagctccgttgtgtactgaggatatccatccatattcagctagctttcaaatggggtaacgatattttctgcatagattttcttttaaattggttctttgtttctgaagaaagaattttttttaacttcatggttttatttataataatttgtttctgaagaaatttgccgagagttacaggtcaaaaagccttgttactagtacagaatatttttatatatattccttcatgatggtgtaattttttttaattgtcctatgctttgttcggttcctgggttaagtacttgtttttaagagcttggaaaaagtgggcttgctacatctctgttcaaagagacatttgttcaatctctgtgtgtcaacgccttgttgaattggtgctttgtggttgcaataaagcattgcttcagtt

SEQ ID NO: 392 - DNA, 140 bp, Homo sapiens
acttggtgaaaggacacaggtactatcattgaaaaccttgacaatgggtcttcttccattacaccttctttatattttaaaggcctgtgaatatacttataacctgcatatcacaaaataaaacatttttctctcatgtt

SEQ ID NO: 393 - DNA, 880 bp, Homo sapiens
agtactgagagaatgatattggattttgctgaacaggcctatcttgaactttggtaaattatttttgacagaatactcttttcaaaatggcatttgctgatttcataaacctttcacgtctggacgaattaccaaatgccatgaattgccactgtgtgtttatgtagaaaatacaaataaaagttattttgatggcttaggtttccttaaacttagttctcttgtttttgggtaactgtgaataattaagttggaatcaagattcagattaactttcctatttgcatagaacacatgagaggaataaaatggttggtaaatattggctaacccttgatttttataccagattaaccttggattcccagtgtctggcacagttttaatagcttaaatggaggccaggtttctggatgttttaacattctcttaagccttcagaagggtaaaaaatttaaagcaaaatgatctaccagggtttaaagcaaagttgcaaattactgaagctaatctttgcttcctgattttgaggtttttggttttttgtgcccacgttgtggggagctcttttttacctcattacatggtgctgtagtactccattcaggcactgaaacaaagttaaccctataagtaactcatggatggaaacccgtagaacttaacagcctcctcctgaccttaaaagaataaaggttcacagtttacctttaattccctagcagtcttgccagatgtatggcataaagtcatgtgagaagagtaggtggaaaaaactgtacaaacttaaccccttcaggtgttcagaacagattaatataccatgtatttaataccaataataatgcaaaataaaagtttcatactaagttttattgta

SEQ ID NO: 394 - DNA, 138 bp, Homo sapiens
aaaagcttcctgaaggggtgttttggggacttcttccctctatttatttttatgtcaggtgaactggcatgctgaacatatatatatataggctcatttatagacttttatttccctgctattaaaacttttgaattt

SEQ ID NO: 395 - DNA, 664 bp, Homo sapiens
atgctacctgggtttccagggcacacctagacaaacaagggagaagagtgtcagaatcagaatcatggagaaaatgggcgggggtggtgtgggtgatgggactcattgtagaaaggaagccttgctcattcttgaggagcattaaggtatttcgaaactgccaagggtgctggtgcggatggacactaatgcagccacgattggagaatactttgcttcatagtattggagcacatgttactgcttcattttggagcttgtggagttgatgactttctgttttctgtttgtaaattatttgctaagcatattttctctaggcttttttccttttggggttctacagtcgtaaaagagataataagattagttggacagtttaaagcttttattcgtcctttgacaaaagtaaatgggagggcattccatcccttcctgaagggggacactccatgagtgtctgtgagaggcagctatctgcactctaaactgcaaacagaaatcaggtgttttaagactgaatgttttatttatcaaaatgtagcttttggggagggaggggaaatgtaatactggaataatttgtaaatgattttaattttatattcagtgaaaagattttatttatggaattaaccatttaataaagaaatatttacctaat

SEQ ID NO: 396 - DNA, 1028 bp, Homo sapiens
ataaatatccaaagtgtcttccttcttagatataagacccatggccttcgactacaaaaacatactaacaaagtcaaattaacatcaaaactgtattaaaatgcattgagtttttgtacaatacagataagatttttacatggtagatcaacaaattctttttgggggtagattagaaaacccttacactttggctatgaacaaataataaaaattattctttaaagtaatgtctttaaaggcaaagggaagggtaaagtcggaccagtgtcaaggaaagtttgttttattgaggtggaaaaatagccccaagcagagaaaaggagggtaggtctgcattataactgtctgtgtgaagcaatcatttagttactttgattaatttttcttttctccttatctgtgcagaacaggttgcttgtttacaactgaagatcatgctatattttatatatgaagcccctaatgcaaagctctttacctcttgctattttgttatatatattacagatgaaatctcactgctaatgctcagagatcttttttcactgtaagaggtaacctttaacaatatgggtattacctttgtctcttcataccggttttatgacaaaggtctattgaatttatttgtttgtaagtttctactcccatcaaagcagctttctaagttattgccttggttattatggatgatagttatagcccttataatgccttaactaaggaagaaaagatgttattctgagtttgttttaatacatatatgaacatatagttttattcaattaaaccaaagaagaggtcagcagggagatactaacctttggaaatgattagctggctctgttttttggttaaataagagtctttaatcctttctccatcaagagttacttaccaagggcaggggaagggggatatagaggtcacaaggaaataaaaatcatctttcatctttaattttactccttcctcttatttttttaaaagattatcgaacaataaaatcatttgcctttttaatt

SEQ ID NO: 397 - DNA, 244 bp, Homo sapiens
ggctgaatttttgtcagataaataaaataaatcattcatccttttttttgattataaaattttctaaaatgtattttagacttcctgtagggggcgatatactaaatgtatatagtacatttatactaaatgtattcctgtagggggcgatatactaaatgtattttagacttcctgtagggggcgataaaataaaatgctaaacaactgggtatacatgcataaaaactatccattcaaaccc

SEQ ID NO: 398 - DNA, 404 bp, Homo sapiens
accttaacgaagaaaaaaatcttcaagtagacctagaagagagttttaaaaaacaaaacaatgtaagtaaaggatatttctgaatcttaaaattcatcccatgtgtgatcataaactcataaaaataattttaagatgtcggaaaaggatactttgattaaataaaaacactcatggatatgtaaaaactgtcaagattaaaatttaatagtttcatttatttgttattttatttgtaagaaatagtgatgaacaaagatcctttttcatactgatacctggttgtatattatttgatgcaacagttttctgaaatgatatttcaaattgcatcaagaaattaaaatcatctatctgagtagtcaaaatacaagtaaaggagagcaaataaacaacatttggaa

SEQ ID NO: 399 - DNA, 969 bp, Homo sapiens
ctgagagctacattataagaataagtaaacatttcctggacctccaagaagattttgataaagctgctttaataaatacttctggtctgatacctaaggagcctggttcagtagaaagttttgaatttaaaccagaaccttctaaaatagagaatggtacgacattctatattgcaattcaagccatccatgaagccaatgtcacctcagaggtttcaaacattgcacaagcaactaactttattcctccacaggaacccagcattcctgatctgggtaccaatatttctgcaatcagtttggcaatttttggattagctgtaattttatctatattttaaactagaaattatattagaactcaaattcaatgttatacatacttggtaaacatttatttaaaatttaatttactatacttattgtctattataaagctcattataatataaaagtgaagtacaaaagttgtaagtttcctaattacttgattaattaatactatttgagttattaaatgttaatcaaaatgagtatatcatttcctgtctttgaataatccactcattaatttttaatatgaaaagatatatatttgtacttgtaagcattttaagaaacatttttaaagtgtgctacaaattcatttggtgtactaacatcaaaatgtatccaagccatttaaaaaatatttatatatacatagtagcaaatagttttatagatttatttgtatcgcattttttattacaaatgaatatttcatgtttatataagctgtaatcaaaaaggactagtagtagtagtaaggaagtcaaatttgtttttttatcattgattataagtggtatatttgttttttgtcattgattaaaagtgattttagccctaggcccgaaatgactagcaaatatcattttctgtatgaattgtggaacatcacaataaaattatttctgtgctgatgct

SEQ ID NO: 400 - DNA, 4948 bp, Homo sapiens
gtaggtggactatggaaaggttgcccatcatgactttgtatttatatacaattaactctaaataaagcaggttaagtatcttccatgttaatgtgttaagagactgaaaataccagccatcagaaactggcctttctgccaataaagttgcatggtaaatatttcattacagaatttatgttagagctttcatgccaagaatgttttcttacaaaattctctttttattgaggtttcactaataagcagcttctacttttgagcctcaacttaaagcagaactgttttctactggatttttcattaacagcaagctttttcttttatgtaaaataaatctattgtgaattgatatcagcgactcatttattaggtataaataatagccaaagaataaaattaaaatttattttaaactttcggtcttaaaaagagctgtaggatataaacctcttttgtgaaaagtagaattttctgaatgctttcatagacaaaaacgcatttaaactatgtttacctggttttccaacagaaatcaaatgattttaatattatgttttgatgggttattttcagagttgtttggttttttaaacactactgaatggtttcttttaaatttaagaacaactagttcttgaaaagcaataccgtatttctctgataaatttgtagttaaggttctagaaaatctaggacaaatttacttcattaaacataaagtttttaagattattcagttggcacaatttaatgcataattgggattggatccatttactgtactgtggtacagtaaagagaatgtgttcttattgaacagcagatttgtatacaaatacggaataatgcaactacattataaattgtatacgaacaaaataaattgggtcactctgagcttactattaaaacattgaaaatttattaatgaacacaggctatcttgatgaggatctctgcttatgaaacacatactaatgaaattattagtgacacattggaagctagaaaattgctgttggggccattgctataaatcattgtttccatgttaagacttctgttctaattcattcattcaacaaacatttgttgagggccagatactgtgctggtcaactggggatactgtcctgaacaatatgcacacagttcttgcccctgcagagcttaaagaccattaaaggatacagaaaattaagcaattatcctatagtaggattcgtggtgtgatggggaaaatacaaggtactgtatttgggagtcatgtaactccagttttgggagtgagagagggtctggggaagaactgttccagataaaaagatgtgtaaccaagatagcatagcacattctgacaactaaagcaatttactctaacttaagcatgaagtacaaaagtatagttcatttattgagggaatgttaagctattaaaatgatactttttggtacttttaaaaaaatgaatacttaaacaccgttttaaaattttgtgttaagagctcctaataagaacttggtaaacatgttgacaatttaactcacagtctaaactttaaaagtagtagttacccttttatttctgtgccatgagacaaattcttctgcagttttatagttgtacaagatgttttgactcactctcaattgccatattcttaaagaaaccctgaaaagctgctcaagctggtcagttttctgtaaaaccaagtaaatgaaattttctctcccctcagaaaggaagttctacagcctagagtaccatctattgtgttttataagtccagatttaggctttgaaagatcataccaaaacttcagatcgacttaaacagcaactatgaattaggtttatgggaaatgtagtaatacaggggaaagaatatcggtaatggagtgaaatggtcctgggttcaaatccagtcttcctcacatattgtgctctttaagcttcaaatgagatgtataactgccttttccttaccagtaaaatgaggacaataattatgacaccatagggtggttgtgaggattagcaaatgttatcttgtatttcaggtgcctttcagggaaaggcttggcacatagtaaacacatcctgtaaatatcagtttccccttgttagcccctgtagcatcctgacctaccaagtctataggccttgcatatcactgtgcaccagagatacctcttttacatctgggctctgttttctctctatcaatcctatcctccaccctctttaaatcagaccccaggtttaaccttcccacagtcagtataaatcatttttcagaactttcagctttccatcaagtgaaagttgattttagttacccagtaatgtacagaaaccttcaataatgttaagcttcaaaggcttctggtacgtttgtctaccacagaaccaccacaatatatatgcttgttcttaggtttattgctttttattttaatggggtttggttgtttgggttttattttggttttggcttattttaaagtcaagtttagtttttactcaggtaaaggcctgaagtttcttgggcgtggaagaaaaagcttgggaagcctattaattcatggtgcagttcagaattgtttaaataagctctgtgccactgagcttaatctgaaagtatagtgacatgtgaaggatgcacatatgaatgaaaaactaaaataattgtaggctcttctataaatgaaaaaaaaagtgattggattgtgtctacctttttcctcaaagtaatctaacctaaacggtcatggtgttaaaactttttatggtgctaatcagaaaaattgatgttgcaagaaatgaggtctcaaaaatgggaatgtgcctcctcactctgcgtcacatgggaaataaatcctgaggccaggatcaccagtggggtagagtcatcttcatagtctcctgttatcctccccctgaacaaagaacaaagtgagactgggaagctagtgttggggaaacatttctgggataaactgtggagtggagaagacaatggagggcaaggcaaaaacccacagacttgtttacccatagaggccccactcacctccatgctgacagaattccagaaaaattccttccctatctcccaaacacctgaaattctgaaatattgccctactatttagcactttaagcttcagtgaggtgctgtaatggagagatagcttcatagtttagcctatagccaactttgcctcaagacctccagataagatgaagtggcttttacctcatgtgagtctcaaacgctggagagagagttccacaaccacccctgccctttctcccatattacgctcattagaaagtctactcagggctgggtgccgtggctcatgcctgtaatcccagcactttggaggctgaggcgggtggatcatctgaggtcaggagttcgagaccagcctggccaacatggggaaaccctgtctctactgaaaatataaaaattagccgggcatggtggcgtgcacctgtaattccagctactcgggaggctgaggcaggagaatcacttgaaccccagaggcagaggctacagtgagccaagattgcaccactgcactccaacctgggtgatagaataagactcttgtctcaaggaaagaaaaaatgtctactcagtagagcagtgattggcaaagtgtgagaccccagaccggcaatattggcatctcctggagacttgtttaaaatgctgattactattttcaagaactttctaccttcatttttacttattttttgttttcaagggctcatggaatcagtcttccatgtgacagctttttaaatattttaagacaaaaactgagtcttctaatcttaattgtgttctagcagtagtcattgtaattatagttatttttataatttatttgtttagtgtatatctgtcactctagaatgtaggctccctgagataaaaactataattcttttgatggcagttacattcccaactcttagcacaagatctaggacatagtatgaactcaataaatttttgttgaatgaaagaaaaatgcaaatttataagccttttcagagacctactgaatcaaactctgagagtggagcccagcaatctgttgtaaaagctgtttgagtaatactgttgcactctaagcttgagaaccactgcaatagaactaagagaacattcatttcaccttcaggcctattctctgacatcacttgaaaaatcctctctgccttctgtaacccttaaccaacaacagtgccctgtccatgtaggggaaacttctgggctgtattacaagtgggtaggaaggtataaggatatcatagtgggaagtattgcttagaatgccagtacttgtttgctgtggaaggtttctaggaatggattgcttagtctaaagtaagcactaccaccatccacgttttcactcaacacagtgccttttaattggtgactaacatcaaaacaccttgacaaaccgttaaaacagtatcagaaaccatgtgtacatccctgtgcctcttagattgctaagttctgctctcattcttacttcaaaggacactttttaaagaattgttaatgcttttttataatacaagtcatagccctgttggcaaaaagaaaaaagattcagtgagaaagaaaaatcactgataattccatcatccagggagaaccactgttatttaagtatatggccttccagacttttctgtgcatttatagatatttttaatgggatcaaagtgtacatactgttttgtaactttttttcactcaacaataccatgactgtcttgctgtgtcaagtatatttctacatctcttaatggctgcatgatattccatcatatgtgccacattttattaaactactgttcaatttttaggtttccaactttcattaataaagtgctttaaagaac

SEQ ID NO: 401 - DNA, 5285 bp, Homo sapiens
gtataaggtgtgactattggattcttgaactaaaatttgaccctgtcttcacctttgttctcagctccacagtctggattgctgacagtaggtgtatatgacaatttgtattgagccaaattaggaaacagacagtaacgtcaaggaagtagatactggctggcattgtcagtgttctaagtttcaggcatttttatttttcctggctaaacgttggtgaaagttataacctcctgcctgggagaaaatatacatcacctaaaatgaacttatggcaggtctaatcaaaaggctaaatacaatttcagaaaaggttctgatactcttgtttttgataaagcattttttcaactaaccatgaattaagatgagtccatttgcctcttctgccttcactgagggtttgggttatacacctctactgaattgtgttaataactgtttggcagtgtgtactttgtttttgtgagtcatgtctcatgaaatttattggaatgtttaatcatatttgctaagaaatgtttctgctgtagttggatttgcccatatttatgtaggtggttttaattttttaaatggtgattagtgttaaaaatcaatttaaatcatgactaatatggtaaaaagataaagcatcaaagcagtatttctcattcctgcctcctcaatatctaatactgggaagatacttcaaagaatattgagattgtctgaagttttagttaagattttcacacattaatatcaaaaaagtaagtttagtatttgtttctccatgggttatttgtaaagctgtaaactgagatatcggtgactccgtattatgactccattagtgagctgtggtatgggtaggattttcctacttcttctgtacttttacctgtagactatttttactaaggtgctttataatgtgttttaaagcattgcatttacaaaacaaggaaaatgctgtaaatattgcatattttatgtatttggaccaaaaggttacaagtaattagacaaaagtggttttgcaccaattttatgtcaagtaaaaccatcagacctactgttcttgtatttctcatttaactttactgttaagacatcactgaaatgaacttcagtaagctttcaattttgatacacagttcattattcataacttgaggcagtaattacagtggaatgagtactggacaaggagtcaaaaaacttgatttcaggtcctagctctagcacttacagctgtgtgatcttgggcaagtcacttaacctctctttgcctcaatttcctcatcttgaaatgaggataataatacctgctgtacctacctcacagggctgttgtgaggattaaatgagatggcatgtgaaagcactttgaaaattgtaaagcgctatgtaaatgtaaggtattatagaaacatctttaacatatagtttcataccattcattttttaacaaagaaagggaaaagtctgcttgtaagctggttgaaaaagttaatcttgatataaatttgtgtttgataaatatcctctcagtgttttatcttccatgtttcaacaactattgaaatatgaaatgcctgtgaactcttaaagcttcatgagcagctgcttgagttcaggaagttcactgttagaaataggctttgttagctgactagggtcagggaaacttttctcttcaaatttgaaagctgtttctgttttcattttacattattattcagaaatggtagctattctatacctatggtttaagtaaatatttctgaataaggcttcaccatactgtaagcattttaggtagattgccttaaaggttatgggagggcatgagggaacacttcttatgagaaaacatttataaacaaaagaaacatttataaactaaagaaaaactaaaagaatgacagaacaatcatcttagcaccctttcctcacaataatataaaaatattaaaagaacataggcaggctttttttaaatttggcttttttctttccttttttcaaattgacttttataggtatttcctgaaagtgtatacaaattatttcctcgcccaaaataaagcaccacttcaaggtgtggtttgacattacatgctaatgaacaaacccagtatgcaagttattcttgcaccacatgctcaaatcttcttgaggtgcattaactcttttaggtaactagagcagtacttggtgaactagatcaggaggtcagtaaactttctgtggaagggccagagagtaaatattttaggctttgcagcccatacggtctctgtcacagctagtcaaccctgccattttaccacaaaagcagcaatagacattatgtaaacaaatgagcacagttatgttccaataaaactttatttacaaaaacagatgacatcccagatgcagaccatgggcaaccaaccattgcactggccaaatcattatttatggagaaatcctctttgtgtctctactctagatgcctaaaagagtttatatacttctaaaagctcctaacttatatccaaagaattgctttctgattcgtgtagtctctcccacagattcataaacttttatgacttatattgtttccaggtgggcatggtttatttcccagtttaacagttcagaataggggcatttattttatcatattttagggtgggttaggagtatcctttctggagactgagaaaggggtgtatttaattccatcaggtccagtacagtactaggagtcataatactttataatcaattaaataaatagaaccactgagacaataatgtatttttttaaagtggcaaatgtggttttcttttttcagcctttgcgctttttcagtattttgaccatagggagataatttttttataatacaaaagtaaccacttggaattttaaagataatgttatgtgtgtatgtgaaatatatatacatatatatatatatgtttatttcctaaaagaagaaaagatacctttctgttcaacttgtatcaactcctcttttctaattgctgtgaaatggcaactgttgataaattattgtgattgttttaaaatctaatgggaagtaaaatatattttgattttacccagcttaatctgtaaagtagcacttaaatatatctgatagcaacacttaagatattgcatggggattactttcctatcatccatatgcatttgtgcaacttcaaacatattgggtgcttctgaattcctgatgattggatttaagctattgaaaattggataatttaaacttaatgatttttataattttctgatcttaaaatttggttaatgcctataatctgttgctttttctcaatatgtgtcctattggaaattcctcaaatcgttggtgccatcagtgatttacaaacaatattttgatattgcagatgacttgcttactgtatttgcattgttagaaaacagtttgtagacaatgattcttttttaataaaatcaaataattctaaaagtgctagagaatttaactaaaagctggttcccaaatgcatagctggcattttaatttaaattcaaatctacatagagaacatctgtgtaaatcatctaactggatttttccattggtcattcccaaacacacctatggtcctagaatccttaagagaagcaccctgtaaccttttatgtggtttgcctttaagaggcccaggtgcttctcctttatgatttgagttggcctcttcataaattagtgctgtttactttcagaggaagcagagaagttgctgttatgtttttgcatccgtttaccctatgcaaagttgctgtatgatgccaactaaactactctttaggcagccttctgaggagaaaagcaaccctgtttcaaatccactgccaattcagctcctctggagtggagctttctgatttcttggagcaggaattttagagattgaaatgaatgatcatttagtcagatttatcctgtaatttcatgcagctttgtggcctttgcagtactatttataaaatggaccctgatggtgatgaactctttagaacgcattactgttaagcctgtgttgagacattgatgctgtctatctcattttttagacagtttttgtagctttctattgagagtcaggtatgtgagcatctctgaagcagtgttgaatgtaattttcggaaacatggattgtgtattttgacttttattttataaatacacagctcaacagtgccttttttttccctcatagtcctgttggaagatgctcactactttctctcttctctctccctgccctcccccactccattcagttgattcatttatgcaaattctgtttccaacttgaaaccattttgtcacatctgttggagagataatcactccttttccttaacattctgccagctttctgatgttgaagtgtttcagttgactacctgatgcaaaagctataaaataaacagtgggaaggggaaaaattggtgtcctgttttaatattttcttttgtagccttgacactgatggacattttccaagctgactcagtgttcagtgtcaacttaactctcagatagtgttgccatcaagaaagcatgcaacatcattggtttctaatgattttatggcttgtgacaatattttatctggactgacatgcctctgctgcttttgctttgtacttcattgctggtaataaaatttcagatggaaaacttacaaaatatatacttaattagaagaaaaaaatagagaaagggctattagaattaaaaaaatttgaaagtaacttaatctaacatttatggcacagtttggacatatccataattttttttgggaacacacatttctgattttttttttcccccttaaagaagaaagtctcaattccattgattttcaattcttagccactggctcattgctttgagcaatgcttgattgattctatttatattatatgatattgggttgataaaataccagttcaatgatgagttttcttaacagaatttggtttgtacttgcagtggctgaacaaagagcatggcttgagaatcaaagggatctgcatttagcaatgtgatgtcagtaaatggacataacaggattgttgtaaaggttgggcatgatgtatgcaaagtactggccagggtagactaataactgatggcatttatatgctgtgctggaatattgttaccaagctgatgtgccgttctcaccctgcagaatactggttttgtcatttcataaatgatatttttataaat

SEQ ID NO: 402 - DNA, 771 bp, Homo sapiens
aaggtcagagtaatgcagaatgcgtgccttcatctcagatttgttcatcacaggtggatcccatgtgtcttcagtagacaagtcacctttgtagctagcaccagtgccagctccatgccattgcaccttctttagtcttgattgcccttcccgcatttattggtgtattaaaatgactgaatatgaacattaaggactccatgaacctgggctaatgggagactgtagagaaaatgaaaaaagatccaccagaggacatcttggggagggggagggagctgggggggagggaaatgactaatgaagctaattaaaagaagcattcaaatctgctttctaccctcattaacaattagcagggcactggccagagtttgtaccctgtgttttaccttaacaacattctatttgctctttgtatatttaagtgttgtaaggaaacgtgtttcaatcaaaactgaccatgagataaaggaaagagatgtggcttttgtgatattctatcacaaacacttattgtatctctgtaaaatacaatgtatgtatgcatgtaagtgtttttgtcctaatgttgctactcccatggcaaagaaaaaaaaaagaatgaaaaaaagaaaaaaatttggaaaaaaaaatcaggctcatagcagctactgtgtagaaaattccccctacttctaatttgctgaatgaagaaaaaaaaaaatcttttatttgtgatattttcagagacatttgctctagtatggtgtatttaaataataaaaactt

SEQ ID NO: 403 - DNA, 2806 bp, Homo sapiens
gttgctagacactgcgaaaccaagctgactcacaagaagacctcttaaaaatagcaacccttcatttgctctctgtgccaccaatagcttctgagttttttgttgttgttgtttttattgaaacacgtgaagatttgtttaaaagtaccattctaatacttcttcaaaagtggctcctcattgtacttcagcgtaaatatgagcactggaaacagtttcatggagtttaagttgagtgaacatcggccatgaaaatccatcacgaatacttttggatcaatagtctatttttaaaaagaaagaaaaaaaccacttttttatagtccctagctttgccatatgcccgccttaagtggaaggaaagttaatcacttaactatgttttataaaaagaaaaaagggcttggaatgctattactgttcacacaaagtatgattctgtttgaataaggcaaatgctcctttttttaaaaaaaaagacattactgtaatatcaaaaaccgtggcagtttgtatacaactcggggcttgattttttttaaaaaaacagaatgaattgatgtcttattttataaatgttctatatttattaggagaaaactttatattgccttttttatcaatcatgtaacaggcttatagctttccaacagagctgcttgccaaacaattttttttgtttattaaacagtgctgaaacaaacaggatcagcatttacttaagatgttaagaatgaggacttttaatcagccgaaccaagatattgttacctgtatgcattcccaaagtctagatgctcagtatgttcagtcatatctttcagaatcagtgaaccgattaccctttttttggtattcactctacatctgccaacctagttcaccttggttttgtgtctgctgtagaagggaaccataacttggttaaaccgtagggattatcattgtatacatgctgtgaacatgtatatgtgcaagttttaatgtattctatgttgtaggcttattatttaattttaccacttcatcacttttgtacagtggccaagcagacacctcaaactccagcatttacattaagtgcatttgtacattttaggccactggatccagattttatattggcagttattgagggcaaaagcaatatattgtaacagaatgtataaatatttttgataaaacagtctatattttattaaaaaatgaattataacactaaagctgtacctcaaaagtctcaaaaataatttgatgaaatattttatacaactcttcaaaggatccgtctgtggctttttatactcttttagggttgtctttttacaaaccatgactttccacttgcctgtagttttttgtttgttttggtttggtttgattttatatttttttctcctaatctatgactttattgttttttcttagtttagtaatagcatctttgatcctgtgcttagcatgttagggtcattatacctcaggaatagcaagctgttaagtaaccatactgaattaactatttaattacagtgagctcatctcttaaaaattgttcaggtgtaaatcttatgagaaacatgaaaaagcacactgatttatggagagttgagctaaaaacatttataaatatttgctgggatgttttagcatcttttcattgtactctgagaacaattaaaattgtccagagatcatttatattaccttccaaattgtttattacccaagatcctttgggagaaaatcttatagaatgggggaacaatatgtggtttaaagttattttaaaatgccagttaatttcctcggcaaaggacaatagaggaacttagcttaattgtctggctttaatttaaactgtgttaatacaacattaaaataaaacactaaatacttttgaggtacagtctgctcacttttttggttctcaaatagcaaagaaagtaatgtctaaaataggctcttagcattaaaaactgacagcatttcgtaactacacagtgtacagaatttttttttaattgaagtcaatcactaaaaaaattagaaggcagggtctatttacacaattaagctgaagaaagcactaattttttgtagtttaaaatatatatatattttagtcagatttaaaattttaagctttatagagtgtaaatatattttgctattactgtatgtgtatgtgactgctcaagcactttgtaaagaaattaggatattttagaatggtacactatgcattcaaatgaaatgtgcctttcactatgtcattctaagaaaacaagtgttttttgcagtcataaattatcacaaatgcacaaattaaagtctatatagattgaaatttgtaactttggttttaagtattctttccttttagaaacttcctaatgattaaaatatactttaacttttctgtgttcaaaatctcaaagactaattaactttaataaacattcttgcaagtactttttgtcctagtgaaggcttaaaaccatgaacattcagagcaaactgtccacttcattgggaataatgggaaaagtttgtattctgctcctgtaaggtcagtagcatcttttatttgaagcatatttatggactgcttactgtgtatagatactgagaataggaagtttttttttttaaagcaacaaaatgttgatgaatgaagaacagcctgttttaattaagatgcaagcaccagtattgtatgtacttttctcttgtttgaggttagcttattttaatttaggacctggcttctcaaaaaggcaaatgaataaaacagaatactagt

SEQ ID NO: 404 - DNA, 991 bp, Homo sapiens
ggatattatagattgtacatatatgctttggactatttttgatctgtatgtttttcattttcattcagcaagttttttttttttttcagagtcttactctgttgcccaggctggagtacagtggtgcaatctcagctcactgcaacctctgcctcctgggttcaagagattcacctgcctcagccccctagtagctgggattataggtgtacaccaccacacccagctaatttttgtatttttagtagagatggggtttcactatgttggccaggctggtctcgaactcttgacctcaaatgatccacccgcctcggcctcccaaagtgctgggtttacaggcatgagccaccatgcccagccctcatttagcaaagttttaaacataaaaagtgcttattagaggatatcagtgcctggcccacatgagagaacagatccatacacactttgaaaaactttgttcacttttaggaaatataattttgaaaaatcatttacatacaagaggtccactgaggcattgcttttaatggcaaaatattgcaatgtacttgaatgtccttcacattagattggtaagataaattttagtatgtgcatgtactggaatattatatagccagtaaacaaattgacaatgaagctctatttgtaccagtaaagaatggtcttgaagagacattgtaaaatgaaaaaaaaaaaaaccaagttgtaaagcaatgtagattatcttatcagcatggaaaaaatgcaattattatatggaagcatgcaaatatatctctggaaagattaatcaaaatctattattattggctccttctgggaagaaccaagtgaatgtaggggttgaaggaacacatactcttcactttatactcttgaattttgtaaagaaatcttattttaccgattcagaaataaataagaaaatgtaagagacaatgctaataatgataacaataaaaaaatagtgaaattggctatc

SEQ ID NO: 405 - DNA, 613 bp, Homo sapiens
cttaaagaaaagagacccgtgtttcaaaatcatttttaaaagtatgctcggccgggcgtggtggctcatgcctataatcccagcactttgggaggccaagatgggcggattgcttgaggtcaggagttcgagaccagtctggccaacctggtgaaaccccatctctgctaaaactacaaaaaaattagccaggcgtggtggcgtgcgcctgtaatcccagctacttgggaggctgacgcaggggaattgcttgaaccagggaggtggaggttgcagtgagccgagattgtgccactgtacaccagcctgggtgacagagcaagactcttatctcaaaaaaaaaaaaaaaatgctccagggctttaaatgagaagtaaaattttctaagttaataaagatgaagaatgggtgactattatgatgaaccataactaaatgtcttattaaagcaactgagtgtctagccctaaattaaccaggtaaaaactgttaacactaacctgaagttttgtgaataactgttctttaacttattgagatgttgcaagaaatgcacatccagggtggactgggagctatgaaatgactaaattcctccttgcagtgtttacct

SEQ ID NO: 406 - DNA, 40 bp, Homo sapiens
cttatttttcgttaaagtttgactgaaacacgcttctacc

SEQ ID NO: 407 - DNA, 355 bp, Homo sapiens
actaagataatatatgcacagtgatgtgcaggaacaacttcctagattgcaagtgctcacgtacaagttattacaagataatgcattttaggagtagatacatcttttaaaataaaacagagaggatgcatagaaggctgatagaagacataactgaatgttcaatgtttgtagggttttaagtcattcatttccaaatcatttttttttttcttttggggaaagggaaggaaaaattataatcactaatcttggttctttttaaattgtttgtaacttggatgctgccgctactgaatgtttacaaattgcttgcctgctaaagtaaatgattaaattgacattttcttactat

SEQ ID NO: 408 - DNA, 1192 bp, Homo sapiens
attgcttaatcatttggccaaataattagacaactataagattttggatatattattttaagtactctttaggcatgttatgatacttgaacttcactgtttgctattgaatcatcaccttaaatatttaaaggtgttaattaatgggtataaaatttaaatcagtattactggcagacgttattttaggaaaacaccagataactatatcatgtcaatataatagagtaagatacactttttagcagtgaacttttaaaaaattcttttacttttaacttcttgtcaatcaaagtatcctgaaaaatgatataaaaatgttattgaaaatattatttatgaagctttttcttaataattaaaaaaaatcttttctaatgtggggtgctatgtaaattagcaaagcagtctaactagaatggattttactgaaccagtctaacatttactttccaagaaacattcaggacatattcctttaattctaattttaaaggaagagcatattgcaataataaaaatatttttaaaattatgttcaggttatttattgacaggtactacttacaccaaagcacttgtgctctaggctagaagcattgtattaaagccatgaatactatacctttgactagtcgagattgtatttatattttcctgttactactgtataaagcttaaacctacttaaacaactacaagctttaaggttgaccatatttcaggagaaggggtgtctactttttgaggcacaaaggttcctgctgaatataagtaaaactagttagtagacatgtgaaacagtcatccttctgcataaattgaaggatccggattccttaatgatggactgaatgatgcttactttccttctttctgcttccagtgtaccactatggtttatagtaaagaaaaattaagaaagtgaacagttgcaactattttgcttatgtgatagatgttttgaaaaatgtagttggaaataggaataatttttatatggttactaggattcagaagtaaatctatttagtgatctgtaaataattgaagtaatgtaacacttaatgttttaatatgtcagttattgcccttttatattgtgaatgtaatgtgcataagctatatccgtagatgttattgttttatctcatgtgtaattgtgggcctttataaaattgtgttgtaagat

SEQ ID NO: 409 - DNA, 521 bp, Homo sapiens
atataaggtattagatttaaaaggagctttacatttcggttctaatgtaaaaaagggtaagaaatttaatagcttaaaatatgaattaacacccatgttgcatgcattccacatattaaaatttgttttatataatttctaaatgtttaacatttgtttaataaaatgaaggcaaaactattttagtttagtttttatagctaccagacttagatccgataaattgtttgtataatttttaagcttaatttttattactttattggtgttaaggataacaaatgtgtattgttagtatatctattctaatcattttatcttaaatgctgctcttgggagtgaatattcaagtgtgcatcaattttttgaatacttaccctggaagatataaactgggcaagtattttgtgctctgtgtatttttttactgcattagacattgaatagtaatttgcgttaagatacgcttaaaggctctttgtgaccatgtttccctttgtagcaataaaatgttttttacg

SEQ ID NO: 410 - DNA, 1321 bp, Homo sapiens
taatggatcttcatttaatgtttactgttatgaggtagaataaaaaagaatactttgtaatagccacaagttcttgtttagagaccagagcaggattaataatttattttaacattttagtgtttggtggcacattctaaaatatagattaagaatacttaaaatgcctgggatagttcttgggactaacaacatgatcttctttgagttaaacctacctaagtagattttaggtgggttcctattaggtcagatttttagcttccctaattacctttcactgacatatacagaaaaaggagcagttttagttttaattaattaaaattaacagatgtgatgaggattaaatgaatcaaaagacttaatttgtagattcttttagagttatgagctaggtatagtttggggaaactcaacctggtgctggtgctcttaacaattttgtaaataaagaagataatttccttttctagaggtacatattaggccttttatgaacactaaaacaatgaggaaatgttggtcatggggcaaagtatcacttaaaattgaattcatccatttttaaaaaacacttcatgaaagcattctggtgtgaattgccatttttttcttactggcttctcaattttcttccttctctgcccctacctaaaacattctcctcggaaattacatggtgctgaccacaaagtttctggatgttttattaaatattgtacgtgtttacagttgggaatttaaaataatacatacactggttgataaagggaagctgcaggaccaaggtgaagattgatagtccaaatgcttttcttttttgagttgtatattttttcacaccatcttagatataattaggtagctgctgaaaggaaaagtgaatacagaattgacggtattattggagatttttcctctgcgtagagccatccagatctctgtatcctgttttgactaagtcttaggtgggttgggaagacagataatgaagtaggcaaagagaaaaggacccaagatagaggtttatattcagaaatggtatatatcaatgacagcatatcaaacttcctatgggaaaaagtctggtgggtggtcagctgacagatttcccatttagtagtcatagaatacagaaatagtttagggacatgtattcattttgttattttgagcattgataggtcagtatatctacctaatctgtttggtaagtataggatatataaaccattaccattgatctgtcttatgccataatcttaaaaaaaatttgaatgctcttgaatttgtatattcaataaagttatccttttat

SEQ ID NO: 411 - DNA, 152 bp, Homo sapiens
aactcagtttttaaattaaccatcaacttaaaatgaatggtaaaagatcaaaatgcatatggtaaaatgattgctttcagataacaagataccaatcttatattgtattttgactgctctaaaatgattaaacagttttcacttacattttt

SEQ ID NO: 412 - DNA, 250 bp, Homo sapiens
cttttctttatcttctatgaagggtctgtaatgaaatctctaaataatttttaaaaattgttcatcaacttctttatgttttattagaaaaaaactgttttaatgtgctttatcataaataaatatcctgacaaatggtattgaaaaaaatctgagatcatgtgaacatataatacaatgttgattttcttctggtgtattttgcacagacaagcatctgccttaaaatatatacacttgtacaaaaagg

SEQ ID NO: 413 - DNA, 39 bp, Homo sapiens
atactcttttgtgtgtttgccattaaaaagtttattcaa

SEQ ID NO: 414 - DNA, 135 bp, Homo sapiens
agtaccaacttaatgtttttctcgaagaatgtgaaaataattagacctgttaaattataatattcaaatatctatttaaagacatttatattaatttgaaataataacatatacaattaaaagtgattttatttt

SEQ ID NO: 415 - DNA, 1161 bp, Homo sapiens
tatattccatgaagacaaaatagaagatgaacttctattcaccgtttctggaattctagccgccatgatggtctggtggtgactgataactagttttattccaagacatacctttacctctttaagtttcaatctcccatctcccagtccttcagtccccaactgcagaggatgacctccccagatagaggagaatcattactccaacaagaataaccaagtctttgtatccctagtacaagacatagtatttttattcgaaaatgaatgtttaagtattaaattgaaacttgaatgaatattcaagaaaatataatgatctctactttttctggatgatttccagccatcatatcagtttgccaaaaaaattgagaaagttatgattttgacctcccaacctaaactctaaattctaaagatcagtaaacaattaggtcaataaatacatacaatttaagatgaagccctttggaagtctagtccaaaacaggaaaatctcagaactttctggactcaaggaaatgctttaaatggaatctgtagtttgtttgcaggagagacaatttctagaatttagattgcttttcaaaatgtttatcaggtaggcaagttagcagttgaggcggaacacagacaacttggggagctttactggaaggccaagaaaatactcttggacactggaggaaatgacagctactaaagcccaatcatggaaaaggaccagaaagcagcccactggaatggggagcttagtgggcaaggaggtagggatataatttctcttcttggctccaccagtaattagctctgtggcccagtcacctaaactttctggacttcagttcaggttgtatggcagtaggccatagaattggctactgccatacaatctctatgggaaaggactgcaaaaactaaattttatctctgtatgggcaaaggctactgtcatcctgttgttggtctggggccactctgacaattttttttaacctcatttgattgtgtaagggtctaaccacaacaaaaaatcatagtgtaatagaattaatcaagttcagcaaggtcacaggctagatcaatatacagaaaatcaattgtatttttctgttcagaaaactccaaaaatgaaataaagaaaattgtgttcacaat

SEQ ID NO: 416 - DNA, 58 bp, Homo sapiens
acccagcaattttctatgattttttcagatatagataataaacttatgaacagcaact

SEQ ID NO: 417 - DNA, 539 bp, Homo sapiens
ctgtaggactgaacattatgttcactgcactctgattttctgtaggtacagttcaaagccctaaaggagtctggcttttactatctttcttaaaaaaaaaaaaaagtcaaaaaaattcaaaaaaggggatgatactagccttaacatgtacctgtcaatgttatggatattgtcataaaaaggtatcttttaaaaatcagaacagagacttaattttttaaatcttaagatttgtagaatgtttctaggataggatattaaaaatgattgaaacccatgcatggtgttagacaatttttctaattattccattgagtcagttttttgtgattagtgattatcagagcaaacatcatgtagatagcacaagtatttggagaaacgttgtttgttttgttaccaaaatgttggaaaaatttatttcaataccttttagatttcataaagtgcagtgtatataatgcctactgaaagactgtaaaatattgaaattttctttcaagcaaagtgtaaaaaaatatattgagcctgtaaattgc

SEQ ID NO: 418 - DNA, 232 bp, Homo sapiens
ttcaaagaagatactgatgtgttgaaaaaatggaatttttggtactgtgctgtttacttattatatgtagctcatacttcatagaagctgttattttgcttttgaataaattttatatttcaatattttaaaagaaagcccttctaaaacttaattatatttttaaagaaaatttattattttatttattgttttttggcttaaacttgctgctttcttttgctttttatat

SEQ ID NO: 419 - DNA, 1950 bp, Homo sapiens
aattcaccagctgagtttctatttcttctataaatgtttttccctgcacaacaaaaacagtgaaagaaatgcttatctgtaattttgtatgcatcttggtggacttgtcattggtattctagggatgtctgctattaagtttcatctattgtgtgctatacatgtaaaaactgtctctttgaactattgaaaatttaaggttcagtataatatcaattttgaatttttaatggtgtttatgaaattttagatagcagcgagtccttcgtttgatcaataaacagtgttacagataacttcaagtttataaaaatacagtgaaatttctacaaagctctaaatctgcatttgcatttcctctgcccttttaactaaactaaaacttgtgaattttaaattattaaggggggggtgctgtgtgaatcagtagacattggattgggttggtgaaagagttcagttctgtagtatctgaatttgtcttttaaaatgagtacatatataggcaataaatatatatgctcagatcaatatacttgtttagaaaaacttcaagacattcaaaaactaggaaggagtatgtttaatagtatttgtataaatttggtggttatgtttttttattttgtttctgttttgtgtagaggtaaaaactatagttttattacagcataattcattttgagctccactatgacatttcaaagactgcccagtttggaagtctgtcatgatttttactctttcactccaattcagtaattgttgatagtattacttacctagtccatccatactcatattattcaaatatataggtggtacttttgaaacaattacattggttctcttggtttaactgaggtttatgaatattcaaacctttgctgggggaaagaaatgaaagttaatgagcatgcttgctatgagagagggatttttaatttaacttgtagttatagtttacttattgtttttagaattacttttacattttcccaactagatggcctagagtccaacattaccttttgagatgacattattgtctccataattgagtgatagctttaaaaaaaagattagttttgcttaagaagttatgttacaactgatcagccctatatgaattaactgatcagccctatatgaaacataagttgtgttataacttatcagccgtatatggaacataaatagtttctacctgcttgttagagaagctttaatttggttctaataaatacagtatggtagtgtttataggaatccaggatgttgaagaaatggcataatgtctatattttggaaacagaaaggaaaagtcacttaagatagtattaagtaattaaattcctatgtcagttgccaaatcttttaaacttatgtattcaccaagcccaaaaatagattgtggctcccaggattccaattttaattggagagctaagtaagtaaagttttataactgttaggtttcttaatgatcatattttgcagttttagtaaaagggaaatattgttatacatttattaaatatacttcccccatgaagtgaaaaggttaattttgctgaatgttttaagttgaagttacttcatggatgtcatacccatgaagtgcatttggatgagatagaagaaattgttttttaaaaagtttaagtaccaaaggtagtctagtctagaacgataagttaatacgtgttggcttttctaatttgtactgtaacatccttatactttctattttaagtatatctgtttcttaagtaaacaacttagatattttccacacctttttttttttttctgatgcagagttcaggttaatattttactgcatctgataatgtattatacgtttgaagcctagtgacttttcattttgacattcttgtgatttcatatgctgtattcttcaagcaataaaattgtgatgtgttttat

SEQ ID NO: 420 - DNA, 3534 bp, Homo sapiens
actaaccaggcacctttgtgccatgtgtgacataggaagagtaacataaaatgaaaacacattcaacaggttgaaaaaaataaggaaacttaaagggcatccaagattaattgttcactatgtgagctgagtgtaggcttgatcttgtgaatattaccacaagaaacattttgtggcactttactgtttgagtaacgttggtgtgaagcttaattgatgccttttgctttatgtcccgcttaagtctgtgtgaaggatttgtgtttttctgccttacaaatagaatttgatttattgggcaggaattcatggatagtaatgctctctgccccctttacttcagaaaacacagtgactttagtgaatttgaatagtgaaactgctctgaaatgctatggaaagccgactccccaaagagtggtttcttctagaagtttgaatttgtagctacagtttccaagaagaaaaatagtagttggataatttagtaaaataataacatcattttcattttcttacctattcttaactttggtttcctaaaggaagaaaatgagcaggtagcacataatctatttaagtagatttaaagagagtttcaaaataaatctcctggtctagctcttaggtgaataaaatagattttgtttgagacctcaaaatattttgaggttagctggtaattttcaataatttacaagcttccttccaaactaatctcatacttttgtatgtttcatcttgaaaatatcttttgggaaataccactttagtgattatttagcatttagcagttacacataggaaaatacacagttacatagaaaaatacacatttgaagatagaggaaaccttgaatggaggggaagtgttgacaaattttaatttttaaaggagaaactttttgactatctgggttagaggaagatatgtgtaccgcctttagggcattttgttatttccgctgaatcattagttattaggatagataaatttttccaattagtttcagcaagcgttgttggaaacactgtgcagtcaaggattgtgcagtgctggttgtgtgaccacaccctgagtcagtggtgtggggaagtaaagtgtgaagaagcagtaagattggtttttaattttgcccatgttttaaattttcctggtgttttcggtagctgactataaaatgatagagacatttgggacaggcactttaaactgaacaccccttttggttttaccaaaggtcttcagtaattgttcttttctttttcctcctggactgcaggttcctgaagagggtttctgaggaaatgggcaagatgttgaaggaggttacatgcagctgcttttgggggagggtattagagttgtcaggctcaaagagagtgagagaagcaagttgcatgagtgcatgcagacatgattttttttttactaacttcattagcatttccatacattgtttttaaaaatcataataccaacccttaagttcctagttcacagttattcccacaaaagaaaaagccaacaatagtgtaccatttttctatttattttattgctgtctaatcaataaagaatgcagagctgtcaaaaaatgtgtcttacattagctgtcccaacaggattgtcttccctcccagctctgttttaattggcttttagacccactatctgtcagatccttgccatctgtcagtgtctgcctgcgccacctccgtgcttgcttaacatcctgttgcatgtctagcgtgattgagctagatttttcaggcatgtctttagattcccttgttcttgtcaaagccttgttttgttttacatttgtagtgcaaatcactttgtcaaacatctccagcactaatgtttccatcttagtatttgtgcacactgctataacttccccactgcaaacattccagttttggcattacgaagaagtagctgtgaacctgaagtatttatgataagaaaaagaaaacatctctgctgtagcctacagcccagttgaaagaactctttgaaacgtgatacatcttcagcacctcagtctgggaagaatctagtcagcactgaaatcctggcataataaacacagaagatattcaccacctcaagacaaaggactattgtcaaaagtcagctgcttccattcaaatgctgccttaaacttgagtgcctaaatctgttgattgccaacactaccactacagtatcccacaaagggctttatgtgtcagctcagtgcgacctgctttaactctgcagcaccgctgcagctgccgatgtagcctcggtaggtggctattagagctctaccatatacagtggtgcatcttcaaatttatgcatcaaactaaagacatgtccaagtccattttaatttcctcagtggttttatgagaagttttatgggcctcccccaattgtctttttattttgggttatgacgatcatgtttgataattacaatgatagtctctttccacgtgatgcttttgtttgaacctgataaaatttagtgaaactttgtaatgatctatgtgcacttttacttgtaaaatggaatttctgtatgtttatacttgtaaatatgattgttgttagtgctcctgttgctcatggtgtcctgcctcgcatttgtgattctgttaatgacatgtatcttaactaatttcttagtggtgttgtaatagggagatggggcaggtggggggttatttgtaccactgaatcttcattaatttggttctttactgttttgaggggagaaagaacgtgaaatggtttgtgtattattgaattttaagcaatattttagaagctgtgtgactgctttaataactttttcccagtgttatttgaatcatactacccgttatactaaagctgaatgacaattgtgtgaaagttactgccttcataagatcaagtcaccactgttacacagctgacatatagtgtattacctttgcagctagtaaactataaagtttagatattgaatctcgttacagggttatttatataatgtgacattattcagtactgacagactacatgaagtagttttaaaatctagtgctatttttattttaaaggttagcaatgaggaggaaatgtgatctggctgtgtttgtcttctgtacaaagcctgaagtgcttatggttttttggctaacagccacagagggcaaagtttaagactttcttgtaaggactaactgttcttttcaagctactgtttgtttttctaaaagcaggatttgcttccgtaggaggcaagttccttgatgtggaatagtgcaacctgtatatgggttattataataggaaagacatttgtacttgcacagtttaaatcattcttaaattttgaacatgtgaattgtcccaaaaaatctttaattttttggtaatttttactctttttgtgcacatgttgatttcttaatggtaaatccttcatttaaagatagtgttctctgttgagaatatttacatggaataaaacaatcttttcatggcctgtt

SEQ ID NO: 421 - DNA, 1399 bp, Homo sapiens
agaaatctggagaactatacctgcttcagtgaaataattacagaatatacttagaaaggcaaagtacattgtaaaataaagttgagcttagttttttttaaaaaaaaaaacaaagcaacaaattaactagatacagaataatggagaacaagttgttaaaacatttaatattatataggatattgctaattgtgtatatgttggtttaattaataatatgtactaagaatgtccttattcttgtggttaaaaacctgcctaaattaaattgggcttcaatcactgtaacctgattcatcctgggatgtaaaccattcgaagtcagctaattggacttttatggctctatcttttccttcagtgaagaaccctatttaaaactgggtcatcatttgtcctgttctagcaagatagtcttcagtttcattttcctgtgccctgtggtagttggaaacaaatcataatgtattatttaaatgtttaacatcattgcataacagcgtttattatacagtggcagatttctttagctgccacagtaatactcattccttgtgtgtgtcttggagtgcatttgactccaggaaaagccattttggttttccttaactaaatgataaatgtacccctctcagtctgcagtattgagttgtttaaagtatatgtgcagtcttgcttacaaggaggggttaccatgtatcacacctaatcttcccaatgtttgggatattaaaacacaaagtccttaacatgccaggctcaaggtcttataagagttctagatttttaagagaattagacaaatttgtgtgtgttagaagcccattcattagaagtgtggtggttatttggtattaaactccaaatgagccataggaaggcactacatgaaataatgcactgagtatgcaatgctatcactgtctttgactgtgattttatgtttaaaaagtatgttctaaaattattatatatacatgggtgaattatgtttccgaggcactgttttatctctgtgaatcttgaataacttttttatatttgggttatgatgtcaaacgatcctaagcgaagatgatttcagttcatcaaatcatcattaatgactttatgtattatttgcacagggagaattgaaactgagtataatcaataagctagatacgaaatcagtttctcaaactgagcttcagaaaggggcattttgtactcttgtttttgcataactggttttgtttttttgcagaattaactataacaatcactggctaccgaagtaaactgatgtactgaattccataatacataacattcaatttttaccacttctgtttagcgaacttgtatacttattttctgttcagattaaaaaaaaaaaaaaaaaactcagatatcctat

SEQ ID NO: 422 - DNA, 130 bp, Homo sapiens
atacccatttaggtatctgtacctggaaaacatttccttctaagagccatttacagaatagaagatgagaccactagagaaaagttagtgaatttttttttaaaagacctaataaaccctattcttcctc

SEQ ID NO: 423 - DNA, 1450 bp, Homo sapiens
aagagtgctaccgataagcaaacttcattactacccagcatatctgctgataggatgaattcttggcatgttcttgtgtacctttcttaattataattgttattcaggatttcagtgtcattttttttaaaccttagaaaagagaaggccgggcacggtggctcatgcctgtaatcccagcactttgggaggccaaggtgggtcgatcactgaggtcaggagttcgagactagcttggccaacatggtgaaacctcatctctactaaaaatacaaaaaaaagtagctgggcgtggtggttggcgcctgtaatcccagctactcgggaggctgaggcaggagaatcgcttgaacccgagagacggaggttgcagtgagctgatattgtgccactgcactccagcctgggcgacagagcaagactctgtctcaaaaaaaaaaaaaagagagaaactaaaattaaaatttagttttcatcccaagatgtcttttctgcctttcttttgccttatttacaagcatggataaaaatcttaaaggtttaaataaaaatgatcaatataatggtgaatcttttgagaaatctcttaactgcattggtattttttctctgtgaaagatgactatgataatctggtacaaatggttttatgtcaccaattttgctgcaagaatgggaactgcttttaaatctgtaaatagctcttaacatttgttgtatgcactcttttcttactatggctgtcaacacttgtgtagggtttaatttctaaattgttggcatgttctttttctcaggctattcagaagtaacaacatttttcatttcagacatgcaatcacctattaatgatgaaatattttaccactttgggaatatttaattagtttagtcatggagaatacttcccacattttaagattttttcaaatatcactgtcatttctattttagcattttatcaaattattgcttttttattttataataaggcttaagacagattatagacctccttaagagatgagtttcttcttctaaaaatgcatgttgatagaggactatttaggctaatcggaggaatcattaagaaagaaagttttaacactgtttatccctatctgctttccttgcactttttctgtgaaaaatattttctgtttgcaaaatcttccctgagttctgaacccagcaccatcagtaccaaagtcttatgcaatatgtatttattatgctcctgaaataggcctcttcttgatgagacccaaactattacaaaaatatcagtattcatattttactcacaattcatacccgtgcttacttagttggcattttagtgctttgaatttctatcttaaagcacagaaaaaaaaaggtaatttaatccaagtattctatcatcaaaattattgtctgattatatgaagataaatgactggcgactctg

SEQ ID NO: 424 - DNA, 355 bp, Homo sapiens
aatggaagacaggaatcttttagtaaaatagcagtgttttttgttgtttttgcattggatttggggagtggttaattgaaatagtcaattttaaagtttctctgaagcaaaatgataggcatcattctaacttcaggaacaaaagccagttctgttttatgaaatattaaacatgaagaaaacttgtatattctaatgtttgccaggaaaggctaggttcagtagatgagacattatttaaaagataaatttaaaaagatggtaaatgaacacttgtttttatagacaatatttgtttgaaactatgtaattttctggctaattttcttgtaattaaatgattttttaaaaaaga

SEQ ID NO: 425 - DNA, 1385 bp, Homo sapiens
aaatgggaagatgaagattgggggtgaatcacattgttcaatgtcatcacctatttgactgttcagaaaagtggggaccagagtttgattttttttgtttttgtttttttggggtttcttttttttttccatgctgttatcattccttggttataaaatgaaatggcatatgtaaaggcagagttgttaactgctatatttcatctgttctatagggaagccattttgtctgtttaaaatttcagtttaattttgctttttttttttttttttttttcctttcaacttagttgacatacgtgccttaaaaaggaaaactagtgttgctattgtgcatttactagaaaaaaggaattggttgtttagggcacactgttatatgggaattaaaatatgtttaggcaggggtgtgtaaaaaggttaagtttttgtttctcctgcttggaacttattttgaattactggcttgtcacctttttttctatttaatcaaataagatacatgatattgaaagaataaagcagcatttttagtttttactaccttaggctttattgctttgaaaacaacattggccttttgtatctcacaattctggtctagattcagttatgaatgtaggcattagttaaaattaacaagatgcagagtattaatttcttaagacaacaaagtgatttctgtaagtttgagccctatgtggaaagcattgtggaatcttaaccttttcgtacacactcttgtgggacgtatcatataaatgtcagcactaagtaatgtcttgtttgtggctgaatatttttcgtagatgtttttgaagttgacatgacttacgtgcatttaaatatatattgccatccttagtttgtaattaagatttggaatatggttgtggatttctgagcatgtgcagactggtctagctagttcaggaactggtgcatgtatttttcaaagataaagaaagtgtactgcgaaaatatgcaggaagattaattttgtggcagttttctaaaactgacaaccaggtgggaccaaagtttatgtgcctttagtcttaatttaccttgcattgtaatattcagttttaataaatcttcaaaatattttgtatttaggaatagatctgactttaataaaaacatggctcagaatctacaggtcaaattaatttgaacagttcttgtcaatccgaattgttgattctgtttaaatgaccaatactttttgaaattgatgtacttagtttcaagattcatagattctgttatctatgtagacagaatggtcatgtatattttctattagttgagtttttacatctttagaaatgtaaaattcagtatagtttgaaagcggcacaattaaaaattaattttctaac

SEQ ID NO: 426 - DNA, 367 bp, Homo sapiens
tcccattgaggacttctgtttgatctttgggagacagcatttattaaccaaagttattctttctggatctgccgtgtccttataaagtggatgaaaaatgttttgtacccatctggaaaaccaacaacttgaaatctcaggtattccaggtcactgacatgaatttgaagatatatctatctgtatggatatatatctatatgtatatagatatataaatacagagagatatctggcttggttttaattatgttcttaaatttgtgtgccaataattgcatatagattttttttcttaaatatttgactgtggaacatgccattttaaatatgttgtaaggactgttttaataaaaagtttagtatg

SEQ ID NO: 427 - DNA, 2570 bp, Homo sapiens
gtgatgtccattccatcattagggctactcgcaaaagaccatatgttgattctacctgtgttctgttccagcgaattgggaagtctcaccaagctagattgtctaccatcagcccagaactctgtaacttttcagaactgctatactcaaacttgcagatctcacatcaaggagagggaaaagcacaatgcaagaacctaactaacgtgatgatatgaagagttttcttaagacctgtcgtcaaacttaaaaggttttgcagagggcagtatcaaaagaaagtggttttcttcaaatgtatactattttacttcctgaatgtgccaactttggggatttttctttatagtgagctgtgggaacccagaacacacacgttttccctacagcagaggccatgcagtattatatattcattttgcagaatctgcacctacagctcaatacgggtggtgctgattattatagtacatataccatgtaaactctcaaactctatttagctgtgaaatagtggtgtgcaattccttgttaaagaaatgctactttattaagaagatgctggctgctttgtgttagaataggacaccccgcagcttctctgtagtggctctgtcacagtcaaaaaatgaaaaggtttttgtgcgtttcttcaaaattctgctttcttcaacatcaaaaattgtgtagaaatattttcagtgaaagggaataactagtacttttctgcatagtttttcttctgcttactttttatttaagtataggtactgctaatgaatctgttttcttagtgagtaaatttgcataattttataaatattattttagagaatcttttgaaattgttgtgatcatattttgctttctatggcttctccttaacttattgattaattttttgaagttatagatatgttctcctattttaaaagcaaaaataacaattgacattccttgagcaaaatatactgctgtgaatttgcaaacaagaaatctgagccaaaacttgacattgtgggttacattgccagaaatgttggtcaagtttgcccttagatgtctacaactagctggcataggttgccatcttaacaagtaatctaaaagtcccattcggttctacattattaactttttttttctatatcctgatgaccagtaaattagagccacactggttaagtttgactcgtctctaaaacgtttttgttaattggacaccaagaggaagaatctgaaaaaaaaatgcatgttggtaagtaaaagtatctcacggtacaaattaagaatgactttcttcaaaatatctgaataggtgcagttttagtttaacatgcaaacaaccattgttgctacctatcctgaatcaagccttgagcctaaatcaaagcaaaccaataccattgataagaagaagataaaaacaaaatattttggagtgttttccaacttaaagtatgaagacatactcagttcttggaacttagtattaaaccttttttatgccatttcataagaattccgatatatacttgatgattgccaaggggatgaaaggaaacaacagagatggttgatctgatcttagctcactttccaataacagaaggagttgtttacagatgaatagtatcacatcattatcaatttccacatgaaaaaggtggagctttctagaaaaaccaacctctaaggcattaggaatttagctgaaaccagcagaattgaaaactctggcaataaaacatggactcaaccatatcccttctggcaatttccttctcagagaggggagtgggaataaaatgttgccttccccacttctcaccaccaccgccatcatgacgctcatactggcttttgcctgtttgtagaggaaaaggtgggctggttttagtactctgaaggacaaaaacaagcaaacaaaaacccctgctgcagcatttcaggtgcagtatgatatttcctaatctttcctatttcttaacaaaagattttaaagtacttctctagtcattgaagtttttttttctttacataaatattgatatattctttttctactcaaagtgccaaaggctacagtttttaatgacttaacaaattgtaccacattgttaaggacatataatgatagacactagaactcagacctctgcatgtatatttgataacatgtcttttgtaaaacaaaaattacaaaaaaatttgtttacattccactggtaccttaatttaaaataaatcagactaaaaggtggtatctcttcttagtgttctatttatcttatttgctaatgggagcacttcttcctttgttaggctgtgctttactgataaaaccaagtattgaataaagagagttaattatctttttaaagtaaataaaattatgaaaatatatatagtatatataaagtactgtgtttaaaaaaatgttatgcaatgttttccaaactgataaagtttgtaaagtgctataaatgtattttgttaagtacagataaaagctattgtgtgagtatattgtgctaaaatcatagaaataaagattagatttcttcatc

SEQ ID NO: 428 - DNA, 641 bp, Homo sapiens
gagttgtaccacctatataaacatcctttgaagaagaaactaagaagcatttgcaaatttctcttctggatattttgtttattttttctgaagtccaaaaaattatcattacagtgtaccatattaagccatgtgaataagtagtagtcattatttgtgaaaaattcccaaaaagctggggaaaacaaatgtgtaacttttccagttacttgacacgattcagtgggggaaaaccagcattttttattctattgataccaaagcatttctaataagagcttgttaaatttaagaataaagttatttaaaatattctgagtatagtatattaactggcattgtaattttgatgatacaaagattgaaagatcataggaaagcattgcccttcatcacagaagtattcaactctgacaaataaatatgtcatcctgaattaataatgccttaataaaagtacatcctcctgctaactatcacttcagttggtttggtagagacttcaaacccttgcacatatccaaaaggtgcatcccgtaatgatcctcagatttggggactgagtttggatagtccggccagtgcacagatgataaccggcacattcattcttcttaaattatcatcctttctttcactca

SEQ ID NO: 429 - DNA, 2372 bp, Homo sapiens
tttattacagatattaagtatgcaattacttgtattataggatgcaaggtcatcatatgtaaatgccttatatgcacaggctcaagttgttttaaaaatctcatttattataatattgatgctcaattaggtaagattgtaaaagcattgattttttttaatgtacagaggtagatttcaatttgaatcagaaagaaatatcattaccaatgaaatgtgtttgagttcagtaagaattattcaaatgcctagaaatccatagtttggaaaagaaaaatcatgtcatcttctatttgtacagaaatgaaaataaaatatgaaaataatgaaagaaatgaaaagatagcttttaattgtggtatatataatcttcagtaacaatacatactgaatacgctgtggttcattaatattaacaccacgtactatagtattcttaatacagtgctcactgcatttaataaatatttaataaatgatgaatgatagaagtttccatctacaatatatgttcctaaatggagcacagatgttcaaactatgctttcattttttcactgatatattaatttttgtgtaatgaatgccaacagtatattttatatgatttacttatgtgaggaaacatgcaaagcattaggaaatttatttcctaaaaacagttttgtaaaattagtattgagttctattgagtattataagatagcttacattttcaaaatggaaattgtcggtcatatttctagaactttaaagaaaaaagaatgttatattagttttctaaaactcaactatctttagtcatgttcaaaaatctattgctagatcatagtagatactggttttctattaactcaaaacctacattgacaagtttaacattgagaagaatcttaacaaaaatatggatatgaattcagtagatatcttaaattcaataaaatcactggaagtttttcatgataacttattttaagatgccttaaaaatcttaaagtcacaaaaggaaaaaggtttttaacatttacatgagttaacattttttcatagaacttatttcctagatagaattttttactgttttttactgttttcttaagaaaacagttaaatcattatgcattcagttggaagaaagtagtggcaagaattctttcattgctatataatattcagtggctcatttatacctaataaaataatggtattttaaaataatgctactttcaaagtagcatttttttagttagtttacaggttacatacccaaaaccttaactatgactaagaaattaaagaagaaaaccagcaaactaaaacttctgggcagcaaaaatatataaatgcttcagatgtcaaatacccatgcttgaaagctcgtgtaatttactttaagattatctgcctgctcttcttcaaagctgaccttgctttagaaatagttttaactagcttagttttctggtttccaaaactaaaatagattaaatcctacaaatttaaggacagttgtgacagtaatctgaccactatctataaatacattggacattggtttccaaatctccctttcttcttcagttccttccttgttcaatatatacccttctctaaactgtgcgggtaaaaggaatgactgtccttgagagaaccattagtttatcaaaggtttatgtagttttgttgctgtaccctaactttgatattcagggaggtaggaaaggtaacagaaaaccagcatatttaatcaaagcaagaagtaatcgctgacagttaaatgtgaccaaaaaaattaaaagttcacaatttttttaatgtagccatttggggttatctctagtaaggcagatacccacgttggtaaatttttaggatattgtgttgcactagaaaactaagtggttcatatttctaatgaggaagattaatgaaagaacattgttatattctgcgtggtatattttaaagtttaagaaggcatgttaaacattatttcctctatggtagttaaaatacagaattagatttttaacaggtgtcatttgactaaacgtttcggtagaatgcttcatacttgagtgatgctggataaggtattgtatttcaacaatggactatgccttggtttttcactaatcaaaatcaaaattactctttaacatgataaatgaatttaccagtttagtatgctgtggtattttaataagttttcaaagataattgggaaaacatgagactggtcatattgatgaatattgtaacatgtgaattgtgatccatttctgatatgtcttgaactactgtgtctagtgggcaaatgtcattgttacctctgtgtgttaagaaaataaaaatattttctaaaggtctgt

SEQ ID NO: 430 - DNA, 974 bp, Homo sapiens
ttgtatactatctttaactggtttttcacgatggggcactaggaatctcgacattaatcttgcacagaggacttctacagagtctgagaagatatcatcatgctgaatctgatcatactgttttttaaaagtttaaggataagacatgtgtatatgtaacaaaacacattgcatctagaaatcaaaacttgaaagtatttccagggattaggattagaaggaatattagaggaaacttgaaatctgagtttaaaaagattttacctttttgattgctgcagaaatgtcctatgcactctttgcaagagcacacaacaaatgtcagataccaatttttgcaaattagatttaatcttattaaatgtttttatcttactctttctgtacagatatatcaaatcacatgaaatatttaaagtttgaaaattataattacctataaagctgtgaaaaatagaagtataatttgaaaaaacatttcacttatcagagatttttatatttatacaaaagattactaaatgaaggattgctaaatgtttttggttcaattacataaaaattaatattctgggtctgatctgtcagagaataaatatcaaatctaaatttaatgtagagatacatactatttctccatatgaattttaagatattttagtgcttcaagactgctgaaagcaatccagttgctcctgtgctagatggtagccagagaattttatagtaatggaggttagcccttaatctcttcattgcatttcatttctgtaaatcagattaagtccttaatattattttaaattaaaatttgtgtgtaattgccattaaattttcaaaatgtaatttaaaaggattaaatactcatttaataatttaaaataattattgtataatatctacatttggagaattttgaactatcaagcatatactgtatacagttagaaagttattaaatgaacattttactc

SEQ ID NO: 431 - DNA, 1162 bp, Homo sapiens
cgactgaaatcaggaagatttttctatcagcacccaggtcttagttttcacctctagttctggatgtacattccatttccatccacagtgtactttaagattgtcttaagaaatgtatctgcatgaactccgtgggaactaaaggaagtgggaacttagaaccagacagttttccaaagatgttacaatttcttttgaaaaaccttttgtttattagcaccaatttcttgccactaagctatttgttttattatacatcctttaattaaaaactatatatgtaacttcttagatattagcaaatgtctctgctaccatttccttaaggtgttgagctttaactctatgctgactcagtgagacacagtaggtagtatggttgtggacctatttgttttaacattgtaaaattttgagtcagattttaatattgtaaaatcttgggtcaaataattcaaagccttaatgcagatgcactaaaacaaagaaatggtaaatgaattgtttgcatttaaaaaaaaaaactcttaagaaaactgtactaaatctgaatcatgttttgagcttgtttgcagtacttttaaacattattcactactgtttttgaagtgagaaagtatcagccatttagcatttaagttggggtatttagagcctgtaatctaaatgctggctcaaatttattccccagctacttcttataccactattcttttaatgtttgcataatcataagcacctcaacacttgaatacataatctaaaaattatatagtaaagctggtagccttgaaaatgtcagtgtgatatctattatgtagataaatatatatagtggcctttcaggactgtcacagtaacactttatttacagagctaatgtttgtcctaaattttcaggaccctagaggagagctttatacaattaccgatgtgaatttctctaaagtgtatatttttgtgtccagttatattatttaaaaaagtgttactttgtaaaaattgtatataaagaactgtatagtttacactgttttcatcttgtgtgtggttattgcttaatgctttttaaacttggaacactcactatggttaaataaggtcttaaaagaaatgtaaatattctgttaataaagttaaatattttaatgatttttttttt

SEQ ID NO: 432 - DNA, 1677 bp, Homo sapiens
tggaaaagaaatttgagcatcatctgtcttccaccaaaaaaaattttttaattatatttttatatcaaaaaaatatatactttaaatagcaaataatatgaactttaaaaaatgctgtggcctcattaaactttggtaatagcttttctttttacttcagaaatccaaacattagagaattcaccaaagtaatcctctttagaagggcatcttgaattatattatccatccgtatttatggagattggtaaagtagttgaaccgttgacttggtgatctgaaacatacataacatgtcaacacataattagcgtatttctgtttgtattaattttggaaatttatcttcctttgattttatttaatattttttatttcttaagttcaagaggtagtgattgattgtaacaagggccaatctgagaatttgacttatatgtggacatttttccctacagatctggaaagcacaattgtgattttctcaaatgcagacaattcagagatattcacaattaataaacacaattaattaatgaagtcaccttcaaatttccagagccatacatgtatatattgtcagaatctgtccatgacaaacacaaaactgaagagctgttttcaaagaaaaaagattatttcacttaattattttgttggataattgtctagttagaacttccaaaaagatacttacaaacataattcacaaatttgaaataatttctgaagttgattagctatctcatatcttttatcaggtcattttttatatatgtaggcacaaacaataagtatgttctcttctgtttgggaaaataatttggaataaaatagaaattagataatgaaaccaaaaaccttctcaaatttaggccttatttaactcatgactggtttctatgcacaagaaaatactaaaccaaatatatggtaggactgttattctcttctgcatcttatccctattttgtttctgcctttatttgtaaaaattgtcttaattgatggtacatttgccaagacaaaggttcagaattactaattttagatattatgatattctgaaataactatttttatcctgtagttctatgattatatgatttgtaaataagaagcctaaccaatttaaaattcctgactttagtctcatatatcttgtcagactgtctcggttcaaattccaaacctaccatcttcagttgtgcgaccttgggcatgctacctaatctctttgtgcctcaatttcctccttttaaaatggggatgatgatgataacaataatacctacctcacaaggttgttgtgagcatcaaatgagataacacaagtaaaatgcatagaacagttccaagcacagagtaattcaataaatattaactagtaatagtagtggtagtaactcgtgaatctttttaataacataataggctttgattttattatctctttaagttgttaacttttttcccttgttataagttttatgtcaagtaaggtagtttgtttaagttagttacccatgtccccaatcaagggaacctaaatgaagatatatcattaaataattaacctttttttattgtgtcaagcaatactaatttgtgtcataaaatttgttttgcatcattcaacaatttatgcccagaaataaacaatattctacaacaggc

SEQ ID NO: 433 - DNA, 267 bp, Homo sapiens
agtatttgcctcttaaatgatacctcattgatatattgcactatttcataaatactataaaataatgactaggaagtaacttattaaaggctatgacttaaatttgaagatgaagtacagtgttctaggtttgctgagaaggcttcattaaattaatctcactttgaatatctcctgagagatggacaatgaaatatcagttggtggatatgtgtgatagctgatttcaatattgaagtattgaaataaaatattctttacacctga

SEQ ID NO: 434 - DNA, 1997 bp, Homo sapiens
ggccttgccactccagtgaaagctgttcttctcttagacacaatttcttcatctggacgagcagtggagagggaaagcaacttcttgctggaagaatatctctgccttcttaccttaaattaaaaagagcactaagataacaccttcaagagacttgaaaacagaaaactggttaatgactactataaatgcactgaaactatgtttatggagatttccatacttttaaagacagttttaatgttgaatttggtattttgaagggttatttttaatgtattttggtaatacatttattattatatttacatgtacagtgttacattatatatgtattgtgaactttaaaagactattttgataaatttataaatatataaaattatgtaaaaactacactatattttgatttagattttcctgctgtttgctaccaaaaatttgtattttaaatctgtttagttttagtatggttttgtctctaatgaataaataattccttcttattaagaagaagtaagggagaaagtttttagaaagtgatttttatgctcgcactataaatatggcaggtcagttcattcttttgggaagtcagtttagttacactgagtttatccaagtttatctctaccaagagtataatggcatgggatggcttatttaggacaattccctttcctattgtttttgttgctgagccaatttgagttagttttgcatcctggggggctttaaaatacagcatgcagtgaaagatcagaattcactgaatatttcttctgagagcatggtttcatggtttttctctatgaaatgactcaatattccaaatgtttttttttccttcctcctttcaaaagagttcttaacccaattaggatatcctgctttgggtatgaggttgttgttgcctgtaatcacacatggtttgacatcagttttaaatcaatggagagaaaaaactgaaaaagatgctgctaagtagttctctgtattaaaggagatatttttaaaacagggtacaaccccctgctgcacacgctagcatatctggaacctactatgaaaatgaaaggacccttataggtactcacagccctttcatgtaagtatgatctgatatttaggtcttcagaagcctgtaggtttcatttctatgaggaatcgaggagcgttacatcctgatatccttccaggctgcttaagaatggactgcttcgacactgaaagtgctagttaaatggattcatatgaagtgctttactcccaaccattgagttatttataatgtatttattaggggagggtaccttgagtctattatatatgcttcatcaaaacatcttgttcatgttttatgtttttaaaaaaggcatttgaatgaatgtttgactcaggtttgttaaattaaccttcagtaactgcagtaccaaaaattacactcaactgatgaaaaaaacgaattgtatgatttaggaatcaaaaactaaaataagtggaattatgtatcttttctaaagttaaaaaagtaaaatattttattatgagttattataaaaattggttaattgtataggaagatgacagtatttttttcaagttatcataaaaagtaattcagatgacatttgagaagtaggggaaagggaatcatgttgacagttttagttctgtgaacactaatttgtgtgaagctattaaaatgattgtaaagttgactactgtaaatttcccataattatgtgtgtatatgtgtcatatgtatgtacatgtatatgtctaaaaattactttacacatgtgcctacatagacacaccaagaagtggatgtatataatatagaaagtatatagcaaagtaattttactctgataataaaaattgtttgacatgtattttgttatgaatagtttatcttccaaaagatattttgctctattttaaagtgtagaagaatacactgctaataaataataaaagttttattcaattta

SEQ ID NO: 435 - DNA, 904 bp, Homo sapiens
gagattctatcttcttaaaactgatgttctgcatttgtttctcagttggacctatataacatagcagtgtcttttctctggatgccacgagtaccaagtttttagaagtagagccatccgtctatatagcaagaagcagaggaaagaaaccaattgcccttaaaaaaaaaaaagctataatttaaggagtaaattataaaggaggctactctggtaaggggtaatatttatagaaaggaaacagaaaagcaaactttctatttgaaaattaaaataaatatcaagaagaaaaattttaatgtgacaattgaggaaataatacataccacaagtggtgctttgaaagcctcaaattcatgctgatttctaaagtaagtgccaacttgaaaacatgattagggcacttttttaaaaaaaaattaaggctctactgtaaacaaaccacggtaaatagttgatatatattgtctgattaatattcataactacctggtgagttaggtaatactatctctattttataggaaggaaattgcatatcagagatgttctaacctcagtgtcaaacatggttcaatccatgtctgtctgagtccaagcttgtgtttttttatatcacaccctgttacctctgaataaaaatagaagtgatttactaagaattaggattatgagcatttttggaactagaaacaacgttgaaacaccatttgtttggttccactattgtagagacaagaaactggggtcccagaaaatttgtgatttgtgtaaagttccagggttgtttagtagtggggccactttgacaactgggcattcaattcctagtttaggtctttctaccacgttatacctgaggtgaagctaagtatctggtttatacttttatatctctaaagga

SEQ ID NO: 436 - DNA, 86 bp, Homo sapiens
gcgatgccttccctctgtgctgtgaaactgtctatgcactacattctgctagctcctcttcaagtaaacgccaagtcacaactggg

SEQ ID NO: 437 - DNA, 1905 bp, Homo sapiens
cctagccggggcccgagggaagcggagatccccggcttccgacgtccttgggcaccgtcgcctccttccctcctagggcatcccctgcctgaacgaagacttccgccgcgaagcccgatagatcgggggaaaatggggccttcgaccccagcgggctacctgaaccaaggcgtctctttaagtggggcgcccgaagtcattttggacggccacctgatttttaccctttgtttctgtgttttagaggaatcctaaagtcaaaacaccagagacttgaagaacttgcaaactggcgttttaaaataaccggttaatttatttccacacagtttgtttttgaaaaagagctttcataatgtataaccctttccactttcatcgtcttatatatgaagcgccttgagtgtgcatgaaccaaaggaaataacattgaagaaggaaaacaatatgtagaaagtattttagaaagtaacctgtctttgatgatgcttctcttaccatttagtttttgtatattaccctggggcagtgaagccctaggtgtgcccaccagtatgagttgccattaagacctcaagccctttattcttaaaagggtttttaataaagtctttctcaaatgaggtagaatcttagccagtgagaaaaaaaattattttatgctccttttttttcgcactcttaagactgaaaattggcgttgagtgttatagtgaaaattttccagtttgataattgatggtcagagccagcactggaattttgaaaacaaataaggtgattatctattttaggtaccgtttcacattttctatagcatgcacacttgttgctaccctcattttgtaaccaatttatttgccttatgaatgtgattgcagctttgaacattctgtactataatggttgctaagaagaataagtccttctgttttctctttaacatttaaaatatctcaatgcacatgatataattaaacactaataataccatgactgcatagctaatattagctgctattgcatgctcctagatgctagaacttattgggcatgtggtatactgaagcaatacccgttagacaaggatattttacttcttccagacaccagaagaaatggccttcaattatttgaaaagagacacagagacacctctggctacctagagttcttcctgtcttgacccaatttatgagaaagctcccagttgggactttatctcacaagtggaatcacagtcaagacggatcaataatatggtttggctcagcaaagccagctgtgctcttttagggtttaaacaagccacacgttagaaagcaacactgtttttatgtagttcatatatattaccatgacatttaacatcaatatcgtatatgttgaaggaggtataataaactcagtcatatatagtgaacagttcaaatgggaaagtgttctaaaacatattatttgagatttgtcatattcatctttggtttactaaatttacttagaaatatttgaaatgcaaaattgtgtgaaatcaccttatcaaattaaaatgggaagaaagtaattttaataatttttaataatcatatgtcagcattctgactacttaccacatcaaatctgggcccaaacagcctcagttaactgcataattcaggaacaaaaccagcttgctttgttgcacgcctgggcaatttcagccaggacattaggaccacttgttgtacatctgaataattatggaagttgggacatgttaaggaaaacaaatatgttcatcaccaacaatcagctgtcattttattaatctatcccttttgtgcatgcaccatttctctcttactaacagtttcatctgttcacattttccttgattcaaatattaaagttcagacaactattctg

SEQ ID NO: 438 - DNA, 760 bp, Homo sapiens
ctaatgcttgatatgttcaactggagacactatttatctgtgcaaatccttgatactgctcatcattccttgagaaaaacaatgagctgagaggcagacttccctgaatgtattgaacttggaaagaaatgcccatctatgtcccttgctgtgagcaagaagtcaaagtaaaacttgctgcctgaagaacagtaactgccatcaagatgagagaactggaggagttccttgatctgtatatacaataacataatttgtacatatgtaaaataaaattatgccatagcaagattgcttaaaatagcaacactctatatttagattgttaaaataactagtgttgcttggactattataatttaatgcatgttaggaaaatttcacattaatatttgctgacagctgacctttgtcatctttcttctattttattccctttcacaaaattttattcctatatagtttattgacaataatttcaggttttgtaaagatgccgggttttatatttttatagacaaataataagcaaagggagcactgggttgactttcaggtactaaatacctcaacctatggtataatggttgactgggtttctctgtatagtactggcatggtacggagatgtttcacgaagtttgttcatcagactcctgtgcaactttcccaatgtggcctaaaaatgcaacttctttttattttcttttgtaaatgtttaggtttttttgtatagtaaagtgataatttctggaattag

SEQ ID NO: 439 - DNA, 4579 bp, Homo sapiens
tgaatggaaagaaattatgcaccttttatggaccaaatttttctggtactgtacgatccaaaacattgtacccagctttttaaaagagagaaattatcactacaactcccgagcactaagtagacggggtagagtcagccgttcatgctttgtggggagttcacagctaagggatcagatttaagaggatatctcctggacttttggtcttttcttttgtgctctttcctccaaatctttttgacttctgaggtttttagcttaggatgttaatttgtccttttgtctttctttttttgtttttgttttctgtttgtttgttttcatgttgaatgcccacaccaccatcctctcatcccagccagtaagaatttcagttgtgggcctccagtcttctggaatgtcttcactgcagctgctggaaatcactgctttcattcccacaaaaccagtattacttttttttaaaaaaagaaagaaattggaaatctgtgctatacgtaatgtcataattgttgacgttcttcagtataatcatgtttgttaaattgtttgtaccttgcaaacttatgaaccaaaccatattgggttttcaaagtgcctttgtatccaaaaatgtatttgccagcatagaaatgtaccatcaagagtcatgtatgttttatttttgtttttattttttattttttgagatggagtctcgctctgtagccaggctggagtgcagtggcataatctcagctcactgcaacctctgcttcccgggttcaagctattctcctgcctcagccttctgagtagctgcgactatgggcgtgtgccaccatgcccagctaatttttgcatttttagtagagatggggtttcaccatgttggccaggatggtcttgatctcttgacctcgtgatccgtccacctcagcctcccaaagtgctgggattacaggtgtgagccaccacgcccggctatgtttttttttttttttttttttttttttaacaatggatattctgtaaaatatcctgtacaaaacaagactattgccagtaatgtatacaaattgtctttttgtgtacttccagcataggtttggatatatgaacatttttcttttattgttttatcttcacagaaaataaaaggtgttaatttgctttttaaaacaaatttaattatcacattttaaattactttgtggactgtgttttcaaaactttgcaaattcatctgttacacagaaaattttgacttaaaacatctgctgaattccaaatttctgtaatagctactgtatctgtgataaactttcctatatctttccttgccatttctatggattttataatgaaagaaaaaggcattggagactgaaggcagaaatggttgtgacagtgctgtttggctttttcattcttcaaatgccaagtcatccactttgttttcctgtttaggctttgcacaaatacaattgctttcaggaatcctaaagcagcattttattgagtttgaattattaaaggtacagaggaaatgtggtgatgtagaacttttcctaacacaggtatctaggaagtaagtgctgagttgattttctaggttcttacgtatttgaaaaataaaattgcaattcgagataagtgcttgagcactctacttaagtattctctgtgttttatgaagagaaaatgatctgattttcccttatacttcattttacaatacatattcccttttaacttaaaaaaattgtaaatgtgggagaaaaaaccctgcaggatggaaacaattattaagaatgtagatcaataagtactttttagtgatgtggcagaaatccctgttgattctaagttttagagtgtcttttcccctatttctgacctacaactataaactactctctattaggagaactagaccactttcttcattcttttctaaactgctgcagattgccgtgaactctatcaatagtctcttttccgcaggcaaagtggcattttctaaacatgtttgcttactgccaggtggtttgaaatctatgatttactgcagtagtatgtgcttaaaacaactgttgaggtcttttaagcaggaaagttcaaaaggaagtgtcctgataatggtactggtttttctacaaatataagtagtcattagaagtttgcaaccaccaccaagtctgagagaactctgggatattctgtgggttttggcatattagatagagaaaatgacagatctagatgaagggagcttttggatgtgtgcctttaaaaactgattatgtataaatactgatatttcacatacggagatatttgaagacccaagtctgcctttcacagagccctccattccaagtttagtttttgtcaaaatatgaatcattttatttgactgtactatcagtacacaaatgcatgagtatgtttatacagtgttagactgatgtgaatttgcatttgttacattacattgccagcgcatatcatttagcaagttggcattaacatttatgctttaattaaatgccagtatacctatgtgtgcagcagtaaaaaattagtgagaaaaagcaactttttgtcactcttaggaaatattttgtcttattagtgttcttggcacatgtatattactaaagtagataattccaatgagaaatactaccagattattgttataaaattaatttacaatgtccctgatattgagctaactcttaaaaaaaccaaacaaaactcgtatctgagtgtaactttgccaatattttaaaagccaaaatattctctggacaacaaatttgtattgctcagggacagtttaccttgcctggtaaaccttcccaaacagaaatatagctatactatctttggttttgtttttttgttttttttgtttgtttgtattagatggaatttcactcttgtcgcccaggctggagtgtagtggcgcagtctcagctcactgcaacctccacctcccgggttcaagtgattctcctgtctcagctccctgagtaactggaattacaggtgcacgccaccacgcccggctaatttttgtgtttttagcagagacagggtttcaccacgttggccagggtggtcttggactcctgacctcaggtcatcctcctgcctcggcctcccaaagtgctgagactacaggtgtgagccaccgtgctcagccactagctttggttttttaaacatagattatattcctcaagatgaagggcttaacatatccacagcttcctcagtttgctaactccccatgcatctttgtgaaggacagtatctagtttatctgtaggtcagtgttccttgtgctgtcatttcccttatatctggaatttgtcagcattcctgaaaacctacacgtgtatatcagtaaccaaaatgctatgccttttttgcacctttgtacagcagccaaatcatgaactcaaaatgtatttgatcacagttctataatgtttttacctacctattatggaataatcagtttttacagagattattaatatggtagaaccctgttatgtaattccaaaacttaagaaccatatttacattgcttaacacagaattttacatctaagcaaggactggctttagaagcagtgtagttctacctctcattttacagatgagaaaaccgaagcccagaaaaactctcatttgctcaaagtcacagagaaaattagtggcaaagccaaaaagattcagatcttctgactcgaagttgagagttctttatactctattatgctgcctctccagtgtaatatttgcctttctgtaaatgggattaaatatgatttgtaaataaaggacatctgacctccttttttggtacattaaggcactttataaatggacttttattgtctcatttttcgtatataattatttccatcatattctttatggaagatgcaattaattttaacttttttactcttataaaaccagttcctgacattttaaaaaacaatatctgtaaaatggatccttttatgagtgaatttttctgctaattgcccaaggctaaatccaatttaaggattgcttagtttctttattttgtttatggtctctgaactggtatttttttataaaccaggctaattcacaggtcataccatttcattcttgtcgtgttggcttccagtcactggaaaagcttttgcattttaaagatttttagagccatgcaaaactgggcattaaatgttgcataaagcaaatcttttaagtaaggtaaaatgttgaagtcttaaccagaattcctacaactaattactaaaactgctatttctaactcttcatgaaagcattacctttggaaagttaaactttttttttcctttcatcaccgtctttgaaacaaattattttccaattcataagaactttggtaaaaaaaaaaataaaaggaaattatatgtttttctttggacattcattggaaggcttgttgaagacatgatcccccagaagccttagtgacccagatctcaaccagagactcaagatagcctcaaatacagtgaaagattatgtatcc

SEQ ID NO: 440 - DNA, 1384 bp, Homo sapiens
aactggaagctgtccacccaccggaagcgctctttacttggtcgctggccaccccagtgtttggaaaaaaatctctgggcttcgactgctgccagggaggagctgctgcaagccagagggaggaagggggagaatacgaacagcctggtggtgtcgggtgttggtgggtagagttagttcctgtgaacaatgcactgggaagggtggagatcaggtcccggcctggaatatattttctacccccctggagctttgattttgcactgagccaaaggtctagcattgtcaagctcctaaagggttcatttggcccctcctcaaagactaatgtccccatgtgaaagcgtctctttgtctggagctttgaggagatgttttccttcactttagtttcaaacccaagtgagtgtgtgcacttctgcttctttagggatgccctgtacatcccacaccccaccctcccttcccttcatacccctcctcaacgttcttttactttatactttaactacctgagagttatcagagctggggttgtggaatgatcgatcatctatagcaaataggctatgttgagtacgtaggctgtgggaagatgaagatggtttggaggtgtaaaacaatgtccttcgctgaggccaaagtttccatgtaagcgggatccgttttttggaatttggttgaagtcactttgatttctttaaaaaacatcttttcaatgaaatgtgttaccatttcatatccattgaagccgaaatctgcataaggaagcccactttatctaaatgatattagccaggatccttggtgtcctaggagaaacagacaagcaaaacaaagtgaaaaccgaatggattaacttttgcaaaccaagggagatttcttagcaaatgagtctaacaaatatgacatctgtctttggcacttttgttgatgtttatttcagaatgttgtgtgattcatttcaagcaacaacatggttgtattttgttgtgttaaaagtacttttcttgatttttgaatgtatttgtttcagcagaagtcattttattggatttttctaacccgtgttaacaccattgaatgtgtatttcttaagaaaataccaccctcttgtgcccttaaaagcattactttaactggtagggaacgccagaaacttttcagtccagctattcattagatagtaattgaagatatgtataaatattacaaagaataaaaatatattactgtctctttagtatggttttcagtgcaattaaaccgagagatgtcttgtttttttaaaaagaatagtatttaataggtttctgacttttgtggatcattttgcacatagctttatcaacttttaaacattaataaactgatttttttaaag

SEQ ID NO: 441 - DNA, 202 bp, Homo sapiens
gtttttttgaatcccgtgtccttcaagtgctttctaactttgagaggaagaaattgaccacctggactatggaactgtgcgtaacagctttgaaagtgtatttaaaaattaaatctatatgcctttaaatcagtgaattggaaacatattacatgtattttaatgattttcctcaaatataataaattgtttcctttccaat

SEQ ID NO: 442 - DNA, 25 bp, Homo sapiens
aatttaaaattaaatgcatatcctc

SEQ ID NO: 443 - DNA, 25 bp, Homo sapiens
aatttaaaattaaatgcatgtcctc

SEQ ID NO: 444 - DNA, 30 bp, Homo sapiens
aatttaaaattaaatgcaaatccgcaaagc

SEQ ID NO: 445 - DNA, 30 bp, Homo sapiens; identical to SEQ ID NO: 444

SEQ ID NO: 446 - DNA, 1449 bp, Homo sapiens
gcgttgccttttctcccagctacctcccaaagcagcctgacctgcgtgggagaggcgtagcgaggtcggaggggaaagggagatcccacgtgcaagtagggggaatatctcccccttttccctcatagcctctagggagggagagtgacttcattctccatttgaagagattcttctggtgatgtttacttaaaaagtgatccccctcaacaacggatacagcgtgcttattattgggcatttagcctcaaaagcatgtagtaccaagcacttgtatttccgtatattttgtttcgcgggggagtgagggggaagaacacggatgaaaatgtcagtttttgaagggtccatgcacatccctgacacctcacaccttatctaagtctgaagctggggagaaaggggttcatttagacttcatacatttccagtacgactttagtatctctccagagccatattttctcagtccgaattaattccccctccctaggtgcctgtaggctatggtacttcttcctcattgttttctaggtaaacttcactactggtaattaaggggaaggatatgaggaagcagtttaaatagccctgttctcattactctgaccacatacatcatagggtgctaaagttgatgaacacattaatccgttaagtaaaatggactttgtaattgtacagcatacctaagaaactcagaaggtgcatttaagagagagacctgaaagaaatagtatggatttttaaaaattcttgtctctactattataaccaaaaaatatttcttgtatgtcccataaaaatatttgtgtaattcttatgaaacaggctggtagaggaggtttctgagcctagcccaagggcttattcatcaccatgggtaaattatttaaactcacttaattaaggaaaatattttcccagctagaaaagtatactcattctcatttaaactctctcatttggagggatcatgtgagttggcctacttacaagtagtgaaagttcccttttcagttttgttttgttttgttttgtttttctctttcactcagccaaatgtgaaagttgtgaatttaggaaaatcacttgtaatgaagtgtgaatcttgttatcaaatttatttctctgatgtttccttccttatccttgtagccaataaaacattgacattctcacgttttatagatgaggtaaaaagtcttgtgtgctgtgagttataatgcttttgcctttttaatattattagttcttaagtgttacagccccttcagaatataacttcaggacaattcaaactatgcttaatgtatgattttcgagcttctgtatgctaagaaaataggtgtgaaaaactggtgttctgaaatagcctaacatttattgtaattctgaattttctgcccttttattcattgcatattaaagtattagagtataaaaact

SEQ ID NO: 447 - DNA, 1009 bp, Homo sapiens
gtgtcacctccagccacaccggacgggcctgtgccgtggggaagcagacacaacccaaacatttgctactaacataggaaacacacacatacagacacccccactcagacagtgtacaaactaagaaggcctaactgaactaagccatatttatcacccgtggacagcacatccgagtcaagactgttaatttctgactccagaggagttggcagctgttgatattatcactgcaaatcacattgccagctgcagagcatattgtggattggaaaggctgcgacagccccccaaacaggaaagacaaaaaacaaacaaatcaaccgacctaaaaacattggctactctagcgtggtgcgccctagtacgactccgcccagtgtgtggaccaaccaaatagcattctttgctgtcaggtgcattgtgggcataaggaaatctgttacaagctgccatattggcctgcttccgtccctgaatcccttccaacctgtgctttagtgaacgttgctctgtaacccttgttggttgaaagatttctttgtctgatgttagtgatgcacatgtgtaacagccccctctaaaagcgcaagccagtcatacccctgtatatcttagcagcactgagtccagtgcgagcacacacccactatacaagagtggctataggaaaaaagaaagtgtatctatccttttgtattcaaatgaagttatttttcttgaactactgtaatatgtagattttttgtattattgccaatttgtgttaccagacaatctgttaatgtatctaattcgaatcagcaaagactgacattttattttgtcctctttcgttctgttttgtttcactgtgcagagatttctctgtaagggcaacgaacgtgctggcatcaaagaatatcagtttacatatataacaagtgtaataagattccaccaaaggacattctaaatgttttcttgttgctttaacactggaagatttaaagaataaaaactcctgcat

SEQ ID NO: 448 - DNA, 4176 bp, Homo sapiens
aagtcaagtcggtgaaaacatttccttgtggatttaagatgtgagtagttgatgtatcaaggcattttattcaagcacttaatagaaaatgaacctcaactatcaagaggaaagccaatgctggtttcttctctggaaggacccaccgccatcctgtaccagccaccaaaggggaacatctacatggcagtctccaggcactgtgccactgtgtgccttggaagcacctggcttctgtggtcactgcacatcataatgaaaagcctgctttttctttcagaacaccccagcggagaaaacagcattatatacatcggagtatcattttaggattcaagtgtaaaaatctgtgatcaagaggctcaatagatttgggctctatggtttggtttttttagtttgagagacagtacatgaatataacttaaaccctatagattttgtcaagatagttgtaattcctgttctggaaatcttccctattacactacctacagcattgtataaagtgtgggtgttcatgctttgggaaaatgttagactacaatttaaacatgtgatgtgcttattcataattctcagtgtatcagtcataaatgaaataacaagtgcatttaagtcagagatacgtgaatggatgtaatgccgttatgcagtatatattgttaattgtcattaatattagatgagctgcagaaccacccccaagcactacataaaagactcaaaataagtttaacacttactgtgttgggcaccctaacagaagagctatcttaactcattgaatattaagatctgctggtttcaggagtcaaaatgtagaaaaagaggagaattgtaatatggtcagaaacagagaagccttttctatgtaaattcagacttatctgaggctaacagttttccgaagtggtggtgggtagcagcatgacagctgcttgccatgactgatgcagactactaggtttccattttagctctctgtaggtactgttttcttccccactgtgtcgaaagtgatttgttttgaagcaagagtagaatataacatctatcaaatatagcttttaaaataagaatacctggtctggatccagttgagcagcacagcagataaaccttagagtttttctgttcttacatgacggtttccatgtggaaagatctaaactttcttggaatcactattagtgaagaaaaatgtagaatctgtataaccagtaattccccaattcttactttcaaagtcatatccaagaaagacaatatgtcagaatagaatgactttggtctaggtgttttcacgttggcaaaaataaggaggaaattatattattttaatatccaaatttaaaggtttggaaaattttgaatagttaatattagaacttatgttgctgttttttatatttcaaggattgagtattctgcattaatccaatactattccaacaaagagattctggaagtttttaaaaaatgataccctgttttatattttgaatgtagagagactctgagagagagaatgttctgagttatactttttattttttaagatttatttttaagaataaaacattgacctgaacattttagcctaaccaagggacttaagtggtaaagacttgcattatgtcttcatgtgaactgatccgttcattatatattatgggaaaaatcaaagaaagttttttatagagatatgaagatattatttagagagatatttattatgacattttttaaaaacatatttttctattttcaaaatattatttctaggctatatttttattggtgctgtgcaaatgattttgcagttttgaaaatgataaaactagattgtaagtggggttcagtgaggacattcatcagacacgtaagaggtgctgcaatcagggtgatgcccatcttactcatccttggctgcccttggtccgacacctctctatacaagactggttctcagtattttaaatggtacagaattctttttaaaaagtagagagattttgaaaagcataaaaatcatgcctttataatcttagcagccatcagatacaccttgatttatgtagtagtaaatataacaaatattttaataaatagaaacactgataaggaagaaaaaagaactaatgtctatgtcttctgtagtcagcaaaagtctggatccattttctattttgtgttccattggcacactttgtgttcaaatttcagtgcagtcctttcaaaatactcgctaagggttgcctaagtgtctgccttactttctgattgtccttttctgagagcatggttaagaacatcttaaccatatagctgttgaaaaaatctgtttattaaataacaagttcacttctgtttatgttttgagtttagaaaatttgacttgaaaatttagattattaataaatttatttttaaatattaaagtcaaatttcaaatcacccagtgttgaagaatttgcagatgtatacaatactttttctaattatgtcttttctatctccatgcctggctttttctaattatatcctagagaaaaagactaatggtatttcaaagctgtgtatttgtgacgagataaagaagagtcttaaacatcttgtttgggagaatgcacaggccagtcaggagacccacctcctcctgtgccctgagctgctgagacccgacagatcatgaaggctagtaaagggcagagaaggccctgagccatcagtttacactcgaattgttgactcccctttgtggtgtttttgaaggctgcttataccaacagctaatgtggattagtgcttatgatcttgaaaaagtcttgaccaagaatcctaaactccaccactcctcccattccagcttaacactatcagaataatatccaaattccagatttttttcttttttacttttttttcttccttttttaagagagacagtgtcttgctcggtcacctaggctggagtgtagtggcgcaatcgttgctcactacagcctcccaactcccaggctcaaatgagcctcccaccttggcctcccaaagtgctaggaccacaggcatgagccactgtgcccagcctagtttcttttctgtatgctttttttacaaaactgtgagccacagaggttgaccacttagccaatttgttgctagaagggagaaaaaaatctccaactagcctccagacaaaacatactcaaattcaaacagcagttagttttaattaacatacagaagtaattttagactttcagatttctatgctgactagaacactttgcaggctgaagctgacattattaccaaatacttcatttaagtacatactctgaagtgtcaggcttccagtatatatagcaacgctctgagagacaaactgggctcatatgacggggttgcattttattttcttaacaggtctttaaattgggcagttctgaaattctgtttggtcagttctagatggtacgtcatgtgaatgcaaccaagcactgtagttgaaattgtgttatgccactactcatgttgtcttaggtactacgcataatgttaatagctgagatgttaaagaatttgaagtctaaaatataaaagatgaatatacccatattaatcctatgttaagatgctctggaaataaaggccttattcccttacacatgcgatttttgtaagataatatatacacagtatattttaaatgtttgtgtgggtggtctgtgtagttactccccatacaacaaagctgacaaaatttttaatttacacaatgtattctgcattttcaaatgtttatgttgtgtatatagcaaagaaattatcttactgatatgcgttgaccaaatcccatggagaaaagacatctcatttgaggttccccttcctctcatgtgtttgattttttggaaggtgatacagtatgtgggtaaccatgcaaatgtttatgaataactttactgaagtgattccatccgtattctgttctaatacttggagaatgaccttcatatttatatattttatttctttgtttcaactatccagtgataattcaggaaatgtttccttttttttttttttttacaaaaactttttatttgtaaaatgtttgtaataatgtaaaggtgaacatgttcaataaaaatcatatattaaaagttt

SEQ ID NO: 449 - DNA, 1521 bp, Homo sapiens
aaatattttgtaaaagtggatcacattgaatcctataaatgattaaatctgcttttttcccccacgttgagattgtgcagtagttcgcactcctcaagctctccctgtaggctgcattttcatttcctctttcgtgtagggaagtgcctttgtaattccatttattgcattggtgttttcacccaattgttaagtttgatacatgatgcacagattgttcttgcatttttattgtttgtttttgaaatgtacagtctgtacatatgtcctgaaaatgttttaattcctttggcatggttgccatgttggttaaatttgtataaggcaataaactgccactaatctatttttgttttgtaggtgtgggattatggtttgtgtactgaagttagcatggctgtgcttttcgtaatagaatgctaaagactttgagaatggatcttggatgtctattataggagaagtatgtgctgccaatgtacaagaaggcagcattgtaggattaacattcttgtctactgtatattatcttggaaggctcttgttaatatgttacacttaatattctccacagttacctttagagagaatttatgagaagttagtttctgatgcagaggtttttaggctgtgatttcatcaaaagtccttttagcattctacctcaaagggacacttagtatgcctaaaatttattcacttagttttccttttttatttgaaaaaatacatgacatgtaatctttttttcttgaattctttctcagattttaaagtactatattaaagaaaaaaattaatgtctaaagcctagcattcttgcagaaccctatactaacatgtaatggggagagggtggggcagatgagtagagaaacagattcaagcctcaagcttccaaagcatttttataaatggaaaatccttaaattatgaaacagcttgatatagtgtcctttttttaaaattcagaactttttttattgataatggagattgctgtttgagtttttaaacttaatctagaacagaggagtattaaaagtaatgctgtgctgcattatttaagactatcagcaaattatttgatagattgttcttacaacttgtattctgattacagaaccatcatgagtgtggaataaatactggattaaatcctttatcctgggtcttggcttttcccccatttgttaaatttttttagcatatttatattgtggaaattgatgaaacgtcagtagagtcacactttgtgtacagggatgtcttagtgcccagatgacaagtgaattttggagaaatgcatagactgggattgggcatgtggtaatcaataatctttattagaatacttgataatggcagttccctttgtcagtggttgttacatgtgtcatttgattactttgttccatgtcaaagacgtttattgggataccttttacttggacaatatgttagcattttttaaaatttggacttgaaattctttaagataattcacccaattctttttag

SEQ ID NO: 450 - DNA, 939 bp, Homo sapiens
caaagtgagccccagataaaaacaaaaacttgaccaagtgagtaacgtaaattgattttgtgtgattttatggcaaagttttttgtctttgtttaaaatgttttcccatttgtcttgcagagttgtctcatttgttagtgattagagatggaaaagatctactagaatgtagaataaaaatgcctctaggataggaaaagctcctttggcctttagaagaacaactctgactctgcttcctgagggcaaggtcaggtgtgtcctcacctgcacagcagttggagatctgctatgtgaggactctggagagaaatgaatccagaaagtcccctggacggctgctagcctgagttggcacactgtgagaaccctggaaacaagaaagttctgcttagcagaaattctgagatttcacatccacacacaccacagacttcaacacatccacttcatgagtgttttacaacagcacttgtctgcagccccctcaggggctggaaatgttcactcccagaaagtcaagccacccacatgcagacagcacttatcccaagacaaacctccagcaggacttcagtataggttggaaagcagtagctgccagggcaacctgagataacaaacgccctcatcgcaagttaggagcaaagctgagctgcttgcagggttcgctgagccaaagcatcaggtggcgtgacatctatgggagcatctgggaaagcagagctgccagcctgttgctagaagggttgcagttatgctttctgcatgagagaagatgtcaaatggagagcctcaaactgtggccgactgacatgcgtgcatcttttgggggaggaccatccatcttattggccatatcccccactcatattgtaattacttttttcatctttggagggggaaggcaatgaaatataacataaatctctcatacct

SEQ ID NO: 451 - DNA, 640 bp, Homo sapiens
catttctttttggagggtttagagattcttactaatatgttgaactaaaatagaaagaaaatgttgctgtcatgtaatttaaacaatgtaaatattttatggaataatggcttttcaaatacatttcttaaggaactgtttatgattattactggatttgtcatttttgataatttaaatattgctgctgctttgtagatgatgagaagaaatgttaaagtgctttctaaaaggaaattttttcacctttggaggagaatatattagagttgtgggtaatttttcacagccacctatgtacatactaattacccattggatacttatatctaaaagtctcatgctgaagtatagtttttgggaaagaatgattttaaataaagagattgtaaaagtaaaaaactgtaaatgtatatgtatgatagaattgtttcctctaagtgtagtttttctttcaactaaaattcagtttatgtgtaaaataattcagtcattaatagaaatggagtgatttcacagtgtgtactgttttgccacatacttctaaagaacacaattttatataattttgaaatcatgtatgtttaaattagaaaaccaaaaatcatgaacattctaagagaaaataaatatagaattt

SEQ ID NO: 452 - DNA, 456 bp, Homo sapiens
ttactatggatttattttttttcctttcaaacacggtaaggaaacaatctattacttttttccttaaaaggagaatttatagcactgtaatacagcttaaaatatttttagaatgatgtaaatagttaaccttcagtagtctattaaggcattaatacttctctggacatgcgcgtttgagggtggaggggtcctgtaaggtgcttcatcgtctgtgattactgcttgggatgtgttctttggcagcttgtgagattactttacctagtgtttataaagtaggaagttaagtgaatcatagattagaatttaatactcttatggaaataattttttaacatcttaattgacaatggcgtttttttatacataaccatggatgtagtgggaaacaatgttgtttggtaaaaataatgtacttgatcaatgtaaaaaagtatataaaatagtcttact

SEQ ID NO: 453 - DNA, 2432 bp, Homo sapiens
attccaaagcacccaagtcatcaactgccaaccaaggggacggggatgaagaacctgttggagacctgaacccagtgtaggagagttcagctgaaatcatcggtccccaggatgacaccacagcatctgcccctgctatatgtggggaaaactcatggtcacgaacattatttatgcttcaggggactacagaaagccagcttcctttgatctatgtgtaaatcagtccttggcagagtgcatataatgtccggataaattacacccctcggtgataagattacatacctccttcataaaaacctgtcatcctgttttgttcttcagctcctcatcaggatcttttcaaactgaggctcattagggaaggaactaggctgtgttcagacttcttttgaagagagagaattttcaagacttcttttcactctttgatttggatctggcaaattggggaggggatgctgggtgggaaacagttatgaaatgccaagaaattctttggctttagaaatttatctttcatgtacccatccgggaacataaaagagaggcatagtgctcattgcaaaaagagaacagatgaagtagctgtgttatgtgctggtatcttgagagttttgccaagaaaatctgggcctacataaaatttgagaattatctgtgtgatgagaccagaaagcagtggcttagacaagaaaaaatctttctgttcaccagtatcctcaaatggagacttcacttgatcagatggtatatgaaaaatgaatcaactattgctatttcgtaaaacctttttatattttctaaatttacttagtgctaaatactgttactcagttttaaatgccacgactaggggaaaaagaaactattgaagaaataattgtttagtatatttgcagttggggtagaagaaagaaatctagtatattgattcatatactagtaaattcatctagtataagaacttgtgatgttagattgaagttttgtcatcttataaaagacaacaaacttattttctgtttaagtctgagtgttatggcaatttttagttgattacttatttttcttagccaaattttaattttcttcatattgcattgctctttagttgtctctggaaattctatttactttaaggacatgagaaattcaaatgagagaagttgctgatattcatcagtgtgtttggacagttcatagggtccacaaatcaaatgaggttgtttcctgaagtagaagaaaacagaactttgcaattgatactgaagtactttgccatggagttagtaactcctgagcagaccattttagatggctcagcatttggcaggaagacttctccattccctgcttatatctatggaaggatcagctgttggatgtctagaacttctctatttaaaaaaaaagagtaggtctaaaattaaattattataagcaagcatagacatgggtcttccagttgaattgtccattaccgtaaaacttaatggtggacaagttagctgtggttgattcctgtgtggcagtaaattgtcttctgtctgcttactccaaataataaaagctgctaggaagtttagattttgaaataggcagtttaatgctttgagggtttctagaaatacagaaagtcatcaagtaaacactgcatgtctaatcatctcagagttgtggctgttatctcttcaggaattggtccacagggtaaatttcaacaattcatacgttttccattgtcatttctgaggacctttgagatgagagaaaggaaatctagtggaacaggaaagagagttacaccttgtgggtgtgagtttgggacctgttggcagaagggaatgtcactccctggaaacaggttcagcatgtttgcacttgttattttgtagctttaatgatttttgttttctaatagggcaaatgtctctaagcttggtgtttagagctgcttcatattttaaactagttccattccacagttctagttcaaaccagtttttacagcctcctgggtgggtcgtcttgacccaaactcttgtgttgttacattttgagaggttttcataccagaatgtaccaaaaagtgcacaaggtaaaggtaatttacagccagaaacaaatatacatttgtttcatttcttgactttccctaagcagataagcagaaacttgtttaactcattactttgtttgatgtgtcttacatatttttgactaaaagttatagaatgttattcctctgggggaatcttttacaggtggaggaatggggatagcagtattgcctcagattcaaactggcatcaccataaaccctgtaggccagggtggaatgaagtcagctcctttttatagttgaaatacaattttttattcaccattgtctgcacaaatccttgaaaataaacctttttttccct

SEQ ID NO: 454 - DNA, 219 bp, Homo sapiens
gaggcactgcctgcctcacctgcctcctcaccttgcatagcacctttgcaagcctgcggcgatttgggtgccagcatcctgcaacacccactgctggaaatctcttcattgtggccttatcagatgtttgaatttcagatctttttttatagagtacccaaaccctcctttctgcttgcctcaaacctgccaaatatacccacactttgtttgtaaatt

SEQ ID NO: 455 - DNA, 275 bp, Homo sapiens
acattcctgcctccctatttgccaggctttcatttctgtctgctgagatctcagagcctgcccaacagcagggaagccaagcacccattcatccccctgcccccatctgactgcgtagctgagaggggaacagtgccatgtaccacacagatgttcctgtctcctcgcatgggcatagggacccatcattgatgactgatgaaaccatgtaataaagcatctctggggagggcttaggactcttcctcagtcttcttccccgggcttgaaccccg

SEQ ID NO: 456 - DNA, 1701 bp, Homo sapiens
ccctgggccgtggttcctacgcccgaggctcccttcccttccccagccgcactcatgccctgctcctgtcttgtgctttatcctgccccgctccccatcgcctgcccgcagcagcgacgaaacgtccatctgaggagcctgggccttgccgggaggggtactcaccccacctaaggccatctagtgccaactccccccccaccattcccctcactgcactttggacccctggggccaacatctccaagacaaagtttttcagaaaagaggaaaaaaagaatttaaaaaaggatctccactcttcatgacttcagggattcattttttttatacgctggaaattgactcccctttcccttcccaaagaggataggacctcccaggatgcttcccagcctctcctcagtttcccatctgctgtgcctctgggaggagagggactcctggggggcctgcccctcatacgccatcaccaaaaggaaaggacaaagccacacgcagccagggcttcacacccttcaggctgcacccgggcaggcctcagaacggtgaggggccagggcaaagggtgtgcctcgtcctgcccgcactgcctctcccaggaactggaaaagccctgtccggtgagggggcagaaggactcagcgcccctggacccccaaatgctgcatgaacacattttcaggggagcctgtgcccccaggcgggggtcgggcagccccagcccctctccttttcctggactctggccgtgcgcggcagcccaggtgtttgctcagttgctgacccaaaagtgcttcatttttcgtgcccgccccgcgccccgggcaggccagtcatgtgttaagttgcgcttctttgctgtgatgtgggtgggggaggaagagtaaacacagtgctggctcggctgccctgagggtgctcaatcaagcacaggtttcaagtctgggttctggtgtccactcacccaccccaccccccaaaatcagacaaatgctactttgtctaacctgctgtggcctctgagacatgttctatttttaaccccttcttggaattggctctcttcttcaaaggaccaggtcctgttcctctttctccccgactccaccccagctccctgtgaagagagagttaatatatttgttttatttatttgctttttgtgttgggatgggttcgtgtccagtcccgggggtctgatatggccatcacaggctgggtgttcccagcagccctggcttgggggcttgacgcccttccccttgccccaggccatcatctccccacctctcctcccctctcctcagttttgccgactgcttttcatctgagtcaccatttactccaagcatgtattccagacttgtcactgactttccttctggagcaggtggctagaaaaagaggctgtgggcaggaaagaaaggctcctgtttctcatttgtgaggccagcctctggcttttctgccgtggattctcccccgtcttctcccctcagcaattcctgcaaagggttaaaaatttaactggtttttactactgatgacttgatttaaaaaaaatacaaagatgctggatgctaacttggtactaaccatcagattgtacagtttggttgttgctgtaaatagggtagcgttttgttgttgttgttttttcatgccccatactactgaataaactagttctgtgcgggt

SEQ ID NO: 457 - DNA, 132 bp, Homo sapiens
cgagaaagtgcctgcccactgcaacggagccgccagcacctcctcccctccagatccgggccccaggctgctgccgctttttataactttatattatttttttttaagaaaaaaagctctttaaaatacctc

SEQ ID NO: 458 - DNA, 2596 bp, Homo sapiens
gttcctgcgaacgctgaatctaggtgggacgcttgccttgaacatcatggttcctttggtgatctataagggatctatttaagaagtggtcaggttttcgcacttcttggctggtccagggactgcagaaaccaaagctgctattgttgaggaataattcagtgggtcaaaatggggagatgtactgggtatgagtggaaggtgatggagagcctgatcctgaagcctctacttgatgagagacagagttttgggtggtgatagtgatgtgctggtggtcatttcttgcttgtgtgcctgatgaaaaactgggttcctgtaagttatgaatggcatccagggatatttgggttacttttaagaaagcagtgtgatgtagtggagagagcccatgggtcttatttatgggatatggtcctcttaggctctgttgtacaaccttaggtacattccatatcttaagaccactgtttcttcatctgtgaaatgtttctaaacaatctctaagtcccttccttctctaatatacagcgtctgtcaggtcgatgtctcagaacactctcccagctgtggaccacgtggaccacttagcagactcagggggtagttctttactctccctttactaccctggagggacagctctgcccttgaggcccttcagaaatttgtgctgatttggtccctgtgccagggcacagggggtcaggcactgtggaaagaagggactcaggtgagggtcttctggactctaagacggtaaaggcactaaagtcactttaaagcttttggagaagcaggagggcattggcttaaccaagccgaaggctgctggctgggctgcctagcccagctaagatcttccttcagcccacctcaggatccgggcttgagggctgcagggcctgcgtgcgctccctcccccgaaatcacttctcagggcaaaggagccccaggcatctcatgctttgcccttcttagggctcaggttcttgccttagcacatagcttctgggagcttttttgaagcatttcataagggccaaggaagtggggcagggcttttctgatccaaagaaaacaaagtttctctggttacccctcttcccttgttatctaagctttcctcagttgtcatctcttcccagctctttggtccaagagggggctgagtttggtgccagctggcaaatgagggctggactctcttccctccagagaccaccccgctccttgctgcagctgaaagtagttccccaggctgccctcggtggtgaggactggatgctagactgctgagctgtggtctgggctcagttgagaagataggatctccctagatcatggcaaggcctgacaacagctgagccaggaaagtgctgctgaggcaagtcgacatagctcacagggaactctgggaagcctgggatgtaggcgctggagctccagttcccaggagcaggggcaggtgttcctagatgttagtgttgtggatgtccttggtcttctgaagattcaggtcctcctctccgggtagcttagaagtaaggaggttggtttgattcaatagtatggggacagaatggggacagcaagggcagaagtgtcctctccacgtaactcattatgcccctcctgggggagattgcatctccaggacaagcatctaaaggaggcccctgctgtgcagaggggtattgttcctgtctctttcattgtcctccctcctctcaaactctccagtgtggtgtgaactcagaagaaacggttactggggctgcatggagaatttcacctgcggtgattttgatccagggactgcatctcctctttcctcatcacagccagtgctgagaggctccttctacctgccgcagggtaggagggccaggcaaagttcaccagcttgctctaagagcaagcaggcaatgccgtaaagcctgagcctgcctgaggtgctgcctcctcccaggtggtgcgggggctggtgggcgggcgggcaggcgtgctgacagccggcagtttgcgtgggctgtgccatctgatgtctattcccagccctgggaggaagggggagtcatttatattctgcaggaggaaggggccccagctgtcgcctttctgaccagcaggcctggagggcaggggcacagagcagagaggagggcactggtggtctcctgcttagcctggtctgactgcagtgtagggaataggtcaccaggaggagcccttcatcctggcaggccggattgtggagggacttccctccccctcttttccatttctccctccatcaccacctgccctcacatcctggggcagcagctggacagccattagacctcagtgccagggcactcttcctccagctgggatctcagtggctcccagctgcatgggctcctgcttgtgtgttccctcctccgccatcctctgttccccgcacctcccttattctgctcatgtctggggtattcacttggctcctcagcaaggaagcaaacgccttggaggagaagcacatggttgcccttttgtccttgctccctggctagggaaagctgctagtggtcagcctgttttgccttttttt

SEQ ID NO: 459 - DNA, 523 bp, Homo sapiens
gactggcctccctgatctctctcctcatggcagcgacccacctccagtcccctggacaatcgggtacaagagacttaaggttgggcatgggaagggtggggtttccatgatccattaaatgccttcctactcccattcatcgctctcaaaattagcttcagtgacaaagacttaaatctctctcctatctgcagcactgggttggagagagggcacgggagttggtcttggctgttcattgattgagactgtaggaactgtgttggttggtattggtggtggtattttcaacaaacagggaataactgcaaactggacaggacacccatctgggaccacctgtccatcctacttccctcaattgaatcaggtaacactaacggatcaaggcagggccagagggtggtgtggtctctatttgaacaaattcctggctcactgagcatcaaaaggggaaatgggctggtgggagtgggatagtctcccatttaagcagctaataaataatttttatgataaaagg

SEQ ID NO: 460 - DNA, 2120 bp, Homo sapiens
gaagcatggatgttagtgaaaggtaaagtttcatacaaggtagttatagtgctacagtgatgtctcttggtttttaaactttttctaattaagaatattcttctcttctagttactacagtgtggagtgttgagaccagacaccttttgctgtctcatggggcagctacaagcatgaacgggaccagggaatggcagcagcatgcagaatcttagcactctttagcacaatattttgtattagggaacttttaattgacatgagatgctaaagtcagacattggaattggaagaactataaagtgtgattcgatcgtcaagacatcacttggatttcttaatcttaaatgcttatggaagatgtgaagttgaggtgctgcattctagaacttcaatatgtagcttactctttttttccccccttcttaaaccaccagtggttcatttttaaggttttttcatcaagagaagaataactttactaaattttatttctttatttgcaaaagaatctttattaaaacaaacaatcttaactatgcacatgatgtgaccagatcatcttgaaaatattcctctttagtaggaactctttgtttttaactcttggtatggtcagaatataatacttccataattacttataattctttccggttactggggctataaatacaactttttaaatgaaatttatgttattatcctgctcaaagtaccattatggtttccatatggtaattacattggaaagttctgcaataagattctagttctctcttttctttaagcttatggttgaaggttaaccttgtttgtgcagattaccaaattactgctgatgtagtatgataaagtcagcttcttggatacagacacacccagggcagctgccaatcagaaatgcaaattgctaaattccaaacagaaccagtgactttgctgctacatatttactaaattgaccactttgattcttgcttgtttgtctcagttatagggagttttgtacatggtgcctcttgttttccatcttcatggccttttctgttgagaaacatctaaagtgtattaacagtgcatgcttttactttgtaaatgtggtgccaaatccctgtttgccatcgtttttactgtaccgatgttaactgtagtaatccttagccagtatgttcttttgctgaaactgttgcattttgggacttttttccactttgtcatgtgtacatttttaatctgttatagttggcggcagtattaaaatggtgagtaaagagcccaggtttgctcctgtttgtaactagtcttttctggaaatactgtcttctgtttccttttgcctttgcagaatgtgctttagcctttgtctgagaatgggtttaggtagaagggtttcctgaaagtctagtcttttggtgtaatagtattgttgaaccttaggttttatgttatatctgcatatgagtgatatgtgatcatgattcattttgcagatttacattttgcttgtgtggaaagttacgttcacttcaacctacagacccttttgtataatgtacagcaaatgtcattaaatattgaatgctctattgggggaagacaaatgaagagaatgcattttgagcatttcaaatcagtagtttgggcagtgccttttggggtccaatctttttggattggattctatttcatcttttgatgtgacttttcactagtttacaaaaaaaaggttggtggtcaacaaaaaaagcaagtcatagcagttcagtgcctttgttggtagtttttaactttttttgtgattctttttggaaaatcatagcttacagatggtataactgtattatataatggaattttctttaggtgtgggaaaacttgatctgaaagaaaattatcagcttcaattggcgattgattcagtgcccacaatgtaaacagggttggtagttgttactcattttgaatataccttttccttattgtattctgtaatataggatcctggaaatgagacctggtggaatattattttcaactgtagtctttctatactgtggactaatgaaatggtgttgttgataatctaaaataaccaataatccaaaaaagttcatttt

SEQ ID NO: 461 - DNA, 903 bp, Homo sapiens
gcctggtccatgaagtgcccaccacatcgcagcacttttaccacgttttgtcctcagaccccgcccatgctgtgtggtctctgcatgtctccattcttctctgtctctgtcttgcatgtctcctaccatgtcactgtccctgggccacccagtgaaagcaaagcctgggaatctgctcattgttgtttgggctcaggtattgagcctgatggcccaggtattgagggcctcccctgctggtggccctgtcctgggatcctcagaagcctgactgtcctatgggcttctccagtgtccacaggggcttgggatggttgtggggggctggcccctctagcctttccggtccttcctgggcaaatctaagccttggccagggccgaagtttaggcccctgtcttgttcatgtagccgaggggcaggcgggggacctctacacctctgctgtgggcacggggctgctgagggtctgtggaactccagcagctctgcactgggtagagctgggcctagagctcagtcacaggcctgggcttcctggcctgagtgggtagacgcaggcggcagaggtgctggaccacatctccgccaagtcactgcccagcagccttctccgtcctgtccccagcccacgtgctccttgggtgtcagcttcctgtgcctctgtgggagagggcagctgccttgtgttatgtctggggccacagttgctgcaaagtcctggatctgccactcaaccccgggagtggtgttcccagtgtggctcccagagctttgaccagattgtgatcccagctggcccctatgttgtgttctggactgaggcctttgctgtgaactgcagtgtttcatacgaaccatctttcctagtgcatgagaaataaagattatttaagtaatgag

SEQ ID NO: 462 - DNA, 471 bp, Homo sapiens
tggtcaattttctgcatcaacttgactgggctaagggatgctcagatggcaggtaaaatcattgtgcttgtgagggtgtttccagaagagatttgcctttgaatcagaagacagcaaagatttccttcagcaatgaaggaggcatccaccaaactgtcagggcccagagagaagaaaaagacaggaagggtgaatttgacctctctgactgggacatccatctctgcctatcctgggacctccacactcctggttctctggccttcagacttgatcagggactaacaccatcgcctcccacccccacctttgttctgaggcctttagcctctgaatgataccactggctttcctgcttctctatcctgcagtcggcagatcatgggacttcttcactccaaaattgtgtgagccaattcccataacagatagataaatttataaataaacacacaaatttcctacagcctt

SEQ ID NO: 463 - DNA, 445 bp, Homo sapiens
tgccttgaaggccaggaggtgggagtgaggagcccatactcagcctgctgcccaggctgtgcagcgcagctggactctgcatcccagcacctgcctcctcgttcctttctcctgtttattcccatctttacccccaagactttattgggcctcttcacttcccctaaacccctgtcccatgcaggccctttgaagcctcagctacccactttccttcatgaacatccccctcccaacactacccttccctgcactaaagccagcctgaccttccttcctgttagtggttgtatctgctttgaagggcctacctggcccctcgcctgtggagctcagccctgagctgtccccgtgttgcatgacagcattgactggtttacaggccctgctcctgcagcatggcccctgccttaggcctacctgatcaaaataaagcctcagccac

SEQ ID NO: 464 - DNA, 449 bp, Homo sapiens
ggccttgaaggccaggaggtgggagtgaggagcccatactcagcctgctgcccaggctgtgcagcgcagctggactctgcatcccagcacctgcctcctcgttcctttctcctgtttattcccatctttactcccaagacttcattgtccctcttcactccccctaaacccctgtcccatgcaggccctttgaagcctcagctacccactatccttcgtgaacatcccctcccatcattacccttccctgcactaaagccagcctgaccttccttcctgttagtggttgtgtctgctttaaagggcctgcctggcccctcgcctgtggagctcagccccgagctgtccccgtgttgcatgaaggagcagcattgactggtttacaggccctgctcctgcagcatggtccctgccttaggcctacctgatggaagtaaagcctcaaccac

SEQ ID NO: 465 - DNA, 840 bp, Homo sapiens
ggcccagtgatgccagaagatgggagggaggagccaaccttgctgcctgcgaccctggaggacagcctgactccctggacctgccttcttcctttttccttctttctactctcttctcttccccaaggcctcattggcttcctttcttctaacatcatccctccccgcatcgaggctctttaaagcttcagctccccactgtcctccatcaaagtccccctcctaacgtcttcctttccctgcactaacgccaacctgactgcttttcctgtcagtgcttttctcttctttgagaagccagactgatctctgagctccctagcactgtcctcaaagaccatctgtatgccctgctccctttgctgggtccctaccccagctccgtgtgatgcccagtaaagcctgaaccatgcctgccatgtcttgtcttattccctgaggctcccttgactcaggactgtgctcgaattgtgggtggttttttgtcttctgttgtccacagccagagcttagtggatgggtgtgtgtgtgtgtgtgttgggggtggtgatcaggcaggttcataaatttccttggtcatttctgccctctagccacatccctctgttcctcactgtggggattactacagaaaggtgctctgtgccaagttcctcactcattcgcgctcctgtaggccgtctagaactggcatggttcaaagaggggctaggctgatggggaagggggctgagcagctcccaggcagactgccttctttcaccctgtcctgatagacttccctgatctagatatccttcgtcatgacacttctcaataaaacgtatcccaccgtattgt

SEQ ID NO: 466 - DNA, 449 bp, Homo sapiens; identical to SEQ ID NO: 464

SEQ ID NO: 467 - DNA, 881 bp, Homo sapiens
ctggacgcacagaacagtctctccgtgggaggagacattatggggcgtccaccaccacccctccctggccatcctcctggaatgtggtctgccctccaccagagctcctgcctgccaggactggaccagagcagccaggctggggcccctctgtctcaacccgcagacccttgactgaatgagagaggccagaggatgctccccatgctgccactatttattgtgagccctggaggctcccatgtgcttgaggaaggctggtgagcccggctcaggaccctcttccctcaggggctgcaccctcctctcactcccttccatgccggaacccaggccagggacccaccggcctgtggtttgtgggaaagcagggtggacgctgaggagtgaaagaaccctgcacccagagggcctgcctggtgccaaggtatcccagcctggacaggcatggacctgtctccagagagaggagcctgaagttcgtggggcgggacagcgtcggcctgatttcccgtaaaggtgtgcagcctgagagacgggaagaggaggcctctggacctgctggtctgcactgacagcctgaagggtctacaccctcggctcacctaagtgccctgtgctggttgccaggcgcagaggggaggccagccctgccctcaggacctgcctgacctgccagtgatgccaagagggggatcaagcactggcctctgcccctcctccttccagcacctgccagagcttctccaggaggccaagcagaggctcccctcatgaaggaagccattgcactgtgaacactgtacctgcctgctgaacagcctgcccccgtccatccatgagccagcatccgtccgtcctccactctccagcctctcccc

SEQ ID NO: 468 - DNA, 681 bp, Homo sapiens
acccctcaccatcctggacacactcgtttgtcaatgtccctctgaaaatgtgacgcccagccccggacacagtactccagatgttgtctgaccagctcagagagagtacagtgggactgttaccttccttgatatggacagtattcttctatttgtgcagattaagattgcattagtttttttcttaacaactgcatcatactgttgtcatatgttgagcctgtggtctattaaaacccctagttccatttcccataaacttctgtcaagccagaccatctctaccctgtacttggacaacttaacttttttaaccaaagtgcagtttatgttcacctttgttaaagccaccttgttggtttctgcccatcacctgaacctactgaagttgtgtgaaatcctaattctgtcatctccgtagccctcccagttgtgcctcctgcacattgatgagtgcctgctgttgtctttgcccatgttgttgatgtagctgtgaccctattgttcctcacccctgccccccgccaaccccagctggcccacctcttccccctcccacccaagcccacagccagcccatcaggaagccttcctggcttctccacaaccttctgactgctcttttcagtcatgctcctcctgctcttttgtatttggctaatagtatatcaatttgcactt

SEQ ID NO: 469 - DNA, 13 bp, Homo sapiens
agggaattctaag

SEQ ID NO: 470 - DNA, 2061 bp, Homo sapiens
tggaccatactaccaaggaccagtccacctgaaccacacactctaaagaaatattttttaagataacttttattttcttcttactcctttcctcttgatttttttcctataatttcattcttgttttttcatctcattatccaagttctgcagaccacacaggaacttgcttcatggctctttagatgaaatagaagttcagggttcctcactctagtcactaaagaaggattttactctcccagcccagaaaggtgattctttctttaccatttctggggactttagtcttaattaggtaccttattaacaggaaatgctaaggtaccttctctgtggaacaatctgcaatgtctaaatcgccttaaaagagcccatttcttagctgctgaaatcagtgctctttcacttcttcagagaagcagggatggtacctacccggcaggtaggttagatgtgggtggtgcatgttaatttcccttagaagttccaagccctgtttcctgcgtaaaggtggtatgtccagttcagagatgtgtataatgagcatggcttgttaagatcaggaggcccacttggatttatagtatagcccttcctccactcccaccagacttgctcatttttcgagtttttaactagactacactctattgagtttaattttgtcctctaggatttatttctgttgtccaaaaaaaaaaaaaaagaaaagaaaaattaaggagaatttttggtgttaatgctgaggaattgcttgagtggttagttgttaccaatttctcttttgaacctttggagctaaggatgctgagtctagagaaatgctagtctcaagccctgttaagtccctctgtttctagcccgtagttcatagcatcagtgaactggagccacaacagcaaattctatcagctgtgtaccatacagcttgtgctgaaggcgaatttcttgagccattactcagtataaagcactgagttctatctttaggatttatctttaagagcaaatttctggtcagctgtgcttctgcaacctaaaatatttaaagggaggtaggtgtgggcaggaggaggaatgataaattgggccagggcaagaaaaatctagcttcatataatttgtctgggactatacaccctatataatgttagttttacagaagtaatatgacttttgattgctacataccacaaagagtttatgaactgagatcataaagggcaactgatgtgtgaagaaagtagtcagtacatcctggctcatgctctgaaagaatatccagagaggctctctcaaagatcagggagatgtattcccatgccatgcaccctgcttcccagcatttctgcatggtcaagtgagctttatgctcatgagctttaagtatataattatccaggattttaaatcctcaacttgttctagcttgtgatccctcaaagttgggtcatacgttagtgctagatactagaaattttcacttttccactgatcagagagacagacattaaaaacaaaaatagaagaaaggaaagctttcaccctgcagcttcttagcagggaacaattgtcttgccaaaacttttttcccttttctctcccattttcttttacccaatcccttcttactccttgccagtgtgaccatgctttcttctctgtagatgttaacagttaaggcctattttcctcgggcacttaaccaaccaatcagaacaccacatctgttaggggaggtaacctggccaacagtgtatccatcacgttagccctgctggagggaagggacccacattcacctgccctctgacctgccccttgatcccatatctattaccgtgtccataggaataataggtaagggctctgtctctgtcaagccatgtaacaaaggacactgttaaaaaaaaaaaaaagtctggcatcagagggagcatgtggagagcaacttgggaagaacaagttcattttgtattgaatgatttttaatgaatgcaatattaatccttgcagatgagcaataatcattaaaatcgattaaaatgataagacctt

SEQ ID NO: 471 - DNA, 721 bp, Homo sapiens
ggctgttggttaggggactgaaatggagagaaaagatgatctgaaggtacctgtgggactgtcctagttcattgctgcagtgctcccatcccccaccaggtggcagcacagccccactgtgtcttccgcagtctgtcctgggcttgggtgagcccagcttgacctccccttggttcccagggtcctgctccgaagcagtcatctctgcctgagatccattcttcctttacttcccccaccctcctctcttggatatggttggttttggctcatttcacaatcagcccaaggctgggaaagctggaatgggatgggaacccctccgccgtgcatctgaatttcaggggtcatgctgatgcctctcgagacatacaaatccttgctttgtcagcttgcaaaggaggagagtttaggattagggccagggccagaaagtcggtatcttggttgtgctctggggtgggggtggggtgtttctgatgttattccagcctcctgctacattatatccagaagtaattgcggaggctccttcagctgcctcagcactttgattttggacagggacaaggtaggaagagaagcttcccttaaccagaggggccatttttccttttggctttcgagggcctgtaaatatctatatataattctgtgtgtattctgtgtcatgttggggtttttaatgtgattgtgtattctgtttacattaaaaagaagc

SEQ ID NO: 472 - DNA, 887 bp, Homo sapiens
acgggccatcctacccatttgcatgctaaaattctcccggcctcatccttacgtgttccctggtgacttttcctactacttcctgctgatgtggatgcgtccacacccctttttgaaccttccaagcagctggagggtttttggatccctgtcccctcttgggcctgaggtcctccctctgaaatgcagagtgaaccaaccctcatcaccatgcttcccctagaagggttctgatcaccggagggcagccccaaaggccacagtcccctcctgtgctggcagctttgcccacacatacccagcagctccccaggctgaaagcagccctggcccagggtctccatggttctaggcagaccctctttctccttcgggacagaaagacaatgtgagttcattttcctccatcctcagaccgtgacatctcccctaggctccccagcagccaagaggagaggaatgtcaggtagctgccccttgccttctgggtgaggctgcccctgctgttctcctgcttgtgcttccagcttaagggacaggcacagcagaggtgagagtgggaggagggcacgtaccgggtgccagccctggagccctcagggagacagacacagaccaagaatagcaggaaactgagcctcaggcagaaaaaaagttcagcaaagtcatacactccctgtggccagcgtgaacagagccatgccccaccctcccagactgatcagtcagtaggtatcacagctcacattacctgcccagcgctgcccaaggctccctggaaggaaaaatggtatctgtcaatgaggatccttgccctcacagagcacgcagcctagatgcagagagctgctatacatgtgaaaagtaaagtggtgacatgaaactag

SEQ ID NO: 473 - DNA, 3755 bp, Homo sapiens
ccactgcccaagccctgcccgcctctccccccacgctcaacctgcccacttgtccaggcctggcctctttcttgaggtggccaccaggcccaggccaggccctttgcccaagaagagagggtctgccctgcctcactcccctcttcagtcccagtagactctgctccctagccctgagcaggaggctgggagcagctctgtttcctaattcaggaccccactcatctagccctccaagagcctccgccaaattgtagccatgtaattggaacaacccataaggcctgcttcccagtccatgggagattccaagtggccactgcaggagtcactcacctccctctctccctgtaacttgccacctgcagttcttagggctgtggggtcagatggtggtggtgagaggccttggggctggggaaggagagtggactttggctcactctgccatgagaacaggacaccatcctgcccagcccagacggggttgctcctggtccaagaggctacctgctccaaggcggagggtgggagcaggtgtgccagggctcagggctcagacttgggagggcctaggcagaagccccaagttctgttttctgaggtatgtgctgcccttggcttcagcatgagccttggtagcagaaggtgaggaacctcctctgccctggtccctgggtggaatcttcccatgtccttggccctgcctggggtgtgtggtgtgtgctcctgcatcttgtctgggagtgcagtgaccgggaccagaaccttccccacctcaattagggcttagccatctccctgtccccagcacccctccccagcccacagtggtggcctctgcctctttcctggagagagaaggacagtgcacggagaggtttccagagcacaaattgttggttcctagcacaaattagatggtttggagcacaatggtgaagcacactcccctccctcctcacctggggtccaatgttctgtctagtggcagcttttcccctggaacaggggtccctggagttcacaggcttatccccaggaagcctcactcctggggaaagacagataatttcactgcccctttgagccaccactcactctccttattacacaagcacagccgcccagtgtgcacatcatgtgcagacaccttggaaacctttcccaagccttcctggcccacagtggccagtgccataggcagtgctgtggacagtagaggctgccaaaggcaagggctggtcttcaggatggaggccagcctgtgcagaaggctgcagctgacaacagcgaccccacctgccattaccttcagggcctcctctggaagagaacccattctcagagtgcagccagggaggaacctgacccaagagtaaatgtctgcagagagatggatggatggatggatagatggatggatgggttggggagtgggggtggatggatggatagatggatggatggatggatggatgggttggggggtgggggtggatggatagatggatggatggatggacggatggggtgggggaaggaaggaaaggagggagaaaggagggaatactggctccatctttgagagctctggtgggcagggcagaaacaggccacagtgctcaacccggacaccctcacgaagggtcgcaagtcactcttgtggctcagattgctcttaggacctggagggacagaccagaatcagggtcccctcctttacccctgagttccttactgttcccccaagcctgggagcagtctatcccccaaccctgccatctcccttactcatccctcttccacagcttcccctttctagccccctctgccctacctgtctttcctgagtgtttgaggggagagagagacccacatctccccaaagagatgagcttttggggcacaacatcccaccgcagtccccctcacccgacaacacctcctacctggccccttgccaaatcccaagcagaattagcaacaggaaaagcagagccccaggagagacactctactatatatactcttctatatattctgtttctattgtatattcactctgtacatgtgggtgtaaatgctgttaaatgacaaacccaatattatactgtggctggtggactattttcatcctcagtgctgtacagatctattttcattgtatatttgatatatttttaattttgtagcgtgtggctgggccaggccccagcgggaggggctgagctggggctgtgtgcttgctaggtgtgggcgcgctagtgctcgttgtagccttttgctgtgtcttcgctgtgtgttagacgtagggcctagagctcggggtgtgtgtgtgcgtgctgtgtgtatggtgtgcacatacgtgagtgtgggtgtgtgtagcgtgctgatctgtgactcccagtgttcaccaccttcctgaagaccacgctccctccccctgcctcctcctcctcctcttggctctattgggagcctcagggccggcagggtgcttcgggagccccctgctacggggaaaggcatgtgtttcttgctggtgactcattgccttcacaccactgggtttgccagaaacagggaaggagggcgttaagggaaaaaaaaaatcctcaaatttatttaccagtcagcttcttgctgttcccagtagaatcgctagctcttctccagaggaaaagtactaggattcttaagatggcgagaccccaagagggatctcatagcactgctgcatttgccgttgacgcagtcctgacagtgtttgaaaagggccgcctgccccctccccactgtgcttttgatgcctttggagtcaaaggcaggtggggtcacctgatgagctaagatccagccccagaatcctggaggagcaggaggtagcaggagaggaccaggtccccaagtcccttcacagggtccccacccccactggctttggtgctgtccacacagtgcccaccagaaggcagagggaactccagggcagggatgtgcctgaaagagtcaacagtcccctgatcccctacctctgcctgccctccagccccatcaccagcttcttgctcagggagacttccgccctcctcactgaggcaacatgaagcccgaggcccagatgggggctgaacaggtagggcacatcagttaatgccagtgaggtcagcttctgccctccagcaatacatgtgcaggggttgctgctttcccagtgccaggagaacccccgctccgagtcagcctgtgtgggtcatgaggctggggcccaggagacacggtcccaggcactgcacaggcctgcagtattaccaggcggaggggctgcttttctgcccttcctcacccccacgccccaccccactcccccagagtactccccactgtgaaaagagctggaaactaaactggttagaatgaacctggctccctgagcatccctggatccttcaaataggccctgagatgtgaggtctgctgcttcactggggcccgatgactttggctgggggagggggcctagggcctcttctcattgaaagctctgctttatacagacccaagcatacacaccaggccgtcactttgggttctggcataagttcagaacaattcaagtccatgtgtcccatggctggtcagagccctgggtcaaaaccactcagcccaggggaggggatgaggcattgtcaccctagacccctcttcctctctcccccaccatagtgtgcaataaagtgtctgttcttacc

SEQ ID NO: 474 - DNA, 1734 bp, Homo sapiens
ggaagggggctgggcacgacatggcatcatactcaggagccttcttcaccagctccttgggacaatggaatatcccagggtggtgacagcagatggagctacttgggggagagctcaagttggtcaggcaacagctggggtgatggcctgtgagccacaggccacatcaggaactttccccactgcctccatgcaaggctgcagagctatggtccctttctccactgcactggagctttgaagacctaagaggctagtggttcctggagctagtggttacctgaacaggtatggcgatgagctacaacatcacctgagtcaccagagttgggttggcagaggggtgaagggttcaccccattccctgacccatccatgctcttcctggccttttagccctgggttcctcatgccttccagctctgctcctggtctactccttagcccacaccctgtgggtcagcagctggcttccttctaacgtctcattctttgtttctccctttcttttgctgaactccctgtccccccaaccccagaaggcaatgttgagccgaaagcgtgcgtcccagtgtctcacacctgtgctctttaaacacagagacctgccaagacgccctctcgtccaactatgcccaggctgaagtcctcaccctctcttaaagcggcaccaacgtgagagagacaggcagacagacagaaagccagaggcttagggaaactctggaacccagacaagaatcttttcgctgggaaagactcagatatccttgtttgcacaggactggtggaaaatctcccatgcgaccctcggggcccagagccatctgggtctgatgttctgttccattgtacatcgaagagatatatatgcacatatagtatctatattcatacatattatactcttgtgtgtagtgcacgtgctattggtggtttgtcttctttgttaggctgtgtctccctaagcccttgccccacccagagtttcccgtccccttcactgatttctgttgtttctgctgactgtgtgggtggaatgtcccaagaaaagtgcatctgggaattgccagtccagctgggtagtcccaggctcctgtcttggggatgtttcccctgtcagcaagtaacctggtgaagtctattgaaggccagactgccccctagggtcactgcttcactagccgcaccccaccccagattggggttctacctcccaccccacatcctcgttgtggggggacttccaggggctcctctgcagcctcctccactacttcctccaccccatctatgtccttgacttaggggggcattttgtcttttttagatttgattttgttctctctcctttgtctgtttgttgtcaaagatgctgctgggcagacaggcagggaaaggatctgtctgcccatctggcccagggggtccgagaagggaagccttgggcaagaggagaccagttgcaatactgtacttcctggtcagtggccagaggatgcgtgcaatagcagaggccaggtgaccccttcagccttggcctctgcccctcccttggccctccctccctgctcctccctggtgttggtcagtccttttctaaagctgtcccctcgtgtgtgtctggggcatgcccaggctgggccctgtgccctgtctgcatgcctccaactgtcatgctgtgctcgagccccaataaagacatctggagcatcctgctgctcctgctgtgtg

SEQ ID NO: 475 - DNA, 48 bp, Homo sapiens
gggcaaagtgttgaggccgaatttctctgtcctctggctgggtctccg

SEQ ID NO: 476 - DNA, 374 bp, Homo sapiens
caaaactggttgaacagcggatgaagatatggaattcaaagctctaatggacctttttgaagagaagttgtggcttatgtggagtttacatgggcctctgatggaagaaagctaatctgtttagtatttgtgcattttactaaaatggcagcttaaagttgtgtatctgctattgtgatgccaatgccggtgttttaagtggaaaaaaaatgacctctttgatttgtgctgtgtacacaagatttctggaaaagtaaagaaaaaccctttttatggctcacacagcttaagagtagctgtctctcaaacgtgcgctcacagttgagctgcttttgttttattctaaataaattgtttcttttgaggaaaatgtt

SEQ ID NO: 477 - DNA, 1001 bp, Homo sapiens
gcgcttgcctggtctcaggatacccaccatccttttcctgagcacagcctggatttttatttctgccatgaaacccagctcccatgactctcccagtccctacactgactaccctgatctctcttgtctagtacgcacatatgcacacaggcagacatacctcccatcatgacatggtccccaggctggcctgaggatgtcacagcttgaggctgtggtgtgaaaggtggccagcctggttctcttccctgctcaggctgccagagaggtggtaaatggcagaaaggacattccccctcccctccccaggtgacctgctctctttcctgggccctgcccctctccccacatgtatccctcggtctgaattagacattcctgggcacaggctcttgggtgcattgctcagagtcccaggtcctggcctgaccctcaggcccttcacgtgaggtctgtgaggaccaatttgtgggtagttcatcttccctcgattggttaactccttagtttcagaccacagactcaagattggctcttcccagagggcagcagacagtcaccccaaggcaggtgtagggagcccagggaggccaatcagccccctgaagactctggtcccagtcagcctgtggcttgtggcctgtgacctgtgaccttctgccagaattgtcatgcctctgaggccccctcttaccacactttaccagttaaccactgaagcccccaattcccacagcttttccattaaaatgcaaatggtggtggttcaatctaatctgatattgacatattagaaggcaattagggtgtttccttaaacaactcctttccaaggatcagccctgagagcaggttggtgactttgaggagggcagtcctctgtccagattggggtgggagcaagggacagggagcagggcaggggctgaaaggggcactgattcagaccagggaggcaactacacaccaacctgctggctttagaataaaagcaccaactg

SEQ ID NO: 478 - DNA, 740 bp, Homo sapiens
tctgcagtagtcctgtggtgaagagacttgtttcatctccggaaatgcaaaaccatttatagcatgaagccctacatgatcactgcaggatgatcctcctcccatcctttccctttttaggtccctgtcttatacaaccagagaagtgggtgttggccaggcacatcccatctcaggcagcaagacaatctttcactcactgacggcagcagccatgtctctcaaagtggtgaaactaatatctgagcatcttttagacaagagaggcaaagacaaactggatttaatggcccaacatcaaagggtgaacccaggatatgaatttttgcatcttcccattgtcgaattagtctccagcctctaaataatgcccagtcttctccccaaagtcaagcaagagactagttgaagggagttctggggccaggctcactggaccattgtcacaaccctctgtttctctttgactaagtgccctggctacaggaattacacagttctctttctccaaagggcaagatctcatttcaatttctttattagagggccttattgatgtgttctaagtctttccagaaaaaaactatccagtgatttatatcctgatttcaaccagtcacttagctgataatcacagtaagaagacttctggtattatctctctatcagataagattttgttaatgtactattttactcttcaataaataaaagtttattatctcaatcacaacattgct

SEQ ID NO: 479 - DNA, 792 bp, Homo sapiens
tgatgtaattggtatataggaacatcatgttttctgcaggaaagaaagtaacatattaaggagaatgggggtggataagaacaaatataatttataataatcaatgttgtataacttttattctttattattggtaacacgccctaactatcctgtgtgagaatgggaatttcaagtcccatcttgtaaattgtatatgttgtcatgcagggtttgggccaagaaagcatgcagaaaaaaatgccatgtgattgtaattatcctggattcagaataatactgtgatggggagccagatccgcagtggtggagagttctaatgttgactgtttgcaggccaaaagatgattgctttataattttaacaaatcattgtcttttagtaacatccttgtttagtgtcttctcaagctttctttactgaggaattcagcttgtgacacagatacatcccactagcttgtgaggtggaactagtaataaagaccttgaatttggattgaaaagtttcctatctttacattgttgaggaagtccttttttttttttttttttttttaattgctcaagaaatgattctctcacaggcttgggaaatcctgttagcatgcagaataatgtggtaactttgtcaatttcccattttatttttttaaataaatatatgatctaaaagccaactttttctcagttttactcagtggaaagataaactaagttttaatgttatttttttaaatttaagcaaaatttatttctgttctttaataaataagaaaatgtggtccactg

SEQ ID NO: 480 - DNA, 222 bp, Homo sapiens
gattaacttacagagaagcaggcaagatgaccttgctgcctggggcctgctctctcccaggaattctcatgtgggattccccttgccaggctggcctttggatctctcttccaagcctttcctgacttcctcttagatcatagattggacctggttttgttttcctgcagctgttgacttgttgccctgaagtacaataaaaaaaattcattttgctccagt

SEQ ID NO: 481 - DNA, 97 bp, Homo sapiens
acctgacctggtctatattccctagagttccagtctcttttgcttaggacatgttgcccctacctaaagtcctgcaataaaatcagcagtcaaaaca

SEQ ID NO: 482 - DNA, 1686 bp, Homo sapiens
gcggctgtaactaccttcacgtgctcctcttatacacagactctccaggactgaggacagagctgctcttcttcttctacgttactgtggccctcttgtctggcagcctggagcccagggagggacaggggcttatagctgctgtatgagaacataaagactagtgcacagtgctatctccatctactgacttgtggtgtacacgtgcatgtctgggtctgtgggtttctgttgggtgctgagttgggtgatttcattttagtgaaatatttgtgggcccctgctctctagttctaattcccaggagccaattttatatattctaccactagccctggtcataggaggctgttagcctatacatgtcaagggtttggatgggatttgggcttgctagatacagaaaacacttaaggcagattaaaacatgtattggagctctcccaattgtgttgctcagtgtggagtgggaaggtcttgatttggttgactttcccagattgacataaaactcaaaaaccaaaaaattgcccctttcctatgacatcatccatttagtctgtgagtcaacatatatactgaggtcctactatgtgttgagcagagcagtaagcactggggatatggcaggaatcaaaataaacttatctactaagtccttgggcctggcctgaagtcagaggaggactccccagggcagctaggggattgggtctgccctccaatctgaatgaccccctagaaccttacaagtcattctggggttataaagatcataacatttatagccccagactgacttgtaagcagctgcatttaaagtacttactcagacactcaggcctgagagatagacccctttctttccagcactagctgaaataatcaagtatatagtttgttcaggattggcactaaatgtgatttaatcttttaataaaagggtccttttgtacccacttaggcttcttcgtaattaccagaaaggtgataagcctgcatgtgtctggacaccaaagattgagaagctgccagtggctgcaagagagcctactgtaaccctcatggccaccccctgatgagtgttacctggggaaagggctagcaagaggtgaagcctcctggtcatatgatgctgggggtgcctaattccttaaaggccaaggtcttctgaaataataatggtgaaggacagaaaagtctttatgagaaatcacataggatatattaagataatgataaagatacctcagcaagaacatacctaatatatacacttcttttaatctgatgacttaatgatttctgttatcaagaagtatttatgacttgagataagtcaggattaactgttatcacctctcctgtacacctccctcctttttctcctttgtacccacatgtgcagattttttcagaggtgacaatttagcatttaatgtttttttttctgcttcaagttcttaggtccctttggaggatattgatgggggtggaggtggggatagaacatctttcacactgtttggtacagagacgctcaaagcttttcccagggaaaggaactctctaaaatagtaatctgatttgatgaaagataaaattttaatatagcttcagttaaccttcaggatactttaaatgctacattgtatataaaagtaataaagtacaaatgaacacgaa

SEQ ID NO: 483 - DNA, 907 bp, Homo sapiens
atgtatctatcccaattgagacagctagaaacagttgactgactaaatggaaactagtctatttgacaaagtctttctgtgttggtgtctactgaagttatagtttacccttcctaaaaatgaaaagtttgtttcatatagtgagagaacgaaatctctatcggccagtcagatgtttctcatccttcttgctctgcctttgagttgttccgtgatcacttctgaataagcagtttgcctttataaaaacttgctgcctgactaaagattaacaggttatagtttaaatttgtaattaattctaccatcttgcaataaagtgacaattgaatgaaacagggtttttcaagttgtataattctctgaaatactcagcttttgtcatatgggtaaaaattaaagatgtcattgaactactgtcttgtttatgagaccattcagtggtgaactgtttctggctgataggttatgagatatgtaaagctttctagtactcttaaaataactaaatggagtattatatatcaattcatatcattgactttattattttagtagtatgcctatagaaaatattatggactcagagtgtcataaaatcactcttaagaatccatgcagcaggccaggcacagtggctcacacctgtaatgcctgcactttggaaggccgagacaggcggatcacttgaggtcaggagtttgaaaccagccaggccaacacagtgaaaccctgtctctactaaaaatacaaaaggttagccgggcatggtggcaggcgcctgtaatcccagctactcaggaggctgaggcaggagaattgcttgaacgcaggaggcaaaggttgcagtgagctgagatcacgccactgcactccagcctgggcaacagacctcgactccatctag

SEQ ID NO: 484 - DNA, 388 bp, Homo sapiens
ctcagcttttccaatgaggcttgaatccatttcctctcatctcagccctatcttcacacatcactttcacttttttacaaattttggaccaccacctgtgtgaaactgcagtcggagttgtttagatgtgatctggcaatgctatccagcatctttggagaccaatggtcagtcttttcctggccagaggaaagattgatggccctcccacttgaactgacagcctgtgagccccttgggggcatagactgccttccttggacccttccaaagtgtgtggtacagagctcagtgcacagagtattcacccagcatcatgaatcaacttgggaggagtcaaccaaatgaacaatctaccaaaaatttcaaataaagtcaaaccccccac

SEQ ID NO: 485 - DNA, 1048 bp, Homo sapiens
attacaggaatgaagaactgttgcctaattggaaagtgccagcattccagacttcaaaaataaaaaatctgaagaggcttctcctgttttatatattatgtgaagaatttagatcttatattggtttgcacaagttccctggagaaaaaaattgctctgtgtatatctcttggaaaataagacaatagtatttctcctttgcaatagcagttataacagatgtgaaaatatacttgactctaatatgattatacaaaagagcatggatgcatttcaaatgttagatattgctactataatcaaatgatttcatattgatctttttatcatgatcctccctatcaagcactaaaaagttgaaccattatactttatatctgtaatgatactgattatgaaatgtcccctcaaactcattgcagcagataacttttttgagtcattgacttcattttatatttaaaaaattatggaatatcatctgtcattatattctaattaaaattgtgcataatgctttggaaaaatgggtcttttataggaaaaaaactgggataactgatttctatggctttcaaagctaaaatatataatatactaaaccaactctaatattgcttcttgtgttttactgtcagattaaattacagcttttatggatgattaaattttagtacattttcatttggtttgtgtgtttttgttattgtttatagattaaagcgtttattttataatgaccacattgttttaaatgcgacagtagctcctttctgcctagtatctgcagaacactggctttaaactatactaagtaactggtgatttctctaggaacagacctcgcactttctgttctaaatatatttattcctactatacagtaaaatacatcagacaacatagaatagttttgtatattctctcttgatcttaaagattgtatcttattgaatatcccactgtatattatttttatatgtaaaaagataagtttaatactgtatcagggtttaacttttactatttcagatcttccacagcttgt

SEQ ID NO: 486 - DNA, 677 bp, Homo sapiens
ttataggatatacctgagaccatcaggaactgtcaacaaatgatacctttggatatccatcctcctcgacttatagtacagtggtgtatagtggcatttctgataaacttgaaaagacttgagtctttccactgggacacatccatttttcagattgttttgatttaggccaggtatattatcttcatttttaagagtttctttaagaaacttcatcagattgttgaaagataatttttgggacatagagctgaaagtttcagggtgccattttctataagatcttcccaaaagaaacatttaaaaagatgacatataccaccacttacttaaaaacaataaaagcaatagatttgattagtaatattattgctgtggagttctttacaaagggcttaggctgcatttccttctatagaggtgcattcttgtagaaatttgtagcatggtagatcagaaaatcctcttaggttttaggcaggaaggaatatttaaacattgctttagattttcctaaaggtatttgatttgatctgttagcttccagtaaaaatatttgtttttagtaaaaacaaatttaaatatatttacatgtttgttgtttatcttttgaatgtcttttgaggctgtgaaagctgtccacatttttgctgtgtattaaatagctgtgggtcatc

SEQ ID NO: 487 - DNA, 2180 bp, Homo sapiens
tccctaggagggagtctccacgtttgacattccatcagatttcgtccaaaagctcagtcagacttctgagtcagattatgttatttattttgatagtagctgaaaccatctgtataatacatttagtatatttcaccattttgtatttttttaagtagaaactgagtagtttggatttttatggctcacatctttttactgaagccagaaaggcacctcaaagatgtctcaagctcagcagtcaccgtcatgttgtgatgaagaaagcgaatcaccaggtggtgatttgctatctatttgagaactagaatcactcaacactcattttgaattatgcagaagtggttcatgcagatttttattccagatgaacatgttttaaaagtgcctgaaatatgactgccatatgaatgtgattctgcagcaaaaaacacaaaatagatcatttaattacagaaaatgagatcctctgtgaattctgaatgttaaaaaccaacactgcttttaatcctcttttaatgttttaatacaagctttgtgttctgaaacaaggctgcataagtagaatgggaatccttctaaaggtgggtgtgaactcaccacaagctgagctttatagagcccttgagaaaccctcctgagcactaagcagttggggtgctgattttcttgtacttttgaaaaattaagtcactcccagtttcctgcataagttcttgaacagaatgaaatcacatctccattcaaaaaatgtctcaagcatctactgttgtgtaaggaacttctgattctgattgctgttacttgaataggaaatggttactcattctgtataaaagttttgcaagagaatgaattttttattctgtaatcaaaaagcaataacttgaaattcactctgtaatattataggtcagtcagaattatacaagttttaccaaattgttacacttattctccaagctgccagaacctggtatctgtatctgtaaaaccaaattaacttttgcttaaatgggaagtatacatatatctgtatagatacattacccctttacatgtttaacatacacacacttaaacacataaatactagtgtgattatatctttggagtttgcaatatagcataaaggacaagtagaactgcacattaagattacctaccgaagcaactagatgtggctgggacacaatcaaaggaggaattttgtccacaggaaggtgaggaaattccaaatgaagcctagatcttcagtatcataaaaaggcagagctggccaggcacagtggctcatgcctgtaatcttatcactttgggaggctgagatgggaggatctcttgagaccaggtgttcaagaccagcctcatcaacatagtgagaccccatctctattaaaaaaataaataggcagagctaaactaaccccagtgtcacaaaactcaactggtcatataaatgagtgaaacaggcctctcacacaagcgatgtaaaacagctgggagcagtgggagctgtggcaaactaaagtgcccaagccgcatttaaaaagggcatctgttcagctccatctgcttgctgcggtgcaagaatgctaaaccaggattaccagttcttcacattttttgaaatccaaattttcatgagaaacattctcatttttaaatatcaagaagtgattttaaaatgtttaaatggtgctggttaaacaaacacgtctgcagctggatttagcttgcaagctgccaagttgcaacctctttcattctagaaacttctgtcattttcatcatagcaagtctatgcggacaaaagcctccaaactttccaactgtgtaggccagtacagctggcaaggttcatagaatataatggctatccccctctgccaaataagactatccacaacccagctcagacacagtggttatatgattttgtgtccatacaggagaggccttggtgtcttcacatacattctctgagccaacatctatccagcagccctgacctcctgctataatttaagtctatttccttttaatctaataagagttgatagtaaaaaggcaggtgatggaaatcagtgtataaatcacaatggagtatattggcaactccacagcttatagtttgataaaggcaaatacatgaaaaataaaaatgctactaatgcccc

SEQ ID NO: 488 - DNA, 774 bp, Homo sapiens
acacacagatacctcactcatccctccaattcaagcctctcaactcaaaagcacaagatccttgcatgcacaccttcctccaccctccaccctgggctgctaccgcttctatttaaggatgtagagagtaatccatagggaccatggtgtcctggctggttccttagccctgggaaggagttgtcaggggatataagaaactgagcaagctccctgatttcccgctctggagatttgaagggagagtagaagagatagggggtctttagagtgaaatgagttgcactaaagtacgtagttgaggctccttttttctttcctttgcaccagcttcccgatacttcttggtgtgcaagaggaagggtacctgtagagagcttctttttgtttctacctggccaaagttagatgggacaaagatgaatggcatgtcccttctctgaagtccgtttgagcagaactacctggtaccccgaaagaaaatcttaggctaccacattctattattgagagcctgagatgttagccatagtggacaaggttccattcacatgctcatatgtttataaactgtgttttgtagaagaaaaagaatcataacaatacaaacacacattcattctctctttttctctctaccattctcaacctgtattggacagcactgcctcttttgcttacttgctgcctgttcaaactgaggtggaatgcagtggttcccatgcttaacaaatcattaaaacaccctagaacactcctaggatagattaatgt

SEQ ID NO: 489 - DNA, 1487 bp, Homo sapiens
aggctgaatgtaggattcttcagtatgtggaaagacaaggattcaacgtgtggtcatatgataaataagtgatttataaacaagagtgatattttgctagggctttcaaagttaaccggttttctagcctcatggaatactgttgaacctatagcgttgtcttgattcttttgtgttctctgccttgtaattttctgttactgctatatctacgtgtaaatctttttttctttttttttttttttttttggttaattctgccacatttaatgttggtgagagagtgatctatcctaatgacattttactgtttaaaaaagtttcctagccatgaagccctgctactgatttagacaaggtattatggtcattactttgtacccctatccttccaagcacttctggtacttcagtcgtttttactgatccaccaacacctaaagaggctatgctacagtctctagctaaatggaagacacattcatccttctccctctgactgctttgatcatcatttattgcatctcataactaattttctaaagtttggattgggacttttcaggtcctttttggagggcaaaggaagtgccagcttctctggggaacttgtttttaaatccaaagacttgaaccacattccctgcacatgaacatgtttgcttttatcccttctctcattgtctccttcccatcttagtaccattgtagttataaacatctgcattttttagaagcattttacccatttatttttttaaacattcaagaactgctgacgtactgtggatgtagagtataaaacttgaaaaatgcagatgttgaaggaataataggtatcttgtgctttaatactttatggcaggattgtactataagcaaatgaattaaacagctatgtaaatcataaagaaaaactaaaaatgaaccaaagtgaaaggataacttccaggcagtatctttctattgtaacctgttatttaaggaaatactagtgatttcttctaaataggatgtaaaacttctttcaaattactcttcctcagtcctgcctgccaagaactcaagtgtaactgtgataaaataacctttcccaggtatattggcaggtatgtgtgtaatctcagaatacacaggtgacatagatatgatatgacaactggtaatggtggattcatttacattgtttacacttctatgaccaggccttaagggaaggtcagttttttaaaaaaccaagtagtgtcttcctacctatctccagatacatgtcaaaaaaagaaaggtgtttgtgcttccgttttgtttctgctcagtaatatagtcaagcaagtttgttccaggtgacccattgagctgtgtatgcatttttgtttatttcaataaaatatatttgtattatttgtccttcatactatccatccataccacactatcttctgtatcaggtagtctaatagaaatatacctgttttgttctaaaattg

SEQ ID NO: 490 - DNA, 230 bp, Homo sapiens
agacacagcacccagccttctcgcaccagccaagccttaactgcctgcctgaccctgaaccagaacccagctgaactgcccctccaagggacaggaaggctgggggagggagtttacaacccaagccattccaccccctcccctgctggggagaatgacacatcaagctgctaacaattgggggaaggggaaggaagaaaactctgaaaacaaaatcttgttctatgcaa

SEQ ID NO: 491 - DNA, 592 bp, Homo sapiens
ctcttgggggtcacggcctggacaagaaaggcttgactgagccgtgaactgaagaatggtatccagtcatcagccaggaaagatggggattcacttacatgcctcatgtcaaatgcagcatcagtctttccggggcatttcagttaagctgctcagcagatatggatggatctgcaatcacatacctaatgtggagctgggcttttctggagacacgaaggtcaacacacaattcctgcccttaaggaatgtccagttgaattggagagttgatgacagacaatttagataatttaggttaaagtacttgataccagactgcggcttctgggccacatgctatggcatgatgggggtttgggaatgagattcccacagttcttcagataccctgtggccacagggcatagaaacaagaggtcacattcagcacccaccacctccctctttcgcatcagttctgaatccccagcaagctgttaacatgttgcaggaaaacactctccccttatgccagaccagcagtatctcatttggatgggattggattgacttgcggaaggaaagtaaaaataaagccaaataacttccc

SEQ ID NO: 492 - DNA, 619 bp, Homo sapiens
aactcacttcaggatgaaatctgggcagagacttattaattaattttgcatttactacctcagagctcagaagaaactccgaagtcagcatttgctttactctttctttatgattgcatctgaccgcaccaaggtgggccatgcgttgtttggtcttatacctgatgaagaaatggcaacagctgacagaaatgggtacagctcatcaaaaatgtgcagcaccggcagagggaagatacggggcaaatgtgcttcctgatgcttccatggggatgtgccctggtgtgcatctgcttgtcaggaagagtcacattgctgcttaacatgctggattgccctagtcttcagaatggtcctgagaaaacatcactacttcgatgttctactttgctttccaaggagcaaaaataactttggagccttctgggaagtgtgcctgggattcttcagtggtttcaggcagatagttgagactggggctttgatattcaaggtctttggcaagaatcccaggcttgaccaactggtaccaggtcaaagatttttgtattcttgtgaatttttttttttgtccctattgcccagggatgtcattgtaaatatatgtgcatttataaat

SEQ ID NO: 493 - DNA, 3662 bp, Homo sapiens
ggctttcagggcttttcttggtctttccttaaaaagacttggtaaatttgcatgtcttgtaaatcactttcttcttttgttttcttttaaattaaaaatgatgctattaaatacatctatttctatcttctgcacttttcagtcttcttttgacattaaatttgacagcttaatgcaagagaattattacaaatgcccatgagcctcattctggttaccacagtttggtttcctttattaattagtgattttgccatatcctaaactgtatcaattcataataattagtgagcttcttgggccacgtaatttggttcagctttataacttgtaagttctaattgggctttactaatagagaatttacagatcatatattatctcactaattatatgtaattggaaaaaatgaatattattttgtgtatataaacaacccatccttcatgtatgaacagatgtctgtacacatccgcctttatagagagatatgttgtaaacatatacaaactgtataaaatactcaggctttttaagcagttacgacaattcaaatggctgtcaaagttcaaaacgtattgttcctatttgtaattctaaaatttaataatgttccattcaaatcacttttttaggtgattgggatattaataatccttcgtcttcaaatgtgatttatgatgaacagtcaccattacccccatcttcacattttgcttccatatttgaagagtctcacgtgccagtaattgaagaatctttgagagttcagatatgtgaaaaggcagaagaattaaaggacattgtgcctgaaaagaaaagcactttaaatgaaaatcagcctgagataaagcatcagtctcttctccagaaaaatgtgagtaagagggatccacccagcagtcatgggcacagtaacaagaaaaatctattaaaagtagaaaatggtgttacacgaagaggtagatcggttagtcccaaaaagccagccagtcaacattcagaggaacatttggataagattcctagtcctctaaaaaataaccccaaaagaagacccagagatcaatccctcagccccagcaaaggggaaaataaaagttgtcaggtcagcaccagggcaggctctggacaagatcagtgcagaaaaagcagaggtcggtcggccagcccaaaaaagcagcaaaaaattgaaggaagcaaagctccatcaaatgctgaggccaaattattagagggtaagagtcgaagaatagcaggctatacgggcagtaatgctgagcagatcccagatgggaaggaaaaatcagacgtcatcaggaaagatgcaaagcagaatcagttggaaaaaagcagaacaaggtctccagagaaaaaaatcaaaagaatggttgagaaatctcttccatccaaaatgactaataagactacaagtaaagaagtatctgaaaatgaaaaaggaaagaaagtaaccacaggagaaacaagttctagtaacgataaaataggagaaaatgtccagctatcagaaaagaggctgaagcaagaacctgaagagaaggtagtttcaaacaaaacagaagatcacaaagggaaagaactagaggcagctgacaaaaacaaagagactggaaggttcaaaccggaaagcagttctccagttaagaaaacactgataactccagggccctggaaggttccaagtggaaataaagtcacaggcactattggtatggctgagaaacggcagtaacctttagtataaaacaaagaaaaacaagttgtaatcttttcttacagcagcatttttccagaaaaagcctttttttttttttcagatattctgaaacagataagtacatgttaatgtgagcctcaagttacctaggctgcatgaagggcctttaggattgctaagaaccaactgtccccctggccggctgccctccctcgctctcaggaaggagctgcatccacatgctcatctgacccgccctgctcaggctgcccagctcgtcttcatgagtgtctgaacaaatgacatatgttgatattaacaatgtggtcacaactcactttgtatttgtgccaagttatctactgtatcatgtctgtttttatcctttttgttcagctgtttccacagtaatgaaaaagttaggtttggcttggaagttgatgatctcaatagcatgttgcatgtttacagagagaaatatgtgagtccttgcagaagaagagactgttaactcatcgttaaagatggccgttgtctcttctaacagctactgatgatgtcccactttaaaaataaaacccccaaacatcactactttaaggaaaaaaaaaatgtagtccaatattgatgctttcttatggctttttattttaatttggctggataagttgtttcaaataactgttaaagatattacttacaattgaatgtttgaaataagaaagtactttaagcaatagagttcatctcctgctgtgttatccaacctcgatgtatacttacagcatctcaggtcaccctttttatttcagttatttaattatgaaaccataaagaagcatgtggaaatagtgtttattgctctttgaagaaaaaccaccaactatttctggatattttggctgtacctactactaaagtcattagtctttaatacataatacatatttgaaaagtaaacatattatatagattatgtgagggacttaatcatgaaaccagtttcacagtccaagtaccaactcttctggtagcaggtgcacaagcttgggtgtttaaaaacaacctgtgtagggtatgcccagcaaatgaggacaaatgtgtagacagtacttactggatcttatttaacttttagctacattaactaactttcttatttaaaaacaagaaagggagactaaacatctgcttaacttgtacacattttcagaattctttttaaaagtctagttaaagatgtttcttagaagttggagactgttaacaacttccataaaatagatccaggtttttcagttccctgaagcagcattcagtagcatctatataaataaaggcaccttctgagaataaaactattttatggagtgtgtgaacacacttgttctgtcacctgggttcatcttgttgtgaagcacattaggtccaggtccttccctctgggagtctgactgtgaaactctttaacccaacaactcaattagcccctgtagataagacatgcttcccagagtgagatttttgaaatccccttttcatccagaactatatttacccacctattgtaactattcaaatagagcaaaattaggaggcttgataaatactaagaatttagtaccacagaaattatttattattttccctgtagtccacaattagtgataacgaatcctatttttgttaactgtgacataactttgatgtcatatgttgtcctatgtggttcttcctaagtaaactctgtactgattatatactgacttagcaatgtggccttggaatgctgagcaaaatgtggatgtactggttgtaaatgtttatatattgtacagtacctttatatatacacttgaggttctgattagagaaagatctgtaaattgctcattattttttatatagatatttaaaaaaaaca

SEQ ID NO: 494 - DNA, 1879 bp, Homo sapiens
agacaggagagtacagaatgacaacattgagcccacactgcagttttgaagatagtaactgatggctggtgggaaagagtttgtttttggggcctacttttctatctttacaagactcttatgggcccaccgtggagcagcacttcccaaaacttgttcactggggtcctcgtgcctatggaatccttctttttataactaagtttaagaaatactttttttataaaatctttggagtatgcgtgagcaaattaaaagttctttgaagtcctacagtaacttaatctgtttaaccttgtttaacccagtatttctcaaacttttgtgaacatgcaatcatcttatgtgggtacagaaagaggtaaagagtctgaatcaaaaaggaccaggttattgctgttgctgttttgtggtgtcatgagccattctccatgtccccttctccctcttctcagatcaaaatccctagggagttctatttttaaaattatgaactatggcgctgcatgcttcaatcctgaacgtcactgacttgctgtgaccatccaaataattttcctgtctctgcctctgggagggaacaggaagcgatgaagaggtcttggaacagtagtgaaaattctacctctatgtccttcatgaggatgtgcagtatcccagtatcactgggatccatgtggaacagagccagctggggggttgggcagctctctccaaggcagtacctagagcccagctgaacaacaaggctttgggtgtgaagggactccccagcctggagaccctatttggctgaaacagttacaaaatatcaaatgtgttgtcagatattcctccaattgttcacatagctgggatatttgttgctcccctcaccccttggattatgtagggagccagtgcacacagcctgtttgttttagtatccaaggaagagaccaaggagccagctggcgggaaggggtgggggtgtgcagtctgccctgtccttctgctcataacctgacaaaatgccaaactagtaagcaggatagctgataccacggctatgagggagtaggctctgagagggcacagacttgtggagctgggcgtctggatcaaaactgctttgggatggaacctcgagccctagcagtgaagaagattccatttcttgtccaggggatttaaaagagttttctgctttgagagagaaatagagagtttagaaagcaattgctcttgggaaagctatacacagctctgttttgtcaatgacctttgttgtaagtctcccaacgtcctattaggagccacagcaggtgaggcatttggtgcagcaggaaacatggggactgcctaggctcgaatctgtggcaccctgagcaattacttaaattgtggagcctagttcctcatctgtaagatggacttgagattcctacctctcatgattactatggagattgaataattggtaaaattctcctagctcagtgactgccacaggatgggtctttcagattttggttctctttagcttctggttcttgaaagaaattaatctgtatataacataagaaactttgaaagtcaaaaaaacaaaaaattttaattcctcgtagattaattgatttgctatcttttagtttttttttctatgcatgtagatgtattaaatatgtaaatgtttttcaaagttgaggtaatattgtatagaattttatagcctacattttaatttcttgatatcttaagcatttcacttattagatattgttcaaaaatgccatttttaatatttgtataataccctatcatgtgagtataccttaactaagccattcccatattcaacattttgtgtactgtttttctaattacatatattacaatg

SEQ ID NO: 495 - DNA, 5761 bp, Homo sapiens
ataaagccaaatgaagccccttttgtgtcaaacaattttgtgttctatggcttacgtcgtaccgcatatgctgtgtctcttcattcactctgtaagtgtgttcaggatgtacattctaggttttccatcagacctccctaagtctaccctggaaggttagagaaacgtctgggatttagaaagagcctggggtgctttaaccatgtctgtgataggcatatgctttgagaccagattctctttatcccccaggccataagtaagctgatccttacattgtttacttgagtcaagagattgtgaaaagctcattggccaccaaattcaactggttctaggtcctacttgttgctggagtctgcgatttgggacttccccactctccgaacacccccagccccaacctacccttctgcttctctcattactttattctatttgtgttcactcttagaagctaaaattcgagtgcttgtatgatgtccaccagtagtgagaaagtgtcagtatgagggtatgtgagagagagcacatgcaagtgaaaatgtaagtttgagttagtgcatgtattttagtttccacatttcaagaggggtatgaagaacttagaggacgaaaacaaaagaaagcaatggtaagaaataaaggctaggaaaaattcaaatttactgacgccagaatagggtgagttgagtcaccagttattaacttgcaggagtggggaaccctatgatctcttgattctccctcttcctgtcatacttacaagcaaaatgctgttacctgagccagattaggatctatcttgctaagaggcagaaggaggggtggctgatttctgacagcattcaatgccagtgtgggagattatgtgctatacccattcgaaaacagtacaagtcagaacctgagctcttaacttggcctttggtgccctgagctggagtgacctcaggattcctcacttcttccttctttcttccagaaccagcagtcatcggcggctccaacctcacaggagagaagcagcaacccagccccccgcaggcagcaggcgtttgtggcccctctctcccaagccccctacaccttccagcatggcagcccgctacactcgacagggcacccacaccttgccccggcccctgctcacctgccaagccaggctcatctgtatacgtatgctgccccgacttctgctgctgcactgggctcaaccagctccattgctcatcttttctccccacagggttcctcaaggcatgctgcagcctataccactcaccctagcactttggtgcaccaggtccctgtcagtgttgggcccagcctcctcacttctgccagcgtggcccctgctcagtaccaacaccagtttgccacccaatcctacattgggtcttcccgaggctcaacaatttacactggatacccgctgagtcctaccaagatcagccagtattcctacttatagttggtgagcatgagggaggaggaatcatggctaccttctcctggccctgcgttcttaatattgggctatggagagatcctcctttaccctcttgaaatttcttagccagcaacttgttctgcaggggcccactgaagcagaaggtttttctctgggggaacctgtctcagtgttgactgcattgttgtagtcttcccaaagtttgccctatttttaaattcattatttttgtgacagtaattttggtacttggaagagttcagatgcccatcttctgcagttaccaaggaagagagattgttctgaagttaccctctgaaaaatattttgtctctctgacttgatttctataaatgcttttaaaaacaagtgaagcccctctttatttcattttgtgttattgtgattgctggtcaggaaaaatgctgatagaaggagttgaaatctgatgacaaaaaaagaaaaattactttttgtttgtttataaactcagacttgcctattttattttaaaagcggcttacacaatctcccttttgtttattggacatttaaacttacagagtttcagttttgttttaatgtcatattatacttaatgggcaattgttatttttgcaaaactggttacgtattactctgtgttactattgagattctctcaattgctcctgtgtttgttataaagtagtgtttaaaaggcagctcaccatttgctggtaacttaatgtgagagaatccatatctgcgtgaaaacaccaagtattctttttaaatgaagcaccatgaattcttttttaaattattttttaaaagtctttctctctctgattcagcttaaatttttttatcgaaaaagccattaaggtggttattattacatggtggtggtggttttattatatgcaaaatctctgtctattatgagatactggcattgatgagctttgcctaaagattagtatgaattttcagtaatacacctctgttttgctcatctctcccttctgttttatgtgatttgtttggggagaaagctaaaaaaacctgaaaccagataagaacatttcttgtgtatagcttttatacttcaaagtagcttcctttgtatgccagcagcaaattgaatgctctcttattaagacttatataataagtgcatgtaggaattgcaaaaaatattttaaaaatttattactgaatttaaaaatattttagaagttttgtaatggtggtgttttaatattttacataattaaatatgtacatattgattagaaaaatataacaagcaatttttcctgctaacccaaaatgttatttgtaatcaaatgtgtagtgattacacttgaattgtgtacttagtgtgtatgtgatcctccagtgttatcccggagatggattgatgtctccattgtatttaaaccaaaatgaactgatacttgttggaatgtatgtgaactaattgcaattatattagagcatattactgtagtgctgaatgagcaggggcattgcctgcaaggagaggagacccttggaattgttttgcacaggtgtgtctggtgaggagtttttcagtgtgtgtctcttccttccctttcttcctccttcccttattgtagtgccttatatgataatgtagtggttaatagagtttacagtgagcttgccttaggatggaccagcaagcccccgtggaccctaagttgttcaccgggatttatcagaacaggattagtagctgtattgtgtaatgcattgttctcagtttccctgccaacattgaaaaataaaaacagcagcttttctcctttaccaccacctctacccctttccattttggattctcggctgagttctcacagaagcattttccccatgtggctctctcactgtgcgttgctaccttgcttctgtgagaattcaggaagcaggtgagaggagtcaagccaatattaaatatgcattcttttaaagtatgtgcaatcacttttagaatgaatttttttttccttttcccatgtggcagtccttcctgcacatagttgacattcctagtaaaatatttgcttgttgaaaaaaacatgttaacagatgtgtttataccaaagagcctgttgtattgcttaccatgtccccatactatgaggagaagttttgtggtgccgctggtgacaaggaactcacagaaaggtttcttagctggtgaagaatatagagaaggaaccaaagcctgttgagtcattgaggcttttgaggtttcttttttaacagcttgtatagtcttggggcccttcaagctgtgaaattgtccttgtactctcagctcctgcatggatctgggtcaagtagaaggtactggggatggggacattcctgcccataaaggatttggggaaagaagattaatcctaaaatacaggtgtgttccatctgaattgaaaatgatatatttgagatataattttaggactggttctgtgtagatagagatggtgtcaaggaggtgcaggatggagatgggagatttcatggagcctggtcagccagctctgtaccaggttgaacaccgaggagctgtcaaagtatttggagtttcttcattgtaaggagtaagggcttccaagatggggcaggtagtccgtacagcctaccaggaacatgttgtgttttctttattttttaaaatcattatattgagttgtgttttcagcactatattggtcaagatagccaagcagtttgtataatttctgtcactagtgtcatacagttttctggtcaacatgtgtgatctttgtgtctcctttttgccaagcacattctgattttcttgttggaacacaggtctagtttctaaaggacaaattttttgttccttgtcttttttctgtaagggacaagatttgttgtttttgtaagaaatgagatgcaggaaagaaaaccaaatcccattcctgcaccccagtccaataagcagataccacttaagataggagtctaaactccacagaaaaggataataccaagagcttgtattgttaccttagtcacttgcctagcagtgtgtggctttaaaaactagagatttttcagtcttagtctgcaaactggcatttccgattttccagcataaaaatccacctgtgtctgctgaatgtgtatgtatgtgctcactgtggctttagattctgtccctggggttagccctgttggccctgacaggaagggaggaagcctggtgaatttagtgagcagctggcctgggtcacagtgacctgacctcaaaccagcttaaggctttaagtcctctctcagaacttggcatttccaacttcttcctttccgggtgagagaagaagcggagaagggttcagtgtagccactctgggctcatagggacacttggtcactccagagtttttaatagctcccaggaggtgatattattttcagtgctcagctgaaataccaaccccaggaataagaactccatttcaaacagttctggccattctgagcctgcttttgtgattgctcatccattgtcctccactagaggggctaagcttgactgcccttagccaggcaagcacagtaatgtgtgttttgttcagcattattatgcaaaaattcactagttgagatggtttgttttaggataggaaatgaaattgcctctcagtgacaggagtggcccgagcctgcttcctattttgattttttttttttttaactgatagatggtgcagcatgtctacatggttgtttgttgctaaactttatataatgtgtggtttcaattcagcttgaaaaataatctcactacatgtagcagtacattatatgtacattatatgtaatgttagtatttctgctttgaatccttgatattgcaatggaattcctactttattaaatgtatttgatatgctagttattgtgtgcgatttaaactttttttgctttctccctttttttggttgtgcgctttcttttacaacaagcctctagaaacagatagtttctgagaattactgagctatgtttgtaatgcagatgtacttagggagtatgtaaaataatcattttaacaaaagaaatagatatttaaaatttaatactaactatgggaaaagggtccattgtgtaaaacatagtttatctttggattcaatgtttgtctttggttttacaaagtagcttgtattttcagtattttctacataatatggtaaaatgtagagcaattgcaatgcatcaataaaatgggtaaattttctg

SEQ ID NO: 496 - DNA, 484 bp, Homo sapiens
ggagctagccttgttttttgcatctttctcactcccatacatttatattatatccccactaaatttcttgttcctcattcttcaaatgtgggccagttgtggctcaaatcctctatatttttagccaatggcaatcaaattctttcagctcctttgtttcatacggaactccagatcctgagtaatccttttagagcccgaagagtcaaaaccctcaatgttccctcctgctctcctgccccatgtcaacaaatttcaggctaaggatgccccagacccagggctctaaccttgtatgcgggcaggcccagggagcaggcagcagtgttcttcccctcagagtgacttggggagggagaaataggaggagacgtccagctctgtcctctcttcctcactcctcccttcagtgtcctgaggaacaggactttctccacattgttttgtattgcaacattttgcattaaaaggaaaatccactgct

SEQ ID NO: 497 - DNA, 348 bp, Homo sapiens
tttcagagaatcagtgtagttaaggagcctaataacgtgaaacttatagttaatattttgttcttatttgccagagccaaattttatctggaagttgagacttaaaaaatacttgcatgaatgatttgtgtttctttatatttttagcctaaatgttaactacatattgtctggaaacctgtcattgtattcagataattagatgattatatattgttgttactttttcttgtattcatgaaaactgtttttactaagttttcaaatttgtaaagttagcctttgaatgctaagaatgcattattgagggtcattctttattctttactattaaaatattttggatgc

SEQ ID NO: 498 - DNA, 93 bp, Homo sapiens
tagtgatataatttgcaatttggttaaatgtgcttgcctgaaataaagctaataaaaatattatgtttcacattatcttctgttcattttgag

SEQ ID NO: 499 - DNA, 6845 bp, Homo sapiens
aagttctatatttgtggctttattaaaaaaaaaagaaaaatatatagagagatatatatctatgccagaggggtgtcttttttaaaaattcttcttcattgctgactgaaactggcagatgattgaccagtatcctttgaccatctgcactttatttggaaggaagcaggggctgtccaccctgaaaaagagtgactgatgacatctgacttttgtcgatgggacttctcaagaagccattccttggagcttctgttacagctgtaaaccaaagtggagctggtgcttcttgggagcctcgccttacaactaattcctgcctttcgtccagtaccaagtcccccgttgcttctggtcagcccacttgtagacttccaggggacacatctttattctgtttcaggaaaccagtcacgacacgtccacatatgtatttgtgtatgttaatgtccagtatcacatcacccatgaaagtcgtgggcagttcaggagatacctgccttcatctttgttctttgttgccttaggttcttcagagaaagatcacaacaaaaaatgtacactgtcgtttacagctattaagtgatttgattttgtttttttcccaaagagaaaacctacctgccctgtttctgatcccacccctctgctggcttgaagcaggtaaccctttcccagccctgcagctgcccacctggcctccatgccatcctgcccccacctggctggcagccctggctctccatgtgtgccctccggctctgtgtgaagcctcaagtcagtcccagcattgtttccatagggaagtgtggggtgcccagcaggtaaagcacagggagagagggcagtgggaatgccacctttaggctgcagcaggagccccacactgcccagttttcctccccactgttctacaccaaccaggggagactaacactgtgactctgggattggcaggtgcaacttggagccacttaatttcctggggacgtaagttcttcccaagcttagagcaagctgccctgccaaaggagaccaaaccatgccaaccacgctggcaactgctgctgtccagtccctgtgttttctgaccaccgtcactgtgcaactcatcgcctctgccacttaggaccaggaaagaggctggttttgctcccactcttagttgctgataaagtggggagaaggaaaatggacactctacagagtttggggaagggagagtagggagcccatcttgtccagaaagattcatctgtggtctgtctgttaaacacagctgatttcagtgggctttcccctggccctgggggagcagacactgactgggttgtgggcagaggagccatcctggcggagccctgctgcaggggagctccttcaggagccccatccggacctcttgcactgggctgcctttgcctccatttgccttcctgtatctgcaacaaaccttttaaaagtgttcactcttgctttttccagtatttcggtaatcagccatcttgctgtagtacaggatgacattgtcgaatgctctttgtatgtgtgcacacccccttactcccttactgcttcatacactccacaagtggtacagtattttgtgtcattgtaaaaatcaaaattggctttggatctttgtaatacacctgtacctgaaaaagtaaacaacattcttcaattactagccttcagcttgaaaagacatgctggagaagaaggaagggggaacccataggtgtggcgtggagccaagatgtactattcaactatgtgtttctgtttataaaaaacacataccatggaaccatggtgcttttgttcttagtttttgccgttagatcccttcaaactggaagttccttacaatatctttctcaggaaatattttgggaaatggggtaagagatggcaagtgtgagacgggctgtgtcagaggttgctacgtcatggatacagtgcagttccaagtgccataagtgtatgtacatatagttaataatgacactgttcatcaccattctaaaatactgttcttccaaccctatcttcaatgaccagtccagaaggggttaagctggattcatttgctctggcatgtgcattcccagcagggtgaagaaaggtttaaattaaagaatttattttctctctcccccttcctctttctcccagtctttgcataggagaatgttagacattcagaaattactgtttctgttttaaattgagtattgatttttttatattgactttgtattgagttctttttgaaagaataacaaaataaaatgcaggatctttgtaaagcctttgcactttcaacctctttatagcttgagttacttttgcagtgggaacaatgtaaatgacatttaaaagatttaaggtttcagaaagctgcatcccacaattgaacacaatgcatttttatttcaattcttggaactggtaggctattctttttaaaagggggtaaacttcgccctaaggctggtagaatgtatgttcacattatagtagacaggatttcatttgccttatatgtttatagattttttataattttcatcctacgttattaaaattagagcattgagtgttaaagaacttaatgaggagtctatatctgagattgctctcttccctggtgatgttttaactggtagataatttgttcttaaatatgtacttttgaagataggacagtttttatagtccatgaactgaatgttaaaaagttctgtatgcattctcagagaggattttaaagctatatagttcatccatcctttgcattatcaaaatgttaagtcaaatctgtaatactttggctaaaattcataaagtaagccctagagaaaatacttgaccaccaaatttttgcccaactatcatcacctcccttcccccgcctctgttcttgccttttgacatctacatggaagacaagttctttacagcaaatggtaagaggcaggtgacctggtgtgtttgctgtgttgtagttcattgcctggggcttgggactccttttttaatggagagactagctgtgcaggtgtgtgttggatagggataaagtgctcacccctgccctctctacagtagttggtggtagatttctctctcattttgcctcataatcactttcgagtgcatgtatttacctaagggctgtagctctgtgggatgctaccagcatattggactgacagaaattgattaccttgccactccaacctacgtactgagtgagtgctccagccactcagtgaaaccaacaaaagtgagtccttggtttaccttccaatctgggtcctgctgtgtaagtatccctaagtggggatgcatatttgtttgtgcgtttttatttccatatatgtgagcatttctctgagtgtattaccagacggatagcacatttatatgtcagacatcttaacatctgtgttatctgtagcaggtgtgtagctcagcagatacgtgtcattgtgtatatagctgagtgtgtgagggtgtctgtgtttctgcagtcccctgtgtttgagagatgacttaataaccctgtgttttgagaggtcgctctaaaccagtgacttttccctcccctgctttattcctttccctcactgacactggcttctcccgctagagtaaatggctttagcacagcactgtcttctggggagcctgctgtcctgcaggcaagtccattaaactctttcttgctttaggactctgaaaacagcaagaaacaaacaaacaaaggtcaagctctaagaaaattactgctcaaacttcactaccctggaagccttactagatatttcttaaggtaacttaaaaattgggctttatttttaaaaagtgataggttacttacagtagcacagaaatgttagcatatttatttaaatagtcctgcagcagagaccctgcgattgtaaagtgatttaagtatttctgggtagtgtttgtgatttacggatttgttactgaaaaacaaaaaaatcactactgtgaatttactactatgtaaccttgtggtcgtatttcattataaataaaataagaattgctcttctgcccaccgttcttgattggtattcagtgcagtagcgaaatgagatagtttagacactgttgaaataactgcattgagctttaaccaagtgtatgctcagaaaattcagttttggatcacattttgacaaaacatgttttggtcaaagaaaggaaaggctactaacacatttatcaggtaatgtatgtcacagtccgtgttccacccagccttgttatccccacattctttcaagataggagtcatcttggtttttcgggtgaaaaacggaaggtcagagaggaaggggcttgtccaaggtctcatgtctggttaacagaatttcaaactagatgtttgattctaacccctcagtccactgtaccttgaagtatggtctaaatgattcggcacttctggatgttgaggaaggacctagagacacatccttgaactagaacctggggtgagagttcattgggaggcaggatctcttctttcactttggatttacaccttgtcccttggaaagcttctccactatgctagcaaatatcttaggatatttgatggaaagaacttgagaatcccttctggaaaacccagcctttcagtgttaacacctgctgcaagacagggatgctgttgttctggcagcccccctttgcttttgcctggccccaccttctgctcccactctgctggcttgggcaagatgcgtgccttgggccttgggtgcagggaggcaggcaggggcttgacctggcctctctctggtgccatggcaacattatgccccaaacttcttccctggttggagtgagaggggctgtccacagccccatcctgtggggatctcaagccggagtccctggcctggcctccttgacgtaggtgttctcagcaagcagtttgcatcccaccgtctttctcacacttgcccccaagacttttgacagagcagacgtaaaacaggactcagaaaaccatttttctctgttcccatatgtagtaagttttgattcagttgtgcataaaccatagttttctgccctgctgtttgctttcaatggaagacagtaaagggaagatggtgctcacatctctccatgtgacatctcattaggaattaagatgcgatggattagaaatgtaaaacttcagaataaaattaaatttcagggctctataagtcccgttttcccaggtcctgttccgtttctacgtagataacccaatttgttttgtctatgaaataagcctctttagtgggttgttttagtctctccaacaaaagagcagattcctaaagccaggtgcagcactgtgaaaagtttctttcaatatggcaccaagactctaccatttatgtctctctcagcttacaaacatcagcgttttgtccttgtcatagtggaagaaagacacttactttaagctttggggacaaaggtgacaaaccccaggcttttatcttaaaagtgtctttggcacttcttttggcactgaaatggtatttgggaagcattatttgaatgtacagttgtttggttttgtatgtgcttatctttatctgagctttcacttgtagacatggccttttgttgtgaagttgctcatcatttaggagtgtttaattctaaaaagccttcagcctaagaaagcttcatctgtggggaccagagacttgttgctcagggagttagtgatgggacttgggcatctgatctgcaggtgacaagtttagttcaactgaagttgtagggaatttagacagttgcacatcattgccgttctaggggccttgtagaaagatgaaacagttgtttttcatttaccagcacctctcagttatagaggtaatggaacattcgcttacttttcatcatcattctttaaaaagggaacatacaaaaatctaaactatggcaataatttatttttataatagtttacggtaggctttaattaaatggcaaactcctctgggacccctaagttatggcgtgattagccaaatttgatttccaacagtcatttatggccataactattgcatagagtgcaggatgccagcaaagatgagggtgggggcagatactggctcagtgatttaactcacattatagatgaccccttcctcaacagaaatgctactgagagaaccagagaggcctgggccaggcaggtcttatttgagaggagattatttgataattgctttggttagaaggactttacatttcctgatttcaagtccagcaccaatttagaaagttcagagatgaaaccacctgtctttacctgacagagtcataacggtttgtgtaaaaatgtggtcagggaccttttttgttctttctgattagttaatactgtacattgtaaccaggaggggcagttttgccaaccagcctctgctcatggtcaccatatgtgtatgacaaggcctgagtgagttcctgcataaactgggtagtgggctcttttgacacatttgcaagcatgtaaatgaatgaatgacactaccagcaaccatctgtacaggtccatttacttacattcataaggtttatgctatgaaacttcttctcattgtgatgtcagtaacagagttagtgtctctgatggaatagtgtacctgtcacccaagttattttgttcctttttgggtcctccagtataatccccccctcatcccaattaactgtaaaatgttttacacatcacattttttatactgtaaacttggaaaataaactgaaatatcaaattg

SEQ ID NO: 500 - DNA, 2296 bp, Homo sapiens
agagccccagattccccctaagaagcaaaggatcgtcttttatgcctctggctaaggcaggttcttccatgactcctaagagagttgtaaaaatagaggcttggcttgaatgtacatagatggtacctggcatggactgatgtttttaggcacagaagttggagaagagatttcatgaaagacaacatcactgcattgagagaatagttgttaatttgtttagaatttaagttctactcagaatcataacatctggcagaacagcccaaacccacattccaaagtggtaggctcatttgtttctagagatttcatcatgtcgcttttccttcatcatgatctaaataaaggcagatatgtaaaatttctcaccattttggtggggtaagataagctattattaagatttaatccttataccatgttggacatttgcccctatcagttgctcctcaggaatcttctggtacaggttaacatcagcattttcattttgtgtccagggaaaagcacccagaggtcatctgtgtgtcccgagaccctccagctttttcttagctgatgaaatatgagtcctcagcttggttcccagcctgctgattgacttgggctgctggtgccttgagtcccacagatgattcattaggaaaagccagatataccaaagcggtttactcagagtcaggggtgtagctctggctgcctgtcagctcccttggatactatattgtatgatttcttcctttcccactaatatgcacatccagaaaaatttccatctgagattctagtacttcaaaatcatgcatagtaaatgagaaagctttaagtagagggcagttaaacagtgacatgttgagcacctggaggaaaaaaaaggtgcagtttttaataagagagaaaatgaaattatctttgataaatttttgtttgttttgctttcagcattgtgccatgagggatttggacaatatttaagaacttcttgtcctagatcagccccaatctgtttaatcaaaatggaaggttcagtaatttcatgggaaaccttggtttttcattaagtgctaccaactttcaagtgaatcttgtatttgatttcctaaaatcatgtcttgaaaacatgttttctcatgaaacttgaatactatctcaaataggaatataaacctggagtcaacaagcttaggcagcattgatttaggtcactttcccagtgaggaaaatttctgtgttttcagaatttccatttctactaacctcttggagaaaaagaaattgaattagaggtaaatagaagacgtcactgtggctgcttctggaagtgctggaagcatcaccccaattggctccaaatactgtcatgttttcttgcacactgacttctggtttccactgtatcagtatgtacctttgtaattgttatttttatgtcttttatgcccttgattattagttgggctcttcataaacagaggccatctctactactgtttatttttccctgctgtgcccagaacattggcgtagacacagtaagaacctagtaaatattactgtttctagccatcagggagattgtggaactcctcccagtataatttttacaaactccaagcaaatctgacccaaactcccaaattgtcaagtcctgcttaactttctctggaaaatagaccccttctcaacatcagaataggaagagaggaagaacttacaaagacacttaaaagttattcttaaatggtggttgggcatttaaaacagtgaactaacatatatataatttttgattagttggagctttctttgtattataagagtaatatatctcattacagaaaatttggaaactataaatttagaaacgtatcacccatacgtccaacatcgaaagaaaaccagtgttatgactttgttccatttgaagactaattgggagtccatctctctattggcactgggttcgattgcctctggctaatagagttcaattagttctatccctgggtttcctttcttagctatggggtggaagataggagggggagatctacaatttgaatatgtgttacttaataaggctaggctggccatcagttgcttatttcagatgtgtcactaaattttccttctagatggtccttgagcaaaacttaataattactgttttttatttccactgcctttataaaatcaaaattttctccttttgataaaaactgttgaatactattgatgtagagaatgtgtatatgtgtatatttgcattgattaaattattggaaaacttttc

SEQ ID NO: 501 - DNA, 1875 bp, Homo sapiens
tggttgccccggcctgggaggctcttggacattttattctggcttaacattgttctttggatggttcctcagtcaggtgccaggatcctgcctaggagaaaggccacgaatggcagcggaaattacatcaaaccagaaacacttcagcagggggaaaactgtgccccaggatgtctggcccaggcctccctggagcccagcaagcatttctgccctagctaattctcctggagacagctctcatcaggcttccccaggcacagatttggaactggtgacagttctgaacttagtttcccttgttcaggctgtgatcgtctcacagtgaagatggagacagaacccctggaagtctggacatgagcctgctggccaatactgtgcccagcccactgatcatgggcacattctcctgccatttgtaaaatgggaatgttaacgtgcctacctctgagcagggctgtgtgcctatgaaactgtgctggcgccttttcaaggggaaggcattggatcaacacaaagtgttcctggttggttgagtagctggtgtttgcatcctggatcggtacccacagcactgacgcaaaattgcacctgatgagttagtgagcctgtgcttccttgctgccctccagcttccttagcatgtgggtcagtggctcctgatgttctgtctgcttcgctggtattctctaagcagggaggggaatggttttgatgataagtgtaagtcaaagatgaaagtacaactcttggcctgatcccaaccatagccctctctttgcttcccatgccatgggccatggatggaacttccttatatatttatgtaaataacctagtactatgatctgcatggagtgaccttaggtgtctgtcactgctcagtgtgttcctttgctcacttcattcactcactcactcattgacaaataatgctcattaggcaccgggaacacagcaaagagcaaagtggatgaggacctccccctggggatgccacctaatggtggagacaagaaatgaacgacagataaacacgcacagttattacagatggaagcaagtgcttcaaaggaaataaacagaatgttgaagtagagtccacagaaaggtccccgaaggatgaaaatgcaaatagctgaaggggaaggaaaagtgaccaaaggcaggcatggtggggctggcatgagtcagagcacctggccttgtaaagccaggaaggaatcagtattttattctaagatcaaaggtgtgacatttggcctctccagaagcagaagagtatcacgatctgactgcattttaaacaattgttctggtaactgcatgaagaaggtctggggactcacacaggagctgggcactgagtgctcttgagccacccatttggaatttcacagaggcccacaaggcaacatattctgtgtggcacaaccgatcaggaattctaggagttctcggtgagatcaatggtttttttctggcgtttatgtaatgcttctcaactcaaggggctcctttattacttttgaatgtttttgcccaaatgtctataccaaagataaatttctaaagcatgaactactgattttgttttcatgaaaattcacatttgaaaatgaaaatgattacttttcaaaagtactgtaaacggcaggaaagatccaaaattgacaccctaacatcacaattaaaagaactagaaaagcaagagcaaacacattcaaaagctagcagaaggcaagaaataactaaaatcagagcagaactgaaggaaatagagacacaaaaaacccttcaaaaaattaatagatccaggagctggttttttgaaaggatcaacaaaattgatagactgctagcaagactaat

SEQ ID NO: 502 - DNA, 357 bp, Homo sapiens
gctgggtggagaaggaaacctactattagccccccgtcctgcacgccgtggagcatcaggccacacactctgcatccgacacccaccccctctttgtgtacttcagtcttggagtttggaactctaccctggtaggaaagcaccgcagcatgtggggaagcaagacgtcctggaatgaagcatgtagctctatggggggaggggggagggctgcctgaaaaccatccatctgtggaaatgacagcggggaaggtttttatgtgcctttttgtttttgtaaaaaaggaacacccggaaagactgaaagaatacattttatatctggatttttacaaataaagatggctattataatgg

SEQ ID NO: 503 - DNA, 446 bp, Homo sapiens
aaaagatagaaactgtctttttcaataaaaagcactgtggatttctgccctcctgatgtgcatatccgtacttccatgaggtgttttctgtgtgcagaacattgtcacctcctgaggctgtgggccacagccacctctgcatcttcgaactcagccatgtggtcaacatctggagtttttggtctcctcagagagctccatcacaccagtaaggagaagcaatataagtgtgattgcaagaatggtagaggaccgagcacagaaatcttagagatttcttgtcccctctcaggtcatgtgtagatgcgataaatcaagtgattggtgtgcctgggtctcactacaagcagcctatctgcttaagagactctggagtttcttatgtgccctggtggacacttgcccaccatcctgtgagtaaaagtgaaataaaagctttgactaga

SEQ ID NO: 504 - DNA, 3383 bp, Homo sapiens
gctggcccgggaggggagtgacagagggacgttctaggagcaattggggcaagaagaggacagtgatattttaaaacaaagtgtgttacactaaaaaccagtcctctctaatctcaggtgggacttggcgctctctcttttctgcatgtcaagttctgagcgcggacatgtttaccagcacacggctcttcttcccacggcactttctgatgtaacaatcgagtgtgtgttttcccaactgcagctttttaatggttaaccttcatctaattttttttctcccactggtttatagatcctctgacttgtgtgtgtttatagcttttgtttcgcggggttgtggtgaggaaggggtgatggcatgcggagttctttatcttcagtgagaatgtgcctgcccgcctgagagccagcttccgcgttggaggcacgtgttcagagagctgctgagcgccaccctctacccggctgacagacaacacagacctgtgccgaaggctaatttgtggcttttacgaccctaccccaccccctgttttcaggggtttagactacatttgaaatccaaacttggagtatataacttcttattgagcccaactgctttttttttttttttttttgcttctctgccccttttccatttcttttgtatttgttttctgtgagagcactgaaatggcagccctggaatctacaatttggctctccactgagcaccttatcttgccaccttagccttaagaatgaatatgaagaaaaatacacagccacctctgtccagggcagtaagaagggctgcaaggaaggggaggatggggacaaggaaaggatcagatacctgctccagtagttgtgaggccactgtgtctcaggggactccaggaggagcagaagagggatcccacgaagttattcttacgcagctggggccaggagggtcagagtggtgccaggtgcaagttaggctaaagaagccaccactattcctctctcttgcccattgtggggggcaaaggcattggtcaccaagagtcttgcagggggacccacagatatgccatgtccttcacacgtgcttgggctccttaacctgaaggcaaattgctacttgcaagactgactgacttcaaggaatcagaaattacctagaagcaccatgttttttctatgaccttttcagtccttcaggtcattttaaggtccactgcagggggttagtgagaaagggtatactttgtggtatgttttgctttcctaatagggacatgaaggaaacccagcaatttgctgttatgtgaatggcctgtagagcagagtcaagagcggtgtgctttgcccgactgctcccatcaggaataggagagtagacagagatcttccacatcccaggcttctgctgctgctttaaaagctctgtccttggagcctcccgctccctgaagtgtctcgccccctgcacagcactggcctttcggaagcatcccagtagggttttctgaggctcgctggtgactcatgccctaattgcaatcctctgcttttatcttgactttgaaggatctaacactgctctctcttccaaaggggaaaaaaagattcatttgttttgagcaataaactaatacaaaatgatggccattcatgtgcagctctttgtcaccatgggccggatgagttgtgctcctcctggctcaccatttccccctgctcccccacagccggttctgcacttatcaccgagtcgcccctggaagcagattcccattgagttttccccaccaaggggaccatgcacatggtagaaacattagattctgcattgacagtagcctttccttggcccgggcctgtggtgggaagacgggcaacaagtataccccaccagggcctgagtgactagaggaagaggacgaggccttgttggcactagatttgggtattttctgcatgtcataacatatcctaactgctatttcagaagaggcagcttgtaggtgattgtacaagtgagaattaaagagagaacagatatttaaacaggtgctgtattagtaacagccagtgccctttcagcccttgcatctattaaaaggagattcaggattttattggcacaggcccttcttagtaggaagaaagggtgcttagctttggacctgaccgggtgtgtgtaaaaccatggactgagtcacagcagacactcgatggtggtaaatgtgatgggtgcttacacactgtaccttttcctttcatactgatgctgcagttcagggctggagttgttaaggcattgacctccacccacctgccccatgtccactgggctgcccaagctgcatgtcacctgagggctggcaggaaggggcgagaaatcccagggcattgtaccaaggacctagttccttctagggatataaatttccaggaatgtgtatttttaatgtggtgagatgcactcttttgttgtaccaaatagggctccccaccccacccctgcgacaagtgctcttctagaacaggttcctaccagcagcactggtgtgaatgaaagagagacccagccgcgtctcacacaggtggaattgcacttcttaacaaaaaggaactttataaaagtttgggattttttttcctaatcataaaaatagccccagaaagagcctaagctatgttcagatagaagcctcgaaattcctgtaaattgtttactttatgatgtttacatacacgtttcactttgaaaaaaaatgcaaatcgactttttaacaactgttgagatgtttcatgggacagtagaactctgactcaccaactgggctaaattttaatttaaaaatgtatttatttgagtgtctttccccccctcaccctcaccatctgaggggctccctgagatcttggtagaggaggcccctcctgcccagaccttcgtttgtttccccggtggcccttgcttcttgctttgcagactgcctgcagccatgattttgtcactgacatctgtgagccaaagactgagcctttttggcaggaataataagcaatactacacaacttgctactttcagaaaacttttttttagcttcaccgatgacaacagaggaagaagggaactgggatttgggtaagttctcctccactgtttgaccaaattctcagtgataaatatgtgtgcagatccctagaagagaaaacgctgactttctttttaagtgtggcacataaggatctgcagaattttccgtagacaaagaaaggatcttgtgtatttttgtccatatccaatgttatatgaactaattgtattgttttatactgtgaccacaaatattatgcaatgcaccatttgttttttatttcattaaaggaagtttaattt

SEQ ID NO: 505 - DNA, 219 bp, Homo sapiens
ccccgtgtggaatgtggtgacctagtcacctggaaccagctcctgacagaccccggcaacttctagatgaacccaagtgaactttcctcattaccatcctgaagtcactaccccagggggagctatagcttcatgaccgtaacatgtgacctgtgtgctggcaggacgactcactgcggctgcgccactgggacccctcccctacatgcaccaatgcac

SEQ ID NO: 506 - DNA, 1343 bp, Homo sapiens
cctcctgtggataagggctcagaatagcaccattgctggtttgtattaggatctgggaataacaacctaaccatgagccttgaactctgttctttgcatttcaatttcaccgtcaagcctttcaccttcctcaaaatgaggcataatcttatccccagaattgaggaggggttgtgttaaccaattagttaaccaattatgttaataatttatttaatgagtggtatggaaaccaattgatttttttagataaaagaatatgttttagagttggatgattttggaaaacaactctggcagaattgtatataagcttcagtaaagttcaaaaagcgggccaggtgtggtggctcatgcctgtaatcccgacactttgggaggccaaggcaggaggatggcttgaagccagtagttcaagaccagcctgggcaacatagtaagaccccatctctatgaagaataaaaaaatgagctaggcgtggtagtgcacacctgtagtcctagctacttgggaggctgaggcaggaggatcccttgagtccaggaggttgaggctgcagtgagctgtgattgtgccactgttttccagcctgggcaatacagtgagaccctgtctcaaaaaaaggaaaaaaaagctcaaaaagttctgtgttgcctttctcttcttagctgatgatgggagaaccagttactaccttctctaacacaggctccatcctatctcttcatctcttcttgccagtgatgttgcacctgtaaccatctttttatgggtggagcagagagtcaatccctgcagccaccctgcagccagccatctctgcagttctctcagtgcaggcagttcttcctctcaggctgaagatcaaggagatgctttgtacatgaacagatgctgagtatctgttatcattgtattgtttagtgtcagtgtatcatttagtatttgtatcactgtaccatttagtgttgtatatcactcagtcatttaatattggttatcaccatacagtttaatatttgtatcatttggttcattgtatcgtttagtatttctattataacatttctatttgtagtatttgtataatatttgtgtcatttttaatagtatttgtatttttacaaatttgcagtatttgtagcatttagtatcattgtttcatttagtatttggtacaatctaataaatactaatccagtccaatactaatccaatccaatactaataatactattggtacaatccaatactaataatactattggtacaatccaatactaataatactaacagtagtattgatacaatctaataaataatgtgtttgacagtgtagcag

SEQ ID NO: 507 - DNA, 2741 bp, Homo sapiens
aagcagttccagaaggaccattctcacctgtgttttgtttacatggaccactacagaaattagtttgaaggggcggcttttgaaaacctggacctctatgtcaacatgacagggtgaaactattccccctaagactgttcaacttgtagatacatcaactttgaaattattccattttatacctgaccaaaacatgttctgatatgtgtaggacagagacctggatgtgctttgatcgttaatgaggtggtcacatgagaaatgatacctgttactactgtattgtttttagagtcctgaagtctggaggctagacttcctgaaagcaagtcaagaatatagagcaccttgcaggagttcaagatggcctttggaaccaattatgtatttgtttcctcctacagtggagcagcattcaaatcaaatatttacatattgcttatcactttttctccattttaataatggaatgaactaaaataaacaagaacaaaagaatagtataattatatcagtaacaagaagactcaaaaaagaaacaggagtacctatccctatctgaattttcaagttccccattggatgaccagactggcaaccatttcaaatcccagtctatttcattgaaatttcttggttaagtttaattttctctgggggcatgatctcacaaagaatactcaagtctttttcttcttatggaatcatcgaaactgctatttatcataatcaccacttatgagcctgggtttgggattttgtgcatgtagttcagtctagtgttggtagcatgacagaaagtggggaaaatgccgcagtttgttgccttgaaacctaagagcaatccttggttttgttgctacattatttttccagaccaacacatctaccaagtaaattttattcactttaatttcataataaagttagtagagtcactcaacttacaactttatttatgtggcttggcaaaaatcactataaggcagctctaaatttgccttgataagctaaataaattacttttataacttactaaagcagaacaaacagtgaaactttctaaaatattctatctggaatagggacaggggatcttttatttataatctcatcagatgagtgagttgttcacagatattttatgtttttttaattttctccaagaatatttatagaattccaaagaatcagaatagtttcaaaataattttcagtgataaaagagtgttgtaattaatcatattacactaaaattgggatacatctaaggaactttatcttactatcagtaggttttgcattgatatttctttttaaataaactactagttctttatattttgacaaaaagaacttaaattttatcaggaactgtaagataaatatctagtgcttataaattttctgtccttaaatttatgtgacagtgcaagatacttttgctcttttcatttaatataggcatcttccattgacattaataaaacttagaaacagtataattagtataacatttactctgaatttgaagatttcctgaaacaaagtttgtacaagaagcccaccttggaattctgaaggcttattttcttgtttgataagcttttcttttaaacttaggttttaagttggggaaagacttaattaactaatatagtattttctaaggttgatcatcttataccacgaatcgttaattttgacagttctactgatccgtaaatgataaccactgcaaattttttcagtataaaatttttcactgcaaaaaaatttcagtagaaaataaggatgcagggccagttacaatagtccttaagagagttaaattatagcacatgttttgacattgtaatatcttttactacttgaacatttaaatttctaaatgagaaaggtatatatattactgtaactgtagaagggaaaagggaaagtatttggttctaaaaaatgttagccttcctcgtaaaagtagcacaagcccacttatgaatcactgagaaaaagtgaaaaacttgagttggcaaagatgcagagcagcagtgcagatggcaatgaactctctgaattctcttttaccttatttagaagaatgcagagtaaagggaccttcttggttctgcaggaacttctcaagggatgaggagacagaacccctacttccaagtgctctatttgtattacccagatgactgaagcttaagagaaggcagggaagtatacaagcagagccagttctggtacaaacaaagaatttgacagggacaatggaagggtcttcttcaccactccttaccttctatgtgatggaaagactagagcttataaaagtacttccatttttttattctcctgaataccaaaggcaattaaagtcagctacaaatgacttgccagtgtcatgttttatttttgttatagatttttaaattatttccttcaagatcaattcttatcccatataatgcttagcttccaagaatattctttactttcttctgtcttttacagctctttgcattttgtagaccttaatactcaggttaaatattcattgcatttataagatcttctgcaaaaagcccagaaatggtccttttcaggtgcctcttcaaagagctgacaccttaccttgtgcctttggcacaaatgtgcagaatagatacatcagttggtgcataatcgaaaaaaataggaattttgaacactgttcttccttctacatttatttctct

SEQ ID NO: 508 - DNA, 4344 bp, Homo sapiens
ccttgagacctgagggtttccacagtgggaaccccaatagggctagggctctcaggtaggggagcctccttctagatgtaggcatttggcttttaaaggggaactcagctctgattctgcttttttttttttttttcctttgtgtacccattggaatgggtctacagtgtatcatgagccaaccctcaaaggacccgtattacagtgccacgttggaaaacgctacaggaagcatgacctatccacatctttccaagatagacactaacatgtcatgtcccaaacattagcacgtgggggttgagctctgtgcagtaatcgagattgggagaatttgggcagcgcgtgagaagtgctaagctacttgttttctcacttgagcccgggtaggctgtgttggccctcacttgggattctcagcagttacatgaaagttgtgctgataatctcttctcttgtaccaattttagtcaggcagaaaatggtaaacatgagggtgctcttgtgacttaatttttgttcaagggactaaattgcttatgtttattccctgtcagcggagtggagaatgtcattcatcaataaaccaaagccaatagctggagaattgagatctggttgaaagtggtttatggtttacatgctgtactatcctgaggaattgcgagatattgctgaggggaaaaaaaaatgaccttttcttgaaatgtaacttgaaaacaaaataaaatgtggaacataatgtttaattagaattgtggtggtggtagtggaaggggataattgtaaataggaaacatgaatgttcatttttttctttaaagaattcttattaaatggctccctgccttttttttcttttttcctcatcagctctttcatggctgaattttgttttattcttcctaagactgaggattgtgctgagtccagagtcattgtggtaactgacatgagggtcttcccatgttttaactggaaacccactttggtcacattccaagtatgacacagctgttcttctggagtactttagctattttttgtttttgttcttttcgttttttttttttccaaaaatagtgacttccttctccaggtgtgtttgacagcaactcaattcaggaatttcggtagaactgagtgacctgtggaactgctttagaatctaacctgctgtcttcgtgctctgtgtgaaggggaagctggggggttagcatgaagtctggccttgtgtgcattggagcttccaaggcactttgaaatcattccagtatatttgggaagaattgagtgaatgagaatgctcttccttattctggtagatttgacttgtttataattctgcactttagaagaaaaacagtgttaatctgtagttgaaagaaagcttagtagatgagagagttctaggctactgtggctttttccagtagatttagatgagattatgtgttttgaaatgttttgtgggatcccttagaaagcatcacttcagggcagagacactcaatattgccagccagcttgggttctaaagtgatttaatcaaattcatgctcctgatcttttttttcccccttcctttggctatgaaaacccaaagcccggagtgattgttttctccttgctttaagcagtgaagttatcctaatgcaaaagagcttagtagaaaatgagtggtttacctttttttctaaaagtatattttcaagtttattctggaatgtgatgtcttggtcctcttaaaagcagatcagccatgactgaaactcaaggcttagctggtatctatgttgtgctacattaggtgactagaagccacttcttagtgtaatcagctcctgtttccctgtgagccttagttatattttaattcagtggctttgagtcaaggccggttctaattgaggggacccagtgtgcttcagtgttaagagtggggcaatgaagagtgaaccccaatgaagagtgatcccaactttggaaactatctggtcattcatgaccttaaaaagctgccatggtggtcaaatggcatgtgtttgcacaaaaatgaccgatgtgtttaaccaaagctttgaaatgtgatgaagccaccaacataagcacttgcctaacagaaatcagtatttcttctacttagaaggcttggggcccagggtaatgaggcaccagatgaagataagatctgcatcaaggaattaaatttccagtttgtccttggggttctttctgcttatgttttttcccccccatctggtaatagtcctcttctgagaatgaaaggaggcacagaagttgcgagaaagacccagtccccagtctttgccaccattgcaccatggttgtctcggagtcccttcacctgacctttttagtcagctcagatctttttgtagtttgagaatagacctattcaagagctatcagggttaaaagctgcactgaccaaagctgtacttttaaaacacaacccctgggctagtgatgtctctacttgctctatgagccttttgccagcctcagaataggcgaggtaaccttgaatttcagggccctggaaactctagctgaaacctgcctttcctaatgctcacacaagcaccaggtaccctgagcttatactgagtccagtggttcctattttatgtgtgtgtgtatgtgtgtgtgttgagtaacatgaaacttggcagtagcagagagcactgaagttcacatgcaagttctaatctaaagttaagcagtctcttatttgtttcgggactctgatttgactctttttctgatgctttcggcatgtctgcagcctgttctcctagcctgctgcttggagtcaggttgagcatcagtgagatgaagacagtaccttttcctctcacattggcagaatagcacgcactagatgcctgaccttgagctctagtctcccctttaaatcttaccttggcagtaacacattattcctcattcaataatttcaatgctgaaactgaactctattactaatgccttccaatcagagttcctgatggggatgcctgtgggatggcccacacctgggggacctggcagatggggtgagttgggtaaggaagatgatgcttagttcctgatagatgctacagatgtagtttggcatttcagtttttgtccagtttgattttcactggggtttgagtcacagcaagctgtgtatgaacttgtgttttgtggtgacacattaataatcaaattgctaaaaccctgaatctgcttattcttcagcttcacctctgcactaaccccttacccttatggtacgtcaggattttaactagtactgctttgttgactttgggaaatggtgccactcaaaagcaacttcctaacttgaggaataactcctttgtagtttactttctggtactggttggtgccttgtattgggatacagctatattcttagctcaaatgtcctctttttgagagcaaagtagttatccaatggtgagacgagaccctgacgctcatagaggccattccttcctgggtgtcggaccagggctctgtgtcagggaaaaccttctgggtggactttgtaagaatccagtttccaaggttagattcacatccttaatcttgcagagactagaatttcacagctcgctttggaacatattccaattcaaccagttaaaatcagaggaccaagtcgtgggggaggggggcggtgttgaggagaggtatttttaaagatctggcaacttttcaggattatttgtggagaactctaaggttaagatcaggaaataaaagactgtgtgtgtgtgtgtgtgtgcgtgtgtgtgttcaagtgcctaaatcttgtttacctatcactttaaaaaaataattgaagtgtaagctaaataaaatgcttggagttttgcctgggctagtgagagttggtgcaaattcttgtgtgtgtttgcataggaaggtgagatgaccatctactaaagaggaagtagctaaatacagatctgtgggtgtttttaaaaaaactcaacctatctggtgttttattttaatggataaaaatgtaatttttctaaggtagcaacttatttccaaattaatatagatgaaaaatagataccaattagactaaattgaaagctttttgttctatatttgcatagcctttgaaatatttcttagtgcctaggaggtctggggattcctctttcgtggtggtcactaaccttacttgatgcagataaaatcacttgtcaatgcaaaatgtgttagaacttgataaagctttgagtttgagaaataaaggtatatttaaaatttaaataaaacttgtcatttatgctc

SEQ ID NO: 509 - DNA, 979 bp, Homo sapiens
aactgaaatgtggtatctttttttttttcaactttttcctttaaaggactcctaaactaagcacagaagagttggcgtcatcttaaaaataccaaataacagaagatcgcattgcagatgatatcaggatgtggtttccagctttgcctgagggaattccaacatgagattatgggctggctccatttcttggacttaaaatgcattattagtttaaaaatctttctgtgctctcaaagcttgagccttgcagctcaagcttgttgttccctttatattctagcagggaataaataattgttttaattaggtatttgtttcattggagttgaaattaacatttcaaaagtttttcgtatttttttatggcagatgatttgtcatttatttatattaggttttactgcctattgagacaaccaggtgcataattgattgccctttggccataaaaatgcagtgtcatggatcttagagctaaaaaggactgtaaaaattacccagaacagcgtcctcagacttaaccttctgcaagttatgtctgtatataagaagattctaattgctaactgtttatacttttctgaataaaatagttgtttctaattaaaaagtagccaagctaagatgcctggctgggcttctgaggaattaatacactcgtgtgtgtgtgtgtgtgtgtgtgtgtgtgtgtgtgtgtatgtgtatgtgtatgtacacatacatatatatagttgacacttgaaaaatgcaggtggtaggggcactgacccacccctacgccccgcacagtcaaaaatctgcatataacttttgattccccaaagtcttaagtactagtagcctgttattgactgggagcctgactgatgtattatatatattgtatactgtattcttaaagtaagctagagaaaagaaaatgttacttagaaaatcataaggaagagaaaatatatttactgtgtttatcaatact

SEQ ID NO: 510 - DNA, 288 bp, Homo sapiens
gaaaaaagggccaataaccagactgctgaggttgcccacaggaggatcacaaactcacagcacagtgtgtgatgctgtccttcctggaccccattctgtccggaggctcatggcccatatttcccacatttctaataccaccacccctgtgcttcaggccctccaaacccctgtgttccccaaatgttccatgcccttctttgtatcactgactattatatgttgctctcttgcctaaatcttcctctgaagtaaaagatctcaaaaggacagatcattaatgactgg

SEQ ID NO: 511 - DNA, 406 bp, Homo sapiens
tttaaggatgacagagatgtgcatgtgggtattgttaggaaatgtcatcaaactccacccacctggcttcatacagaaggcaacaggggcacaagcccaggtcctgctgcctctctttcacacaatgcccaacttactgtcttcttcatgtcatcaaaatctgcacagtcactggcccaaccagaactttctgtcctaatcatacaccagaagacaaacaatatgatttgctgttaccaaatctcagtggctgattctgaacaattgtggtctctcttaacttgaggttctcttttgactaatagagctccatttcccctcttaaatgagaaagcatttcttttctctttaatctcctattccttcacacagttcaacataaagagcaataaatgttttaatgctt

SEQ ID NO: 512 - DNA, 413 bp, Homo sapiens
tttaaggatgacagagatgtgcatgtgggtattgttaggagatgtcatcaagctccaccctcctggcctcatacagaaagtgacaagggcacaagctcaggtcctgctgcctccctttcatacaatggccaacttattgtattcctcatgtcatcaaaacctgcgcagtcattggcccaacaagaaggtttctgtcctaatcatataccagaggaaagaccatgtggtttgctgttaccaaatctcagtagctgattctgaacaatttagggactcttttaacttgagggtcgttttgactactagagctccatttctactcttaaatgagaaaggatttcctttctttttaatcttccattccttcacatagtttgataaaaagatcaataaatgtttgaatgtttaatgtg

SEQ ID NO: 513 - DNA, 173 bp, Homo sapiens
ccttggagctcactggtccctgcctctggggcttttctgaagaaacccacccactgtgatcaatagggagagaaaatccacattcttgggctgaacgcgggcctctgacactgcttacactgcactctgaccctgtagtacagcaataaccgtctaataaagagcctaccccc

SEQ ID NO: 514 - DNA, 26 bp, Homo sapiens
gcagcccttactaagccgagagatgt

SEQ ID NO: 515 - DNA, 3881 bp, Homo sapiens
acactggaaaatatgtatgtgtggttaataaagtgctttaaactgaattgacattaacagtgggtgatcaactttactatgtgcttgtgcttttgcttttgatggagtaattcattgttttcttatccacctaaatgcacccagctgcccttgattttctctgggctactggccttcacaaccctctcccatgtaccctctctgactttggggtaaccctcccctaacttaaagctagagaattctgaaactgaggaggggatcctctgttaatcagtgagcactttttgatgagctgatagatgatatatgagagactatgcgtggcacaatactttgttacactcttcactgatacaagtgttctagagtgtacacacaacccaaagatagaaataaaaagaggagcagtgtcggggagcttggggcctggtgttccatggagagggagaaaggaacaagcttgaccaattcattcaactccttataaaaatgatgaggaggctgaaaaccaagaattttgattgggaacagaatacaagcagctgaatcagatgaattactaagcaacaaagatcctgtttttatacaaatatccttagtacaaaaacaaaagaaggaaaactgtaggggggagtaatgtgctaagtaagcagaattgcctcaaaaagaagttgttctagttactctttcagagtgggaatcttagattctggtattgtggatatggttcacatataatgggattgtgtgttttattttggagggattaaaggtcatagtttggtcctcagtataaaatcaactggtaatttattcatttcatttggtaaaaatgtattgactgcctgctatgttctaggcaccatgctatgtatttggaatacagctatacaaagcattgtcacataattgaaatgaaaattttatattatttaagtcacaagaacaagctatttaattatattacttttagtttctcttttaataaagaatagataatgctatcattctagatactaaataagtattttcttaacataatattactatccactttatcttgtagaagaaataactaaaatacatctgtcttcactcctgtatttgtttgcattttaaggattaaagacagaaatagaaatgtaaacaactttattttgaaaatatttcaacactgcaaatatctctgggtctgatattctagtaatctaattggctagtaattgatgttagtgtgatttattgttgaaggctaaatgtgtttttcagtttcaagaaaattgcttttaataattgcctagaacaagaggttgatttggcagcaagatgttgacgggaagttagagaagtcaataaaggaagtttttagctgagagagagtgattattcactcccatagcctctgcattgttatccattagccacgataagaaccttagggaattctgagagtgtgtccaggaaaggatctgtcaaactagaatagtatctcctccttgagaaaggaaataaccaaggattccgcagctgagaggctgccagggctagtgaaatagagtaaggaaatcttggctgtctcttattctctggttgtagtttaacgcaagacacttatttactcactgatggtgtgtgtgtgtgtgggaggggagattagcatgaggggtgggaatggggagattcgatgaagagaaaactaacatttttttggtgactcaggaactgtgccaggtacttccatgcttattagctcaattacacaaaaatcttgggaccaggtattatttttcaagtcttcccacatgaagtaactgaagtttggagatgttaagtgattcacccaaagttgtacagctaatatgtggttaggctgggtcctgaaaccgaggcagtttattttcaaagcctttgctttgtgcatcttactgcgccacattgcactgcacatctgcttcctgaaagcactttgtaggtgtgtaaaacttttcgttaaatgctttaagctgtttgggttaaaaatatatgttcatgttataagaaaaccaagacactcctaattataatcaaatagtacttgttacatatcaatatgtgtgtgtgtgtgtgtgtgtgtgtgtgtgtgtgtgtgtgtgtgtgtatggcgttgtgcagatgtttaaaagtagttacatagactagttcttgcttttcagggtcccataatctaaaccagatgacttcagctttggataaatatatagaaggaaatttaaagagaattcaaaacaatagatgatgcagtgacactgtgaataaatgttatttatacagtttgtaagatttcatgctcattgttcatatgtcccaggtggagttcagaaaatattctcttcatttccacaaaggggaatagtgcctggagatggttttcttttaaaaagtccttttcataatgcagtgcccttccttccattgcccttcattccattgcttcccatgcttgtcaagagactaaaatgttacttatagtaatagtcactatctcaatgtaaatagcacccttatttgatgagaattattatttcagttctaaaaatggggaaacaaagtcagcaggaggcaaagtagcttgttaaagtattctgcaactttcaaatggttgcttccactgcatttcacgtcttggcacttctaattgagggttactctaaccaccctatttaaaattgtaactgtcccccacccccttaattactaaccctggtctactttttgttttctttttctgtaactcttatcttcttactatataatttatactatataatttacttcattatgtctattgttcattgtctgtcttttccaaattctactgcctcttaccctctccagaatgaaaactagtatctttgtttttgtttactgatgtaacccaaacacctacaaacagtgcccagtatatactaggcccacaaatatatattggctgactgactgtatggtttagtatcatgtcatagtattgagactgtaactttggtcttctcattttcttctttgtattgtgcgtcctagacttagtttggcctctccttttgtccttgtatactctaatactggataagaattttggagtctttttcaactctgagtcagtgaatgccacataacttagtgactatatttaaatggttaatttacaattttttccctgcaaaggatactgtagtcactgtgagtattttagtattattgtaggactcaagagggaattaaaactacaaaaatgactcctcttgtatgacacagaaagaaatgtttcttcacagagggaggagaaaaatatcttcaagagagaactaatagaatcaaatcaatgaaccatgtctcatctttttggataagtaactgttagtaatccagacacttcatgagctttcattatgtaaagtctttagcagaagctaaaggaggggcaccaaccacagtaattttaacttaagaacaaaatggagcatgaaaataaattattaaatcatttactcccactatttttgggttagggccaataatggggagagaaagaggtagactagttttgtgtttgtggctattttaatagagtagcacaagtaatcaaaaaacagtaggctgttttgaatttactggctgtcccttatgagttcacagttagattggactgtcctcaatgtactttcttttttttctttctttcccacatctctttatttctctgattttgtttaaacttcataaagagctctctgatctttcctttccaaacaatgaaggtttatcctttgtaaactacctctgtactccacaggctgatgatatgtgatatccctatatcattaaagtaaagcctaagcaca

SEQ ID NO: 516 - DNA, 1517 bp, Homo sapiens
gcagctcttactaagccgagagatgtcattcctgcaggcaggacctataggcacgagaagatttgaatgaaagtacagttccatttggaagcccagacataggatgggtcagtgagcatggctctattcctattctcaaaccatgccattggcaacctgtgctcaatctgaagacaatggacccatgttaggtgtgacacgttcacataactgtgcagaacatgccgggagtgatcagtcagacattttaatttgaaccacgtatctctgggtagctacaaaattcctcagggatttcattttgcaggcatgtctctgagcttctatacctgctcaaggtcattgtcatctttgtgtttagctcatccaaaggtgttaccctggtttcaatgaacctaacctcattctttgtgtcttcagtgttggcttgttttagctgatccatctgtaacacaggagggatccttggctgaggattgtatttcagaaccaccaactgctcttgacaattgttaacccgctaggctcctttggttagagaagccacagtccttcagcctccaattggtgtcagtacttaggaagaccacagctagatggacaaacagcattgggaggccttagccctgctcctctcaattccatcctgtagagaacaggagtcaggagccgctggcaggagacagcatgtcacccaggactctgccggtgcagaatatgaacaatgccatgttcttgcagaaaacgcttagcctgagtttcataggaggtaatcaccagacaactgcagaatgtagaacactgagcaggacaactgacctgtctccttcacatagtccatatcaccacaaatcacacaacaaaaaggagaagagatattttgggttcaaaaaaagtaaaaagataatgtagctgcatttctttagttattttgaaccccaaatatttcctcatctttttgttgttgtcatggatggtggtgacatggacttgtttatagaggacaggtcagctgtctggctcaatgatctacattctgaagttgtctgaaaatgtcttcatgattaaattcagcctaaacattttgccgggaacactgcagagacaatgctgtgagtttccaacctcagcccatctgcgggcagagaaggtctagtttgtccatcaccattatgatatcaggactggttacttggttaaggaggggtctaggagatctgtcccttttagagacaccttacttataatgaagtacttgggaaagcggttttcaagagtataaatatcctgtattctaatgatcatcctctaaacattttatcatttattaatcctccctgcctgtgtctattattatattcatatctctacactgcaaattttgggtctcaatttttactgtgcctttgtttttactagtgtctgctgttgcaaaaagaagaaaacattctctgcctgagttttaatttttgtccaaagttaattttaatctatacaattaaaaccttttgcctatc

SEQ ID NO: 517 - DNA, 1033 bp, Homo sapiens
aataatgaatacagtcactggtaagggagaacctagaacccagtaggtgtatattttcaggaaactgagctcacagagatgtgtattagaatccaagtggaacttctgcctctaaagaccttgcaagaaaagagatgtcctgaaaatgaaaggttgcacctcatttaatgaagcttaaccctatgtagaaagtctctttcgggggcagaggctttctctgggtgccaagccatatatattagggaatagtagattgttatttcgttttttccctcccagtgcattttaaaaacagcactggctggggcattctcattctctgatggagccatcaatgagatttaacttagtcaacctgtgctagcaacattctgaaattccttcaaagaaggcagtcctttgggaaggtgtttttttttttgtttttttgtttttttgttttttttgactctaatcaacattccttttgttggtgacatttgtgattttcagtaatctgagtttttgatggccttttaaacaagactccagtatgtgaaagttaattgctgtgctccacagatcttgtctattggcccctgtagaaagttaacctttgttgttttccttttataatttgcttattgcacaattgctttagggtaagtgaattatattaagatgccttgaaattatagcactccttgattaagaagctaaaatgtttctctcatttactccttaaacaaaagacttaaattagtttgggtcattattacttttattttgcagcatttggtttgttattagtgtaagagcaagtataggatatggagaggcccctggcttcatgagaacaaaggcaggcccaggttataattacagctttctcctgccccttctttactttctctaccacagttttctccgctgtttgttttcctcttgccacaatttgctaacacttaaaaaattttcctgcacccagtagtttcatatcctgtagacatcctcttaggacattctcaaatttcaaaataaaaaatattcatct

SEQ ID NO: 518 - DNA, 609 bp, Homo sapiens
ggggaccatcagtcccattactagtttggaaatgatttggagatacagattggcatagaagaatgtaaagaatcattaaaggaagcagggcctaggagacacgtgaaacaatgacattatccagagtcagatgaggctgcagtccagggttgaaattatcacagaataaggattctgggcaaggttactgcattccggatctctgtggggctcttcaccaatttttccagcctcatttatagtaaacaaattgttctaatccatttactgcagatttcacccttataagtttagaggtcatgaaggttttaatgatcagtaaagatttaagggttgagatttttaagaggcaagagctgaaagcagaagacatgatcattagccataagaaactcaaaggaggaagacataattagggaaagaagtctatttgatgaatatgtgtgtgtaaggtatgttctgctttcttgattcaaaaatgaagcaggcattgtctagctcttaggtgaagggagtctctgcttttgaagaatggcacaggtaggacagaagtatcatccctaccccctaactaatctgttattaaagctacaaattcttcacaccatc

SEQ ID NO: 519 - DNA, 1305 bp, Homo sapiens
gcatgtggaagaaaagaagcagctttacctacttgtttctttttgtctctcttcctggacactcactttttcagagactcaacagtctctgcaatggagtgtgggtccaccttagcctctgacttcctaatgtaggaggtggtcagcaggcaatctcctgggccttaaaggatgcggactcatcctcagccagcgcccatgttgtgatacaggggtgtttgttggatgggtttaaaaataactagaaaaactcaggcccatccattttctcagatctccttgaaaattgaggccttttcgatagtttcgggtcaggtaaaaatggcctcctggcgtaagcttttcaaggttttttggaggctttttgtaaattgtgataggaactttggaccttgaacttatgtatcatgtggagaagagccaatttaacaaactaggaagatgaaaagggaaattgtggccaaaactttgggaaaaggaggttcttaaaatcagtgtttcccctttgtgcacttgtagaaaaaaaagaaaaaccttctagagctgatttgatggacaatggagagagctttccctgtgattataaaaaaggaagctagctgctctacggtcatctttgcttaagagtatactttaacctggcttttaaagcagtagtaactgccccaccaaaggtcttaaaagccatttttggagcctattgcactgtgttctcctactgcaaatattttcatatgggaggatggttttctcttcatgtaagtccttggaattgattctaaggtgatgttcttagcactttaattcctgtcaaattttttgttctccccttctgccatcttaaatgtaagctgaaactggtctactgtgtctctagggttaagccaaaagacaaaaaaaattttactacttttgagattgccccaatgtacagaattatataattctaacgcttaaatcatgtgaaagggttgctgctgtcagccttgcccactgtgacttcaaacccaaggaggaactcttgatcaagatgccgaaccctgtgttcagaacctccaaatactgccatgagaaactagagggcaggtcttcataaaagccctttgaacccccttcctgccctgtgttaggagatagggatattggcccctcactgcagctgccagcacttggtcagtcactctcagccatagcactttgttcactgtcctgtgtcagagcactgagctccacccttttctgagagttattacagccagaaagtgtgggctgaagatggttggtttcatgtttttgtattatgta

SEQ ID NO: 520 - DNA, 312 bp, Homo sapiens
gcatccacccacataactccccaggctttccacagcctttttttatgtctcctttctaagatttaggatgattttttgtacatactttctcatttttatactttaaaaaatatatatgtgtataaattctacacctagattcctatttgctaagagatcccttttcttactaccagtttttggatgtagttttatttgaaacatcttcagtccactttacaacaaagagcagcttgtctttgcagctttgttagctcttaaacttccagattaactgtgtagccatttcagtagcactaaaagattaactct

SEQ ID NO: 521 - DNA, 2233 bp, Homo sapiens
caggtcctctgttgtccaggtgttctcttcaagattccatttgaccatgcagccttggacaaataggactggggtggaacttgctgtgtttatatttaatctcttaccgtatatgcgtagtatttgagttgcgaataaatgttccatttttgttttctacatttaatgttactttcctgtcctaaaattgaaagttctaaagcatagcaaggctgtatggatcattgtgaagatacttctagggactgaactctatgtatttcttttttttcttttttttgagatagagtcttgctgtgttacccagggtggattgcagctgatcatagctcactgcagcttcaaactcttgggctcaagccatccttctgcctcactgtccctagtagttgggattacaggcacatgccaccatgcccagctaaatttttaatatttttgtagagatggggtcttgctgtgttacctgggctagttatgtgagtttctatattagacatagtctcaagtttcaggtagggtttaaagtagagacactggtcagtatttcttttttggggggaactaggagagcaggagtagaagtgagatgttaagatcttatggcactaaagacttactattctgttcctacatactctgttaggatcagatagatgttatagaaatgccttttgtttctcctgcccttcttgatgtcacagttttttgtacttccagctgtctaaaggcatgaatctcctcttggagcattctcccagacccttctttagaagagtctatactaagttcttggtgccctcttcggcagccaagggtgaaggccccatagaggagaggatccaaaggagcattgaggaggcccaagaggaaaaggatgtggctcaggctgggagggacttcagttagcatggtgggggagaaccagtaccacatacccagtaggtaataaggtgtccagcagaggatgaaggtcagcaagataagcagggccagtctcagggcccggagacgaacacggggacaattgtcaaaggagcgggggagggcaaattcaccagcaggggctaggaatttagaaaatatactgtaattcagacactcagcttctgatctgagtatagggtgaattgatggaggggcatagctagtgagacagagctcacctcctacaaggaggagaatgttgcaaaccgttttccccttcccaacctgggactatatgatttcttacccccagggattatgatagaaatatgaagccaccaagtctagacttgatggtgttcaagaataaataatactgattgcctccctagtccttgtccagctaactcagctgtttataattgaagggattcaacaaaattatctctagcatcaggtgctagacatggttagaatctcaccatggtttagtgactggtagatagctattaggtaggtagataaataaatgatgctagaggcaacaggtctagggttaaggattaaggcctgggaattggagtctcaccatggctccccttccttgtctggggcctggacacactgaggacaatgcggctatagcagatggccatggcagtcagtggcagcagaaagaggcagcagaaggtgaagaggttataggtggtctcttgccattgagccttgaagctgcctttggtgacacactgagtgaaagggactgggccagctcagtggaccgtgtggaacaggaacagctggagtggagttgaggactattagaactggttcccctcaccacccaacctacccacctatgtcatactgtctcctcccaattcatccttaattccaagtgaagcagcacagtgctgagaaacagttcatccatggtgccatgttaaagaagttggaaatatatcttgaaaatcctatcttccttttaggcttgaatatgatgctgaacagtaagtttgttaaatcttggaacttaaaacaatcctgctttctcaagtactattctaacattgcgctttataagggatgatatttctaccacctcactcatatttttagctgaaatgattttcctggtatgtctgttattttgtggaaaaagaaatattgtgtaaaatgggtgctgccaaaattccaggccattttgcagggactctgaagtgacctttagtagtaatagtcttatgtgcagtaactataatggtaaagaatgttaaataataaaatttaacattttccaaatgct

SEQ ID NO: 522 - DNA, 812 bp, Homo sapiens
ccttccggtacaggataaggaggggacctgaattggtgagatggaatcttagatcgtcccccatgtgccagcctcattcgaattctactctttggttaaagttagaaattcagagatttaggggtggaggaagagctttggggaagatgaggtaaggaaagatgactcgtgaagttaataggatgtctctaatttctagatgtgcctgagcttctgttcttttcctctttctttgtgtctctcttgaatatatttactttgtgtctcttaactctgtttaaggttctgtgtctatgcatctctctctttcttttttcaaccttctcattctcctatccagggatttaatcagcagaattactttttgataggggaggtataaggtttggcctgtaaggttctaactgccttcttttttctcacagaggtggcttatggcagatttttcctccttcaaactccaaacataatttttaagactatgtgccagtggactcttcccttatatctctgcaccacaagttgttggatgtttcctcttcctcccttatgtctacctcaccaacctcgctcatcatttggcccttatccttccttgtacacctaccttcagatttctgcttacactttgatttcagagctttattccccagtctgttcttactcctttgtcgcttatccagaatgatgctatgtgtagcatcttgctgtaaatcctgtacaatgattctgtgtaaatagctgtggcctatgccaataatgaagagcaagcctttcaggtaagcaaattaaagttcagtttgctcatcgac

SEQ ID NO: 523 - DNA, 1589 bp, Homo sapiens
atgtagaataagggtctagaaagtcctccctggcagcttcttcaagagacttgcataaaagcagaggtttgggggctcagatgggacaagaagccgcctctggactatctccccagaccagcagcctgacttgacttttgagtcctagggatgctgctggctagagatgaggctttacctcagacaagaagagctggcaccaaaactagccatgctcccaccctctgcttccctcctcctcgtgatcctggttccatagccaacactggggcttttgtttggggtccttttatccccaggaatcaataatttttttgcctaggtgcctgactcctttcagattccctctttatcttccctcacagtttggaaaggatgagggttatcttcctcgattcttccaccctctcactttcctgcctgttccccactccacaggagggagctgacgttggcttgaaaggagtaaagtcaacatctgctgctttcctgtggactctggtgattcatagagccggatggggagagtcaacaggaaaaaaggagggaggaggaaaagccacaagagacattctgtacaattccaaggaacagagaagcctttagacaggcaactgccatcccccctgaaacctgagacctgtagtgcactcgaccgccctcaggtgttggtgaaacagagctgcccccaggctcgctgggcataggcttcctgattccaagccttttctgggagcaaagccagggcctggtgcctgattttctgaagccaggagccctcaggtggctggagctggaatagcagggaggactgggtgtacctaggcagtattttctctacttctctcaagtcttatactcactcttgagccctccttggggcctgcttagaaagcagacaggagagagagtactgctacttgatgatgggaaatgctttcactttaccagctttgggaagcagcagccccatgggatctaaaagtgtggagtctgcattaagaaacctacatgggtggcatggggctctggggagcaagcccttacttgctcagcactggttatgtagcacaaatagctcctaggaaaatgtttctggggcaaccctagaaccctggtcatattttgcagggtttctctggtggaatcagtttgccagcccttgcttgatgcttactggaaatctccaggttaatttctatctctgatccctccccaacccactccatatttgggtcatggacagtaaaggcagttggattctcatagacaactgggtaacttatatttctttgtaatcaagacttgagatatcgaagtcagttattggtctccagagtgcagctctgggagccttttgaagaatcagcactcattaagagctgagaagagagaagacctgattgggtggttgactagcagtcacagaacctgtcctcccaggctgttcctgaggcctgaccacagtatttattttggcatgtctctggccttctgcagaggcccaccctcatgggcattgtctctgtttcccagtggggtggacagtatatcagatggtcagaacaaataaagttcagtgtcaaatg

SEQ ID NO: 524 - DNA, 206 bp, Homo sapiens
ggaataagaaaccctggttgacagaggcttcatcaggctgtggtgggcgggggtgttggccactaggcaatggtatgggcagggcttcacctgacattatggacctcagacctgagaacctggaccctggaatcagcatggatgagaccagaggaggtatggatggaaacaagctctatggaaaataaagcatgaggcaggacggg

SEQ ID NO: 525 - DNA, 924 bp, Homo sapiens
gttccctggattatggaaacttcgctgtcccccaacactgagcaagtatgctgtggagtcccaaccccagctactctgatccctctgggggctctggccaagggccagacagaccttcacagatgcctacttttggcctcatctctgcctgacaaggccagcacccaaagggttaatatttaacctctttttaaggacactggggtctgtttctggaaatgttctttagatggtggcacattcctttgggtatgttaacctaggcagtgggaggcaaatgggatggtatgtgagctaggagaagggctgaaccctcagccttgactatgtctagagcctcttggggaaggggcacctctcttgaaccccaaatgctctctcttcttattacccaaacccatggctctatttcttcttcacatccattgtctcttcatgtctattccattcccttcggccaaacagacaggtggaaaaactgagacaggcagtttcagagatggacagagaactttattttggattgtggatgtggacttttttgtacataaataagaaaaaccaaaatactccaaagatgacttcccctgcctcctactccagtatgacagaggaggatgtaaggccttagccatgatctgcaggggtctgggagtcaggcccggcctattgcttgggtctctctccatttatatatctaagttcacagtgtttcttattcccccctaagcttctagaggctcatggccctgtagttaggcctggctcattctgcaccttgccagggaggtggaaggaccctgtgccctccttcccaatcttctttttcaggctcgccaaggcctaggacctatgttgtaattttactttttatttctaaagttgtagtgaagctctcacccataataaaggttgtgaatgttc

SEQ ID NO: 526 - DNA, 506 bp, Homo sapiens
agctaaagaccacacctgaatcagggctgtggtaatcatcttaccatagctgtaaattgtatcaaaacaaaaaattagtagatggatttaggaatatgtaagaaactcaacacataatataaatgcaatgaatgtttttcttctttaaatttaaagttagtatctacagatggaattgtatctacaaccaaatgcctcttatccctgaattcagagtgataattttataagtgtgaaacttaattatgtagggctccccccgtctgaatagaattaattccttaaagtctagttagggtcctgctgtctgtcatgttgccttgtaacggatgtttccacctccttctccaacctctaccccaccattagtgtattttactataaaaacagtggaaccacagccctaaagtcctgctgatataaagtccttttgtcttaattgtatttaaaaaaaaaaaaaaactactcttgatcacattagctatgaggcgaggtcaaattcaggt

SEQ ID NO: 527 - DNA, 450 bp, Homo sapiens
tgaaaacaagtaatagctttggctgtttatttgatagctgtttctgggtatttaataggaatcctttctcaaggaatgagttgtgacctgtttactgtctctttagaagaaaaactccactggaaaccattcaccatgtgtgattgtcttctgttatcatttgtcttacaggcggctattgcagacggctaatttatgcttaacttaggaagagataaggcaagagctagatttttttcatgtgatcttttccaagcttcaacttaacttaactacatttctctgtatgatgatgtctcttacttctacaggttccttgagcaccaaagatgattcataactctgtataggtgacagctgcttataaaagcatcttagcagataagcctattaaaattgtgcttttgtaacaatgttgtggttgctagaataaataccattaacaaatgc

SEQ ID NO: 528 - DNA, 253 bp, Homo sapiens
gaattggcccagcctcagatcctgtctttagcaaccagctaatatttacccagaggtactgcaatagagtatttcaaaatggaatcaggatctggtgggcctcagaaattgtctcttttctgagtttcaatttggttctcctggatgttttgctctgttttggtacctgtaatatagggaaacacaactttttttgggaaagccctttgaccccagcttgctagttgcataataataaattttctgttcctaa

SEQ ID NO: 529 - DNA, 1253 bp, Homo sapiens
gctgctaagatgggatgtgccgatccttgtcaaaatgagattccaggtcctgagagctgctttgaggcagttccaggagtacttactattggtcatgcaataggagaacagagacccgagggctgctttgggggaggggggaactcgagaatgtatggatttacctgaaaacaaattattcatttaatcaacaggtgtgttttttttaagatttattttttaaaaattatttttgtggacttgggtatcaatgatggcacctacttttgggaatctgtagctgtgctttgagaattgccatcggtcatgtgttgcaccgttctctgtatgtttacgtcctttggactggcttctcccaggattcttttctgtttttgtttttttgatttgggctttatttttttctgtgtactgtactatattgtaaaagggattttagcagagactttagtctttggggcaagaggagaacaggaatgctgggctgtttactttaggtggagaatccatcttcagacctttggactattttctttcaactgcagtgtatagaaaaaccaaactacgacctcagagcagagtattaatgaaaagcacaaaaaaaggaactaagttcagcgaggggtggggggaggggggagatttttcttttgaaaaataatgactcttaggacatttgtttttcagttcaagtgctcttcagcactgtcttgtctcccaatataccaacccactggcacatttttctcttgttttctctctccgattttgctctgtctcctcagttaagtgtttccttcctttgtgccccccgctggtgaccctctgcttccctctctctttccctttggcagctgcaatacacagtgttattctggggaaataaatctagcaaagcctcgccttccatgccgagcgtcctcttggctctgagagggaaaggtctgtccttgggatgctctctggtcttttttccccctaagtctttctctttcccatcatacccttccctgcccaccttgttttctgttctccttttattaggaattcccaagtgaattttattaatgtgggagtggaacagatgctaaaagctatccaggattttgtttctgtttgttttaaattttgtggttccttccctttcctccccctcccatgcgtaagacgttctgtgtaacctccattaaatttggtacaaaaccactcgccagagctgtggtgtcagaaaaataaaatatattgtttcttac

SEQ ID NO: 530 - DNA, 604 bp, Homo sapiens
acttaagcctactacagactgttagaggccagtggtttcaaaatttagatataagaggggggaaaaatggaaccagggcctgacattttataaacaaacaaaatgctatggtagcatttttcaccttcatagcatactccttccccctcaggtgatactatgaccatgagtagcatcagccagaacatgagagggagaactaactcaagacaatactcagcagagagcatcccgtgtggatatgaggctggtgtagaggcggagaggagccaagaaactaaaggtgaaaaatacactggaactctggggcaagagatgtctatggtagctgagccaaacacgtaggatttccgttttaaggttcacatggaaaaggttatagctttgccttgagattgactcattaaaatcagagactgtaacacttttgccttacgttcattttatcaagcatagcttggtatttattatgcttgtgtgatctaacatgagttagcatcccacacctcctcttctgatcctgccccattaaaataaccaagaggttatctgttcttttccgggaaaggggtggtatgcacctgaaatagattttaccaaaaga

SEQ ID NO: 531 - DNA, 1000 bp, Homo sapiens
cagcggctcagtgggtggccatcgatctggaccgtcccctgcccacttgctccccgtgagcactgcgtacaaacatccaaaagttcaacaacaccagaactgtgtgtctcatggtatgtaactcttaaagcaaataaatgaactgacttcaactgggatacatttggaaatgtggtcatcaaagatgacttgaaatgaggcctactctaaagaattcttgaaaaacttacaagtcaagcctagcctgataatcctattacatagtttgaaaaatagtattttatttctcagaacaaggtaaaaaggtgagtgggtgcatatgtacagaagattaagacagagaaacagacagaaagagacacacacacagccaggagtgggtagatttcagggagacaagagggaatagtatagacaataaggaaggaaatagtacttacaaatgactcctaagggactgtgagactgagagggctcacgcctctgtgttcaggatacttagttcatggcttttctctttgactttactaaaagagaatgtctccatacgcgttctaggcatacaagggggtaactcatgatgagaaatggatgtgttattcttgccctctcttttgaggctctctcataacccctctatttctagagacaacaaaaatgctgccagtcctaggcccctgccctgtaggaaggcagaatgtaactgttctgtttgtttaacgattaagtccaaatctccaagtgcggcactgcaaagagacgcttcaagtggggagaagcggcgataccatagagtccagatcttgcctccagagatttgctttaccttcctgattttctggttactaattagcttcaggatacgctgctctcatacttgggctgtagtttggagacaaaatattttcctgccactgtgtaacatagctgaggtaaaaactgaactatgtaaatgactctactaaaagtttagggaaaaaaaacaggaggagtatgacac

SEQ ID NO: 532 - DNA, 90 bp, Homo sapiens
tgagtttgacttgtgttttattttcaccaccagacccattccttctgtagctcaggagagcacccctccaccacatttgcttgcaatatc

SEQ ID NO: 533 - DNA, 55 bp, Homo sapiens
gccgccgctccagctttgcacgtttcgatcccaaaggccctttttagggccgacc

SEQ ID NO: 534 - DNA, 87 bp, Homo sapiens
ggctgacgtccggcccaagtgggcccagcccggcccgcgtctcgaaggggcacctgtgaactcaaaaggctcttttcagagccaccc

SEQ ID NO: 535 - DNA, 59 bp, Homo sapiens
gaagtggcggttcggccggaggttccatcgtatccaaaaggctcttttcagagccaccc

SEQ ID NO: 536 - DNA, 46 bp, Homo sapiens
atgcagacaaacaaaccaagaccaaaggctctttttagagccaccc

SEQ ID NO: 537 - DNA, 319 bp, Homo sapiens
accccaagagagggaggaccaggatccgaatgggctgggtgagcacgaattaccgaggccttccctttgatacagtccaggatttgtaagggatgaagacccctgggccccattctgttggggtccatacatactctccgaagatagcaacttgcttcaggtcaaagtgaacccgagaaaagagaagaatcactcactactgctcttgccctggactattcaggaagggcagcccggatgttccatgttaaatcgtgacagaattgcaccagacctgatgagttggaaacaatcctatacattaaaagaaattacacta

SEQ ID NO: 538 - DNA, 530 bp, Homo sapiens
aacggtggttgggggaagggcacagcttcctctcttgtccccactacaggttttccctactaaacaaaggtgttggagagcagctttgggttctgtgctggttgttagaactcatctccaggtagcccacggatacgtggttggcacagacacaagactcccagagttgtcctaacaataagtctgagcccatctcaacccacttttctccggtagtctttatgtatctgttagcacaatcacttcagttactgatgaattttgttgggatctgacttggggaaagggttatcagagcctagaggggcttaaaaagtaatcatttgatgtacataccacactccttggcttcctttctcttcccttaaccctttctgcttttcattaaccacattcctgcacaactcatttctgaaaacctaccatgtttctttacagagccatccaaaaattttttgtccctacatagcaattttctgtggcactgagaaaccatgtatgaccacaataaaaatccattttgtgaaagg

SEQ ID NO: 539 - DNA, 107 bp, Homo sapiens
gggcagggtggggtctggaacttgtcgggttggacagactcttatctccgtgttgctggataaagcttttttatttacctcaatcaaaaaaagaaaacaaaaatgaa

SEQ ID NO: 540 - DNA, 417 bp, Homo sapiens
attccttctcagataccatggatgtggatgacttcccttcatgcctatcaggaagcctctaaaatggggtgtaggatctggccagaaacactgtaggagtagtaagcagatgtcctccttcccctggacatctcctagagaggaatggacccaggctgtcattccaggaagaactgcagagccttcagcctctccaaacatgtaggaggaaatgaggaaatcgctgtgttgttaatgcagagaacaaactctgtttagttgcaggggaagtttgggatataccccaaagtcctctaccccctcacttttatggccctttccctagatatactgcgggatctctccttaggataaagagttgctgttgaagttgtatatttttgatcaatatatttggaaattaaagtttctgacttt

SEQ ID NO: 541 - DNA, 82 bp, Homo sapiens
gtggaagaaggctgctatgactctttggatgggagtctggcaagaggaaattggaagataaaataaataataagtgaaataa

SEQ ID NO: 542 - DNA, 135 bp, Homo sapiens
cccagggcatacagctgtccactgtgacttctaatttgtgtaaatatttatgtatatatgtatttttactattaatgtgtgcatttgtgttgagggaagataaatcctttctgattaaagaaatttttttatacc

SEQ ID NO: 543 - DNA, 156 bp, Homo sapiens
ggcctgtgggtgggacacccagtgcgaaaccctcatccagttttctctccatctcttttctttgtacaatcccatttcctattaccattctctgcaataaactcaaatcacatgtctgcaagaaggcctccaaatatagaaacaatcccattagtc

SEQ ID NO: 544 - DNA, 213 bp, Homo sapiens
gactactgcaagcccttgcctctcctcccttgcctttgtctcttcagtcctctcacttattctatttcccaaccccctcccacttgtttgtgtgatctcagaactgtgccaagcagacactgggacaaagggagaatatcttgctcccctcctgagtcagcctggtgttgccctttattccccttatgtgcatatgattaaagagttattttt

SEQ ID NO: 545 - DNA, 222 bp, Homo sapiens
tggaaaccaagggaaaggcattttgaacagtctagagaacattggaagtaggagtttggtttattgttgttgtttttatttgttttctctttctcgattttttttttattataacaaagggcctctcttccaaagtaagaaatcacatacgcttacgttttactattcaattcaatcctccctcccattgcacttatctaccttccccaagttgtttgtatt

SEQ ID NO: 546 - DNA, 207 bp, Homo sapiens
gcctttgtacatagatgaggcaaaaacctgcgagtgccatcagcctccctcacatgggagaccccaacccagctgacaatgtggagcccccagaacttcagaactgtgtggaggcacatgtctgctctcctgaaaagagacttggtttggggaccccacaaaaggagggaagctgtagctgtttggatgtgaggagaatgaaactac

SEQ ID NO: 547 - DNA, 93 bp, Homo sapiens
gtcaccccagagccctagagggtcagatggggggaaccccaccctgccccacccatctgaacactcattacactaaacacctcttggatttgg

SEQ ID NO: 548 - DNA, 738 bp, Homo sapiens
aaggggtccggggcaccttcacggttttctgtgccaccatcggtcacccattgatcggcccactctgaaccccctggctctccagcctgtcccagtctcagcagggatgtcctccaggtgacagagggtggcaaggtgactgacacaaagtgactttcagggctgtggtcaggcccatgtggtggtgtgatgggtgtgtgcacatatgcctcaggtgtgcttttgggactgcatggatatgtgtgtgctcaaacgtgtatcacttttcaaaaagaggttacacagactgagaaggacaagacctgtttccttgagactttcctaggtggaaaggaaagcaagtctgcagttccttgctaatctgagctacttagagtgtggtctccccaccaactccagttttgtgccctaagcctcatttctcatgttcagacctcacatcttctaagccgccctgtgtctctgaccccttctcatttgcctagtatctctgcccctgcctccctaattagctagggctggggtcagccactgccaatcctgccttactcaggaaggcaggaggaaagagactgcctctccagagcaaggcccagctgggcagagggtgaaaaagagaaatgtgagcatccgctcccccaccaccccgcccagcccctagccccactccctgcctcctgaaatggttcccacccagaactaatttattttttattaaagatggtcatgacaaatgag

SEQ ID NO: 549 - DNA, 21 bp, Homo sapiens
ctcaataaacttgtattgatc

SEQ ID NO: 550 - DNA, 370 bp, Homo sapiens
aggacagccttcttcccaacccttcttgaactgtcgtttcctcaggaactgggtcttcctgattgttgaaccctgacccgaagtctctgggctagctactccccccagctcctagttgatagaaatgggggttctggaccagatgatcccttccaatgtggtgctagcaggcaggatcccttctccacctccaaaggccctaaagggtggggagagatcaccactctaacctcggcctgacatccctcccatcccatatttgtccaagtgttcctgcttctaacagactttgttcttagaatggagcctgtgtatctactatctccagtttgtattatttcttgaaagtcttttaacaatatgataaaac

SEQ ID NO: 551 - DNA, 316 bp, Homo sapiens
gacttccctgccccaccccacatgacatccgaggatctgagatttccgtgtttggctgaacctgggagaccagctgggcctccaagtaggataacccctcactgagcaccacattctctagcttcttgttgaggctggaactgtttctttaaaatcccttaattttcccatctcaaaattatatctgtacctgggtcatccagctccttcttgggtgtggggaaatgagttttctttgatagtttctgcctcactcatccctcctgtaccctggccagaacatctcactgatactcgaattcttttggcaaacttc

SEQ ID NO: 552 - DNA, 1479 bp, Homo sapiens
ctgttgagaggcgaggaggtagtgggtgaggctacctgactcacttcaaatgcatgttttgagatgtttggagattcagcaattctgtcttcattgctccaggatctggtatactgttctcataaaactgagaggagaaaaaaagtgaaagaaagcagctgctttaagaatggttttccaccttttccccctaatctctaccaatcagacacattttattatttaaatctgcacctctctctattttatttgccaggggcacgatgtgacatatctgcagtcccagcacagtgggacaaaaagaatttagaccccaaaagtgtcctcggcatggatcttgaacagaaccagtatctgtcatggaactgaacattcatcgatggtctccatgtattcatttattcacttgttcattcaagtatttattgaatacctgcctcaagctagagagaaaagagagtgcgctttggaaatttattccagttttcagcctacagcagattatcagctcggtgacttttctttctgccaccatttaggtgatggtgtttgattcagagatggctgaatttctattcttagcttattgtgactgtttcagatctagtttgggaacagattagaggccattgtcttctgtcctgatcaggtggcctggctgtttctttggatccctctgtcccagagccacccagaaccctgactcttgagaatcaagaaaacacccagaaaggccttaatgacctcataggcactcttccaaaaagacaacagaactggaatgagaggcctgggtctgtctcctgccttagcaggcctatcaatttcttgtcaatctctttttttccttgctcacattaaaaggaagcatggagttctaatgctcccataaactatgtattttggcaagacacttcactactccaggtctcactttccccatctgtaaaacagggtttggactaggtgttccctggtattctgtgatctgcctcttgctgccattctttctctcctctgcttctctgtatttttcttctgttatccctgggggtgctcaggttcacttgattgtctgtatttctgtgtggttgtagcaaggactcagcctcatgtagcacgaataggggtgtggttcatggcgtgttgacccagcagagcactccctcccactaacttgttctgcatgtgtagagtctccccattttttttaacgcaaccctttcccctttttcctaccccacagctctgttccatgtaagttgccaacagtttcactgaacagtggggtatgtgatggttttggcatgacatcttcagtatgagggggacagtttgacttcactttgagggtgtgatgtctgtagctatgtggaaggtaaaaatagtggtgtgatcatgaaccaaaggaatttatgttttgtaacttgggtactttattttgcattttgttatactattaaataattttttcctgtt

SEQ ID NO: 553 - DNA, 909 bp, Homo sapiens
cacaggactggataaaaggccttagaaccagttagtgatctgcctacacctgaatccctgaaacatctgaactgttttgtaaatcatcttatccccaacctcagtaccaccggatcttcacttctcagtgggattttgtcctttgcatgaccctactttcagcagggctttgaggctgggaaactgatctgctgggtgactttcattccagttgctgggacggaaggctgaatgtagggtcattttgtatgggatatgcagagctctgggtttttttgttttttgttttttgagacggagtctcgctctgtcgccaggctggagtgcagtggtgcgatctcggctcactgcaacctccgcctcccggttcaagccattcttctgcctcagcctcagcgagtagctgagactaccggcgcacgccaccacgcccagctaattgttttgtatttttagtagagacggggtttcaccatgttggccaggatggtctcgatctcttgacctcgtgatctgcccgcctcggcctcccaaagtgccgagattacaggtgtgagccaccgcgctcggccagagctctgggttttaatcctactttagctgtagaaccttgggcaaataacttcatctttttgggtcctaattttcctcctgtctaactggagggactgtgatccttccaccttggatggaagaggcttacctgacagccagcctgcctgctgggagccaggagagtcagctcattaaatcttgaagaaccgctgtatgccctttttccttctaagtcatgtctgctgcctgtgagcctgggaaggagtgctttcaaaacctgtatttttgccctctttagtaaatttagaactgtagaggctaataaactgcgatgagacatttaagctctgctcc

SEQ ID NO: 554 - DNA, 935 bp, Homo sapiens
tggccacttcatccacatgaggagatgtcagtatctcaacctctcttgccctttcaatcctagcacccactagatatttttagtacagaaaaacaaaactggaaaacacattgtttggtcttgtgtttctttacagaggtacctgagggaggagagacataaatcccttcatccctaagactgaactatgtaactagcagcctctggcttgttttctactccctgtccctcaggataaaatgttgatattgctcattttcctcatttccaacattgttttaaaacaagtacttcttttacaggcttgaaaaatctcaaataaacgctaagaaaagggagtaggaagaacaaggagttgagcccttgaaagatgacagtggtcttcttgccttcatgcttggccctctctcctcaaaagggcaatgttggtacaaaattccatctcagccactttcgaggagttatcttcattagctatatccatcctttaatccaacacacacctgcaatgattactgtgcaactattttgcttaattttttatttgaaaaaatgtatttaaaagtccaacaactttttaatataaattacgactctcaaacccattcccatcactttattagtgatggtagcatacatattagagaaggtagctaaaggcaagagagcaccaaaggaaaaagactgtccaaagaacaggtattagaatgaggccgaagatcacggtgaccagagatttctaggagtctctaacctttccaccctatcctgttaaccctttagatctctagtataacactcaggctactgaggtattttagagcaacaagctgggttactttcagagcaaccagcttgactggaactgagagtaaattgggaatgtatgaccaatcttagaccctgaaaaatggcagaaaatacatggaaatttg

SEQ ID NO: 555 - DNA, 999 bp, Homo sapiens
ggccaagacttctctctcccatcaccttgccctcattgtcttccctctcaagccccttcctttccactcctttcccattttaatcttgttctctccctactgtgttggtggtgctgatgaatctgccagagttgagttctatgtatttatttatctatctgtctactccatttctctcaaaagccctcaagtcacaaagtaaatggttcaagcaatggagtactgggtcacagggattcctcctttcccccccaaatattaactccagaaactaggcctgactggggacacctgagagtagtatagtagtgcaaaatggaagactgatttttgactctattataatcagcttcagagattccttaaaccttcctaatttcctgctccagggcagtaaacacaaatatttcttcaaggggtgatgaaaacctcggaagttttaatttgaggttatctgctacgaaacagtatttctaaaaggctaaagtgataagtctcttgcttttttttgatcctgctcttatattcttttttttcctcagagaaatcaggagggtagttagaggtataaaacaggaggaaatattatggaaaatgaaaatagggaaaataattgaatcattttagaagtagctaatttcttttctcaaaagagtgtcccttcttcacacctactcactttacaactttgctcctaactgtgggttgaaaactctagctaaagaaagttatcaaatcttaacatgcattcctactattatgatagtttttaaggtttcaattcaatcttctgaacggcataagtcctattttagccttacctcctgcatttgcaatacgtaatactgatcagtgggcacagttcttcagctacattgagaccctgaaatgaacaattatattctgactcgacatcttgtccccaatccttccaaaaatattgatggtgatttgtgctaccatttactcgtttatttaataaagacattcaatcccagg

SEQ ID NO: 556 - DNA, 1664 bp, Homo sapiens
tatgcaagggccacaatttgcactgtgttcatattaatcctcttttaaaaaaggaaatatacagaagacaaacattgtataaaaactaagagtgtctttaagaagaaaactatagcagggtacaatgcttgggctcaggaagtttctctgtgcaactagaaaattcaaagccatatttagggaacattttttctgaggggccaaaagaataaaggaccaaatttcttagctcatatcattgctttaaacatagaagtaaaagaatactgcatgttgtgggttgattttttttttttaaataactgactttctcacaaaagattttaagataacatttctaatatatatgcaccaatatatatgcctttaataattataccatcaagtgacctgaaaatgccccttagatttatgatgcgtatctgttggaaaaaccaattggaagggaagttagacaagctttggggaagagaaaaggaatatagtccatttccaaaggagcaggaactcccaaccttaagttaatttcactgaagagaattttccctttttttttttttttttgagacacggtctgactctgtcacccaggctagagtacagtggtgcaatcttggctcactgcaacctccgcctccagggcgcagcctcctgagtagctgggaggacaggcatatgccaccacatcactgagaagaaatttttgattgtctgacagatacttatccattatgtgtctatagttcagatgcttgtgtaagaaactgaaataagctgcgtgtggtggctcacacctgtaatcccaacactttgggacgttgaaatgggagaattgcttgagtccaggagtttgagatgcgcctgggcaacatagaaacctgtgtctacaaaaaatttaaaaattagccaagtatggtgacaggcacctatggttccagctactcaggaggctgaggtgggaggatcgcttgtgccttggaggtcaaaactgcagtgagccatggttgcaccactgctctccaggcttgagtgacagagcaagactgtatctcaaaggaaaaaggaaactaggccaggcgtggtggctcacgcctgtaatcccaacactttgggaggccgaggcgggcggatcacgaggtcagatcaagaacatcctggctaacacggtgaaactccatctctactaaaaatacaaaaaattggccgggcgcagcggctcacgcctgtaatcccagcactttcggaggcagaggcaggcggatcacaaggtcaagagattaagatcatcctggccaacatggtgacaccccgtctctactaaaaatacaaaaattacccaggcatagtggcacacgcctgtagtcccagttacttgggaggctgaggcaggagaattgcttgaacctgggaggtggaggttgcagtgagccaagatcgtgccactgcactccagcctggcgacacagtgagactctgtctcaaaaaaacaaaacaaacaaacaaaaatacaaaaaattagccgggcgtggtggcacctgcctgtaatcccagctacttgggaggctgaggcaggagaatcgcttgaacccgggaggcggaggttgcagtgagctgagatcgcaccattacactccagcctgggcaacagagccagactctgtctc

SEQ ID NO: 557 - DNA, 497 bp, Homo sapiens
gagccctgagcctagcacattccaccttgacaaaatggttgactgagaaaacacagataatgggcttcctaaccctgctcacctggcactaacacttttcaatcttcaggcttcattccttcccaagagtgcttttgactctgagaccagcccacccccaaacagctagtggagaaggagcaatgctgaggggtgaggcctctctcccactccagccccaggacaggaaacagaactgcctgaaaaaggtgaagtgaaacttggatctctatttctcccataagggacttctgaaacagggaagccccctcccatgtgaaccaaggaaaggaggcacagcccagagaacccctttggggatactaaagacagaagaggggaaggtggcccttagagacagagcttggacagatgccagaggctctgttccagagtgcaggaagaaggggctagggcaggggagattctcataggggaaataaaactactaaaatatg

SEQ ID NO: 558 - DNA, 51 bp, Homo sapiens
tacccttttcccattcattcacaaataaattacaatgggtgctgagaactt

SEQ ID NO: 559 - DNA, 1663 bp, Homo sapiens
gcgcaaagcctcagaagacctggaacaagattctgccatctctgtgatcccaagatgtcagcccttgccccagcaatgctgaattttcttctacttggtcatcaaaaaaggagtgtaatagaagtgaggggagctgctcctccatcttcttcctgaagaagaaccttctctccttcctcttcctcatgaatgggccttagtgcctcagagagttgaggaccgcagcatcccctccactccagagttgggtggtatggattttcaactggccaaccctttgcctccactattgaatttttttcagacccccattcttcatgctggaaatgggattgctggacttggcagctttctttcccctcgtctttgactaggaaccggactcttaatttcctcaggacagactagctggcacattatccctaccttagttctttctctctgactcctggaagaatactcctgtaatctctgtaaaggtttttgggggataagggtgtttaaccacctcccagctttcttcttctttttttttttctgaaaaaaggaaaaagcacacagcacacaatttcaagccattttcagatcagaactccagaagtgttgacaagatgcctattcgtagagttccctcagaagagccatggtgtttatgaagagaagagtagtgattgctctgccagaagcagctcctctttaaactcctcctctcttgatgaatttcttaaggctgaaggaatgaagagagtgggacatggggtaatctttatcccttttgttaaaacaggaggcagccatgggctgggagatcatagcccttcctaggcagaatcctgttcactgccaggctatagtaattattactattttgcaatttgaaatatattctggttgtttttctaaatgtgaagacttaccaaatgaattttagatcattctccagaggagattttttttgctcttctcatcttttccaacagtgttctcctgtttgtggagctaaggtaaagaggggacacttctgtctgtttaacagacagtccatatctgtgaggccagcaaatattttcttaaactcatggggagacagcagattcttgccttggtgaggtcattgctgtgccatatgtcctacccccctgtcttcatgcagggaagttggaaatgggggctacatatgccctctcctccccgtctacaagagttgtggttttccatctgatccttccactcttgtcaggggaagaagggggcctggtatctcaggcagattgttgaattcctgttctatcccttctctatcccaccctgccttgataatatgttagcccataccccaaataactgtctatattagacacccccagccagtttctggctgcctgtctttgctgccatgttttttacaagaaggaaagaattcttgctatttttttttcataatttactatttatgatgtatttaagtgttttattaaggacagagttctgttaggggtgggagggaatatttgagggagggctgggtcttagggaaaggaatggggaagcaacatttttattaagtgttactatttgcctctactttgtattgttcagaaatggcaaatacaatataaaagtgatatatggttttaatgtaataaactttaatgagttattt

SEQ ID NO: 560 - DNA, 133 bp, Homo sapiens
gactggagggaaagggtagctgagtctgcttaggggactgcatgggaagcacggaatatagggttagatgtgtgttatctgtaaccattacagcctaaataaagcttggcaactttttttccttttttgcttc

SEQ ID NO: 561 - DNA, 695 bp, Homo sapiens
tctccaaggcctgggactgaccagccccttcctcttggagcctggttttccctactgctgcctgatccctcggctggggagttttcattaacattaatattttgttaattcctgtctctccaacctgaagaagaagagcatttgaggattattctagttatttgcaacctccctttgggtttggccctggagtcctagtagagtggaccctccattcctcctttctgagcccaacactaattaattttatgctcctgctgcagaacccccagtgtgggcctgggggtgggaggatgggacttaggtatgcctgctagacaggttcagggaaggactgatgggggtgtcatggatggacacacctctccacaattccttcaggcatggactggaactttcctcctctaggccgggccctgccctagtgcccacccccgcccccgcccccgcccaaccccaactcactggcactcaagccccctacccctgcagtgcctttcacttctttttttccccagaaatccggggcgggggggtggggggttggtagggatgagtcctgtcaagggggccacaggagaggaggggacaggctctcaggaatcctttattcttgtagtaataataatactaacaaacagttggggaactagggagaaaaccagaccattaaaactgtttgtggtcgaatctcc

SEQ ID NO: 562 - DNA, 107 bp, Homo sapiens
aatacagatgcattatccagaactgaagttgccctacttttaactttgaacttggctagttcaaagatagactcttcttttgtaaagtaaataaattcttcaaaatg

SEQ ID NO: 563 - DNA, 1343 bp, Homo sapiens
ctcgtggtcctcaaggactcagaaaccaggctcgaggcctatcccagcaagtgctgctctgctctgcccaccctgggttctgcattcctatgggtgacccaattattcagacctaagacagggaggggtcagagtgatggtgataaaaaaaaaaaatcatcagcaataagctgatagatggactttccactgtaggagtggacatttcaagccaactgagccttttcctcaagtgccgacacctccctcatctctcttatagtggaaggatggtcagcattaggctgatggggactgagaaggataggaagggatagaaattgccatgtgtataaagctttattctttagcccttaaccctaaggctcagggaaataccctatgttattgtgctccctggattcctgcaactcattttccttccactctggagcagggtgaggggaatgttatgggtaacagacatgcaggcatggctctacccatttctttgcacaagtatggggcccatgtggtagtccccatacccctccagttcctatatttttgtcttcttcctttcccctctttgccattcctaccttgcatttttcctgtcagtgccttagccaaggcaaggagataaggatgctcttcttgctttttatatctgcacattcatacctctccaaagaccagcttttccccagccagggccctcagccttccctgctgccccagtgattgattgagagagctgttggggtttctctgccaatgacccctgggagagggactttggtagggtcatgataaagtggcgggggtctggtcctgctcagggttttcatccttcctcctctccctcctctgtgactgtggatatggttataaggtggttgcacctgggagccctgacaactggctgcacaaattccaaaagtaaaggtgtcagtccctgtggccttccttggggcttctctgaccacatgtgcccaacttcaataagagaaccaagggaccctcattttctgaggtgcttggctctgattcagggctttgcaaggggttagaagctgactgtaaaaatgggaagaggcaacggaagacatttatttctcctttggattttggggagaaccaagccctggtagggaagaggtaagggggatgattcacctccatatttcctaagcaggttgtatagggagccggtggcaggaggaaggctgttttcacaaatgacttgtaatgtcgtgattaaaaaaattcctatattcttctgcaaatcaaacgttctttcccaatccaatccagccttggttttattttaaattaaatattaaaattacacatttatattg

SEQ ID NO: 564 - DNA, 1875 bp, Homo sapiens
gctgcctggagatggttgctgccattgctgctgcctctgcctcggagaagcccactgcccctgttggctgttaacactgcctttgacttcctgactgtcccctggctgcacccaggacttcgggctcctgtgtctcaccattcccaagcccctggccactctaagctgggcagacggagcacgagcacctattcaaggcactgcagccctttggaagacattgtcctgcaagcaggagccagggcaatatctatattcctacagtgactatttttctctgtagagagcctcccttctgttgtagactggactctggctgtgccataagccaggccttcatcagattgggagaggtgacaagatttgcctcagccctaaaagctggagacacagatgtccagagtgattggagaatgtcctgggggaatgaagttccttccacaaacacagctcagttcttagcaacaaactgtttgtttttctacttgctccatctgcagcctacgctgccctggcctcctgcagacagatagtggggttacctggcaaggcctggtgagagccagtgaacctaagctttgactgggtggccttgtctttctggggaggagggaatgtacattcagggagtagccttttgcggaaaaattctctagggctacagacagtcatgtgtgacttctctctgctgtgaaaactcccagagtctctttagggattttccctaaggtgtaccaccaggcacacctcagtcttcttgacccagagcctgaaaactgttttcactgggttccaccagtcccagcaaaatcctctttgtatttattttgctaagttattggtggttttgcttacatctcatgattgatataataccaaagttctatagccttctcttgcagtatttggatttgcttgaaaccgggaaaactgttcccattaggcttgttaatgtcagagtgacactattatgaatctttctctccctttcctctgcctgtttcttctctctttctccttcaaacttgctctgcagctaaggaaggtgagtctactttccctgaggctttggggtcagagtatatgttgtttggagaaagagggcaatcaggactcttctgggacccagatgagttcttcactagcccttctgaaccccttgctccataattggtcttttatcctggctctgaatgaccctgcaggtcatcatggttttctttttttattgtttttttttttttctgagacagagtctcactctgtcacccaggctggagtgcagtggcgcgatctcagctcactgcaacctctgcctcccggatttaagcgattcttctgcctcagcctcccgagtagctgggactacaggtgtgccaccacgcctggctgatttttgtatttttagtagagatggggtttcaccatactggctaggctggtctcgaattcctgacctcaggtgatccacccacctcggcttcccaaagtgctaggattataggcttgagctactgcgcccggcccatggtgtttttctttagggctcttcctacaaccttgagaagtagataggcatcagagtatggtactataggaatcagaaaaattcaaaacaaatgtggattaagtgtttaggctctatgtggctcacgcagccagaatccttaagtctgtgtgtttctgtgtctcaagactgggctcacattctggctttgtccataacaatgctctgggatttcagggagttccctcatttgtaaaatgagggggtcagagcaggtgatatccatgtttcttccctttctgatattgttgtctgtggcatattctttgtatggcgaatttaataaattatattaatgtgtctctttg

SEQ ID NO: 565 - DNA, 5482 bp, Homo sapiens
ttagagactgattatctcatgtgagccaggacattcttccagcaaggttggcctctggatggtgaacgggctgtgcaaaaaagccctgcttcttcccttgtctagagggtggacattggctacaggctcttccatctctcatgacttcatggaccctcctctgccagttttttaaatcagatcaccctccatgttgttcctgacccacaggggaagctgtcctcagttgtagccgtcttgactggatgagtcctggcagtctttctaggcgaaccaagaatgtttgtgtgagggaaggtgtttgctgttgctttactgctgtctgtatgtgccagtgctggaacagaatttggaagattctgaataattagttacttattctcaaagaaaatctttgaaagaatcaggaggtcaagtcaagaacatgaaaatttatattttagtacagtagaaagaacattgggctctgggaattttatctgggttttctcctggcttttttttccctctgtgtaattttgggtaaatcagcctccctagctttcagttttctcttctgtgaaacaggaagactgaaccacgtaattaatatccaaggtcccttccggctctaaaaggctatgattctagatgagaagttatatcaagaaagatgtggccaatcagattgagtcatccaggcatacctttttagcttctgtttgtggagttgtctccagataagaggagatgtgccttcccaataactctttttttttttcctttcagaacattttccagatggcgaggtcacagcagagagatgtggccacctagcctttccttatccccttcccttcccttcacccccatcctcttactcctttcatgtcccatttcagacagagtaaccattaacaaaaaagaagagaaaaagttaaagtcgttatattcaaaagccctaaactaaatattattaataaccccctctgaatttcatgtctctggaattgaggtggtagtgaacagcagatcggtcagcaccagaagtcaactgagttaaggcaggaaaagaaataagcccaaccaacttgccaaaggtatctttgtcctttcacctgggcctcataccaacagcctctccttgtactatatttttaaaactggaactatgaacttcatccatttgcactgttcagacatatatatgtatgtatgtaaaaattatatatacacaaattagctgcacgtatatacatatatatatttctttttaaatttcatattgatggcagtaccttttttagcttgtgtttttacacacctttcactagaatccatgacctccctcgtgctctctttcttttgaaacaaactttaaaaaggaaaaaaaagcattttacagggaaaaatacctctcctcatgaaggacttgaaaagtttacaacctgcttggatttttgcccctttttttgtattgagtatagattccggctcatgggttgccatagagtctaggaacaaggagtatagtttctttatcttccaagagggtgctggggaggagaaagaggtgtgtttctcaaggttaacaggctgtagttctgcagggagagcctgaagtcctggtatgggctcttgattctgtgacaatttttttgatccatctatttctctcactcctggctttctagccacattctgcacctccttcctgctttcctagagcctcggtatgctttccctcaaccgaccctggctcaggaggttgatgccatgggaacctgaacctgaaacacttcatggtagtaatttcctgttttccttgccttttttttttttttttttttttttttctgagacagggtcttactctgtcgcccagactggaatgtggtggcatgaacatagctcactgttaccttgaattctgggctcaggtgatccttccgcctcaccctcctgagtagctgggactacaggtgtgcaccaccacacctggctaattcttcttaaaatttttttgtagagacagggtctcactatgttgcccaggctggtctcaaactcctggcctcaggtgatcctcttgtctcagcctcccaaagtgctgggattacaggcatgagccactgtgtccttccctgccttttttgcagcagggatagtactcaggaccagagttaagctgataccttaggcacacaggttggacttacatagaggaaagaaagcaagaaatgccctatgtacatgaggttttacctcctccattcctgaccaataaccacccataactacggcattctctgtgacttccttaaacagcagtgatgggaagggatccaatagtatcttcaaggccttggggaaacttgcagtgggtcagtggtctgtgccaaccaaacgatagccccatccaagccagctgagaacctaggaaggagtagtaggaatatggttgattagattggatctcccaagttttaattgaaaggagactgaacgaaaacctttctgctttctgtccgttaaagagctcctcatctgatcttgcagctagaccctttgagacttaagagctgcatcccaggatcagaagccagggctaattggggtaggacaatattcccagcccctaagctctgtagataatgcataagaagcaccaagtcaggctcagatgcaactaaaacacatctttgagccttttctttttcccttctcccctttctaaacaaaaaccttcctaggatggcatcttttgctctaactgggagacagtcataattggttgtagtcaattctactaagcagtgttggggtggttggaaagtctcttttttgtaatttgtttttgcaaatcattgtgaggccactttttctttctttctttctttctttctttctttctttctttctttcgttctttcgttctttcgttctttctttctttctttctttctctttctttcttttgctttccttctttcatctcttttttgtaatttgttgttgcaaatcattgtgaggccacttttctttccccttccttccttcctttttttctgttttttttttttttttttcccagagtcttgctctgtcgcccaggttggagtgcagtggcacgatctcggctcactgcaccctctgcctcttgggttcaagcgattctcctgcctcagcctcccaagtagctgggattacaggcatacaccaccacgccccactaattttttgtatttttggtagggcggggtttcaccatgatggccaggttggttttgaactcctgacctcaagtaatctgcccacctcggcctcccaaagtgctaggattacaggagtgagccactgcgcctggcccacttttctttctttccttcttattttgttatgctggcagccatttgcccctgcatggtatgggatcaaagaggacagcctttcctccctcaccttctccaaatctaggtgaaatcacagagtacaaaacgtgagaatgctgaatgtgtaaagttgcagagggatccctaatttgaagactttgacacagaactaacttcttttgacttaaatgaatttaaaatgagccaaaggaccctgaaaagaagacatgttgatttcccactcctagatgctaaagagacttggcaccagctttgttcaaactgtaaaaatagcaatttgcccctactcgctcagagtgggacagtagtgaacagagctgggattccatgcgacagcttgaatgctgaccttcagacatgagacatagggatttggaggccccttagaatgggtagatggtgttatgttccctttctggcatagcattcacttggtgctttggagattaggtgagggccctataggtagttggcctgttggcagaatttatttaggaacagcccttttgaaagtgtcccagtaacaacgcacccagctgcagcaaggaggtggggaaggagggcaccccaaaggacagcgccttcttctcttccacccatgcacggccttgggtgatggaggcgggttccctgtggctgcgtggatcccataggatcaagcccttctttgcatgaagcagtgttgtgactcttctctctccccttcctctgcacttcctttctgtaatccctactgttcttcttagtcccagcttctgcccagggaggcttctacccagacttcttttgcaatttgtccctgggaagagggggtctcccagtgcccccagcttcatcccagcagaaccagcaggatcctcctggtctctcactggccttcctccacacttggtttctatcctcaggggtagaagctcagagctttttatggcccaggagaaaatgtagaccctgagaaacctgtccctgcagaaaggttcccttgggccatgctttgggccctctgctctttatatgtttattctattctccatttttccaccccgtccttaccctaggcctaaacacaggtacagatatgtgcatgctcagggcagctcctaggcctggactgagctctcaggggggaattagataaatattccaacatcctcatgcctggcccatttagtttcatcctttagttacccaggccagtagctttgggttatcccttcctgtagctccaaacccagcacttggagcagcaaaatagggcactgacaggagatgaaactctctcctatctcagaatttgccaacttctgggctgggctcctaggaggtagttttcttgaaggggactgcatcctagttgacctgaattttccagaccaggagggactgctgtgctctcccttctcgccatcatactgtttggctagattcattcagcagtagaagctgtttgatctgttgaccccagcatactgctgtttcttcaccagcttcattgtgtcacagtagcttcctttgggaggatgatgtgatagaacactcagagagagggagggagaagagagatagtgggtatgcttctctagctccccatcttccaggtccacctcttgacttcctgttcccctaaacctgagcacatcacgccaggcctctttgctgccaggacagcatcagctcactcctcagcaataatctagggtatgtgggaaggtcagggctgtggtaaggaatagaatcaaagaggggagtgatacggggtgggggcacttggccgcctgctaaacttggacattaattttatatcatgacccccttttaagccagtgagctgggcttcagtttttcccaggccatgcacatttaatttatttcagagaaactctaattgtattttcactgcagtatcttgtattttttatttgtgatttaagaaatgtgaagagaaaatacacagacacaataatggctaacattgtttctttcattccttgttctagagctaaccactctaaaattgtttggtaatgtcacttagtgtaattaattgtaacatattcttttaaataaattgatttattgatcaaacactt

SEQ ID NO: 566 - DNA, 110 bp, Homo sapiens
acatgcttattccaacgctttgaggggctggaagccttgacacatggaatcaggggcccgggatgtgattcaggacactttccatcctaggaataaagggtagtgcaatc

SEQ ID NO: 567 - DNA, 285 bp, Homo sapiens
cctgggccatgaggagcacggaggagaaggactggcagatcccaggtgctgaagatgtgtgtcagcctgaggcttcttttctctcatttcccatggaaggacttcggaaatgccttaagttcccctctttatcctgcccatgttcactccattgtagggttgaagtctagcttgtgatattttctggcctggctttccctctcagacatagctctttggagaactaggtgttgtaattcagttatgaagctattttctctgtaacaataaagctttttattcctg

SEQ ID NO: 568 - DNA, 321 bp, Homo sapiens
gaggcccgcaacccccagcgctgcgctagagaaacccgcccagcccagagcgggcccgccccgctgcggctcccacgcggggctgggcctcggagtttgccccgtaaagcgaattgcactttgatgttcagaaacccactttgttctcagccacgcaaaactccctgaccccgatgtgatttttctccccggggattcgagagccatgcgtgggacactggaccctactgtctacacgggcttgcacacagcaggtgctcagcaaatgtctattgatttgattgtcttttgaagatgtcataataaagcttctacctcctg

SEQ ID NO: 569 - DNA, 220 bp, Homo sapiens
cctgggctgcagaagagctctggtactgaatggtcaaaaacctgctacagcctgatgcttaactatttccccttcctttcattccactcatgggtggacagggaccacaaagactcatggggcttccccagaactttgtgcttgatggagcaccccagatggaagccttctttttctcctttacctcatattgtaataaagctctgatttctgactcttt

SEQ ID NO: 570 - DNA, 223 bp, Homo sapiens
cctgggctacagaagagctcttgggactgaatggccaagaacctgctacggcctgatggatactctttccacttcctctcattccattcattggttggcagagaccacaaagactcatggggctttcctggaagaacttcgtgcttgatgtaacaccccaattgcaagtcttcttttcctcctttacctcatgttataataaagctctgatctctgactcact

SEQ ID NO: 571 - DNA, 222 bp, Homo sapiens
cctgggctaagaagaactctttggacagaatgtttaagaacctcctacagcctgatgcttaaccctttccatttcctctcattccattcatgggtggacagcgaccacaaagactcatggggcttccctgggagaactttgcacttgatggagcacctcaattgcaggttttgttttcctcctttacctcatgttataataaagctctgatttctgactcac

SEQ ID NO: 572 - DNA, 218 bp, Homo sapiens
ccagacctcgaacatcacagagcaacccttatggagaaacttgcaaccaggacctgtcccagagtgatgcttctcctgcccctttttctcctttccttgggctgacacaccttgtgaggtgttttgtctgttgtcatggcccaagagcccatcctggatcctgatcttaccttcccactttacctcatacaacaataaagctcttttgcctcttcgtg

SEQ ID NO: 573 - DNA, 725 bp, Homo sapiens
aggaaaggtgactgagataaccctctctcctgctctgaaaatgttgttcctcctattccacaatttccagtacgctcttgtttgaatctctccaaagatattcagagactccctattacgaaggtgatgtccaaactcctttgcctatcatccaaagatccacacctgggtctcagatgcctctccagcctcacgtgtcactcctcgcccgtacgcatcctcggctctagccagaccagtctggccactgggcacagcttgggtgttccccaggccatactttagatgtccctgcctccaagcctctgctcactcttccccactctgcctggaccacttctctcctcctccccagcttctgaaatccaccccatctttcagtgcctctcccttggagccttctttgcttgttcccactcacaagaacctgtgccgacttcctagaactcactgcatcccccgcactacttggtaactgcctggtgacatctcttgaattgttatttcactttgcaggcatgtcttccttatctgcccaactaggttgtaaactcccaactgagtggagtcggagaatctctaaatctcagtgtctatcctggggctggctgttgcttagcaaggcttgtgggttggcagcttgaaccatgttctgtcctgatgctcaactgcaggaactgaggtgagaggaggccatgtgacaataaagatcattatgtactcac

SEQ ID NO: 574 - DNA, 766 bp, Homo sapiens
agtggaccttgacttcctcttccttctgattctgcctgaatagctgagaggttccagcaaaagcttgaagtcttgcctggagaatccctctgctctggtgtcaggaaacccaaaatctttctccttaatggcatttagagactttcttctgcagatccatggctgccctgggaactccaaagcacacacctacttcctccccagctcacgctgctgtattctgtgctgcctgaactgaagaaataaaatccagaatctgccccccaacttgctaccagcctgcttgattttcctgtttgtgtcatccttgttctgctcccctgtgtctgctggtggctgctgaggccttggtggacagaggatggggaaaggggtcaggaggaaaaagcttgcatttctgtgtgttttgtgttttttcttctttcggtgttttccttttaaaccaagggactgaaatagcattgagaaatatttttctttcaaattctggttcctttcacctatgtaaccgcatccctcaggcatggccaggaggccgacttcatcctccttcccactatcacctcttcattcttgtgttcctcgttccccactccttccactaacaatctccctggactcctcctccatactgtatgtgcatgcattcacacacacatatgtacatgcacatagatgagatgaatctgcattgtaaaaaaattaaatcacatttagtgctgtataatttgcatgcaataaaattcaataaaattaaatgtaaaat

SEQ ID NO: 575 - DNA, 42 bp, Homo sapiens
agtggaccttgacttcctcttccttctgattctgcctgaata

SEQ ID NO: 576 - DNA, 306 bp, Homo sapiens
agtggatcctgagcctagaagaacacaaatggccaaatatttcccttccgtcttccttctccttctgggcctgcccatgttgttgagaggtcttggtgagggctcaactcaagcatagaggattcttctgtcttggagttcagaggcccaaaacttctcccccaaagccaagccatttaatgacctcagtttgcgtatgtgtggttgctctgggaagcccaaagcacagacctatatccctttgcagcttgtctttttgcatagctcagcctgatgtgaaacaataaaaccagaaatatgcattcc

SEQ ID NO: 577 - DNA, 266 bp, Homo sapiens
gagcagaagaagtcaaacaaagaagaagtccctggggccatgcctttcactttgtagggtgggggattactgagagtcaggctagacctgtgtttagagaagcagttttcacagtgactaccatttccacccaatgagaggctcctatttcccatcatagctccctaccctagggaggcctccatctggaaatgggaggatgaagaggctagaatcatctttcctagtgatcctgacatttagacagcacagaaataaagagcaat

SEQ ID NO: 578 - DNA, 330 bp, Homo sapiens
ccacccgcagtgtccagaggccctcagatcgtctcatacaagggaagagagagccactggctccacttatttcgggtccgctaggtggcccgtctcatctgtgaacttgactctgtccctctacatgtctctttaatggggtgagggtgggggagagagggaattattgtccagtgccaaccccaatgaccccaatcccaacctcaggtgagcagagcctctacttgagggactattgttactataggaatccttacttccccagtattgaagctgaatcagtgagtgtgtacaatgatacataataaatcctggaagtcttgggatcct

SEQ ID NO: 579 - DNA, 463 bp, Homo sapiens
ggatggactggatattaccatcatccaccatcctggctaccagatggaaccttctcttcttccttctcctcttccctccagctcttgagcctaccctcctctcacatctcctcctgcccaagatgtaaggaagcattgtaaggatttcttcccatcgtacccttccccacacataccaccttggcttcttctatatcccaccccgatgctctcccaggtgggtgtgagagagacctcattctctgcaggctccagcgtggccacagctaaggcccatccatttcccaaagtgaggaaagtgtctgggcttcttctggggttccaccctgacaagtagggtcacagaggctggtgcacagtttctgcctcattcctctccatgatgccccctgctctgggcttctctcctgttttccccaataaatatgtgcctcatgtaataaatgtgtctgcttcctgggct

SEQ ID NO: 580 - DNA, 313 bp, Homo sapiens
tgtggtccacagccatgcccttgaggagctggccactggatactgaacaccctactccattctgcttatgaatcccatttgcctattgaccctgcagttagcatgctgtcaccctgaatcataatcgctcctttgcacctctaaaaagatgtcccttaccctcattctggagggctcctgagcctctgcgtaaggctgaacgtctcactgactgagctagtcttcttgttgctcgggtgcatttgaggatggatttggggaaggatcaagtgaaccatccctagtcttccttcaataaataacttttaactcc

SEQ ID NO: 581 - DNA, 326 bp, Homo sapiens
tttggtgcacagacaagcccttgagaagccaaccaccagatgctggacaccctcttcccatctgtttctgtgtcttaattgtctgtagaccttgtaatcagcacattgtcaccccaagccatagtctctctcttatttgtatcctaaaaatacgtactataaagcttttgttcacacacactctgaagaatcctgtaagcccctgaattaagcagaaagtcttcatggcttttctggtcttcggctgctcagggttcatctgaagattcgaatgaaaagaaatgcatgtttcctgctcttccctcattaaattgcttttaattcca

SEQ ID NO: 582 - DNA, 284 bp, Homo sapiens
tgtggtccacagccatgcccttgaggagccggccaccagatgctgaatcccctatcccattctgcgtatgagtcccatttgccttgcaattagcattctgtctcccccaaaaaagaatgtgctatgaagctttctttcctacacactctgagtctctgaatgaagctgaaggtcttagtaccagagctagttttcagctgctcagaattcatctgaagagagacttaagatgaaagcaaatgattcagctcccttatacccccattaaattcactttcaattcc

SEQ ID NO: 583 - DNA, 114 bp, Homo sapiens
ggcactgtgggcactacccaaccccaccaccactgccacctccaccatgtacaacgctgtggggctggagactgaaaccatgaactgacaagtaaacgtgttcctctgctgtgc

SEQ ID NO: 584 - DNA, 234 bp, Homo sapiens
atcccccagggtaccacggaggcgaaggagttggaggtgttttccaggggcaccgatgggcttagagctctcatgatgctacccgaggtttgcaaatccttcatgtcttaacctacctggaagaagccattgagctctccggctgcatctagttctgctgtttagcctctttggtttctgtacaactacctcccaaccccagtgcctcagtcaataaatttgcaaattcatgag

SEQ ID NO: 585 - DNA, 188 bp, Homo sapiens
gaccacagtggccaagatcacagtggccacggccacggccacagtcatggtggccacggccacagccactaatcaggaggccaggccaccctgcctctacccaaccagggccccggggcctgttatgtcaaactgtcttggctgtggggctaggggctggggccaaataaagtctcttcctccaagtc

SEQ ID NO: 586 - DNA, 3916 bp, Homo sapiens
tccagccccaccaaggggcctccagagaccccaggaacaataagtgtctcctcccaccagacacttgccttatttcttcttctctttggtgacctacattgtcaaaactaccaattccaggttaactttgttggagaatttcccccacccccatccagtgggtcacccaggagtaatgtccctccagcaacgttccccctatggcctccagcagagctgatctgcctctcacacaggtcctggtgtctgcctctgcaccgttccctaaatgcagccaccttggcaggttccaggtggaagttggtagaaggcccctgccaggtcacagcaatgctctccttgtcaaggcatggaccagggtcattcagacacattcagatactgcactgagaaggagctggcatctctcagtgtgctcctgccctcccactcctgccccagctgttctccagggcttggggaaacagaaaccactcacatagggattcctggatggcttcaggttcagcgcccttggggctatgaatgggaggctcagcagtgccctgaggatgggcttccttgtcctgtggcctctgctccaggggcagtgtcctttccctgtgctgtgtgcttgtgtgcatgtgcctatgtgggtgaccctgtggaagtgagaaggagtcactgtgatgcttagctgtcctaaatgatggtttgctcaatgccaggactgggtttctggtgatgaatgaatattccagattttgaggagctctaagtggtccaggagtccaagtaagcagtctggctggaataaggcagcatcacggaaattctgtaaggactgacacagagagctcatgctgactgtgatgagaaattgcagcacctctatctcgcaggtaatggagtagtttgttattggtagtctactccaggccaggcagtgtgttatgggctgaggatgcagaaacaggcaggacacagtgctgtcctagcagtgcactggcgggtctctccatgcaggccacaacacagggtcagtgttcacctggtgtcacttccaggcaatgttctgtgcagccgctcttagtattcttccttgaggctcacatcatgtgtccctatcactcttactactctggtcagtctccagctaacctctcaatcaggcaaacattcttcttggaggaatcaggcaaacatctcaaaaattctctttccatcctaccagcagcagtgtgtaagatgggctatttgttctttggaatgactgctccactccacactcacacctctattcacagaccagcatctcctctccttatcaggaacattccttcctgaacatattctgcacctcgtcagccttcaggactgatctgccattttcacctctaaatccccatgtctgaccattagttttcttctctttccttctctccctttctcattctcattccacctgttcttggaactcacggagacctacagtccctgggctttcattttctcctcccagccccctgctgccttctctatgcagcctgccctccatcatccaccccagaattgctctctttcctctcttagctctgttgcccactttccttgggccataccttccctgcagatctccagcccagaaccatcttcccctgttgtcctcctctctcctccaccgggactgctggtcactgcttagaaccgtcatgccagggtcccaaaagtgtgggtgcctgacttcctctctgtgcagcactctctgaatccctcctattcaccttgctgctgttattccccgaatgcgcaacataccccccatcaatatatctcagtatttcatgtctcaataccaatcttttaaactactgcctctaccagaaatgtcttttaatacttcttctgtctcattaacattacatttcaaggctgagctttaatgtcagtgtctcttagacattcagagggtgaaccaccatcccttcaccccaaagaaatgatctctgcttcatttgtgcctccctcaccatgaccccactcttaccatagtggctacattacttcagattcccctaatgtctttccagccagacttggaatcatggagggaaaacattgttacctcggatctcctggttacccagcacatagtagtactggattccagctcataataagtactctatatcatttttcaatataaaatgtatttgtgcaaattctagtcaatactactttatgtaaacagcagtgtaaaatccaaaaacttccagtcctggaggcaggttgtgcagcttaggggaggaccccagaatctggaccccagagtctggaagcaggccagaaaggataaggcaaatgactgaacagttccctcaggactcacgtactgatctcccaaaagaagagagggtctccctggggtggggttgctggaccttcaatccatcgctacagtccagaaggcaattggccactcctaatgtgggcctgccctccctttatttttccagttcttatttcacctgataatattccgtccaattggcaatggcacataaaaattaggatggagtgtgtggacaaatacttcttcatcttcttgtctaggttttagaaatcaccttctcaagggagccttgtctaatgttcctgagactatttcacactctccatgcttatgtcaatgcaggactcatcacatctattcggatattctgtttacacacccatgtcatcccagagaggtgatcacagggcagggacacatgtgtggcatacagttcctagttaagatcccaaatcctgagatattgctgatttgctatggcaggtcgtcaagagaactgtgtcattccaaactcaccaaggtggcttatagaacagaagcagatggatatgaagaggagaggggaccagaccatctccgcaaccacagcccagagctccagtcaccagatagaaaattgatttgatttcatccaatattccttcgaaagagtgtcaaggaatagggtggggcaatgtgtcattctgcattggaaggaggacattttagagcaaggcctaagggcacaggtattagtgtcatattgatcagaattcaacctttgttctaacacatactagagcaagaatttacttgatttggaataattaatagctactggacattatattggtactaaagagaaagaatacttgacagctctatgcccacactcacattacagctgatgtgaaagagattctggaaatccaaatgttccccagaaattctgatatcaaaacattccaataacttttttttttcaggcgcagtctcactctgtcgcccgggctggagtgctgtgagctgtccgtggtgctgaattcactgtgacgtcactcctgtctctctttgctttcttctgactgacatttattcagccttctctacaggaatctcttatgttcccccacatgcaggtggtttttcagtaggctcctgaagagtgatctcaactttccaggaagaaaagagggcaaagggaacaatgtgaaaagaagcagaaaatcataaaagaccatgtgtttgataaacaaccagattgtttctggttccctgccactataaaaacaccatgagagcatactcatacatgttcccttataaatctgcgaggtagtttctttggtattcttgcccaggaaatgggttgattcatcacagattttatatatatacttttttttaactaagtgtgagataatatcttattgtttttgtaacttgcattttacaagagttctgaccagcaccagataagcttcagtgctctcctttctttggccttaatattattggattaaagaattactgcctctcactaggagcatcatttatttaccattattttcaatttcatattaaaactcaatttctagtagagtc

SEQ ID NO: 587 - DNA, 196 bp, Homo sapiens
gcagacagccacattgggcagcgcccttcctctccaccctcccagacctgcctcttccccctgcttccacctcaccccacttatccctctccataaccccacccttgcccaccccacccccacccccaccaagggcgcaagagtagcggtccaagcctgcaactcatctttcattaaaggcttctctctcaccagc

SEQ ID NO: 588 - DNA, 234 bp, Homo sapiens
agcctgcccatcctcccatgagagactcttgttagtcaacacatctgtaaataaccttgagataacagatgagaagaaatctgattgatgctggatggacctatcacaataggctgtggacttacttgccaccagcttgtgcatttagtgtgttccttttactttttgatactgtgttgtatgaaacccttttgtcctttgatttggttttttgtttttgtttttttagggggg

SEQ ID NO: 589 - DNA, 527 bp, Homo sapiens
cagatgagcctatggactcagtagcacaagtactgttccccagctgccttgtttcaacagacatgcaaagatcctaggagacagtccccatagaccttcagacattaaaaagggagccgtacagtttgtttgaagcacttcgtcttacccatttatgtaggggccccaggaaacctacacacagccagaatgaggttcccaaaggacttacattaattatggctcttgcttcctttcacaaatgagctgaggcctctacttttttttttaagctgcatacgtgaggcttaccttcttcaggactagttaaccagaggggcttcctttgtatgttacatgcctggttacatgggcctggacagcatgtcctctacctgtgacttctcattttcctgtttacactggggatttggagggggcaggcaaagtcaaagtgaatgacctctgtccacccacttttttattgcactggcttgaatacagtagcagtgttgatagaatcattttattcaataaatacttaaaat

SEQ ID NO: 590 - DNA, 573 bp, Homo sapiens
cctgcctcctctcctatccctccacacctccctaccctgtgccagaagcaacagaggtgccaggcctcagcctcacccacagcagccccatcgccaaaggatggaagtaatttgaatagctcaggtgtgctgaccccagtgaagacaccagataggacctctgagaggggactggcatggggggatctcagagcttacaggctgagccaagcccacggccatgcacagggacactcacacaggcacacgcacctgctctccacctggactcaggccgggctgggctgtggattcctgatcccctcccctccccatgctctcctccctcagccttgctaccctgtgacttactgggaggagaaagagtcacctgaaggggaacatgaaaagagactaggtgaagagagggcaggggagcccacatctggggctggcccacaatacctgctcccccgaccccctccacccagcagtagacacagtgcacaggggagaagaggggtggcgcagaagggttgggggcctgtatgccttgcttctaccatgagcagagacaattaaaatctttattcc

SEQ ID NO: 591 - DNA, 809 bp, Homo sapiens
ggccctgcattccccatcccacccccggctggactgccctctccttcttggtgattcaaaggttaatagaggctgaggagattgcaggggaaacacccttgctgcatccccaagctcccccggtggaaggaggagctttctcctctggctgagtttgagaagctgccatgcagcccctagccccttccctcctcctggggcctccagcccctcacactgctgttcccagtgatatttgggatctgactgaagccagaggctctgtaaaatcagaccatagtggaagtcctcagccccctggccccttccgcaatctcctcccccagtctcccaaagagccatttcaacagagaagggaaatgacaaaggggcagctggccagataagctaggatgagagcagagactcagtgtgtgggtgtcccttcctgcttccccttcaggtcttggtttgttctgaagggacgttttatagtcactatccacatgccagtgtgaaatgggcatctatgacgtggtcagggtgtccattcctaatcatggggcagatgccacaagcattcagaaaggagtctgaaagggtggccacagccccacgtggtgtgccctggaggcttaggttggtctgaggttggcacctcaatctacaccagagcccagggagtcccagaggcaagtttcacagaattgtcaaatgatcccatttccttgagtctgtttttttttttgtttttttttgttttttttttggcagagataatcgtgtcttaaaagttgtttttaaatgacaataaaacaagccagaatgtc

SEQ ID NO: 592 - DNA, 154 bp, Homo sapiens
gaacttccacacctgaggcacctgagagaggaactctgtggggtgggggccgttgcaggtgtactgggctgtcagggatcttttctataccagaactgcggtcactattttgtaataaatgtggctggagctgatccagctgtctctgacctac

SEQ ID NO: 593 - DNA, 291 bp, Homo sapiens
gctggaacagaccttcctggcccacttcctgatcacaaggaatcctgggcttccttatggctttgcttcccactgggattcctacttaggtgtctgccctcaggggtccaaatcacttcaggacaccccaagagatgtcctttagtctctgcctgaggcctagtctgcatttgtttgcatatatgagagggtacctcaaatacttctgttatgtatctgtgattttatttcttctttgggtatagggttgaggggaaataagttttgagtgagaaataaacgttttagctg

SEQ ID NO: 594 - DNA, 54 bp, Homo sapiens
aagcactctgagtcaagatgagtgggaaaccatctcaataaacacattttggat

SEQ ID NO: 595 - DNA, 557 bp, Homo sapiens
ggccctgaccctcttctcccggtcccatcttctgagagggcttctcagcctggaaactatggaaacagcatcaaagagaaaggaatgtggggggtttccgctgccccccacccccagcggcccaccccatgcctcagcttcatgtctgtcccattcctataccatccccaccctgttgtatgtattataggatttgtattttctccttttttttcccccttccattccttctcccctcttgcattcaagattatgaaactttgctatgggccctgcacttcctttgcttcctcctgttcaccctggtggtgtacggatgaggcggggaggtgggacccccaaacatatatcagcccaacagccctaagtctccttctttattattaggaaaacaacaacaacaacaaacaaaaaaatggcgtcatgaatatgaacagcattgtcagatgaattagttgaagtggttttttttttgttttttttttttttttgtactgtgtcctcaaatttaatggattaatgtgtcttgtatatataaaaagaaaacctctaccttc

SEQ ID NO: 596 - DNA, 172 bp, Homo sapiens
ccttgttaaccctcagaggccttcaagtcctttccacctctcacccattgcccaccattaataagcttagcttctcttgccacctcaggggcttggatatgtggaatagtgaactggggccatgtcagtttgtcactcacccaaactgaccaataaaacctttatttatgct

SEQ ID NO: 597 - DNA, 844 bp, Homo sapiens
ttaggacaaccctcacttcactcatggaccctggagccagccactgaccccgcctgggaacaacagtcattcttcctctttgttaatgtgccagaacctgggaggcttctctgtttatctgtttggcatcccttcctcctaaactaagaaggatcctggacagggagaagtggaggaggataaggtaccaggactcaggcttctcatcccctcctcccgcaaagcggttttctgaccctcagggcctctcggaatgtagttgctcgaggtaaccgctagagggtgcgcacctggatgctggatggggacggctgcgggcatctgcagggtggagggggccaccatccagtgtagggcacaaccctggggactgccctccatagcctgtcccgactgccgactcctagctctcatcgcctcggcgcctcccaccttcaccctctcggggatgcctccccaagagggtagttaggggtggggaagccgcctccacccagggggcgtggtgggggcggagggaaggagggcggcggggcacagagacagagagcaaggctgtgaaactgaggcaccgttcctagacatctcggtgctgtgtcgttcattcaaggagagttgagatacagtgaaatgagccagggcgaggagggagggtgaaggaacggagggcgggcggctccgaggagcgagagtcgggctgagggcaacctggcgccagggaaaattctggttattcaccacttctacagctctcctgccgctccctgcagaggatgctcgttttgcagagaaggcagtgttcctctattcccttcttccgaattaaaaataccccctcagagcg

SEQ ID NO: 598 - DNA, 170 bp, Homo sapiens
tgttatctgtttatctttgtgggcagagcaaactttttaccacagtttcctggtacttgggactgtattagagaaaaaaaaatattgatttattcagcacctatttattacatgcctactgtgtacaaagaagtgtgctaggtgccatcacaaataaaagatgaattagg

SEQ ID NO: 599 - DNA, 2185 bp, Homo sapiens
aggccgaggatggatgccctgtgccagtgaccagagcacccagggctggccagtcactgagggaacagcgtctcggaactgctggtcctcattccttgcttcccgtccccccggtagactctgtcctgctggtcccaccacacatggctgggacatctgttcccagctgtaggcccttccaccagctggggagctagagggagcaggcccaagggcagagcagaggctgaggcacggggagccagccccactcggggaccagaagtggaaccaaaaacaagaaaaaactgtgagagattgtgtctgcccctgccctgcctgggacccacagggagactataatctccttatttttttactcctactccccagaggggccctagtgcctctgttcctgaattacataagaatgtaccatgccgggaagccagagacctgcaggggcctcggcccctcacatcgtgtatgtctctccttgatttgtgttgtgtccagtttggttttgtctttttttatttggcaagtggaggaggcttttatgtgacttttatgttgtggttggtgtcttaactctcctgggaaaaggaggctggcacacactgggatgccgcagcctggccggctgtggggtggtttgggaggatccatgtcggctctgcctgcagtgaccagtgctctgtggggcagaggagctgaccagggagggaggtacccatgagcagagggtagtgggagagtgtaaaggagggtttggtcctgtctgcttcctcaccttgagagtaaagtgctgccctctgcccccaacacacacacatatcaattcctggattccttagtcctgctggccttgggctggagcctaggaaagtggcccccaaatccttagtgagctaaagctgggtctgaaatttggtcagtggggaggggtagttttcttttcttttttctttttctttttttctttttttttttgagatggagtctcactcttgtcacctaggcaagagtgcaatggcacaatctcagctcactgcaacctccacctcctgggttcaagcgattctcctgcctcagcctcctgagtagctgggattacaggcacacaccaccacgcttggttaatttttgtatttttagtagagatgtttcaccatgttggccaggctagtcttgaattcctgacctcctgacctgcccacctcaacctcccaaagtgctgagattacaggcgtgagccaccacacccagctcagggaggcgtagttttctttaattttaaatttaaacccaagtttattggcagactcccttttgacctccctttgcctccccatctggtgctttcttgcatctacaccccagggccctgtggtggggctgcagggggaagctgtgcacctgagatgaggctggaacgggaattggcctctctgctcccttcttcagtaagcaaggagccccgcccctcaggcccagcctctggcaagaggtggtggaatccttgtgccgggtagtagaggaggataagggcaaaaccaggcccaggccagtgcctggcttggtctggatgggacactgtcagagtttggccacagcctgtcctttacttcatccacacctatgaagctattccctaaataaggcatttcccaagttagtcgctacctaatcagccttgagaagaatcctttcctcttctttgatagtgggtcgggggattcttcaggaatggtttggagctgggagtgggtagggggattttaaatgttccatatgggagccccaaaggaactggatgggctgcagtgaggtgggggcgggtgggcagggaatgggagaggggaagtcttggcagggaaatcccttttggccacacagtttacaaacccagtatcatgtctgtctgtgtgtctctcaaggtgagagtctgatttttataccaaagaggaaatgattttttttcatattttgtttgtctatattatataaatatatatatacagttatatatatatatattattttttggttctctctcgttttttagggagggaagaaagtaccaagttgcattgagctgtaattaaggaacattataatttatgacacatttctatacttgcaaaaattatatcattttatggatataagagaaaaatgcctttttataaaatttcaatttctg

SEQ ID NO: 600 - DNA, 2547 bp, Homo sapiens
aggaaggcaagacaagcatgcatccgccgtactctttggggcagctggtcccggagaggcctcgacccaccccagtgcttgttcctctcatctccccaccggtgtcccccagcagcctggggtctgacaatacctcgagccacaaccgaccagatgccagggacccacggagcccttatgacatcagcaatacagactacttcttccccagatagctggctgggtggcaccagcagcctggaccctgtggatgataaaacacaaacgggctcagcaaaagatgcttctcactgccatgccagcttatctcaggggtgtgcggcctttggcttcacggaagagccttgcggaaggttctacgccaggggaaaatcagcctgctccagctgttcagctggttgaggtttcaaacctccctttccaaatgcccagcttaaaggggctagagtgaacttgggccactgtgaagagaaccatatcaagactctttggacactcacacggacactcaaaagctgggcaggttggtgggggcctcggtgtggagaagcggctggcagcccacccctcaacacctctgcacaagctgcaccctcaggcaggtgggatggatttccagccaaagcctcctccagccgccatgctcctggcccactgcatcgtttcatcttccaactcaaactcttaaaacccaagtgccttagcaaattctgtttttctaggcctggggacggcttttacttaaaccgccaaggctgggggaagaagctctctcctccctttcttccctacagttgaaaaacagctgagggtgagtgggtgaataatacagtatctcagggcctggtcgttttcaacagaattataattagttcctcattagcattttgctaaatgtgaatgatgatcctaggcatttgctgaatacagaggcaactgcattggctttgggttgcaggacctcaggtgagaagcagaggaaggagaggagaggggcacagggtctctaccatcccctgtagagtgggagctgagtgggggatcacagcctctgaaaaccaatgttctctcttctccacctcccacaaaggagagctagcagcagggagggcttctgccatttctgagatcaaaacggttttactgcagctttgtttgttgtcagctgaacctgggtaactagggaagataatattaaggaagacaatgtgaaaagaaaaatgagcctggcaagaatgtgtttaaacttggtttttaaaaaactgctgactgttttctcttgagagggtggaatatccaatattcgctgtgtcagcatagaagtaacttacttaggtgtgggggaagcaccataactttgtttagcccaaaaccaagtcaagtgaaaaaggaggaagagaaaaaatattttcctgccaggcatggtggcccacgcacttcgggaggtcgaggcaggaggatcacttgagtccagaagtttgagatcagcctgggcaatgtgataaaaccccatctctacaaaaagcataaaaattagccaagtgtggtagagtgtgcctgaagtcccagatacttggggggctgaggtgggaggatctcttgagcctgggaggtcaaggctgcagtgagccgagattgcaccactgcactccagcctgggtgacagagcaagtgagaccctgtctcaaaaaaagaaaaagaaaaagaaaaaatattttccctattagagaagagattgtggtttcattctgtattttgtttttgtcttaaaaagtggaaaaatagcctgcctcttctctactctagggaaaaaccagcgtgtgactactcccccaggtggttatggagagggtgtccggtccctgtcccagtgccgagaaggaagcctcccacgactgcccggcagggtcctagaaattccccaccctgaaagccctgagctttctgctatcaaagaggttttaaaaaaatcccatttaaaaaaaatcccttacctcggtgccttcctctttttatttagttccttgagttgattcagctctgcaagaattgaagcaggactaaatgtctagttgtaacaccatgattaaccacttcagctgacttttctgtccgagctttgaaaattcagtggtgttagtggttacccagttagctctcaagttatcagggtattccagagtggggatatgatttaaatcagccgtgtaaccatggacccaatatttaccagaccacaaaacttttctaatactctaccctcttagaaaaaccaccaccatcaccagacaggtgcgaaaggatgaaagtgaccatgttttgtttacggttttccaggtttaagctgttactgtcttcagtaagccgtgattttcattgctgggcttgtctgtagattttagaccctattgctgcttgaggcaactcatcttaggttggcaaaaaggcaggatggccgggcgcggtggctcacgcctgtaatcctagcactttgggaggccaaggtgggaggattgcttgagctcaggagtttgagaccaacctggg

SEQ ID NO: 601 - DNA, 437 bp, Homo sapiens
cggggcttccctcagcatgttccctctcctgtttgccacggatccagaggccacctgccctgtcttctcgtacccctttcactcttgaggcctgggaggtgaaaaaggccagactgtgcccaggattgattcaattttgcttttactcccagcttccctctcaaaagagagtgaagtctcatttgtcatgtgtcttcagttccccaacttggcatgaacatttgaaccaaacataggaaactaccattaggttgaaagcctgaggcagctgggatggtctttcttgtgtctcttctttgcaccccagagcatgatataagtggtcctaacagattctggataatggagaagccctctgctggttttcctggcattccatgtagaataggtagagaatatttaaccaatgagcaaataaatgttggcatgtttcatga

SEQ ID NO: 602 - DNA, 3943 bp, Homo sapiens
ggcccttcctcatctccatgctctttcaccctgccaccctctgctgcacagtagtgttgggtggaggatggacgagtgagctaccaggaagaggggcgctgcccccacagatccatccttttgcttcatctggagtccctcctcccccacgcctccatccacacacagcagctccaacctggaggctggaccaactgctttgttttggctgctctccatctcttgtaccagcccaggcaatagtgttgaggaggggagcaaggctgctaagtggaagacagagatggcagagccatccaccctgaggagtgatgggcaaggggccaggaaggggacaggattgtctgctgcctccaagtcatgggagaagaggggtataggacaaggggtggaagggcaggagctcacaccgcaccgggctggcctgacacaatggtagctctgaagggaggggaagagagaggcctgggtgtgacctgacacctgccgctgcttgagtggacagcagctggactgggtgggccccacagtggtcagcgattcctgccaagtagggtttagccgggccccatggtcacagacccctgggggaggcttccagctcagtcccacagccccttgcttctaagggatccagagacctgctccagatcctctttccccactgaagaattctgcaccctctggacttccctcttcttccttcctttctcaggctcaaggtgtggggggcaaggctgagtattaggggagcttctgagttctgaatctttgggtgacctgcttggagtctcaggtccaaatacttgaaatctgtgagaagtccaagttcatgggcttttggaactggaagaactttgtacagccatggattccaacataagccatgttgcagatgaagaaactgacccacacggtgagacaagcacaggtgggtctgactcttcctccctgccctgagatccatctgtcgagtgccctgttttttccccactttgaactgactggttactctaaggaagtgaactgaggatgttagctttaagccaacccagcctctttgtccacagcagagctgaggtgaacagctggaaccctgctacatccgtgctgctccagtctgttctgctcatggctccatccttctggctgtcactcttcctcttccccttcccaaccaaacctgagcagctttgaagcagaacttgggaaggacagggctgctgctgccagcgacacctcagaaagcatagcctcggcttcctgccccatgtgtccctggaagctgtaccctgactctgcttccagaggccagcagatggtgggttacagacgggtcagcctgccaagtgcacctgagggacctgacctgacacaagccattttgtccctagagcccagctgggactcctgcttctctaggcagggcagagggaggagacacagcacaggcacagagcatgggacagggacccccgagtctggattcaagtcctggccctgctagtaactcatgtgagccagcttgagcaagtcccttcatcttgctagagctcagcttccttgcctataaaacgtaggtggcaatgccctcttcctgaggttgctgggaggataaggcagtgcttgtgaaaaagtctagcgctgtacctggcacagagtagatgcttcatgaatgttgagtctgacaggcaactggagctggtgagaatggggtcccctgactgtcatgccagcctccctcccaggcccactcttcccccctcttccctgaggaaaccaagtctcccttatcaggaagagctgggggagctgggaggaacattacaggaacaccagagggagtctagcgggtgggcaggcttctctctgcagccccctcagcagtttcattccattcctgggctgaacccttgccctggccctgcctcccttctgggtcagcacctcctgacacaggtgtgtgctcagggaccccaggctctagtcctgtactggctgtggaagcctatcactgggacaggaagccagtggctgcaggagacaggcctcagcgcatctcgtctgtcaggatgggctcacggacaccttttcttggtagcagggagtgtctctgcactatggaaactttccctcttctagagcggattgggagttgcctgtattatgcctgaaccctccttgaactcatggtcctggggaaggcgtcttggaaccagaaacagcaacaggaaaggagcctccctctgaagggtaggatgccggcctgaggccctccctcttggctctcccagggcctgggctaccccgaggccccagcagctgctgctgtggctgtacttgcttttaatatttcccatacatggctgttgtccaagttaagtcaccaaatggtgctagaggggatggcagagagcagcttgtccagctcctctccatgacccggttaacacacgagtaaacaggcctagagcttgtctgctgtttgacctcttttaagacccggctgtgctgcatctacaaaatgaagatgacagagctagccgaggtcttcagcaaggaagaaaggggtcagtgtatatgaaagggttacctgggcagtgtcattccctccatctctgtacgcagccctttgggaaccatcacaataaggaagaggtgagggcagaggtgaaggatccactgcccaggcaaggtgctaccatgtggtgggagagtgtgaaccctcaagtgcactgggaagctttggggaaccacagtctcttccacccttgggtcgtgtgtcgtcctcttctcttgatgtcagggaagcccctatgcctccttcccgtggtggggctatctctgcagagaatcgggtgcccagcttaatgctgggcaaggactggaggaagctccagatctggaggtggcagagatactggatggaaacctggagcaagggtttgggaggggaagtgaggaaacaggttgagactatctccatcagagatggcaaggccacaggtgatctgagaactatttttgtctgaaaagaaggcatgcacaggctctctgcttttgacaggtggcgttgcagtgggaggaaggcagcttcctggcggggagatagaaatactagaacagctggtaccaagttattgaaaatttaaaagcaaacaagacacagcagcccccaggtggtgtgttctactgaggaaggctacggcagaggaagggcaagaccgtttcccccaatggtcttgaaacggaagaggaaacagggagggctctttggatggtttggggacctggggctgtttgtatcccagtattagctcctgttactaagggtctgctctgcgccaggtcctcagcatgcgttgtctttattccgcgtgacaatcctatgggaaggggcctccacctacgtaacagaaatgcggctcagaaagaccaagtgacagctagtgagtagtgctgggcctgaaccccaaagtccacactcttgctatagccgctgaggcaggcagaagagctccttgggaggaaagtaaggggcattcaaagccttctctgaatcactccccaagccagagtagacctggttccagttgtcccccccttgtttccgggcagagtcaggcaggtgtcataccatccctccccgcccaaccagtgctggccagactcccattcaccgaccttgactagacagcgaacagccaccttttagtattcatcccaacaggtccaggcggtcagtgtgatagccacgcagttcctaagggactgtaggtctaggaatcattaggacactcactcagccaccctcgatgcccccatcttccccacactgcccttggcctccccgctctgcacgcctggagtatttgcactggtctagcctactccaggtcagactcattaggaactcaagattctcgtaaagaaagttgtttcc

SEQ ID NO: 603 - DNA, 469 bp, Homo sapiens
agctggcaagctacttttcagcctcaagctttacacagctgtccttacttcctaacatctttctgataacattattatgttgccttcttgtttctcactttgatatttaaaagatgttcaatacactgtttgaatgtgctggtaactgctttgcttcttgagtagagccaccaccaccatagcccagccagatgagtgctctgtggacccacagcctaagctgagtgtgaccccagaagccacgatgtgctctgtatccagaacacacttggcagatggaggaagcatctgagtttgagaccatggctgttacagggatcatgtaaacttgctgtttttgttttttcctgccgggtgttgtatgtgtggtgacttgcggatttatgtttcagtgtactggaaactttccattttattcaagaaatctgttcatgttaaaagccttgattaaagaggaagtttttataat

SEQ ID NO: 604 - DNA, 74 bp, Homo sapiens
cctcccaccctaggagggagggaaggacaccgtcctagggtataacctggcaataaaccgtgcctctcactgtg

SEQ ID NO: 605 - DNA, 521 bp, Homo sapiens
tggtagcagggaactgcctcctctccccaccagcaccatggctggcatcgctcaggtgggcagggtagagtaaacaggaggcatagctgcagcttctgtggcagagcttgccttagcttctcattctcttctttagcccccagcccaattgccatcaagactcctgaagccagctgtgcttgaccaaggatgggccataaacaatgagtaaacagtaaagtgtggatcctgctttgagctgtgtcatctagcagacctgcctcatctctgagcctccttcattcccaacccctgcctctggtggacctctggtgggcaggagcttggactgctctggctaggaccccagtaagattgtggcaagacctggcactcctccaagcttggcacagtgagcccaccagctcagatggttgatcttaccataccctcatagtaccaagaatggactgccccctaagaaacctgtttgagaatcactgaattataaatataatccataggccttgaggcccaagatt

SEQ ID NO: 606 - DNA, 291 bp, Homo sapiens
agagggacgagggccagactgaagcagcacaaggccggggacacccatgccaagcagtgggagcacgcaggacagacacagcaggggtctggggcacggagccttgctggcatcagcatcagcccttcctcccagagccctcattccaattccaagctaagaaggtattggggcagaggctccccaaattggggtgatcccccaaggagtgatacatatattgtgtatatatttacagctgtattgtaaaagtggggtccctgtccccagctgctcctggggagtagaagc

SEQ ID NO: 607 - DNA, 62 bp, Homo sapiens
agaggcgtcctgctcgctcttccgcaccgtccttcccggttaataaaatgccctgtacgctt

SEQ ID NO: 608 - DNA, 420 bp, Homo sapiens
tggtaccctccaggtaggaggagccctgggcatgggtgggcggggcgagtgacctgggggaaaggggcctctgactcttttttcttggcttcccgcaatccagaccagcgccaccgcctccgacagtgtcctcgctctacctctgacctctccggaggttccgctgcctccaagccggacttagggcttcaagaggcgggcgtgccctctggagtcccctaccatgactgaaggcgccagagactggcggtgtcttaagactccgggcaccgccacgcgctgtcaagcaacactctgcggacctgccggcgtagttgcagcgggggcttggggaggggctgggggttggacgggattgaggaaggtccgcacagcctgtctctgctcagttgcaataaacgtgacatcttgggagcgttc

SEQ ID NO: 609 - DNA, 562 bp, Homo sapiens
gccaagcagaccttccctctcatcccaaggagccagagtcctcccaagatcccctggaggaggagggatccctgctgcctgcactgggggtgccaattcagaccgacaagatggagcattgatgggggagatcagagggtctgaggtgactcttgcaggagcctgtcccctcatcacaggctaaagaagagcagtagacagccctggacactctgaagcagaggcaagacaaacacaggcgctttgcaggctgctctgagggtctcagcccatcccccaggaggactgggatttggtatgatcaaatcctcaagccagctgggggcccaggctgaagacctggggacaggtcgattgctggaccagggcaaagaagaagccctgccatctgtgccctgtgggccttttccctggggcagcaccttgccctccccaggggatcactcacttgtcttctatgaagacggactcttcatgaggttgaatttcatgccagtttgtatttttataagtatctagaccaaaccttcaataaaccactcatctttttgttgccctcccc

SEQ ID NO: 610 - DNA, 995 bp, Homo sapiens
ctctgccccctcccctggggggggagagatggggcggggcttggaaggagcagggagcctttggcctctccaagggaagcctagtgggcctagacccctcctcccatggctagaagtggggcctgcaccatacatctgtgtccgccccctctaccccttccccccacgtagggcactgtagtggaccaagcacggggacagccatgggtcccgggcggccttgtggctctggtaatgtttggtaccaaacttgggggccaaaaagggcagtgctcaggactccctggcccctggtacctttccctgactcctggtgccctctccctttgtccccccagagagacatatgcccccagagagagcaaatcgaagcgtgggaggcacccccattgctctcctccaggggcagaacatggggaggggactagatgggcaaggggcagcactgcctgctgcttccttcccctgtttacagcaataagcacgtcctcctcccccactcccacttccaggattgtggtttggattgaaaccaagtttacaagtagacacccctgggggggcgggcagtggacaaggatggcaaggggtgggcattggggtgccaggcaggcatgtacagactctatatctctatatataatgtacagacagacagagtcccttccctctttaaccccctgacctttcttgacttccccttcagcttcagaccccttccccaccaggctaggccccccacacctgggggaccccctggcccctcttttgtcttctgtgaagacaggacctatgcaacgcacagacacttttggagaccgtaaaacaacaacgccccctcccttccagccctgagccgggaaccatctcccaggaccttgccctgctcaccctatgtggtcccacctatcctcctgggcctttttcaagtgctttggctgtgactttcatactctgctcttagtctaaaaaaaataaactggagataaaaataa

SEQ ID NO: 611 - DNA, 841 bp, Homo sapiens
aggtgtatgccacacctggccttaaagagggacaggctgaagagagggacaggcactccaaacctgtcttggggccactttcagagcccccagccctgggaaccactcccaccacaggcataagctatcacctagcagcctcaaaacgggtcagtattaaggttttcaaccggaaggaggccaaccagcccgacagtgccatccccaccttcacctcggagggatggagaaagaagtggagacagtcctttcccaccattcctgcctttaagccaaagaaacaagctgtgcaggcatggtcccttaaggcacagtgggagctgagctggaaggggccacgtggatgggcaaagcttgtcaaagatgccccctccaggagagagccaggatgcccagatgaactgactgaaggaaaagcaagaaacagtttcttgcttggaagccaggtacaggagaggcagcatgcttgggctgacccagcatctcccagcaagacctcatctgtggagctgccacagagaagtttgtagccaggtactgcattctctcccatcctggggcagcactccccagagctgtgccagcaggggggctgtgccaacctgttcttagagtgtagctgtaagggcagtgcccatgtgtacattctgcctagagtgtagcctaaagggcagggcccacgtgtatagtatctgtatataagttgctgtgtgtctgtcctgatttctacaactggagtttttttatacaatgttctttgtctcaaaataaagcaatgtgttttttcggacatgcttttctgccactccatattaaaacatatgaccattgagtccctgct

SEQ ID NO: 612 - DNA, 570 bp, Homo sapiens
ggctgctcatctgaccactgggcaccttagtgccaacctgaaccaaagagacctccttgtttcagctgggcctgctgtccagcttcccaggtgcagtgggttgtgggaacaagagatgactttgaggataaaaggaccaaagaaaaagctttacttagatgattgattggggcctaggagatgaaatcactttttattttttagagatttttttttttaattttggaggttggggtgcaatctttagaatatgccttaaaaggccgggcgcggtggctcacgcctgtaatcccagcactttgggaggccaaggtgggcggatcgcctgaggtcaggagttcaagaccaacctgactaacatggtgaaaccccatctctactaaaaatacaaaattagccaggcatgatggcacatgcctgtaatcccagatacttgggaggctgaggcaggagaattgcttgaacccaggaggtggaggttgcagtgagctgagatcgtgccattgtgatatgaatatgccttatatgctgatatgaatatgccttaaaataaagtgttccccacccctg

SEQ ID NO: 613 - DNA, 779 bp, Homo sapiens
gccttccaggcccctcatgcagacctggggtcctcctgggccctggcccccaaacctcttggcacccggttgttaccccctggcagcttctcccccaaactctcctaccatgtggccctgctccttctcccgtgtctgtcttcccacagttttctcttgacccaggggctctcttctgcccacctctctggatggcccccgttctctccattgcttgttagccaggcccccacccccactgagtctgccctatgacctgcctttggcatgttacccaagccatggagagagccccttctccatccctgtcctgtgccccccaggctgattgggagggagggcacctggaacactgggcatgatctccagctctgcccttgccctgccaagctccctgccctgttgatgctgaactacagccttgggacaggcaggctttggggctggacgctgtccaggcattcctggtgaggggaaggggaccctgtcatcctgctttatttatttgggtcccaacaccccgcagccgcatgccccttatgtccctcttctccctcttgcatgctttacctgtcccacacccatgccaatgtgccaagtctcccttggggacccagctgagtctgggtgttcccattgggttgggccaggcaaggcctctggtgcccgctgccgtccccctgcagtgggctctgctaggcctgtgctgagcaacagctgttattgtcatggtttataaacaataaactgtgatgccaggcacatctctgccttccctg

SEQ ID NO: 614 - DNA, 133 bp, Homo sapiens
tttgtcctcacgctcccaagactggtttttctactctcatgcattccagaggcccccgtgcctcctcgttgttggtacagccggacacggggtgctgccacccagaataaagccactcacactgactgggctc

SEQ ID NO: 615 - DNA, 1384 bp, Homo sapiens
aacctttgagtacatccagccttagttcttggggtgcagtagtatgtacccaagggcagatgcctcttggggaaggccatggggacctgaaacattgccccatggaaatgtcgaccctgtgcggacattccgcatactgccatgaagacggtctctgtgtcctcagctcaagaatcctgtagcttgtcccatcataatccattcacccgttcatcatgtgtactgagcagctaccatgttcaaggtaatatgccaggcgctgtatgtctccactgccaagtagaagtgactcaaaaccctctgacaaggatattcccttggctatggtcctgccaggtgcaggcccaggcccatgaccccacctttactaagcacaagtacttgccactgccatcactgccaagtaactagatgtctctgtttccctgccaatgatcctgcaggttctgcccggtctggttatcttcctgttcctgtagcatagccaggcactgccagtcacctgtgcccccattgctgtcagcagatgtcttgggtcctgagtgtgggtatccacttttacccgctcactgccacctgtggacactctgtgtctaccctctgagtgggaacatacttctaagttccctgcagtctctgtcctgtggtagaccatctttttgtaaactgcgagcttcctcttccctgtaccctctgccccagtcgtgaccccctaaaagttaaggggtagttggcacctccttattaatatgccagcctagatcccccccggtggaggggcaaatggctgaatccttgtgtgatatttttttcttcgcttgtttatttattcatttatttaattgtatttattcatttactaactttatgtgttaccaattaattttgtttacccattcctttatccatccctcccctccttttcaggtaaggagacaggaggagtaggaggaggcagggcctctccatgccagcctctgtggtccttgcccaaacccatcagcgcaatacttgaaccttctcccaggtaggggcaggaggagccacatgagagagggagaaggaccgcgtttacctttagagttttgttttgttttttccttctgagtttgctgttggtgcaggaataagggaaaggcccaaggtatccaagcctggggaagggcaggccagccagcacctctgccttctcagggacaagagtagtcctttaccaccctcactctgcctgtcccctctcctactctacagcattaaagactgtgggaccaggaccctaagtctcctttccttctgggtggggagttctggggttcttggtgtgtgggagaagttttataattgcttccaaacagctgggtttaaatataaaatagacacactc

SEQ ID NO: 616 - DNA, 56 bp, Homo sapiens
cctagagattgcaagggcggggagaggaggctctcaataaataatcgtgtaacctt

SEQ ID NO: 617 - DNA, 541 bp, Homo sapiens
ccctgggaccctttcctgcgtatgtgtctccttcctgtcacctgggaatggaatggccagtgaacaccatcccagaagcattttccctctgcaaaatgacgtttcttcccacgtctgtttctgctaatatttaaaataaactttccttcttccctcctatacccacctgtaaggtgaaatctgctcttcttccaaatatataaaaaaggaattgccctccaggtaatccctttcctttttcccgtctatataagggaatgtcttccttcctatctatctgcaaaatggaaatctagacctccttcttcatccataagtggactgtgccagtacaatacatgcctcagcccccaagcctagaaggacctctagtctccttcctgtgtggaatcttccccactccatccctcccaagttgcctgtattgataatgtactcactcatgctgtactaggtgctgaagcctggacacccttggtgggtgggcctgtggtgatggtttgcatccttcctcctttgtcccaataaagtatgggagttg

SEQ ID NO: 618 - DNA, 693 bp, Homo sapiens
agttcccagtgtgggagaaaggagctagtttgcaataaaaacagctggatgcaggagcccagtgtcttcatgcagaggagctcaatgtcgcgggactagctacaccaacatatgcactttttacatttagaaacactgtgattagaccacagaacaataaatatgtgccatcagaccaaaaaaaagtagagaaaggagctgaactccactctcgatgctacttacagaggacatctgtaaagtcttcataaaagaccttgaatgatgcctaggatggcagagcccctgggtcctactccatcctccagcctttgtccttgtcctggcctcctgctctccagatctgtaaactgggctcaaggactgtacaagcagagtacaactacccgcctccccggtgccagggcgcctgttgggtttggtcctgtgtagatgattcccagagtctcattcatccagctcctcttcagacagaaggtccccatggtcagacagctggtctgcattgctggtactggttgcatcatcctcatcctcagagctggcttcacaggcagtgtggaagagctgcatgagttctcgaaaatggtgggaaacctaagaaaggaggagggctgtattcactgatccttagtaacatgttaacatttatgaagcactatatattgatttgcaaaatcttttgtttattcc

SEQ ID NO: 619 - DNA, 284 bp, Homo sapiens
gccaagatcacagcatgtgaggaagacagtggacatctgctttatgctggacccagtaagatgaggaagtcgggcagtacacaggaagaggagccaggcccttgtacctatgggattggacaggactgcagttggctctggacctgcattaaaatgggtttcactgtgaatgcgtgacaataagatattcccttgttcctaaaactttatatcagtttattggatgtggtttttcacatttaagataattatggctcttttcctaaaaaataaaatatctttct

SEQ ID NO: 620 - DNA, 3536 bp, Homo sapiens
tcctgttcttctctcctctaatccccgggggccaagctggggagggatgtggaggggaaaaagatgacagagaagtggactccaaacctcattttagttgtagaagaaaatttcttacaaaacaaattccacaaagaacaccctatatgaccacagctgcagatcagttcttagcaatgatgtttttttttctgctttgcaaggcgctagaatcttttattttactttattttttttgaggtggagtttcgctcttgttgcccgggctggagtgcaatggtgagatctcaactcactgcaacctctgccctccaggttcaagtgattctcctccctcagcctcccaagtagctgggattacaggcacccacgagcatgcccggctaattttttgtattttcagtagagatgggtttcaccatgttggccaggctggtctcgaattccagacctcaggtgatccacccgcctcggcctcccaaagtgctgggattacaggtgcgagccaccgtgcccggcctctggttttgttttgttttttttttttaatgggggacaaaagagagggaaagacccctataaatctatatataacaatgtaaccatatacttgcatgtctaatacaaactgaagaaattagcctaactgccaatatcaagttgcagattttaatccatggaaattgtgttttgtgctgaattgtatttgctgattacctgaaattggcttctttttattgggcttctctggagaatttctcccactccccacctctgcagaagaaaattttgctcttataaaacctcatgttttcatcattcccatcttttctttttattgcctcttatatctctgctctttgacctcaaggtctagaggtctgcagtaagccaagaaacaaaggtggggtggatgaggcaaggtttgcaggagaaagaggaattgagaaatggggtatttttgctatcagctcttctgctatgaagtagtaaaaggcagtctataattaactgacagacctaactgaagcacagagaatacatcagacttatgcatccaagacatcagaacttggattttatcaaacttgatgacttctctaaaaggagctttggaaacttcaaattcagctataggatagtaccaatgaacacatccagctgatcccaaaagctgttttcaggtataaggacaaggagaggagacaagtgacgacagccattcccctttgcagctatctactgtagtgacagccatttcttggttgatgggttggaagtcatcagaggtttgaagaattacactggcctttgtttttctggaaatgccgaccatggagatgctttagagtcttctcaaatagcttagatgttgtaatgaggttagctttgcttcataaaacaggggccctcagaagttctccttaaatttttcaataaaaatttagctcttaaaaaaataacagtgtgactgagtgaatgaagataagttggattctttcagagcattcttttcctcaaaacgagctgcataattcttggaatttatgtcttaccacatggtggagggatggaggaactacaggatgcaattcttcttctaccaatgggcaatagaggttgagagagattcagcatctttctgggattagaattcaagtctctttactcctacagcagctgtgtctccaacgttgagactttgcagatggcacagactccatggataataggtaaacttggggccgggcgcagtggctcacgcctgtaatcccagtattttgggaggccgaggtggaaagatcgcttgagcccaggagttcaagaccagcctgggctacatgacgaaactccatctctatcaaaaatacaaaaaattaactaggtgtggtgctgcacgcctgtggtcccagctattcaggaggctgaggtgggaggatcatttgagcccagaggtagaggctgcagtgagccatgatcatgccactgcactctgggctgggtaacagagtgagatcctgtctcaaaaattaattaattaattaattaaaataaactaggtaaacttggataggcagtagatatttttgcccacctgaggaggaactcagtcaagctgttgcttaacagcttgatccagggcgtgaaaggttagttgagactgaagtgttcacttccatagaagaacatcacttttaaccttgctttggcgaagggagtcggaaagctgagtctctatggacgggggggtgatcttgctttcagtgttccctcagcttttgtggatttaaaaccattctgctccccctaaaccttttgtttgatttcagcccatgttcttgacaatgcagagcaattctgagcagtcacaaagcctactctctgttcttgtccctgccaacccccaccccccataatctgactcacaacttcaccatcagttggggtcataccactagtctctgtcctataccccatgaaatgtaaatactgtatcataagtagaagaaaataatttttgttttctaaaaatgcattttgagatagtttaatgtaaatctgacaggagcattctgaagccccattaggaaaaaatttaaatggttcctcttcatcgccttaatgtctaaagatcagaaatcgctgagcaaacccgcttttgtttccttcccagaaacaatgcaaaacaacaggtggagatagtctggtctttgccctgctgtgtgtgcctctgtagctcctcctgacaaacgtctgggaaaacagcctcaccccactctcctctctcttccccatttccttgtagctttattccttgcatctttgggtctactgagcagtgggtgctgaggtgacaggggaggaaccagttgttctgtagcctaggaactgcctcagtgtctttgccagaaaaaggcaaagaggcggacagtgcagggctcctccctcctacctcaggcctgatccatcgtgcccttgactttgccgtctcaaagtttcttagctgactttggctttcacatttgttctttccagagctaactgataagagtggaggaggaatgccttctcctaagagtcagttgaaagaaagacaagagagtcacatcttagcttttgcacaaggcattcgtggtcaggaataggttagggaatggtcacttctgattttccaacagttgctccttctctgaagagatcttgattcctttgggaagacaagaatttttcttaataacaaaggtccctttatgagttattccttctttcagttcatctcactggagcacagccaagatggacatgtttatggacagtgctctagatgtgaaaacagatagaactggtttgtgggacaggggcagcttgctcaggagagggaataacgcaggtcccttttcttggaaggcttgtactatggccatgacagtgacattgccctcaccatgatccctctccaaagtggttgtctttctttaccttgtgtcttctcttgtaaaaatgaaactcaaaaataaaataaatgtgtcaaattt

SEQ ID NO: 621 - DNA, 137 bp, Homo sapiens
cggcattggtggaagctggggtcagaaaagagaaatgaccatttggaggggcggggcctcctagaagaaccttcttagacaatggggggaggatgggactttgttttttccaagaataaacttcaactcctgtcatg

SEQ ID NO: 622 - DNA, 215 bp, Homo sapiens
ccttggccagcaccacctgcccccactggctttttggtgccccttgtccccacttcagccccaggacctttccttgccctttggttccagatatcagactgttccctgttcacagcaccctcagggtcttaaggtcttcatgccctatcacaaatacctcttttatctgtccacccctcacagactaggaccctcaaataaagctgttttatatc

SEQ ID NO: 623 - DNA, 981 bp, Homo sapiens
tctgggacctgccaggcaggggtgggggtggaggcttcctgcgtcctcctcacctcatgcccaccccctgccctgcacgtcatgggagggggcttgaagccaaagaaaaataaccctttggtttttttcttctgtatttttttttctaagagaagttattttctacagtggttttatactgaaggaaaaacacaagcaaaaaaaaaaaaaagcatctatctcatctatctcaatcctaatttctcctcccttccttttccctgcttccaggaaactccacatctgccttaaaaccaaagagggcttcctctagaagccaagggaaaggggtgcttttatagaggctagcttctgcttttctgccctggctgctgcccccaccccggggaccctgtgacatggtgcctgagaggcaggcatagaggcttctccgccagcctcctctggacggcaggctcactgccaggccagcctccgagagggagagagagagagagaggacagcttgagccgggcccctgggcttggcctgctgtgattccactacacctggctgaggttcctctgcctgccccgcccccagtccccacccctgcccccagccccggggtgagtccattctcccaggtaccagctgcgcttgcttttctgtattttatttagacaagagatgggaatgaggtgggaggtggaagaagggagaagaaaggtgagtttgagctgccttccctagctttagaccctgggtgggctctgtgcagtcactggaggttgaagccaagtggggtgctgggaggagggagagggaggtcactggaaaggggagagcctgctggcacccaccgtggaggaggaaggcaagagggggtggaggggtgtggcagtggttttggcaaacgctaaagagcccttgcctccccatttcccatctgcaccccttctctcctccccaaatcaatacactagttgtttctacccctg

SEQ ID NO: 624 - DNA, 102 bp, Homo sapiens
ggccgagcctgcactggggccacccagccaggcctgggggcagcctctccccagcctccccgtgccaaaaatcttttcattaaagaatgttttggaacttta

SEQ ID NO: 625 - DNA, 746 bp, Homo sapiens
actctaggcacaggccggggctgcggtgcaggcacctggccatgctggctgggcggcccaagcacagccctgactaggatgacagcagcacaaaagaccacctttctcccctgagaggagcttctgctactctgcatcactgatgacactcagcagggtgatgcacagcagtctgcctcccctatgggactcccttctaccaagcacatgagctctctaacagggtgggggctacccccagacctgctcctacactgatattgaagaacctggagaggatccttcagttctggccattccagggaccctccagaaacacagtgtttcaagagaccctaaaaaacctgcctgtcccaggaccctatggtaatgaacaccaaacatctaaacaatcatatgctaacatgccactcctggaaactccactctgaagctgccgctttggacaccaacactcccttctcccagggtcatgcagggatctgctccctcctgcttcccttaccagtcgtgcaccgctgactcccaggaagtctttcctgaagtctgaccacctttcttcttgcttcagttggggcagactctgatcccttctgccctggcagaatggcaggggtaatctgagccttcttcactcctttaccctagctgaccccttcacctctccccctcccttttcctttgttttgggattcagaaaactgcttgtcagagactgtttattttttattaaaaatataaggctt

SEQ ID NO: 626 - DNA, 2364 bp, Homo sapiens
ccagtggtggggagagaagcctgctgttttccacactaccgtgggtcaggggcagagtggagaggacagcaccctctccaggtgctcccaccacacacccagccctgccctgggccaagtggcctatctgggatagggatagagactttgaactgctcttgctgaagaggctccacgcctggatcccttgcccccactatttaaaattctcttctgagctgggctccctcactcagtccctgtatttgatactggcctaaagaccccaccccccaccctgccagcccttcttctggcttccccttccatctgtgtccctgagaccctgagaagagctgtacatagagcttgcttactaccactggttcttcctcttgggctttcagcccagactccaagcagctgctatcaaccctctctcccttcatctcttagccttgcttatttttattttgggaccgagctgcccactagatgactctgcttttccctgcatttggggctaaggtgccaggtacttatttgcacagggagcaggagcagcaaaaaatctctggttctccagagcactcgtcctctctttggaggggttattaggttgggagaaatgttgatacttttgttttgtgtgtgtgtgtgtgtgtgtgtgtgtgtgtgtgtgtgtgtgtgttttaacatctgtgaaccaggctattagtcctgctaaagcgccaatcctgctgtcagagctcacccccttcctaagacaggtagaaaaatgtaatgtagctttttccacaagccacttccctgtcccttcagtctcaggagccctaggagagtctaagctggggcatcccctggcccagaggactcccgtggtgggcacagttctaagtggatcaggctgtcttgggtgcactggacttggagcactaccttgagaagtcaggttgagaaagtagttgatctagaaggcaacaagtgggcatgtgttccccagcacattacccaggccagcagagccaaacctaggagagggcagtgggtagattctctgccccaggcagccatgacatacacataaataccccaatcactcagacttacggcaacaagtgttgtctcactatggtgatctctaagatccacatcactggatgcgtagtcatcccagtcatggtaccctgtggaggaatgctggaagaacataaagagcagttcagaaagtcacccaataccaggaccactgcatttaccagcctgatactgccaagattatctgatgctctcctcaggagctaggagaggagtgctccttcctccctaccgctactctccccaagcctgtgttgcaggtagagaggtgcagcaaatagagaaggcatgtcaaaccctgcatttctacctgagacgtgtgacctggatgatcctccaaaccctattggtcccaccccctgggaaaggccatggtgccagtttgaaaggtgctagctacctgaagccttgatatttcttcatggctgccgcacattcttccaccttggccagaacaggttctgaaaaccacttctctaccttcaccaccaccactgcccatcttgatctctttgagggttttcccatttcacttgatcttatttttgtttatcccttcctgcactttgtcaagagagtcctccagtttctatccaggaatgttcacatccaaagggttggacccacggatcattctgaatcttcctgcccctcctcactgcttaaccctgagaaccacaaatataatggaagcagttccccccaccctcaccccatctctttaagctcatcctagcaagacctctagagaccctagagactcgactttagtccttccccgccatggcacagtggggaaggtgtcaatggggagtgtcacggacaggaggtaggatcctgccgctcgcgtcttagtgtttctccctcaagactttccttctgttttgttgtcttgtgcagtattttacagcccctcttgtgtttttctttatttctcgtacacacacgcagttttaagggtgatgtgtgtataattaaaaggacccttggcccatactttcctaattctttagggactgggattgggtttgactgaaatatgttttggtggggatgggacggtggacttccattctccctaaactggagttttggtcggtaatcaaaactaaaagaaacctctgggagactggaaacctgattggagcactgaggaacaagggaatgaaaaggcagactctctgaacgtttgatgaaatggactcttgtgaaaattaacagtgaatattcactgttgcactgtacgaagtctctgaaatgtaattaaaagtttttattgagcccccg

SEQ ID NO: 627 - DNA, 439 bp, Homo sapiens
ggagaccgccagccccagaagcagagggcagtcaaggtcaagagcctgtggtccagcatgcctggcctgggcgggctacctctgagaacggctgaaatggtgcccagtccatcagcagtgatggaatttgctggaggactaggccagagcaagcctcactgccactgtgcctttggggcacccttggggttggacatacaccccctttagattcctctgtttcttctacctggataattcttggccatgttctctcttctctaggttcaggtcagctctgcccctccgcccccctcctgctggttccccagcccttttccctggccctggcttggagaatctgttttcaatctccactgattgcccccttgctggccagcccaggggcctttaccatgttctctccacatccgtaaataaacttccttcactacactgt

SEQ ID NO: 628 - DNA, 159 bp, Homo sapiens
ggtgtcgctctgctggcctggccggcaaccccagttctgctcctctccaggcacccttctttcctcttccccttgcccttgccctgacctcccagccctatggatgtggggtccccatcatcccagctgctcccaaataaactccagaagaggaatctg

SEQ ID NO: 629 - DNA, 845 bp, Homo sapiens
gcctctccgccctcgccctcggagtagggggtagcggcttgggtctgacacatctttgaaccttgtggccaggcctggacttcgcccccaggcctaggaccgcggtgggtggaaccctgctactgccccaacagggactccaatcaatcggagttctccccttgccggagctgcccttcacctttggggcccgagacagtcataagggatggacttagttttcttgcagggaaaaaggtggacagccgtgtttcttaaggatgctgagggcatggggccaggaccaggggagaggcacagctccttcctgagcagcctctcaccactgccacaaggctccctaatgctggtctctgctccactccccggcttcccgtgaggcaggaggcagagccacagccaaggccctgaccacttctgtgccagttgtctaagcagagcgcctcagggacgctggaaatgccttaaggatagaggctgggcatcacatcaaatgggactgtggtgtttggtgaaaaccttcctgaggatctggattcaggaccctccatgactggcctatttactgtttacagctggccagtgcagagctgctgctcttttacctttttaggcccctgtaacttcccacctttaaactgcccagaaggcatgcctctcccacaggaagaggggagcagacagggaaatctgcctaccaagaggggtgtgtgtgtctttgtgcccacacgtggtggctggggagtgcctggatggtgcggtggttgatgttaacctagtgtgtgtgtgtgtgtgtgtgtgtgtgtgtgtgtgtgtgtgtgtgtaacaataaattactaccagtc

SEQ ID NO: 630 - DNA, 12 bp, Homo sapiens
attgtggaacaa

SEQ ID NO: 631 - DNA, 424 bp, Homo sapiens
ggataaagcccagagacctctgagggtggaggaggcagacactcaggcctaacccactgccagcccctgagaggacacgctccttttcgaagatgctgactggctgctactaggaagttctttttgagctcccattcctccagctgcaagaagggagccatgagccagaaggaggcccctttccacaggcagcgtctccacagggagaggggcaacaggaggctgggaaatggtggggagtggggccgtaactgggtacaatagggggaacctcaccagatgcccaacccgactgccctaccagcctgcacatgggtagaagaggccaaattgaggcacccaagtgatccactggccccacgtcacacagttacagtgaagcccaagccaggcctggttgagggtgataaacgccactgtctct

SEQ ID NO: 632 - DNA, 213 bp, Homo sapiens
gggaaggtgggtgggtattcttcccaataaagacttagagcccctctcttccagaactgtggattcctgggagctcctctggcaataaaagtcagtgaatggtggaagtcagagaccaaccctggggattgggtgccatctctctaggggtaacacaaagggcaagaggttgctatggtatttggaaacaatgaaaatggactgttagatgcc

SEQ ID NO: 633 - DNA, 341 bp, Homo sapiens
gcgcccaccgtgtcccctccagcgcgcgcgaagaagcttgggagtcgtggcgggggtctctcgccacccctttccggagagcctcccctccctccagacccggagcggcctctccagacctgccttcccagccgggggctgcgggcctcggaccccggctggcccggcggcggggaggggaggcgggggcgcctccggcggcgagatgcagaggtgaccctcggacccgctgccgttcgcgaaccctagcagaggactcagccaccgccggggggagggtgaggcggccgggggcattaactgacctctgagtacagcaataaaataacctggggatcttt

SEQ ID NO: 634 - DNA, 504 bp, Homo sapiens
cctgtagtcctttaacccaccatcatcccaaactctcctgtcctttgccttcattctcttacccacctctacctatgggtctccaatctcggatatccaccttgtgggtatctcagctctccgcgtctttaccctgtgatcccagccccgccactgaccatctgtgacccttccctgccattgggccctccacctgtggctcacatctcgccagccccacagagcatcctcaggcctctccaagggtcctcatcacctattgcagccttcagggctcggcctattttccactactcccttcatccgcctgtgtgccgtcccctttagctgcctcctattgatctcagggaagcctgggagtcccttctcacccctcaacctccggagtccaggagaacccgtacccccacagagccttaagcaactacttctgtgaagtattttttgactgtttcatggaaaacaagccttggaaataaatctctattaaaccgctttgtaacc

SEQ ID NO: 635 - DNA, 392 bp, Homo sapiens
ggggcaaggccttgaacactgccggccacagcactgccctgtcacccaaattttccctcacaccctgcgctcccgccaccacaggaagtgacaacatgacgaggggtggtactggagtccaggtgacagttcctgaaggggcttctgggaaatacctaggaggctccagcccagcccaggccctctccccctaccctgggcaccagatcttccatcagggccggagtaaatccctaagtgcctcaactgccctctccctggcagccatcttgtcccctctattcctctagggagcactgtgcccactctttctgggttttccaagggaatgggcttgcaggatggagtgtctgtaaaatcaacaggaaataaaactgtgtatgagcccaggc

SEQ ID NO: 636 - DNA, 198 bp, Homo sapiens
tgcagcctgaggaaacatctcagaccccatcatctgaaagtgcccagagagcacagtggcagagtacatctcatccagagaaacagcatcctgcatcctccagagtcctggttccttcagtttcatcccctttctctccttccatggattatgtaatacattgtaaagttttaattaattaaaaattggatatctgtt

SEQ ID NO: 637 - DNA, 352 bp, Homo sapiens
ggctctggaactgattgctcccaggatctcctgccagcccagctggcctggcccccagcttcacctctgggaccccagctgctctaagcccaggatctctttccccaaggacccagccctcgcctctgcgagaatgaacatatttgatagatttttcttaacaagttagaaaattcagctcctttctgtcctggagctagcaaagacttgtgtgatgcctccgaaggggctctgagttctggggtgggagttttgctctctgtcaggtgtgataaaatgttgaaccctccccaccaccacttttttttttttaaaccagggatgtctgttgaaataaaacattcagtctgac

SEQ ID NO: 638 - DNA, 208 bp, Homo sapiens
ggggccggcccaggggctgggagtggttagccggaatactggggcctgccctcagcatcccccatagctcccagcagccccagggtgatctcaaagtatctaattcaccctcagcatgtgggaagggacaggtgggggctgggagtagaggatgttcctgcttctctaggcaaggtcccgtcatagcaattatatttattatcccttg

SEQ ID NO: 639 - DNA, 196 bp, Homo sapiens
tccaggagctgatgttgccaagggatcccatcaaggccaaactcagggaggatgaggccatggcattcttcccctagccccctcccacctgcttgcctctaagactcggggctacagaagcacctcctgtccctgtgtggggtgacctccctgggggagatctcagaccaataacaaagtctgttgctatactttt

SEQ ID NO: 640 - DNA, 930 bp, Homo sapiens
gggccagagcctggctggggcatctctgcggggcagaggagaaggctttcacagctgttccctgatattcaggggcattgctcattgctcccttctcggaccagccttcttcctcccaccatggcaggtggggagcaggtctcccagaaacaccccgtcccgaggatggtgctctgtgcatgccccagcctcctgggcctgcccttccctcttcttcgggaggatgtgtctcttctgacctgcactcttgcctgaccctagaatggggacagggaaagtgaaggttagggaaagcagaggggggcactttttagcattccctttctatcccacccctctgatctcccataagtggaaatgggggtacccagggatgggcaggctttggcctagggacatgaagtatgggagtgggtggctgtggcacagacaggtggaaaacgggatagcctggccagtccctctgttgtctgcattcgtgccctgggtgcctctctccttcctcagggtactgcagaagggagcgaacagggtactgttcgctcttgtctacagaacagccctggcactgcattcaaatccagtcttcattcagctgggatcaaaatgccagtcaccttggctacccactgtggacagctgtctgtcagcatgcagagggatccaggaatccccccggcagcacggcccgctttccttctcctccatgctgggccagccagataagtcagggtcctggtggagaaagaaaggctaggaccatgtcctcattgacccagatactgctgtgtgctgcacagcagtgaaccaacactagagggagccacacaagcctcctctccccagtctgccccacttcctggctttaactcttgagctggtttggggagtggtgaggtaggggtgggggtgctgtaggctctttttcaa

SEQ ID NO: 641 - DNA, 2274 bp, Homo sapiens
ctcgccttgccacatctgtgtctctggaacccaggacctctggacctcaggttcctaagacttcagtcctggtctgctcaggaattgaagatgtaaggaattgaagataggagagataccttgaaaaagtagagaacagtcatgaggcagctttcatcacacccttttaacatttatctaaaagaatttaaattctttttcaaaaattacactacaagtttataagcccaaatggctctgtgaaatcagaagtgcaaaggtgtgcaaacttgtatctgaagacctaccagggacaagcaggtaagagctgatgtgagtgtgtgtgatgggatctgtaaggaactggaacacacatgtcctatccaaaggaatcagctgcagctgcttgttgtcaagtataaagtcaggacctggcttggctttaaccgtttttcaagaaaactggaaatctggattttcagcgaacatgcctgattttaaaaggttgactcaagtttttacaaaatactatgtgggacacctcaaatacatacctactgactgatgacaaacccaggagtttgtgtgtcttttataaaaagtttgccctggatgtcatattggcagttggaggacacagtttctattgtaaatttggatttacgactgaagaaggacattttctctttaaaagaaagttaggttataagaaacagaggcgtctcacatttttacttggtgtaattaataaacgaagataaatcatagtgtatgtgtattatgttgaaaaaaactactctgagtaaggatatttctctcaaatggtcatcactttttttccttggaggaagattgtcatgaaggcatcccttccttcccaaaacgacaacggcaacaacaacagtctcctttacttacagctattaaaagagacaatgtagggaaagggccaacaccacttgggcaagcatgagctgcagcgatgatggtgatggtagcccagccatgctgtgttcttatcttagagaggacagagcaggaaacttacaggggtagcagacctttctgatgccaaagaaataaggaggccaaaatcatgtttgcctagctgggaggtaaatctcttggcagtcagggtccctgaacacccagaaaaaataagtgagacttaacggttggagagtgtttgcttgagaaaagtaacatttcacactctctatactagacttgcacatatgaatttaggatgtgcgtgaagattctgctagcttcaacatatcccaaagcacttggatatgcctataatccaagtgctttgggaggctgagataggaggattgtttaaggccaggcatttgaaatcagcctgggcaacatagtgagaccctgtctctacaaaaaattaaaaaactagccacccatggtggtgagcgcctgtagtcctagctactctggaggctgaggtgggaggatcccttgagcccatgaattccaggttagtgtgagctgtgattgtgtcactacagtgtaaggatgacagagggagaccctgtcttaaaaaaaaattatgctagcttttaaatcaatggttcccaaattgtagtaacctgaccaacagcctcagcaggacctgggaacttgttataaatgcaaattgttttgggcctcatcctatacccgctgaatgagaaactctgagtctggaagcaggctcaatagtcaagccccctggtgattctgatgcttagctaaagttagagaaccactgttcttagacattgtgcaatgttatacaacaacttcctcaaagtgctaagtgaaaaggacattggcctggcgttagtcagggaaggcgtcctggagggaggggaatttgaagcagagctttgaaaaacaaaggcagtgaggtgaaccagcaagtgcactggctgaggggactggagttctagcctctgaaccagtttcctcctgtgccaaaggaggataataattatctattattgattatctcctagacttgtggagttcaagtgtgtaatgccttaaaagatgtggaggctgttgctgtgtttggtaccacattgcccaccctcacgtggcgctcttcagcttaggttcctctagcagtgtcaagtttgtgaaccaaccccactggccttctgcattctgagggcacgtgtgttaaagtctctactgatgtccttttggaaatgcctctgcatgaatttatggtagctctgactcatctttaaacaattttaatttatttagaaaataaaggcttatctctccagg

SEQ ID NO: 642 - DNA, 576 bp, Homo sapiens
gacacaccatgagcctcctcgtcacccttctccttttggggtgagagaccagcagcccaagggctccagacacacctgaacacatcgtgatgatgacgtcctctcaactctctttgtaaaaattttgttatttttgcttgtttctgattaatgattgtttgtcaatataagctcaatttaattttgcaggatttgttgttctgacctgggttctgggacttttaaattcaaattttatctccagatggaatggggtcctagcaacctccacatgttcaactattaatggatcatcaggcctgttttagatatcccttactccagagggccttccctgacttacaagtgggaagcagtctcttcctggtctgaactcccgccacattttagccgtactttgctaactgtgctcctcacttcctcttcttcattgcagttatttagatcccccctttccttctaatttttcagctccttcaatgcaaagtacatgtatttttaatatatgcatccctggtgaaggatcttgcctgcatgaaacatgttctcaataaaactctgtgttgaatttatgcc

SEQ ID NO: 643 - DNA, 1297 bp, Homo sapiens
gactcttccccctgactcccccattgtgttaagaacccagcaacccaggagcctagtacaatatagtgatgccatcccgtcgactctccatttaaattgtttctctttctgcataataaacatttgttaataaaaaccaaattctaatttggaatgtttttcttggaatctccactttttatatagcactcaaccttcaaagcccatttctgatgtcatttcctccaacgatcttccttgacccatactgaacccagagagcccctcaactgttatgtgcatgcaacacttcctaccctgtgttgcagctacttgagtctttcatttcacatttttaagcttttaggaggcaaggatcatgataaatgtgcctttcctgcatatgataggctcagtgaaacacaaaacaaaacatcatatctaagttggattaactgtcatgttgacaatttttctcattatattccttcccaatgttgttgtagcattggaaatattcatgcttctctttttgtttaaatgcttcatacctagcagataaattccactctcctttagctccctcattttctccttaaacatttaaggaaaagtgcagccttgtgccttgatacacttattttctaaacacagagaattacaaatgcaaatagacagagagtgtgcaagttacatgtgatgatcagtggtgcagatatgtcacagaatacttaagaaaaggaacaagagatttggtcctcagggttggagtgggatcaaggcaaccgttgtgctgtatatggaagacaaatttcctaaaggactgtgttatctgagatagccttggctaaactttagtccctttaggtttcattcactaattcaactaatattttttgggtactgagttgagacaggcacatacagcttctaaactggtggtggataaaacaaatgagattgtgtccactctcctgaagttgcaatgtttgcttcctcaatctgtccatgtttcttttctattgttttcatgtttttatttatttcaaaaaattttaaatagattttattgatgtataatttatagtaaaatttgaatctttaagtgtacagttctatttattttgataattatataagcccatgtaaacaaaatcacaatcaagatattaaatgtcataacccctcatacctgtttgtagtcaagcacaccaacaacctggcattcttgcaactactgatatactttatgtcacttaagcttaaacttgtattttctatgattttattaagatggaaataaacatatctacttggt

SEQ ID NO: 644 - DNA, 655 bp, Homo sapiens
catttgctttaccttatacataaaatccttgtctgcatcttcttaaacaccgtccatgtcccataagggaagcatgcttttatttaaacagtttatactagcaaagatactgacccctttaggaatactttttccccatcttccagagattttttttttcctgctttggctacatatccatcattgtttatttttgaaactataatccagatacttctttttcatggattcccgagatcacccaattgatagctcttctgtactccccaaattgaactgatcttcacaagcacattcatctcttcctactctgaacagtagttatttaggtttttgctctttttttttttttaatctcagttgcttgaaagtaggatttaggtatttgtgtctgtattcatgaccaaaaatcttatctgaattcagggccagcttcataagcatgtgacctgtgcagacacatggaatcgtatgctctgcaagaacccatgctagatttaatgctctgctgttgtcatcttggaatccttagtcattttcaaacaagagatattgtattttcatttttcactgaccccacaaattatatagctgattcagtgtgaatgtaatatttctcaataaatgctgactgaaataaatttgttgttagatc

SEQ ID NO: 645 - DNA, 243 bp, Homo sapiens
aatatgaaagctgaaatgcaacaaacaacttccgcttaaaacaattaagttgttaataactgtgattttgtaaatttcagtaattcatttaaatgatgtttcagtagatatattctagcatattaagagcttttataactgagttatagattagtttgctttctggaataaaattttcttcttatactcttccttttttttagatattacattttgcttttatgacattcacgaggcaaaaaa

SEQ ID NO: 646 - DNA, 353 bp, Homo sapiens
gtcaccaaggacaaggatatcaaataactactgttcaatctttactcaagtgtggaaattttgcctgaagtcctccacctaaaaacctgatgccattggtaatgatgtttatgaagataagatcaaagcacagaaaataatatatgtatatatatctggttgaaatactatatatatatatatatatatatatatatatatatatatatatatataccagctattaattctaggaaatggagtattaagggtgcattttatttcattagttttacttttatgcattttcttcatatcatattttgcattcagaattttcataatttgaaaaaaaataaacttttttttcttaa

SEQ ID NO: 647 - DNA, 252 bp, Homo sapiens
aatctggatgtcattgacgataatgtttatggagataaggtctaagtgcctaaaaaaatgtacatatacctggttgaaatacaacactatacatacacaccaccatatatactagctgttaatcctatggaatggggtattgggagtgcttttttaatttttcatagtttttttttaataaaatggcatattttgcatctacaacttctataatttgaaaaaataaataaacattatcttttttgtgaaagg

SEQ ID NO: 648 - DNA, 1089 bp, Homo sapiens
aggcgcctgcccacttcctgcgccccccaggggccctgtggggactgctggggccgtcaccaacccggacttgtacagagcaaccgcagggccgcccctcccgcttgctccccagcccacccacccccctgtacagaatgtctgctttgggtgcggttttgtactcggtttggaatggggagggaggagggcggggggaggggagggttgccctcagccctttccgtggcttctctgcatttgggttattattatttttgtaacaatcccaaatcaaatctgtctccaggctggagaggcaggagccctggggtgagaaaagcaaaaaacaaacaaaaaacaaaaccctggagtgttaggaggagagtgaaggtagaggggtgaggaagggtaaggggcagggctggtttcagctgggggctctcaccagccctcctttcagcctctacaacagagcagcttcccagacttctccaggaacccagaaacgggatggttgtcggcaaaggttgggagtggcttttcctctggtagccacacacctgagcactacggacagggaggcaggtgccaccttgacacctctcttccatagcaatgggaaagtgatgagtgcgggagtcctgaggagatgtggcctgcagacaacatgcagccatgcagggacccaggactgtaacctggggaggacgcgggtccctgcaaggaagagtagatttggagaggaaggatggaggtggactctcaccccattccccccggaaatgaacaaagccgggccctttccataggaactgcccttggagatagcagagtgtggctgcccctccttgctccagcagcagtgggagaggcactgctctggggcctgaactgcctctgcttccccccctgaggggcccctcactcttacccaagactctggattgttgcacggcaaccactcctcccatggcattgctcagcaactacttctcccttcccggccaccctgtgcccccttcctggtcccaacgccagcccttcatccttcctccctcagcagccaggcagacataacaacaaaactactaaaaggagcttcactgc

SEQ ID NO: 649 - DNA, 48 bp, Homo sapiens
ttctcttcccacctgtcaacctgaattaaagtctacactgcctttgtg

SEQ ID NO: 650 - DNA, 291 bp, Homo sapiens
tataattactcaagaaatatttgcaacattagtttttttccagcatcagcaattgctactcaattgtcaaacacagcttgcaatatacatagaaacgtctgtgctcaaggatttatagaaatgcttcattaaactgagtgaaactggttaagtggcatgtaatagtaagtgctcaattaacattggttgaataaatgagagaatgaatagattcatttattagcatttgtaaaagagatgttcaatttcaataaaataaatataaaaccatgtaacagaatgcttctgagt

SEQ ID NO: 651 - DNA, 162 bp, Homo sapiens
ggtcttgactcaacgagagcacttgaaaatgaaatgactgtctaagagatctggtcaaagcaactggatactagatcttacatctgcagctctttcttctttgaatttcctatctgtatgtctgcctaattaaaaaaatatatattgtattatgctacctgc

SEQ ID NO: 652 - DNA, 205 bp, Homo sapiens
ggggccttagtacccttctaccaggccctcactccccttccccatgttgtcgatggggccagagatgaagggaagtggactaaagtattaaaccctctagctcccattggctgaagacactgaagtagcccacccctgcaggcaggtcctgattgaaggggaggcttgtactgctttgttgaataaatgagttttacgaaccagg

SEQ ID NO: 653 - DNA, 2232 bp, Homo sapiens
aggacaatatgaactgatgcctggactatcagtaaccccactgcacaggcacacgatgctctgggacataactggtgcctggaaatcaccatggtcctcatatctcccatgggaatcctgtcctgcctcgaaggagcagcctgggcagccatcacaccacgaggacaggaagcaccagcacgtttcacacctcccccttccctctcccatcttctcatatcctggctcttctctgggcaagatgagccaagcagaacattccatccaggacactggaagttctccaggatccagatccatggggacattaatagtccaaggcattccctcccccaccactattcataaagtattaaccaactggcaccaaggaattgcctccagcctgagtcctaggctctaaaagatattacatatttgaactaatagaggaactctgagtcacccatgccagcatcagcttcagccccagaccctgcagtttgagatctgatgcttcctgagggccaaggcattgctgtaagaaaaggtctagaaataggtgaaagtgagaggtgggggacaggggtttctctttctggcctaaggactttcaggtaatcagagttcatgggccctcaaaggtaaattgcagttgtagacaccgaggatggttgacaacccatggttgagatgggcaccgttttgcaggaaacaccatattaatagacatcctcaccatctccatccgctctcacgcctcctgcaggatctgggagtgagggtggagagtctttcctcacgctccagcacagtggccaggaaaagaaatactgaatttgccccagccaacaggacgttcttgcacaacttcaagaaaagcagctcagctcaggatgagtcttcctgcctgaaactgagagagtgaagaaccataaaacgctatgcagaaggaacattatggagagaaagggtactgaggcactctagaatctgccacattcattttcaaatgcaaatgcagaagacttaccttagttcaaggggaggggacaaagaccccacagcccaacagcaggactgtagaggtcactctgactccatcaaactttttattgtggccatcttaggaaaatacattctgcccctgaatgattctgtctagaaaagctctggagtattgatcactactggaaaaacacttaaggagctaaacttaccttcggggattattagctgataaggttcacagtttctctcacccaggtgtaactggattttttctggggcctcaatccagtcttgataacagcgaggaaagaggtattgaagaaacaggggtgggtttgaagtactattttcccagggtggcttcaatctccccacctaggatgtcagccctgtccaaggaccttccctcttctccccagttcctgggcaatcacttcaccttggacaaaggatcagcacagctggcctccagatccacatcaccactcttccactcgattgttcccagatcctccctgcctggcctgctcagaggttccctgttggtaacctggctttatcaaattctcatccctttcccacacccacttctctcctatcaccttcccccaagattacctgaacagggtccatggccactcaacctgtcagcttgcaccatccccacctgccacctacagtcaggccacatgcctggtcactgaatcatgcaaaactggcctcagtccctaaaaatgatgtggaaaggaaagcccaggatctgacaatgagccctggtggatttgtggggaaaaaatacacagcactccccacctttctttcgttcatctccagggccccacctcagatcaaagcagctctggatgagatgggacctgcagctctccctccacaaggtgactcttagcaacctcatttcgacagtggtttgtagcgtggtgcaccagggccttgttgaacagatccacactgctctaataaagttcccatccttaatgactcacttgtcaactagtggactaattaaccctccaccaaaaaaacacaaagtgcttctgtgagaccaattttgtgctaatgagcattgagactgatgctttgtaagtcacaccacaacaaatattgattgagggcgctgcatgtgctgggtacatttcttggcacttgggaatcagtagtcaagcgaaacccttgcctttgagagtttatggtctggataatataaataaacaagtaagcata

SEQ ID NO: 654 - DNA, 1605 bp, Homo sapiens
ccagcttcctccagacccctgtggcagaccgggggccagacacagatacatggggaactgcatatcggaggtggtggaggaggaggaggaggaggaaggcaaagcccctggaaatgtgctaaagttggaaagtccccgtcccccagaacctcaagtctagaaaccagtatggaagggaggggtcctgatttcagggaaatggagggtggggccgggtgaaaatgccagtctgtgtttgaccttcacatttgttcatgagtggatggatggacagaatgatggacttttgggggttggatgggaagatggtagcagataaagacagctgacagatacatagatggaccagtagacaactggtccactcagggctgccactaacctgtagaacacccctgtgcaaattttaaaaaggaacccttttcctccagacagatacagccccaaaccagggtgcatggcttggggagcagagtataggatggattgcagtccccagtcacctcttctgccagcctccccacatatggcacaactgtctaatgacacggtaggccaagctgaagtgaaggagaaaggagccggaccaagatgggcacatgaggagggtgccctcctagctccaccctcaccaggatgaaggcgtgcaaggggctcagcaaggtgtgaatgaccttagtccgcaagttcagggaagcaggcagagcggggaggtgcctgagctggggcctggagaggggcctgggaaaggaaaaccagggatagctattttcttacagtggagtgagatcttacaggtatcaggcacaggcaggaagagagagagagaggttctggggaggaagggccaggagagagatctagaaagtgggttcactagagctgggaaacagggagcccctaggaaagcagtgtgtccttggggcacagtcattcacatcactgattgggtgccatgtggagtggacattcaaaaacctggttcctgtcctcaaaataaggggcacctgggaaaacagaggaatctacctgtggtgactgaacgagggataattcaaactgacaacctgtgcagtcccgtggagggtaggggagtgtgggtgatcagaaggctggggccagtgtaaggcatagggaatatgtaagtcaggagttagaaatctccagtgtgcgttggaatcacctggagggcttggtaaaacacagatttttgggctccactccaagggtttctgacccaagaggtggggaccaaaaccatgcattcctaagaagtccccaggtcatgctgctgttgctggactgaggaccacactttgagaacctgtgctctaagtgaatacttggaagtcgtttcaggacatggggcatagaaactgaggagtagctgagaggaagatgaagagaagctgagaagaagctgaggatcctcacaggagcagacagagaaatgtgaagggtggggttttatgtgtgggaaagggacccgaagcccaggctgaagagtttaactttgggcccagaaactcaaccatcaatggaaacagggcagtgacaagtggagggggtgtctggaagctgagcaggcccgacagagagatgaag

SEQ ID NO: 655 - DNA, 2260 bp, Homo sapiens
ccccattggaagaagaaccaggcatggaaagatggggagctctggaggtgttgtggggatggtgatggagagggatggaaataacgggtggcattgggtggcaacatttggggagagataatgaggcaactcagcaggctaagttgcggggtatataaattggggtgatgaccccatagacctaactgtgaacaatcagattagacactatgtgttagagtccccccgaccagatccttttccatcccactccactatgttgtctattttttctgaggaattaagggttaccccaccctgcccactcccatcccttcaaccccacttcctactgtaatagatcagcatccaaaagcaggaacccatctaaaccagaaggaagccctctcagatcaccccagcctcactccatttcccacttccacccccgttagcttcctgcaggactctatccctggcttccccttcagaccttgcaatcacaaaaggttcttctggtgagtgcaagagcctgagactggaaaaggtggacttgtctcccagtcgaggctggtaagggaccttcagggagagctgggcagacaggtgggagatggaggtagggctggctggaggaaggaaacaacaaaggaagtgaggtagtgccaatgacaggacatttgacatgagtctccagatagatgtcgtggactccagctctacgtcccacattttagaataccccaccagcagaacaaactcagatctcatcagggtagcagcagaggcaggaccagaaggcaatcaagagcttccagaaatgccacacttgtgtgccacagagttccccgctgacccttggttaggggtcctcttagtccacaaggtccggatgtcactcatgtacttaataacacttcaccttctgtaatactaagtcctcagagctccatgctgttctgaaagggatggccacaagttctttcccagcctcttccattccctttcttttcatgcccatcccgatgaacctgcatcattccccgacactgccaagccaaccctggaaaaggagttcgctggccattggctagaatcagggtggagaagttccctgaaccttcctgtctcccagggacatgtatgcttccagggacaagcttaggtcatgaacatggtcagaacctttggacaagaggaaaaatactaagagatttgctttttctgggtgcggtggctcatgcctgtaatcccagcactttgggaggccgaggcaggtggatcatgaggtcaggagttcgaggcgagcctggccaacatggtgaaaccctgtctctactaaaagtacaaaaaattagccagtcatggtggcacacgcctgtaatctcagctactcaggaggctgaggcaggagaattgcttgaacctgtgaggaagaggttgcagtgagctgagatcgtgccattacactccagcctgggcgaaagggtgagactccatctcaaaaaaaaaaaaaatgatttgcttttgacgtcttaggtggcagggctgttccctccaggcaaatgcccttcaaaccgacgatcattgtgcccacttaccctgggctggagagttggtttcaggttcctacaggagatagctttctttcccttactccctatctaacacttttgctctgcaggcagccttgcccattctctaagcctggcttagaaggcactgggaatgtcctgtagagagagacctagataggtcatgcaagtgagaaagacatctgaggaaaatggaagacctaaggcagacaggaaggaagcacaaaagacaagcattgggtcagacccataaaccacctcccaaaggctgtcatttcattgcactggaattttgctttatcagaagcaaggaagtaagggagtcattgccttgggcctgggaatctaagtgggagacaatattaatttggatccgattaattggagattactaactgtggacaaaagtttatctttgcacaatcaataaaaatggcatttttttagtaaattaagagcataaacaatattgctagaggtggcatgtttagtctaccaaaaacaatacttttcaggcactttagaaatatccttttagaagcagcgagtgcatgggctaattatcatcaatctttatgtatttgttaaagaaacatctacaggatctttattggtgaccttttgtaagacattagtttgaggtactacctatgtacttgaaaataataaagtggcatttctttatg

SEQ ID NO: 656 - DNA, 278 bp, Homo sapiens
actcagcagatgaagagcttcatgtgacacaggggtgttgtgagagctgggatggggccagagattataagtttgacacaacatctgagacactaggatgaattatcttggatgagaaagatgggcaatcctgggctggcttgagggaatcatgggcagaggatgaggtgggctgaagggaagcccagcctgcatctagctggagccccgcagggaggggcatggtcctgctgaatcccgtagccagtctagacagtaaatgtctggaaaagccctca

SEQ ID NO: 657 - DNA, 508 bp, Homo sapiens
ttgctatggcaaccatctttcagccccactggtcttttcatgctctctcctgccttcccttgtccttccctgagttcctccagggagactaggttattctctgccatagagctaactggggtctatatgctgggtgctgagacactgatccccctcatttgatgagcaaatgagctacttttccctagacaccaggccagctctctcttatctgacttctgtttcttatcccataacttacttgtatctattatgtgtctcttccatcactctccatactctttcttgtgattctcctctagccatatatatgggccccatctctgttctgttccctccatctatgcacagctttcccccactctctctaatcctgtatctttctgactgtcctgtccttggccagaaggaagggagaatactgtgtttgggactgtatctcagcaatcacttgttaatgtatttgggtcaaatgagaggcctcaataaagacatctggggcagcatg

SEQ ID NO: 658 - DNA, 1884 bp, Homo sapiens
gcaagggggaggaagaggaggaaggttggaccttcatcagaccactcccttcccccatcctccaggagagggggcaagggcaacccaccatctacccacttactaacctggtcctaacccccttactgtgcgcgtgtgtgtgcgtgtgcgcacgctctggctgtttgtctatatgtctagctcatctagttcctcttcttaaggggatgggggtcaggggctaggggagggggctgagtttccccactttaggaggaggtgggggctatttctatgcaaatagaaatcagcacattcctcctacttccctttcctccactccccccatatctttaaagtgtggaagcagaaaggacctgcattttcctacattgaggagctgacataggggtaaggtatgggagaggtaggtggatccagggaaaagcagtggggacggaaggcaaagagaccactcaacccccacctggaaggggcaaagaaaagccagagttccatgtttgtactcctgtgctggactgtttcctgagtaccagcaggtccctttttgtctctcatgggcctagcataggtatgagccagggatcctttcctggtccctaagatcaaaccccatggagcagccagcgttagatgcccccacccacctgtactctggagagactgtgctgggaacatgtaccactgagcctgagatggggatgagggcagagagaggggagccccctcttccactcagttgttcctactcagactgttgcactctaaacctagggaggttgaagaatgagacccttaggttttaacacgaatcctgacaccaccatctatagggtcccaacttggttattgtaggcaaccttccctctctccttggtgaagaacatcccaagccagaaagaagttaactacagtgttttcctttgcaccgatccccaccccaattcaatcccggaagggacttacttaggaaacccttctttactagatatcctggccccctgggcttgtgaacacctcctagccacatcactacagtacagtgagtgaccccagcctcctgcctaccccaagatgcccctccccaccctgaccgtgctaactgtgtgtacatatatattctacatatatgtatattaaaactgcactgccatgtctgcccttttttgtggtgtctagcattaacttattgtctaggccagagcgggggtgggaggggaatgccacagtgaagggagtggcagaatcaaattgctacatagtccaaacaaaaaagaaggctttttcaaaaaacattaaattcacatgcagtctcagagactatttagacaaagttcaagttaggagcttttaggatgtgggagtaaaactttaatgggaggggagggctggctgctggaagaaggaagaagccagactggttagacagtactcttaactcctagcccagcctagcgtgccctgcccctctggccactgctgcagacacctgccttaacacacacacctctaggactccacagttttgccttaaaggaccttcccaagtctccctttccctgtctggcttctcccttaagaagagagagatacttgtagaattgggtggggggaatgagcatgaactgtccttccatttgggatatgttacattagagtgagagagagaataaggagcctttcttatggaagaaatgggagaagagagacagggttcttttcagcagagtctagtagtttctctgtaaggcaaaataatctaaaaagactaacctgcccacccactccttatattgctgtgagattgcccctatcttgtgctcttctgtctgcagtgtgcacggccttgttctaacccggaataaaggtgattgattgtattgc

SEQ ID NO: 659 - DNA, 680 bp, Homo sapiens
ggaggaccccagcttttcttgccagctcagcagttcacttcctagagcatctgtcccactgggacacaaccactaatttgtcactggaacctccctgggcctgtctcagattgggattaacataaaagagtggaactatccaaaagagacagggagaaataaataaattgcctcccttcctccgctcccctttcccatcaccccttccccatttcctcttccttctctactcatgccagattttgggattacaaatagaagcttcttgctcctgtttaactccctagttacccaccctaatttgcccttcaggacccttctactttttccttcctgccctgtacctctctctgctcctcacccccacccctgtacccagccaccttcctgactgggaaggacataaaaggtttaatgtcagggtcaaactacattgagcccctgaggacaggggcatctctgggctgagcctactgtctccttcccactgtcctttctccaggccctcagatggcacattagggtgggcgtgctgcgggtgggtatcccacctccagcccacagtgctcagttgtactttttattaagctgtaatatctatttttgtttttgtctttttcctttattctttttgtaaatatatatataatgagtttcattaaaatagattatcccacacg

SEQ ID NO: 660 - DNA, 1677 bp, Homo sapiens
actcagcctgtctcccacctcccgggcctctctggggcccctttccaccgctcactgcttagaaaggccgcatcctccccgagcccttataccttggcatggagtcccaaaggccctgggcacaggcagagagcccaccggctggtcatgagggcctcttcctttctctgacccaggcacctcgagggctattctcctgggttccttccggggtttattgctgaggcccagctgtgcagaattgtttgctagtgtggttggtatggaatccttgctggctttactaagccagccacacttggagtctgcccccaagctctctcactgaatgctgcctcttctacccctatgtccaaattttcagccaccacagacctcagctgtgtatcctatctgttctagcttctcctgcccctggtggggatgggctgtcagaattgcaagggaggaaggctggggttagagtggggagtgggcttcttcctccaagatctcagtctctcagtgcttggcagaggggtgaggccctggggaggcaggggttggtgccctgactcctgtgaggggaatctcagtagctgggaattatggaaaaactcttcctgtttctgtccatcttgttcctgtggcttagcacatacagacctcagatcttacttggtagtgagtgccttgccctctttgagctatttggctacttccctgtccctctgactcctactgtcccaattttctccctccctgtgtgtcactagagaaaaaaaaaaacaaaaacctagattccggattaggggatgacatcccaaacagcccggagtatttgcagaaggctcaggcaacgagtgggccacatctcacttctgcttcctcatctcagcccactctgaaaatgtgcagcaccctcactggttcctccccccaacgcaaggaggatgcccaattgttgccctctgaaaatgcacagttctcctggccctaggacttacttattacatttttttctctttccttgagctgcctttggcaagggaagagacccccaactctgcgcccctactccatgctgctgatccccacctgcgcactatagctcagggtcagcagtggaatgaagggccttagaacctgcatagaagaaatgaactcactgcatttctgtgctccctcctccctcgcaccaaactcctagctctacaagtatatttatttatttatttatttattcatctatttatttacttatttatttatttataaatattgctatttattgccgagttgtgcactttggggtagagtgaggggctcccagcagctctagctgggtctctcttgcttcctccctgcttacgcctttccttttcttgctccttcttcaactcctggtgtgtgtgagcatgccctttgcttgccacaccatatcctttccccagatccacctgtcctgacactctagtcctccaggatagtgctcctcccccagctccagggctcctggatgtccttcctcaactccctccacccctagacaatcctacctggtcccatctgcctcttttctctccccagcctgccctgtgacccttgcctcttcctgatactcccaagagcaggccccaggggtctgtgtcacatatctctgtgtgattccttctggttgcatccccaatttcatac

SEQ ID NO: 661 - DNA, 3296 bp, Homo sapiens
ctgtgcaacagcagggggagtgggaaactctggggggtcctgagggggtgggagggggcttggttctcaggcccagccacattcctgccacccttcttcttcttgctcttttttttttacttgaattaacgcacccccaccttctctcctcgcttcttccttattttaccccatgtgaacctggagagaccatcctgctgtcaacagtacctgggaaggactcccacctcaccaacaacttttgtattactctaggccctgcaggaatcagtgcctctctccctcttctttccctagtcttttcccagattacagtctctcctgaaagggcacagggccctgctgattgtactttcccctcctgagccccgactcacaaatccaagttcttaaaacatttctcttcagtggcccaacagggtttctctggggcacatggacatgactccagagagccacagtgccaaactcctccagggcagcaactggccctcctgtccctcaccccagccacaacaaaccctgggttctagggcagggatactcctgccacacagcccgagttagaaatctccttgctaggagcatttgcttccacatatatttagagcaaagaaggatcccatccttttcccagaaatctccacctaatgtttttggtttgtatggtcacgtgaccataggcaaccacgtggaaaccctctgtgaccacttttccagggacttaggggaaggtacctttcttccaatgtgtcttcctaggcagcccctgaggaggagggctgaatagatccctgaggttttggagagacccccatcactgactcctgctccctaaccctaccctcactttcgtccccgctcttcccagtgaaggatggtatgtagactcctgtacagacatagtggcttgcagaccctgacccagcccctgtggtcttagacaaatgtttttatttttgtcaccagccacccctgtcctgccgccttctctcgactccagagacctgttgcctcatctcttttggggaagagccggcagctcctcctcatcccctgccttaagtccagttctttgcctcaggggtctcgtttccttggccttccagggtccccaccccttttctccctgcctgattctctgagctctgggctccgtctgtattgggttgaggggcaaggattactgccttttgtaggtacttcacccctcaccccattttagcttccatagtctttgcaccaaatccaaattcttgataatttagatctcattttgagcaaaatttgctggccctctaataaatattttcaatataaatctgagcctttgactcagacatttttgccaaggagagtagaattaggaagtacccatatacatccagccaggatccacatggaggacctttctgatggctgcaatgactaggccattcctctgagtaactcacagtgtccttttgtaggcccttcttttccctgaaagactggttggtacttaccttgcagagcacatcctgggataagatccccagtgtctcccctgggaggctccccctctgtgtagcaccagccctgggaatgatggagcctagtgatcggggtttctcctgctgtcctttctgcaaaagttcacttgtttacccaccgcatgctagagaggagctcattggccaatgcttaccttgtccccaaaggggtgggttgtggagctcacttaggcagggcctctggctggggccagggttatgagataggcctgtatgaaatatgtcctgttctgggggtctgtctcttttcttctcttcaaaaactttgtgtcagagagtcccttctgagtcacataaatacctcactatcctggaaaacagggcctggatggtgactggggtcattgcctttgtggacaggatggagtgtggtgtggtctgaggagcaggttggggtgggggagagggaaaggatttgggatcttagttgctgccctaggttaggggctggggagtgtttattttaagatcctgccatgtttttaatcactgtgatttttttttcattcccctttcctaaaaaaaattttttgcctccaactctctaagcactaagggctgtgcctgagaatggtagcattttggtcttttgcttcagaactgtggtatctttgtcttttttcattattattattattattattattattattactattgttttttaaaatgtcaggatgaattgtcagacatatggccatgtgtttgtcctctgcttctcccctgtgggaagttgtctccatgctgtgaactgctgtggggtgtgcagctgactcagtccctctgagcagtttccccactgtgtctgtcccatcatgcgctggatctgctcattctcctgctgtgggggtatgcccacctcttacccccttgacaccatagggctgctgtggctgggcctcaccagcactgtcttttgtgtgactcatggcatcctcgttcatccccaccgtgcctagcaggccttccttttcaccacctcggaacgcttgcctttcctccctccacaacaggacgctgtgcctcagtccttcacctacctcgccactctgccactgtccccattggtcctttctcctaaactggtctttgtgctctctttgttttttcttatttccctcttgtctctcattttttcttcccattcccctcccatttcagcccttaacttttctctttcccatctccactcagtattccaatggcaaaccctgatgatgtaacacctgcgatgagacatcggactctccggaactttctcatctgacacgtctttttcccagggttcgtacttctcctccattggtcccaggctaactcccctgttcctctgtggtgtctgtcagtccgtctgtcttctctttcctctgcccttcccacagggcagtatctgctgatggattcagtcctggtgtgtgattgttgtgatttgttcttccgtgcgcaaaaggaagagggctttttgagtcccttccaagtgagattgtaaatgtagaattttccactgttggatctagattttttttccttttttttgggggggtggggttacagagctgagaccttgtgcatgcatgtagaaaattgtaaaatgtaaattttttttaatatataaaaagcttgtttctacagtttgcagtggatctaaacattacggcaattttaggatttttttcttaaacataggaactaaaactgtacaaattttttttatataaaataaagacatttgacttttgtggg

SEQ ID NO: 662 - DNA, 1633 bp, Homo sapiens
acagcagtgcactcccctaagtctctgctcaaaaaaaaaacaattctcggcccaaagaaaacaatcagaagaattcactgatttgactagaaacatcaaggaagaatgaagaacgttgacttttttccaggataaattatctctgatgcttctttagatttaagagttcataattccatccactgctgagaaatctcctcaaacccagaaggtttaatcacttcatcccaaaaatgggattgtgaatgtcagcaaaccataaaaaaagtgcttagaagtattcctataaaaatgtaaatgcaaggtcacacatattaatgacagcctgttgtattaatgatggctccaggtcagtgtctggagtttcattccatcccagggcttggatgtcaggattataccaagagtcttgctaccaggagggcaagaagaccaaaacagacagacaagtccagcagaagcagatgcacctgacaaaaatggatgtattaattggctctataaactatgtgcccagcactatgctgagcttacactaattggtcagacatgctgtctgccctcatgaaattggctccaaatgaatgaactactttcatgagcagttgtagcaggcctgaccacagattcccagagggccaggtgtggatccacaggacttgaaggtcaaagttcacaaagatgaagaatcagggtagctgaccatgtttggcagatactataatggagacacagaagtgtgcatggcccaaggacaaggacctccagccaggcttcatttatgcacttgtgctgcaaaagaaaagtctaggttttaaggctgtgccagaacccatcccaataaagagaccgagtctgaagtcacattgtaaatctagtgtaggagacttggagtcaggcagtgagactggtggggcacggggggcagtgggtacttgtaaacctttaaagatggttaattcattcaatagatatttattaagaacctatgcggcccggcatggtggctcacacctgtaatcccagcactttgggaggccaaggtgggtgggtcatctgaggtcaggagttcaagaccagcctggccaacatggtgaaaccccatctctactaaagatacaaaaatttgctgagcgtggtggtgtgcacctgtaatcccagctactcgagaggccaaggcatgagaatcgcttgaacctgggaggtggaggttgcagtgagctgagatggcaccactgcactccggcctaggcaacgagagcaaaactccaatacaaacaaacaaacaaacacctgtgctaggtcagtctggcacgtaagatgaacatccctaccaatacagagctcaccatctcttatacttaagtgaaaaacatggggaaggggaaaggggaatggctgcttttgatatgttccctgacacatatcttgaatggagacctccctaccaagtgatgaaagtgttgaaaaacttaataacaaatgcttgttgggcaagaatgggattgaggattatcttctctcagaaaggcattgtgaaggaattgagccagatctctctccctactgcaaaaccctattgtagtaaaaaagtcttctttactatcttaataaaacagatattgtgagattc

SEQ ID NO: 663 - DNA, 774 bp, Homo sapiens
gccctcgcccccacctgccactggagaccgctccgccatccccacctcaccgccgcgcagcagagctggaagggtcctgccgatgggaccctgccaggcccagtgccactgccccccgaggctgctagacgtgggcgttaggcgtgtcccacccacccgccgcctcccatggcacgtcgggaacaccggagccgccaacttggagactcctggtctgtgaagagccgctgacgcccgcaggaaccgggctgggccttgtgtgccagtggggtttgtgcttggtctttctccgcttggatttgcttatttattgcattgctggtagagactcccaagcctgtccaccctgcaaagactcctcgggcagcatgcgggtcccgcacactgcacccatttcctggatgtcccctgcaggcgcgggaggccatccgggcctgctggctgcggccccctctcagccaggcctggctcagcccactgcgtgggaggtcaccggccactccccgaggagctgggatccccgggatgcaggcccacagtgcggggctgcacccatgatgcggagctggcctccaaccctgcgggccgcgccaggcaccaactcagtgtttgtcagtgtttgtttttccaagaaatggttcaaattgctgctcagatttttaaatttactgtagctgccagtgtacacgtgtggaccccattttatttttacaccaatttggtgaaaatgctgctttcctcagcctccccacaattaaactgcacatggtctct

SEQ ID NO: 664 - DNA, 437 bp, Homo sapiens
aaggaaaagcagctgctgcctctctcctgggaccgtggggttggaaagtcagctggacctcatggggcctggggctcacagacagaagcacctcagaatttccttcagtgcctcagagatgcctggatgtggcccctccccctccttctcacccttaaggactcccaaacccattaatagttcagacacaggctccttcttggagcctatgggcttcagatgtctttgccccatttgtcacctcgcacacttatagcgtttcctcctcgaaattctaccaagactggtcaaatgttgctgaggggcctggaccagctgtcctttacaccaccttctcaacactgctgaaaagaacccaagagaattgtcacacatgacacaagatgtacataatatcatgctcactgcagtgttatttaaaataaaaggcaggaaat

SEQ ID NO: 665 - DNA, 284 bp, Homo sapiens
gcacatctcctcctttgtggttccacttcccctgtgcagatcgtgggatgaaacgcatgggccatcgcacctgcctttggaatgatcagctttacctggttgggggttttggtgaggatggcaggacagccagtccacaggtttgcatcctggactttatctaaatagtgccaagacacatcactaagcctcgttttgttttgctttgttgcaaacctataaagcgttatcaccagagctatctgcttcacttcaaatgcttattaaatttcaatctgagactc

SEQ ID NO: 666 - DNA, 302 bp, Homo sapiens
gacttgacttctgtgagtttagacctgcccctcccacccccaccctgccactatgagctagtgctcatgtgacttggaggcaggatccaggcacagctcccctcacttggagaaccttgactctcttgatggaacacagatgggctgcttgggaaagaaactttcacctgagcttcacctgaggtcagactgcagtttcagaaaggtggaattttatatagtcattgtttatttcatggaaactgaagttctgctgagggctgagcagcactggcattgaaaaatataataatcataaagtc

SEQ ID NO: 667 - DNA, 364 bp, Homo sapiens
agaatcaagccactgaggcagggcagagggacctttgataggctacgatactattttcctgtgcatcacacttaactcatctaactgcttccccggacaccctccacctctagttgttactaagtagctgcagtaggcattgctggggaagaaacaaacacacaccaaacagtactgctacttagtttctaaggctgcacagggaagggaaagactgggctttggacaatctagaggtaatttatatccgcccccaggtggagcaacatgcgattctggaggcacgggggtaactgaaagtgagtacatatagtctttctggtttctggagataacccatcaataaaagctgcttcctctggta

SEQ ID NO: 668 - DNA, 278 bp, Homo sapiens
cacctctaagctctggcacctgtgaagccctttaaacacccttaagccccaggctccccgtttacctcagagacgtctatttttgtgtctttttaatcggggaggggggagggggtggttgtagctccattattttttttattaaaaaatacccttccacctggaggctcccttgtctcccagccccatgtacaaagctcaccaagcccctgcccatgtacagcccccagaccctctgcaatatcactttttgtgaataaatttattaagaaaaaatg

SEQ ID NO: 669 - DNA, 44 bp, Homo sapiens
tccccaactctcattcatgaaaataaaaattgctggagcttggc

SEQ ID NO: 670 - DNA, 199 bp, Homo sapiens
gcaggggagcagcgtttgatcccccctgcctatcagcttcttctgtggagcctgttcctcactggaaattggcctctgtgtgtgtgtgtgtgtgtgtgtgtgtgtgtatgttcatgtacacttggctgtcaggctttctgtgcatgtactaaaaaaggagaaattataataaattagccgtcttgcggcccctaggcct

SEQ ID NO: 671 - DNA, 305 bp, Homo sapiens
ctttagaatagatgcggtcatattcttctttggcttctggttcttccagccctcatggttggcatcacatatgcctgcatgccattaacaccagctggccctacccctataatgatcctgtgtcctaaattaatatacaccagtggttcctcctccctgttaaagactaatgctcagatgctgtttacggatatttatattctagtctcactctcttgtcccacccttcttctcttccccattcccaactccagctaaaatatgggaagggagaacccccaataaaactgccatggactggactc

SEQ ID NO: 672 - DNA, 1520 bp, Homo sapiens
ggttgtccagagccagcccccacagcagctggaacctctgagtcaggtgccctagggccaaagactaggcccctcttcagagcccaccttgctgggtgatctctaggacccaggagcagagtggtggacaggaccatgccctcctcagaactggagctgccacaggggcagttgatgaggcagaggtttgaggatcccccctctgctaccagccccagtatcaccttccccatgctcttgtggctgtggactaagggagaaggattaaggggtatggctgaattcccccggcaccccttgccctcaggcttccttcttcctttccctttggttaatcctgcatgggattagctgaccatcctgttttccatcccagagcctcccaaggctgggaaagtagggctgaagggctagatgtttggtctcaggaagtggggcccacccattcccagaaggagcttctttacctcttagccctgaggtttcctccttcccatcttctgtgcttccagagaacaactttgttcctatggtcacccccactatccccatgaccgcatgaagaggcagttattgctttagtctttcattgcaaccactgggctccctttgaacccggcccaatctttggtcccagcattttcccactccagtgtatccagggtgttccaggtgagctggggaaggaagtgagcatggcctcagctgcagatctcctggagcagcggcatcatggcagacaggccctggatgtgctggatttggtacccgtaggcctcattaatgctccggagctcagccagcaggcctagcaacttcgcatacagaaacctttggaggaagtagtggggttgccaggaaaacaggagggaaataaggcagttgggagtcttgtctctaggccctgatcccctgaactattcctcagtgaagccaggtctgaacattagagaaaatcatgctctggtatgacagactatcagaggttccaaaggtcctccagggggcctcggtctgacactgtcttctctcaccatgctcagttttttctgaacccagagctctgagagccgagtgtgaagaaagctccagacttggccagaactccaaccatgtggaatctgagggcctggccttctagagcaggttctagaaggtggatgtgttctatggtataaagcatcccctttctggccaaactagctcttggaggaacgagcaaaacagaagcggtgcatacctcagagcctggataaatcacagactattgaacctggaactggctttgaccatgaaactgtgaatggccctaacttcaagggaaatgagaaatcgaaggaattggcccaatggcgaggagaggaaaggccaagggaagagaaaagtctgcgttagtctggagaagttggactagtgaggtaatggatgtcatcaatctcaggaatgctattacccagagcctctgagctactactttgcatctgtactgaataaaaaaaaaatctggaaaaagtgagatg

SEQ ID NO: 673 - DNA, 2310 bp, Homo sapiens
agaaaggaggctcccagcatcatcttcctacacattattacattcacccatctttctgtttgtcattcttatctccagcctgggaaaagttctccttatttgtttagatccttttgtattttcagatctccttggagcagtagagtacctggtagaccataatagtggaaaagggtctagttttccccttgtttctaaagatgaggtggctgcaaaaactccccttttttgcccacagcttgcctactctcggcctagaagcagttattctctctccatattgggctttgatttgtgctgagggtcagcttttggctccttcttcctgagacagtggaaacaatgccagctctgtggcttctgccctggggatgggccgggttggggggtgggttggtgaggctttgggtgccactgcctgtgggttgctggcttaaaggacaattctcttcattggtgagagcccaggccattaacacctacacagtgttattgaaagaagagaggtgggggtggaggggaattagtctgtcccagctagagggagataaagagggctagttagttcttggagcagctgcttttgaggagaaaatatatagctttggacacgaggaagatctagaaaattatcattgaacatattaatggttatttctttttcttggatttccagaaaagcctcttaattttatgctttctcatcgaagtaatgtaccctttttttctgaaactgaattaaatactcattttatctttgactctccttgaaatctagagaaaccaagaaaatggctgttgggaaggaaccaatttcctcctcttccctcgggtctcaggcatttacatcctccctctccccgcaatctgacctttaccaggagggaaacagttctcctacatctcatcattggaaaagttttcagggaatcagatagaacttagccagagatttaaatatcacagaaaagcctcagagaaggaaggagaaaaagaaaagaagtgacgcatgtagagtgcttttgggttataggcaccaaaatcccattaaggactgattataagcttcatggtacagttcagcaaattatgattcattgaggggcacagaggaccagtgttggtgacagctaggggatgatgacctgaggttataggcttggggtgaatgaagcatagagtttttttttaaaaaagaagggattgttgaaaacctggcaaaaatgtataatttaatgagaaaacttgctgcttttaaaatccatataggccaggctttagcaggcatgctgttttgatagtttttgggaactctggaataagagacttatctcatctgtcacttcgagttgttggccagccagttaaagctgtgggtcgaagaggggaaatgttaactggctggtgtcaattggataggaagaccttagttaaggtggggacccgctgttttaacagtcttcattcagggtcccaaatagtatttggctttaagtaatgattggttttccctttttactagaggggccctgggaagtccttgtacctttcctccattttaaaccagctgttctctactttgtccttggaatgagggacaagtgatcatgacagaacactttgtcattgggactgggaaaggtttggcaagggcattaaatttaacagccagtgccaggaaaatataaaatggggtcaatgataaacagctgttagaggctggaaaatgggtagggcagttgaattttttggtggtttcgtaccatttgggtgattgaagcatggtagtgggtgggtggggggtgtgacagagcatcatgtttgttattctgccttaaatttctacttactgtctttttcttctctgtcttccaatcactttaatatcttcaattttcaaactatatttgtacttgggcttagatagaaagtcttacacaagcatagtatcttctactttggttttccctaccttttcttccccaccttctccaaacacacatatacatactctactcaattctatttctgattttgtagttgttagttgtccatgctcaggataaaaaatgagtgggtagggttgagggactggttctttgaggttctgccctttttccatgattcagaccaactttctcttggtcatttctggagtataactgactcaattcttgtaaaaatgtgttccacccaaaccactgtatgttcttttccctactttattttctcctaccttccttctcctaattgtgttacaagaggcagccatagcaagaatggaaaatccagatcagtaaaagattcaac

SEQ ID NO: 674 - DNA, 1576 bp, Homo sapiens
ttgccatcagaaagagacaacttgaagaaaccaacaatgactatgaaacagctgacggcggctacatgactctgaaccccagggcacctactgacgatgataaaaacatctacctgactcttcctcccaacgaccatgtcaacagtaataactaaagagtaacgttatgccatgtggtcatactctcagcttgctgagtggatgacaaaaagaggggaattgttaaaggaaaatttaaatggagactggaaaaatcctgagcaaacaaaaccacctggcccttagaaatagctttaactttgcttaaactacaaacacaagcaaaacttcacggggtcatactacatacaagcataagcaaaacttaacttggatcatttctggtaaatgcttatgttagaaataagacaaccccagccaatcacaagcagcctactaacatataattaggtgactagggactttctaagaagatacctacccccaaaaaacaattatgtaattgaaaaccaaccgattgcctttattttgcttccacattttcccaataaatacttgcctgtgacattttgccactggaacactaaacttcatgaattgcgcctcagatttttcctttaacatcttttttttttttgacagagtctcaatctgttacccaggctggagtgcagtggtgctatcttggctcactgcaaacccgcctcccaggtttaagcgattctcatgcctcagcctcccagtagctgggattagaggcatgtgccatcatacccagctaatttttgtattttttattttttttttttagtagagacagggtttcgcaatgttggccaggccgatctcgaacttctggcctctagcgatctgcccgcctcggcctcccaaagtgctgggatgaccagcatcagccccaatgtccagcctctttaacatcttctttcctatgccctctctgtggatccctactgctggtttctgccttctccatgctgagaacaaaatcacctattcactgcttatgcagtcggaagctccagaagaacaaagagcccaattaccagaaccacattaagtctccattgttttgccttgggatttgagaagagaattagagaggtgaggatctggtatttcctggactaaattccccttggggaagacgaagggatgctgcagttccaaaagagaaggactcttccagagtcatctacctgagtcccaaagctccctgtcctgaaagccacagacaatatggtcccaaatgactgactgcaccttctgtgcctcagccgttcttgacatcaagaatcttctgttccacatccacacagccaatacaattagtcaaaccactgttattaacagatgtagcaacatgagaaacgcttatgttacaggttacatgagagcaatcatgtaagtctatatgacttcagaaatgttaaaatagactaacctctaacaacaaattaaaagtgattgtttcaaggtgatgcaattattgatgacctattttatttttctataatgatcatatattacctttgtaataaaacattataaccaaaac

SEQ ID NO: 675 - DNA, 305 bp, Homo sapiens
atggcccttcgtgataagtcagctgtgactgtcagggctatgctatgggccttctagactgtcttctatgatcctgcccttcagagatgaactttccctccaaagctagaactttcttcccaggataactgaagtcttttgactttttgcggggagggcggttcatcctcttctgcttcaaataaaaagtcattaatttattaaaacttgtgtggcactttaacattgctttcacctatattttgtgtactttgttacttgcatgtatgaattttgttatgtaaaatatagttatagacctaaat

SEQ ID NO: 676 - DNA, 608 bp, Homo sapiens
tctccattgtcttgcattgggatttgagaagaaaatcagagagggaagatctggtatttcctggcctaaattccccttggggaggacagggagatgctgcagttccaaaagagaaggtttcttccagagtcatctacctgagtcctgaagctccctgtcctgaaagccacagacaatatggtcccaaatgaccgactgcaccttctgtgcttcagctcttcttgacatcaaggctcttccgttccacatccacacagccaatccaattaatcaaaccactgttattaacagataatagcaacttgggaaatgcttatgttacaggttacgtgagaacaatcatgtaaatctatatgatttcagaaatgttaaaatagactaacctctaccagcacattaaaagtgattgtttctgggtgataaaattattgatgatttttattttctttatttttctataaagatcatatattacttttataataaaacattataaaaacaacattctgtttaccttttcaaggctgtattggttggagtgtagactgaactgcctggggtctgtttctcttcagtgatgagactcttaggaaggcaggaatggatag

SEQ ID NO: 677 - DNA, 971 bp, Homo sapiens
aagtaaacagttcatccatgatctcacttaaccaccccaataaatctgattctttattttctcttcctgtcctgcacatatgcataagtacttttacaagttgtcccagtgttttgttagaataatgtagttaggtgagtgtaaataaatttatataaagtgagaattagagtttagctataattgtgtattctctcttaacacaacagaattctgctgtctagatcaggaatttctatctgttatatcgaccagaatgttgtgatttaaagagaactaatggaagtggattgaatacagcagtctcaactgggggcaattttgccccccagaggacattgggcaatgtttggagacattttggtcattatacttggggggttgggggatggtgggatgtgtgtgctactggcatccagtaaatagaagccaggggtgccgctaaacatcctataatgcacagggcagtaccccacaacgaaaaataatctggcccaaaatgtcagttgtactgagtttgagaaaccccagcctaatgaaaccctaggtgttgggctctggaatgggactttgtcccttctaattattatctctttccagcctcattcagctattcttactgacataccagtctttagctggtgctatggtctgttctttagttctagtttgtatcccctcaaaagccattatgttgaaatcctaatccccaaggtgatggcattaagaagtgggcctttgggaagtgattagatcaggagtgcagagccctcatgattaggattagtgcccttatttaaaaaggccccagagagctaactcacccttccaccatatgaggacgtggcaagaagatgacatgtatgagaaccaaaaaacagctgtcgccaaacaccgactctgtcgttgccttgatcttgaacttccagcctccagaactatgagaaataaaattctgttgtttgtaagct

SEQ ID NO: 678 - DNA, 480 bp, Homo sapiens
gggggcggctaccgtcccctctgcaggctcattcctccttggtctcctgcttcccctcacgcgaatttctttcaaagccatctgtttgcatccttgtgttttgctgtggtttttaaaggagcgcccacgaagtgtagtggctgacgatttcaacctcacacagcagtttgtaaccgcaagcattctctttgaattctcacagaattcagcaagaagtagaaacctgttatttactacattgtgatttaactttggatgtgaatttagtcacccttagcccttcagataagcctagccagtacatatttcagcacaggcagtttttttggtatttaagtacattgaggtaactgagcacttgagaatattttagggtcaaagtgtaattattcataatgaatttactctgttgatattaaaaagacgttcagtcctattactgatgagtttacatcttcaaataaatcctgggttctattt

SEQ ID NO: 679 - DNA, 214 bp, Homo sapiens
acatgatattttatagcttgggaagaaacttgcagatgatatgtgctgcctttgcttcttatcattcatggcagattgtttgtgctttcaacatttcatttgaaatgggagaagataaaatcacttgatgtaacctggaaactatgctttacatggcaatcaaagccttttgatcatgtacattttatttgatattaaaatcttttataaccag

SEQ ID NO: 680 - DNA, 407 bp, Homo sapiens
caccctgcagctatgctggaaaactgagcgtgggaccctgccagactgaagagcaggtgagcaaaatgctgctttctgccttggtggcaggcagagaactgtctcgtactagaattcaaggaggaaagaagaagaaataaaagaagctgctccatttttcatcatctacccatctatttggaaagcactggaattcagatgcaagagaacaatgtttcttcagtggcaaatgtagccctgcatcctccagtgttacctggtgtagatttttttttctgtacctttctaaacctctcttccctctgtgatggttttgtgtttaaacagtcatcttcttttaaataatatccacctctcctttttgccatttcacttattgattcataaagtgaattttatttaaagct

SEQ ID NO: 681 - DNA, 971 bp, Homo sapiens
gtgccgagggcgaggagatggaggcggcggcgtggctggaggggccgtgtctggctgctgcccgggtaggggatgcccagtgaatgtgcactgccgaggagaatgccagccagggcccgggagagtgtgaggtttcaggaaagtattgagattctgctttggagggtaaagtggggaagaaatcggattcccagaggtgaatcagctcctctcctacttgtgactagagggtggtggaggtaaggccttccagagcccatggcttcaggagagggtctctctccaggactgccaggctgctggaggacctgcccctacctgctgcatcgtcaggctcccacgctttgtccgtgatgcccccctaccccctcactctccccgtctccatggtcccgaccaggaagggaagccatcggtaccttctcaggtactttgtttctggatatcacgatgctgcgagttgcctaaccctccccctacctttatgagaggaattccttctccaggcccttgctgagattgtagagattgagtgctctggaccgcaaaagccaggctagtccttgtagggtgagcatggaattggaatgtgtcacagtggataagcttttagaggaactgaatccaaacattttctccagccggacattgaatgttgctacaaagggagccttgaagctttaacatggttcaggcccttggtgtgagagcccagggggaggacagcttgtctgctgctccaaatcacttagatctgattcctgttttgaaagtcctgccctgccttcctcctgcctgtagcccagcccatctaaatggaagctgggaattgcccctcacctcccctgtgtcctgtccagctgaagcttttgcagcactttacctctctgaaagccccagaggaccagagcccccagccttacctctcaacctgtcccctccactgggcagtggtggtcagtttttactgc

SEQ ID NO: 682 - DNA, 1504 bp, Homo sapiens
tcagtaacctaaggactgtttcctttttctcctcttccatttcttgggttattccacatatgaatgcaggactacccccttaccattttaagaaggtactttatacatttatttaatcctactaatgtgcagccattgcccaagcagtgactgcgttgcatacatttggcactgagtaggacaagacctctcagctatacattgaggggttttagagcatccatgtgggcaacccttttttgtgcgggagagcaggtgttgctcttcagtatgtagcctaaaaaaatcttaattatttcatggatcatgaagcaaggatgaataatatcatgtcttggtaaatactaacaaatttgttaggtttggtgacatcatttacagattatttctttatgttgtccagtggttcttccttattgttgatatccataagctggcactggatgctctcagtaatgttaagtaattgtcaagcagcagttacctactgtgttcttaacactgagttgtgaattttttcttaaagcagtactgtagtactgaatattcctttaaaggaactgcagtgagcctatctaagtttttttaaattaaggcttttaaaatagaaagctgatgcttgatcttgcacaatttttatgtctagtatgtatgcttgagtgaatgtgcgagtatgaatgattagagaaaatttgagtcagtgtactttatagtgtgaatcctgtgagctaatacagtctatacttatttcttccctacctgtttcacatccgtaagatttaagatatacattttttgagaggtagtctgtctgatacaatgtaaatgacaaaacataattcctgagaggcccagaacaaactggagtctagcctggagttaaattgagacttctaaaatgattggaacaaagactaagttgtgccagatgtaaatcaacccctcttttagtttactttagactttgtattagctcatcttttttgtagtaaatctatagttttaaggtttctcaagatgtggctctacctactatgatgaaaattgaagtgggtcaaaagaattagatgtacagtgaagggaaaagaaaaaaaatgggcgaagagagggtggaaaataaaaggattcttttttcttcctttctgtttctcgtatccctgctccctttttcctccccttccctcattctttgcctctatccttagctgaagacaaactagaggagcagcatcccaggtagtttggcttttgactgcaaggtagttaagaaaggtgtagatataatgaggtagaagtagaaaggaagaaaaactcaaagaattcttaaaaggattcatagcaacataatgtgtccctgagtagaggatgctgctatgcgtgagttcatggacacaagttgattacatggtttttagaattataattatggattcttcttatttcatggtaggttgtctttaaagatataaaaattaggatgcctttatgaagcactgattatacc

SEQ ID NO: 683 - DNA, 473 bp, Homo sapiens
accagataccaagttttgtttgccacgataggaatagcttttatttttgatagaccaactgtgaacctacaagacgtcttggacaactgaagtttaaatatccacagggttttattttgcttgttgaactcttagagctattgcaaacttcccaagatccagatgactgaatttcagatagcatttttatgattcccaactcattgaaggtcttatttatataattttttccaagccaaggagaccattggccatccaggaaatttcgtacagctgaaatataggcaggatgttcaacatcagtttacttgcagctggaagcatttgtttttgaagttgtacatagtaataatatgtcattgtacatgttgaaaggtttctatggtactaaaagtttgttttattttatcaaacattaagcttttttaagaaaataattgggcagtgaaataaatgtatcttcttgtctctgg

SEQ ID NO: 684 - DNA, 201 bp, Homo sapiens
tgctgtcagtgcctggccatgttcctacggctcaggtcctccctacaagacctaccactcacccatgcctatgccactccatctggacatttaatgaaactgagagacagaggcttgtttgctttgccctcttttcctggtcacccccactccctacccctgactcatatacacttttttttttttttacattaaagaact

SEQ ID NO: 685 - DNA, 397 bp, Homo sapiens
ttccagcactttgggaggccaaggcagaaggatcacttgagaccaggagttcaagaccagcctgagaaacatagtgagcccttgtctctacaaaaagaaataaaaataatagctgggtgtggtggcatgcgcatgtagtcccagctactcagaaggatgaggtgggaggatctcttgaggctgggaggcagaggttgcagtgagctgagattgtgccactgcactccagcctgggtgacagcgagaccctgtctcaaaatatgtatatatttaatatatatataaaaccagagctgacaatgacactctggaacattgcataccttctgtacattctggggtacatggatttctactgagttggataatatgcatttgtaataaactatgaactatg

SEQ ID NO: 686 - DNA, 2028 bp, Homo sapiens
ttctcacctgaaggcagagggatgaaatgccaagactctatgctctggaaaacctgaggccaaatattgatctgtattaagctccagtgctttatccacattgtagcctaatattcatgctgcctgccatgtgtgagtcacttctacgcataaactagatatagcttttggtgtttgagtgttcatcagggtgggaccccattccagtccaattttcctaagtttctttgagggttccatgggagcaaatatctaaataatggcctggtaggtctggattttcaaagattgttggcagtttcctcctcccaacagttttacctcgggatggttggttagtgcatgtcacatgacatccacatgcacatgtattctgttggccagcacgttctccagactctagatgtttagatgaggttgagctatgatatgtgcttgtgtgtatgtctatgtgtatatattatatatacattagacacacatatacattatttctgtatatagatgtctgtgtatacatatgtatgtgtgagtgtatgtatacacacacacacacacacacacacacacttttgcaagagtgatgggaaagaccctaggtgctcataactagagtatgtgtatgtacttacatgggtgttttgatctctgttctttcatactacatttgaacagggcaaaatgaactaactgccatgtaggctaagaaagaaatgctaacctgtggaaagttggttttgtaaaattccatggatcttgctggagaagcatccaaggaacttcatgcttgatttgaccactgacagcctccaccttgagcactattctaaggagcaaataccttagctcccttgagctggttttctctgatggcacttttgagctcctaagctgccagccttcccttcttttcctgggtgctcagggcatgcttattagcagctgggttggtatggagttggcagacaggatgttcaacttaatgaagaaatacagctaaggccttgccagcaacacctgccgtaagttactggctgagtgagggcatagaagttaaaggttactgtttttatcctctatccttttttcctttcctgatcaaggtgctcttctcattttttcctgagaaccttagccatcagatgaggctccttagtttattgtggttggttgttttttctttataatggctctgggctatatgcctatatttataaaccagcagcaggggaaagattatattttataagagggaacaaattttcacaatttgaaaagcccacataagttttctcttttaaggtagaatcttgttaatttcattccaaacatcggggctaacagagactggaggcatttctttttaggctctgagactaaatgagaggaaaagaaaagaaaaaaaaaatgattgtctaaccaattgtgagaattactgtttgaaacttttcaaggcacattgaaatacttgaaaacttctcatttatgttatttatgatgttattttgtacgtgttattattattatattgttttataaatggaggtacaggatatcacctgaattattaatgaatgcccaggaagtaattttcttctcattcttctaaaactactgcctttcaaagtgcacacacacgcgtccacatacactgcattcgttgctccagtataaattacatgcatgagcacctttctggcttttaagccaatataatgggctgcaaaatgaagacaccagagtgtatgcatacaaatctcactgtattaaagatgcaggttttctaattgtacccttcttgtctctctggcaatcttgcccttaatatccctggagttcctcatcagtgtcattttctgttatacacagttccacaattttgtctctagttgacttcaaatgtgtaactttattggtcttgccctattataattgtcatgactttcagattgtatctgaactcacagactgctgtcttactaataggtctggaaggtcacgctgaatgagaagtaaattattttatgt

SEQ ID NO: 687 - DNA, 294 bp, Homo sapiens
ttaacaaaattacatgtctttttgtaaatggcttgccatcttttaattttctatttagaaagaaaagttgaagcgaatggaagtatcagaagtaccaaataatgttggcttcatcagtttttatacactctcataagtagttaataagatgaatttaatgtaggcttttattaatttataattaaaataacttgtgcagctattcatgtctctactctgccccttgttgtaaatagtttgagtaaaacaaaactagttacctttgaaatatatatatttttttctgttactatc

SEQ ID NO: 688 - DNA, 396 bp, Homo sapiens
tctcccagcaatcgcatcccggctgaccctgtgccccagttggggcaggggcaggagggagggtttctctcccaacgctgaagcggtcagactggaggtcgaagcaatcagcaaacacaataagagtctccttctcttctcttctttgggatgctatttcagccaatctggacacttctttatactctcttcccttttttttctgggtagaagccacccttccctgcctccagctgtcagcctggttttcgtcatcttccctgcccctgtgcctctgtcctagactcccggggtccccgccctctctcatatcactgaaggatattttcaacaattagaggaatttaaagaggaaaaaaattacaaagaaaataataaaagtgtttgtacgttttc

SEQ ID NO: 689 - DNA, 137 bp, Homo sapiens
ttgccagagaccactatcttatgtgcctcccccaggctccctgctttctctcttgccctccccatcccaccaccttggagctgtcatagagattgaaaccttctagtaaaataaataaaatctctgatggccatttc

SEQ ID NO: 690 - DNA, 112 bp, Homo sapiens
agaattataggggtttaaaaactctcattcattttaaatgacttacctttatttccagttacattttttttctaaatataataaaaacttacctggcatcagcctcatacct

SEQ ID NO: 691 - DNA, 277 bp, Homo sapiens
cccgtctccatcggaccccagcccctatctccaagagacagaggaggggtcaggaggcactgctcatctgtacatactgtttcctatgacattactgtatttaagaaaacaccatggagatgaaatgcctttgattttttttttctttttgtactttggaacgacaaaatgaaacagaacttgaccctgagcttaaataacaaaactgtgccaactactactggtgatgcctaattatgaatccaacgtgtaaccagttataaatacatatatatat

SEQ ID NO: 692 - DNA, 1888 bp, Homo sapiens
caaatggaactctgatttaaacagctggggatgaaattcctcaagatgattattcctgaaagtgtggatgcgctggatgcgcagggaacatcaggaaaaggccacggggctctgaacagccccggtccagacagcagcctgtacatccatcccaggacacagcccagcccctccccacaccatacaaggtatcagaaaagtctaggacctatcatttcatcagagacatgatcagaaaagaaactgcttctgccccatttcttgttttggagattactccatctgtccatcaaaagaaacctgtaaatatgaaagaacaaaggttatttcctggagaaaagacaatttattcaacaccaacgagggactcatcatatgggcacaactctggtgtccttctatggagaaaacctcaagtaaagttttattctgcctttgaaaatgcttccaaaagtagaccctgtccccacacaggtcaagactacagagaaggctttgtagaaatgtgtcacctatgtacacctgctacttacacatttcctcttttggaaaaatgagatacttagaataacaagaaaattaagacatactggcctggtgccagcagatggcttttctatagacaaactaggttagtgtggaagatataggttaaaataaactatgctgttttatttatcttcccaacctgattggcagctagacttttttagggtctcatttaatggccctgtttttttcattattatatttaatgatagggcaggatttcgtatgcaagctcttgtttctcaggctgcctgcagaagaagtcgctataaattatctgttgtctacatggtacaaggcccattgactcatctgatgcttgttttgttaatttctttaatatttttatcacggggcagtgggagggcttgggcttttagccacagctgttttaagacttctgatctcctgccctgcaggaataggtgggaagtcattgaatttttacactatagtaatttgcattcccacataagtttgagtgttacgaaaacattcctttaaagggatctgtgctacacaaaatatgccaggacctcacagacaaagccattgctagaaatgtcattccaatgatcagatctggaaacaggctgccataaccacttttccttcttgtagactcagctcacctgtatatttaaactgttcttggcatcttgaaacacctatttctactcaggtactcattgtcctgttactgattcacctttctgatccttttcaaccagttttcccccaaggggggaaattttacttaacctctagtatttgaacaactcaatatttgaattgttgccccatttgcttttacctgtactgtattcttggtcatctcaaatggcgtctaaacccagctactttgcattccagaagtttccattccctccaattccacctaatttttcatctgtcctagttactggctctttcttcatgtcttatttctcttgctttgggagcttaaaagattttacaagacctaattttgggttccttccttggagccatagttaccctgccaagaagagtagaaaatgggttcaactcctgtttcgctccaccaacacctctgtgagtctcatcatcagctgagcgatgatgccttacaggttgcatagcactggaactttcctagagtaacggctctgctgccagggtttctctgggctcattcttccactgacttaattatgatctatgcctaacagagccccagtacaactattttgcagaatggctgttaccctagaattactatagcacatattgagatatagttgtactccctagtagataggaactgaccccaacaataaactttgataataaagacaat

SEQ ID NO: 693 - DNA, 355 bp, Homo sapiens
tgatggtactcttttcaatttctgaaaacagtaacaggcccaacttccttcttactacagtcatattaaacagatcacatcaatgacaaatgtcactactataaaaactacttaatttgtaaggaaattgtttcatagatttaaaaaaattgtggttggagagcatcttggcatttgtgctttttttcttgagggattgttctgcttcctggctgtatgatgggtatatcattaaagtttggagtcctatatgaacaaaactgacatttttagagttgtacttttgggaatgttatagattgatcattctttctcctgataataaaggtattgaatatctgttatgaaaggttct

SEQ ID NO: 694 - DNA, 270 bp, Homo sapiens
gctgggcagagctgggctgccagaagcctttttcactctgcagtgtgattggactgccagccaggttaataaactgaaaaatgtgattggcttcctctcgccgtgttgtgagggcaaaggagagaagggagaaaaaaaaaaaaaaaccacacacacccatacacacataccagaaaaagaaagaaaggatggagacggaacatttgcctaattttgtaataaaacactgtcttttcaggattgcttcatggattggagaactttctaacc

SEQ ID NO: 695 - DNA, 1552 bp, Homo sapiens
agaacagctcattgtgccccagtgatgaagttgctggacacatctctttgcaggtagcagcaacagttgtagcagcagcagacgaagccattgcagaggcagaatatgctgagtgtctggagtcagcctgaagacacagggtggattatttcctggcctccacaccaaacgttcccttgcagatggagactgaatctgagggcagcagacttttatcagcttgagtttatgtcatttgatggacttggttcaacaacaagaacttacttaaaacaatgtactgtggtgatgagtcccaggggcactggtcagcctgtggagccctggatgctatccacacccacctatccctgcagctaatttagctgatctctaatttaactgagctctaatttagctgatcagattttgcttgggtaaagttcctttttaatgttctaaagtgtttacggttctcaaatatcagttaaaaactaattttaggtggccataaacataaaatagaaaccctgtaagttacagaagaccctaaattgtatcaaaaccctagagacaacttttcaatttgatccaaatttgaactggccaaccagtctttaaaacactggactagaagagataatgattgaaacatttaaaaaaaaaaagtgctccattcgcaggagcttttcctgtcctgtggttttccagttggtgaccaccatgggaggtcgctggctcggctcactcccttctcccacccttgagaatgtggagaactcccatggagaggcagaatggcaggaggtttcatgtcccgcgttgcatctcctcctgaaagaaaagcagtgatacctgaataatgctggctctccgattgatcctgtgaggatgaatttgcatttccagaatccttgagcatggattagatgtttcctgggaggtgccttgagtaccattatgtgcaagctacataattaaaacatttttcttagtttccctgggaagcttttcttgactcacagcccaggttcttctgcccaacacaaaaggagtgagttggggtctttagtctcttcttattgggtagctcttgctttaatattctgtttggtgagtgtaagggattctgcaagggacagggggcctgactacccagtctttgacttgtatcctctcccctcttcatacactcctgctgaaaaatgttaatccaaatacacatttaaacttagggtcggtccttattctgatttgagtattttaatgtctcagtgtgctgatttggtagttggaagaattattcttctggaggtctgttagactacatcctacactgacttcagaaaacagtctgtcagacaaaaaggccttatgtcaccactggtacctcagtttcctcatcccatttacagtttttctaactccagggtagtgtttagtgttaatatttgggatatattttttttcaaaactgtttttaagtagtttgtaatttgtaacaaacttgtaacctggttgggactgatattgtcatagctatgataaactttggatattagcagaatttggg

SEQ ID NO: 696 - DNA, 2977 bp, Homo sapiens
accactccggcggacatcacagtgacaagattaacaagtcagagtctgtggtgtatgcggatatccgaaagaattaagagaatacctagaacatatcctcagcaagaaacaaaaccaaactggactctcgtgcagaaaatgtagcccattaccacatgtagccttggagacccaggcaaggacaagtacacgtgtactcacagagggagagaaagatgtgtacaaaggatatgtataaatattctatttagtcatcctgatatgaggagccagtgttgcatgatgaaaagatggtatgattctacatatgtacccattgtcttgctgtttttgtactttcttttcaggtcatttacaattgggagatttcagaaacattcctttcaccatcatttagaaatggtttgccttaatggagacaatagcagatcctgtagtatttccagtagacatggccttttaatctaagggcttaagactgattagtcttagcatttactgtagttggaggatggagatgctatgatggaagcatacccagggtggcctttagcacagtatcagtaccatttatttgtctgccgcttttaaaaaatacccattggctatgccacttgaaaacaatttgagaagtttttttgaagtttttctcactaaaatatggggcaattgttagccttacatgttgtgtagacttactttaagtttgcacccttgaaatgtgtcatatcaatttctggattcataatagcaagattagcaaaggataaatgccgaaggtcacttcattctggacacagttggatcaatactgattaagtagaaaatccaagctttgcttgagaacttttgtaacgtggagagtaaaaagtatcggttttattctttgctgatgtcctttctgcttgaaataacagtcaccatacagctaaaggagaggagtttctttccttctaagtaggcagaaatggtatcattatgttgccgctctccaatctcccagagctcgctctctagagaatcaccttctttcgcttttttttttttttttgaggtagagtctcactatgttgcccagactagccttgaactcttgggctcaagtgattctccctcctcagcctcccgagtagctggaacgaactatagttgcaccactgcagctggcaagaatcaccttctttataaagcgtcagtcatgcttccagcaagaggcagcatcagtcatggctttataacagcttcatggtgcctcaaagactgttgaggttaatgagagcctagattagacagtttggctgtccttccctaaaacttgttttctcctattcactactccccaccgcacttaaaatctatgagtttttactttttactgggaatggaaagtgtggtgaagatcattcaacacttatgttgtcatttctcccattttctgaatttttttttaaatttccccccttttaaaattgttcgaaagcccacagttatggaaagaattactgtctagatggtctgcagaacgtgtttggggtgagtgggagtgaggggcaatgttactttttctccctgtagtttggagtccattatgagctgctgctttttcttctcatcttgtcatcttctggggatgtttgaaggctgagttccaacagaattcacaaagggaataaaacaggattgagattttgaggtgtgcacaaggtggtaagataaagggcatatgagcttcaaaactaatgctgttgcatacatgaagccttttgttttttgaggagctatttttgttattcttgtaacgctccaccttacatgccacatctgtgtgagtcaacagggatcaggtttggtcaccacacatgtctgaagctgggcagcgtctgctctgtgttctgtgtggaatggagaaaaaaacgcctgccctgctgccttccatgttcataggcccagcccaagagagtgacacacagtgctggccctgagacatttccacaaagtggtcaactctgccttgcatcctaaaactttttgggcatctattttgaaaactataggagcctttggaaggcctcttatgtttggaggggaagggtgttgagattgtcaccatccttcaagctgagactcctggtgagcctttgccaccatgaaaaccacatagctgaccagggctgtgcttgaggtacagaggacacacattgtagacaggcctgtgtcatgtttccttacagtcgttttttacagagaaaaggggcattgttttttcactgctttctcaacagttcctgtgaataaatgaaacatttcggagctccctgagagcaagagccttcacttcttcttgcggtgccgggaccatgtgttggtgaagctggtgctgtgggggccactcactcgaatgacacctggaggcctgttcctcccttaccactcccttccccagcccgacttcttggcctcctgcccaaccagacacctcaaactctgtcagtgccctggcattctggcagagaatcctcaccagttctcaccaaccttccccccaggcaagggcagctgccagcatggtgctctgccaggacaggtttccctgaaggaagctgctcacactgagatgagcctctcagggcaggacctcttcccaagccctgcacacccacccctgcagcccttttggctccccttttccctgtgcctcagcactcctttcctggttgcagataacgaactaaggttgcctaaagggcagatctgccctctccatgtcttcgtcctggcaaacagggtcgtcttaaaattatgcgctaattctgtatgggagcactcaaaaggcattacttagagattgaaatttcaaactatctctagtttttcaatggaaatatatcagctagggaaaaaccatcaagctcattattattttttgatcttcagttgtatttttgtgaatattttaatacatctttttcaatttctg

SEQ ID NO: 697 - DNA, 406 bp, Homo sapiens
taaactctttttggcaagcacttaaatgttctgaaatttgtataagacatttattatatttttttctttacagagctttagtgcaattttaaggttatggtttttggagtttttccctttttttgggataacctaacattggtttggaatgattgtgtgcatgaatttgggagattgtataaaacaaaactagcagaatgtttttaaaactttttgccgtgtatgaggagtgctagaaaatgcaaagtgcaatattttccctaaccttcaaatgtgggagcttggatcaatgttgaagaataattttcatcatagtgaaaatgttggttcaaataaatttctacacttgccatttgcatgtttgttgctttctaattaaagaaactggttgttttaagataccctg

SEQ ID NO: 698 - DNA, 2065 bp, Homo sapiens
aatgtgatacaacatatactcactatggaatctgactggacaccttggctatttgtaaggggttatttttattatgagaattaattgccttgtttatgtacagattttctgtagccttaaaggaaaaaaaaataaagatcgttacaggcaggtttcactcaactgctgtttgtactgtctgtcttcacattcatattccagatttatattttctggagttaaatttggatgatttctaaattatcacaaagtgggacctcagcagtagtgatgtgtgtgtctcatgagcagtgagcacagtctgcattcatcatgaaacactatcttctaccaggaggaggttaatgtaaatcaccaaatcccaatgccttgtgactttcataggattcctgatcatgcatgttgatgtactggctcttcactttgggctttctgatgtttattcacacctttggagagttgcaacttgccacatacgaaattagtctcatagtgtagtgaacttcaaccccaaaattttaaaaatgtatttccccccagttttaaattgcctttgaaatttaaaaaaaaaaaatttagacttagtaccagaaccaaaaatacctagatttttggagaacttattacatacatagaaacatgaatatggtttaccactgtgtgtgtgtaggatgttagaattatctgtcctccatctttaggtgctttttcttaaatgtggttctacttatactgatatttttaatttccatcttccatgcaacctcagagtgaataaaccccttaaatttggtgctggttcgaaaaagtctaaagggtttattaggggttgtttttcgcaaatattacatcaatccttaaagcaacaagattaattttctgcttaaaatatttgggaagataggtaaggaggagggggttttaaaatataaaagcaagtttttctattttaaggtgcatatttgtaacattacaggggatgaagtaaaatgtaattaattagcacaagacttagggagtacagaaaatacacagaagtaaatttcaaatccatttgattgttttcatagtgaccccttagtcattttatattcttgtctgcctttctagaaaaatggttgtcataaagtggaaagtgattaaaaagcatcaaataagaaattatttcaagtggatttttaaaaatatttttttgaagggcagggggaaaattcaccccttttctgatttgaaatatgttgtacatatttccatttgatggataaatcattaagtaagaatatttgatttaaagtattagccaacctcttcaggtattagcctgaagataaattttaacaaaacatatacacttgggtatccgtcattgctcaaactctatagtgtattgctggagccaataggcagggtatattttattagctaaatttgatatttgtcttctgccttctgtatcacctccaagctataggaaatcaggattttgttggctttaagaaaacacatggtatgttcactgtatattaaatatacctgtatttaatgttttctcttaggacagaaaagtagacacacacacacacacacacacacatgttgtgttcagctttctgttttatattatttgccattgagattagaatagaacaggctctattcatgcaaactatatgaaatgaaaaacttttaagactcttcattaattggagcttctgggcaacatcgtgtgtgtgtgtgtgtgtgtgtgtgtgtgtgtgtgtatacagacattttttttttaacttgttgattcagatgtcttggtccctgaatagtcctagattacttattttgagaattcattgttaaaaattacagggaattaaaataattgccttttttttttttagagggtaagagatgggtagaagagtatgcctctgaaaattttattagtttattcttgtggagaataccaagaaaatgtgtatttgcccattgctaaatatgatatatgccattttgtatttatttgtcccaagtgtctttttgtaagaggagaataaacaataaggaattactgatc

SEQ ID NO: 699 - DNA, 166 bp, Homo sapiens
tcccagctactcgggaggctgaggcaggagaagcgtgaacccgggaggcggagcttgcagtgagctgagatcgcaccactgcactccagccctccagcctgggcgacagagcaagactccgtctcaaaaaaaaaaaataaaataaaataaaagaagtagaaaacac

SEQ ID NO: 700 - DNA, 599 bp, Homo sapiens
ttcatggccagttttatgaagctttggaaggcactatggacagaagctggtggacagttttgtaactatcttcgaaacctctgtcttacagacatgtgccttttatcttgcagcaatgtgttgcttgtgattcgaacatttgagggttacttttggaagcaacaatacattctcgaacctgaatgtcagtagcacaggatgagaagtgggttctgtatcttgtggagtggaatcttcctcatgtacctgtttcctctctggatgttgtcccactgaattcccatgaatacaaacctattcagcaacagcacataagccttgggtgcaagtgattcccaggtggcaaaaggcagccccatcagagatcacgggagcaacagtaagggacagagttttggggtccacttgtccctcagcatggaagccatcaccgtggtcctgcatagagtgagtctgcttctactctggcatctgagaacaagtgactctgctttagacaagcccctggagagcctggccatggagtgaggtagaaaagaagcactttttggtggtatatgctgtttctgaatttgaatctaagcattcttggtgttctg

SEQ ID NO: 701 - DNA, 1422 bp, Homo sapiens
gcaggatcctaggagcctctttgcacagcgatccttccatgtgtagagtgcttagaaaccccatcaactgatctagtgagtcagactgtggaatctcccttcccactagctggaggtggaggtgggttattacagaagtcatactgggagagggttcagtttggatgatgctagttagatcatttgcatctctccaccattttcttctgcactcccattttctctgcagcttattcttgccatgcttaggtgacagaagtttgttaagtaccatccttgtgccctgcctcttattctcaaatcgttctggaaagcctcacttccttttctgtggagaaggtgcaaagctgttaaatgagctcagagtttacctagctaaggccactgcttcctgctttgtgaagcctggaaagtatgtgtggccacagggctcaggttcacacttctgctttgagaccaggatggggtgtaagccatagagtaaggttaacaaaaagaataaagctaatcatgtattacaaacagcagtgtgcccagacttgtggaaatgaagtcatgtcactcctctgctcagaaaccttcaatggttcaccattaccagtggaatgaagtcaattctcctcactataactgggtgtggtagtttaagcctataatctcagcccttttggaggccaaggtaagaggatcgcttgaggtcaggagttcgagaccagcttgtgcaacaaagtgagagcctgtctctacaaaaaatagtcatgcacacaaaattagctgggcatggtggcctgtgcctatagtcccaactacttagaggaggatcgcttgatctcaggaggttgaggctgcagtgaattatgattgtggcattgcactccagcctgggtggtagatcaaggctttgtttcatttgaaaaaaaagaaagaaagaaagaaagaaagaaatcctactacgagcgatcacaccatctggcctgaaaccacttccccagcttaggtccctctgttatcctgttggcctcctatgtattggtcaaggcaggcatctctgttctctgaacattcattgcactttcccacctctataccttgcctgtgccttagtgtcctcttttttccagttcacctgtgcgaatccgacccacctcccagagcctggctgaaacgtcactccctgcatccaacatctgatctgctgagatatgtctgatctatctctgctcgctgttctcccgttgtttttgcctctgccatagagctcacctcattttgccttgtatttttgttacctgtgagtgtgtctctccctattagactgtaagcctctcgagggtgaggcctagccttcttgtctttgtaacccacagcagctggtactgtgccttgcctattgtaggtgcccaataaacatttgctgaactg

SEQ ID NO: 702 - DNA, 857 bp, Homo sapiens
tagtctctggcaccctgtccgtctccagccagccagctcatttcactttacacgctcatggactgagtttatactcaccttttatgaaagcactgcatgaataaaattattcctttgtatttttacttttaaatgtcttctgtattcacttatatgttctaattaataaattatttattattaagaatagttccctagtctattcattatatttagggaaaggtagtgtatcattgttgtttgatttctgaccttgtacctctctttgatggtaaccataatggaagagattctggctagtgtctatcagaggtgaaagctatatcaatctctcttagagtccagcttgtaatggttctttacacatcagtcacaagttacagctgtgacaatggcaacaatttgagatgtatttcaacttgtctctataatagaattctgtttatagaataagggagaaaataatccagtcttcactgggttcccattctgagggtccactactcaaaaatttgcttcactcaatttttttcacctctttgtgttttattttggtgtcctattaaaggaataaaatgacacaacttgtcccttttttgtcccattagcaaaaattagaattttggtataaagaaactttattcaagtaaaaatcaataccctttgaattggacaataatctcactaccttattaggatttctgtatttgccattacgctagttatcatgcatgttatgctttactgcgaataagcttttaatgctccaaatgctgacccatgcaatatttcctcatgtgatcacaatttgcagtaaacttttaattaaatgctcatctggtaactcaacaccccag

SEQ ID NO: 703 - DNA, 1167 bp, Homo sapiens
tcacaagcacaaatctttcccactagccatttaataagttaaaaaaagatacaaaaacaaaaacctactagtcttgaacaaactgtcatacgtatgggacctacacttaatctatatgctttacactagctttctgcatttaataggttagaatgtaaattaaagtgtagcaatagcaacaaaatatttattctactgtaaatgacaaaagaaaaagaaaaattgagccttgggacgtgcccatttttactgtaaattatgattccgtaactgacttgtagtaagcagtgtttctggcccctaagtattgctgccttgtgtattttatttagtgtacagtactacaggtgcatactctggtcatttttcaagccatgttttattgtatctgttttctactttatgtgagcaaggtttgctgtccaaggtgtaaatattcaacgggaataaaactggcatggtaattttttttttttttttttttttgttttttggctctttcaaaggtaatggcccatcgatgagcatttttaacatactccatagtcttttcctgtggtgttaggtctttatttttatttttttcctgggggctggggtgggggtttgtcatgggggaactgccctttaaattttaagtgacactacagaaaaacacaaaaaggtgatgggttgtgttatgcttgtattgaatgctgtcttgacatctcttgccttgtcctccggtatgttctaaagctgtgtctgagatctggatctgcccatcactttggctagtgacagggctaattaatttgctttatacattttcttttactttccttttttcctttctggaggcatcacatgctggtgctgtgtctttatgaatgttttaaccattttcatggtggaagaattttatatttatgcagttgtacaattttatttttttctgcaagaaaaagtgtaatgtatgaaataaaccaaagtcacttgtttgaaaataaatctttattttgaactttataaaaagcaatgcagtaccccatagactggtgttaaatgttgtctacagtgcaaaatccatgttctaacatatgtaataattgccaggagtacagtgctcttgttgatcttgtattcagtcaggttaaaacaacggacaataaaagaatgaacacattc

SEQ ID NO: 704 - DNA, 647 bp, Homo sapiens
aataaacaactaaataactgtattagaaaaaaaagaaacttactaaatatcataatctgatgatatgtggtcctgaattggctactagtttaagcaaataaactgtaagtcatttatgggttagttggggaataaatggatatgggctggatattcggtaatatcattaatgaaaagcagattgcagaaatacagtatgatctcagtattttgaaattgtaaatacatgtacagacaaatacttagacagtatgcatactggtgttaacagtcacaatttctgggtgatgaaaatgtaacttgaaaccgctccatttctacaatgcacatttactgtttctgttataataaaagggtatgttagaaaaacaaaaaggaggctgggcatggtggctcatgcctctaatctcagcactttgggaggccaaggtgggcggatcacttgaggtctggagtttgagaccagcctgagcaacatggtgagaccccatctctacaaaaaaaatataaaaattagccaggtgtggtggtgcacacctgtggtcccagctacttgggaggctgaggtgggaaaatcacttgaacctgggagggtgaggttgcagtgagctgagatcatgccactgcactccagcctgggtgacagg

SEQ ID NO: 705 - DNA, 99 bp, Homo sapiens
aacttatcactaggcagaactgggtttgatgctttgtcaactgaaaatacttatgtctgtacattttctaacagatataaaacaaattttgtaaagttg

SEQ ID NO: 706 - DNA, 981 bp, Homo sapiens
agttctggtattcttttgagctaatatggtattgagtaaagtatactttttgcagtagatcatgccctgacctccaataaaaacctctttaaaacaatgctgatttttgaattcatgattagttttagtaaattaataggtttggccattctaaaatccaaaattatgataactgtatttctaggggtatgtttcaccttgattttggcccggttctttcagtgttccgtttaccctttttactgaaagtaagtgacttaaaaggatggaagaaaaactacatggttggagtgtttttagatcagataaatatagaaaagtaaaatggaaaatgatactcaatacctagttaaactcatttcacttctcctgggagacgtattaagactggaagtcctattttatttaatcagtatcagtaaaaagacaaaaattacagtgtgaacaagagaaaaacaggaatagaagaaaaaagttgcaggttgaattatctatctggatattactagagttgtaaaacacaacttggaaactggaatttatgtgaagaaccaaacaacttaaaccagcatcacttttgtcttcaatttgccttccagtgattttagtttacaacctgcgttttgttatttgaaacacacacacttatatataaacacatgtaattttactattttattgtctttcctttaatcgatgaattgattaaatttagacaattaaaacatttctaaagtgagactgaaaataatatagaaaatctcattgctacttgtgattatcaaaaaaagtatgtattttctttctaaagttatctataaatatgtttttgatatgttggacatgaattaccctgtcatgaagcgtttaaattgttaaaatgctgattttcttattagtttgttaattgcctgttactagtacttgaccaatacattgtgctatatgtaaatgtgtaaataaatattgtaattttctcac

SEQ ID NO: 707 - DNA, 3352 bp, Homo sapiens
cgccatggctacttattctgccacatgtgccaacaatagccctgcacagggcatcaacatggccaacagcattgccaacctgagactgaaggccaaggaatatagtttacagaggaaccaggtgccaacagtcaactgaggaaaaaaaataattaaacaggcctaagaagaaatcaaaaaccataagacacctatcctgctctgttatttcttcatctgctggggggaaaaagtaaattacaaacaaacaaacaaagcagaactaaaatattgggaccatggcagagaaaagcaggagaggagcaaaatgaaaattagttaacaaatgttcctcctccctctgggataccaccaccacttgtttctgtgtgtgtttattttgtttttctttcattcatgctttgcttaatgtactccaggcttcttcagataggttcagcccacccacccccatgattgtatgaagttttaaaaaaaactacagcagccaaagaaactatatatatatatatatatatatatatccagaatgattgcctctactgtcctcattgacttgtttgaaccttagtgccttaccctgtcctcttcccagttctctttatagaagctctaggagctttcgaaaagccaaagtctttctgaagaatctgtgctggacagacataattccctttctcattgtctccatctttgttggtcatggtaaggtttttccatcagcctctgaaaaaatagttgtgcacaacatctgctcactggactgtctgatccaatgtaattggctgcgtctggctaattctaagcactaaagtctacatctaagctatagatttaagcttgaagctacagattatatcactatcaccaccacccctcaccctatgcaatcaatcaatcaatcatcttaagttaaagatatttgttgtctttgaatgatttgctgtcacagactatttggtagaagaaatatttttcacctgagagaggaagagaaatttctctagtaacacaaagagtgagttctaaaaggcatgcccacatctctttcgtgccttaaggatagtgagatgcacacttatatatatactgtatatatttatatatttatatatatatttcatatatatatataatattgcaagcttaagtttgcaatttcccaaacaatacaaaaagcaaattacacaccctcaccactgttcttatctctatagtgatgaaacattaattagggatcttgctgcttttctttttctacacgaagttttcattaaagccacagaataattgatagggcagctgtttgagaacaggtcccattttcacattagggctttaaatgaattagaaactatttgaggctataaaaatgtccttgagtttggagcctgagctctggtgaaatgctgatacatctgatctatcatgggaattgcagttagagagagtaaggaataccatttagtcatctatccgttcttcacttagcaggaatatgaaagaaaggcacatgtttaagaggaatacctaaaggtttttctaaattccaacatttaaaaggcaattgtgggctatttttattttttaatattttgaaataaagtttagtgtctagggctgggagccaggactgatcttccatttctttttctttgttcccagccatgcttttgtaacttgccaggtggacttgaccaactacattaccatgctgtgcctcagtttacccatttgtaaaatgggattaataatacttacctacctcacaggggtgttgtgaggctctattcatttgctcctttattctttcctgtattctctgtatgtccagcactttgtagccatgggaggaaagggactataaaagtgtacaatgttaatggaatgatacggtacctgaaagccttgttttctagtaagaaaatgctaccttgctgtacatacttataaccttgtatttggaaatgagaaataggtttatattttcagatctctcaaaaatcacatcatttgaccaaagaataatttaagacacatagaacagatttttttaatttatattttcatcctgaccagcttagttctaataatttttagttgtgagtgattaaaaaactttggatcaattttggtcaaacatgccaactttgtagtctgagtgacaggcaaggatttttgggtttaagatgcacttttagcacacatttgtatttcccttggcatatcagattgagctaatggtgatgttatttcaatctaacagccaccaatctgaaattgtatttcaaatgttgattctgtagttctttaaataataatgaagctcatcttatacattttgctttcaccaattgattccttcttcttttagcccactattaaaacatttcttactgaatggttcatgtaggcttgctgaacagcacgcattacttgcttcctgaagagttcccccattcatccatttgtcccattagttgctgtggattatcaagttttgaaggaactgtacatcccaacagactgaaacattctaagtgaaatgagtataatccaagtaactggtgaactttggaggtttggagcttgaagagaatggctaagaagatttgaattatagggagggaacagaaatcatacatgaaaaggttttactgagaaggggaaaaccttagatagagggacatgtgaaacaaaatcatttgaaattttgattcagacatccatttccagtggcaaacagcaaagcctgaacccataaacccaaatgataggtgaagttgggtggttttatccaatgtctcaagcaagcaatgtctgggaatatcatagagtaacaagtgctggtcagccaaagaaacattcactgctggtgaaccaataccataagcatgtattatctaagcacttgatcaagaaatatacatgttgtacaagctctcaattttgttcatttattatcaaatttttaaaatacaagtttggtatgtgatttggaaaagatgccttctggatcttaagccagttgtcagtggaggtcctcagggctgcaaatgtcaagacataaccctgttcctcaccatcatgataccagatacaggtgaatacataggaactatctgcctgtgtcctcaatctcccttcaaacaagatgctgatttgtagggtacttggcaggttaaattaaaccagaagaggtgacttaataaaaaagggaatgacatttagggtataaagatctcataagaaatgtaatatgtaaattatatcttgctttatgttgtaaaatatacattgtttgcgctagaatagaaatgatttcttttcaataaaaagaaagaaggactct

SEQ ID NO: 708 - DNA, 403 bp, Homo sapiens
aagatatctgaagtcggatggggagaggtgtggagttagatctgggttatggaagagttgtcccttcagctttccccagcagttggtttttctctgtttctaggggtgtgaatttgtacaaaaactaattattttttaggaccagtttatatatttctgcatgattgttaaagtatattgagggataattgggtttaataaagatggtagttaacatctgggatctaggcagtacttctgaccatctagagggagaaaggaactggctgagtaactgggtaaaatgaagatgtggaaccatattactttgtatatcaatattgtgccatgtattgtaatactataatggaatcaagcaaattgacaaacttttgtttacaaaaaataaaggctttataacctg

SEQ ID NO: 709 - DNA, 375 bp, Homo sapiens
tcatcattttctctaggatttctgaaagttactgacaatacccagacaggggctttgctatttaaaaattaaaattttcacaccacctgcttttctattcagcatcttttgcagtactctgtagacattagtcagtaatacagtgttatttctaggctctgaaatagccactttaagaatcatgtcatgatcttaagagagcactaatcatttctgtttgagttccactaacacttcaaaatcagaactatgttctttatatctaacttaaatcatttcctgaaacattttgacatgattcctttttccttttaaacaatgtatgaaagatgtattttaaatctaaataaagagcaaattaagcagaataattat

SEQ ID NO: 710 - DNA, 3730 bp, Homo sapiens
tatcgcctggttgggcctgggcaatgggaaggagccagaaatgccatcttcacccagaaacaaagaatactgaagccactcaagactcgggccctgaaggattcatctaatttctcagtttcttttctgttgaaaatcctgggccttcttgctgttgttgtggcctttttttgccaacttcaatggtcctagtcagcataatgctttgggctttattatcttgtcagtcactacctcctaaagaaaaaaaaaaaggctagaagaaaaaacattacattcatgttctaattatagattttagagttaggtagtacaggtaagggggaaattgtaaagaattagcagaattaggcatatgtacaaaaccaaaattttgtcatgaaattttgcctttccacgcttccctcagttcaccaaagttaccaaaatgtaaaataaaataagactggctcaggtaagtagtgctgccaaccctgatataggggagttgtatggaaaaatagtagaattacacagcatgaaaagcagcccatggtttaaattattggacaatttaaattgtgggtaaatatttaaaactcctgaacaatgtttctgatggtcttctatccaccctacttggtaacaaagttctcagatgttaggtcatgtttcatttgctcagtcggggatcactcaaaactactagacaaaaaagtgagaggatagatttagaaaacatcagtgatgctcagataaacttttaggacctcatattaagagctaagcaaatggccacatttcctatattttgacagagatactgctggaaaaattaaaattaaaatgccataatagctacctaacaaatatatatgtttaatgtttatcataggccagacattgtgctatgtgcatatcatatgtattatttcatttaattctcacaacaattctgtgaaatggttacagctattatagtcatttcacagatgatgaaactaagattcagagcagctgatcttgtgaggcagctggaattggaactcagatttgttgaactctagaactaaagatcataatgttgtcttgtaatatatttatttacaaaacacttcattatttataaagaatttactaacagtttatcttatttatacccatacatctgctactttgggaggccctttacatagaaaacagcattctttttgccaaatatgaccaaattacttttatttataatttttgatttatatttcagctagatctaaaaagcatctgaaggaatttacaatgaaagatacctatgcaataacatttaggataatctttgacattttggaaaaataagaattgaggaaaaaaagtgtatctttcaagtagatgcaaagcattataatgactgacacttgtatctaactccagtcttacagataactaaggcaaaaagctaaataaacaatatgtaacctctaacatttggtaaaaggaagtatactggtctgttagcagagacaaactttttttagaattgaagtctgaaacaaacaaaagcaattcaatgtcaatagacattaagcaacataatagacaaacatctcctaagggaacatttgttacagctgctccttccctgaactgtgctttggaagataagctctgtcctgagtccaaaccaagcccttccaagagagaacaaaggtcagagatgttgaagattccagcaaatttctcctcttatttctaccaagcctttgtgaacattgctcttcattttggcctgtacttctccctcagggacgtagaacaatggaatgtcagtcagtctctgtagttaaaactttttctttaaaattcaattaaggtacttctccctcagggacgtagaacaatggaatgtcagtcagtctctgtagttaaaactttttctttaaaattcaattaaggtacttctccctcagggacgtagaacaatggaatgtcagtcagtctctgtagttaaaactttttctttaaaattcaattaagttacaccagaatttacaggcaagattttttttttcattgctcccataagcaaatttgttttaaaataattgtaaatgaggtatatacttagttcttggttaaaaaatatattgctttgttaagtattaaagattatttgtaagtcattgtattaataatactaataaaatttatcaagcctttatagcaagggtcagtgaattaccactgcctgtgggccaaatctagctcactatctgtttttgtaaataaaattttataatagtacacagccacactcattcatttattttctgtggttgctttcaagctacaattgtagagttgggtagtcgcaacagaatctctgtggcccacaaggctaaaatatttacattctcacccattacagaaaaagtttgataattcctgctttataatatgtaaggcattgtcccattttgcataacttgccttatttcatcattatcactacccatttagtagctatggttgttatcttacttctacagtggaagagattgaaaagcatttgtcaggttaatgctaaatcagtgcggaaatatagctccactaggaaaatattattaaatttatatccctaaaatttttagaaatctctcaaaatctttccaaatgttctggtatctttgaaaaatgtaaatagtttatttatagagaaccctacctctgaggttgactcaaaggttaaagaaggctcatcagtctatccttctgcctccatatatcctgaacatcaaactatcccaggaaaaccatctagagtagtttgtttcaaaatattagccacagaccacctacatcacaataactcagggagcttatagaagtgaagattcctgaatataaacatagtaataattcaacctactgaatggaaatctctgctgaaatccacagttttcataagctccccagatgattcctgtgtacattaaatctagaaaccattagtttgagatctctcaaaaataaaaataaaaattgctttcagagagtagcccatgaaatttcccattcttcaaggacaaattccttctgttcagccttggtcctccaactgcagtttacaatttttgttcttctcctgtaaagaatgtcaatggttatcaccttcaatagtttcaatatgtcccccaaagttatgtgtttgaaacttgcaatagtattgggagatggggcctaatgaggtgattaggtgaagtctctgccctcatgaaaagattaatcccattatctcaggagtgtgttggttataaaagcaagtttggctccctcttttcctcacacactctttttcccttctgccttcacctttgccgtgggtggacacagcaagaaggccctcatcagatgctggccccttggtcttgaatttcctagcctctacaactaagccaaataaatttctgtttattataaataacccagtctcagatattctgttacagaaacacaaaatggactaagacaccacccttttccaaaatctctccttgtgatggctccctttactaacctttcttttagctattccctttatgatagtttcttaattttttctatcaaaagctaaatatggcacacttgttctttacagaaaaataaagatattttaaacaaaatactagggccatggtatgtaataaaatttgaaacaataatttcaaataataaagattgaaaatgcttaacccag

SEQ ID NO: 711 - DNA, 428 bp, Homo sapiens
gtaaaagatctcctaaatggaagatgcacagagtagatttacaatgctccaattcctctcttacagcaatattgccttcacagttataaactgtattcaaatagtaaaggccaccctctcgcttccctggctggccccagggctaccactggtattcctgagcctctcccagctccacttctaatgctagagaatgataactaagacttctgtgcatttgaaggttgttggaaagttacaggttcattttagaaagaaagctgttcttgacagcactctgagccatcatacctctttcccatataaactattttcacagatctcaactaaaaccccttacttcacaaatgattgtgttgtgctgaaatggtgctcttatagtactggcttattaaaagtaaaaaataaacctaaaaattgattgtttt

SEQ ID NO: 712 - DNA, 244 bp, Homo sapiens
acctgattgttacaagggttacacaaagtcatgctaattctatctccaagtatcttgtgcatccctcctctgctctccatcataactgctattagccaaattcaggcccagtcatctcctatctgaattattgtattatcttcttctttgttttcagtaccctctttcttgccaccctttccaatgcatcttctaccctgctacctcagtgattattctaaaataaatatatatgatatggttt

SEQ ID NO: 713 - DNA, 1663 bp, Homo sapiens
aggctatggtttattgcaggggattgggaggggggcgggaaaacatggagaattaagtcagataatgctggcagccaaaggggcaaaatggcctgtgacattatcctgttcagagcttggagatgtacaagggacataggagcaatttacactgacacacagctgctgtaccagtgaaaacgaggctttgcaagcttgtacctactatataacatgtgcttggttgatggccatgcatcttcagtcagaatttatatataaatgtatgcacccatttttttgagtgcatataatttagacctaaaaatccttatgattagatgaaacaccaaaaatataaggaaaataacacagcagaggaatagctcagcctgaacagtgtgatggtcccagctactacatcagatgcggtttttttgctcccttatgttcttcggatatggttatggcatttgtaggcttggaggtaaagaactgaagataactggtgctggatagaggagccttattttttattatggcagcttgctatttttataacatggtgattgagttgaacacaatcaaagtacagtagtaactgatgtccccttcttcctggatgaatgagcagataaatattgatgtcagcatccttgaaccatatcaaagtgagcagtgtttggctactgcttctatttgaaatggtgctgtgttttggttgtggtctgaagctttgaagcgctacttagcatctcctttcttccatggagctctcacgattcaaacatgacagatttggtaaaatgctggttaggttgagtcttccttgcccccactcagtcatctttgtatgaatcccatgatttgggggtttttttctttttttttttataccagtttttagctggtgtttatgaagaacagtgagtacctagaactgtgccactaattaaaggaaatcctaagaaggtgcatttctttacagagctgtgtcatgccatcctttgggccctctgctggaaaagtagaatcaagtctcaaataatgcctttttaattgtatcctctagtattatagatataggacagtactgtatcatacctctgtgaatgtaaaatatcttgtacctgctttatgatacgtagtagtgaccgtgctttatcagagctgtttttaatgatgttattctagaatgttttctttccagatgatgattcagaagctaattttaaaaaacggtgccaggtaccacaacagtaacagaactttgcaattttctggggttttgttttttacctttttccccccttttttttaaatggagtgtgctggatgtctctataattttattcagatgactgcagaacctggaaaagctgttgctgctattgatgcataacatactgctattggtctttttatataaatatatatatatatatacatatatatatataatttgaatttttggaaactttagctgtgctgtcaactttggaaaaagtatcccggtttactgtgttgagttggcattgtacagaaattaacagccatattggtctagaaacgttaaacttaatttttttccatttgtacaggggtaacgcactgtattaaatatgtaaggtcttatctacatgggtttgattacagaaactaataaagtattctctaaataatg

SEQ ID NO: 714 - DNA, 959 bp, Homo sapiens
ctgcttaggccaagcagccctcctgcctagactgaccttggactcccagcctgccagagaatgaagaaatacaacgcacagtacttttgaagcttcgtatttttcttggtttcacactcagctacatgtgacctccagcttggtgaggttgcctgaagattagggaaaataaaaatgtccttcccatcttgtcctcttcagtaccacttgggttggtttgtctttgcttcctacaccacgtccttgagtggagttccctgctgaagcccctagcacacactgcatgccttaacaagtgtgtgcaagcccctcagaactcaagacatccaaattttattgcgtctctacttatactggtttgcttttgatttattcctctattagttctataggagtgatctcaagtgagatagcagagcaagatgccaaaagaccataaatagagtaaggtttctatagatgtgagacagatttgagagagcatttactctgtctccctgtggatgaaactgctgctgaaatggttccaatttttaggaatctgcttacccacttcattatttgacagctttccttggtgacccaaaccttgtagcctaagccatttgtctttttctcagtggagggagtgtatggacctggccccatggctttgcatgttagagacctggcagactaaagtctctagtgtttgtttgctcacatttgctgagtgacagctatgtgccagactgcataaagggtggtggcagaagtgaaaatgtttaagaatgaccaaaaacattagtaatgaaagttaatgtgttccaggcattcttctaagtggtttacatgcactgtctcatttaatctgagataaaggatacttaagcccaaactatatctaaacccaaatctcacttggctggaaacatcaatcttaaccatttattcagaaccattaaaccaatgattccaag

SEQ ID NO: 715 - DNA, 4875 bp, Homo sapiens
acgaagtgtctggcatggcaattaatcactaatgaattatgcgaaagcaacatatttgataaccgttgcagtaaatcatgagtagtcgcatgtgtggacatcagtaggcaagtaaccagttttactaatgcattcatcgctcatcttcattgctcatggtatgtcaaacctttggggtttgactcagaaactgctaaccttttagaggctttatatgttgtactgaccaaggtaggtttgtatagcagccctatactttggggatcatttgcctaccatggcatatatttgaaattgctttggacaagttttctaggctatctaccaggtagctcattaaacgtaattcttcagatatgagatagtgggcttagacctaagccatacatatttcttttcccacattctgtttaggatgacagtaattctgttgtctaccattaatgctactacctactccataattgcctatttagctcctcttttcttcctttttatttcataagactgctaggaagtgattttttaaaattaggactccttaagaataaacttttccagaagcacgaggtagtttgcaaaggaaaagtctgcactgtttgctctaaagagcttctcctcattccaatgtgttttgcttcatgctagaagcatatgcaacagtgaataaaagcttctttttttgttaatcagtcaataaatttggctaattagtttcagagttcaaggaagaagcaaaatatcacatctctagaagtgttgggaaaaatataatttctttctttacttatattcacctcatggtaggttatattgaaggctgacatggagaatgtttacttttctatttggcatagctaactacactttgatactaactccagttttactattattattttggttggaaaaaaaattcactctttacgtgctaatttgtaatcttgttttgtaagaatttatcctacccttgaaacaggctcagtgtaactgtatatccattctaggctttcttaataaatcttgaggctatgggataatcacatttaaagaatggttcctgaaatgaagtcagtagaaatggcatgggataagagcagagctcacacttttacagttgcagtatttcaaagtccctatccaggtcactccagaaaagggtattgaaacgttgaaatctaaagcaaatttgcaatttcttaagatttctaaaatttaccagaacagtttagcctgggggttaatagttaagtcttgaggctaagttttggactaccaaggaccagatgattcacatgtaggaaacagccagaagccaactggaattttgtgtgctaactgttcccagacagcagagcaagtattcactgagtaggggtgtcccatgacactatttcatattctacagaagtaaatcaggtttcaccaactgaaatgtctccctttgaaagtagcaaacatgatttgtatgttaacttaactttaatttcctgtgtagtttacacccagagcagatactcataaagtataaagtaaaaacttttaaccattattaaacagagaacttgccatgttgagtgccattgtattgaacttattctaaaggcttatgctaacccatttataattggtaaaaatcagaaaatacaagatttacataaaggtcatttcaacttttaaggttaccagtgattgtataaaaacatcacaatcctaaatcctctcgtatctcaccccaaaccccaaactgggggaaaaaaagttaactctttgtgaatggaaccaatgtgcaagatacatactgcatttttaaaatagtgtctcagctaaatggaaaactgttaagcaaacatccatagtaaaacaaataatcttcagtgagatctttttataaaacttcttgtttttaggattccctttgcttcttcctttgaattctctaaaataggcagctaacggattatatacttcagggtttggctttgtgctaaatgtggttttgtgttttgctgtatttcaaaattttccttctgttaaaggaaaatattgtgaataaccactggtgtgttcttagatcagcacaaaccatgtcaaaaaaaattggagatttttttccaattttccttccactgatcttaggcagtaataaacaatggcatttgtcatctttggcacttgcttttagattatagtcccacagttgcactgccccaattgtctacctttgtgggtacatttttgttctttactcctaagttatttctcatagaacccagcctactctagaatttcagcagtgacattggagaatatttttaatttgctgcagtactatgtcatattattagtatgaatctcatttcccaaagggtttgtattctgctaaaaggagatgccaatgttgaatgaagtctgaaactctagtatgtgcatagtttgacgtgcagcatgcacaccaggccttaagatgggaatgtagcttaatgattttctgtttcccataccatttctaatcttttgtgtaattttctcttaactgattgctctgatattgtaaacacaatagatgtagctctatcatgtctagcataatttaaaaaatcagtgtttttaggatttgggaaaataaactgtaaatgtttatttgataggtaaatatagttttattgtcacatgctaaatattgcatgcatattgactaattggaataaccatttactcaattatggacagcttattgaaatagtattgatttagaaaaagtatattgcatttctaaaaaacatctaccaaggttactcgtctgaatattgcttttagccgtgttttataacatagacgagcagtagggtctgtttattagcaaatttcctatttgttccaatacaaactcactttattctaaagtatattaatgaaaccagttcctgtgatgtaactgtaagccttctcgacttagacttaaaaagtggtcacatagattaattttgtgactttttagtatagactgtagccataattctcaaatatgaaatgggacctaataccagtatgtgataaatgttgatgttttctgtgtacaaacacattttctatgcatgtgtctctgtgtatatggcatatacctagtaagtatgtttctgtaagtatgtgtattttatgtccatttgagtaggtaggtaggttttaaaaatactagttaaaatgccacaagcatgagtgtgattgtatgtgcactgtgtgtatatatataaatatatgtatatgtatggttgtaaatatctatgtatacatgtacttagtatgtgtggtatcaggatattttttaaactgtgataatacaacagatagctttgaatgatctgccataacatgtggtaacaatagttcatttctcataacatatatgaggtatacaaaattttctaactccagattgtagtcattttgagaggtacaaagctcataattaccatgacaacatggtaatgtccatagacatttgtatctgaatccacaagaagatctgaatctaagaaggaattacctttgacaatatttttcggtaagaagtaaaacctctggagacctatctttaagatctctaattggaattataaattatttttggattgctgagctgaatcttaaaaagccaagttgatatacatagtcatttttcctctatggtagaagtaaaaaaaaaaaaaaaggacatagcaacattaaagtagtggatttttctgagtaaatttgctgaaaatataagagagaagctatctaataccttggaggtaggtcatccactttttcaggtaaacatttttcatttggcaaatggcataattatttgaaagtgacaggaatctcctcagaatgaagaataaagcctactaggtctctaactgttgaactcatgaaagaagatagtgtatgagacttaagccatgagttttgtatcatttcaattagaagactactagctgtgagctcagagtttaatgtaaatgaatctagatgattttgaagaaatgattattcgttcaccagatcactcattgtacattctaaaaagctcaaatgagtcttctagatactcttactcatcctgtctggttgctatgtttaaaattatgtggtgctgtgtaggtgaaactttaagaatatttttgaagcatatgtaatatatgcactgctatttgtgtgtgtgtgtgtgtctttgtatatatgtaagaatgtgtgtatgtgtgagagcaagagagaggaaactcaaagaggagtgtttgtcttaagacctgttcatactggtatattggtgagacttctcacttctggttggaggtttcacatatggctcaactcaagtcattaatctctttttaatttttactcttgaattccttaaacttcgctcattatgaaatgttttaaaattatgacaaaaattactctgtctaaccacttgccttgtctgctaccagtttgttaaaaattattccccccaaccagtaattccaccagtactacttgatttgtgttatatttcctatgtacatgtacagcctttgttttgcttgcttgtctatttttactttcccttttttgggtcaaatttttcttttgctttgtttgaagaaggaatatacagaagtaaaatcttgtcttctctgctgattctttaattaatatgagccggatactttccactgtcttcttggcactttcaggatttcttaatgctgatatatggactcttagaatggaatttttgaagaaaaatctcaaagcctgtatcgttcttgaaggtcacatgtacctattgtgaaaatgtgaagctgtatttctgaagctgaaataaattataacatttgaagg

SEQ ID NO: 716 - DNA, 231 bp, Homo sapiens
gcggtaggagctcatcacctcccagactcccagagagaaaataacctcgccaagccaatctttgacactggcaccttctcctcacaattttctctcttctcccaaaagatgatttaattttgccttcctaagattgctggtattctagctcttacctctatgttctttctcacgtctcctaaagacaaaattgtttaatttacatgattataaagatctgtttatgaaaat

SEQ ID NO: 717 - DNA, 1572 bp, Homo sapiens
aattaattgaacttttcatacagaagacttttttgttgttgttctttgaagaacagtctgtagtatttgaagggtttgggggagggagaaaatattaatgggaaaggcattcagaaattatggtttctacctttttaaaaagtagatgggattgtgtcaatcttggttaatgagctacagttttacaaagctgatcacttcctataaggacaatggtagacattttataaagatgttttttcacaagattaattactgggacaaaagtaatttggaagcccagttccttaggtgggataggaatgaaagcctaaacctcttcctttagctttgttcctatttcttgcaccttcccatatttatgtgccttttgtctatttataatgccactggaagaggagggataactttttctgttatttgatttcttttataactttgttaggtttttgaagctgcaaacactacaatgctttgagggggtctgtgcctgaagctcaggagtgtggatcagacagtctaaagatcctaaaaacttgccaactggatctttgtttagcaaactcactggaaatgaacacttaatggaatttttaagtctgttctgttaggtagatggtgatgctcttgttattttcacttattcagactggattacttcttacttagttactaactcaatgaggaaaaatccctacaggatctttttttgcaaacaactgatatatgcagacaaatttttgacaaattcaccttttaaacacacttaaccatttgtgaaggttttctttagcttacattttaaacatacacaataaacactaatcctccaaactttcactgtttttattagtatgaatataaaatttgaaggtttggccaattagtacaagtctcatgatataatcactgcctgcatacatatgcacagatccagttagtgagtttgtcaagcttaatctaattggttaagtctaaagagattattattccttgatgtttgctttgtattggctacaaatgtgcagaggtaatacatatgtgatgtcgatgtctctgtctttttttttgtctttaaaaaataattggcagcaactgtatttgaataaaatgatttcttagtatgattgtacagtaatgaatgaaagtggaacatgtttctttttgaaagggagagaattgaccatttattgttgtgatgtttaagttataacttattgagcacttttagtagtgataactgtttttaaacttgcctaatacctttcttgggtattgtttgtaatgtgacttatttaacgccttttttgtttgtttaagttgctgctttaggttaacagcgtgttttagaagatttaaatttctttcctgtctgcacaattagctattcagagcaagagggcctgattttatagaagccccttgaaaagaggtccagatgagagcagagatacagtgagaaattatgtgatctgtgtgttgtgggaagagaattttcaatatgtaactacggagctgtagtgccattagaaactgtgaatttccaaataaatctgaacacttgtctttatt

SEQ ID NO: 718 - DNA, 854 bp, Homo sapiens
gagaagcactttgggattctttccattatgattctttgttacaggcaccgagaatgttgtattcagtgagggtcttcttacatgcatttgaggtcaagtaagaagacatgaaccaagtggaccttgagaccacagggttcaaaatgtctgtagctcctcaactcacctaatgtttatgagccagacaaatggaggaatatgacggaagaacatagaactctgggctgccatgtgaagagggagaagcatgaaaaagcagctaccaggtgttctacactcatcttagtgcctgagagtatttaggcagattgaaaaggacaccttttaactcacctctcaaggtgggccttgctacctcaagggggactgtctttcagatacatggttgtgacctgaggatttaagggatggaaaaggaagactagaggcttgcataataagctaaagaggctgaaagaggccaatgccccactggcagcatcttcacttctaaatgcatatcctgagccatcggtgaaactaacagataagcaagagagatgttttggggactcatttcattcctaacacagcatgtgtatttccagtgcaattgtaggggtgtgtgtgtgtgtgtgtgtgtgtgtgtgtgtatgactaaagagagaatgtagatattgtgaagtacatattaggaaaatatgggttgcatttggtcaagattttgaatgcttcctgacaatcaactctaatagtgcttaaaaatcattgattgtcagctactaatgatgttttcctataatataataaatatttatgtagatgtgcatttttgtgaaatgaaaacatgtaataaaaagtatatgttaggatac

SEQ ID NO: 719 - DNA, 944 bp, Homo sapiens
gtctcttggagaagctggtgctgtgagccagaggatgtcagctgccaattgtgttttcctgcagcaattccataaacacatcctggtgtcatcacagccaaggtttttaggttgctataccaatggcttattaaatgaaaatggcactaaaagtttcttgagattctttatactctctgccttcagcaatcaattccattcatacatcagcactctgctggttctgtttgaaatatgttctgtatttaaaactcaaatcttgttggatctctgcagggcttgtgaccaatgaagtcatatttgttgatggttgacaaagcttgcttcactccatcagagaatgactatcaatttttttttaactgtcctatcacgtcctctcctgtcacccattttgaagagtggcagaacttgaagttcaacttcctctgtaaatatccaagtataaagcccaggaacttctagaataacccagatgcgctttaattttttttaatatgttttgatcacagaacttctagaataacccagatgctctttcatattcttttaatacatcttgatcacagctgggggaaaaaaagctttttaattctataccttcctagtagataagtgaagagcagggaaagagacctttaaatattttgctataaaaaaatttgtgataagtttctatcaaaatggggagattgcagaaaaggcttcccttggctcccaaggaggtgtagcaggtgtgagcaatattagtgccatgtgcctttcacacagggtttgcatttatcagtctgttttccgatgatgtgtacatgaaagagtacaccatgtgaagagaagagagaatgattgaaaatgttttagtatagaactcttcttgcagtgggttgctattttctagattttactttttagggaacaaaataaaatcctttgttaaaactggg

SEQ ID NO: 720 - DNA, 1453 bp, Homo sapiens
acacagagaagacagtcttgtatatattcctctgtattctggggagctttgaccttggagctttgtacagcttgagaaaacattagaacaaattttattatttgccggtgcctcaacaaatggaaatacaatccaatgaaagtacttcacctgcaagatgcacaataattttcaactctgtgcagaagaatatttatttttggttttaatttatcatggttttttgttgttttcgttttgaacttatccttcctcccacaaaaaaagaaaagaagaaaaaattccaagcagcaaaacttactttgtttgtaaggtattcatttaggtttgaaaatactatttaataagggcagaagggctatatatgatttggctattatttctagacactccatccacatgattccactaacaaggattaccaggaataaaggtaggtatgcaaaatgtattagctacccattattctcgcactaaccaccagaagacttgaaaatcttaaaaaaaaaaaacaaaaaaacaagaaaaggcaacatctcattttaaatagtacaattcagaagggatactaaatcaataaaaaccaggactcagacactacagttttcatcagtgtaattttatgtcttgtttctttctatatgaacttgtttatttagtctttttttcataatattctcatagagtttctgctagatctagagctctgctcagtgcctcttataaaaacaatatataagtctcatatgctgtcttgagaatccaagagaatcacatgcagctctgcaacagtttttgctcaaaaatgttactgactaaagcaactgtccttcctgtttccttattgctaccaaggaccagcagggagaaatgtcttctcccagcagtgaattctgttatgcaatttattcttgatgctcaggcctggttaagctgaggcttacctttaataacagcctccaagggaatgaattattcagttaatgtaatagcacacattaaagagtgtaaaatcaattgaggcattttattaatatcttggttcttttatacaaacaatgtatcattatcttcattctataaggtcattgttactacttctctcaaattgcactttctggtaaaaagttaaaaatttttaaggaaaaaataatttcaatggttaaagttttttttcctcattgtattcatagacaaatttttttcaatatattttgcaagaaaaatctttgaataagactaactgcatttaaaaggaataacctccttctccctttccccaactacaaaaatgtttggcaactttgtgtttacatttaaagatcatttgcacctttttcaaggaaaaaaagtattgagtaaacaattgtttacatatatcatttatgcttttttctagcatgtataacttttttaaataaaggtagtatttaccattaaaaaaattttagct

SEQ ID NO: 721 - DNA, 839 bp, Homo sapiens
atcatgcataccatgcagaaagttgagcttttaggttttgtcctctttgcttccccaaggctaaagtcagatctagagttctgccacaggtctaacaatcaagtctttagatggaaggaatccaggcaacattcttcaccacaacgaagaaacagataaaagatacccaattttgacttgatttcatgcatcatttggattttttttggttaggactttttttgaagttcctttttacttaggtgtgaaagatggttctttgttgaaataatatagtggtttagtgttttcaaatcatgtttctcatacccagatagtagattattcacttaggacagaggtaatcaaattatgtgtgaaatgtaggaaaatgcttgcccctgtaaactagtgagttgatggagcatttgcttcatcatcctcatcaagagaatcatataaattaagctttataatgacatttcaaccatcaacataatatagtgaggagtagcataatattttttaataatgcagaaaacatcactgaaatgagagtcacaaatttttcttcagtgtttcagcctgagtaagttacataaacctcgcttagcctcccttcctgctaatgtgtaaaatacatacttgccctggctacctcaccgggctgttattgctggaatcagaggagataacatatatggaagataaagtgaataaaagtactttgaaaaactataaagcattccacaaatatgagatgatggtattatccatccataaataggtagatatatctctattttatagtttcagattaaacaaaactgatatcaatagtaaaagtcattttacttatc

SEQ ID NO: 722 - DNA, 284 bp, Homo sapiens
gtaactccagctgttgcatttatactgggaatcttcataagaagctgagagaaagagaggggaaaaagaaagtggctttctactttcaaaaatgaaacaaaaaggaaaaatggcaaagtactgttttagctgtgcatgtcatatccacaaagacttttagcaggtgaactgttccaagactgacacaaggatgtttcaaacttgcctctgtctgtagaaaatgttaaaaataccaactcacttggaaggaaaaataaaaatcacaaaggtatattgagcacagt

SEQ ID NO: 723 - DNA, 348 bp, Homo sapiens
agagagctacatagtaaatcaaatgtaatctgacagtggttttggatcatattctagattcatctggaaatttgccatcagagaaatatttacttgaatagttgactgtaaaatgaagtatgagactaaaggtttctctctttttttttctttttcatggaagaaactaaagggaaggatgtatagagggttagctcatgaaataattatagcatgtgagtattagtgtgcagtaataggaaaaattaagcactgagatgaaaaagaatatctcaaatcttctgcaggacatgagcaagccccttggctcagcatttctgtctttctgtctgactgtaccctgcctct

SEQ ID NO: 724 - DNA, 1948 bp, Homo sapiens
gactttaaagtcgttttgggaactgtgatgtgatgtggaaatactgatgtttccagtaagggaatattggtgagctgcatatataaatttgacagatagctatttacatagccttctaagtaaaggcaatgaattctccatttcctactggaggatttatttaaataaaatatgcttattaaacactcctgcaaagatggttttattagtaccctggtcattttgttcaaggaagggttatattgcattctcacgtgaaatataaaaagcaagtcttgcccaataaaaacgctacattgtgtgtattttttgttcagctaagaattggaaaagtatttgcttgccttttaagttactgacatcagcttccaccagtgtaaaaattgagtaaaacctgaagttttgcataaaatgcaaatcggtgcctgtgcttgaaggttgctgtagagcatctgaccccttattaccaccttaagcaatgtatatgccatgcattaccatgcactaattcaatcacaggtgtttctatctagatttaaatatatttgtcaatgaatgtggaatagaaaatctaaacatgacaataatagacatatctttgtatggtaccagttagttttgccgtggatcagatggtttataaaagtaataaccataaagcaaaaaataatttgaaagcccgtctattcctatgctcaataaagttaagtttttcttcattagaacagttttatgatttatttgtctaggagtatgtcagaaaaatcaggcttttagtaggaattactcctattccccctgaagtcaggaccagtgcctgtgatctccattactttattttcctggaggtattagccaacacagttagatcagagaaagcaattgaagccaggcatgaaggctggcgcccgtaatcccagctactaaggctggaggatcacttcagcccaggagtttaaggctgcagtgagctatgatgatgccactgtactgcagcttgggtaacagattgagaacctgtctcattaaaaaaaaaaaaaaaaaaaaagccgttagacacacaggaaaaatccagaagggtaaactaaactaaagctacaattaatatgggaatttggaagaagtggtaggatttaaaatacagaaacagtttatgtataggatagctataagtaaatactgaaacacattatgcctctgtaattggggttgacacatgaacagaatagcagacacaatgcatatgaaagttacagaatatggtaaaagtggggtaaagatgggtttttaatgatactaagataactgaaaataggcatatagatatattccaagccgcctgacgatctaattgtaaaaagtaaagcatacaaatactagaagaaaatggaggaaaacgacattatatgtgacttaaaacctagaagaaataaataaaactattgatcaattttaactacataaaaatgtttataggacaagaaaaaccccaccataacccaaggcaaacaatgtattgacaggattccaataattaagaatacttcatacaaaaagaaatgtaaatgacctttaacatgtaaagatgctcaccttgttcagaagagaataaaccagtgtttttacctttcacttgaaaaagaagtataaaaacaactgtattgagttgaggctgtggagaaataaggacacatatatgggaatggaatgcaaaagttaaactttggttaacaagaatatttgggcaggtgcagtggctcacacctgtaatcccaacaccttgggaggccaaggtgggcggatcacttgaggtcaggagttcaagaccatctggccaacatggtgaaaccctgtctctactgaaaataaaaaaaactagctgggcatggtggcagatgcctgtaactccagctactcgggagactgaaggacaagaatcacttgaacc

SEQ ID NO: 725 - DNA, 995 bp, Homo sapiens
tggcccgtgtgagcagtcctcgcaggagacaccaccagctgtggcagcttggggcggggtgggtagtggtcactgcggtctgggagtgctcagatagcccgcagaacaaatcatgtcaccaagcttcaagccatggaggttccttccctctcacctgcatttttgcccgtctttatgagggtcttgaaaatcaaaatagtagttgcacagtatgtgtaggaaagacagtactggaacggcaaggtttctcagcttatcttcagcaacatatatactggattagggcaagagaaggaatcacccagcacttcaccagttggaaatctctggaaatttacatctatgtatttaaagttctgctaatgcaaatcttttctctggaaagaagcacagaggaggagttctgatgacccaggggttagggctgagacaaccggacgtttgtcacctcctttcccattgggtttttaggaaaacagtgtgaacctcccccttttaatttctggtgttatgaggaagaataaaggggataaaaggggctaagatggactcatgtttagctaagttctgacttgtatccagcatgctggagaccaaagctgccgccttactgctatttttaagtgccctcttttcagtcatttgcataattgcgtccatagagctgcatatgttgtgaataaattctcactcatttcaactttgaataatttgactgtcttgataattggttcctcccaaagactcttctgcaactcccattcatgcccaccaggcctcagactccctcttttccccgccctgcactattggagccctgggttttgtgggagtgctcagcaccgtgagtcttactgtttgatcggacagttagcaagatcagatcctttttgcttattttctatcactttggagggttttctgtagcaaaatcagtgaccaatgaagtaacttaaattcctattgaagaaaaaaaataataaaccacttgattt

SEQ ID NO: 726 - DNA, 722 bp, Homo sapiens
gagctgggagggtggaggtgtgggagctgatgggagaatgattaagtggtcatttgtgtcggagagttgaagtgtatttattataaggtattattattttttcatgtctttgaagaacttgaagaaatactgacatattaaggtactttgttcactgaattctcctctactagatattttaaaatatacttctatcctcgatagtaaaaaaggcacagagccaaaagccctcttgtgatccccttgacttctagaatgtggttattcttatttttgcccgcattcttagacatttactctgaagaagagtccaatggaaataaaggaaaagagtttatgggtcaaggtggcccattgtactgtttttgaagttggtcaacaaggtggcttggttaatttaggctcagcatgttttactgtatgttactaaaaaaaaaaaaaaaaaaaatcagattctctttttccagcactagtcaagcacaaattcttagctgcctaccaccctttccccaccaaaaggtgacatctaattttaaaaaaatggcatcttcctggccctcggaaaaacttgtcatctggtctttcttgccttaattcagcttctgtattattcttcgctgtctctcacgccttccttgtttcttgtgaaaagtaatagtgactggtttcctataatggactcaaagttatccctaaaattaaagacttatttgatgacctag

SEQ ID NO: 727 - DNA, 378 bp, Homo sapiens
ctgtgggaacaagcccctccctccactgcctcagaggcagtaagaaagagaggccgacccaggaggaaacaaagggtgaatgaagaagaacaatcatgaaatggaagaaggaggaagagcatgaaggatcttataagaaatgcaagaggatattgataggtgtgaactagttcatcaagtagcccaagtaggagagaatcataggcaaaagtttctttaaagtggcagttgattaacatggaaggggaaatatgatagatatataaggaccctcctccctcacttatattctattaaatcctatcctcaactcttgccctgctctccgctccaccccctgccaactactcagtcccacccaacttgtaaaccaatacc

SEQ ID NO: 728 - DNA, 894 bp, Homo sapiens
tgggcggcccacttcagcactgggcaaggaggggatccatgaatctggggtacaaagataatctaagccctcaccttagtgccaacagggtgtgctcccacgagactttcagcatccagtagatgggacctcgaggctcgagctgaagcaggcgagagagaaacagctactgcgtgcgtgcgcgcacgcatacacacacacacacacacactggcacagggaggctacaactaagcagcctcagatctgtaaagttgattggtgctttctaaaatgaatgcaattgaaagaaaggagccaaggaagagattaagaaaaagaaccagctgaaccatgaaacaaacaaaaatcctaaaagtgattcttgtcattcaagaaagcaagaggggacaacaatgggaggggtcggagctcttccttcccctctgtggagtcacttttgtattctttttaaccagatttcttaaaatgttgttgttttgtgaatcctgacattggttcttacttttgtatgctgcctcctctgtgccctcccagacgctgactgggaaacacaagaagtacaaccaacaggaaccagcgccaagggcaggcagcggcctccttgctcccctcccttactcctccctctgctgcctcctccccccaccaagtttcagggccctggattgttcccagttcccattgtggtcccttcagagctcctttccaacagcatctctctgtcgaagaaagaagctctgtcaagttagagagagacaatgtgtaggaaatgttcttttttaaaaaaaaataacaaaaacaaaacaaaactatttattttgtgattgttttccttgttaatctgctccaaccacctgaacatctaagtaaacatttatctggtttaatata

SEQ ID NO: 729 - DNA, 1181 bp, Homo sapiens
cgggctttgtctgtggaaggagacagaaggaaattgacccactctcctatctccagacctttacctagcccctccaggtttacagaatgttgctacttcacaatggcgatgtggtgagaaactcctgaatgaagaaaggaaccttgtctttcagggcataaggcggcgacttccaaggtcaatgcttttcccccacatctctatgtacatagggaacttagttctgggccatgtacagaaaatatcactgtaatataccaaaaggaagttaataatgtagattacctttttgattattgctatttttattattgttttcctcttgttgaaagcactgcagttgttacaggaagtaaagtaggaactgttgtgtgagcgagacatgagcctgtaggttcagtaggtagagaccaagcatctatctgatagaagcacatggagtgcaataggacattgtgagaaggaatttttcagggattcatctactagtttaaaaaccccactctggccctcttgtcctttcagaaaacatgcaaataccaagatccatacaaaacaataatttattccactgatcaaccaagactggttctggttggacagctaatctgatttggggattcactgtttcagaggacacagacaaaagctgttgcatcaaaactggactttaggagtaatttctattgaactcctgtcaatatgtttatttcctctgtctacagcagatgggagtcttctcttttagacaggggctttttgtttttaaccccaattgtaataaagggtgttctttttcctctttagagtttacaaaactataaatatttgtgtctccacataccatcttcatcttcacacattcactgtgctttcctccccatagtgggagctgtcatcaccaacagggtttactctcccctggagaggttatttaaatagctgtccataagccatccagatcaacaccctttcttccatacagaaaagggctaaccataccacagctggaatctctgaatatttcctattaaaaattttttctatgtgttgttataatttttgtttgggataaagactctatccattgtactagcaaatctatggggggtaattttatctccatctttaacttttaaagtacttcttccccttatcccctcaataaagaaaggaaatcc

SEQ ID NO: 730 - DNA, 209 bp, Homo sapiens
agcttaactgccagcttgaaatgagagtaaagaagatacagagcaaacagtgtttcagaaactgtcctgccctgggtgtgattctttggcttcaatttgaaggacgaggaatgatgggatttcatattttatttcacaccagttcctccttgtttcatctctttgctaagctggctgcttctaccatctaataaataattggccaagtt

SEQ ID NO: 731 - DNA, 1796 bp, Homo sapiens
attgggggcaggagctgctttttcaatgagaagaatgaacagacctagtgggcgttgcctttagacccaggtaagaggaatcccagccttgggacattactttcaagggccaagcccataggccatccttctagaacattctttgggtagctagggcttcataagtcacttactgggtttgtcctccttgagtggactgtgttgtcggtgtgcacacctgtatttccatggaatggtatcttagtcctgctgctataacaatacctgagactgaaaaatgtataaacaatagacatttatttctcacagttctggaggctgggaaatccaagatcaaggcaccagctggtttggtgtctggcgagggctgctctctgcttccaaaatggtgccttggggctgggcgtgatggctcatacctataatcccagcactttgggaggccaaggcgggcagatcacctgaggtcaggaggttaagaccagcctggccaacatggtgaaaaccccatccctactaaaaatacaaaaaattagccaggcatggtgatgcatgcctgtaattccagctacttgggaggctgaggcaagagaattgcttgaacccaggaggcagaatttgcagtgagccgagattgcaccactgcactccagcctgagtgatagagcgagactctgtctcaaaagacaaacaaaaaaccaaaatggtgcctcattgctggatcttccaaaagggatgaacgtatgttctcgaatgacagaaaagacagaagggcagaaagtgtccaaactcactccatcaatcccttttataaggtgctaatcactccctaaacaccccatctcttattactgttgcactggggattcagtttcagcatgagttttggagggatacagacattcaaaccacagcattgtgcacactcctttttctatggaatggccaaggtgcagctatttgcagaggctctgacagagctccgctgtggagctggggtgtccacatgcctgtatggaagaactttcatggcaccggagcctggtgggaagagaagtgggctgggctatagactgggcaccagggactatcacctcgtgccaccacatttagtgtagagttccagagaggccacaaattcttcatttgaactggactccccagcctcatgttcctctgcaggatgtaaaaggtaatgccagcagacgttggcagtgctggagacacctggtgggcagaggttacctggctggagtggcaggtgtgaggagatgcctcccagcataaggaatgtgggcttctgttggatctcttgttccaggcctcacacatgttcaaggcagcctgggtatgtcttggcccattcaatccctcaaagccctgtttaattctcatcttgctgtcacctatgtggtgccaagaaacaagtcaccaaaataatgaaatgcctacctaagcttaaaaacaaaaccatgaggtctttctaaataaattatgaaaaagtgcaaactgcaggtccctgtaatgatttcaaagactccgttccaacaatgcattaatttaaaaagggagtataaggcaaaggggggtgattagaagaggaaggcagctgacatcaaactgaatataccaagtttcctcctcaaaaacgagtgtgcattatttgtggtgaccattcttggtattgttctattacgtaaaacacagcatagcatcattcttttagatgccattcatttaatatatgggcaaatgtacatggttaggctagactggagcacttgtctacactgctt

SEQ ID NO: 732 - DNA, 792 bp, Homo sapiens
gttggatcttcaaaagtggtttgtataactttgtcctgtcctccacctttctatccctatgtatttaaacatctaaatcctacatggtatcatacaaaggactaatccagtggtttacagcagtaaaggtactaacatgtattacttcttaatcacttgttatgattgagccaatatacaaatacctcatctgttctttttaatattttatctctgtttgtagagagctaacgtttgatagttctaatttaaatttcttcctttcccccatattcaatcattgaatccttatagaatttgtcttttaatagacagaaaaattaatgaaactttttaaaatagaaaaattactcttctttaatgctaagtattgacacatcgttgtttgtttttcattgtttttgcggattgagagacttggtccatcttgtctcaggagaagaaacctttctccaatgtagcagaattatcctcttccctgtattatagcaagttctttattaaagatttttgaggccgggcacagtgactcacgcctgtaaccccagcactttgggaggccgaggcgggtggatcacttgaggtcaggagttcaagaccagcctgaccaatatagtgaaacactgtctgtactaaaaatacagaattagccgggcatggtgcatgcctgtaatcccagctgcttgggaggctgaggcaggagaatcacttgaacacaggaggcagaggttgcagtgagccgagagtgcaccattgcactccagcctgggcaaaaagagcaaaactccgtct

SEQ ID NO: 733 - DNA, 348 bp, Homo sapiens
aagcctgagaaaaaaagagaggtgaactgttgcttctacgtgagcatgaggacctgataaaagagcgccagctataaaccatcctgtgccaggaagagcccagaggctctgtctcagtcgttggagttctcaaccaaaaaagcactaatttcagggaatgatttgagatattcccagagaacaaattggagttgcaaaacaaactgccatgaaccatgcttcttatctcagaactgacctgtggaaaccactgccttaaaagaatgaaaggaaaaccaacatgaaacaccaaatagtgtgtgtgaatcttctggcggtgctgtgcttggaatagatcgtagctaattt

SEQ ID NO: 734 - DNA, 4414 bp, Homo sapiens
ttctcgacacaaaataagtgaaacttctttttacaaagatagagaaacagcacaatcaattccaaatggtatgagatggattggaagtggccagcagcaagttctggtgacgggacagagtggccttggatgtctttggtattttctgtagtagaaactaaagcaaagaccacaagtttcagagcatggagacattcctgctgaatcgccttctcacctcctcggcaattgctcattctagggttgggcatcatagttggtcagtcttaattcccatgccaaaggacaaacaggtgtgacatttggatagatgaatactgggattggctctggagcatgtgttttgagttgaaccttgcagtcctttctctacgcccgtggattttgtggaaacactttgcaatctctttgtcttttttttttttaccagaactagttacattggaatgcttactgtcctacagagtggcagcaaataaaaccttgcattccatcaagccaaaatagcacactctgttagaggagatacatgtttaagatagaattggagggaaggacaaaaacagaaaaatgtttgggcttttaagccattgggtagtattgttttgatgatcttagaggagggaagaagagagagagacccaatggtagaaccagaatcagggagatgactgaactactgaaaaacaggttcccttgtatttaggatcttaaggtgtataaaaagcaaacatgactttgcacctaagtaaattctgcattctcatagttgtgtcccaattaaccaaaaagttgtctctagagaaaatactattacaatctaagcatgattctctgtggagactaattttttccccttttgccaaaagcagtccttcccaaattaacaaagcaaactgaaataataccttgaataacaggttgcctgtggtctctgtcatcctcgtttctcttctgaaatgaatttccacctctgcctttaaggcatttttgtcactgaagctgctgttcccaagagatcggcaacctttttgtccctttctcataagaaagggacactcctacaggtgagagtgtataccttactctctcagataagtggctggacttatcttgtgatttggggccatggaagattggaaacaaagattttaagccttcttctttttttcttttttcttttttttttgagaccaagtctcactctgttgcccaggctggagtgcagtggcacgatcttggcttactgcaacctccgtctcccaggttcaagcgattctcttgcctcagcctccagagtagctgggattacaggcgcccgccatcgtgcccagctaatttttatatttttagtggagacagggtttcgggtttcaccatgttggccaggttgatcttggactcctgaccccaggtgatccacctgcctcagccttccaaagtgctgggattacaggcatgagccaccgtggccggccaagattttaagccttctgagccttgaaattgaggaggttaaaaggaagagccttaagattttgatttatgtcaaatcctaattctatcattcagtcttgtttggagttctgaacccatgatgttgtattatgcttctttctcctcttagcactctcaaatttcaggtttgtaaaacacagtttttgttttgtgttctggcaaagtgatctcaacatgtaagtagttgcagtaaaacacaggggcaaaggaagacaggcctgatgtgcccactcatctatggactcagagctgtgtgctttgctcctgcatcttgttgaggtgctgttccagctttgcatttctgtcaagtagaggcgaatatataaacagtgtggttgaatacatttaatgccagccattggaaactagttttaggcaaccactctcaaaaacagctttagaatttatgcccagttttcttgcattgaaagataactgagtaataacctgtaactatttttaaatggcatgaaattaggaaacttttgtacattttatatacattttgagatgaacagaacaatgggctgagttataaaaagcgtgtattgaatttaagaagacagactagcacaaaacacagaattcgtgttaaccaaaggaggcattgatttcagttttaaggctactcagtgttgtgtgtccagggaaattcacagctcagtatgagaataccttggttagtgctcacccacaagcttccaggagccagctgggaggagacaataggaagagatgtcatctctgctctccctgtaaatgttagttgaactaagttatggatttgtggtctttcaaatacatgacgcctttagtatgccacactgaaatgaataagaagtcttctgaaactgggaacttcataacattgaaggcagaagattctgctaaggaaaaaagcaggcaggaaagaaaatgtctcatcctttcttgaaagcatttgcagaaaatatatcatttcattttattcccatctgttttcaaactcgtgatcttaaaaggcattctgatgataaatttagaattttcatctataaaatttagaactctaatccataaagttagaattgagctaatagagtggtatgacatggcactaaaaatataaatttttgttgtaagtcaggattggagtaagctggaaaagtatgtttaggcaaatcttggagaaaaccaaccataaacttacagctctaaaattcagaaagccctaaaatttcaaacactgtttgaaagaagaggtgggggccgggtgccgtggctcatgcctgtcatcccagcatttgggaggctgaggcaggcagatcacctgaggccaggagttcgagaccagcctggctggctagcatggtgagaccgtctctactaaaaatgcaaaaattaacagggcacggtggcatgcgcctgtagtcccagctactcgggaggctgaggcaggagaatcacttgaatccaggaggcgaaggttgcagtgagctgagattgtgctgctgcactccagcctgggagacagagcgagactctgtcttaaaaaaaaaaaaaggaggtgaatttttttttaagttttgtaacactgtcctactttatttattagaatctaaggctgttacaatcaagtcgttgcagggtttggatcagctgtaagttaggtatgcctaccaaacatccaaaggtagacgtggagacattttaatactacaaaactaggaaaatcagaactcatggccatttcctgccctcctccaacttgttaaaacatgtttattctaaagttcgaatggataaatttgagtataaaggttttgttataaaactgttctttagtgtaaggctgcattgtgggtttgggggaaatgtaaataattttctgtgtaaaacaaattcataggatctgatttgctcagagtattattcaagaatgtattaataaggcattgccccctgtttgcactcagggttaatatgtcaaatgaaatttaagaaggaaatggaagaattcaggtacattaattgcatattattttgggaaagatgagtcctatacgtggcaatttttcaatgtcatctgaagccagcattatcttccaaagaaatcgatcttttttttctaaaaaaaaaaaatgcttttgccttcccttcccttcccatccgccatatttcttcagcctttcttctcgatcacccgtgtattctttgaccagtaaatgaccacacctcaatgatggtaaaacagcatcatcagtaagctatcttatatgcctcatcctgtgagtttgagcttcaggaaacatgagtaaaagtatatgtaatgtatatagtcgtatatgtattctagcaagaaaaacatatttattttgacaaaggggaacactgactttctgaaggattcagaaagaaccttagtgaaaggttctcagtctctgagagtggaccctaattaacataaagaccattcatcagcgaataactactgagcaactctagtgtgccagcacaggccagacatactagtgagccaggcacatctggccttgggaaactcatcctacaggggaaggccagtttttttcccttcaattcctcaagtctgggtggtgacaaggtaggggctaggtactggactaccacaggtttttaggaactaaggtgtttctcataaacacaaaatgttgggtgaaactgggaacaactactcagaagctcatttatttgcttaaatggaaagtgtgggagccactaccctctcttttgatctgccaaggatttcctctcagagctgttgcacagacagagattgtacttggtaagataccaaacaagacagatatggatctaaatttctaatgtgttctatgggtttcaattctgaaaaaagaaaatgaataaagattttaat

SEQ ID NO: 735 - DNA, 774 bp, Homo sapiens
aggctagaggaagacttcctggaactgcctttcttccactaacaggaccctgggacctgtaggagcaccccgtttgggactgtgaggtgtttgagggtgtggactggcatccagcagccactaacaaacacacaactggtgtgtaaaaggcaggccttacattagaagccaagccaatcctttttcttttttttggaggtcccaccgagatagataggaacttggattgctgaattcaaaaacagagcccattcttaagatcacttggtgccttaaagacacgcattccaaagtggaatgtggttgaagaaagtgggccaggtggttgaagaaagccatgtgggagctcagcaaatcccaagggcttattatgacactccagatggtctccttagcatctcagctcttctgcaaggaagagcttgggtgttaggcctcagaggctgtagggtccttgggttacagagccggggagaacgaagttctgtgacccaggggtggagaatacactctaggtttgcaggctggtgggctttcaaattggtacttccagaggaaagccaagctgcttctgttgtgagcgaatcagccaagagcctgaggctgaagggaaaagtacacagaggaagatattttacaaaccaggtcagtgtaggccaagacttatggtctacagattttggcgggggaggggggaccttttcaaagacaatagggggtcttgacatgtttgttgtatgtaaagatgataagattaaaatttttgattttcct

SEQ ID NO: 736 - DNA, 1676 bp, Homo sapiens
aagcttggactttgtttcctccttgtcactgaagattgggtagctccctgatttggagccagctgtttccagttgttactgaagttatctgtgttatttggaccactccaggctttacagatgactcactccattcctaggtcacttgaagccaaactgttggaagttcactggagtcttgtacacttaagcagagcagaactttttttgtggggctgggtggggggagaagaccgactaacagctgaagtaatgacagattgttgctgggtcatatcagctttatcccttggtaattatatctgttttgtttcttgactctgtccaatcagagaataaacatcatagtttcttggccactgaattagccaaaacacttaggaagaaatcacttaaatacctctggcttagaaattttttcatgcacactgttggaatgtatgctaattgaacatgcaattggggaagaaaaaatgtagaatgatttttgctatttctagtagaaagaaaatgtctgttttccaaagataatgttatacatcctattttgtaatttttttgaaaaaagttcaatgttcagttttccttagtttttaccttgttttctctataggtcatgatttctgtgaagcaaaaagatgccttttaccatgaattcttgagtttacatcaataatattgtatattaaggggatcagaagtaggaaggaaaaaataagagatagcagaggaaaaagaaaaacatttcctcttataacttctgaagtaatttgtaaaaaagatttgtagagtcaatcatgtgtttaaattattttatcacaaacttaacatggaagatattcctttttaactttgtggtaacttctttgaagttatttagaaatatcctttggaacaattattttattgtctaataaatattgacttctcttgaattattttgcagactagtgagtctgtaccataagtattaatcacctccactcatattaaagtgatcattaagaatccagaagctggcttctgcatttgctcagttatacttttaatggtagtatgtttttaggtggaataaattaatatgtgattggtttcaaggaaatgtactctattatgtaatacttccattttataagatgcccatttctaatacaatgtgtgtaggaattatttgtatgtatgaggtatgattgtaaagattgagcattggaaggggtatcagagaccatgtagttcaactttccactcaaagtaagatttatgaattatttaaatgatagttgttacttggaacagccacttgagaggctctcttggtattgtttggaattgttttaaagtcagtttgagtctcacaagaaggtaagtagagtttcttaatagtcacaacttaatttgaaccacaagtatccagcttaatcacgtatcttactcacgataccactggtccagatgagtttaggtaattttcaaacattaaatccaacttcaacggaaacaaatacactcaagggaagttatttttaaaaaggtactctgcatgttcccgcagtaatgttctgcacaacagtattgtaattgtaatggaatcataacctgctaactagtttgctttaatatggcttgtaattcttgacatttttcttaaaattaaaacgaatttttattttgaattt

SEQ ID NO: 737 - DNA, 214 bp, Homo sapiens
atccaaggcaacctgtggaaagaagaattcagatgtcagtgggagcctccaggtgggaggagagcatgcctaaaccctggtggccattgttctgtactaaggaacaacattccctttgaaaggacattatttgcctgttgtatttaacttcacagtgccttgcaaagagttgtttaacttgcatggtgccacccaataaatatctgtgcaattg

SEQ ID NO: 738 - DNA, 320 bp, Homo sapiens
gggagggagggaggagggagaaaaacagaatccagccgcttaggctttgatgaactcccaggccaaaatgaggagttattgaagcaaaatagtatcttgatcattgatacttttgtctttctgtgactatatgttagctttattatgctaacagtctactttgatgtgtaagtaagtattgatatttactgttaatcttgatttttcttgattttattctgtgtcattttgttcacctttgtttttaatgtagtttaaaggaatttgtttttttgtgtttgtttttcttgtacattatcatgactgataaatgaaaattg

SEQ ID NO: 739 - DNA, 2002 bp, Homo sapiens
atccttccaccccgacccgcacacacacccacactgctgccctggcgggggccatgggggtgatgaatgaccctccaacagccccacatgggttgtttctgtttctttggcttttctcgctccgcagtggagggtttactaggatttaagcttttgagtgcattgagaaccaagacagggcctggctccaactctgtgggccagaggtgggggactgctaggtcgagtctgcagcttcgccagtttcttggttgggacactcctctggcagccccagcaccaccacaaccccttgcagtgtgccccagtcccctggattcgctggactgcaaaaaggagcaccagggaaagctcagcaaaggctcaggaggcctcccgggtcctcgggagatgaagcatccgtgcctaggaaaaggggacagagggcaaggagagaagtgagagctacaattccagcattggagaagcgaggggcggggcgtcaacggcactgcttcaggacgcgcttgctgaaacgactccaacagctagttcacagcccagctttgtacgttggttaccatagctactgctgtcactgtagctgctcccgtagggtcgttgattcctgaacgtatcacatctcacctgcccccttcctcgtgggacgtgtcaagttgactttaaagcctaaggtggcttgtggggactgcaccagaaagtgtctaaccttgtgttccccgaaatcctttctctgacttaggaaccagcgccccctgctggagaagttttttcattttgttagccgacttctggtagcttagcaaagagaccagctgactgtctctcggcccagcccaccacgccgagtagcttgtgtggatgcagtcctgtgagggtgtgcataaccgttcccaggtgtacgcacgcgcgcgcgcgcgcacagacacacacacacacacacacacacacacacacacacagtaaccacgggtaggcaccaggggctttgtacattcaggagctgcagagaggaaaggtctcccatgtaccagagaaggaaaagtctgatcccgaaacagcttgaacgaaaggtggttaacacgtgaccaatccccatggcagacagcgggctggtgaacaggaagagcacagaatctctgtggggcgatgctgcagcggctgaaaccacgtcaagtcccccagagcccggcattctatgtaagcatccacctgtgacgccgtggagcaggatcttcattcatctcaccagagcaacagcccagtcctgaggatgggagggacgtgacttagccttgggattccacgctcgccgccctcccttggccgccctactccccagtttcctggcgatgagccatttattgtgtctcacaccagcctcatttccaactccgacttcctacttagaatgtggcagtggctttgtgagtgagaatcctgatgagttttccagtggcctctgcagaagctggcccccttctaagggcatagctaacccccttcccactcctgagtcactgaattcgaggagggtggggcagggaaagggctggcccccctgctgaaatcttgattctgcatttgaggaaggtcagggtgccgctgggggagcagggagcggggagggaggaagaggggaatgcacatcttttgcgccactattaaggcacctgtcaccttacatctcaatctggaatcaaagtgccctgggttgagaagcagacctgggctctggtcacactttggtcactcattagctctaggaccagtcactaatctctgagactccattttctccagggaaacgaggcttgcccagatagactaacaaccctttagtgctccaagaagtgagaatttccgaaaaagatctgccggcccagagcactccctcttgccctaatcctggcagggtctggatgtatttacccaactctgatcttgcgtgcagggatgcttgctgatggatgaaagaccacaataaaacaagattagcagc

SEQ ID NO: 740 - DNA, 1837 bp, Homo sapiens
gaagtgagagagaagaaaaatcatgtcccaagttctgagaattgttcacactttctaaccagagacagaattcagagctctttttgaaagaactagtttctttttaaagaagttaagtgcttacataaacatggaacatataaatcattcattcaacctaattatctgtgatatgagagaatcatttcagtttccattgagagctctgttaaaggtatcttaggagtgcagattatatgcagttccttagagaatctgttttgattctgggctgagttattacagttatggtatgaccagtgagagggatttgtgtcctttcttatgaaccttcctgattttttaacttagatttctcactaagtttcctgagttattagtaagattgctccctaaatgtaaccagggattttcccattatgttcccttttataccatttaggtgtgagttccttagcttctgcctataggaacataagtaatgaaaggtcatctaggtgtgtgtttggaatttttttcttttgttttttggaaaatggaaagaacaaggcaaggaaggaaaattaatggggaagctgaagggaggaaatgttacagtaatccactgagatgtagtttagtcaaacataggtatatgaactgttaatcttggtggattccgttgggatttgttttttacatctcctttttccttccttgaagaaaaattcttggctgtcccaaggattcttcatgtatattgcaaaatttaatatatttgttcacttgagtcttaagagtaggtcaggccaaggcaggtggatcacctgaggtcagaagttcaagaccagcctggccaacatggtgaaaccccgtctctactaaaaatacaaaaattagctgggcgtggtggtgcatgcctgaaatcccagctacttgggaggctgaggcaggagaattgcttgaacccgggaggcggaggttgcagtaagccgagaccatgcttattgccctccagtctgggcaacaaaaatgaaactccgtctcaaaaaaaaaaaagtaggtcaattcgtaacagtttattttggacacaccctgaagcttttgttttgaattaagaaatgagtttcaggaattgacaaaccatttgttaaccagctgtcctgggctattgaagaagatttcattttccgcgcatccacttgttgcagtccaagtcctctagtgcaacgccatagcaaatataaagatttactatgcacgtgatacattttatggagtgcctcaagccaagatagtgaatttatatgaagggtgtgaaatgtatttctttactactatagtagtttagttataactttgcatctataattgagctttctcatctgtcaaatgctatggttttcttaaaatgttacaattctagatctatccaccttgtttttttattgtctacaaaccattaaatgtaaatattgtttttagagtcagtcattggctttgtcatttaccctttgagagttccacaagtggtagtagagtggtttaacgtctttcctctagtactaccagtattcataaatgtataccccttactgtaatttgttcctcttagaagtcagatcatctgatttatagaggattatgaaaaccagagtttttgaaaaggcttattttatacatacgtattatatagagaaacaaatgtttttattaaatgtttcattgacccaagtaatttaaaagtaatatgttacctatgtctttcaggaaaaataattatagcagctgatctgtaaatgactttaaaagctattttagtaatttaaataaatttactttcttggtttatactctc

SEQ ID NO: 741 - DNA, 3718 bp, Homo sapiens
catcttgcaaataaatcgaacgctgagtgctaatgtgagtcctgggcctttctgcctcctgatgtacacccatcgccatcatagcaagagtgcttctggaccttgtacttattcttaaagactaccagtatggagttcataggacaatgtggtacacctggtattacagcctttgcctttcgagactatccactggattaatgggttattttcagtgggcagggttgcacagtgtaatcctacaccttttgctaacacccctactaggtcccagagggccagaaacacctgacttacctctgagtttagactagggtatcacttctttgagtctgaagtcaagtgagagaggtatagataaatgcatcacatcacttttgaaatgtaattctggtctataccatggaagtcataaatggacattatagtctctaaacagtattaaacccttaaccacttctaaaataggcaagctcaataatgtctgccaacttcacattctggagtttatttcatttctttttgaagaccattttcttccattattgtagttgagcagcaccaagtggactgtcaggctaacaggaataagtggtagccttgctttctgagcaccatctaaagaattttaaacctctgcattatgtttagtgttctctgtgtgggcatgaaaacaaagaaatgcccctactgaagactgggctcaaaggaccaatgcagggctggttcttttaccccttggtttactcctgcacttgtcttactcattctgaatctctaccagctgctcccagaatcacagatactcaggaccatctcaggcatccaggcatggcaaagtggaaataattcattttggcctgcaaaccttcaactcccatctttccccaagaagtcagagatgctgttacttgaatgatttaggaaatgagtgtgtgcaccaaagacaaaaagatattgtctattgtttgtgtgcttgttttgcgctatggaacattttttaatttattttaagataaattattaagttgaaaatgtgtgtccctattcagaagtgaaagattcatcttgtaatagttaaacctccatcttgaagcttctatggttcatagtctttgcacaggaacctgtggttttaacaaaccaatacacatattgaagaagtcattttaattcagtgaaacgaagatgggcttttccagatcacctgcaatagcagcagtgggataaaatgatttaaaaacactgtacaatttaactctgcctctcttgcagcattgcttctcacaactattacctgcatctgaaaaaaaatctatagactccagctgctacattagagcataagagatgctctcctgggacctcagtaccctgccttcttgactggtttccgttcatcagtcctgtccctcttcaagtaatctagaagaatgtggatactcttaggcgtgaatgtaaatgccttaatattgaaggtcctggttagaagcatgatacaagacatctactggattcatatttacaaatatcctggaatgttatagcttcaaagtatattagaaaaaccccaaagatggtataatctttaagtgtgcacgttcgtttatttctgcatcttccctccaaacttgcctttgcatcttaaatatttcactatgcacactcccattcctcttgggtttcatcttgtcgtttaagaaatgtactgaaataatcattggaatatttgcattttgcacaatgactggtatgatagctcttgacaaataaggaaagcactgaaatgttgtgattgggtctcgggaaatgctcagattgatgtcttaccagcatttcttctgggcttgtgatgttgagctgtagtcttgtagccataatgagcaaattgactaagagaagcaaaggtttcttggggttattaaccagtagtgtggaaatactagttttatgtggccaaggaaaagcaaaggcttttcttttcagtttgtgttatttggaagacagaaaaacatcttgtctacatcctttggctgtttgtaggatcacgttgtccttacgatactgaaactttacagctgctgtaaattttttataaatgaatttcaaaatgttataatgggactgtaggttgtttttctacatcttcattatttggacctaaaaccagtttttaataagaaagtttatctttactctttctgaaattatgactccagaaaaagaaaaaaaaaatacaagtcatggaatcagcaatctggtaagaaatgctgccaagaatgtggcagtagctgtcctgacagactccaactgtctttactatctgaagaatcctaggctccacatgagaggcagaaatggatcagtcttattcttttctagaaatggttatctgtagtttggtagcaaaaaaaaagaaaaaagaatccataattagcagatttcttattaactatttggatctaattgaaatggctttattcttaggattaagaaagatagatgtggatacccagccactcgttccatattggtatctttttaaatcagctctgcctcttaatcaagaacctaaatattccctctttctaatctttgttccttctccctacaccctcatcctctttcactcttccttcataattcctctaagaaaaatatctttgcatcagcagtaatatcttttagaatagcactatcagaatttagcagtaaaccaacatacaggcttcagatttacttctgagtccaaaacaatttgtgctatccagggtagttaactctgggttaaacaagtacagggtatagattccctcttcaggtctacacaggaatttttaccatagggaaaagtggggagagctcaaacgtagttaataaggaaggtaatttgtttttcttttacctaaaagaaaagaaaattccttctgtgactacaggtctctgagaaattatctttcaaaagagatttcattgctcataagagtgttgtggcctattgataaaaacaattttgttcagtttcttgtcttgaaaaaaaagtggccttagctttttgcaatacttgaataaagtgtgtactcgcaaaagaatttctgtagcacagcattagagactcataacttttctgcaagaaatacaaacttacatcttccttttactaccttaagaatactagtgaataaaacattaattcaaagagcaaattatagaaactacaatgacatttaatgcaaattgtaggaatttacatgtttacaaatcatcttcaactggttgtgcagcaattcaataaaatatctttgtattataaaaatgtgaagaaaaaatgtaaactgatgtaaaggaggtactgtcattttaattaacctatgtttaatagcttttccttctggactttgcaaagccttcttggcaaacacattgcaaagcattctctgggaggttcagcctccttgtgtgtactgtactgtgcagacatgaaaaaataaacccgtttactgtgtgcgtgtaaatagcctggtcatcaggccattttcagccaatagtcacatccagtgcaattttgcaccgaacacttaagggtgtggtttgtaagtacgatctgtaaaataactgggatgaattcccatgtatacctgtgtaaatagatttgttaactgaaatatactttaagaaagataaaatctgtaaataaactgatttataaattaatttc

SEQ ID NO: 742 - DNA, 995 bp, Homo sapiens
accacctggggaggaggcgggagagggagctgccatctctaggcacctcaagccccctgaccccattccctcccctcccaccccttgctccttgtctggcctagaagtgtgggaaattcaggaaaacgagttgctccagtgaagcttcttggggttgctaggacagagagctcctttgacacaaaagacaggagcagggtccaggttcccctgctgtgcagggagggcagccccgggcagtgggcatagggcagctcagtccctggcctcttagcaccacattcctgtttttcagcttatttgaagtcctgcctcattctcactggagcctcagtctctcctgcttggtcttggccctcaactggggcaagtgaagccagaggagggtcccccagctgggtgggctggaatggaactcctcactagctgctggggctccgcccaccctgctcccttccggacaatgaagaagcctttgcaccctgggaggaaggaccaccccgggccctctatgcctggccagcctccagctcctcagacctcctgggtggggtttggcttcagggtggggtttggaagcttctggaagtcgtgctggtctcccaggtgaggcaagccatggttgctgggctgtagggtgagtggcttgcttggtgggacctgacgagttggtggcatgggaaggatgtgggtctctagtgccttgccctggcttagctgcaggagaagatggctgctttcacttccccccattgagctctgctccctctgagcctggtcttttgtccttttttattttggtctccaagatgaatgctcatctttggagggtgccaggtagaagctagggaggggagtgtcttctctctccaggtttcaccttccagtgtgcagaagttagaagggtctggcgggggcagtgccttacacatgcttgattcccacgctaccccctgccttgggaggtgtgtggaataaattatttttgttaaggc

SEQ ID NO: 743 - DNA, 474 bp, Homo sapiens
acttctctcctccccaccctacctgcccccctggcttgagagaatatcttcaaggatcaaaagagacttgccttttaaggatcgaaagtacgccaatgtgaatttccattattttcaatggaagtcctccgctgattcctagaaggctgtgagaccacactagggcattgtttccctggggaagcagtgggagagcagactcatctcagaacacagcacagggggtaatggcctagagctctagggacactggcttgttgggtctctcccctgctgttctgcttaggggcttggctgctcagtgctttggtagcacaaggtgactgtgataggcccccttggcctttgggaactttgctccaactggtgtgtctcacacaatgcctcccaaaacactgctctcaccagaactgagactcctaaggtagaggcctcacagcccttgagtaaaataaaagtgatttctggaccatc

SEQ ID NO: 744 - DNA, 2277 bp, Homo sapiens
attttctgaagtctagcttaacatctttggttttcctactctacaatcctttcctcgaccaacgcaacctctagtacctttccagccgaaaacaggagaaaacacataacacattttccgagctcttccggatcggatcctatggactccaaacaagctcactgtgtttcttttcttttcttctggtttaattttaattttctattttcaaaacaaatatttacttcatttgccaatcagaggatgttttaagaaacaaaacatagtatcttatggattgtttacaatcacaaggacatagatacctatcaggatgaagaacaggcattgcaaggaccctctgatgggacggtactgagatatctcggcttccgctcagcccggttttgactggttgaaaccggacattggtttttaaattttttgtcagtttatgtggagaatttttttctttccttcatacccagcgcaaaggcactggccgcacttgcaggaaaagtgcaacttaaagcagtaccttcattcatgaagctactttttaatttgatgtaacttttcttattttgggaagggttgctgggtgggtgggaaatatgatgtatttgttacacatagttttctcattatttatgaaacttaaccatacagaatgatataactcctgtgcaatgaaggtgataacagtaaaagaaggcaggggaaacttacgttggatgacatttatgagggtcagtcccacatacctctttcaggagacaacttgcaccagtttgaccttttcttttctttgtttttattttaagccaaagtttcattgctaacttcttaagttgctgctgctttagagtcctgagcatatctctcataacaaggaatcccacacttcacaccaccggctgaatttcatggaagaggttctgataatttttttaactttttaaggaacagatgtggaatacactggcccatatttcaaccttaacagctgaagctatgccttattatgcatccacatgtatggtccctgtagcgtgacctttactagctctgaatcagaagacagagctatttcagaggctctgtgtgccctcactagatagtttttcttctgggttcaaccactttagccagaatttgatcaaattaaaagtctgtcatggggaaactatatttttgagcacatggaacaaattatacttcctcattcatattatgttgatacaaaagaccttggcagccatttctcccagcagttttaaaggatgaacattggatttcatgccatcccatagaaaacctgttttaaaattttagggatctttacttggtcatacatgaaaagtacactgcttagaaattatagactattatgatctgtccacagtgcccattgtcacttctttgtctcatttcttccctttgttccttagtcatccaaataagcctgaaaaccataagagatattactttattgaatatggttggcattaaatttagcatttcattatctaacaaaattaatataaattccaggacatggtaaaatgtgttttaataacccccagacccaaatgaaaatttcaaagtcaataccagcagattcatgaaagtaaatttagtcctataattttcagcttaattataaacaaaggaacaaataagtggaagggcagctattaccattcgcttagtcaaaacattcggttactgccctttaatacactcctatcatcagcacttccaccatgtattacaagtcttgacccatccctgtcgtaactccagtaaaagttactgttactagaaaatttttatcaattaactgacaaatagtttctttttaaagtagtttcttccatctttattctgactagcttccaaaatgtgttccctttttgaatcgaggtttttttgttttgttttgttttctgaaaaaatcatacaactttgtgcttctattgcttttttgtgttttgttaagcatgtcccttggcccaaatggaagaggaaatgtttaattaatgctttttagtttaaataaattgaatcatttataataatcagtgttaacaatttagtgacccttggtaggttaaaggttgcattatttatacttgagatttttttcccctaactattctgttttttgtactttaaaactatgggggaaatatcactggtctgtcaagaaacagcagtaattattactgagttaaattgaaaagtccagtggaccaggcatttcttatataaataaaattggtggtactaatgtgt

SEQ ID NO: 745 - DNA, 232 bp, Homo sapiens
ttgcagatccctcttttccagttctccttcctctaggagccatgttatcctctgtcccccatagagtcaagcctagtgcttgaaggtcctgacgacacccacaacatacatgagagtaatgggattgagcatttatggcagcaacagaggagccacaaaatgttctttgttctttggctccaaaaagactgtcagctttcagtctcttttgatggactgttttatcagagtt

SEQ ID NO: 746 - DNA, 957 bp, Homo sapiens
gcccttggcccccctgcggggaggaggtggagcagcgggcgtccccgaagtgagggccaggcccttcccggctgcgaggacgcccagagaccgcgggcgctgagcgcgttgggcagactggttgcctctgggcatcgcaaactgcccccgggcgcatctggcttatctggagacctgggagcttgaggctcattggaagaggacgatcgttaacttttgtgtttgtgtatgtctgtgtatgtaagtttgtcttgtggcattaagactattttgctcttctggaatgcaccactccttccccagggtttaagagattgggggcagacagggactttcctctgccggctgcgtggagaaggaagcggctaaaaggtttgggccggggagttccccattcgttctccggggagggagggactttacacctacccctcaccggaaagctagacccgcttcagggccaggagtggcgtttccgcacaggatttcctaagacgagagggatttagccaagagcacagacttggattccttctgtccctccccacctttctctcccaatgaagaaacgtttatatcctgtgattactctaggaaaggggcgtattaacggtcctttgcttccccgcaggggagaaaaagcttgacgaacttcacagaagagttcaagcttggaaataatggagtttatagagaaaagatatatttttaaaagctctaggtcagaagtactacacagtgcttttaaaaagtgtttaatgagagtttacagacagaagcccgaagtggaaagaccttatggttttgtagatatggtgactccagtctttgttgtataaaggttgggggagctgataaggtttttgtacagtattttctccttcgttgtattgatttttgtataaaaatgtaacttctacgtgtctaacacgtattaaatattttgaagcaacgtaa

SEQ ID NO: 747 - DNA, 2743 bp, Homo sapiens
aggctgctcccccctccgatgcatgctcttctctcacatggagaaaaccaagacagaattgggaagccagtgcggcccgggggggaggaagagggaaaaggaagatggaaggacaccatgcattatcagagaagaggaagtaaaggacaatcagaacaccagtcaaacccaccaaattgctttattcccctttgcaagatgggcactgccatagttctgcctctttgctggggaaagaaaccaggaacgtggagggttattactgcgggagaagggacacgaggatggctttgcttccccttgccccttcccacttttctaaaagctgtggagggatctagctggcctatgtctacactcagtgccctgagaagcctggaagactttctggctcttaactggggagtagtggagaccataggagaggactctcctccctcaccagctcttacgcctcagccagcaccactgccaccagggcaactgcagcagcatctcatgcataaccctgtggcttgcttcccccagggcagcacaggctaagtcaggaacatcggatgccagggagggaggagaaagccgaagcgaaaggggtcagggtgctgaggcaacagcagcaagggctggtctggacaagaaaagccatagcccggcagcccctaccatgagggagacagagaaacagaactggtggtgctggggggtatagccccccatccttgaggcctgtcacccacacagtaggtgctgagagttaggacaggtcaggaagtcccccagggtccacaaaggtgcctgaggctctggtaagggtgaagataaaagtatttaacaaccgctatggcatcaatgtaagtggagtttggtcctagtgccggagcccatgctattccaggcattggctctttagatgccagtcatgggggaaccctgagggtgtgggtagagtagcaggggccacctaagagattaaaaacagtctgttttccaaccagtgtggaagcaattaaatatgcgtaacagtgctacggccacaccagcacctcctggctgaaggtcagcccacactctggtccatgaggcagcaaggccagtgctgtgccaagcccggtaaggccaagtgccgaggcccagccttccctgccactcctctgagagggcagaacacacatatccaagtaggctacccaccactgggtagggatttctgtaaagatgggaaaggctgatagattgaaataagcttctgtgaaagtctggatttactgaggacctcccctgaggagggaccgttgggaccgcagattctgcagctggtgtggggttcaggtcagtttgtcaggatgctttaaggtgattagtaaatatacctcagcttagacttgggctgctccttctagcaaagcaggctccagtggggcctcatcatacaggatgacaagactggggccctgttcaccttgaacatgcccctgggccaagatggggcttcacccctccccagagtaagagctggggctgacagtcccaccctgtcattcctaatagcccaaacgcagaagcactgagcaagagagccctttcttgccaagccagtgctcttttggtatatggcatacagctccattggaggggacacatcactggctttatctggtggaaatgtacctttcccttaagttcctccttagtgccatcacagcaggtgaatgggtgccctacggggccctccttcccccaccaggaacagatggaacctgccacccaggatcctgatctgccctgcactgagcactcagtggataaacactcctccagcccagacacactcctcctcttgggcaggagcaatccagagttgttatttttcttagaaggagcctcttttccctctattttttaaattgaaatataatagctgcatcagccctgaaaagccaaattcaaccacatggctggagaatcatttgtcatggccccgccttctcttctgatactaatggagcttcatgacccacggtcagcccccaaaccaaagttgtcccaacagaggaggccagtgaggcagagacagagctctcccactctcagaccctcttttgtcttcattttcctctcccacttagcacatgtgtgcttgagggtggctgggaatgtgatatacagcaccctgatcctaacaggtgtgattgttacgtaagacgctgatactgggccttgtattgcttttaaagtttcctctgctcagcatcatttcatgccaaagtgctgctatgggctgctttgtgtgcacaaaattgctttttccacctcggaaatgcagctttccctagggggaggcctacaacaggacgaccattctgagccagtgagtctattgcatggtgttttgagaaagggaattttagtgacaccttatgccatttcaagaggagaaatgcaggctggcagagcaatttccagaaatggaatttgcctgcaaatagtataaacaacactaaatttactgtgccaggaaatcttcctgaactccttgaactcatacacacaggtatttgagtcctgaataaagtgttggaaagcactgcagatgcggtcacctgactgaccacctgggttttctattaccagtgaatttcttttattcaccttcccttgaccaagaaattgggtttcttttccctcagcctgcacttactcttctattaagaccagaaaataaaataattttccgttgagtcac

SEQ ID NO: 748 - DNA, 545 bp, Homo sapiens
tgcctctctatcaaatcagggtttgcaccttgagacataatctaccttaaatagtgcatttttttctcagggaattttagatgaacttgaataaactctcctagcaaatgaaatctcacaataagcattgaggtaccttttgtgagccttaaaaagtcttattttgtgaaggggcaaaaactctaggagtcacaactctcagtcattcatttcacagatttttttgtggagaaatttctgtttatatggatgaaatggaatcaagaggaaaattgtaattgattaattccatctgtctttaggagctctcattatctcggtctctggttcctaatcctattttaaagttgtctaattttaaaccactataatatgtcttcattttaataaatattcatttggaatctaggaaaactctgagctactgcatttaggcaggcactttaataccaaactgtaacatgtctcaactgtatacaactcaaaatacaccagctcatttggctgctcagtctaactctagaatggatgcttttgaattcatt

SEQ ID NO: 749 - DNA, 313 bp, Homo sapiens
aacttggttatgtcagttcctgtgtgtagacagtaaggaaaaaaaggcatgctatgtgttacgtgttttttccagtatgtttatttgccaccaaaaagtaaatgcattttcacccattctgtggttcattgtagtttaaggaaaccaagcatatagatgcattagtgattttgtttatattatgtaaaatataacgatctcttaaaaataccacagtttgtattttttctttaaggagtaaagatttgcctttaaataacttggtattttcctggctttcgtttaatacaatagaaaataaagtattacaccg

SEQ ID NO: 750 - DNA, 2802 bp, Homo sapiens
tgtctttagggctggaaggcagcatccctctgacaggggggcagttgtgaggccacagagtgccttgacacaaagattacatttttcagacccccactcctctgctgctgtccatgactgtccttttgaaccaggaaaagtcacagagtttaaagagaagcaaattaaacatcctgaatcgggaacaaagggttttatctaataaagtgtctcttccattcacgttgctaccttacccacactttcccttctgatttgcgtgaggacgtggcatcctacgttactgtacagtggcataagcacatcgtgtgagcccatgtatgctggggtagagcaagtagccctcccctgtctcatcgataccagcagaacctcctcagtctcagtactcttgtttctatgaaggaaaagtttggctactaacagtagcattgtgatggccagtatatccagtccatggataaagaaaatgcatctgcatctcctacccctcttccttctaagcaaaaggaaataaacatcctgtgccaaaggtattggtcatttagaatgtcggtagccatccatcagtgcttttagttattatgagtgtaggacactgagccatccgtgggtcaggatgcaattatttataaaagtctccaggtgaacatggctgaagatttttctagtatattaataattgactaggaagatgaactttttttcagatctttgggcagctgataatttaaatctggatgggcagcttgcactcaccaatagaccaaaagacatcttttgatattcttataaatggaacttacacagaagaaatagggatatgataaccactaaaattttgttttcaaaatcaaactaattcttacagcttttttattagttagtcttggaactagtgttaagtatctggcagagaacagttaatccctaaggtcttgacaaaacagaagaaaaacaagcctcctcgtcctagtcttttctagcaaagggataaaacttagatggcagcttgtactgtcagaatcccgtgtatccatttgttcttctgttggagagatgagacatttgacccttagctccagttttcttctgatgtttccatcttccagaatccctcaaaaaacattgtttgccaaatcctggtggcaaatacttgcactcagtatttcacacagctgccaacgctatcgagttcctgcactttgtgatttaaatccactctaaaccttccctctaagtgtagagggaagacccttacgtggagtttcctagtgggcttctcaacttttgatcctcagctctgtggttttaagaccacagtgtgacagttccctgccacacacccccttcctcctaccaacccacctttgagattcatatatagcctttaacactatgcaactttgtactttgcgtagcaggggcggggtggggggaaagaaactattatctgacacactggtgctattaattatttcaaatttatatttttgtgtgaatgttttgtgttttgtttatcatgattatagaataaggaatttatgtaaatatacttagtcctatttctagaatgacactctgttcactttgctcaatttttcctcttcactggcacaatgtatctgaatacctccttccctcccttctagaattctttggattgtactccaaagaattgtgccttgtgtttgcagcatctccattctctaaaattaatataattgctttcctccacacccagccactgtaaagaggtaacttgggtcctcttccattgcagtcctgatgatcctaacctgcagcacggtggttttacaatgttccagagcaggaacgccaggttgacaagctatggtaggattaggaaagtttgctgaagaggatctttgacgccacagtgggactagccaggaatgagggagaaatgccctttctggcaattgttggagctggataggtaagttttataagggagtacattttgactgagcacttagggcatcaggaacagtgctacttactgatgggtagactgggagaggtggtgtaacttagttcttgatgatcccacttcctgtttccatctgcttgggatataccagagtttaccacaagtgttttgacgatatactcctgagctttcactctgctgcttctcccaggcctcttctactatggcaggagatgtggcgtgctgttgcaaagttttcacgtcattgtttcctggctagttcatttcattaagtggctacatcctaacatatgcatttggtcaaggttgcagaagaggactgaagattgactgccaagctagtttgggtgaagttcactccagcaagtctcaggccacaatggggtggtttggtttggtttccttttaactttctttttgttatttgcttttctcctccacctgtgtggtatattttttaagcagaattttattttttaaaataaaaggttctttacaagatgataccttaattacactcccgcaacacagccattattttattgtctagctccagttatctgtattttatgtaatgtaattgacaggatggctgctgcagaatgctggttgacacagggattattatactgctatttttccctgaatttttttcctttgaattccaactgtggaccttttatatgtgccttcactttagctgtttgccttaatctctacagccttgctctccggggtggttaataaaatgcaacacttggcatttttatgttttaagaaaaacagtattttatttataataaaatctgaatatttgtaacccttta

SEQ ID NO: 751 - DNA, 1504 bp, Homo sapiens
agctgccataaatatttctcaactgaggttcttgggatacagatctcagggctcgggagccatgtcatgtgagtgggtgggatggggacatttgaacatgtttaatgggtatgctcaggtcaactgacctgaccccattcctgatcccatggccaggtggttgtcttattgcaccatactccttgcttcctgatgctgggcaatgaggcagatagcactgggtgtgagaatgatcaaggatctggaccccaaagaatagactggatggaaagacaaactgcacaggcagatgtttgcctcataatagtcgtaagtggagtcctggaatttggacaagtgctgttgggatatagtcaacttattctttgagtaatgtgactaaaggaaaaaactttgactttgcccaggcatgaaattcttcctaatgtcagaacagagtgcaacccagtcacactgtggccagtaaaatactattgcctcatattgtcctctgcaagcttcttgctgatcagagttcctcctacttacaacccagggtgtgaacatgttctccattttcaagctggaagaagtgagcagtgttggagtgaggacctgtaaggcaggcccattcagagctatggtgcttgctggtgcctgccaccttcaagttctggacctgggcatgacatcctttcttttaatgatgccatggcaacttagagattgcatttttattaaagcatttcctaccagcaaagcaaatgttgggaaagtatttactttttcggtttcaaagtgatagaaaagtgtggcttgggcattgaaagaggtaaaattctctagatttattagtcctaattcaatcctacttttcgaacaccaaaaatgatgcgcatcaatgtattttatcttattttctcaatctcctctctctttcctccacccataataagagaatgttcctactcacacttcagctgggtcacatccatccctccattcatccttccatccatctttccatccattacctccatccatccttccaacatatatttattgagtacctactgtgtgccaggggctggtgggacagtggtgacatagtctctgccctcatagagttgattgtctagtgaggaagacaagcatttttaaaaaataaatttaaacttacaaactttgtttgtcacaagtggtgtttattgcaataaccgcttggtttgcaacctctttgctcaacagaacatatgttgcaagaccctcccatgggggcacttgagttttggcaaggctgacagagctctgggttgtgcacatttctttgcattccagctgtcactctgtgcctttctacaactgattgcaacagactgttgagttatgataacaccagtgggaattgctggaggaaccagaggcacttccaccttggctgggaagactatggtgctgccttgcttctgtatttccttggattttcctgaaagtgtttttaaataaagaacaattgttagatgcc

SEQ ID NO: 752 - DNA, 864 bp, Homo sapiens
acccacaacccacaaccttccagctccatgctccagggctttgctccagaacactcactatacctagccccagcaaaggggagtctcagctttccttaaggatatcagtaaatgtgctttgtttccaggcccagataactttcggcaggttcccttacatttactggaccctgttttaccgttgctaagatgggtcactgaacacctattgcacttgggggtaaaggtctgtgggccaaagaacaggtgtatataagcaacttcacagaacacgagacagcttgggaatcctgctaaagagtctggcctggaccctgagaagccagtggacagttttaagcagaggaataacatcaccactgtatatttcagaaagatcactagggcagccgagtggaggaaagcttgaagagggggttagagagaaggcaggttgagactacttaagatattgttgaaataattgaagagagaaatgacaggagcctgctctaaggcagtagaatggtggctgggaagatgtgaaggaagattttcccagtctgtgaagtcaagaatcacttgccggccgggtgtggtggctcacgcctgtaattctagcactttgggagactgaagcgggtggatcacccgaggtcaggagttgaagaccagcctggccaacatggtgaaaccctgtctctactaaaagtacaaaaattagctggatgtggtggtgggcgcctgtaattccagctactcaggagtctgaggcaggagaatcgcttgaacccaggaggcggaggttacagtgagccaagattgcaccactgctctccagcctggggaacagagcaagactgtctcaaaaaaaaaaaaaaaagg

SEQ ID NO: 753 - DNA, 2259 bp, Homo sapiens
ggccaaagtggcaacctgggaatgaaggctccataaaccatggcatgttgggtttgcaggactggcccacacagtcccctgcaggtggcagccctcttttctgtttctcgctgtcaagagggtgtaagtattccaccagcccgctgagtgtgcacgaaatgttcgcagtgcaacaaaaagaaaaatccatcaggaactctccgtccccccggggccctccggagggagagagagaggaactgctgtttatctcactcagttacttggtatcaccgcctctcaccttctccatcgtgcatgtccccagccacatgggaagtgaaagctgagaagggaaggcagatgggagaagccaatgggaacttctcagtccttttttcctctttggggaataaaataggaatccattaatgattgctttgctgactgagaatgtagttgaaattattcttaaacatcttttattattattactctcagtagtaaaatatcacactgaattcttccatacacaggtgtgcttctagtcagtgtgtagcaaggaaagccccgttcactgctcctgtgagaggttggtggtgacaggatggggaaccgacctcttcagccagtggaaatgttccataagggagagttcaaggcctgtcagaaggctctggtaggccttcctctggccaggagactccagcagggaatgcccttcactctgtaggtgctcgagccccaatcgaggatacagtgtgggtggtggtgctgggctggactagcaggtagactgctgtaggatttcaaattacgtttttgattcctgtacattttacagtcgcacagcaagcagtctcacagaaggcaggctagtccattcacagcctgacacgttctaataggtagaagctttcagtgtggttattttttctttggttggtttttgtgcccccattctacttcccaccctcctgccccatctccatcccttcttttacccaatgctgtatgctagtaattgtttttattcctaatgtgtgcaacatcacatctccccaagaagcaacagcatggggtccagcagttggggcccaaaagacagtctgaagaggaaggaagcagcagtatctgcgtagcccacagagggcccaggcccctgcccagctgcagtctcccagcctccactttcagagtgaaattcaaggcagcacggacatgtgcccatcaggcacagaagaaaacacgacgtcgtccattttggaagagacgaaagaaaggaaaataaactctttgtatgatatttattaggaggaaagaggactgaaaatgttcttgtgtagaaacagaaggacagcatttctgttagtcatttcctggaaaagtaatattttaaggggaaattatggaaacaatctaattgttcaattgctgtgctagtggtagggtttattttctgggaggtctctcctttgtgtgtctgtatgtttgtgtacacacacgtgcccatctgctgtcccagaggggaggggttgtgtgtgcgagtgtatggagttagtgtggaacttaagagctggaagacagctgtagagcaaagcacatccaggagccccagttgtcactgcagtctgggcaaccccagcaatgaaaaggggtgagataacgctcattgctcttcagagagagtggttggagccccccccgccccgtatgcttacattattgctcttttagtttgacatggtgtttgggttttgtttttttgaaaggtctgaaaaggtgaagccccctacccaatggcaatatgaaaccttttgtgcttctcttcagccccttccctgtgtccacctttctctcctcttcccaagcctttttcctactacctttacccagtttgtgtgtttgagctctgcattcaggcagctgcaacattccagtgtttgaactgtcactgattcttgcgccctagacaagctaaccaggtttaccatctcactcccagtaatacccagctcctatctaaagccccattctgcatgagaatttggtgtttggaatgttttctgactcttggggcgggattcctcgccttatcatcctcactgtggagtaatgagggggaggagaatctttatcagaaactggttttgtgtagtaaactttcttttgtggttttttgttttgttttctgggttttgttttttgtttttgtctgtgcaagacctgcagctgctgaaaatcagctttgcctttaattaaaccatgttctctccaacc

SEQ ID NO: 754 - DNA, 2239 bp, Homo sapiens
agggagggaccagtggccccttgtttgccaaaggcagagtggggctgagaaacaggctgcggtgattgcaattaccatccggtgttcgaggatcattggtgaagtcagcagatatttattgagttcctgtggtgtgcaaagcattatgataggcaccgtggggaaactggaaatgaatttgacatgaaaaggatgaacgattcactgattctctttgactcatttgagactaaaatgcagaattaccaacatttaaaacatatatatgcacatgtatttggtatgcatgtgtatctatataaaaatatataagagggactttatgggatagtatggactatggaaaaacaaatttgcacaatggcctgggaagttgaggtcactttttacagggaaatagaagaaactgagaacctagtctcgtatattctgagtaaatggaatcagtcctgggaatagagagtgtcctttgtgccagtattacaagaagcccaaactttatttttataaagggagaggatgactttctcaatcaagtgccaccagataaaaacaactgcagaggctggaactgccacaggctgtatgaaaggccactttggaaagggtttggatgagctggtggccttcaacctctgcctgcatctgccactttctgctaccctagggaggccaggaggagcttcggaggaccatcgccccactggtctagccatcatgacacctctggaggtgtcaagctcctgaaacaagctcatttcagtttctggcaaccccgtgtatttccgttttccccctaaagaacatatcataatcattgcacaaataaccatgttctttggtaatgaagccagaaaagaaagcgcaaaagaatggtgactcatttggactcttatctgtcttggaatgtcactgcttcattgccttctctgattgccttttgcatgtaaaactatgtgtctggagtcttttgccatctggatcttagtacctctttattatgtgcaatttattcctcaggtgtggaaatttctactgcaattgactacgtttgattattttgagcttgtgaaagatttctgaacagtgattgtcccgttaatagcccctcagaagatgttccctgctgataacagcatcctattttacttacttttatagcattactgtgcctagtcgtggggaaagagatggggctgtatagattatctgaatcatttgtctaagaggtacattcttccagatggaatcaataacttttttttttccaggttcccgtgcttgctatcacagtatcattgttaagtgacacttttgtctctcataacaccatcacactcttccttccaagtctgagctgtgctggggtttgaactaaaagccatatgtggaatattgacatgtgtaagaagcactttcagaatgttgtcctttttaagaaatgattctcaaaataccagtttttattccaaaaatttagagaacaaacccggaatatgaagtgcagattgtaacatggagctatttttttttcttaatcccataatacagctcctaaaagttgtgtgggatttgcgttgcataaatagccatgtgaattccacaagaagcaccagggaaagtttagagatttgcggcaatggaccgaagaacgggccaggaagtcctccaatttcctttggtctttccaggagattggactacacattgtaaagactgactgggtttcaactagtcaaaaagcactttcttctgttttcaatccctgttcgatttgtgcttctgtgcttgtaggagagatggccagggtggcagccctcatgcaggttgaagtatatgtagcctcagcctgatattcttggtgcgaaggtaaaaaaaaaaaaataaataaaaccattggcctggttgagggcgtgaccaccaagacatatatgttgtgcccgtgttcatcctgtgtatttatactgtatatgtagagtctagatttatatactgcaatgtaaaatatatatatatttaccttttttaaagacaatggaaattccaagtagctaaaacttagcttcatttatttaatgccactttaaatgtcttaaatttgtttcctggtggacagccgggtaatgcttttagctgctcgcatgcttgtctttctgcatctccatcatctgtttaccttttggttaaactaataaactagtttgggacttggctggcatgtgctgccagacccaaaggg

SEQ ID NO: 755 - DNA, 1360 bp, Homo sapiens
catccatgtttcctgatgcttgttttattcatacaagattggatttgagacccatcagactgcttcatcttttatctcagaaatagggttgacgtacatagtgagggttgacttccccattccataaggttttcattctgaagagtaaaacttccccaggtagaagactttctccttcttaaaaaatatagggtgatttctttaaaactttgttatctagagacagtttaattacagttatatacaggtttatgcctaggatgtattcagatgggtgggacctgtgtgctgcttttgtcatcccacactcaaagttgtctctttgtttcttgctgccactgccagctcattgttgagactgccatttctttctcttactcagctctccccagtgccttttggccactgcagctaccgtagaatggcattttatatgtaccttgtcacccacttctgtttactttttcctctccagtaaaaagtaaaagatttctttcaattggtcttcccattgcagttactgttatttctcttttttggttaactttaaatcaaaactcaaaatatgttcatccagagtgtgtcttaagtaacttacgtgtcttaagtaacagggaccagagacatgttacctacaagagttctgggctatccttttcattcttatcacatatcatagcttgaatattacaacagtgtgggagagaatcaaccgtaaaaatgtcttcattaattagacccagttattccacttttgttaatgtctctcaaattgtacaaagtataaaaaattatatgcacaaagatgttccaagtgacattacttttagtagcccaaattataaaccactttaaagtttggggtaaagattggcaaactttttctataaagggccagaaagtaactattttaggtttttaaacctactgtctctgtcataacttgtcaacactgctgtatgaagcacaaaagcagccatagacaatacataaacaatacgggcgtggctttgttccagtaaaactttgtttacaaatgtggtgccatagtttgtcatccctgggtctaggaaatagtcaataaacagatatatacaaatgatacataatgtacttattaaaaattagtaatgaatattattaaaaacatgaaaatattaccttaagtaaaaattgcaagacggaaaagtgtataagtgggtgtaatcatggctgaaataacagaccaagcatatgataaaaagataacaaagtaaatcaaattactaactggttatagtgggataggaggcagaaaatggatgactttgtcttttctcaatgtttttatttgtattttataataaaaatgttttaaaat

SEQ ID NO: 756 - DNA, 9465 bp, Homo sapiens
caccaattttaccactcaaaccaggagctactactgtgtaaataggttacaccccagttgaaatctttgcaaaggtcggttctattcagcgaacagcactatagcaaaagaagatcgttccatattgtacgccccattaaattacagtgtttcttaatgaacttgcaaaggaatattgctaaaaacaaacaaaaaaaactgttatcgaactttctttgttgctgctagttaaaacttgttgcaacttttcacttctcttgtgtccaggtatgcagcaaaattctgcaatttcaccttaaagatactgttggttttacagatgctctccaacctattttctataagatgaggtagtggtgaactcagataacaaacttctcttctaaactggttctgcttctaagacaagcatctcctgccctctctccttcctccccatctctcgcacgcagtctagagatggactgagccttgcttctcactggcagtgttgagctttggagatgggatggttgctatgccaagccttgtttctctgctcagaagaagtagagaagctattatcaattaaaagcatgctgtgatgtgactcctggaagtgacgtaggagtgagtggcaggttgtttgatttaataggtatcttaatcaagaattaagcttgcaacattggctttgctcagatgcagatggaagtgtgatcacaatcattttgaatccctcttcctcacttttttttctaagaaaataaacattttactgtttttatggatccttgtcttctcccattcatccagctcagtgttttaagatgatcctgggtgcagaagttgagccctcctttgcattgacactgataattagcctatagggctccctacccttccattaagaatctaccaagcattagcaaggctgaaagtggtctaagaggtgaggggacatcctatgactttttaggaaggcctgaaaccaccttgttacctttcattttgttagcaaataaaccatcctattttgtaactctcccccttcaaaatgctacatgagccttgccacttcctttttctcttacttccagcacactagacatagcaaaagtgtttgcctactcaaaaacataatacttttatgctgatgatggtatttggagatgtgaaagccaaaagcccctggcagtggtggggaatgttgactgagtgttcagcagagtttatttttccatactatatgaagagaatgatctcttctcaaagacagaagtgatatttttaacaaatattgtcacaagtaaatagcaatcaaaaggagaaaataacttttgtatttttttaatgtgtttgatagctttgacgagggttctctttgttactttcaggggagggcatcctattaaatgccacgccagcagtccgggtctgggtttgtcccacaaaatcacaggagcactgtatgttcctctcttttggagttgtgactttgaagggcctcaatattagccacactgccgcctgcagaaggtggagagttaagatgttctatgtcaatttgctcttgccgaaaagatgagcctcgattttaaaatctatccacatccaactgatggcaccattgatgtgcaaataatgagattccctatctccttttagacctgggacggcaaaagggaagggaaggaaacttagcagagtgctattgactatagattcacatattagcaacaaaatcccgtaattcttttggccaacagcagctattttggggagcagctgtggctgttacataaatagagatgcagccaaaattttaggccttttatcctgcttctagcagaaaaatgcagggagagtcaagtagtctagggtttcaggttgcctcccctcatatggtttttggccaagtgactaaaacagttttccacaactgtaaacaaactgctaagccccacctcaaacttgttcactggggactttgcttaccgttctgtgggtgaccttttccgggatttcttgttcttatcaagcaagaattaagcacatgctaaacgtcttccatttgacttctctactcggtgtctcagacagtgtcttcccagaaaaccaccaccctctacccaaagatgaaacatgctcatgtcatttttctcatggtcacatttaacagttttgacatgttatacttgcgcatagatccaagcgtttcttgggaacctgacttttgagtgtttaataaagccggaagtggtgttgccctgaaccagcagattttcacctgggttctggctccggtgtttaacactggatacatctttgatgtgcgaaagtgagttcatcttcagacacatttggtacatccagaaatagatccaagaaatggggtggttgagtgggtccgcacgaaatgcttgattatgtcagcaacacccaacactgtctgttttccatttgttggttttaatcataaaattgtcaagtgattcgtgtttgtactttatttttttgtgccttctgaaaggatctaaaacaaaaatattttgcctttttttccccacgtgtatctgaacattaagcagattggctcagacacaatgaaaaggataatccaatgtacgtgctggtgcactctgctagttgttatctctgtagggctcaggaagctggaaggaggaagggagggtaagtggcctggtgagtggaggtagaaaaatgatgagaaatgaactgagagcattaagcagagagggttgataggctggccgtgtccggggtgaaattggaaatccagctgcctagtggccagtgggtggggcaagactgtcaacgagatttacagctggcttacacatgccttatgtcctctgagttgtagagttgtaaaagttcagcagtgtgtgcacagctttcttttggttggcagagattcaggatcatggagtactgctctcataattgaagacgtgtttgttattggcagagaaccttaaaaaaggcctttacctcagcgatgcttcctagccccaggcttgcagagaacacagagtggtgttgtggtctatttagggacaaagaaggtataaagtccagagatgagaaaactgggtcagccctcagaaactgcagcagccacgcacacagaagcctgctggaagacaggtctctctccgtccacagtgcccatcatctgagcctgggctgggatgactcaacttagcaaagacggacccaggaggagtgctggttcttcagtctttgtactggccccatcctctcctcactgtaatgtgaggaagcacctctgtgtcagggctcacctgggcatccaaagcggccacgcccacaatccgacagcccccaggagcaggtccagggatgatgcagcccccttcttggtcccatgtgatgtcatcctgctttgttatcttcttataactttatcctgctataactttatcctcttcccagcctcatccctgtttttctgttagggcaagactcttccataagcctgctaaaaaacagagatgatacctcttacaaactttacctcatagcctgtgaagcaggttggcatgtggattacaagtcctgctttgacactgggcaagaatttaagattgttctatctctactagtcatagaaaagaaacattgttaaacatgttgagttttaaaggaagaaatattttcaaattcttaatccaagaaaatactgagttggaatcttagacttcgggactctgacacgttctttatgaaaggcaaaataattggtatctaaagttctctccttcctgcctcccctaaagaaaaaggatattagattgcacactataattttacataagatctgccttccacacttccctgctggaaggcattctcagagctttatgtcttcgtacctctcagagattggactttttcttgtttaaaaccccaaccaaaaaaaataataaggcatgattggtggggagggaatgtgtatttaggggcataataaaaaggtggctcgaagcaggaactttggcctcatggtgtcatgggtggatgcctggactccagtgtgcctgtgaggggctgggttaggcagtcggctgtcacactcacatgtgcctgcaataaaccttttggaatttcatgaacgaggtctatgaattgccttttgccaatgaatggatgtatttttccaaggggggaatagtatccttgactttggcagtcacctttttgtatgtctctagaaaggggtcaaaaaactatggtaaagatgaggcttatgagtgaatacctctgggacaaaccttaggactcacaagctatgccatgtttttcaggagactcttgtaccttatctggaatctaatcttgggagaagaggaaaaaggagctaatatttgtcatttatactcactctgtgccagatactgtgctaggcattttataattgttttgtgtcatcctcatgataatcctgtgaagtagatctattacccccgtgttctaaataatagatcttaagtgtggaatgcatctatccaacataaatgcccatgttgaaagaaggaaagatgtcattcaagtatttttcaaattctttttattatgactatgcccttcgcaacactgtgaaaacaacccctgggggcatctgccttccagaatctctctctggcttctcaccagcttggtttcctcatggggagtgttttatttggcctcccctatctgagctgcacacacaccaggggaggccactggctaacagtaggacttcagtgccctgaggaaaaggctttgggaatttaggcacacgtttctctccttggaatccttctagcatctggaaaaggaacctggtatttctgcagttagataccagatgcaaccagaacaggctttcgagtgctgtgatttctttcctgggttcccaagtcttgttgtttcatcacaaactgtatctttttaaggttaaaagtcttgaccttcatgggggtctgggacaatccgatctccaagcatggaggaaaggcaatgcctggaccactgacttgcattgaaatcctttcttgtgggctagggtttgatgtctctttttcatctttggactggggatctgcatcttccaggtccatttaagcactgaaactagatgcaaatctctttcgagaccttacatgttttagatagtcatgtaatgacttggatagacatttaaataacttgttccaaggtcggaagagcccaagaactcctcagagttcctcttcttgcttcttgaatcacatcctctaaagatgactcatgtctccatagcaactgttaaaggtgctgcctagacgggacccgctcccacctttacttactttgctcgaaggaaccaaaacaatgtccttgtgtaaaggggctgtcatatccagttttcctttgaaatctggcccccaagatcctgcttctttctaacctggcagctgtcatgtcccttcaagatgatgtgggaaatggcccttacaacttgggaaccacagaaattgctgtatttcgggaagattcacctctaaactgaaggcttcattctgatagtgtctgccctctctaccctgatttcgcccttctttgcttccatttttagcccaaggctttgaatttgattgagtaagacttagaggcagtataaagaacaccataaacttaggcagaggtcccttagggtctctagagttgaaaataattctacagccttagggggacctcttggcattgactctaaagggagagaatagcccctgtgtcctggcatttcagtctagaccttcaaggactgttctctcttgacaggcaagcaagcaaagaaagttttgcaatagatttcaagccagtttttccattcaaaccaagatgcaaattcataaaattactcttttcctggaatagatccaggcagctgccttattagaactttagattcggatctattttcttaacacacatacacatacacgcgcatacatacatatacagagagatacgtggagaaaggaaatttactctatcattgcaatacttcaagaaagagctgtattttgcctttctgtaatctccaagatagtgtctaggaaagtaatagtataactatagggataccgaaacaggaaaaaccagccatcactcttgagaaagtttgagttcgactcacatgggagaatcgaggtctgctactcgtcttgctttgtgccccatctgtgcctggatgccctactacatctgcttgactcgtctgggctgctagccggggtgttgtggctgacatcctttcctggccttacacacataatagacacatccctaacggcgtgtgcctggtccagccacatacagccaccacatgtgtcacacactgtccccctcatccatgtggacttgactggcatttcagcagctccactgggatgctctaaccccagtgtgtggagttggggtcccttcatctaggttgacccaggtatagcatttttagcattgcctttccagtcttgatgattcattcattgaactcatttatttctggagcccctggtacactccaggcactgcgctaattgccagcaaagcacaactgaactaaatccaccttcaaggaacctagccataacgagggaggcagcatggaagtaccctacaggggaaagtcctgagtgctgtgggagcatctcaccgtggcagccagcccagttttggcaatcaggggcttcctgaaagaggtgacatcaaagcccggatgtgtcagaggactgagggagagtgttactaaaggactttcaggctgagaggatagcacaggactcagcccaaaggagggccagtgtggactgtccagggccagcctgcagtacagaggctggagcttggacttgtagagggagagagaagagcaagggacgtggacggggcagtgagccaggctagccacagagggttcccggggctttgctggggattcagggagcataaataagagctttaggtggtgctgtgtcctctgcagcccactgctgaggtcctccagacaggtaaggtgtggtcacaatcagggccggggtttccctgctcactgcggcagtgcaggggtgcttgctgagatgattcatcccagggtgtcctctgtcccttacccagccccaactcctcttcctctgccaaaagctatttgaattcaaggactttaacctgggccggatctggtttggagacaaaggggacagctctgggtcagcatgaccttctttagagccactaaggcgaaaaataccgtttgggaccaggctggcctagacccagggatgagaatgcaccctaaaataaatatacgggaagcagcagagggcttccctgtctagtgtgtgatcctaactaaaggcagctctcttggacagccttcccctggattaggtcacatacacctggtggccaagcctctgctgggtcccaaatacacacccgagtcctgccaaagaaaggagatttttaaaaagcacagacaaattgtatgcaagtggaaaatacccataggcctagacagctgtggagggaagacctcgtgggtacctggaggctgccagagctgggagctctgcaggtatgagtcagggaaggctcagagacaagcagaatctctctatggagacaacttgcagtgccttttaggttttccaaataacctcggagttcagagcattgggtttttttctcccctccccacccccagaaaaataattagaaaaatgtttaggagaaaggaaaagaattagatgcatcagaataccagctataagccaacactgtttccagaaactcaagaaaaagctcaaacagaagacagttcccctgagaggctggaggcgttggtgctgaaggcaattttcctagctaaggggcactgggccttgctgcaccttggggctgaccttttttgcaaaacacccacccctgccctcctggcatactcaacagcaacgccagctttctggacccttggaaagatgttagctcaaacacccactttttccagatcttcctcttgctcttcactgaggaatttgtaattctgaggctagcgatgcccactcggatattccgcaggcccaggtgtttagattagaatttgtccagcggtaatcctgatgctggaaaccaacaaacatttggcctcatattcacccatttaaaaactagagcccctggcaggtccccttagggccatgtgttcatggaatataagccaagtttgccttaggcttgttcatggaatataagccaagtttacctctccccattttctgccctggcccacttcccactcacctccacctcattgccaggaagggatcaaaatgcctccatgccagttgttaatggctacatatttgcccttcccaagggtatttgcattttatttaggaacatggccttatattcaaggaaaatctagcatcaagattacgaggcatcacctctcaatcaggtctgggaggtatcttggggcattgctcttctgaacacctgcagaggcttcctcaggtgagtgtgggagcccggaagggtggcctccctaaccactctgcctgcacatgaattctccaaagcagtgggcccccatctgtttcaattacacatgcctgtcagcaaaaacttcgtgagatgcactctctctgtgtgtttattaatttatttaaagcatatatccctttacttttgtactactatattaggcacattataaaaagtatacagcatagaaactttaaatgaataagacacaaaatattataaacagaggttctggcattttctctctgaactcctgagggggaccttgggcacctcctggtatgtgcacaccccactttgaacacccttgctttagtgcaaatcagcacgcctaaatagcatcccaaaccactgtgcgacatttggcctgcagaataagaaagtcctaaggcagaatccccaggaacttcaaatctgggagatgaggaaagaaaactcactcacaaacaacataaatgtaaataattcaaaaccctaaaggagagctgtccctagacagtagtggctacaggtgctaagcaaaagtcaggtacactggacagagccatgcgattgattgttcatcttccctctctgggtctccagaaaaggacactggcaatatccccagctctctcctgattggaattctttgaaccctcgaagtgctccagcagtactaccccccacgtagcagtgggcccatgtcgcttgaatattatttttgatttgaccaccaagatgtaatgatgattctattccattttgaaaagggtctgagaaagtgtacaggtctaattatatatacatatttatacatgtgtatttttgtttattgttacattttgacattggactttctattaaataatttttaagagttgg

SEQ ID NO: 757 - DNA, 2307 bp, Homo sapiens
gcctttaaaaaccaattctgagactgaacttttttatagcctatttctttaatattaaagatgtactggcattacttttatggacagatcttggatatgttgttcaattttctttctgagccagactagtttacgctattcaaatcttttcccctttatttaagatttcctttttggaagggactgcaattattcagtatttttttctttcctttaaaaaaatatatctgaagtttcttgtgtttttttttttccccacaaagtgtgtttccacttggagcaccattttgacccaggaatttttcatagtttctgtattcttataagattcagttggctgtccttttcctgctcccctcaaaagatttttagtcatacagaatgttaaatattatgtattctgactttttttttcccccggagtcttgtatatttatagttttctatataaactgtagtatcttcatgaagacccaaggctcaaatttactgtccttaaaaacaattctcataggattattcttttcatggtattttcttccataatatctcattttaaaaagaagttctttatgaacttagtgtccattgtcatgcaatgtttttttttttccattctttttccctgtaattttggaatttctggtcctgggaagaatcaaacaaaatcttaagttctatgagaacttggttcattgacatattctgctgaagaaagaaaaattaaattggtagtaaaatatagtcttcaagtatacgtttgagagtgcttttttttgtattagttctgctgtcacttcatttcctgtattatatgtgatgtttttccccattaaaataccagagataatggagatattttgcactttagccttgatgaaaagtacaagatatgttcaaagcttccctaatttttttcttatttgtagccacataagtttcaagaataacatggcacacagaacaatggaaaaaagtttgtttccattggaaaattatatcattttgggttgccacatcagtttataaatttggcgctcttttaattacactctgtagaaggttaatagagcttgagccctgctttaatatgtagtgaaagataattctgtagaaaaacgtcagccagtagggtaaagtcattctactgttcttaatttttatattgaggaacaatattgggtgtttgggagccagaaagctttgttgacagatcagaaataagattgacttgggtgttatatttcatctctctccagactctaggtatatttccaactttatatatcacagtatttaaaaagacatgtttgcattgagaaattaaccctaaagggttttcaatagggtgtagacctccagtacctttgtaactaaagtctgtctagtcattgtaaatatttatctgtcagttttgacagattggggccagcttgatgttttaaatcttcagcccggtatgaaaacttaaaggtatatattcaattttttaccattttatggaaaatatttaaaatctgtttttacagggttttttttttttttttttttttgtaatctgtgccatgaaatttgaaaaccaccaaaaatcaagggaacttttatatattcaattccttttctggtgtaatgttaaagttgtatagattattaatgcatgcccactgaatataaccctggttttgtgataaaactgcttagattttgttgatgacattagattagtagttgcattaaataactaaattcccattgtgattaattgaaattttgtctttaagcagagagttatttgtgactataagctttgtgcttagagaatgtatgtgtttttatctgtcagtatgggaggatataaactgcatcattagtgaaattattggttgtgtaatcctttgtgaaatataattctaggtatttgatagggtattgagtgtattttgtgtgtgtgtggatgtgtgttttggggtacggggagaggcgatgctattggccatcactaccaaccagggtttcaaaaagtattacctaagtaatttcttttatcactatctcaactgaggaagaaaaggctcaccacaagtggtgtgaaggctttgggtacttagttctaaatttttttatggtaacatatacatagccacatttacagttttaaccattttaaggcatgtaattcagtggggttaggtacattcacaatgttgtgtaatgatcaccgctgtctacttgtaaaactttttcatcaccccaaacagaaactctgtgtgcaattaaagtaatgcatttctcttcttcttaacccct

SEQ ID NO: 758 - DNA, 885 bp, Homo sapiens
gtactgatttgtaactttaaaggaattgcatttgtccttaagaataacagagtagttttcaatctggtcactcttttgggccaaacccaagagaattttaagaaatgtttcataggtataaaaaggtgatcgcctattactgacagtctcattgtagctctaaaaagcctaatgtatccactgtggaataaactccatagactcaactcttctggagttcacaatgcctccctacctctattcttgatagtgagccagtatctctaaggaaaggagagccgtatttttagtcatcctagggcaggagccactgtggcatctgaggaagacccagggtacagtattagcatttctttcaaccctaagtatgggcatgtgaccagagacactgccaaaccctaagaaatcattagggcatgatcatgctcaccatatttcacaaatgaaatcttaatgtgggctgttttttatgatcaaactgtcatccatgttgacctgatgaaaataacaccctccttcacctccctcagggtaatgaaagtagaaatttgactgaagctcctacttccttatacagcctttccttctgtgggcttgtcacttttcagtacatttctagtggggaagagcagggcgacccctctgctgggtttctccttaaatgtgaagcaaaataaatttatataatggaatttggtggcagtgactgatgtttgtctctagctaaaaccaactgtttagttgactttttagttataggataagttggaagtccttgtttactggaatatattatgcttttgttaacacattagattaaatagaatttggtattctattataaatgtttattttttaaagcaataaataacttatttttggtaa

SEQ ID NO: 759 - DNA, 1075 bp, Homo sapiens
ggaactctccaaagcctattccacatatttaaaccgcattaatcatggcaatcaagcccccttccagattactgtctcttgaacagttgcaatcttggcagcttgaaaatggtgctacactctgttttgtgtgccttccttggtacttctgaggtattttcatgatcccaccatggtcatatcttgaagtatggtctagaaaagtcccttattattttatttattacactggagcagttacttcccaaagattattctgaacatctaacaggacatatcagtgatggtttacagtagtgtagtacctaagatcattttcctgaaagccaaaccaaacaacgaaaaacaagaacaactaattcagaatcaaatagagtttttgagcatttgactatttttagaatcataaaattagttactaagtattttgatcaaagcttataaaataacttacggagatttttgtaagtattgatacattataataggacttgcctattttcatttttaagaagaaaaacaccactcattttataaaatatagtacagctactataaggcttgtttgatcccaaatggtgcttatcttgattgaacattcagaacaaggatattattttcagtgattttgtgagatcagctgaaccacttatgataataataataaaaaagactgctttgccctcacgtcagttgtacatggcatggaactttaaaaattttaatataaactttcatccagttagcttcataacttttacgttccagaattttgtttattttcctgtcaatgaaagcaatttttaaagataccagtgggacagatttggttttttaaaaatctcatgtgttcaaattaacataaatattacacgtcaatacactgtacatggtggtaatagactctaagcaattgccaagatgtattctatttttatgaagtgtatatatattaccttagtgtgcattttctatataatatcttgatggactcttttataaaattattttataaaaaacaatgttacactaaaatcagcctaaataaattttcacaactttttttcataacctt

SEQ ID NO: 760 - DNA, 776 bp, Homo sapiens
actgatgagcaaaggaggagtcaactaatgaagaaatgaataataaattttgacactgaaaaacattttattaataaagaatattgacatgagtataccagtttatatataaaaatgtttttaaacttgacaatcattacactaaaacagatttgataatcttattcacagttgttattgtttacagaccatttaattaatatttcctctgtttattcctcctctccctcccattgcatggctcacacctgtaaaagaaaaaagaatcaaattgaatatatcttttaagaattcaaaactagtgtattcacttaccctagttcattataaaaaatatctaggcattgtggatataaaactgttgggtattctacaacttcaatggaaattattacaagcagattaatccctctttttgtgacacaagtacaatctaaaagttatattggaaaacatggaaatattaaaattttacacttttactagctaaaacataatcacaaagctttatcgtgttgtataaaaaaattaacaatataatggcaataggtagagatacaacaaatgaatataacactataacacttcatattttccaaatcttaatttggatttaaggaagaaatcaataaatataaaatataagcacatatttattatatatctaaggtatacaaatctgtctacatgaagtttacagattggtaaatatcacctgctcaacatgtaattatttaataaaactttggaacattaaaaaaataaattggaggctt

SEQ ID NO: 761 - DNA, 2295 bp, Homo sapiens
ggtgaggcacaaagagtttcttgatcatccagagaacattgacagacaattatgaataataaagatgttaacaatccatctgtatttaaaacactagcagccagatctgctgccatgatgcctatttggtgtgtttctgattaaaatgaaatcacaagctgccttgtttagcctgctttacattgtaggtggcccgcatttccagaaataacgttatgcatctagatggaagctgcatgtaacaaatcattattatctatttttaaaagcttcaaaatgatgggatatgatcatagattttagtcttactaatctgaatcacatattaatcaggacattaaaaactttaacagaggcatgatggctcacacgtataatcctaatgctttgagaggctgaggtaggagcatcacctggggctgggagggagttggagaccagcctggatgacataatgagattctgtctctactggaaaaaaaaaaaattagctggacatggtggcaatcagctctagtcccaactacttggaggctgaagcaggaagatcacgtgagcccaggagtttgaggctgcagcgagctatgatcacatcactgtactccagcctgggtgacaaaatgagacattgtctctaaaatacataagtaaatttaaaaaaaaaagaataataatttgaacagtgaatgttgatgtaacatcttaataatagagcaccagaaaaatttctaccaaatgagacaacaactttaggataagttcatcctctaggagctttctaatgtgcactcagttcctgtatactgtgtgttttgttctgatcaaggggtagggaacctttccagagaagtcccattagtaagaaatgacataaaatacgtgctttctcaggttactgtataactgttataatatatttaatatataaaattaagacttttgcttccagcaagtatgttagactagatattataaaacaactagatcctgaataaaatctgcttttaataggttcactggaagtaggagaattttcaagaaccatacttcgacatttcctctgccacaaaaaatgaacgcattttaagttaggagtcatgaatactgtattgaccatacaagtggattatggttgtctggatggcagataccaatagcaacattgtcatatgcagtttgcctcaaatcagaaacaagaagacatcggaatctgagatgctgccctagagaggacagttaaagaaggttcagtggtcctcagtttgcagtgctctagctcctggcagaagcaagagggaaacattcctaatttagttccaagattcctacagattattatcaagtagtagtattttatgactagagatcacaggcacaagttgaaacaaactaacatgacaagaaagctatagaaaaaataaacattgaactcagttcttcaaggtttcatcaccaacataaggaatgaagttggaaccacaggcagatctgaaaaagaaccaaatagagctcctaaaaatgagaaatatttattgaaataagaaaaaagccctcagacatgttgaatattttattagactcagctgaagagacaagtgaactaaactataagctggatctaaagaaattacccagtgagcagtgaggagaaacaaggagctagaaaacattggaaagttaagagagttcgagggaagaattataaagactaggagtcctagaaagagaaaatttagagaataaaggagaggcagtacttgaaagataacacaattttacaaatttgttggaaaaacatgaattcataaattcaggaagcacaatatataccaaacatatatttaaataaaatccaggcctagactcaaggtattgtaaatgacaagataccaaatacaagattttaaaagcaaccatggggagaaaaagatcagtgaaagcaagacagtcaaatacttagtaggcttcctaacagcaacaatgtacccaaaagagggtagaattctgagaaaaactattagcttagaatttgcaacaagcgaaactgaaacaaacagatgctcagatgaaaaacagatgttatcctcagcacaaattcagtaaagagactacaaaaggatgatcttcaagaagggaaatgattctaaaaggattatctgaaattgaaaaactagtaagcaaataaatgataaacataagtaaatttaaactgttgtttgtataaaacaattataatgaagtgtttataagaaattgtaaacaaatgtaaaactaaataaacattgttatgcaaca

SEQ ID NO: 762 - DNA, 274 bp, Homo sapiens
aatttttgctgatgttcaattagtaaaattaatggcccctaacagcagttgtactgtttgtatgttaaacttgatacatttagaagttaatgttaaagcctaatcctaaatttttaaaaggtgaaaaagtttttactggcaattgggtggccttgggacctgtgtgaagagcatagactgtagtttggtggaaagagcaaagactttgaagttctcggattctgtgtgtattctgctcctagcagagtgacctcaggcaaatgactttataggc

SEQ ID NO: 763 - DNA, 465 bp, Homo sapiens
ttcatgtactggaaatggcagcagtttctgatgctgaggcagtttgcaatcccatgacaactggatttaaaagtacagtacagatagtcgtactgatcatgagagactggctgatactcaaagttgcagttacttagctgcatgagaataatactattataagttaggttgacaaatgatgttgattatgtaaggatatacttagctacattttcagtcagtatgaacttcctgatacaaatgtagggatatatactgtatttttaaacatttctcaccaactttcttatgtgtgttctttttaaaaattttttttcttttaaaatatttaacagttcaatctcaataagacctcgcattatgtatgaatgttattcactgactagatttattcataccatgagacaacactatttttatttatatatgcatatatatacatacatgaaataaatacatcaatat

SEQ ID NO: 764 - DNA, 1259 bp, Homo sapiens
agaaaattgattttgctcatttttatgacaaacttatacatctgcttctaacatatcgcatgtttatgttaagatttggtcccatcctttaaactgaaatatgtcatgtgaaattattttaaaaatgtaaaaacaaaactttctgctaacaaaatacatacagtatctgccagtatattctgtaaaaccttctatttgatgtcattccatttataatcagaaaaaaaacttatttcttaatcaaaaggcagtacaaaaaaagtaataatgttttataagattgtagagttaagtaaaagttaagcttttgcaaagttgtcaaaagttcaaacaaaagtctagttgggattttttaccaaagcagcataatatgtgttatataaacataataatactcagatatccaaatgttcagatagcatttttcataatgaatgttctcttttttttggtaatagtgtagaagtgatctggttcttacaatgggagatgaagaacatttattattgggttactactaaccctgtcccaagaatagtaatatcacctctagttataagccagcaacaggaacttttgtgaagacacattcatctctacagaacttcagattaaatataatctagattaatgactgagaataagatccacatttgaactcattcctaagtgaacatggacgtacccagttatacaaagtacttctgttggtcacagaaacatgaccagattttgcatatctccaggtagggaactaagtagactaccttatcaccggctaagaaaacttgctactaaactattaggccatcaatggcttgaataaaaaccagagaaggtttttcccaggacgtctcatgtttggccctttagaattggggtagaaatcagaaatgagatgaggggaagaagcaaggagtctaaggccctagcgatttgggcatctgccacattggttcatattcagaaagtgttatctcattgattatattcttgttaagcaaatctccttaagtaattattattcaaataagattatactcatacatctatatgtcactgttttaaagagatatttaatttttaatgtgtgttacatggtctgtaaatatttgtatttaaaaatgccatgcattaggctttggaaatttaatgttagttgaaatgtaaaatgtgaaaactttagatcatttgtagtaataaatatttttaacttcattcatacagttaagtttatctgacaataaaagctctgactg

SEQ ID NO: 765 - DNA, 707 bp, Homo sapiens
ctggtccctggctgaagggaattaacagatagtatcaagcgcagaaggaatgtgccagtatggctccctgggtgaacagcttggccttttttgggtgtcttgacaggccaagaagaacaaatgactcagaatggattaacatgaaagttatccaggcgcagagttgaagaagcataagcaagacaaaaacagagagaccgcagaaggaggaagatactgtggtactgtcataaaaaacagtggagctctgtattagaaagcccctcagaactgggaaggccaggtaactctagttacacagaaactgtgactaaagtctatgaaactgattacaacagactgtaagaatcaaagtcaactgacatctatgctacatattattatatagtttgtactgagctattgaagtcccattaacttaaagtatatgttttcaaattgccattgctactattgcttgtcggtgttattttattttattgtttttgactttggaagagatgaactgtgtatttaacttaagctattgctcttaaaaccagggagtcagaatatatttgtaagttaaatcattggtgctaataataaatgtggattttgtattaaaatatatagaagcaatttctgtttacatgtccttgctacttttaaaaacttgcatttattcctcagattttaaaaataaataaataattcatttaagattc

SEQ ID NO: 766 - DNA, 734 bp, Homo sapiens
ctacaactcaaaagtttaaatagaaaacagtatattgaaagtggtgggtttgatctttttatttagaaacccacaaaatcagaaacacagtacaaataaaacagaaatcaaactataagttgacttttagttcctaaaaagaaacatatttcaaaagcaatggaatctagaattcttataacatgaataacaaaatgtacagcaagcctatgtagttcaattaatatataaggaaaaggaaggtctttcttcatgatacaagcattataaagtttttactgtagtagtcaattaatggatatttccttgttaataaaattttgtgtcataatttacaaattagttctttaaaaattgttgttatatgaattgtgtttctagcatgaatgttctatagagtactctaaataacttgaatttatagacaaatgctactcacagtacaatcaattgtattataccatgagaaaatcaaaaaggtgttcttcagagacattttatctataaaattttcctactattatgttcattaacaaacttctttatcacatgtatcttctacatgtaaaacatttctgatgattttttaacaaaaaatatatgaatttcttcatttgctcttgcatctacattgctataaggatataaaatgtggtttctatattttgagatgttttttccttacaatgtgaactcatcgtgatcttggaaatcaataaagtcaaatatcaact

SEQ ID NO: 767 - DNA, 677 bp, Homo sapiens
aatgtaaaagggagcccagaaatggaggacatttcattctttttcctgaggggaaggactgtgacctgccataaagactgaccttgaattcagcctgggtgttcaggaaacatcactcagaactattgattcaaagttgggtagtgaatcaggaagccagtaactgactaggagaagctggtatcagaacagcttccctcactgtgtacagaacgcaagaagggaataggtggtctgaacgtggtgtctcactctgaaaagcaggaatgtaagatgatgaaagagacaatgtaatactgttggtccaaaagcatttaaaatcaatagatctgggattatgtggccttaggtagctggttgtacatctttccctaaatcgatccatgttaccacatagtagttttagtttaggattcagtaacagtgaagtgtttactatgtgcaacggtattgaagttcttatgaccacagatcatcagtactgttgtctcatgtaatgctaaaactgaaatggtccgtgtttgcattgttaaaaatgatgtgtgaaatagaatgagtgctatggtgttgaaaactgcagtgtccgttatgagtgccaaaaatctgtcttgaaggcagctacactttgaagtggtctttgaatacttttaataaatttattttgataaataatattg

SEQ ID NO: 768 - DNA, 1582 bp, Homo sapiens
ccataagcagcagcacgatccagagatccattgccatcagtgatctcactaaaaatatacagctacttcccagctaatctccacccaatgaatgatgatggtatagtatgtgcataatggaaagttaccttactgaaaaaaaaaaaagaaggaaaaataagatgggcccaaaggtctatctactaaactagctcttggggaaatagcttcaggatactgtagtttcctctatctaatagagaactttttgttaacagacactgtaaaatagttttgctttgttgaataatacgtgtgtacctaaaagaggtaagagcaaaaagtgtaattccacatcatgttacttgagaagtgcttaacgttttcttaaatgttttcattgggaaaggacagctttgataatgtccaaatactctgaaatgcactagaccatataactgtgatgaaatatgaaactcatctgtaaacttttataccaagggggtaaaaaaaaaaactaaggcatttgattaaattatgaatgagttttacaaattcctttcagagttttactaagatcacacaaataacagctttcttattcagtgaaaaagatattttatttctgatgttttatttgcacttgtggaatatgttaccattaatcagaaacatcatggcaacccctaagaatagactaagtttgtgttggctgagggattctatttggtttgcttttttttttttgctttgttatattttattgctacaaggggtgtgacttgataatgatttcctctgaattataataacatagccagatgtagtctcacactgtttttcatactcttaagtgtaaataatataaaatgtttcaagcgcttaactccccctcattcacaaagtataacaattaaaatctcaactataaccagtttagctttttccttacttttaaaataaaattttttacttttaactatttttttagttaatatttttaaaagtatacatgtcaatggcctctttgtccattattcattttgtggcaaaatattcttctttgatagtgtaaacaaataataaagcaatctaggtcctttaggtttgaaaggcaatttttgagtagcatattaccagctagccagtcactaggaatttttttcagtattatttgtatgtattaaacttttcattacactaaagtgcattattttattgagcaagtatccttcattgtgaggtttaacattaaagcaatctgttgaaatgccattatctttgctcataattttattatggccgtctaaggtagcttacacataaaacctgtttgcgtatctgttgttctctaaatattaattgaagatttactgaggatttgtaaggtccttctcgctgttatgtgaaaagtcaaactgtagttaatgtaaattatagccttttaggtgcttgggggttagagggtttatgttttttgggaaagggggactttagtagtctgaggatttctgtacatattttcttctgttttatgtgaaatttgggctctgggaataagaaaatattcctttcaaatttatttgacatattaatgctggtt

SEQ ID NO: 769 - DNA, 1214 bp, Homo sapiens
attatttggctcctccatttctggaaattgagactcaagctttatgaatttatcaagaacttaaaaatgaagaaggtcacagattgatcttttataagaccttatttgatgctttgtgcttcaaggagatgatacctgtcatccatataagcaaactttttggcttacaactatttttttaatattagccttctagtctgtaatggaaattgtatattttgatagaagttttttctccattggttaaattagcattacttaaaatttgtttctttagaaaataaatgcaggttataaatgtgtgtatatttagagattataaggctctctgagccatcttctgatttttcattgctctataattctttttactgaaaatactatgttatgaatggtattaaattttagtctctggaacatccaaaaccaagcaaagggatgtgactattttgaatgaatcagaatgtcaacttgtatgtacactatatctacacttactcattatttaaaaagaataatgaaaaatctagatcaattcttcaatttgattgaactgttcagccttttcaagatttctttatttacaaatgattacatttaaatgaatgtacattcttctcactgactttggtgattttgaaacctagaatgatgtgtttctatctgtaatatctttccatttgaaaaaaatctcaaaacacagattaaaaccacaataggctgtagtattttttattttgggagccagagtatgatttgggggaagaatatgtatcagccctattgcagtataactttaagctccttttctctttagtccacttttgattgtaatttttatggtataggattttgaatcttctattttaggcttgtcagtcttggagttcttatcttccattatccctaaatattgataaactcccaggcaccaaagaaaacatttgcttaattgtctgaaaagaaacaagagaaaaacactggtatttttatgtctgtattcaatatggtataaaatataaaaactatattttaacttagtgaaatattttactatttctctacttcagacaaaatgttgcatccaaggtacatcaagtgaccatttgccttgaaccttgatttcactttgttttttttttttccttaaaggcaactaggaagctttactttcctaaagtgtttttgccattggaatttttgctgatcacagt

SEQ ID NO: 770 - DNA, 232 bp, Homo sapiens
acttctgatcgaaggtcatccctctccagcttgagtggatcaaagatgacaagggccaatggaaccaagtttgagtcttgccaggtcaatacttgggtcctgagtatggtgactagtatctgttttgttatgtgtgtattattccagccagaatgggaaatgctaattcagctcctccaggcagcccaatggggctggtggctttgagattattaaactctttctctgctgc

SEQ ID NO: 771 - DNA, 188 bp, Homo sapiens
aatcaatcataaagtgcacacctttattcagaactttagtattaaatcagttctcaatttcattttttatgtattgttttactcctttttattcatacgtaaaattttggattaatttgtgaaaatgtaattataagctgagaccggtggctctcttcttaaaagcaccatattaaatcctggaaaac

SEQ ID NO: 772 - DNA, 229 bp, Homo sapiens
ggcagcattgttaccctaaatgtatgtccaacttccacttttccacttctcactcttatggtctcaaagcttgcaaagatagcttctgatattgttgtaatttctactttatttcaaagaaaattaatataatagtttcaatttgcaacttaatatattctcaaaaatatattaaaacaaactaaattattgcttatgcttgtactaaaataataaaaactactcttat

SEQ ID NO: 773 - DNA, 187 bp, Homo sapiens
aatcaatcataaaatgcacacctttattcagaactttagtattaaatcagttcttaatttcatttttaagtattgttttactcctttttattcatacgtaaaattttggattaatttgtgaaaatgtaattataagctgagaccggtggctctcttcttaaaagcaccatattaaaacttggaaaac

SEQ ID NO: 774 - DNA, 226 bp, Homo sapiens
ggcagcattgttaccctaaatgtatgtccaacttccacttctcactcttatggtctcaaagcttgcaaagatagcttctgatattgttgtaatttctactttatttcaaagaaaattaatataatagtttcaatttgcaacttaatatgttctcaaaaatatgttaaaacaaactaaattattgcttatgcttgtactaaaataataaaaactacccttatattgg

SEQ ID NO: 775 - DNA, 146 bp, Homo sapiens
aatcaatggcattactattagtaaaatgcacacctttttctgaatttactattatatttgttttcaatttcatttttcaagtactgttttactcatttttattcataaataaagttttgtgttgatttgtgaaaatgcaattacaa

SEQ ID NO: 776 - DNA, 991 bp, Homo sapiens
agcaagcataattttcctgaatatattcttcaaacatccatctatgctaaaagtagccattatgtagccaattctgtagttacttcttttattctttcaggtgttgtttaactcagttttatttagaactctggatttttagagctttagaaatttgtaagctgagagaacaatgtttcacttaataggagggtgtcttagtccatattacattgttataacagagtatcacagactggataacttctaaccaatagtttatttgtttcataaatctaaaagctgagaagtccaagatggtggggctgcctctggtgagggtcttctcgaagcatcataatatgctggaaggcatcacaacatggtggaagggatcacgtggcaaaagagcatgtacatgggagtgagagaaaaagagagagagagacagagtggcgggggcggggaggagcgcaaactcatcctttataaagacaccactcctgagataacaatccaatcccatgataatgacattaatccattcaagaagatagagctctcgtgacttaatcaccttctaaagatctcacctgacaacactgttgcattggcagttaagtttccacgtaaactttcggggacacattcaaaccacaggagaaactcaaattgttcctgggcaaatcacaacatggggaattttattcataaatgtccacagaaacagtaaatgttctcgcttcagtacttaattcatctaatccctcctgtttgtctcaaattataggataactttgaaactttctgaattaacgttatttaaaaggaaatgtagatgttattttagtctctatcttcatgttattatcacttaaaaacctgcgaaagctgtcaacttttgtggttgtagcaagtattaataaatatttataaatcctctaatgtaagtctagctacctatccaatactaaataccccttaaagtattaaatgcactatctgctgtaaa

SEQ ID NO: 777 - DNA, 575 bp, Homo sapiens
gagcattgtgtcccttcgagatggggatccacacactgtgaatgtgatgactgtacttcaggtatctctgacatacctgacaatgttaatctgcaactgggattacactggaactacaggaatgattcctttgaccaccttaaaaactttcacagtggttccgctcgacaccattgttttattatattatatcagccaattgcaaaaaaagtctgtgccagtaatttcagccttataattagcaaaaacatcttccagagaataaagtcttctgtggctttagtggctatcactgaaactctttcctcttttcaacctgggaacaaattttagttttcattttaggtttctgtactttctgtagtttctgtgtaaactgccatatgtttacatggaaactacaggaaaaaattggctacatttctcacttctcctatcatgtggtcaaagttattgttgtataccagcgatgggatgtatacttttgtccttcattcatggattcagagaaagctctgggaatgacttatggtccaaaaaagtgacccaatggcaacaaataaaaattgaaatgc

SEQ ID NO: 778 - DNA, 145 bp, Homo sapiens
caagaatttcatctctgttccctaactgtgcttgtattttttaaaaaataaagccccaattcagaattgctggattattagtacttgaacactagtttaatcctaaatacatatattaaaagaacatcaataaaatgaaaaagct

SEQ ID NO: 779 - DNA, 884 bp, Homo sapiens
cattggttttttttttttagtttttaaattcttcctcttctttttattattattctaattattattattttattatttacaagactttttttttcttctaacccacaagatatttggggaataaaaataacagcttggtgtgtagcatctgcagccacttggcaaatgagtttacagtattgtctcctttaagtgaatatattttgtctacaaagtgtatttggatttaaaaaaattaattaggtctttcagttggtaaggagagtttttgaataattctaataagtgcctcttaaaattgtatgttacttatttccagaatctcgaagaaaaaagaaaaaagagtggtattattatgggcaaataatcatattcccacttaaatgattaggttaataaagaaccagataattaattagttactttttaaatcttgcaattgtatgtgtgattatggagttttgaaaacgttacattttttaaatcttaaaactgaaaacttgtttttagtatttctatttcttacctgaactgttaattcaagtgaggaatatgatgaaataaaagcattaactacagacattttaaatagtaatgattaattaggtgagaaatctattacaggaatgtgacttttccttctcttaggggtgtacaactctaaaaactttttacttggttatttgtttttcaacatttgaaaaatacttaagctccctatgtatccatgaaaattccgcattgattttgacattccatacttttaacctcctaaagctaaaaacaatagctcggaaaccattctttctagttactttttttcccagggaaaatggaaataagcaaaatataatgttttaagaagtaaaaaaatcaatataatt

SEQ ID NO: 780 - DNA, 117 bp, Homo sapiens
acatgcaagatcatgaagagtgtaaccaaagtaattgaaagtattttgtgcaagtcatacctccccatttatgtctggtgttaagattaatatttcagagctagtgtgctttgaatc

SEQ ID NO: 781 - DNA, 1235 bp, Homo sapiens
gaaaagacataaatgaggaaactccaaacctcctgttagctgttatttctatttttgtagaagtaggaagtgaaaataggtatacagtggattaattaaatgcagcgaaccaatatttgtagaagggttatattttactactgtggaaaaatatttaagatagttttgccagaacagtttgtacagacgtatgcttattttaaaattttatctcttattcagtaaaaaacaacttctttgtaatcgttatgtgtgtatatgtatgtgtgtatgggtgtgtgtttgtgtgagagacagagaaagagagagaattctttcaagtgaatctaaaagcttttgcttttcctttgtttttatgaagaaaaaatacattttatattagaagtgttaacttagcttgaaggatctgtttttaaaaatcataaactgtgtgcagactcaataaaatcatgtacatttctgaaatgacctcaagatgtcctccttgttctactcatatatatctatcttatatagtttactattttacttctagagatagtacataaaggtggtatgtgtgtgtatgctactacaaaaaagttgttaactaaattaacattgggaaatcttatattccatatattagcatttagtccaatgtctttttaagcttatttaattaaaaaatttccagtgagcttatcatgctgtctttacatggggttttcaattttgcatgctcgattattccctgtacaatatttaaaatttattgcttgatacttttgacaacaaattaggttttgtacaattgaacttaaataaatgtcattaaaataaataaatgcaatatgtattaatattcattgtataaaaatagaagaatacaaacatatttgttaaatatttacatatgaaatttaatatagctatttttatggaatttttcattgatatgaaaaatatgatattgcatatgcatagttcccatgttaaatcccattcataactttcattaaagcatttactttgaatttctccaatgcttagaatgtttttaccaggaatggatgtcgctaatcataataaaattcaaccattatttttttcttgtttataatacattgtgttatatgttcaaatatgaaatgtgtatgcacctattgaaatatgtttaatgcatttattaacatttgcaggacacttttacaggccccaattatccaatagtctaataattgtttaagatctag

SEQ ID NO: 782 - DNA, 819 bp, Homo sapiens
tatttatatttttactaattttattttcttgttgcaaagtttatatatttaactacaattttctattattaacactgaaattatttttaaggataaattttataatcatgagtgattcttgacattcacttgttcttaaactttctgcttatacgttatagagtttaataactacctaaacatgttattaaatttgtatatatattttgtgtataaatagtaacttttcccaaacttgacagtaaatcacacaacaggtttctactctcttttaatattttaagactataaaaaaatgcatttaaattagataacaaaattttatagtctgaaagcaggttaacagctgtctatgtatgttatagatatgtagataacagatttgcatatgtctatatttctttaagagtatgttgcttttttcaatggtatgcaaaacctttgagactattgagatatttttaaataataattttcaaattctactgaacacttcaatagtccttataaatgtcttaatcatgagataaatttaaaacacagagatgctgcaaataaattcatacatagtacatacaaaataagagaaaaaattaaattgcagatggttaaatatcacatcacttaactgatgttactgaaaatgtattttcctgcataatcatatggttgacagtatgcattaagaaggtaagtaaaacaatgaagacaattttgatttaatatggtaatgcacaattccaactaacgtacattcaacagatcatgaaattgggttattaaaatgaatatttttgtcattaaataaaaattccgtcc

SEQ ID NO: 783 - DNA, 3210 bp, Homo sapiens
gttacaacccctaggagctctgctttcaaaacaaaaagagattgggggagtggggagggggaagaagaacaggaagaaaaaaagtactctgaactgctccaagtaacgctaattaaaaacttgctttaaagatattgaatttaaaaaggcataataatcaaatacttaatagcaaataaatgatgtatcagggtatttgtattgcaaactgtgaatcaaaggcttcacagccccagaggattccatataaaagacattgtaatggagtggattgaactcacagatggataccaacacggtcagaagaaaaacggacagaacggttcttgtatatttaaactgatctccactatgaagaaatttaggaactaatcttattaattaggcttatacagcgggggatttgagcttacaggattcctccatggtaaagctgaactgaaacaattctcaagaatgcatcagctgtacctacaatagcccctccctcttcctttgaaggccccagcacctctgccctgtggtcaccgaatctgtactaaggacctgtgttcagccacacccagtggtagctccaccaaatcatgaacagcctaattttgagtgtctgtgtcttagacctgcaaacagctaataggaaattctattaatatgttagcttgccattttaaatatgttctgagggttgttttgtctcgtgttcatgatgttaagaaaatgcaggcagtatccctcatcttatgtaagtgttaattaatattaagggaaatgactacaaactttcaaagcaaatgctccatagctaaagcaacttagaccttatttctgctactgttgctgaaatgtggctttggcattgttggatttcataaaaaatttctggcaggaagtcttgttagtatacatcagtctttttcatcatccaagtttgtagttcatttaaaaatacaacattaaacacattttgctaggatgtcaaatagtcacagttctaagtagttggaaacaaaattgacgcatgttaatctatgcaaagagaaaggaaaggatgaggtgatgtattgactcaaggttcattcttgctgcaattgaacatcctcaagagttgggatggaaatggtgatttttacatgtgtcctggaaagatattaaagtaattcaaatcttccccaaaggggaaaggaagagagtgatactgacctttttaagtcatagaccaaagtctgctgtagaacaaatatgggaggacaaagaatcgcaaattcttcaaatgactattatcagtattattaacatgcgatgccacaggtatgaaagtcttgccttatttcacaattttaaaaggtagctgtgcagatgtggatcaacatttgtttaaaataaagtattaatactttaaagtcaaataagatatagtgtttacattctttaggtcctgaggggcagggggatctgtgatataacaaaatagcaaaagcggtaatttccttaatgttatttttctgattggtaattatttttaacagtacttaattattctatgtcgtgagacactaaaatcaaaaacgggaatctcatttagactttaatttttttgagattatcggcggcacaatcactttgtagaaactgtaaaaaataaaagtatctcctagtcccttaattttttcataaatatttctggcttttgagtagtgtatttatattgtatatcatactttcaactgtagacaattatgatgctaatttattgtttcttggtttcacctttgtataagatatagccaagactgaagaaaccaaatatatgtgtttactgtagcatgtcttcaaattagtggaacttagttcagggacatagaagagtcttaatgaattaaaatcattcacttgattaaatgtctgtaaatcttcatcattcctactgtagtttatttaatatctattgtaaattatgtgacttgtagcttcctctggttttcaagtaaactcaacaaggtggagtcttacctggttttcctttccaagcattgtaaattgtataccaaagatattagttattacttctgtgtgtacaaagaggattattttattatgtttattaatcacctctaatactcatccacatgaagggtacacattaggtaagctgggcgttgactcatgcgcagtctcagtcacccgtgttatcttcgtggctcaaaggacaatgcaaaatcgccgatcagagctcatacccaaagcattacagagaacagcagcatcattgccctccccagctgaaaaacaagttggctagaagatacatggagaggaatggtgtggtcaacagttaatgaaacggttctatcatgcatgtgtaatgtggatggagacaattataagatttgactataactatttggagggtctttaacattgccaaaaaaacaaatatgttgatttttattttattttattttttattttaagaggcgggatcttgatctcacatgttgcccaggctggccttgaactcctgggctcaagcattcctcctgcctcagcctcccccatagctgggactaggggtgcatgccagcatacctggctacgttgactcttaaaatctatgttctcttattttaaagatacagtgctccccactgaaaattaaacctaaaaaatgtcacatattggtatgttgttaacctggtagattaaatcatgagaatgattagaaagacgggcaacacagcgggttacatccacactgctgatcacaccaacgacaggagctgataagcaagaaagcgtcacagccagcgtctgttcacccaaggttgacaagtgaagtttctctaatgttgattgttagccgatttgtaacctggcatttacttagcaactgccttatcaattacaggatttgccggtaaaagcagactcaaatataaaggtttttggcttaacttggtttattatagttgctctatgtttgtaaacagacaatctctaatgtctgattatttgtatcacagatctgcagctgccttggacttgaatccatgcaatgtttagagtgtgaagtcagttacttgttgatgttttcttactgtatcaatgaaatacatattgtcatgtcagttcttgccaggaacttctcaacaaaatggaattttttttttcagtatttcaataaatattgatatgcccagcctgataattttt

SEQ ID NO: 784 - DNA, 2642 bp, Homo sapiens
aagttgggaaatacttgcttcagaacattcatggtaaatttgcacttcatctttcctgcctatagaaaatctttctaattgccaacaagacttttattaattaaaactggacattaagctctgttgtcatgaacaactggaatgtaaaccacagtattttggagtgcagaacattctcaattaagtgataagtccaaatgatgaaggaaatgttttaattcacaaatggagatttgtatgtgttatcaggttcacctgcttgatattagatacattaaagcactgaattttcatggatattagttggatttatcattgaaatatggttaagattacaaattatgtgttttatttgttgcttttttttaaccttttaatgtatattcttgtcttcagatggtttgctatttttctctcctgggggtttattctaagatacctttgtattttatttcatgtggagatcatgaaagtaggaaatatacctttagaagtaactcgcacctttcttatgatgttaagagaaacactagtgtttagttttacagtaaccctcatattttaatggtgttacagcatttgcaaaaattattctgctaagtatttacaactctatttattattcactcaagtattaacattctctattaaataagaggaggtgttgtaaagagctgctagtaggttcgctttaaaccacatgagcttaaccaagaatatgttatgagaagttgctgattaaatcagtgctgtttttacaccacttctggccaactcagaataatttagattgttcttttaacaaaaaaggctttctatctcttttaaagtaagtcactttataagttggcagaagtgaatgacactttgagagtagtctttcaatctgaagatgtaagacttcctgaaacaagttctcaagaagtctttacattatatttataactcatataaaaattatatttagaatttttaaacatgtacaaagggctacattttaattttaaaatagcttcacattattttacttatattgggtttttcttcattttaatccttttcaagtggaatggcttagaataagtatacacttgaaatctcctctacatgatctttgttctttaacagtgtataccagagggttagttggggaaaaacttcattctcaggaaaagacttgaatgattatgtgaccctgttatatttcagtgttgtgacaaatgtgtaaactagcgggggaagacagtattgtatcataaatgagatgcgtagtttgttttctttcatgggaagtagagataaaaatatatacatttctctaattgagttgtttagagaaagaactaatgtctcatatgatgtatttacttattttaaaaaaaagaataggaatgagatgtccctgagctgtacttttctattattataaggcctttaggcatcagtgcatctgggttatcaacattttctcaaatgctgtcaatattttactgtaatttatgttcttatatttatgtatatttgttaaaactgtaaaaaaatttcacagatttttttccaatacctgtgcaagatacatgtgtagctcaaaactatttgtgatctactgtttgcatgtaagagaccaggatatgtaactcttatattttaagtgtatacatattgtgtatataacatatggatattaaaaatggggaattgcacattttaccttttggacagtaatttctatcacagttagaaggaaatgatagtcaaatacacgtttagattaaaactagtttaaaaaattataaatgaatctaatcaaaatgtgaatagtagtcaaaaggataatttaataagcattttacgttactaaatttgttcatttcaatattaactaaatttccctcatcaaagcaatctttgtgatattacttcgctattaaataaagaaaattggatgcaagacaatggagaaactttaaaactaaacaggaccaccctttattcttaaatttgtgtgtgtccaacagttgaattgaatgtctataaggtctaaaggtagaatgtgaatattgccacagagttcattgctctcagtataagattttactttattaatgcagaaggaatatggatatatttctttaagtctgcagatttttttattatggtgcagcttttttttaattatgtttttaaaattatacagttgaaaaatatgccatttcataaagtctgaggattttcgtcaaccttactgaaacacactggtgctttcatcatcagaggtcaaattattatgataactattccattaagtttgccaaacatttgtcgtggttaccagtgcagcctgtcaaattctgctatttgacacagctttggaaagatttagttcttggtttttccgttttgtattagaatgactgttacagttttatttggctgtttaaagccaaattcagctatttaattatggtttcatggacactgttgagcaatgtacagtgtatggtgtgcttacctgtccactctagagcattgcttacaggttttttgttttttaagatgctgtgctgtaaaatactgtcatacttgctatttcctggtacagtgtagtttttcccctttcatttgaataaaagcatggcacc

SEQ ID NO: 785 - DNA, 2106 bp, Homo sapiens
ctctgcgccccacgctggaaaaaactgtttcatagaggggctgggctgagacccccccacccctgagtgcctctttcagctcccccatccccatcgcaggccgatgacctggagctgagaccttttattattttttttttacacgacttttttcagaagccctgacctaaggatttatatatgtggattgtcctcaatacccctgtgatatgattatgttttatcccccagagtttggcctactggacttaaggccttgcctgtctgactgacagcctctatctccttatataagacaagtggcaggggacgagtgaagcagagtgagccaccttgggagttctccaacgctctgtgctctggttctaagaaattccctggggaactgcccctggccctcctgtcccactattgctggaggctggacatggtacatactcatgcacatgactctcccccatttcccaggtctctgggtaccccagcctgggctgggggagaatctcttcccccttttctaatgtgctctgtgatgcacacaccaagtggtaggtcaaaggtcagtatatcccggtggtgtattgtcttgctagaccctgctattttcctgaccccctaaatcctctttagggacccagtcactataccctgtctatgccctgtgggctcccagacccctgagctttgagtcagtggcatcacagtttgtagcctcagggggtctggctgggggctggtccatgcttgtggttagtggacagcagccaccctttgacagctacctctgggcatctcaagggcttgcagccccactgctccttctaacattttgtttgtttttgagatggagtctcgctctgtcgcccaggctggaatgctgtagcaagatttcggctcactgcaacccccgtctcccgggttcaagcgaatctcctgcctcagccttccgagtagctgggattacaggcaagcaccaccatgcctgctaattttttatttttagtagagatggggtttcatcatgttggccaggctggtctcgaactcctgacctcaagtgatccacctgccttggcctttcaaagtgctgggattacaggcatgagccaccgcacctggcccttctaacgttttttcatcatagtcccaaaaaccaatactttacaagtggttttggaaaggcaccacttttgtggcatgttctggttgggagagggagtcacagttcctactccccccaccagctatgcttctgctctgagaaggtggttatttatacaaacatggacatactcactcccaagggctgatgagatgctgaattttctttgggggcattcattaattgtcccagctgcagcgactggagcaagtctggaagctgcctgtgctaagaccacccagctgtccctgggttctcatcctagggccttctttgcttccaggtcaggggacctgcttcaatgagaaagcaactgaattgaggctaggagaggtagggagagctgagttctgacttcacctgtgcagaactctctgcccccatgttacctggactggaacagactgtgaatatagcagaaggttccaagaactctggtgtctgacctagaagaggcacagttctctctactggaaagaaaacgatgtagccgattgcacaagggtgccaagggaagacccaggatggcccatcaaaggaacctgggggaggatgcaggaggctgaagggatgcacctggcatttctctcactgtgctcttaccgcatcagcaacccccaacttttgggcctactctgccccccatgcgtgaataccctgcttggatgctgtgcttttccggtttgtctctaagcccctttctccagggcatgttggtttccctggcctctcagtgtcctaactggagcccagagtgccttgttctgagccaggagacggctgagcactggccctccacacctaagcgtcctttacattaacttattggtcttgtataacacctggtgccattgccaagtggctgtgtcctcagctacagagctggaattgtgtggggtttagtgctaaatacttcaataaagtctgttttttgtgattggctg

SEQ ID NO: 786 - DNA, 547 bp, Homo sapiens
cctcacctcaccctgggatggtcctggacccttgaagcttcacttccgacacctgcactggcccgggaagccaatcccaaggatggaggctgtgcccagagccccaggaaaatgggagtgagaagatgcctggcgaggttttggccaggaggacgtgaagtccttggggaagaaaaacaagggaggagggcattccacctcctggctccaagctaagtcactcaacagaatgacagcgaacctcctggaccctcaccatatgggtttctttcttcttcgcttcaggagatccagagggcacctgcctgcaggatgggccggctccttattttcctgggctgagccgtttggagggagggtgggcacagctgggcctgctgtgaccactgggagggaagaggagaggaggtcagaggacctgggtgaggactagggcatcaaggtcgtgtgtgtgggtgggggcagcctccacctcctggattcaagagattccaggggtgcagcaagtgctttctatgcgtttcttcattaaaacattaggctaata

SEQ ID NO: 787 - DNA, 2914 bp, Homo sapiens
gaagatatgacccagctgagaagccctcaggcctcgctggatggggttttctgtccatcctatgcagtatttgggaaagttcacaagaaactgagaagaaacctaaaaactgtggatagtggaaagatttttagattttttttttccttggggaaactggcaggcaatgggggttagggaggttggggcggtgggggctttcttgagttaaaggggcttatatgtgatgtcaatatttcttcctctgagaaatggtatatatatgtgtataatgtaagtgtgtgcatgcatgtgcgcgtgcatgtgtgtgtgtgtgagtgtcttaaagcataaccacaaactgcaaaaagctaggtaagctattttgttgcagctcataaggtggtgaaaaggactctcctgtgtttcttactcataggcaaggacaacatgtgctttttggtgagctgctcataattcctgaaatgtgtggtgccagggcaagggggccatcactgcagtcaggccctcagaggagtcctgcaggcttcctaccagtggtctccaggggtgcaggagtaactggggctgggccagcctccccacttacaaggctgctttccaggaagggaggtctggtgtatctcatgggagaatctggggtgtctgtaatgtcacccctccagcagcgccacaaggactgaggttgggtaggtgtggggttccagaggacagcaggacactctcgcatactttgccaaatgaggcctgctcagaggagtaggagctgaaagatggtgccttccaccctcttgggctgtgtgcccatcagagcaggctcagcctgcaaaggccctgcattcagaggtcttgtaatctacttgttgcaggagaaagaaggtaaaaaatgatttttttaagaaaagctattttattgcagctctttcccaagagctgttctgggaatggctggtcttcatattcccagtggagaggggaacaagtggggctgggcatatacctattccggcttctagtgggatggagttggggtatagaaattaaccaggaagatgtttccaccaagcctgctgtgagtcaattgagggagtgtttggggtcccaggagacttggacggggggagtttgggtagactaggaaaggaaagtgccatatcagggtaccggtaccggcaagctcacatctcagccaggggccatgccccacttcccctgaccccagctgtcttgtctccactctgtgaaacccacaggggatgtgataaacagggctattaggggtatcagccacgtcgagcccccagactctgtgcacttcagaccagcagcagcaggagggctcccgagggccttatgagaaaacctgtgtggacatcccttggtgtacactaagacagagcagagcccagcgctcccaagccttcctccttccagcttctacctccatgctagcattgctggtgttagagaggaattaacttcctggtctgtgcccttctctagaagaatataagatgctcctcctcctcaccccttctcagcctcctcccaagtcttcctcttctgcaccacccccgagtccaaacccacctcttgccccagcattcaggctggaaaacactgatgtggactcagtatgataactgagatgggggacgccagacatgtgaggacgctgtcctccgagaggtgtccccggctgttagccagctgtgctgtggtgctgtgggtctgtcataccctcccttgcttctgttcacactgggaggcccactcctggctcacctctccctctcagggacccacgtgggagcctggatccctggactgtcctgggcataggtttcaggggcctcctttgttgtcatcagaacccagaggaattcttctcctaaaaaatacgtatggcataccaatctgtgcggggcagtgtcctaagcacttagactacatcagggaagaacacagaccacatccctgtcctcatgcggcttatgttttctggaggaaagtggagacacaagtccttggctttagggctcccccggctgggggctgtgcagtccggtcagggcgggaggggaaatgcaccgctgcatgtgaaccttaccagcccaggcggatgccccttccccttagcactaccctggcctcctgcatcccctcgcctcatgttcctcccaccttcaaagaatgaagagccccatgggcccagcccctgccctgggaaccaggcagccttccagacctcaggggctgaggcagactattagggcagggctgactttggtgacactgcccattccctctcaggccagctcaggtcacccgggcctctgacccaggcctgtcactttgagaggggcaaaactgagaggggcttttcctagagaaagagaacaaggagcttgccaggcttcatgtagccgacacacgtctcaggattttaagtccacattggcctcacactaccagggccaatgcccaaaataaggagttccaatttggggccaaatgaggaaggacacagactctgccctgggatctcctgtgctagcggccaatgacaaatccagtcattggccaccagccacctctgcagtggggaccacactagcagccctgactccacactcctcctggggacccaagaggcagtgttgctgtctgcatgtccaccttggaatctggctgaactggctggcaggaccaagactgcggctggggtgggcagggaagggaagccgggggctgctgtgagggatcttggagcttccctgtagcccaccttccccttgcttcatgtttgtagaggaaccttgtgccggccaggcccagtttccttgtgtgatacactaatgtatttgctttttttggaaatagagaaaatcaataaattgctagtgtttctttg

SEQ ID NO: 788 - DNA, 5395 bp, Homo sapiens
gggttcggcaatcactgtcacccccggacagcagaacgctggcatcagctatcttagctcctcctctcccctctcctctttcagagcactggctctccagccccaggaggagaacaggagggaggaggagatgaaagaggagggacaggttcttggtgctgtacctttgagaacttcctaggaaggaatggtggggtggcgtttgggaacttgtgccccctaaacacatttactggcctcctctaatgactttggggaaaagatgattctgggtctttcccttgacttcttgtttcaattacaaactcctgggctttctggggaggggttcagaaaacatcaaaacactgcagcagttcctaaatgattctcacaagcaaccctgagagagacagtcttgtgagggagatctgggggaggcaggaagctcctcagattttctcacagacccttcccaattccatcaccactgccaacaactcctcccccagagatctggctggagcccagaaaaagaagcatgtggtttaaaaaatgtttaaatcaatctgtaaaaggtaaaaatgaaaaacaaaaacaagcaaacaaacaaaaaacaatggaaaagatgaagctggagagagaggaaccagttgccaaggtagagagctgcccgctcctgccctctggatgacataggggacatcaacaagacggctgccaacctgagaagtcaccaaaccacaaaaataaccttacagccttcagggaaagactaccagctctgtctttctaccctctaatttaacaatgcataagagtcaataaaccctacttttttatttttggtttttattttgttttcatttttttctcccatttgcctatttatttttttgtttcccttttttttttctttttccgtttttccatttcctcacatgtccacgagatgcttgggttgcttttccaggggctagtttggcttttccaagtgggttttctttggagaatctgatgccatgcaattggcatgacacctgccatgccactatctttggcatccatggggcttatatgagacatgaagcattggctcagaagtagagggagaagaggaacccagttcccttgacttcccttttgagagcacacgttctgctgggtagctcaattgccagcctctgtcatgagaaggtatagccccatcttgatagaagagttactccgagctttatcatggaccagaggaaaaccagaaaactgaaaacattcctctgtcttgtggccagtttggcctttcactgcactattctgatggtgcctgactgaatccaaatatcctagctggctcttactatttttcacaaatgagtattcacatataagagatgaacatccatgtgagatcatcccaatcagaatataagactcaaggagtttgacttggtggccaatacctgccttccaaagagatcctacctttgcagatttgctcctttcccattgccttgaaggtctggcaatccctgttctttcatttgacaagtacttactgagtactcactatatacaaatcattaggttaaaacagacacacacacacacacacacacacacacacacacacacacacacacaagacctgggcccttaagtttacagtccagcaggaaatgttaacctccattcagctacgcccccttgttatctagaccttcgggatcatctaagaaatgtagctgaaacccaaggagccagctagaaagaagcttttgattagatgtacaatacattgggggcagaagatctgggatcaattaagatggagcctgaaggactatggaatcttgcttgtcaggaatgggcaagtctacttcctgccatttctgaaagccccgcgggaccagcttctaggctgagctgcctagtaggctgaagcttcaggactctgcaggtcaaggatatgtgatgagcaccggcctaagtgtttgctcttcagattcctaagtagcacaagactttatcagaatctataggcataccaacctggatcactcttccacccaaccgaggagtagatgcatctgaatcttcatatcggtatattaagtccaaaagatggtccgggctgcccctcacaaaagcttctgcatccacgtggtaagctcccatggatgacagggttctgtatgatggagactattattgctattgctgctaattccatgagctgtgaagatccctaaccaactcagctgtaacatatgcaattctgtggtgggaagaggctgtgtgtccaaggatggtgctgaaatcactgccttaaggtctctgctgtgcagaatgaggaggcccccgagctggctgttctaacttagaaggaagagaagactggatgggcctgcttgggatctaggcctcttctaaaccctatcctaagctccagttccatggcaaggctcagacttttaatgccatcttaatctgatggttgagcgcttcactctattttctggtgctgcccagccagtgccttctgccatggatgttactggctacttgagaaaaaggagaggggagaaccccttctttcattccaactgcctccgaccccaaagggattcttggctctctggtaaccatggataccaccatgaattttatttggatcctcagcaggttgattctggaggcctcatgctatgactttttatttctcttcctgggatccaccaccctctactctcagctgactgctgcatttaggccaggtctccaattgctttcctccagaaagtgtgttcccgtctagtgaggtagtattgaagcctcggctttccctctggagcctgggaccctgtttacagttgcacatctgggcccctcactgtggggattgatcattctcatgaaggaatcacagttatatggcaactgcagaaggctgagcctcctcatggtgctataaccccttgggacactcatccagacttctctgaagcagaaaacctgagctccccactcactgccctagaatttatggcaaggagcaaatctacagcattctctcccacctacgtcctgcttcttggttgagactactgggatccttcagaaaagaaacactgggtcccatagctaaattctcaaccgccaggcaccttcagaagaatccagcctaatactggaatttgtgctattatcttcctctccagccccccaactccatccctcaccacagttgtctaggaaatgacatgaattcaatatctaatgtcaaccaatggggagagccacaactccaggagaggttcctgagctgagtcccttaatttctggatgaagaagaccaacaagttttgtccaatgtatttgtttctcagaccttgcctaggcactaaaaataaaatactaggtcattggaggctaatgtgggacctgatgtctgcgtgtgtgtgtgtgtgtgtgtgtgtgtgtgtctccctctctcacacacacaagagcagtttgctgttgctgtttcctaccttctgaggcttcaaagtattttttaaaatctatgctttgtggcagctctacggtgcttatctctgtctttgtgtcaatccttaagtacccatgtctttttcatgtctaaccattgggaaggtagaggctggcagggaagacaaatctgctacaagtccatgggaagaccctacaatgaaatgttcattggttggtatactgttttagtcttgaattgccaactttccaactgatctatccatattccttaagtactaaagacaaaatagagggcttctttttctctcttaatgtcttgccttctggttttcctggtttgcaagactaagtgtacctaatctcaccatctcttcacttctagctctctgaaacaagggtcacactactcagagggataaccccttacagtggtctgaggagtaactatttcctaaagtattctaaaagagtaggaagagagaaatggtagcctgctgcttctcacagacacctcacatcctcacttgggatggcatccacatagaaaccctgcatttaggtaaaatttgcctgactgaaggggactcagtcctccaaatcaaggtcaagaagatatctgcatgagaccttaagaactctttattgccattatttggagagggcgggggaattgtcctaatcacacatttaacacagggaataagtgctgaagtgacccagatcaccaagcgcagttcctcatcatactttatttttgctttccttattccttggcactgactaagctaaagttaagaagccgacttcataagccaacccctgtgatgggatggaaaaatgggcttttgcagagggtttattaatagagatggatatactactcacaagttctggctcatggctccactgagaaggccatagtaataaaatgatcttatgaacactgttccccaaaggccaaagcctgaagatattgccccttataatccaatcagccttatattttaataagtcctgaatcaacctgactacggatatatggggccaccagggtgcatgggtgcatgtctgctcagcctagccctggaagtgagcactgccggccacagatcctgggaaaggtggtagtaacccagaagatgtagccttgaagggaggatacctatcaaaatgccaaagctgcagggacacgaagacggttgaaaattcaacctgtgtatactagatccttccagtttgatggtttggtcattcttcttcatgattataccatggagaattttctgtgacaagggtggtcatggaagtaagtgagtgatcccctggtttctcattccttaaagcagtggttcgcaaagtatggcacaagaccagcagcatcagcagcctttgggaacttgttagaaacgaaaattctcaatcccatcccagatctgctgaatcagaaactctaatgagaggacccggcaatccacgttttaataagccctcctggtgattctgatgcacactaaattcaactgttttaaagggaaagccctttatagtattggagttcccacactgagaggctttggggcccaaaataagaaggttctaggttgtcattcagactttaacattaatttcaaagtcacctttctcatgcttccttgtgtttctgtttttccatttatgattttaacaaagaaaggtatgtgtgcttttgggtggaagttaggagaatgtttgtgtctttcctagttgaatacaaccttcagagaaaaaccttatgccttggaaattactacctggcacacaaaggggcttcaacaaggaaaagcagttggaggtctcttccagattgctcttctgccgaattatttgtatctattccgagctgattatgtaataggatggaaaaagt

SEQ ID NO: 789 - DNA, 8239 bp, Homo sapiens
aaaggggagcctttctacatttgctccttctgggccagccgcaaaccattttgcagccctcactggccttgagatgcactttcttctcaacctaaagtggcatcttgacccttggcccttggcctcggcagtgacactgatgacaattcagaccaggctcaccggtgccgtcacttaggaatgctggaacaaaggacatttctcaaagttcccctgaagacatgccatctctagaaccttttttctccccgactctacccccacctctgttcctagagccctctgctggcgagtccagaaacattattgcccagaaggattatgtgtttatggattattttgccccgcctcaggagcgcaggaagtcactaccatttatattctaaaacagacctatctatgttcataggacttctgatgtgttcagataggaatcctcatgagagatcattatgctttgtgccctggaccactgctgctctgggttctcaggaggaacaggcaagagcagcttcattctaagcctttccagtgacctcagccttgcttctcttctacaacactaaggctcctctgtcagaggaggtcgtcttgtttttgcttcattgcatgacataacccttcccctcaagctgttcctatatatacatgcacacacaaaataagccagacagatggcaatttgatcttccttttttagaaaaaaaaaaaaaaatggggaaaagggattttttttaaatccacctgacccaactatatttaatatgcctctcccacacattaccacagagtctgatattcaaaggttatcccctttccctcaggaagcctctaaagtgcttaagttgtagccctcaaatttgcaacatgtatttttctaggacagtaaagtaatctttacaaatgaatttagttgcatggtataaggtgtctcagcacctgtttgccttctattccctttagaaggtaagtaaaagtaatgggggaaaggattaggtggagcctgtctaaacattctagtgtgtcttggcaaacatagcctgaaatgattcttaaagaactggcattgtttaatcaaatatttttaagggagattccttaattgggaagtttagtctgtttggggttcaaagagtaaatgaggattagaaaatcatggagagaggctgggcgcggtggctaacgcctgtaatcctagcactttgggaggctgagatgggcggatcacttgagatcaggagtttgaggctagcctggccaacacagtgaaacctgcatttctactaaaaatacaaaaattagctgggcatggtggtgcatgcctgtaatcccagttaacttgagatgctgaggcaggagaatcgcttgaacttgggaagcagaggttgcagtgaaccgatatcacaccgttgcattccaaggcaagactcaatcacacacacacacacacacacacacaaatcatggggagaaagatgaaacctgtgttcccctttttttggtagtgcccacatctggtgccccatttttaataaccacaggatatttctttagattgatattctcacaaagaagaaatagaatataggctgggcgtggtgtgtcacacctgtaatcccagcacttacggaggccgaagccagcggatcaccagaggtcaggagttcgagaccagcctgaccaacatgatgaaaccctgtctctactaaaaatacaaaaattagccaggcatggtggcatgcacttgtaatcccagctactcgggaggctgagacaggagaatcgcttgaacctgggaggcagaggttgcagtaagccaagatcgcaccattgcactacagcctgggcaacaagaggagcgaaactctgtctcaaaaaaaaaaaagagaaagaatataaagtgaatctgaatctccactcaaggggatggccccaaggatattgtagctggtaatttcttcatgccactaggtgtccccagtgttcaacctccatgactgagattggaagaagtagagttaaaagtttttactacctttgagaagcctgcgggcatgttcacagtcgtcccatgccagccaggttctgaggctaactgcttgtgcccctgctgcttcacatggcattgtgggagttgctgatactggggaaatgatggcagatctgaccaagtggtgctgagaaaaccaccctcggccttgcagactccatagtttatctcaaggcagtgccagtcggatttggtgctaaaggcataaggccaagtcagcctctgatattggcacaaaagaatggtctcatgccagtagcattgaactgctgagcttgggaaggcttaaggctcccacacacagactgagaatgatgggggtccctctgcgtctgctaattagacaaacattctatatctagtgccaaaagtggtcctaaatcctttggcaagggtcctttctgctctcatgctgatttgggggaggactgggcatcctgcctcaggagaacttgagtcctgaggaaagggccctagtaacacttaagggctacccctggctaacagatactcggctgtgggtgagagcagaaggtcttggacccctcgatgtgcaggtacttaattgtgtttccagtgcattttcatatacattatcccatttaacctttataacaggttcacagagtggatattcccattctgttgatgagaaaaagagtggagagactgtgtccagtgtcagcaggaagaaaaaagatctgttggaggccagtacatgttgacagaaactctagaccatattttgtctcctgtctttggccaaagagaactagcttcagtctgaaaagggcagggctaagtggttacaaggaactaaaaagttcaaggtaagacaaatgaggtaaaaataaaaaagagcacttagctgctctgagacattttagtctcctgactggtaaacagcagctggggcaccaaggggctcccaggagtttgtcgagcttttattggagtgaactgaaaggaaaatggaaggaatgctataagactgaaaagaagttaaagccctaggaaggaagctgataacacaagttacagacgtatatgtgacattgatttgggagaatgaacctacaacaaatgacccaaaagcacctaaataagagtgacgagagtttaacagacattcattatggacttcagagaaaatgatgctaaactggtcttagaatcttctttaattttgttaactaggtaaataatctggacattttagtcaaagcattagacagacagagaagttggtaactgaccactaactaacaaactataaattcacccattgtgggttgacctggtaagttcccccagggctgtgtccttggcccctcctttgatattagtgacagatgactttttttatgccttacccattccacaaaagaatttgaagccatttacacaagagatagtactagtaaattaggagtgctgatcaaatttttagataataagaaacccttaggaaggatgacaatttagaatccaaatttaggatccaaacaaataccattacaaactataaaaatgagcagaatctaaatgtaacatttcaataaatgcagattgataataacatctgtgcagagttgaggactatagagtactgtgctgtcactaacagtattgtgtgctactaagagtttaatggctgggtgtggtggctcacacctgtaatcccaacactttgggaggcctaggtgggtaaatcagctgagatcaggagttcgagaccagcctggccaatgtggtgaaaccccgcctctactaaaaataaaaaaattagctgggcatggtggcacgtgcctgtaatcccagctactcgggaggctgaggcgggagaatcacttgaacctgggagacagaggttgcagtgagtcgagatcacaccattgcactccagcctgggcaacagagcaagattctgtctcaaaaaataaagtttattatgccaggagggccaggtgtggtgccacacccatgtaatcccagcactttaggaggctgaggagggcagatcacttaagcccaagagtttgagaccagtctgggcaatgtggcaataccttgtctcttaaaatttaaaataaaaaaaaagtttattatgccaggaactgttaatgtgtccaaaaaaactccagtgtggttctaggatgagataataaaaacaggttgtctagggtagtgtggaaggtcctttcagtcttcctgtgcctatcagtgatcctcattgccatgttcccttctggtgctcaaccggaggctccctgacagatgagtcctctgccagaggaaggctaagatgtagaggacaaatcgtgtcaaggaaaagaagcttgaaggagctaagaatgcttagcttagagaagacaagaggaaacaggacatggctttgggaagttcaaggatggtccagtgaaatacatactatacttttgcaccccagctaagctgacccatgatcagtaagtaggaaataaaaggccaatttctggctactcttgcccccaaccccatttcagtgaactatgaacctctattagatatgcaaggccggtgctaaatgctggagggctttggccctttccctcaaggagctagtctagtagggggtcagaaatacagatgggcctgaacataatgatggtttgacttccagtttttcaactttaggattgtgcaaaagctatacacattcggtagaaacagtacttcaagtatccatacaatcagtacagtattcaataaattacatgagacattcaacactttattataaaataggctttgtgttagatgagtttgcccaactgtaagctaatgtaagtgatctgagtaggtttaaggtagcctaggtgtattaaatgcatttttcacttaacggtattttcaacttttgttgggtttattgggatgtagccccattataagctgaaaagcatctgtagtataataaatgtggggagtgctgtgagagaaataagtgtactgggtttagttcccactgcccaaaaaaggaactggctaatggtaacctgggggaggaagtcgggtaagttgcatggagaaggcaacccttgaacacttgcaaggagctaacaatacctgcttctggagtatttaaacgccagtgggtatgctaaatacttttacctcagaccacctactaaccttacaaagtagtccactttgctcacccagttttacagattgatgaaactgaagcagacagatattgttaacctatcaaaggtcaccctgcaagtgtgtgattatagtccaagcagcttgtacttgttgcctatttgttttgcctttcctgtgcatttgccaggcagatgagagtggggtaagacattgcagagaaaaagtaagaaaaggccgtcatgaaacaatttcattttcagaccttataagcacgttacaagtactgatatttatgcttaagttcacgggagtcctggccagaaataaagctggaaggacaagtggggggcagattgtgaaggatccttcaagacctgcttcctctagagaatgggagactacccaagataactaaacagggaagtgatcaggttttgtgtcttagaaaagtgttgcagtgttgatgcaaatgtgactagaagggtgacttggaacctggattgaaggggtgggagatgggagaaaggaatgcagtctggcagcagctacagcagtccaggtgggaaaacccagagcctgaactaaggttgtaactagaggggatagggtggaagagctggattagagatgttgacaagataaagtcagtaggacttaaagactgacaagtaaggattttccaaaagtgagagctgtggaatgaattgtcttaaaatgttgcagtgagttcctcctcatcaatccaagtgctcgatcagaggctagacctttagttagcagtcacgggaaaattccccattctcacggggatttagactaggtcttaaccatactttaccaagattccagtagcaaagcacccaaaagtaatcgcaataaaattccaatttttgtaggccgggcatagtggctcacacctgtaatcccagcactttgggaggccgaggcaggcggaccacgacatcaagagttcaagagcagcctggccagcatggtgaaaccccgtctctactaaaaatacaaaaaaattagctgggcatggtggcgcatgcctataatcctagctactcaggcagctgaagcaggagaattgcttgaacccgggaggcagaggttgcagtgagccaagatcatgccactacactccagcctgggcgacagagcgacactctgcctcaaaaaaaaaaaaaaacaaaaaaaaaaacaagttttgtgaatttaagtttccctaatggatggtacaggtcaacatttgccatctaatgacacttacattccagttttttccttttttgagtaactgggaaaagggtggcattactgctggcttcctaaaattgaaaagtatactagggtttttaaacctgtgtagaatacatgatatggtagcaaatgtgctgtaggaagaaaagcaatgaggaactactggcctgactaggaggcctagaagtccctcccaggcttgagttgttctgacttggcatgattacatagctgcggcaagtgacgtttccttcaagccttggttccctcatctgtaaaatagggaactaatacctacctcacaggattgtagttagaattaaggatgacttcattaaagcacctctagtggtggaagatgtcccatcctatcccccacccatagctgggagctatgtttggctcattcttcctgactcactggattacactgtgactcagttcaatttcacacatgctgctgctaaattagggtcttggtgagcctttgggaggacagctctgaggaatgaattgtagcactgcagccctgcctgaggaacatgatagaaacaggtggtaggcccagctcttgccttccacctactaagcagtttttctgtggttagctgtgtgacataaactatcggtgtattaatttgctttcactagattcccccccccccaacaacttagtccaagaacatacctgaattctttgcatttccttgccttagttgcttttgtagggtggacagcaggactgcatgagaatagctgtgcttctggaccctatggtgaaagctctagtgaactgcaattaggcccagggtcccggaggaagaaggggagagaaaaaggggggtagttttccaaaagataagtaggggacaaaaaagtccacggggcctatgagcggtgagactcctgccctgattgtggcaaagcacctggagatgatagaacttcctagggaaaaggctgcatggagtccccagggatgctgggccctggtcaccaaggctccctgggaaggtctcttgtacctggggcacacagaccaacacttctgaatttgcaagcttaagagcatgtatgagcagaacctgtgcagaccaaggcttagagggctcacctcaatgttttgcactgtgtgagaccccaggaccttttcgtgattctggagaggggaacaaaccataataacaacaaaccaggtagcaggatagagactcattctcatctattttggttaaaagaaaataaatgtatttcttccacacctgattttgtgattgcaaattcataactaatatccctcgtcagctccgctgactcatccctgccacagggaggttcacagcaagagcacagaaactagggccagtgcccggttgtgtgaccttgagtaagttctttttcccttgaacagggagagagacacaatggatcagagtgtctctgccagttctaacttggggattctagtgggttgaaccgaacggtagtccgtttccaaaagaggaagccaagaccagagggggagtggttccttcaagtttgcagaaccagtaagtggcagagcaggactcatatctagttagtggttcagagcatgggctccggagctagactgcctggatttgaaccctggctttgccacttgcctgttgggtgactttggacaagctgcttaaattatgtctccatttcctaatccacagaacaagtgtaatactagttatctgtttcatggagtgattgtgaggattaaataaagttaatataacacaaagc

SEQ ID NO: 790 - DNA, 452 bp, Homo sapiens
ggaaccagccatgtctctgctgccccttcagtgatgccaaccttgggagatgccctcatcctgtacctgcatctggtcctgggggtggcaggagtcctccagccaccaggccccagaccaagccaagccctgggccctactggggacagagccccagggaagtggaacaggagctgaactagaactatgaggggttggggggagggcttggaattatgggctatttttactgggggcaagggagggagatgacagcctgggtcacagtgcctgttttcaaatagtccctctgctcccaagatcccagccaggaaggctggggccctactgtttgtcccctctgggctggggtggggggagggaggaggttccgtcagcagctggcagtagccctcctctctggctgccccactggccacatctctggcctgctagattaaagctgtaaagac

SEQ ID NO: 791 - DNA, 430 bp, Homo sapiens
aggctcgtgtgcatggcccctgcctcttcaggctctccaggctttcagaataattgtttgttcccaaattcctgttccctgatcaacttcctggagtttatatcccctcaggataatctattctctagcttaggtatctgtgactcttgggcctctgctctggtgggaacttacttctctatagcccactgagccccgagacagagaacctgcccacagctctccccgctacaggctgcaggcactgcagggcagcgggtattctcctccccacctaagtctctgggaagaagtggagaggactgatgctcttcttttttctctttctgtcctttttcttgctgattttatgcaaagggctggcattctgattgttcttttttcaggtttaatccttattttaataaagttttcaagcaaaaattaagtt

SEQ ID NO: 792 - DNA, 680 bp, Homo sapiens
gggttggaactatacccgggaccaaactcacggaccactcgaggcctgcaaaccttcctgggaggacaggcaggccagatggcccctccactggggaatgctcccagctgtgctgtggagagaagctgatgttttggtgtattgtcagccatcgtcctgggactcggagactatggcctcgcctccccaccctcctcttggaattacaagccctggggtttgaagctgactttatagctgcaagtgtatctccttttatctggtgcctcctcaaacccagtctcagacactaaatgcagacaacaccttcctcctgcagacacctggactgagccaaggaggcctggggaggccctaggggagcaccgtgatggagaggacagagcaggggctccagcaccttctttctggactggcgttcacctccctgctcagtgcttgggctccacgggcaggggtcagagcactccctaatttatgtgctatataaatatgtcagatgtacatagagatctattttttctaaaacattcccctccccactcctctcccacagagtgctggactgttccaggccctccagtgggctgatgctgggacccttaggatggggctcccagctcctttctcctgtgaatggaggcagagacctccaataaagtgccttctgggctttttct

SEQ ID NO: 793 - DNA, 1105 bp, Homo sapiens
gacttctttcctaggatttctttaacagaacgagttgtggttcgagaaggatttcagaagatcaagttacagtctgtttttaaaaccataggtgggacagctatggccaataggctataaagagacatttagcacttttttctatttaaaggaacaagcggggaagggtgctaaaagataatacgtttatttattcacacttgaattgcatttgtgatcaaaataaatgtttaaatcgctaaaggaaaatacagtaagtgcttgaaagatgaaggaccaaaaggccaaaaaacagtgaaatatgatcatcatctccttgcggacttctctgcctggttttgtgtgttctgttattcaaacaataaaaagctggtggaacttactctttcttttaagataagttgtagacttcgatgtttcatgctcatgtacttcaaataatgcatgttttatagttagtccctcatcacttgaagtgacttctgagaattatgcagagtcaacatggatcatttcacagtgagatgctttatggattgaaggatatggtaaaatgtttatagtttactttgaaagtaaaatatactatgtcttggttttgaggatattggatacaaaactctcttcctttagggctactgagtcttgattcctgatcatcagaaatttcaccagaaacaacttgcttccaatatacccaattctatatgaagaattcatggagagtgtactggcactggaagagtttagtgtttcttgtatgcttgaaaataaagtatgtactgttttgaatgtgttccaagtcctctgcataaacgatgtattttggggtctggttgggcctggaaaatggatgagcacttcagaacaggtcattttcctgatattggaagtgacatgtggccctataggaggcatgatgttagttaattacacatttgcctacatctgtgggaaatggagaacaaagccatgtgggtactgtaaacacacgtttatcttttggcccaatgccatacatatggtaggcatttaattactgattgtgtttggataatttgggaattttcgactgtggtaaaatatacataaaataatacttatt

SEQ ID NO: 794 - DNA, 950 bp, Homo sapiens
ggccccagtaggggtggggagggagggagaggccgccacccccgccggtgtctgctgttctttccccataggtcttgctttgttgcctgtcttgctgtctagggatggacttggttcctcttgtcaaggtttgggaatgtcaaagccccctccccacacagggcctttcctgtcccttgtggggccttccaaccctgtcctttccactggtgggcggtgatgcttctaggtccttagaactgcccagaaactctgagtcccagcagctgggagccagaactttgcctgccctcccttggttccagtctctcttctctctctctgccttggaacctgaccatactttagttgtgcccttcccaggcatcatcctcctaccaccaacctggggccccatcttggaatgggggctccttggggccagcccagtgtggctcaccacactcttctttttttttttttttttttttgagatggagtcttgctctgttgcccaggctggagtacatttgcctgatgtcagctccctgcaacctccgcctcctgggttcaagcgattctcctgcctcagcctcctgagtagctgggattacaggtgtgcaccaacacacccggctaatttttgtatttgtagaagaggcggggtttcaccatgttggccaggctggtgttgaactcctgacctcaagtgatctgcctgccttggcctcccaaagtgctgggattacaggtgtgagctgccacgcccagccccagtacactcttctctggaccagatctgtcccagtcctggatgcctcctcctactggtgccttcttttcttccagaggatttctctctccttcctcctcctttctttgggatccctgggttgccctgtcccaacctccttgttaggtgctttcccataggaggcccttcttgagaaacaataaactaggtagaacta

SEQ ID NO: 795 - DNA, 553 bp, Homo sapiens
atatccctccccattcttctcttcccctctcttccctttcctctctccccctcggtgaatgatggctgcttctaaaacaaatacaaccaaaactcagcagtgtgatctatagcaggatggcccagtccctggctccactgatcacctctctcctgtgaccatcaccaacgggtgcctcttggcctggctttcccttggccttcctcagcttcaccttgatactgggcctcttccttgtcatgtctgaagctgtggaccagagacctggacttttgtctgcttaagggaaatgagggaagtaaagacagtgaaggggtggagggttgatcagggcacagtggacagggagacctcacagagaaaggcctggaaggtgatttcccgtgtgactcatggataggatacaaaatgtgttccatgtaccattaatcttgacatatgccatgcataaagacttcctattaaaataagctttggaagagattacacatgatgtctttttcttagagattcacagtgcatgttagtgtaataaagagataagtcctacagt

SEQ ID NO: 796 - DNA, 8096 bp, Homo sapiens
gtgttaacagaactgaaatccgacaaccagaggctgaaagatgaaaatggtgccctcatcagagtcatcagcaaactgtccaagtaggctaggctccagatttatgaggaaagaaagggacagcatttgctgcccccacccctcttttccagtccttgccttccaaccaaaagaaatggatgttttggtggaaggacacttctttctatcaccctcttcagtcacctctatacactctacattttctctgcactttcaatgccctgttcttccaaacccctatcccaagttttatgacagttttaattgaagcatgattgtggtaattcgagccatctggagaatgctctggggagtacaccaggctcagctgtggacccctcaacttcctgctgctcagctactttgtccacattggatttggtccaaacatgtaagacttctaccctaatcagtatccttcagctttttacattaacccagtgtcctctgatataggtgagtcttgtggtagccactccaggatcctgattggggtgccaagagaaacagcaggatgttgaattgatcatcagatgccctctggaatggttagcatccaaggtgacagtgactgcattgaggcgctctattcttcttcacctctcaggaactgacttttattttttctgtcaacacccagtaatctccctaactagttttaacccttattcctccctcatacctagccatttctccaaggcgcaaatggccctggcttcatttattcctttcctttctatccttttatatttttcccttccccaccccctcactcaatggtataaaagctaggacagagcacctgacctcagttgtctttggccattgtgggaagtcattattctggagacaagaaaatcatcactctggtgccttggtggcagcaccactgcctgctccctggaaggtagactatggcataagtgtcagctcattgttttcgtctcccacttatcttcccccttcaaagtgattttctttataagaaaatttgggctctgaatactccattctgcctcacttccttgaccttgttttcctctcttcgccctgacacctgcttctaatgagaaatgaagtcagtgcaaggaggaatgagaggtggggaggggagattgttgagagatggactaggaagtggaagcaggctggaaagacacatatggcgaaagtcaagtatctgaggccacttgcaacattgtgacaaagaagatggaagatagcagcctactgggctgtgagaatagtggtgaatttgattatttccagtggttagatttagcagagagatttactttcttagaaattaataggggaaatggcacttaatagaggtttaatggaatgaagtactttcaacccattgatgagagtcatggaagtttagagtggcaagacccagaggtcattaggtccagctttctattattgtgtcacagggacccctgctaccacagctttcacccatgggcatggtcaggtagcctctggtggctatgcatttattactcaaaagttgggcaactctaataacgagagagtttttcctcatatcagctgaagtctgcctgtggattctccttgtagtccagatctactatctgcaactctttaacggcacttgagatatgtgcagtgggtggtctccccctcagtcttactttgagctgctgttactctagtcctttaagtcattcctcatatggcatgcttttcttacctgtcacatcttggccatcctcctctagacaaaaccagcctttaaaatatcatgtccaggcctggaaagaatacaaatccagtgcaaaattaaaccattagttcttgatgataacctagcattaatacttacagtattttctttttgtaggagttttatcccttggttcacttgagtgtgcaagtcattaaatcctcatcattttagggttgccagtgatattcagtgtttagagtggttcattcccttaatatatactacctctgtctgttaattctttcctaacatgacatgtagctctccatggtcctccctctgaaacaccacatgctgtttaaactagaagctgtaattcaagatcccaattccaccaggtgcagtggctcatgcctgtaatcccagcacttcaggaggccgaggtggacagatcacgaggtcaggagttcgagaccatcctggctaacacggtgaaacccaatctctactaaaaatacaaaaaattagccaggcgtggtggcaggcgcctgtagtcccagctactcaggaggctgaggcaggagaatggcgtgaacccgggaggcggagcttgcagtgagccttgatcacgccactgcactccagcctgggtgacagagcaagactccatctcaaaaaaaataataataataaataaataaaaaatcccaattacagaacaggagatatgtttcctctgacaaaaccccatttttagagtgtataaaattctgtctttcatttccaaccatttttcaagagaagctgctactatcttgagacttcgtattatcatgggagtactgtaagttcagttctcagggaatgctaaattagagtaataagttttatatccttcattctgggagaggaaatcaacataaggtgttgactaattgattatcctggaacattttgaatattggggaaggaagatgatacttctttctcaagaaaagaaaattggattattaggaatacatcttgacccttttccactcaatagaccagggaaaggggttacagagagcctcctcagatctgtttgtgcctttcaaaagtactgggggcagattctcaaaactcttagattggtgttgcatccctgccacttcacatgacccttccatgttaaagctgacttttcttgccagaaagttttccttgtgacaagaaatttgcaagcttttcaatctcaggaatactggattctatagccaagaactcatgaaagtaagtgtaaactatcctaggtaatttcaggtactttctcttatgcaattaattttattaactgatttctggtctatctccagagataaaataccattccttcacaactgtattgtctggaagccccatgagatggtaattataggccttctactagccagcagttctctctggatactggcatcagcaggtctcctttttcttgtgctgcttggacaggtacctactgctggcctcttcagtggccacaatcctcagtcctcacctgctggtttggagactcatgagcaccccaggcagctcaagctgaataaatagctgcagacatggccaacaacatggggctcaggtctgtcacttaacttagagtctttacatgaaatatcagaatgggaaagagaatgttcctggtaaaactctgttttcattaatttgttatttttcaaaaaccgagccacacctttggaagtaatgatttggccattccagagattctggggctaaagtttgtttttccagggctgctgatccttttccagatagctccagagtatgatgaccccagccccatcccaatctctagcgaaagggttatgcaaatctcagggtgttgcctctaaagaatctaaagaatagacatgctttgggcttactcagtgtaccagattctctagtgggccattctcatttgatgttccctagaacctccctgtcttccaactgcaggatgtgtttacttctcttctgggcttcccctggtttctgtcctagttcccaccccaagtttaagaagacttagattcatttattgctatctgaggccactagtgagatttcagatctctcttttgcaacattttacccatttcccttccccaaaccatgtgcttattagatggttccactcaggaagcaaggaagctaaaactcaagttaatggtctgtggatcccacgaaagtgtgtgtaaactactgactgtttctccactagaggcatttaattgagccaaagatgatggaagaagaaactctcaaagccatgtactttgttaggtgtctggatttttggcctgtttgcagcctctcctagccacagacagacactgtctcctctcagagaaaggccagtgtttcggtccaggccactggtgagtgtcggcacccttgaggtgggcatggagtgagcagaagaagcctggagaagagagaactatttaaaagtgttgccagttattcagcttccaggcggctttgcacctccaaaggtgcaaaaaggaaaaagaaagcagaaaggattcagcatttaagcagaaagaaaagggaaattctactctaccagatgagccactggttccactggagcttatcagtgaagtaacactgcaggagccctggtatccttccctcagagatatcatcaggggccctcaaaccccattgtttatgccagcactgaccgcactttaagcacacacttaccaatcagaggtcgtgtaattggcctaaatctaggcccagttattactacaaatcttagtcaccatactctctcgcccaggctggagtgcagtggtgtgatctcagctcactgcaacctccacctcccaggctcaagggatcctctcacctcagctcccgagcagctaggactgcaggtgtgcaccaccatgcccagctaatttttgaatttttttgtagagatggggttttgccatgttgcccaggctggtctgaagctgctgggctcaagcaatccacctggctgggcctcccaaagcgataggattacaggcgtaagggcccacgcccagcctaccatactgattttcaaggcagggtctaacccttcataagatgtgagttcttccaacccaataagcaggcagctttgaggacaaaaaggcaacattaaaagataagaccctagaagtcagaacatctgtattccaaggccaccccttctccttttagtcatgtgactttgggcaggtcaccctccctgtctgtaaaatgaggttggactggataatctttatgtgccctttccttttggcttaaaattctgtgatttattcattcttaggaagatcagcatatttattgggatttctgcttcaaaaattctttctaacctcaaaaatccaagtccagaattttttgttttcttctggatttaaactgtttaatatgagcacatcaaggttgacttctcatcctttttgggaagtgaatttaatattgagggtaattgaatgatgttgcaatggctttccctcctgctggcttggtaagaatattaaagcctgcagaggtggaaattggagctcatggagaaatggatagaaagcaatttgttgcaggcagcctttggacaagttgttttaataggaaatagacctgctgcttcataggtttcctcaaccacctttcctcagctttcttaaaatgggatctacattggctcttcacacccaaatagcagactaatcgtttttctgcttagcaccgtctggttcattgtcttgaactctgccttacagcagcaagaaaattttcctcgacaagaacctcaatctttagttccattgagctccccctctggattttggacttaccagaagtaggaggttctgataccattcaagatggtctttccttcaaagcaggtctgaagaggagactaccaaagcagtgtttacaaacccagagtccacacaaccatattgcatagaacagcacttggctttcacaagcctcctacaggacctggtgtaattggagtgaaagggcagagaccctggaagtggaggtggctgtgtgctgcgatgggaagaaggcagaaggcccaggggctttggacatagagcagggtggaagctgcaagtactgggaaggaagagagtttcacagaaacaaagctttgtcacacagaaatgagttctgtctcactggtgacttcatccctcaggctccagctgagcagagattttaatcagcttccttaatgggtattgacactgctcaggaagcagtagaccctgtcagggacagctattgatcttttgtgttctgattagattggaaaatagatcaacttcattgtagtccaggaactgttggtcacagctactaggaatgaggtgatttctgagggctgagaaaaaacacagaatcttggccagcagccagcagctgcatggtgaaagatgcattcacttctcctttgagagttggggttgagggcaaacatagaacccaggtttggcttacaacccagtgtcccggaagccctccttcgggagaactgtaagtaagaggtgggtgtgtctaaagacaataccattaatgaatgttctggccttacctaaaaaggtttagcaatttggggataactcttggatctagcttatgtgcgttcacatgcacatttgctagcccagagcttttaaaatgaggtctggcatatacttgattacaaatgaaaactcagaaaccaattttatttattaaatcatatcttttgtttttccccctcccttctaatcccccaaaggacctatttgagctgttccccaattcatctgcttattttggaccatgaatctgccagagtgatattttctgttatttctcctccaaatttttccctgatgtttccaataaagatttacttgggtggccccttaaggtgacatcaggatgctcttatgtccttccagaataagcatacacttcactcctctccctttcatctccctctgcattcttaattccttgcttttctcacttggagccgagggtgctttagagaggtggttttccatgaatcagccaagattcctgtagaagttgggtataccaaccaccaccaccaccgccccctattccagtttcaaagctcctcggctatgctaatgtcccctcagagatgaggtttgacttttaggcccgtatgactcctccatagcctggccaaggagaccatgagtagccatgtctggtttactctttatcctgagactgtttatagcttaaaacagaagtgtgtcttcccagcacaaacctaatcaatcagtgtatcagtgcatctggtggcaacagctcagcccattcaaagagcaaggattcaggaaaggcacactgatggtggggagcctcttaagagcctctaatgttctcccaaaaccagagttgagagtcggagtgccagtcgtcggggcccactattcctgaataagggacatgcaagggccagaagtagcttgactctcgcctaaatatctgtgcctttgcctgtcctttctcccactctactgaaacccggaacagattcccgcttgccttctgatgaagagaggttaggtaaagagagtttggaggaaaaaagacaccaggaggcaggctgcggggtaggagagggttctgagaggaggcagcaatccagaatacctccttttctagccagcatcccttgaacttttgaaaggttgtgcctaccactggctggcacaccagggcaatgatttccctgcagaaggaaggaaagaatgtttcacccttgcatccttcttggagaagctacagcctgtgctcagttgagtggttcacactcagactttggctttatggttttccttcctccttgtctttgccctgaccttgatcaacaggggtgaaaagaaccaccctgaggtttccatgcctctcccattttagtggtagcattttgtgtctttactccacccttcaccctagttccaccaaggttcacacaccagatgtaactgtttttcagctgagttgtatggattaacttcagtccactgtaaatacacctgggatggggtggggttggggttgtttagggagaagcagccagacttgctttgtgaactgaatgtatttttatgcaattttgagtggcctttcaaccctaagatgaatggttttgttttactggttgttgttatatagttttgagtattctgtgtttgaaagtttgggaataataatattcacttctatatgatgcctgtaaacacaacagtatttataaatgagtaaataaaactgtgttttaactttg

SEQ ID NO: 797 - DNA, 1029 bp, Homo sapiens
ttactgcttcccatcccttgggggcagcctcgagtgtagtccattagtaatcagattccagtttggacagggtggctggattgtatatctcgttagtaatgtacatgctcttcaggttctagggctcctgttaggggagggagaaatgttgaatcaagagggaaaacaactactatgatttataaacatattttaatgtaaaaatttgcatttaaaaggagtggccctgttttctgtgttaaaaccccatttggtgctattgagtttgttctttattcttttatcccagtgaaaattgttgatcttgctgtagggaaaaattaaactctttgaatctccaaacaaggaagtttcagcattcccttatggatcagaggaaccttagaggcctgaaattgttgcttccagtttagctgcccctcaaattcaagtgaatattttcccttctccctttacccttctccagaaataaagcaggtgacagggttttcagaatcttaccatattgacttgtgtatcttttttaaaaaataatttgtgatatttattgcatacattttcttttggcagttttggattttaggtatttttttgcatgaggctgataatggtgatgatgactttatacccttggtactatactaggaactttacatagtatctctacttctcacagtcttgcaaagtaggtgatattattcccattttatagttgagaaaacggaattagtgactgtacctataacaccagtaaatgcagagccaagattctgacccaggtctttttgttgtaccataagtttaaaagatgagtctcatttttcttgtggtagatggtggtaaaaaggagtaggcagagtgtacatagataaaaaaaagtaaaagggtaagtaaaaaattgattgtggtatatgttattctaatcagccaaaaaagtttagaagattgatgaaatgatcttttaaatatgtatttctgaataaaatgtaaaaccaagaaagttatttcaggaaggatagtgaccctttc

SEQ ID NO: 798 - DNA, 2345 bp, Homo sapiens
ccatggcccccagggctggcttcctccttctgggtttcacaggctcctctggccctgacccctcttgctcgttccccttccttccgcagctcctagtctcgtccgtgactttccggttgccctggatctcagaatatattcgtccaccccctcggcaccccattaccccgagtcccaccgtgtgtccgttgtaagtccggtggatgtggctggggtttcctggtattgtggaggcacccaggttgtccatgcttgggattctgggggaaggagagaagggcagctcagggtggatgtgaagccacccttcctcttctggacccagcctggtctgcactgcaacctccaccaggaccaggatcctgggccacaggctgggatggtccttccaagaaagggtcatttcagacgcagccctgcttgggctattcaatcttagggtgtctatccacgtctggctgtgccaaatggtctggcagctggttttggcatccccagcatcaccactctcccaacccatcaccgtgactgcagttcctgcccccattctcttggggtcagggaggggctgggaagggctactgaaggccccattctcccacaggatggtgaggctgggaggaggaagactgaggtagagattccaggccctggcataagctgaatcccaaatttgagtttgggaagaaccagagagaaatggatccctgagctctgagccaagggtgaggatggggaaactctaagctcccacctaataagaagcataggcagaccagccagagggagagccaatggcctctggtagccttaagcccaaagggcagtgggaatgtcccctgccccaaccatcgggtggagctcctgctgggctatggggaagggaggttgtgcggatcttgactctagggcagaacagatctaaccatgcattgctagctctgctcccagcatcccttccccttctctcctcctctgcctcacttctttagtaatcccaaccctataaaaatgaacctaatgggtggattgaatatacattgagcccaaagtcaagtttggggaaaaggcagactaaggcctcctttctctgacctcccaggaagaaaatagcttctcctacagtgattcatgtcccaggtccaggaaatccaatgttggtgaaggcagccactctcttgcttgtccccaaatcacctaaccctcatccagggctattttggtgggcagggactgcctcctcccggaattcctaagatccgcccagctgccaccattttcattgctttccccagcagcatgatgggaacccaagctgagggatacaggtcctgatttggtaggaatattattcccaagaaatacccgctcctcacctactccctcatcctaccaaggtgcctgaaaatgttcaagacttatgttcagggtgggatgatggaaccgagggcttcatcaaagtgagaggaaaggaaaagcatctggcatgtgtttcttggataggggccagtgcagtgccatcctacaggtggctggagcagctgctttgcaacctgatcaccttgagttctgagcagggactaggcttgcaggtgagataatgggccagggcacccagtccagaaggagcaatggcacctgggcagtgccagggcttaaagcccgctgctccttttcggtagaggagaggcccatcactggtgtggtggggtgggctctcccttaggcttgggcaaggcagccacctgcccttgctctcccttagtgttccctggcctccctgccatcaggttgctgggagtggagatggagggattattgagcagaaaatgagttggatggagataaacagctcccatccctgggtaatggatggtaagatgatggagattcctaagattggtggagttgggcaatgcatagccatctgactccttcagggtgctcttgatgggctggctgtaagggagactcagtcccagcctctcccctctacaactcctgccactgttggccatgtcgtaaggcagcagctgtgccaggatagctgggtccattcagagcaccttgagaagtgttgcagggaggtgttaagaagagaactctgtgcaaacagtgatggaaggctgttgtcttggtgtatcccttgcctcatagtcaatatattttttttttggcgagtcaccagtgacccgagccctccacaccagcctcctgtatctcatcaggtcccttctcagtactgtatttgctcagtgcatcaggaatgggtgtatgggtgtgtgtgggtgggtgtgagtgtgggtgtgtacgtaccaataaacaacctggttttaagacaatgt

SEQ ID NO: 799 - DNA, 1505 bp, Homo sapiens
accccgccttccgctcccaccagcccacatccagtggggtctcagtccagtcctcacatgcccgctgtcccaggggtctccctgagcctgccccagctgggctgttggctgggggcatgggggaggctctgaagagatacccacagagtgtggtccctccactaggagttaactaccctacacctctgggccctgcaggaggcctgggagggcaagggtcctacggagggaccaggtgtctagaggcaacagtgttctgagcccccacctgcctgaccatcccatgagcagtccagagcttcagggctgggcaggtcctggggaggctgagactgcagaggagccacctgggctgggagaaggtgcttgggcttctgcggtgaggcaggggagtctgcttgtcttagatgttggtggtgcagccccaggaccaagcttaaggagaggagagcatctgctctgagacggatggaaggagagaggttgaggatgcactggcctgttctgtaggagagactggccagaggcagctaaggggcaggaatcaaggagcctccgttcccacctctgaggactctggaccccaggccataccaggtgctagggtgcctgctctccttgccctgggccagcccaggattgtacgtgggagaggcagaaagggtaggttcagtaatcatttctgatatttgctggagtgctggctccacgccctggggagtgagcttggtgcggtaggtgctggcctcaaacagccacgaggtggtagctctgagccctccttcttgccctgagctttccggggaggagccttggagtgtaattacctgtcatctgggccaccagctccactggcctgcccgttgccgggcctggactgtcctaggtgaccccatctctgctgcttctgggcctgatggagaggagaacactagacatgccaactcgggagcattctgcctgcctgggaacggggtggacgagggagtgtctgtaaggactcagtgttgactgtaggcgcccctggggtgggtttagcaggctgcagcaggcagaggagagtacccccctgagagcatgtgggggaaggccttgctgtcatgtgaatccctcaatacccctagtatctggctgggttttcaggggctttggaagctctgttgcaggtgtccgggggtctaggactttagggatctggggaaggaccaacccatgccctgccaagcctggagcccctgtgttggggggcaaggtgggggagcctggagcccctgtgtgggagggcgaggcgggggagcctggagcccctgtgtgggagggcgaggcgggggatcctggagcccctgtgtcggggggcgagggaggggaggtggccgtcgagttgaccttctgaacatgagtgtcaactccaggacttgcttccaagcccttccctctgttggaaattgggtgtgccctggctcccaagggaggcccatgtgactaataaaaaactgtgaaccctg

SEQ ID NO: 800 - DNA, 2161 bp, Homo sapiens
gcccttccgcccccgccctgggcgccgccgtgctcatgctgccgtgacaacaggccaccacatacctcaacctggggaactgtatttttaaatgaagagctatttatatatattatttttttttaagaaaggaggaaaagaaaccaaaagttttttttaagaaaaaaaatccttcaagggagctgcttggaagtggcctccccaggtgcctttggagagaactgttgcgtgcttgagtctgtgagccagtgtctgcctataggagggggagctgttagggggtagacctagccaaggagaagtgggagacgtttggctagcaccccaggaagatgtgagagggagcaagcaaggttagcaactgtgaacagagaggtcgggatttgccctgggggaggaagagaggccaagttcagagctctctgtctcccccagccagacacctgcatccctggctcctctattactcaggggcattcatgcctggacttaaacaatactatgttatcttttcttttatttttctaatgaggtcctgggcagagagtgaaaaggcctctcctgattcctactgtcctaagctgcttttcttgaaatcatgacttgtttctaattctaccctcaggggcctgtagatgttgctttccagccaggaatctaaagctttgggttttctgaggggggggaggagggaactggaggttattggggttaggatggaagggaactctgcacaaaacctttgctttgctagtgctgctttgtgtgtatgtgtggcaaataatttgggggtgatttgcaatgaaattttgggacccaaagagtatccactggggatgttttttggccaaaactcttccttttggaaccacatgaaagtcttgatgctgctgccatgatccctttgagaggtggctcaaaagctacagggaactccaggtcctttattactgccttcttttcaaaagcacaactctcctctaaccctcccctcccccttcccttctggtcgggtcatagagctaccgtattttctaggacaagagttctcagtcactgtgcaatatgccccctgggtcccaggagggtctggaggaaaactggctatcagaacctcctgatgccctggtgggcttagggaaccatctctcctgctctccttgggatgatggctggctagtcagccttgcatgtattccttggctgaatgggagagtgccccatgttctgcaagactacttggtattcttgtagggccgacactaaataaaagccaaaccttgggcactgttttttctccctggtgctcagagcacctgtgggaaaggttgctgtctgtctcagtacaatccaaatttgtcgtagacttgtgcaatatatactgttgtgggttggagaaaagtggaaagctacactgggaagaaactcccttccttcaatttctcagtgacattgatgaggggtcctcaaaagacctcgagtttcccaaaccgaatcaccttaagaaggacagggctagggcatttggccaggatggccaccctcctgctgttgccccttagtgaggaatcttcaccccacttcctctacccccaggttctcctccccacagccagtcccctttcctggatttctaaactgctcaattttgactcaaaggtgctatttaccaaacactctccctacccattcctgccagctctgcctccttttcaactctccacattttgtattgccttcccagacctgcttccagtctttattgctttaaagttcactttgggcccacagacccaagagctaattttctggtttgtgggttgaaacaaagctgtgaatcactgcaggctgtgttcttgcatcttgtctgcaaacaggtccctgcctttttagaagcagcctcatggtctcatgcttaatcttgtctctcttctcttctttatgatgttcactttaaaaacaacaaaacccctgagctggactgttgagcaggcctgtctctcctattaagtaaaaataaatagtagtagtatgtttgtaagctattctgacagaaaagacaaaggttactaattgtatgatagtgtttttatatggaagaatgtacagcttatggacaaatgtacacctttttgttactttaataaaaatgtagtaggat

SEQ ID NO: 801 - DNA, 4468 bp, Homo sapiens
gccctactccgccaccggatctgctctgaccgcacttgaaggctggggcccaggcacctgtgccggccattcgttttctctctctccctttctttctcccagctttgcctcccttatcccaccctcgaggcagggaaaagccatctattcttctgcagcctcaggagcgagacttcaaggactcagtttggttccacccagttgaaagacacccagtgcacacccaaactcctggccttctgtggtttccctttgctccagaaacacagatgtgtctaaagacttggtgtccccttctctctcctcccccacccgccactcctgggtacatctgggccgtggactatctgatcttggtcctggccgagcaaacagcccggaggtaaggttcagaaagtccccctggggactcctccatcttcggcagctctggctcaaagaggccgagaaacccagttctcctgggccaaggatcccttctggcaaagctgctgctccgccgcttggttccccggcaccagacatcgccctggccctgctggcccgggtatcgggaaggaggagcgagggaatgacggaggtagggtgcagggtcagggctcccgcaggggcctgcatctggccagcaggacacagggatgcgcagggcgcccccttctgttccagggtgaacatagcacacgccctcctggctgggcctcaggaggaacagccaaggagaagaatggcccaaggaactaggaagcagccatgggagaggggaagggttcaagcccgggatgggcccgcgtgacgtcgatgggtcctgcggcccccttgcccaacctcgggtttagggaggagggttcacagtgtttttgtgggggcgggggaaggaagaggcagccccgcccccgccatctgttctccatcagtgtgcgcggcccagccatttccaccctcgggaggcggctcctgagaaacagggaggaaggggcggagcacctggacgtctcccagaagcccctccacgtttgaaaatgcgcctcctcctcggagacagacgcatcggtgccacctagtggctggtgggagtaacagctggtcccagtcttgcgcctggccctcttcctggggtgattttcctcggtggaggaggcccgtggggtcccaacacggaagagccatgggccgtgtgcatggtgtcgctctcctctagggtctagcgggcacaaacgtccccaggctgggctcattcccatcgtgagtgagcccaggtgaggacatagtcggctcccgtttgttgtaggcccttcccaggtgccttctcagctccctcatctgtaaaccgaggaggtggataagatgctcccggccgggcgcggtggctcacgcctgtaatcccagcactttgggaggccgaggcgggcagattattgcctgagctcaggagttcgaaaccaccctgggcaacatggtgaaacccccgtctctactaaaatacaaaaaaattagccaggcatagtggcgcgcgcctataatcccagctactgggaggctgaggcgggagaatcgcttgagccggggaggcggaggttgcagtgaggcgagattgtgccactgcactccagcttgggcgacagagtgagactccgtctcaaaaaagaaaaaaaaaagatgctcctctgaggtccctccggcgctcatgttccgagtctgcagctccacactttaaatcatactcgaatgcaggacaagtcctaaatatttgccccttcccttgcagtaatttattttctgtatggactgtccctcccccagaggcttccccaccctccattgcctggcccaggtgagcagcttggcaggtctccaagtggaacccggtccagacagggctgcctcgacttcacctttccccctaacttcctccaagggatgctgccccttctcagccccctgcgtgtgtatattggtgggaggcatagaggatggatgttctagaaatgagtaagacacagtgcccacccccaagttaggatgaaaaaagttccagaggtttttaagaaattggattaagctgggtccctaacttcaagaaattcccattatgctccttctcacctttcttttttgctaattatggaaaatagggcccatttcatcatagcctccttcccccgtgctccactacaatcgccgcattctttctagctgcagctggtttcttcaaggctcctgcttaaagtccacacgttattatggccgaaagcaacctggtgcttcggcctggataagagccccttctgcatcttattcacagcttgcagcctcagcccctttgatgaggccctcaggggagaggtcattaccttgatcctgcaaacccagactcgttgagcagcaacgcaatcaccatcatcccactgcccaatctagaatatgtctgctctcctttgctctctgcagctgtaagccagaggggattcaaggtaaataggctttacaggctcccctcctccaaacacacacagaatgggctggtttctttcaagtttaaaaaaagcccccttctccatgcacaagttcattccctccatgctgtcgtcatcgacatatacaggtgtgtacgtaggtgtatgtgtgtactctgcacgtatatctcttctgtcttgaagaccctgttaactttgtgaaataacttccacatttcaacacacttcacagtacaggaaataaagtaatatgaaaaacaccctgcgtgaactcaacggtgtgaacaggtcaagaataacacttcaaagtcatcttgccagccaggcgtggtggatcacgcctgtaatcccagcactctgggaggccaaagcgggcagatcacctgaggtcaggagttcaagaccagcctggccaacatagtgaaaccccttgtttactcaaaatacaaaaattggctgggtgcggtggtacatgcctgtagtcccagctacttgggaggctgaggcaggagaattgcttgaaccctggaggcagaagttgcagtgagccgagatcgcaccactgcactccagcctaggagacaaaacgagacttcatttaaaaaaaataaaaataaaaataaaaataaagtcatcttgccacccaccccctaccattgagccaccatgcccagccccaaagcctcttaattgctctaacaagatgagtggggaaaagattatactcttaagaaattcctacgaaagctatccaaaagccttttctttcctcttttcttattatttttaaatagaggcagggtctcattatgttgcccaggctggtctggaactcctggcctcaagtgatcctcccaccttggcctccccagagtgctgggattacacacgtgagtcaccatgcccagccccaaagccatttcttgaagaatttctcgcaaactcacaaccctcatgaaaaattaatcctcagttccacgagactgcccacccacagacaaaaaaatatatatattcctaaagtcggaccagaaatctgacagctgcctttgaaacccaaagcctcgggttctttcaagctacatgtactaaattgtcgaaggtctcccaggagctctgtactgaggcagacacagaaagacacaaaacggtcgtctttcctgcccaagtaaagcttacagactaactggggagatgtagtgtgcatacaaaacagtaaaagagccatctcaaggacagagagcatagaccaagtcatctggaatggtctacatgccatgcggaagtccaccgaagggttagaacagggtgtcccagactctctcttctgagggaaggttggttgcaaaagtgggattcatgaccctcccaggctacaccatcttctttagaatgagaactgccaggtgacgccctcgctgctcctacctggctactaaacatcgacttcggttcacttcacggatgttcagtggatatcggtcacatgccaggtccccagctacgcattcaaggatggataatatacatagcagcacatccttgaggaactcataccttggtaaagggaaagaaatccatgaatggatacctctgtgtcctaagtgtttgtaataatgctgtgtgtcaggcctctgagcccaagctaagccatcatatcccctgtgacctgcatgtgcacatccagacggctggttcctaccttaactgatgatattccaccacaaaagaagtgaaaatggctggtccctgccttaactgatgacattaccttgtgaaattccttctcctggctcatcctggctcaaaagctcccccactgaacaccttgcaacccccacccctggccaccagagaacaaccccctttgactgtaattttccattacctacccacatcttataaaatggccccatccctatctcccttcgctgactcttttcggactcagcccgcctgcacccaggtgaaataaacagccttgttgctcacac

SEQ ID NO: 802 - DNA, 304 bp, Homo sapiens
gtcatctcttggaccagcgggcatcacattctccagcagccgccatctcacacgcctccctcctgtggccgccggcagcatggacaaaggtctccatgcagggggaggaggcctgcttctttccccacagctctcacgtctcccttctccctgcgggtgacaaagaagcccaaggaccacctccttcctgcctcattgtaataaaattccccacactgaggccttcttgtcttcaacctggcctgtccagcccttccagatatggccaaacccatggcctggatgggcttgtgtacttcctttc

SEQ ID NO: 803 - DNA, 4508 bp, Homo sapiens
ttccctccacgaaagcattcagaaaccctacaaccaaaagtccatccacagcttcatgacccaccctgaattcgccatagaggaggagttgccacgaacaccactcctggatgaggaagaggaggaaaatcctgacaaggcttctaagtttgggactagggtgctcctgttggatggtgaggtcactccatatgccaatacaaacaacaatgcggtggattgcaaccaagtgcagctcccccagtcggacagctctctacagagcctagagacatcagtttgaattttctttctctgactctcatccctattttacctatttccattttcgtctatcccatctatgaggtgatgatgggacttttcattgtcacgtcagctgctgtgttaacagcagtgtgtgtgaagtgaacctctacctgaccatgaagaggcaagagcacagacttacaaggatttcaacttaagcttgacttggggtttgtagcgggacccagtcaaaccccattcaggtcatggtagaatctactccttggtagtcacttgtcatttttaaagaaatgatgacaatcctcttggcatcaccccaccccacattctccccgatgttcctctcctgaattctggattttgtcctacaagtctgtgccatttataagctaagttgagggttcagagggagacaaatatccccaagtgaaatatgttgcggtagagatggaatgtataaaatccgccagtagtgtgattgtttttcaatttttcccactttgaaaacttacacctaaaggcctgtaggcctctaactctttctgccctttcattcaaacctctccaaagttctttgtcttttgtcttcccttcctttccttttttttttttttttttatgatgattaagaaaatggaaaggatatggatgaattgtgtaaacttagatccttctcccttttggcccaaaagaacccttgatttagttccagaatccaaccagtttctttgttaaaagggtccttttgaagcaattaagtgctggtaagaatatttctctgttgttgccaggttaccttctgcttttaaattgccatcttgtaaagtgtatgtggttcttaagtgccagggagatcagccttgcccatgaaggttgcatatgtgtggtatacagtttttacctgaaagcctgagctttctcttattcctaaagtggtggcaaaagaatgaactgggtatgaccctgcccccttactgggcttggatattgaggaccagacgctgccaaatctaggacaagacagaccatcaaagcagacttttgtgggctcctctttggggtgaccactgctttcaaagccatctgccaaggctctccagggcaggacctgactggtggggaatgagtgttcagaagccttgggagaggccaaagagccattctagcatgatctgagaaaaccttcctgcagaggccagaaaccttgagcttaggtgcctggggaccagcttcgacattctctccagtttctgattctaatttttgccacgtgtcacaacttttccagtctctgagaaggtcccagcctttctcaaatattctgattttgaaaatatgtatccaaagtgggaggcccctgtgacattttgccaacttaaacgagaaaaagaccccccgcacccggcacactcccccttcctccagccccgcttcagccacatgctccagctgctgcccagtaaagccctgtgcctttttttcccctgaatactgcccaaagcatccccttcccatctgcctctcaggagttggggactttgctaggagattttttaagtgttccttactgggacaacgtggagccacgtttgcaggagctccatttgtatccctgctggtgttgacttctgtgtaggggccagttcatgtccctgactctcacctcccattagataaatgaagcccacccccctttctagagtgatgagagtcaagaagaggggatgtatgaacggccaaattcccatgtgagaggaagatgacctgatccacctagccttttcttctggatctgtcctccctcacccctttcacctgagctgtccacagtaggaaacataaagaaacaatgtcccctacatatccccatgactacataatccatcatcgtaggaaataggaaagcaaatttgattttggttttgtaaaacgtacatgcttcaataattcttttttgtgtcttaaatactcataggggaaaaaaacagctcacccaaggtgttaggtttcacatatatattcatcaactattttagaagatttaattctatcaaatcttgtattacctcagatcattttaaatagcaagccaataacgagctttgaaggctattttaccattcctgttcacaaaaggttctcatggtgcctgacaggttacccttgagggcttgtgtctactttttaaaagtcaatggttttttttcttgtgttctagtttccataataggagagaaaatatagaaatatatgcaaaaattatagttttctttagatcagaaactgatatttttgggtcagccatatgtattttgtttaaaggatttaaaataaagtgccgtcatgtagccctgtggaagggagcacataaccagctgtttggcatgacaggtgacttagtatatttgtaattggttttaaaaccaatacaccatactttctttctgcaaacagccatctttatacttagggaagaaaaattgttgggttctagacttttttaatataaattttgttgatatggaattaggtaagtttaagtgtctatgtgcatatgttttttatataagttttttctattcagtttcactgatccaactggcagtgggtaaatatggcataagttaataacacttttccccaaaatggtgctttggatttgaaaagggtctgatggggagaaggagaacgtatcatcctagcttcctctcttaataaacctagaaaaacgggtagtaaactgtggatagtcaggaaaacacccagcaagggacacagctgtcaggaaatgaatcttccccccaacccccaccatgcagatggatagacagaatctttcctgactagtcattaggatcaggggcctctgttggatttgtgtttcttgaagaatagctggcagagtggtataaaagacacgaatatctcctggtctataaggatactctgatttggggtttgcatttttcatggtttttatttcctgttccccctggagttttccattagtgagtttttgtgcaaggatcttatttgtgatgccttccctcccctagaaagattttgtgcaatatattaaatggggacagaattctaaatggataaaacaatggctggttctagccctgagtgacagtcttaaggctagatccttcccatagtatcatctgtcctctggaatgactctcctgtccctaaaggggttaagagagagatcacctagaaatccctctggacacttgtgggttctttagggtttgagtttcttcttccccttgagcttcagagaggagagttggcatggttaaatctgaatggttacctcactgctgaaaacccagaggggcgtggcacactcgcttgtgtggaaaagcctctaaatgcatcccttcctttctttcctgcttcctttgccttacaattgaagcagcccgtggtaccatcacagtatgcagagacttcctcacctttcatatctagggaccacccccgatgcattggtgagggtgggcacttataaatgcctgctattgttaagccattccagcctcttcctctgaatagaccagacgccctttcacttagttcagtgccagtccttttgccttcccaaccctgctgttaggcctgctgttccctttgctcttgattaggagagatggaaggagatgagctcccataactgaattggcctttggttcatgttttctccccatatgtatatatgccatatgtgaatatgccatatatatgtgccaacaaatctatctacgttgttcttttcaaattagcacgcagataggaattttgagtttcttcttcttttagtaactagtataacaagcactggtatttttgtacaaaaaagaaaaacaaaagattgactattgtggtctgcatgacataaacaaacaaatggtgatatcaaagcaacgtataccccagtccagtgtgtgttgccataatttgcaattcagcttaacagtgcacccaatctatatttgcattttgatattatttaagctctatgtacaaggttttgcatgtatttatatggttcttagggaaaaaaaatgctataaactgcaaatctgaaattcaaatgtgttgttccactgagaccagaagaagaagaggagttttaaaagggataatttgttggagccaataaagctttttgctgatgaacagaaaccaatactgctgtgcactgagaataaaaactcatgcccacttgt

SEQ ID NO: 804 - DNA, 1669 bp, Homo sapiens
agacccaggtacccagccataaagccacattgagtagtctatcccataggattgactactgcagagtctagtgcagacccgtgatcaccttagtgcttcagtggattcactggttagattaaaaagaggctgagatgagcagtgaactaagaggccacacaaaagcagaggtttgggaattccagaagggaattcttctcaagcagagtgtggttatctcctgtaccagcctaagaatgtttgctgaaactgcttcctagaactgtgaagaaagcaggaaagtagtgcacagtagtctaagattattaccttcattaataccaacaggctgcaaagcaagagtatagattattgtataatccagtcagaggtcaaaaggaaggaagaagttggagtggagtggggtgggcaatttccattttaaagagtgtaggcaggccaggtgcagtggctcatgcctgtaatcccagcattttggtaggccgaggagggcagatcacttggtgccaggagttctagaccagcctggccaacatgacccatctttactaaaaatacaaaaattagccaggcgtggtggtgtgcccctgtaatcccagctactcaggaggctgaagcaggagaatcgcttgaacccgggaggtggaggttgcagcaagccgagattgtgccactgtactccagcctggtgacagagcgagactccctctcaaaaaaaaaaacaaacaaaaaagaagtgtgggcaaccaaatgtaggtaaggatgaagaagaacaggaactctcactggtggctgatgggattgcaaagcgtcagggcagctttgaaaaacttttcagcagtttcttataagcataacttatcatatggcccagccatttcactactagaaattgacgcaagtgaactgaaaacttatgttcacacaaaaactcgcacatgactgtttatagcagcttcattcataattaccaaaaactagaaataacccagatatccttcaacaggtgattggataagctgttgatatccattccttgagtttatccatactcaacagtaaaaaatgaactcttggttcacacaataatatagacatatcttaaatccattttgctaagtgaaagaagctaggcctaaaagtctacatgttgggcgattctatttatatgacattctggaaaaggcaaaactatagggatgaagaacagatcagttgttgtcaggtttgagaaaaggagggaagtttgctacaaaggggctgcaaagggaataggctgatggagctgttctgtatggtactgtgtggtggatacatgacaatatccatttgcaaacacaagaactatacacatggccaggcgcggtggctcacacccgtaatcccagcactttgcggggccgaggcaggggaacacaaggtcaggagatcaagactgtcctggacaacatggtgaaaccctgtctctactgtctctaacatttgtaaacctgtctctaatttgtaatttgtaaaccctgtctctcatatttgtaaaactacaaaaattagcttggcatggtggtgtgcgcctgtagtcccagctactaggaggctgaggcaggagaatcacttgaaccaggaaggcggactgcattccagcctgggcaacagagaaagactctgtctc

SEQ ID NO: 805 - DNA, 1728 bp, Homo sapiens
aggtggtagtgaggacactttaaaaaaaaaatcgccaaaaaactggacttagtttcatctattgtaacatttacctgagatgatcatttctttagtctagaatttgccccaaatcagaagtatacctctgaattatctgtatgtgtcctggattccttggggtcagatttttaaagttactttataaccattttgtccatttgatgccattgtttatcatcttttgagaaaaaagttctgtcatacccttctctccacaaaaaagagactgagagggagatcaagtgaaagggtgcaagcgaacttagtgactccttgaggtgtttgtcagttttggcttttttcttctttgttgtattctttatgtattgtcttgatgtacttaatattacctgagtttgaaatggatgaagacagctgctaccattaaggaccaaattttatgctaccactaaacaaaaatacccactcagtctgtgttaaattgtatgtctttttaaaggtatttaaagattcaactaagctttaaagagggctgagcagctcaggaagcctgtaatgtgggcataactctttggacctgatcttgatgcttctgctgctctgttagcctctgaagagcaatatctaatttattattactgtaattttttaaaaggctttaaagtgcctcaggggtcccctgaaactaattttctatttctgggattccctggattcattatatgagatggtgacatgattagaggaattcttttttagtatgaaaattgtcctttttcttcttcagtacttgcctccttgctggcattgaattaacacagggacaaaatttggttaattttttatttctaactctcccaacaaacccctgttgcccagtatttgtttggtggcctttaaccacctgagggaaaaaatgagcttattcaagctgccaatatttatctatgggctgtagcagtacactgaattgtactgtgccagggatattgagatgctctgggggtgtattgtatacctgccagttttcttcatttctgaattgagttttcttttcttgatgttggtttccttcatatcacctcaaggtttagatttgtgaaggaataagcatgatggaaataatagtcttgaaaggagatatgttgtatataatcaggaggaagaggaaggaaggacttacccattttgatattttgctgtaggtggccagttttgtttctcatagggaaatctgacccacctgtcatgttggctcctaaggaactgctgttgtaagcggctcatcaagagttgaacttcacgtagccttgttgggaatatggaaaaggaagaaagccacaggactgcccattcagtcttgggaagattgggatgattctgcacaagcaaaaatgactgaagtttatgtatagacacacctctaccaatccatcttcagctgactgaatgttgtatgatagcccttctccaaagcagaggtagaatgttcaggtttcaccatggattttctacttatttcgtttttggaatcagcttacagattccaggtcccttttgtatatattctttattcttttgcttttttaaaaaataattttgtttcatatttaaagcacttgtattagtcaatgtttcgtgttccgcattatttgaaccatttgcccttacagaaagagaaatacttgtttgtgttttaaataaaactgatgtaggaaagtcttg

SEQ ID NO: 806 - DNA, 1218 bp, Homo sapiens
aaatgatcaatgaagtgagaaattgttgagaaggatacagtttgtttttagatgtcctttgtccaatgtgaacatttattcatattgttttgattaccctcgtgttactacaagatggcaataaatactatgggattgtttgtattaaaaaatttacattgcttcttactattcagcagtagaaactttttacacagtaacaccattcgttgctggtatttagttttctgaagggtcgcagttgccttgagcacttggtattcgcagagcttggacctgtagattttgaggcagattaggaattctgcctgatgggtaagcttccagtattgggaggtggagaaggggagggttcagaaaaataaataagagttattgcactaacaaaagtcttcatcacttgtagttctggatgctggaataccagagtttctaacctaaatatgttgggtacattatttaatggggtcagtattgctcaacactctcattgagtcactgtgaggtctttgtgaattttatcgctaagatcagaatgtgagaagtatttggatatagggaaagaatgaagtgcctttcaagtacattaaaaatcagttaagagtttacaggaaagagactgagattggtaatctgaaaaggaccacaagcatagctggtaggcaaattgttaggcagaataatggtatgttggagaaatacacctgtctcttattcttatctcttaagaattttggttcttcccccagtgattgctggttgaattcttatatggacaggtttcccttcccccagtatcgcacatggttctagttagaatcctgttagatagtgagcatctgctgttagctagacactgttgaatcaatacagtgaaacagacaggtaagcaggtggttttaatgcctcattctaagtgctatttaaattggatcttgaaagatgaataaggcctgccttaagttctgctaaaggccatgttgttattaaggacgggtgaggaaggaccaagaagtctggctcctgcttttctacatgcctgtgaaggagacttttcatgaaactgaataaaagaaatcctttccgagatagaggagatttgtaggtgaatgcagaagtgtatccagctttgaaccatgcattccatctatattcctcctgtctgaactcatgctcttttgattatgttttgaaataaagggctgcattagttctttt

SEQ ID NO: 807 - DNA, 1607 bp, Homo sapiens
tcccggctgggtgggcctggccccttctcctctggggaagaccttgtcccaactcgatgggcacagccagccaacctaagactatgttggtacttggacttgttcgtgccccagagatgggcaaagctgtgcacttgcagatacattcatgaggggagaggcgccctcccttcctgaggagctgttggcctgggtgggcaggaactgcagtatggccatgggctgagcaggctgagcacctcagcctttagggcttatggccaggggacactgtatgactctcctctcctgcaggtgtctatccacctggggtatggcatctaccgacctgtctccctggggtcacatgctttgtttccattcttgtcctggctggaccagccactgtgggaccaacacccctcccacactcccccagactgctcgtctatcaccaggatcgctttgtactttgtgcaaaagggtctggctgtcccttgctgttttcatctctgccaagcctattgtgcctctggctgctgtatgtgtgcgcgtgcacgtgtgtgtgtttcatctgttcattcactgcacaagatatttattgagtgcccactacgtgccaggcactgttgctgagttcctgtgggtgtgtctctcgatgccactcctgcttctctgggggcctctttctgtgcttctctttgtccccaaattgctacctctttgtcagtctgggtgtctcaggttctgtgtgtccttgtgtgcatttctgtctctctctgtcctcgtctctctgcaaggccctctatttctctctttcttggtgtctgtcctttgccccctgtgccctctggattctctgggtctatgtaggcccctggtctgccctgggctcatcagccttcctgacctcctcctgccctccccttcactccctccctggctctgccagtcggttcccacggagccatttttagctctgatcagcatgggaatgtgcctcggcctccaaggggctttgtcctggtgcccccgcccctggtcccaacctgatcccacgagggagttgggacaggaggattgatggtgctccccttcctgccagcgtcagaggccctggagaggggctgtccatggcagctggtctttattcctccctcatgagcacagggtcgggggggtccccattcttggaagaggttgagaagactcctgggcttcagcctctcccacccagccctgcccctcacctgcctgccctcccctcccccactctatactagggactggatctcagcctctgatcagtttcacaaagtttgttccctaaggaaatcaaatcccattgtcacctaactctgaagatctaaatagcccttggatcagtatgggaaccccaaatcccacagggccagatgtggagtctgtgtctgcccccgtcttctctccatcctcaaagcccccacttctctccaggctgtttctttttttatgactgtaaacatagatagtgctttattttgttaataataagataatgatgagtaacttaaccagcacatttctcctgtttacactcgggggatttttttgttttctgatgacataataaagacagatcatttcag

SEQ ID NO: 808 - DNA, 916 bp, Homo sapiens
tggtagtacgaacataaaaatgcatttattccgttcacttaccacattatttgaaaatcaatcctttatttaattttatttccaacctgtcagagaatgttcttaggcatcaaaatccaaggtagctgtaagaaaaatactggagctaacaatgaagaacagaagtaatctgattagtcaaattattaagtgccatggattactttatgcagcagtcaggtacatagttaggtgaacccaaaagaaaaactcttgaaaacaagagatttcttccatgcacatttacaatattgaggtataattaacatgataaagtgtttccttctaacgagttgtagaaatctgagtaaccacccaaaaaagcaatagaatgtttctgtcaccccaaaacactcccttctgcccctcttcagacagtccttcagctatttcatggctctcaccctagttttttttttttttgcacttttttttttccgggggtataggggaggtgtggggcgacagggtctgtcttgttctgtctcccaggctgaagtgcagtgcagtggtatgatcatggctcactgcagccttggtttcctgggcataagtggtcttcccacttcagcctcctgagtagctgagactatagactagcataaccacactggctaattttttgtggagatgaagtctcactatgttgcccaggctggtctcgaactcctgggctcaaacaatcctcccgcctcagccttccaaattgctgggattatagtcatgaggcacctagtctggcccttttgcaagactttaatctgaaatctaaatttttaaaatttaagtacttacaaaggatatactatccaacatattgcatattatatatgtgctttaaagtttttttttttttttgagagacggtctcactttg

SEQ ID NO: 809 - DNA, 6282 bp, Homo sapiens
cggagcccacccaggcacagccaccactttgcaagtgggaggaggggagaaggggagacaaaaccactgcagacctaccacgaagccaccaccaccttcagtaacaagggtacgatatgggggtctgccaagctgtgaggaccagtagccaccaagccacccacaagccccctcccaatgaccccccttcagccccgggtgccaccagtgtgggagagctggagccgtggctgagctcagctggagggagcctggccccttgcccggtctcgcagccaccccgagcgttccaccacactgtccgcccttggcctcggcacacgctcaccttttctgttggttacgggacttctcattgtcttaatttcgctttgtgcatcttcccctccagacccaatgtctctgttttcttttccttttgaaaaagagtccctggaaaagaaagaataagtggattctcccccaggagaatcctttttgcaaagataggcaaaaaggattgaatccataccagaacacgtagacaggctgtaatattcaaaccacctctgggccaatgcatttccaaaggatgcctttctcgccatatgcctcccctggcccccagcccctctgcctcggccttgtcagttgctgagctgggcttggctcctttctggaaaatgacagtatttttggcagggagaaggtgcgcaggcctccttgctgctctctggtttggttgggaggtgtgtttacctcttgctcctcattcctcccctgcccttttctctggaatatctaagatgtgagctgcattgactctgaagacgtttgaggaacaggagtgggcactgatagaaaggacttcaacgccagtgactgtgtacctccagcagaagaaaatcaggtgtctggtcttgggggcactgtgctcacttctagagagaagaaaaaggctgggtttggacttcatgcctcctcactggtgaaacccaggatgtagatagagggccacacccaccctgtccagagtagagggcacctgtccacgtggccagggcccatgctgccaccctcgaggagatggaaccctgtgatgcaaaagctttgctggtgtgtttggggcataaggcactgctccccttccatctctagcagatatcatcttctcagccaattctgtaggacactgaggctcttgtttgacatggtgtgtggatggggacttgccccaagactgagcaggtctgccctttcattggggtgtatacatatcaggggaccctgaggtggcaccgtactcagtgttgtgatgcccccacctagggaggactcaatgctctttgtatgccttatgcagcgctgatctgtccctggagttcccaggttcccagctccccccctgcaagccttgaagcctccagcaacgtctatctccaggagagcagggcagcctatgcaagtgttccggcaggaccagaagtggccactcaacacacgtcctcaccagtcaccccaaatggagacactcgcagacctgcagttctcagaccgaaggtgctgccttcatcctccccacctaatgcatttttgaaaccaaaggtacctagcctcagagacagagaaggagagggggagatcttgagtctaagaggaaccctttagctgtttctgcagctgaggtcagtttcaggagggtgaagctgatccccaggaatggatcagctgccatgggcacagcctccgatttgagcctctccggctgccagccagggggcctgggccagaccagggctctgtccttccgtgactttattaaagcaacatttgccacatgtttaagccgcaaaggtattagcaatgcttgcatcattaataatcattcagttgaaggtcaagcccatagacacacactctctgctggtaagaaaccatagcccagaactgagccaataaggttgtttgaacctgagagtgtgtaatggtcatttgggccaagcctcagctagggctgctgcctggacgcctgaggggcagcttatcacagtgcaaggggacagggtaaacagcagggggtggggtgtgagcttggagggcccctcccctggatttcctccaacacctgcttggatactaggcccactgtccctgaagggaatgtcagggaagtgtgcctgtgagctgaattaaaggactggcctttccagaaaacgctttggatctgagcagagtagtcagtttctcagacactcattccatactgcaccgtacatgccagcgtacccattgcaccgaaagcaggcccttagggcaggaagggacgatgagcaagtctgccacaccacctggtgactgggaagggctgcttctctcgtaagggtcttggggagaagtaagcccgcagcctgcctctgcacctcgttccagtgtcctgccaggctctgtactgtcctttgtgtatgaagaaaatgctgttagccctctctcaggctgctgttctgtgggtgctgagagctgccccccatcaccacgccatcacacccctctgagcagaagcaaatctgaggctgaagaattaagttttccccaagcaaggaaggcaggtggtcagagagatcaaacgctgaggcgtggggattgcaggattcaggaggcagcccctttggggaagaggagggtgcattttccatggagcccatgtcagagtccactccagctcagcaggaaagtggaattgcccagtactgcctgccagctgggtctcccaagcaactaccccaagacataccaacagtgaagccaggacagcaccatgccatcggcgctccagtctgtctggctgggaggaaagtgctgggcatcttacagtaactctagaagttcctttgactaggctgcaatcccacctatatgctcagccctaagagctgtggtttcctgtgctctcatttgtccattcattcattcattcattcattcagcaaataatctgaaatccagtctgaactaaggcctgagctgtggataccatggcgcgtgagttagatgtggtccctgccctcatggggctgacagtcctaaaatcaagtgctaggacacagtggccattgagctgggagcattcttccctctaccgcttaagccactgatggctgcgagcttgaagagagggattctgagggagagcttggtccatctggtcaccaaggctgggcgggacagagcagtcaagaaccacggtgtggcttgagaaacagtcctgcttcctgagcctctttgctctgcctcttggggcaagctccttaacctgtctgtatttttatgcctctgtctcccattcagttcctccttgaatacctctttctacagagaggcacgggctcccctgaaggattgtcgaggccagggttcgggaagtacactgccatcggtcaggggacagctgcctcccaccttgcctgggtgatggtgaatgggactcatcttttcctgccttgcttttgaggagatggttgaatttaagctaacaggaaagccaaaccagcaccctcctttgtgctctgagaggttggagacatctggtccaccccattgcccctgcccctggcaagccctgaagtcgggagaggtgaccacaggtctgaaaatcagccagtgccaacattgcttgccctgcaaggtgcaactgagcccacatagcgcattcatagtttccctgaccacagccttgggaagacggtggaaacccgaggatgtgtgggtttcccagctaacggacaagctcccctgccacacccagtgcccacgcatgctcacatacatacagcagaccacaaccctgttgccaagcagtgcttccaagggatagcgatccagattccaacattgtcttggagagggttagtccacatccaagttgcgtgagataagatgcaaagggctctgtgtggatgaggaacgcaccttagaggagtgggaaaggccaccagggttgggccctgtttaggtaattcctgttggcagcacctagagagagcatctgagctgaaggagtgggaaactttgcccaagcaatggcacgggcagcgggctctttctggcgccctgtgctggagcagggccaagtcttagggcatcacaaacagcccatttgatggagggagcagggacatagcacatttttgtctgtctttgtgaggctgctttgctaactctctgaggagaggaagcctctcgggctttccgtcggctggggctagtgccagagaatcccttctcagtggccagcaggttcctgggaggccggcacaaggcaccgctccccactcatgacaccttggtgcagagtgacctcctgcccagtcaccactccggccagccccagccaaacacacaaaagcccatggttgcggttgcatctacaccgttagttggcaaaggatcctgcttgagctctgcgtggtggccaaggagtagcatggaggagggccctgattttaaaaaggaaaaatagagaggcctcaaaacaatgaaacaaagagcttgatatgtcaagaggagaccaaggccctgggaggcataggcaagccgggcagagtcagaccagtgccctcccttgaccatctcctagcattccttaacctagacaggggctaccccatgtgagtccaagccagactttgtggctgtccccagcctgcacagcccaagcccagggaagtgtcctttctttcccttccttactaataatgggccttcctgagacacattcagagaaggatcagagagaaaggagaaccatccaggagagccacaagcgtccaccaaacagtgtctcaggcctcacctgaagctgctgttcctcctatcagcacactagtattaaatgggtgttccataatgaggagaatggaaataggtacaaggcatctagcttaggacagaatcggatttcggcatgtgaaggaatcccagagctgatctcattgaaatgatctatcgtacagacaaggatatgcaaatccacagaagtgaagggatttttgctcaagatcacatagctggtaaactaaggtaaggttagggcttgaacttgggccttctgactccttgtccagtcagtgttctttcatctcaccacagctgcctcctttgaaacagaggtattaagatctgtccttctggttcaccctctcatacctctttactgcgtctcccacatcccccacatgcctcccaaaatgaaagacaaacaggattgtttctgagaccaagatcagtctgtctgtgatcagcctgtgtgtggttcacccagtcatgcaattaagggcagatctgggccagtggaataggatagctgattggtgtttgttactgtgaaccctagaccgtaccccgtagaatggtgtctcttgctttgtaacacatcgggccttcagtgtgctgtattcctcagaagtgagggcatctcggtccattctgcccatggccacagggtgcagagaggcagcagggcccatgcaagctgccaccctgggatttgctgggctggagttcaacagatgtaaagacttcagtgaagcaataaacacaaaactctgggagaagatatccagaattttgtacattactctgtttctttttcaaaaatgaggcagatcagatgcccctgagctgcccctttttttctgattcccaactgcaatgtcctcagtcagtgttgtccctctgcccggctccccagctctttgccaacctcttcacactccccttgagctgagcatcagtcgcctgtgacgtggccaccttctgtcctgctcccactcccgacccatgctggaccccggaggacctcctgccccgcccccaccacacacccatatcccccaccattccaatttgttctttcccgtggggaattttttttcccagcgtctccatcccttcctacatatccacacacacacaaattggtctgatcttttttccattggttaaacatttaactccatgccagaccttgttttaacccctctcacatcatgttctttccttttttgcgagttattttgcattaaccaactttgtcagtgacagatgcgtatctgagggtgtcacacacgaccttcagcagggaagacttctgggccatggagggccgtctaatacatggacttataaactgactgcatgagcaatgaaaaggccaaattattctgaattttttttgaatcactgtaaaaaaactgatttcttttgtatagagaacactaaacgtataataaaagttgttcaaaatgg

SEQ ID NO: 810 - DNA, 4243 bp, Homo sapiens
tcctggaacccctccctctgcgccgcagctggacgccacctccgacggacacagccagccccttcctgctgccaaggtggcctgacactgtgccagagagtggctggttttaaatacctactttaaacagtgccctttttgtaggaggtaggatattttatattctgccgcaggatagaacccacgcaaggattttctttaaattgagaggcaccaggcagtaacttccatgatgacactgacgcctatacctgagctctaggctgcctggagggaaggaacaggcccatgggaagaagggggttttaaaaacatgtcttcaactcagcagagatggccctctgggaccctatacggactccgccacttgagagcagtcctaggcccggcaggaacaccagacatgaacaggttgaagaactggagcgaagtgcacacctcaccatccttcagtctaaggaagaagggcaagccctgggaccaagagctctcccgccttctccctcgagcagcagcaaggaccctgacgctgtccccgataactccctaggggctcctgcctgcccaagcggctgagaaccagcgccccgatgcctgaggctgggagcctgagccccttcagctttgaggggggtgatactccaggctgtttggggtgggagccaaaaagagttgagaggccagggcccttggtggaaaggggcaccagccttggtctgagatagtcacaacccaggtgacgatgccctctcagccaacactgccaacctgaccctgtcatcccgattgacagcgccacttcaggtggctgggtgactaaagggcttgtcttggtggggtctcccacccctccaagacccattctgcacagtccctccagggtttgggcaggagatggccaatcatgcgcccacctctccagtgctgcctgcagtcagctcggcctccccgacctgcagccccagactctgctctcccagcactgactcactcctgcctgggaggggaatgcagcattcatgctgtgtgtcctggtattgggaggtttctgggaagggcagaggataaatgtggccctgcctgctcccaggtatacctaggaccacctggccagatccgctcccagacggccttggactgcttgcatttccccggagaaaaaggggttaataaatgggccatcctttcctgagctctgggtatactaccagtcacagaacgtcagagctggaagaagccttagagctcaacttcttcaagcccctcactttacagatgaggaaatggaggtggtccagagagggtctgggattcccaaggtcacacagcccagaagagatggggctgggttaagaactcgagtcttccacctttctgttcaaggctgtttgtctacccagaggaaggaggcactgctgaatggctatggcctggctaagaaggtgattagtcagtagggtgtgaaaattctacttcaaggggttcggattggtgatcatggggattggcatggctgggttcccgtccaaggtgtgggcagagcttctaccaaacttcaacatggagggctgacttgaagctccctgtccccctcactcttgccccaagaaaagaggccaaagcaagagcagattccctaggcaagagcagcagcacaactaggaaaccccaaagcccatgctccgacaggtggcccttcacagggggcagcgggacaggcatcttgaagggcatatgtcctcggaagctccgagcctgttttctgtagtttatagttagagctctattttgttatggttttttaaacttttaagtcctgctctattttcctgggcaggtttatgttgatgtttacccactacaattttttaaaaatataagctcacatgccttttccctgccacagccaaacccccactgcaccctacccacccacccctagcccaggtcagctttcctggagctggctaatgaaagcctcctcacctcttcccaacccttacaagcaagggtgctaggggctcagctatacgaccattctccctgacagggagtccaaacttggcctagcatccctcctggcccccctctggccacgacttggcctgtgcctggttctctatcagaaaggggatgctgaacaaaacctccttccaagttttatccaattcgttcctcattgcctcgggctgcgtcaggggaagcaggggacaggtgtccagttgctgggccgagggaggagctggtttggcataggacctaaccagtgaagctagaggctacagccactaaacttgcttcaggccaacgatagttactcacaagtaagtaccttaatgctaatgaggtccactaaaaaggggaggaaggcagacctcctgggagacccacgaagggtttttagccagggaaaactgagccccaggaaaacctaaccactgggcaggcagaatttgtttgagggatagaacgacaacaaaataaatgttcctgcagcctgagatttcaggtagagtactgactaaggtttaataagacaataggtgacctgaggacatgcaagcttgtaaaatgcaacagcctcctgctagagtgacttgtacatgagcttgcttgcagaagactagattagatgtttctcaggatcccctcctgcgcaggggttctctgattttcgtgttctctgcccagatgggctgggggagttgagagtgtgcttattttcactgcgatcatgagaccacagttctgggttatctcctctcatacatcaagccccagaggaggcggcaagaggaacagccacaaacaagtactttaccccacagcttagtggccagtaaacaccctggggactaggaaaaggaaccaactgtaggcacctctccagggcctagggagacaagtgtcctctcttctgcatacatttgggctccccttacagagccctttgccctggctctctggtccttgttgctctaacagtccagatgtacacccagcctcagggggaaggcagctctctccagacagagtctcagggcccagcaaggtcaggttatctgctttcattcagggcaacaaatgatacaaatggtgccagggagtggcaaggccatgggggtaggtgggggtgtctttttcttttcataaagtaacaacagacgagactgaggttaaacatcagaaaaaaacctctggaatgaccttcctcattccaggaggccctggaataaggaagaggcttctttctgagggagctttgaggaattttgacagctgttgacatgggatttgggaaaggtgaagctgtgactggaggggcaggagatggtccaagtgtccatccagagatgagactcttagaatcaaagtgttcagcccaggaagtcttggagatcccaccttctgtggccctgcaccttatgggaagccattaagggggctcatctaggaattctggttacagcccagtgctcatcccagcgtatgctgcctctttagggcagccccaagggccagccagcctgtactctgggcaagagcccaaaatggctaggaatgtttgactcccttaatctcttccccagctacagaggaatcttttctctgcctggtctcagaatgggactgccaactggctcattggtgggagacacagtatcctcaaacctgtggccactggcatgacagtggtgctctgtctccctgggtgacacccaccctaggcttcctcctggatgtgatggggattgccagagaggctcttagcataaaaggcattaggtgggcatttttctgtgtgcccccaaaaagctccatggaaacaggcacctggtagctgcggaacacccgtggacttgtgtatatggtcataggctttgggaagacaggacgtaaaggaaaatgagagaaacaaaatgggtcagatagctttggccacagccccaggcagcctttggggcctatgacacttagtgcccttagatgggatacatcttgcctcggccccaagactcctccaacttacccgtcccatccagggcctgcacagcttagagaggctcacagcttggcaaatgctagggcttcatcagaccactgacttgactcagtgtttgttaaaatggaaccactcccgttggcctactgtttctctcctgtacttcttgtaatgatagttatttattgactctggtagcaggcagttcttaaataaagatggtttctcaacctgttgggg

SEQ ID NO: 811 - DNA, 1218 bp, Homo sapiens
gtggccagccacaccaaccctgtgctctctggcccccagctggccacacttctccaggagggacccttggacttctttgtgtgtccagtttggcctcctgcccaaactgtccattccagcagctcctgcccccttctctgtacttgcttctgtctgacaccttctccctgttggcctgaagggagcttagaatgcagccctacctggagatagtgcgggcacctgtggccaagtggagcagaggtggacatggggttggattgttttgattatttatagttacacaaggacttctcccagctgaccctcaggatgccccaagtcaggaagaccattaagaataggaggagagggctctgcctcaactttcctaggaaagagcccacctcggagatagctacggttttctctggtggagatggtgaggatgaaggctggagagtgagggaggaggctctgctggccgcagagaacacagggatgggagggtccctagccttcgggcacctccagggccagagagcaggctcagagcagctagtgtggagctcagcatccccaccccacccctcctccctgtagagctgatttgaggcctccttctggggctgggctctgcaggccaggtgggtgtggcctgtgttttcccttctgttctttctgcctgtactggatctgttattttcagggaaacaggccccagggcccccctgagcctcaccctaagcccttaggcctctgagagtgctgttgggttctatttatttatttatttgttcctttgttccctacccgtgcccccagtgtcttccctgctgagtaccaggagaggtcctgccccatcctctctctgaagccagggcccttccattccatttagcctttggatcatcctggctgggagaagtgggaccgagccacccagccccactatccccaagcagccctacagccgggatgggaggcacgtggcctctcttttatccgtctatttattttgtaagtgtattcgtgtggaggaggttgttgctttatttttttaaggctctggagtgttgtgtatggtttcttttcacatcccagcctcccatgggcacttctaagaagagaggggatttcttggaaaaggagagaggaatcccctagagcagggaaagcagtgcctgccagctgttgtgcaccttcctgagaaataaatatcctctaaattttcaaacc

SEQ ID NO: 812 - DNA, 1409 bp, Homo sapiens
gccacgcccaccttgctgtggccaagggacaagagatcacatggagcacaaattcgggtaggatggagcctgtgtggccctcggaggactgaagaacgagggctgacagccagcctggaagaccgcttggcagcccttctggccacggctgtttcttctttgtgcttcccgtgtgcctccccagtagccctcacctgcataccaacccctcctttacccacgttggggctggcataagctgcttccctgagaggacatgaggggggggcggtcctcgtaccctctcccaccctggtgtttgggcacctgcgtgggatgcacacggatgacagaatcaaggcgccaggatgggcactctgccctggatacaggctctaccctcctcccccaggacctgcctagtgccagtttggtagtccccctttctggccccttggagcccacacacgtttcatctttttcccctctgagagcaagaagagacatggcatgttctctgggaccctggaatcctaggtacccacatgtgtgccaaagcctaccccacctggcaggtgtcccacagcaacagaaggaatagtagtccccactctttccatcagccctaccctaccctcattccccgacaccctctggcttgaaccatggctgagcagtgccggcatacgctttgctggcatgcttggatgcccagctgtgtccagaggtggcctgggaccgccagttgcacgcctgccacctcagccagcccccgcccagctcatcagtctgaatggagttgccttaaattggcaggtggtaccgtactcactgcccttggagctgtgaccggctcctgcctgtccaccccttcccgaggtggctcctgcttaccttatcatcccagggctctgattagccaggcctggtcagggtcctggggacggcacccagatatgcagagtcaccctgacactggtgccaggctgacctcagctcccgaaggctcgcacagcctccccatccttccttcccagcccttgtggctctgtccacctgatcccaataccagcttcccccagcccctgccaccccagagggcggccacgacagggagaggtgtagatgccaccatctgagggagaggaacgtggaacaggagcaggctctgatgctgagaggcttgcctccgggggctggaagcctgggtggccggggcccctgaagaaggctcccctctgtatcccccaggtctcctcaacactgggctgatcctgaatggcacaggccaaggggaggccagcctcgcctttctacccaggccccctgccctgcccacctcaggcccccaccctccactcctccccacggtactgtgaacgtcgtgtgactcagtgcagagacagataatatatttaattcatgtacag

SEQ ID NO: 813 - DNA, 1748 bp, Homo sapiens
aactgggtgaagaaggcaagagaagactttcagcctcttgatcaccagcacgaccatactgtttcagaaagctgggtggtggtggaggcgctctctcaatggctattcaagtcttctccactaaaacttggttgggtagaggaaattaaattgagtcctggtacctggtcaaaatcattagaagtttacctggcttctcaagttatcttcttccctggttcagactgttggtaagagctgtccagatacccagatgggaaggaaggagacagccgcgcgcttcactccatttgtcacctcatgcatggaccatactctgggtttgagatcattcttcattgaagtttgtaaaaataggttgaaattgtaaagctccatgatcattgctatatgtagatatatttcaatttaagcaaaacaagctgcaagttattccctggcatgctcaaaggattttcgtgcttttcacttaatagtccaaagtctcttaaattcctgctgcagacatcaatagcttatctatattctcaaacaccaaaaggaaaagttgaatcttgctctctttggtatactaatgtagtggtatgctaagctggctcataccaacttagaaaagctgattgtaaaattttcattttgacagctggttattaaatgcagccattattaaaaatcaaatcatacaaacttataattaaatcaattacatttaaaacaaaggtaataaatattcaaagcatatcacttcctaatttgatcttgatgctcttgaggtaatttacgtccatggtacctgtgtggtggaattactatatatgatggtgtgctactgtgcaccttgtctcaactccactcttcgtgatagcatgttggtagcttgaaatcagcctggtgggagtattaccatggacactggcaaaagctacagatcccggagagccagtggttaaacatttaccagcataccactgctagtaatcaaggctaactggtccagaaatcgcccaggagaatgaaatggatgttccatttttttctactgacattgactagcatataaaaggtatagaaacagcactaagactttctgaaaatacctaatgaaaattttacatctttttttgtttttgtttttgtttttgagacagagtctcactctgttgccaggctggaatgcagtggcgtcatctcggctcactgcaacctccgcctcccagtttcaagcgattctcctgcctcagcctcccaagtagctgtgactacaggcgcatgccatcacgcacagctaattttttgtatttttagtagagacgggatttcaccgtgttagccaggatggtcttgatctcctgacctcatgatctgcccgtctcggcctcccaaagtgctgggattacaggcgtgagccactgcacccagccaaaaattttacatcttttatagagggaaaaaaactctttataccatggcaaggccttttctttcacaaaaagctgggcctactgaacaattcaagctgtgcagtagtagactgaaagcaggatttgttgaggagttacagctcctgtccagagcaaatcctgtagtgatacaaggagaatgtaaacttgccagcttagacagggatcagtcctgagactgctggcagtagcaaatggctattagagtaactgtataatggttttgcctgcactttctctatgtatatacaaatgtacatgtataaatataaaaattaagtgatcatg

SEQ ID NO: 814 - DNA, 489 bp, Homo sapiens
gaaagactcgctggggtctggtactgcccccaggactagtggaggttctctgcccacctcgggcactggaaatgagagctgggagggtaagggttggagttagaggagccctgtctaaagcggagcgaaaaggccagaatgggtcccctaccctggtgtcacagctgcccctagtgtgagggctgcctcataagctcccaatctcagacactggcagtcagggagaatcaaactgcctgtctccctggtcctgccatattcatagggtgtccatgcacacatggtgtcccagatctaggcaggcctaggatggtgctgtctaggggtccacgggtggcaggaattcagaggctggccttgtgccctggctacctgtctccattctaacctgactggcacatctcagcctaaccaggagaggggagaagtgaaaaaccgtgaggaggactctatttggatcctggatttgttgttgttgttgttgttgtt

SEQ ID NO: 815 - DNA, 918 bp, Homo sapiens
ggaggggccttgtgtctgtgcctgcctgtctgacagaccttgaatatgttaggctggggcattctttacacctacaaaaagttattttccagagaatgtagctgtttccagggttgcaacttgaattaagaccaaacagaacatgagaatacacacacacacacacatatacacacacacacacttcacacatacacaccactcccaccaccgtcatgatggaggaattacgttatacattcatattttgtattgatttttgattatgaaaatcaaaaattttcacatttgattatgaaaatctccaaacatatgcacaagcagagatcatggtataataaatccctttgcaactccactcagccctgacaacccatccacacacggccaggcctgtttatctacactgctgcccactcctctctccagctccacatgctgtacctggatcattctgaagcaaattccgagcattacatcattttgtccataaatatttctaacatccttaaatatacaatcggaattcaagcatctcccattgtcccacaaatgtttggctgtttttgtagttggattgtttgtattaggattcaagcaaggcccatatattgcatttatttgaaatgtctgtaagtctctttccatctacagagtttagcacatttgaacgttgctggttgaaatcccgaggtgtcatttgacatggttctctgaacttatctttcctataaaatggtagttagatctggaggtctgattttgtggcaaaaatacttcctaggtggtgctgggtacttcttgttgcatcctgtcaggaggcagataatgctggtgcctctctattggtaatgttaagactgctgggtgggtttggagttcttggctttaatcattcattacaaagttcagcatttt

SEQ ID NO: 816 - DNA, 3017 bp, Homo sapiens
gggataataatttaattgttctagacaaggggactatagggactgactgttattaaaatcttcctatttaactagcttggggacttcagttgaaaattaggttctaagttgttcttgcaggaattagcctccccgtctcccaaaaccttgagaatgaagcccttggtatcgcctctcccttcccactgccctctgcttcccccagtcgtcgtaattcagccagctgcagtccgtaccgttcttaggttagccagagacaggttttcattatcaggtcactgtgaaatctggtaaggcagtcctgaggacatgggctcaagtctcagtcccctcagaccacggtgatgccttgaccagatggttggctactgccatccagctttcagtggcatcttgttttgggaactgattatagagaatcatatatagtccagtcttcattttacatacacacacatattttacacacacacacattttacacacacacacacacacacacacatatgtttttctagtctctggcatgtgtagcctctcctggtcatagaccagtctctttgtaagttattgtggcagttcacacagtagccaccaggggtctctgtttccattacaaactttgttctgtctgggccagagaacctagcctttgaaatctctccatcatatgaaacataacgggatgggacaatcccgtaacctgtttggggttgggggctttctctctgtgttctttccattgatgtgaattggtcattggtgtttgctcttgcctctcctccatcccctagaagtacacccccgtcttattaaggagcttttaaagtttttctgaatgtatagacatttctcgggttcctacctttgtctctgatggaccattttccatttaagacattttcctgtataagacagttttatagctggttccttttagggtaaagagtcttaagagagttttattgtgtctatggcaggtttgggaaaggtaagaaatgggtcctttttcctcctaatgtttttggcacttaaaacataaaattcattatcctattaaaaaattaaattcagctttgctaatccagaaattgttcccaaatgaaaacttgttttaagtccaccccttagtttccttattttacaaggtctctcttcagggaccaacaggggcttagagagccttagttagattaaagggagaccctacctcttaaaaccagttttcatttatgcaaacaaggacaattaagggaaccctgaccccacaggctctcaagtcttcccaaggccagaatcgaaagaaaattaaaatttgaatgctgaatattctggctctactctggccttttttctggttcccttccaaaatgcacaaatcatacccttgtctgctccaattcagtctccaaacctggtgcctgtgctcctggcccccctagcatcatgctatcccaggagtatcaggaccagacacatccacagccaggctcatgggtctcagacagcaacttgagttaaagctgaaactcatccttcttctctgtgttttctggtttaaaagctgcacttatattttagccttattattttctgtagttccggagagatggtgggttgccattctggtaggaaaatctgagttttcttatctttgacctagaagagattctttttggaccaacctgcgaaattggtagttaggtctatggaaagtggtaggattttttttttttaatcctgtgcaaaggaaaagaggtgctttgtgggaaatcactaatgagaaggctaacctgcagcaccagagaaacctttccaagtgctaggcaggagaactgaagaactctttcagtgaagtgagtcagcctagaagaggcaacccacagtcttgatttttgttgctgtttcctgacctgttcttgcctgtcacctgggcctacacaggtcccgagccaacggggctttcatacccaaggatctgtttccttgctgaaaatgaaaccctatctttcactttacattcctttcaatccaactgatcaaaactggtacccacacttgccctttctccctctctccagcacactcccctctaagaaagtaaaagcaaagctttcttaatggcaacactttgggcctgttctgttgctcctgccttatttctctttcaaccctgtacatgactcgtgttcaccatccccttgatcagtgtccatccgcgctaatttgcatcatgaactgaacagtgtgtgagtggtcacctactaaacccagctctgggggcagagctgtcttccccatctctggtgctcctaacacctgtgagatggtcctgtcgagaggactaggaaccgataggaggagagtccttctcggcagagctcactgcaaacaactggaattgaggttgcacactgtgatttttacaccgaaaagccaaaaggagctggccatccagggcctagggagaccagccttcctcagctatgcttgccgaaaccagcatgatgcttcaaagagccctgctccacccctcatggcatggatccttttcctggtgtggactctgaagggtcagtcttcggggaagagaggtggggtggggctactagcatcccaatttagaaaacagaggagtttgtagccagcagcctgtaaactggaaacactggtctcagccaacctcctcagggcgccctggcttctccccaaggagatgaggagcggtgatgccagcaccgggatgcgcagagcactggaagggctggtgcagatctacttcccatgcagaagagaagtcacatcttccagggaatcgcaatgttgtggcgtctgacttgtatgtcacatttgtgtaaaatggtatattctttaaaatagtgttgataactggaatattgtatgtatgcttggagatgctttgtgtgaacctaagactgtcactcaacagatgttggattggggaaaatccaaagcacaacttcaaaataaaatacatttttaggtttcgatgctgc

SEQ ID NO: 817 - DNA, 744 bp, Homo sapiens
gctccatggggcacatgaggcatcctgaagcattagaatgattccaacactgctcttctgcaccatgagaccaacccagggcaagatcccatcccatcacatcagcctacctccctcctggctgctggccaggatgtcgccagcattaccttccactgcctttctccctgggaagcagcacagctgagactgggcaccaggccacctctgttgggacccacaggaaagagtgtggcagcaactgcctggctgacctttctatcttctctaggctcaggtactgctcctccatgcccatggctgggccgtggggagaagaagctctcatacgccttcccactccctctggtttataggacttcactccctagccaacaggagaggaggcctcctggggtttccccagggcagtaggtcaaacgacctcatcacagtcttccttcctcttcaagcgtttcatgttgaacacagctctctccgctcccttgtgatttctgagggtcaccactgccagcctcaggcaacatagagagcctcctgttctttctatgcttggtctgactgagcctaaagttgagaaaatgggtggccaaggccagtgccagtgtcttggggcccctttggctctccctcactctctgaggctccagctggtcctgggacatgcagccaggactgtgagtctgggcaggtccaaggcctgcaccttcaagaagtggaataaatgtggcctttgcttctgtt

SEQ ID NO: 818 - DNA, 2435 bp, Homo sapiens
acttcagaacttcctaacaatcctggaaaaagaggagcaggacaaaatccaacaagtgcaaaagaagtatgacaagtttaggcagaaactggaggaggccttaagagaatcccagggcaaacctgggtaaccggtcctgcttcctctcctcctggtgcattcagatttatttgtattattaattattattttgcaacagacactttttctcaggacatctctggcaggtgcatttgtgcctgcccagcagttccagctgtggcaaaagtctcttccatggacaagtgtttgcatgggggttcagctgtgcccgcccccaggctgtgccccaccacagattctgccaaggatcagaactcatgtgaaacaaacagctgacgtcctctctcgatctgcaagcctttcaccaaccaaatagttgcctctctcgtcaccaaactggaacctcacaccagccggcaaaggaaggaagaaaggttttagagctgtgtgttctttctctggctttgattcttctttgagttctcttacttgccacgtacaggaccattatttatgagtgaaaagttgtagcacattccttttgcaggtctgagctaagcccctgaaagcagggtaatgctcataaaaggactgttcccgcggccccaaggtgcctgttgttcacacttaagggaagtttataaagctactggccccagatgctcagggtaaggagcaccaaagctgaggctggctcagagatctccagagaagctgcagcctgccctggccctggctctggccctggcccacattgcacatggaaacccaaaggcatatatctgcgtatgtgtggtacttagtcacatctttgtcaacaaactgttcgtttttaagttacaaatttgaatttaatgttgtcatcatcgtcatgtgtttccccaaagggaagccagtcattgaccatttaaaaagtctcctgctaagtatggaaatcagacagtaagagaaagccaaaaagcaatgcagagaaaggtgtccaagctgtcttcagccttccccagctaaagagcagaggagggcctgggctacttgggttccccatcggcctccagcactgcctccctcctcccactgcgactctgggatctccaggtgctgcccaaggagttgccttgattacagagaggggagcctccaattcggccaacttggagtcctttctgttttgaagcatgggccagacccggcactgcgctcggagagccggtgggcctggcctccccgtcgacctcagtgcctttttgttttcagagagaaataggagtagggcgagtttgcctgaagctctgctgctggcttctcctgccaggaagtgaacaatggcggcggtgtgggagacaaggccaggagagcccgcgttcagtatgggttgagggtcacagacctccctcccatctgggtgcctgagttttgactccaatcagtgataccagaccacattgacagggaggatcaaattcctgacttacatttgcactggcttcttgtttaggctgaatcctaaaataaattagtcaaaaaattccaacaagtagccaggactgcagagacactccagtgcagagggagaaggacttgtaattttcaaagcagggctggttttccaacccagcctctgagaaaccatttctttgctatcctctgccttcccaagtccctcttgggtcggttcaagcccaagcttgttcgtgtagcttcagaagttccctctctgacccaggctgagtccatactgcccctgatcccagaaggaatgctgacccctcgtcgtatgaactgtgcatagtctccagagcttcaaaggcaacacaagctcgcaactctaagatttttttaaaccacaaaaaccctggttagccatctcatgctcagccttatcacttccctccctttagaaactctctccctgctgtatattaaagggagcaggtggagagtcattttccttcgtcctgcatgtctctaacattaatagaaggcatggctcctgctgcaaccgctgtgaatgctgctgagaacctccctctatggggatggctattttatttttgagaaggaaaaaaaaagtcatgtatatatacacataaaggcatatagctatatataaagagataagggtgtttatgaaatgagaaaattattggacaattcagactttactaaagcacagttagacccaaggcctatgctgaggtctaaacctctgaaaaaagtatagtatcgagtacccgttccctcccagaggtgggagtaactgctggtagtgccttctttggttgtgttgctcagtgtgtaagtgtttgtttccaggatattttctttttaaatgtctttcttatatgggttttaaaaaaaagtaataaaagcctgttgcaaaaatgactcatgtt

SEQ ID NO: 819 - DNA, 231 bp, Homo sapiens
tggacagagatatgcccagagatgcatatgtgtatatttttatgatcttacaaacctgcaaatggaaaaaatgcaagcccattggtggatgtttttgttagagtagactttttttaaacaagacaaaacatttttatatgattataaaagaattcttcaagggctaattacctaaccagcttgtattggccatctggaatatgcattaaatgactttttataggtcaatgc

SEQ ID NO: 820 - DNA, 2190 bp, Homo sapiens
gcagaggattctgtgttcctgtccaaactcagtgctgtttcttagaatccttttattccctgggtctctaatgggaccttaaagaccatctggtatcatcttctcattttgcagaagagaaactgaggcccagaggcggagggcagtctgctcaaggtcacgcagctggtgactggttggggcagaccggacccaggtttcctgactcctggcccaagtctcttcctcctatcctgcgggatcactggggggctctcagggaacagcagcagtgccatagccaggctctctgctgcccagcgctggggtgaggctgccgttgtcagcgtggaccactaaccagcccgtcttctctctctgctcccacccctgccgccctcaccctgcccttgttgtctctgtctctcacgtctctcttctgctgtctctcctacctgtcttctggctctctctgtacccttcctggtgctgccgtgcccccaggaggagatgaccagtgccttggccacaatgcgcgttgactacgagcagatcaagataaaaaagattgaagatgcatccaaccctctgctgctgaagaggcggaagaaagctcgggccctggaggctgcggctctggcccactgagccaccgcgccctcctgcccacgggaggacaagcaataactctctacaggaatatattttttaaacgaagagacagaactgtccacatctgcctcctctcctcctcagctgcatggagcctggaactgcatcagtgactgaattctgccttggttctggccaccccagagtgggagaggctgggaggttgggaggctgtggagagaagtgagcaaggtgctcttgaacctgtgctcattttgcaattttatcagtaatttgacttagagtttttacgaaacctcttttgttgtccttgccccactcctctccaccagacgccttcctctctggatactgcaaaggcttgtggtttgttagagggtatttgtggaaactgtcatagggattgtccctgtgttgtcccatctgccctccctgtttctccacaacagcctggggttgtccccgctggctcacgcgttctgggagctcaaggccaccttggaggaggatgccacgcacttcctctctcggagccctcagacatctccagtgtgccagacaaataggagtgagtgtatgtgtgtgtgtgtgtgtgtgtgtgtgcacacgtgtgtatgagtgcgcagatctgtgcctgggatcgtgcatttgaggggccaggggcaggcagggctgcagagggagacggccctgctggggcttaggaaccttctcccttcttgggtctgccctgcccatactgagcctgccaaagtgcctgggaagcccacccagattctgaaacaggccctctgtggcctgtctctattagctgggttccgggaggcagagaggagtgaccgggcactggcactgcgatcaggaagactggacccccagcccccagggcccccctccccccacttagtgctggtcctaggtcctctgaggcactcatctactgaatgacctctctacttccccttcttgccattattaacccatttttgtttattttccttaaatttttagccatttctccatgggccaccgcccagctcatgtaggtgagcctgggcagcttctgttggcagagcttttgcatttcctgtgtttgtcctgggttctggggcatcagccagctaccccttgtgggcaaaggcagggccacttttgaagtcttccctcagatttccattgtgtggcctggtgggtcagggggagtctttgcaccaaagatgtcctgactttgcccccttgcccatcagccatttgccatcaccccaaacaactcagcttcggggccggtgaggggaggggcctcccccagcacagatgaggagcagctggggtaggctgtctgtgccatggccccccactcccccttcccttggagggagaggtggcaggaatacttcacctttcctctccctcaggggcaggtggtggaggggcgcccagggtcgtctttgtgtatgggggaaggcgctgggtgcctgcagcgcctcccttgtctcagatggtgtgtccagcactcgattgttgtaaactgttgttttgtatgagcgaaattgtctttactaaacagatttaatagtt

SEQ ID NO: 821 - DNA, 357 bp, Homo sapiens
tgacaaggaacctgtatagtgatccagggatgaacaccccctgtgcggtttactgtgggagacagcccaccttgaaggggaaggagatggggaaggccccttgcagctgaaagtcccactggctggcctcaggctgtcttattccgcttgaaaatagccaaaaagtctactgtggtatttgtaataaactctatctgctgaaagggcctgcaggccatcctgggagtaaagggctgccttcccatctaatttattgtaaagtcatatagtccatgtctgtgatgtgagccaagtgatatcctgtagtacacattgtactgagtggtttttctgaataaattccatattttacctatg

SEQ ID NO: 822 - DNA, 658 bp, Homo sapiens
gaggaaagtgatgctgctgctaagaatattcgaggtcaagagctccagtcttcaatacctgcagaggaggcatgaccccaaaccaccatctctttactgtactagtcttgtgctggtcacagtgtatcttatttatgcattacttgcttccttgcatgattgtctttatgcatccccaatcttaattgagaccatacttgtataagatttttgtaatatctttctgctattggatatatttattagttaatatatttatttattttttgctatttaatgtatttatttttttacttggacatgaaactttaaaaaaattcacagattatatttataacctgactagagcaggtgatgtatttttatacagtaaaaaaaaaaaaccttgtaaattctagaagagtggctaggggggttattcatttgtattcaactaaggacatatttactcatgctgatgctctgtgagatatttgaaattgaaccaatgactacttaggatgggttgtggaataagttttgatgtggaattgcacatctaccttacaattactgaccatccccagtagactccccagtcccataattgtgtatcttccagccaggaatcctacacggccagcatgtatttctacaaataaagttttctttgcataac

SEQ ID NO: 823 - DNA, 1080 bp, Homo sapiens
atgtctagaccaggacctccctccccctggcactggtttgttccctgtgtcatttcaaacagtctcccttcctatgctgttcactggacacttcacgcccttggccatgggtcccattcttggcccaggattattgtcaaagaagtcattctttaagcagcgccagtgacagtcagggaaggtgcctctggatgctgtgaagagtctacagagaagattcttgtatttattacaactctatttaattaatgtcagtatttcaactgaagttctatttatttgtgagactgtaagttacatgaaggcagcagaatattgtgccccatgcttctttacccctcacaatccttgccacagtgtggggcagtggatgggtgcttagtaagtacttaataaactgtggtgctttttttggcctgtctttggattgttaaaaaacagagagggatgcttggatgtaaaactgaacttcagagcatgaaaatcacactgtcttctgatatctgcagggacagagcattggggtgggggtaaggtgcatctgtttgaaaagtaaacgataaaatgtggattaaagtgcccagcacaaagcagatcctcaataaacatttcatttcccacccacactcgccagctcaccccatcatccctttcccttggtgccctccttttttttttatcctagtcattcttccctaatcttccacttgagtgtcaagctgaccttgctgatggtgacattgcacctggatgtactatccaatctgtgatgacattccctgctaataaaagacaacataactcaagtctggcagactttcttctctatttctggatgaatgcccagtgagactgtgttgtacagctagaaaaggccttcttcccaatagcaaggctgtgcatctagcctcaagctctggctgaactttgtggtcgacatcaatctaaagatacagtgtctgactataaccttgttccaaaaacctaggcaaagagtatatgtaggaggtgggatatcacttccatgacataagtgctattgcagagccgtggccacccaggaactcctgactgctttcc

SEQ ID NO: 824 - DNA, 5445 bp, Homo sapiens
ccgaagacccaagtcagcattccggtggtgtaactgtgtgtttccctccagccctggcctcctgcccttgtcactaatcaccaaggagtcattaacttcctccctctatgcccacccctgacacttcaccattaatcttaacacagaacatgaggttatgtgtttataggacaacttaagctgttcttcagtttgaaacatcttttcacccaggggcaagttagcaaattgagtcttttaggacagattctcagatgggatgatctggaggaggaggaaaaagatacactcccttggggctgagcatgccccacactcttggatcttctctctgttccctggtgtcttcactaatgtcctcatgttggtgaagtgttgggggatggagggcgggtgagcagtcgggggacaaaaagtctatttttccttcacttttgtctcttcaatgtgtgttttcctcacactccttacttgactgctttcttcccccactttcatgtcccctctggattgtccagtgtaatgcatggcattgtggtgtctgtctaggaaggaaggggtgattgacaagagacaagtctggcccagttaatgctttctgcagtgggtctaaatggatctggactggaggagtctttcctttcctttctcccttcctctccagccaggtcctgtaagggccagcccagactacaggacatccacagaatattctggagcttgcaagtagacatagggtgagagttcttgcctcctttcatgagaaacagttctaagtcttcgatgccctgggagaatctggctctgagcatgtgggaaatgtcttggtttttatttttaatttagagtcaggcctgggtcttttgaggtctgcagagtggggtttaggagagtagggtgggctctagctcttgcagggctcttagagagcagtcatgtcttttctcccatgactctcaggttctttgccaatcacagcaacttttcctgccaaagccagtatcctctggggctgtttagaagggcagttagattcaggagtcaccactgatgtttgagttgctcaaggcaagaggcagagaagagttcactaaaactgcttatttttgaataatttcagcacactgtccttaagaagaaagaaacatcaaaacaaaatagtttttacatgaccatttttttcccaaatgtggaaaagcttgatgatgaatttaatctctctcattggagtattcttttgttcataaagagaaactatctcatcttgatgtccagagaagtccttggaaccctgtgggatctagctcgtaactgtttgtatttctctattcacttctgtcatttcattttctttgtagggttaaacagaaaatgtttagggaagaaattcttagccccttgatgaccatgatggcttattctctttcccaattttgcatgcaaaatgtacgaatatatgtatgtttttctgagaggcaagtttagggttctcatgggattttaaaaagagataggtgactccccaccttaaagttatctgctggtcttttagaggtaaccagtgagaaggagttagctattttccaagggtgttttcatttggtaatggaagactttttgctgtggttctcatccaggagtattccttagaattgcctttaggattgttgaatcataaacatgcctgtgtccaccttatgcttaatactgactcagaatctctgggatctgggtctggacatgcatgtatttaagtagcttcccggatgattctgattcatagctcgggttaagaactccaccttaggaagttaggtggaaaaatactggatagtagtttctcagacaaaagtgtcagcctaggaattctgaattcctcatagtcctgaaaggacagttctttgggtttgatgtttgagcagatcataatgttaaatgatataaccccctggaaggcaggctgctgtgttttagagggttattctaggttctagtcccatctttaaccctttacattgctgagtgatgtggaacaaatcactgaattaaataattgtctctagagagcagctggggattttaagcaccctggagagaggtgcagaccctgccaggatgataaaggttgtcatcactggcaactgactcctgaccccgggtcctttactcgtatgtcccaagtaggataccataggcagcttctaaaggctgcttacctagattcttctcaaaattgtgtccaagatgttaagtaacctgctattcctgtttagtggttacataacatgtacttagtgtctttgtggagctttgggctggtaggggcagggataggggaaagctaaacagaagtagaagaaaaggtccttgtccagaggaaggttattttaagagacaggacatgtaatttataacaaatggacatttgcaatatagcaacagtctgagtctagaagtgttcaaccatcacatcgcttctcctgacttttctgttgtcctatggctatgagactacaggggttgggggatggggatgcccccaccaccaccagtgtgagaatgagatatggttggggaggcgtgtttggcacttttacaaggttgcattgtccacatttgcttggatggtggcatctgtagcccaaatgggcattcagtcttttcttctgctgtgaggtaagagtaattcagacctaatgaatgagaagagggagcactttgatccacagactttggattaacactgtacccactcttagcaaaaggggacttctctaacaagctagcattgtgttaacctgtcattaacccagcattagagacaggtcactgggatgttcattctggctctcagcctgctgttatttccccactctcacctgtgctagttcgctttctccagaagaggagctgaggtggtcttatcctcagataggacatgagaaattggaatttggcaagcaagggcttcagcatcctttagtttctaaagcaagatcccttcagagaagtctagcaggaagaagccaggagaatgtagaatggaaaagagctcttactccaaattttagagaagtttcagctctacttctcatcttttctctcctggtcttacttgaatgcatgttggtaatctgtatacattactatgactgtgtctatcacaagtcctacaaaataaaaatggacttaaaagtactctctgctgaggctgtaagttttgttttgtgagaaataggtaaagacattagcatttaatctactggaataagctggttgctgtggcttatacctgtagtcccagatacttgggaggctgaggcaggagaatcacttgagaccagcctgggcaatatagtgagacctcacctctaaaaaagttttttataaatttacttgtctaaagtggggaaagggaaattattctgttttcttattcttgcttcaagactatgacagatttgaaagagaattctaaagcagatttagagaacctgcttctcttcttatctcctaatccctaaattgtaatttagctcttatctgtattgttgttttgttttggtaaagggatgatttttacattgagttttaaagtagaataagaaaagcttctaaaaacttgcattgtgctagggatctgccctatatctttgcctctggtgtttcgttgttgttgttattgtttgtttgtttccaaagaagttggagttaaggacacaatatatttgtacccctagactgaatgggtgagtattccatatgaggatctgggtaatcctctttgcaacccacatttggtcttcagagacactggcattttgaagaaacatatgatatagctgtttggaaataaattcatctatgttactttttttttcttttttttttttttttatgagcaggagatcttaattgacagaaactcattggtggttggagtggccaatgggcacgggaaaaagtatccagtaatcagaagaattgtatctgggttatgtaatcttatgcacattccattgtctttgccaagcccagaagccatgttgtgttcattgttaagaaatttgatagatttacccagcttttctatgtattttgacttattgaaaatatgtaacaactgagtcgggttgcagcactggtggggtagaatcgactttccctgaaggtgacacagatgtcagaattgtgtccagggatttaatttagacccatactgtccaggagactgtctctagttggatctctgtgctgactgactgacagacagactttagtgtctgtgtgctgactgacagactctagtagtgtctatatgttgaccaactggtagaccaggaggatctgtgtgctgattgactctagtaggatctgtttgtcactgacagactgtagtagtgtctgtgtgctgactgatagatagactatagtaaaatttgggtgttgcctgactaacggtctagggtctgtaagctgacagtctgcctgctttctgattgtatccattgaagtgtatgtacattatggtaattctctgtctattaaatgtgtctaacaaaggaaggaattaagcactccacgtgttttctttataggggagttctgtacactatgattttaaatagatatttcttatatagtagtggccaaattctcattattttgtacaagataaaggttatgcatcacttttatggtattttgtgaactcagctaagggaatgcctgttcagagcctggagttgttacctttacttgaagtcatctcatccagtcccctgctttagggcaggacttcagttccactgttcatttctgaagcttctgtgtccccagcttaccctgttctgaaatgttgtattccattggacagggctgctatttttagtcagccatgcatttggattttacacttaatctagtaagtaaaaatgagaagaaaatttggcatttaaaaattgattttaagggttggcaaaagtattttttccagtaagcctttcactggatatctgtgaccaatgtttacctacgcaatgtttttgtatctgaattgcttatgtacgttttttattatattgacctaacaagaagatcaacttatgctggtatggtgatggttttgctatggcaaaatcaaagggctgatcatacatggtgccctttgggaagggggatggtgtggggctgagcacctctgggttgaatgggaatgggtcagattgggaagcctaggaagagagttctactgtagatttcctaggcactgctctgttgaaataggaacataagtctttagcaacattctgatttaatcgggtgacactgataacaaagtatgccactcagatccatttaaagtgtgcataactgtatttgaaatgtgtttttgtgtgcgtgtgtgtagaatgggtaaataaaattgttgagtaacttgaacct

SEQ ID NO: 825 - DNA, 2003 bp, Homo sapiens
tgatgtggatgttcaggcctcacctctccaaacgactgggatctactgaaaagcttgggatgtcagcttcacagaggctagaacaggaagttaagtgggaactggactttgggggccaccaaaacgaggcctggagaaacgtcaccatatttcctcccctcctgcctaatgggaatatcagttacactgaaaaatttaacttccctgtgcctcaaaacatttagcaacctgaaccagtgactttttgtcatctctgtgctgagtttggtccaagttggtcaatctcattctgtataggcatttaacatcctacctgtgactgtctgcatcctttgctggctcttttttgcccaaagtgcaaatgcacttcttcagatttacttttcaagtgagaaggtaagagctggtctctgccactgttccaggcgagcaggctagagtctaatatacttatgctagcagttaccatttgccacattggaagcaagagacaaatcaccaggtgaatggagggtcttctgagaaattcagtccctaaaacatcttctctgccttgatagaagaacagtgtcagtggcaaccttttcatttagagaagtttttcttgttccaggcccttcaggacaggatctgactgcaagactccccaaaatgggtacccatcttctaagttcccttttgtagctactgtacttttgacttgatgcatgtgcctctcatgcatcaagatggggctgatgtggttctcctgggtggttgggaatgtggactagacagaaaagtagagtgccatttatatcacgtgagtaagtcaagaaagctccttgagaatcagcccgatcagggagtgttttggcttcagaacaggtggaaggagacacgcccctctgtgggctctgtcaccatgatacagtccttgagagagctgtggctgtgacttggagggcagtagtctcctgatacctgcctcttggccactggtcactattgtggtcactgatctctcatataaaagtgagggtggcggggtcatggaccagcgcctcagtgcattagtcattcgcttttccttacagacaaatcagataactcttccccagtgattgtcaaatgtatgaatgtatctctgtaaatgtggttttgacatgtcactgttactgaaggagagtatggaatccccacaggatattatatcttgcaaggaaagtctattttttaaagaatagtatgtttttagctttacttttctttcttttccttttcactcaaatgctcacttgctgggcaaaagggtgagtagcaagaaaagtaatgatatgtagcttttctcaaatggttcttttatactgtggatgatacaggactctgttacctaagatgtgataagctgggctgcaggcggttcagcatccagcaactaggagctgcttttctacgtacaaagctgccttcaggaaggctccttaccctgtagcagatgattttcatctggctgcctaccgcatgctgtactataatgatttagttgtgatatggatttctctctgcatcgaaaactgtcttttgatgatcagacaatgtttatatttagttatttattctatccatgtaaggcatttttgagttttcttgtcactgtttgcatgtatttaatcagaatgtaatataatttatgttgtcaggtttttttttgtttgtttgtttggggttttttttgtagaaatttaggtagttagagcttttaagtctaatgtcatattaacttaagttaaatttccagaacgtagatatctgtcttctgtaaaaggaaaataacgatgttaagggacagtgaattttttttgaatactttgtttctcattgatttttattgtaagtgtaaaccaagagatgcatttctctggagaagtgtttatctcctggattaataaaatcatgctaaaatatgcgagtaatatgtattgcttttgtaataagaacataaaataaaattatttttaatt

SEQ ID NO: 826 - DNA, 61 bp, Homo sapiens
cactacagctgagcagatgtaatagaaataaacctatgaataaattttcttcttggttctg

SEQ ID NO: 827 - DNA, 246 bp, Homo sapiens
tttttctcaaaagaaggaggaaaaggtgtcttgctggcttgcctcttgcaattcaatacagatcagtttagcaaatctactgtcaatttggcagtgatattcatcataataaatatctagaaatgataatttgctaaagtttagtgctttgagattgtgaaattattaatcatcctctgtgtggctcatgtttttgcttttcaacacacaaagcacaaattttttttcgattaaaaatgtatgtat

SEQ ID NO: 828 - DNA, 891 bp, Homo sapiens
ccaaagaagagttaagaagaaaatacacacaagtatacagactgttcctagtttcttagacttatctgcatattggataaaataaatgcaattgtgctcttcatttaggatgctttcattgtctttaagatgtgttaggaatgtcaacagagcaaggagaaaaaaggcagtcctggaatcacattcttagcacacctacacctcttgaaaatagaacaacttgcagaattgagagtgattcctttcctaaaagtgtaagaaagcatagagatttgttcgtatttagaatgggatcacgaggaaaagagaaggaaagtgatttttttccacaagatctgtaatgttatttccacttataaaggaaataaaaaatgaaaaacattatttggatatcaaaagcaaataaaaacccaattcagtctcttctaagcaaaattgctaaagagagatgaaccacattataaagtaatctttggctgtaaggcattttcatctttccttcgggttggcaaaatattttaaaggtaaaacatgctggtgaaccaggggtgttgatggtgataagggaggaatatagaatgaaagactgaatcttcctttgttgcacaaatagagtttggaaaaagcctgtgaaaggtgtcttctttgacttaatgtctttaaaagtatccagagatactacaatattaacataagaaaagattatatattatttctgaatcgagatgtccatagtcaaatttgtaaatcttattcttttgtaatatttatttatatttatttatgacagtgaacattctgattttacatgtaaaacaagaaaagttgaagaagatatgtgaagaaaaatgtatttttcctaaatagaaataaatgatcccattttttggt

SEQ ID NO: 829 - DNA, 752 bp, Homo sapiens
tgtgcctcattgcttggaattcagcggaatattgattagaaagaaactgctctaatatcagcaagtctctttatatggcctcaagatcaatgaaatgatgtcataagcgatcacttcctatatgcacttattctcaagaagaacatctttatggtaaagatgggagcccagtttcactgccatatactcttcaaggactttctgaagcctcacttatgagatgcctgaagccaggccatggctataaacaattacatggctctaaaaagttttgccctttttaaggaaggcactaaaaagagctgtcctggtatctagacccatcttctttttgaaatcagcatactcaatgttactatctgcttttggttataatgtgtttttaattatctaaagtatgaagcattttctggggttatgatggctttacctttattaggaagtatggttttattttgatagtagcttcctcctctggtggtgttaatcatttcatttttacccttacttggtttgagtttctctcacattactgtatatactttgcctttccataatcactcagtgattgcaatttgcacaagtttttttaaattatgggaatcaagatttaatcctagagatttggtgtacaattcaggctttggatgtttctttagcagttttgtgataagttctagttgcttgtaaaatttcacttaataatgtgtacattagtcattcaataaattgtaattgtaaagaaaacatac

SEQ ID NO: 830 - DNA, 2355 bp, Homo sapiens
caaagtactatacagctgaagaacatctcgaatacaattttggtgggaaaggagccaattgatttcaacagaatcagatctgagcttcataaagtctttgaagtgacttcacagagacgcagacatgtgcacttgaagatgctgccccttccctggtacctagcaaagctcctgcctctttgtgtgcgtcactgtgaaacccccacccttctgcctcgtgctaaacgcacacagtatctagtcaggggaaaagactgcatttaggagatagaaaatagtttggattacttaaaggaataaggtgttgcctggaatttctggtttgtaaggtggtcactgttcttttttaaaatatttgtaatatggaatgggctcagtaagaagagcttggaaaatgcagaaagttatgaaaaataagtcacttataattatgctacctactgataaccactcctaatattttgattcattttctgcctatcttctttcacatatgtgtttttttacatacgtacttttcccccttagtttgtttccttttattttatagagcagaaccctagtcttttaaacagtttagagtgaaatatatgctatatcagtttttactttctctagggagaaaaattaatttactagaaaggcatgaaatgatcatgggaagagtggttaagactactgaagagaaatatttggaaaataagatttcgatatcttctttttttttgagatggagtctggctctgtctcccaggctggagtgcagtggcgtaatctcggctcactgcaagctccgcctcccgggttgacaccattttcctgcctcagcctcctgagtagttgggattaccagtagatgggactacaggcacctgccaacacgcccggctaatttttttgtatttttagtagagacggggtttcaccatgttagccaggatggtctggatctcctgacctcgtgatccacctgcctcggcctcccaaagtgctgcgattacaggcatgagccaccgcgcctggccgctttcgatattttctaaactttaattcaaaagcactttgtgctgtgttctatataaaaaacataataaaaattgaaatgaaagaataattgttattataaaagtactagcttacttttgtatggattcagaatatactaaattaactttttaaaacacaacttttaaaaaatgtatcaaaataataaacgtgttctgatatttttaaaataagtgaccttgtgttctttaaccagtccacatctttagagaacaaaaatgtgttatgatattatgggccatgctaatgacctctagaaaacatcagaatatttctggatatttaataatagctttatatatgactaatgctcatttctatgtaattctgtttaatagttgctttaaaggtgaattttgccacatttactttgacagcagtataaggagtgagatagacatgaacctgaatttcaatttaaaatcatggaagagagggaaaaaaaaccagcttaagaaaaatcaactgataaactgcaagaaaaaaatgcaacttacatcacaaaagctaattgctttattatttagagagtacttaaaaattaaagaccaaacttctctccacccaacaaaaatgggcaaaggacatacagctaggtcaccaagaaagaagggcaaataggtggtgagtatatgtaaagatacttgataggacttttgcttagttgaatctttagcaaatctcttttatttcttgggattttgaagaagtaatttttaaaggaggactagaaactaagtgattgggaattggcctttttagaattaaaatttcccattacaagaaaaaaaaatcctgtgttcttttttttttccagaatggagtaggtcagtgagcaatgtgattaataaatatttcaatgtctgtgacttttgatttattttggagacagggtcttgctctgttacccaggctggagtgcagtggtgctatctaggcttactgcaacctcacctgtcactttttaattgcaagaaagctgaaaggtttttttctattatatcagttataatgataaatactgtatatactaactatgagtaaaatactatattgcctaacttgtattattaagcaattctgctaacctgtgaccttacattttcatctgaaaagcaggggctggacaccaattgccctatgaagctattgctagtcctaacattctttgttttgtttgcttttttggcacacttaagtgtgtactatgaagtttatgatgctttaatgaaattttctgtctctaccattgtaatgagaaaggaataaaatactttattttgcaaatct

SEQ ID NO: 831 - DNA, 1994 bp, Homo sapiens
gaaagcagatggtggagctgaatatgccacttaccagactaaatcaaccactccagcagagcagagaggctgaatagattccacaacctggtttgccagttcatcttttgactctattaaaatcttcaatagttgttattctgtagtttcactctcatgagtgcaactgtggcttagctaatattgcaatgtggcttgaatgtaggtagcatcctttgatgcttctttgaaacttgtatgaatttgggtatgaacagattgcctgctttcccttaaataacacttagatttattggaccagtcagcacagcatgcctggttgtattaaagcagggatatgctgtattttataaaattggcaaaattagagaaatatagttcacaatgaaattatattttctttgtaaagaaagtggcttgaaatcttttttgttcaaagattaatgccaactcttaagattattctttcaccaactatagaatgtattttatatatcgttcattgtaaaaagcccttaaaaatatgtgtatactactttggctcttgtgcataaaaacaagaacactgaaaattgggaatatgcacaaacttggcttctttaaccaagaatattattggaaaattctctaaaagttaatagggtaaattctctattttttgtaatgtgttcggtgatttcagaaagctagaaagtgtatgtgtggcatttgttttcactttttaaaacatccctaactgatcgaatatatcagtaatttcagaatcagatgcatcctttcataagaagtgagaggactctgacagccataacaggagtgccacttcatggtgcgaagtgaacactgtagtcttgttgttttcccaaagagaactccgtatgttctcttaggttgagtaacccactctgaattctggttacatgtgtttttctctccctccttaaataaagagaggggttaaacatgccctctaaaagtaggtggttttgaagagaataaattcatcagataacctcaagtcacatgagaatcttagtccatttacattgccttggctagtaaaagccatctatgtatatgtcttacctcatctcctaaaaggcagagtacaaagtaagccatgtatctcaggaaggtaacttcattttgtctatttgctgttgattgtaccaagggatggaagaagtaaatatagctcaggtagcactttatactcaggcagatctcagccctctactgagtcccttagccaagcagtttctttcaaagaagccagcaggcgaaaagcagggactgccactgcatttcatatcacactgttaaaagttgtgttttgaaattttatgtttagttgcacaaattgggccaaagaaacattgccttgaggaagatatgattggaaaatcaagagtgtagaagaataaatactgttttactgtccaaagacatgtttatagtgctctgtaaatgttcctttcctttgtagtctctggcaagatgctttaggaagataaaagtttgaggagaacaaacaggaattctgaattaagcacagagttgaagtttatacccgtttcacatgcttttcaagaatgtcgcaattactaagaagcagataatggtgttttttagaaacctaattgaagtatattcaaccaaatactttaatgtataaaataaatattatacaatatacttgtatagcagtttctgcttcacatttgattttttcaaatttaatatttatattagagatctatatatgtataaatatgtattttgtcaaatttgttacttaaatatatagagaccagttttctctggaagtttgtttaaatgacagaagcgtatatgaattcaagaaaatttaagctgcaaaaatgtatttgctataaaatgagaagtctcactgatagaggttctttattgctcattttttaaaaaatggactcttgaaatctgttaaaataaaattgtacatttggagatgtttc

SEQ ID NO: 832 - DNA, 899 bp, Homo sapiens
gagacatattcaactcctctgctcttccaaacctggtgtctatccggcagagggaggaaggcagagcaagtggagcagggcttagcaggagcagtttctggccagaagcaccagcctgctgccagcggggcagcccctcataggaggcccaggagggagccccaaggcgtagaagccttgttgaagctgtgagcaggagaagcggtgcccaccagcttccaggtctccctgacctgcctgctctatgccccacaccctacgtgccgtggctctgtgcagtgtacgtagatagctctcgcctgggtctgtgctgtttgtcgtgaaaagcttaatgggctggccaggctgtgtcaccttctccaagcaaagccatatggagcatctacccagactcccactctgcacacactcactcccacctctcaagcctccaacctcttggccagattgggctcattaatgtcgttgcctgcccatctgcatgaatgacaggcagctccccatggtggtctgcctgtgagctcttcaagttctaatccttaactccaggattagctcccaagtgcgctgagacccagccagcacacttctggcccttctccctgcctcaatctaaaagcagtgccacaccctccaaagtggaatagaaagaagttcatgagtaagggctgcaaggaattcttatcctggccacatgtcctccgtgcacacacccaatggagttaaccttggaagttgactattttaatgtctgccaggagttctaatcctgcctctgttcccttttctctccttgaaagtccagcacaccattcttgtccttccccagtttcctcgccctccacccctccagcttcatgctcagtgttgtgcttaataaaatggacatatttttctct

SEQ ID NO: 833 - DNA, 391 bp, Homo sapiens
gaactgtgggagaccagcggagtgggagggagacgcagtagacagagacagaccgagagaggaatggagagacagagggggcgcgcgcacaggagcctgactccgctgggagagtgcaggagcacgtgctgttttttatttggacttaacttcagagaaaccgctgacatctagaactgacctaccacaagcatccaccaaaggagtttgggattgagttttgctgctgtgcagcactgcattgtcatgacatttccaacactgtgtgaattatctaaatgcgtctaccattttgcactagggaggaaggataaatgctttttatgttattattattaattattacaatgaccaccattttgcattttgaaataaaaaaactttttatacc

SEQ ID NO: 834 - DNA, 428 bp, Homo sapiens
gaactccctgagggctgggcatgctgagggattttgggactgttctgtctcatgtttatctgagctcttatctatgaagacatcttcccagagtgtccccagagacatgcaagtcatgggtcacacctgacaaatggaaggagttcctctaacatttgcaaaatggaaatgtaataataatgaatgtcatgcaccgctgcagccagcagttgtaaaattgttagtaaacataggtataattaccagatagttatattaaatttatatcttatatataataatatgtgatgattaatacaatattaattataataaaggtcacataaactttataaattcataactggtagctataacttgagcttattcaggatggtttctttaaaaccataaactgtacaaatgaaatttttcaatatttgtttctt

SEQ ID NO: 835 - DNA, 171 bp, Homo sapiens
ataatttgtgacaactgccttgggtgaaaatcagaagcaagcaactcagcgaaaaactcagaaggtttgggtacattacagcttgggttttccaactgacttaggatttctgactttttattaatttcttaacctactgtaaataaacttcacctgaccagattgttcctc

SEQ ID NO: 836 - DNA, 6116 bp, Homo sapiens
aattttgttgggcaggaagtggtatttggcatgatacataatgtttgattctatgccatttggacccaattctgattacttacagaagaaggactgatacaaagaaagtgcatgaggcaatgtcagtattatctgacatctttcttttcaggtcatgtgtccctgaaaagttaaatgtaaaccagattttggtaaatcccatctttcagaagtgaagagggggctagaaggactctgagaagttggtagaagaaaactcccacttgtgaatatttttgtgagacataaattcttttattacgatttacctctaatttattacacttagtaaattcttccagatttttctatttgtttgacacttccttaaagtaaggaatacacattgcttgcgagaactggttatgagacattggaatacttcttgctgctacatgtcatcttaattttggatggcatgggttttgtaaaacttattctgccccagccaaacttttttgaaaccttaaatagtctaccttaattcagcctagaagagtacattgatttactgatcttttttcatattcataatactaaatgttttagttttgttcaaatatatgcttaaaatcacgttatttaaaaaacacatcagctctgtctcaagaagtaattttgttgaaactccatgttaaaatatccatcttcaacagtagtgtcttcataataactagtcattttttcagtcataaacagatgcaaataaaaaggaaattacacttttaaaaacatttttattttgaaacattctcaaacagaaaaattccaagtacagaacctgaaccatttgagagtgagttgccaacccagtgggcctatcacctttaaatactttagtatatatttcctgtaaacaattaagggtattgtttgtgattaggaatgccccaccaataaggataatgtgaatatttcagaatccaaaaaaattcgaaacacgtctggtcccaagcatttcagataagagatattcaactcatcctagtatggactcgtagtttcttcttttattcaatgggttacggtttgttacatcattatttctttagatgcgtaactggtctcaaatatggccgctgggagcaccttcaggttagcccctgtgtacttttgacatgtcccccatctacttgggcactgctgtattttttgacaatgagacattccaggtttctctactccagccctgcttgcttttagtaggaaattattataaaaggttagattggagtgcttactattgtggtgccactcatcccaggctcagtggtcagaacttgggaattgtgtacatgtatgcacacacatatgtacacacgttgtctaaatttgcttcacattaatatctaaatttactttcatatccatatattgaaaaccatgaattcacaccagtacctccaattctagtccaacaacacaggattgcttctcattttctttccatattgataactcctttctcagacagtggctcccattatcctcaatgtaataacccatgattggtacagattttttttatccttgggcacgcttaaaattacttagcaaaaacaaaaagtaaaatcagttttgaagtaatatttctgctaaatatttagacatttttacttctttttcttcagcatggtaagtaaaaccatttattccatatttagatggttttctaaatttcagaaaatttagttagataaaagccgaccgaacccatgctacaaagaactttttgtatctataggcatgccctgtggttactggcgtaattgtgctgctgtttatcatagatcctgtatattatgagaataagaaatgagtttatttacctcattcagaaatgtgaggcgaagggactgtaattacctggatctttttttttttttttgagatggagtctcgctctgttgcccaggctggagtacactggcatgatcttggcttactgcaatctgtgcctcccgagttcaagcgattctcgtgcctccgcctcccaagtagctgggactacaggcgcatgccaccatgcacagctaattttttatatttttagtagagatggggttttgccatgttggccaggctggtctcaaactcttgacctcaagtgatctgcccacctcagcctcccaaagtgctggggttacaggcctgagccgccacgcctggccaattacctacatctttttctactgccatattcttttgcctgtgaattgtagttcatctcgtggtttccattattactattcacacgactcccaaatctccagcttctctggctctccactcacatgtgagtctggatttcaaatccatgatgtagccccagaaataaccattttattaagcacccctagtgattttcatgctggcatagagccaaacccagccaactgcttcttgcctgcagagaacactgaggatttcaagtgtgaacaaagtagtgttgctttgttcctggctcagcacctgaaaagaaggtaagcctctgcagttagccctggctccttagtgcattgcagagtggagtctctgcaatggttttattaaaaggatgccttgaagatctggtctctctcaacacacaataagcgagaagagaggctactgaaatacggatgcgtgagctggaattacacactaccttgatgttaacaaggctcatttgcagcaagcaagtgcctatatagggtctgaaatatagacaaaggatggtcccaatcctggaaacagtggaattaaaaggtatggaaaggaacttacccagaaagtaacacttttaaatgttttttcttttcccatagttaaaacaaccagcttagcacttttctttttgagagagaaaaagctttgaatcgtggatgcttctcacagctggctgcaccacgtgcagtgttcaaaaaacaagaacaagctaatcatagagaaccagcagcagctaaacagccctctgcttgcttccaaagggcttataattgagcacagatggtcctagtggagatggggaatgtgtccctgctgactcctcataccccagaggaccaaggggggctcatgaaggctctcagccctgattgtgccctcgtgagggcaaggagctatgctgctgaaggaggaaagggaaaggcaggtggggccagaccctattggccatctgaccagccttcccaagcccacgtgagcagatctagggtctcaagattacagaaggcctggggtgagggagcaagagttggaagttctttatagttgtctgaagagcctcattgtccaactgcaggggcctgaggtgcccaaagcttcgtggaaaagtaatgtcagtggaatgctcagaagtggctcttttcagggcacggcttctgaggagcgtggggccaccacagctagccctccctccgtctagccatcctctccttccagtccctttcccatcttttctctcaaaggagcatggtagtgatcttcattaccaaatttctactccacacttattttaaaaagcttttctgaaagcctggctacatagaattctaaacagatttcagtcaacttttaattagagtcaatgaatggggagtaaatacacagataatccaaaattgatgtaagcattggaaggggaaagagggaacgcttctttccctctgggcttggtcatttcctcccaagcaaaccccgcgacgttcagccgtcttcctcctatgccacgtgctctcaccagaactgcagcaaaactgcattttatgtcctgtgtctaaagctaaacacatgttcctgtctacttttgctttgttcctgtttcccttctgtgaggaccttcccctcctcagatgtggggagttgccgcctccacttgcattacatgtatttcagagtaggtcctaggctccccttacacctctggtcacgttgccattattcctatggtagataaaggggatgagaaagaacagagctccaggcctttttcaaacaaactggttttctcagtatagccctatgctcaaaaggagtgaggacaggtatgtgactgccataaggagctgtttgctttgcacagagaaatctaatctttctcctgctgggcagctcagtacagatgtcccctcactgctggaagaaacacctgcccttgcttgttctcctgatggcccctcacagtcaggtgtgggatggcacatttctaggtgctcctcgccgagctgtcatgggcttcagtcttgggcctctgcagctggctgtgaccaggtggaaactgtagccttggctgacccagagaaggaaaggaggcagtctgccgcttggctgatttaggagttgtgctgaattcctgcccatctgttctcccagctgagccaaggccaaagctgtctaccttttgccaacctaaggaatgacacagagcatggagcaccatcactgaaacatctgccccagtgccctgccaccttcgtcctcactgacctctgcagcctctctcatctgccagttttgattccgcaaggagaggtggccctgggctcacagctggtgtttgtccacagatgttcatgggtttctttgtgttctctcattttttcaaagctgggtgttgggaccaacatcaccactgacattctgtggctctaaacaagtcctcacgaccacttctcagttttctcatctttatgaagtatggagtaatccccactagccttatagagggactgtgtgagaagggaagagactgctattgtttgccctatatccacctacttccctagttccagaacgctggactttaatgagataacaaagtacctagtaaaaacactgcatcattttccatcccccaccccttgcagtaaaatgtggcccatgagacagaagcactaactactgagcaggacttctaggggagttctttaaaactcagaggagcaccacttttaccttctgctcttccctttttcctgcctggaacgcagaagtgatggctgaagctcctgaggctataagctctgtacgtaggagagtggtgaagaaaggagcttggttctgcaaggatgttgtagagctgccataccagtcctgcatggtattcctgtgcactactgttacgtgaacacacaaacacctaatttgtttaagccattaggccaggcctctattagccattcctgactgatacagaagacaaaaatggcatcacagactcctgaactccaaagacactgcctattctttcgtctgttcttggcaagcaccaacattgagactgtacttcagggttgatgctggccatttggtggcgtgaggagtgggcactcacatgtctctgctagcagttctgacgtgtccattccacactggatccatagaacgagggaacacaagtgtcttctcataagatttatagaaacagtgatcgttgcagaaaaataattagcaagagaacagacttcagctctctgaaggctgatgaccacctgtttctcatctcttctagtgtatgtcaaagctaaattaggtcaaataggaaataagtcagaatccccaattcgatagaaacttacaggtcttgtgatctaatctgccacttgatccgtgaattacctataggtcatccctaagaggtggcctccagcttctgcttgaattccttcaaggatggggtgctcattgtggcttttctaatcatctctgattgttagaaacactgtgaaacttttatccatcagtcctgtttctgaagctgtacggtacaaattttttttttccccacttaaggctcaactattggaatacatctaccatgtctcctatgaaacttgcttctccaggccaatcatccttacttccttaaacttttttttttcctgaaaagttattcttttaatcttattaaaaaagcaacccatgcccattccacaaatacaagtgaaatagtgaaaaacaaaaatcaaactacatctatttggtgatcattattaatgtcttatgtttcctcccagattgttttctgcatgaataataaccaacaatgtgtgtgtatgtatatatatgcttttgcattaaaaggtggttttgaaggt

SEQ ID NO: 837 - DNA, 3246 bp, Homo sapiens
tgaatagaataagcaagcagttaccatcaaaggcagcatatttccaattccaacattactgtttctaccaagtcccattagaagagctgttctttgaagaatcatattcaaccttctaccaaaatgctttaagttctatggaaagaacgtctcatactgacataaatgaagaaaatatgtgtatctagtagagcttgtttaggaaactgagaaacgtacactatcattgctaaactaacagtcctccagaaatttaataagatgtttttgatttgaagttaattttaatttagcaaaagagccagtcattttatgaaaaatcaaaattataagtgattttaaaaaccagaattttagttgcaatacaattttaatatcaccctacatattatttataaaacatagtttgactggccagtccctggtgtttgtaatgttctttaatatgaaaaagtagttctccaactctatcataagtcatatctaatggtgaagggtttcagtcacattgaaaattgttttatttcaggcatgttccctttgtgcacttaggttcattgtgcctcagttcctctcaaaagcactaaatctaagtgcaaacaagtattcattttcatacaggaatttttttaatatgttatttttttaaaagttcatttttcatttgcctccgctttcgcctgatccaaagagaccaagtcactgtactggtcccttgcaagtcttctagacaggttgtactgtagaactacgtaactttctgttgaaagcacttcctgtattcttgtattccaatgtaggaagctaatagagcaggactttactttcaaatttctttcagtgattgactcttcaaaattgcagtagtgtgaaaatacattttttacaaactgaaaatacagtagataagctgtcgaaaatggaaaacaattcaattttaattttctgctctgagtatttagtaaccaacactgcgtaaagcaggtagcattcaaaataagaaactgttctctctctaaatcttcactcttacttcaatttatatttgtgatatgaagactatccagttctcagtttgaattggaacatcatgttaaaaacagttatgagattccttatgaagtttctagtaacttgtaactagactttatgaaattaacagataaagttcttcaacgtgatgtcatcttgtgcctttcatgtaagttaaatttgctcatacagcttgaacgttgtatttgcaaaattaagccttcgatttttataaatgtaaagattcctcagaacagtgtcgcaagatctttatttcctctgaagtatgtaaaagttgtataatgtgctaactttttaatggcaaggcactttcatttgtttttatatttaggaactctaatcaggaatattataagctgttttctttttaattttgcttcttacctaatatatcattttatgcatatactttatcagagtatgttttatatatattaaaaatagtttcttttttctccttctcatttctagttaaaatagacaaaaacatactatttaccagttactaaaaagcagtatatcattgcttctagtcccaactaagtactatatattattgtaaactagaacttgttattaccataataacaaaacaatgcgtagatattacttcagcttggctgtactgaaaggccttaaaagaaacccaaaaagaccgtgaacttctgtatttttttagtttaaaaaatggcagctctatgcattcatacacatgaattataagaaaaaatacaaatgctatattggatgacatgaggtttgagaatgtgtgttacagggctgcattaaagggaaaaatccatcttttattgttacatcaatgagctttttccaggatttttcaaataaacaagtaagagttagaacctgaatcaaatggcaaaatatctcatttaagtgttttcagcaacagtatgaaaaaagacttgaagaggggatgtagattttactgagaaattggacttaggcatttgaagctataatgaactttttagactttgaaacaactgactgcattgctaacaactgttatcttcctaataaaaagagttatcagtcttatctgtaactgtaacagagcttagtgaaacacattagtaagaccagcttggtgctttcactcttagtgagaaaaagacctaactaattgttatttgttaaatctaccttttttcagactattcccagaattgtgtgtgtgatttgatacatccctagggatttatctggcataagtatcaaatccttcatggcttaaaaattaataaacagttttttaatatttctggaaagaccctacctccaccccagctgccaagtcctcaaagattataaattatctatatgagtgtatgtatctgtatacacacatgcaccattacacatacaacataaatatgtatatgtatattcatttgtaaaggcaaaggtgccctggctttttcagataactgaatagaaaaacatttcatacatttaggattatttttctcctctatgtatttactagatattatatttggtttgggttgctttctgctgctgttctccttcacacacagcaaaatatacatttgtttctgtagattgacacaacttataataattactcccaaaaagttgtctgttcttttagaaaaggattaaataaggctcaggggacccacttcactctactgaatctaatgtacgagacagtactactgcttctttgtgtgcttgaatttgcatgaaagcttaatagcaaaatcttctatctcagtaattatagcaaatagggacctactggtagggagcaggtgttggctcagaaacctgaaaaagacaacccactttcatacagttctattaaaatcccctaagttttctaataaaatgatatagtccaaatatggcaatcgactggcatttatgggagcctctaaacctggaattatggggtttatttttctcccaaatgagctgcaaaagataattattgctgcccagtaaacaaaatgtatgtcaaatcagtaaagaatttgtttagcataatattgccttatctttcagaagctttcttctatattcttgtgtcttcagtacaatccacttttgtttgaaatccatttgcatattatcttactgtgcatttagtgaattctcaataatgttgtatttgctgacaagaataataaattggaccacaattaa

SEQ ID NO: 838 - DNA, 756 bp, Homo sapiens
gccatcttctcaccgaactttgaagcatgcacagcatgatcagttagctctcgtaaattttattttgaatggattttgtagttttgtacaacagataaaattatgccatgaacatgccatgtcgttttaatgcctggagagcagattgcgtaaaacatctgtatagcaggcatcagcgagcttcttataaatgtggtgatttttaccaaggaaacgattgacttaatgcttaaaagtatatcatagttttcttacggaaaagatcagtagatgagattgggggacaatgtgcccttgcaatatttccattgccccccaaggagcctgtcactagctaagaaatttctacatgtttgccagttaattagggagttatttggtaagcaaatcaatataaccagcaaagatacctgcttcttctatatgatacaatattttttttaaataaaagactaaagacagggagctagatgaaatggcttaatggtgctgttaagtatttgtacctaacagtcttgtgtgacagatgaaaataggatgtaacataatgaaacacacctgtctaggggcggcaatcaacagtcttacacagagagggtattccctgcaagtttctggcttgcctgtgatgggtgatgaggcttttagagaggtgttatacagggcgatttttggtgccttacttttatcttaatttttgccaatgtgaaaattaaggataaatcagagttacagcagggatttaacaaacaggac

SEQ ID NO: 839 - DNA, 1917 bp, Homo sapiens
tgctgttgggcccaggccagtccttgttgctggcctccaaggcaaatagtgcttcaccctgacctctcactccaggacagcctctaagggatttgatctgctcatcttcagttgaatgccctcactccaagactggatgctggatctcatagaaaattcacagccagacaatcttctaatctggagtctttgagatcttctaccccaactcatcattttcctattgaggaaacgggtccagggcagtcgtgtgtcttacccagctacacagggtgacattttggtctagaacctagtctcatgagccctttgcattctttccccttaagcaagaatagaatgtagtggaaatttattgattgagacacagaaatcctgattagtgataggcctgtcttctgggcaatatttctaaaatatttgagtgacattgatgtttaagtgacctccttcatcacatcctgcagtatctccagaagcagcactagggtttgagtttcatacttcagcccctctgtaggaatgagaccaagccacagctgtcttttgaattacgtagtcgaagaagacggtagcagccctgtagcattctaaggcatctatacccaaggagtcctgtgatttgagcttcagcagggtgatctacatttgggtgcttgtttctgagatttgcagagaagtataacatggtagttcctctaccttacagttaatcgtttcttaataaagaagcagaatttagaaaccacaggatagtgtacccacagatgggtgttatcaaggccagtcatgaggatggtgtcctggagtcttgtccaccctctccatacaagtctcaaaagtcatcctcctactcagtgattcacgtttagtggtttatattattaaggtttgattcaaacagagccttttctgtcctgtagataatctacatgtttgtagaattattttgaatatgtttgaggaaaatgtttaaaatctaaatatactcacataacttgattattcactcctctgaaaagatgctggataggctaccaaagttcccaagtggtagataattcagaagacttgtttgaatttggattttttttttttttggagtggggaagggtataaaggaggcttaaaatttgaatccataatatatctaattacaggagaatttacaacatctcaagtacgtaaattaagttgtcattgagtgaaaggttcacttggacctagtgctgcctcctgtttattacatagcatggcccttatgtcttgagttgaggttatcatctcaatgaggcttaagctcctagagtacaggaccattttgttgattgtctttcttcatagcttctctgcttggcaaagagatgggagggggccagatactgactacctggggtaggcacattatgtgttaaagcaagacagaggccagagaggggcaggtagacctgcatagcagcagcctcagcagctgtcttggtaaaggagagagagagacatggggccagtaattccggggtgctcagaagttttaggagggaatgagcctcagggaggagtgagcacctaaatgaacgcagtaaaccttcatggaccaacagtgattgaggatttgtgggcagccagagggagtctgactgaagtttacttggaaagaaagggcttgctaagaaaaaagggagtaaaaatgatgatagggaagtgtctaatgtatgtgcacatataagtaatacaaaagttttgagctcttccaagtataccatttatatacaaacaaataggtttattcattcattaaactactttggaagcgtcagtggatatatttgaaagtggtaatcctgaatctcttttaaactattatatgattcataatggttctcaggaattaataaatgattactgtgtttagctctg

SEQ ID NO: 840 - DNA, 2467 bp, Homo sapiens
aaattaaattggacacagctgcagtaacttttcaccccatcattataccagtgctcatctgactgatgaaaaagaggaaagaataatcatttctagatactgaggctgcgaactagttctgtggcagtggactagcataagtggatgtctaagaaatttttcagttcactagactaaaatgttttacaacaaaaagcctccagttagcctcctttctagagtatatgttcagcaatgttgatctcataaaaggaaaaacaaaagatttaagtattctatataccaagtttttgttttgtttttactgtatttattttattgaggttctttatattcctgcctcttcatagtcaaggctcttagtacaggaatattgacttaggaattgtgaaaactccttaagtttcttaagttaaggatgtttggcttttttctttaattttttaaaaaccattttcctatgttaggagtgcaagaatagccagcatttccgattttgacatatgttcattttatgcatatttaagaaattatagctgcatatcccttctttcaaaaaatgttgcttttttttttaaaggaattttaatatattcctttaaaagaaagcaatttaatcaattgcaaagcaattatataaaaccacaaagaatgtactgaacctactaaccctttaacatacagtttagggtcctagcgcagagtccttgtttaaaggtcattgactcatcatctgtcagtaatgagaggattggaagaataattttgcatacaaatgaggacttaatttgttgaaatataatctctttaagttccttgaaaatggagttggttttttttgtttctaaatgctatctgcttttaactagtagttgcctacatctggggacttcagagaagaattatattttgttagttaagtagacacagtggttatggaagcatttctttacagtaccctttacatgtttggtttctgaacttaaaattgccctcatacttaataatatggtctgcatttaatatgaaaggtgttttattgataaatctattgtactatttggatacatttgtgtattccttgcagccaacctgtattcgtgggattggtgtagggttaaatcatcaacattatttcataaaataagaatttgttctgtgttatctaaagatgtatcagtatattgtcacagttgtgctgttaactaaaaatgctgagacccctttttatagaaaaacaaaaagacatcaagtcttcttaattcaacccataatcattaagtacttaacaaagaatattttacaagtgatagtatttcaacaatgtgtaattaatatttttgatacagtgatttcatattggaatcattatttgtgcaaagggacagacagatcacttagattgctatactagtggacataggctacatgtttgcacattcacattcttatcacgtgtagaatacttcacaaaatagtcaacatctaaggccctaatttatgttttgaaagatcatgtgttcccaaagtattccctattgttggctccacagccttaaagtgctatagatttaaattcattgattagttttaatttttaattttagactgtgtatttccataaataccctacgtactggcatatttgaaactctttttccaggttaggtccttttctttctcattgaatcatcttaaatagttcttggccctgaatttagctgatttaaaattcttaatattcaagaatttatacttattttttccttaaaagccacaggggacagttaaatatcttaaaatatctaaaacattttttaaagcacttagattgtcttacgtatgtgcatactatacctttacagcgtttattgtcttgtctcttgtcagtagaccttcagtacacagtatgtgggatatgtcagtcaagttggtcagcaccagcatctgtccagctgttcagtatattgtgattcattaaaaaatctcttctatcccagacatgggccaaggtgctgtatctgagggatgtgctgtaatttgatttacatgcattagagcacacagtagaaaaactttagcttcattagtaatatgacacatgtatatagtgagatgtctttattgtgtgctttgcatattttgtaaatattttgcacgtcattatttttcttttttgtttaagcagtgtttggcctggaagagtgatatgcttgctgcttaatcaaaggattaaagatttaaagatgtctatgtcttctatttttatataatttcatgttctatgaggaatttagtacctcttcactgtgaaattcgaaataatgatttttataaaagcaaaactagaaatcttttaatgacaattttcattaatttcagggttatcatttttgagaaatctacaccaaagtggttttttaaaattacataactaaaaataaaccacactgtggatacatcttat

SEQ ID NO: 841 - DNA, 2240 bp, Homo sapiens
tcactgttatggggtgataagaggacttcttggggccagaactgtggaggagagcacatttgattatcatattgacctggatttagactcaaagcacatttgtatttgcctttttccttaacgtttgaagtcagtttaaaacttctgaagtgctgtctttttacattttactctgtcccagtttgaaacttaaaactcttagaatattctcttattatttatatttttatatttcttgaaagatggtaagtttcttgaagtttttggggcgtttctcttttactggtgcttagcgcagtgtctcgggcactctaaatattgagtgttatggaggacacagaggtagcagaatcccagttgaaaatgttttgatattttattgtttggcctattgattctagacctggccttaagtctgcaaaagccatctttataaggtaggctgttccagttaagtagtgggtgatgtagttacaaagataatatgctcagtttggacctttttttcagttaaatgctaaatatatgaaaattactatacctctaagtattttcatgaaattcaccagcagtttgcaagcacagttttgcaaggctgcataagaactggtgaatggggtaagcattttcattcttcctgctgaagtaaagcagaaagtactgcatagtatatgagatatagccagctagctaaagttcagattttgttaggttcaaccctatgaaaaaaactattttcataggtcaaaaatggtaaaaaattagcagtttcataagattcaaccaaataaatatatatatacacacacacatacatatacacctatatatgtgtgtatacaaacagttcgaatgtattttggtgacagtaataaatcaatgtgaggatggatagaatttagtatatgatagagaaaatgtcataaatggataaaaggaatttacaacttgaggagaaaacctttacaatttcctatgggtgtcagaagtactctcagcgaaaactgatggctaaaacagtatctactattctctgataactttttttttgagacagagtttcattgtcacccaggctggagtacagtggcatgatctcagctcactgcaaactctgcctcccgaattcaagtgattctcctgcctcagcctcctgagtagctgggattacaggcgcccgtcaccacacccaggtaatttttgtatttttagtagagacggagttttgccatgttggccaagctgatctcaaactcctgacctcaagtgatctgcccgcctcggcctcccaaagtgctgagattacaggcatgacccaccgcgtcaagcctctgacaactattgaatttgtaagctgctatgcaaatgggcatttatataaacttgtgatgtttcttgtcagaattctgagtactctgtgaagaacagaaatgatcatattcttatgcatctatctgtatgggtctgaaggtgtatatacaaactgagatgagtccttatgactcttgataagcctgagtttaacaacaacaaaaatgccaagttgtcctgagcccttctgcgttgttatgccacttccctactgctcatatgcacgctggctcccctgggcacgcaaggatgagtatgggccatgggcccctgtagagctgcttacctggtgatgaccatgcaccttacaatttctgaacagttaaccctatagaagcatgctttatatgagtgtcttctgggaagaggaaccttcttaatctcttctgtgggattttcaaaatgctaaagactcacactgcagcaatcatcccagatgattaaattcaaagaaataggttcacaacaggaatatactgaagaactagagtgtcactgctggtgaactgtggcacggttgctcaacacatcacctcggacaaattcaggaagcatttctttagcccacaagtccagacccaggtgctctgtatgtttgtttttaatattcatcatatccaagttcactctgtcttcctgagcagtggaagatcatattgctgtaacttcttttaagtagttgatgtggaaaacattttaaagtgaatttgtcaaaatgctggttttgtgttttatccaacttttgtgcatatatataaagtatgtcatggcatggtttgcttaggagttcagagttccttcatcatcgaaatagtgattaagtgatcccagaacaaggaatactagagtaaaaagcacctctttttcac

SEQ ID NO: 842 - DNA, 501 bp, Homo sapiens
gtagctaggactacacgcatgcaccaccacacctggctaatttttgtatttttagtagggacggggtttcacctggttggccaggctggtctcgaactcctgacctcatgtgatccgtccacttcagcgtcccaaagtgctgggattacaggcatgagccaccgtgccctgcctcttttagttatttttaaatgtacaataaattgttgttgactgtaatcaccctgttgtgctataaaatacgaaatcttatacattctagctatatttttatactcattaatcatcctcctttccccaccttcaactacccttctaagcctctggtaacgatcgttctggtatcaccatgagtttatttgttttcatttttagctcccacaaataggtgacaacatgtgaattttgtctttctgtgcctggcttttgtcacttaacaatgacctccatttccatcccttgttgcaagtgacagcatctcattttttttttttttttggc

SEQ ID NO: 843 - DNA, 1904 bp, Homo sapiens
attctaatctgagtgagttactgagctttggtccactaaaacaagctgagctttggtccactaaaacaagatgaaaaatacaagagtgactctataactctggtctttaagaaagctgccttttcatttttagacaaaatcttttcaacgctgaaatgtacctaatctggttctactaccataatgtatatgcagcttcccgaggatgaatgctgtgtttaaatttcataaagtaaatttgtcactctagcattttgaatgaatagtcttcactttttaaattattcatcttctctataataatgacatcccagttcatggaggcaaaaaacaagtttcttgttatcctgaaactttctatgctcagtggaaagtatctgccagccacagcatgaggcctgtgaaggctgactgagaaatcctctgctgaagacccctggttctgttctgcctccaacatgtataattttatttgaaatacataatcttttcactatgcttttgtggggttttttttaagtatgtgtaaaaatgtgatgctcagataagtacatttatatcagttcagtgttaaaatgcagtctcttgagttaaagtcatctttattttaaatgcagtgataaatgtcaactcttcggagaaactaggagaacaacaacagaaagctgtgtttgtcttttttctctcaaatatatctcccgtatgagatttcaggtccccatgttttcaccaagcaatctgctatgtcagccaacccaacatcactttctacaggaggttatgatttttgccatttactagaggaagatgttttatgaaatcaatttggggtttgaattcaggtgcagtcatcagttctttaggggctgcaatgttttaaaaaaaataagtcatcagattttaagaaaaaagtgatgatttcttattgatatttttgtaacagaatatagctcttaactgaaaatccagaaccagaaacataaatcttgagtttcttttcatgtacataaaaagcaatagccttttagtatagatagccctgagccaaaaagtaatagaattttctctagatatttaatacagagagtgtatagactgactctaagttaataatgtgcaaaatatcttaaacatccctccccttattcaacaattatgtatcagtgatcttgaaccattgttttatatttttcacctttgtaacctcatggaaagaggctttacatactttctatgtactatttacttagaagggagcccccttccagtcatgaaacttcatttgttttatccatatccctgaggactgtgtagactttatgtcagtttttgtcattatttgaaaatctattctgacaactttttaattcctttgatcttataagttaaagctgtaacaactgaaattgcatggatcaagtaagcatagttttatccagggagaaaaataaaaggaagccatagaattgctctggtcaaaaccaagcacaccatagccttaactgaatatttaggaaatctgcctaatctgcttatatttggtgtttgttttttgactgttgggctttgggaagatgttatttatgaccaatatctgccagtaacgctgtttatctcacttgctttgaaagccaatgggggaaaaaaatccatgaaaaaaaaaagattgataaagtagatgattttgtttgtatccctacccatctcctggcagccctactgagtgaaattgggatacatttggctgtcagaaattataccgagtctactgggtataacatgtctcacttggaaagctagtacttttaaatgggtgccaaaggtcaactgtaatgagataattatccctgcctgtgtccatgtcagactttgagctgatcctgaataataaagccttttacctt

SEQ ID NO: 844 - DNA, 1092 bp, Homo sapiens
aaaaaaagcctcccacctctgccggataggcagagttttgtatgcttttttgaaatatgtaaaaattacaaaacaaacctcatcagtataatataattaaaaggccaattttttctggcaactgtaaatggaaaaatatatggactaaacgtagccctgtgctgtatcatggccatagtatattgtaacctttgtctaatcattggatttattgtgtcacttctgaagtttcacagaaatgaatgaattttatcatctatgatatgagtgagataattatgggagtggtaagaattatgacttgaattcttctttgattgtgttgcacatagatatggtagtctgctctgtatatttttcccttttataatgtgcttttcacactgctgcaaaccttagttacatcctaggaaaaaatacttcctaaaataaaactaaggtatcatccttacccttctctttgtctcacccagaaatatgatggggggaattacctgccctaacccctccctcaataaatacattactgtactctggaatttaggcaaaaccttaaatctccaggctttttaaagcacaaaatataaataaaagctgggaaagtaaaccaaaattcttcagattgttcctcatgaatatcccccttcctctgcaattctccagagtggtaacagatgggtagaggcagctcaggtgaattacccagcttgcctctcaattcattcctcctcttcctctcaaaggctgaaggcagggcctttccagtcctcacaacctgtccttcacctagtccctcctgacccagggatggaggctttgagtcccacagtgtggtgatacagagcactagttgtcactgcctggctttatttaaaggaactgcagtaggcttcctctgtagagctctgaaaaggttgactatatagaggtcttgtatgtttttacttggtcaagtatttctcacatcttttgttatcagagtaccattccaatctcttaacttgcagttgtgtggaaaactgttttgtaatgaaagatcttcattgggggattgagcagcatttaataaagtctatgtttgtattttgcctt

SEQ ID NO: 845 - DNA, 371 bp, Homo sapiens
tgttccccctgcaggagcaggttcttgggagcgtgaggcaggaagacactaggtgctgaatctcctgcaaaactggctgcctggaggccctgagccacccagatctgaataaaacagatgcttaccctggaagagcaaatgcctcctgttgtccttggtcaggggttctgtctacctggggacccctgtctgcacaccagggatcaataagagccaaagtgggacacctcctagatgtcagtatcagctggctgggcagtggaattttgagcgacctttactttatacttttctgtgcttgacagattttcagccatgaccatgttcactttataatcaaaacaaaaataaaggtcccatttttacaaaag

SEQ ID NO: 846 - DNA, 1667 bp, Homo sapiens
ggtatctgaactgcagcttcagtattagcagagccacaggccgcctctgtggcatcaccagggtttctctgaagaagagggtctgcattttcctaaacccagtgctgctctcccatctcccatcttcctctcgcagcttgatgagccccggtgtgtcccaggtacacccctgcatccaggcagcagcccaggccaccccctcctcactggcccttggctcctttcttgatgcctctgttgcttgtcccccaggagtcggagaagctggaaagtgtgaatgctgaactgaaggctcagattgaggagctcaagaacgagaagcagcatttgatatacatgctcaaccttcatcggcccacgtgtattgtccgggctcagaatgggaggactccagaagatgagagaaacctctttatccaacagataaaagaaggaacattgcagagctaagcagtcgtggtatgggggcgactggggagtcctcattgaatcctcattttatacccaaaaccctgaagccattggagagctgtcttcctgtgtacctctagaatcccagcagcagagaaccatcaaggcgggagggcctgcagtgattcagcaggcccttcccattctgccccagagtgggtcttggaccagggcaagtgcatctttgcctcaactccaggatttaggccttaacacactggccattcttatgttccagatggcccccagctggtgtcctgcccgcctttcatctggattctacaaaaaaccaggatgcccaccgttaggattcaggcagcagtgtctgtacctcgggtgggagggatggggccatctccttcaccgtggctaccattgtcactcgtaggggatgtggagtgagaacagcatttagtgaagttgtgcaacggccagggttgtgctttctagcaaatatgctgttatgtccagaaattgtgtgtgcaagaaaactaggcaatgtactcttccgatgtttgtgtcacacaacactgatgtgacttttatatgctttttctcagatctggtttctaagagttttggggggcggggctgtcaccacgtgcagtatctcaagatattcaggtggccagaagagcttgtcagcaagaggaggacagaattctcccagcgttaacacaaaatccatgggcagtatgatggcaggtcctctgttgcaaactcagttccaaagtcacaggaagaaagcagaaagttcaacttccaaagggttaggactctccactcaatgtcttaggtcaggagttgtgtctaggctggaagagccaaagaatattccattttcctttccttgtggttgaaaaccacagtcagtggagagatgtttggaaaccacagtcagtggagcctgggtggtacccaggctttagcattattggatgtcaatagcattgtttttgtcatgtagctgttttaagaaatctggcccagggtgtttgcagctgtgagaagtcactcacactggccacaaggacgctggctactgtctattaaaattctgatgtttctgtgaaattctcagagtgtttaattgtactcaatggtatcattacaattttctgtaagagaaaatattacttatttatcctagtattcctaacctgtcagaataataaatattggaaccaagacatggt

SEQ ID NO: 847 - DNA, 113 bp, Homo sapiens
ataagacccagagctggaagctgcaaaggagcccagagctcatgggagtgtccctggaaagcctattccagcgttctttactgccgtttaaataaagaatcatacatctgaaa

SEQ ID NO: 848 - DNA, 122 bp, Homo sapiens
agagaaaggcaaagttactgtcctgtagtaattggggacaatgtgatcatccttggagagagatgtgagcaccaaggctgggtttgtatgtggtgggggaataaacacacttacttgaaaat

SEQ ID NO: 849 - DNA, 2320 bp, Homo sapiens
ccaagccataccggccagcaagagggtttctgtggtgcttctctctgcactttacccagcatcttcaggaggaactgcaactatttattaagaacttgtgaattttatttttaaggattcacctggaaatagaatctgagtgggtggtaaccattagctttaaaaaattcactaaaaggcaccatgaaaaggctgaagtaataagccccactggggttggactatgtccctcactcaagatcttaaggataaccgtaactgaagttttatatttttccatttacctactttcttttacttgctttgaacattatgcctcaccaatagtaaatgttcatgaaataatctcttgaacttttggtatagtaaggtaactctaacagtattactgtctttttcagcaataacagaaagcaaaaatgggtgggttttttttaagcagttattacctcagcattttgacatcagatatgcaaacttaatggcgttttgtttttttatattctatttgtattctttccccagtatttcccatggggatctccacaagtttggagttttttcctggtgcacacacgtgaggagatttaaggtactatatgcaagtgttttactaaaaagcactgaaattcttctggcaatacaagaaccattttcaggatcttggagttacttccttcttaatctttcttaaagcattcactgatgtttttgttttttcaaaatgaaacaaaaatatcacattgagaagctagtctatgttctgtcactaacatttaaactttgcagactctaacaaaaagcacaagaggtcacgtactattatacaaatttagcggtactggatttacctctgacattaacacactcaggcagagaccaggagtgatcagcaggtcttcagaaccaaaaaacctttctgttcacatttcatctgatttttaaactgaggcaggctttgattcttctgaaggatgccaagaatcaaactaagggaggactcactgttaaagatgtgttctgatgtcttatattaagaccaaatgtgacatgatgtgattatcttccagtactttgcttttaggtaccatttcatgacattttaggaatgagtattggaaaatataaagaattagaaaagcagcactttttttttaatggaaaagtcttcggtccagtgttacaccttatagtgtaattcagtccctaagcacagaatgaatgtctggcctgcatatggtagttacagtgtaacctctggctgcagaccacacaggacaaccctaacagcctagtcttgtatggtgtaaatatcaagagtacagcttcaatttcatttgctttatcttagcaacaatgccaactcaggagagcagacggccgatttcagtgaagtctggtagtcaacagatgttatttcagtctcagtgcatctcctctggctttctttgactgaaggtgtttataggaaggaagttaaaaaaaaaaaaagctcattgagattctttaccaattctttacaagatttctgggggtgacagggaaagcaaaaggacttcaaagcaaaagggtgcacaagagcttacttcaccctgaaaatcagtattattaatgaaaagtactgttttcttaaagaagtcgaatgtcctttagatgaacaagaccaagtatacatctccattagattaaaatgtagcacagggttaaaaattatcagtttaatctctttaagaacagtattatcagagtttaaaatgagttagctctgtttatctacacacagcaaacccattcgcagcctcttggccacatgtattcagatgtttgaaatagtgaatcatttcattttcattctaaaacaatactgacttagccatataccttctgtttgtcaatctgaaacttgcttacatctaataagtagacctcttataacactgcaaccattctaagagttggaatttatttttgccaagtattaagtactgttacatctaaaatacagaatgtcaaatggttgcatagcttgtttcccacaacaaggaggaaaagaacaggaatacaaactctgtaatatgctgataaagaagccttagaactgccaactggcttgatggttcaattagtaagctaatttctcccacacccgctccttgatttttagactaattttcccaaagcaaggtttagtcacacaaacttgaaagtacatttaaaatgttcttagttgtcatcctacttttattgcctatggaatatgctaatttctaaaaaaaatacgggagaggcaccaaacccctaaattctagtgcaataattt

SEQ ID NO: 850 - DNA, 830 bp, Homo sapiens
acgtaatgcagggttatcttcacacattctgatcttctctgtgacaggcatctccagcactgaggcacctctgactcacagttacttatggagcaccaaagcatttggataaagaccgttataggaaatgggggggaaatggctaaaagagaacaattcgtttacaattacaagatattagctaattgtgccaggggctgttatatacatatatacacaaccaaggtgtgatctgaatttaatccacatttggtgttgcagatgagttgtaaagccaactgaaagagttccttcaagaagttcctctgataggaagctagaagtgtagaatgaagttttacttgacagaaggacctttacatggcagctaacagtgctttttgctgaccaggattggtttatatgattaaattaatatttgcttaataatacactaaaagtatatgaacaatgtcatcaatgaaacttaaaagcgagaaaaaagaatatacacataatttctgacggaaaacctgtaccctgatgctgtataatgtatgttgaatgtggtcccagattatttctgtaagaagacactccatgttgtcagctttgtactctttgttgatactgcttatttagagaagggttcatataaacactcactctgtgtcttcaacagcatctttctttccccatctttctattttctgcaccctctgcttgttccctcatattctgttcttccgactcctgctaacacacatgcaacaaaaaagggaagggagtgcttatttccctttgtgtaaggactaagaaatcatgatatcaaataaacatggtgaaacatt

SEQ ID NO: 851 - DNA, 583 bp, Homo sapiens
aaatttcaacaactctttttgaatgtatgaagagtagcagtcccctttggatgtccaagttatatgtgtctagattttgatttcatatatatgtgtatgggaggcatggatatgttatgaaatcagctggtaattcctcctcatcacgtttctctcattttcttttgttttccattgcaaggggatggttgttttctttctgcctttagtttgcttttgcccaaggcccttaacatttggacacttaaaatagggttaattttcagggaaaaagaatgttggcgtgtgtaaagtctctattagcaatgaagggaatttgttaacgatgcatccacttgattgatgacttattgcaaatggcggttggctgaggaaaacccatgacacagcacaactctacagacagtgatgtgtctcttgtttctactgctaagaaggtctgaaaatttaatgaaaccacttcatacatttaagtattttgtttggtttgaactcaatcagtagcttttccttacatgtttaaaaataattccaatgacagatgagcagctcacttttccaaagtaccccaaaaggccaaatt

SEQ ID NO: 852 - DNA, 346 bp, Homo sapiens
aactatgcagcatttcagttttcatttaaacacttagttcagaaaccttaaaggatttgaatatttcaaattgcacacgtcactccagcatctctgtaaaataattggaatgaaaatacttcttgcacttaaacactgcacatgccgtactttgaggttagtctgaatcttgaactttaataccaaattaattttgaatgcttttgtttcctaagagataatggcatggtttcatatgttatactttggacagacagagttttaaaaatggaattattttttctttcatgcctcttgtaatgttctgaacaaacttgaatgatgaaagtattaaagagatatcagt

SEQ ID NO: 853 - DNA, 775 bp, Homo sapiens
aggcactttgtgtgtcagtacccctgggaggtgccagtcattgaatagataaggctgtgcctacaggacttctctttagtcagggcatgctttattagtgaggagaaaacaattccttagaagtcttaaatatattgtactctttagatctcccatgtgtaggtattgaaaaagtttggaagcactgatcacctgttagcattgccattcctctactgcaatgtaaatagtataaagctatgtatataaagctttttggtaatatgttacaattaaaatgacaagcactatatcacaatctctgtttgtatgtgggttttacactaaaaaaatgcaaaacacattttattcttctaattaacagctcctaggaaaatgtagacttttgctttatgatattctatctgtagtatgaggcatggaatagttttgtatcgggaatttctcagagctgagtaaaatgaaggaaaagcatgttatgtgtttttaaggaaaatgtgcacacatatacatgtaggagtgtttatctttctcttacaatctgttttagacatctttgcttatgaaacctgtacatatgtgtgtgtgggtatgtgtttatttccagtgagggctgcaggcttcctagaggtgtgctataccatgcgtctgtcgttgtgcttttttctgtttttagaccaattttttacagttctttggtaagcattgtcgtatctggtgatggattaacatatagcctttgttttctaataaaatagtcgccttcgttttctgt

SEQ ID NO: 854 - DNA, 1948 bp, Homo sapiens
ccctctctttaaataaccttaggcatagccataggtgaggacttctctatgctctttatgactgttgctggtagcattttttaaattgtgcatgagctcaaagggggaacaaaatagatacacccatcatggtcatctatcatcaagagaatttggaattctgagccagcactttctttctgatgatgcttgttgaacggtccactttctttgatgagtggaatgacaagcaatgtctgatgcctttttgtgcccagactgttttcctctctctttccctaatgtgccataaggcctcagaatgaatgagaattgtttctggtaacaatgtagctttgagggatcagttcttaacttttcagggtctacctaactgagcctagatatggaccatttatggatgacaacaattttttttttgtaaatgacaagaaattcttatgcagccttttacctaagaaattttctgtcagtgccttatcttatgaagaaacagaacctctctagctaatgtgtggtttctccttccctgcccccacccctaggctcacctctgcagtcttttaccccagttctcccatttgaataccataccttgctggaaacagtgtgtaaaatgactgaagtgatgatgcccgaagatgaaatagatgccaaattagatggacattgaagcaacactcagcgttgcctagcgttaaaggcactgcagagaaatgaggtgcagaggtggcccctctgagtatttatttgactcaggtaccagtggtacatatatacagtgtaattatgaccaggctggtaaaattggctgctcgcaaacaatccccttttttcctggcagtatttggaatttatcatttattaataactatacatttttaaaggcagaagaagaaaatctatctatctatctatctatctatctatctatctatctatctatctatctaaatgacctgacagaagaaaactgttaaaaatggatattattggaggggatttaaaacagtgggtgtgaattatcattctgatggaaagaaaatagcaaaacaatgtgttacaagtatttgctaataaacagtatactgccagcttctaattgctttttgatgtatgaaaggcttatataattttcttttcgttgggtgacttttgccagatgagaggaggtggcacagtggtgagtgcagggcacagtcctagccttctgtgggtatacttttggagttgtgacttggctgtgagggcagaagttgaagttgggatcactgtgactttgcacatggaaaaatgcagattgcaggcataattcatctctgacattagagaaaaagctgttatagcacaatttaaattttgagagtttgctgtgtttttttttcacataaaagaggctgattattctttttagtttaattttatatcctgtaattctttggatggttccaagattcagaaaaaattcagtaaatgcaccccgtaaattgctaccctttcctttattttcatacttagatctgctgtacattgtatatatatataatttttaaaatgcagaaagaaaataatttccctaaatataattgcaaactgatttcttttacttttttgtgtgtgggggtgggagctgtatctgaataagtggcattcagattagggtcttgaaaaataaacccagaatctttaaaagaagcaaataaactaatagacgcttattttccaaaatttaaatttaagctagaaatgtaaatattcaattaatttgttaaaagtacttttataaagttaaaaaaaatccaaccaaaattttagaaagtcaggctcttttagaaagaaagctacacccatttcctcaaataactgttccgaaaatttatatggtggaatgcgccatgtataaactgtgaattgtattgacaaataaagtttgtaattaaagtcagca

SEQ ID NO: 855 - DNA, 1187 bp, Homo sapiens
aaactcaccaaaatgaatagttgtttcgttacatttagatgaaagttaaactttactgaatttcagtacattagtttttacactaaaactttacaagataaaattggacttcatttagtatctttttaacagaattacttggaataatgagatacaataatcatatctcttttgacattttggaaatttttttaattttacaagtacatttaacagatcatttataaagcaggagtccattttaacacttaccgactttttttggtttggaaacatattaccacgtcttaataggatggtgcccatataggtgagcatccctttagatcatgggaaccagcagactgcattcctaatcttcattatgcctgagacttgtcttacaatgttacctttaagtgaatcacataattgtctttggaacttggtctcccaacacttattgtgattgcaaagtgtttaccagatatttgatgaggtgctatgtttgtgaaaaacatatcatgtaattcaaaaacactattgatattgaataccagataccactatgtagtaagtcttttaggatgattttaatttagtcgtgcgtcattttctgattctcatcattgggagatcttaaatcttagcaagcattagcaatattaaatgccaaaattccattgaaactttcaagttggagcaattgtctgtgtttgaaaagatgaaataaaaataataatcaagggcaaagctttgagtgcccagaagggaaagctgtaccagttgctaacctgtcttgtttcaggagccaccatgtttttttttcagtgttaacaacaatcatgataattaaattaaaacactagtttgttcacttgtaggactgcagttctgaattttgggttaaaggttttggctgctgtaagaatgtgaatttgaatgtattttgaattgtaagagcaaaagaacgtttttgtacaattttttttcatttaattggaatgatcttcaggtttctacaaatagggtaattgtaaatttaaagcattagcatttattggtgaataatgtatatatccccattccaagaaatataagtgagtgaagttgaaataaaatctttaaaatttactatattgccagtggtttcacaacagttctcttgtatttatttatcaattaaatcaaataaaaatgattatgtc

SEQ ID NO: 856 - DNA, 121 bp, Homo sapiens
gcgtcagaagaagaaactgaagccatctgcattttaaaacttaacagttctgaaaggaaaacacagatgaagatcctgtaggaaatatacttgctatgattcaataaactataaaattttg

SEQ ID NO: 857 - DNA, 6892 bp, Homo sapiens
agcatcataggaaatacaattgcagtcgttttattttttctagaaaaatatgtcatcctctgatagttggggaattataaggataccatttgtaagaaagccaaaagacttttgccagatttcatatttccccttttcatgtacactttatatatacttcattaaaattatattttaaacccttgtataattttaagcattgttcctcagaacatttgtaaaaggatatatttctgcttgaccagcgagatgtgcattttgccaggatcatattggtcatgtctattggtgtattatttcagtatcaccaatgttttcagaaatacagtactaattcatcattaaactctttgaagttaatatttttctgccttctaacttatagactcaactatgtatctgtagtttttgggaatggttggtgttttttgctttgtgttgggaagttattgagaaaacctatataataaaatttaaaattatagtttttcagattttgggtcgtgattttagttttaggtaatctggaagatatgatttaagaaacaacagatttcaactttttttttttttttttttttttttttttttttttttttgagacggagtcttgctctgtggccccggatggaatgcagtggcgtgatctcggctcactgcaagcaccgcctcccaggttcacgccattctcccacctcaacctctcaagtagctgggactacaggtgcctgccaccacgcccagctaattttttgtttttgtatttttagtagagacggggtttcaccatgttagccaggatggtctcaatctcctgacctcgtgatccacccgcctcggcctcccaaagtgctgggattacaggcgtgagccactgcgcccggcccagatttcaacttttattttatttcctttcatttattaaataatataaataatgacagatttattttaggtgttagcctatttttgcatgagagatttacagaggtggaaattctcatgcttaacttatgcaatgagacaatttctcaggaagcaagtttgacatgctttagtctctctcttcttttttttcctcccaaatatttgagttagcttaaattcttttttatggactgcccaaccagtgaattgatgcacttagacaacaagtaatctgcagcagaatattgcatccaatttgagacttgattccatattattgccttaaaggctattaaattgggtgacttttagtatccagctgttaaaaagaggaaagactgtttaatatcattccaaaatttttgtgaaatgtggcccaagatctaaagtttttaagggaattatttttaataaatatgatctgtccctttttgaaaaggatccatcccttttcataataaaaataattccctcctaccacccagttgcacatacttgcatctgttatgtattgaaggataatcccccccaaaaaaactatccaagagcagagatgtttatattttgaaacccatttgagtgttacagtattatatgactaaagctgaatcagtctgtggcctggtatttgttatcataaaggaagatgtacacctaaggtatcaagtggttaaaacagcaaagtacaagatgcatttttgtatttattctaacttttgaacattagtgtctttcagtataaataaatgtgaacaaatatacctcagtagtaatacaggagaactaaatatcctgctataacttaatacagatacatatttcaatatgacttaacaaacacacaattttgaaaaaaaaaaaaaaaaagtgcagcaacttaaacacatttttctccccagaactaagattacacttaatttaatttaatgtgtttctgcgttatactagagttttgcaggaatttttctgaatagtacattcacatgatagatacggataaataccttatttactaaaatgttttgaaacatattttatagtccctcatttgatttgaaaaaatttgacaagatcttcacattgaaagtaaggacgagaatatttgcagatttccttcgttccaaaattattttattccaaagaaaaattgagttgccactatcaggaaaaaaaaaatgtatcacttctgttagaaggctatgaagtatatataaattatatgacaatttttatcatatagatttgatatcttctatgtattcgtatttttgcatcttgggtattaagcaaaataccatatgtataaatatgaaaccaggaatgtgcatattttagaaactaattgtgtatcttaagtgaatgttttgagtagttctgtcacccctattctaaatattttacctacaacatttaaattattctgatatcaatcagataaataatccgagtgtatttcatctttctacattgtctttgtggtttttgtttgtttgtttttgagacggtctcacactgtcacccaggctggagtgcagtggtgcaatctcagctcactgcaacctccacctcccaggttccagctatcctcccacctcagcctcccaagtagctaggactacaggtgtgcaccaccatgcccagctaattttttgtctttttgatgtagatggggttaccccatgttgcccaggctggttgtgaactcctgagctcaagggatccccccgcctcttgcctcccaaagtgcttggattacaggtgtgagccaccataccacctgtctttgaattttttaacgaggggaaagaaaactgcaattcctgcctccccatttatttaaacataacacctaggattttatttttggtaactacttagaataatatagtaggttacttatcttcggttagaaagaactatggaaaataggaaccaataatttggaagtattatttccttatttcatatatagaaataattatcttatttccttatttcatatatagaatattctagatacttggatggctggggttgatgttcttagtatttatcatagtttagcattggttgttatttttaagcatcagaatttgaaagccaatgataatacctgattaggactgaaaatagaattatcttagtagtttagcactttttataatggagttggagcactgaatttattttcaaattacctagaattctgcattgctcaaacattattcaattgattgcaaaatataccttggaaaccctttggatagaacagttcagagggttaccactagtacttagagcctaaagtcactcagtaggaggttctcaaaggtctatttgaaggcaatccaatttctttaaaataaaatattttttgccttttaaaacagatgggtgaagaaagggacgtataaattctgggaaacctcttatgttttcctcccatttccttctatgtctccattaatgtgctaacttgaaggaatttaacttcaaggaaagttgactgatgaagtttatgtagagctgtgaatattataatttgtcaatactttattgataatgttaactttgtttttatttggaaacattttttccagttgaccaaagcagaattcattctgttcttccctcaaattcatctattaggatcaatgtgattgacatttatctccactctgcatgtcactgatatggtatagacgctataagccctgtagatattatgggtatgaagactatttgaggtgaattggcagtgagagcaaattttggaaacaggagagagaactacttcgtgcctataaaaagctctctcactccttccccaagaaaacaggagtctgaattttggccagctgggtatttgaatcttactgactgttgcagcactggtagtcctggtaaattttttcagtgggcgagcttttctgaaatttgattaaacatattagtcaagggaatctgtgaatagatttagaagtagaatgtttgaggtggttgacaagacatttagaattgtgattaatgttttaataaaatgctaagttagaatgaataatcataattatatagatggaagatatattctaacagttcttaaataattttagattctctaaatttagagtgttttctagcttagagagcaatattaatattttttacctagtctactgaacataatttcagggagttagtatttaggactttttacctagagatgcggtaaaccttttaaatttaaatttgctttcttaaaatacctgttccaacattgctcacctttcttctccctcctttttgccctctccttcagtgggaggagcacatattcagctttctgttaaacactctttggttttcaactgagtaaggcaagcaaggatatatgttagaagagtgggcataatactttatattaaaattatagggactaaaagtctaaatcattgctgtcaataggactttttttgatgatggaaataatttatgtctgtgctgttcaatatggtagccactcgcagaggtgactactgagcatttcacgtgtggcttgtgatacagaggaactaaatttttaattttacttaattactttaaattttaaaagttacacgtggctagtgggtctatcccaactatgaagagaataaagctacagagcatctatctagtctaatgaaacaacagtgaatttgggaattgtaaatctgtcttaagctttttccataaacttttattgatataatttaggcatatacaaatactggtgaaattttattgattgaattattgttgacttttttttcagtatttatatttttaaaaagatatgtttctttataattaacttgtattgtagggtaaccattgtccttaaatgttaagccacttagttaataacaaatagcatttggttttttagcattatttatcatctgaggctttcagaattaatgcaccaaaccttaaatatttttgttgttctctaaaagaatgggtttatgatgcaccaaaaggacattttgagaactgccggagcaacagataccaccatgtaaggagtgaattcccatgtttttcacttatatctagaggcctacttatttaggaggtttcctaagtaagtgtatttagttgtaggaccttagagttgcctaggtccattctattctagcatatactcaacatactgccagagcaaatgtaggttgcagattcaggcaaaacacacacacacacacacacaaaaccctgaagagcacaatgagcattattagcacagccaatttaaaatgatgaggtgttaaccacatttgtataaataatagtttctctaaccctgaatcattatcctgcatttttaatgcaatcggttcataaacatcaaagtgaaaacaccaaatttgtaagaggtcaggaccaactggggctctaaatggagagacagctgagagctgtgtccctatgcgtgggtggccttgcagctgttgattcaccctcaggctaccagacagttgcctctttgcatttgcagaaccagacttcaatcttaggtaaaaatgtatccctcccatggacaggacataaacaatagattgacatcagctctgaaaacagtgcagcagccagactcagcagttgccctgaaatactgagaagtaccaagcataacatcaagactgtttctacacaataatatttgtctttgtacagcaacactgggttctcttaagtatattataaatataaaagctcaaagtccaaaaggttcaatgtgatgatatccttctctacaaatgccaggaacaccagggtagattgcatgagacatgactgccgtatcttggtccttactaggattcccaaatatactccttaataaccagtaaagttatatttacactggacattttaagaaataccagtgttcgttgttagatgagagacagcataattttggaatcacaactgagttcagagttcagttttgagtcctactagttttgtttccttgtgtaagtttcttaacctttgtaaggctagcatgtaaatcagatacaataatatatagttcagggtgtaaagattggattaatgtatgcagtgtctatctagcacagtgcctgttatgtagtagcgtgtcaagagatgttctctcttatgcatttggaggattaggtgctgcacctataggtttccattcatttctcatctatgtaattctgagtcttccttttctagatagaattccccccaacaaaaatttaaagtctaacaggtggtaggtgcttattgaggcccagcaattctacttctggaaaccttcctcaggaaaagattctgatgacagaaaatgctgtgtgaacagtattatatagaattgtttttaatagcaagaaattttttaaaacttacaagttcagtgatatgaggacatttacataaactatcgaaccaccagtcttctgtcaattccttttaaaatgatggttgtgaagactgatgaaaacacagtgtcaatgatatgttaactgaaaaagtaagattaaaaacattatggatagtataagtttcttaaatgccaacaatgcatgaggtgaatagaataagacttttttttaaagaatgtaatttttgacagtctgaaaagacaggccttatatttatattgagaaaaatgatcctgacatttaatgagacactaaaacagtttttattttttgcttacttattctgttctagaatccaaactctacatactgtttaatagagcattattgatattagctgtattagatgactgtatgaagagtcctgtttgctagaatcctactttatcttttaagttttgctaattaccctgcaatgaatgttgaacataaaaaatttgactccctttccatgtgtccactgtttccttgtgccttttgattaataaaactttatttttaagtgagaa

SEQ ID NO: 858 - DNA, 266 bp, Homo sapiens
aattcttggaaaagtggcaagaccaaaatgacaatgatgatgataatgatgatgacgacgacaacgatgatgcttgtaacaagaaaacataagagagccttggttcatcagtgttaaaaaatttttgaaaaggcggtactagttcagacactttggaagtttgtgttctgtttgttaaaactggcatctgacacaaaaaaagttgaaggccttattctacatttcacctactttgtaagtgagagagacaagaagcaaattttttt

SEQ ID NO: 859 - DNA, 90 bp, Homo sapiens
atgaatcaagagtgatttgttaatgtaagtgtaatgtctttgtgaaaagtgatttttactgccaaattataatgataattaaaatattaa

SEQ ID NO: 860 - DNA, 399 bp, Homo sapiens
tattaacagctcactcgagcaagaaccctcctgacagtactggctagaagtttggatggattatttacaatataggaaagaaagccaagatttaggtaatgagtggatgagtaaatggtggaggatgggagtcaaaatcagaattatagaagaagtatttcctgtaactatagaaagaattatgtatatatacatgcagaaatatatatgtgtgtgtgtatctgtggatggatatatgtatatctcttcctatatatatccatagtggacttattcagaacatagatatgtattcagcttgtcttcaaatacggccaagcagaaaatgttttatattttataaatcatcttttgactctgtatttaaattctatgatactgaaaataaaggcattctgg

SEQ ID NO: 861 - DNA, 2291 bp, Homo sapiens
agaagtccaaatttacaggttcagggaagatacatacatatatgaggtacagtttttgaatgtactggtaatgcctaatgtggtctgcctgtgaatctccccatgtagaatttgcccttaatgcaataaggttatacatagttatgaactgtaaaattaaagtcagtatgaactataataaatatctgtagcttaaaaagtaggttcacatgtacaggtaagtatattgtgtatttctgttcattttctgttcatagagttgtataataaaacatgattgcttaaaaacttgtatagttgtctagatttctgcacctgaatgtatgtttgatgctttgatttgaaaatgttcttccctgttatttacattctggtgggtttttaaaattcttacctccatcatgcaattttgaaaattgtgtccagaattaaaagtgcatagaaatagcctttacaattgtagcatggacctttaaaaattgttttaaaatcttatttaaatttaaaccagaagctgaaaaatagatcagctttattatacacaaaattattactgcttatctttgctcttttccttgttatcccgcaaggtttagttgagaagatacaaaatgtttacagtgttggcacttagagtttttaaattcaagtacatgaaattcagtaatagcattgccttgagctaactaggaagtaccgggaaaaaagttaaatctacatcaagtttcttttgaactttgaagtgttttctgacccactgctaactgtagcaacaaaatttaaaagaaaaaaaacatactttatctggctattataacataaactgtcacgtaggtttgctgccttcagaataccgcaatttaattgcgggaatataataatattgggactgtttcacagcacaaactcatctttacagtgttgatcaatgcatcagttaagaaataatgccacctcaggaattaactggcattgggaacatttgcctcattctcctgctatcctcttcattcacccctgccactgtaatatctataagtacttaagagacttgtgagcaaaacatactatttataacagtatatgattgatttatgcttatgtggttgttcagtttgttcccatgtaactcgtttgttttaaatattttgccagatttcttgtatttattccacatcattatgcctataatgtgccgctttgtgattgggcatttgcctacttttctttcataattagtgatatatgcgatgtaaaaccactagtaaaggtacattttaatacttgttattttatactgaattagccttggaggttgactgtgcaatgttatttactgttgtaattactgtaataccaacatatgggccccatctgcacactcctgaaaaacagaaagtgtattcaaattttatcagtttaaagaaaataaagctgtgataaatactgtaattccaacctacattagaaggtctaagtgtaggtgatgtgccattccataatggcttccagactagggtgaattttatgttctgtactgtactgtgatgtagctttcttctgtaacagttatgttttaaaattaagtgagttttttttttgccttagcaaagggtggtgtttgaaaaaaaaaatgtgtagcccctttttaacctagtgttcattcaaaaaaaaattgatgcaaatctttattcactttcactggtgcacactgaaattttacttgaacagttctcataataaagcacttgtcttttgctctttatcagaatgtgaattacctgttttctggtacaaaagtattctgtatgaggagtttattgtatgtgttctaaatttagttggcaaagggtgaagctgtgaaggttttcaagattattgaaactatgaaggtttcttgtcattatgacaagaaagtttaatctttttataggaattcctgtcactgaaatacgtttttaaaaaaatagactcatgtgttttccacggtagaaactgatatttttttacattttctcactgtggccaactcttctgtgtttgtagaaaggaatttgacttcaatatcttttatgaactaaaaatgaaatcttgatactcactttagatttttcattttatgtgttcatgacaacataaatatttttcaaagatttagaggaattttgcaatgtgtttgcataaataaataccagtttatgttcaccggctatgtgataccaggatttccttggcttctgttgaaatattatttgatatgacatcccttatattaaattaattattttgta

SEQ ID NO: 862 - DNA, 2426 bp, Homo sapiens
tgggagctgctgtggcaggtgcccccagagtgaacgggagcccctgctgtgggaactttgtgaatcctggagcatctcagacttgaacacacagcatatttggaagagaaaacatgcctttctttgttgaatcacattagtatgatgagtgagtcatccctgcccatctgctgagcttctcacatctctcagtcacacgtggacccagtggtcaatcctgcagagaattcggcggaggttaggtttgggagtggagctagcgtgctaaagccagagccttcacgtgaaggtggcaggcactggggcggaagccaacactcaacagatgcaagcagtgtgggtgtgcagcagaacagtgatcttgggggaggaagaggatgttactagagtcagatgatttgctgtattctcctgaaaggtcgtaggctgacaggcgctcacattccttggctgcctcggttctgagggcagctaaggagctgtttattcctcaagtcatgctccccgatctccttcctctaccactctgtcaccaggagtttaattacaggcttgaggagaagaaaggaagaaaagatatcttgatgctttgaaaactgtgttggcagtgtggcatgactgtttaaagtagataaaaccttgtcattttaccccatccctgcatgactgtgaagctggcgaggaaggaggaagaagggcaagttcagatgcaggctgggtggctgggacaggttggctaagggactactctggagggctcttctgcctggcattgcccacttcggcccagccacgtgtttgcagcgaccagagtccctgcaaaggtgtggctggctgtggtcagggtgctactagcaccatcagcgcactcccgccattggctcagctcctctctgccagtccaactaagagtgctttgtcctgggtgggacataggggctgagagagatggggggagacataacacccaggaatgaaaatacagatttagagaaggaaccagtaagtaggagacagatgtgaaggaaatggaaatgaggcaagaggacattggaagagagaagtttgctgtccaggagccaggtctggagcatcagtgtgagggagttcaggtaggctgggcctgtgcctctaggtagggacaagggaggctgggtagccagggctggtgcttaaaacccctgaggccatgagctcattggctgcctttgtagcatcctgtcttcttctgtgctgcctggtttgatctcatctcacctggattcaaagggtaaggtgggcatgggtcttgggcctgacacccaccaaggatgacctgtggactgccatcggatgctgaacagggagatgaaaggaggtcctcttaccatacccctctgccaaccccccagtaggccactgttctgactttgtttccagaatatccagaaatccaaaggggctgttgctgaacagtctgcaggaccagtgacagcacctacctgttgtcccaaggcatacaaaggaggcctcaacgctcatgcttctctaatcaagccctaccaagacagacagaaagacagacagaaaaaaggaaggggtagaggagaaggttgaagctgtggagctagactctgcttcacttcctgaagcttcaacttcatgtcgaagattcactgggacccaattcctgcattgttaatatttgtgaggaaaagtgaaacaagtgatctggttttagcccagatgatgaaagtggatatggcacattttcacacacgtgagataattacagcttgccccacaacactgggtgttggagaaagggagagatagtcataagtggaagaaaaagccaagcatagtgagtgggaaagagagtgagagcctgtgcaggctgctgacgagccccaggcagcccacaagtttctcgtggggagatggaggcagagcccagggtaggggacagagctgctggggcctttccttgcctgggaatctgtcccaggaagagcttccccactcccatcccccaaattggaaaaaccgtacattcaagcctgtttggccctgaaattcttaagaatctggttaagaattaactcactaatgtcaaaagtcaaaacctcctaggggttgtcctgggagtcaggttcacgggtacagaagatgaatctcagatgtcactcaacctgagccgtcattctctgtggcagggctgccctgggtttctcttactcaatccctggagtgtaagcatttggattgtgtcacagattacctttttaccttttctttctttttttttctttttttcaatatcagtgcccacaccttactgagtattgagttttagagctttcgcttgatgtgcttgaccaagagacttcttttgtatccttttcttgtcctatgatgtaaataaaagcctcgatttatgtaatgtt

SEQ ID NO: 863 - DNA, 334 bp, Homo sapiens
gcttcagcaaccaggagggattgactgagatcttaacaacagcagcaacgatacatcagcaaatccttattatccagccttcaactatctttaccctggaaaacaatctcgatttttgacttttcaaagttgtgtatgctccaggttaatgcaaggaaagtattagaggggggaatatgaaagtatatatataaattttaggtactgaaggctttaaaaataattaagatcatcaaaaatgctattttgaatgttatcatggctattacacttttacttcctgactttaatattgatgaataaagcaagtttaatgaatcaactaaaaagctgc

SEQ ID NO: 864 - DNA, 969 bp, Homo sapiens
tgggaaccgtatgtcctggaatattagatgccttttaaaaatgttctcaaaaatgacaacacttgaagcatggtgtttcagaactgagacctctacattttctttaaatttgtgattttcacatttttcgtcttttggacttctggtgtctcaatgcttcaatgtcccagtgcaaaaagtaaagaaatatagtctcaataacttagtaggacttcagtaagtcacttaaatgacaagacaggattctgaaaactccccgtttaactgattatggaatagttctttctcctgcttctccgtttatctaccaagagcgcagacttgcatcctgtcactaccactcgttagagaaagagaagaagagaaagaggaagagtgggtgggctggaagaatatcctagaatgtgttattgcccctgttcatgaggtacgcaatgaaaattaaattgcaccccaaatatggctggaatgccacttcccttttcttctcaagccccgggctagcttttgaaatggcataaagactgaggtgaccttcaggaagcactgcagatattaattttccatagatctggatctggccctgctgcttctcagacagcattggatttcctaaaggtgctcaggaggatggttgtgtagtcatggaggacccctggatccttgccattcccctcagctaatgacggagtgctccttctccagttccgggtgaaaaagttctgaattctgtggaggagaagaaaagtgattcagtgatttcagatagactactgaaaacctttaaagggggaaaaggaaagcatatgtcagttgtttaaaacccaatatctattttttaactgattgtataactctaagatctgatgaagtatattttttattgccattttgtcctttgattatattgggaagttgactaaacttgaaaaatgtttttaaaactgtgaataaatggaagctactttg

SEQ ID NO: 865 - DNA, 349 bp, Homo sapiens
actgtactagggcggaggggatccgggccttgcgtgcagcctcccaaccatgggctgggttttgtgcttactgtatgttggcgacttggtagggcaggagacgcagcgtggagcctacctcccgacattcacgcttcgccccacgctgctccgactggctgcagcggacactgcccaaagcagaggggagtctcagtgtcctgctagccagccgaacacttctctccggaagcaggctggttcgactgtgaggtgtttgactaaactgtttctctgactcgccccagaggtcgtggctcaaaggcacttaggacgccttaaatttgtaaataaaatgtttactacggtt

SEQ ID NO: 866 - DNA, 50 bp, Homo sapiens
aatacaacttgcacttagaatttctctagcagtaaataagataaaccaca

SEQ ID NO: 867 - DNA, 602 bp, Homo sapiens
agcacctcatccagggagggtctggtggcagatcctagctcatgatggcagcaaagactgcagtttccctggatctgttccttggccattgattaccatggcaacaacaccagaggtagcacttctgagccagatctgatcctaatctctgtgtgacttagtctcaagcatccaggaattacaagcaataatgagagtaattttggacactttctcagaataatttctatattcaagccaccccacctcaactccacccctgtgatacaagtcccatgagtactgacatttgcacagtagcataaatgccttaaggaactttgggactgggagtttttggctgaaatcctctgtcatgggacgagggtacagtaaagaagctctattcctcagaagaaaatttgggcaccgcaaagtctaaataaatcccctttcaggatttgatatagtgtgtacttccaacaaccatcctggcgtagttggggattgttttacaataagtaaacattgctaataactgtgttacaagatcattatcaagatctttaagaattaggtacatccctccaaattaaaacaattgataaataatataagctcta

SEQ ID NO: 868 - DNA, 21 bp, Homo sapiens
taaatgcagcattcaattcag

SEQ ID NO: 869 - DNA, 123 bp, Homo sapiens
gaaccaaggacgcctggcttacagtgcgcagccagaaggagatgtggcaatgtgattccttttgtaatctgattataattgaacattgattttaaaaaagcatgtaaaatagctgcaatttcc

SEQ ID NO: 870 - DNA, 1159 bp, Homo sapiens
agttataactaatctgcctgaagacttctcatgatggaaaatcagccaaggactaagcttccatagaaatacactttgtatctggacctcaaaattatgggaacatttacttaaacggatgatcatagctgaaaataatgatactgtcaatttgagatagcagaagtttcacacatcaaagtaaaagatttgcatatcattatactaaatgcaaatgagtcgcttaacccttgacaaggtcaaagaaagctttaaatctgtaaatagtatacactttttacttttacacactttcctgttcatagcaatattaaatcaggaaaaaaaaatgcagggaggtatttaacagctgagcaaaaacattgagtcgctctcaaaggacacgaggcccttggcagggaatatttaaagcaacttcaagtttaaaatgcagctgttgattctaccaaacaacagtccaagattaccatttcccatgagccaactgggaaacatggtatatcatgaagtaatcttgtcaaggcatctggagagtccaggagagaagactcacctctgtcgcttgggttaaacaagagacaggttttgtagaatattgattggtaatagtaaatcgttctccttacaatcaagttcttgaccctattcggccttatacatctggtcttacaaagaccaaagggatcctgcgcttgatcaactgaaccagtatgccaaaaccaggcatccaatttgtaaaccaattatgataaaggacaaaataagctgtttgccacctcaaaactttatgaacttcaccaccactagtgtctgtccatggagttagaggggacatcacttagaagttcttatagaaaggacacaagtttgtttcctggctttaccttgggaaaatgctagcaacattatagaaattttgccttgttgccttatcttcttccaaatgtactgttaaataaaaataaagggttaccccatgcaatcacaccatgccatgttttccttcctggagggcagccccacaggacggtttatgagcacacaattatagcttgtttctactttaacaaggtatgctgcctctgtaaattcatgtattcaaaggaaaagacaccttgcctataattaaaatgtggaactataaaattttttaaaatcc

SEQ ID NO: 871 - DNA, 1798 bp, Homo sapiens
attggaatgtggttctagttccagaggaagacacagcttagtagcttaagcagttatgcatatcaggatactgtgagcaacatggtgtcccttaagcttctaggctttcagaacacaacttaaacttgaactcttatggttgggacattcttttcctgcttctcctgattgaactgatgcacagaatctttttactttgcaatagatttgtactaaccagacctgttctatcatgttttgaggagttaacttttttctgtgcagataatgttgaaagtaagttaatttgtttctgcatatatgcacatacatacgtaaggatcttaaacccagtcttgacagactagaagttaagtttaatacagaaaatgtcctgttcacttgaaagaaaagacctactttttaaatggacactatcttggttcttttttttttaagtcatctttttgttataagtgacctttgtctggaatgtctgaaaagtagttaatgctttttggtattgaagtaatgggtaactaaaatggacttccatagtattgactgtagaaggagcctctacaatattgactatatatttttataaactactggcaaggaacttacccagctgttatacatgttttcagttctctttgggggccatgtcctacatttgcatggatggatgcatgcattgcctagtcaactcacttaaaaagctcttgcactggtattgatcttgaacctctatacttctccactttttagagcggcgtcttagtttatttaaacgcttaacatcttccaccgcaacagcttgcctctagagggggaattgttcatccatttgtcctccagttttataggaacaagagactattaaagcccattgctttatctgctctctgtagggttcaggtacactggctaaggcagaaccccaaatttcaaggctctttctatcaatattggacctctgggagctaatactcctctttgctcaccaccatgtgatcattgatcagatgtggtgagtgagtaggggactcgacttgcgggatgcagttttgccattgcagcaaagttcattgaggaaaattgtaccatgaaaaagcattttgattatttcatttctggaggatgaccttgagggaagctttttaatattagtttcaagctttccttaccctacaactttaaacaaaagctttaattttgtttgcactcctattttgagcttgtaactggaaaagcatgtcttgcactgttcaacctcctgagtggtcgctttaacaacctccaaattgtgtacagtggttattttccccagttgtatagttttgagacattcaattatcactgtcttagttgtattttaatttactaaattatgtagctatttgactgttaagttcttttaaacaactgtttccttgggcttcagttatttaaagtaaatttaggtgtaatatagaaaactgtccctttccaggtgggagcttaacacctgtataaaacctaaggttttggtaagtaccttagttgaataaaagcacaaggttatcaccttttttatccgtccaccgtgacatggttatgcatcctttagattaacctcaccaaatgaagctttttctatccatttttaatattgtccttacataatattgtccttagattttgatcaattctatgtctgactttgaaattccatttacaatgtagtatgttttcaatgaaaaaccataaagtaacatccaagtgtttcatggtttgttgggaaggtaattttaaaataaaacaatttccaaaaaac

SEQ ID NO: 872 - DNA, 960 bp, Homo sapiens
atatcattagtgccaaagggattcttctccaaaactttagatgataaaatggaatttttgcattattaaacttgagaccagtgatgctcagaagctcccctggcacaatttcagagtaagagctcggtgataccaagaagtgaatctggcttttaaacagtcagcctgactctgtactgctcagtttcactcacaggaaacttgtgacttgtgtattatcgtcattgaggatgtttcactcatgtctgtcattttataagcatatcatttaaaaagcttctaaaaagctatttcgccaggcacggtggctcatgcctataatcccagcactttgggaggccaaggtgggtggatcacctgaggtcaggagttcgagaccagcctggccaacacggtgaaaccccatctctactaaaaatgcaaaaattagccgggcgtggcggcacatgcctgtaatcccagctacatgggaggctgaggtgggagaattgcttgaacccaggaggcggaggcagaggctgcagtgacccaagattgtgccactgcactccaccctgggcaacagagcaagaccccatctcaaaaataaataaatatatataaaaaataaaaagctatttctagtttatttcactataaagttttgctttattaaaaagctaataaacagctattaatcacagtgtattagtatttgttacatttttgtatttcactatctttatactatataatatggtaacttgggtaccgggggaactttaaaatttcatctcaaaaataatttttaaaaagcctgaggtatgatatagcataaaagattgagatgaaaatatatttccctgtaagctgaattactcatttaaaaattttaacttctatatgggacccgaattagacactgctgaatcctgtacagccttactcataaataaagtacttactgaatttccaccattc

SEQ ID NO: 873 - DNA, 171 bp, Homo sapiens
agctggagaagccgtggttgaagtcagcctacactacagtgcacagttgaggagccagagacttcttaaatcatccttagaaccgtgaccatagcagtatatattttcctcttggaacaaaaaactatttttgctgtatttttaccatataaagtatttaaaaaacatgaa

SEQ ID NO: 874 - DNA, 1191 bp, Homo sapiens
cgcaaagaccatgcacatcatcagagactgagatgggagaggcctgagacggagaggtgcatttctgctggtgactggaggagggaccagaatgaggatacgtgagaaatagacccggcaggcagtcagactgaatgggagctggaatcacgcagcagctgggagccgagttaaccctgcgtgtctgtgtcaccctgtttgtcaatctttggcattcgaattccacacacggggtcctagagcccttctgagcatcagtggtgtgggggagtaggtgacgaaacactagacctctcctgagagagaattgctgcttcctgaatccacttcattgaacagcaccttgcaagttcaaatgagttcctgggagcggaggctggaaggccacaaggtgcttgctaaggaacagaatgacccagagtcaaggccaagtctgcagggacctgttgaaagcctcgagaatgtcttggctgcccaagactcttgttgcctttcttccaagccatggccatgccctttttctcaaatgggaggggctggagggtgtgtgggatttgtcttcagctgcaaccagccttgagcctgctgggctattttcagctgaggaggggtgaatataggaaaaatgcatttttgaaacgtttgcaacatgatcaaggtgttagttctccaccacacaagttgtattcttcttttgccacctcaaaccatcacagagtctttaaatgcaaatcaattggtcaatgctagtcaaagctatgttcttacaaaaaccccagacagctcagagctcagaaaatcctgtggagtggctgctctgtaccgtgggcatccggcagccaggaagtgagacaacataattataactttgttttatgatgctgcatcatttgtactgtttaggtcgacgtgaggacatcatcttatttagaattttccgtttggcattctcttttgggtgggagttatgctgggggttgtaaataatgacaaggctgagatttttatgatgtttaaattgggcacaatgattttgaccttattccccaaacttcttttcttttctactgtttaacatacacaggctatttatacacgtccccagctcccatctgaaacctgtgactcaggtttatgaatggtgtttgtgtagcaacacattgtgtgctatgtttattaaaatgcagcgac

SEQ ID NO: 875 - DNA, 1103 bp, Homo sapiens
atggtttgaaatgaagactttgtcgtgtacttaggaagtaaatatcttttgaattagagaaagtgttgggacagaaagtactttatgtaactaagtgggctgttcagaagcttagaggtcattttttgtaattttctttttaattactttagagagctagggatgcaaatgttttcagttagaaagcctttatttacttttggaaattgaacaagaaatgcatctgtcttagaaactggagattatttgatgttaggtaaaacatgtaattgtttctctggcaaatttgtatcagtaatttgaaaatgagatattaggaaaaaccaattcttcttaaatttagttcatctttctttaaaagaacattaaatgtaaccattttgtcagatccatgtattttggagcataaaatgtatgctgttgtgaccaataaatataaaatatggtaattggaattaactccacaccatagtatgcattgttatacatactgtgtacctaattatgtatagcagtgtagtctcaattatatctgaaagtaattgtgactaacaagtatgctttgccttatttccacatttaaactacctgttaatataagggatttgtagtatcagcttgttgagcaatgactttgaatctagttttcagtgatcagaagcagcagttatttgagtgtatgaatggaatgatgatcactgtgctataatgtactgaaaccaccatattacagaaatatttactacatattttccatctgtagtttctcagaagggctatggattagtttgaactgtcaaatccttgcatacttctgtgacacccctgcccattttctgtctttaattaaccaaggtgttaggtgtgactgtcacaactgttatgttttccagtaaactagaagtacgatatttgataattatatttgtatttcaccacctaaatgtaatgttgattcctcaagaatgaaatgaaggcactacattgaaatatgttttgtataaatttgtcatgttgaacagcattttagcatggtaagttcccttagctatatgaattttggcatgtttcagagagatcagtaaataaaatattagataaaa

SEQ ID NO: 876 - DNA, 212 bp, Homo sapiens
cccacccctctccccccgcctgccacctccccccacaagtgccctccaggcttttcttggggaagataccccttttctgaggaatgagtttgcctccgtcccctgcccatgctgggagcccacgctcaccccctcacccctccaagctcactccccaacccccaactccgtgtggtaagcaacatggctttgatgataaacgactttactct

SEQ ID NO: 877 - DNA, 522 bp, Homo sapiens
gaatccactatgatgggaaacatttcattctcaaaaaaaaaaaaaaaaatttctcttcttcctgttattggtagttctgaacgttagatattttttttccatggggtcaaaaggtacctaagtatatgattgcgagtggaaaaataggggacagaaatcaggtattggcagtttttccattttcatttgtgtgtgaatttttaatataaatgcggagacgtaaagcattaatgcaagttaaaatgtttcagtgaacaagtttcagcggttcaactttataataattataaataaacctgttaaatttttctggacaatgccagcatttggatttttttaaaacaagtaaatttcttattgatggcaactaaatggtgtttgtagcatttttatcatacagtagattccatccattcactatacttttctaactgagttgtcctacatgcaagtacatgtttttaatgttgtctgtcttctgtgctgttcctgtaagtttgctattaaaatacattaaactat

SEQ ID NO: 878 - DNA, 3562 bp, Homo sapiens
gcccacgggagccgctggggagatccaggggggccctgtgagggctgcaccaggcagctttgggcacaaggacctttacatgttcttttctgccattttctggactgggggtggaaagggggtatttttaaaaatattatttattttgaaaacgcatctgcttttctcagcaggttgtgagggctgccagcccctcctgctctggaaagcactgtgggcgcaggcaccagagcatcagagagtggggtggagatgagaacgcccacagagaggctgggatgctccggcaggctccaactggccttgctgtacccactgcccaccgcaaaggcacgccacgtctgctgggccgggccacaccgggccctgtctgggtgagcaggggctcaccaaggggacaggactgtggtagacccgtcctgtgggaccccacctgcctcaaaatctggtgccccgagtgtttactgtgtggtctcctgggggcagcaccagggtgtgggtgaggatggccaggctccaccctagcgtggaaaggcccactgtgcccacagctggcctgaggcctcggggagaagaccagtcccacaggcgtctcctgggcctgcctccctgaccgcaccccccgcctcctcgcagctgaaatctgagggctgggtgtgtcgtgacctgtgttttcctgggaaggagaggagtagctccttccctggggtgaaactgccagatgtttatacacaaagttattagactgaagcaggagtgggcagactagcaggctttcacccaatacttaacagcatttctggcccacattcctttttctgaagtcattggggccagatgtgtctccgaattgagaaattttagatttgagaaagacaatgcgatccatttatcgtacactttctaacttcccggcagagtgtggaacatctcgcctaccatcaggcacgtgaatatttctgcagagaaacatgtgactagtcccattaactgggagctatacaaactgtaaatagcctcacctcagttcagtctaattttgccactaagtaacttagggaaaaacttaccatttgagagcttttagggtttcagaattgcaagaacaattgtatggggttgtggaccttgatctgaaaatcctgcttgcaaacagatgtgttagagggtgaaattgtcggcattacacaaggactccttcagttgccaaaagaccatgggcctctttaaggagcccctctgtaagtgattgggacagggctagatccctaatgggggctaggggtggggagaatctagcagaagttgtccaggatactgtggatcaagtatcaatctgaaattaagagaaattagatactaagaggatggacatttacatgtctgtttcctttcctttcattttcattctaacataggaaatgctaacagatggggctggcccaaagtcaagcttctgactccacttgacacagtgccattgggcatgtccctctctgaagggcttgtttgtctatcagagactgtcagaactccatgagggcaggagaagggattttgcaggatgaaagtgcttgggaagtagtggccaccgttctgggggtttcagcccacctaccccatccaccgggctttctaatcacagtcctgcctgagaagcgggccctgctgcccaccccttatcatggatcccttagctactgtccgtcttccattgctgcctggggctgggctgccgtttttgaacacctggcagtgtctttgtcgcgtcctgtcctctcttcttacagaccccaacccaggcctttgccttcttctctcctgtttggaagcctctgtatcttcaaggtgtgggaacagatttggttttctctaaaaagctagaaccttctgctgtgtgcagcaggcatcctccaggctggtgctggctgctctcgaggaagctgcgtcagagtggagctgcccctctactcagataaaatagcttcagctgcaggaagccgccccctcccatgcccaccagcccacagcccttcaccccacacagcccccagagtttgcccgacaccccctgagtgatgacaggtctcaggagggggccgcccccacaaatgggaggcggaagcttattttccccgcttgggctgggggcggctgctgagggggtgaagaagagatagcaatttatgtcgcatgtttagtgacacaatccagatgcaggtgggactttcttgagtggcaggtgtcaccctgggtcccgtgtgggatggtttaatacaggggtttgtgtgtttgtgtgtgtggagggccactgcgcccccagatcctcctctcccccgagggctgcgtctctaaacctgggaaaacatcagcctcaggaggaggcccctttccgggtaactgatgtgtgggagaagccaagaggcccctgcctgtctcctgaatgaggctgtgagggttgccatgtgggcgggaccggttcaaaatagcgcccccgcccctctaaattagaccgtggtctcagcatgatcatcttcagtagataagggacagtggctgatttactccaaatagttccagctggccactcagaccagggccagagttaacttctcaaacaccagccagctgaaaattagggttctcgtgcaggcaagtgcatggttgacacacagccctttggtgacaaagctgggctttgcctgcatagtgcagacaaggctgttggttcagaggctgcagggcacattccaggttggggccttttgtcggtcggaattcaataggacattccctggctgtgggtgtttagggcaggaattacaggcttgcagagaaagtcagaggcaatgagatgctcccagtaccaaactgtgacactgggatcagggtggtcattcccttgggtcagagtgggaccctagagccagagtgagctgtgggtggcctgggtgtgtcctgtggacggcggagactgttgatttggatgttgagctctgagtcagtttcagaaccaaggatctcaggctgagaaggccaggtccccatgggagcggcaggagtctgatggctctgctgccagagcctaccccagcctgccacgccgctgaccttcccatggtaaggaaggggcaggcagcatggttcccaccctcagctgccccagacccacacatccagccccaagagcagcctcacccaggcacagtgcagggcattttagctcctgggaggggagatgcctttgtgagtttcagatgtcagaggagaagctccgagagagtaagtcatgtgcccccaaacactcagctcctaagtggcaggacaggcaagtggccaggttgggccgcccccacagcctgtgccgtccacacactcactacagcactcccagaagaaggagcagaatcgcatgcagcccagagcaggtcctgtggaggggtcctcacccctcaggagtaatagggtgattatgtcacatgtttagtgatacaatcccacctgtgtctggattgtgtcactaaacatgcaacataaattaccatctcttctccatcccctc

SEQ ID NO: 879 - DNA, 524 bp, Homo sapiens
gggacatggtgtgccacaggctgcaagctgcagggaattttcattggatgcagttgtatagttttacactctagtgccatatatttttaagacttttctttccttaaaaaataaagtacgtgtttacttggtgaggaggaggcagaaccagctctttggtgccagctgtttcatcaccagactttggctcccgctttggggagcgcctcgcttcacggacaggaagcacagcaggtttatccagatgaactgagaaggtcagattagggcggggagaagagcatccggcatgagggctgagatgcgcaaagagtgtgctcgggagtggcccctggcacctgggtgctctggctggagaggaaaagccagttccctacgaggagtgttcccaatgctttgtccatgatgtccttgttattttattgcctttagaaactgagtcctgttcttgttacggcagtcacactgctgggaagtggcttaatagtaatatcaataaatagatgagtcctgttagaatcttg

SEQ ID NO: 880 - DNA, 810 bp, Homo sapiens
ggctgcgggccacgcccaggccggctccgcgggaactctctccctcagacaggccaaaaaccagtagcgaggtcgtggtgatgctctttttaactcctttgcccaataaggggggtggctgcctggagccccgtagccagcgctttccacggtttctgttgctaaatggttgtagggtgagaagtgcaagaatgaagatgaagccccactgctcggtcagtctgcctccgtgtgtcctctgaaataagcagatgaagatgaaagggcaactttgttttcttctttttcctgatgtgaatgttaagcagaagggagagagtccttactcccttccaatctctgttcagtgcaaaacccagaaacatgaacagatacgattgtgggattttatcatctgtgtagtaggtgtgtgtatgtgtttctagagtgagatttgtgttttctgcccttttcctctccagccgatgggctggagctgggagaggtgctgagctaacagtgccaacaagtgctccttaagcctgcgaggcccaggcctgtggggctggttctcacctttgacagctgaatgttcctaaagaactgctgccccacagtgagggtgggagcagcggaacagggaatgccagacacaggctcgctgctgctggaaggcggggtgggacttccttcctctgtccggagaggcacaggtgtcaccagttccagccaaaggctcctcacaggcgctgtgaatttttgtacaagtcttgtaattatcgaatcaacaacttgtttcaatttaataaaaatgctcatgggaagtgcttt

SEQ ID NO: 881 - DNA, 596 bp, Homo sapiens
aaactgcttcattatacatggcttcactaatttcatactgaataaaagtggtatgagcataatgactgtttaaggatgtttcacaaaatgtaagcttcagagtgcacaacactatactgaatgaaatttataaatataaaagattacaatatctttatttcaaagatcttcctgtaaacagaatctgtactagaggaaaaacccttaaacaattattcagactttattcaactttagaggattttacgggggcaaaaaacctcctacaaatgtggaaaaacattttttcaagatatatgccttagaaaacaccagagtttatagtatagtagaatatattttacagatacagtgaatacaaacaaatgtccaaaattaagtctaaataaaacattacataatttactgtagaaagtactaaggcactaacagtttcagatgttactttaaagcagtgttgattgtcgagaataattcaaagttaaaatagataatttagttgtatgtaaatttaaatgaatcaagagatgatgtctttttgaagcacagttacattcatgttatacttttttgcattaaaagtttttatatttttg

SEQ ID NO: 882 - DNA, 552 bp, Homo sapiens
gggcagaacgtccctgcattcctgtctcaccctgcacatcccgctgagatggagggctgggcggcagtgccagggctgcagaggcctgtggccctccggagtggtcttcctctggatggggctgctactgtggggctgcttctgcaccaggggcctccccaggtgtgcaccatgcctgcctcccacttggctgtccctgctgctgggcaggacccggccacatgttctgcggatgctgcagaagtgtggaccatggcgggaccccaaggacacttggcacaggcctggaagaggccgccctcgtcttgtctcggctccctttcatggacagactggccttcttagctgtactataaatttgtgagtgaagttagagcccagctcacttagccagctcactttgagggcatcctataaacacccaactgttcttttatcgtctcggttttagccaaaagtgaaattagcatgactgcatctttcaaacaaaaatattgatttctgcttttagggccccgtttccatccagaaataaagggaaatgctggcttc

SEQ ID NO: 883 - DNA, 260 bp, Homo sapiens
ggtcaggatacccactctaggattctcatggctgcacaccctgccccagcccagctgcctccagacccctaagcatctcctgtcctggcctctctgaagcagacaagggccacctatcccgggggtggatgctgagtccaggaggtgatgagcaagtgtacaaaagaaaaaagggaagggggagaggggctggtcagggagaacccagcttgggcagagtgcacctgagatttgataagatcattaaatatttacaaagc

SEQ ID NO: 884 - DNA, 1795 bp, Homo sapiens
gcaccggccgcggctccccctggacggggcgggccctgcctgagggtgggcttttccctgggtggagcaggactcccacctaaacggggcagtactcctccctgggggcgggactcctccctgggggtggggctcctacctgggggcagaactcctacctgaaggcagggctcctccctggagctagtgtctcctctctggtggctgggctgctcctgaatgaggcggagctccaggatggggaggggctctgcgttggcttctccctggggacggggctcccctggacagaggcggggctacagattgggcggggcttctcttgggtgggacagggcttctcctgcgggggcgaggcccctcccagtaagggcgtggctctgggtgggcggggcactaggtaggcttctacctgcaggcggggctcctcctgaaggaggcggggctctaggatggggcacggctctggggtaggctgctccctgagggcggagcgcctccttaggagtggggttttatggtggatgaggcttcttcctggatggggcagagcttctcctgaccagggcaaggccccttccacgggggctgtggctctgggtgggcgtggcctgcataggctccttcctgtgggtggggcttctctgggaccaggctccaatggggcggggcttctctccgcgggtgggactcttccctgggaaccgccctcctgattaaggcgtggcttctgcaggaatcccggctccagagcaggaaattcagcccaccagccacctcatccccaaccccctgtaaggttccatccacccctgcgtcgagctgggaaggttccatgaagcgagtcgggtccccaacccgtgcccctgggatccgagggcccctctccaagcgcctggctttggaatgctccaggcgcgccgacgcctgtgccaccccttcctcagcctggggtttgaccacccacctgaccaggggccctacctggggaaagcctgaagggcctcccagcccccaaccccaagaccaagcttagtcctgggagaggacagggacttcgcagaggcaagcgaccgaggccctcccaaagaggcccgccctgcccgggctcccacaccgtcaggtactcctgccagggaactggcctgctgcgccccaggccccgcccgtctctgctctgctcagctgcgcccccttctttgcagctgcccagcccctcctccctgccctcgggtctccccacctgcactccatccagctacaggagagatagaagcctctcgtcccgtccctccctttcctccgcctgtccacagccccttaagggaaaggtaggaagagaggtccagccccccaggctgcccagagctgctggtctcatttgggggcgttcgggaggtttggggggcatcaaccccccgactgtgctgctcgcgaaggtcccacagccctgagatgggccggcccccttcctggcccctcatggcgggactggagaaatggtccgctttcctggagccaatggcccggcccctcctgactcatccgcctggcccgggaatgaatggggaggccgctgaacccacccggcccatatccctggttgcctcatggccagcgcccctcagcctctgccactgtgaaccggctcccaccctcaaggtgcggggagaagaagcggccaggcggggcgccccaagagcccaaaagagggcacaccgccatcctctgcctcaaattctgcgtttttggttttaatgttatatctgatgctgctatatccactgtccaacgg

SEQ ID NO: 885 - DNA, 1198 bp, Homo sapiens
acgcgacccccctccctctcactcctcttgccctctgctttactctcatgtggcaaacgtgcggctcgtggtgtgagtgccagaagctgcctccgtggtttggtcaccgtgtgcatcgcaccgtgctgtaaatgtggcagacgcagcctgcggccaggctttttatttaatgtaaatagtttttgtttccaatgaggcagtttctggtactcctatgcaatattactcagctttttttattgtaaaaagaaaaatcaactcactgttcagtgctgagaggggatgtaggcccatgggcacctggcctccaggagtcgctgtgttgggagagccggccacgcccttggctttagagctgtgttgaaatccattttggtggttggtttttaacccaaactcagtgcattttttaaaatagttaagaatccaagtcgagaacacttgaacacacagaagggagaccccgcctagcatagatttgcagttacggcctggatgccagtcgccagcccagctgttcccctcgggaacatgaggtggtggtggcgcagcagactgcgatcaattctgcatggtcacagtagagatccccgcaactcgcttgtccttgggtcaccctgcattccatagccatgtgcttgtccctgtgctcccacggttcccaggggccaggctgggagcccacagccaccccactatgccgcaggccgccctacccaccttcaggcagcctatgggacgcagggccccatctgtccctcggtcgccgtgtggccagagtgggtccgtcgtccccaacactcgtgctcgctcagacactttggcaggatgtctggggcctcaccagcaggagcgcgtgcaagccgggcaggcggtccacctagacccacagcccctcgggagcaccccacctctgtgtgtgatgtagctttctctccctcagcctgcaagggtccgatttgccatcgaaaaagacaacctctacttttttcttttgtattttgataaacactgaagctggagctgttaaatttatcttggggaaacctcagaactggtctatttggtgtcgtggaacctcttactgctttcaatacacgattagtaatcaactgttttgtatacttgttttcagttttcatttcgacaaacaagcactgtaattatagctattagaataaaatctcttaactatttc

SEQ ID NO: 886 - DNA, 253 bp, Homo sapiens
ggcttgctgtctgttctcggcaccccgggcccatacaggaccagggcagcagcattgagccacccccttggcaggcgatacggcagctctgtgcccttggccagcatgtggagtggaggagatgctgcccctgtggttggaacatcctggggtgacccccgacccagcctcgctgggctgtcccctgtccctatctctcactctggacccagggctgacatcctaataaaataactgttggattagaaactcc

SEQ ID NO: 887 - DNA, 746 bp, Homo sapiens
gggcgctggcttgcgagctgggccagggaggaggagggttggggggctccggtggaaacctgcgaccccttctcctcagccttctccttagccggtggcctcaggcagactctgcccagaggggcagccaggctgctcagggaaggggctgaaagcggcagaggagtgccctggcttggtcaccactggggccaaggtggggtggagagaggcctaggagccagaaagggccctctgctgtggtctgaaccccagggggagtggggcattgactccacccctgtcctgagctggaataggtcctctgggatgccagctctcccctttgtgcttccctgcagcaacccatggagggcccagggtgcctggtatgggcatcagttggtgggggtgcgggggtgcgtgtccccattccctgcaacagcaaatggggctccttcttcagccctccccttcccagccccaaactgagacagactgggagctgggagcctggggtggacaggaccataccctctttgagcttctgcgatgccggccttccgttcctctgggaggcttgaagttctgcaaagatgttgatatgccttgcagcttggacccaatgggtggtggtcagggcctgggggcttggccatgctgggggaatggggctctgggttcctgcctgtggcctgtctgtcctcctccctaattcagacccagcctcaagaggaaagggagtaaaataaaactaacttgtttat

SEQ ID NO: 888 - DNA, 6743 bp, Homo sapiens
tccgaagccttggctggcgcaggctgatggggaggctggggcctggggcctttggcctctgtccagggtcttcccgtcccatctgtctgctgcgcctactgggtgggagccctggtttccatctgggaaagtcccccttgtaggtgccctgcctggccccacccatgctcaggggccccaggcacgtgggttgttttctccctggacttcctgtggccccagaggagcccaccgtgtgagtgctgggctccagatggcgccgggtcccaatcgtggctccacacagggttgtctgggaggacgggacggtgtctctggccagcactggcagcttccgggccttgtaccccactctgcctggcatgagcctcatggggggttggtccctgtgcctggaagcggggtggtgtccagggtctgcaggctggggctcgggctttgggagttgtttcactgtgcttgcttccagcatgtctcagggtggggctatgcgtggtctagaggggtctggggcattggatcaggtggcatgtgggtgtctacacatcgagaagcacacagggatgagccactaggtatcccatgctggaggcttgtggaaggctgtgcccatctcccatgtttccccacctctgttcctcctcagagccctccaggagcgtggggtgggggccagcgcagggctcaggagccagcagggcagagttctgcctgtgtgtgctgggttttggcatagcctgtgtttgcagtgagagtgacttgctgtcagtcacggggcacagcctcctgttcacccactggcttcccccttcccactgaagtgtgagctctatgtttcagggcatctattaaagagtgagccacaggcagccccttgggagctctggtttcatttgggggagagggaggtgggggcttagtttttgtgatctggctgactggaccccgggaacagcgctcctttgagaacgcccagacctaccagatgaagcacttggcatggctgcaggccagcaggggaggcctcagaggcccaggctgggcacgtgggtgccgagtctgcaaaggacagccccatggctgtgagctgtcggctgcagggcgcagggcctggggggcaggcgtttgggccaccaagctggacgttagggtggccacagagggccaagcaggcagggagcctgtgccgccatcctggggggccacaggtgctctctagaaatctgcagccatggcggttttggggtcaggggtctaaaggcagctctgagctgcagtgtagtttgtgatcacccaggaggagggtgtagagcggatggacgggaggaagcggctgcagctggagggaagagaggggccgtccagcctcacccgctgcagtcagctctcctatgggcaaggaaacagctaggtggccctgacccctgcggtcctgagagccggtggccttcagcccctcttggacaggtcatggtctggaagcgcccagcgcaggatggattccagaccagcatccctgcaaccttttcagccccactggctgctgctttaaactggcatggagacatttgatcagcttcccagccagttttctctccagctcagccaggagtgggtgcctgtggcctgtgtcaccaagagctggtgtctcctgcatgaggggcatgcacccctggaatgagggtctgtgcctcgagctcaaagtgtcccggctctgtcatctgcctgaagttgcctggcttttccagtggggcctccttgagtgctgcagcatctgggagcatcctagcctgtcccgtgggtgtggctgggtgagggctaggaggtgagccaggaaggaagcactccactccagagtgaggtgccgcctgagccatcctgtgccccctcagtgtcttcaggtctctgcaggtgtcaggatctcaaaatacttggttcagatcaaacacatttcgtgttcttctgtgtccttttttttttttttttttttttttgagatggagtcttgctctgttggccaggctggagctcagtggcacaatctctgctcactgcaacctctgcctcccaggttccagtgattttcctgcctcagcctcctgggtagctgggactacaggcacatgccccatgcccggctaatttttgtatttttagtagagatggggttttaccatgttggccaggatggtctcaattacaggcatgagccactgtgcccagcctcttctgtgtctttaaaaaggaaagtgtcagtcaacaaaagagcccctctgtcatacaaaccaaatcagttttcaccaaaatgtccttagtcctctcagaaaggcctggcctttaggaccttggaagcaggccctaaagcgcatcggcagggtcagagctttgtgttcaggaacactgggatctgctgagagctggtgtagccgctccaaaactgcacactgcttttcctgtctgctttagtttgtgttgtaaaaacataggaagttcgtgtgtgtgtgtgtgtgtgtgaattcaaggcataaggtgcagttgtgttatgtgggtatagtgcatggtggtgcagtctgggcttcttaccctcacacctcctgcctcccctcgttagagtcccccacatccgccttccactttctgagcccacattgcctgttgggcagctcctggttatgaggcaggacgtgtggtgtttgactgtctgtttctgagctgttttacttaacacagtgtatatggtgcatctttaggaaagcatgcttgtattttcctttcaaagccagatatgggcgggtgtggtggctcatgcctgtgatcccagcactttgggaggccgaggcaggaggattgcttgagcccaggagtttgagagcagcctgggcaacatatcaagactctgtctcttaaaaaaaaaaaaattagccaggcatggtggtccacacctgtggtcccacctattcgggaggctgaagtgcgaggatcacttgagcccaggaggttgaggctgcagtgagctgtgattgtgccactgcactccagcctgggcaacagagcaagaccctgtcttaaaacaaagaaagaataaaaaagaagagaagttgcagttggtagtatttccagagcccggcagacagtgtagaaactgtgagaaacccacctccaaatcaggccttagatagaaaacatcctaagaagtatacgttcattgtaaaatcattatcatcatcatcttctaatccccaaggagacaagctccctgttctgtgttcttgtatgaggcggtcagtcaagcgcagcccgagaggagaggcaggagcctgggagagcctctgctagacctttcctggcacttccccaggaaaggcaaggcagggcagatgtgcggctggccagctggagtgatttccatgggctccaagctgtaggagtggtccctggctgccagagtgctctggccagatagaggtgggctctggactggtgaggctgcattgcggaggcgcgcacacccagctgggcccttatctgtaaggactggctggcctgggaggggcagtctcccagccagaaggtggaatttttttttttttttgagataccaaaacatcctaaggtacaggaaagaaattgtcaacacacacacacagtaccataaacaaggcccagcagaaaggcagacagaagcacacacaccaatgttctgatcttagagtaagcagacacatcacatggaatgaggatgtttaatatatttaaagaaaacaatttatgcacaggaagcaagagactataaaaatgaccaagcagattttaaaaagagaacttgttgaaataaaaataaaatactctaaaaaatattccatgatgtgtttcctgaagaatcgggaactgtttgaagaaatgacccaaagtgcagcacagaaagacagagctggaaaatatgagatgggatgagacaagaagatggagagtttagtatgacatccgcaatttacgagtaattccagaaggaggggaaagagaatatggggtggaggcaagtattcagagaaatacggctgagaactttcccaaaccaacaggagcccctgctccttaggttcaggaaccagcagctcccaagcagcatagttaaaaagctctacccaaacagtcacgtcttggtgaaagtacagaatctcatgacaaagagatcttaaggcagaaaagaaagagattatctggaaagaagaaaataagtagttgattaaaagcaacagtggaagccagaaagatagtaaataatatcttcaaagtcctgggagaaaatagtgatagcctagaattgtgtacccagaaaatccgtctttcaagaatgaggggccaggcgcagtggctcacgtctgtattcccagcactttgggaggccaaggcaggtggatcacctgaggtcaggagttcaagaccagcctgatcaacatggtgaaaccctgtctctactaaaaatataaaaattagctgggtgtggtggcatattcctgtaatcccagctactcgggaggctgaggcaggagaatcacttgaacccaggaggcagaggttgcagtgagccaagattgtgccattgcactccagcctgggcaatagaatgagactctgtctcaaaaaaaaaaaaaaaaaaaaaaaaaaaaagagggctaaacgcattttcataccacgaaactgccctcactccggagtttgctgccagcagagcctagagcgtctaaggcatgtctgggcttctggcgagggatcctgtggggaagctggagatggaagaaggagtgaataggcaggaaggtggatttgtgggcatgtctaaaacaccacatctagaagcttctacttagaatgcctacttttggagtttataaaaaagatgccacatgttgagttgggagagaggtgcccaaacctacagtgttctaaagtccccctactggtcggaaggagggcacggacactgacttcagcatctgttacaaggcttatcagagttttcagataatctctaaaagaatggaaatatatcttccaaactatagagggaagaccatggaatttaaaagccagtccttcaaggagaaatgaacaaactcaaaatcgtagttgggagtgttttttttttttttgagacagagtctcactcttgcccaggctggagtggagtggcataaacacagctcactacagcctcaaccttctgggctcagatgattctcctgcctcagcctcctgagtagcaggaactacaggtgtgagtcatcacactcagctaattttttttttttttttttactttttgtagagatggggttctcactgcattgcccaggctggtcttgaatttctgggctcaggtgatcttcccacctcagcctcctgagtagctgggaccacaggtgcatgctaatttttaaaattttttgtttttaaatgctggtcttcaactcttgtccccaagtagctgggattggggcatgaggcactgtgctaacttcatgttgaaattgaattgccattctaacagtgttaagagatggggcctgtaagaggtgattaggctgtgagggctccactctccaagggcggagttaatgttatgaaagggtaagtccagcccgcttgtgcctctcttgccctccagtgttcaaagcaccatcttggaggtggaattcccaagtcggccagttcctggatcttggactgtccggtctccagaaccgtgagccaataaacctctgttccttgtaaatgagtcagcctcaggtattctcttgtagcagcacaaatggaggcagacacttccttcaccaatctcatgggaggcccactcctgtgagctgcctctagttccccaggccacagactccatcagggctcacctggagccgtccctgtctcacctggaagctctcccactcctctggccagcctgggcatctccacccaatatgagtgatggcgactgattcccttactttagcaagctgggaataaggaatgtttgcctgttcttattcaggggtctctgcatctccacacttgcacaggttgtgtgtacatacattttcctgtctttctggtaagcccctggggtggagctctgggccacagggcaggaaaactcagtgttgctaggaactgccagacattttcccggagtgagtgcagcatttacattcccaccagaagtgtgccaggttcttgtcatactgcgtcctcgccagcgcttggtgctgtcagtcttcttagtttccatttagagattcagtgtttaaattttgaacgtcttgggtgaacaccttggtttgagaaaagtaagaaaaagggtctgtctggctatgggccatggagacccagggcagtgctccacgtgccaaccctggggcagggagcccaagctaggactgtgactgtctgggctgtgggcatctgaccatctccagtgtccccgtctttgatttccctggcgatggtgctagcttagtttgtgcgcatcggcatttgtgggagaaatgaaggattaatacattttgttttatgtcagactctctcagtgagaagttctcagggacaataatagcagggggtcctgctgaagaaaaactgggagatggctgagctctggtccatctttcattgattcattcatttcttcattcattcaaccatgtattgaatgcttatagccaatgaaaataaagtacacagtatatttt

SEQ ID NO: 889 - DNA, 494 bp, Homo sapiens
tgctgctgccatggtggcttggggcagcggggagaaaggagtgtccttgaggcctaggacgctgcccggcctcagcagcagccctgggagcctcctgagggccctccctgtccctggccacgggcccttcttacctcactcaacttcagccaggaggactgggtggtgcttgcaatgttggaatgaccggctcaaagacctcagctctgggctgtttcctgtcagcctggcaggagcctcaggactgtggacgaaggatgtggccttgggcatttgtcctgttcccacatgggcctggtccctccctcctggccccagccacagctgccaggcctgacatggccttgcctctcctgcagtcttggtgactgagacccttgggtggcgcttcccagctctgcaggccctcctggccttttctgcagggtggacacagggtctgtgtgtgggcagcagcccctgtctctcagcaagaataaagcagcttcctgtgc

SEQ ID NO: 890 - DNA, 47 bp, Homo sapiens
ggcgttcctcggcgtcctgaacccaaaggctcttttcagagccaccc

SEQ ID NO: 891 - DNA, 2922 bp, Homo sapiens
tgctggcaagacacccagaaaggctattttcagatgaaatcgatattagaagctatattagctgaaacaactccttttactgcgtagaacctatatcgagagtgtgtgtatatgtattataggaggagctctcaattttatgtattctttctgcctttaattttcttgtttgtttgagcttagggatgagatacttatgcaagatatttttgaagtaaattaaacatttttcacatctctggaaatttagagttctagacctctggttaatttatatctaatatgaagaagacacctctaatctggatgttaagaatgaagttctgctacattataatgtacagaagagcaaaagggaggaacactatggttaaccctctcttgattaagggctacttaatgcacagtgcattatgtacacaggtcaaccatggtaacaatagttcttagctttgaaactccatgcaaaccatgccttttttttaaggagcaaaaatctgagaaaaaaagtgagagacctctgcctacaaaacctcaaaccagtcacttttgtcaattgctaatacccagttacttatgatttaaaaacaaccaacagaaaacatcccactgactgtatggcactctgtagtcaaaaaaggaaacttccttattgggacttttctttcttagtccagttgtgttgacacatatgaacacagacaaagtgctatgcggaggaaagcaagtgttggtcagtagtttcatgttttagggagtggttcctgtggagatcagaaagtgacatttgctttcggtactgtaatacgtgcaccaaactgcctcaatcctaggtaacgagggcaacagggagcacctgtctggattgtttttaaacctccatactcaagctgtctcttcggcagggaggtgaatactcttgaaaggccaacagcaagtgtttgtgggacacaacacagataattttttcttaagtcggccaagatgtacttctctgtgtgcacacccatgcacactcatgcacacagatacataggtctgtatggctgtatttgctgttgattcagactttcacaccattaatggggaaaagcgtggccacaaaaacagatgctaggaagcttggcttcctcttcttgttgacccttttttgaaccaacatcttttttattatattcagagtatgtttttaagtgtatcttaatatatacattttttaggacatcttaaatctaaacaaaaaataaaatgaacatctcttgaaacctgttaaaacaaccagttaaagccacagatggctttcagggcagtagcagcagaggccagtggactctgaggactcctgaggggcggggcgtgtagccagccaggtgcatgccgggaccatggcccccatacttggctgcttcctgtgacagtgaaatacatccttcaaggtggcagctgttagggctgaatcttctggagaaaaaggtgccatctcaggagaatagcttttactctggtaggaatgcttccgagacaccacaaggcagcctgaacactcagttgcagggtcgggcttgcggtgggtgacccagagccaccaaagtcacatccacaactaatgagggaaatctgtaaagccagttagatagaagaattttatttttctgtgggttttgtgttgtcttttttatgttaaaaagaaatccagtttgtgtttttctatagaaaaagtaaaagatcaggttatactttaggttaggggttctatttattcctgttagtaaataaaattaacaaatttctttgtttaacaaaagattaatctttaaaccactaaaatacatagactgattgattattcaacacattggaattgatgtcggtcatagtttcctgaagcatttagttacaacctgaaggaataaaatgatttgtggaaatgcttaaaatagacctaactgaatacagtctcatcttgccgcgcctggcttacctatctgtggaaagctaggcttcccaggctgggctctgcctgtctggtgcctggaggtgtgggagggaagatgagttatttaactggtaagcgatttgaaacactatttttatattaaagtaaatggcatggagtatagtgcaaattcatttttaagatagaacacaaaacttgaaagaagttttatgcgtgtgacagtgtatggggctgcagttggtctccctggaggggacttccacacctcctgcctttaggccatgggtggaaagtgctcagtgaagtacacctgtgtggcccagttctgaaagctttatacagttgaattttaagtggggttgataacaccttggactgttagtgttaaaaatctagtgggttgacctttaaatgcaacagtttttaaaatatattgctgcattttatagaatagtaaaggtacgattatacttgagattttcctccatttttatttcttcgtgaacatagagtttggggccgaaaatgtttttaaagtatgtgtttgagttaaatataaagttggttcacttcaaagctaaaaaattgttaaacttgcagcttggtattgcagagaagattttataagaattttgctttagagaatgccactttggctgaactacaagtgtaggccaccattataatttataaatacagcatacttcaaaactgtttgttatctcttgttaccatgtatgtataaatggaccttttataaccttgttctctgcttgacagactcaagagaaactacccaggtattacacaagccaaaatgggagcaaggccttctctccagactatcgtaacctggtgccttaccaagttgtgcttttctgttttcaagtgtaaatgatgttgagcagaatgttgtacttgaaaatgctataagtgagatggtatgaaataaattctgacttatg

SEQ ID NO: 892 - DNA, 965 bp, Homo sapiens
gtgttcatacagtggcatttgggacacaatcgttggaacctgaagaatctgaagttttttttaccaccatctttttctactctgtatggaagtagatctttatggggaaaagagaatttggggtgttctgcaagccagtcaaagtggcacagcaaatcatataaatcgaattaaatggacaacaccgttagatgtgtatgtaaaaattttctgtttcatatttttcctttcactttcggtttaaaacatgctatatgtactgtatgtcctgtagcccagtgcggctccacagcatggaatctgatgtatgatatgatagaatgtggcactaaatgcagtttcagattttattttttttaatcatatgaactaaaattgtcaattgtgaggtgtgcttttctcatcatgttggttatattgcacaattggttatatttatgacctgatattcaaagactctggcattgatagccagtgtgttttcttatttaactccgtttactacattctacatggtgtttacgtgatccacacttgaaatactagatcagtagacattcactaatataccaaaataaaatgaaaaattgagtttttccgtgaactttatactgtccagctctgttgattttaaagcctcttcatccaggtcagttcaggaagtatatctggagtacctgctctgtttttggctgtgagactagcactaaggattctggtacctttacccaaacctactgggctactaatacttctctcagcagttgatcaaatacaatagaccatgtaagctggggccgctcatccacttccagtttgctggtctccctgctagaaaacacattgtactgtgctttttctggaattcagtataatggcatcactgcctgtttttcacatcttttgtttcctgttcattttaaggaaacctactaaatccagttaatattaaatggacaccactc

SEQ ID NO: 893 - DNA, 175 bp, Homo sapiens
acagctttttgcatgggataggagcatgtctattctaacacatcagcttattcaaaagcaagaattttaaaaataagataaatgtaaagttgttttataaacgatcctgttaattaaaccacagacaccatatatccttctgcatcctttggccaataaaagttgctggagaacc

SEQ ID NO: 894 - DNA, 902 bp, Homo sapiens
ggctatgggacagaagtgccgccagtgacactgtccagaggctttggctgcatggtctgaaagagctggagaatgaaagacttaagatgttctaattcgtagtattggtatacatagaaaatcctttggggtttatgtagtatattttgatgtattttacatcgtgtttttcttactattttttaatacatagttttatgcagtaagtattgcaatagaatcctgaaaattgaccctgggatgagattaattcaatagaaaaattgctgactcttgggacctttctgtgtttggttctcgtcttggctcagtggtttggtgttccctcgtctgcactggaaactacataaaacttggctttttactttgggtacatgggcgtataattcagccctgtttaaatatacttgcctttcaaattcttcaagtaacatgggaagtattcttgaaatgtcacattttctgccttccctctaagtatgctttctgaagaagtcagggaaagttagagtctgtggcctgaggtgtctgctctgggtggcgatagtgggcacctcaggcaggtcggtgacgtttagcacaggtgccagggctcctgcctgctcctcctgtgttagctctgtgaagttcatttaggaatttttttttcctatgcagtttaagaaataatcctaattgttttttcttattacctaagcaatatatttttattatagcaacctcagaaaagaaaaataaaaggataatttaaaaaactcattcatagtctcagttacccagataacctcggttgtcaccttggagtatcttgttgtagtccctttactatgtgtatgtatatagatgtgcatataaatatatatagtagctaaattggatcataaatgcatttttttaaagtt

SEQ ID NO: 895 - DNA, 2742 bp, Homo sapiens
gagggtccgggaggccctgccgtcctgtctcctgcaccattgggtggagtctggtgatcacattattgattatgtttcttaaactttccgcgaaactaatatacctcagtattccatcatggtctgaaagtcaaacttcggcaaggcacggacgactgtgcagacacagcagcggcaagaagcgagaactgccctccccctcctctcggtgcagcccagccgggcccccttccccaggccggagcgcccctcttccttccagctttcacttctgccggctccgcaactgagtgacacccagcgacaaccgactggggagtggtagaagcaactgaacggatgcgtgcgagctgaggacagggcgggaggagggggcacacatgccccaggggagcgaggagaactcttgaaatctccattttcaatcccttcgaaatcacgtatggtttccacaaagccgagtcgtgtcacgtggcaggtttacgtcaatagtccctctctctgctcctccattcgcaagtgtcttcctgggccagactcccctccacctcatgtacttgctatattgaggatgaagttttctatggtgggacactaaatataaagctatatagagaaagaatgtacggtcagttccctatggtttctgtagatcatcgtcatcttgtatattccccacaaagccgttcgcagcttccgggagaaggggccagagcccggtggggccagtttctcacagagggaggaggtggcctttgtcccctggagcccgatcagccagttggtgctactgctgtggccagctggggggcttcctccagaccaccggcctcggccccggcatccctgttgggcgtcagcctgagagtccctactgtgcgtcagaatccaccttgcgtgctgtgcgtatctgtgaacctggagcggttacttattttgacagatatcactttgggtctttttacattaaatttcttttctctaaggaatataagacataccccatagctctgtgtgagccagcaataccgctgccccctggcgacagggcagaccaatgatgccaggcagctgtcacacgctagtattggcttcattgtgatctgagccctgcacgctgggccttcagaattaatggccagcagtgtcagggatgagcccgtcagccagggcacaggcctggctcacagtcctgcacacctgctggcctggggagctccagccaggcagcgagtcctgccccgcccgcagctccctcccacaccccgcctggccaagatgactgcttcagggggctttggggaaagaattaggaagggtcagaaccaaacaatacctgctcatttacactgaggattcagggcgggagacaggagccttggggtcctgttaaaccacagacagttatgaactgaaagtcataacggggagaggtgcctggcttctacctgggtgctcaggaatgttcctcgtcacccctgccactctgtggtcggtgccctgcttcctcctccactcctggccgccttctccagcgccgcacacacagatgctcagtctcagagaggctggcacggcctggcagtctgagaaaagcgtcagttaggcacacctgcaggcccctcggtgggacagcggcggccttggagttaggagccaccctgggaggttgtgccggtgccatgctcctccctgtgtcttgtatgaaaggggccactgtgtgtcttcctccccggcgggagccccacatgtgtgcactgtaggacagcggccccgaggtggaagcctggctggagggctgccctataggtcttctcttcccgcctcccctgccatgcaaccagatgtgttgtgagtgggcagcgtgcccccacgctggagtaactccgcacgcttctgtctttcacggtgggcgctcggggggagcctgaggaaaacccccttaggtacctgtgcgaggctgtggagtgcaggccagagcagggtgtgcgtagcccccagcacccaggttcttctgtcagaccctgtgacctgcgagctgctactactgtaaggagggaaatggatgaatctggctcgttttaaaatcacgttttctgacgaatcctttgccccttcacctttaccccgcccgcacccctaggccctctcagccttcctatcatcccacgtgtctacccagacccttgtgcggcccatgccctgggggcggcgtcctgtccctgagctgggaggcggctttggatggtccgggcgtcaagagcaggggtgggccggggaggggtcctttgcggtgagctatgtttacatgacacagtgtgccaaagtgacttactgcggttgcgttagtttttaatcatcaggactatctcaccctcccactcctgtttttaaaactcagaattctttcctaagagcccttcgagcaaagcgtgccgaagttagttgtcttctctgtgctggtcctttcttatgtcctcataaaagctcagatgatggtatctgtgagtatgttttgcaaattcaaaatatagtttggtaatttttttttccagttgatttttaaaaagaactgctgtacagagcttgtactttgtccattttatagatggaaaccatccttgaaaattgtttaacttaaataaagagaagatactttctagataccgctctttgctggccagagtctgtcctggtgtgtgagggctgggtggggtgggtgtggggactgggattggggtc

SEQ ID NO: 896 - DNA, 588 bp, Homo sapiens
gcatcttggaagatcccgaggttagattcttaagcaagagaagagttggacttccaggctgaaggggagaaagtgactctgttctcttagcaaccgtctgtagcaaagaagtgcttccagcatcactccagcaacacgcccatgcgtcttctctcagcgtatttgggtcttctttgcccaaaagaacacaaaagcctttttccattgtatggaagatagtttttaagacatttgaaactttctactatagtttacagaacaaattattttatttttattgtaaatcttagtgtggaagagctgatttctaaaatatgattaaagtaaatatatacctatgaatatcaagagtcgtctccctgagcctgtagttggaagtgacgactgtaatggaatgatgtcttgtatagaaatgcccttctctgaaataaagagaactcctgggctttctaaagaggctgcgggaagccatcctccactcccactgtgtgtgagagcagtgcttctgatcctgctgtcaccccgacctctggcaggagccggcgccagtaggaaagacctccttcctaaataaaagaagtgtctccc

SEQ ID NO: 897 - DNA, 407 bp, Homo sapiens
ggctgccttgtagagatgcagcctgcccagctgaatcttggcttctggaccttgaccttcagaacttctcttggtgtggaaccattacgcccagggttcactcccctctcatcgtccggccttctcccttcatcttgatctgggaagaatgaaatgaactcagctacactctctgattttgtgctactcctttgtaaagtcactgccttaagggggctgatggcgccacctgtgccttacatccaggttcaggcatcactagctttcccacactctactttccttatttccttccattaagaattactcagagttctaacgcacagaatcctgacttccatgtagctccagtcattgtgatcagacatcctttataaaacatgtttttataaatgtgtatgtggaat

SEQ ID NO: 898 - DNA, 588 bp, Homo sapiens
ttttattcttcttcactatctgtggcatgaccagctgtatctgaaagagaaaagacatgaaatataaaccaacctcctcatttctgttgagtaaaatgaagcaaagattggaaacactttctgaaaaagaaagcaatgataatagcggtggatacccacccccacaaatgcacccaagagacaagccatttacatacagatattcacagtcacacatagaaacacccacatggacacaaggaatgttgctgcagagactgaatgacatgcaacaggtgaaggtttatacgttatacacaaggccaggtaagcgctcataattcacacataataaaacatctaggtttcattcctttgacatgtttatatctttttaatttaaatgttgttactggcttaaaatattttgtgttcttacaatagaaacgcttttaataaagtctttcagaataaaccaagtttttgtaaattttcaattcaataattaaggtaatctttaaaattggatgatccaaaaataagtgataatgaaaaccactgagttatatactttgcaagggtaaattacatctgaataaagctgtaatt

SEQ ID NO: 899 - DNA, 6128 bp, Homo sapiens
ccccgctccagctcggcactgtgcctgtgacagtgacattcacaggcaaaacgcccaccattctcactaagctcaaataacccacaaaagcaggatatgcaaatcatgggtgcaacctggcagcgtggagtgtcatagaaacacattttcttggggacgcagggaatgggtccacgggccatgctcacagctgccactgtcagtggcaaaggaaggtacgtgtgtcacccttattccacccagacattacgaacactccccaagaaggacctttctcaagggagtcagcattcgggcttcatgtctatgtttcctgccatctgttttcaaagcttgtctttttttggagggagaggaaggtagactttgagactggcctcctgagagcggcagtcaggagctgcgctgtaatcccacgccccgggtgttggccctccgtggggaccttgcctcctcagagtcccgagattgcagattctcatcatgctgagaaagttatcttttagcttcttggtcctagagtctttagtagcacctgccacttgcagacccaatgcaggattgatagaaagggacattaatcattcatgcttgacttttgcctctctcactgaagtgttagaaccttttaaaatggcttcctttattaatcagccaattgtgttctctctctctcttcctccatccttcatttcttctccctccctccttctctttctctcttcttctctctctccttccttccctcctttgctctctctttcttcctttcctccttctctcttactttcctccatccctgcctctttcttccctctttcgctctctttccctccctccttctctctctctctcacacacacacaggcatgacagtctcctaaaattaattcactcagttcttagttcttaaatccacgtgaaaacacaagaattttaacaactatgtcataggtcttcgcctggtgatggctcctttctgaaactggcagcccaagaagttaactgaaaatgcatccagattgctcttctgagctgaaccactctcagactcataagcatttaaaatgggagaccctgggaaagcctgttctagtcagtccaccctattgtcattatgaaagcatcatgaacacaagtggcccctgtggcaggccgggacggctctgccctgatgcagtgggcgggatctctggggaaggcaggaaatagaagggcagtatcaggtaccttgtctcccagcttcccactgtgagactgggtgtgccgagtctgacctgccagggcaggactctggaaacaccaggcttctcccttgagatccacattgattcatccacacctctcagagacagctcatggcaggggttttgagcctgccaggctcttgttcccagggaacccttcctctcctccctcctctcatcttcccagtcacctgccacctccagctccacctggtagtaacatttctctctccttttaaaaagaatatattttgtcaagcattttatttctgaggctgagaagtgacttgtcaatttgctggactggatttttataaaattcgcccattcaccagcaccaactgtgcgtccttggttctgccttcctgttcagacaccgcgcctgctttctgagtaactgcctgccggagccatgcaggtaccccccctccactcagcaggcccgacaatcctacctcaaagctcatgctcttggtctgcaaggctgcttggtccgctgtctctgcagatgtggccggcaaggccagctgccccgtctccaggagctgctcggtgctgtgttgcagtctctgctgcggagcctgggagctatctgcttcatggaagtctaggtcttgcctcttccttgtcatctcaccaagcggtttctgggtctcctcctcccatcccagagccctgtccagagctcttggtggtgacacacaagacctgggaccctgtgtccttgcccgcacctctgcctctgtctcccatatccctgcagcttcatccttagccatagctctgggtggcctttgcttggagcatggagacgatccctaaagattgaggatgaagaggagccaccactttcctggggccaaggaagccatcagctttgggaagtgtctagctctcttctgaaaaaaaaacaggcctacaccctgcccccagaatgagagtgggctaggcagggctgcctggtgacagcagcttctcacaggggagccctggggaaggctgtggagcctccaccatcaccacagcccaggtcaccaggtggccccagctctgcagaagaatcgcccatcattggagcacaagttgcctggggctaccctgaacctaacccctttgagggagcagcatccaggtcaggagagaagtggaaagtgcaggagggtaatgccctcaaatccggtggcctctttcagaaaaaagttccctgaagtccagagaggtgcagccaggactccctcctccccactgccaccctgagcttgggggctgggattctcccttttctgactcctccaggagcccagaagcaatacggccgatgccagggacagcatccagctctccttcacagacacctctcctgtcttcagcacaaaacaccttcaatgttctgacttcaaagagaacgacaggtccgtgccacacacttgtgtttttgagggatcagaaaagtgaagaaggaacttatcaattcctcatggccaggaaggtcccgggtttcagagtagaaatgacagacaggtcatggaattctcatccaccatcgaattccataacacgttacatcatggtggcacatttgtacatacatataaatgatatcaagatgaggcttttgttgggctggctgaggagtaacttggtgtaaatctatcaagcagtttcagtgaaaaaggaattcaaagtagtttaaaaatgtcgagttccattgcattgtaaatagtgcctctgtaatgtggttctgcagttgttctttgctagtgagcaagcttggtcaaagtgtatgccttttccttttaaaattaatctcttccgaaaatatccactagcacctcactgcatacatagcatcccagctcctaattcaaagcaggggaaggtatttccccaaagcctgcttttcctctctctgttctccttgggaaaataatgattccaattaaagaggacaccagtaatactgacccacaaggtaactgacctaaacactataaaactgtatatatttccaggctgcatcttcagcctgatatgtactttgtagttgcaacagcgccctaggtgccctatggcccaccaagtttgaggagggtggtgctttccggattgagcctgggcaggctctgtggagctcaccaagagagctgggggcaggcccaccctcctctttgcgccctttctctccctcttggtgcccctgccctccgccccaccacagcactctcaggaaaggatcagaatgcaggatctttgtgtatttcttccagggatatttgcatttaagccttaattctcattgcaagcgaaaggcttggtccccctgggaaggcgggtttcggcaccggtgggcaggtggttcagtgtcaaggaggctgctgctggtcccatggccacctgctggctttgaggtagtgagggagggtcaatccttagggggagtcaacatgtgaatgctaaagaacactgctgcacagcccgtggggtggcgccagggtttctcaacctctactgacattttgcgataggttctgtatgccgtaggatgtttagcaacatccctggtctctacccatcatctgccagtagcaacccccaagttaggtgtgacaaccaaaagtatctgtcgacattgctaggtatctcctgggggcctccacaagttgagaaccaccaggttatgccagtggtttgtcatgcatggatctgtagagggactgtggcgctccggctgctttgttccatagaaagcctgtatgtgacaaagctgccagcctttatcttgatacccaagcccaggattttccatgtgtcttcagggggcaggtaggggaaaatggggtgagccacctccaacagatgccaacctgttgggtcttgaattttcactcactgaagatgccccctgcccgctccccacttcctagaaagcaaaactcgttacctttgttttccttggccacattttactggaagcaacaggaacttcttaatgggtttgtggccctcaattggtttttaaaaaaatctaacagatcttattggcaaatattcaagatggtgatgctggaaaatttcaggacttttcttttgcaagtgagccggtagctgtgtttgttgaccacattctttggcagttcctcccagaagatcaaaggatcctgcagctttaacctaatatctaggctgtaaaaatatgagggcaggtttcgggcaggatgtattgatcagacaccaagttcagccctcggttacttccctcttttaacctggctttaatagtgattcatggtatgagtgggggccaatctcttatcctttctgtgcctcagtatccccacctgaaatgagactagtcatactaacctacctcctctgatgtattgtgaggattatacaataacatttttaaagaaaaaaagtgcagtctttcatctctggcatctaagctaatgattcccattcagtgactcaaacctgtggggggcgttccagtgttctctgaccagtgtcttccatccaagcctccttgtgaccagggcaaggagctgcctggcctccagtgggtaaaatagacctttaagacaggtttcctatgaccatagaaagtaacaccccatatgtttccattcccggcgaggcctgtttgaatggcgctctgtgtgagtgctatgaacaggctacctgtcagcagtctcactgcgaggcctcaaggcctctgtgagcagaagcccctttaaaccaaggaaggacactaacccaggcctctgccttctttgttacctaagttctggtatctaaggggtctctcatctcacagcttgcctcctttgtttcgaggggtctctgcagtgtgaatgggtttgaaatccagtgtggatagcacgaagagatgcaactgagccgaagttttgaaggctggttgggctagtgggtcatcatgtcactttcagatgactgataaccgctgggactgctggggcttcaccagcacgagctatgcaggttgggggaggccctggctttttcaatgattgacgttgacatcagtcaggagctgggagttgagacctccagggaagtctcgtccggatccatcgctcttctctcaaggagcacagtcctgggaaaggcctagggacctgtgggccggtgatgcgggcactgcagaccaggccaggccctcgggtaaagctctgaggagaggccaaaaccaggcttcaggttcgggaaggtgactgcttgcaactgcagtagcaggaacatgtcaggtgcttactgggtgagacccagccggggaagcctctccaactcctcctagccctggaaaccagacacccagagccccaggctttctcggcacccagaagaagtggggagcgggcaaagcagaaaacattcaatgcatgatgtaggattgctgcgttggcactaagctgttgtattaagcatgagaggtgtttgtttaacgttggcaaagggatttaacaagaaacaaaaagcttcgcgtccttgttttgaccgtcgacagaagtccaattttcttgcctttctttatccccatttctcctccctccccttcccccatcacatccactttcggtcactcgttgttggtatttggtggcagctcttggtcctattgctgtggatgttccactgaaaacacggggggtagcggggagtggtaaggaaagcaacttttttctaatttttgtattggtatccacaagcgtttgtattttttgaattgcaaacactgtgttttctggtctttgggggttagttgaactttctgtattaccttttggaaaacctgagttttaccacagtcttaagcagatttgaaataaattcttttgacactgccaacaacagaaagac

SEQ ID NO: 900 - DNA, 245 bp, Homo sapiens
taatcaacaaatagttatggaaaattcggtcacgtaattactctcatcgaaggactcattacaacaaacagggaagtaaaggaagagacacatcctctcatactccctgagactctgagaacagtggacgcagagggaagagatgatcattggaagcaatcagtttactcttccccaccacagtggttaaaaggcgtttgtatctgacactatgtgtgtgttttaaaataaacttttggaaacat

SEQ ID NO: 901 - DNA, 2636 bp, Homo sapiens
ccatagctatgatgtaaagacaatactgtccttcagagaactggtattaagataaacttaaggatcgtttctggtgtagaagtcttcaagtgtagacttaaggaaaaaatcccactgtccatgaaatgatggtaggaaaacagactttgctctgtacagaagtaagtaaaagtaggaatagtttccatggatatttttatttttattaacttttttcagtttctttttattcaaagaaacaaaattcaatctctgataatatttgaggtaaagttcctttccctatcttgactcactgagttattaggaaacagaaggcaaaaagattgtcaaaataaaaacaataattcaagtaacaatgcccggaatatacgtcctaactacaccccttcctatcagctggattctatccaagtgactctattgatgtatgtatgttcattcaaagaatgggaaaaggatatgacatatatttgccagtacttcatcttcaagatttacccttttcctgtgaagttcagagttactgaagatgcttcttcccttgggaagttgttgacccaagaacataggttatatttcccaaatctttaattattgagtgaaagagctatagatgaattgatatggaaagaccgtatcttcattttcgtgagtagaaggaaagataagaatgaggcagcagattttccctcctggaattacacataaaggacactaagcaattttcaaggtaaatgttgccttgttgttggtctttggcatgataagattctttatttaaatatgagagaatttttttttatcctttatattctctcaatatcagaactcctgaattctgaagattgccctcctcccattaataggattgtatggatgtaagatggaataaaatactagttcttcattttgagaaaactgtacattagtttaatgtttgttactgtatttcttttgagttgaggcacttacataacaatcttctttgcttttttggcagataaacccaacagaggtgaggcccagctagtaatcccttttagtgggaaaggatatgttctaggagaaacaagcaatttaccttcacctgggaaactgatcacttcacatgccattaataaaacccaagatcttttaaatcaaaaccattcagcaaatgctgtaagacctaattctaaaatcaaggtgaaatttgaacagaatggttcaagtaaaaattctcatctggtctcccctgctgttagtaacagtcaccaaaatgttctaagcaactactttcctagagtatcatttgccaaccaaaaggctttcagaggtgtgaatggatctccaaggataagtgtaacagttggcaacatccctaaaaactcagtctcttctagttctcagagaagggtttcatcttctaagatatccctaagaaattcttcaaaagtaacggaatcagcatctgtgatgccatcccaggatgtgagtgggtctgaagatacattcccaaataaacgacctaggctagaagataagactgtttttgacaatttttttatcaagaaagagcaaataaaaagcagtggtaatgatccaaagtatagtacaaccacagctcagaattccagcagttcatccagtcagagcaaaatggttaattgcccagtttgtcagaatgaagttctggagtctcagattaatgagcacttggactggtgccttgaaggtgacagcatcaaagtcaaaagcgaagaaagtctttgaaaaaggtttcaaagtctcaagtaccacctgtattatctcactaatgtgctatgtcagccagtcaggaagttctggttaatactaagatttgtaggttataatctagttcacataaccaatagaaagtgtcctattttatatatacgcatataagattgtaattttaagatgttttgtgtctcagggtgctacattcactcttgccttaggtatactgtaacccaggttctgcctgtcgtgtataagttttagatacttttgttctttcttgctcttaaggattttaaaaacctgttaatctttttatttgtatactttcctaaaaatattcatatggggaatcctgtcaggtgtttggttatattgactatttattaatagtattagaactcattccctgaactgatgtaaatcttcatagtgtcagacatactgaccaaaaccacaatctagactacaaagtatattgttttagagtactcaaattgtattatttattaatttttttgtttgcaaaatcttaacaggaactgtattttctatattttaaagaattttatttgtcccacttttactaaacagtggcagcagattttaagttaaagaatatggaatatagtaaaataagtaaatttcttttggaatatttttagtaacaaatagccactataattctgtaggccaaattttatattgagtttagctgttttctcaaaatttagcagagtggttaaaattctgtgctgataagtaactgatacatataacataaacataacaaagttgcctagttgatgtaacagtggaaagttatctggaaatagtattttgaactttaagccaagtttaaaacattataataaaaggaataccatttgtgc

SEQ ID NO: 902 - DNA, 1616 bp, Homo sapiens
aatctaacgttactcagttactaattcttttgagaactcctaagagaccaatttgtaagacttatttagtatttcatttaactttattgtggcttttacatagaaacatattcagttgtacttgttttaaattgtatacaagctgtacataaaattagccaaatgaatcatttcttatatcttattcatgaaagtttgcatacagatgtttgcatatatgcctttttgaatttttgctggttaacctttatcatttatctttgtaatgtgaacatgcttcagagtgtaccttttgccataacctattttaatttactttttctgaagtttggagtgataatttttagtggaagcaatttgtaatttaagttggtagttatattatatatagaaaagattttttagttaaacttctggacatgagcgtcctgtttaaatttcttgttaatatcgtgccaagcctcaaaaataggcttattccatggaacaagaattaaaaatgaataagctatcaatatataatttaagtacaagtttaggctgggcgtggtggctcacgcctgtaatcccagcactttgggaggccgaggtaggcagatcacgaggtcaagagatcaagaccagcctgaccaacgtggcgaaacctcgtctctactagaaatacaaaaattagctggatatggtggtatgtgcctgtaatcccagctacttgggaggctgaggcaggagactcgcttgaacctgggaggcagaggttgcagtgagccgagattgcgccactgcactccagcctgggtaacagagcaagactccatctcaaaaaaagaaagaaagaaaaaagaaagtacaagtttataaagtattatagtgaaaaattcgcattctggctgattttaagccatttaaaatttatataaaacaaccttccataaaaatttgacaggtgcccagatgttgctttctccatttattttttgtttttttttaatcacagtaggtctgatagagaattggagctaaattataatatttttgttggtaaagttgagttatatacttgtacatacaatggaaatgcttttagtagtgattatttagcaatttttgtttttgttatattaggcatgtttggaggctttcctattctagcatttaaatttaaattttattaaaattaaataatttaaatctagcatttaaatttaaataatttaagtctagcatttacttttaaataattataatgaagttttgaaatactaagttaatccagacctttagttgtcccatggtgttaataaagttgccaaagaagatgtattatgaacaattcagcaataagacaattgtcaacacagttgagaataacaatggtaatcgttagtaatatttagaattggaatttgcctactgaaatagttatagatgattacttgtgatgtgaaactgaattgagcatgacaaccagacatttccagttggttttgtaagttttgagaatctagatactgggttttattttttgaaagattagctctgtttgtaagggctgattccttgaaaatgtaattttccagaaaaacacctaaagaaaataaaacatggacatgcctagt

SEQ ID NO: 903 - DNA, 4439 bp, Homo sapiens
ggagtgacgggatgggggagggaggtgggccaccatgtttggacccggggggctgctcttccctcccccgccatagctaagatgcctgaatcaattacggagatacagagccttgaggtctttcagtggaaaggtggttcatgttcattctcatcagtgtgaaactgaggagtctgcaatttggaatatggagagagagactgatttgctgaatttccttctaaatgtcactcaaaaatttcttttccatgtcattcttgggaatgtcttccacaggatttgagaatagtttcatctcagcccccattagagagaagttggggtgaattctggaaaaatgtctctttttcctgtgccatttgccttctgctgcaacgaaaatatttcctgattcaagattctataaaaaggaaaccaagcataagactctgtcatcatacctgttacacgttcctacaggtgcacaatctaagagagctaattaacctcagagtctggagttaacagcttttcaccttacttctcctgtgatctaatattatcttagaaaaattaatatgcaatttccaaaagatattttggtaagacaacaacctcccagtgatatgccacctttcaattttccttttgtggcaatgattgcatctgaagaaaggatccctgagagtctctgtttcatcaggacattctgaaatttacccacagtgaggctgtggatggatcaggggacctgtataaaatgtttgagcctgttccattttcccgtggaacctgtttcactcaatgccaggcagtgcagcatttaggaaagcagtgcagtactcagtaaggcagtgcagtactcagtaacacaatacagtactcaggcagtgcagtactcagtaagacagtgcagtgctcagtaaggcagtgcaatactcagtaacagtgtagtactcagtaacagtgaagtactcagtaatacagtacagtattcagtaaggcagtgaagtactcagtaatacaatacagtactcagttaggcagtgcagtactcaggaatgcagcacagtactcaggcagtgcaatactcagtgcggtactcagtaacacagtgcagtactcagtaacagtgcagtactcagtaacagtgcagtactcagtaaggcagtgcagtactcagtaacacagtgcagtactcagtaatacagtacagtactcagtaaggcagtatggtactcagtaaagcaatgcaatgctcagtaacacagtgcagtgctcaataaggcagtgcagtgctcagtaaggcagtgaattgcttagtaacacagtgtagtgctcagtaggacagcatagtactcagtaacacagggcagctagtactcagtactataagtactgagtacttatataggcaatgtagtactcagtaaatcagtgcagtactcagtaatgcaagggcatttcaggctcctgctgggctgcttctttggcccagctgggactcctattgagacagctgcaaaacaggctgatttcaattaggcagcacttcccaaagtgcactgaggaaggtggccccaagagaagctctctaaacaaaggagtaccctctctggtcaagtacctttggtaaatacaccataccataatatctgcttggagaaccacaatgcacattagcatattagtctgagagagaacttatagtaaggaaactcacttgattttatctaacctcaaactttccaagtttaatggatcgtgaatttttttcatgtaactcctattcatatcccatagatctagtattgtacagcactgcattctctgaggaagtcccagtccaaactctgatttacatcactttagaaaccacactcacacttttgcagagtgttgagcttaataactacctgccacagattggtaaatttaatccagtggttgttctgtttgtgcttctgttctcatttatgtgtttagggatagtgaggttcctgccttcactaggatccacggatatgagaccatttttgtcatttcctgaagtcacactggcgtttccagaaggcatctggtgctttgctcagccttccatgctgtgcagcacttctgtcctcagtcaaggagatggccatgcttaagccagcaattggctggggtccaggaaacaaagcaaaagcacaatatgtgaatgtgctgattgtgttccctatggctttatctcgagcaaaatacactctacatattttaataataagtataattagcttgttcctggacttcattttcaatgatgaaccaaattcctgaattatttataattgtgtctaaagaaaattatgaactggtcacatggcacttggaatccttgagttaattccagtgaagcaaaacttgggaagagtcaggattggccacattgccaataacaaattcctacttcgacatatgtcttttcaaaaagcctcccagacacaagacatcttaaccgtcactagcccaagtgttttgtattactcagacaccatcatgaaataattctgtgaggtcatgatgtatttgaaaattctgcaagttaataactgccttgaattgtttgaacccgaaataagggttctttggtacctctagtagatagtgtgttcatttccctgctgcaaattttgaagtatttgggcaggtgagtcatgttttaaccacaagccataactcatctgttgtctttgcttggtcttagagtatcattcagaaagtccgctaagggccagcgtgcttcttctggctacacaaccttctcaggacaagcccactgtcttaagccactttgaccctgggagacacaggactgtgtatcctcaatcatactatacagcagtttttgtcaggggaacataaaaatatccaagagaggttagggcttagatttaaaagcatcaaaacaacaacaatggaaatttatgttggcgatagccaagaccacaagcaaaagcacatactggaaatgatgagttagaatctgatttgactgggatgttttatgagaatgtaagtgtgatattatactgtctgccttgctggaatgctggctttcaaatggtcacccatttttctttcactggcctgagttaggacatgctatcagtaatagtcccagttccatccaactttctgaaatttcatttttttttttgagatggagtctctctctgtcacccaagttggagtgcagtggccccgcaatctcggctcactgcaacctctacctcccaggttcaagctattctactgcctcagcctcccaagtagctggggttacaggcatttgccaccgggccctgatgatttttgtatttttagtagagacagggcttcaccatgttggctaggagggtctcaaactcctgacctcaggcgatccacccccacctcggcttcccaaagtgctgagattacaggtgtgagccaccgcacccggccaactttctgaaatttcaaaactgaattgatccttctccaaattagtatatactattggaaacttgtctttccctgcagtaaggctggtttccccaccccagaaacatgtaacggttggtaccatgctaagcccttgccatgctaagccctttacagtcatatcctataatccccatatcaaccttataaggaaggtgtttgtagatgatgcaactgagccttaagaggactaattccctttttctaaggcacagagctggtaaaatgtgaagtaatagtgaacctaacagtcagagacaggcagcatgctcttaactagtgctcttcctaaagttcctttaatgtccttttgagattttgagccatggaacttacttgttcacctggctaagaactcatggccactgtggaaatcttggttagggagtcaaagaaactgagcctggggcaaacgaggcttcccacactgccaggggagcctcactgtgaagtctaggctcagacaggcatcaacaaacctattcaccccaccatcatcctgatctaaccattccccagtcatcccaggaaaaccactcacagcctgacactgggctgactttcttgaagatcctcatccaattggtgtttttcagaagtgttccaatattatgaattctgtgttgtggagaaaagcaaccatgcatttactggtcaatgccttcttgtatatgtaattcaatacttttacttttaatatcctcaccttatctaatctttgaattttgtcatgtaatttattgcttcattaaggttactttttgttatacaaaataaaagctgatatccaaggcatggtgcatcttgatgattttttgtcctttgaagtatggatgatagaaaaatgtatcaggtttattcatctcatctttctgttacaggatgattaattgtacagttacatcacacgaaacatttataataaagtcatgctttag

SEQ ID NO: 904 - DNA, 1473 bp, Homo sapiens
tgaaacttcccaaatttaaacaaagcaagacaaatagatatccacacagcgtagatcatgacttctttagacatcatgaaaagaaaaagaggacccacgtggaagaatacgctcatttatgatcagggtagcatcatattcctctcccttttaacattatttcaggatagcagctgtctggatgctggccatgggcttgaaaaaaaccaggtgggcatttctgcccactgtaccgtttctcccatgcgtttcccagtcccctgtcatggcatgaaaaaaccgctattgttctgtgttgggacaattagatttttgtaggggggagaaaccacccaaaagcaaatggaaaaatatgctatgattaatgtcagttacgggaattaaacttcggaggcctttaggacaattatgaaggaatcattttccccttggtggcaatatgtactacagttgtcccttgatatccatgggggattaattccaggacgcctgtggatacagaaatccacgtgtactcaagtcttgttttcagtggatatgaaaagtcggccctccatatctgcaggttttacacttggcgaatgctgtatttttgattcatgttggattaaggatctggaacccctgatacagactgtatttattgaaaaaaaagtctgcctatgagtagactcacatgttaaaacccgtgttgttcaagggtcaaccataactgcaggcagaacatctgggcaggaagctcctgcaggaagacctgtaaactcaggtctgtggaacggcgatgatcttcttcccttgcttccagaattattgctgtgagatcaggtgcactggctacgaccttactctttgtgcagaacttatttctggtctggtttaagtgaacgttattctttctgtgcagtcctgtggttacatcaaaggttaaatttcatatagcatgtctgttatatcagacttctctgatggcctgtccagagcaaacattttaaaatattggtcctattctgtcttataacagtctgctctggtgatttttgtctcatcaattggattatgacactgtcagccactgttagtgttattctcaaattcagtcttccattcatctctccttcccttccctggcagacagacttctgcagccactgggactgttggggtgaggaaaggcaagaaccgatgtttcattctctccctcccttcttcctccctcttttttgttggttgtggggtgggctacatcttcttacccaaacaaccaggagcatttgttggcaagtttattgtgcccagtgccgatgtctggacaattaattccctaggtcagtggctttcacagtttgtgatggtgactccaggaaggaaactcaccatgaccctgtatatacatagaacaaaaatgcagcccactctgatattgtatttgttctattctagttcattaaaagtgaatgttggtcttcatccttt

SEQ ID NO: 905 - DNA, 112 bp, Homo sapiens
ggacagcctgcaggacacagcactgtgatttgaacccagagagtctgacttcagcccccagcgctcaactactattaattgaaagggcattgaagagacatgatgtcacaat

SEQ ID NO: 906 - DNA, 242 bp, Homo sapiens
agacacgtgcattcctgccttccgtgaaggagtgcccagttcaagaggagcctgatggagccctgcctgtcgaggctgtatgcctatggggttatggaaccttgtgggcttttctagagaaaactcaacagctgtttcccataaaatgtttaaaagatcaaattagccttaatgctggattgtctgtacaagattaactatccattgtggcttatctatgcttaaagatttcttgtttattt

SEQ ID NO: 907 - DNA, 2437 bp, Homo sapiens
actaagtgccttactgttgtttaagcatttttttaaggtgaacaaatgaacacaatgtatctacctttgaactgtttcatgctgctgtgttttcaaaagctgtggccatgttcctaaattagtaagatatatccagcttctcaaaaaatgtatatgattgctgttagccatgtctattgtttttcctctggattcttttcttataacttggaatacacaaaagtgtaaaacaagagatgtgcaccaatgaaaactatgctgggtcgaattaccttcagcacaatgttaatgtttttgttctcatttatgcctttgtccatttgcacacaacagaaattgtaatgagcttcactatttttgtttctttccttccttttttttcttttttcctttctttcctttttcttgtcttgtttcttgtttttttttcttgtagtttcttttcttaattgtcatttttgcaacaaaaagccaagaaagagctttagtttcttggcaagaataatgtgatattagtaagtaaaggtcttaaaagtctgacgactggaatagatataaagtcctgtttaaactacctaaccttggctgtgggccgataatgcatatgtccagttctcacttaaattatgcaatgatatttctctctgaggaaattatacggaatgtaacttataaaagctttactgaatataagttataagcattttattcattagaactccaaaatagatgttcaaagttcagtccttgccatttgactgagaccacatggtgtgccccttgagtgaggctaatctttaggtttttcctatagaaaacattcttcctccatcagtagccctttatttgatattcagaagtggaaagctttttcattctccagtagaacttttaaaaattgttacagatacctagctcttcacagatatcatgtactgtaaacagtcatgtgtcttaattttattttctctatttgagtgcataattatcctaataatcccaaagacactgacaactcaaggaacagcagtacagtactattagaagttaagtatgttgttgttatttcacatttcatttaattgtggataaatgttagacatctgttgaaataagctcatatggtggaaacgacaactatattatgaattattttcagaaatggatctttgaatagcagatcaggatttaaataataaaattatctatgaatcacttttatggtcatacatatatgatacaaatccagagttattggtgcagaaatggctacccgagagcttggtaaatttgccttggtttcttatgttaaatgtattgtgcttcccttctgtctctagaatgtggctcttcagaagacagacaatcgacatttaaatttttccaaacaatgaaaaactaaattaaaaacattgcttgatatttcatttaaaattgcaccttgcttaaggtttactgaataactgaaatgtcagcaatttaaaataaattcaattgtgtgataaaatatctcacctataatagaagaaaaggaaaatcatattatttggcaattttgcagcattgtggttgcctaacaggtatatccagcagatgagaaacagtatgaaaggattgtattaacatggtaagttttgccctaaggaaaacgatcttgcattctggattcttgcagcaaagtctcagatacttaatacgttttcttgttttatcatctgttctatgattcggcttcactttgtgtggttattgaattatgtaacagagatttggttttcccaaaatgttatcacatttgaaactatgattgctttgtgttcagtccttttggaacacgtagcttccagcttaagggtagagaaatatatacctaaaatcatcaatacatgaaagaaaaaggatggaaactatgtcctcagttttacttctaccaaaacatccctgtatgtgtgtgcatgtatgttggcgtgtgtgtgtgtgcatgcatattagtaaatgtgtgtttgcatgtgtgtgttggggagtgtatgtgatctgggtgtttgtttatctctgttattattcccctttagctttattttagtcaactctacattatgatgaatttcaaaatgaagctgtattaaaataattgtaatataacaattcaatctcacatgttactgcagatagttaacttttgctgcaatctattgtacatttgcaattttctgtgttagtaaacttagcagaatctggttatttatttttgtgtaggcttaatgttcactgaaagataagtcaattactgttagtaaaaaattaaggtactctcactgcagagatttaaggcctgggcctaatgtgctgtattatgaagccttgtgactgaaaaatatgtttacatatgttgtctatttttttaataaacttttatagctggtctatttgctcagta

SEQ ID NO: 908 - DNA, 708 bp, Homo sapiens
gcgtaggatttgttgcattatgctagagcaccagggtcagggtgcaaggaagaggcttaagtatgttcatttttatcagaatgcaaaagcgaaaattatgtcactttaagaaatagctactgtttgcaatgtcttattaaaaaacaacaaaaaaagacaaatggaacaaagaagctgtgaccccagcaggatgtctaatatgtgaggaaatgagatgtccacctaaaattcatatgtgacaaaattatctcgaccttacataggaggagaatacttgaagcagtatgctgctgtggttagaagcagattttatacttttaactggaaactttggggtttgcatttagatcatttagctgatggctaaatagcaaaatttatatttagaagcaaaaaaaaaaagcatagagatgtgttttataaataggtttatgtgtactggtttgcatgtacccacccaaaatgattatttttgtagaatctaagttaaacttactatttataatgcataggtaaccattaactatgtacatataaagtataaatatgtttatattctgtacatatggtttaggtcaccagatcctagtgtagttctgaaactaagactatagatattttgtttcttttgatttctctttatactaaagaatccagagttgctacaataaaataaggggaataataaacttgagagtgaataaccat

SEQ ID NO: 909 - DNA, 1273 bp, Homo sapiens
caccactcctctagaactcggtggtaatgactgggaggtctattcctgccgggaggaacctcagttgggtaaggtgtacatacctgtacagttttggtcatctgcggtaagttctatggtatttattggcatgtccaatttgcttgcacttttccacatcagaccttccacttaagggtaccaattcaatacaaaagagaaaagaagaacctctcagtgcttttccaacgaatgtaaagtgggtttaaaagttccctgcgtagatcgttttggatggctgacgttcttgacaagccagccatcagggcaagtgttttgaatcttagcaagtgttttgaatcttagcaactgaacatgacattgcacactgtgattatttttcagctatggtaggtcatattttgttttataccagagctgtactcttaattttaaggaatttcaatgaaccaaaagataactgtcaatttatttggatggatggatggagggatggaaggagggagggaaggatgtctgggatgtgaagaggcaaggcagaaatggatgatgaacatcaaaaactgtcagaggacaggtctgtgccaggtaccaggaaggacaagataagtccaagccccggctggcctgctctcacgtgtctgtgtaagatcatgcaagagaaatcacagtgccttctacagaattttcgtctttacctatgtgaagcgaggtgacgtgatacgtcactggcgccgtcttataatttagatgtaaaaatctttagaaacaaataaaactctctatatatgtgtatgtctgtgtacaaaaaaatgacagagctgatggccagtgtatacagagcgtggcccgcggtgtacaatacccatataaggtacattgtgcaggaggggaattgctggctgcttttacttcctgaccaagactgaaaaattatttactgaaatctgtaaacctttttatgaaacttttaagcaccaggctgtttacttacacaatttaggtctgccagaaaattctatctgtgatagatctgtaaagagggtcaggggttagagtttactatttttgaagtttacattgttacatatgaaatggaaacattattttgaaacgttgtcataacccaatggtgcattctgtaaccatggagtcttctgtttcctgggggaaaggggcattcatgacctgaactttttagcaaattattattctcagtttccattacctgtttggccaaacagattaataaaatatttgaaaaagaagcgtt

SEQ ID NO: 910 - DNA, 226 bp, Homo sapiens
gctgttcataaagattgaaagtattctttctggacattgaaaaagctccactgactatggaacagtaatagtttgaatcatagtgaacatcaatacttgttccctatatacgacacttgataattaagatgatcaagaaccagaagatctgtgaagaaatgaaataaaatggtatttagtaagaaatctctattttaagaaaaaaagtaaaacctgttataaacac

SEQ ID NO: 911 - DNA, 1755 bp, Homo sapiens
tgttaagccattcttgattggacctcatagcttattttagttaatcttttttttgtcttttagccttaccaccttttaaaaaatttgttattctccagaaacagtaaataggtgagtaggggtggtgcaagtgaattcgttttcatttagaagcccctctgtacagataatcaaaattcaaagttgaaagaatcaaaagcagccacagttatgtaggtctgatttgaatgtcataattgcagtgacaggacattgccaccaactctatcctactaccatcaatgttgtgtttattccgtcaataaaaaagacttgcttccaggaatttttatccatacactttctaactgtactatctgggcagttccaagccagtttctattagctagctggaccaaagaccacaaatctctttttttcctaaacgctgctgtaaggaatatctcacttttccccccggaaacaccctcactgaagtcttctatgaaaaggctgataatgggctgggcgcggtggctcacgcctgtaatcccagcactttgggaggccgaggcgggcagatcacgaggtcaggagatcgagaccatcctgacacggtgaaaccctgtctctactaaaaatacaaaaaattagctgggcgtggtggtgggcgcctgtagtcccagctactcgggaggctgaggcaggagaatggtgtgaacccaggaggcggagcttgcagtgagccgagatagtgcctctgcactccagcctgggtgacagagcgagactccgtctcaaaaaaaagggctgataatgataaacagtgagcactccggtcctttttcttaggttttccttttttccttcctctccaccccacaagttttgctttttaaccaaggtgtctctgcttgatgaaattcacatgctagtctaaatctttttttctcccttgtaacatttatgtgccccaaactggttagtatatgggtacagcattccctttccaattgggaagcggaaaaagagagtatgggatattttagaagggagcctttgaaccttattatatttccccatcattgatagtgacaatcttaaaagggttgttttcttaccttaagtacaaaagcatggaaaaatgcgcttttccttcccgcccacatcaccaccccgacttgaagacagtaggtgcttgaatggaaagtgagtaggcatctttaatcgccctgattaaaggaaagtgttagcctgagagggcctgactgaaaagtaaccaaaggcttaatatcaaacactaattagctttttagtgccttaaccctgacctggttaccagttttctgtagtttctacacccaagccactgaagtcatctgtggcccaagaggtaggacaaaaaaaaaaaaaaaaaaagctgatttcaatatttgatttgttgacatcccaaaatgaaagttttatgtttcccttagaaacatgttttgcttggttctatagtatgttacttaggatctatttaccatatatttgtatgagaaatcctcacccaagcattcaacctaaatctttgaaaagttgggtgctgtctttagtaacttttaaaatagtttaaatctcccattttaatagtgataaggaaacctgttaaaatcatggctattgatgttatagtatggaaagttgaactttatgaacccatacttttaaaaagcatttttaaaaatctaacactgactatagaaacaaattaaaatgtctacctttaagtat

SEQ ID NO: 912 - DNA, 203 bp, Homo sapiens
caaccaactaataaaatttaaagaccacactgcttatcgtgtctggggttcaccggaaataaatgattcactggaacaattctactgtcaaaacaaagggggtttacaacttgtcctaagtataacaagggatgtattttttgttgggaagtgaccatttctaggcttatacataatagcaataataaaggctttgaacctac

SEQ ID NO: 913 - DNA, 748 bp, Homo sapiens
catcagttaacagttttatggacgattcctcagatgaaaagcttcagaaaagcatagtgacagctgaatttttagggcacttttccttaagaaatagaacttgatttttatttgttacaggtttccaatggccccataggaataagcaataatgtagactgataaacccttattttagtactaaagagggagccttgctatttcagtgggtataatttaaactttttaaagaaaatctgtacttttataaagatgtattttgtataacttaaataataatgctaaagtatactagggtttttttttcttgagaatgttactgcaatcatgttgtagtttgcacagacttttatgcataattcactttaaaaatatagaatatatggtctaatagttttttaaagcttttggactaaagtattccacaaatcttacctctttaggtcactgatggtcactccgattctgagtgccacattggtagactcctaaaatacagttgacaacttagccaattgcaactccagtgttgataattaaaatgaaatggtaaagcagcagactgtaaggtctttagagattttttttttaaggttcaggccgtaggttcctcaaggaatctcttaagttttgcccaaagactggtacttcctttcagtagggcgctaatgtatacacattaatgataagttgataacattaaaaatgtagctgacttatcctattaaacctcctctgctatgttcac

SEQ ID NO: 914 - DNA, 2059 bp, Homo sapiens
agctcttcttcttccttcattggcctctccggatgttgaaacaaccacaggtcaagaaggaatgtgaatctgttgttttataagagtttaggacaaggacgtggaacagtggacactggttttccccaaagctggcagttttgtggaggggtagcttgtttcggtggtggatctctgtttatttttgcacatctgttataatttaatattcaaatctggaattaagaaaacatattttctagtatcctctaagggccaaagtcctacaatcggaatggattcatgccacgttgaagataaaattatcctctctctgaaatacggtaaagatttaaataggtcctgagactgttgatagccccagacatacccacagcattatatgtaacatctctcctgatcagtgccattcccacggtttcaaagaaaacagctacaaggaatgcttacctgagtgtctgcagcaccctccacttctctcctaggcaatgagacccagtggctagaaattcaccatgtctattctcaagatccatgccagggagctctttgactctcgtgggaatcccactgttgaggttgatctcttcacctcagaaggtctcttcagagctgctgtgcccagtggtgcttcaactggtatctatgaggtcctagagctccaggacaatgataagactcgctatatggggaagggtgtctcaaagcctgttgagcccatcaataaaactattgcacctgtcctggttagcaagaaactgaacgtcacagaacaagagaagattgacaaacttatgatagagatggatggaacagaaaataaatctaaatttggtgcaaatgccattctgggagtgtccctcgctgcctgcaaagctagtgctgttgagaagggggttcccctgtaccaccacatcgccgacttgtctggcaactccaaagtcatcttgccagtcccggtgttcaatgtcatcaatggcagttctcatgctgtcaccaagctggccatgcaggagttcatggtcctcccagtcggtgcagcaaacttcagggaagccatgcccattggagcggaggtttaccacagcctgaagaatgtcatcaaggagaaatatgggaaagatgccaccggtgtgggggatggaggcgcgtttgctcccaacatcctggagaataaagaaggcctggagctgctgaagactgcgattgggaaagctggctacactgataaggtgatcgtcagcatggacgtagaggcctccgagttcttcaggtctggaaagtatgacctggaattcaagtttctcgacgaccccaccaggtacatctcacctgactgtctggctgacctgtacaagtccttcatcaaaaactacccagtggtgtctactgaagatccctttgaccaggatgactggggagcttggcagaagttcacggccagtgcaggaatccaggtagtggaggatgatctcagagtgaccaacccaaagaggacagcctcggccgtgaatgagaagaagtgcaactgcctcctgctcaaagtgaaccagattcgctctgtgactgagtcccttcaggcgtgcaagctggcccaggccaatggttggtgtgtcatggtgcctcatcattctggggagactgaaaataccttcatcactgacctggtggtggggctgtgacctgggcagctcaagactggtgccccttgctgatctgagcgcttggccaagtacaaccagctcctcagaattgaagaggagctgggcagcaaggctaagtttgccggcaggaacttcagaaaccccccagccaagtaagctgtgggcaggcaagcccttcagtcacctggtggctaattagacccctccccttgtgtcaactccggcagctcaagacccccgagcaacatttgtaggggccgctgctagttagctacccttgcccaccgccgtggagttcgcacctcttccttagaacttctacagaagcaggttgcagtgagccgagattgcgccactgcacaccagtctggagacagagtgagagtccgtcccag

SEQ ID NO: 915 - DNA, 1535 bp, Homo sapiens
cctacctacacagctgctacaaaaaccaaaatacagaatggcttctgtgatactggccttgctgaaacgcatctcactgtcattctattgtttatattgttaaaatgagcttgtgcaccattaggtcctgctgggtgttctcagtccttgccatgaagtatggtggtgtctagcactgaatggggaaactgggggcagcaacacttatagccagttaaagccactctgccctctctcctactttggctgactcttcaagaatgccattcaacaagtatttatggagtacctactataatacagtagctaacatgtattgagcacagattttttttggtaaaactgtgaagagctaggatatatacttggtgaaacaaaccagtatgttccctgttctcttgagcttcgactcttctgtgcgctactgctgcgcactgctttttctacaggcattacatcaactcctaaggggtcctctgggattagttatgcagatattaaatcacccgaagacactaacttacagaagacacaactccttccccagtgatcactgtcataaccagtgctctaccgtatcccatcactgaggactgatgttgactgacatcattttctttatcgtaataaacatgtggctctattagctgcaagctttaccaagtaattggcatgacatctgagcacagaaattaaggcaaaaaaccaaagcaaaacaaatacatggtgctgaaattaacttgatgccaagcccaaggcagctgatttctgtgtatttgaacttagggcaaatcagagtctacacagacgcctacagaaagtttcaggaagaggcaagatgcattcaatttgaaagatatttatgggcaacaaagtaaggtcaggattagacttcaggcattcataaggcaggcactatcagaaagtgtacgccaactaagggacccacaaagcaggcagaggtaatgcagaaatctgttttgttcccatgaaatcaccaatcaaggcctccgttcttctaaagattagtccatcatcattagcaactgagatcaaagcactcttccactttacgtgattaaaatcaaacctgtatcagcaagttaaatggttccatttctgtgatttttctattatttgaggggagttggcagaagttccatgtatatgggatctttacaggtcagatcttgttacaggaaatttcaaaggtttgggagtggggagggaaaaaagctcagtcagtgaggatcattttatcacattagactggggcagaactctgccaggatttaggaatattttcagaacagattttagatattatttctatccatatattgaaaagaataccattgtcaatcttatttttttaaaagtactcagtgtagaaatcgctagcccttaattcttttccagcttttcatattaatgtatgcagagtctcaccaagctcaaagacactggttgggggtggagggtgccacagggaaagctgtagaaggcaagaagactcgagaatcccccagagttat

SEQ ID NO: 916 - DNA, 1321 bp, Homo sapiens
tgctgagcttctgtaatcactcatcccatcagaatgcaataaaagcggaagtcacagtttgtttcctggaaactttgacaagctttattaagttgagagagagagaggggaaaaaaaaaagcctttcgtagttcagtaattgccagcaatataacacggctaaaatgaagtttttacagtatatgacatagtgcgcttcataaataggtttatttctgagtttttagcaaaatgtaatgaaatatcaggttgatttctttgattaaacagaacaaattacttgagtaataggaaattaggaggatctagggacagaaggaaagtgaaaaatgtgaaaatacaaaatacccaagatttaagaccggggggaaaaaaccacaaattggtaaataaaggtttgctatttgtaaaaaatttcatttatctctaatatgcttatgtgattgcccctaggggagtatatttgggattctaatgttttattttcatgcttatccaaagattactattgtatcttcaaatgaatttaatattgtgagatggaactgccggggattaaaaagactacccaaaagatttttggcacttacaatttttaaaatagtttatgtcatctcttcattatttagggctggatggtcaactcagtcagtgattttttgatgcttctcttatcctccagaatagagacctaaggacacgtggaagtcagtttaattgccagagagaaggatgcaatcactaggtaaaatgaggtttttaggattatttattgattccaggttcccatgctttttgttagagcttattagtacaggttctcaagagatgaccacataaaagtgctctgtttataaataagcaggtttctgtagtactgactggttcatcacaaggcaagtcagaaaccagtatccttctagctctccagtcaggacttccttatgcctctagttttatgaccggttaaggagaagccagagttagagtaggagaggactaattctcagcagcagtggaggtgagttctttcttttgcggaagctttacatatgttttgtgtagtaggaataactagatattttagctagtgtgcggtgtgtgttcacccctgggattggacagtgtatcctaacaagtcccatgtctggttctgtgtctaaaggcctgctccatgacacaggatgctacatgcactcctgctagcacatcttgatctgttgaatgttcattctttctttttgctcatactgctgtaggctataattcccccctgtttttccatcttgttgacagcttgtagagaataaagcaggaattc

SEQ ID NO: 917 - DNA, 3016 bp, Homo sapiens
ctttttttttttttttgccttttttattcttgatgatcctcaaggaaatacaacctagggtgccttaaaaataacaacaacaaaaaacctgtgtgcatctggctgacacttacctgcttctggttttcgaagactatttagtggaaccttgtagaggagcagggtcttcctgcagtgcctggaaaacaggcgctgtttttttgggaccttgcgtgaagagcagtgagcagggttcctgtggtttccctggtccctctgagatggggacagactgaagacagaggtcgtttgatttcaaagcaagtcaacctgcttttttctgtttttacagtggaatctaggaggccacttagtcgtctttttttcctcttagaagaaaagcctgaaactgagttgaatagagaagtgtgaccctgtgacaaaatgatactgtgagaaatggggcattttaatctaagtggttataacagtggattctgacggggaaggtgtagctctgttctcttcggaagacctcgttttctaaaggctggactaaatggctgcagaactccctttggcaaaaggcatgcgctcactgcttgcttgtcagaaacactgaagccatttgccccagtgtggtcaagcagccatgctttctgggcattttcgtcctcccataatttcatatttccgtacccctgaggaaacaaaaaggaaatgaggagagaaagttactgttaagggtggttaacattttttttgttttgttttgttttggtttttttttttttgagacagagtctggctctgtcgcccaggctggagtgcaggggcgcaatctcggctcatagcaagctccgcctcctgggttcatgccattctcctgcctcagcctccagagtagctgggactacaggtgcccgccaccacacccggctaattttttgtgtttttacaaaatacaaaaaagtagagacaggatttcactgtgttagccaggatggtcttgatctcccgacctcgtgatctgcccacctcagcctcccaaaatgctgggattacaggcgtgagccaccgagcctggccggttaacatcttttaattgtttccaggattgagcaggttctcagctgggctctgatatcccgtgcggagttggacaagtgggcagcataaagtcactcatttcttaccattttattcccctcaattctcaatatattcagtaatgaagaatggtgccaccactcaagcaacaagcctcaaactcaaccatgtcatctttttcttggatgattgcagttatttcaaaaatttgcatgcaaaatatacactcatcctacttcaagatggtggtggcaatagtcaggagaaggtaacattggagtcctggtttgattcgaaggatgaagacgaagaagcaagggaggaacaaatgaagaaccatctttgttcatgaataggaatattcaagattataaaggtatcaggtctcctaaaattgatctatggatttaataccattttcaatggaaattccaacagattttattgaatgaaacaagcaggtgtttatatggagtagcaaaggacttaaaattaccaaatgcttctaaatatgaaggagaggttggggacacgcaccctatgtgataccaagttttattgtcaagacagtgtcatggtgcagaggtaggcattctgagcaggggaacaaaataagggcctagaaactcacccgtgcatatgttgacctttgcaaaatgacctggtgacatggcaagtcagtggggacaggaaggaccactccctaagtaatcccagaacaatggctattcatgtgggaaaaaaagaaattttactttctctcaccttacctggtgataagttccaaatatgttaagggctttaatacaaaaagcaaaaattgtcagtgtttggatgaaaaaagccttagggcaggaaagaatctcttgagacataaagtagtaatcataaaggacaagatggttaagtcaattctgttaaaactcaaggcttatattaagcaaacacttgaagtgagaagatgatccacaacttgagaagacatttataatacaaataactgatgaaggattcataatcacaaatatagagaattcctatttaaaaaaatagaaaaatagtgaagactacacaagaggaaatagggcttttaaataaatagatgttctgtagcattggtcagggaaatatgaattaggaccacaatgagattccattttatatccataagatttgcaaaggttgggtctgacagtaccagttgttagatctgtagggacttgtacaacattgtggatgtgtaaacaggcaccactgctttaaaaaacaattatcccttacagacttgaacatttgcagacgttatgatcttgcttccaactcccacctgtatgtccagcaaactcttgcatgtggccactaggaggaatgtgtaagaatgttcatagttacatatttataatagttaataactggaaaaagtgaaatgtatgtctgtctacaggaaaataggtgaataattagatatatatattcattctacgggatattattcagtagtggaaatgagtgaactacagctatacctcacaataagaatgaatctcagaaaatattaaggaaaaaagcaagtttgaagagaccacatggggcgtactatttttattgagcccaaaaacaagcaaaaccaaagaatatgtagtctaagcatacgtatacaataaaactatgctattaaaaaaaaagaaggtaactgataaaccaaaattgagcatagtaattacccacagaaggaggaagtggaagggacaggagcacataggtagatgccaagttatgcagctgttctggttcctcctggtaggcttacaagtgtttactatatgctattaatacattatactttataactaatagataacagttttttacatattaaatatgttctacttaaatatattataaaaaataaaggcaaagtggaatg

SEQ ID NO: 918 - DNA, 1341 bp, Homo sapiens
actcagacccaatcacctctaaaaaccaaaaccctacccctctctctccctctctcaatttctctgctctcttggaaacattttgctgattttgtgaattgccagcgttgtgtgttttctgggagcatcgaagctctgtttcggaagagctgtttcctccccccaccttttgtatttactttgagactaaagactgaagaataatctaaattcatactcagacaaaaaaaggaattctggaaagaaaaccattctggacactgtcataacacacatagatagattttcttctgagactcccggagtcttctcgagctacgagaccttcacagagacacgtggcagccacactcacccagcctctttatttcaccatcctggaaggaaactgtctgtctaatggtcacagagcactgtagcacttaacagattgccatggacaccagttgcgaagggaaatagtgccttactatatgtgggttgagctatgcagaagatacgtgcatgaaaaaacatctttattttctttatgtcgacctttcttttcttagattgattttgtgaggttttttttttttcctttagtcttttctttagtgggggagggtaagaaaagcagtttgcacttaaaaagaaaaaaaaaaaacgggtggtgtgtctcaggacaaaaggaggctcttctcattcagctaaattcacatttgccccccccccccgcccccgcccccatatgctcctgctattattttggtaatgctctgatgcaacattgcaactttatgaaatctttgtatgaaaacaaaaagactgcaaaaaatacactttcaaaagaaaccattcattgcatgtttattatgcaagtttaaatgaacaaagaaaaccttcagaaacaagttgatcaacgtgagagaaatttcatgataattattcatagtaataaagtgtcgtgggcttaattgtatatctggagccagtgtcatccaccaacaatgtgatacaatatgaacttgacagtagttttgggttttgctcattctttcagccacctgtgatcagttttgttgattaaggacttcttgtcaggccattttttaatatcaaagctgaagcaatatccattcagggatttcatcagttgcatcacaaaacacggatgataatatacatcactccattttttccattttgagtccttttaaatgtaatgctaacctttacaattaaaaagtcagattcagaatggaaacaaggtcattttgcaaacattggagctcttttattacaagtctgcttgttaattttagaactgtaaaaccgctctgattaaactatttaactaac

SEQ ID NO: 919 - DNA, 191 bp, Homo sapiens
aatgaggttgtatcaatagcagtgacaaaacgcacacatcaacccacagaccttaggaggaggaaggcgagggcggggtgacttctggtgatgataaaaatggttttatcacccagatgtgaaagaagctgcctgtttactgatccattgaataaacccattttaatagaaaaagtcaataccaattcagc

SEQ ID NO: 920 - DNA, 1029 bp, Homo sapiens
acaatgaaaagcagaatgaaaatgagtcattgcaacgactttcacaaaattcagctgacctgagagtgggagggaaactaccgtcattctgctcatgtttcttcttgacctcttgcataatctttttgttttctagacagttcactaattgttgaattttactgtatattcatataaaaatgcaaacgtactagaccagtggagaatttgacaccttttctttttgtaaaagtttatggtattataccgatagaccaaaacagcatgtgtaagaggcagtatctgcactaattctcaacatgctaaacattaactacaattcactgttgtgagaatattcctcgtcacagcaaaaacactttcctttctactgacaaccagtcctccacatcacagcatttagacatatgggtaaaatgttatttctagtgaattgtttgtatcagtttcatgtctaagtataaattttctattttaaaatttaagaaccgtttataatcagtgctttcccaactcttgggttgctctccataactatgtatttgtgaaagaaaatggtcattttttttactgaagtcatataatgacttgggtcagctcgtaatgcattgtgatggttttgtatgagctgggtgtttttttccattacttttaatgatcttcgttgcaagttatagttgtggataaaggggagaatttattgctcttgcaaaccaattatggaaagcaacttaagaaaaccaatgttctaaatcataattgtttgtatttatgtaaagtatggtctcttactttttagtttgtagtttaagtgcaaagaaacagtagtggttttttttctattgttttgtagtcttcctgtccccttcagtccctccagtgtgtatattaccattctccaatgaaataatagggcatttaacaaagatcgctatgtgcaatactgtatttagtgtttctatttcaatttttctaggatgttaatttatatgaaaataaaatgaataataaaagaataaagatacttgc

SEQ ID NO: 921 - DNA, 3488 bp, Homo sapiens
tagaaaggttttgtggtagcaaatgcatgatttctctgtgaccaaaattaagcatgaaaaaaatgtttccattgccatatttgattcactagtggaagatagtgttctgcttataattaaactgaatgtagagtatctctgtatgttaattgcaattactggttggggggtgcattttaaaagatgaaacatgcagcttccctacattacacacactcaggttgagtcattctaactataaaagtgcaatgactaagatccttcacttctctgaaagtaaggccctagatgcctcagggaagacagtaatcatgccttttctttaaaagacacaataggactcgcaacagcattgactcaacacctaggactaaaaatcacaacttaactagcatgttaactgcacttttcattacgtgaatggaacttacctaaccacagggctcagacttactagataaaaccagaaatggaaataaggaattcaggggagttccagagacttacaaaatgaactcattttattttcccaccttcaaatataagtattatcatctatctgtttatcgtctatctatctatcatctatctatctatctatcatctatctatctatctatctatctatctatctatctatctatctctatttatttatgtatttagagatcaggtctcactctgttgaccaggctggagtgcagtggtgagatctgggttcactgcaacctctgcctcctgggctcaagcaatcctcccacttcagcctcccaaatagctggggctaccatggtatttttcagtagagaccgggtcttgccatgctgcccaggccagtctcaaactcctggcctcatgtgatctgcccacctcagcctcccaaagtacagggattagagttgtgagccaccgctgccagcccagagttaccctctaaagataagaaaaaggctattaatatcatactaagtgaaggacaggaaagggttttattcataaattaaatgtctacatgtgccagaatggaaaggaaacaaggggagacaacttttatagaaatacaaagccattactttattcaatttcagaccctcagaagcaatttactaatttattcttcgactacatactgcagcagaaccagcaatacacttgatttttaaaagcacatttagtgaaatgttttctttggttcatccttctttaacaggctgctgagtcactcagaaatccttcaaacatgattaattatgaagatgaaacactagagtcatataagaaataaaaattgggcaataaaataaaatgattcagtgtttcttttctatattgtcaatgaaaaccttgagttctaataatccatgttcagtttgtagggaaagaaaaaataatttttccttctacccactttaggttccttggctggggcccctataacaaaagacagattgacaagagaaaaacaaacataaatttattagcgggtatatgtaatatatatgtgggaaatacaggggaatgagcaaatctcaaagagctggcgtcttagaactccctggcttatatagcatcgacaaagaacagtaaatttttagagaaacaacaaaacaaagaaaaagagctttgagtctgtaggggcagcaatttgggggaagcaaatatatgggagtttgccttgtagattcctctggtgctggtctccaggctgacaaggattcaaagttgtctctgaaactcctctttgtcatactgcacatataaaacgtcttttgtttccaacaagaggattttctttttcattctagaattatctccttgataacttgatcagatataggacatgacactgaatagagtccaacagtacaaaaaaaattcagtatgttctagctacttcacacatgtgtacgcgacagttatttttacagtaaggtattttcgagaaaaatgcattacgtgttttggaaaatagagtaatttaaaaaatatatttgaaatgaaaatctccaacacattagaagatgatgatgttagatgcccatcgtgtgccacaagtggttttttcattatgtaaagcacccgttgaattaaaagaatttgtttttgttcaacctcttcctgaggcccaagagcatatgggcaattcggatttcctgctggaccacaaggttctgttgatattacatagaacgggtattccagacacttcttatgatgaaagtccaaaagtggcatccaatttaaggccccatctttcgttgccattcttcattcctacaaaggacgaacttggattacatcaactttggacccattggttttgtcgctgtcgtcaactgacagtgattcatcactggtgatgataaaaatgatggaagaagagttgaaagtcacttttttctttggcctgtccccatctttctgtgacatcacaatgggtctgatctgcatttcacttccagctgctggtaggtctttagcaggcctctggcacctcagcagtcggaggcacagaagctgcaaaagggatcttcgaaactgggcagagaaaaaataaagtggaatattaagtaaaagttgggcactaatctggattaacattcgaggaaatcagttgagctgaatttaagttgttttttgtttgttagcaggtgtggatgtggggttatgtggtcatgctcagatctacctaaatcaccccagagctttatgtcttttattcattctaattcttattaaccggaatatgtaggaccatttcaataccttgtaatcctccaagcttcaatctgcacacactttctatgagggcaggtacaactattaagagattttgaacattaagttagtccacaaatattcagtgggcatctactaggtgacagccactgtgctataattagagactttttactataagcatcaaaaacagataaggctcttcctggcagagtttacagcctggtgtacttgctaatgtctctttaattaggtgaagaattttttttttctatcgaaattactaatcagttggggaaaaaaatactatagcagacagcactaatgtcatcaacaaacattgttcttctccgtgtcctgggtacaacatcgaataatatttcttggcctcctttccgcttctcctctctgctgttcctctctacaagaacctgggaggccaacgcctaaagatcataatatcacacaatggaaggaacctagattcctaaatgactgcataggacagatcccatctcctccacccaatacattattagactgaactgtgacctgaaatgagcaataaactctgtattaattcactgaaatgttggggttgcttgttatagtagtcggtccatcatgaccagtaaaacataaatcaaaagttaatgtaattgttatcccattatttagagcgaaataaatgttgaatatatggactttctcagattaggaaataccaattaaaaatataataaatagct

SEQ ID NO: 922 - DNA, 440 bp, Homo sapiens
ggagaaaaaatcagaaatggctgctgcacataaaatggcaacgtttggatgatacctgctctttatttcaggatgagagggagaaaccaccagacactatcagtcatctctggtgtcaggccatcctattgatgggaaagattgcttagggagttctggtgaccttaactctgaataccaagcaagcagcaagcagccagaagtttaggcggtgtttcttatttactgtcagcaaactgacacataagaaaacaaatgaaatcaacagcattagtaggtctaaaataatatggttatcaatgtttagctttccacttcctcccattggtcaccttactccacagcaagaatgactgtcagaacatgtgcagtaaaaggcactttcaagtcatgctatgtgttgtacaaaaagaattattaaaaagaaaaatgtaccagtc

SEQ ID NO: 923 - DNA, 272 bp, Homo sapiens
aaagcttcctccttgtaagaaacccctgtccccagtcagagataacatccaactaactccagaagcggaagaggatatatttaacaaacctgaatgtggccgtgttcaaagagcaatattccagtaaatgcagactgctgcaaagcttttgcctgcaagagaatctgatcaatttgaagtccctgtttgggaatgaggcacttatcagcatgaagaattttttctcattctgtgccattttaaaaatagaatacattttgtatattaacttt

SEQ ID NO: 924 - DNA, 305 bp, Homo sapiens
cctggatggaacagagtgaaataaatgatttacaaagagatatttacattcatctggtttagacttaatatgccacaacgcaccacgaccttcccagggtgacaccgcctcagcctgcagtggggctggtcctcatcaacgcgggcgctgtccccgcacgcagtcgggctggagctggagtctgactctagctgagcagagctcctggtgtatgttttcagaaatggcttgaagttatgtgtttaaatctgctcattcgtatgctaggttatacatatgattttcaataaatgaactttttaaag

SEQ ID NO: 925 - DNA, 2104 bp, Homo sapiens
ttttatatatatataaataatatatatatatatacatatatataaatagatctctatatagttgtggtacggtctaaaagcagtcttgtttcctggaaataaaaagttgggatattaacttgtttttgcactttagaatagcatgagaatctcactaatttagcattctgataaaagaaactttagagcaagtcagaatagagaggtgtttttcctttgaggggataggggaagtaagccaataagaaccttttaaacaaatcgtcctgtcacaaaatgctttcatatggcttaattttgtcaacactgcattgtcttttgagctcttttttcccccccaacaaagtttttttgttttttgtttttttttttaagtagaaattccctccagttttattagcctctttatatgtctcaaattgcatgaattttttctggctgttggaaacctgaatgcttttagacccaaatggaaaatttctgaaatgctggattatctatttttaaacaagcagttgacttaaaactttctgtggcaacttctggttttctgacagttcccagtgagagaaatgctgaaagtacactgggatcactgggacactgtcttatgaaggtttgcttgggatgaaaaaggatattgcagcttcagcagtgttgaactgtgtgtttaaaaatgtgaattactgttattgtatactgtaattgattacatgggctgggggggtgtcaaagaacttgacaggttgtgttgatgctcttagttgagtcttgaaaagtaaatattaacgctacagaaatgcatgagtttcaatatattttttgtctttgtttgcattgtataactttaacgagtgagtttaaaattatttaatttccttagaaaaataacaccatttggaaaaaaaaactggtgttatgaagaacgtaaatgcactgtttttatttttattttatataatttaaattgactttcccactgtctttaagttgaaactgttaagctgaataaaaacttaagctgcaaattgataacttcgctacataacaaggaaaatataaatgtttacaaacagcttaaagatttgcatgtgcagtgtgcatttataacaaacttctaattgcacaaaacccatgccagctcagagtttaggtgtacacatttacccagttgagcgttcttagaataactactgcacaagttgacaataggtcgttctctctttttttttgtttgctccctttttctttttctccccttcctccttaccctccctcccttactctccccccccaccaccaccctccacccccaactcatgaaaagattctatggactgaaaaagccccaggctgaaaggactggactgccttgattgacatggggaagggggttagtagactatgtggattgcggcagcagaggctgcagcctaacgtgtggttttaatgaccagcacgcaaggcaaaagcattttgcacagtgtttgttttcctgtcttgcacttacaaataaggtctatgggagtagcatggaaaacgtttgctgtttttcccttttttttttaattgcttttgtttaaaatttgatcgccttaactactgtaaacatagcctatttttgtgcttaagatactgaatggaaaactccattgtgtgttgctggactgttttggaaatatttggttaaatgtgtgttaatttggctgtaatggcatttaaagcaaacaaacaaacaaaaaaagctgtgaaaatggccttggagcattatctttagttacttgaagagtttctagtttttttaaaatacagtttatgttaaaataatttttattaatttagagaagacaatcaatgtctgtgagaaaacggactttcttttggattttctttttgtggtcattgtgagtgattgctttttccttttcttagtttcacattcttcctttgttctaaaacttagactgacatctagctttgacaatcatagtatgttttattttcctgagggggaataacttataatgctgtttagttttgtactattggtgtgttggtgaatttttaaactgtgtgctaactgcaataaattatatgaactgag

SEQ ID NO: 926 - DNA, 20 bp, Homo sapiens
ccacggcattcgaacaaaat

SEQ ID NO: 927 - DNA, 433 bp, Homo sapiens
tccaagtgtctacctggtagcttctttcctcttcgtcctgatgctgctcttcttcactattcttgttttgagctactttcggtacatgaggatttatagacgatatatttatgaaccacttcacaaacctcaaagaaaacgtaagaagaattaggaaaactgaaagtttgtttattacagatatatgcatatagagaaacagtgtattacatagtgatattgagagtgtgtgtttgaccaagaaatactaaatataagctcgtagtaggcatcaccaaattcaagatctgaaaaatattcttgaactatctccaaaatagaaatgttttcatatatattgttattaaattaatcctttgtttgccttcattttaaagatactctatgtactctcacatggcatgaaaaaataaactaaatttgactattacaa

SEQ ID NO: 928 - DNA, 3241 bp, Homo sapiens
atgtctccaaagtcacacattcagaactgtctctggcagtcgaatatcactagagaaaagtaaacagagaagcatcctttagatattttgtatgcaaagatggctctcccccaaatcccagtttttcagctcaggattatatttgtaatcaaaaaaaaaaaatcacttggcgcaggagggagaactttgtaagaagctgccctctgttttttttatccactcgtaaatctggatttatttcttctgttttatacaagctctgttaagttatgtttacagtatcttgtatcgctgtttacaaatcttgcatggactcctgccacagtgaaagaagaaaatcttcatgtcttcaaaaattaggcaggtaatctttgtatacttctgacaattgccagatctatggcataaataggcacacaaaaaggtacttaaacagttatagtcaccatcacctgcttcagaatggtcttttagatttgtgtttgttttgttaaagttgttggcaccaggatgcagagaatcagactggcctgaggtgaaggagcacacagccctgagggcttggaaccctgggtccagttcctcttcacacccccttccactctgagtagcacatctccccaggtgcccatggaacacctgctttcatcccaaatatccgtccacctaggcggggtggtatgttcttacgtctctctgactttgatgccactcattctatagtttagctggttttcgttcaagatattcttggtagtaactgacaagtatgttgcacatgtattgggggaggcgcttcatttttattttaatacacatgtatttcctccttgcacaggattttgatggtgtgggaatatcctaagtggtagccttccaagtagcagtgagttgacattcagctgcttttaactattcaggctaccttttatactaaaccttgaaaactagaatctaatgtctaccccaaaaaagtagttctttgatattttatactttttatgtaccatgtcagaaagagtatgttggcgtttgtcatgggactcatttcacataatagaatgcctagtctcattgaccaatcgttaaaaaatcatatttgtgtgtcttaagattcatatttatatgttctctcaaatgtatgtctcttacgtaacatactctaagaatgaaactgtcaccacaggtaaatccttgttagcaaggaatctgtctgctccagtctactcctagtttgatccttggatgtaagaaccaagtcattacatgtcaaattcaatttttctgccttaagaatgaatgtccttcataaaatattggatgcagtgtaacactatccaaggcagtgacttcagctttatatacatataaaatatagttagttttaaaattattgacatttatttaaacttttagattggattgtttgctattgctctgtgtgaggatacataatctttcagtaaactgtatttttaacttttccataagctgattttggttcattttatcaacgtaagcacaccctgttcatagggaaaataaaccttgggttataagcattagcctgaggacaatgaagccacttaacctaatttatgctttcgactgttctgtttccagagaggaaagcctttacaaattactctcagttctttaggggcagaaggcttgtttcaagaggtttgacagaagaaaggaatatatgaacttaatgagatgtcgacttggttcaggtctaaaaatgagggcaaaacactaaggctctagcagtgacttgttcactaaaaagagagagtcctgtccccagacggttagtacaaagccttggatacagtttgcttgtaatatttttaataatgtgaggagtacagtgttttctaattcattcaagtatatatgatttaaacctgggctactgacacacacacagtagccattagttagactcttcttagtgaatatcaggaacatcccatctgtgcttaaccagaatccagcaagtcagcacacaagtgattttattgttattttgttgtatttacttgcatttgttgtatttactttcatctgcagcatttggagtttaaaaataatgtaaagggttctagtagaaatagtgtcctaaggccaattacctaccatactaacaatcagcagataaaattctggacgtgagattccttataatctaattatacctgaggttgagcaagaaatgtcttcctttagaaaatctcattcaagtcaggttcttctctacagttcaaaattgagaatggatttaattaactagcatttagccagctttttcttgcccttggagaaaaagaatcattctcaacctgataatctgttaagaaaaatcccatatgaacaatctggtcattaacatacatatgatacggagtctctttgttgtcaccaagtgaacatacttctcatggtgggttggacagtaatacatgttagagggtcagaagcttctggtttctgctgtttgctttaaatacccttggggtttttttttaaacccttacaaggggagcatcagctttggaaagtgtgactctgtaggagtgtagaaggcagtggtgtatgatcttagcctcgtcctgatgcctgaatccagccagctgttgctctgacccacagcaatagagcaagttacccatcaccagcatttgtacagagcagggaattctggttttagtccattggtagcattgtgtgtatgaggagattcaacaccacagacagctgcaggactcgatatccatggcttctttccatcacaaaacgggtagaaacacattcactgcttcagggttctaatctgtgtgtctccttatgactccatttctgtaagctactctgtaactttgatatatgctgtattttctttctttaaaagatttagatgttttttcagcaagctagccatacaaccattgtatctctttctcttcagtatggtttagagcccagatcagttagtaggctttcgttgtcttctctttcaatacatgtacatctttactgtttgaaaagtgttacagctgtcaaagaatcttcatggacctgaagataatttcttgtgaagttgaatgcaagtgtactgtcattcatagtgtttatatcaaaataccaggaatcttcacttttgctaccttgatatagcattgggctatcatgttacaacattgaaatacattgatttattaaaaaatacttttataag

SEQ ID NO: 929 - DNA, 1879 bp, Homo sapiens
acaatcttgagcatagaagtcaatgtaaacgaagttaagatcaaccacataaaacatttcatgtgcaataagctctcaatcaagtaaataaagtttaagttgtagtcatttttttcccacacttgtgtggaatgaaaacttgccagtttattctggccctgtgtctactgccaggatagcattcttacgtgttacatatagtggacttgtcatccttaaaatgtgaacagaatttattggcagtgtggcaaagaattataaaacatagtgtttaatgtacttggagtttccttgtagtagtaagtatagagtttgatgataagtaaacgtcccttaacaaaaacctcaaccttattactatcccattaaaaaacagcaaatacttactgagttcttgtaagagctaatgtcattgtaagatttaaaactaagggcttttatcactttgcaaattattttttaaatgcattcatcatttgacagtgttctctcatttcttaaaatgcgagtcatcttccaaaagagttgtttttaactgccctaaacatttttggggaagtatgcagggtttaaatttttaagtataattagttctgaattaaaatatgcacatggaacttgtctggcagactgatgcaatagtaaaacaactgcagaattactattaatgtaaacaatccatttgaaagtcaatcagctgctcccattaaaatattatttaaaatacaatacccacagcatctaactaaatcctcaggatttattctccgggagaaattatccctttctaggaaaatgaagttatttctggttttaattcatacaatactttaagaaaatctgttaaatataacaaaacacaagctagatgcttaagaaatgcttaaagaaatattggggcgaaggtaacagcagtcaacaggattgtggccattactggtcctattattttgatgtaccatggaaggcacagaaatcgagcaaggaagaaaatattagttattttgatctacatctttttctaaagaaaagtggagcttgcctccagttcaattcacaagagcattttccctcccatgcccaccttttcttgtggctgtcgctaggaaggatgcagaggctgtgtggtttaccaaatgccttaacttagcagtgaatgacaactgtcaaacacatgttgagggaaaatttttactgattcacaaaaaggaagacagtttgcccactcttagtggcacaaatcaaagctgcatgcactacattatccaaattagtcgtaaccaaatagttaaaaaattctgctgggcacggtggctcatacctgtaatcccagcactttgggaggccgaggcagttggatcacctgaggttaggagtttgagaccagcctggccaacagggtgaaaccctgtctcgtctaaaaatacaaaaattagccgggcgtggtggtgcatgcctgtagtcccaggtactcaggaggctgaggcaggagaatcacttgaacccgaggtggggcaggcggaggttgcagtaagccaagatcgcgccattgcactctagcctaggtgacagagtgagactccatctcaaaaaaaaaaaaaaattccataggatgttcaaccatgttttcagaggccgcactgcatgaatgcgggaaaatgttgatgatcactaatcaataatctgatatttaacaaaatatggacaggccacttatgctcagttttaccttagttattccttggtatccacaggcccaagtccctttaaataaaataccctcatatttccatataatctacatacattctcccatatactttaaatcatctctagattacttataatgtctaatacaaaataaatgctatgtaaatgt

SEQ ID NO: 930 - DNA, 476 bp, Homo sapiens
atgttctaaagataatttctgattgaaagaacaattttagaaattgcttgttcttgttaatttcacatcttatcttaggattcctatatgtgatatttaataccttgtgacataactattttaagacactttgtttttaaagatgatcgtaacactttaaaccaaatttagtatgtctagccttacagaatgataaattactatttatttaaaaactattcttaaaacattttaacattagaatggattgttgtttattttctacaataaaactcaggtcaccttcgaattaattaagctgacaaaatgaaaatgacttaattacccaaggtttggcatgtaaagatcttaagagggggcagaacgaaccactcgaaaacgagtagcagtgtaatgaaggcttcttttttaaacaataacaaatgcttcatcaatctgagtgtggaaggtgatttatcaaaataaatattactaat

SEQ ID NO: 931 - DNA, 1219 bp, Homo sapiens
cagcattccagacacagacatgctggcagtgagagtgaaaggcgggagactttctaaacagtttttctttcaggaattctgtagcattcccccttccctctgttaggaaccaaggacatcagaaatagcaactttaagtggcaagccggaggaactctgttagaataatccacacagtgaggcaaatatcaatctaagcattgtggatggaaggaatggtctttggagagagcatatccatctcctcctcactgcctcctaatgtcatgaggtacactgagcagaattaaacagggtagtcttaaccacactatttttagctaccttgtcaagctaatggttaaagaacacttttggtttacacttgttgggtcatagaagttgctttccgccatcacgcaataagtttgtgtgtaatcagaaggagttaccttatggtttcagtgtcattctttagttaacttgggagctgtgtaatttaggctttgcgtattatttcacttctgttctccacttatgaagtgattgtgtgtttgcgtgtgtgtgcgtgcgcatgtgcttccggcagttaacataagcaaatacccaacatcacaaagatgatctttcttcttttaacttgatgatgatgtgcaggcacaaatctttggagaaggcttaactgtggaatagatgaattctagaactcttgaccctgcaatgagaaactgtgacagatctgtgtcaattaacttgattagccagaaattaatcacaggcctagagaccaaagaaaaagctcccctgagtctcaggcaacagttttgtcacggatgcaaagcttcctgaaatcatgaatgctggactcagtttggcaaacgcttacacctattatgttctgagattctgagaaccagaatgcaaacttaagtaagatacagttcccactgtaggtgttttaatcctggtcttatatagaataaaccagtactttgctgagtgaaatcaccatatagaattcagtattaacagatcatgcattcagatgcttgaatgtgcattcttgttgtgggcttgatttagatcctattgcggggtcattacgcaaaaattcaatcataccttccatagacaaatgtctgatttttgtttaaatctgtccgttaggtggcctttccttatctgaggtgtagtggtctaacatttaggaagccttgctttgactttatcgggcagcatt

SEQ ID NO: 932 - DNA, 835 bp, Homo sapiens
acactggaagaattaactgaagtcataacgtgcgtgaattaacagcttctctatttgatatttgaaattcttctgtaagcctgtctgagtgtatgtggaaacgattgtcaaatctaaaatatctatatattaaaaagtaggaaattgtcctagcttaccctaaatttcaaatctgagttgattttgtgattttattgcttataacagagaactcatatttgacatatttttttcattgatgtgttcctggtagattttcacgaatgagctggcaggtctaatgggggaggcggcgtcccagtctgtgttgcagcagcattctcatcgggggtgcgcacaccatcgttactgtcgggcagtaactgccgcttgccttgccgcagtaggagggaaatctcaccttccttccacatactgtcttgagcctttgctaaattaaactgcactttttgctatttttgcctagtttttcgccaatctacactgattttggactgttacctaagttgaaaaataaaaggttgtcaatcgaatggtggtttaatgtttggacctgccgatgtatttgtatagtggtagaaacatgctgcttaagtggcctaacctgtttcttgccaataagtaggcttatcattttatctttacgtaattctatatctgtgactaggtttttaaggatacagcttataagttgctatcaattttcactacctaagcagaatttttctctaatttactttttgtattttaactaggttttacatggaagccctaaaataaggcaaaagactttttcttttgtaataagcatataataaacacgtatatacatagc

SEQ ID NO: 933 - DNA, 598 bp, Homo sapiens
gagtggaaacggggctgccagacgccagtgttctccggtccctccagctgggggccctcaggtggagagagctgcgatccatccaggccaagaccacagctctgtgatccttccggtggagtgtcggagaagagagcttgccgacgatgccttcctgtgcagagcttgggcatctcctttacgccagggtgaggaagacaccaggacaatgacagcatcgggtgttgttgtcatcacagcgcctcagttagaggatgttcctcttggtgacctcatgtaattagctcattcaataaagcactttctttatttttctcttctctgtctaactttctttttcctatcttttttcttctttgttctgtttacttttgctcatatcatcattcccgctatctttctattaactgaccataacacagaactagttgactatatattatgttgaaattttatggcagctatttatttatttaaattttttgtaacagttttgttttctaataagaaaaatccatgctttttgtagctggttgaaaattcaggaatatgtaaaactttttggtatttaattaaattgattccttttcttaatttt

SEQ ID NO: 934 - DNA, 2164 bp, Homo sapiens
aatcctcaagctgctttatcaccttccagcaatgaagacaatgcagaatagcagactctggcgaagttgttcaccctgagcagtgcatgaaacattcctttctggctaaagtttagaaatattatcttattatatatccttaggcaactctgatatgtggcatctctgtggcttaggtgaaatcatagaaattgacacaatgacctaaaatattctatgtgtttttgcttgtaaagtttgaggacatggaggtgataaaaaaaactttcttaggacaataatgtaaaatgaaaataaatttctaatccccctgactaactgaatggaccctcttctaggccaaagagacctcagatgaacctgaaagactgaattctggccatgataggaagggaggtgagacacaccttgttataccccttcccttttggagtttatgcacaagtgaccaggatgagtcataagactgatgaaatagactgattgtggcaataagagtcccaattccaacctgactctggtgtagatcacacactgtctgagggattccatctatgagactttgtctacataacagagaccttggtttccacaacccctttattttagctaaagcattcttttctactgacttcttaagtctttagacaaagcttaactctttcaaccaattgccaatcagacaaactttgaatctacctatgacctgtaagctctctcctgcttcaagatcttgcctctttaagctgaaccgatgtgcactttccatttaatgatttatgtctttgcttgtaactcctgtctccctaaaatgtataaaagtaaacggtgacctgaccacctcaggcacactttctcaggacctcctgagagtgtatcccaggccatggtaagtcatgttggctcagaatcaacctctttaaatattttacagaatttgggttttggttaccaataagtctccacaaatatatgtccaagaatcttcaattccaagcctgctcaccaaatttcaaatgccaacatctccccatccaattacctatttcatctttgaggtgtaatctactcaataaactgtgtaagaccagtgaccagaccctttgctaacctgacatttacttcaatttttctttttctatgtactggatatttttgcatataaacttgcagtaatagttcaaaaattaatagtttttgacattggcttttctgagaagagaaattgaaagtgtcacaaaataaaaaaagatgaaatgaagcatatataattgtcaattttttcaattttctagccaacagagaatcgaaggattctgttcaaatattagtaaaaattgaaaataaacttgtgcttatattttgtttgcaacacactagttaatttaacctgtgactagttatctctaccgaaggtggatgtgtagtttctggttttaaaattcaagcaaactggaaaataatccatctaattatgctttctttcccaagaagttttttaatgatatgccagcttcctaatttggagacaaaagccttaattgacaatgcattcattatatatttttttgtatagttacagtatacgagttgagtatcccttagatgagatgcttgggaccagaagtgttttggatttcagatttatttttggattttggaatatttccatacatataatgagagagttggaaaatgggattcaagtctaatcataaaattcacttatgtttgatatacaccttatctgaatagcctgaaggtaattttatacaatattttaaataattttatgcctgaaacagagtttgcgcacattggaccatcagaaagcagaagtgtcactatttcaagtcagtgctcaaaaagtttcagatgttaagctggtgatgcagttcatgccagtgatccgagtactttgggaagccaagacaggtggatctcttgagcccaggagtttgaggccagactgcacaacacagtgagacctcgtttctacaaataattaaaaaattagccaggtgtggtggtgcacacctgtagtcccaggtactcaggaggctgaggtagtaggattgtttgagactgggaggttgaggctgaactgagccaggatcttgccaccacattccagcttgggcaacagagtgagaccctgtctcaa

SEQ ID NO: 935 - DNA, 3645 bp, Homo sapiens
aattctgttcccaagatgcagtcctagcgtagcgaacgttcctggagtggggtgaaggatatcaatatactaagttttaacagataccccatttaggtcagcacttgattcgttgttgctgtgaaatatgtccatgggacaaaagagggaatatgaaatatttgcatatgggaagattatagagcataataattttgtaaatggagcaatctcaacctctatttctagatcacattttcttgatgtcttccttcaaattaatgaccttggattacataaggatttctatgcattcattataatttgttattcctttcaatatccttgtatttcaaatcttccatataagaattagacatggcaattcttaaattgattcagaatggtctgatactattccagtatcacctccttaattctgtttctcctcgttttcctgattttccttctcattctctccttccccgctctgtctctctctccctgtcactctctctctcttgttccttattttttgtttcttacctcttactgtttaacctgttgcttccttctggattaatacatttagagccattcctttatatggtcacatttcctatgactttactcaattacttttaaaatcctttctattctgagactaatttttaagaattacaaagctcattcttctgaatctaatatcactaactcctagactttttccgttttctttggatacactttaagtaggaatttatcagaattttcattcaactcgttctttaatgcagatatttactagttataagaccttaaggctgggtgcagtggctcacgcctgtaatcccagcactttgggaggctgaggcgggtggatcacaagctcaggagttcaagaccagcctggccaacatggtgaaaccctgtctctactaaaaaaaaaaaaaaaatagaaaaattagctgggcatggtggcaggagcctgtaatcccagctattctggaggtggagacaggagaattgcttgaaccctggaggcggaggttgcagtgagccaatatctcaccactgtactccagcccagtgcgagactccatctcaaaaaagaaaaaagacctcaaacaacacttctctctctcttttagctgcttgttatggttcctatacatggaacaattatactggcctcactgtgttatggtaaatatttaaggtcatatttgatattgctggtttgaattcagcttttccatttaaatacattataatgatgatgatgaaatcatgataatatttaacttatttttaaagtatattctgtacctttccaacaaaaaggttaaaagtcattgaaggctaaccttactgccttctttgtatcactgtcttctaaataattattatgtctgggtacagtggctcacgcctgtaatcccagcactttgggaggccgaggtgggcagatcacgaggtcaggagattgagaccatcctggctaacacagtgaaaccccgtctctactaaaaatacaaaaagaaattagctgggcgtggtggtgggtgcctgttgtcccagctacttgggaggctgaggcaggagaatggcatgaacccaggaggcagagcttgtagtgagccgagatcgcgccactgcactccagccggggcaacagagcaagactccatctcaaaaataaataaataaataaataaataaataaataaataaataaatattacacaaatgctaaaatgtttaaatggtaaatgcttcaatgctaaccaaatattaattaatggcaaattatttaacattatctgataataatctgcagaaggtttaattttcctcctcaatttgaagttcaagatgtttttctcttccagggagattttttcgactgacatctttaacttaccttccaatcatattactaacgtagccttcttcctagattttttaattgtttgatcatgagcgaacacttctactctctgtgatagatttgcaaacagaggaaataacgcatcctcgtgtccctcttcttggtgttccacaggccatgtgtgccctagccctcgttcatgcaaggtctgtgtagggaaggtggacttcagctcagcaacagcatcccttcccacagggatcaggtgggtggcttgagataccccttccatggggcaccacccattcagtgagacggggaagccctgggtgggagggagaacacctccacatgtcttctactctctccataggatggaatgagtgtcccagtcccaggagtatccatttcccactgtgtagcccagtactctggtctcactgtctctgctgaatcctgtctcactgtgcatattattgtggtttatatcagtcagtaaaccaatgtgagtcttcatctcttgcattcttaggttcatagttttgtgtgtctcctgtaatgactcttctctttccctttccaactcctgaaagattgccactatttcctctggaactttgtttcgttaccagcaaaatcctcgacatccatacccgtttcctggctttccctctcctttcctctgaatggtagtcttttatattcagctgtccacttgacatcaaaatagacattttgaactcaatttgcctaaaacttacccacaaatttctccccaagtctctccctaactgcaacaacaaaaaccacaggcttctccctgtcactggatggcaactccattcttttgattgcttaagccaggcatccgattgagtactttcttgatttctccagcccacatccagtccatcggcaagccctgttggtcctaccttcagaatatgtccggggttcagttgtcctggccaccctgctgctgtaaccatggtcagaactccatcctgcccctctggattatgactttcgtttcctcacagtggtcctgcttgggctctaggcccttccactcccattctctctacagcagctgggctgattcctttagcacccaaggatatgttggcatcacagtgacttagataccatcacaaagacctcccattcaacttagagtgaaagtcagaatcctcacagtgaatccccaggccctagaggatgtgaacccccaggccctagaggatctgaacccccatccctcctctgattatctctcccacccccacttccctttgcattctgctccagctgccctggcctcatggctgggtttccaccaaagcaggcacttcccatcacagggccatttccccgcctgtggcttctgcttgacattcccttttccctgatatccccttgactcattattccctttcttccttaactcttctgagatccagcttctcagtgataccacacagccctactccccccagagcccatctagagctcacctttccagtcgcccttgccaggctcagtggaggctctttgttccccatacagtacgtgtcgtcgtactatattgttaggcttatttaatttatgtatgttttgcctttttgtgctaaatgtaaacaccacaaggggaggtatctttgtctgttgacaatgatacattcaatgtttctcaagcacccccaatgctggtttgtatgtggttatcattcaatctgtatttgttgaatgaataaatgattgactatgtggagagc

SEQ ID NO: 936 - DNA, 607 bp, Homo sapiens
tcatggccatccccactccctttgtatttcctctttccaagttgattccaacacgctagagcagggttgtccaatagaaatacaacataatttaaaattttctaataggtacatttaagcagtcaaataaatttaaataatatatttaattcaaaacaatgttataattaatattaatattaacaatattgatgttaattacatagcatactatttcaataaattatatgcaatatattatagtacatgtttgtacatatattactattaacgtgataatgtttattcttgtatattgacatagaatttcttcatgtaataacacaaatttgttaatgttgccttttactctgtttgcattctaagtcttcaaagtcttgtgtttgttttatagagtgcagcgcagcttggacaaaacacatttcaagtgcccagtagtcagtgtctatagtgttggacagcacattcttagagcatccccaatcaatagtttcagaagttatatatgcatgtgtatgtgcatgtatggtgtatacaaacatatttttgttatatacaatattgctgatgaactgaaaattaacaagtaaaatgcacatgctaaggt

SEQ ID NO: 937 - DNA, 98 bp, Homo sapiens
acatacgttctgtgttagagtcaaagcgctaggttcatatcaacttagtagtgtacagcagtgaagaaaaacattattacatgcccagtgtgtcaaac

SEQ ID NO: 938 - DNA, 881 bp, Homo sapiens
ttgagggaggcttgctgaggcttctctaaaggtggttgggcaagcacctatatagtatcacggggacagttgaggcaactcgtagatggagatttgggaaaagacgatgtggcctcctacctttccagtttctgttggcagcccttcacgtagcctcctgcctcgcctctacacctactaccctgtcggcccttttgccatgctgtcctcgtataactcggattctctcctcaggtgtaggtgcagggagtcagggaacccttagactcccctgtgtgcaagagcccaggtgttggtgtgtccctttaatgctactgtgctctctggtgtttctgattttcctgcctttattctgtcttctcttgtcctatctcattccagcccacatcttctcctttcctgattacttttgttgtcctgcctcttcaggtaatggtcacagatttggctgtaggcacgttaccagccctgtggcttcttgactcttggttccctgttaactctgtttctgagaaatgtgggtatggaggtgggtgggaaagctcacttccatgaaggatgtctccatgctaggagctgcctgcaccctggcagaggtggccagtcacgtgaaggtgggcagggcccttagcatggccacacatgtccccagggcagatcaaggggcctctcagaaccatgttccccagccaggtgaggaccattttcactgggacccaggccaaaaccatgtgggtgcacaaagccaggcactgccaagtggaacatgaggttatttccaaatcatgggagccaccagcagggagagggcaggatggaaaatcccctggagccggtcaactttttgctcatggctagtgaaataaagttgtttgagtact

SEQ ID NO: 939 - DNA, 478 bp, Homo sapiens
ggcagcccatctggggggcctgtaggggctgccgggctggtggccagtgtttccacctccctggcagtcaggcctagaggctggcgtctgtgcagttgggggaggcagtagacacgggacaggctttattatttatttttcagcatgaaagaccaaacgtatcgagagctgggctgggctgggctggtgtggctgctgaagccccacagctgtgggctgctgaagtcagctccgcgggggagctgaccctgacgtcagcagaccgagaccagtcccagttccagggggaggcctgcaggcccctggccccttccaccacctctgccctccgtctgcagacctcgtccatctgcaccaggctctgccttcactcccccaagtctttgaaaatttgttcctttcctttgaagtcacattttcttttaaaattttttgttttgcatccgaaaccgaaagaaataaagcggtgggaggcagg

SEQ ID NO: 940 - DNA, 94 bp, Homo sapiens
ggctgtggccctgagactgcatcggaggcggcgccccgttctagggccgtggcctttgccgagactgtagcagagaaaacgtatttattattcc

SEQ ID NO: 941 - DNA, 1068 bp, Homo sapiens
cctggaggccgagaccacgccacgcacttggcggcagggacccggaggccgaccccttggcgggaaccagcacaaagtgttggcatcgcccggcgcccgggacagtcctgggcacagcctcggctctgagtccctccgcctcccagcgacggacgccaaagggtcccgggccgcctgaggctcctccccaccacagccatctcgtttatcggaccaggagcaggcatccatgagacctcagagcttcagatcgaggccttggggggtccgggcccccccaggaaacacggtgaggccccagcgcctgcagccaaagctggcacgatctatggggcaggtgccgctctgcctagaaaagccaggggctctgctgccgtgccctccagagcccacagcgggcaggactcctccagcaccaccacacccagtggcccgagacccctctgagaacagtgaggctggtcctcgtgccgttccagccggtgcccggccagtggggaggacacagcctaggaaccagctgcctgagaccagggtgcctctgggctgtcctcccgcgtggcggagaccccaagcacgcagccacccatttccggagctgcaggatagagcttcctcttgatctctgtttttaagcagaaattcattgtgcagaaaagtcctccagagctctgtggccccgctcggatccgctggacccccatgcctggctgatccctgcccacgtggggcaggcccacatctaacccccacaagtcactgcctcactgcacctgccaaggctgccctggcgctgagtcctggggtccctcccggagttcctgggagaaaggcgccgtcgtggccgcctcccgcacgccaggcccgggctccaccgtgggtctcagacgccctgcggcaccggcaccgtctgctttagcatgggacccccctctgaggggtggcctggccttcggggtccccacgctcctttgcgaagtccactgtgggtgccatcatggtctccgggacctgggccagcgggaacgtgggggcactgggtgtgctgatataaagtcggcattactc

SEQ ID NO: 942 - DNA, 335 bp, Homo sapiens
gcctggccgtcctccggggccaccgaccgcagccagcccctccccaggagctccccaggccgcaggggctctgcgttctgctctgggccgggccctgctcccctggcagcagaagtgggtgcaggaaggtggcagtgaccagcgccctggaccatgcagttcggcggccgcggctgggccctgcaggagggagagagagacacagtcatggcccccttcctcccttgctggccctgatggggtggggtcttaggacgggaggctgtgtccgtgggtgtgcagtgcccagcacgggacccggctgcaggggaccttcaataaacacttgtccagtg

SEQ ID NO: 943 - DNA, 228 bp, Homo sapiens
cctgggcccaccaaggtggacgctgggccccgccaggctggagcccggagggtctgctgggcgagcagggcaggtgcaggccgcctgccccgccacgctcctgggccaactctgcaccgttctaggtgccgatggctgcctccggctctctgcttacgtatgccatgcatacctcctgccccgcgggaccacaataaaaaccttggcagacgggagtctccgaccggc

SEQ ID NO: 944 - DNA, 761 bp, Homo sapiens
acgagtacaacgcgctgaacgaggccaagcagatgatcgccgtcgccgacgagaaccagaaccaccacctggagcccgaggaggtgctcaagtacagcgagttcttcacgggcagcaagctggtggactacgcgcgcagcgtgcacgaggagttttgagcgcccggccgcgccccgcgccgccccccacgcaccaccggggcggcctcgcgggtgactccgggctccgtggctgtcccggaccccacctcttccctgccgcccgccaccggccgaccgaccgcggctgccccagttgatgagcggcgtgtcccctctgcagcgcgcaccccggcggggctttggctgtgacgcggtcggggcgcggggctgggctgtggccccgcggcgccgcctcctccctggtccctcgaaatcgtggcatctcacttctgagaacgaaatctcgcttcagtcactctgccgaaggcgctgacggcatcgcggccggaacctctgggcccggcccctcccagggccgccgctccgtgggaaaaaacagctcctccatttccttgaaaactgaacgattattaaaaatagattaaacttcgctggaaatgagtagccaggaagttcaggggagggtgccgggtccttcccgggcctggcgtgtcggagccacccaggtcccgcagctgccgctgagaaaatgcaaatatttgttgtgacaagaatcacatacatttactttaaatatagttgccttttttggtcagcttc

SEQ ID NO: 945 - DNA, 1289 bp, Homo sapiens
ggcccaggcgccgagacccaaggcgccactgagggcaccgcgcaccagagcgtgacctcggcaggctggacacactgcccagcacaggcagacccaccaggctcctaggtttagcttttaaaaacctgaaaggggaagcaaaaaccaaaatgtgtgactgggctttggaggagactggagcctcagccctgtcctggccacgggccgctggggctggtgtgggtgggccttgtgtgctggatttgtagcttatcttccgtgttgtctttggacctgttttagtaaacccgtttttcattttattagatgtggtcacttagaaatgcaaacttgctgccgaccgcgggctgctcctgcgttcttggagctcctggcgcgtttctcggagctcccggctcctcagcgggtgggaacctcggggcccaggggtggagctggcgtccgcgggtgctggtctggcctggccgtgtggtgatgaggcttagcggggccagtgacggccgtggctcaggatccataagtcggggtttggtctcagcatttacaaatgtgtttacagtcagaatgaaacacattccttctagaaagtgcttgggggtttttgctgccctggaagccaggagcctgctcactccaaccacaagtcgcccttgactgcggcggccgcgagcggggcgggggctgccggtgccctccgcaggccgggcctcctgggcgcccctcggtgctgcaggctggggggccttgggtacctgcagagccttttctctgaattccttatgtccggtgggccagaagcccgtcctcctatgctggtggaaggcggaggaccggagtccctgcagaaggccccgtgcactcgggggcctccctcacatcccgtgccccctgcgctggccttcacagtaggtaatggctccggcccgggtgttcgctgtccacggaacatggcagaggggcaccccggcccggaaagacgccagagccagcaggggctgtttcgggccgcgtggctccccgggtctcggccgtctcccctcttctgcgtctgttccgtgacttcgcctgggtgggatgtaccgcaggtgcatcgcgtcgaggtggggcacggccgccggcaagaaacccaccctgtccggaggcgggcgtgagacaagcccagcccgcacgcgctcatctttcttcgttttttgatcagtttattcagaattgctctataatttaccaattgtatgtatttaacctattcttgtggaaaaaaaaggtctttcattatatctttatttctg

SEQ ID NO: 946 - DNA, 274 bp, Homo sapiens
ggccggcaactcacccagccgccacctctgccctctcccagctggacagaccctgggcctgcacttcaggactgtgggtgccctgggtgaacagaccctgcaggtcccatccctggggacagaggccttgtgtcacctgcctgcccaggcagctgtttgcagctgaagaaacaaactggtctccaggctgtcttgcctttattcctggttagggcaggtggtcctagacagcagtttccagtaaaagctgaacaaaagactacttggtactctc

SEQ ID NO: 947 - DNA, 864 bp, Homo sapiens
ctcgtggcgcatgccccagccctgcctgaggtggggagctggcggtcctgccgcatgcagagctcgcgtgggcttgccttcgtgggggccaggacgggaggcagggtggggggcaggctggaccaccaccatctgccctggcagcctggctgctccagctcctgacagcacctgtgtctgagcagccgtgttgggggcgctccctctctgcccctcagcgagagcctcggacctcccaaccccttgtgtctggtggggatccctcctgggatgaggaagaccccctcgggctctcggctgacccccacctcctgcacagctgtgcccaggcccccagggtggtccatgcggggcaaccccctgcggtgcacaggccccctgtctggagtagggatctaatttatttatttattgcctggccggtgactcgggggaggaggcgaccctgtcatctgtcccacctgctgctgccccttggagcagcctgcaccttctctcctcccatccggcaacagtctgaaagtacgtggaggacgggaccggaagacgagagagggctggacatcctgcccaccgtgtcccagccagggcagggagggaccatggcccgcagggtcaaggggccccgatgtgcacagctgccacagggagggaggtcttggggagatgggcagtcaggtggcccgtccttggtgagtgcacacactgcgcgcacacatcgcggccttcctggcttctctggcccccacgtgtctgtgctgtagatactgtatcaaagtcccagcgtttagatggttaacatagagctgcttctgtgtaaatgctgcttattttaaacactaaaaagcgtttaattttatggga

SEQ ID NO: 948 - DNA, 912 bp, Homo sapiens
ggaggccctgggctcctggctgggccagcagctgcacctctcctgtctgtgctcctcggggcatctcctgatgctccggggctcaccccccttccagcggctggtcccgctttcctggaatttggcctgggcgtatgcagaggccgcctccacacccctctcccaggggcttggtggcagcatagcccccacccctgcggcctttgctcacgggtggccctgcccacccctggcacaaccaaaatcccactgatgcccatcatgccctcagacccttctgggctctgcccgctgggggcctgaagacattcctggaggacactcccatcagaacctggcagccccaaaactggggtcagcctcagggcaggagtcccactcctccagggctctgctcgtcgggggctgggagatgttcctggaggaggacactcccatcagaacttggcagccttgaagttggggtcagcctcggcaggagtcccactcctcctggggtgctgcctgccaccgagagctcccccacctgtaccaccatgtgggactccaggcaccatctgttctccccagggacctgctgacttgaatgccagcccttgctcctctgtgttgctttgggccacctggggctgcaccccttgccctttctctgccccatccctaccctagccttgctctcagccaccttgatagtcactgggctccctgtgacttctgaccctgacacccctcccttggactctgcctgggctggagtctagggctggggctacatttggcttctgtactggctgaggacaggggagggagtgaagttggtttggggtggcctgtgttgccactctcagcaccccacatttgcatctgctggtggacctgccaccatcacaataaagtccccatctgattttt

SEQ ID NO: 949 - DNA, 71 bp, Homo sapiens
gtctggcgccgcccttcccgcccgttgctgctgtgatccgtagtaataaattctcagaggactcagccttt

SEQ ID NO: 950 - DNA, 166 bp, Homo sapiens
ggactgttgctgtattgattaggaaaagagacagagtaatttgcagtttgtttgatttatacttttgtttatctacaacccaataacagacatgagggatggccctgtctctctgggacagagcctcacagatgatgtccatgttttgtgtgaatgaaactcaaac

SEQ ID NO: 951 - DNA, 393 bp, Homo sapiens
gcccagcgcccgcatggagccgcctctggagcttcctgttgttcatactttttccttcctgacatttgtttttacttacaggtgttctgctggtgacggtagcattacccaaataaactgtgcatatgaaatgggagaggagatgccaaaacgccagatgaaagcaatcaagtttcttcttttccacttttacttatgagcaggatattgattacaaagtttttcttctttaaccaaaaaggaaagacaacggtttgtgtgcacttcccgacatacctgtgtcttcgtgtgcctgccttccctccctcctccccaccgggccggactgtacagagccctgctgcggcgtgttaggaatgacctggaattgtcaataaacagatgctgctgtca

SEQ ID NO: 952 - DNA, 213 bp, Homo sapiens
gtaggaggtatctccgagacaggaaaagtggccgctctctctcactttttctggaactcatggtggtctcctgggcttggtcactgtctctcaccagcatgtttctttgtgcggtcaggaattatttccaaatgctcctgaagcctagtgttttagtgaacattagtgattgttagcagtggttcaaaaaaaaaaaacttttttttttttttt

SEQ ID NO: 953 - DNA, 1665 bp, Homo sapiens
gtcaagcccctatccaggcccgaatccttccgctgccctccaagcgccctctggggacagaccaatctgcgtgtgtctgtgaccgcctgtctcagtggcacggccacttcctttctgtagctgggttagagcctgggtctgccttttgtccagatcagctgtttttttaaaatgtctgactttttttgcatttctaaagaagcgtgagaaatgggctgggagtgcttctgtcctgctgacaccccgcggtgggtccctggagcgcggcctccagctgccgcaatttccatgccaggatatttttccgcaaatcagtcggttgaaattcagaggagtcagaatgactcgacctgtccttcaatgttgataataaatgtctcagccaaaaaccttccttgagctgccatgcttttccccttgacctgcacctcttcccctaaaacttctgcagggaagcccctggcggaggcgccattgaaagcatggtcttgccagtggctggcaaggcggttttgttctgctcagtttctggagagggttggatgcgtcccctgccatccagccctccccgcttgaggccagcactgagtctgggacactcagcgggaagggggctggcatcgccagcgacccacacattcctcacgtagcttctgctcccaggaaggtagtttaaatcctgtatatactttttagagactcttttaaactttctgaagtgctgatgtacatactttctcgtacacacttttgtgaagatttcaaggggaagggagtcgtctgccattcaatgtttacatttatgttctgcaagacgctgtcctcagggaccattaggggaccattctgttcagtgcgatcctgatggtccgggagatgagggtttccggggctagtgatcgtgatcccttttatttgcaactgtaatgagaatttttcacactaacacagcgagggactcaacacgctgattctcctcctgcctctcccgtgagtctccagcctgcccagcaccggcagctgtggagcacgtggatgctgcctaccccggcgcccgcgtcttccacgggcacaggtgtgtggaggccgtggtcggaccctggtgtcctggttactgctgcccgggtgtcttttttttgagtaactgctctctgagttttgcacacgaagttgccctcatctgctggagatcgataaggaaggcacaagacgttctcctctgcccgtgaggagcttcccgcagccgcctggcccagcctgggcacgttctccgaggcatgtgtctccctgctcaccctcgtctgggcacctcagcatctgtggacttgagcgtccaaaaaccctgagtgtgattctgggcagccggcctggcttgaagtccgccatgaccctgggcacaggggaagcccagccgtgggcttaggagagagggaccagcgcccagcgttagggctggaagacggcagtgttcagaattccagccgctcatctgaacacagaaggtgtgaactgacctctaaagcagcgtgagatgggaatgatctagaaaactttggatttttgaagtaaattttaatgtttcatattaatttcttgaaaatgtattaaatgtcattgaaagccttattacgcttttcagatcctttcaataaacaagacttgtag

SEQ ID NO: 954 - DNA, 1764 bp, Homo sapiens
catgtggatgccatggagactggaagaccattccaacttggacgcgttaccatgagagcatatcctatccaaccgtactaacgtggacaccctacacctcccctcagaacttcaaaagggcaagatcttttttccttcacttattgctgaaaccaagagcacaattcccattgagagaaagatctctgtgctgtaaactaaaacaaattgtgcattccttccggggccatcgtctttgttttcttttttgtcttgaatgaattttaaaaggaaatatataataaaaatgttaaccagaaggtaaacttgagtgtaattgtcagacagacacacttttccaccagtgtatttgaattttagaccagtgaccctgttttgtggcattcatgcaaaacatgctgagggctttgttcatctggtcatcgtgtccaaatttcagtcatgtttgtagcaagattttggaagcattcatatttcctttttaaaatgtattcctttgtgttcaacagttaatcaaaaccagagagtctagggcagcctctctgatgttgtcaatgatgtaaattcagtccctggtttttaattttctgtctgatgtcacagatcattgttgcacacaaacgtggcatagaaaagaacatgttcagaagccatggggccaagcacatgcggggacggtctcaaatgcgtgatcagagaatccttcacctttgctgaaaagtgagctcagatccagcaccatgttcctcctgacccatcctgtctatcttctcagttgagtttttaatctcactttgggtttccttgtgaagttggagggaagtttataatagcctaacactaccccacccccaactaggaggaacctctgttttcaagagagatgcctgtcctgtgcttggatagtcagtcaattatttgtgtatgaaacaatgtacaaatcaatgttttgaaaataatgatctcagactttctaagttaaattttaaaaattttgattgtttgccatattgggtgggtttactcttagaatcgcatgctgtagaaatgctcaaaagtgcatatgggactcagtccttaggtgttctttttcttttaagaaataacctcttacagttgtaaccattgcggctctgtccacttctcgttgctgctctgtggcacatatcggaagcagtacagcgcgcggctctacacgcttgggtagcgggataagtcactgttttctttatttctttaaaaaaaaaaaagttctgttgcaaacgactgctgttggattctgagggtggggagggagagagagggagggagagggagtgaagagcctgccctcctatatggattcttcagggccctccacatctgaggtggctcattcccatcacacacagattgtcctggtgttcatttcaaggccagtgttcagcagcagcgtttggaaagcaggttctgtgggaccccccgccccgccccccgcactccttcatagcagcagtagtggcttctccatcctgttttctgcaacattctatacaaaactgtgctgtgaccttgcggtaggcctggatctggcaaagagaatacaaatgaaaccccttctttctctttccgtccaacaactctgtagagctctctgcacccttacccctttccaccttttgtatttaattttaaagtcagtgtactgcaaggaagctggatgcaagatagatactatattaaactgtactgttatttaagatgtaataaagcagtttgacatga

SEQ ID NO: 955 - DNA, 291 bp, Homo sapiens
aggaggtaggagaacggaccagagcttggagaactaatgcttggagccaagggccccagcccaccccaccgtcccacacattgctgtggccccaacctcggtgccatgttacaccggcccctggcgtcacccactaggcaggctgctgctttcagcctcagcccctggcccagccccagcaggccctcagcctggaagaggccccttgggcctaagcctcgggtgggagctcagggccacctgtgacgtctgcatcttcttggagagagaataaagtttgtatttaagtgg

SEQ ID NO: 956 - DNA, 329 bp, Homo sapiens
gcctctgcacagagcaccctcgggccctcctgtccaccctcaaagccctccccaggctgagggccaggtcatactaccctagagcctgggacctggccatcctctgccagattccaataggccgccctccacatggcgccacggccacttcctgctgccctggaccccgcaagcccagggacatccaagagcacccctcctgagaccccagactcagaagcagcgagaaggccaggccagccctcagccatcctagccagaccccctcagagcccccagcccccaggagagccctccacagcctgtcaataaattttttgtaggccaac

SEQ ID NO: 957 - DNA, 160 bp, Homo sapiens
gcgccatccaagagccctgcgcagagtgcggcgcccggacacgctctcccccgccagcagccccgcctctcggctcccccgccagcagccccgcctctcggctcccccgcatgcgcattaaagcagggcgggctcctgtctgtctctgtgttgtgatgaa

SEQ ID NO: 958 - DNA, 126 bp, Homo sapiens
ggccccgtgtccacaggaggccacctcggtgtgaatggaaggaaacgctgcctctgcttgcgtgactctgctccccgattctccagagccccgtggttgctggcttgaataaaatgctcagtggcg

SEQ ID NO: 959 - DNA, 962 bp, Homo sapiens
gccggcgcccgggtgggcctggacacagatgacctctacgggagtctgaacgccaagatttagtctcaggattaaccttgcttgcacagaagttagaacactctcagttttttgtcatgtaagatactaacctagccaccctgggagagaacagaaagctgtccctggctgcgctttctcagccctgggaggggcgcctgaacccagaacatttccctaaccccaacctggtaggactcagccacttcttcaggaatttcacttatttggacgggattttaggtttccctcccttccccaaaccatacagttgagaagtaattcagaagtaggccagaagacactttattcgtttatattgtgagaaaacagccccatcaggcttgtgttaaggcaatggactgaatgagtgcgtgctgggtggggtggggcacggaggctggcgggttgcttcagccagtgcagtgagaacagcagccccacggccccatgggaggcggcgctgctctccccgagggcggctgggcagagcacatcccccaggacttgatgaccacacggggcagagagaaaccaaccaaggccagcacctccgtcggaagcatttggcacacacaccttcaatacacgtcaaggtcgcttccagttttagaaaacagaaatctgcatctcagcctgagacgcacagagaggtctcttcctgacccagacgcactcacgagccaggtcctgggggtatgggggctgccaggggcgcccgagccctctcctggggggcctgctgggcaggcgacctgctgacccacggtcactgctgtgttcagcccctcagctcggccccagcctatttcccgcctccatttgatgtttccaggttttcaaaactgcatttaacctgcgccagagagttcaccgtaggcatctttaataaactaactccagcaaaatgtgggtacgttact

SEQ ID NO: 960 - DNA, 311 bp, Homo sapiens
ggcgctgcagctgccggactcttctgcttgtcacttgtcaggaatgtgtttttaccaccacagggaaactgcgttcaaatcaacgtatttatatggtactgctgtgacgcggcacatacaccccagccgcacagatgcgtgtgacccagaggcgagacgcagctttgtcctgggagacgttcatattggaatctatttaactgctaaagaaccttttatatatatatatatataaatagagagatctatacaggtatgtctgacgggacgcagcaccgtgggcacgcaccaaatagagtttttaaaagagg

SEQ ID NO: 961 - DNA, 724 bp, Homo sapiens
cccggcgggacctgcgggcgcgcggcccgacgaccagagggcgagcctgctcctctcgcctgtagggaagcgccttcccgccgtcgtccgccccgggcttggacgcgcccttctccggaaggctctggccccaagctggccggcccgcaggagccccattctcagagaatgtgtgtgcagagtccctgccgttttaggacaatcagggcccatcttctgccaagtgtctgaccccatggggttgttctgtgtttgcatttaagcaagtgacttctgggaagtccccggccgcccggggttctatgatatttgtagtgccggggctcgcacactgctgcccccagcctgtagaggactttcttcagggcccgtagctgctgggcgtacccctggcaggcgggctgtgccgcgggcacatttgccttttgtgaaggccgaactcgagctgtatcctcataggaaacagtgatcaccccggacgggcgtccaggaccctgagggccatggccaaaaggctcctgagtgtgcctggtggtctggctggggctcacggtgggctgtctggggagggtgggtgcctccactatgatccttaaaggattcctctgtgtgggtggatgcgtgtgggcacgactttgtactcagaaattgaactctcagtcacgtggaagccacgggactgctccgaagccgccataataaaatctgattgttcagcccccaa

SEQ ID NO: 962 - DNA, 554 bp, Homo sapiens
cccacagactctgcaccccgacgccagagatacctggagcgacggctgctgaaagaggctgtccacctggcggaaccaccggagcccggaggcttgggggctccgccctgggctggcttccgtctcctccagtggagggagaggtggggcccctgctggggtagagctggggacgccacgtgccattcccatgggccagtgagggcctggggcctctgttctgctgtggcctgagctccccagagtcctgaggaggagcgccagttgcccctcgctcacagaccacacacccagccctcctgggccagcccagagggcccttcagaccccagctgtctgcgcgtctgactcttgtggcctcagcaggacaggccccgggcactgcctcacagccaaggctggactgggttggctgcagtgtggtgtttagtggataccacatcggaagtgattttctaaattggatttgaattcggctcctgttttctatttgtcatgaaacagtgtatttggggagatgctgtgggaggatgtaaatatcttgtttctcctca

SEQ ID NO: 963 - DNA, 348 bp, Homo sapiens
ccaaggccctgccgcgctgtgcggcccacgcccacccgctgctcggaggcatctgtgcgaaggtgcagctagcggcgacccagtgtacgtcccgccccggccaaccatgccaagcctgcctgccaggcctctgcgcctggcctagggtgcagccacctgcctgacacccagggatgagcagtgtccagtgcagtacctggaccggagccccctccacagacacccgcggggctcagtgcccccgtcacagctctgtagagacaatcaactgtgtcctgcccaccctccaaggtgcattgtcttccagtatctacagcttcagacttgagctaagtaaatgcttcaaag

SEQ ID NO: 964 - DNA, 2582 bp, Homo sapiens
tagaggcagtcccgtggagcccgcctctccagtcccagccagaggggaccctggcctttggtgaccactgagaaggacacttcacgggcccagagctcctggtactgcccttcctttgagggccgtggagggctgtggacagcccagcaacctgtcgctcttggaggctggtgtggccttgaggagggaagcctcgcatggccgctggaagagaggcgcctcctggcctggctctgcagaacccaggggcacgctctgggcctgggctgaggaagtcccgctctccccgcggctctgagttggactgaggacaggtgtgggcgccagtgtgggtgcaggcgcaggtgcaggcacagggccactgtcctccaggcaggctttttggtgctaggccctgggactggaagtcgcccagcccgtatttatgtaaaggtatttatgggccactgcacatgcccgctgcagccctgggatcagctggaagctgcctgtcatctcctgcccaatccccagaaaccctgattcaggtctgcaggctcctgcgggctcaccaggctgctggctccggtaccatgtaaacctaggaaggtaaaggagcaggcaacctcctcgtggcctgtgtgtttgctgtgttacgtggactctgtgtgggctcctccctggggcccggccagcataacggtgcacccagggacctcccagtgcacccggggccctttgcaggggtgggggtgccacacaagtgaagaagttgggactcatctcagttcccagtgctattgaggagaacgctggggctgcattcattaccgctgagacccagagactggctgttcccagagaatggcccagggggaggagggctggtgtggaggggcaacctggactgaggccgaactcccttgggctcaccccacccacccctacctgagcatcagcagtggggggagggcagcatcgcaggggcagggactccctgggtgaggacagaccagccctcccgagcacctggcactcatgggctgaggctgacttctcctggaagaagggcccagagtggaaggaagaggcagagggtagaggtggtggctgggggctcctctgcagagtggggtggccaatggagagggctgcactcacaccgcaacataggactctctctcccttaagaaggcccccttagggtctgggctgccgcccccatcaccctaaaaccagccaaggtagctgaggccccagggcagacaatttcaccagcaggaggaggaggagtccagtgagcttggttgctcacagacagcaagggagctgtcacagaggaagctgatgaatggaccgctgtggggagactttaaagtagaacagtgataagggagggcaggatggtggggatgcagaagcagcagccagagagagacggactggggtgcagacggagtgtggaaaacgcataccttgaaatgaagcatccagcagatggggtgagtggatacagctcaggagattctcccaggaatagcagggaggcgtaaagagagacaacgtacagagatagatgaatggaaatgggtaagggaggtgttcattcacatccatctaactgcaaaatacaaaagtaagaagtcattgacatgaagcaacgacgaccaagacgttctcagatctaaaggtgaatgatctcagtcagcctggaaatgcacaaggtggaaaaataacataaaaaagccataagaccttgaagaacatcaatgtcaaagataaattctaaagtcccagagaaaaaagaatgggaatcaaattgacctcagactatacgtgagaaacacggagagccagaaaactgtgatgttccatcctcagagtttgaaggaaatatttgaaggctgaattttacatccagctaaactatcaaaggcatgcaaagtccatgttattcttaggccttcaaggcctcggccatttttctacagaaaagcctgattttaaaatgctcttagagacgttctccagccagaagagaaagaagccaggagggtgctctgagatattcagtcaccacagttcccaaatggcctaggaattcagagagtcagaatatcaccattactccccaatgggaacccccgacagtctcagcatggtgtgagggtgtggacggggggcctggcaggtaccaatcactcatcccgctcagtgaagacacagtgttcagctacggaagccataaggcaggccgagcttctgcccatccggaggaaatctcagctatccaacggcggtcaggagcagaggaaaataaagcagaataactagaaaacacgctcacagatcctaatgttaacggttacaaatgacgacggaaaaacaaactcctgaccatatattatatagtttcaagcagcaagaaggaggatattgaacattctcaacacacataataaacgcttgagatgatgatatgctcattaccctgatttgatcactagacatcccatgtatcaaaacatcactgtgtatccgatgaatatctacaattattgtcaattaaaaacatcattaaaaacagactagactgcattaaa

SEQ ID NO: 965 - DNA, 199 bp, Homo sapiens
cagcggtgcactaacgtgtgcagaaacagggctactctgtgtttccagtgtgggaaaaaacacagcttcaccaggaggttctccactgtggtggtctggattcagtgattgattctatttttctatagcaaagcatttttgtaaatatgtatggtataaaactgtagttttattatttaaaataaatacttgctgattt

SEQ ID NO: 966 - DNA, 4404 bp, Homo sapiens
atatggccgccttaaaagatgcagatgctgttgtgatcagcatgaagtttccctgtgaggccgtggttagcgtggacatcagccagcactgcacagacagctgcgaccaggacgtcagccagcactgcacagacagctgcgaccagagactggaggtgacccttgcccttttccacccttcgccagtccactgtgaaaagctgggttgattgtgcgggttagatagaggtcatcagccgggttgattgtgtgggttagacagaggtcatcagccaggttgattgtgtgggttagatagagatcatcagcctggtagattgtgtgggttagatagaggtcatcagccaggttgattgtgcgggttagatagagatcatcagccgggttgattctacaggttagatagaggtcgtcagccgggttgattgtgcgggttagatagagatcatcagccgggttgattgtgcgggttagatagaggtcatcagctgggttgattgtgtgggttagatagagatcatcagctgggttgattgtgtgggttagatagaggtcgtcagctgggttgattgtgcgggttagatagaggtcatcagccgggttgattctacaggttagatagaggtcatcagctgggttgattgtgcgggttagagatcatcagccgggttgattgtgcgggttagatagaggtcatcagccgggttgattgtgcgggttagatagagatcatcagctgggttgattctgcaggttagatagaggtcatcagctgggttgactatgtgggttagatagaggtcgtcagccgggttgattgtgtgggttagacagaggtcatcagctgggttgattctgcgggttagatagaggtcatcagctgggttgattgtgtgggttagatagagatcatcagctgggttgattgtgtgggttagatagaggtcatcagctgggttgattgtgtgggttagatagaggtcatcagctgggttgattgtgtgggttagatagaggtcatcagctgggttgattgtgtgggttagatagaggtcatcagctgggttgattgtatgggttagatagaggtcatcagctgggttgattgtacgggttagatagaggtcgtcagccgggttgattccgcaggttagatagaggtcgttagctgggtgtgtgggtcccaaggcgtgctgcagatggagaatcagaattccttgggcatcaccgggcggggcatgtccctgtcccttcgctcccagacccaggctagccgctaccaggactcctatcgagagctcttcagacactttgtcagaacccttaaaggtgggtgacgttttcaggaggaacctgggatgtcctgatgctcaatgggtagatgccttccaggctgcagtcagtgcagatgatatgccaatttcaggtggaaaattgcattccagataccgggttcagatttgaaattgtccatctcagtgatcatttacgttgcgtgtacttgagggagattctgagagatgctcctttggggttctgtgcgtgtaccatgttgcctgacacgtcctgagaaatcttcttaaactctgagtttataaaataactacttctgaactcctgagatctagtggataccatgtatcctggaagataggacactttctaccctctgtcagtcctgggggtgactgggaaccagagaggttgagcagaattcctggacctgggtggggcttgtccaagaggggcaggtgggcctctctaggatcagtgtcccacccagaggccagtggccccttcacatgccccaacaagaggaagactgtctggctccgcagtgttgggttttgtcctgaatctgtgcaaatgtgcagggaaataacctcctgaaatcaccaaagagcagttcctcagggccttccgggtgaccgtggccgtggagcagtcgtggtgaaaccggtcagctgtggacctgccctgcgaatcggcagaggcctccgtggtgaagacagaagctccgtgaaccaactcgaggctggagccaagatcctgcctgatatccagttgcctgtttcacttgttactgttactgggagagggagacaaaacctcatggcaatcttgtcctcactggagactcagaaggggaagcattgggaaaccatgtatgtttcatttctggtttaaccaggcttttcaggatgggacttcagaccaaggacacaagttgggcttgcttaggtgttttgtgttgtgcgcaggcctcagagatgctcttccggtcagagttcccttggcagggccttggaggcctctggttggctctctcaggaagagggcaggtcagggattgggcggtgtaaattgactcagaaacctgcggtttcagcttttctgtggcaaacagggccgagggctggtgaagctgttaaggctaaatgtcgcatgcatgaggcgggctgcaggcctccttaggccttttttggggtaattacaccagtatttaaaaacatttttttttgtttgttttgagatggagtcttgccctgtcacccaggctggagtgcaatggtgcgatctcggctcactgcaacctccgtctcccaggttcaagcgattcttctgcctcagccttctgagtagctgggattacacgcgtgtgccaccacgctcggctaatttttgtatttttagtagagatgggatttcaccatgttggccaggctggtctcgaactactgacctcgtgatccacctgccatggcctcccaaagtgctgggattacaggcgtgagccaccatgctcggcctaaaaaacaattttcttgaagaatccgattttgtgcatagtaatgacacagcaccattcctgagaaataggaaatatatgtgtgtggtatgaaaagcccatattctgttcttgtcacctgaatctaggcttcctctttggatgtgaacgcgggaatgaacagtggctgttttccacccaaaggggcgtggagaccttttggaaacgggctttctcctttccattttgcagccgggggcgggtggaaaccttccttcgaagggtagtgccttggggagcagcagacctgctctgagtccagcttagctttccaaaattctgtgtggaacttactggagatgtttttatatatttgaaaataatggcctgtatttctcacgctatacttaaaaaaaataactaaccttttaaacaaagatattcaaactcacccttgtgctgaaagcactcacatttctgtgttcattcctgaaagggcgttttagagtccccgtttctacgttctatgtggcaccctcttgccgagggaacatccagaatccctccacttcctgtctagtttgaggcctcaacaccttcatgatccagagtcctgcggctatgagggggtgggcccaccaccgcccagccctccttggtggacgtggggacaggtaggagcctagggaaaggggtgggcgggctctggtgtgacggcgtgagcgctagccaggaagatggggccagggcttggcatggcacctcacctgtgggggaactcggcggagcttcctggcggcatctccccctcttgccttggtcctttctatctttgttttaggccaatttctaaaaagactgaggcctccttcaaggttgaacagatttctagagccttgtttttgctgtgacaagtccctagtccctgttcacaactctgaaaccaagaaacctgagaaccaagagaactgaaatgaagcccgttggtctcagcctggcttgagccaacatgaggctctctgctgccttttgttttcttaggttttgctgagaaacgggagtgcgttctgtgtcggtgtttgtgacgccctgagaccctgcttggcctagctaaagtccagaaggcctgggccccacagggcttggatgagggctcatgggcctgtacttcaggaggcctgagaggcccggtcagtcccatgaggctactcggcttggcccgcaggtcctccgaggcacagggcagagggacaccccagggacccatcagactcacgacacagagaaactcaagtggggtgccagggccggccacagaggccacgggcttcctgcctgtgaggagccgccctgtttgtctgagccctttggagatttaggttgagtcatgagaaccggtcattggaacatacactttattatgttacaaaaacaaaaatccccactgaaacacagctaaaaaaataacacattttcccaagattacattaccaaaaacagttgttatgtcattggagggcgtccattaatactgctcggagaagcacgatcttacacgaaaaacacggatgggatttcgttttcaccttaaagcattaaagtgctttaactggtaa

SEQ ID NO: 967 - DNA, 868 bp, Homo sapiens
cgccagggccgcctgtccgcgtttgtttggccggttttgcggaggtttctatgcggcaatgctgaattatccgttagattttcaccccagtttttttgttggtttttttttttgagatggagtctcgctctgtcgccaggctggagtgcagtggcgtgatctcgagtcactgcagcctgtgtctcctgggttcaagcgattctcctgcctcagcctcccaagtagctgggactacaggtgtgtgccactaagctcagctaatttttgtatttttagtagagacggggtttcaccattttgaccaggatggtcttgatctcttgacctcatgatctgtccacctctgcccctcaaagtgctgggattacgtgatccacccgcctcagcctcccaaagtgctgggattacaggcgtgagctgtgcctggcccaccccagcattttttaagatgtatgtattcgttgttctgtttttccagatgattctgtcgtaaagtgatgctatgttgtcgttacaacatcaaagtgattttacggtttttgatgggattattcaagtgtcagaattaactgttcaaaatgttctgaatcatgtagatacatggcaggtaactgtttatgggagaaaagtacagtgctgttacgtggcactgtacagtcatgtgccacgtaacagcgtctgggtcagtgacggacacttacctgacagcggatccacaatattctcgtgcagtgtgtttggaatcctggtctgggctctcgtcgttggccttgtagatcaagtaggggaagtgagtgatgttcagtcatgctgctgggacacttggttttccagatgaaaacacataaataaaactacatgcaccatc

SEQ ID NO: 968 - DNA, 622 bp, Homo sapiens
cgcggcgctcgggctccttggtctctgtgagggatggagcgggtctcctgattctacaccatctctccagaactctctggccttggtggccccatgctctggctgctgtccccagctccccgccgtgcacgcctcttacgcgtctgtgccgtcagctctcgtgcaaacgatatggatgcagctaaccaaagatcctgcgtgcagtgccaggacctggccgcactgtacattaagccttcagggctgtctcaggccttccttagaatcagagaaggaagcgtcctgtttggagagagccagagagcaccgccgggaggcgctcgcgcaaggccacggtcagcacaggcacggtcccgctttccttagtgcttggagcaatttccataaaacattcaccagaaaccttttgcacatcggtctctgccacacgcagtagaatttccgcagggctgtggctcggccagcagcggttccaggagagtggcggtgcgcacgggcctccagccgtgccttccccctgcaggccccgtctgctgggcctgctgcccagtgcactcagccccaggtagcagaactcacgttcccactatagcaagaaataaaggcaaaagagaacatcttt

SEQ ID NO: 969 - DNA, 821 bp, Homo sapiens
gggccatacaaaataatgtccttgagtatttagtaccattaacaatttgacaatttagcacattacaagatttatataaaatgtatctccaagagaatgtcttaatcaaacttcagaactgacccatctaagtcaatagtgcaaagcacccaatacctgtggaggatgtactcatgggaactaaaactcaaaccatctttgaggttgcaaagctgctgtactgtgccaatgtcctttctttttttttttttttttttttccttggagacagagtttctctcttgtcgcccaggctggagtgcaatggcgcaatctcggctcactgcaacctccacctcctgggttcaagtgattctcctgcctcagcctcctgagtagctgggattacaggcatacaccaccacacccagctagtttttgtattattagtagacacgggggtttctccacgttggccaggctggtctcaaactcctgacctcgtgatacgcccgcctcagcctcccaaagtgctgggattacaggcgcgagccaccatgcccggccagtgtcctttcttatacacgtacatacatgatgatggcttgagtcagctgcagggcagtgggcttaatgagagggatctttgtaaagacagctcttcacttcagctcagtagctttggtcataggcaagtttgttttccattatcataatttgatgattcttgtgatgaattcaatgctagttcttaaagaactcttttatttctgtatgtggagctaatgtttaccttggaaattttgcaaaatacatgtaagaaagaaataaaatatattttg

SEQ ID NO: 970 - DNA, 455 bp, Homo sapiens
gggcttgagggtgacgtccttcctgcggcacccagctggggcctgtctgtgcccctcctgccctgcaggctgtcctccccgcctctctgcagcctttcacttcagtgcccacctggctgacctgtgcacttggctgaggaagcagagaccgagcgctggtcattttgtagtacctgcatccagcttagctgctgctgacacccagcaggcctgggttccgtgagcgcgaactccgtggtggtgggtctggctctggtgctgccatctacgcatgtgggaccctcgttatcgctgttgctcaaaatgtattttatgaatcatcctaaatgagaaaattatgtttttcttactggattttgtacaaacataatctattatttgctatgcaatattttatgctggtattatatctgttttttaaattgttgaacaaaatactaaacttttacacgtct

SEQ ID NO: 971 - DNA, 3635 bp, Homo sapiens
ccacgcctgccgggccacctgcccgacccacatgggagagaaaagctgccacctttttaggagccagcgccaccttgggacaaaaagggaaacctagtaatgccatcacatggaggacgaggcccagctcagctgggccagagcccagaagtgccacctcatcataattcaagtgttcttccacacagcgttgcccccacaaccacgccggacgtgccccctcgccaccttttccagacgacttcttagaagagatttcatttatttgtacatcttttgcactttcctattgaagacttgaacacgtttgtcttgataaaagttggatgacgtatggaagattcgaacctgcagcactgatgtctctttaccgatgggttccagacccaaggtagtcctggcactgccctgtggactcagcccagctggggaggacatggcgcccggtgccctaggagccctcagtgtcccctacctgacctgtctgcacctgtgtgacagccccttctgatttggccccctgcccgcttggagcctcccagcaccagacagggcaggtttggggagccgctgtccagccctatggtgagaccctggctgacatttcccctccttcctgccaaggctggaggccgccaggtgtttgctctctccttgtggggaggtggatcctctgccagcaggtgtctgtccccggcccagcgcatcttgaaggccctggactctgttaccagtggggggcctgtggccccggctcttcacagcaggcagaagcgtatgatcccagggagggtgggctggggggggggcagcacttgcctcggagccactgctgcgttgggtttgccttctgccagaggtgtggttaagggcagtgatagctgcgccccagcaaggagggtcatgggccctgagctggcccaggagaccctggccctgccctgtgccctgggatgcctaccctgcccacctccggaggtggaaccgggctgcccctgggggcctggacttgtcccattcccctgtccctggaaaggccttcccgggggctttttgcctgaggctgcactcttggaaggcgtggggagagttctgcctggagggggactggacccagtgccctctgcagacccctcccagccgcagcaccaagggcttgctgccttgtttcctgccaggagcgccctgacatcccaaaaccatcttcccacatgtgggttgttggaatcccacccactcccccggaccctgcccctccaagttggggacggagatggggagcaggtcaggccctccctaggcctgtttgtgtgtgatccttctcctggccccaggtcgacctggaaggcgtttctgagtcttgtactgggaccttcccagggaaggtgccttggggtgcagaatcctgggaatgttaggaaagggctgcgtgaaaaacccagctgggcctggggtggaggtgcacacgggctggggctcagctccttggagagggcctgcctgggactgagggggccagggctgggtcaggattcaccagcttgtgttgcagacactggagcgattgcctggccctccctaagccctatatgcctcactcataatgaggctgtctctgaaccccggagggcgggacctacaagtccttcctcttggcgcattcccacactccagtctggatccaggtctgcaaggccagcccgaccctgacactgcacgtgggcgtagtggggagcaccctggagtggagatgattgtcagcgggctcacatgttatggttcatccacatgcgtgttgtgtgctctgcggtgcctcctggcaaagggtcctggctcgggtcagaagctcactcccgtgccctcgtccccaaacaagcagtggcaagcactggggttggccctcgttgggagcagtgcccaccttccttggcccacagcagataggtcccgagcagcaggactggaggcctgtggcggtcagggcaggggtctgtgtctccaccccaagggctgatggtccctcccctgtgcgccttcctctcaggcaggcttgctctgtcccttcctctctgcttccctcccaggcctcgccagggctcccttctcctctgcctggttagactcgggcacccaggaaagcctggccagggctcctttgggcctgggccccctgcactgcctggtccagaaggggtggtgctgtccgtggccagcaccccggggcccgggaggggtgggctactagagtcagagcgggtttggggctgaccagtttgggagaggagaaaagatctgagaatgtccttcttggtttgtcagtcatctctgccaaaagtggtgatggtggtgtccgtatgtttggcgtctttgggctgggtttggtttttgctgctggtagaatcagggtcctcgggcatgaacgcgagcccaaagtgccagtctgcgattggaaatttccagccactttaagccagtgctgagtagggcttctgcagagccatgtttgagccaaggtcttggaaggcattgccccatgggctcaggtgactcggggtggagtgagcacgtctgcagggccctctcatacacgcctgaggcagaagcagcgtcccccgtgaaagccaccttccgaagctcctgcgttttttgcaaacttggcttcccccaggggcaggctggactttccctgccccctatgattgaagtcctcctgcttttgggggctgccttcccagagtcccccgggtgctcccctgccgaggtcaggagctgaccaagccttggcccggtgacacctgcagccctcactcctgtcatcccaggacacttgaggcccaaggaggtggagtggagagtgggctcgggtacatgggagccagaagccagatggacttggtcaagtgtcggtcacttggagcctccagtgtgcgtcagggtctgtgggcaggggacagggcgtgggtgggggccgaggctggcacgcccctctgccctcaccgtcttggtgacctggcctcggcccctcccccaagtctcttctgtgcaaggcccgcctcggcctcggcagctggttcctgtcctgttttctgtgtctgaaagtttacaggttgtggtgcatcagcccaaactcactggcgttgtgttttttttttctttaattttcagattttttttttaaacaaagtatttttttaggtgcgataacccagaaagggcccgttgggtgtgtgtgtgtgtcctgaactcctcaagcagcgattggagcccaagcacccctggagaggaagggagggtccccactggcccgtggggtctgagttcaggggtgtggagggagcagactccaccggcccaggcccagctaagagggggccgacccctttccccaggcacagccccaggctggcaaagggagggccctgggctgggtgcaaggcgcgccaggagtcccagccagggtggccccggcgggggcgggtccagctttggaagccaggctcccctgtgagccgtggcttgtctggtcttcgcccacgggaggctggacagaggctgtagccaacacaatcacctttactttgtactctgtgtgtatgttttggttttctgtgttttaataaatcctttgggaaagg

SEQ ID NO: 972 - DNA, 1651 bp, Homo sapiens
atttcatttatctggaaaattttgtatgagttcttgaataaaacttgggaaccaaaatggtggtttatccttgtatctctgcagtgtggattgaacagaaaattggaaatcatagtcaaagggcttcccttggttcgccactcatttatttgtaacttgacttctttttttttctgcttaaaaatttcaattctcgtggtaataccagagtagaaggagagggtgactttaccgaactgacagccattggggaggcagatgcgggtgtggaggtgtgggctgaaggtagtgactgtttgattttaaaaagtgtgactgtcagttgtatctgttgcttttctcaatgattcagggatacaaatgggcttctctcattcattaaaagaaaacgcgacatctttctaagattctctgtgggaaaatgactgtcaataaaatgcgggtttctgggccattcgtcttactttcattttttgattacaaatttctcttgacgcacacaattatgtctgctaatcctcttcttcctagagagagaaactgtgctccttcagtgttgctgccataaaggggtttggggaatcgattgtaaaagtcccaggttctaaattaactaaatgtgtacagaaatgaacgtgtaagtaatgtttctacaggtctttgcaacaaactgtcactttcgtctccagcagagggagctgtaggaatagtgcttccagatgtggtctcccgtgtggggcccagcaatgggggcccctgatgccaagagctctggaggttcttgaaagaggggacacgaaggaggagtgactgggaagcctcccatgccaaggaggtgggaggtgccctggaaatagctgcctcatgccacttaggccatgactggatttaatgtcagtggtgtgccacagtgcagaggctagacaactgaaaggggctaccaaggctgggaaaaaaatgcaattgttgctgtgagtgactttgaaagactctggtgccttgtggtgcccttctgaaattcaaacagtaatgcaaaagtgtctgcattagaatttacggtgtctaaaattcatgtttttaaaagagcttgcctacagatggtttccacacttgaaattgtgccctgcgagttgcatagctggaagttcaatgctcagtcctaccttggctcccattaaacatttggtgctctgtggattgagttgaacgtgttgaggctttgcaatttcacttgtgttaaaggctctggcatttttccatttctatgcaaatttctttgaagcagaattgcttgcatatttcttctctgccgtcacagaaagcagagtttctttcaaacttcactgaggcatcagttgctctttggcaatgtcccttaaccatgattattaactaagtttgtggcttgagtttacaaattctacttgttgcattgatgttcccatgtagtaagtcatttttagtttggttgtgaaaaaaccctgggctgaagttggcatttcagttaaaagaaaaaaagaaactagtcccagatttgaaaacttgtaataaaattgaaactcactggttttctatgtctttttgaactcttgtaatcgagttttgatcatattttctattaaagtggctaacacctggctactcttactgt

SEQ ID NO: 973 - DNA, 3885 bp, Homo sapiens
cgggcagtggccccggtgaccttggggcctccgaccctgtgcagcctgggacaaaactgtttccggttggccgctgccacatggattttcttaatcgttttatgtcattagtcactcttctggaatgtcactcaagaccaagcggtcagaaggcctgaggacccaaggccccactggagcagtctgtccttatgccgaatcaaggcggaacatgggtgaaagacgagtaaggggcaaatcacagcaatattccacagcgccctccagagttacctggggaggaccgaggccacacgccactgcccccgaggccagagtgtaagtaaaggataaccaggactcgctgggagagatggactctgtcctcagcaacactccacagcagaaaggggtagcaggtaccccttcttatcagcggtaaaaatgcatttacaacctttcatttaaccgaaaaacacagaccgctttaacctctttatttctgtcccccactgcatgaacatctatacaattttaaaaatacttcctcataggatgctttggcccttcatctatttaatcatagctacatacctattttttataagtagcagtacacattcaaaggggtattcctagctcaatgcttggtgttctagttcaacttttatcctgcagcaagtaagcctagataactctacacgatttggctgagtggctttgtgtgaccgtggccccaggccaaggggatcatggccctggctggctttcccgggggtctcagctcctgttgtcagtgataggcggctcaaaggagcatcagtttcttttgatccaagaagtgcttactgaatgcctgccctgtgcgtggccttaaacattgagaagtgctgctctccgtttatttgggatttgattctcattttaccatagcttatattctcaatttcaatgccagtctcagaactcttgttttctgtgttctgttctcaaaattacattgtccctcatgtcatttcaaactgttttccaaagggatttgagcatatacaactacaaatccaagcagattgactctcaaaaataatcttaaatactgcaaatagtcccaactaagattcagtcagtatgtttgttttgcaagtttgggagagtaagttggctttgagtcacacatcgaagctttaagaggtgagacgctggcttcattctggactagacaggaacttggcctcagcgtgagatcctgccatgcagtgttgcggtggcactgaagaagtgtgaatgtgaaggcggcgtcggcgcggggccagagcaccactctgctgccccaccacgcggcctgtgaggagccactaaacctttccgtgcctagacctccccatctgtggaatggggtcaataccacctacctcacaggggtgttgtgaggactgagaagaacaatgtcaaatgtttttaatactcagatgtgggagcgacatcaatgaaatctgtactgtatgaaagctacacaaaaatgggcagacatttggttaattgtgccagatacctaaaatgtatgttcagaaaagcattttatcaactcagaaatatgacttatttctagatttcatggcttaatgaattttttcattgttatatataccaaagaggcttacgggttcattgattggtttgaaaaccagacagacggccgggcgcggtggctcacgcctgtaatcccagcaatttgggaggccaaggcgggtggatcatgaggtcaggcgttcgagaccagcctggccaacatgataaaaccccgtctctactaaaaatacaaaaaaatagctgggcgtgctggcgggtgcctgtaatcccagctactcaggaggctgagacaggagaatcctttgaacccaggaggcggaggttgcagtgagttgagatcgggcctttgcacttcagtctgggcaacagggcgagactccatctcaaaaaacaacaacaacaacaaaaaaaaccggacggacttgcccatcggccctcacgacacgcgtgcagtgggactctagccaaggcggtggccgagccatcattacaatttttctggagtaaaggatccacggtgggacatcaactggcacttactctgtttaggaacttgagttgaatcatttctaaacttgtcctttagaccacgcctagggcagcaaattccacttcctagaactgcaaaccgggagaggatgtagttagattctggcatcctgccccggctctttgagggaaaagttctttcccctgctctaagtagggcgggcccagcctccattcccattgggagccatgaagttgtcttgttgataggtctagggcagctgttggcagctgctggccttgtggatggtaagctgactgtgttggcatttaatgccatcctccatctgccagaggcccaggaagcccaccttcacaccaggcccaccagctggaaggagcccaggaggcaggtcttagggtttcatggtgaaatgctgtctgacaccagggaaaacttgacgtactctgctttggagaggaattccaggggtagggatggtgggagaacattcccaccctgtttataatcccagagcagaagtcagcaattacttagggataaaagatgaactccattttttttattttcttaagacagtcttgctctgtggcccaggctggaggctggagtgcagtggcaccatttcggctcaccgcaacctctgcctcccgggttcaagcgattctcctgcctcagcctcctgagtagctgggattacaggcttgggccaccatgcccagctaatttttttgtatttttagtagagacggggtttcaccatgatggccaggctggtctcgaactcctgacctcaagtgatccacgcgcctcggcctcccaaagtgctgggattacaggcgtgagccaccacgcccagccaagatgaactccttaaggacaggatttggtaagtgattgacttctttttagttccatgatcttgagattatttttagctttataaatttagcagtggcagggcccgtggagaatcaggttaatgaggtaaaggctttctgggtatttgctgccaaggccacatcaccaattttctcgatttaaaaaactgtcaagagatttatttttccattgcaggttttaaagtggagattctgaagtggaaaataggtactgtcagaacaaagctacctggaaacagcatagagtgaagcctttcgtgagggcttgcaggccgctgctgagtggcagtttacagaagaggtcgcggggtgagcctcttagcaggacagaaaacaaggcagcagcgcacctgccaccccttcacgagctgctccttgagcctaaaaagtaggctttattcatcccttctgttcatttaccaacctgggggattgatacgaccggggaaaatgttcctaaaccaggaagctgcgttagccgatcaggctttgtaagatctcgccaacagctagctgcttaggagtacccccacgatacgcacagcacaccactgtcccttcactgcactttcttcctgccttaggtagttgggcttgcccaccctagtttgcttttgtagtggtttggcaaggttagaaggcctcggcctctctgtcatgctgggaagtgcctactctctgggccactgctgcagaggccgtggcacttgtcatgggtttggaagacccagccatctgcagcagaggcagcctatcccattgcaaggagaggaactgaacggagtaattattctactcttctttttacataaatgtttatttaaatattctaaattggattttctttcacagatactgattattctttccagttcttaaataaaactgcacttgatttcactc

SEQ ID NO: 974 - DNA, 542 bp, Homo sapiens
gaccgccggcgcctccccacggacgccaggcaggccaggccgctctccggggccgcagcaccaaagacgcccgcctccgccccgcgcgcagacatgcgccacccctcccaggggtgagggggcgttggcctcagcgtttgtcttccggctcctcccagctggccttgtcccaggggcgacggctgccccggacgactgcgctgggcaccgcatgtcccgggccgagtgaggtcgggcctggggagctgagtgacatcccaagcttgggcttgggtagtgagtgacatgtgcacacgtccagctgcgccatcaccagccctgcgcaacaggacgtcgggagcagggaacctgagacagggccactgcgggatcggacaaagccccgctttggagaggctgagctggagccattggcctccccaggggctttccacccacactgcaccataaccgccacacccttcggggggggggagggtacagagggtctctaagcacaggggtgttcagagcccgaacaagctttgatcaggtttccctgc

SEQ ID NO: 975 - DNA, 324 bp, Homo sapiens
actccctcctcctgccactggtgcctcgagtagccatggcaacgggcccagtgtccagtcacttagaagttccccccttggccaaaaacccaattcacattgagagctggtgttgtctgaagttttcgtatcacagtgttaacctgtactctctcctgcaaacctacacaccaaagctttatttatatcattccagtatcaatgctacacagtgttgtcccgagcgccgggaggcgttgggcagaaaccctcgggaatgcttccgagcacgctgtagggtatgggaagaacccagcaccactaataaagctgctgcttggctgg

SEQ ID NO: 976 - DNA, 3637 bp, Homo sapiens
cccctcggccgatccacagaccctgccgactgcttgggaccttggggcactggacaggttgaagctcttggtggcggctgctgttcccatcattaggggccagcccagtacccacacccaggccggaagccggctgtttgtgactggcgtggcagactgaaagccctggggctggggctcggctcagggaataaaaggagcgtccctgcttcacccccaacttggctggagaagaaaggacaagaggcagcagggtgaagaagaagccccccatcccagctggtggagatagttctggaactggaccccgcagctgcgtgggcagccgacacacccaccccagcactggcaccagaccagagccagagccaggacctgggcaaagtgcagccgtgcaccctgcctggtcactgctctcccagccctgcctgggcctacctcctgcccagctctgcttgggaccctctgggcatgcagcagcagtagcctaagggctctggtcacttccagggctctacagggcagcagagcagagcaaaagggtgcatatgctgggagctgtcacctccactcctaggcttttctgcctagagcagaattataggggcagtatacatccaggggtctgtgcggtggggctgggggattccttaagtgactttgggaaggatttgttttcccgagcatcaatttcacacctgggcattgcaccccaggctatgcagtctttcagtgtgaggaaggggcagaacaagaatgaggcggccccgtggcctcaaggaagcttgtggctttggaggatctgactccagcagagtctgtgccaatgtggggtgagcagggcccctgccatggagcagcaggaatttgagggatggagcaggttaaagaatgggaaacatcttcacttgtttttttttcttgcaaactactccctgctactcattgagactggttactggaagcaacttgttaagatttttctttctgggcgggcgcggtggctcacgcctgtaatcccagcactttgggaggccaaggcgggtggatcacctgaggtcaggagttcgagaccagcttagccaatatggtgaaaccccgtctctactaaaaatacaaaaattagccgggtgtggtggcatgtgccagctactcgggaggctgaggcaagagaatcacttgaacctcggaggctgaagttgcagtgagccaagattgagccattgctctccagcctgggtgacacagcaagactctgtctcaaaaaaaattttttatttctttcttttccatggaggcctagagtccctgtgaaggctaggaaggggctgctgatcccaggagtgcccacgaggagtggggggcactgttggcccataatcaggcaaacacccatcatttcatgggggattcatgaaatcatagtcaggcaaacacccgtcatttcatggctaagcatttgcagaaggtggaggattctcccccgagtccccaaatcagcagcctgtgctagggaccagagcaccgggggcaagaagacagaaccaatgtgggagtggggatggtcactaaatctgactgtgccacacaagcccatgatgaccttggcactggtttgggtggcaggatatgaaggaagctgtaggcattattgaaaaaatcattgttcagccaacagggtgaggctcccagcaaggccgtgccatcttcccacctccctgtgcccagagggttagactgtaagctcccggagggcgaggctggggctgagcgtgcctccacgtccccaaggcacagggtgcacagtgggtgctcactgaatatagtggactagtgagcagaggatgagaggactaccctgtaatgagccttggacagtctggcatttgccttaactcccactcccatgccctgggatcactgttggatatttactccatgaggacaaatactggggaggtgtggagaggagggagggcaggttcctcttactttcacccattgctgagaatgagcgcctgttggcactgcctttgtgagcctccgggagcaggtaacctgcggcccaagcccgcctaggactccacatcaggcaggcacaggactggccccttgtcctcataaaaactctcagtacagcttaaactctgtaagatctaaccagccaggaggaccctcgcttcctctccgccatgcttgccacctcttgcttctgagagtccatctcagttcgcagttctgtgacttgcattgacctggctccaatcaagctacaactcaagcagtcacggggagaaggattgtagatgggccagtgactcacagggtcaggcactcgggggagcctgagtcaggaggtcagtgggccctggaagggagggggcaagcctgggtgggtaaggttctgggccccaggcaagaaggcagagtttctccgcaggggtgtgtgcaagagctagctgcgcagaaggtctccgctggctctccaagccgggcttgtgaaataggaacgccaacatcctcctccacaggcagtggcaggcacctcctcctcaggtgccccccaagccctatctgatgggcaaaggtgaacgcagggcggtgggcttttcctgtgcagagggagactgattcaaagggtcatttatgacctttcacaagtcccacatcctgcccaatggccaggtcttgggatgctgttgcaagatggttctgtgactccatgtgactgtctgatgattgccccagctggggaaaaggctcccatgtctctttctcataaaaccagtgggcaaggccgggcgcagtggctcacgtctgtaatgccagcacttcgggagaccaaggtgggcggatcacctgaggtcaggagttcaagaccagcctgaccaacatggtgaaaccccgtctctacaaaaatatggaaattagctgggcatgacggcgggtgcctgtaaccccagctacttgggaggctgaggagggataatcagttgaacccaggaggtggaggttgcagtgagccgagatcgcgccactgcactccagcctgggtgacagagcaagactccatctcaaaaacaaacaaacaaaaaactagcgggtgaaatgattcagtgacctaaggacagccagagcactaagctgctgggaacccatctgtgctgaaatgtagatttcccaggaaactcaggcttgggacaggcgcctacctgctcctcgggcaccaggtgattaggagaggtcgaatctcatttccacgtgagtgaggataaagactgggctgccaaggaggactcctcataaacattgacaaattgctctgccccgcctgtgatcccagacgactcctgcagtctgggatcctgagtgtcctgtgggttcatctcggatgggcgctgcataaacagcctgcagggaacgtctgggagaaccagcttcacaacagatataataaggaagaagtttgaaatattgcaagaattgcgaaagtgtgacacacagatacaaagtgggcacatgctcgtgggaaaatgttgccaatagacttgcttgactctggagttaccccgaaccttcaatttgtttaaaaaaaaaaaaaggcaatatcttgacgtgcaataaagtgaactgcaat

SEQ ID NO: 977 - DNA, 273 bp, Homo sapiens
cacggcgcccacttgccacctaggcgctctggtggcccttgcagaagccctaagtacggttacttatgcgtgtagacattttatgtcacttattaagccgctggcacggccctgcgtagcagcaccagccggccccacccctgctcgcccctatcgctccagccaaggcgaagaagcacgaacgaatgtcgagagggggtgaagacatttctcaacttctcggccggagtttggctgagatcgcggtattaaatctgtgaaagaaaacaaaac

SEQ ID NO: 978 - DNA, 1471 bp, Homo sapiens
gcagagggaggcccccaagagtgccattgaccaagagacagcagacagcctgcctcctggggcgtgccggcacctgcttcagctactgcctcctgtatgcatgagccggatgctgggcaggatccctgcctacgcccgggcccgatttgcgctttgccggactggatggagtggaggaggcccaggccacagtaccaccccacctgcccaggcagcccctcgtcacctactccccgaagttaccagctcagctcgagtcttcagggctgggctcctaggctgcccatcctacttctaccctcactggcctccagtgggattcactcctgccctgcccccaccttcccagtcccacaggccacccctggcttgggctgggttctgtgaagttacgtatttattgagcttttggttcttttataaagacttgtctagactccactgggaagagtcctttgctttggggcccagtgactcggggcacttgagttcagggcggcctccttgtgttcctgtgctcctccacttgccacggatgggccacggatggagcttgccatgggaagcactgggaagtaatggggtgtggggtgccaccagaccaacacccccagacttccccaccttcagccaccatcagagcctctccccaggtgccccccggggattcagggctgaatctgcccagttcccacactcaggccagccctcttgggaaggtgggtcctccatgggggtcccttcaggaactttttttttttttttaatacagagtctcactctgtcacctaggttggagtgcagtggtgtgatgtcggctcactgcaacctctgcctcccgggttcaaacgattctcctgccccagccactctagtagctggaactgcaggtgtgcaccaccacgccgggctagtttttgtattttaagtagagacggcatttcaccatattggtcaggctggtctcgaactcctgaccccaagtgttccgcccgcctctgcctcccatagtgctagaattacaggcctgagctactgcgcttggccccttgcggtacttttggcccaacctcctccatggctggggacgcggaggccgagagagaagtcacttgccctggctctaccttgaagtggttctcagggttggggcgagagtcggggtggggaccgagatgcagctctatcctgtgcccctggtcgcagcaggcagcccagcgcttcgcgtgttctacttggcctgtccgctgccgcctaatgagctcaggtctaggccgagcagagggggcacctggtcggactcggttgggctcgggcggccccgcctccccccgcccgccaggcgggcccttctcgacggcgcggggcgggccctgcgggcgcggggctgaaggcggaaccacgacgggcagagagcacggagccgggaagcccctgggcgcccgtcggagggctatggagcagcggccgc

SEQ ID NO: 979 - DNA, 704 bp, Homo sapiens
tgctcgcgtttttaataagggaagaaactttcctaccagaaagctttgtctcaagcctgaccacaagagacatgatggagtttcatggccatgaatggtgcccttattagcaacagtgttttttgtgtaattcgtgaatgtcatatagtagtcttaagtttctcttttaaagctgcatgagctagaatttgttctagtcttctgtgtgatactcatacttgctgtccagagggagtaaaacagcagagaacagtttgtgtgccattaaaacagagattcctcagaaagttcttcagggacctggttattagaatcaggataaaaataaggaaactggggccattacaatgtaccgagaaggaaggaagaaggccgacctgcaggatctcaagcataatggatacaagggctcgccacgggccttgcctgagccatgtgcagagctggggtccagcggtctgcttccttggagccagtgtggatggttacagcccatccatttggtgcagttgtacttggtctgttatattcaatcaaggtttaatagatagggctgggcatggtggctcatgcacacctgtaatcctagcactttgggaggctgaggcgggaggattgcttgagcctcggagttccaggctggagtacaccaactactccagcctgagcgacagagtaagaccttatcttttaaaaaagaaaag

SEQ ID NO: 980 - DNA, 2640 bp, Homo sapiens
ccccagtctggcccggcacgggcctcggtgcaggtaactggcacctctgcggggcagtgccccactcctttgtgcacaaggacacgttgggctcacaggaggagcacaggctcttgggtggcgaagccagcccaggatccattacctggaaggtttctgtaccttgagagcctgaatcagaggccgtcgggaacgccctccctgcagttgaggaagagccactttcctgccagcacatgtttctgggtcttggaggtcacccccaccccgcggatcacagctcacccacgcggcgcacacccctcctgccgttgtcatctgcacctacttgttcccaccttgggagaggacgatgacttgggagggacgcgtgaagggagaaggggtcctcccatgaggctgaggatggcctgaacctggagcagcggaccaggcagacgggctgaagtggggtcccaaattccatgtccagaggtgtggggagcctgcctccctagctcctggcccctgccaggggcttacatcaaaacacctcagagggctgccctccagaggctgcacccagaacagtgggacatgagcaggggtgtgggcttggagggtgaagaggatgtggtcctatcagatgctgggcctcctcagccatagccccctgctcctaccccctgactggctcttgcgtcctcacctctcaccctctccttcccgggaggccctgggaggtgatcattgacacccagccaagcagacagctgcgggtgcccaagcccttgctgggcctgcgcgtgaggagtcccactgcttctaaaggaagtcctgggcaggaggtggctttggtggttggttccaaagttgaaaatgcttgcagtttgaccttagaagaagtgggaagaagaaggagctctacagggtcagctttgtttgatttgtccagtctaagaagtcccattgccaaagctttctgcaggagggtgaatgccgcagcttggcagcccctgggtttctcttggaaatggtcagtttcccctcaaagtacccaaagtagccttggcttgagtttttgtccttgcctcctttttagagaagagggcatttagactgcattttcctggttaaagaaggttaaagcaaatgtttattgccttttctagtgaactaactcgtagagatgttctcagcaggaagacagtcttagcactgtcacttagcagattgcacttaagtcccttgtgctggccagatggcgtggctggttgccttaatatgtcccaggacccctgacagggctgcctggcctctccctcgtgctcctcaagagcccagtccatacactgtggatgtcattgctgtcgggttaggaagtcttgtcctagaacgccctggctggtatgaccacagttcatggcggctcttctcgcttgggtcatggtcatcttccagcacctgctgtgctgggaaggccgaggatgggggcccagcactgtccaggcctgctggggcctggctgggagtcctgtgggcagcatggaacatgcagctgggcttcctgtgaccaggcaccctctggcactgttgcttgccctgtgccctggaccttttcctgcccttctccttcctctgctcccttggggctaccccttggcccctcctggtctgtgcaaactccctcagggagcccccctgccctgtagctctcgcttaacttcctaggggctgctgagcccacccagaggttgttggagttcagcggggcagcttgtctcccttgtcagcaggggcgtaagggctgggtttggccatacaaggttggctacgccctcaatccctgaccgttccaggcactgagctgggcacccacggaaggacatgctgtccagactgtgatgactgccagcacagggcatctcgggcttggctggtctgcgaggccttgcccctgtggaactctgggttcctgttttctcagtcttttttgcggctttgctgtggttggcagctgccgtactccaggcttgtgtcggccactcagatgagggctgtggtgcgagccagtgcaggagagctgcgcttgggattgtgccctctcctgtgtctgtcctccggacctacccaggtctccaccatcaggaccctgtctttgggtttagaagaccaagtatggggaaaaccaggcaccagcctctgcagcaatgggtccctctagcctgtggacaccagctgggggatccagggtcaggccccctcctctccccagtttccctctgctgtgggttctgggctgtcatgtctccaccacttaaggatgtctttacactgacttcaggatagatgctgggatgcctgggcatggccacatgttacatgtacagaactttgtctacagcacaaattaagttatataaacacagtgactggtatttaatgctgatctactataaggtattctatatttatatgacttcagagacgcgtatgtaataaaggacgccctccctccagtgtccacatccagttcaccccagagggtcgggcaggttgacatatttatttttgtctattctgtaggcttccatgtccagaatcctgcttaaggttttagggtaccttcagtactttttgcaataaaagtatttcctatcc

SEQ ID NO: 981 - DNA, 1504 bp, Homo sapiens
actgccaagaaccagatttttaaaaggccgcaaaaaatcttttcctgggagtctacaaatttggaaatgaaaaaacccagacatcagatgtttttattttatattattattatagaaggtggtaccattatcaattatgtgaagggacatgcagacaccccagcttttgagggtgctgggggtaggactgaggcagccccactgggaaccagactgcagcctggcccatggctgttttcccaaggatcagttcctggagggaagggctctggccctgactccgctgtgtcccgagcacacgtgctgaccgcagcccgccgccctgtagttcttggctgggtctggaggtgtctgtggagcaccctgccctcaccacaggagcgtgagccacttctgcagtccacgctgaacatgggaaacaacctgaaaagcaggcaggcctcccggtcagggagcctctgctgtgctggcttcccatgaccacctcctcttgctgaaatattactgcttgaatctggagcagattgcgggtttataaaactgctttttatctgagaacaaacgggtttggaaattagtcgtcttttttccccactcccagagctgctcaagtcattccaccggccccctcggcttgggacagggtagtgtaactcccgatcccagggcctagccctgacacaggtggcttcccgtatcccggtgggaaaacgccctgccaccagcgggcttgagctggcctgtgtccctccaccgcctgcaccacccacctccagagtgcagtgctgggcaagggcagctcaagaggacaggaccaggcgcttggcaagacatcagacacacccaacccaaaggcgtggaccccaggcccggcccgtggtacccagcaggtggcactgcagctccccgctcctgcaggtccagcgtcctcacaggaacaccagggcctgtgctccggagccttccttcagacccttcctccacgtgcccacttgggatgcagaatgcagcggagctaggaccccctccacggcctggacctcggctgcagtaaagttacgtgaggcctgtctctcggggcctggaagtggcagccatcagttgctcttgctgacccctcggagcaagcgccgcacaggtggtggctgagacagctggcgcggggggccccaagctgcgccggcctccagcccacccacagctgttgctgaagtcaggcctccctccccagcactggtatctgagtaacggctaagaacctccttcctctggttttgaaaagcagttcgggttgtccaattctgtaacattcatctccattttttaaaaaggtttctctgacggccccacggcccgagccgcggtgagcgtcgtgttgcatgagcctgggccccgggcttcccgtgcgcctctgccgcaggtgcttctgggcacccatcctctgcgtttcatttgcagtcgactgtacagaaggcactcaccacaataaacctttcctgaaagc

SEQ ID NO: 982 - DNA, 151 bp, Homo sapiens
agtgaaataagcatctgttagtcagctcagaaacacccatcttagaatatgaaaaataacacaatgcttgatttgaaaacagtgtggagaaaaactaggcaaactacaccctgttcattgttacctggaaaataaatcctctatgttttgc

SEQ ID NO: 983 - DNA, 987 bp, Homo sapiens
aatggaagtcaatagggctgttgggactttcttgaaaagaagcaaggaaatatgagtcatccgctatcacagctttcaaaagcaagaacaccatcctacataatacccaggattcccccaacacacgttcttttctaaatgccaatgagttggcctttaaaaatgcaccactttttttttttttttgacagggtctcactctgtcacccaggctggagtgcagtggcaccaccatggctctctgcagccttgacctctgggagctcaagtgatcctcctgcctcagtctcctgagtagctggaactacaaggaagggccaccacacctgactaacttttttgttttttgtttggtaaagatggcatttcaccatgttgtacaggctggtctcaaactcctaggttcactttggcctcccaaagtgctgggattacagacatgaactgccaggcccggccaaaataatgcaccacttttaacagaacagacagatgaggacagagctggtgataaaaaaaaaaaaaaaaaagcattttctagataccacttaacaggtttgagctagtttttttgaaatccaaagaaaattatagtttaaattcaattacatagtccagtggtccaactataattataatcaaaatcaatgcaggtttgttttttggtgctaatatgacatatgacaataagccacgaggtgcagtaagtacccgactaaagtttccgtgggttctgtcatgtaacacgacatgctccaccgtcaggggggagtatgagcagagtgcctgagtttagggtcaaggacaaaaaacctcaggcctggaggaagttttggaaagagttcaagtgtctgtatatcctatggtcttctccatcctcacaccttctgcctttgtcctgctcccttttaagccaggttacattctaaaaattcttaacttttaacataatattttataccaaagccaataaatgaactgcatatg

SEQ ID NO: 984 - DNA, 1475 bp, Homo sapiens
accttggggtcatggttcagcagaggttacataggagcaaatggttctcaattttccagtttgattgaagtgcagagaaaaatcccttagattgcaaaataaaatagttgaactctctgtcttcatgtggaaggtttagagcagttgtgagatgctgttatgctgagaaaccctgactttgttagtgttggaaaaaagtcttacaagtctataatttaaagatgtgatggtggggaggggaggatggggaagctttttatatatgcatacattacatacctatatataaacttgtggtataaccatagaccatagctgcaggttaaccaattagttactatcgtagagtaatatatattcagaataataaactcaagctggagaaatgagtcctgatagactgaaaattgagcaaatggaagaagatacagtattgtttagatcagaatcattaaaaaatatttttgtttagtaagtttgaagatttctggcttttaggccttttctattttgttccatttatttttgcaggcaatcttttccatggagggcagggtatccattctttaccatgggtgtacctgcttaggttaaaaatcataccaaggcctcatacttccaggtttcatgttgcgtcttgttgagggagggagagcaggttacttggcaaccatattgtcacctgtacctgtcacacatcttgaaaaataaaacgataatagaactagtgactaattttcccttacagttcctgcttggtcccacccactgaagtagctcatcgtagtgcgggccgtattagaggcagtggggtacgttagactcagatggaaaagtattctaggtgccagtgttaggatgtcagttttacaaaataatgaagcaattagctatgtgattgagagttattgtttggggatgtgtgttgtggttttgctttttttttttagactgtattaataaacatacaacacaagctggccttgtgttgctggttcctattcagtatttcctggggattgtttgctttttaagtaaaacacttctgacccatagctcagtatgtctgaattccagaggtcacatcagcatctttctgctttgaaaactctcacagctgtggctgcttcacttagatgcagtgagacacatagttggtgttccgattttcacatccttccatgtatttatcttgaagagataagcacagaagagaaggtgctcactaacagaggtacattactgcaatgttctcttaacagttaaacaagctgtttacagtttaaactgctgaatattatttgagctatttaaagcttattatattttagtatgaactaaatgaaggttaaaacatgcttaagaaaaatgcactgatttctgcattatgtgtacagtattggacaaaggattttattcattttgttgcattattttgaatattgtcttttcattttaataaagttataatactt

SEQ ID NO: 985 - DNA, 2681 bp, Homo sapiens
gttatttatttgttaacgctggctgtggaaaccccagttcttggggggagaaacaggactttttacataaaataggagctgcaaaagcaaaaagaatatcttctaaagatttctttatatatttaaaaacccacaactaaaaatgtatccacatagtagtgttcgtttgtcgagaggatttcctgagactggtttggatctccctgcatgacagtcccccagaaacttagtgagtcctggactggactgaacatccagaaagcttccctgcaatcttggggtttggctttagttttcttttccttgatttctcagtaggtgctagaatccagttcacacccttcactgtgcgtgcagacacactgacacactccgccacgagtgctccagagcccacgaggcttgcagatcgggggcataggaatttggaatccaagagctataatttttaaaaaaaaaaatcttttattttaatacattgtaggaaatcttcataattggagaaagttctgcagcatggctttttacgtctgtaaataaataattttagaacagcctttttttcttccataaactactattgtgatctattttttccagccatgtcactaattgtgaattcctaccaactattgacagaatacagagttgattttttaataaaaagttatatataattatccctttaattaaagggagcaaaggggcgttccacatggacagaggcttggaccgaggcctggtcacagcagcgagcatccagggtttgcagggacgatgttacagactctgttttctgcctggcgtttcacttgtgtctgctcctagcctgtgctctgccagcagcacagacatctgctccatcagacctcttccattttgcacagggagtgcaggaggtgaatgttcactttctgttctccagtgtcactgttctgtttccacgggatggaaagcgcatgggcctgtgtccattgtagatttccttctagatttctgtgtacacacacttgattgttctggatgaatgtcttttttaatactccgaaaatttcatcatctaagaaaatgattccatacaaataactcagcacacaagtgacccaggacatatgcctgccaaagggatgtgttagaaggctgccttctcatgcgcattgtcacttggatcttgtggtgaggacggccccatctttcttgccacagattgaggccacttttgagcaagggagatcctggagttaagacaggtgttgggggcagcctgtattttaccctaggggcaggtctgcatggtgaccccacattgcactggtaaaccatttgagtcccactcttcatcctggaagtgggaactggagtcccacccacagtgcattcagaaagcatgctgtgtgggggctgcttctcaggaggccaggcccttctgagcggaaccgtcctggagagagcctgccctcgtttccaggctgcagccgtaacgcactttctcccaggctgagggcgggtgttctggggtgtctgccctctgtcggccctgcttcctgccaggacgtggcctcttccgatccttttctctcagacactggaggtctcttctgccattgtgctggtcccatcccaagaattgtaggacagagaccacactgggtcggcggacacaaagtccatccaggacccaggccgcagagggagcaggaagagatgctgatagtttgatctagaaaccagcagctactggctcaaattcaggttctggcgtcaaatagcgacatttccagtttctcttaaaaaccgtgtttggtttcagttgggataggcttgttttgtctgttgaaaatgtttctagttttttttctttcatttttctctcattccatttctgccttaactttagtttgttcacagggaggcaaagctgacatgaaccttttgtcgtgggacttcaggccacattggcttgaaggcattcgtttccttctggggtggggacaggccctcatggcaggcttgttcccgtggctctgagcgaggcctcttcctgctgggctcccagactcctgcatccaggcccccaccttctcggcttctggtttttctttctttttggtagaacacaacatctaccattcagttaaaccttctttatctcctcctttggcatccatttttccaaagaagagtcgagtcctctgaggtctgtgcttgaaagccgtccgaaggcattcttgttagctttgcttttctccccatatcccaaggcgaagcgctgagattcttccatctaaaaaaccctcgacccgaaaccctcaccagataaactacagtttgtttaggaggccctgaccttcatggtgtctttgaagcccaaccactcggtttccttcggattttcctccctttgttcggggtttggtttggctcctctgtgtgtgtccgtatcttgttcggtgtcctcgaggttgagcttcactccactgcggcagaggcagcgtgcacactcggatttgctacgtttctatatatcttgaagctaaatgtatatatgagtagtttgccatgagataacacagtgtaaacagtagacacccagaaatcgtgacttctgtgttctctccatttgagtattttgtaatttttttgaaatatttgtggacataaataaaaccaagctacactac

SEQ ID NO: 986 - DNA, 356 bp, Homo sapiens
gctgtgggcaggcaagcccttcggtcacctgttggctacacagacccctcccctcgtgtcagctcaggcagctcgaggcccccgaccaacacttgcaggggtccctgctagttagcgccccaccgccgtggagttcgtaccgcttccttagaacttctacagaagccaagctccctggagccctgttggcagctctagctttgcagtcgtgtaattggcccaagtcattgtttttctcgcctcactttccaccaagtgtctagagtcatgtgagcctcgtgtcatctccggggtggccacaggctagatccccggtggttttgtgctcaaaataaaaagcctcagtgacccatgag

SEQ ID NO: 987 - DNA, 638 bp, Homo sapiens
ctctggagaggaagccagtggagctggtctgccaggggcttcccactttggcttatttttctgacttctagctgtctgtgaatatccagaaataaaacaactctgatgtggaatgcagtcctcatctccagcctccccaccccagtgggaactgtgcaaagggctgccttgctgttcttgaagctgggctgtctctctccatgttggcctgtcaccagacccgagtcaattaaacagctggtcctccactttgctggttcagccttcgtgtggctcctggtaacgtggctccaccttgatgggtcaacctttgtgtggctcctggtaacataacaacaacagttactatagtggtgagatggaaggaatcaaattttgccagagaaactaacttggtggccccgacaggtcttccggggccatgggcatttgtttagagccaaattcatcctcttaccagatccttttccagaaatacctgtctaggaaggtgtgatgtcagaaacaatgacatccagaaagctgaggaacaggttcctgtggagacactgagtcagaattcttcatcctaaattattttgttagtggaaaatggaattgcttctgtgtagtcaataaaatgaacctgatcacttttc

SEQ ID NO: 988 - DNA, 1486 bp, Homo sapiens
cccgtgcccccggccacctcggtttctgctttcgaagactctgctgccatccgttctcccagtcccaagggtccacgatgtacaaagtcatttcggccagtaggtgtgcagacccctccccgccacgatcgtcgctgtgcttggtgtgtaggaccctaggctccccgcccaccctctgcctggtcgcgctcttcagtcccacgaggagctgacacgtcctctctggccgccatccggctcgcacaggggcctcccagcgcctcaggccccgcgtttgtgtctggagtctccccccggggagaggacactggcccctcgcactccagaaaagccatgccagctgggctcgttgacaaagggtaaaacatgctcactcccacccggtaatcatttttttctttttttaaaaaaagtttttattttttccaaactagtgcatgtataaataatggcaggatggggggtactgtgtagatgattaactgactttttaatattttgtaaataaatcggattccttgtgtcctttgtgctagtgtaacccgggactggaatgtaaagtgaagttcggagctctgagcacgggctcttcccgccgggtcctccctccccagaccccagagggagaggcccaccccgcccagccccgccccagcccctgctcaggtctgagtatggctgggagtcgggggccacaggcctctagctgtgctgctcaagagactggatcagggtagctacaagtggccgggccttgcctttgggattctacctgttcctaatttggtgtggggtgcggggtccctggccccttttccacactcctcctccgacagcagctccctgggcagtggcctggtctcaccgtgtgcagccttgtggtttatgcttaaatgtacattttcctgctggtaaaaggagaaactgagaggtgtcctgcagaccggctgaccactccttttggagacggcaggaggcctgagcgatccgtactcagaacgtccaggagagacgcatggcccgaagtcaaagtgctggaattttccaaaacagcctgttctctcctctctcctccccagagcaccccctgccatcaggggggttgaaatccctctcccccaggagccctgctgctttgcttggtggtagggcaggagagcaaacaaacagtcatggtctaaaacccacatagcactttgctcttagttacatgtaaaattttagatttctaaaacaggtgggcaatcattttgaatactgttctgtgaccctgactgctagttctgaggacactggtggctgtgctatgtgtggccatcctccatgtcccgtccctgtagctgctctgtttagacagcggacagacgctcacgcccaggggatgtcctcacgctgtcgccgcgcggtttcccttcgcagatgtgtatactcatgataggtcagaaagtgtatccgctacaataaagttctggttctaactaactcc

SEQ ID NO: 989 - DNA, 2442 bp, Homo sapiens
ctgcaaagcccttggaacaccctggatgctgttgagggccaagagatctgtgtggctcctgggccggctgagtggcagcagccccccttgccccacctcccccttcccctacccaaccctgccctgccccaccccacctcacagctactcagtggggctggcatcaagggagacaccagtggtgcgtttataattggcttaaagggatggacttgtgattggctgcaggaagaaacttttttattttttaaatcttgaccaacagaaaccttttatttttatttctgactcttattttttaaaaaatttgcgcctcggtatctggcttccctggaagctctccgagctctggtgctttagttaggtcatttttttagaaatgtgaagaggtctgattggctgcttaaactggaaaggatctgtgattggctggttaatgggaaacggtttttttctttggctgcaggtgttctgctgatatcaacagcttccctattttgaatgcagaaaacagggtctgggacattagtcgttatatttgacttgaaaagaaagaaaccaagtgcgctttgcaatatttattacacaaagaacttgctgctgccttcacatttggggtttgtgtttgattggctttcgatgcgtgtgtttggtttcccattggttcacctgtgactcctgttgccatggattcacccccctctgctgccggctctgggcctgagggtccacctggagagtacatttgctttaatgagtgcacctgcctccaccagcaaggggaccccgagaaccctgagcagggtccacagctggaaagttgggcccctgaggagctttgtgtcgtcttgaacgagcagcccagggcctagaggtaaccgttaggcgggatttatgtgcactgcctgcatgagctggcaaccagccagcgtcccttggtgagaaagggattgctgaggcaccgtccaggccccaccggccaggccgcgcccagcagaggcgtactacccagctctgtcctcttggccatccttctgtgtaccacttcctgaggcctcattttgggggtcatcttggaaaggggaggagcttctcccagtgtgagaccccaaagactctggaggtcatctggcggaggtctctgggagcccagaacccacataaaagccccagcttggctcacaaggcccaggagacctccagctaaacaccaacccctgacctaccccagccaggctcctacctgtctgctgccagcacagtaggtcccggccagctctggagttctctcatcggaggcccatgccctccactccactgcctttggaagggtctctctccaggtcagcctggaagggacagtatcgtttgtttatgaaatgccactgggacagctggctgggccttcaccaagcaagtcccttcagactggcccttaagccaaactcaggcccagaattgcagttcagaatggcagtcctggaggcagggggtgaggggcaggtctagtgttcctgcaccaaacctaagtccttccacctgccacccccttccctgggagggaggtggtcctcctatctccctggctcactggcaggtgtgggatctggggagagcggctggagaaagatgcagtcctcaggaagggggccgccaccctcccctatgctggtagatgctgaggcccctaggtgcccagggccagtgggaccctctcagaaccaaatctttcccctttctcggggcttggggctcgggccgtaggggctcctgagtgtcatgaagtgcacaggagccaaatgaccgagccctggagagccccatggtgggtaggtggttcgtgctgtgctctggcaccatcagcctgttccagaaggaggattcgagcatcaggctaagaccctgtgtcctccaccatgcactcacccctagccctggttagctgacagtcagctgtggggaacacagctacaaccctaccctggcagggacctgagagcatctcaggaggggcagcgcatgtgtgcatgtgctgtgtgagtgagcacacccgtgtgcacactcatacacatgtgcacacacacgcactctccccgctcaggggcctggaggtctggctgagcccctggggaaaggtgagttctttcatctccctcctccaggtcggagtgcctggagtcaggtgtcgaggccacattgctggctgccccctctttgtagctcctataaagggcccacacctggtggatacctggttgagtgtgtggtctctgccccagcctgtccttgtcacgatcacaggccttgcttttgtaacaatgatgaccccggcctgtctcatcttctgaagaggaaaagtcaaagtgttgctgtggctccatatttcaactaaaaatatatctgttggagaaagaaattaacaataaagaattttcataggtt

SEQ ID NO: 990 - DNA, 679 bp, Homo sapiens
catggtgcagaagcttgtaacattgatcacattcttaatgtaaatggtgtctttcttctggggttttcagttattgcaaagaaatgaagagattctggaaatgcatcaataacctaagaaaaagcgacataaaaatatacttatggcttgtgtttatgctcttcatcattgtgcgttgtgtgcggttacctgcttgagtgatcctgaacttgttgcgacagagggactcactggactctgttcgttatgatttgtctgtttaagagagaaaacaaagtggacttgatttttattaaggctgtttgtttttaagtgttgatagtgaacgaaaagatgtgaagtaatgatatttttctgcttacaacttatccccactcattggagtgaacagtgacgcaagctcaatagacttcataagtgttcatagaattttacaattctgagtgatcttagaaatcatttctgtttttacaaacaaggaaactgaggtccagaaagagcaagcgactttgcttaaagtcgcatcagagagctgagggtaagactcaggtgtcctgactcccagtttagtatcttttgaattttatttctgtaccatttaaaaaaaataattaacactatttgtgcaagtcagtgtttttgaaaattcagtgtcccaataaaaagtggactgcacact

SEQ ID NO: 991 - DNA, 2486 bp, Homo sapiens
gctacagaggaggacatgccctgggatgtagtagtatcatgcagaggtgtgtgggcccttttgttcacctctgcagactgtgaatcctagctgccagtttgcctattatatgccaaggcatttgcaaaaatctcattaatctaaatcaaaatagctttaaagaaaaatgcatacacttcctcagatcatcaaacagactctggtccaaggttggtaatgaaatgactgttcctgacagggaggaatagcagggcccaatcttctgagatggcttctgggtctttccatggtcagagaagatctatagtccgtcctgaggtctgtcaatgtcacaggaaaaggcaaacttgaggggatcgtcgcctgctggctaagaccagggagctaaaaacttgaggaagggaacctgcctgggtgggtgctacttctgattcattgtccttgtccctgtcataagtacctccctattgtagatagaagggaaggaaactgttgacttgagcttggctaaatttcctgaaggtggaggaccttagagttgctccaagtaaactttccaaggacttcttcctgttggtgttgtaagaaaaggcccatgcttgtccgggcacagtggcttacgcctgttaatgccagtactttgggaggccgaggcaggtggatcacctgaggtcaggagttcgagaccagcctgaccaacatggcgaaaccccatctctactaaaaatacaaaaattagcctggcatggtggtgggaggctgaagcaagagaatcacttgaacccaggaggtggaggttgcgtgagctaagatcgcgccactgcactccagcctgggcgacaagagtgaaactccgtcttaaaaaagcccatggcaggctgggcgcggtggctcacgcctgtaatcccagcactttgggaggccaaggtgggcggatcacaaggtcaggagatcgagaccatcctggcgaacacggtgaaaccccgtctctactaaaaaaaatacaaaaaaattagccaggcgtggtcgtgggcacctgtagtcccagctactcagggggctgaggcaggagaatggcgtgaatccgggaggcggagcttgcagggagccgagatagtgtcactgcactccagcctgggtgacagagcgagactccgtctcaaaaaacaaaaagcccgtggcaattaatggtaaaggaaacccggcatttcagtgtaaagaggtaacataaacggatactgcctcattgcactccccaaaagagagtcaggagagcagcaggagaggcgcacagaaggcccagttctcaggggtttttattcttgctgcagttggttaccaaggaagaccccaaagcactggctgttgccttgaactgggacataaagaagacggagactgttcaggaggcctgtgagcgggagctcgccctgcgcctgcagcagacgcagagcttgcattctctccggagcatctcagcaagcaaggcctcaccacctggtgacctgcagaatcctaagcgagccagacaggatcccacatagcagcagcgggaagtgtgccaaggaagctctgtggcgttgtgttattggtagacaccctcagcctcatcatttgactacctatgtactactctaccccctgccttagagcaccttccagagaagctattccaggtctcaacatacgccgttccaccaattttttttttagccccaccagcttcaggacttctgccaattttgaatgatatagctgcaccaacaatatcccgcctcctctaattacatatgatgttctctgttcaaaagtaattggcagtgattggccaggcgcagtggctcacgcctgtaatcccagcactgggaggccgaggggggcggatcgtgaagtcaggagatcgagaccatcctggctaacatggtgaaaccctgtctctactaaaaatacaaaaaaaattagccagccatggtggcgggcgcctgtaatcccagctacttgggaggctgaggcaggagaatggcatgaacctgggaggcagagcttgcagtgagctgagattgcgccactgcactccagcctgggcaacagagcgagactccgtctcaaaaaaaaaaaaaaaaaaagtaattggcagtgactatgggcgcactgcctaacatttagccctgccccatatggaacatgttaaaaaaaaaaaaagccaggccgagcgtgttggctcacgcttgtaatcccagcactttgggaggccgaggcgggtggatcacgaggtcaggagatcgagaccatcctggctaacacagtgaaacgtgtttttactaaaagtacaaaaaactagctgggcgtggtggcaggagcctgtagtcccagctactcgggaggctgaggcaggagaattgcttgaaccggggaggcagaagttgcagtgagccgagattatgccactgtactccagcctgggtgacagagtgacactctgtctc

SEQ ID NO: 992 - DNA, 584 bp, Homo sapiens
gtccctcgatgagccgggagtcccgcgttcccctcgcgtctcgggagtaggtgctagcaagggcgctaggaggccctgttcctcactgcggatggtgctgctgtccccagcctctctggggcatggccatcgggtgatgtccttctagccaaagatgctgctgctcctacctcactgcctgtcccagagcaggccagcccgcgtgggccgatggtggcggcagtggctactgctcctgcagggcatgtggtgatcctgccagggccaggtggggtggactgggcgtggtggtcctcagaggacaactcccagcctgacaaggagggctgcgtctccctccgagcctccgtattggcctcctctgtggctcacacccatggctgaatctctgcagggcacgtgaagtcacgggtaggggccaggcccctccaggccgtcactggcctgcacagtggtctgagctcttgggtggaagggaccctcctcactggatggtggtggctccttgcagggagaacggtgactttgtattgtcatgtgtgcggcttcctgttctcaataaaagtaataaattggattattta

SEQ ID NO: 993 - DNA, 266 bp, Homo sapiens
cagccggtaccccgctggcttggacagccccagtgaccctcagtgacccagctgtccccaggctccctggcttagatgcccagctgtggctgggtacagtgttctgggccggaagagcactcactcagtgcttccctggaaaggtggacccccagacgcccacctccaggcagacccatcactggaagtgggatttgaaatgcagccaagaagaggagaccgtcggcaacgcccgcccggaacaagaaataaataaataaataatc

SEQ ID NO: 994 - DNA, 362 bp, Homo sapiens
cttgcgtgtctgcagtcaaggattcttcatttttagaaatgcctgtgaagaccttggcagcgacgtggctcgagaagcattcatcattactgtggacatggcagttgttgctccacccaaaaaaacagactccaggtgaggctgctgtcatttctccacttgccagtttaattccagccttacccattgactcaaggggacataaaccacgagagtgacagtcatctttgcccacccagtgtaatgtcactgctcaaattacatttcattaccttaaaaagccagtctcttttcatactggctgttggcatttctgtaaactgcctgtccatgctctttgtttttaaacttgttcttattga

SEQ ID NO: 995 - DNA, 141 bp, Homo sapiens
cctcccctggagctccggcctgcccagcaggtcagaagccagagccagcctgctggcctcagctccgggttgggctgagatggctgtgccccaactcccattcacccaccatggacccaataataaacctggccccacccc

SEQ ID NO: 996 - DNA, 273 bp, Homo sapiens
gcccaggcgccaccactgatgccacccaggacctcggaccttggagcctgcggggtgcctcggcccctccagccccgggccggacctcctgctggctctcgcccaccaaccaagtgttacaagccccagaatgctgcccggcctgccctgctgggcggactgtctgtgtgtctgtctctctggcgttccacctccaagcctataccagctgtgtacagcgccatctctctgccttctgttgcccctcactcaccaaacacgtgtatttatagc

SEQ ID NO: 997 - DNA, 100 bp, Homo sapiens
tcctggaagacacgtggcgcctgtggaccggaagcaccaaatgctggtgctgcttttgtacatacatatttttaaaccattaaaattcttcctgaagaaa

SEQ ID NO: 998 - DNA, 949 bp, Homo sapiens
ctggaggcccagatgtgcccatcacgttttttctgaggcttttgtactttagtaaatgcttccactaaactgaaaccatggtgagaaagtttgactttgttaaatattttgaaatgtaaatgaaaagaactactgtatattaaaagttggtttgaaccaactttctagctgctgttgaagaatatattgtcagaaacacaaggcttgatttggttcccaggacagtgaaacatagtaataccacgtaaatcaagccattcattttggggaacagaagatccataactttagaaatacgggttttgacttaactcacaagagaactcatcataagtacttgctgatggaagaatgacctagttgctcctctcaacatgggtacagcaaactcagcacagccaagaagcctcaggtcgtggagaacatggattaggatcctagactgtaaagacacagaagatgctgacctcacccctgccacctatcccaagacctcactggtctgtggacagcagcagaaatgtttgcaagataggccaaaatgagtacaaaaggtctgtcttccatcagacccagtgatgctgcgactcacacgcttcaattcaagacctgaccgctagtagggaggtttattcagatcgctggcagcctcggctgagcagatgcacagaggggatcactgtgcagtgggaccaccctcactggccttctgcagcagggttctgggatgttttcagtggtcaaaatactctgtttagagcaagggctcagaaaacagaaatactgtcatggaggtgctgaacacagggaaggtctggtacatattggaaattatgagcagaacaaatactcaactaaatgcacaaagtataaagtgtagccatgtctagacaccatgttgtatcagaataatttttgtgccaataaatgacatcagaattttaaacat

SEQ ID NO: 999 - DNA, 301 bp, Homo sapiens
gcgaccctgcctccactctcccccagctgcctggaggggcaaaggtcgagggtagataggccttaacttagtccatagcgtcctcaccttccccaagccacacatcctcctcccatcccttgctccgatcccagcccctgagcagggagagagaagttttgttggcataggtttgcttaggtagccggcttctagaatgtagatccgtgagggcgtgagcttggactggacccactgctgattccctgcacctagcacagtgcttgccacaaagtgggctctcaataaatattatttgtcc

SEQ ID NO: 1000 - DNA, 294 bp, Homo sapiens
gggggcacctgccaccccactgatgcccaaactgtcagactttgggggatccccgcctagggcagtgctgcatggctgccctgattccaagtgctcttatcgcctctgtgtgtggatcgcccgccccagcccggggccgctcaggtctgcttggaggatgcctcccccaggagggcagtgagggatgccgcaacctcgacttctcagcctcctggggttccgccggccaacactgtctgtctcaaatactgtgctgtgagttgtttcaataaaggggccccaagggctgggctg

SEQ ID NO: 1001 - DNA, 4950 bp, Homo sapiens
ccctgcgtcctgacgccctgcgttggagccactcctgtcccgccttcctcctccacagtgctgcttctcttgggaactccactctccttcgtgtctctcccaccccggcctccactcccccacctgacaatggcagctagactggagtgaggcttccaggctcttcctggacctgagtcggccccacatgggaacctagtactctctgctctagccaggagtctgtgctcttttggtggggagcacttgcgtcctgcagaggaccacagtgggtggcacctcctgagaaggcgaggagagtggttgttgccaactaagccctcgaaccaaggcagcctccagagccagcctgggactcccagtgaacttacacttggagcccgtgcagtacaggcaaaacacgcaagggcatcaggcactggtggcatcgtagaagagatgtggcaaagtgctgtacccttccacctcctagaggtgggcagctgggccccacctacttgtgactgaaggggcacaccactgccctgcctgcccacttagccgtccatggcaccagccccctggatgggcattgggctgacacctaccatgctgctttttggcacagttgtctattctgagccttgagagaaaaagtgccccttaagggttgaaggcagtctgaacccttgtgcttggtggggctcgtggccttccccttttgcctggctgtggaggcctgatgctgccccgttccctgtcagaggctaagatgagatttgccagcacaggggccccagatctgcctgggcctgtgcagcagcccagcttcctggtgtatttttcaggtaggcccttgtcctgccagctgccttcctcatcccctcgtcctgtcccagaggttatctgcctggcctggctccccacgagtcacctgcaagccccagggcctgggggcagtgactggcaggtgcagatgggctgtttcgtgtagtggaagagcagcctgatggccaagggggtggacgcaattgtgggatgtcctctttactcccttcctggcctcactggctggggcagaggggcagccgctaggagagactgaaagcagcagctaggactgaggagtgggttttattgtccttcagagctcttcaagctgtcccctctgtcatcactccctggatgtgtggggcatggttccttccctgggaaggctaagttcagttctgttttttattctatgagaacaagtcacagctgcagctgggccccatgctctgccccaagcccccaaccccgcggtgctctggcggcttcctgtccactctcggggcccttggggcctggcttgctccagggtcttgggctactggcagctcctctccttgggctcctggctgccaggcgttggtgccacttcttaaaggcctggaaccagggaggagaggaaatgctattgttgtgggctttctccggggtctgtgctgtgcctgctagagcaacccctgtacccagctccttttgtccccagggcccctccctctgccccaagcagccagccagtcttgcctaggccaaatgcacaagctcagaatagatctgatggtgagctgggaagctgtactcagagcagagcaaatgagggagggggcgctcaggacccaggccctccatgggctagtgtgagtggcagccatgcctcatgccacaccttcttcgcaaactgatggaccgggtgggcctggcctgagctggggccacaaatcaaagcaagggctccagcatccagcctgtgtgttctgtaatggaactgaccccctcccctgaaaacgaaggggccccggggctggcaagcagggaaagctccacggtgcgtggctgtggcacagacttctggaaggctggctgagtggaatgcagggaagagggcagtacctgggaaaggacccacccatcttcctgctgctgtaactgctgagccactcgcagtcgcaggatccgctgccaccacgtctgccaggcccatctcaggtgccactccctgagctttggggacagttggcagagaaggcctcttgtgctcacgctcccccgcagtccccagcccttctgcctttctcccccgacactgctgcaccagagtgaaagggctatggcaagggggtgtcatctgaggagtattaagaatgcagattcctgggcctgtcccccaaggttttggagtcagtaggtccaagggccatacttttgagaggggtttgggttaagtatgaggtgaaatgggagatggtcagtgtggagaggggtgcacccactcaccagggtccgcaccagctgctctgccccttgggcatccacccagtgctgccatgccactgccaggcacctggcctgctgggaaccccgcagcccgtgaagcagtgcctcgaggcaccggcgctgcaggtacttcctcctgatggccaagagcatcgtgacccttcagggccagaaggagggcagagccatgggcctgggcctgcttttccaggatcctgcaggaacgagcactggccagagagggcccagctgtagccatggctcaggcaagcccctcagcccttgcccccatccctcggacccaccaaactgcacacacagctcctcttaccgtagcctccgtttatgggccttgctttgggctttgcaggctctgggctcagggctggagtgcgctcttggtccctggtccctcgtccacaggggcaggcctgggacccagctactctgtccaggccactgtggccagagctggaaggcagggcagagggaatgttccctgcaccctggaaaggggagttgagtcacaagaggttaaggtgggtccaggaaggcagctgctcttagtgcccgcctaggagttgagtacagtgaggagggtggaggaaggtgctgagcttagccttgtgccctgcccccatctccccaggcctccagcctctcccggctgcctgccgcccaaagagaaatcacaggggcggggcaggaatgcaaagtgttttctcagaacagctgaaacattccgaagagggaatggatggggagaatggtcaatacacataagaccgtgtcccaaggagctgatttccaggcccctgaggactggagaccgcttcacccctgcacttcagacaccgtttgtcccccggggcaaggtctccttactctgagcccaggccgttccccttggcttcctccgtccacccaggctgcactgcagtgatggcgcgggaggcaccagctctgtggcctgtgtccagcagctgcgggtctgaaggaatagccagagaggagcacctgaaccccatgggcttggacttcctggggccccgctgggatttcttcgctgctctagctggcaggacacatcccggcctcttccacccattcccccatgtggctgaagacattccaacaatggggtgggcccataatagttagccctcagtcagttcccggagcacagccctgggagggggctatttctctccccactgaaaacatttcaaagctgagttacttgtctgaggcctcatccctcggaagccgtctgactccagagtctgagcccccggctagtaccctatagagagggggctctccaaaggggctgctggggcatgtgtgcctgtggcagaaaagaggagaccctggaattcagcaccctgggtgccattcccagcgtttagtttctagaggcctcagtttctccatcagcttatgggatccttgtctttactgacaagaatggaatagaaatgtaaaagtactctgaaaagcaattgccctgtaacttatctagaaagaaaagaccctgagactccagaatctgctgttgccatagccccatatgtgtgaattctgcaactagccaaggctagttcctttcaattccatttaaaaaacaaaaaccagcaggtgtggtggctcatggcgtaatgggcctgcccaatgctttgggaggccaaggcaggtagatcgcttgagcccaggagtttgagacaagccctggcaacatagtgagatcccatttctacaaaaaaaaaaaaaaaaaaattagccgggtgtggtggcacacgcctgtagtctcagctactcaggtggctgaggtgggaggatcgtttgagccctggaggttgaggctgcagtgagctgtgatcgcaccactgcactctggcctgggcgacagagtgagacactgtctgagaacaaaaaacgactgaaaaaaaaaatcaccttagctttttctcttagaatcttctctaaaacgtattctttgtggcattctgaaataggattcatgatgatgcctgttgatcttagggacactacctcacctgccagtatctttggggctgtgtccttcaaggacatgtccccagactgctgtgcagtgtcattttttgtgtttggtttggtggtggcttcttcccccttgctaggctatcaacctcttatcaccacttgttggtgtcagaactaactgcttctggtctggagagggactgaccgatgcctttgggtagagagaattatgaaagaaattttggtatttttctactttatattttctgaggtttctgtaataagcatatttcacttttccaataagaaaaaaaaaaacttggcctggcgcggtggctcacacctgtaatcccagcactttgggaagtcgaggtgggaggatcacttgagttcaggagttcgagaccagcttgggcaatatggtgaaaccccgtctctactaaaaatacaaaaattagccaggcgtggtggcgtgcacttgtagtcccagctactcaggaagctgaggcgggagaatcacttgaacccgggaggcagaggttgcagtgagctgagatcactcctctgcttcagcctgggcaattgagccagactctgtctcaaaaataaacaaaaaaacttgac

SEQ ID NO: 1002 - DNA, 290 bp, Homo sapiens
agataacagccagggaggacaagcagggctgggcctagggacagactgcaagaggctcctgtcccctggggtctctgctgcatttgtgtcatcttgttgccatggagttgtgatcatcccatctaagctgcagcttcctgtcaacacttctcacatcttatgctaactgtagataaagtggtttgatggtgacttcctcgcctctcccaccccatgcattaaattttaaggtagaacctcacctgttactgaaagtggtttgaaagtgaataaacttcagcaccatggac

SEQ ID NO: 1003 - DNA, 190 bp, Homo sapiens
gaggaagtcctggctgcagacacctgcttctgattccacaaggggctttttcctcaaccctgtggccgcctttgaagtgactcatttttttaatgtatttatgtatttatttgattgttttatataagatggtttcttacctttgagcacaaaatttccacggtgaaataaagtcaacattataagcttt

SEQ ID NO: 1004 - DNA, 247 bp, Homo sapiens
gtgaactaacagtcctgctttcagccaccatttgcacaagacacccagcactgaaagtcccgctgccaggagcaagggatcctttggaagcacccgccctttgtgccttgttgggggaaaccggtgacgcagaagtgagtgtggatacaccagagtttgcattggaaggaatgagtgtcacgtggggagggaaggggccagtggaccttttgtaagctttccactcaataaaatgaacctgtatggc

SEQ ID NO: 1005 - DNA, 429 bp, Homo sapiens
agacaggatgaagacatgcttgaggagccacggagtttgggggccacagcacctgggcacacacccgagcacctgtccattggcatgcttctgctgggtgagcaggacagctcctgtccccagcgaagaatccggctgcccctgggccagtcccaggacctttgcacaggactgatgggtataactgacccccacagggaggcaggaaaacagccagaagccaccttgacacttttgaacatttccagttctgtagagtttattgtcaattgcttctcaagtctaaccagcctcagcagtgtgcatagaccatttccaggagggtctgtccccagatgctctgcctcccgttccaaaacccactcatcctcagcttgcacaaactggttgaacggcaggaatgaaaaataaagagagatggcttttgtg

SEQ ID NO: 1006 - DNA, 320 bp, Homo sapiens
atgcctgcctatttggatgggtatgtcaaacgctttcttctggacacttggaaactaaaacctaggtcttaggtacatcctaaagggagcacagaacccatcatttcacacataggctctgaaagtgggaaaggaaagctgatcaagcaggggccggacttgggggaaatgttgccatggattcgatgggactttggggacctgtgtcctgtagagtcgaaaatgggaatctgaatgtctagagtggaattcaggcttgagaatacatgagggagttactcttgcatggatggttgtaaagaaacaatcagaaataaagg

SEQ ID NO: 1007 - DNA, 637 bp, Homo sapiens
tggggtggaggtataaaaagctttttctccaggcacttggaaactaaaatctgggacatagatgtcttttatttttctttttccttattttacaattttacagtttttatttaaaaatttgagacagggtttccctatgttgtccaggctggtctcaaactcttacgcttaagggagccacctgcttggcctcccaagattctgggattacaggcataagcagctgtgccgggtctataggtgtattataaagggagcagagaaacctctgtttcaggcatgtgctttctgtgagtgggaaaaaaaacacaaaaaaacccagcagggggcagcactggggaaaaggttgaatggagtcactgagactcagggatctgtgtcctagacagtcagaaatagaaagctgaagttctagagtgaaggagttatctcagcaaggatggatacaaagaaacgtcggaagtagagggaacctaaatggaaactctctgctgtccttcatgattgattagcctgtttcagcaatttatacatcagaaatctttagttcctgatgaattaaaaaaagaggtactagttcatctgtgatttaggttcatctgcaggaaataaaggaatcaaaataaacttcattttg

SEQ ID NO: 1008 - DNA, 641 bp, Homo sapiens
ggccagggcccctcaccctgccttatcttgcaccccaaagctttcctgccccaggcctgaaagaggctgaggcctggactttcctgcaactcaaggactttgcagccggcacagggtctgctctttctctgccagtgacagacaggctcttagcagcttccagattgacgacaagtgctgaacagtggaggaagagggacagatgaatgccgtggattgcacgtggcctcttgagcagtggctggtccagggctagtgacttgtgtcccatgatccctgtgttgtctctagagcagggattaacctctgcactactgacatgtggggccaggtcaccctttgctgtgaggctgtcctgtacattgtgggatgttcagcactgtcccttgcctcaatgccagtaacgcgtcttcctgagtggtgccaaacaaaaaggttctcaggtgttgccaaatatgtcctggggtataaaactttcctcgcctgacaaccactggtctgtagggatttttggctacacacaaaccagtatcgctcatagatcagcaaaccggggcctactagagtctgaacagctgtaatctatgaattctaagtgaaattttaaaaattgttaatttttcctatattgcattaatttt

SEQ ID NO: 1009 - DNA, 994 bp, Homo sapiens
gtcttgtgctcttcaagacaaaacagattgcgtcgctgacaagttctcaagaagaacttatgagtaagcagtctgagaactaaagagtttatgccaagaaaactttctgctgaaagtgtcattgctggctgtgaagtcgggataatcagtagaattctcacccaaacagcaacatttctaaggaacttggattaattgggggaaaaaaaaaggagtacttgtactgctttgattttttttcctttgatgaaagatggaggataaaggggaagtgaggagaatttctttcaagattatctaaacattagaaacatgacatttaaaaaaactatgaaataatactgtataagcattccatatttctatatcttccttttaaacatttttttttttgagatagagttttgcttgtcacccaggctggagtgcaatggcatgatctcggttcattgcaacctccgcctcccgagttcaatcgattctcctgcctcagcctcctgagtacctgggattacaggtgcctgccaccacgcctggctaatttttgtatttttagtagagacagggtttcaccacattggccaggctggtcttgaactcctgacctaaggtgatccgcccgcctcagcctccttaaagtgctgggattacaggcatgagccaccgcacccagccgctttttaaaattttgatgatctgcttcctagagtattgagtatcttcctttaaactacagctcctcctcggacgctgcagtgagctgagatcgcaccactgcactccagcctgggtgccagagcaagactccatctcaaaaaaaaaaaaaaaaaatacagcttctcctatgaggtgcttagggctgcatcttggttttaggaccactgtgaacgtaagtaaaaagtataaagtaacacggagagcctaatgaagaaacttcttgctcagaggcctagaagggtacacaaaatgtcttctaaactagaaaacctaaggc

SEQ ID NO: 1010 - DNA, 98 bp, Homo sapiens
gctggcggcccttctgactgtttatttaaggatggatggcaccctggaaccgggaagggtggcctgttccctagagagaataaattggattattttct

SEQ ID NO: 1011 - DNA, 1550 bp, Homo sapiens
gtgcctctcccttccctttccctgtccccccgccccacgcctgccagcaaagcctcgctaaccccattacaacagctccaggacatctcagcccaggttctagcccccacgcaccccagaccccaggtggaccatcctcccaaactagggccctccactctatccagggcaggccagggactccctggcctgacacatgatgcccagatttcagatttggcctccgtcacttaatccagagtacaggggctggggtcagggaaggaagatctaaagaacccactgtgggtcaggggaatgggaccagcaggacatatgggcaagctctgcaggacagacagacagacaaaccctctgatctatgaagtctctgcagggcaaggggaccagggacctggaaccctcttggccaaggggagtgggagggacagagggaaggtcacaggcaagggtgcctatctaagtggaactaattgcccgagggctcagcaaggccaagaggagacagccgtgacggtaaacttcccctctaccagcctccaagccccacgccagcgagcaggctgcctgcccaccccgtgcccccagccagctggctgtgccagggcagagccatgccacatctgtatatagatggggtttttccaatacagctggttcgtgataaactgcatgaaactcctgccgtcctgcgcctgctggggcctccaggcaaggccaagtggggttgggggtggggctggtccttctccctcccacaggcctgtgttcttggggctgctcccatgcagacaggatcacctaacagagatggaagccagggcatggatggggctttgggtcctcgaggttggaccccagcttcttgccaccttcccctccgggcagtcagctctccatccatccccctctttaatctatgaatctataggctcggtgtgtgtaacacacacacccctatcgttgtccttcaaatactcagcattaccattggttgaggccaaattcagagctttctcaaatcagatttacaatctccattttcattaacggggaaacatccccgagccactgagtgctgtgctttgtcactgaaggttagatctgaacccagggtgtcaactgctgctctcaactccccacctctgggcactgaggagtatttcccctcattctacctctctaaggctatgcaaccctccccacgtcttccagctgggggatgggggggagtcataggaaaagcccccatctcccatctgggatagggaccttccatcagccttaaccctgggaaatgcctgctgcccccaatgactcttggtttcgtctcccacatacagaagcagggtggaggggaagggtgggtctcagttagcaggggtccccagggcaagtcagcctcctccctccatgcctctctggtcagtgtgccttagggtggcctctcactcccaccactctgggccccttgggggaggactggggagggggccgtgggagagccctgacgctggaacctgtatacacaataaaggacagtctcacag

SEQ ID NO: 1012 - DNA, 667 bp, Homo sapiens
ggtgggggctgtgctggtccagcacctgctctcaccatgacctcgcctggtgggcagcccaggcatatctggaccccggggtccagggcagggcatcccttgacccctcgggtaggcacagggtaggtgcggcagggatggggccagtgctcatggtggcctctctgtgcctcggtggacctgccccagcagtgggagccataaccccctcccccttcattacttcactcaggtgggcaccttcccctgcagggtgtctgccctcagggaactcacggactctcagagacaccagggcagcctggcccagaggagcaacagccaggcccccaggaggacagccatggagagaactgagacccacttacagtggggtctgggaaccctgcctgtacctggggttcagtccctcccaactccctccttgtgtctgccccccagcaaaggtggggtgaccacttctggtagctaagcacctgctccccggctctcttcacccaggacatctgtctctctggagtgtctgtctgtctgtccctccctctctgaacctgcttcctccgtgtcccctgctcctcacccctgggagcccactccccctccttgcggctccctcccatctcactcaaggttctctgaggacattaaagtggtggattcaccctgg

SEQ ID NO: 1013 - DNA, 877 bp, Homo sapiens
gcctcgacagggcctggagccccatcggccaagaatacttgaagaaacagagtggcctccctgctgtgccatgctgggccactggggactttatttatttctagttctttcctccccctgcaacttccgctgaggggtctcggatgacaccctggcctgaactgaggagatgaccagggatgctgggctgggccctctttccctgcgagacgcacacagctgagcacttagcaggcaccgccacgtcccagcatccctggagcaggagccccgccacagccttcggacagacatatgggatattcccaagccgaccttccctccgccttctcccacatgaggccatctcaggagatggagggcttggcccagcgccaagtaaacagggtacctcaagccccatttcctcacactaagagggcagactgtgaacttgactgggtgagacccaaagcggtccctgtccctctagtgccttctttagaccctcgggccccatcctcatccctgactggccaaacccttgctttcctgggcctttgcaagatgcttggttgtgttgaggtttttaaatatatattttgtactttgtggagagaatgtgtgtgtgtggcagggggccccgccagggctggggacagagggtgtcaaacattcgtgagctggggactcagggaccggtgctgcaggagtgtcctgcccatgccccagtcggccccatctctcatccttttggataagtttctattctgtcagtgttaaagattttgttttgttggacatttttttcgaatcttaatttattattttttttatatttattgttagaaaatgacttatttctgctctggaataaagttgcagatgattcaaaccg

SEQ ID NO: 1014 - DNA, 483 bp, Homo sapiens
tgggcagccatggcctaggaccccacctccatgcctggctcctggatggtcctggaggggcctgcagtgtctccattccccaagctgctcctgctggcacttcgcttctgtggccttggcattgagggcacaggctggacacaggaatgggggcgcctccagagggtctctccgtcctcatgctcctcagtgtccacacttcaaggccaaggatagtttcttcctctgacatggggaccataacaggtgatcactgatacctggcaaagactggggccctctcctttctatgtcctcaatcctgcctgactcttggtccttctggcagggacctggctggggaacgttctggtgctgatggtgctgggacctatatgtatatttatatatatctggggtcttgtctaccacctcccctggtcagagcctgagtgggtgctggttgctgtgtcttgtctgtaaataaactcctatcatgccttt

SEQ ID NO: 1015 - DNA, 347 bp, Homo sapiens
gtcacgagtggttgcctgtgatcccacccccaaccctcaggtctcgacatagggctggaggctggggcaggaacatggatcctatctggaggactggccagcatggcctgatcagggaggatgtggccagagaaggcccacccgcgagcagcgctttccttgcagaattcatggcagggaggtggggaccaaggccctgagctcgaacatctcccgtggcctttccccctttggcagcaccgatggaggatgactgggagagggggtgcctctcaagttacttcaatcaagaacctgtattggttgaggtgacaccatctgttgtaacagataaaccccgaaatccc

SEQ ID NO: 1016 - DNA, 605 bp, Homo sapiens
tgtgttctaaacccctttccttttctgtggcttttaatttggaattttccagtgtgtaagcatttggactgagaattgggaaaacaaaattactcccagaagccaaaactctttaattcccaaccgaagtcactccaggctgggatcaaatctccattaagaaaaaaaattatatataaatatatatatatatattatatagccaactctgttgacaaaaaaagggagagatttccatcctggttcagataaagttgttgctgtgttttaacaggggctgggctgcctttttctaccttgctggtaactagaccaagaagttagagaatagactaacatcagtaacttcccaaaagaaactgaagagccccctgtaaatctttatgtggccttcttggagttaaaaaatgaaagggcatatgtaagttgcaaaggtggagggttttagactctcatgcttcaggtgctgtcggggtaaaagtaactgtttttccccttctcttaaaaccacagaggacctgtgacagctctgcagaaatgccagtgcctggccccctcttgccttttatggctgaggaaagttacccaacaaaggattttattcc

SEQ ID NO: 1017 - DNA, 263 bp, Homo sapiens
tgcaggcccacgggcaccccagacactggaactccctgcctctgagccaccaactggacccctctccagcaacaccaccgccaccacctcccacatccctgaggttggcgactgtctacactcctcccccgagaccacccccaccctggggaagcgttgactactgtcccctaccttggaccatcccgcgtaggggtggcagcccccagctcccctcagtgctgctgtcagtgtagcaaataaagtcatgatattttcctggc

SEQ ID NO: 1018 - DNA, 122 bp, Homo sapiens
ccctctggaggcctgactctaggcagctgctcaaggcctgtagacagatgggccaccaggcaggagctgctgctgggatttgcttttgtggcctggtgagctaataaacaccaataacttca

SEQ ID NO: 1019 - DNA, 416 bp, Homo sapiens
ggtggtgctggcatcctgagtcctggccctcctgggatctggggccctcgggccctgcctgacctggtgcttttttccccatccccatgttccttttattctgtaaaaagttagtggactgcagccctgggggttgcaggctgcggtgcctcaggcccctccttcagcctgtggccacctctggggcacaatgggggctccccactgcccagtctgcccctcgggttgggggagtatcccaggcctctctgtgggacctgggcccctgacgggccttctcagcccgttttgaggacagacagtcccccgaggtaggctacatccccccaccccagctggtctgcttggatttcctacagcccccgtgggcatggaccacctttattttatacaaaattaaaaacaagtttttacaa

SEQ ID NO: 1020 - DNA, 149 bp, Homo sapiens
ctgtttccatgctaaacatgatttataaccagctcagagctgaacataatttatatctaatttgagttcctttaaagatcttggttttccatgaatacagcatgtataataaaaattttaagaaataaatgttattctactttattaac

SEQ ID NO: 1021 - DNA, 2283 bp, Homo sapiens
cctgccaggggccctggcgtttgcctccttcgcttagttctccagaccctccctcacacgcccagagccttctgctgacatggactggacagccccgctgggagacctttgggacgtggggtggaatttggggtatctgtgccttgccctccctgagaggggcctcagtgtcctctgaagccatccccagtgagcctcgactctgtccctgctgaaaatagctgggccagtgtctctgtagccctgacataaggaacagaacacaacaaaacacagcaaaccatgtgcccaaactgctccccaaagaattttgagtctctaatctgacactgaatgaggggagaagggaaggagattctgggattgccagttcttccagcagccatgctctgaaaatcaaggtagaatccatggaaagggaccccaggaccccgggaccctagacgtatcttgaactgccatcgtcatttcaaatacatctccctcagggtttccaggtggccacccccaattattcattccttaccaacctctcaaatcctcttggctttctctctgcagtgtggacactgttggctagtcctccccactccctgagggtccagtaagttagcttagaaccttcctggaaacatttcatctgagcaggtttccccacgtgtgggatgctccttttgcctcatctgtctcagggatgcaggctcccccgcatgcatggggatttctccccagaccagcatacttgtgacctgagagttcaatgcgtaaagatgcccctggtcagccatatccatcttctcttgcctggtccttgattctctggccgctccctgaccttcctccttccactgccttgactttcttcctttttattcctggtgccatctgtccaggcagctagacaagaacttgttcgccagcagccagattcaggccttcccaggggcataataagtgaccagcccctcctctccggacatcagatccaacacataaggaccctggcctaccctccagcccaacagccagttctgggtcagctgccaacttaggggtggtttgattatcccattgaaattcaccagtgcctttgccaaagaccctctcatttggacatacccagattcattccctggctccaactgaaaagactcagtttcaatcgttaaaagttcctttagggccagaagaataaatgaattataatcccattttgaagaaccgatttataaccaatgaaaaggttataatgtaatttatattcttggaggaacaagattttcatttgggattatttccttcaaccattcaacaaacatttgttgtatgccactaagcgccaggcacggcgttgggctctgcaaacacagtggttagtagcagtctggacctggtccctactggcatggaacccatcactccccaacatgcaaagcccacatttaaaggccagcctctgccccttcagtgatgcgctctttagaaatgccagtccactatattcagaaatccgcagggcacaaaacttccagcaagtcactgttgtggtgaaatgggcagtgggggtggggggtcttctttaaacaggcccccttcccatctacctagccagtacccatccaatgagtccccagagcctccagaagctgttgtctcctctctggggacagcagctcctgcctttggaggccaaagccccagatctctccagccccagagctgaaaacaccaagtgcctatttgagggtgtctgtctggagacttagagtttgtcatgtgtgtgtgtgtgtttggttaatgtgggtttatgggttttctttcttttttttctttttttttttagtctacattagggggaagtgagcgcctcccatgtgcagacagtgtgtctttatagatttttctaaggctttccccaatgatgtcggtaatttctgatgtttctgaagttcccaggactcacacacccgttcccatctcacttgcccacccagtgtgacaaccctcggtgtggatatacccccgtggactcatggctcttccccacccccactttctataaatgtaggcctagaatacgcttctctgttgcaaaactcagctaagttcctgcttccaccttgatgttgaaatatcttatgtaagagggcaggggatgtcgtgaagatggcaagaagaacacagtttcaaatttctggaaaagagcctgtggtggagatctaaagatgtttagggaagagctcgactaaagaacaatgaaataaatggtccaaggggaagtca

SEQ ID NO: 1022 - DNA, 2307 bp, Homo sapiens
tgctcccggagactcctccgactccacacctctcgcggcagctgtcatttccatgtgcactgggacgggaagtcaaacgaggaatttaaaaaagcaaaagttgaccgaaggtgcatttttgtttagactccctgaggttccgttttacacatgatccaacgttaactacctttttttctgtatgctttccaaagtccttttttttcccttaatgttgaattaaaatacttgctcatagttgatttaccattcctacaaaagaggcagaaactttgagcaatctaggttttttttttttttaagttttttctttcttcctctcctgaatacactccccaaaacacccctttccagttacaattagcatcgtgatccaagcagatgccacatggaagaggaatcgccatttactcagaaaaaatgtcccttacaggaaccggcagcagctaggcagtcaccggcccgcctccatccaaaatcacgctcgcgtgcttcggaagcatccgggtcactccttctccgctttttcttgcagatgggcctaggccggtgtcggttctgtttctccccttggctgcctgtacgcccacagccttctggctgcgacattatagaatcggccgtgtcccccctggtgggggattggggatctgtgtttagccatttatatctactttagctgttaaagaggtccaaatgaaaatcaggtgattgtggaaccatggggacttgggggtggggcagaggtgggaacatttgtatcagttgagtcagcttggtggctccctgtggagccagggctgagccttgtcacgcgcactcgccaattaagagatggaccagccagcagtcaagtgcattctccagtccttgcaagaaggatcagccctttctgtgccagcctcgatcgccttgtgctttggtctctttttctcccccccgcctggatcctgcctcgcgcgggccgtcctgttgctgagactcggggtaccgttctgctgacccagctccctttagtcacgtttgcttggctctggtaccaaatagttgggattaccgaagagtccccttccttgcgtgtcagcacggatgctgtgactgccacctgcgtcctcgtcaagtgcccgagctcgccgccgtgtgtgctgcgctgagtgagttatgaggtgcctttcccggaaccctcctctcgcctggacccaagagaggcgacagctgtggctggggctcttggtttccagagggtctggactggtttgggtgctttaaaatagatatttagttcagtggtgcttatgggggagatgggactagaacttaagtgtgagacttgggtggatgggaaagttaaatattggtctcttcaagttttttttttcttttgctttgttaccacttgtcactgtctccatgttaaaatgccaaaaatgatgtagttgttgttgcttttttccctattttccaccccagtcgctccttaccgtgactcctgcccttggagggcatgtagcagtgtctgtcctgccagtcccaaggccctgtgggaggagactggcctgcatctctctaagacttagtctgacgccacgcgcatctcttgttctgtgttcaatcagtagtccaggggagaagcttctgctacttcagagctttgctaaactaacctaatttgtccaaatcaccccaaaaccaccatctctgacgtaagcttccatgcgacagcctgatccgtttccctggacaggtctctttcctggaatgcagcccaggcacctgtgctcctggcacccttgaggtctctcctttgagccgtggtcaccgagagggttgaggacgcagcacccgaggtcccagcctttgcaggagcctccctgggcttagctggacttagatcttcggtggcctcatgtaaacgtggcagccagcctcttctagaaccctagcccagggactggagcaggaaagggaccttcaaagtgaagactgccttgtcccgcagctccttctggcttagattgaaaaatgggcttcctaatgggttaaatcctttaaaacaaggagttgtgggggaagggtgtcgtgcactcctagagaaaggtacacagttgcccggttgggaatgtgcttggcgctgaccctgcgggcatctgactggtcttccagctcaggaaaaagaatttgaaagaggcttagcgtgaaggggaatcaaagaggaggttgtgatttggtcgaaggtgcctggtttagtgctgtaattgtcttattattttttttatatatatatttcttggagtaaacattttaaat

SEQ ID NO: 1023 - DNA, 1413 bp, Homo sapiens
gcccctctcgggctccaccgtccagctgtctgtccgtccaggtggccgacctcactgcacagaccccactccagcccctccaccccttcttcatgcacagctgcctttctataatccgggcttgactcccttcttaccactgtattctggcctctcccatgcctcaggctctggtttgagatcgtgctggggaggaacatggccactaccccttatcccatcggccatgtgggaggtatgaccctggtgcctggcaggttctccctctgccctccactgggcccagtggctcagggacctggggaaaggagatggagcagctcttgggatcctttggggaaaaggaggccattctgggccccttggcaaacctcaccactcacagaggctcctggccttgatccctgcccctccaggtgtccagggtaaagtgtaactcagactgacctgtggggcacagggggcaccagctggccttgccctctctggtctgggctgtctaccttcctcactgtatctttgcccagacccacctgggccagtaggcccctgtccccagccacacaccttagatgctggcatgccttactccaggtgcctgtgtttggccgaggcctgtgtgattcccggtctgcaccacatggcggggttggggggccgctggaggccacctgccaaggcgtgggatgggatggtcctgccggtttaggccgtgattctggaaaaccttggatgggccttcgtcctatgtcagccttccctttgatcctcaggccctacctgtagagacctccactcctagagccagtctcagggtctgggatttccctgcaggagctcagccaccactgtgccatggtgacacaggccaaggcagacattggccctcccttctcccagcccccagaggcctggccttgggttcgtcagcatgggccgaggacgttgcctgtagaatcctcctctgcctgggagtggctctgtgtggaccagtccctcactggcccattctttttttgacgcagccaatctgtgaccacgattcctcccacagatgcctcctgcttggattctgagtggtcagagatctgtaaagcatgactttcaaggatggttcttaggggactgtgaaagtgttgggtcttcctccaggatgcctgcatgggaccccacccggagctggtgtggccattccccaagtgccactggcccatggatgggggtgggtgctggtgccagctgggctgggtgtgggttctgtgtccttccaggatatgtgtcatttcccatgaggggccggggcaggtggctgggtgggggcacaggctggagtattcttagttctactggttctacactgtgaggtggcaatgggatttgctcagatgccacccaataaaatgcctgttactt

SEQ ID NO: 1024 - DNA, 324 bp, Homo sapiens
ccaccacacagcagctgcggcggcgaagacgaagctggcttgccttccaccctctgttctccctccttgtgcattaagttccctccgcgggatgctgcattgttaccccgccctcccctctctcatttttcttggtgtggcttggggtttttaggcttcctgttttatctcgtgtgtgtggtgcaccagctatgaggttgtctgtaacccaagccatcaaagggcctgtacatacctaggagccatgagttgtcccggccagcttcatacttgagtgtgcacatcttgagaaataaacaagtgacttaacacacattgaaaagg

SEQ ID NO: 1025 - DNA, 1212 bp, Homo sapiens
agaacaaagactgtgcctaaaagtggagagccaggggagtgtgggtcagataagcagctacagctgcagtttggtggattggtggagtatgtgtgtgtgtcagtgctcagctaagaactgtagggaagatggatgaccttcacgcagaactccttttgggatatacatgatgcagaaaggatcctacatggagagagacagaactctctcagctgacactctcagagattcctgatgggctttctcttgaagtccaaaggcgtctgcattgtttcctttctttgcccatccatgaatgttctgttttgttttttttaataagaattccggctgatttttgtgaggcctgtttaaattgactttactttgccttttgtgtttctcaattttatctagaaatctttctgactttttccatctcttgcttcaaagtaagaggggaactctccttgccgactccaccttataggtacatttggtgttttgcactgggaagaaataggatccatccttagctgaggcttgaggactgatccagcctctcatggcttccctccaaagtaacttagggttgagggatctatatgtgatgtcaaaacttactttaaacctctagtttcgtgctgtcatttattaggctgggccaccaaatctttgtttcaatttatcagaagccaagtgcatactagcgtcttgtttgttgcccattgcctatacttttcacctgagatgtgtgagttggggccttttaaaaactactgaattgtctgagccttgaagacatttccagggagaagagataatctctcatttcacccacaggctggtctaatcataacctagttaaagatgtccttgtttaagaaccccattatttatttttagtttttaatataaattaacatgtgggtcattatatttctccttaaatgaggaaattttaaattttattgatctaacctttgaagctttaaaaaaggagaaagagggtaggggtgggaaactggcatactgtgtgtatagcactgccgattggctaggccactgtgtctctgctacaaattaaagaaatcctaaaagttttccttggtcatagagttggggaatgacagaatttttctttgttgtgaaatgtatgtacagagtagaccatctctagccctgtggtgaaagaggtacactcgaatgtttgcataaagcaagtgacaaatg

SEQ ID NO: 1026 - DNA, 1316 bp, Homo sapiens
gctcattgtggctcaggctgcccaaggcttttctgtcaactcttttgctctctcccgctttgtctaatttagaactgcctcactaaattcttagggatggaagtatttggaaaaaaacctaacagtagagtcaccacctaaggaagaataaaatctcccagggtgctgtgtgttagtctgtttgcgttgctataaaagaatacctgagactgggtcatgtataaagaaaagaggtttctttggctcacagttctgcagtctgtacaagagggtgtggtgccggcatctgctcttggtgagggcctcaggaagcttagaatcatggcagaaggggaaacggagccagcgtgtcacatggtgagagagggagcaagagacagacaggggaggaaattcacacactgatggtggggatgtaaaatggtacaaccagtttggaaaacagtttggcagtttctcaaaggattaaacataaaattaccataggattcagcagttccacttgtgggtatgtagccaagagaaatgaaaacatatctccccacaaaaaaacttgggtatgagatttcacattatcattgctcataatagccaataagtaaaaacaacccaaatgtccaagaatgaataaatggataaacaaaatatggtatatttatacaacagactattattcggccattaaaaaaaaaaaagagtggctgacacctgtaatctcagcactttgagaggccaaggcagtaggactgattgaagacaggagttccagaccagtctgggaaacaaagcgagaccctgtctccactaaacataaaaacaaaattactggggccccatggcacacacctgtagtcccagctgctcgggaagctgagatgggcggattgcttgagcccaggtattcaagtctggagtgagctatgactgtgccactgcactccagcctgggcgacagagcaaaccctgtttccaaacaaacaaacaaacaaacaaatacacagacagaagtagttaaacatctacaaggtaagtgcatcttgaagacgtgttaagttaaagaagccaattacaaaaggtttcacgttgtatgatttcgtttatatgaaatgtccagaataggcaaatctgtttgagagagagaaagtagatgagtacttgcctaggactgggaggaggattgcgaggaaatggagattcactgctaatgagtacagggtttcttttgggggcgcttatgaagatgctctgaaattgattgtgatggttgtacaactctgaatacatgaaacagcattaaacatcactttaagtaagtc

SEQ ID NO: 1027 - DNA, 168 bp, Homo sapiens
gcccatcgtttctcaggctgcccaaggctcttctgtaacatcttttgttactcacattttctttaatttagaactgcctcagtaaattcttagggatggaagtatttggacaaaaacctaatagaagagtcaccaccaaatgaagaataaaactcccagggtgctgtg

SEQ ID NO: 1028 - DNA, 255 bp, Homo sapiens
gcccatcatggctcaggctgcccaaggcttttctgtcacctcttttgttctctcacactgaccagtcttggccttaagctgacttagaagggtttttctgaattgtctagatccatgcattatttttctagcttcctgccttgctccctattcactttacactgtgaaaggtggggggtgagtcccacttgagcgcttcctgttgaataaagcaggcacttgacctggctgtagcctaggtcttgagtgaacccc

SEQ ID NO: 1029 - DNA, 751 bp, Homo sapiens
acctctgtttcatgctaaccagacacgccgtgcactcgttagattcctttcttagaaaactcgttttctgctcccttccctcgtcccttccctccccgacaggtcacataacagctgcatcattgaccgcacagcgccatctctccctgagaataaagccgatagccaccctcctccggctccgagcctgcttctgccacacctcgctctcagttctctccacatttccatagagaccgtgtggtttttgttcacccgggccccccgtcttcctccctgtccccccatttataggcataaaatccactgtctgccagcctcccttccctcccacctttttggtacattggtgtaaaaaatgtaaaacaaaaaaattttatgaactaactgtggtgtgtgaaagagagaagaaaaactggaaatcttattccgtgtgtgtttgggagttgcttggggttgggggtcgtggggacaggggacagctctgggagcagaggtggccctcggtgccgtcctgcgcagactctcccgtcccacggaggccgcggggtgggggctggggggggtgccgccgaccgttccgctcttccggccaggtgcttttctgtcaatttctatggaatgcaaaaggaggtttttgttttattttgtttttttgtaaagcttaagaaaaaaatctacatcttatacttgagcctccatacttaaaaaaagaaaagaaaagaaatcaataaaaagaaactggggcgca

SEQ ID NO: 1030 - DNA, 800 bp, Homo sapiens
ccacagcaggggacctgagccgtcttccccagtctccatatgcagctctctcttataccctcgggttcctcccaggagctctggaggtacaggatttccacaggcctctttcctaaatggaaggaattggaactgaaagggaaaggaaatggaaggaaggggaatttggaggagagaacacgcccacccttgggaagctgcctgtccccagaggagccccaccagggagcagctgccccctcatcagagacctgcagagtcaaccaagcacaggttagagtcccaggaccggaaaccaactgtgggctttctgtacttctcatagctttggagtctggctgtccatcaggaggtcccgagggctctctggggcctgaggctcccacaccagctctcccctggcctcaataaaaccaggtgcatgcctgttcttccatccacactccagggctgcccaccagctgacaggcaccatcaactggcagcaacagagcaggcgcaggtacaaagaaggcagctcactcctgctcttaggagatccaatcagatctgccctgtacagccatgtaggctgtgcgctgcataactccagggacatgagtcacacagacacaatgtgagtgtgctcccccgtcatgcaacatctggacaccactaacagagcatggtgaatacatgctgaattgcattcagtatggctgtgaactaggcctggggacaagaatgaattttacatggaaagaatttcctgtagcaggaacagaggggataacaacagcaataaataataataagaagaa

SEQ ID NO: 1031 - DNA, 388 bp, Homo sapiens
gtgccctctgatgaggctatccctgcagccctttctgcccttgggcccccggacttccacaatgaacagggtaaggggttacggactaagactggctcctttgggaaatcacatgccagcgggacttgcaagccacaaccgagatggccagcctgggtcaagaattacacgcttggatgacaggcttgcacttgcccttgggatagcatagctaaaactgttggtggctaggggagcagacacaaactacttgaacatgacaagatgggggaagctcctgttcctcttattccaatgttcttggtttttctttatataacttgatgaaagtattgcagtattgatgccattgtagaatagaactggaattccattctttttgcaattt

SEQ ID NO: 1032 - DNA, 263 bp, Homo sapiens
gtcccctcttccctggaaaccttccacccagtgctgaatttccctctctcataccctccctccctaccctaaccaagttccttggccatgcagaaagcatccctcacccatcctagaggccaggcaggagcccttctatacccacccagaatgagacatccagcagatttccagccttctactgctctcctccacctcaactccgtgcttaaccaaagaagctgtactccggggggtctcttctgaataaagcaattagcaaa

SEQ ID NO: 1033 - DNA, 2166 bp, Homo sapiens
aagcccacaccctctaccctgttcctcagcatggagctctggcatccccacctcagtatctaacctgaaccagcctggcttttcaaacactccggggggaggtagtcccagcctcccccggaaccctctaccaatgccttctgaccttctgaagctttccgaatcctcccagttgaggcagtagctgtgtcctctgagggtggatgggaatcttgggagaagcccaagcaagggagccctcagaggtggtgtttggaccaaagcatcggggtgggggaggggtctgccgctgtcccccacctgctggcccccttgtccttcctcaccccctccaatatagtctcggagctacaaccgcagcagccactataaagggcaatattgatctttctgtccatgtggctctatcttttaaaacctcaaggccctccactgtcctaagataaagcctctcataggcactggggaccctgcacagtctggccatgtgaccctctccccaggcaagctctgaagtccctgcaggtggaggccatgcctgtcttaaactcagttgcatccctggtgcccaaagcaacaccagaaccaagaaggagctccataaatccttcttgggtgaagcctagacaaagccgccaggtcttgtggctccaggcaccagagccttgagtactttctcctgcctccaggcattggctcagggtgaattacaaggggctactgaatggctattactttcatcacgactgatccccacctcctcagggtcaaagggctactttctggaagtctccccaggctgactccttctccctgactgcaagggctcactccctcctccaagctcccacaatgcttcatggctctgccgcttacctagcttggcctagagtggcaaatggaacttctctgatctcccccaactagactggagcccccgaaggatggagaccatgtctgtgccatctctgtttcccctgttttcccacatactaggtgctcaattcatgcctgtgaatggcgtgagcccataatggatacacagaggttgcagcagatggtgtgggtacctcacccagatatcatccaggcccaaggcccctctccctgagtgaggccaggtgttggcagccaactgctccaatctgcctccttcccctaaatactgccctggtctagtgggagctgccttccccctgccccacctctcccaccaagaggccacctgtcactcatggccaggagagtgacaccatggagggtacaattgccagctcccccgtgtctgtgcaggattgtctgggttgaatgacactctcaaattgttcctgggatcgggctgaggccaggcctctcctggaaccacctctctgcttggtctgaccccttggcctatccagttttcctggttccctcacaggtttctccagaaagtactccctcagtaaagcatttgcacaagaatccttgtctcaggctctgcttctaaggaaagagactgaagagggacaactttttcctatgaggactcccaatctgccatttgtgtgtggctagctgtttccagccagggggctgaggcacctgcagtcacccacactctgggcctgtggcaccatctgtgcctcagctgactgagcagttctgagatgtggtgactcatgtgaagtggtgtcataggaatgaaggactgtgggcgctgggttcaaattccagttctatgcaccactccaggtagggatacccatgggggcagctgtgcctgtgtgggggaacagggtagggaaatctccataccttctcaattttgctgtgaacctaaaactgccatataaagataaagtctaggccaggcatggtggctcatgcctgtaatcccaacacttagggtggctgaggcaggcagatcacctggggtcaggagttcaagaccagcctgcccaacatggcaaaacctcgtctctactaaaaatacaaaaattagccaggcatcgtggtgggtgcctgtaatcccagctattcaggaggctgaggcaggagaatcacttggacctgggaggcagaggtttcagtgagcccagatcgcgacactgcactccagcctgggcaacagagtgacactctgtctcaaaaaataaaataaaataaaataaaataaaataaaat

SEQ ID NO: 1034 - DNA, 1257 bp, Homo sapiens
ctcccccaaagacaatgagttaagggagagaataagaacggcggtaacagttattggcaaaaagcatgaaaagagaaagcactttgaaatttattactagcttgctacccacgatgaaatcaacaacctgtatctggtatcaggccgggagacagatgaggcgagaggaggaggaggaggaggagaaggctctgggctcctctgcaaaaataaaaataaaaaaataaataaaattttaaaaataataaaaattcactatatacacatataaagaaataaaaagaagtctcagttgcagctatttgtcaaaattaatatccatttctttttatatacggtgaatattgcgcaattatagatctggattttgaaccacttaatgaagcggcaacaccaggtgttttgaggtgttggcattcttcgctgatttggctgttcccaatgtttacattatttaatcttgcaaaaatggttctgtgcacttggatgtgaaatgctgtccagttttattttttttatgttgttatccttggatgtacaaaaaattcagaaaatgatctctgtagatattctgttttattttggtcatctttagaagttatcaggaatgtgtttaaaacaagaagagaacttttctaaggaatgatacatagaaaagattttattttaaaatgagttgtaaagcttgtgtttctttgttgctgcaagctatctgcccaagttaatgcaaatggacacattttttatgtcagaaaaacacacacacacacacacacacacacacacacacacgaaaaacaaagaaaaaaatgcttgagctttttctaacttccccttgcagtctgttgtgtgagcagcctgtttatttctctaatattatgtcagtttattctctttaatggactgtaaaaaaatgtaatcacaagagtgccaaatatcttgaaatgccaaaaggcattttagtttcttttctctgtgctctgagtccacgtacaggaatgcttggagtgtcttttctgttatttatagggattctcttaaggcacaccagctgcctgttttgcatggtatttgcaaaaatgcctcttgcgtgaggaaatcttttaccattttttgtttgcaactttggacctcaagaggtttcccttcccttccccgttccctcttttcttaattcaatattctgtatgttgcaccttgaaccagcacacagggctatttctccaatgtacaataaaagaattgttcctgtgtctc

SEQ ID NO: 1035 - DNA, 1240 bp, Homo sapiens
tagtttggaagccgcacagcttgacctggaagcacccctgcccccttttcagggatttttatctcgaggcctttggaggagcagtggtgggggtagctgtcacctccaggtatgattgagggaggaattgggtagaaactctccagacccatgcctccaatggcaggatgctgcctttcccacctgagaggggaccctgtccatgtgcagcctcatcagagcctcaccctgggaggatgccgtggcgtctcctcccaggagccagatcagtgcgagtgtgactgaaaatgcctcatcacttaagcaccaaagccagtgatcagcagctcttctgttcctgtgtcttctgtttttttctggtgaatcgttgcttgctgtggacttggtggaggactcagaggggaggaaaggctgggccccgagtacaacggatgccttgggtgctgcctccgaagagactctgccgcagcttttcttctttttcctcatgccccgggaaacagtctttcttcagaattgtcaggctgggcaggtcaacttgtgttcctttcccctcacctgcttgcctccttaacgcctgcacgtgtgtgtagaggacaaaagaaagtgaagtcagcacatccgcttctgcccagatggtcggggccccgggcaacagattgaagagagatcatgtgaagggcagttggtcaggcaggcctcctggtttcgccactggccctgatttgaactcctgccacttgggagagctcggggtggtccctggttttccctcctggagaatgaggcgcagaggcctcgcctcctgaaggacgcagtgtggatgccactggcctagtgtcctggcctcacagcttccttgcaaggctgtcacaaggaaaagcagccggctggcaccctgagcatatgccctcttggggctccctcatccagcccgtcgcagctttgacatcttggtgtactcatgtcgcttctccttgtgttaccccctcccagtattaccatttgcccctcacctgcccttggtgagccttttagtgcaagacagatggggctgttttcccccacctctgagtagttggaggtcacatacacagctctttttttattgcccttttctgcctctgaatgttcatctctcgtcctcctttgtgcaggcgaggaaggggtgccctcaggggccgacactagtatgatgcagtgtccagtgtgaacagcagaaattaaacatgttgcaacc

SEQ ID NO: 1036 - DNA, 612 bp, Homo sapiens
ggggctagagccctctccgcacagcgtggagacggggcaaggaggggggttattaggattggtggttttgttttgctttgtttaaagccgtgggaaaatggcacaactttacctctgtgggagatgcaacactgagagccaaggggtgggagttgggataatttttatataaaagaagtttttccactttgaattgctaaaagtggcatttttcctatgtgcagtcactcctctcatttctaaaatagggacgtggccaggcacggtggctcatgcctgtaatcccagcactttgggaggccgaggcaggcggctcacgaggtcaggagatcgagactatcctggctaacacggtaaaaccctgtctctactaaaagtacaaaaaattagctgggcgtggtggtgggcacctgtagtcccagctactcgggaggctgaggcaggagaaaggcatgaatccaagaggcagagcttgcagtgagctgagatcacgccattgcactccagcctgggcaacagtgttaagactctgtctcaaatataaataaataaataaataaataaataaataaataaaaataaagcgagatgttgccctcaaacttcacctgg

SEQ ID NO: 1037 - DNA, 568 bp, Homo sapiens
gcacagctgcttgccattgcctgccttataggcatgtagagactgccaggccctcccagggcagccccaaccaggtctcctcccacctgccacacagcgctccggggcctgagggctccctcagccctgggaagacacattcccttccctgttccccagagagcccacctccgccctgggcaggagcccctcggaggctgtatagtcctccttagagaggcctgctccagctgttcataccacatcagtgtttccgtctgctcacctgccacagagcccacacccatgcccaccagtgttggtctttgcctcaaagcctgagacctgcttcacggccttcaccagccctgatggagagggcagcagctgccacgtggaggaagctcaatatcagctgggaaggaactgtgcctctgtctgactggccccacttcctaagcactgccctgccccatggggtggcacaggggtcccacagcaggtcttcctgcactgcccacccctggctggtctgtggcccaaggaaggccactccacattaagctgcccaataaactgcttttaagat

SEQ ID NO: 1038 - DNA, 2119 bp, Homo sapiens
attttataggaaaaaagggtatcatgatgaaattcaaaatcttattttctaaggtcagtgtgcatttgtttagttttgatgcttttcaaattacattattttcctcccctatgaacattgtggggagggactctaaataaaccagtttaggcatttgctagctttaggtgcttttattggtgcctgcccttttccttgttcattttaatttctgcaataatcctggactttcctaaactatgtaatgtatacttgtcctttttctctgcctcccccaaccccctgttgtttttatggtcagctttgccttttttttttcttccaattttatctaaacagttgcagagatttttatatttgtagaaagcatcaagaacggtatgccagtcaggtcctggaagtaaaatggaggcacaatatagcactgactgagttgtaaagcctcctgcctggagacttcagttatagctgtaataattaatcttatttataaaagccactccactaaccttttctctccaactgtaaacacagagacagctttgggaataagccaaaaacagggtgatctcattagattttgaagatatatgactcctttgggctacatttcatattgatcaatttctaggtatttttcactggcccaaagtattgcattcccttaacagcaagcacaagttctctatatcacttgttttttgttgttgttgttgttgtcgtcgttgttttgagacggagtcttgctcaggtgccccggagtgcagtggtgcaatctcagctcactgcaacctccacctcctgggttcaagcaattctcctgcttcagcctcccgagtagctgggattacaggtgtgtaccaccacgcctggcaatttttttgtatttttagtagagatggggtttcgccgtgttggtcaggctggtctcgaactcctgacctcaggtgatccgcctgcctcggcctcccaaagtgctgggattacaggagtgagccactgtgcctggcctatcccacttggtttttgactgaaggggaagtgtagaaatatattgatttgtgatttctggtgtcacctgtgttaccaaaaatcaaaacaaatcttttttattttttattattattattatttttgagacagagtctcgctctgtcgcccagtgtggagtgcagtggtgtgatcttggctcactgcaaactccgcctcccaggttcaagcgattctcccacctcagcctcctgagttgggtcctacaggcgcacacgaccacgcccagctaattttttgtatttttagtagagttggggtttcaccatgttagccaggatggtctcgatctcctgacctcgtgatccactcacctcagcctcccaaaatcctggggttacagatgtgagctaccactcacggcccaaatcttcttgatcatatgtttaaatatattttttaatatttggagcatgagttgtcacttcttgtttgccttttttataaggaaatgttggagagttacatcattgctaatgtagaaatgttaagtggaaaaatatacagtttggtaaaataaactagattctacatttatttgtgggtttttttcccctcctttctttccacagcacttttgatatcaagcaagtggcttcctttttgagatattaaaaaaaaaaagaaaaggaaaaaagtaaatgaagcccaactacctaaccctttcttatttgtatttgttttagtattgtgaagttgtgttaaatagtactagctagaaatacaaatttctggttatcatttctcttccctgtggcacttgacattttaattgtcttaaagtttttgaagtacatcttctggccccttgagtactgccagaggcaaaagatgtttgtttcttattcattccacttttgtctcctgggatcccttctgtagcctaaagtatggctgggaaatggacttgagaagattggcttgaattagatcataatcatgtgtgatcccatcatgaattcattggaatttgtgttgcatgtaaggcaatctttcctgttgtaaatcttccttttttaatgtacatatattttgaaaaatatgaataaacatgaaattttaaaagctg

SEQ ID NO: 1039 - DNA, 836 bp, Homo sapiens
aacttcaaatacacaaaatgaaacaaaagaaacaatttaagtatttttttaaaaagtttcacgtcttcgccaatcacagtgcagcaaggccaattctcgcagaaacccccacgtgtgcacgagtgggagaggggaaagagaaaaaaaggtgatcatggaggaaaaaggtactggataaaagtaaacttcaaaccttagggcgggagcactaaaaccaaaatacatgtattatttatagaaaatattttctgttttaatcttttctttttaaacaaggactcatacttaaaaaaatgtttagcaaaaaaaaaaaaagttgagaacttttaatttattttaaggactgcaaatgccagtgtaattttttaatttgcagtttctgtaaacaacttgtataatagaaaagcagagaaataaatttccctccccttcaagatgcacctcatgtttgttttaaggtatagcatttagtccagatttgagaaagtttggggtgaacaaggtaagaaagatttttttttttttggcatcaaatctttctgcctgcctctcagcttgcttcagaaaatttaaaaaatcacaatagtaatcaaaacatacataacattgaaacagaaggaaatgctgtggaccacagaactccaagaattgtttaaaaaaaaaaaagtgctaccctgagaaaagtactcttaatactcttgaaatctttagagcaactttaaggcttgtaaatacatagaacaaatatttaaaaaaacaaaaagaaattgactcagtactatttcttttcactttgaaaatataaagaacaaaataaagacaaacattgcaagttt

SEQ ID NO: 1040 - DNA, 96 bp, Homo sapiens
ggacgaagcggagagagccaagacggaggaggggaaggggctgaggacgagacccccatccagcctccagggcattgctcagcccgcttggccacc

SEQ ID NO: 1041 - DNA, 1043 bp, Homo sapiens
atgaggccacagaagcacaaggggaaggtgccgtgtcaagcccaggcagacgagacctctgccctgaagaccaacaccagcccgtgggctgccccctgcctccccaccctccccatggcccacccatctgggctgtctctgcagggcagagccgtccagacctgggatcagggaagctgctggcatcgtccccacccccagcctgggggtctgggctggggcagggattgctcagtggaagcaggactgggggtctggcttgccccctccctgggcctccatcacccctgagcatccctctggactcagagggaacaaggtgggagagagagtttgagacagctccgtgtggagagcttagcccctggaggcagcacaaggaggatgtgatatgtgggggagtgagcactgggttgggagccgggtcctggtttccaatttgggttctgctgtgtgactctgggcaagtcactctccctctctgggcatgtctgctacaaatggacaagattatttcagaggtcactgaagactgtgattacatgcacctgccttagaaggtaggattttcttcccagggacctcctatcaccctaccctgcttcttgaggtccctggagccccaggtgggctgaggggcagggagccggctgtgcccagtatgcctcctggaccctccagttctgccacaggtctgccgatgccctgtccactgcctacacatgacagacaagtaaccccctcatgggggatggggacctacctggctcctcagccagcacccagcttaacccctgccatcccatgctgggccctccaggccaagagtctcagctggccgagagtccaggccttgcctcccccgaccgccatggagggggcagcccggcacagctgctgggagcccttgtgtgtctggtcacactttttaggcgtcacgccaaaggccagcctcctggccccaatacccattttggaagcccctgtggccgtgtggatgtcggtaacagttgtataaaataaattctatttatcgctattgt

SEQ ID NO: 1042 - DNA, 1116 bp, Homo sapiens
tctttgaatacttgctgactgctaagaaatgaccagaggggaagaggagtttgacatgttagggcattaaagcaaaggtggatttaagaattaaaccattacatgccccttccaaaaggcagaaatccattcaaacgtgactgtcccaaatgccttatgtcaaataaagcagattgcactgatggacatcagacttgaaggaaatgtttccaattttatatttaaggggggtggtgggtgggagggggcaagtaaagacggaacaagtttagtagcagtaatagtaaatcatgtttacatatgagatttatagtcgtgggaggggaataaagttctgttatatttccttgctcgagtttcataccagatgcgttggtccataaaggattgtatcaagtagatgggacaacattctgctctgaacgaaaagtaattttagagacataacctgcttaccaatgcctgtctttgattcatattctactttcaataaagcatgaaagtgaagaacttgtcctaagtgtggaaaagtgtcttcagatttagactcttctccatgtcagctgcagcgccacccgccttacacctgcccggccgtctgtctcttggtattgggtaaaggagggggcacctgcatgtctcctgcaatgagcaaggaattatgtctcatgttttgacttcagaggctttttgctttggtgcatttcagaaaggatggagaacatttattatgtgtgaaagcatcctcttccggttttgctgttattcaaaagtgggaaatgtacctggcacgtttgaaaataaaaaatctgactacctatcagaagagtaaatcagactgaagtacatttggataacacaaggtttctataaaatttgttcttcctgtcctccatgtcactgtttcttggacctcagttctctttttgaaagcattattccaaaatgccctgagagggtctcttagatcattgtttaaaaaaggaaaaaagtatatggatgtgctgtccatccaactcaggattatcattcttagcaacacgtaaccgaagcaatattcttaagaatattgaaggggtttttttaattgaacttaagactggagtttttcctttg

SEQ ID NO: 1043 - DNA, 715 bp, Homo sapiens
gatattctgggacagcactgttgccattaagtgccttgtttttttatgttcacaaatgtatatgaagaaactttctcaaacttactctttctaataacccactaaagccagcttaaacactctaaaagtactttgtaaaccaacaataacttgatgtgtagcattccatattatttcattacgttgtactcctaaaaatgggaagctgttaataaattataacatttaggtcagcactctgcatccatgagtattgtagatatttatattttgtgagatattaacttgtttaagaaaaatccgattggattactatggaaaaagcaacttgcctgttctgtttctttgcatactttgtgacctaacagttttaacagacattctattatatgaatacagtttttttgatactattagattaacttgaagtttaataccaaatattatgctaagagtagaaaagctttctgctgacccctgatttcttagaaatatcccacataatccagcttatcccttttctgtatatgtttattcaggtttacctgatgtctcaaaatgaaaccaaattaagcctttttaaaggctgatgtgccatttgtattaagttatctttgtcattttaaagacatgaattccccaagcctaattcctacttaaggaagagagacaatttagtccttactttagaaaataaatacttaagcataattgt

SEQ ID NO: 1044 - DNA, 1072 bp, Homo sapiens
gcacctgcctgccccacacggactcccgggccacgccccagcccgacaatgtcgagtatattattattaatattattatgaatttttgtaagaaaccgaggcgatgccacgctttgctgctaccgccctgggctggactggaggtgggcatgccaccctcacacacacagctgggcaaagccacaaggctggccagcaaggcaggttggatgggagtgggcacctcagaaagtcaccaggacttggggtcaggaacagtggctgggtgggcccagaactgcccccactgtccccctacccaccgatggagcccccagatagagctgggtggcctgtttctgcagcccttgggcagttctcactcctaggagagccaacctcggcttgtgggctggtgccccacagctacctgagacgggcatcgcaggagtctctgccacccactcaggattgggaattgtctttagtgccggctgtggagcaaaaggcagctcacccctgggcaggcggtccccatccccaccagctcgtttttcagcacccccacccacctccacccagcccctggcacctcctctggcagactccccctcctaccacgtcctcctggcctgcattcccaccccctcctgccagcacacagcctggggtccctccctcaggggctgtaagggaaggcccaccccaactcttaccaggagctgctacaggcagagcccagcactgatagggccccgcccaccgggccccgcccaccccaggccacatccccacccatctggaagtgaaggcccagggactcctccaacagacaacggacggacggatgccgctggtgctcaggaagagctagtgccttaggtgggggaaggcaggactcacgactgagagagagaggagggggatatgaccaccctgccccatctgcaggagcctgaagatccagctcaagtgccatcctgccagtggcccccagactgtggggttgggacgcctggcctctgtgtcctagaagggaccctcctgtggtctttgtcttgatttttcttaataaacggtgctatccccgcca

SEQ ID NO: 1045 - DNA, 343 bp, Homo sapiens
ccgcctgcctagccctgcgccggcaaccacctagtggcccagggaaggccgataatttaaacagtctcccaccacctaccccaagagatactggttgtattttttgttctggtttggtttttgggtcctcatgttatttattgccgaaaccaggcaggcaaccccaagggcaccaaccagggcctccccaaagcctgggcctttgtggctgccactgaccaaagggaccttgctcgtgccgctggctgcccgcatgtggctgccactgaccactcagttgttatctgtgtccgtttttctacttgcagacctaaggtggagtaacaaggagtattaccaccac

SEQ ID NO: 1046 - DNA, 3937 bp, Homo sapiens
gcccgctgggtgtctgttgtctgccctctgctcctgcttctcagctcttccaccgtcctgccccacgaaggatccaaggccagttaaccaggcaagacacaagccttggctggaaaactgtggtagagccgggctgtggctcaggtaatttttgccatttggccagagggaatcagagactacaagctggacagtcacccaggcccaaccttccccaatgcacgagtcctctctctctccttgtccctgtccaccaagtagttggaccattctggcccccaaacaagggaagataaagtccccagcacacagcaggagtcaaaaattcttctcggctccttggtgggttgtttctggatcctagggcagcctctgtctgtgtggttaatgttctggtttctcagtctcctcactatatccacttcactcctcatttgcccaatgggctcaagtaccccataagatttaccagccatcagctctatctagggggctttcatttctttccccttggagttcttttcttcagacttaaagcagaaaggggtctgtgctgcctctaaaggattatgagactaccctttaggttgaagtttgacctggctcctggcttaccagtctcctggaagcagagcatgcagatactcatgcggatacccattggaatgacatcatccctccccaaccccagctctctctgctcaccttccaaaggcacctggaggtgcaagcctcatgcatctcctttcctgagcaccagtaatgctgctggcatcgcctgctttctctccagtggctggagacttcaagctgacttcattgtttccaccttgggaaaatccctaggctaagctgggcctgacccagcatcctctgccttctaggaagtgcccagcaagagggaaagcagacccctttagtcactccacaagcaatagctccatgagaggcatggactgtgagactactccctcctgttcctccttctccatcccccatggaggaggcatcgcactttaccaagctgatgcattcctacagaagtgggccccggatttctgcaagtcgactatcatgatgacttcgctggaggaaaggtgatacgtacatacgcattgagggcctcagctttatatagttcaaaatgcagcaaacttttcagaaagccacgtaaataaattggttaggttccttataccagtcacatggggaagttgaaaagaattgtatattcttggcagtgctttttctttagcattctgtcaattcaaagaagggatcctctttcaaaggctacctttatgaagtagacactattgccctcagaatgagagaacattaaactaccagtctggtaagctggatttttttccccatggctttacttccttgctgtgtgaccttgggtgagtcattgtcttcttggagcctcagtttccctgtctgtaaaatgagttctttgaaatggatgatctctaagggcaccaaatctggtattctaaggttctcctgttttcaccatctataatagtatgggatgatttttgcttgtggaaggtatcatccgtgtgggttcttccctcctgccctcaattgtttttctgggccttgttttttagtttctgtatgttttaatctcatggggatgagctcagagaagctccgtgggcctgtttcccaatctgcaaagtgtgaagggattagatgggatggtctctgaggctctttgtggcatcagccttgcccagtgccacacagtatctcctggcgttctaggagtctaggtattatggaaagtacccaagtctgtgtatctcctgttcctgtgcatctcctatgaatttcctggcaagaggaagactcaagacttcctccagaggaatttgtcttctctgccttcactcagcatgggaaccagtgttcatcctgaccttgtctgtatcagatttggcagtgaggaggcttggggagcacctaccttactttcagggacaggaatctattgctcatacttctgcttcccagagttttgccaatctaaaggcattgtcatgtggcctgcctttcctgtccacatccccacctctgatgctcaagatgctatttccaagatctcttactgctgcttctcctggcttactggccagaaactagctcactcaaggctgccatccttcacttgcagcctccctgccattctccttcactggttggcaaccttgagagttcaaagaaaatcaacctctgtggtggtcaactaaaggtattaggaaactaagtctgtggctcttctctgctgatggaaacagaagggcgccaagccatgcctaaaaagatctcgccaataattcttgtctttgagtgttggagccctggattctggtgctatagctcctggtgccaaagtctggatctttccacatttcagcagcaccaacatctgctgctactcaaaatgtcctgttgaagagggacagctgtgatgcccttttgctggggctgccatcttgaaatctgagtgcaataggatttgcttgtaacagttatttcaggatattttgtttctttaatctgcacactttctagatagattttatttttaagtgtcctcagcattgcagaaaataacattgtaatagcaagtaaaggctggaggctgtttctctgggcttcaaatggctggcaaggctggctctcaaatcccaaagttgggaggcatgtttctgaaaagcaactgaggtgtgactgtttggacccaggcctcatcatcaggggtcctggaggaagcctccaagtagaggggagacctggtagttgaatagttgtttaatcaagccaaatagtcccactgcccccggtcaacaaacccacttttatgacagttttcttccgcagcttggctcttaaattttactggcaggtgtatggttgttggagggttcctagtgagttgggggacctggcaatagagctgcttggttggaggaagtgaagctggcttagtaccagcagctgatctcttccacgtgctgctgctttttttgccactctgatactaaaccagagaaagctgcaggtggataaagaagctgtggctgttttttgcttttgggtggcaatgagaaagagtcacagtgtgggttaaagggatctgcagtggggccaaggatgccaccccaccctcagctgtaggcaagcttgcacataaataacccccgtcagtggagtgttcgggatgcagggggcactatagtgttcttggacttgtcgtcctggggcagttttagttctttatatttagtgggtcagtgccaagtgctaccacttcccaataaaggaatggggacccagaggctgggtccctggctaccttgttatgaggttttgttatttctctgacaagattgctttggaaagagctgcttttagggattattttttgaataccccgagtggggagcagggttctcctcaaagcctcacaaccataggatcataggaaaggggccctattttcctgctgcttcccagctcagaacatatactgaatggaatgtatttttaagagaataaagtctatttttttgtattttaaagattgagagggctaagaaagtagccctcaaataaactgttattgcattataggcccctttgttgggggcagcctgttggtccacacctacttgctcaggcaggtgctctggtctctctcacccctgccccttagagtctaggtgcagcagctccaagcatgggaccaaggaggccagaacctgtcgctggaaaccagggcaaagcagtggctcagggctccttgggtgcatgtgtatcattggagctgcctgtctgcatgtatcctctggcgcgaatgctctctgttggctctgcagtacaatatgtaaccaataaagctccctcgtttccgtatactctg

SEQ ID NO: 1047 - DNA, 1190 bp, Homo sapiens
tcttattcggtgatgactcttgttatcttttgtgtcctgtaacctcatcgggattgtcttttttttttttaattattttctgagacttggattaattcatggtatcttgagtcttggttcaatcaacagaattgttctttttcctgttgttttcttaacttctgaaagagctgtgggtggtggggggcggggggcaggactgaagatttcactacttagcataatattttctttctttttttttttttttgagacggagtcttgccctctcgccaggctggagtgtagtggcacaatctcagctcactgcaacctccgcatcccgggttcaagagattctgcctcagcctccagagtagctgggactacaaacgtgtgtcaccaggcccagctaatttttgtatttttaataaagacggggtttcatcatgttggccagggtggtctcgatctcttgacctcgtgatccgcccgcctcagcatcccaaagtgctgggattacaggcatgagccactgtgcctggccaacataatgttttcacagttcctctttgttggaagaagtgtgtgacctacaagattcctggttgatacagttcaggtgagaaactgtttgattatagaaaagaccccagactcagagggaaggctctctggtctacctgagatctatatggagcttaaaggagggtgaataagattaatgacctgaattgaaagagaatttggagccaggatgggtctccattctgtgtggcaccttgattggaaaataatatccatgcgtttcttccactgagtctttcttagattaaatctctcccagttgtccgtgaagagaaagacagtatttgcagtgccgatgatatagagtgacttggagagagattcagaagttaggggtagcgggggtaggatggttgggaccagattgactaccctgtacccttccttcttccccaatatgcctgcgccatcttcacattctgaagttgaaacccatgatcacccctttgaggtagattgaccggctttagacgcccaccccccacccaccgcaagctttgagtgggacaccattctgaattttttttctgaatttttttttaacatctctttctcattagagatctgaaaactcattagagatgttgagtcttatcaaataaaaagcatgagacatcatggcc

SEQ ID NO: 1048 - DNA, 670 bp, Homo sapiens
acaagtaagggcttgaaaatgatactggcaagatacgattggctctagatctacattcttcaaaaaaaaaaattggcttaactgtttcatctttaagtagcattttgctgccatttgtattgggctgaagaaatcactattgtgtatatactcaagtctttttatttttcctcttttcataaatgctcttggacattattgggcttgcagagttcccttattctggggattacaatgcttttatcgtttcaggcttcattttagcttcaaaacaagctgggcacactgttaaatcatgattttgcagaacctttggttttggacagtttcatttttttggatttgggatagattacataggagtatggagtatgctgtaaataaaaatacaagctagtgctttgtcttagtagttttaagaaattaaagcaaacaaatttaagttttcttgtattgaaaataacctatgattgtatgttttgcattcctagaagtaggttaactgtgtttttaaattgttataacttcacacctttttgaaatctgccctacaaaatttgtttggcttaaacgtcaaaagccgtgacaatttgttctttgatgtgattgtatttccaatttcttgttcatgtaagatttcaataaaactaaaaaatctattcaaaacatt

SEQ ID NO: 1049 - DNA, 2520 bp, Homo sapiens
gctgtaattatgatggctgagaaatgattcatttgaagatacaattttatttgatatcaatgaacgccctcaagactgagctgcttttatcatactctcctagttgtgggccacgatttaaaccatcagagatgacaagccatttgaaattctgaccctcagctttgggaatgttatctcctccaaaatggtgatttttattcactcaatgggttacttcattaaaagcagccccacaagtaactggaaatctgaagaccaggggacaaatgctggtgaatgcttaggcctggaaatggagtaaatctttcaatgttattttctcccatccttggcccaaggaactatgctaagtgaaacgtgggactgtaatagggtggtaatggctgctttggaaaaaggcaactagagactctgcctaaattgccacacctattcacacaccatagtagttgggcacacacatcttcccttccaaagggctttttccttgagttgctcatgcatttgtatcttttccatcttcctgagggcaagattttgcacgatgaaggcaatgattgtaacttttctccttctcattgtttctaattagctcctttaaagcttgcatctttgtgaaggctaactgaagatacggttggaaaggaaaaatgagacacaggtttggggaccaaggacccatcaatgatggtgactttagcagaagatgcccacagttattactgccattaatcagatttatgaattttctttggggatcactatagggaatattgtatagaaaatatcttcaagaaaagataggaccatcagtgacagttaagtgtaaggagcaagtggaattgagtccttcagggaaggaaccacagagtcccttcccaaggaatgtaggtcgtttctgtgttctttcccttctaatctttaagatcaactcttcctatcctgctaactctaagatttgataagggccacatcccagtgtttatcttagcttgcatcagggcatgtgtatgtacagtaatgtgtattcctgtggtttttctaatagaaactgaatttacagagacttagcatgttcttgggtgatgtgagtcatgtgacagaagtacagacataactccaatgtgagaaatgtccttttttcattatggaaaataatttaaacactagtgctttagtgtgcactctcctgtaaggtctgtctttgtacagagctaagcacttgtttgtatgtgtttgtcaattgtggaagataatgaccagacaaataggtcgattgtcctattctcagaatgaattatcttctatggtaatgaagaactctttggcttagtcagaaggaattaacgaacctcggtaggaatgtatttccatcctcccaccctacagatataagaggttaaaataacagttcgcccaatttaagcccagtagtgtcagttttcctaatctcagtccaggtaggaattaagaaatatctcaagtgttgatgctatccaagcatgttggggtggaagggaattggtgcccagaaaatgggactggagtgaggaatatcttttcttttgagagtacccccagtttatttctactgtgctttattgctactgttctttattgtgaatgttgtaacattttaaaaatgttttgccatagctttttaggacttggtgttaaaggagccagtggtctctctgggtgggtactataatgagttattgtgacccacagctgtgtgggaccacatcacttgttaataacacaacctttaaagtaacccatcttccaggggggttccttcatgttgccactcctttttaaggacaaactcaggcaaggagcatgtttttttgttatttacaaaatctagcagactgtgggtatccatattttaattgtcgggtgacacatgttcttggtaactaaactcaaatatgtcttttctcatatatgttgctgatggttttaataaatgtcaaagttctcctgttgcttctgtgagccactatgggtatcagcttgggagtggccatagatgaccgcatttccatgacctaactgtatttcacccccttttccttccctactgttcttgccccaccccaaccagttcctgctgctgcttttggcttcttggaggtgaagggcttaaaacaaggcttctaagcacccagctatctccatacatgaacaatctagctgggaaacttaagggacaagggccacaccagctgtctcctctttctgccaattgttgcccgtttgctgtgttgaactttgtatagaactcatgcatcagactcccttcactaatgctttttgcatgccttctgctcccaagtccctggctgcctctgcacatcccgtgaacactttgtgcctgttttctatggttgtggagaattaatgaacaaatcaatatgtagaacagttttccttatggtattggtcacagttatcctagtgtttgtattattctaacaatattctataattaaaaatataatttttaaagtc

SEQ ID NO: 1050 - DNA, 404 bp, Homo sapiens
tggaacagccagccatgaacaaggtgaggaagaagaaagaggaagcgctgaattatctgaactggagaagcaataaaaattaaagtgaaggaaaatactgaactctgtctgagtgggatggtatgagttagaggaagaattctcttgcaaattaataatcggtcattagaaacaattggttaatgggggagcctaattggagaatgatgctgagaatttgtattgatgaacctcttttagaaactgcagagggctgggcacggtggtttatggctgtaatctgcaaactctgggaggctgaggtgggagaatcgcttaaccccagaagtttgagtccagcccaggcaacacagcaagaccccatctctataaaaagaaaaaataaagaaactgcagcgccttag

SEQ ID NO: 1051 - DNA, 1293 bp, Homo sapiens
ctccttgctggcccccacatgccccatgctaggccccaatgttcagagctgggacttgagctcacaaaactggggagctgagacatttgttctcttggatctcactctctctgtcccttgtgcctctgtagctggccttcttcctgccacaggccatgcctctaccaaggacacatggcctttccctgttaggactgatggcggttctttcctatctcattacccgctaggggcctgggagccctgtggctggatctgagtgctcctgagctggcttcagctgcagaactctcagtccctcatcagatcgagactctatttcccccgtcagtctgggggcttcacaagggcaggagagccctccatcactgacttccagatcagggaccctgccaagtagggactgtcttctcagccagccatttattagtctaatattccttcactaaattccaactctatgtctggacctgtgttaggcacttcagataccacacgagtaagacaagggccctgcaggggtggtcctttggtggaaagctggtcttaagggttgggcttgggaataggcagggtcagattccagggcatggctctggactcagctggtttatacctatatgaccattacaattgtctacagatcacatccattctggctggtcaacatgcatgctgtactggctgttaaataaaaatattctgaatgtcactccttttgagggacagcacagccttccctaggcattctcctatattccccagccaaattgtagagtcagatgcacccacatttgcctgtgtccttgatttagcaggaaggaaaggaatagtcagggttgatggatgcccacttctcttctctttctcttggtcaactcaggagccttttagtctgagggaatggagaggcaaagaaagaagggagagtaatagaattgggagggcagagacttaagggttctgcttcccagccctagaaattctatcattgctcagccccaatgagaaagcagatacacctaagccatcatcaaccactaacatctcaacttgccagttgctgggtgctgggccctggcaggaatgggccaagccaagcaggggagactagagagcaccaatggccaacacagctgcctggctggggaggctgtgctgtttcccctggagacctgactggtctgtggttcccacaggaacagggttgtcttttgagcccccagtgtctggtttcattcatctcagacttgttatttcactcatctctaataaaggattggggggtcagtt

SEQ ID NO: 1052 - DNA, 3450 bp, Homo sapiens
gtggccctgcctgcccccagcagcctgcccccgactctacctcctcacagacaggctgacagcccctctgcctgcacagggacattggacactaggtgctgccctcagggcatggggtctcctcgcctttcctgccccagccggcagaagctgtgtggggagatatgaatggtacgggtgaggagtggataaggggtggtcctcaccttcctaatggaagctgggcctagggaggcccatccagtcttctgacttctgacctctcacaagaaggctgcaggtgaggtggccaagtccagggaaaggccctgctacctccttttgaggggtaattaggaccctcgacgtaccaagaagcacataatgcctttgtatttatttcaggttgagttgtttgtttgtcctccctgagttttagcagggaggttgttctagtttttagtgagacctctgcagacaggcccatcactgtccatgttccagggcaggtctgggtttccaagggaggggcccaggctacatccttggtttccccactgtggtgggggctgggactctgaggggctgtccagtctgctagaatgctaattgcacttaggcctcatggttctagtaaacggcagctgtgggcccttttgcctcttcccctgttcttggcctcacatctccagctgagctgccggtcttggcttcctggtcgcctctgtcccagagatggtcccagggagccatcctagggcaggtagcactgaggctcctgtggaaacaggagccacctgctcaggagacccctttcctgaggaagtccttacctctccccttgagatgtaaaaatggtccagcagagacaagctcccgtggaaaacagacaggagcatgggggcagctgtcatggctgtggcgggcacttttcctcagagtttctgccttgcgctggtccaggagccattttgcaccaaggacttggtaggcagaggcagccccactgtaaagaagggtcagattaaaacaaaaaactgccaaaagcatcccctctgccccccatgtggcactggcatcattctctgcttccctgggaggaattttttcaccatgttattgaaggggatggttcattaaggactccacccctcagagctcactcagaccccaaggacagaggtgactggggcttggtgacttgttcactccttttttcccaggtatactgaaggggtgacagagagaggtcttcatggcagaccaggccttcacagctaatggggagaggaactcatgttacctctgcaggcctggggtcctgagggggtcttttggcttcagcctgttcccccagaggcttgatcatcccacattgtcccttcagctcagctgctcttctcccccacccaccctgggatgtgggtgctctgggctgaaccaaggctatgacttctggagagaggctcaggggttggtctgagaggcctgccatccacccctcagggagctaggttttctcagaggctcagctggacagcactttttagaaaagtttgtagcattaagctggtttaaaatatgaagttggttttgttggatggctcctgagctgactgactgatgtctgaagtttgagacgagggattatttcagggtggggcccaatgtgatctaatgcccagctggggacaattgtgcctcatcatttgctcaaattcctgggcccccaagttagccccctcccaggagtggtcagcgggtcacagctgcccccactctataagcagggctaattgtgtaccctttgcagaaatgcttttggtctcctacccaaatactcacaagggtcttatcagacgcccgtcttaaagtccagcatgctcagggaccctgtgtaggatctcgtttgtggtgagtgggctgctctgaggtctccactgggctgccatttagccatgtgccatctctgaagtcagaggtgtttgactcccattccttgggctctggagctttccccaagaattacatcagagaaaaggaagaaggggcctgcaggacccattgggaatgagtttaatactgaagtctggaatgtaagctcatgccctagaggcctctccatatggctggtcaggggagctgccttcaggcttgtgccccgtgtgctcagcagctgcctctgtccccctctactgtccctttcacaccttgcctggccaaggggctagacctcccaggctaagcctcagattcagtgcaggacacaagctcatgcccccgtcttgccagtgacacttgaagcctcccgacttccacagagtgcttcaggacacattttgagtggtattttcttttctttttttcttctttttttttttttttgagatggagtctcgctctgttgcccaggctggagtgcagtggcctgatctcggctcactgcaacctctgcctcccaggttcaagcgattcttctgcctcagcctccagagtagctgggactatagacatgcaccaccacgcccggctaattttgtatttttggtcgagacggggttttgccatgttagtcaggctggtcttgaactcctgacctcaagtgatccaccacctcggcctcccaaagtgttgagatgacaggcacgagccaccaggcccagcctgagtggtattttctttagggaccaggtagactttaaaacgagggtaagagaaaagccagtgtctttctgaggtaaataatttctgccaggaaacttcccagccccaccagcagcccccctaaaaaaatcactcgtgtccccagggacttctaaagcttggggctccaggaaatcatccagtagagttggagattcagagatttcttgaagccagggacatgctcctaactcctttcccattaaaggtgttagaatagaccagagggtgtcccttttccacagtaatgggatcggctggtgtgccttcagggaggaagagggaggtggtcaagcttgaaaaactggctttaggatggttctgactttgttctccctccccaagtgttctcaacctccattctgcagtgttcagagttttagggaaagggtttgggtgccccagcatccaggtgttgtgtggcttagcgcatgtgaagtgaaaaccttctggggttgtttggaagcagctttctggttcttgtgattgtatcctgaggtcccagaaccctattctcccacgaggatcctcagtgaccatggtggccacacgcctggccagcctgctggctcctgggtgagctgaagaaccttgcctgtggcacttttcgagggtgagctggaaccgagagaacatggtccccgtgctgggactcatgcgggtcatttcctgccggcctggtttcgcctggtcgtgtctttatgagcaccatgtaagcctccttgtattgagataattgggcattaaacattaaactgcagctctggg

SEQ ID NO: 1053 - DNA, 498 bp, Homo sapiens
aacgcaggtgctggcgcccgttctgcctgggaccccgggaacctctcctgccggaagccggacggcagggatgggccccaacttcgccctgcccacttgacttcaccaaatcccttcctggagactaaacctggtgctcaggagcgaaggactgtgaacttgtggcctgaagagccagagctagctctggccaccagctgggcgacgtcaccctgctcccaccccacccccaagttctaaggtctcttcagagcgtggaggtgtggaaggagtggctgctctccaaactatgccaaggcggcggcagagctggtcttctggtctccttggagaaaggttctgttgccctgatttatgaactctataatagagtatataggttttgtaccttttttacaggaaggtgactttctgtaacaatgcgatgtatattaaactttttataaaagttaacattttgcataataaacgatttttaaacacttgtgtatatgatga

SEQ ID NO: 1054 - DNA, 350 bp, Homo sapiens
ggaccctcccctaccaaggaccaggaaaagcagcagctgcctgctctccagcctctggcaggaactcagggccctggagctgctggggccaagccaaggcctcccctacctcaaaccccagctgggcccgcttagcccaccaggcatgaggccaagggctccactgaccaggaggccgaggtctctaactcttatcttccacagggtccaagagttcatcaggacccccaagagtgagtgagggggcaaggctctggcacaaaacctcctcctcccaggcactcatttatattgctctgaaagagctttccaaagtatttaaaaataaaaacaagttttcttacactggg

SEQ ID NO: 1055 - DNA, 585 bp, Homo sapiens
gccccttgcccacctgaagccctggggatgatgtggaaataggggcacacacagatgattcatggatggggacatggaaatgagaataggttaaatggtgcaggtacctcatagccagctctacacagaggtctctcctggcagaaagcaggcgaagggcaggaggagctgcttggcagaaggacctcctgcccagacctgaggagtgagaggctttgagggctgaagtctccctttgttacggaccctggcccaggagttgaatgcctgaggacgtgtgggaaccccgttccctacttagcatgatccttgagtctcctctctggatggaatccgcgagctggccacctggccaccctctacacggctccaccctgccatggccgtggggcccttgctctctgacttctcaggacacaggtcatggaggttcttcccaagctggcagaggccatttgtggaaagtggagagctacgtggtggccgtctgccaactccagcatctctggaaaatctccacgctgaatgtgatttttgaaaacagcttatgtaattaaaggttgaatggcacatcataattccagc

SEQ ID NO: 1056 - DNA, 631 bp, Homo sapiens
tcatttgagtgcaagaagaaagaggcgctgctcactgttttcctgcttcagtttttctcttatagtaccatcactataatcaacgaacttctcttctccacccagagatggcttttccaacacattttaattaaaggaactgagtacattaccctgatgtctaaatggaccaaagatctgagatccattgtgattatatctgtatcaggtcagcagaagaaggaactgagcagttgaactctgagttcatcaattgtaatatttggaaattatctacaatggaatcttccctctgttctctgataacctacttgcttactcaatgcctttaagccaagtcaccctgttgcctatgggaggaggtggaaggatttggcaagctcaaccacatgctatttagttagcatcagttgtcaccaacagtctttctgcaaagggcaggagagctttgggggaaaggaaaaggcttaccaggctgctatggtcaactcttcagaaattttcagagcaatctaaaagcgccaaaattcgctatgtttacagtgatactattaagaaaatgaatgtgattctgctctgtctttttaagtatgatcaaataaaaaatttgtacatcacaatcatttctacc

SEQ ID NO: 1057 - DNA, 564 bp, Homo sapiens
tgaggcctcttcccaatttaaacaactcaagtcagaaatcagttcactccctggaagagagagaggggtcttggcactctcttcttacttaaaccagtcccagacacctagacacggacccctttttgctgatgagtgttgggactgactcctggaagacagcctggccttgcccacctgcacacagtctgttggataggtagggccacgaggagtagccaggtaggcgagacacaaaaggcctgggacagggtcagtacaagtcaggtcaggcttcatgcctgcatcctccagagaccacaggagccaaagcgagcctccaggcccagcaatgagggacttgggagaaatctgagaagaatgggttgttctcttgggaagtcagggtatcagatgggatggacatccaggtcttctctctgcctaattgtcaaggcctccttggctctggagctatgaaaggccccactttcaagtcacccttgccactgaggaccgaggactatgctatgatgaggattaaggtgttgacttgcctctttcagagataaatgacaagccttc

SEQ ID NO: 1058 - DNA, 2059 bp, Homo sapiens
tagtataaaccatggtcatttttaggcatgtatcattcatttactcatagtttggtttacttaaattatcaggaatacaatgttgcaatgatgcttaaaaaacacttgttagttttccctgtaccaggcaatggttataattaaaatgatatgctgttgagaagccactcttaagagtccagtttgtttaatgttatgggcagctaccaatttgtggtgtctctgtatatttttgtaaagattctcattttttatgcttgaagtatttggtgaaaagatgttggttgaccataatttgcaacattgtctcattaaaaataaactttcatattcatatttggtagaactgttaacctagaaatgtagcttgctaataagatagaatgatacaaaagtgaagtagtagccacagtacaacactgactgctcagacacatttaggttcagggtggacctttatgtcttgtcaagatgtctaggcccggctgggcgtggtggctcacacctgtaatcccagcactttgggaggccgaggcgggcggatcacgaggtcaggagttcgagaccagcctgaccaacacggtgaaaccccgtctctactaaaaatacaaaaattatccgggcatggtggcacatgcctgtaatctcagctactcaggaggctgaggcaagagaatcgcttgaacctgggaggtagaagttgcagtgagccaaaatcacgccactgcactccagcctgggcaacagagtgagactccgtctcaaaaaaaaaaaaaaaccggatgtctaggccaatgataattatttttgatgcagtgtggattagttcttttgttaaccccactgtcttggggaatgatgccagctgggaaattgagtttttgactgaaacatggagccttcactgctttttttctggttcctatgaagatttggaacatagaaaacacaaaaactcaccttaaaatttgagcaggtcgttgatggcaaaaataattttaaggaaaaaggaatattcttatgtagttattctaaagtttaaggagcgttgttgaccataatattgcttagttttcttactgctgttaagtaagtaaattgtttcaaagtaggttttgtgtgtgtgtgcctagtgtaaaagaactgaaattttgatgcttacagcacttggctcgtgcatttgtatcaaaatttgcctgcctctttatgagggaggcctgcttttcacacctcagtttatttaatacgaggcaagttgtaagacaacactcattctaggtgattctgtggtgccatgaaatttaaggtaatttggggaaaaggattagtcagttttaagcaagagtcacatcttttgagctttcgattatcagtgtagtacctgactaaaaatgaagtaatacccttaaaccatttataatttctagtatttctctgaaagatcgttttggggacaaaagtgacttgacatgtccaatttcatttcagaataaaaagctagcatctttaaaaatctcagattgcttgcttacagatacaagtacgaattatggacaaacgattccttttagaggattacttttttcaatttcggttttagtaatctaggctttgcctgtaaagaatacaacgatggattttaaatactgtttgtggaatgtgtttaaaggattgattctagaacctttgtatatttgatagtatttctaactttcatttctttactgtttgcagttaatgttcatgttctgctatgcaatcgtttatatgcacgtttctttaatttttttagattttcctggatgtatagtttaaacaacaaaaagtctatttaaaactgtagcagtagtttacagttctagcaaagaggaaagttgtggggttaaactttgtattttctttcttatagaggcttctaaaaaggtatttttatatgttctttttaacaaatattgtgtacaacctttaaaacatcaatgtttggatcaaaacaagacccagcttattttctgcttgctgtaaattaagcaaacatgctataataaaaacaaaatgaagg

SEQ ID NO: 1059 - DNA, 1214 bp, Homo sapiens
aagcggaaaaagaaccaaagaagggcagttcaagcgaccaaagggtgggtggaaggtgctgcagtatgaatactgtacgaatattttgactctggtctgaaaagataaaagaatgttatcgaaaactacatggaataattgaagtcccttcaagtttgaaagtaagcattttaggacaaataaaaggaaattcaactttgtacttgtggaaactaatccctaaatatgaataggtttatattgattcatgggtaacaggtccataataaattattggaaactaggatgtctgaatatcaaggaagacagccatagtctcttacagtgcctctgttggtctgtctcaaactgaattgggtgggaaaaggtatggtccaatataaaagttccatttttgccattattggcaaatcttgcctttgtttattttggtgccagtgttttctgcttaatcatttgctttgttggcatctgtgtttatttacttgtacaccacatgcagtttacatctgtcttaactactccttcccaggtaaattccaattatatttgacatccagctaagagggcccatctcttctcacctctttcctagtcagtatattcagcaaatatttattgagcccttactgtgggcaaatcattgtactggataattgagaaaaatagataattcccttattcagtaaatgtctactgagcacaatctagtgaatcattacagtatggcctcattgttttgtttgaggtgtgttattcataacaatattttacaccattcgtatcaatgtaattatagaacacaatatacgatcaaggataagtaattgtgtggttatctgccatttaaaagtatccagtatttgatcacattattataaataatgaaaaaatgatttaatctgtaataaactggtttattgtgcagtgactgtaatatactagagttataataaattgtttactctgcctcaccaaacacatgctaggatataacccccaaaataagtatttaactttgcattaggtataaaggagactgggtgctataattagattattttgaggcagacagagagctgttatcctaactgatttagtatgttctgtaattgagaaaatgttcaccaaattatactttttagtgatttacatgtacattttataggggacatgttctgtgtatagcgaataaataacttttatagtatcac

SEQ ID NO: 1060 - DNA, 1323 bp, Homo sapiens
cagcgtgtgtccaggcacagtctgagtctagtctacatggaccagtagggacaacctgtaccagggtcacagcctggcacaggctacaggggtggggcagaaggaaaggggacaagatagaacccaggatgtgagggtgggggtggagcggatgcaccaaagtggagaagcaaagatctttctggggtcctgagtggcttccaggagagcgggatgaaccctggacctggagtaggagacccggatgcactggggctatctaacagtactggcatctgataggtagaggtcaggtacgctgctaaacactgcagctcccaccacatagaattatccgaccccagatgtcaaaagtgccaagggccatgagccctgccataaactgatacatcgcacccctcttttaggatcccatagtttcaattcatgtaagttcaacagacacctgaagtctagcatgtgggaggctgaggatggagctgggaacacaaaggcagctgataagcaggttctgcttgcaaagaggcctcagtccagtgggagaaacagacctgggcgcaaacaactccaggacaaggcaggacatgataaagattataaagcaggtccaaggaaagtgccgccagtggtccaaggagggagacagagggtcgtcccaacagggggaggtagggctttgaaaacaccttcatccaggctgggcgaggtggctcacgcctgtaatcccagtagtttgggaggccaaggcgggcagatcacctgaggtcaggagttttagaccagcctggccaacatgacgaaacccggtctctactaaaaatacaaaaattagccaggcatggtggcaggtgcctgtaatcccggctattcagaaggccgaggtgggagaatccgttgaacctgggaggcggaggttgtgatgagccaagattgagccaaaaaaaaattagcagaattggtgttgggccctgaaaaattagtccgattttgtggtggtaatgggagaaggacatcccaggagcagggtctggtgggaggaaagggaaggaggaggctaaggctgcccaggaggccttggataccaggcttggagctggtaacctccagggcttccagcacggggcctctgcctggtgtgacagataccggctggcctcacttgatggatctcagtactgagctgggcatttctctgccccccaacttttttctttttaaaaataagatggggagtgttcataaaattatagatgtttgttgtaaaattttggaaaaccctggaaattatagagaaaataaacataatctatactcccaacacca

SEQ ID NO: 1061 - DNA, 1034 bp, Homo sapiens
ggggaatgggaaaggcttggtgcttcctccctgtccctacccagtgtcacatccttggctgtcaatcccatgcctgcccacgccacacactctgcgatctggcctcagacgggtgcccttgagagaagcagagggagtggcatgcagggcccctgccatgggtgcgctcctcaccggagcaaagcagcatgataaggactgcagcgggggagctctggggagcagcttgtgtagacaagcgcgtgctcgctgagccctgcaaggcagaaatgacagtgcaaggaggaaatgcagggaaactcccgaggtccagagccccacctcctaacaccatggattcaaagtgctcagggaatttgcctctccttgccccattcctggccagtttcacaatctagctcgacagagcatgaggcccctgcctcttctgtcattgttcaaaggtgggaagagagcctggaaaagaaccaggcctggaaaagaaccagaaggaggctgggcagaaccagaacaacctgcacttctgccaaggccagggccagcaggacggcaggactctagggaggggtgtggcctgcagctcattcccagccagggcaactgcctgacgttgcacgatttcagcttcattcctctgatagaacaaagcgaaatgcaggtccaccagggagggagacacacaagccttttctgcaggcaggagtttcagaccctatcctgagaatggggtttgaaaggaaggtgagggctgtggcccctggacgggtacaataacacactgtactgatgtcacaactttgcaagctctgccttgggttcagcccatctgggctcaaattccagcctcaccactcacaagctgtgtgacttcaaacaaatgaaatcagtgcccagaacctcggtttcctcatctgtaatgtggggatcataacacctacctcatggagttgtggtgaagatgaaatgaagtcatgtctttaaagtgcttaatagtgcctggtacatgggcagtgcccaataaacggtagctattt

SEQ ID NO: 1062 - DNA, 3669 bp, Homo sapiens
cttgttcctctgtccccaaaaggaactgaccagaggggtcaggccgacgcctcgagtcagggccccagccacccaacagacaagatggaagaaggaccttgcagaggacgaagaggaggaggatgaggaggacacagaagatggcgtcagcttccagccctacattgaaccaccttctttcctggggcaagagcaccaggctccagggcactcggaggctggtggggtggactcagggaggcccagggctcctctggtcccaagcgaaggctcctctgcttgggattcttcagacagaagctgggccagcactgtggactcctcctgggacagggctgggtcctctggctatttggctgagaaggggccaggccaagggccgggtggggatgggcaccaagaatctctcccaccacctgaattctccaaggactcgggtttcctggaagagctcccagaagataacctctcctcctgggccacctggggcaccttaccaccggagccgaatctggtccctgggggacccccagtttctcttcagacactgaccttctgctgggaaagcagccctgaggaggaagaggaggcgagggaatcagaaattgaggacagcgatgcgggcagctggggggctgagagcacccagaggaccgaggacaggggccggacattggggcattacatggccaggtgagctgtcccccgacatcccaccgaatctgatgctgctgctgcctttgcaaggactactgggcttcccaagaaactcaagagcctccgtacctcccctgggcggcggaggggcattgcacttccgggaagtccacctagcggctgtttgcctgtcgggctgagcaacaagatgcccctccctcctgtgacccgccctctttaggctgagctataagaggggtggacacagggtgggctgaggtcagaggttggtggggtgtcatcacccccattgtccctagggtgacaggccagggggaaaaattatccccggacaacatgaaacaggtgaggtcaggtcactgcggacatcaagggcggacaccaccaaggggccctctggaacttgagaccactggaggcacacctgctatacctcatgcctttcccagcagccactgaactcccccatcccagggctcagcctcctgattcatgggtcccctagttaggcccagataaaaatccagttggctgagggttttggatgggaagggaagggtggctgtcctcaaatcctggtctttggagtcatggcactgtacggttttagtgtcagacagaccggggttcaaatcccagctctgctgttcactggttgtatgatcttggggaagacatcttccttctctgcctcggcttcctcatctgcagctacgcctgggtgtggtgagggttctaggggatctcagatgtgtgtagcacggagcctgctgtgtcctgggtgctctctacgtggtggccggtagaattctccatctatccaggctccaggagacccctgggcatctcccacctgtggcccctaaacccagagtgactgagagcacttaacattcagcttgtctcatccccagtctacctccttccttctaccctcactgcctcccagtcaggagagtgagctctcagaagccagagccccacccaaggggaccctggtctctccgccttcacctagcaatgggaaccctgcttcccaggggaggaaccaactgctccaccttctagggacccagtttgttggagtaggacagtaacatggcaggaatcggacttctgggcctgtaatcccagtttggatggcacgttagactcttggttgaccgttgtggtccttagaagtcccattctcccttccagttatgagaaaccaatgccttctagattcaggtgactatccttacctgggggtgctgatgcatcctcagttaacctacacccacctgaatatagatgagcgtagctgagttttcacccgtaggaccgaagtgttttgtggtggagtatctgaacaaccttggctctgtggccattcaacctgccaggactaacatttctggatttgtgaagaagggatcttcaaagccattgaacccacagagctgtgttgctttaaagccaccacaagggtacagcattaaatggcagaactggaaaagcttcttagggcatctcatccagggattctcaaaccatgtcccccagaggccttgggctgcagttgcagggggcgccatggggctataggagcctcccactttcaccagagcagcctcactgtgccctgattcacacactgtggctttccacgtgaggttttgtttagagggatccactactcaagaaaaagttagcaaaccactccttttgttgcaaaggagctgaggtcaagggtggcaaaggcacttgtccaaggtcgcccagcagtgctgctctgatgacttgtgcacatccccaagggtaagagcttcgatctctgcacagccgggccaacctctgaccccttgtccatgtcagtaaaatatgaaggtcacagccaggatttctaagggtcaggaggccttcaccgctgctggggcacacacacacacatgcatacacacatacgacacacacctgtgtctccccaggggttttccctgcagtgaggcttgtccagatgattgagcccaggagaggaagaacaaacaaactacggagctggggagggctgtggcttggggccagctcccagggaaattcccagacctgtaccgatgttctctctggcaccagccgagctgcttcgtggaggtaacttcaaaaaagtaaaagctatcatcagcatcatcttagacttgtatgaaataaccactccgtttctattcttaaaccttaccatttttgttttgttttgtttttttgagtcggagttttgttctttttgcctaggctggagtgcagtggtacaatctcggctcactgcaacctccacctcccgggttcaagtgattctcctgcctcagcctcccaagtagctgggattacaggcacccgccaccacacctggctaatttttttgtatttttagtagagacggggtttcaccatgttggccaggctggtctcgaactcctgacctcaggtgatccgcccgcctcggcctcccaaagtgctgggattacaggcgtgagccaccgcgcccagccaaaccttactatttttttaaagaattttttccagagtttaatttctgacatagcttaagttttccagtaactctaaactccatctcctttatcgtcattaagtcattcacaaaaagccaggagaagcatttggaaagggcatgataatcagtataataatttgccttgtgtggtcagcacttaactgtttacaaagccctttcacgtgcacagcaggtgggaactgcgcggtgtgggctgggcctgcgctggaagcatatcccgtgaaaagtgttagtgccttaggtgaaagcaacatgtatccctttagactactaacggtatatgttgttcttatgtatttgtatttatttctattttttctatgtttatgtcatatttaaacgatatcctactgcttgttggtattaccctaaactgtttaaataaagagctctatttttaaagaaaaaaggtacaattg

SEQ ID NO: 1063 - DNA, 1544 bp, Homo sapiens
ggatgtcacacaaggtcaaggagaactccagccaccagcccaccctgcccagcgtccccaggacattcctcaggaggagaccgatcatgagtgtggcagctgacaacttggggggtggctctaccactctggcctggcatcctagccggactgctgccattgcctttgtcttgagctggagacattgctccctggagacttcaccccagccccacagactccagtggcttcctgagcagaagggaggagtggacagagccccctggctgcttccccacgcacccatccaggctgccttccggcacgactccctgccgcagactgaagggactcctgaagcgcagacttcaaggaggatcagtccaccctgaaggtggccaagcctggaagccccacccttccctgtttcattccttcattcatttacacattcattcattccctcactcctgcctttctcatttgtccctttctgacctcactcacttacggtatgtctactgggcgaaagctacctgcaggcaggtgatgctttttccaccagtccacagcttcctttctaaagtgaccacctgtttggaaagacctctctttactccttttagacctttttctctttggagtgggagatcatcttggaatggcagtggccgggcccgggggctgcgcttttccctgactttctctgctggcgggactgaattttctcaaggcttacaggcccttccatggagtccacatggcctgtctaggcctgatagctttcgtctctctatgtggagggaaaaagaaatgtgccctagtggttttggtggaggctgcacagattcgcggtgggtggggagctgccaggctccttttctgatctcccagcaggctttgactgacgctgtttagtctttctgtacattaaccccgccagataccgagaggttacaaagcctccaaggcctgtacaactgtggcctctccagagaagtggttctcagccttgactgcacactgtaatcacctggggactttaaaaagtactgaggcctggggcccacccacaaatgctgatttaactcctccagggtggggtctgggcagtggggaggcaggagccacccaggtgattccaatgataggtgtaggttgagaagcgccaccttccagcttcctaactggctctgggaggggagctgggtgggaagttcaggaggtgggaactttgtacacgcagagcacctggagcacctacagcatggctgtggttccacactcctctgtcatttaaccttcacacatcacctcgttctgacatcaagggtgcgtcacagccacagtgaggcctcgcctgggcagagcaactctgggtgccccactgggtccctcccacaggggcaggcaagcctaatgggaacccgaggcaaaaggaaacatcagtaatacgaatcctgtctttaaaactgtgatgttttgttcaccatggattttttttttgggggggggggccttaattttaaaaatattgcattaaacttatttatcttgcttattga

SEQ ID NO: 1064 - DNA, 2610 bp, Homo sapiens
ccgccctggtggactcctcccgctggaggcggggaccctaacaaccttcaagaccagtgatgggccggctccgaggctccgggcgggaatgggacctgcgctccagggtggtctcggtcccagggtggtcccagctggtgggagcctctggctgcatctgtgcagccacatccttgtacagaggcataggttaccacccccaccccggcccgggatactgcccccggcccagatcctggccgtctcatcccatacttctgtggggaatcagcctcctgccacccccccggaaggacctcactgtctccagctatgcccagtgctgcatgggacccatgtctcctgggacagaggccatctctcttccagagagaggcagcattggcccacaggataagcctcaggccctgggaaacctcccgacccctgcaccttcgttggagcccctgcatcccctgggtccagccccctctgcatttacacagatttgagtcagaactggaaagtgtcccccacccccaccaccctcgagcggggttcccctcattgtacagatggggcaggacccagcacgctgctggcagagatggtttgagaacacatccaagccagtccccccagcccagcttcccctccgttcctaactgttggctttcccccagccgcacgggtcccaggccccagagaagatgagtctatggcatcaggttcttaaacccaggaaagcacctacagaccggctcctccatgcactttaccagctcaacgcatccactctctgttctcttggcagggcgggggaggggggataggaggtcccctttcccctaggtggtctcataattccatttgtggagagaacaggagggccagatagataggtcctagcagaaggcattgaggtgagggatcattttgggtcagacatcaatgtccctgtcccccctgggtccagccaagctgtgccccatcccccaagcctcctgggaggatccagccaaatcttgcgactcctggcacacacctgtctgtaacctgttttgtgctctgaaagcaaatagtcctgagcaaaaaaaaaaaaaaaacaaaaaaacaaaaaaaaaacaaaacagtttttaaaactgattttagaaaaagaagcttaatctaacgttttcaaacacaaggtctcttacaggtatagttccgtgattatgatagctctgtgattataagcaacatccccgccccctctcccccccgcggacccccagctgcctcctgagggtgtggggttattagggtctcaatactttctcaaggggctacactccccatcaggcagcatcccaccagcctgcaccacaggctcccctgggaggacgagggaaacgctgatgagacgctgggcatctctcctctgtggctctaggacatctgtccaggaggctgggcggaggtgggcaggatgtgagaggtggggagtactggctgtgcgtggcaggacagaagcactgtaaagggctctccagccgcagctcagctgcactgcgttccgaggtgaagtcttgcccctgaattttgcaaaatgggaaagtgggcgcttgcccaagggccaggctgcatggattctcacatcagagttctctggccctagaaaggcttagaaaaggcgtaagggaactcataaaggctagcagcatgcggtattttaactttctgcctcggcctctgtggatgcagaaatctgccctacaaaatgctcttcattggttgtctctgtgagagcactgtccccacccaacctgtcacaacggccagaaccatacaccagagacacactggcaggttaggcagtccttctggtgatcctattccattccctcctgctgcggtttctcttggcctgtcctcactggaaaaacagtctccatctcctcaaaatagttgctgactccctgcacccaaggggcctctccatgccttcttaggaagcagctatgaatccattgtccttgtagtttcttccctcctgttctctggttatagctggtcccaggtcagcgtgggaggcacctttgggttcccagtgcccagcactttgtagtctcatcccagattactaacccttcctgatcctggagaggcagggatagtaaataaattgctcttcctaccccatcccccatcccctgacaaaaagtgacggcagccgtactgagtctgtaaggcccaaagtgggtacagacagcctgggctggtaaaagtaggtccttatttacaaggctgcgttaaagttgtactaggcaaacacactgatgtaggaagcacgaggaaaggaagacgttttgatatagtgttactgtgagcctgtcagtagtgggtaccaatcttttgtgacatattgtcatgctgaggtgtgacacctgctgcactcatctgatgtaaaaccatcccagagctggcgagaggatggagctgggtggaaactgctttgcactatcgtttgcttggtgtttgtttttaacgcacaacttgcttgtacagtaaactgtcttctgtactatttaactgtaaaatggaattttgactgatttgttacaataatataactctgagatgtgtggaagg

SEQ ID NO: 1065 - DNA, 988 bp, Homo sapiens
tcccttcaagaactgtttatagaagcttgagaatggggtaaaaatttctgctagcaaaatcaagttctttttgaaattttatcagtaatccagaatttagtagtccatgccttctcactcagcatttagaaataaaaatgtggtttcttaaacgtatatcctttcatgtatatttccacatttttgtgcttggatataagatgtatttcttgtagtgaagttgttttgtaatctactttgtatacattctaattatattatttttctatgtattttaaatgtatatggctgtttaatctttgaagcattttgggcttaagattgccagcagcacacatcagatgcagtcattgttgctatcagtgtggaatttgatagagtctagactcgggccacttggagttgtgtactccaaagctaaggacagtgatgaggaagatggcagtggccaccggaggactggagcagtccctcctcatggcggcctgtgaccaaggtcggggaggagtggagctatccttccatgatctgatcatgtacagttccctttttaaaaagcaataaatgcttgggattagaatttctaacatttttagtctatcatttaaaacaaacatttgtatatatacatttgtttatatacatacatgcttccattctacaaacactgaaagaatattttattatgggaaattccatacacccaatacccctggtgagtcccatatacccagtaccctgttcaacaatcattaactcatggccagtcctgcttcatctttatttccatttactttcttcatgactcttattttgacgcatatactagatatataatttcatctataattattttagtatgtatctctgaaagataaagacttaaatgaccacaatactattatcactgcaatagatttatttttataaaactccagagggaaaggttgttattttttctctatgttgaattaaatgctaaatatct

SEQ ID NO: 1066 - DNA, 339 bp, Homo sapiens
aagaagaaaactgatggctaagtttgcatgaaaactgcactttattgcaagttagtgtttctagcattatcccatccctttgagccattcaggggtacttgtgcatttaaaaaccaacacaaaaagatgtaaatacttaacactcaaatattaacattttaggtttctcttgcagatatgagagatagcacagatggaccaaaggttatgcacaggtgggagtcttttgtatatagttgtaaatattgtcttggttatgtaaaaatgaaattttttagacacagtaattgaactgtattcctgttttgtatatttaataaatttcttgttttcattctt

SEQ ID NO: 1067 - DNA, 304 bp, Homo sapiens
tttcctcatttggctgttggattttaagcaaaagcatccaagaaaaacaaggcctgttcaaaaacaagacaacttcctctcactgttgcctgcatttgtacgtgagaaacgctcatgacagcaaagtctccttatgtataatgaaacaaggtcagagacagatttgatattaaaaaattaaagactaaaaacttagtttaagagtcaatttaataagtttaaaataaatgtttagtttcattaggatgatgctatcaatattttcttggttacagacacattattaaagttttgggttaatttt

SEQ ID NO: 1068 - DNA, 987 bp, Homo sapiens
atgtttgaagctttgtttctaaaagtaccttgaaatgatagagatgtaggaaaatatagttgtgggtggagagaggagtgagtttgtttaggtgggaaggtggcatgggatgaagttgtcattactgagcatcttctctgtgtaaataaagggcagtaccattgttaagacagtgggattggcatcatggctttccctcaggaaggtggtggctggtaaattccctgaatgagtctatgatgaacactgaggcagcacagtgggtatttatctctatgaaagtgccttttactcagcctgcacagagccatctctttgcccttccagatgtctgactgggaccttgcttatggatgtgtttttttttttttttttttgagatggagtctcgctctgttgccaggctggagtgcagtggtgcgacctcagctcactgcaccctctgtctcccggattcaagcgattctcctgcctcagcctcccgaatagcagggactacaggcatgcgccaccacgcccagctaattttttttggatttttagtagagacgaggtttcaccatattagccaggatggtctccatctcctgacctcctgatccgcccacctcagcctcccaaagtgctgagattacaggcataagccaccgcgcccagccagatgtgtgagcttttaatctctggctgatcttaacccacatcagcctaagcttgggatgattactcttgacccttttttttcagtgattagcaaatctccccacaacccaggtgtggagagaagagaggtagaatggtgctagtttcctattttatttttgtggtaactgtacagcactttaaagttatatactctatgtttaaatatctcccttaaaaagcctgagctgtacaacaatctggatgtgactctgttacccttttcccacaagataggagggaatcccctttgtaaaactatgaatccaaataaatgtttacaaagtg

SEQ ID NO: 1069 - DNA, 1314 bp, Homo sapiens
agggggatggcatctggtagggagggaggtatagttgggggacaggggtctgggtttggctccaggtgggaacaaggcctggtaaagttgtttgtgtctggcccacagtgactctctgtgcacgactcaactgccaagggcatcactggccaattcttggatttagggattggctaggagttgctggggtccactcctgggcctgccccagctccttgcccagggagagggaaagagttaacggtgtgggccactccagcttgcccttccactgccactcactggggtgaggctgggggtcagcttggtgaggattggggcttctagattgtctaggcaggaggtgaaacttaggccagagtcagatttgagctgagccaggggaggccttggcaacctacttctactcagatttcattgctggatgcggaaggggtaggcccaaaatatatacaggatcttactgtcccttgaagcccagccacaagtgttggagctgcagagagaccccaaaggtagtagattgtgccagatacaaatgggtcccatccagtgcttcatactccttcagtcactatcccagacagtgagccccagatctcctagctctggcttctgtgtcccacacggcctgttcccagcttctctcctggttcccttgttacggattcatttatccattcagtgtttcctgggcctctgctcagaggcaggtcaccactgggccctgtggatcaatgcaagatgacaaaggctttttttttttttttttttttttttttttttgaggagtttcgctcttgttggctaggctggagtaaaatggtgcgatctcggctcactgcacctccgcctcccaggttcaagcgattttcctgcctcagcctcccgagtagctggggttacaggcatgcaccaccatgcctggctaattttctgtatttttagtagagacggggtttctccatgttggtcaggctggtcttgaactcctgacctcaggtgatctgcccgtctcggcctcccaaagtgctgggattaccggcatgagccactgcgcctggccgacaaaggctttgatatcagaatgaactgtcaagggaggtgctggagagggattaacctgtgctgcctgggaccctcagggtcttaggttggggagtgtgaataggagtttgcagatggagaataggaagggcattccaggcagagggaaacctgtgcagagaccaagaggtgtggaaggaaaagtggggttggggctgggtggtctggattatggcctggatgcaataaagtactgtgacagtagcc

SEQ ID NO: 1070 - DNA, 898 bp, Homo sapiens
tttgttctgagaactgactttctccccatccccttcctaaatatccaaagactgtactggccagtgtcattttattttttccctcctgacaaatattttagaagctaatgtaggactgtataggtagatccagatccagactgtaagatgttgttttaggggctaaaggggagaaactgaaagtgttttactctttttctaaagtgttggtctttctaatgtagctatttttcttgttgcatcttttctacttcagtacacttggtgtactgggttaatggctagtactgtattggctctgtgaaaacatatttgtgaaaagagtatgtagtggcttcttttgaactgttagatgctgaatatctgttcacttttcaatcccaattctgtcccaatcttaccagatgctactggacttgaatggttaataaaactgcacagtgctgttggtggcagtgacttcttttgagttaggttaataaatcaagccatagagcccctcctggttgatacttgttccagatggggcctttggggctggtagaaatacccaacgcacaaatgaccgcacgttctctgccccgtttcttgccccagtgtggtttgcattgtctccttccacaatgactgctttgtttggatgcctcagcccaggtcagctgttactttctttcagatgtttatttgcaaacaaccattttttgttctgtgtcccttttaaaaggcagattaaaagcacaagcgtgtttctagagaacagttgagagagaatctcaagattctacttggtggtttgcttgctctacgttacaggtggggcatgtcctcatcctttcctgccataaaagctatgacacgagaatcagaatattaataaaactttatgtactgctgtagc

SEQ ID NO: 1071 - DNA, 2222 bp, Homo sapiens
gcacaactggccatttgtaaagtcacttcagccaagttttcatttgggagctacccaagggcacccatgagctcctatcaagaagtgatcaacgtgaccccttttcacagattgaaaggtgtaatcacactgctgcttggataactgggtactttgatcttagatttgatcttaaaatcactttgggactgggatcccttgctgattgacaaacagactttctgggaccttgatggagtggggaacaagcagtagagtgggactgggggagacccaggccccgggctgagcactgtgaggcctggatgtgaagactcagcccagcgaagctcattcccttacccccggccagtgctgctgcttcagtggaagagatgaagccaaaggacagaatgaaaatccctaccttcagagactctagcccagcccaacaccatctcttcctacctctcagccttctccctccccagggccacttgttgaagtctgagcactttatgtaaatttctaggtgtgagccgtgatcacattttctatttatttccaagtcttctcattgtatggaacatagtactacttatacttacagtagtaagttatacttgtgagcccacagagtggcagacagcatggctctcacagcacagggagaaaaactgaggtacacagaggtacctcagaagctctggatgtctttgggggttttgctaagtgtatcttgataggaaacaacaaaagcaggttgagatggggaagatgacagaacaacagtgttaaatggccatttgcacaggcctttgccacaacagagaagtagtttggtcagctaaaactcagctgcagcctggacagtagagcgagaccccatcttaaaaataaagaaggctgggcgtggtggctcatgcctgtaatcccaacactttgggaggccaaggcaggcagatcacttaaggccaggagttcaagaccacctggccaacatggtgaaaccccgtctctactaaaaatacaaaaaattagcctggcgtaatggcaggcgcctataatcccagctactcaggaggctgaagcagaagaatcacttgaacctaggaggcggaggttgcagtgagtcaagatcgcgccactgcactccagcctgggtgacagagcaagactctgtcttaaaaaaaaaaaaaagaaaaagaaaaatttaaaataaataaaatttaaaaacgcagaaggccactcccagagaggcctaggagtaccttggtcattttttcttgcctcaaatattataaacctccaacttgctcagaatcagggtgcttttattgtctgttttctggctctgaggcccttgccccaaatttaagtcagatacagactgaatttccattctgttctgtttataatatgaatgatattaatactcttgtttgcttaatgttatgttggaattttctgtttaatctgcagtagagcaagatggagagccatctggaattgacttccttctgtctttcttctgtgttcgcttactacttgggcccatgtgggaaaaaaactttaaaaggaaggaagtcttcttagggatccagttcaaagctatttgggggcatcaaactgaaactctcttctccactactcaagacttcgtgcctcagtccaagtaggtaagagcaaaagggaaatgcatctctacacaatggcccatggtcagggccaccagagcaagctgggcctagatctccacctgtcagtgactggccattctaagaggtgaaacagcagatcgttgaggctgtgagggaggatctttgaattcccatgagacatagcataagaagggtatcattaaagccctgggctctaaagttacagagcctggttttgagtcctggctccaccactgccaactgggtaaatttgagcaaatggtattctctttcttatctcagctcctgcgtttctaaaatgagggtctgcgttatgaatagttaggaggattaagtgagaggatgtataacccatgggttacttaaaagtatatttcctaccttccaaacatgagatttttctagttatagtttcttttctagcttgattgctttgtggtcagagaaaatgacccatatggtttccatccttcaaaatttgttgaaacttggttgttggcctagtatgagatcaatgttgtaaatgtgccatgtatgtttaaaaagactatatattctgaa

SEQ ID NO: 1072 - DNA, 1137 bp, Homo sapiens
ctgctcagccaggcaccaactggggcatgaacaggacctgcaggtggctggactgagtgtcccccaggcccagccaggactttgcctaccccagctgtgttgtaaaccaggtccccctcctgacctctgccccactccaggaatggagctcttcccagcctcccatctgactacagccagggtggggactcagcgggtataaagctagtgtgaccctgctcttccagctcctgggccagctctggaagggctgtatttgggcctaatcctcagcaaatgttctaccactcgcaggggcaaaggtggtgagccacgggacgtccaaggggaggctggccccagcgcgcccatactgcctgcctcatgccccattctcagcctggctggcctttgcctttatgaatctgagcccctccatctgcctatagcaataggcacgggggtgaggaccctcacactctcatttgagcctccctgaggcagggagccaggaggcacctgaggcctatctgtgccttagtcacttcagctatgagccaaatgttccctttcctggaggggagaggcttcttactaggtaagagacaggtttcctctttccttatttcctcagctgtgccaacacaaaaaacaactttggcacaggtggtgggcagggggtagagagatttcagcttgggttctgcactaacagcctccaagccccctggcacttctgttgccctgagagtgtcccaggggattcagagtctccagaaagatatggctgggccaactctgttgcctacctggcctgacccagtcggagcctgacatggtggagggaaagggagacaagtggggctgcactcggtccagaggccagctaggagggaaaccgcagcttcctggggcttgtgtgtgaagattcctgacttaggggtggcttttgtttacaagatgcaagaggggaaacctgtccccgactcatcgagacaacatgcccagttatcagggagtcctgtgtcacaaggtctgtctctgccattgtaagcaagtgccttgggcgagctggcctctgccccacagtctcatctgtacaccgacagggttgatgcctccctcacagggttgagaacaagagccagttggccaagt

SEQ ID NO: 1073 - DNA, 566 bp, Homo sapiens
ggagctggatgaatgagaggcccccagatgcagagagactggagagggtggggaggggcccagcggccttggtgacaggcccagggtgggaggggtcggggcccctggaggggcaatggggaggtgatgtcttctctctgctcagagagcagggactagggtaggaccctcaccgctgcgtccagcagacactgaaccagaattggaaacgtgcttgaaacaatcacacaggacacttttctacattggtgcaaaatggaatattttgtacatttttaaaatgtgatttttgtatatacttgtatatgtatgccaatttggtgctttttgtaaaggaacttttgtataataatgcctggtcgttgggtgacctgcgattgtcagaaagaggggaaggaagccaggttgatacagctgcccacttcctttcctgagcaggaggatggggtagcactcacagggacgatgtgctgtatttcagtgcctatcccagacatacggggtggtaactgagtttgtgttatatgttgttttaataaatgcacaatgctctcttcctgttcttc

SEQ ID NO: 1074 - DNA, 16 bp, Homo sapiens
agcacccgccccctca

SEQ ID NO: 1075 - DNA, 176 bp, Homo sapiens
gaggccggggctacgaccgggaccacgtggtgctatgggagccggatgaggacagggcatcccagatctggactatccacgtgctttgaaacttttcccctcaccctccagccctggaggcttttgctgggatgaatgtttttatagggtttttgttgtaacataagctattttct

SEQ ID NO: 1076 - DNA, 17 bp, Homo sapiens
aaatgtttcttctgtca

SEQ ID NO: 1077 - DNA, 521 bp, Homo sapiens
ccgggttgggggcttcctttcatagctacatgatgaaaaccctctgccctggcctcatctaccactgaagcagaaaggagtctgggagcagcagtcttcgtggctggttcagggtgttttgttccgagcctgcctgcctgccggttctatacctcaggggcatttttacaaaaagccccctcccgtcccctccccttggatattaggggtaacgaccgcttgtctttggtctctaaccctaatctctgggcttgccctttgcctcctgcagaactttgaaaagctgggttgagtgaggctatcagcacagccttccttggggactctgaaggtgtccccacgaaggccagaaagggggaaagggacctgggcgaggagaggatttgtggtgcttggaagagccggccttgggtgggccctccaccgcctctaccctcactgggtgggactgccagcggagagtccgcgggaggtggcttgggtgtgcgacgtcacggaagaataaagacgtttactactgg

SEQ ID NO: 1078 - DNA, 295 bp, Homo sapiens
caacaaggtggaccctggagagcaggatgcataatccagcactggggaaagtggaggctcctgatgcaggctgcagacccaagagcaagtcctcccagccagagctggcgggctggcaaggggatattcagctctgcaaaggacttctggccaaaaagccagacatggtgccaagcagaacaccccccatactgtcagtggtgtccgtgagctctgggccctgccaccagaaagtcgagcactggtcctagtcaggctgtgatgaaatgtgctacaatacaagagtttattttct

SEQ ID NO: 1079 - DNA, 357 bp, Homo sapiens
cctgttccagcccaggcagagatcaggtgggcagaggctggcagtgctgattcagcctggccatccccagaggtgacccaatgctcctggagggggcaagcctgtatagacagcacttggctccttaggaacagctcttcactcagccacaccccacattggacttccttggtttggacacagtgttccagctgcctgggaggcttttggtggtccccacagcctctgggccaagactcctgtcccttcttgggatgagaatgaaagcttaggctgcttattggaccagaagtcctatcgactttatacagaactgaattaagttattgatttttgtaataaaaggtatgaaacact

SEQ ID NO: 1080 - DNA, 2557 bp, Homo sapiens
ctctttctgcctgctgcccaccttctttttctttccttcctacctgccttctttgatgccaaccccaacagacccgtagggggagaaaagggaggaaaaaagtaattttaaggggccaaagctttccctgaagcaaccaaagatatatccaagtgcttcctccaagtcaacatgtatttcctctccccattttcaggccctgtggggctcctgaggttcagtagctgggatgttccctctttccttcaagtgcctgttgcatattgaaaggaaggagaaatcccaaagcagattcctttgatcgggtttctgttggagatggggcttcccttaggagccatattcaactacagccttctaaaacctgtgccctcagccacttcgaatgccagccaccttctggttctaaaacggggagtggtctgaatgaacacagctgacccctttcccgcgcactgaaagggcagagtaggccgaagggtccaagggccagactgcctcaccctctgccctaatcagcagggtgggcctgccttttgctaagcgatctctatgcctgggatgccctttattccaggaggcatcaagcctctaaagaatgtctcacctcctctgcccaaaaatgatgcctttctgtaggctggtgttgttgcctccctcccaggatccctttggtgagtatggtgttcaggatgcaccaccaccacctctagataccttcaggcaacacagcccagttttaacctctagtatccatgaccaaactatccctgacacatgaggacaggggcctcttctggctgtcaggagcaaagcctgaagacttggagctgcaggactggaagaacagtggagccccgtgggtctcaccctttaaggatgctgaggcctagagatgggaagtgacttgctcaaggtcacacaattggatagtgacatagctagagcgcagagttcctgattccaagtcacctgtgctttctgggaccaaagaatgggcacctgctggagtccgggcagagctttctcagttgtattgctactccagacctcaccataggttggggtcccagtaggaaggctcagggtctgtgccagccctgtcggtgctgctcagaccttcatagcctctcttgtcattctttgttgccccttttctgtcaccagccaaccacatagccttgggaccagcctctctgggggaccagaagtagtgagagaaggaaggggataggcagctttgacaggtgctgctttcaattcctctgcaactcctcccccttttatttccccaatttaaacaaagattctgccaactgtggaaacttcagtccctcaggctggcagccatgccagtacctgcctgggggtggggggtgcctggcagccatgaagcaggctgaaaggcagaggggctccaggtcctgtttccagctcccctcactgcacatggtgaagctcgctccctccctccctcccttcccgcttttcccagagctaatacacaggtgctattattcagaaaaaaactggtcagctctagccaacagtgaggtttcttttcttctgccctaactattgtgtagcctcttatgctgaaatcggcttctgctggcttctccggctttcagagccctgaaacaaagagaaacaggatctgtccctacccagcacagcaaatggttgtagtaattgccaaagccctcataaagccctccggcttgaggagagagtgtatagtcatgggttctgcctctgtgcccttgctggccgcttctcctctgccttctttcctggaactcagggtgtggggactgagcctgtaggggacagcatgccgtcttgctgtggccactcccaagtgtgccctcttccctctttacacatcaggtgtctctggcacaggacttggcactaagctccatgctgagacaccaggctatgtgggcccccaccttgtttcccagcctgcaccttagaagccgaaggtgctttcatcagaaccctaaaatggtcgttgaaggcgcctgggccgcagcccagcagtagttggagaggcaggcagagggcagtggttctcccaaataggagacctggggcctggccaggccagggtttgggcctaatggctttgactaaattacccccatcctccttgcccggaaaagggagagctagagccactcactgtcattctgctctgaccttgaagggggcggtgttggcctggcttctggaatggactgagtccatcgtggaaagggctgggggcaggaggaggtggggaggggcactgcctgcggaaggtaggattagatcattagctcagtgacctcctagggtttcgatgtgctatgttctcatcctacagttggtttggtaatgatctgcaagtcccggagagcaacagcacagctctgcctgacgctctcattaaaatctatgcagccaagctcggcactttgtagcagccggccttgcgaagcctcctcagctcggggggccggggacccagtgagccgagaggccctctgggctccacttatgcatatgcacc

SEQ ID NO: 1081 - DNA, 499 bp, Homo sapiens
cccctgccaggcccagctgccacaccctttctgggagaagcatggcctacagaatgaagagggggaccaggaacccctgtgggagaggcttagacctgaagcagtgcccactctggctcctcctgccttggctgactgggttcctggaccatgtgcatttcactgggccatgggatctacatctccttgcatccccagctggtctgatccctgccagggccccttccttcctgctcatggtcttcaggtggcctgatcatggaaagtaaggagttaggcattaccttctgggagtgaaccctgactccatccccctattgccaccctaaccaatcatgcaaacttctccctccctggggtaattcaacagttaaaagaagcttatcttaaatgtattgtattggggggtgggcagggcccactctatgttatgttaaggagttggttctggttcttggctgatgttctgtatcttaacatgaccacagtttgtaagtac

SEQ ID NO: 1082 - DNA, 922 bp, Homo sapiens
ctcagaccctggccagaagggaagggactgggcctcacggggtggggtggggcctccaagagtgtgtggaggacatgaccagaggcgcagaatgtgccaggaggcccagcactgcagggttgggcctttgattgaacagaccagactttcccgagcacgaggcccctgtgggcttaatgccagcctggggctctcagcaggaggaccctttggttattgcatcacacttttggaccagcatgccggtggggtgcaggcgccatttgtcttggaagtcaatttccttcaggagacaaagcaagtttggggtggtagccttaatgcccagcaccttggattgattcccatggtctaagagggtctttttgactaaggccagcctgtggtgatcccagcagctttggagggcctgcagcccacacactgactgatacatggtatgttacagggacttgtcactttggatcaggctgggccactacagggcctgatgggccaacttgggtaatcactgggaggagggaaactgaggcccgaggcagatacctgggtttggggagggctgggtttagcccggttctctgaactacatacccccagctgtgaagccttcctcttgaggggttgaggtgggcagtatacaggagccaagcagcccagggtgggtcgcagcccaggccccttccagggtgccactcctttcccccttgtgttgcaaggagccctcctgcctgggagcttgttctttggaaggtgctgagcctgaatttgccacagtcaagtcaacgttcccaccccactggcttggttacagggctctcacatggggtaggggagccatactcccacccccttgcgtattcccctgggtttgttgatattttgcactcttaacacctgccaataaagacggtctacactg

SEQ ID NO: 1083 - DNA, 1491 bp, Homo sapiens
caccagggccagcaggcagcgcctgtcccctcacagactcttccaccagagcaggggctgctgggggctccccttgcccttcctgacccggattggccctgcccctccccctaccgcatggcagctgggcccacagcccccaccccagcacagctcctcccctgccgcctcccgggaagcatcctccccaccagagctgcctccccaatccatttggcagaactgctggggctggtgaggccggccctgcccctccctagatccaggcttctcccggacctggactagggcctcggaggctcctccctctgcctcatcctcctcctcattcagaccaatcttagtttctaaccaaagagtctctggctcagctgtggtcccacccaggaagggagggagctgaggcctcccttgagtaggccctgctttatcaggggacaaaccaggggtaccaggcacatggctgggggagggactgctgacccaccaaggtctcacactcctcctgccagctctgtcaccctggccaccacccaacctgtccttactcagagctgcgggctgagggcatctctgagtgtctctgcctggagcaggggtggtttctacggtgacagtgacgtgactcagagcttttcgaactgtgctcccacggggaccactgggcccctcaggggaagctgctaggggaaggactggccgtggctccagaatgtgctgcctttttaagttttgtttgttcacactcctatatatgattgtttgcacagagggcgctcctgtttttaaaacattttgaaaacccctggctgaacagtgctctgcctctaactccctcctcacactccagaattacccttcctcatctgtgcctgtctgtccaacccctcccccacgtctctctgcctgctgggctcttaactgttgctcgaagactgtgacatcagaagtaactcccactcctaatcaagagtctctccagcctcacagatgctggcctcttggcacctgcctagctcttgggcctgacctccagtcctgctggcctgctcttacttcccccaccctgggtttggcccctggaacctttcccttgtgtgtaccacaccctgcctgctgtggagcccattgtggaggcggtgggggggagaaggcctcccctgaggatcccctgtcccctggggctggtggattgggcagaatcctgggcccccagagacctttgcccacacacactccttccccttgtccctggggcactcccccaggattgtgcaatagtcagagtgtccctttttgcaggggactgggccatgggtcctcggcccatctgtccatcctcctctccatgcaagtgctgtttgggcaggagtcaccatgcaagggtgacatcgacaaccacgtaccaagccaccgcagctgctgccactctgctgcctgtacagaagaaactgaatctttttcatattctaataaatcaatgtgagtttt

SEQ ID NO: 1084 - DNA, 212 bp, Homo sapiens
gagctgaatgagggcatcataggccagacaggcccaaggatggatgaatggagaggacaaaggcagcttctgacacaccagccccaggacctggggcgactggaggaagccaggcgagtggggcccaggactggttccagtgagagaaaccaaccacaggcacccaagcactaccagacaaagcgtattaaacagaacacttttgaaccttt

SEQ ID NO: 1085 - DNA, 124 bp, Homo sapiens
ggcactctggcagccagtgcccttatctctcctgtacagcttccggatcgtcagccaccttgcctttgccaaccacctctgcttgcctgtccacatttaaaaataaaatcattttagccctttc

SEQ ID NO: 1086 - DNA, 940 bp, Homo sapiens
gtacctggccagcagcaagtacctgagtcccagctcacctcctggttcctgccccaccgttccccttcagtacccagggtgctgtcttctccatgggcaagccctcaggacggtgacagcgtgctccatgtgagccacaccccttttgtctcctccagttggggtgtttcctttgtcagatgttggctgggaccaggactcagcctgggccagtctaggagcccagctgagccctcctgtgtcttttcccttcatgctgccagcagggaagagaaccagtaggtgccagcccaggcaagcctgtggcccgcgtttctgtggctgtgggcaggagctgggccttgtgtctagttgggttttgctctgagaaggggagctgtgcctgaggccctctgtgtgccgtgtgtgctgtggggcgggtcgccacagcctgtgttaaagtgtttgctcttcctctgctgcctcctctcgaggcagggggtccttggctggctgaggcagtgtcaccttcctgagtgtcctctttggcctctgcagaatctgacccctttgggcctggactccatcctgaggggaaaggaggatgcagagggtggcctctgggcacccttgtgggtaagcggggggcgggggcgggaaaaactctggccgccagtttttggctcctgcgggcaccaagcaggctcagtgtctgatgcctgacatctcctcctgtcctgggcctggaacctgcagctgagaaaatccctcaaccacctcgtctcctccatcgcccctgctgggccccccagcctgacagtgggttgtatgcctgcctctttccaccaactggcctgggcactgcccccaaataaaggaactctgcactgcacttcatgtcctgtgtcttgggctgtgtgtggattggatggggtgagggtacggccattgtcctcttctt

SEQ ID NO: 1087 - DNA, 672 bp, Homo sapiens
ctttcagaaaaccaacgccaagatccctcccagcgtccacatcgtcctctggcaggagctcctgcccctctgcctcccaccctgccccctacaccccctgcagacccatctccctccaccccctcccacccatctcctccacgcagaagccgaaggtgagccctttctgcacaaaaccagcaattgtaaatactttttaaaaatgtacaaaacttaaaaacaaaacacagttttagaaaaagacaaaaaaaaaaaagagagagagagagcgagagagcgagcgtgtgcaagaggttgcgagcggggccccgaggtgtccagagcccctgcaagtatgcactgagaaatttatctacaggtcgtttgacaaaaatgaacaatatcctatttattgtatatactgttttattataaatcgtggattgtatattgcattctgtaaacctgctgtggtcccgtggtgtgcaaattcgcatggtgggggggagggagaagaacctcttgcgggagctttttttttctttcttatttttcactcttttgggttttctcttctgttgttgttgttgttgttttctgttggcaggacacacccaaagatccaagtttgtattaaaaagaaatgaaaaaaagcaaaaaaaaaacaaaaaaaaaacaaaaaaaaaaaaccaa

SEQ ID NO: 1088 - DNA, 622 bp, Homo sapiens
cctgtccgggcatcaaccctctctggcggtggccaccagtccttgccaatccccagagctgttcttccaaagcccccaggctggcttagaaccccatagagtcctagcatcaccgaggacgtggctgctctgacaccacctagggcaacctacttgttttacagatggggcaaaaggaggcccagagctgatctctcatccgctctggccccaagcactatttcttccttttccacttaggcccctacatgcctgtagcctttctcactccatccccacccaaagtgctcagaccttgtctagttatttataaaactgtatgtacctccctcacttctctcctatcactgctttcctactctccttttatctcactctagtccaggtgccaagaatttcccttctaccctctattctcttgtgtctgtaagttacaaagtcaggaaaagtcttggctggacccctttcctgctgggtggatgcagtggtccaggactggggtctgggcccaggtttgagggagaaggttgcagagcacttcccacctctctgaatagtgtgtatgtgttggtttattgattctgtaaataagtaaaatgacaatatgaatcctcaaaccatg

SEQ ID NO: 1089 - DNA, 320 bp, Homo sapiens
ccagcagctcccagaacctcttcttccttcttggcctaactcttccagttaggatctagaactttgcctttttttttttttttttttttttgagatgggttctcactatattgtccaggctagagtgcagtggctattcacagatgcgaacatagtacactgcagcctccaactcctagcctcaagtgatcctcctgtctcaacctcccaagtaggattacaagcatgcgccgacgatgcccagaatccagaactttgtctatcactctccccaacaacctagatgtgaaaacagaataaacttcacccagaaaacactt

SEQ ID NO: 1090 - DNA, 624 bp, Homo sapiens
ctggatctaactgggtacctgagatattttacagctggacctagtttcacaatctgttgtctccagctctgcatatgtctggccagggggcttctaggaagtaggtttcatctatcaaatgtctcctctgacttccttttgaaacttactgctcttctgttttattttgttttgtttgaagctcagagggagatgggcaattgacagggatgcaatccagggtgggatttcttgaggaagttacaaataagcttgttacaacatcaagatagatggaattggaaggatgctaccaggagagtacttacatagtgctcaggagtttctcttcttaaaatgtttactgctgaaagatgagcaggaccagggcgttataggcagagccctagccgagaaacctgctggcctctgcctgttttcatttcccactttggttgtgtggcattactttcagaattgcactttcctgcttgtcatgactttttgacacacttgccatgacgtgtgtttctgtgaacatgaagttctgcggtagtgcctccaggggcagaggaaaagaagaagtgttactgcattttgtacaaaataaatacagtcatatgtttaataaaacagttctattgt

SEQ ID NO: 1091 - DNA, 158 bp, Homo sapiens
gaactggaatgaggagccttccccttgagctccttttcactcctgaagggagctggagactggaaccaactgagaactttctctgtctgtctctctctgtgtctctgtctctatctctctctctttctctctttctctctctccctctctccctccct

SEQ ID NO: 1092 - DNA, 640 bp, Homo sapiens
tccctgcttccaggcctgaagtcttctcctccatgaacatcatggactgagctgggggaagaagggatatctactgtggtctgggcaccacctctgtgggcactggtgggccattagatttggaggctacctcacctgggcagggatgatggcagagccaggctgttggaaaatccagaactcaaatgagccccttcatccgcctgtgggcgcatactacagtaactgtgactgatgactttatcctgagtcccttaatcttatggggccggaaggaatgtcagggccaggtgcagaccttgggggaagactttaaaccacctagttctccccgatggggcatcggtctaaagctttgggggagtgggcgcagtggctcacacctgtaatcccagcactttgggaggccgaggtgggcagatcatgggtcaagagatcgagaccatcctggccaacattgtaaaaccccatctctactaaaacatacaaaaattagccgggcatggtggcacacgcctgtagtcccagctactcaggaggctgaggcaggagaatcgcttgaacctgggaggcagaggttgcagtgaacctagattgcaccattgcactctagcctggcaacagagcgagattccatctc

SEQ ID NO: 1093 - DNA, 967 bp, Homo sapiens
ccgcccaaggtcacaggcacagaacctttcccctgctatctcccttcctgcttcgaaggactcattctttcctcccacttccaccccaacatagagtagtatttgctttttagtccattttgttttcaatacgatttaatatcgatcagagtaattcttttgtacattgaaatgaggggcttggtttaaaaaaagacctttccctctccctgcccctagaacaaccagtattagaaggtgccaccattggtgctgccttctcttcccacagcctgtaactcagtgttttgtacttcactgaattgtgatggttagaaacttcgtggatagtttgtggaaatcatccaattaaacatactgcttaaaacagtgttgctgtgacttcagagacaagcctggaaggggcaccttaggaagccccttcgcttcagttgctcgcttctgggtgtgctcccttcgaaggcccagataagacagggaacacttgtgagcacacagagcagcatctgatgccctgtggtgtttggcatgtgccccctgtctactgaccaatcagtgtggcatgaggcccacgccacccaaacctttcactttccaaagagctagccgtcctccacccagtaccatgtcctagcctgtctgcatttgttagtggtaatattctttatgtataataaatttttatacccaagccattgatgtacttttccttgtactctcccttgtgggtcccttgtctggcttggctgaaccccaaaatgctttggggttggacagacctggctgaaccttagtttcttcatctatgaaatgggaatatgaattactgcagcagcttttagggcagatttgccatggcatatacaaggtaactaccatagtgctccttgggtattgccaatatcctattatttctgtgtaaaatgaagatactgattgttttgaggattaaatgaagtaatatatg

SEQ ID NO: 1094 - DNA, 438 bp, Homo sapiens
cacacggaaaggtcagggaatggacagcaatgtatttggagatacttgagctgagaactcagccatctcatccttggatttttttttttaatgctttacagagaagcatatattttttattaacagtgcagcaatatctataatgactgagaggatctgccaaaagaataaagcctcctaccccaacttccggtcccttttccctgccatctcaaagaggagcaatgtatcttccagagaagattttatttgtggtttattatataagtgactgaatatgggacaaagcattatggtctttttgggtaagacagtattagcaggatttgtaaagggttttgtttccttctcccttccccttttccctgtactttgtaatgtcagtgtttatatgaatatgactttcatttgcttttccagaataaagaagttattaat

SEQ ID NO: 1095 - DNA, 1477 bp, Homo sapiens
agagaggggagacagcctgctctgaggctgcagcatggaccatgctaataggaccaaaggaccaggagtcccaacgtctaatagatgtttcagtcacatcccaggctggggatggatgctctgaccacagcagctgtgaagggcatcctgacctgcatgcgggcagagaaatgccagctgcaccagggctcagtgagctggagagggtgcgtttcactgtggggtgtggaggactcgcctcaggaatttcttcagcctctgtaagtggccttagccctaacagggctggaggtccaggccagggtgactgggagatgtacccagtgtcttggcaaacccaagaaagtggtgggcaagggcccctaagactgggaggtaggttgggatgttacaggctggggcaggctccctccaaggcggcactggtgatggagtgtggggcctctgggaagatggaccacgggatgagactctccactgccatctgggacggggactgagccttgaactcctaccacctcaatccctttcttccctcagccatctggggtatatccctctagagctacactactgccaatgccttcatactgagttctgggcccttctgcaaataagtctgagaagccccttctctccttcctttatcgtggcctatgctgcagaatctcactgcagctggcaaaaggcattggccagctctcagaaatccctttactcaacgttgaagctgcattttggtcaatgtgggtaacttactttagaaaatgacttgagtttaggtctcccccacccatatttaatttttcccaagttgctggtagaagagaaatttaaaagtggatcaatcctcacagagagagttctttttgttgttgtttattgaaaaaaatgcaatacaagaagcaagaccaaacagatatctaaacactacaaccacttctactacgaaaggccaaaacagcagacttgattattgcctgtgtagtctaaagattctgccaatctgattctgctgcccgagttcctattttttcaagaaatgtaaacaactacttgatatgattcataattttaaaaaaaatttacaaagctccttcatttttgtcaccaaaataatacatttgagagagatttgtagaaacaaccagcctggggctgagatcctgggcagaaatttcccgtgagcatcaaaaggcgtcagtcaggccgcagctctggctccagttcccgaggtttgttgtctcctcacccccagctgccaagcatccccccaacacacactgatgggcccagcggtggaggggggggtggggacggggatgggtcacggggccctgacgggtcccgcagttaggctccctgagccctcggcttataaatacaggtcttgctttgtgggtgggtgccagagtcctcatgtggcttggaggaaatctttatttctcaaattaaaataaaattgcagcgagagttg

SEQ ID NO: 1096 - DNA, 557 bp, Homo sapiens
ctggctatggccacagctggaactacccgagaagtcttttgtacatgtttggtagccgtagcacaagtgattggagtagaacatgtcactgctgtacatttttaactcccctaatggtgtgtctataattgttaaatctaagtgcttcctctcagtaaagcctcctggcaccaggccttcctgctcgactgaaaaaaattttctctttgaaaatccccttttactcatggcccacagtagaatatccaaaacgccttggctttcaggcctggcctttcctacagggagctcagtaacctggacggctctaaggctggaatgaccacataggtaggtatggtgagttcaaccatttttgctcttgaattgatgcccttcgatgtatgccatttagtgaaagtgctaagtcttaagtttcctaccactttggtttcatatttttggacttaacaaagttgtgaatagcacagtcgaggaaaattgatacctgcagtaacccataggaaataaactgtagagttccatattctggtattgtgattatattgttttatatt

SEQ ID NO: 1097 - DNA, 1149 bp, Homo sapiens
tcatcccaaaagagctggagtgacatgggaggggaggcggatctgaggggctgggtgcaggcccctcagttggggctcccaccttccccagactactgttctcctcactgcctcttcctattaggaggatggtgaagccagccacggttttccccagggccagccttaaggtatctaataaagtctgaactctcccttccaaaaagtagaagtcatccctgtcgagaaggaccaacactgtgcactggtcagctcacagcaccaagaggcccccttcctgcttttctgtcatgtgttcccccagtaatcattttctgaccaccctgaaagcaaagcctgggtgggtactggcagtgcaaaggccagtaggccaccatccctggccccaagctgcacaagcccacagacgagggtcctgtagaacaaacgctttgatgtgcttctcaggtagcctgcggcccagtccagggcttggggaggatcagctgcatggaagagtgaatgccaggctgaggtcatcagggccctgaggaacttggacgtggggtcttcactctcatggaactgcccttctaactggagacatagacaatataccagtggttctcaaccagaggcaattttacccccaggagacatttgacaatgtctggggatatttctggctatcacagcttatgaaggaggttgctactggcatctagcaggcagagtgagtgctgctgttaaacccaccacaggacacagaacagtctactgcaacaaagaattacccaaggcctggcgcggtggctcacacctgtaatcccagcactttgggaagccaaggcaagcggatcacttgagcccaggagttcaaggtcaacctaggtaacgtggtgaaacaccatctctacaaaaaatacaaacattagccaggtatggtgctgtgcacctgtagtcccagctactcgggaggttgaggtgggaggatcacctgagcctgggaggtctagactgcagtgagccatgatcatgccactgcattccagcctaggcaacagagcaagaccctatatcaaaaaaaaaaaaaaaatctagccccaaatgttcaatgttcatgaggtcgttgataaaccgtgcattaaacaatctcacagtaattaccat

SEQ ID NO: 1098 - DNA, 433 bp, Homo sapiens
ggctgcctgtcaccactgtggcctctccaagcgtcctgcacgtgtccgccgtagctttaccattttagtgagggaagccagcccgggggtgggagggggtgtgtctgggtgtgcctattgagagcgtgtaatggcgtttgggagctcgtgtgtgtatgtgtgcgtgtgtgtatgtgtgcatgtgtgtgtgtgtgtgtgtgtgtgcacgtgcgcctgagggtgggcatgagtcttgccagaatgtgagtgtgagagtgataatgcaggggtgagtgtgagagggactgcgtttgcatttttataatcaaaagcttaatatattcccatcttttttagttaaccctttcttgactctgagtgctgtgaatttctttactgatttctctattctccggtgagaaacaattaaatgtgatttaacgtaagcagtgaa

SEQ ID NO: 1099 - DNA, 1359 bp, Homo sapiens
ccctcgccaggccccagccccagtgctgggaggggtggagctgcctcataatctgcttttttgctttggtggcccctgtggcctgggtgggccctcccgcccctccctggcaggacaatctgcttgtgtctccctcgctggcctgctcctcctgcagggcctgtgagctgctcacaactgggtcaacgctttaggctgagtcactcctcgggtctctccataattcagcccaacaatgcttggtttatttcaatcagctctgacacttgtttagacgattggccattctaaagttggtgagtttgtcaagcaactatcgacttgatcagttcagccaagcaactgacaaatcaaaaacccacttgtcagttcagtaaaataatttggtcaaacaacagtctattgcattgatttataaatagttgtcagttcacatagcaatttaatcaagtaatcattaattagttaccccctatatataaatatatgtaatcaatttcttcaaatagcttgcttacatgataatcaattagccaaccatgagtcatttagaatagtgataaatagaatacacagaatagtgatgaaattcaatttaaaaaatcacgttagcctccaaaccatttaattcaaatgaacccatcaactggatgccaactctggcgaatgtaggacctctgagtggctgtataattgttaattcaaatgaaattcatttaaacagttgacaaactgtcattcaacaattagctccaggaaataacagttatttcatcataaaacagtcccttcaaacacacaattgttctgctgaagagttgtcatcaacaatccaatgctcacctattcagttgctctgtggtcagtgtggctgcataacagtggattccatgaaaggagtcattttagtgatgagctgccagtccattcccaggccaggctgtcgctggccatccattcagtcgattcagtcataggcgaatctgttctgcccgaggcttgtggtcaagcaaaaattcagccctgaaatcaggcacatctgttcgttggactaaacccacaggttagttcagtcaaagcaggcaacccccttgtgggcactgaccctgccactggggtcatggcggttgtggcagctggggaggtttggccccaacagccctcctgtgcctgcttccctgtgtgtcggggtcctccagggagctgacccagaggtggaggccacggaggcagggtctctggggactgtcggggggtacagagggagaaggctctgcaagagctccctggcaatacccccttgtgtaattgctttgtgtgcgacagggaggaagtttcaataaagcagcaacaagcttc

SEQ ID NO: 1100 - DNA, 1705 bp, Homo sapiens
ggcagtgtcacccgctgttccctcattcccgctgacctcactggcccactggcaaatccaaccagcaaccagaaatgttctagtgtagagtctgagacgggcaagtggttgctccaggattactccctcctccaaaaaaggaatcaaatccacgagtggaaaagcctttgtaaatttaattttattacacataacatgtactattttttttaattgactaattgccctgctgttttactggtgtataggatacttgtacataggtaaccaatgtacatgggaggccacatattttgttcactgttgtatctatatttcacatgtggaaactttcagggtggttggtttaacaaaaaaaaaaagctttaaaaaaaaaagaaaaaaaggaaaaggtttttagctcatttgcctggccggcaagttttgcaaatagctcttccccacctcctcattttagtaaaaaacaaacaaaaacaaaaaaacctgagaagtttgaattgtagttaaatgaccccaaactggcatttaacactgtttataaaaaatatatatatatatatatatatatataatgaaaaaggtttcagagttgctaaagcttcagtttgtgacattaagtttatgaaattctaaaaaatgccttttttggagactatattatgctgaagaaggctgttcgtgaggaggagatgcgagcacccagaacgtcttttgaggctgggcgggtgtgattgtttactgcctactggatttttttctattaacattgaaaggtaaaatctgattatttagcatgagaaaaaaaaatccaactctgcttttggtcttgcttctataaatatatagtgtatacttggtgtagactttgcatatatacaaatttgtagtattttcttgttttgatgtctaatctgtatctataatgtaccctagtagtcgaacatacttttgattgtacaattgtacatttgtatacctgtaatgtaaatgtggagaagtttgaatcaacataaacacgttttttggtaagaaaagagaattagccagccctgtgcattcagtgtatattctcaccttttatggtcgtagcatatagtgttgtatattgtaaattgtaatttcaaccagaagtaaatttttttcttttgaaggaataaatgttctttatacagcctagttaatgtttaaaaagaaaaaaatagcttggttttatttgtcatctagtctcaagtatagcgagattctttctaaatgttattcaagattgagttctcactagtgtttttttaatcctaaaaaagtaatgttttgattttgtgacagtcaaaaggacgtgcaaaagtctagccttgcccgagctttccttacaatcagagcccctctcaccttgtaaagtgtgaatcgcccttcccttttgtacagaagatgaactgtattttgcattttgtctacttgtaagtgaatgtaacatactgtcaattttccttgtttgaatatagaattgtaacactacacggtgtacatttccagagccttgtgtatatttccaatgaacttttttgcaagcacacttgtaaccatatgtgtataattaacaaacctgtgtatgcttatgcctgggcaactattttttgtaactcttgtgtagattgtctctaaacaatgtgtgatctttattttgaaaaatacagaactttggaatctg

SEQ ID NO: 1101 - DNA, 76 bp, Homo sapiens
tggagccacagtgcctccctgcagcctcaacaccaccctgctgtccagtccccagcctggccccaccagcccaagc

SEQ ID NO: 1102 - DNA, 1957 bp, Homo sapiens
cctctgccccgcgcccaccccggcgcctcgccctgggctgaccgcagctgccgcgagctcgggccaaggcgcaggcgtgtccccctggtggcccgcgcgctcactgcagcctgtgcccaaccccgcgtctgcatctggagatgcggacttggacgtggacttggacttggacttggatttgagcttggctcttcgcagcccggacttcggaggagtggggcggggcgggggaggggcaccacgggttttttgttttttgtttgtttgtttttaatctcagccttggcgtgagctggggccttcctctcttctccagcctctccctttcactcttcacccagcatcctgcccccctgtccaaaaacagcaggacatcagacccatcccatcccaccacactcactcaccagctctggggaaagctactgtgaactaggagcaggattcctgggttctaatcgcaggtccatcactgactgtgacgtctagcaaagcccttgccctctctgagcctcggtttccgcacctcaagtaattaatcccttagcaaatggactcttttagacttctcatttaactcaattccctgagctagactgggattaaaattctcattttgcagtacattaaaactgaggcccagagatgtgatttgcttgaggccacacagctagatttttggtggaagtgggccttgaacacagtgtactttctgcagtttctgactgtaaaacccagtgtctgctctctgagttccatttccaagcccccctccatcttggacctatgtggtctccaccatattcacacaccaccaccaccacttgccaatgcctctcttaaagcaatatacccattcgttctcttattgggaactggatggatgaagccccaaattcagccccacccacagagaagccttcctacactcagcctctgtccacccttggcaaatctttcaagctctctcctccaggaaagtggggccccaactcagtcactccacccccttccaggtccctgaggctggttctactgtatccccatcacctccacaactccactcacccctgacggctccatccacctcaccagttggaaggcttgtggtttcagagaggagcaatgctggtcagcgctgcccagactccagtgtttacagatcaccagcatttacaaccaatccaatggccagaagcctcctctaacaagcccagaaggagttctgaaggggcagatgggggtgtgagtagtcggggagtcgggattgccagcaccctcacccttccttgggggcaagtagaggtgagaacactttccccacctccctccacagacactcctgaggacgctgcatcccacgcactgcctggtgcgtccatagagagaggatcaggtctcagcatttcatctgtgaaagaggcatggccctgggttagaaaggagggcaggagacatggaggaactggggggcacccagatggtgcagatggtttgcacacctgagcctgtctgtggtgaccattccgctcctctcccactaccctccaatctatcattccctactctctaaggccaaaatatcctgagcaaggctggcaaccccaccccaccatcccaaatgcaagcagccaggcccaggagttcctctggcccccacaggcatggagctcccagctggtgggtacagcttgagaggggggcagctccctcaggctaagctactgcccttcactgggccagccctgcctccagccctcacctctctcaccccaactctcccccaagcccctttctactcaacgggtgtagccactggtgctttgaagccttttgtttttataagatggtttttgcaaggggaccaggttctcttttcactgggaccttgcaaggaggggagtgctctcctggtttctgtgcaggcgggttgattaaagatggtgttttcttctct

SEQ ID NO: 1103 - DNA, 502 bp, Homo sapiens
agatatggactggaagactccaaggccgcttgtctttgagacctcagactgcataagtgatgccaaatgttggatgtccaggctagcaccctcccttcagatgaccattgctagcaagaaacaggaggcggtggccatattccaaaaaccacttctgtcccatttcaccaggatgactaaggcaagctccctgtggcctctaaaaaccacctgccagatttcagggactgtttttttttttctttttcttttttcctgttttctaatgcaggcccaatgtgacaaatttgttggttgggattttttttttttttttgtaactggcttgtatgatattttctttctgtatttctctatatcattttgtattaaaagccaaatagatgcctttttacaagagccatgtggattggatttattgctgtcttttttttgaggcttgattgctataaatcagaatagagcatgatgtggccacagaatacaattcatttaaacttcc

SEQ ID NO: 1104 - DNA, 633 bp, Homo sapiens
cctgactgcactgttgctgactactactctgccaatcggctacccctcgactcagcaccacattgcctcatttcttcctctgcattttgtacaaatccacgaattcttctggggtcaggtgccactgaccgggatccagttccagttcccatggtgtatgtggttttttttttttttttttaactgcactcatagggtgctctgaggtcaataaagcagagccaaggccacccagttgcctttttgcctttggtaacataactctgggagtcttggtttatcctgtgtgtcagagagtgggcagaaataacggcctgaaggttactgaggaagaagcactggatgggagactgaaatggacagtctcggagcctgttaatcagctgatcaccttacacatttaataataaaagagctgtacctacacgttgcctttacactgccccccctccatggtcaaatgacctagttcagtcagtgatggggcttccccaggtttggctattgaactgtcacttcaggcccatcctacactgaaagctcttgggtctggctgttctctgtgaaatgctgtagtctctccctttccagaattcaggttcagggcacagaacccaggcttgtaccatggtg

SEQ ID NO: 1105 - DNA, 743 bp, Homo sapiens
cccaaccatctgtggagagtggagtgcaccagggacctttcctggcttcttagagtgagagaagtatgtggacatctcttcttttcctgtccctctagaagaacattctcccttgcttgatgcaacactgttccaaaagagggtggagagtcctgcatcatagccaccaaatagtgaggaccggggctgaggccacacagataggggcctgatggaggagaggatagaagttgaatgtcctgatggccatgagcagttgagtggcacagcctggcaccaggagcaggtccttgtaatggagttagtgtccagtcagctgagctccaccctgatgccagtggtgagtgttcatcggcctgttaccgttagtacctgtgttccctcaccaggccatcctgtcaaacgagcccattttctccaaagtggaatctgaccaagcatgagagagatctgtctatgggaccagtggcttggattctgccacacccataaatccttgtgtgttaacttctagctgcctggggctggccctgctcagacaaatctgctccctgggcatctttggccaggcttctgccctctgcagctgggacccctcacttgcctgccatgctctgctcggcttcagtctccaggagacagtggtcacctctccctgccaatactttttttaatttgcattttttttcatttggggccaaaagtccagtgaaattgtaagcttcaataaaaggatgaaactc

SEQ ID NO: 1106 - DNA, 404 bp, Homo sapiens
aattccccacctgcctttggatgaaagactccgttgggaataaatggccaaagcttataggactctgtgacaggttgtgaatgttttttttgttgttgttgttgtttttaattgctgttaatattttttaaataataaagaaacaaaactatctgccctttcccttccagtgggttcctctggtgctgcagccagagctccctgttgccctccttttcccgtttagtcccaggaacaaaaaagggcattttgggtacaggggcatatacctgtaatcctagctattcaaggggctgaggtgggaggatcgcctgagcccaggagtttgagaccagtctaagcaacataatgagactcagtctccgaaaaataaaaattaaaaaataaagggtatttccctcctt

SEQ ID NO: 1107 - DNA, 302 bp, Homo sapiens
gtgccacgctggactgcccactgcatataaatatatatatctctctattttcacactccactttggaactacccaggagccagcgccctctcccctctcccgagggctgggcagggaggcgccgtggactcagccaggctgggggagccggacatggcttggcctggggtcccagggcccttccttgtttctcagaggcccctcagccactggaaccccatcttcagcccagcctgtccgtccctgtcccgggctggggaggggggaggggaactttgttgggaataaacttcactctgtgg

SEQ ID NO: 1108 - DNA, 179 bp, Homo sapiens
ccctccttacccaccagaacaggggttttgatgccctcactagtgttgaagcctgttccagagagaggtgggactgcaaggagaggatggtcagccctacccacctgccctgtttgaacttcctgtttgacaatgtttgctgttgattttttgttcaataaagaatttggtaaaattgg

SEQ ID NO: 1109 - DNA, 709 bp, Homo sapiens
gatgcgattacgcttcagagataccaatgggcattgctgtgttcagtagaaggaaatgtaaacgaaggctgacttgattgtgccatttagagggaactcttggtacctggaaatgtgaatctggaatattacctgtgtcatcaaagtagtgatggattcagtactcctcaaccactctcctaatgattggaacaaaagcaaacaaaaaagaaatctctctataaaatgaataaaatgtttaagaaaagagaaagagaaaaggaattaattcagtgaaggatgattttgctcctagttttggagtttgaatttctgccaggattgaattattttgaaatctcctgtctttttaaactttttcaaaataggtctctaaggaaaaccagcagaacattagcctgtgcaaaaccatctgtttggggagcacactcttccattatgcttggcacatagatctccctgtggtgggattttttttttccctttttttgtgggggagggttggtggtatatttttcccctcttttttccttcctctcctacatctcccttttcccccgatccaagttgtagatggaatagaagcccttgttgctgtagatgtgcgtgcagtctggcagccttaagcccacctgggcacttttagataaaaaaaaaaaaaaaacaaaaaacaacaccaaaaaaacagcagtgatatatatatatatat

SEQ ID NO: 1110 - DNA, 656 bp, Homo sapiens
gtgggccgaacccacttccagctctgctgcctccaggaagcccctgggccatgaagtgctggcagtgagcggatggacctagcacttcccctctctggccttagcttcctcctctcttatggggataacagctacctcatggatcacaataagagaacaagagtgaaagagttttgtaaccttcaagtgctgttcagctgcggggatttagcacaggagactctacgctcaccctcagcaacctttctgccccagcagctctcttcctgctaacatctcaggctcccagcccagccaccattactgtggcctgatctggactatcatggtggcaggttccatggactgcagaactccagctgcatggaaagggccagctgcagactttgagccagaaatgcaaacgggaggcctctgggactcagtcagagcgctttggctgaatgaggggtggaaccgagggaagaaggtgcgtcggagtggcagatgcaggaaatgagctgtctattagccttgcctgccccacccatgaggtaggcagaaatcctcactgccagcccctcttaaacaggtagagagctgtgagccccagccccacctgactccagcacacctggcgagtagtagctgtcaataaatctatggtaaacagacaa

SEQ ID NO: 1111 - DNA, 757 bp, Homo sapiens
ctaggtaggggcaggtgggtgatctctaagctgcaaaaactgtgctgtccttgtgaggtcactgcctggacctggtgccctggctgccttcctgtgcccagaaaggaaggggctattgcctcctcccagccacgttccctttcctcctctccctcctgtggattctcccatcagccatctggttctcctcttaaggccagttgaagatggtcccttacagcttcccaagttaggttagtgatgtgaaatgctcctgtccctggccctacctccttccctgtccccacccctgcataaggcagttgttggttttcttccccaattcttttccaagtaggttttgtttaccctactccccaaatccctgagccagaagtggggtgcttatactcccaaaccttgagtgtccagccttcccctgttgtttttagtctcttgtgctgtgcctagtggcacctgggctggggaggacactgccccgtctaggtttttataaatgtcttactcaagttcaaacctccagcctgtgaatcaactgtgtctcttttttgacttggtaagcaagtattaggctttggggtggggggaggtctgtaatgtgaaacaacttcttgtctttttttctcccactgttgtaaataacttttaatggccaaaccccagatttgtactttttttttttttctaactgctaaaaccattctcttccacctggttttactgtaacatttggaaaaggaataaatgtcgtcccttt

SEQ ID NO: 1112 - DNA, 3158 bp, Homo sapiens
caggtggtgggaaaggagctggagcttcctgctcagacccacaacattggtcatcagcaggctgcacttttcctcagttccagggtggatagagggtcaagttcttgaccttagctctgtatcaaaattgcctgagaaactgcttaagaaaacagatgtcatgctgagcgcggtggctcacacctgtaatcccaacactttgggaggccaaggtgggaggattgcttgaggcgaggagttcaagaccagcctggccaatatagtgagaccccatttctgtttttgaaaaaaaaaaaaaaaggaaaaaagaaaacagacatcaaaccctgcctgaccttctgagttgtggtcctcaggtatgaggcctgagtatatacttggccttggagacaaaagaccagtgtgatcaagggcaagggcaagttacttaacctgagcccctggttcctcatctaaaacatggaattgatcattataagacctggctataagctgtaatgaggtgatccatgtagacaccttagggctattgcctgagacatggtgaccagcactcaggagacattagtgataaaccccacaaaacccattccagttattaagctcaaggaggccttagtactgttattcttcactacctctcagaatcaaaagtggctcatttagattgagaggctggaacagtccaaagctctcccagctaataagtgacaggactgaggctgcaacccagacatctgattcatgtcagcgttagttccactgtcacataagaaccacatgagtccttccatcatgtaacttatgagcctgttagaaagaggtggacagattagagagacatgtgaagggcctcctttttcatgatgggaaactgaagccttgggggagtattttacctactcaggagtattttgcacttgtgactacctcactatacccaggacagagaaagcccatagtgccctgtcaggccacaggggcttgctggctttttgtgtctttgcagccccctttaaaacctgacgtgcagtacacgtgagcattctagaacctgctataccagggcttagccgacagcaggccaagagtaggaacaaagcaagaaaacgttccgtggggagacttgagctgggaattagggtgttggtgcccctagtgaagacctagtgggcatctgtaggccactgccacctctgcttttggccacagtgccactcaggcagtggcctccattcacccaaagactaagtaacttgcccttgattacactggtcttttgtgtccagggccaagtatctgctcaggcctcctgagttctctgcttctcagagccatggcattatctgctcagcaggaggcaagttctccttaaaggactgaggctgacttggttcctgtaggcagccatcaccttgtggtgtctggtgttggttgggggaagtgtttcctttaggtctgaggtaatcagagcatcaggcccacccctcaggcagagggcagctctgcccctcagacacattccttaagactaggggttcactctcagtgggacctcagagtatggcctggggtaggggatgggaggtggctctgctcagcaagtggaggttaggtctgggcctgactcaggagtaactatgtgtttgtgatttccattaccccctcccatttgcagctggaagatgtagagtgggaggactgggagtgagggagccagagggagcagctcccccacccatggcatctctcgcctccctcgctcgtctcagcccagccctggaagactgagaatgttcccccaaatctcctctgccaaccagagctctgggcacagattctggtggctccctgctggccctcttgggcctctgctcacacctgggaaggggctctctaaatcccggccagaaactctgacttgtgccaacaataggatgacccaagggagaggaaacctatcctcctcaccagaagagcctgtgtttttctgctgaacacccactgttcctgaggactcctgctgggaagtcccaagggatagttctagcccttctgcctgtgtagacagaagctaaaccaccagtctctctcggaggaagctgagacaacatactctgtccatacataagcaggcagggagggccatgccacctacccttggctaaacagggacagtgaacacattttggttcctatcccagtgggtaagaggcacttatctctgggaaatttgcctctcttgggactctccccctcccaggcattttccattcctggaaaggctcctttggggttcagaatccagagaccaaaccctgacccacctccttcctttcctccagcccacgctggtctgtccccatgccttcccagggcttcttcatgtcggatgcacccaagtccttagcccagctgtgccacctgcaggagttcgctcttgcgtttcttcccctccccaagaagggagggggctacttcaggcccttctgtgtgttgcctggcaggataccttgtccaaccagctacccacctcaactcccctgtagtttaggacacaaaacagctaccagcggtacagagcggtgatcaaagccgagtacttacaactctggtaagcctagcttctccgcctcagcccttctgcttctggaagggctatcctgggggtgaacttgaaactctcatcaggcttctgcaaaagctcttcttcctgaagacagacccagcctttgtgctctcaccctccactctggtaaagctgcacctctgggggaatgaggggctgcaggaatctctggagagcctggtgcttcacgatgctgctctggtgattcttgtacctaatctggtgtgctcaccaatgagtgaaagggatcgtgggtcagggacaccgagagagtgaggtcacttccacttcaaaccttcagtgagggggtgggatggagagaatgctgaatcttttttttgacgggatggggtttttctctttgtaattatttctttagtttaattaaccttttggttgtttgtgcaatattatatattttaaattataatgcatctccccagagtattttgtagctgggaaaagaaaaaaggaaaaaaagaaaaaaagattctaacagctgttagttttataattaaaaaagaaagaa

SEQ ID NO: 1113 - DNA, 154 bp, Homo sapiens
gacaccaaaaaataaaagactcctacgaagaactgtttttgttttcctcttccttttgagaagacactatgaattaaattctacagcttttttttgatatatggaaatttgtagaacagaaatattttagttaaagtgtgactttcagaaaggg

SEQ ID NO: 1114 - DNA, 1475 bp, Homo sapiens
aaatatatggccaaatctgtaacccggaaacagcaaaaaacttcttagcaaaggatcactaagtaccctttggatgtactcttccaaccagacaagagtgccagaaacttggcaagcaattcatcctgtggaagttgcaaatactggctgacctgcttaaaaagattctagagttggccggaggcagaacatgtcaactctttgctggattctatttcatctgctgttgatactgatctcaatgcaccaaggaaaggaaagatgagcctcctgtcttccagcaacaaccctcacatatgcactgagtgaaggatgaatgtatggacacatctgggagtattttaaagaatgtatcttgccttgtgttgacccaaaccaaaaacatttttgaggggcacatgtggggtcaaaaagatagccaatttccattacatgggtttacaatttccattcttttgtgccacgagtgttagaatttaaatgaatacttttacaaagtctactttttgttcaaggatatgctgacccatatagtttactcttaaaattgtgtcaaggtatttctcactatactctaaaacaactagacttgaaaagaaaccatttgagatttgaatctaatggttaacgctattcagattttcccaaagatcttacctcatgaaagtagttctgggtcagaatgatctactcagttaaaaaacaacaacaacaaaaaactaagcgattgggaaaaaacaggaattttatctggttattgcatctggtgatagaggccttcaaagcctattatttctaacctaagtaaaggccccagtgaaaaacatactggggaaataaaacctctgagaaaaggttcaagcaccttttccaaatttaaatcttgccttaaattctctctaccacactgcctttgacactcttggaagtccatgtagttctctacagatagacttcaaagaaacgttaccttatcaaagactaatctgtgccacctctgattcagtgttttatgtctttcactttccctgggaaggagtaaagttcttttctacagctctgggactattacatttaattctgctcttgatagtcaaagaccatggacaacaactgtcatctgaaggactcttctagaagccagagactggtgtttgatggatgttttatactaaataaaacccatcagcatggggttatgtagaaaagcaatttattccattttaagcacttacacagttagtcatggagagtaacaggcctgctggtgaaacaggtcacccaaaatggagatggcatcaaactagtggtcaaggactaactcctaaaaaaaaaaagcaactcttatcaaggattaatttaatttttaaaacaaatacaagttattgattcactcttctcaacttgacagtctacctgtggtataactgtcaggtaaaaacatacatctttacaacttggtggtcccaagttaa

SEQ ID NO: 1115 - DNA, 742 bp, Homo sapiens
ccagcccagcatcttccccccttcttccaccactgagtcatctgctgtctcttcagtctgctccatccatcacccatttacccatctctcaggacacggaagcagcgggtttggactctttattcggtgcagaactcggcaaggggcagcttaccctccccagaacccaggatcatcctgtctggctgcagtgagagaccaacccctaacaagggctgggccacagcagggagtccagccctaccttcttcccttggcagctggagaaatctggtttcaatataactcatttaaaaatttatgccacagtccttataattggaaaaatactggtgcccaggttttcttggagttatccaagcagctgcgcccctagctgggatctggtacctggactaggctaattacagcttctccccaacaggaaactgtgggatttgaaaaggaaagggaagggaaaacagagaacctagtggtctaccaagtggttggcaactttcccaatgtctgcttactctgaggcttggcactgggggccagggcctgccccagggctcctggaatttcccttgatccagctaggctgggacactccctaaatcagctgcgtgttgttagcatcaggcagaatgaatggcagagagtgattctgtcttcatagagggtggggtacttctccataaggcatctcagtcaaatccccatcactgtcataaattcaaataaaatgtctgaacaaggg

SEQ ID NO: 1116 - DNA, 2018 bp, Homo sapiens
aaaccttttcagtgcttgccctcagcagctaagaagacagacagtagagaatgtgagaggatctcatggttctgatgatgattatccaacaaacatctggccctctctacatctcttccctccatctccttgtaccctctggcttactgtcctctctctggcgcactttcctgaagcctcttattaactcccatctccagaagcacctcaacaatgtcagtggctgaggctgcactcagagggatgactgctgggggtagactgggtgccaggggccatgggcccaggacccagtcttggccattcagttgagtgaggctgaaggctgggtttgaaaaggcaaaaagacaagacatccaggcagggcttctcttttctttccacaagggacaagagcttggcttatttaggctacagccctgctgctgctcccttccttcttctgtcctgtttccagccttgcaagaaggctattcacaattaggcctggctgcttctctcatttttttcctcccagtttccaaacaagccctcagtgaacatcattgaagcgtgactgcctgtctgcagggagaaggattccatttttcttctcagctggtccccaggcccacgggcacagggagagggacaactgcagcagtggggaggaggcacagctagctgcacagttctctcttctccttgtcctagtcagatgaaggaggctgcactacaaacccaaattctgcaaaaaaataaaaataagccacaaaactaaaaggcctggccccattctggaaaaggcaaagctgcatgagacacagccttctgcctcctcgcctctcctggactggcttcctctttgagaaaatgcacaaagccctgggagatgacaagcacaaggactgactcaagctgtgtctttcagaccaaggaacatcagagaagctgtggggctgcctgccaggcaggatcatggctgccatcaagccttttctggatccagccatcaaggacatgtttgtggtgtgatgcacacttttgcaagcgtgtaagatgttacctggtttgtctcttttggaaaacaaaaatcagaaggctgcattctagagggcagagaaattcccccgaagactgagctggttgcctgcatcctctatcttctttgacccttatgactgaaagatcatcagtttggaaggtactggtccaatttatttaggaagtatctcttggagtttcagaaatgctagcttggacaactgaaaagtcacatcacagctggcattctgggggctaccaaaacaccccttctggagtagaagctgctggaaggcaggcctgagccattcaccacggacaggaagagcagctctggctatcaccactggcctctggggtcttcatatcttgccatctcatccagggttccatgaaagttacccagggtcctcatgtccttccttagagcctgagtggtgtgaggtgacaggtctctctctccactgcccctttctggtttaaaaaaatggtgcttgatgagggaaggtagactcttccctaggactgacgagttacggctgccagatgcctgcatgggaagaggtggacatctgcatcttccattggtggtcaaggatgggtgtgggagaaccacacctagtgcaagcctggtactcagtaaatatttgttgaaatgaatgataagagcattggtccccaagccagagagccagaagccatcacccaatgaccgccccttccttccggtctacaagagctctcaaggctgggtctgccaccactctgctttgcccaagtgtgacagcactggggaggagagacaggataaagggcagatgtcagcaatactaagggcttcctcatgggagggcatgaggctccactcattgtcttgtgacttccatccctgctgaatggggctgcaaggccaaggctccttaggggagaggtccttacctctgatccacttagagcaataaccactttttaaatgtaaaataaaaagacaaatg

SEQ ID NO: 1117 - DNA, 210 bp, Homo sapiens
gagatgatgtcctgcccaggcccgatggccactaggaccctgcaagcaactctgctctgtgaccaggccaggattcctggagctggcctgagagggctcaatggaccctcggggacccaagtggggctttcaaccctctcccccaccacccagcccactgcactgaaatgagactttattctgaaattattaaaaagaacagagatgctc

SEQ ID NO: 1118 - DNA, 360 bp, Homo sapiens
agtggaatgaatgctcctgttctgagaagcacacttgtaactgcatcttttggaatttttttttttttttttccaaggggtagagatttatgtattttatttcacagattctctggtcacaggtttttgcccagggaaattctgagaaattcacaatttcttaccagataaaacatgaaaagtttgccgttagttcccctcccctcccctccctctttttagttttaatttattggttaaactgatggcagcaatccatgaggtgtgtcaaagagtgtacatatgtatgtgtgtatattgaatgctaaacatattactgaaagacacattttaataaagatttctgtcataattcaactt

SEQ ID NO: 1119 - DNA, 2844 bp, Homo sapiens
tatcagaaggccaggcgagactgcaacactgctcatcaccccgcggcgtgatccctgctcttaggtgctgggcagaggggaagggtggtcagggtgaggatggtgagggagggctggtgaggggctcagaggaatacttggaacaacagcagtgttattgtagtgtggcagtttcttttatacataggtgagagtttttaaagtgtaagggaaaaattaattttttaaaaaacaccatgcttggagggtgggggtagaaatagacacaatattatttctaaggaatcgggttttcatttactctggactggtgaaaatattttttaaagccagtgctctaagacctcagcttttatctcagaaccccatgggttccagaccaagagtacaggaaatcaaattgttgtcctgtctgtctatagcttggaacagggagctttgattactgactccggttccacacactgtaagatcaaaaaaccatctccacatttgaaagagatgtaaggtgtattcatagggatggtggctcaacaaatcaagcaaactggaatcaaggggagggggaagggaatgaaatggaaagggaggctgattcccttcccctgacttaccactaatttactaggctacctactttcatgagtaacctctcacagctacccagcacatgccacaatcctatgctcttgccttcttttatctgcactgtgtgaagggactcttttaaataaatgagcaagtgtcctaagctatgtcatccaaagattgtcctttccattctcaaatcctgtgactgggatcactcaacagcactgtgatgtattattttcaatgaggtgcctttcttaactgaccaaatgctgccttgtttggcccctaaatcaataaaatatgttaaaatttgtatcccctgttgtggcattttttttagataatctaagctagaaaaatgacattgaattctggacctggctggaaggaaaagaagccctttcttgtcgctggcagctgtgtggtagggaggtccaagtatgtgcatatgagataagcctgcaacctcttgaccttcagctcctatgcaggcttctcttgagcccagagacaaggcagcttggtctagtggagatagcactgtgcttggagttcaggggacctaggacaaatcccagccagttagttattcactgtgctcctgtttcctcagctgaaaaaggaagttggttatgccaccttcttggccttaatggcattaaatgaaatttataggaagaaggtttttgctcagtacctggcatgcaacagacattggataaatgttagttggatccagatatacacagaaagatatctgcttcctgccaggctggataactgttgaatggacacttgtccatagtctagaaagccagtgcttctaatccttaagccagatctttgactaccttttcagttgcttctttaacactctttgttgcttctctgtgtgtcctagtttaaattcatttcctctccagcaaaagtgagcttaaataatttctccaaactaaagctctcatgtttttggaagggctgcctttgcaagtgaggtttctgagaaatgactgttgttcccaaaacaagagggagctgggctggaagcaccactattcttctttaggcatcttgttacagagagaggcagggtcttcactgacatattaaatcctgttccctgaaccagcccctccctcttctgctccacttcctcacctgtgcagagtcattttcaggtgttagccttactgatttgcactgatctgtttgttccctgagctttttaaataccctgtgaaaattttctttcctcccttggtcatcatgcatctaattgtggggaaatgtttgtcaaaccaacctgcaaagcagcatggtgtagttgagaagaataaacagagaagactgggtgagctattgtttgtttgcttctttgggcctgggtttcctcatctaatctgcaaaccaagaatgcagactagtcctaccactcccggaagactgacgttgtgccaggtattatgcaaaggcttcatgtaaccctcgacttcacgtaaccctcacacagcaccctgtggagtcagaactgtccttcacttttataggtgaggaaaccagactcagagaggtgaagtggcattcctgaggtcatgcataagaggcagtcaggactgaaacacagtctctaacacttatccgtccccttgatcttgttgctgaagtgatttaattacttgcgtagctctgcacacaggaagggctgctctgaataagagctcttttccatggacactcagcgctgccggaactgattttgaagaagtcactgccggctctgagggcctagggtatgtgtcttaggatctcctgtgtgcacaaagtgtcactgacagaacacagcaggatggagagcagcctcctcagaagcctcacaagtctttcctcagatgaagacagagcaacgagtcagaagacagatttcaacagcgacttcaccatgcgaccttggacaagttatctcacctcatcagtagaataggaatgatccctacccctcaaaggtgctgatgacactagtgaccaagatactcatgtgggttggactgcccaggacacagcagatgcttagtaaacacagatggaattcagagggaaaatgtaggcattgaagaaagttgtcttactgaccatccggaaccaggctaaggatcccctagaaatcatagacctctgaaattatatgcagaattctttatgtgttttcataattaataatagtctaacatattaaattcttagctgtgtgag

SEQ ID NO: 1120 - DNA, 199 bp, Homo sapiens
tgttgggtccaagaaggaatttctttccatccctgtgaggcaatgggtgggaatgataggacaggcaaagagaagcttcctcaggctagcaaaaatatcatttgatgtattgattaaaaaagcacttgcttgatgtatctttggcgtgtgtgctactctcatctgtgtgtatgtgtgttgtgtgtgtgtgtgtgtgcat

SEQ ID NO: 1121 - DNA, 1774 bp, Homo sapiens
tccaggcagaaggagaccacaacctcctgggaccactgccacctgcaagagccctgcccaggagatagaagacctggactccagcccaccgtggccactggagacctcaggccagttgtttaccctccagcctccagtctgtaaaatggaggttgcattccctacttcctaaactctcttccagcatcgatgttctgtagctctgaccttgatagggatacagctttgatccaaggatgtgacatggcttctcctcagggcaacccctgcccaaccctcatccccatcttctcaggggcaggggactaccttccagtgtctccctccagcccagccctgacctcaggaagtgtcagagcatggccagtagttggcagcccgaaagacacacagcaccctcttatgtcccatggcctaagacttacccctgaccaagctagtgatgggccatttacccttgaccccagtccacagtggtcacaggtagtacctggtcctagggttgcctgagagccaacctctcctgccacccccacaccaagaactatatggttcctacttctcccactgatctgctggtcagtgatgatgctgtggcctgtggaaggcacctggtagttgagtccacacattatagtcatgtgccaccaccttcctgcccacaggccgagggacagggtgagggtatacccaaagctgatgcagagcccattagcctaaaagcaactgcaggacaagcctccctggatgatcgaggtccccagtagctctgaacaagagtccagccaaccctcttcagccaggcctctgtgacctgctagggtgcaggaggcttccagaagcagttgttgtaattaggacccaagcactgggaggggctgttggctggaccccttgtcagacttggcatctatctcagttaggatcctgctgcagaaaacaagagccacttgtagctggtttaattagacaaggatttactacctggcccctggtggcttgcaaaattgttggaagagctggagaagcagactctgctgaatttccaggaactcccagcgccagattcatcatgtctgttgtgaccaggaaagctgcccccatctgcaggaagccactatgccagaaagctgctgactgcagaactaggctccctctgccacggtccgtgccagccaatagatgtcctgaggcctgcccctctcccacttcactcagttcccaaatctaaatttttacaagagattctgtttgggggaacttaagtcagatccagaaccttggctgcaagggagtctgggaaatgtcatttccctagaaggaagttagggtgggtggagcaagccccacctgcgtttttctgccacagcatccaatcgtgaagaactcgggagagggtggagtccacatctagggttgtcctgccccttggctctatccctgcccagaggtgggaactggaggagtgggctgcaagactgagcctaaatgtctccccggccttgacttttctttctagtcctggggcctagattctgcacttggggtctctgacacaacacaccatcccaaagtagccggaagagctaaacacagggggttcttaaaatggctgcccccgccacccgggcctcccttgggcaaaaggaattgtcagccctaccccaacccttcaactaccagaatctgggccaccccagcagtatttttatttaaaatgttgcccattttatgagttatgatcaatttgtattaaattaaagttacagatgtc

SEQ ID NO: 1122 - DNA, 1242 bp, Homo sapiens
ggctggtggcagccaggattctggcccagggcgcctcctcccgactgagcagagccagacagacattcctgaggggcccagaaatggggccggttggagggcaggggctctccctaggggcatagctggtgaggaggtctgggcacctcctccatggctctcaggggcctttcatttctgtgggaggggcagagaggtaggtggcacagaagatggggctttatgcttgtaaatattgatagcactggcttcctccaaagtcccaatactctagccccgctctcttcccctctttctgtcccccattttccagggggtatatggtcagggctccccaacctgagttgggttacttcaagggcagccagcaggcctggatggaggcctagaaagcccttgccttccttcctcccacttctttctccaggcctggttaactcttccgttgtcagcttctcccccttcagcctgtttctgcagcagccagggttctcccccctacaccctctgcaggtggagagagagaagctgggcccagccgggccgtgcctgctggcacagacgccttaacgctgtgtgtatgactgtgtgactgtgtgggagcctggactgacagataggccaagggctactctctggcatctccaggtgttttgtagcaaacagccacttagtgctttgtcctggactccactcagcctcaggatggggaatagccaagaatggcagcctcagcgcagaggcaaggtcagaaagagacggcgcttcagagtttcctttccagacacccctccccgcactgtgaagttcccctgaccgccctcctggttcacaaagagcattaagaaagctgcggtggtctgagcaacatagcccaaagggctgagcctcctggcctgcctgcccgcccaccctgggagtcccagtggtgaggctcagagaactgctaaggggaaagaacagctggagtttctgttgatgtgaagaaggcagctcttggcctcccactcccacacttctttgcctataaatcttcctagcagcaatttgagctacctgaggaggaggcagggcagaaagggcgagggcctgcctctgacctgccgtgtcctttgcaggaaggaggtaggcacctttctgagcttattctattccccacccacacccccaggcagggttggaaatgaaggacttttttaacctttgttttgttttttaaaaataaatctgtaaaatctgtct

SEQ ID NO: 1123 - DNA, 2562 bp, Homo sapiens
ttccccagggggcaggaagtaggctcccctgagcacagtgcccagtgcccatcttcgttcgtctccttgcctgtgtctgctactgctgggactcaggccctcgccctgccgccatctatgccagttaccctggagaggactcctgccgtgtcctgaaaaggcagaaaaggaagaggggctgcagacagaggaagaaagtttatggatttaaaatagcaaagcaacttgtggatctgtgtgtgtgtgtgtgtgtatgggcctgatcacacacaaacacacacacctctccttcattcacgtcctatggaagagaccataaaggcttcaaaactagaagtgcgcatgaaggatgcttcatgccctgttccccacacagagaagagatgaagagggggaggtacggtcagctttcaaaacaatatgccccccgcccatcccatgtgtgaggacatggtgactcggtgactgtaacagtaggacacatcccatcatgcggtcagagtgcagaaacccggtcagcgtgcagaaaccagctgtctgctgatgaacggcccatctgcacagcggcagcaaggattaccccaagggcaggaaaaaagtctttggaaatagattgaaaatcagtttctttatttttttcaaacactgttttattgagttctaaacccagtggattaaaaagtcatttgggtcctgggaagcactgggaaagaagggagagccggggaggatagggcaggagtctggccaggagcccaaggtcaagtctggctgtcaactgacaaagagaagagaagacaagtctgtggcccagacaggatgccaagtctgggggcagcagcagggtccttgagagaacaggggagcaagcctgccccagtacccaaaaaacaatggctatcatgtactggggttattctctgtgcctgacactttacctgtagtatttctagtctgcacaataacaccaaaatgtaggatttgttattcccctttgacagatgagaaaacagaagcctgcaaaggtaaagacagagttaggaagtgtggagtcagaatgcaaacccagatcagtctgccccaaagtccactacaccagctgccagaaaccctgttctagaaggggcagctaagaagggaggagccgatgaatctctacagtagcactgtggccaggtctggaaagccaggcaagacacctgtgtgtcctatctgggttctgctgtctccgcgtaggcagcttcggggcaaggattcaactccccaggcctcccacggttggtgctggctccttggctcccagcagccgctgaccatagccagcaaaagacctggcaggtcctgaatcaaaacaacagagtggctgaaagtcacacctctccagctccttgcgagtgggtttgattgattttgacagctatatcatgcttgggtcgttcatgaattccatgagaattgttgggaagttcatgagtttaggaatcaaagtatagcatttagggccactttctctgtcctcgggaaggcccccacaagcttaagcccctgtatacgtgtgacatgctggcctcagagattcatgtcacatattgaaatagcaaatagaaatgtgcaggagcggagggacagcgacacctggttcttaagcaaattctagattggaacaattagaagatctgactgatgttaagagtggccagaggaaagtgagaggcgtccatttccagcagacacaatggaggctgacagaggcaggagcctacccctggccacaccacctctgggacacggcacccccctgggcctggagggagagggccaatccagacacactcacactctcatctctttccttggctggaaacaagtgcaggaagctcccctcccaatttcttatgctcccttcccccttacactcctctccttcgactgctcccttcccccttcttatgcccctctcagaccacccagcggatgcctattcccgccccccacccctcccctgcgtctccttgtaaagttccatgagatgctcgaggagcacctgctggtggggcacccagcactctgctgggcatcaccctccgcacccctgacatttctctccacctccagaggcttggaagggaacagggcagatgaggcccttcacccaccatctacgccatatacccatcaccatcccatgaggaaaaaaaaaaaagtaaaacaaagacaaaaaaaatcttttgtacagagatatatttttattatacaaagtttgtacagtaccaaaaaagaaaaaaaaaaaggtgtaaatttttttttcattattgtaggtaaacggtagtggaagccttttttgtaaatgtaataaaatgtataaatatggttttcagaaaacatcaagtgctgtaaatatgtaatctacacaccttcttggcttgtctgcagtatatacatttaatttatctgtctctgtatatgaggcttccccctggggtcctgcattatggtactttcctgaatttgaaagcaattttaaattttttgaattcaaataaaatataaatttttgcattg

SEQ ID NO: 1124 - DNA, 1594 bp, Homo sapiens
aaacagtcaccatcttctacccccatcactgtatagtgaaaaacctgattaaagtggtatctgagaaccataatgatcgaatcttatcatccaggtggtatttgggggtcttcttaggagttaggcaagtacaggcattttagagcaggataacattggtattaaagggtgccaaggagccctggaaactgctttactagtgcggttgcactgaaccctggaggcacagattcccaggaacctttttaccattattacaattggctgcagcaccttcaagtctaaatggaggtagacctcacatacacacacatagacgcctttccctataaaagtatatacgcacattcaagaaaatttggtagggattttaaaaaggtcacccatgttcccagctcgttaataacaaccgttaacattttgttgtcttttactaattctctgcataggttttagagatagttatcattactgtacatttaattttatatacttttctcactattatcattttcccattttacatggtcatcataattggttttttggagacagggtctcactctgtcacacaggctggagtgcagtacaattacggctcagtgcaaccttgacctcctgggctcaagtgatcctctcacttcagctcctcaagtagatgggactacaggagtatgccaccatgcccagctaatttttttatttttttgtagaaccaggtctcactatgttgcccaggctagtctcaaactcctgggctcaagtgatcctccggccttggcctgtagtttcttttttctttttttttggagatggactctcattctgtcacccgggctggagtgcagtggcgtgatcttggctgactgcaacttctgcctcctgggttcaagcgattctcctacctcagcttcctaagtagctgggattacaggcgtgcgccatcgtgcctggctagtttttgtgtttttagtaaagacaggggtttcaccatcttggccaggctggtctcgaactcctgacctcaagcgatcccatctgcctcggcctcccaaagtgctgggattacaggtgtgaggcaccgtgcctggcagtctgtagtttttttttgttgttgttgttgttgttgttttaaatatggagtctcgctgtattgcccaggctggagtgcagtggcgcgatcttggttcactgcaacctccacctcttgggttcaagcgattctcctgcctcagcctcctgagtagctgggattacaggtgtgcgccgctacgcctggctaatttttgtatttttagtagagacagggtttcaccatgttggtcaggctggtctcaaacttctgaccttgtgatctgcctgccttggcctcctaaagtgctgggattacaggcgtgagccaccgtgcctggctgtagttgtttataatagcaacataattgtctatcaagtgggagtatgacataagtttatcctggacaatttccatattgctggacatttgaattgtttctggttggtcactcgtttagatactgcaacgaatatcttatatgaagcttttcctgcgttttggaataaacagtaaaaatag

SEQ ID NO: 1125 - DNA, 936 bp, Homo sapiens
caatatgcacattgcttaacagtgaagtcaataatcctgtgttaagttttgtataagtatcctaaaagataatttcctaatgtggatttgtgttttcagtgattaaatgttttaataatttttccctttttgttgaggaatttaataattatgattgttataaataattatgtataattataatctagggtagaaaatttagttatttcattaaatttggactagtgacaaagactgcaggtaatgagaagcccagtttataatgtaacagcacaacctggatgttgaaacagcttggcctttagaagcaagtggaacatttcagtcttctagccaaccagctacttacccctgcaaggttgtgagtaggtggaaaagatagatcttttttttgagatggagttttgctcttgttgcccaggctggagtgcaatggcgtgatcttggctcactggaacctctgcctcctaggttcaaacaattctcctgcctcagccttccaagtagctggggttacaggcatgtgccaccatgcccgtctattgtattttttttagtagagacggggtttcaccatattggtcaggctggtctctatctcctgacctcaagtgatccacctgcctcggcctcccaaagtgctgggattacaagtgtgagccaacgtgcccagctggaaaaagatagatctaagcagcttgggtaactataaatggaagcagcagggggatttgagacccctgcttggggcctttctggcccaatataccagggcttagcaaactttttaaataaagagccagatagtaaatattttcagctttgcaggccatactgtcacaactactcaattctgcagttgcagtgcaaaagcagccatagacaatatgcagataagtgtggctgtttttaaataaaacttattcatgaacactg

SEQ ID NO: 1126 - DNA, 2476 bp, Homo sapiens
gtctgtgcactctctctgtggaaggctgctgtcactagcccctcctgagtgtgtcactaacagcccactgtgcttgcaaagcattttgttcccttttgcctgatgaagactgagggtcagatttgccctgagctgcactggacaaaatgcctccaggacccacttcgcgtgctacttccgcttggcgggggtgctgggcctgttgttttcctttgcctgggcattctcctcatgtttcccacctggagttccgcttttccaactgccccaggtagtcagggtcagggaccttggacttgtctcttactgctgaccagtctgtgctttatgggcagagatgagacccaggcccgtgtctgccagctgaccacctttcagccagccttgttctcctgtcttcctatctttatcatttggcaagtcctcagcttctgtcagtgtcttagggcagataggagggcatttccttgcacaaacagtaagatgactttgagtgatggcactgggagatcagggcaggtagtaggccttccttcctccgctgggctgggtcacctggcgagggtttcactcatcatggatgccatgggacaggtatcattggtttatgagagctagactctataaagcgattcctaaacactctgcaagtagaactatttttatataaagcatttattaaacacttttcatgcttaaagctttgtgttagggagaggctatgggggtatagggagtcatcagacacaggctgtgctctcagtctagtgagggagaaaagacacacagtagcagaagagaacaggctcacagcagtctggactctgcaccaagcagctcgatccaccaacactgtcaaggtggagactggaggtggtggggcttgaaatgagcccaggaaaccagagcagtgagggcgggcggggcatttcacccaggaatattgagaatgagggcctggaggtgaaatgtgcaaaacccacccctcacactgcagccaaggtttttatcatgttactctgatcatgtttttcaccccctgacattcttcaatgacttactatttctagcacaaaaagctagaacttttggtctggtagatgtggcctttgtgagcttacatcagtttgcttttctggaatctttctctttgctgatctccctcttttctaaacaagttcttctggttcatccagtaatctctttcttttttaaaaatgtggcgacaaggtcttgctctgtcacccaggctggagtgcagtggtatagtcatagctcactgcaacctccagctcctgagctcaagtggtcctcctgcttcagcctcccaaagcagctgggactacaggcatgcaccaccatacccagccctagaaagctctttcttatccctcccttaacctcctcaagttgtgctcacctttctctcacatgcctgggtcggcatttctctcgctgtctcatgattagttatgtttgcctgtctccccacccatcagtgaaatccctgagggcaggggctgtctcattcatctgtggatatggagcgggaccactatgtgccaggccctgtgccagacactgcttatattgtggtgaatcaaacggacagacttcactcttgtgtagcttatgtcagacagacattaagcaaactcacaaatacataaaatatgctcataaaaggcctttatgaagaaaaacacttaagctgagacctggataagtgggagctagccagataaagctgcaggaaatagcattccaggcaaaggaacaaaactggtgcagacccagctgctagaaggagcagagagcatttgaggaggtagaagaaggtgacatgatggacaggttcaccttcccacagagtaaggggtgagtgacccaaggctcaatggatgagcagggtccctgctgaggacttctcttgagtacaatggggagccactgatagctttttaaggggatgaatggtgggatttggtttacatttattattatttgagacagagtctcactcttatcacccaggcaggagtgcagtggtgcgatcaaggcccactgcagtcttgacctcctgggctcaggtgatccttccacctcagcttcctaagtagctgggaccacaggcatgcgccaccatccccaggtttttttgttgttgttgttgttgttttgtatttttggtagagacggggtttcatcatgttgcctaggctgttcttgaactcctgggcttaagtgatctgcctgccttggtctcctaaagtgctgggattataggtgtgagccatggcacccggtcttggtttatattttaaaaagacaactgtgtagctgggcgtggtggtgggtgcctgtaatcccagctactcgagaggccaaggcaggagaattgctagaacctgggggtgtgaaggtttcagtgaactgagatcactccaacctgggcaataaagccagactctgtctc

SEQ ID NO: 1127 - DNA, 1403 bp, Homo sapiens
ccacctggtctgtctcctcagggcagggcccagcacactgcccggccagtcctcctacctcccgagtctgcgggcagctgctgtcccagcatctgctggtcatttcgccctgacagtcccaaccagaacccctgggacttgaatccagagacgtcctccaggaacccctcaacgaagctgtgaatgaagaggtttcctctttaaacctgtctggtgggcccccagatatcctcacctcagggcctcctttttttgcaaactcctcccctcccccgagggcagacccagccagctgctaagctctgcagctccccagtggacagtgtcattgtgcccagagtgctgcaaggtgaggcctgctgtgctgcccgcacacctgagtgcaaaaccaagcactgtgggcatggtgtttccctctctggggtagagtacgccctctcgctgggcaaagaggaagtggcacccctcccctcaccacagatgctgagatggtagcatagaaatgatggccgggcgcggtggctcacgcctgtaatcccagcactttgggaggccgaggcgggcggatcatgaggtcaggagatcaagaccaccctggctaacacggtgaaaccccatctctactaaaaataaaaaaaaaaattagccgggtttggtggcgtatgcctgtaatcccagctactcgggaggctgaggcaggagaattgcttaaacctgggaggtggaggctgcagtgagccaagatcgtgccactgcactccagcctgagtgacagagcaagactccgtcaaaaaaaaaaaaaaaaaaaaagaaatgatatctggcccccccttaacactggagccccactcccttctcccatccggcccgagattagggaggattgactgtgtcagggatggcgggtggcctctctcgctgccagggcccttgtcagagcagccaggctggacagacggcctccctcctctccatctgaccggcacctgctgcttcggggcttaggccaccgctccctgtccccagaggagatagccccagatggactggaatgttgtggcatgagagcgcatgtgtgcgatggccccgctgtggtcccctctctgtccctccatctgtatgtgttctgtgtcccttgcatgtgtgcgtgttagagtgagcgcgtatgcatcaactcattgggctcttggctgctcacaaggcaaatttgacttggaaagactttcatctccttggaaccaagacttcctgagtccccctcaccctggccctgttccaccatggttatctgggtattggggaatggaaactttgggggagtgactttttaaagagacacttataatttctactactgcactactgtccattgtgggatgattaaacatggtatttaactgtgc

SEQ ID NO: 1128 - DNA, 855 bp, Homo sapiens
atgtgatatttaggctttcattccagtttgttttgtttttttgtttagataccaatcttttaaattcttgcattttagtaagaaagctatctttttatggatgttagcagtttattgacctaatatttgtaaatggtctgtttgggcaggtaaaattatgtaatgcagtgtttggaacaggagaatttttttttcctttttatttctttattttttcttttttactgtataatgtccctcaagtttatggcagtgtaccttgtgccactgaatttccaaagtgtaccaatttttttttttttactgtgcttcaaataaatagaaaaatagttataatattgatcttcaactttgccattcatgcttctatgcatattaggctacgtattccacattgaaagcatgagagtgtctaggcctttgaatggcatatgccatttctgggaaatgcatctggaggctaagtattgctttctacaaataattgccccctttgttttaaaaagaagaaatgcatattgaagtagtttgatgatttgtttggcatataggaagcacgctggtgctaagtattttttaaatggttatgtaagcaaagctgaactgtaaatcttcaggaatatgtattaagattgtggaatgggtgtaagacaattggtagggggtgaaagtgggtttgattaaatggatcttttatggccctatgatctatcctttacttgaaagcttttgaaaagtggaaaggtcattttgttgcatttccccatttcttgtttttaaaagaccaacaaatctcaagccctataaatggcttgtattgaacttttacatttgaattaaagatgttaaacatga

SEQ ID NO: 1129 - DNA, 128 bp, Homo sapiens
catcatgtcctccctcccacttgccagggaacttttttttgatgggctcctttatttttttctactcttttcaggcgcactcttgataaatggttaattcagaataaaggtgactatggatataattg

SEQ ID NO: 1130 - DNA, 1756 bp, Homo sapiens
gggtgtgcctccacaagtgtgcaagggtatatgtatatatttgcaggcatgtgtgaggcgcactagtaagtacataatttgctggcatgattgcaggtaggcatgagtgtgtatgtgctaacatgtaggctggtgtgtgtaggcatgtgtgaataagcatgtataaatgagcttaagtgtgctgtgtgcacatgtgtacacacagctaatttatctgcagacctatatgtgagcatgtaagagtgaacatatgtgtgtgtgtgtagtatgtaagaatgaggaactcggtatgtgcatgtgtagacaggtacccagcagtgtgtgtatatgcgcatgagtgaggatgtataggcagaagatgtgtgtgtctatgagtgagtttgagtgtgcaggcttgtattaggtgtatgtgaggaagcccttgtgtgtgcaggggtgcacatgtttggccacaggcatgggaggtgtatgttaggagcatgtgtgtttgtaggcagactcatgagcaggtgtgtgcaaatacatatccagctgcactgtgggtgtccacccacaccttgtgttcctcatggcctaccccagcctttcttctccactgggtcccactgttccctggagacagagggctagcatgctgtcatttatctgaaggttgtggctgacccattctcctgggatttcccaggccacctctcctttccctttccctcacttaacccagacttgctcagctgaggctattgtccctgatgttggctttacttgtaggaggtttagtggctgctctggcctgccatggaattttggctgcaattttggcagtgtgtggagaactggtatcaggaaagggaaccaggagtagtgatgaagatgatggtggggatggggacagaggacataggggactgtccctcttgaactctgcctttgggcacatgggagatggggacaggaaagatgataacagtggaaccctgtgaagaataggagaatgggaattctaaaataccagttcccaaacaaaccatctctccattggaaaaggagctgttgcaaaccgtgttcatttaagcttctgatgaaaagcaatgtatgtttataagcttgcaagtaacagacaagatgttccaaggccgatgaggaaaatatcgcttccctgtctctgcctctaccttgctgtgcctctctggctttagcagcattggatgttgaattggtttggttcatttctctgaagtcggactgtcaggaggagccagaggttggctttctgggatgtgaaggggacagtgtcagcctaagcctctggagatgcttaggatgctgaattttaaccccttctttcactgcatggcccttcaaacagggattggcaggctccgcgagttacagagtgggtgagtcttggagagaaccaacgactaaggtagcttagctctctgctttgttcttgggagccaagagaatgcaagatcctggtgggtgagcagtggtatgaagaggggacactggtgggtgaacagtggcatggaagtcactgatgcagcctctggccctcagtctccctatcggcaaagtggggggctcttcctatctctaaagagtttcatccctgacaggtggatgggtgaaagatccagagagtgggggtgaggggtgggccctgaagactttttgtctgtagctcttgcatattgagtgtataaacccggcttctggaccaacccaagatgaataaactggggcagaaaattac

SEQ ID NO: 1131 - DNA, 277 bp, Homo sapiens
caccatcaaaggtgccaaaatctacattgagactgctttgagaagtttctagcactgaaagttggaattgacactccagccaatgatccttccttctttcataatcaatgcaataagattgcagacagaaattccagtgatttctactgcacagctctggacatctcttttcctagtattattccctgaattggccactgatttcaattctgcagtatttacaacatcaacaactcatggaatacttgggtgaggtttccttttttttttttttttt

SEQ ID NO: 1132 - DNA, 2324 bp, Homo sapiens
cccgcggggggggtcctgctgccctggcctcctcccctttagtggtagagcgaccttttcaattacaaagaacctcctggaaaaaaaaacaaaagctgaacagaggcggccgtggccttggcccgaggagactaacttgctttctccctgcatgcaggctgagattgtttctggaaggggctggcctgagtttctttcccccaaatgtctgtgcagtgtcagggctgcaccccataggccctgaggcacacagcccagccccttgtgagtcctggcctctgctgggccctgaaggagctgagagggagctcaactccccaccccgccacgtggggagacagcccttcccactggctccctgatggcacctgctggaggaaaggggcacggcctccctcacagcccttggctggggctcctccagctccccctgggacctccagcatatgacagtggactaaggactgtggggttttcctccaaggggaagggagaagaggggaccatcgaggtggcgagtgtggacaccctgccaggactgcagcccccatggtgatgctgtggcatcagacatgtccgtggtgggcacagtgcctgttgccctgggaaagggcaacctccctttcactgctccagtggcagccatggggaaggcagtttgtgagggcttggggcacagacctggggcaggaggcagctcttcacgttcatccctgtctctcccgggctgcccccgccagctctggctgtttagcttgagggcagcacagaggcccctgggacacctacaggccagaaagatcaacctctgtgaagtgtctagaagtatctagtgcagatggtggcggaggcagaatcgaccatcagcaaacatgagcactcttccctttctccccttccacctgctgcgggctgggctggttttctcaatacaaaattgtaagaggatccttgtcaccccagccaggtatccccaaggcagagcacctctcgtttggccctctgaacaaggtgcacgcgagctgggggatgaagacggctcccacttccttttccttaataagaaccatatggtgggtgtatgtgtgtacaagaggggttcatctgtgggggcttcctctccttccaccctctggttccaatttcctgttctaagcaggactagggcccaggaggctaaggctgggagagaaagggtgccaacaggtcccttgggaatgagttggctctggacgtttctgccctgttccccgatcagagctcctctgcaggaaacaggcaggatgcccctcccaacccctcagtccctacgtcaagcggagtggataaggctgagatgagtgctgggagtggtggacattcctgctcgtgcaaagatggccactttccccgcagctgcagggcctcgcgctcggccctcgccaggccagccccactccttgtaccaagtgtgaactggggtcattcggtctgtgatctcgttgcactgctccaagtctggctgtgtccaggcggtccatgttgaaaatggaggatggctgctgacttctgactggctgagcagtgggttccttcaggttccttgccaaccctcctcccctgcccacaacttctccaaacaaagcaggctgtttgctcacttcttcaaaaggaggaatgataacccaaatctgcccaagtgacacttgagaaggttttggctggggttcctggtggatttcttactacctaacgcccaagaaaaccaactaaggactctcaaaccatacctggtgggggttcttcgctcaacctcttcttccctaggtcaaagccactatcatctgatgtgttagggatgggttctgattggcagaaattaatcagctcccaatgggagcccacggaactaagtagggtcccaagaaaaaaaacgggagctatttcacagagctgagcttctgccaaatttcattcctcaaacctttcaggaggggtggttggcgtttctaaaatgtttatgggatttgagttgcaggtgtccacttaactgactagctttgataaacaatgtcagattttaactatgaaaacgacattaccttgtgcatttttatattgattcctattttttttttaagattaaagtttaaatgttttccactagtcatttcacttctaacttggtataggaagcttagctctctacatacctatcatgtgccctgtatcacagaagattcaggaaaaatgcacttgggaatcaaagaaaatggaacttctttttgaaaagacaagcaaccatgttaactgtattgacacatcctcaataaaacctgttgtat

SEQ ID NO: 1133 - DNA, 629 bp, Homo sapiens
ccatccctacaactcgaggatagccatcaggagcactgttggaatcagcaggcctctgtgctccctctgccctccagaactcagtgactcttgaacatggatgttatatattcttataacctgtttccattctccattcaaataaagagcagactgcgatatagtccatttaccccatgtgtgcacattcaggagcgacagtctctgcccccattcccttgagaggggctggatgtaatcacctttggttggactagaaagagctcaaaccattttacattcctgtttgaatttttccaaagcaaaactcactttgaccccattaagaggcaagcctggcacatctatccctgggcctttagaaagccatttgcctcaaatggctatagggttgtggggtggagggaggaagggctgggagggagtggggaggaattgctagctgtagtgtgacacattgtagtgtttgccaggaaaggagccagtcatgccggaaacactgacttctgggaagccacccaggtctcattcctccctgctgttggaggcaacatctcctctttttacagagggtacatccttttttcttacaaattcttcaataaagacacattcttgagtgaaatccc

SEQ ID NO: 1134 - DNA, 264 bp, Homo sapiens
tgggccccggctcccgctgcaaggcgctcggggtaccggacctgcacatgagctcagagctaccccacaccttcggactgcctcggcccccacagctcccaggtgctactgggcgtggaccgccaccccctgagaggctcccttccccagtcctgccagaagaccccgggggcggggagggggcagcatgcagggtccccactccctctctggggtcgatgaagaggtgaagtgaccaaatgaaagaaagctgcattctcagtg

SEQ ID NO: 1135 - DNA, 2131 bp, Homo sapiens
cagcctcagccggggccaccagcactgctgccacttcttccagccccagccaaaggcgtggctgtcagggctgggccctgtagtgctggactctcccgggccacaatagggacagggcagggacagggacagcccaggtcacacgtggggtcagcagaggtaccacgaagctaccttttgggatgattgctcgattgtttggtttttaaatctgagaagcctagataactaatctgcttttaatcacgatgttttaatctacctctgtctctttaaccatgctgtctctggactgagcaagagggaggagggagcctgctcaccccactccagggccttccccagcggccaccaactgacctggggcgctgctccccacagtccaaataagctgaaagtgcagctcgctgcaggccccagagcgagcttcccctcctccctgctctcccaggcccctgccacagcctctttccgtccctctctttctgatccaggcccctcagtccaagctttggaaaaccttcacctcatcttaaaccgaactcaaatatatttatttttttaccataccaacttctctcccatctctaggtggctcagtccatggccactccctgcccccagcctggctggacagcaaggaatccacagcccacacgtgagctccctcctcacccccaggcagggaagcccctcctgccagtccctgtcccctttcagcccaccagtccctctctgctgccggtgatgggaggcctttctagacctggctctttctctcccgtctcagtggcttctctgaggtgctgtacacgcgcgttaacctgttcccttctctatccttccccgtggtactgagctcacgtggactcccagtgcgaaggggcccatgggttgggctgcaggcctggccgtgagcgggggctgcctgcacgctcccctagcctactcttgtgtttaggggatggtgggaacatatcccagtgcccttgcctcataatagatgtggtgactctcccggtagaccctagcaagggtcctccatggtggtgagggactcaggagaattgtagggattgggggaccctgcctgcctggcttgagaacagccctgctgcccttttgagccgagattttgaagtggatgcccgtcttgccagaaatgctgttctcaccagaatgccccctccccttgcccttactggacttggccctgcctgatgccaagcaaagacccttccccagaggcctaccccccatatgtcctcagagaggctgagtgtcccctccaggcagtcatgggccctgaggcccctcctgcctggccctgctccccagtggggaggtgactgtgtttcccagagtgtgagccgctctcctccccctaaaaagctgactcactgtgagtgaccttgggcaagttcccaaacctccttgtgcctcagtttccccatctggaaaaaatggggccacctcttgccagcagtagcagggctgcccacgcccctttctccccatgccccatccagcacttgggcgactcatgcctctgcctcagtgggcctgtgggagcctactggagcccagcacttactccccctgagcagcgagcctgcgtctgtctcagctgtccagcgctgagggccagggtcttgtgctgtggggctgggggatgccctcttttctatatttatttcatagaaagtctcctgcgggagcggaaatgcagtccggcctagggctcccagcccttgactgtcctcctgtgagggcctgaagctgggccagggcccgtcgcagcggagccccctctcagcagcccaccgggtccctccaggctgctgcccgtgcgtggtctttctcctccttttcaaagcaatagccgccgggtctgcaaagccctgtcagacagactgggcccttccaaggtcaagccatgtgtctgatgacattcctggtgaagcaaaggagaggaggatgggtcagccctcactgggtgtcacacactgagagaagtcctattgtaaagaaacggaaaaagtcacaaaaaagtttgtataaagacatatttttgtactacatggggactcttcctgcatgtcagcaataaaacttcctgatctggaaccac

SEQ ID NO: 1136 - DNA, 328 bp, Homo sapiens
ggccctcagcaagccctggccccaactcggagtcctccagtgatctccggagctagttccctgccctcacaccctgtctggtacccgagaagaaagcagggccaggccagaagctggtgtccaacagacaccacctgtcaaagctgcctttcacagggttccacctcccagactcactctgggacccagaatcctatatgtggccttggggtaggtgacaatccccctttttgatgatctgaatctctgacttattgattatggaacctgtcaagtagttttcaactctcccagtgaggataattaaacatgctcagcctgagccacc

SEQ ID NO: 1137 - DNA, 232 bp, Homo sapiens
ctgttctgaccaggcgtcctctgcccccagggagaggctgctggatggtgacccctggggaatgccccatggcccagaatgatgctgctagttttctactgagtgaagccattacgtctatttcttatttatgttgtaaggaactgtgtgagtctcccttgaggagcactcactcttgaaggcacacacatacacatattttcagtgaaatatattctgacttttaaacttg

SEQ ID NO: 1138 - DNA, 18 bp, Homo sapiens
aattttaaaaaggggaag

SEQ ID NO: 1139 - DNA, 16 bp, Homo sapiens
attctgttcaatcatt

SEQ ID NO: 1140 - DNA, 420 bp, Homo sapiens
ccccagccccaagccaggaggacgactgtgtctttgggccactgctcaacttccccctcctgcaggggatccgggtccatgggatggaggcgctggggagcttctagggcttcctggggttcccttcttgggcctgcctcttaaaggcctgagctagctggagaagaggggagggtccataagcccatgactaaaaactaccccagcccaggctctcaccatctccagtcaccagcatctccctctcctcccaatctccataggctgggcctcccaggcgatctgcatactttaaggaccagatcatgctccatccagccccacccaatggccttttgtgcttgtttcctataacttcagtattgtaaactagtttttggtttgcagtttttgttgttgtttatagacactcttgggtgt

SEQ ID NO: 1141 - DNA, 838 bp, Homo sapiens
gcacagctggggtggggacctcaggcctgggggctgggcagaggaaagcaaaggagattggaaggaacgtcccctgtccccgcactgggcttggggaccagagctgccacctgcctgttgggccaggagcctcctgcccttacctgccaggaagccagcaggctctcaggccagctgcttgggcttcatcctcctcagatcttctgtgggtttctaaagctgccagccgagatagccaaggccaaaggaagcacatgcctctctcaggccaaactcacctgcccctcaactctcctccagagtcagaagtttctgccgcagccctgcagagggcacagaaaatggaagacagctcttatattgccatttcttccacaagagcccaggcctcctacagcttgaccgtgaggccagagacacaagccttcggcgccttaaggatgttctagcatggctgccaatgggagctcatggtgagggatacccatcccatatgcctgggcagaaggaagacttcatccctctggggctgttcacgtggtcctaatcttctgaacttggcgctgcccctggcagcccctgttctggcagagttgaagacagagctacacaggggaaaagaggagtttggggtatgggagagaagagaatgcacaaacagaggccgccattttggattcttatggacaatgacccagtggttcctaatcctctaggaggtctctaagaatataagtgggggagtggccacagaaaattcttctccactttctagccagaggagagaggaccccctgaatttctcacaaaggatgcccaaagatgcagccggtatttg

SEQ ID NO: 1142 - DNA, 1524 bp, Homo sapiens
aagacacattagtgcagaagcttccaggctgtagagccctgcttcccttctctgacctcacaaagataaacatccttcacctgagttcgtggccatccacctctgctctcccagacccagtgcctgtgactttgagtagtttgttctaaatgtggtgacaaacaagtcatttctgtaagacattgggtcttactttatgtcatttttagtaacagaactgcaggaagatgaagacaatgttgtaatcccagcaagttgctaactgtgcgtttctcccttcttagaatgaatgtctcccccaaaactggctggcaccagcttcatctgtgatacccttcaagaaatgttctctggttttgttttatgctgaaagtagaacacaagtcacatttcagatggaggctgtaaatatctggcattttcttatattgttttatgttttcttgtttttctcttgttgtttttatcttattttctttggggtttttttgtaatgcctttgtacagctcatactttcctgctgacatatctgatcatctctttcatgcagttgccaatattcataactgaaaataatctggtttatcataagtaaaatgggaaacttgcctctgttttttgcaaggggaggtaaagagtgtttagtaattacctatcttaaatctttctgagttggtagtagattcatgttcaaggaacaggaaaaatggaaaaacataagtttaaatcagttctttttaaataactttttattcttttgtataaataaaatttcacaggcttcaaattctcatgctttacttttaaacccgagattgttttttcacttatttattcatatcatgccttatggaaatttctttttctgtattttctctctttgctggtattcacctgattaaatattgctctaaaaatcaccatggcatatggaaagtctcaaaattataccaaaagtgataacttatgtcgttcttaagtggagtgaaaggatagcatcagtgagagccagtgttgcccaccaggtctccctttcttggagggcttgttggggctgaggaatctgctagtaatcgttacctgcctctagtgctgtggtgaacttgcgacagggtctggctgcacattggaatcacctgagaagctttaaaatactcatgcctggatcccatccctagagactggggtacagcctagttattgggaatttctttaaaagagttcctgggattctgataagaagccaggttgagaaccactacattagaagactgaatggtttaatttacatcctatgttatgattggtctaagggataagatttggggtctaacctttcctttcactctagttagtcatagtccttgacttatgcctatatctttgtaagaaatagtatgtttcatttgtgatagtattggtagggctgaatatggatggcatctactgtaaaacaagtctaccttgtcagatgtgcaaaagctttcactcttgttctcaaataaacttttgtgggttttttt

SEQ ID NO: 1143 - DNA, 1204 bp, Homo sapiens
caaactaagaacccaaactattgatacacggtttccttcttggaagtctttgattgactcagagagcactatggtggtgggtccagcactatggtgctctctgtaatgcctcttactgccttaagtctttcctctgttgctgaccagattgtgttaccatttgaatacactgactaatgtttgttaaactttttctgtggcaccttggccacatgcctgcaggcatttgttttcagaacagtctcaccaattacaacacaccgtgttttagtagaagtgttgtggttttagttggtgctttcagaactgctgcctaggaaactataaacccttggttaaggggaaatcatggcttgttctctttgtacagttactttatttatataggtgttaagctttgtggaccaggtgtttttcttttggggcgaacccctgagcagagaatcttactaggctttggttatcaccaaaacaacctccagtatataccaaagctttgacttgtttgagctcttgagcttagaagttgattttgcacttatttttttggggggtgggaatgtactgcagtcagtaaacattattgactgtttaacttaaacagatgctttatggcacctgctcaagcccgtgactgtacagaaggatcctggttgctaccagtgggtgctgattcagcatcacaagtgactgaaattggctgtggatctgttctttgtgaaagaattcctgatttctccatggagcatgtacacaacaattttgatcatattaactgtacttcagttttgcatttttattcaaatgttatctctttttttctttgagaaataaactgtcactgatgtgacagcgttctttctttattctaataacatgtatagatctaaagcaggttgtgttgtttacatgtttctacacatttcatcctttaaaaagttgttgagagaggttgtatttaccttcccaaggttggaaagcaggggaatttcccagtgtcctagttttccaccagaggaatatgtgtaagtagcaaagtatttgctgcttacatatagtgtgtatgtatgtatatatgtaaattgtgtgttaaagagctgatactgattttcatatgacaatgttaggcaaaggcctccctgcatttgaagagcaggttttcatttatatgtatttttgggataaaaaaataaaatttgtaaat

SEQ ID NO: 1144 - DNA, 38 bp, Homo sapiens
tgtttaaaaggtttttattaaattatacaaaaacaggc

SEQ ID NO: 1145 - DNA, 1545 bp, Homo sapiens
ggaagctatgcgtatctggagaccacgggtaccacagttgaagactgacattctgaaccctgatgtttctaaagaaacgtcagtatttcagtctgacatatttgaaacatcagtgccttgaaccttaggactgggtcttggggaggattagcgcctagatgtctgattttggagctgcagcatgccaggccgtggctgagagtatgtgagccatgccttgcccttttctgaggctcagggaagtggatggagctagagagacaacaggaaagacggtgctgaagaacatagtgtctttcctctattgtggacctaaagaggtggggaagcaaggacaagaggcaaagagccacactgcccttggcatcatccaaagcattgtctggttgacaccaggtcctggttttgtgtcttttgtcaatacctgaatccttgacaaaagaaaaagtggttttgatgatttaaagaaataagggtgattttgacagaaaatatattttaaaaattttgaccaattgcaatagttatcctcaagccaatttccagaacctgccaccagggggaggtggtgcagcatgaatcattctgaatgctttgtctttgaagtgttcccctattgctgttaccatctcagaggaagtaactgggcatggtgagactcctaaaatgacaggagtttttttggccaaagctggcatctgacttgccacattcctctgagtctggagtagccgcaggggtgggagaatgccagcccagagtcagtccatcggggttacatttccaaggtctgctgccttcatctatgtaatggccgtgttactttcagatctttcagcttcccagagtgttgtgggaatcttggtcattgaatgtaaagggacttagtaaagggtatagatatttttcaaaaatgaaaataactttttttcttataagtgataagcttttataaagatcataggaaaactagaaaaaatgtaaaatgtagaaaattgtaaaacaaacttcattagagatattttgatagataccttttcagtgtctatttacaaattttttcttttaatatagatagggtctcactatattgcccagctcactcctgagctcaagggatcctcccaccatagcctcccaaaatattggaaatacaggcatgagccactgctcctgaccaattcacaaatttttttaaagaacaaacgtgctatcatcgatacatactgttaggttgtctttttttaaaaaacctaatgtaatttgttcatctttttatatctgtaaatatagctcaacacagttatattctttttgtgaatgtattatatctacaatttaccttttttcttagattttacatgcattttcccaaatctttgtgtttgcctatctgtaaaggtaatacattctgattacaaaaaatgaaaatgttacatagaaatgtaccgttatccatctaccagataactattattaataatgtgtatttatttttccaggaattaaaaaacatctatcatataagtattgcaaataaaactt

SEQ ID NO: 1146 - DNA, 1094 bp, Homo sapiens
agcgtaggtggcaattgagagagagtgtgccctagaggaaagaggcgggtgtggggtcggggggcggtggagaagccttggactctggagcccaaggagagccctgaagtcttgtggagtttccagtgagtccagtcagggccaatgagtgaacttactagatgaaattgactggctaaggaggcattagggatctatatcttaggcaccttgcacaggccttctcgtttatttattttcatggcaataaaggaagtcattgtttttttttttttttaaaataaggagtctctcttgctctgttgcccaggctggagtgcactggcttgatcttggctaactgcaacttccacctcctgggttcaagcaattctcctgcctcagcctcctgagtagctgggattataggcgtgcaccaccatgcccagctaatttttgtatttttagtagagacggggtttcaccatgttggccaggctggtctcaaactcctgacctcaagtgatccacctacctaggccttccagagtgctgggattataggcgtgagccaccgtgcctggcctaaaggaagtcattcttatctctatttcacagatgaagaaacagagcctcagagagattagtacctcacttgcaaagttaggaaatggggagctaggatttgaattcaggcttgcccaactcacattctatgacatcatgaggtctcctcagtgcataaggaagaactctacagcagcccaatcttcaggctagtgggattggttgcattacagagaggaatctcccagtcacggaccaaatacttgcaagttagaggctggcaggggggatttttatgctggagagagggattgggaagttgcactagatgattacgaagatcacatcccactctctgaactacaatcactgtgctccctgggggagatccttcatgttgagggttttgctgggttctcaggctagtgggggcattaggaacagacctctcattctctctcttgcctgtggctttggatacagagggtgatgatggggttattaatgtgtgtacttaatatagaaagatcaaggtatgctttttctaa

SEQ ID NO: 1147 - DNA, 983 bp, Homo sapiens
aactctgggaagcaggaaggcccaagacctggtgctggatactatgtgtctgtccactgacgactgtcaaggcctcatttgcagaggccaccggagctagggcactagcctgacttttaaggcagtgtgtctttctgagcactgtagaccaagcccttggagctgctggtttagccttgcacctggggaaaggatgtatttatttgtattttcatatatcagccaaaagctgaatggaaaagttaagaacattcctaggtggccttattctaataagtttcttctgtctgttttgtttttcaattgaaaagtaattaaataacagatttagaatctagtgagagcctcctctctggtgggtggtggcatttaaggttcaaaccagccagaagtgctggtgctgtttaaaaagtctcaggtggctgcgtgtggtggctcatgcctgtaatcccaacattctgggaggcccaggcgggagaactgcttgagcccaggagttcagaatcagcctgggcaacatagcaatactccgtctcataaaaattaataaataaaaagtctcaggtgaccaaaggctcctgaagctagaaccaggtttggataaagattgaagagccacaggccactcttccctctgagccattgggcctagtggtgtcatgtattgtaattgctcgcagggagagcagtctttttggtgtaatagtgggatgtctgcttagttggcaggggttcagtccaaatggaagaatattgggaaataaacctccactatcctttatagccagggacttttttcttatttattcataaaataaattatagttaattatacccataacacctttatttaaatccagtgttctccgcagccttttgtctatttatatgtgtaccaagtgttaaacataattattattgggcatttgaactttgtttttctttaaagaaatgctgctattaaacatatttgtaaatggttt

SEQ ID NO: 1148 - DNA, 5568 bp, Homo sapiens
agggcccatgtgtgctcacctctgggaaaagcgggtgagcaggaggcatgaggtacaatgcctgccatcatgggtcagaaatttgaaggatgaagaaatctactgtttgaaatcctcacctttcagacgtattttctttattcacatcccaggagcatccattttaaggaactattctttggaaaaaaacaaaaaacaaaaaaaacaacaaaaaaagctaagttataagtgaactgtttggctgcactgtatgtcacttttgcttgttgtcatgtgaacttggaaactaaggttactcgtgtgcataaaaattctaaatgaaagggtgtggtttccatcaatctgatgctgcccatcgcttgcactggggtctttgtggatcgggcaggagttttcagtgtgttgggtgttgctccttcctatgtgtcttttgaatctgaggctgacatttgcttggaaggccagacccttgctccatcagagagggcagtggcaaaggccagtgaggcagctgtgagttggacagggttcaggtgagatggtgttgtcatttgtgcttagtgttggtggtgctcagggtggataacacgggtcgttctgcagcccgcttcagcacaaataggcagcttaaggcctggctcacaggctgtggggttgatctggctctgcagaggccctaggcagcttgttgactgctgtctgttgatgacgtgtgtgcaaagcaggctctagcaacatgatcactgtccttgccttcctggttctttctctcggttggttgccagggcttgcagatcgcagtgaattttccttggggaacatcgctgttttgtcctagagtgaacttgtggcttatggccagtgctgtttggtggtctgccttctttttaatggtattttcttcctcagagcagaagggctgcattttgcttatcagaagaaggtgcagatttaagggaattcatatgaggtggcatgtaattggcaggccaggtgtcctggttccaggttccagccaggctttgggttgccccctccatctctgcccccctctggattttgcatacagcctcatacagtgcaaacaaggatgtgacttgctcagcttagtcatgtgatttatttaaaaaaaaaaaaaaaagaaacacaaaacgatgatcttctactcagggtatagcaaaacaaaaaaattccctttccaccaaaaagcctgaaatgttgcaataagttatctcatttggaatgtttcattaagttgtgttataggaaaaaattgtgtgtgtgtgttatagaattatatccatatgtctgcctttggctccaagtcattgcctcttaaaataaaagatacaatccatactagcatgaaaagtttccctcaacaggctatattaacatagtcatgagtgctgaccaaactcaccgagctcagaggccaggcatggcctgaggtgcagaataggcctctgcctcccaagagccctttccttgccctgagcaaggagtggtgttccacaaacaaggctgctcttctaagccaacagtgtcaggcaggaagcagccataattttgccttgcattttcattccctaatgtaaagggatctgcattggtcactctcctgttctctgagccattgctcagggccagccaagatattattgagaacagataatttaccttggagccagaggccctccctgcctttagcaaggatgttcagggacagacaaagagggcagtggtggtgaatgttgttactgccatgaggagaaatggcagtaagaaatcttaactacaagcagccaatttctcattccaggaccctagccagaataattgacttctttttttttttgagacagagttttgcttttgttgccctggctggagtgcagtggcgcaatcttggctcaccgcaacctccacttcccaggttcaagcaattctgcctcagcctcccgagtagctgggattacaggcatgcgccaccacgcctggctaattttgtatttttagtagagacggggtttctccatgttggtcaggctggtctcgaactcccaacgtcaggtgatcctcccgcctcagtctcccaaagtgctgggattacaggtgtgagccaccatgcctggtctagggaattgacttctttttgaccttctgcactcccttccccaaaaggattgtggcttctgttgaccattgacctcagcagaagttgataaggcaggaggtttccagtcctcctggaaaaccaactgctgagcatgagttgtccttggctgtctctgggcctcgcacccatgggaagttttgaggtagggcccttgctgtttacaacttctgagagagtagtgatgggaccccaaagtaagcttgtatcagagggcagtaatgaccttcccatatccccatcctgtggtcacctgggatttgggttccctggggcggaagtgggaaataggagcccagggaaggacatctgaagcacccacagtttaaatagcgactcttcttggttagccagggctgtgctcatgttgggccctacccaggtcagtggccttttcactctcaaagatcgggggtgacgaagcagcatcttaaacagtgtttaggctgacagatttttccagttgaagaagctgaagtatctgccttttgagggtgactctagattacaagagagactatcagatccaatcagcttttgaaaaatcaggaatgtgcttaaaatgccagtgagtggttgtgaagatcaggtttatttcccaggataggcagtctttctttccctccttttccagttctcttttcctacctgtccttccataagcctggtctctagtgccgaggaccttggagaagagagggcccctagctaagctggagccagaaagaaccttcatggtgagtgtggtttcccaaacttgggaaatgaacctagggtgaggttagggaggatttgtagaattctagcaggtaaaaatcaagcctttttcccctcccatagtaaacttaaccattttcaccctgtacgttatcttctagctcctactaacatctccaattagacaaccgcttcaaagggtgcttagcaccagggattggggttcatggacttaggaggtggtaaggaaactggctggcaccaccaaactgccttagtgaacttggcccttcccaggcaggtaggttgggcattgagggaaggtggcccagtctttgctggcagggtctggccagtctcatgggggcaccaccagtttggtgacagaagtggtgtcatttattgaattccacctccgtttagaaggagatcatggtacaaagcccaggaggggccttaagatgtgaagatctctctgagtaaaaggcaaggggcttctcttcttcacctctgggatagttggtagatcggagagttttattttcagggtcaaggctgtggactgatggggatattggagggtgggtgggttttcctgagagactttgtataatgctgaatgtgtccagagggacaagtttgcagaacctcatattggtatattaaagaaataataaaataaaaaagcactttaggttattttatctttaacccgattgctgcaatttcttttgtgtgtatatatacatatatatactttccacaaagttttattttttgctcagaataaaaagttaaattgaggtgtgaaaagaaaagcacttaccttggtgcaatatgtgtagcttgatggtcgttgtcccatgtggccctggcctggcagcgtttttccgctcaatcagccctgtgctgtgagactgtccatagggaaacactattatgcattctcagcaaccgctcaatctatgcaagccttccctgtgtgccccagggcgccccctcaggctctctgaagaactgctgtgggtcctgttttctgctgactgttgaggccctttttcatcacttcttggtctctcgccatcttttccctcttcaccattacaaaatgatgcctgaaaggaaggaacagattgttcctaggtagaaacctggcaccttctagacttttatatttgtaatcacatccattgtccttaaagacttttccagagtgattgaaaccattgatttgtggaactgcaacaatatttctcaagagtttacaattgtcttacaccaccaatcagaaatatgtttggggaggcatgggtggcagggggcaacatgagccatttccatactgctccccatactacctgtgttggttccttaagcaaaaaggcctccagccttcattaaatcctataaacaaacattacatcccatgaatcattatcaactttcttcctttactccacctcccccattttatcttcaattctcaggctatagaatagacaagttttagaatatacttcagccaaagcagaaggattttcatagatccaatatgcaaatagttctgctgtgacatagatcagaaattgtctgttccttaatatttgggggtggaggcaacaaaactgaagcatatttctgattggttagccattttggcctgtttcctcttgcatgttttttagggagagagggaaacagtcctgtatttcttctgatgccctttggggaagccgacgaccactgggcatttctcactgttactcctgttcaagagagggcttctcagtctgcactgaaaaatgcaaattaaactggatctttatgtcaatgtgtacatagtacaagcttttttactggaattgaggtttaaaaccacacactgcccttttggtggtgtgcctgttgggccaaaaattgggtgataatgtagtgtcactttctcagctcaatgcagtttctactttttcttatgggaaaatttttcataaaacctttttgcaccaaaacccaggggtgttttttgcaatatccttgttatcctcgtagtgtgccaagtcagaggctttctcttgcccttttcctgctgtgttctcaggcctcccaagggctatttgactcaacagtctacatccttcgttgtgttttggagaatgtgggggtgggggtcagagttcaaggtgtctgttcccttttcctgtgaactctttctagtccctatttggggagggtggctggaaacagatttttgctgaatttctggctcagatcttctagccaggaaaggcaagagcccccaagagcccttttttttgacatacactaatcattggccggggtcttggtgacaacttttaaaatcccaaatagttttatttggattatgtaaaagtaagtgtgaaacatgggaacaacggacttccactgagcgatgtgaaaacgttacaggttcagtacttccaaaggaagaaacctccaaacccaaaaaagaataaatatgaatttgtatttttgaagaatgtgaaataatggtgtttgcttaattgctcattttgtataaacttaatattgtactttaaaatatctgctaaaaagtgaaaatttaactttttggaattgaaaaagcaatattaaatactaatgaaatcctaattaaatgcttatttaaatctggt

SEQ ID NO: 1149 - DNA, 1618 bp, Homo sapiens
gcctctctctcctcctattttacttgaggctgccaattaccagccccacctgtttcagctcaagagatgccttaagataattatgtgaggccacttggtagcaagaatggcagctatttcctgagcctagtaccccaattaagcccaccattggttagcacactcagcgctgtgagtcgtgaagacacgggagaaaatccaccataataaaactgacattcaattttcaactttagttatttaacacagatttttttattttttatttttttttattttgagacggagttttgctctgtcgcgcagggtggagtgcggtggcacgatctcggctcactgcaacctctgcctcctgggtgcaagcaattatcctgcctcagcctcccgagtagctgggactgcaggcacacactgccacgcccagctaattttttgcattttagtagagacggggtttcaccgtgttgcccaggctgttctaaaactcctgaactcaggtaatctgcctgcctcggcctccccaagtgctaggattacagatgtgagccaccacgcccggccttttttttttttttttcttttttgagatggagtttcactcttgttgcccaggctggagtgcgttggcgtggtcttggctcactgcaacctctgcctccttggttcaagcaattctcctgcctcagcctctcgagtagctgggattataggcgtccgccaccatgcctggctaatttttttgtgtgtttttagtatagacacggtttcaccatgttggccaggctggtctcgaatgcctggcctcaggtgatccacctgccttggcctcccaaagtgctgggattacaggcatgaaccaccacgcctggcctaaaatgtttttaaataactgtacttgtactcactcaccctacctccagggcatagtcagtctgggctgagatccccatgatcagatatttgatggaaagtcctgaaaggccaatgagttggatggcaagaatgcaggcagaagctgctggataaaataggctacagccacctcagatgctttcagtgctctgtctgaggatgtgtatatgcatatgcaaactcgacccccgttcctgcccagataatggctcaataactctgaggctggttgctcagcctctgagggcaatacaggcatttaaaaaattaaaatgaccaggcacagtggctcacgcctgtaatctcggcactttgggagactgaggtgggagcatcacttgagaccaggagtttgggaccaggctgggcaacacagggagaccccctctctacaaaaacatttttaaaaaattagctgggtgtggtgatgcatgcctgtggtcccagttacttgggaggctgacgtgggtggctcacttgagcacaggagtttgaggctgcagtgacctatgaccacatcactgtacgccagcccgggtgagagagggagaccccgtctctaaaaataaaatgtaaaatcactgaaaaaatgagtgttcggtgaaacaagtgggattttctgggccagcaagtcttccaaactgtatatgatgcatcctgtctccatgtgtaatatattttaatgataaatgtatttttaacagtg

SEQ ID NO: 1150 - DNA, 1204 bp, Homo sapiens
tgttcagggatgtagctcagcttttgggctagcccaggcttccctaagatctgctttttctatttctcccaaccaaatcctcttaaagaccctttgctatgtagtctcatggtctagcatgcatcttgtagaaacaaggcatgctggcagattgcagggttgagatgtgttttatctgttttatattttaaaagattctgccagaaaataaaaccagaccttgttctaaagcccagggttatggaccaactcagtgcttcaggtcttaacgcctccatacctcttcctcaccaactttactagtagctgagatttaatgggcacctattatgctacatatcatgttaggtaaatctgacctgacctctttccccaccctcctttgttgctgcttccctgaatgagtattaccccaggatgaggtctgccatcagcttagttagccattgatgcaaatactagggaaagactaggaggatgagccagggttgctactaaggactaagtgtcgcaccaaggtttgccttttgtatttgcataaagaaaggagttggagctgggtgcagtggcttgtgcctgtagtcccagctacttgggaggctgaggcaggagggttgcttgagactagcctaggtaacatagtgagaccctgtctcattaaaaaaaaaaaaaaggcatggtggcacgcactgtagtcccagctactcaggagactgaggctagaagatcctttgaacctaggagtttgagaccagcctgggcgatatagtgaggccccatctcaaaaaaaaaaaaaggggggggggggggagttgggctgtgttggaatgggcctgcagcccaacaaacaagggaactaggaccgacagtgacttcaccagcttgctaggtcagaatgagagactggtgggtctgtctacctgtttcttctacaagatccctatttgactgtaaaagtagctaatactcacatgttctccaatcccaggtagccatggtagagttgggtagagttgagcagctgccccaggatccaaatgtggtgtctgaaatggaaagaactaaggcaaccaggaaggcactgatctgccttataagcacagtcatctgaaagtcaggcctgctgcaggacaggatcccccagagaccccatttgcctctcaacactcagaccttcaactgttttttaataaatctacttttt

SEQ ID NO: 1151 - DNA, 633 bp, Homo sapiens
gccagggctcctggacccaggctttcccataccacgggcccaggactgtggctccttttctaaaccacctctgggactcagctccccccgccaaaaaaaatgggtctccttctgggctccaggattgtctccccactccagcatccccaaactggtactccctgacccagggccccaaacctgggctcttacagagcctccatgagtcaagccccctccccacacctggactccagaattcaccctctcccctgcagtctgggttcccagactgagtcctctccccaaatcagggctctagacccgagccctccaaacctggactctgggacttaggcccccttaaatctagacttctctttataggtttcaggtctcctatgggtgcctgggaagtccttgaaagtggactgttctcaggcttgacctgccccaccccatccccgcggttgaggctgtgggggcagcagatcaggagcccactgataaggggccctagggtacagggtgctgcccagcaggtcgccaccgagtgtcttctcattttatttcagctccattttgcccatagatgggcagaggggtgagattggctcatcccccttccagattctgcaataaagcggtgtgagg

SEQ ID NO: 1152 - DNA, 1537 bp, Homo sapiens
ccccgcgggccgggcccccgccggcgcgctgcagggcgcgggcgcgcagcccgcccgcgcggcctggactctttttgttcggttgctttggattttacaaaaaaaaaaaaaagcccagaaactttcgaacaaaaccaaacacccggacgaccctctccggtgagcggcgaagacagcccggtaggctgcgtcgcccgagccccgggagagaggagcgaagatccggaactcgccaactcaccccgggcatcctgcccgccgcctgctctctgcccccatcccctcgacgacccccgcccctgcccccccgggctgttcggggccggatcccggcagcggcctccccaaagcgacaggtaacgcagtgcggggttagggattccccgggagagaggacgaagcgaggagagttctccatcccctctccccgcgtggactcctgagcctgcgggtccagggtggggggctgtcactttattcgctacacgcctcttctctcctataaggatgcgccccaccccgctttcccctttctccgggcttggttttttacggtttttatttattcgtggagcctctcggctcctggggtccttctaactccgcccgcgcccttaatttaaatcgcagtatactgtatttatcggggccccggaggggaggtcgcgagagccgcgtctgtgtataaaagcaggaaatagccaaagctttaatctagcctaatttatttttccccttatatttccctaccctaccctccccccaaaaaaaagcaaaaaaaaaaaaaaaaaactaacaaaaaaaattcgagtgttcatttttcgtttcgtttcatccgagccccggcttggttcccggccacgccggaggggtctgcgctcccacacacccagacgggaaggggcttctgccctgctgcagaccgaccgccgcatagcgcggcccctgctccccgcggggccctgccctcctggccacaccaaacgaaacttggaaaagttagagagattgttttttaaccagctgtagaaataagccgttccctgagaaccctccgcctgattccctgcagcttccctctgctccctttccagcccgccgggatgcgggatgccaggggaggccgggagagaaattccccaagtttggggtgaggtgggaaccatgtaaatatgtgagatatgtacacactggcggggagaagaaacattttgtgcttggtttttatttttggttttccgggttacccttccttcctaccctaaaggattttgtacactgactaatccgaaaaagatattttaatatgatttccgaatttctgacccatctctatttattttctggatgtgtttggagcttcccccttctccgtttcttcttctgtttgttaaggtttgaatttaaattttgttattttatttttattattttttgaaacaatgtttcggtgcattctctttgtatctttattgaaaaaaaaataatgtagactgggaagttccctttatatttatgttatagtaaatattttatt

SEQ ID NO: 1153 - DNA, 206 bp, Homo sapiens
tctgaatcccagcgtcggggctctgtgccagcttactcttcactccagggtcggatgccacgtgctacaggacatgggagctgctgcttgtgggaatctggtgcctgttccactagagacaaggggtagagtttctcatttggatgaaaaccccttcaactggtggtgtacaactgaagctactatatcttttttgaaaatggcaa

SEQ ID NO: 1154 - DNA, 1706 bp, Homo sapiens
gattcttctcagtttgaaagacaatgaaaaatggttttgtatgacttgaatagtttgtatagtatataatcttttctgaacagatgctatagaactcttttaatatgtttaattcacctatcacactctgttaaaaacacatagaatcatcaataaaaactcaatataactttctttgggtcttaaagcaggagaatccaaagtaaatcctgaacaaaacctaaacacagccatctaactcattaccttaaaagacattctgtttattagtctgattaggaatgatggcactggttgtattttagccaagacagtttagcatggagctattccttggtgcagttcaggatatgaacacaggtacagtcattctttgaaggtgacactgttctgtatattccctataggcagctggagagatctgtgtgacacaagatgcttttgtacgggttcccatgaatcttctgctcttgtttgtgtgacatggaacaaataacttctttgccaccactttgccttagataactgtgtgtgtgtgtgccagtttgaactctgacaccacattttccttctatgcaatcatgcctgtctgataatcttgcattgctttcctctgagctttagtgggtcctagttgcacactggcctttctgtgctgtttttcaatttgcctaataatagcagttaccctgattgtaatttatgtaactttaaacaggatcacactgtaccccctgcctgccttatttgcttactgagcacaggacagaggcaatatacaactctgggttcacacacaagctgagatgagaagaggaatgagccatatattggggaaaatcatagtttgtaggtataattatatagtgcttttctccctcaaagtatttttctagccttgaattcattttatcttcattatccctgtgaagtaggtgggacaagtataaggggaagaggggtgctgaatttttaggccaaagactgatattaatacaaatcactcactaactgtagagccttgggcattatcagtgaactactctgagatttactgtcttcatctgtttaatgagtagaatgtccgtgatgcctacctcacagggttgttgtgagggtcaaatgagaatgtatgtgaaagatttgtaaatggtaaagcactatattcttgtttgttagtcctttttcctttctttgggtagacctacagtcagatgttttgttttatggatcacttattttccttactggtagactgtcgttttatagacatattcctatttcatatattctctccctgttgttagagaacctatctttgtttttggtcaaaacacacatagaaaacaaaatgatccaatgaaaactggtttaactagcaaaagccttggcacctgttggagactatgaccaagccaataaaaagggcatttaaatcagccctgttagtaggaatgtggctatggctggtgcctcttctagtcacaagtttgtttttggagggggtccagaagatcattcccttgcatagatttctcttttaccaatttgagtgcctcctacatgggcagcagtggactaagtgctgggtgtgataaagaggaatgacttaattatgagactgtatataatcaaatacagtgtgggttaggacctgtggcagaccattataataaagcatggccccgtgagggttttgaaagaga

SEQ ID NO: 1155 - DNA, 484 bp, Homo sapiens
acagcggttggcttttagacattatatatattatcagagaagtagcctagtggtcgtggggcacagaaaaaatagataggggcagctctaaagaccagctgttaagacagacaactgcaaactcatttaagcaagagaaaaacagctctaattcgagattgtgaagcaacacttctaaattcaaagacatagagttgtcaaatcaggatttttttttttttaaatgatatcctttcgaatgtaactgattttgggaaaatcacatgttcagaattgaggctaaatggtttgatcaggttttctctttgaagagaccacagccttaggaaatggttcttgatctatacaattccaccttggacactgggttaattctgtttgcccctggaacacaatcacgtaagtttccttctagactggcatcctgatgtgtcttgagtataatcacatgttgctacctagtaaataaaatcttaagaagatc

SEQ ID NO: 1156 - DNA, 697 bp, Homo sapiens
cctgcccctattgtaagtcaattaataaaaagagccatctggaggaaataaaaaaaaaaggaagactctatgaagaaacagagaagtctcagaaaaggctaacaattttatatagaggacaaaacagcattaaactcatcagttgcaaagattgcctataaaaggaccttaggatttaaggaaggggcttcttaatgtagaaagggaagaagaagagagaaaagaagggtagtaaaaactagagattggggccaggcgcagtggctcacgcctgtaatcccagcactttgggaggctgaggcgggtgaaatcacctgaggtcatgagttcaagaccagcctgaccaatatggtgaaaccctgtctctactaaagaaaatacaaaaattagccgggcgtggtggcgtgtgcctgtagtcccagctacttgcgaggctgaggcaggagaattgcttgaacctgggaggcgaaggttgcagtgagccgagattgcgccactgcactccagcctgggtgacagagcgacactcggtctcaaaaaacaaaacaaaacaaaacaaaattagagattgggtctttcccaggcatatggtattctataaaacagacttactctccttggaggatatattttggagaatgcttcataaaatctatgaatactgtacaatgctgataataaaaactttttatacctg

SEQ ID NO: 1157 - DNA, 307 bp, Homo sapiens
gattcaaaagccaaataaccccttatggaattcaactcaaggtttgaagacttcctagcttgtcctatggacctcaacaccaaggattacaaattgcaaatttaataggtcattttgtatcaaaaggtcaattatgaagcacctagaatttttcaattatacgaatatgttctttgggttctgctgtggcccagacagtgttaactttttttttattgtgggttttgattttttcccccagaaattggttttatttgatgtacccaagtcttacgtttcccaataaagaaaaaaaatctccataaaa

SEQ ID NO: 1158 - DNA, 3075 bp, Homo sapiens
gctgccccttcaccaccccgccccaaggaataaggaaggttcttttaccaggagcccaaaaaagggcactgccttttctgctttgcttcatggactggctcatatgtgaaggcacgttctccagccatcagaggccccctcctcctccaacccatctctccttctcactgttatcccagcttatccacccagctctcctggagctgttctggtctcagaggcttggttccatttctcacctgaacagatgagtcctgggagagaccctcagagatccgcccagacccctctcctgccctctgcacaccagcagcaggcatgaaccttgggtctgggaaaaagctttaacctgcagggcaccaggacccaaggcaggctgttccttggggcggtcagaccccagtcaggagcaatgactgactggctgcagccttcccacgccaagaggctggaacatagtgtctgcctcgcttcctggagatagtaactgagcaggggctacaaagaggtctcctgggaaccctgtctgccccttcccacctgtccttgggccacaccatcacactgaaccacaggacagaccctttctccaccacagccaaggcctggagactgggggcccagcagagcctgctcccaccctcctcccagcagcagacacccaccctctcactgactaacaggtccctgcacacagctggcctggtaaacccagctgggaggtttctaggcagcagcaaaactctgtgacagggtgtcctcacaccaggccttggacagctctcccagacaggagccagggttgagcaatggagagcccagcccccacgtcttacagtcgccatcctccaggcgtgtggtccctccccattgggtgcacagtgcagaggggccgtggccccatgtgatggtgcgcagagaggaacctcttgggattcagcaccagacgtctgtgctgcctggtttgcatccggctcacagagcccagactgctggaacagccaaggactgtcaggctggacaaaaataactgcaaggaggggcaagagaaaggatgattcgaggcaccttggcccttcaaggtcatgcagtgggtcgagcgcctgagatcctgttcaccaggactccacagagctggctctgctcagaagccatttcattccccggctccaccctaggccactttttctaacagaggaaacaaatggtccagcagtcgttcccagcagaacagcggagcctggactgacacccagtgggaccagtgttgccacaccagttgataaaatgcagaaacccttctgtactcgttggtaaatatctactcccccaagtgactccaggtgccccccaccgcctggcacttcccccaggactcctacgatctggttactgcctggccgatccaaggctgtggagtcccagagccagcagttcactggtgctcattccacactggttagatacttcagttgtcacccctgggaagattctcccacctcctccctttgatggaaccaccctccccagaggctgcattgaggagactccacagactgaaaagtgagtttgcagaaaccttggggaaaagggccctttcaaagaagtggataagagggaggagatcattgagtgacccagaaagctcttttgaaaagacagactcctcaaggagagataaagaggaaagcacctctttcattttttagtgtgagctaattccatcagactgctgtcctcctggacccatctgagatgtgcagtagcaaggagaggggggatcattttagagagtgggtcattggcagggagtgctccggagggaggcagaggggagactgtggtagaaggaagacagaactcacacatgctcccaggattggggacagggacagaggaggtaacagaaggcaaaggccagtttccccgttatcatgaaggggcccactcaggacaggaacaaggacaactcctcctcctcctcctcctctcctgctgctcctgggataccaggtcagtgatgtagtcttgcagtttggcaacttcctagcctgagaatccctagtggggctgtgggaaacacatttccacgttgcaagcatgcaactccaaagaatctgtgatgccactgaaatgagatgggaatgatccagctctttcagcatcttggttgaacttgctttcattgtccctgggatattgtggaaggaaaggtgactgtgtgatctgattctgtggtcaaggacttgcatcttgtgtttctatccccaagccttcctggtgtctccaactcctaccccattgcatgggttgttgcggacatccaataaagatttttttagtgcttctggaaacttccagtagattctacttctaaactatctctggagtccatccacttctgtctgcacccacagccatcctggccaggccacatcacctcccccagatcactgccctggcctcagaaaggtcttccctcttgctttgtcaatcagttctcagtagcagcagagagaaattgaaagctgcaggtcatatcgtatcatctttagtttgaaaacctcactctcttaccctattgttctaaaggtcttcttttggtcccaacctcatttccagcctcatttcttgccagtcccagacttgctccctgagcttctgccacctgcccttccttcatttcctcgacattccagccttgttcccacctccagcactttgcatatgctgttccctttgccaagaatgctcttcccctaccctgtgcatggctgagttctgcagaccctcaggccttggcttcaacgttgcctcgtccaagaggccttcctcgactactttacttgtggagttcctctatcacaaggcctctgttctttcccttcatggagaatttgccactgcatatccatttgtgtaatttacttgttggttgactgtgcctcccactcgagtgtaagctcatgaggccaggtgccatgcctggttcagtctccactctgtacccagcattgagcacagggcctggtccatagttggcgttcaataaatacttgttgaagaagtgaactg

SEQ ID NO: 1159 - DNA, 3559 bp, Homo sapiens
aagctggtgaggggcagggtccctggccagaaggggcatggccacctcccaacctgatgacctctctggctggcctcccaggaggagggacactccagcccccctctctggcccacccagtcctctgcccaagcccttcctcccctccatcaagatctttgagggaccacctcaccctgcaaaagagacaggtcctccagtaccctgtcttctagccccacctcccacttggccagaaccaatgtccattgggcataggggagttggcttttgccccaggaggtgaggttaaggagttgggggcctggggttctggttaggaattctcttgatcctgggattatgctttataggatgtggtcccacaggcctgtcacagggccaaattgggtctgtccattcctgaggctccagatcccataaagggggtctcttccccatcccttctactctacctggcccttccagccccagcctttggagcgttcattcagtcctttcttcagctaatgattactgagcacctgtttggtgctaaggatatggtcatttacaagacacatcttgtgccctctggaagctcatagggttgtgaggcaaacttccagccgtcagggtctcagctaagcagaaggtgctggaaggctggttagtctgggaggagctatttcatcttccagctcagctccacacaaagctgcagaaggacgaaatgaaaagcatttggaagtttaggagccacgtgagtgaaagttttaagaaaaatgaaatttatgtcatacttatttttttagtaccctttaaaggagctacagtcattttattatttcaggaggttaaaatatactctatattacttggtttcttataaaatgattaaatgaatagagaaaatattaattttcaaggggaaaaaacctgagaagaaagggagaaaagaccatgaaatttaccagataacactttttaagactaagtcctgagctgccactctcagcagtttttgctgcttcagctcttcctttttattacctttttcaattcaacaagcaactttctgctacatacttactccggttgggtgctgacttcagggacaggaaaaagcaaggtttgcaaagagtgaaactagtgtatattccgtatcttggtagttcgtttctggattgggtttagtttcagaactggacttgttccttcactgccacagaatcagaaagagctagaagaaaaggctcacctggccactgtttaggcacccagacataatttatggacgaaatgcctaaaaatgtgccaggcatgctctgtttgagaggctttttctaaccccaaatcttagatctgccaggtagttcaacatcttccaagtgtgctggttctgctttccaatgcctgcttcccaattttggatccatgagctatacagctgcatgctttgactgccggaaaaattaatcttgcttcttcatcaggtctttctcctgtacttgtgatcagaaattacctttgacgtgcagtgacagttgatttcctcttgaactgccggtgaaaacagtctagtacacaggtgctgtcagcccagggtgggagcaggaaatgattgctgagcccggggcaggggaattgcatctgcaggaaagagatgcagcatgctcctcactcctgagtgcccacctgtcctgcttctctgcaggtgaaaactctgggggatgctgatcaatagagcttggtcccaagctctactgggcccttggaggtagcaaggccactgggttgctatcctcttgctggggatagcaaccactggtttgcaaccactgggttgctatccttttgctatcctcttgctcatgaccagccatatggtgaggctggggagttcacatcctcaggcaggaactagcagttgtttatccagcaatgcctcaaggatgttgcattgctcccaggaactggctattaggtatgtcttgtgcggtcagtcagcatcacagacacatagatgctcaccagcctggcttagctgggacctaaatcttctggtgaaaagcttttcactaagtgaggttccttccctgcaaatgctgaatctagcctaattcgcaaccacacagaatttcatggctttcaaaggcttgccatgtgccccatctcattctatactcacatcccatggaggtgaggattttcacttcttttctctagacttggaagctgagattcagagaggaagcatcccttgtgcaagatcacatagtcaggaggtgacacagggctaagacttgaaccaaggctctaagaggatttcttcttttcagagtctcttccctgtccatttctgtgactaagctgtgcagaggttgacagcagggcaagttacattgatattcatcctttataggcttcctgctaaaaagcttctgagattgtggtcttccaaaaaaaataggagcttggttgaagtccccacattttcaagcactcagtgttctgcctctggcagctgtgctaacagctcagtgctgtcctgggagtcctctgactcagaaccctcgaagcatcctgcattgtctttacccaccatcatcttcactaagagaaacatgcctacccatgaaggcgtgtttgattactccaggcttctggacacacatacccatgggtgatttttgctcctcaggcccaatattctcagacagcccagcagtgtgaacacacaatgccaggccaggaactgggaccaccatcttgctgatggaaggaacaacaggtggcccaggacatgctcctgcatactcctgggtgtcccagggactgtgtgctcaggagcactgtggtagagcactggccctgccttgagaagagacacaggtctcccgtccctgcaccagctgagagagacttgccgcaaagcacaaggctggcagagatttatgtatgacttgcacagacacaaaaatatacagacaatcaaaacattgatatattcaaactctcctttaaattccaatcttattgcaacaactctgtgaattgcaaggtcccagaatctgccttctcacatactctaccctcattcatccttttgggctaattgatgagcatcttatttcttatctctaaaaattatcagcaaaggctacttcagatggccactttagtcctttcagctgtagtcaggattatttaacttacctgtatatcaaaagtgaagaaaaagttagttcataagtaaaggcactaaatcctttcctgacaatggcagagtctctagaggtagaaatttgccttgctgcagagagagaaggaatggcgtgggatgggggaaagaaaagaaagagaagaagctggggtctccaggcagggtagtaagctgacactaaatattttttacacaaaaatgtattgaagcaacaaatatttcctgaagatccaccctgggtgaggctttgagctgactttagagatcactgtggggtcaagaatgtcttacatgttttattcatcattcttgaaaaaagaaataattcaaaccttggaattaaaaagtcagaaa

SEQ ID NO: 1160 - DNA, 2188 bp, Homo sapiens
gtccacccgcccggcccagctgcagccacccttctcatctggatcgggcccctcagaagcaggaaaccctcaaacccagccagaccccaggccggggcattgccagggaggaccctcacaaccacgtacatgaccctttctccttcatgccaggctcctatgctccccttgccctgccaggcatttgtgtgactgtcctgtttccagcccaggtggtctcaatcatcaggcagtgttctacccaaatgcaaacgcctctcccggaggcatgtcctggctggttctttggggttggcacagaagtcctgtctgaggtcctatccatgccccttactggctcaggtcgtgagatagatgtggaatgacctgagaggcacctggagcccactgttggccaccttgagctcttcaccatccatcacagggtgtggtgtgtgtagtcagggtctggttggctccccattgcctgcccgaggtgcaaggtggggtataaaactggataacccctgaagtattgtatattcatggatctgaagcactgatccactggtcacaggtagacatgtggagtcaactcaagaaaaagctgagtgaacagcatgatttagggctaaagccaatggcatttatcttcccttgtcttcctgctttgcatttgcctctgccatctaggaaagacatgtaagagcatggacattttactttggagaaacagaaaaatcttggggcttccaattgacccatctatctgccaccatgttgccccaccaggagctcagctctgtggagttttccctttgctgagcaagcatgtggttgcattgggtggcccaggatgacaatgcacagcacagatgccatcatttccctttcccctctgaatggcagacatcagtaatcaatctggaatgtttttcttccaaatctgagtggaattttcaaatgatcagcacagccactgccaacagatatgatgtaaagtgaaacctggttgccatcttctgccatgctgaggagcagtccatccctgcccgagcatgtatcggcaacatgggcagcctgtgaccgggtctggggcgaggccaggggccatcaaaaacaggctgatcaccaaagtcagtgtcaccctggatgcccagcagccctgtcctgtgtcttgggcctgtgagtcaaagaaaaggtccttttcagggagtgacaagtagtaattaggctgagttgggtggagaggtttgtctcagcctctgctgttctcggaaactgctgttctccttggagcagccactgggagttggagtgtttatttgatttctgacttgctaagcctgtaatttacctgctggaatagacagagtccagctgcccaaaccgtgtcattaaaagcagatcctgcgcccgccccatccacaggcacagcccggcagagtggttccacctccccatgggcccaaggatgcgcctctctggagttcacgtgctgcacccccagggaggggcctggggaaagctggtccagcagcaggggtggaggctggggccacactgcgggacagcagcccctccacctggaccagggagggcctccatgtgcaagcgcagaggaagagaccctcccatgtacgcaaagggcagccccaggctgtctggaagttggagaattccctatcagcacagggatctcagctctggcctggaggtgaagagacctgccttgtaggtggcttccttatctgcgcctccattttctatctgcactttttgatctccaaacaaccttcagccaaagaatctgtctaccaactcctcatagtgagccagaagcagcctcataaccctgaatgtggggctctggtggctgtcacgaagcagagttggcacataacatggaacctggccaggcatggtggctcacacctataaccccagcactttgggaggccaaggcaggcagatcacctgaagtcaggagttcaagaccatcctggccaacacagtgaaaccccatctgtactaaaaatacaagattacctgggcatggtggtgcatgcctataatcccagctactcaggaggctgaggcagaattgcttgaacctgggaggtggaggttgcagtgagcagagatcacaacattgcacttcagcctggtgacatgagcaaaactgttgtctcaacaaaatgaaattatg

SEQ ID NO: 1161 - DNA, 176 bp, Homo sapiens
cgggacctggatctgggcggggtggtgcgctcctcagggcgggtgccaccgggttccccaggggaatacatgtccccagctctgggaggggtttgctactggcctcctactttcctccctaggtggacagtgctcctctagagagctgcgactttaattaaaaacaacaggaaaac

SEQ ID NO: 1162 - DNA, 687 bp, Homo sapiens
gagacatgtccagtggcctttggaaaggtggtggggatccagttcaggagggaggggtatgtttgtctcccagtctgggcaaaggagtgctatgcggaattctctgcatagcagaaaagctcccaccattttcttttgatgtggttttaaagtctcacgttctctataatagaaacagcaggtcttgtcagctccttgtgtggctgatgtgtctggaaatgatgtagttcaggaaagcattttttttttctttgaaccttaaaggttctattattaaaagcagcacagattccacatttttatacatgaggatcttctttgtggtgaataccaggattgactgcatccctttaaagaagttttatgtccctgactctggctaaaattatctaatttccagatgcttttgtagatgactgaagtatttgtgagccacatattgggagttctagatttgagtgaatggcaggaaagggccatctccattgagatgattaagtgaaccaaactagttctcagaattctacagagaaggagggaatcagactgaggaagctgtgacataggacttgaagaccaaagactttgaaatttgcgagctgctcatgtgtgagttattatcactgctgtctttctattgagttacaaatctatatttttattgaagtttaaataaagaaaaaattt

SEQ ID NO: 1163 - DNA, 1946 bp, Homo sapiens
ctgaccaaaaagcctgacagttctgtcttacgaagacacaagtttattttttaacctccctctcccctttagtaatttgcacattttggttatggtgggacagtctggacagtagatcccagaatgcattgcagccggtgcacacacaataaaggcttgcattcttggaaaccttgaaacccagctctccctcttccctgactcatgggagtgctgtatgttctctggcgcctttggcttcccagcaggcagctgactgaggagccttggggtctgcctagctcactagctctgaagaaaaggctgacagatgctatgcaacaggtggtggatgttgtcaggggctccagcctgcatgaaatctcacactctgcatgagctttaggctaggaaaggatgctcccaactggtgtctctggggtgatgcaaggacagctgggcctggatgctctccctgaggctcctttttccagaagacacacgagctgtcttgggtgaagacaagcttgcagacttgatcaacattgaccattacctcactgtcagacactttacagtagccaaggagttggaaacctttatatattatgatgttagctgacccccttcctcccactcccaatgctgcgaccctgggaacacttaaaaagcttggcctctagattctttgtctcagagccctctgggctctctcctctgagggagggacctttctttcctcacaagggacttttttgttccattatgccttgttatgcaatgggctctacagcaccctttcccacaggtcagaaatatttccccaagacacagggaaatcggtcctagcctggggcctggggatagcttggagtcctggcccatgaacttgatccctgcccaggtgttttccgaggggcacttgaggcccagtcttttctcaaggcaggtgtaagacacctcagagggagaactgtactgctgcctctttcccacctgcctcatctcaatccttgagcggcaagtttgaagttcttctggaaccatgcaaatctgtcctcctcatgcaattccaaggagcttgctggctctgcagccacccttgggccccttccagcctgccatgaatcagatatctttcccagaatctgggcgtttctgaagttttggggagagctgttgggactcatccagtgctccagaaggtggacttgcttctggtgggttttaaaggagcctccaggagatatgcttagccaaccatgatggattttaccccagctggactcggcagctccaagtggaatccacgtgcagcttctagtctgggaaagtcacccaacctagcagttgtcatgtgggtaacctcaggcacctctaagcctgtcctggaagaaggaccagcagcccctccagaactctgcccaggacagcaggtgcctgctggctctgggtttggaagttggggtgggtagggggtggtaagtactatatatggctctggaaaaccagctgctacttccaaatctattgtccataatggtttctttctgaggttgcttcttggcctcagaggaccccaggggatgtttggaaatagcctctctacccttctggagcatggtttacaaaagccagctgacttctggaattgtctatggaggacagtttgggtgtaggttactgatgtctcaactgaatagcttgtgttttataagctgctgttggctattatgctgggggagtcttttttttttatattgtatttttgtatgccttttgcaaagtggtgttaactgtttttgtacaaggaaaaaaactcttggggcaatttcctgttgcaagggtctgatttattttgaaaggcaagttcacctgaaattttgtatttagttgtgattactgattgcctgattttaaaatgttgccttctgggacatcttctaataaaagatttctcaaacatg

SEQ ID NO: 1164 - DNA, 1200 bp, Homo sapiens
agctgcccgtgtagtccccaaccgtgtctgtctggcacgtgggtgtgttggtaaacagtttggaaaagtggcgtgggagccagcctccctttgatgattattggagccccaggggacaagggatttgaggtgagggttggcgcttagagaggacaatactggggttggactgtaagggattgaagggggtaccttaagagacactccaaacctgaagtttttttgctgctgcctctttccctaggaaactcacactcccctagggggagaagaagccgagagccttttgtgcaaagccaaaaccttcgtccttttaaaaacctaggtctccagttggctttactttaaaatgccaataataaatgccctcttctcgtgcctccccaccaccacttaccactcgtgcatccctgagacagggagggaagaatgaacactccccattaacagatggaaaaactgaggcttagagatagacaatcactacaagtcagctccagctttctgccatctagccagcccctcttccccaatgctccatcccaaccaggcacctcttccttgatgtttggggtctttgtggtagcttatcttagaagcactacaccttgccttgctgtttgtcctgagatggaaaagtgtccttcttgctccccctcaatagatctccagcgtcagctgctccctggcattcaacaaatattcactggcccctactttgtggcaatctgtgggctacatgctggggtcaaggcagtagaactccaggccctcctctcccatccttgatgcaagtgcaacctcgctgagggcagactggggcatcctgtgccactaaactacattgttcttattctggcatcttagacctccacacccgtgagaaatcctggagagggtatttttgtagagtgtagactgtggctagtgacaaataaattaggaccaagaaagctcactgtagcttttaggaataacttttacacgaccatttgatagggaactggggaatggggtatggaagttttcctacacttgagagaaaaaataggataacaaaaattaaaagtcttttttttcctggtccactgtgttaaggtcatttttaaccagcttgctttctacaccaagagtttatgtttgtttaatggctggaaagagaatcttgagatcaaaaaaccaataaagatgtatctctac

SEQ ID NO: 1165 - DNA, 1349 bp, Homo sapiens
aacccgtatagttcacaatagagctcagggagcccctaactcttccaaaccacatgggagacagtttccttcatgcccaagcctgagctcagatccagcttgcaactaatccttctatcatctaacatgccctacttggaaagatctaagatctgaatcttatcctttgccatcttctgttaccatatggtgttgaatgcaagtttaattaccatggagattgttttacaaacttttgatgtggtcaagttcagttttagaaaagggagtctgttccagatcagtgccagaactgtgcccaggcccaaaggagacaactaactaaagtagtgagatagattctaagggcaaacatttttccaagtcttgccatatttcaagcaaagaggtgcccaggcctgaggtactcacataaatgctttgttttgctggtgatttaaccagtgcttggaaaaatcttgcttggctatttctgcatcatttcttaaggctgccttcctctctcagtacgttgccctctgtgctatcatcttatcatcaattattagacaaatcccactggcctacagtcttgcttctgcagcacccactttgtctcctcaggtagtgatgaattagttgctgtcacaaaaggagggaagtagcacccaaattaagttgcttaagagaggaaatgtacatcttgtataacttagggagcgaagaaaatgtaggcgcgaaagtgaaaagtgaggcagctagttcttcctattccattctcgaccaacctgccctttcttaatatgactagtggtcttgatgctagagtcaacttactctgttgctggctttagcagagaataggaggaaccatatgaaaaagatcaggctttctgacttccatccccaaaacacatttaccagcatactccaaactgtttctgatgtgttccatgagaaaaggattgtttgctcaaaaagcttggaaaatactacacactccctttctccttctggagatcaacccacattagagtgtctaaggactcctgagaattcctgttacagtaaacaaaactaacgtaatctaccatttcctacactatttgagcatggaaatcatagtccccactctgtgaaaacttaacgctttttggaagacatttctgtagcatgtcagtttggagaaatgatgagctacgccttgatgaaagaaccgtgttggtgctgctaagtttagccattatggtttttcctttctctctcttaagccttattcttcaactaaaagatgaggattaagagcaagaagttgggggggatgtgaaaataattttatgaggttgtctaaaataaagagtagtttctta

SEQ ID NO: 1166 - DNA, 691 bp, Homo sapiens
gcatcaggcccagacagagcctggcaggcatcctggcgggaaggaccaggtcccctctgggtggacatgcacccatccccagtccaggaaaccatctcccccaggaccttctgtctgggactcaggagtcctaaggaaaaggaattctaaaacatgggggaaggggaggtagagcactgatgggtgaaaaagtgaggccaacacacagggcaagtggtgtcgatggagtcgaagcgctgaaggaatagggcggctttccttccagcgagcatcattcggctgttaccaaaacaaacatcttaatctgcacctttctccactggccatcttgtccttgggtcagtgggacatgggcacctcgggaggcccgggccctgcccagctacagttccacccctcagcttgaggaccaatgactgaggtctatgccagttcctgatcccatctcactctctggacctaccaggtgactgctgctgggtgactcccctgaggcggctatacccttaagccagccccactacttccttccctgcctcccagctcagtatttaaacatcatctcccttctctttctcgcataactccccacccctttctccccgatccacccaggcctttctgtaaataaaagctcccaagttgggtacaaaccaggatattggagttactctatcctggagttaactag

SEQ ID NO: 1167 - DNA, 5837 bp, Homo sapiens
ggatgtcaggaagaggccaggatggtggtgtggggaggggtgcctgctggccccatgtcctcccctgtacatagtcttcgtgtctttctggaccccttgtcctgctgcatgcctgttggctactgggctcatcccagctggcagtggagactgtagtgtgtgcgtgtgtgcgtgcgtgtgtgtgtgtgtgtacgtgaccacgttctatctgttcatttgtctgggtatagtcactcctggtgatgatatgggctgaaatgtctccacgtctctttgtgtcttgttgaaaagaaacccaaaggagtgttgtgtggacatgactcaccctgaggagtctccagggatggaggtggggcatgcggccactggtcggtgctgcctggtcctggcctggggcagagcctgtgtgttcttcacctgtgcctgctcctggtggtctctgctttgttttctgtcttgtcttttgttccactcttgactctcccggctctgccactgttttctgagaaatgtagcatccgctgcagctggccacactgagggccctctgggaaccccaccccactggagccgctccggcagctcttcctgccactgaatgcgttctgcagcatgtagcatgcccacctagctccctggccagggccctggggaggcagagggtacccaggggactgagggcttagaaatgactttctctatgaggctggaacctcctccttcttccagtgaagcacgaggtcttggttccagggttcctggccaggtgcccccttagcatttgttcttcatctcctgtctcttcaagcctccccactccaccgtgccgaaggagctctgccagtgggcctgggcaggcagccacagagggcatgttatctgctaaagcaaacagtcctcctgaggccctgagggtggccctgaccccctcagggctcattcctggtgggcatgactcggtaaggaggttctgtgggtagggctgtttgctggaataaggagggctgaggctgagttgttccccgccactgttgaggatcccatctgacatttggggattcactgcatgaagttgttcatttggggctccagtttttgtgcatttccagaccagggtccctgtctgggagctcagacttagctgggctccagcagcctggctccggactctcgtctgccaccatcaccagctctgtctaagcaatacttacccctccgggcttccctgctttcctgtgccccactgctgccctctgcagagccatctgctccaggcacccacctgcctctgcttgctttctcacccatgtctggttggagcttctcacagccactcaaaccctgacttgatttgacaactgggccctgttggtggagaccagtgcctgaactggaccctgtgaaatctgtcccgtgggaatcctgaagtctgactcaggaatgcccagacctgtccctgtccctcctcagctctagggtgaaaggcgagaggttgcacaggacatggacagagcagcccttgggtttgtatctggtaggggagaaagcagcaggacagtggaggtgtgtggaaggcactctttccacctctctccaggcattatccccaggtgctgaaatggctgtggccccagcacctgaggcaggggtacgctacctggggtagcagtagaaaggtcttggggtctgaatgacttggggcctccattcataaccaaagttgtaggggcatggaggcagtggcgccttatggataggtcatctcagcccaaagggcctccttggctggcatggttctgtgttacgttgaagccagagtcttataacacctcccaagaaagataggggaagaagccagaaccccacctggcctgcccacaggacaagaagtgggtaagggcaggaaggaaatgaacggagttagctcccaggctcctatctctgcctgagcctctattcttatattatcagagaaagggaccattgggtgcatagagatggggaggaggccactgggctgaattttctctttaggcggaaatgctctccccaggcccattgcgttcgtcaagttcttggaaatggacaaagggctctgtcctcctcgaccctagtgggggatcaagaaggaaactccgttgcaaaagggtattttaatctcctgtttatgatatattcacctctagagcagtcactgtcagggtgttgcgaaaatactctacacctttgggatgatagggttgttagtgacccacaggacagtatagatgtttgtggatgtagcactgagtggtgatacccagaccagcagtcaccccaggaagtgggggctacccataccctcattcctctggtggggagctgcctgcagagaggcctgccactgggggttccaggccgtggtgacccttgcctctggggaagggttagcacaggggaggttctagctggaggaggggtctgatgtgctggtaacttgggctgacctacctacagtccctggctgccaaaactgctcagcagttgggccactccactattccacctctctaaaagaaggtaatttcctccccaaattgaccttggggaattattcttttaaccctttgcaccaaataagttactcatccccacctggattttaccccatgagggtaaagttgtgtgaggctgacacgtctgtgtgatgcagtgtggctgcacttaagggtctgtttctcagcatcatggatgcaggggcttgtctgaaaagccactctggacctagcctgtcccagaagaggagaatgcacaagtgtaactcctggttgtttgctggggtgggggagcatctgctgtttgaggacggggggtggggaaggaaggaacatgatccctccagaagtctcccaccctggggccaactcactgccatgttcagtgtcccggctccaaatgcccccttgcccagatgaaaccctgcagtggttacaggaatggagctctttgtcattccacctcctctggtcaggcgaggttcactgtgcatatggcagagacaggagtggccctgcagtgatgttgggttgtgggcagggacagtgatggatgactcagagcgtctgtctttgtatttctgctctgttcattctgtcccactttcttcatagactccttttccctgcaatgggtttttggtatgaaaaaggctccagtaaatggagccaagtcttggtttgacaaggggaacttgatccttcagggaagaatcatctccaaaatgactccccatctggtttcttctaccacccaattctactaggaaaggagcacttaggaggctcttgggatgcagcaagtcccaggcaatgccagcatttcatgggggctgaggcagaacccaggagctccaagaaaggccacccatagagctcatcctctgtggaatcactgccggttagaacactgaggtcaagccagtcctcccatggtcatgccacccaccagggaagcatgcctgatctcttctttactgccagccttgaggagagcagaagcctccatttttaaagacaataaagacctccaagggtacttctttggaaatgaaatgtagcacaatcttagcctacgttaccaggagccctgacatgcaaccagggtccctcttccatgccctgctgcccaggagttgctgagctcctcttcccctggggttccagccctcctaatacctcatattccccatcttcctcagcccagaaagcaatggggctttagtgatgctcctcttttgtgtctctctggttgcctctagcactgtgcaaactctgcaagaaattgctgcctttgcttgatgttgtagatgagttgccctccacctggctggagagatggcacatcattcagggccagaaggttgtccagcagtgtttctgcagtggctgcagggagatggaaaagaagagccctgcttccctgcctcctcctacctttctcttccactcctcagagttttcttctccagtatcctgacatgtaaagagattctttaaaatgctgcttcttctactggactgtctttcactgagtagtcagggaggagatgaaaatgtggacacatccccccgccttctccctcaaccttttcactcacgtcagaagaggttggggcaaaacaaaacaagcatgattgaagagcaggggaagcccacacaatcaggtgagccctgatgggggctggactggcctggtctggctgggaaaggattcttttaaaagcgtgcctgagcatctcagagcaatgtcagtgatgccaaagagagcaacttggcctccttgggcaccaactctgatggctgagttgcacaaacgtggctcagatgttggcatgcccgatggtgggaccttgttctctgataaagggcttaatctttccatgtagcaaagcaactttccctccctcccctccccccgaaccctgagcttgggcttgtgtgggcccagcatggctgtgcctgtgagggaagccacatcagtgagagaaagttgcattctctcaggggcctagattggcttggggcaggtgcttgttgaaaagcatgagtgtttctgctttgggaaacccttccagggctctggttggaaacttggccagtaaggacagggccttgggcctcccaaggagttcacaatgatgccaggaagggtccctgagcctgggttccagtcagcttggctaacagaatggggcttgggaattccaggggcaactgagcatccaccccattagccagtgatctggacagggacagctggctacagggaatcaaaggctgttctgtacagttttaccagaaactgtgaccttgggtaaggctcctcacttttctgggcctcaacttcctcatctgcaaaatcagagcattagctgctctccccatgattccctcccagttttaattaaaagtctctgatctggagcacatgagggttgcgagcctggtgcacctggttcctgtctccgtgggctggtttccttcagcccctgatgcccaggctgggtgcaggctctcatctggtccatgcccagatgctgcctcagacaagaactctgggaatcctaacagactctgctttcctctcttcgtggtttgtcctccctcttttattcttgtgtaatgatgagacataattaagggtcatctacaatggacaattttcaaggtgctgatgtgatgtcacaacctccgctacatcctgagtaagtcagtgtccccaacagcagatgaggctgggtctttcctcatttctgcttctgggatgacatcagtgggagagttgaagatctgagaattctaaaggaaatgttctctgatgggaggagagagggaacttatttcccttcaaagtagtttgcttcttaagaccactcctccctccagaatgtctttaaccagacatcatttcagaaggtggggcagctgcttccttaggaagagtgggcctgatagctcaaccaactcctttagcatgtaaactcacagaaggcaagaacccctttttttagactttccaaatgcatcctgcaaagagagagatagctgatagggactgacaagcacactgtttagataagaagcaattagccttttatatctgtgctctatacattttctatgtgcagcatctttcctaacttgttgtggttcccgggtggcaggtgcacagctgggagggactgccggctgtttcgtacaacattcttgccaattcccttgaggagaaaattcttcacatggcttctgcatgtacagtatttgggcagcaaaacatgattaaagtcagtttgaaaatgg

SEQ ID NO: 1168 - DNA, 516 bp, Homo sapiens
gggcggccggcgcccgcccggcgtgccggagaggagaaagggcccgactgcccgccggaccctgcacccagcgactgggccccgcgcgcgccctccgcgagggtggaggcggcggctgtgtgcgcagggcccggcaccggactgggaccctggcgtccctccaggccttgcctcctgcgggaggacagtttggcttcacttctctgaccccagcctcggccgtaaagtgaaagagaccggaccagcttcagctttcggactctggttcttggatcgtgtcctctccccctcgccgccctcttcccccaatctgagccattgcaggcctctgcctgctgccccctctctcctcgggatcgggtccccagagccaccatctcctgagcctcccaccccgctgcctgggccctgtggttgctgggcctcccacctcaaggaggggaaggttgtacagcccgaacccgtggagcaatgccctgtctggcctccaaaaccaaaataaaactgggtcacttt

SEQ ID NO: 1169 - DNA, 509 bp, Homo sapiens
gggccctggggagcaggcaggacggcacggcactctccacctgagacccagggatttcctgtttgagtgtaaggccaaccagtaaagcccatgcgggctgctgagaggcggacagggactccttcaacatggcacatgagcaggcacccatgtggcttcaaccctgacagacccatctgtgtagccaagaaactgctctcagccctgtccccaaatgaccttactttcagaaagaatgtgtaaaaccctgcccagagctcccctagggctaagctataagggattgtccttctccctaaaatgctcatttggcccaggctgaggtctgtgactccagttggctacacagtgccagaaaggaatctgtcatctcaggaaagcccctcaaagatggcgaggcatatttgatgactgtggttacagggcaagaggccaccctgcagcccccacccctgacttgctggaacttgtgactgtcaaagctccattaataaattacatgcacctgg

SEQ ID NO: 1170 - DNA, 991 bp, Homo sapiens
accaggagaggcagcctagacaaccaagtggcagcaggtgggggcattcttctaggaatgaggggcatcagcccaccccaggcacctcagtggggttccgggccacctcaggactccaagaggctgtgtggagccaccactcctagccacagctgccatgataagtccttccatgaaggactgaggagggagagtgggggtccagggctggtgctgctcttccctcagctctgccggggctctaaggtccctctatttatttctcaaccctggctggcctctcaccaggagtttaggctgaatgccttccacgtgatggaggaaaaggccaactctgtcctggtcttgctgtggcaccccatcgccccacagctcgtaccttctcaccagattcccctgaatccaaactcgtggtgcaaacctctaccttttttacaaaaagatcttattgttaatttattgtttctggcacttgggcaaaccctgtagttaatactcctcccacactagacactgggtttcaggaggagggagactgccctgctttggtcccagagaggccctctgcagataggcgtggcccctcttcagaggacactaccctagggcactttctctttgaggtggagagacccataaagccttgaccacatcactccatatggggaggagaaggatccctgtcaccttctcctctcttcacggggcccttttgcagccctaggcctcatctgtgggaagggagtccctggcttatactgcccccaccacagctccttgccctggccagaactgctgtcgaagaaaatcaggccggaaggccaagaaggcgctaagggggatgggagggcaggttttccaggctggagtcggttccacccactcgcctgtccacaggcttccttgtaagcaagtcagcagcacagctactcacgctgccatctggacttattttatgtcaatctgtttataaataaaaaccaatatagat

SEQ ID NO: 1171 - DNA, 631 bp, Homo sapiens
tgtcgtgagctggaggaacattgggaaggaagcccgcggggagagaggaggagagaagtggccagggcttgtggactctctgcctgcttcctggaccggggccttggtcccagacagctggacccatttgccaggattggcacaagctccctggtgagggagcctcgtccaaggcagttctgtgtcctcgcactgcccagggaagccctcggcctccagactgcggagcagcctccagtgctggctgctggcccacagctctgctggaagaactgcatggggagtacattcatctggaggctgcgtcctgaggagtgtcctgtctgctgggctacaaaccaggagcaaccgtgcagccacgaacacgcatgcctcagccagccctggaggctggatggctcccctgaggctggcatcctggctggctgtgtcctctccagctttccctccccagagttcttgcaccctcattccctcgggaccctcccagtgagaagggcctgctctgcttttcctgtctgtatataacttatttgccctaagaactttgagaatcccaattatttattttaatgtattttttagaccctctatttacctgcgaacttgtgtttataataaatgaggaaac

SEQ ID NO: 1172 - DNA, 437 bp, Homo sapiens
cctctctccaactgcttcagcatctggcttccagtgtccagcaacagacgtttccagccactttcctcgaatcatcccacttcctcagccccatctgtccctccgtccaggagctctcacggccccatctgttgtaccttcccatgtatgcagttacctgtgcctttttctacaccttttgttgcttaaaaagaaacaaaacaaatcacatacatacatttaaaaaaaaaacaacaacccacgaggagtctgaggctgtgaatagtttatggttttggggaaaggctgatggtgaagcctcctgaccctccccgctgtggttggcagccacccaccccagaggctggcagagggaaaggggtacactgagggagaaaggaaaaggaaacttcaaacaatatagaattaaatgtaaaaggaagcactcctgtgtacag

SEQ ID NO: 1173 - DNA, 215 bp, Homo sapiens
gggggcttgcccactgcctgcctcccctccgcagcagggaagctcttttctcctgcagaaagggccacccatgatactccactcccagcagctcaacctaccctggtccagtcgggaggagcagcccggggaggaactgggtgactggaggcctcgccccaacactgtccttccctgccacttcaacccccagctaataaaccagattccagagt

SEQ ID NO: 1174 - DNA, 3171 bp, Homo sapiens
ggcttgtttctgcaagacaccagaccctaacgttacctttctgtgcagtgaagggaaaggtttaagagaatccagttgagaaaacaaacttgctaatcactttaccaatgttatcaaaattacttttgaagacaatcagaaggattttagctggataacttactgcttttatctgacccaagcaagtactacatgtttgtctccctgccagctgccctatgtagctcctaactgttgtgtgatttggacggctttttgcatatttgtgtcagtttgatgttaaccacaagtgccagactgatttttcagacggagcctattttgctgcaagcagtttatataaagatacatatgtgtaaatatatgtacaaaaattactgaaaggcttcagttttttctaattggattattatgtcttgaaagttattgtcagtttttattccttgttaggctattttctgcaggatgcttttaactgatgtaggaaactgaaaggaaatagattttttccaaaacccagttccccttatttaatcttttttagaaatgtgggtaatgaattctatctaataagtcaaggaaaccagaatttgacacactccaacaatccgaaggggcatgttgctcctgagcagcatgaagaactgaccaaattggttttgatgcttgggggatcatagagtatttatgtctgcttttctaaatctgcattataatagctctaaaatttgttgattggtaagaaattgggcattgcttggctctttaaacacatcagtgcttccacattcacctatgtatttattattcaaaagtgtcattttaatatttattgctaccttctgtgaatgcttagctcctgtcgggttcattaaggagaaatgtgtctgaaagcacagaactattattatttttttctttttttgagatggagtcttgccctgttgcccaggctggagtgcagtggcacgatctcggctcactgcaacctccgcctcccgggttcaagcaattctcctgcctcagcctcccgagtagctgggagtgcaggtgcacaccgccatgcctggctgattttttgtattttagtagagatggggtttcaccatgttgcctgggctggttgcaaactcttgagctcaggcagtctgcctgcctcagcctcctagagtgctgggattacagacatgagccactgcgcctggcccagcgttacttttcttgataagaatttacagataagacactcagagagacattgtgtcattctctatcatcactccttttaccatgtgaatagatttctctgtcttggcattcttgctgattcagacttattagttaaatcggatttttctggaatttgaatcagatttcatttgggcaacaacagcagggcagggtttctaaagcaggtttccccactcatctaggttgtcttgaaaggaggatagagccacttacagttttatttgcttcagtgtttaatgtagatattatgtggcctgctgtttctgttgtcttgtatgtctgtgtatgcatgacatttggtccctttctttgaaatgcagcccctcttacgggttttttagtggtggtggtttgttttgtttcatatcatatcacagtttgcatggactgattatcttagttttatgataaaactagaagaaatgagggtttttttttaatgaatagattttgaattgattctttagaccccccaaaaagtgtcagttctaatggggaaatatattccatcaagtcaaagagtaataactgctcactagttgctttttagcatctctggtcttatcagccatgctaaatcactttaattagccttagtgattctatggttgagtaatctctacttgaactaaacaaacatcttttgtttctgtgtgtgtgtgctgtgtgtgagagtgtgcgcgcgcgtgtgtgtgtgtgtgttttaatggagtgttgccttgaatgaatcactgggaagccagccatggtaagggctggtgaggttggggagaaaggaagagctttatgtttctctgttgtttggaccctacttggcatgaaaaaggaagctcagttccagccccttggatcaacgaaaatcagaggattctggaaaggcagccaacttgcgcctcttagaaggatcagaggcaagatgagatggcagcctgcagagtaaatgcttgaaaaaagaggggtgattttcaatggtttgcttaagtcactgttttctagacaccaaaatagctgttttgaaactgttttaattgcttgggtagcaatgtgcactttaaacaatttggatattggaatgcagtctcatactgagtgatttgagtagaaccactgatgatgattttataaattgtgtgaagcgaatttcccatttggcaatcatttactgatttgcagtgatgaatatttttatgagaatttaaacttagcaagaatggccatggaggcaaagccttcacccagacccatcccactctcctgtgatccaggtggtccaggagcccaggacaggccttttctgtgggccctggccagacagggttacctggtgaggtgcagagagtccctctagtggccattttgtatggtagttgctaatgcagaacaagttctgtcttgggcttaaattgactgaagactttagggggaaagaatagtaaatgcatgtaaacaaatggggacactctgttcaggagaataatccgactggcatttgtggcagtttttgaaatgtaaatgtattcatgtgtgttcttgtaaatacgtgtcgctcagatgtcctttgaagtgggagggaatcaatccggggataatttcaaatggaatagagtattttgatattgttcattcagagggtgatgtgtacatatctatattgtatatatgtgatgaaaatgcattggctttttgtgcagatacaacctgctctctgtactgctgttggacagtcagtgttttaatgtttctacagttttgctattgcacgatttcatattttgcctctatgatgaacggcaaccattatttgtaactgtttagtgctgtaaagaaatattccaagtgtcattaggattgttgctgccagaactgatatgcatgaatggcacttaaaataaatatattatgttaactctatttacaaca

SEQ ID NO: 1175 - DNA, 312 bp, Homo sapiens
tgacccatgagctctgcatcaagggttattccaggggctactgaagatctaatatattccagccttgcacaactgctttgaggtactgtagactgctgaagtttccaccctcttcccctgggattgcacacatagctgttatttttttcttacacagcatattaagggaatataaagctttaggcatagaaatcactaaaaactgtgtttgtcatgacctttgtacttgatttatcatgactttgtatgactgagtaatatgtagtcagatcactaatatggtatttgtaattaaactacaaatagtttgtc

SEQ ID NO: 1176 - DNA, 1993 bp, Homo sapiens
tgtccagtccccagccaggctctgtcccctgccatacctagactgtgtgtttcatatttttttggaaagagaagtgaacatccagccccaatcatggtatcattcggtctgtcctcagcgtggcttggacggggcctgtgtcagagtggtcagtgctgacccctggggctcttgggcagaaagatgaggagacagaggtccagggtgggttacatagcacatccagggctaagcaagaaataattcagaggtcctaccctctgtctagggacccccctcccaagcctggccttggccttggcacaaagtcctccttgataggagatcccactcactcctggaggctgcccctgaggcttggcccagctctaggagcagtccccagggtcagggagcccctggtgtggaaagaggccccaaggtagtaaaccctgcccctgttactgtgctccagagacctcctaagggaagggacagttcctggaaggccctccagctggatgctggggatcagcgataggtgaggggacacagtgtaggagctccccatgtagaaaagggaatgtggggagggcgttaggagcttgcaggcattaggactgtcctgagcaaggtctgcagcccccagctctgctcaccccgaatcctgccccttgtttccacacctaccattcctcctctcctgatccccagcatccagctgaggtccaaggtctttgtcctagaatcagagtggggaggggacagcctggggctgcccagagactgtgggtggagctgcctgctgcactcagcagtgcggtcagagaagggcttttggtcttgaagtccaggtaccatccccccttagcatacagggggaagggcctgagaggaatgtaaggaaaccagcccagatcagtcccaaggccagagtcctttgtcctacatctccctgaaccagagtgtgccctgcccctcatgctcagacctctcccaccccaaaccctctcccgggactcagtctccctggccactgcgtatcaggcttctggggaaagcatccatcacagaacctccccttccctgccacgcaccttccttggccagctccattctggcctcctccaccacctgccttgtgaccacatctcccaccacgtccccagatctcaagaacgcagctcagcttctccttcgagcttgactctgagagggaaagtgacggaaaccaagtcagatgagatgactgccatgtacactgcagtcaagggcagggaggggaggaatgacacaaatggcagggagctgctgggggactgacccctcggcgcctggcctggccggtgctgcacatccaccggggcacaacagggacttgtccagcctctggtcagaggatgtggccacctgaccctaaataggttccccagagtcctgcccctctaatgaatgagaactgcaggagtttctcctctgggtgcctgaagctatagtgcaatggttcccaaccctgcatgcacattcgaatcacctgggggcacaatgcctaggctccaaccccagacactcttatttcattggtctgggtggacctggcatcagaagtcatgtagctcctcaggggactgtagtgtgtggtcagcactgagggctcctctatgaggcctcaagcccaggtgactctgtgaggtctgcagagggagaaaagaacccacaagggaagaggtggaggtcaggcacggtggctcacgcttgtaatcccagcactttgggaggccgaggtgggtagatacctgaagtcaggagttcgagactagcctggccaatatggtaaaaccccgtgtctattaaaaatacaaaaattagctggctgtggtggtgggcacctgtaatcccagctactcgggaggctgaggcaggagaatcgcttgaactcgggaggtggaggttgcagtcagccaagatcgtgccactgcacaccatcctggatgacagagcaagactccatcac

SEQ ID NO: 1177 - DNA, 537 bp, Homo sapiens
gagatagcgagtgtctggagcggaggcctctctgaatgggcaggggtttgtccttgcaggacagggtgcaggcagatgacctggtgaagatgctcttcagcccagaagagatggacctctcccaggagcagcccctggatgcccagcagggtccccccgaacctgcacaagagtctctctcaggcagtgaatcgaagcccaaggatgagctatgacagcgtccaggtcagacggatgggtgactagacccatggagaggaactcttctgcactctgagctggccagcccctcggggctgcagagcagtgagcctacatctgccactcagccgaggggaccctgctcacagccttctacatggtgctactgctcttggagtggacatgaccagacaccgcaccccctggatctggctgagggctcaggacacaggcccagccacccccaggggcctccacaggccgctgcatgacagcgatacagtacttaagtgtctgtgtagacaaccaaagaataaatgattcatggtttttttt

SEQ ID NO: 1178 - DNA, 352 bp, Homo sapiens
ggccccaggttcaaaccagatgggatcctgagagctttgagagggtgttgccagttttaagctgagatggcccatttggagccttacagaactagaccagaagacatttgtggataaatctgaactcacttcctgtgtgtaacttctaacttcactggttcctcccatctgaattggccacatgcttgctgaagagacttgttttcttcttctaagacagtggttttgttttttgggtttttttaaaaaaaaaaaaaaaacacacacaaaaaacactttttctattgtttgagaaaaatcagtgtttctcatgaaactctatatcttctccaaaaatacaaataaaatacta

SEQ ID NO: 1179 - DNA, 1193 bp, Homo sapiens
gtcgccccagatcaccagcccggcctgctcccagcagccctaaggatctctcaggagcacaggcagctggatgagacttccaaacctgacagatgtcagccgagccgggcctggggctcctttctccagccagcaatgatgtccagaagaatattcaggacttaacggctccaggattttaacaaaagcaagactgttgctcaaatctattcagacaagcaacaggttttataatttttttattactgattttgttatttttatatcagcctgagtctcctgtgcccacatcccaggcttcaccctgaatggttccatgcctgagggtggagactaagccctgtcgagacacttgccttcttcacccagctaatctgtagggctggacctatgtcctaaggacacactaatcgaactatgaactacaaagcttctatcccaggaggtggctatggccacccgttctgctggcctggatctccccactctaggggtcaggctccattaggatttgccccttcccatctcttcctacccaaccactcaaattaatctttctttacctgagaccagttgggagcactggagtgcagggaggagaggggaagggccagtctgggctgccgggttctagtctcctttgcactgagggccacactattaccatgagaagagggcctgtgggagcctgcaaactcactgctcaagaagacatggagactcctgccctgttgtgtatagatgcaagatatttatatatatttttggttgtcaatattaaatacagacactaagttatagtatatctggacaagccaacttgtaaatacaccacctcactcctgttacttacctaaacagatataaatggctggtttttagaaacatggttttgaaatgcttgtggattgagggtaggaggtttggatgggagtgagacagaagtaagtggggttgcaaccactgcaacggcttagacttcgactcaggatccagtcccttacacgtacctctcatcagtgtcctcttgctcaaaaatctgtttgatccctgttacccagagaatatatacattctttatcttgacattcaaggcatttctatcacatatttgatagttggtgttcaaaaaaacactagttttgtgccagccgtgatgctcaggcttgaaatgcattattttgaatgtgaag

SEQ ID NO: 1180 - DNA, 258 bp, Homo sapiens
atagcatctttgaatacaaagaaccaagaaaaaggaatgaagactcgcaatttcacgacacactttgatcccttctgttggtgtcatgttgtaaacatttctttcaataaactaaagaaaaattattaaaggaacacatacctttggttaaatagtctagactaaaagattgagaagttactttccattgctatctattgataatttagacattgagttcaaattgccttcattttatgataaataatgatttaactg

SEQ ID NO: 1181 - DNA, 900 bp, Homo sapiens
gctcccatctttagaccctccccactccctccatgcctgacagcttaaggacagtggttatgacatgggggccttgaacctcagggacagaggtggctggggcttaaaggttggccagggatggagtaaaccccacttccctgacactagccagcaaagtgacaatgaccctctcttgctcaataactctcaactgttccctgctgttctcaggataaagccaaacaaaggcttgagtgtggacataaggccctctgtgatcatgcctctcggcctcttggtttcttttcttgccttcccctactttactgtcgaaatcaatgttattctccctcccaccacttcccatgcagtttccccaggcacctttgctcacattggtccccctgcctacgctactcttctcctaaatcctctatgactgtgatggcctgcctacctgccagcatttcaaatatgcccagatggtaacatttgtgcaggtgaaaaccagtgccaagcttcctttttttttttttcctgagacggagtctcactctgttgcccaggctggagtgcaatggcacatcttggctcactgcaacctccgcctcctgggttcaagcgattctcctgcttcagcctcctgagtagctgggattacaggcatccgccaccacgcccagctaatttttatatttttagtagagacgaggtttcgccatattggccaggatggtctcgaactcttgacctcaggtagtccgccttcctcggcctcccaaagtgctgggattacaggcgtgagccaccatgcccggccagcttcttaatgaaatattttcctataaataaagtgggtaatccggttataatatgtttttcacaggaattaataaatctattttcattttgaataaa

SEQ ID NO: 1182 - DNA, 514 bp, Homo sapiens
gaagcatggcctagataggcgcccacctaagtgcctcaggactgcaccttagggcagtgtccgtcagtgccctctccacctacacctgtgaccaaggcttatgtggtcaggactgagcaggggactggccctcccctccccacagctgctctacagggaccacggctttggttcctcacccacttcccccgggcagctccagggatgtggcctcattgctgtctgccactccagagctgggggctaaaagggctgtacagttatttccccctccctgccttaaaacttgggagaggagcactcagggctggccccacaaagggtctcgtggcctttttcctcacacagaagaggtcagcaataatgtcactgtggacccagtctcactcctccaccccacacactgaagcagtagcttctgggccaaaggtcagggtgggcgggggcctgggaatacagcctgtggaggctgcttactcaacttgtgtcttaattaaaagtgacagaggaaacc

SEQ ID NO: 1183 - DNA, 1125 bp, Homo sapiens
gtgtggctggcaacctcgactccctggtgctctttgcagagttgggcagtgaaattaccttttgctcaaggctcacctagatgggtacaataaaaagaacatgggctttcagcagcagacaaatcccacttccaccactgactagctgtgtgaccttggacaagtgacctaatttttctgagcctgtttctcatttgtaaatggtgataatacctacctcatagggttgttgtgaggattaaaatgaggaaatgaatgtaaagcacttagtacagtatatgaaataatgggtattcaataaatgatagtttctacagatccttctccccaccaccctccacagtccttgatccagaacttaccctaatctgatactgcctcacgtcaatggtgagctgatggacacaagatcaaataaggctatgcttattttgtgctgccagaaactgtagcaacctctgtgttcttagaggcacactgtttttgcaggccctcctgcctgggtttcattctggctatccctctaaggcgcaaggtgaagaagcttctgggccaggaaggaaaaaaaaatgcccacctgcagctctggtgaagcttgggcctgctctcctttccatcctctaaggagccaacttggcttttacctgtcaaatagtcataaagtcccctatcctttaccccaccttatacacacgaggctttctcaggaagtggctctgccaggcaggactatgtgggaaagggtttttccttagcacacgaaaaagccccttcccctggattcatgtttcttattttggagggagaagggaattgcacttcacactgccatcagggtttagttgacctcataatggtgcccactttctcgactttggccaggatttccttcaaagaaaacgactttccttcatttccctaagcctgtggcccaaatggtggaccagaatgatggtgggagggggcaacccccagtagctttgcctgcttttataaagttgaacaaattgaatttagacattcaggctaacctgcctttcttagtactcctttgttggcatgggcaggggttgagtcagcagaagtggaccaaaggattcctctgaataaagttatttaaattga

SEQ ID NO: 1184 - DNA, 78 bp, Homo sapiens
gggcccgcacaccacccacgtgcctccagacagcgagtgacatcccatctcctcctctgcattaaagatgacctgctg

SEQ ID NO: 1185 - DNA, 1061 bp, Homo sapiens
gcacagctgccaggggagtggccccacccccaccccgtgctcccaccgcagagactggtgaggcagaggccaggtgtctctgcctgccccctgccacgccctggccaggacggctgctgtcaccttggtcaccactgctagtgcagtcattcatgctcatgtccccagtgtttacatgtcctttggatgccaagatagcagctggggggaggggtgggagtggagggttgctgggaggtccaaagcactttggaggggtctcgggccaggtccccagcagcctggatggctttacgtggcctccgatacccttataccctgccctgagctgaggttctgggtgggcctccagccccatgactagtgctcctgccctcagagccgaccccagcctctgccaggcacatttggctattcctccctaggggcaggatgaagggctgggggactgcccagtgttacttgtcaggctgtgctgcccagccctgtttatctgtgtaattatttttgtaaacattgtattctctgtggtcgccacctcctcgcccccagcctcgggttcagtctgtcttccaggcctgcttgcacctcactgggctgctccggggtctctgcccctcattccaggcctggctgtcaggcccagccagcaggggcccgtgacccagcagcctgcccaaagcatttgtttctgggggatggggtgggggctgctccacaggaggtttgagcccagcaccctggggaaggggaccctgcacgacacccccttgccctccctccatgaggctaaaggcccagtcttcccaaatgtgctgccctcgttcatgtgccaaatggccccagcccacatgcccctcccctctctggagtgggagccccttctgaagtgtctgaatccctgaagtgttcatttgtccgtcctctgtgcagtgacagccccggccaagccacctctaatcctctgtagcaataacggtgcgccgcccatccctgcccattgtgcaccactaggattttaaagtccatagattttaatgaaatttctattcctgtctctg

SEQ ID NO: 1186 - DNA, 487 bp, Homo sapiens
ttggccgaggacaggatggggcaggacagggtagctgtttggcccagcccagaatcctcctctccctcaccagaggggaagagggagagtggcatagctctgtgtccagagtgtccccagctgccctgtgggctcatgcccttggcgtgggcttgtgcccttgcaagggcttggccacttggcccttctggagcagacactttgtgccccccatccccacccctcaatctcagcccagtatcagcccctcccattgcgggcctgggctagggggacccaggcactcaccgcctcctccctggtacacaggcttctgtggggccaccaagcccctcctgtgccccctcccatccatagtgcatggtgtgtggtgcccccagggctccaggacagatcaggccccaccttgtgtctacccccatccccgctgtgaacgtgccactgaataaagtcggggaaacgaggcactgggtgtgtgtgcaaagcc

SEQ ID NO: 1187 - DNA, 729 bp, Homo sapiens
ggccattgctccatctcacctctgctccagaaataaatgcctgacacctccccacaacctgcaatctgtcgggcactcttctcgttcaactccctgtagccctttgggactttgcggtcccctaagtagaaaattcctatgggcctgtctcctgggggcctctgtctgctggtggtctgcttaccacagaatcctaaggggcaggagtgcctgggcatgtgtctgtgggagccttgcagtcagttgtgtttggacaagtgcaacagtcaggctgctgattcctgtggcatgcaggctgtagaggttgacaaatggaggggggtgttgagggtgagccctagttgattttttaaaatttaaactctggtaagaacatttaatatgagacctactctctttttttctttacttatttatttatctatttatttcaagacagggtctcactctgtcacctaggctggggtgcaatggtgcaatcatggctcactgcagcctcaacctcccaggctcaagtgatcctcccacctcagcctcccaaagtgctaggattacaggcatgagtcaccgcgcctggccaagatcacctaacaaaattgtaagtgtgtacgatacttaaaatttaagagattatgtgcacggcagacctctagaactgaatagtcttgcatcttgcataattcagaacttcatcatcttgcataactgaaactttgtgcctgttaccag

SEQ ID NO: 1188 - DNA, 625 bp, Homo sapiens
ggtctcgcctgcccccgcccggtttcccccacccactgccctccttccctcccgtgcccggtcctgccagccagctctattagagcagcttttcctgtgtgccttgaaggccagagcatttagggacagaacttgaaagagaagatggcgaaaagggcctgagccagggctgggaatgtgtccactttggtgggagagaaggtcggttgcttgggggacgtgaagctagaaaaataaatgagcccaggcatagaggactagagcccaggtgcacggttagcttcacagcaacagggagctaggccattggttctcaaacttaaggaaggatcagcatcacggaaggtcttgtcaaaagagtgctgggcaccactcccagcatttctggcacgttagatttgggatggcgcccaataacttgcatttctaacaagttcccaggtgatgctgtgctgcttgtccaggaaacacaatttgagagtcatgtgaaacgtgcttgaaggggtataccttaccctggtaaccttactcaaaagaagggtcagtgtgtgctgggggacttttgccttgtttgtaatgttaaagtttttgtttacattgagaatatattcaagtttttgtttaa

SEQ ID NO: 1189 - DNA, 85 bp, Homo sapiens
gggggagtccaattctgcaaaattgtttattatcctaggaggaggcccccctggggctcacatcccaataaataagtgtctgaca

SEQ ID NO: 1190 - DNA, 173 bp, Homo sapiens
gttctgagcaagtcagactccttccttttggcctccaaagccacagatgttggccggcccacctgtttaactctgtatttatttcccaataaagaagggcttccaaaggcatgctggagacttgtggagcagtccaaagctccatgtcaggtgggctccaggtgtacacagtg

SEQ ID NO: 1191 - DNA, 950 bp, Homo sapiens
ggcgtgccgccggctgtgggaccagcaagactgcacgtgtccctcttggccttgcccagggcgaagacaccttccctgccctggtttggctgacgtgctcagcaaaaccccatgtgccctgctcctgtgtgcagttggggtaggggcagctggcatggtcaggtaacactagtggcccagccccgcagacccacaagccctacccgtgctggggcttgcttcccgaggtatttcacctcttaagagggaatcttccacaagcccagcacaagctgccaggcctgagctacttgaagggggccatctaggtccccaacccatggactttgcctccattttcagctccgccttttttctcctattttctctctggctttcttcagccatgactcacaactaaaaacataaaacactggaggttagtggaggcccctccccaagcagggagcctgggatgggcagggagtgatagccaaactccttggtcacctgctccaagaaggaagcagtagctgagcacctgccctcacattctgctcttttcccctctccctccataccagagatgtggtgagctctgttcttctaccaacccagtctcaacacacaaagtgccaccaccttccctgactcagaacccacatccactcaatgtgaactctactaccacgacctccccatattcctcacttctccatcacctccagcctgactccctgtctgccctttcacccccaagattttgcacaggttaaggccagttatggcctttttgaaatctgtaatagctcccctttccccaactctaaagcctagaccttaaacctgttcctagagctatgcacacccctgccccagtttaccgttcctccctcagggcctccgtgacactccatgaaaagaagttcttgcataccggaaagttgaataaatggatgaattcattcctt

SEQ ID NO: 1192 - DNA, 63 bp, Homo sapiens
cacctctgaaagcccccattccctgagaatcctgttgttagtaaagtgcttatttttgtagtt

SEQ ID NO: 1193 - DNA, 957 bp, Homo sapiens
gggggtttagtccctgcctcaccttggggatggaccttcagctgaaaccatatggccccctaggtgcacagccttgattcttccctggagcctacagagcaggcaggctaggccaagccaggctcaacttctgggctcccagtgcccattggctgtgtatgacgggaggcagcagtgagaggccttcctagttagggccaacagctgataccaagcctctgaaatccagcaaggaggtctgcctcccaccagaccctctccagtgtacttccccagataggaccagaggatgtctagttctaggctgagctggcaggcagctattaccccggttctttccccaccccaggtctgtctcttgccttttcttggggcatataagctactgagtggaacatggagctgatcaagaggccgtaatggtcatggctgtttcccagacctgaatattggggtgcttcttgccagtattctaagacatttgagtaattgctgtttgcacttactgcatggtcagaccacgtcactacatttctatgcaaggggacagcaaggcagcgtggtggtcatggctcttagctaacctattcaaagaccttttcctgttgattaatctattttcatatttataaaggagtcttaatgttctgccccataagactttcaaccttgtggttgggagtggggctggttttgtaggccctagggcctgcttctatgtatttatcaacatgtgatacattcaattggttaaatggtttatacagggactgatttgcttcccttcctgccatggctggagctttgggaacagtctgtccttacagagctgcaataagaaataaccaaagatgaagctggtcaaatattttcataacttgcttctgttgatttttttttttgtaaaactttcccaagacattttcagacttaaaaataaagtcagtgttacaggtg

SEQ ID NO: 1194 - DNA, 293 bp, Homo sapiens
gcgctgggctgttttagtgccaggctgcggtgggcagccatgagaacaaaacctcttctgtattttttttttccattagtaaaacacaagacttcagattcagccgaattgtggtgtcttacaaggcaggcctttcctacagggggtggagagaccagcctttcttcctttggtaggaatggcctgagttggcgttgtgggcaggctactggtttgtatgatgtattagtagagcaacccattaatcttttgtagtttgtattaaacttgaactgagaccttgatgagtcttt

SEQ ID NO: 1195 - DNA, 231 bp, Homo sapiens
acccaagtgaatgtggagatgagcatctgaacatgcacaggactggggcctatttccagacctacaggtttactactccatgttctgacattgggtctagaagcatctagcagttgagtacagaaaaccagttccaaccacagctttaccacctcccgttaagtccttaacttttctgtacctcttctgtttttgtaaaacagattaaggattaaatgagtttgtcaggta

SEQ ID NO: 1196 - DNA, 945 bp, Homo sapiens
gcatataaatgctcacagttaaatctgacccagtaaactctgtgtgtttagggagtatacaaaagaaatcgttcttttccttttcttatgttgttgaatacttcattcacaagggaaataatcatatcccaaagagagagcaattggcttgttttgcttttgttattgttcttccctgttatctgctttatagagagaagtttgtgtggtgggacagattttttaaacacactcacacacacacacacatacacacccagtatatatggggcgatgcacaggtaggagctggcagtgcagggaagaggagacactggtctgcagcaacagcttctactaccagcccttggggcactcacccctgtgatcaagcaatcattgtcaatgacaaagtgactattgaagttataattgtattaaattaatgctaataatttggatattttattttatttttggctgctcgggtaactttagcccttaaccaagcatatgtgggtttttttggttgtttttttttgttttttttttctttttcctttttgggtacagctgtaaaatatttggatataggaaatgttgtgttattcttgcagccttgatattcagggtggattgtaaaatataaatttttgtgagatttcaaagattaagattattttgataacattatttacagatttaaaagatgtggttatcacaagtctcgagggggaaactactgcataaaataactaacttggaataaatattttgcatcagtttggattgtcttgtgtaagaagtatattttctttaaaattagatgagtggattcttttttaggggaaatatttttagaagttggggggaaatgtgaattcagacacaactgtttctctattttagcagatacttttttgatgcagaaaaacctgtgcaataaattaccagtaataaagtcag

SEQ ID NO: 1197 - DNA, 1229 bp, Homo sapiens
aatataaagcataacagagcacaaggaacattttgaaaatgcaggacctgaccttttgcaaagcaaacatagatttggtgataagaccctctgattctgtgagttttccatgtatttggtagataaatgactaacgaggctgggcgcagtggcctcatgcctataatcccagcactttggaaggctgaggcagaaggatcacttgagcccaggaatttgaggttgtagtaagctacgatcatgccactgcactccactctgggcaacagaatgagatcctgtctcttaaagaaaaaaaataaactcaagaatgatttttctaaaaatatgagtgagaatggatatggaatatatcccaattaataaagagctcacacagatttgccaggtttactaataatagaaatgccatttatgctgtagaattctccagtttaagtgtagacaactcctattttacaaatttgtagaaattatttactagaagcttcctggcaaatagtccctttagctacttctccagtgcagtataaattgtaacataaaactttatgtgatataggaatagtgtcaatgacacagtttaaagacctctatattcacaattatatccagagcataattttccatggccatagtttgagccacagagaaagccaatgaaatagattcctacttttatttaatgccaagagttttcactagccccaaactttttattggcagcagatatcctaggaggggtgtttgggaaatatctagctattttaatagatagatacctttttgcttgatgataagtttttgcttgctcatattttttgtcttgatcctgagaatgcaagtaaggaattaataggaggttcttagtgaccagatgttgtaatgggctatacagtccagcaggcagtatgcacctagaaatttctcccttttttaggctgggcatggtggctcacacctgtaatcccagcactttgagaggccgaggtgagacgggaagatggcttgaactcaggagttcgagactagcctgggcaacgtgatgagactccgtctctaccaaaaaatatataaaaattagccgggcgttgtggcttgtacctgtggtcccatctgcttgggaggctgaggttgcaggatcacttgagcccaggaggtcaaggctgcagtgagccaagattgtgccactgcacaccggcctgggtgacagcatgagaacctgtctc

SEQ ID NO: 1198 - DNA, 3533 bp, Homo sapiens
agaggaagtgggaagagaggtggttctctggcatttttttctacagtttttattagactacgatgagggcattctttctacatagactgcttgttttgcacaagaagtgattttgtgaatgtgaagtggagaggccgagcagcagccggccgggatgggggcattagaggcctgaggttctctaggactcagccatgccgctgcactgacatactaagctggaagcagatgttttttttgaaagtctgtttcattggggtttttgttttgtttagccagacaccctcaacagaatattaggcttgatggttatagcgggtggggttgtatttggaagcctctgaagagaccatgtctttttaaaatctaactcttgagagtgcagcaggggcatggctctgctgggagttgtgttttgctttggcagtctctcttccccccacgaagaaggctgtttaggttttgtgatagaatgggatttgatgaaaaagacaaccaaaggaaaatggggaggcttgggatttcatttaaataatctaagccaagatgataaaaaaaaccttcaactgaaggtattttgtttcttaccaacataatttaggcttcagcatctcaccagcccctccctctgaagaagtattatgttcagaagccaacaaaacagtttgttgccagaccaatgtttgatgggaaaacgtggcactcatagttgaatgtatacttctgtaccaaaacttgaacataaaaagactagaatttgtgagttttagcaaacgctaaaattgatcactgtaactaaccccttctgtccttcctgcctgtttctctgagatgaggaatagcattctttttgtggggatggtgagctttgaatcataaaatgaagttggtgcttgtatggtgtttccttagcctaaagaatgatctgttgtttgaaacctttgtaacttgtttgtatgagtaaagaaaaggtgcaatgcagtgcttttagatggcttgatataccaaataacaatatagaacaacattattatatgtgcttccccaagtttaaaggccctgcagaaatagtaaacatggtttaatttcccttcatttccccctcctttgctggatggggttttgggagctataggttgctaaggaggggagtcagattgtggtcaggtgcctcagtaaatcacagacccaggggccctgtggtccagggtgagagtcacaccacattacacatgtgcttccatacagtggtttctgaagcttttgcagggagagaagatggcttagtgtttagactgttagtagaagccatctggaagcttttctctttgcctttttttgtgatcctgccattaaggctatgtgcagtctgccctcctgctccagtggccttgattttaggccaggaatcttctgctccatgtggcttaagccttccagctgagtgaagctaggcaaatggagtgggggcaggcatctattcctgcccccatcatgccccacacccatcagtcaacactcatttgacaaatagagtccagctgcctctgagccaatcctgggaccataataggctcagagtgagtcagctgtttgaacccaaagctgtgcagtcaggcaccctggctgagctagagaagccagtacctgcatcttggtttataaggcttacagctaggaaagctctagttctgggggtgaaagaaaaatattagtttacctgagcacttatttccatgacagggtctaaaatatggaccatgatgtagacacagatttttaattttggaaaaacctccagttactagtgacgaggatagaaagggaagtgcttctctttggctttttcttggttacactgcagtttcaggattgggtgagacagagacaaatgaacccccctctaaagtcatttaactaatagccagcacatcccttccccaaactgtcaattgaaatcttaactgaaagttttactgaataataccaagctaattgctgttgggcacacctggatggctttgcacctggtgttgaacctgctgaagcaggtggatgctcaagattacgtgcaaggaatccctcccatctggtactaaaatttcagtgtgttctgagtgtcttttaaaccaaaatggaaatacagatacagggctgtagtattcagtaatgtgtctgctccttgttgggcagacaccagcggtgtgcagggagagaccaagtaccatctttatctacacttgggctggcttgtggagaagggctgctttttttcagtcctacattccttcattttttttttcattcttgaattcattgttttgtgggatctaagacccaggggtcatttgagaggtttgacagtatcttttctgaccagttgccacatgacttgcttgaccctgagcctgtggaaatggcatagggaccagtctactacccactgggcctggtgtgtagagggggagagggtagcaaggtgcttctctacgcccatgacttgggagcaggtcttggcctccttcatgagagtctagtgccatgtcctgtcccatgatctggaccctgggactgtcttggcatcttaactgcagtttcaatgaggcagagggcaaagagagaccaagatcagaggggttcattatacccctggctagagaacccagctactgacatgcaagcagcttggggctggctggacacaggtactaggcccattgtttccaggtgaagctttcatcacagaacagtgttgtctccacctggccttagatggcacgccatgattcgggcctggatagactgcctgcgtccttaccactgatctggccaagaatgaggccctcccaacactttcactccctctccaagccttgatgggacctccacttatttaggcctcatgtgctttgaagaagctttgagagccaatgtgtcttccacgggtctcttttttgctacaagtaatcagccccatgtgttctcttaaactgagaattgcacctgggcaattcctgttttctaaggtggtctctgctgctatttaacaacccagagtaggcctctgtgaggcttcagtggcctcagaaaccagagggtccagatagggggcctgcttgggccctctgctgccaactgctcaaacctgctttagctccagccacttgtggcaaacaacctcgtttccttacaaattccagcatgtgactttggtgccgttacttgtgaaaaatctattctgttgtctttgatgtgtccaagaaaattcgtgtagtttacgtaaaaatatctgactcacaagaaagccaactgtatgtcttgtgatgggacagttcataatgtagttgctagaccactttacaaattgttcttgtcaccagatgtgttcagacattgctgtgcaattgttggggagggtagggggaaaggcgagaggagatacttattggtctttttgtttaataccttccccaagaggggacagtctggccaacttgctccagtaatgcaataaagacattgcaataaagtaa

SEQ ID NO: 1199 - DNA, 1343 bp, Homo sapiens
ggccatcgcccttaaccgccagctatctcagcacgaagagaacgaactagcagaggagccagaggcactagctgatggcctctgctccatgaagctttcccctccctgcaagtcacgcctggcccggagacgggccctggcccaggcaggccgtggtgaagacaggagcccgcccacagcactctgaaatgctccagtcacaccttataggccctaggcctggccaggcattgtcccctggaaacctgtgtggctaaagtctgctgagcaggcagcagcctctgctctgtggctccattcaggctttttcatctacgaaggccctgaggttcccatcaacccccatttccctagggtcctggaggaaaaagctttttccaaaggggttgtctttgaaaaggaaagcaatcacttctcactttgcataattgcctgcagcaggaacatctcttcactgggctccacctgctcacccgcctgcagatctgggatccagcctgctctcaccgctgtagctgtggcggctggggctgcagcctgcagggagaagcaagaagcatcagttgacagaggctgccgacacgtgcctcttccctctcttctctgtcaccctcctctggcggtccttccaccttcctctgtcctccggatgtcctctttgcccgtcttctcccttggctgagcaaagccatcccctcaattcagggaagggcaaggagccttcctcattcaggaaatcaaatcagtcttccggtctgcagcacggaaaagcacataatctttctttgctgtgactgaaatgtatccctcgtttatcatcccctttgtttgtgattgctgctaaagtcagtagtatcgtttttttaaaaaaaaagtttggtgtttttaaccatgctgttccagcaaagatgataccttaaactcccactgcaagcccatgaacttcccagagagtggaacggcttgctcttctttctagaatgtccatgcacttgggttttaatcagcagttccctattattctgattttaagctgttcctgtgatgaacttagagacagcatcggtgtctgctgctgtgtccccaggtcttgtgtgggtggcacagatctgggcagttagatagtgctctgtgcctaaggtgaagccacactagggtgaagcctcacttccctgtttgagcaatgcagtgcctgctgcccgtgtgcatgaaggtacagccattcagataagtggaactattgagttacataaagaaaatagatttgcatttgtcaggcagacgtttatacaacaccacggtgcttttatacattgtgcttattttaataaaactgaaattct

SEQ ID NO: 1200 - DNA, 588 bp, Homo sapiens
gacctcctccaggaccctgcggggctgggtactgtgtacccccaggctggctagcccttccctccatcctgtaggattttgtagatgctggtaggggctggggctaccttgtttttaacatgagacttaattactaactccaaggggagggttcccctgctccaacaccccgttcctgagttaaaagtctatttatttacttccttgttggagaagggcaggagagtacctgggaatcattacgatccctagcagctcatcctgccctttgaataccctcactttccaggcctggctcagaatctaacctatttattgactgtcctgagggccttgaaaacaggccgaacctggagggcctggatttctttttgggctggaatgctgccctgagggtggggctggctcttactcaggaaactgctgtgcccaacccatggacaggcccagctggggcccacatgctgacacagactcactcagagacccttagacactggaccaggcctcctctcagccttctctttgtccagatttccaaagctggataagttggtcattgattaaaaaaggagaagccctctgggg

SEQ ID NO: 1201 - DNA, 465 bp, Homo sapiens
tggggcccgtacctcacagtctcatgctcggtaccatcagcttgcaggggctgaagcatgggctgcccagaaccccaaccaccagttctatctttctctttctgtcaccttttttctcttttttccttcttcccttgcactgaggtcctggaggccttgatgaggcccagcaaacaggcattctcacagctgggtttatagtctttgggccccttactcagtatcctgggaaccctgggccaggaggttacagtggtcatcataattgctgaagagatcccctcccctgcccctgggttcctgccttccctcctcaagcaggcacccaggctttagagaagtatagggggcttcttccctgctgggcttaccacactgctctcaggcctcaaaccctttcatacctttattcttttttttaaccaaaaaagtttttcttataaaataaattttgggcaaacatca

SEQ ID NO: 1202 - DNA, 1940 bp, Homo sapiens
gcccaggtctggacttttttggccatcagatggacgatctgaacatagggtggctggcagaggggacccccaggagcctgaaggaatctgaaggcactggaatcactccacacacccaaagcctctggacttctggttctcaggagtctgcctacctgtcgccctgaccgcttgtggatggagaaggggagagcatctaggcaggcaaacagaagggaagtggagttaaacctctggcatgaagtctgggagtagggtaggctagggggtttcttctatgacacttgacccttccatgctggttcccaagcctattggaggaatgtgggtgtggccgaggtgatggcaagaaaggtgcaagaaagtgagcagtctgcctgtgagtgagcacagatgccggggtgtgtgtgtgtgtgtgtgattttcactgtggggtgtgtctgtgagagctagctgccttacccctccttggcacatagtaggccttccataaatgttggatggatggataaatagattgggaccatcagaccatgggaccatcagaccatgaccactgtaggagtgatgacagctcagcgtccccactcagtgtatctgaccatgtgtgtaagtgcacaaaaatgtggttgtagatgttgctctacattcaaaccttccaggctacactcttccatcagcatgagtcctggagagctgggggaacgtaggaagaggagccttgccttgagttcctaaaccgacccactgcagacacaggctctgattctcttacccagagatgcccatgagctgacattttactcatccctctgcctccaagaaggcctgtattatacgtgtcctcctgggggttggagatgatccctcaagtacacaaaggtcccctggcccttcatctgggaatcatatactccactctagctcccagaatctacagacctggctcctcggatctgaagcccagcacaaaataatctccccgtccaaggagcttgtggaacttgaattgggaactttggagtcttgtctcccatcccagcacattgaggatgtagttggtgaatggactcttccaggcatggagatcctccatcctaaaagtacctgcctccttcccagccatccctgacacattccagccagttggatctcacagcacagctatccacagggagactgggatgttcacgcagcactccattactcagtacctccatacccagccctatacgcagacccacaggtggggaaactgaggcaggaacagggttctgccctcccagagcctccactctgggatgccagaatggaaagccagagggaacctgagaatcatccagtcttactgtctcaatgtacatacggggaaactgaagccaggagaagaagagggagaaactgtccagggcctcacagggaggcattcatggagctggagaaaccagggatcctgaccgcagggcccatcaattgctacatagagatacacatggaaagagggtttaacagaccctctctaggacacaactgtttctgctttgagcaataatttctaacctgaggccaacatgtcccactgccccttgggttggctggggttgtttcctgagccaagcatccaatatcatgccccactcaatggcctagaagctgcctgtactttggggaaacagatggagctcttgggcccagccagctgggcctgggacttctgcctctgccgcctccagagtggcctggcagctttgccagaggctgtggagcgagggtagtaggagcttttcccagagtgctgtgacttgcatgatggattctaggctgtggcaagggctgatttctgggatagggggagggttggaaaatttatttttatgaaacagagggaagactttattgttgttatttttggtaaaataaaaggcaaactaaagcagcca

SEQ ID NO: 1203 - DNA, 3035 bp, Homo sapiens
aactgtacaggttggcccttcacctagttgactcagccctcgatagtctagagcccaccccctcctcaggaactcaagagctcagcatttataatgagcagttggtaatgagttgccctatgtgcttgtcgcaagcagtcacagagatgagccctattacttgatattcaggaacaaaggtacctgaacattctgataattatctcagcatacttgaggtttccttttttaagtgttcgaggttataacaagagacagccaaggacctacaagacagttgacttgattttgcacagtgtaacagcgcagttgcattctggccactttgaccttatagctcccaaatgatgagtttgtcatctttatgaactcatgacaggataataagcttgaagacctgctgtagttagatatgggctttaatccttcccaggcaccagtcagctgaacaaaagcataagccaaacatcctgtttaaactgtagaataaccagatattcccatcaggttaaagacttcatctagatgatgccccccagagatgcctttagtgtaagtagctggcttggggtatcagcaaatttcaggtatagttagataaacaggtacagggcctgcatactattaaaccatagtttgtggcacccgcttttctaactccacctgttagaagctatgtgtttgaaggaatgaatcagtgcagtataaataaaattcttttgtaaggagaagattaatcctggtttgcatgatttttttaaaaacaactctaaacatgatacgaaaaagtggatgaaagcaaatgttcccagattggatgtggggaaaatatagcaataattttttttttaagtctggcttacaatgtttgttatacaaaataatgaaatctgagttatgtactgtccattgtgtcagggctatgggctgattttatcaaaactcatcttgggactgaaaaattgtttggaatgccagaaataagaaagttgttctccagagctggaaacccatctttcgtttgtagtgtcactgttgtggctccaagctcagtgataggaaaggacggtggttacacaccagccttctgaacccaaggcccccagtattgttgtcagctgcctttaccatggcatttctttctctttctttttttcctgagatgaagtcttgctctgtcttgcccaggctggagtacagtagcgtgatctcagctcgctgcaacctctacctccctggttcaagtgattctgctgcgtcagcctcctgaggagctaggattacaggcgcatgccaccatacctggcttatttttgtattgttgtagagacagggtttcactttgttggccaggctggctggtctcgaactcctggcctcaagtgatccaccaccttggcctcccaaagtgctgggattacaggtgtgagccaccgtgcctggcctgacatttctttattgatctaacatgctccactctgctgctcctgcctaagatctggttatatgacactgaatgtggtgagtgggaatttaagcagtattcgcagtttgtgtgtgtgtgttttcttccttccagaagaatttttataggttgggcctgtccctaagctctttaaatagggtggacatcccactattctctgagccgtgtctattttgttgcacctttgagtctatgtattgagagagacagatagtatttttttaaactggggaagctgctatcctttcactatttctctaaaggttgagctgttaactaatgtaaattctggacctgcttctggtcctggcagtttatcttttgagaaacttgagtcttatctgccctgccattttcattaaatgccttctgaccttctgaatgttttgggtcccaagaatttttgacatcagatggggttgtttttattggtatccagttatgtttgcttgtctttccagatgggcccagttattagccatacatagtacattgatacacctccaccagcgggtgaggaaatgatggaaaaaggagtaagaagtggccattcgttttaatcattcctcctggatttgtcctcagtccccaactgccaagtaggatgtgtccatggataaatgtgtggggcatgactaaagtaccacgtagctgttctttatatttatttacctagaaagatctggcaaagaactcaaagaaaattgtaccatttaatcagtaaatttgtcccctggtgctagcatggtgttatagaaagtggacaggctttagagttaagtgaatctgggttcatatgttagtgttgctattcattagctctatactgttgaacaaattgcttaaactatctaattttggggttttttttccatctaaaatagggataataatatctacctcataggattattgtgagaattaaattaacttcactatagtagaaaatatcaactaccatccttttctctacttcccttgcccctcattaaagactaatacaagttagcatttcagatgtgtagatcattctttattccagttaaaagaacaaactttatctcatcagttctgaaactttaagatgcagtagcatcacctaaagtgcttttaaaatgcagattctcaggcctcaaccgtacaccacccccccacacacgtactaaatcaagaatatgtgcagaaggtactgggaatctacttgttaatatgtgctccaaatgattctgatgtaggtaattagccagccacactttgagaaccactgccttatctattctttacaaaaatgtacattgccaggtctttctttcctgtggatgctaactataggatatttaggttcctctgttctttgtctcccatagtggccccctttgcaaactccaaatacattatatttatttattcttgtgtcttttttcccccactagactgtgagctccttgagggccaggacttatctctgttcgcagtgccaaggacatggcctggaccatagaagatactcagttttttgttgaataaataggtaatatggatttcaacc

SEQ ID NO: 1204 - DNA, 3300 bp, Homo sapiens
cttcatcaggcatattttagaaatggactgcctaatatctatttacctaacaacaaaacaacccttacttacccatcagtcctctagtcctccaaactactgtagcagatactttgccaccttttaacttgtttgaagaagctatataaaagttatttttttaaagaagaagaccattttacttatgatgttcagaaatctatgatttcctacaaccagtaagatcttacattttaaaattgccagaaaaaaaattaaagccctctttttttctctttcctttttttgaggggaggagaccttatcttttaaagctgggaaatgtatatagagagagaataagccacttttatatttcacttaaatttgccttaaattagctgcactttatagagactcagaaaatgtcttttctttaaaagataggccttttctgtttgtaaatatttaaatgaaagaaagcattgtgcatattgtgtggaaagtaggaagaatggttttgaacaggatatgaacaaatgacttattaaaaattgctgatctggtgtaggtggcagctgaaactacatccatgtctccataaggtatccctcaaaggcccaggcgctgccagggggtttgtcctggtagctggaggaaccgatttcagggagtagacactggagacaatactgactccaggcatggctcatggaagtaggattctggttctttgttcctattccctcagctaatcccaacctgggaatcagagaagtcttggggatttttctcatttttagtactatttcagggtttatgagcataaaaagttatccattggggagctccattttccctgctgagtgagctagattgccttccccacccacccacttaagtctgtcttaaagccgtagctggctcccaccaccagtaccatctccatttgaatggcagggctaaattcccccagccattatctcacactgaccacccagagctttagaagagagctgtgcttctaattttgacccagaaaaccataccccttgagattttacctagaggctaaccaagagcctaatatgtttctctgggggatgactaaagccaaaaaggctgtgagatgaaacatgtgaaataatattcagtttccttaccattaccagctcagaagtagctagaggctttctacccaaaggatgccaaagtatagcagggcaggcctggagctagggccttcacatggtggtagcaagtttttcaaatctaatacaatcaagtacaatacttcctttaaatgcttctgtggacctggcatgaaagatccctagattgaaaggaataatacctccatgtctcctgtatgttgagtctagaattgctgtgttgttcttagaagcagtctttgggcaacaacttgaaaggggaaaaaaaaactacaaaaacttaactttggtataggccaagtcagggagaaagtagagaaagctgtcatgccacagacttctttagtggagatcatttcctttttaactttgttcaggttgcccttcaccatggatacagtccggtacccttaaacatttaagggctgttttttttttctttacatgatgttcagcttggtattaaccaaacttaaattttttttccagaagtattaaaatttagttaaagcaagatgaagtcttttcccatgaatgtgtccccttatctcattatagcttatgctcagtttcactttcttggaaaggttaaaacaaattagcctggcactttaggtaacttgaaaataactctcacccttctgactgccttccatccactctcaccccacacctttttttaatatatatacacccttacagattttctaacaaccaaataaaattctagcaataaattgaattatactgctatatttgtatatactgtaccataaatagtatgtctgtacctggaaggtatttttttgagaactgatttatatgaaatatacttgagggtaatgtagcttgtcctttttagtttcaaattcttattcataggcagatactttgaagacaccttaactctttgttgtgtgtattttcccttgcatcagataactatacatggagaaatccattttgttttttggtttatcttctgttcttcctaccttgtgcttgtctgactagtatcacccctgagccagtatacagtaccatcctctccccctaccaagtttggcagaggtgtttatactgcattctcagatctatgaatatttttgtcatcctgcctgagaaagtacatcttccaggcaaaagtagggtatcttgaactcctttcttctgagttgagcagactcactggcttaagcatcccataagcctattatttagtgtgaatttgggacttttatttgtatgttgtcttaacttactaagcctgtgacttgtatttagctgtagtcaagcctcaccagccatatctcatctctgagaggaagactggatagtgagtttggttttggttttggttttaaacccttttaccttttcagtctggcagctcctactgctgctttcctaagttactcaaagcactgcttcttggtccttgttttcttttgccttgtactatcttgtataatgtttactaaaagagcctccccataaatcagagaggcaaaaaggtagcatataaaaagaagaaccaaaagaagagaaaacctgacttctagatgactgtggtgtcatctaaaaggcagaggtgcctgaccctcaggaatgtgtatgatgcaacagagctgaagaatgggttcccttcacctactgctggccattgtcccttctgttggagattcctttctttatggttgctgttcataaccccttcaacacccccccttgctggtcctgccggtcacagttgaggattttggctgtgatgggctcatactcataatggcctgttgagttgtttttagtgacaggttttgtttgctgcacacctcattggcttgcttaccaacaccagctagaagtggtccctctttcatatccaaaccagaacacatttgggtattcctgagactttatagagcgtgtattgtttgttatacgaacctaacctaccttgttgttttctcatattaagaaatttaaatctactttgttttagtgaagctattttggtaatgtataagcaattttggttctgtttagggagaattcagggtttccatgacttgatttgagctttgcatatttcaaataagtaacacagccattttaatttagctaaataaaaaaatttcttttttctctc

SEQ ID NO: 1205 - DNA, 939 bp, Homo sapiens
gggcctccacctgccgtcctgtcttcctgacccccgcttctgtccccttcctgtctgcccatatcctgttttctgtctgcccaccttcccttcttcccacctgcctgctgtcccccagtctgcctgcccttctctctctcacctttctccaggctccctacctgcttgtctacctgtctcctacccacctgtatctcttgttgggagaaaagctgagtgttgggagaagctgaggccgagcttgcatgtctgacataatgtaaaagagtcttggatcatgtccaggatccagggtctaaaaccccttgtggcctttggaacaccaagctctgtgctgaagggtggaaggctaccctgacgcaccataatctaagcccggggcataaaacccctcgtggcttggatagaatccagggctcgtggctctggaatgtgtctgaacttgctgcctcctcgctccttgctctcccaggatcaattgtatcttgagttaaaagaacctgctctccattatctcaagtagcagagcagatgctaaaccgtcacagctgtaaatcatgtgcttaatgcaacatgccctttcgacccccacattctcaccacctgtttctttgtttgatcaccaataaataatctgcacttccagagctcggggccttcacagcctccatccttagctttggcgccctggacccactttctctctcaaactgtcttttctcactgctttgactctgccggactttgtcacccccacgacctggtgttgggtctgaacaccccaacatccctgaatctccacccacctcccaaactcctgcctgccctccagactgtctgcccatacacctgtctccttcttcctgcctgcttgtctgttcctatattagtttcctattactgctgtaataaactatcacaatctcagtgattttaaat

SEQ ID NO: 1206 - DNA, 381 bp, Homo sapiens
ccttctctgtggctccaaccccaagactcccaggcacatgggatggatgtccagtgctaccacccaagccccctccttctttgtgtggaatctgcaatagtgggctgactccctccagccccatgccggccctacccgcccttgaagtatagccagccaaggttggagctcagaccgtgtctaggttggggctcggctgtggccctggggtctcctgctcagctcagaagagccttctggagaggacagtcagctgagcacctcccatcctgctcacacgtccttccccataactatggaaatggccctaatttctgtgaaataaagactttttgtatttctggggctgaggctcagcaacagcccctcaggcttccagtg

SEQ ID NO: 1207 - DNA, 3428 bp, Homo sapiens
tgggtctgggccaccaggatcagccaggagggcgttcttaggctgctgggatggtgggcttcagggcaggtggggtgagaattgggcggctctgaagcaaggcggtggacttgaactttcctggatgtctgaactttgggaagcctttactgaccctggggctggcttttctgtttcctgtaccagtaggagatcagaaaaatggagcaaagtggtaggtactttttgtgaagacggcacggtcttccctcttccctcagtcccaaatccttcccaagtaagaggctggagttgtcactgcttttggcctggagtttgggatccctgtctttcctaagacctggggttgtcagctctcatctgaggcatccagcagtctctgccttgcctttagcccctcccaagctggctggggtggcctgtgtggccacttctgtccatatttataggtacccaatagctgcccatttcgtgagccccatcttcacccaggcctatgttgatccatccagcttgccagatgctgcagagtcacaagcctcgaggtgccttcttcagggcctggttgaagaagatgatcagtggacagtctgctctagatgagctgggccggagggtcaggaaacccagtcgcccttacttcttgccctggggatcaaagttctgctttctccccaatgagacttgccttcctaagcctgtggctgtggagacaatgtctgcagccctgagaaagccctgtcgggctttgtgtgaaggcagagaaagggacaatgatagtagagtgatatggagcaagagatattttgggcatgtgggcttcaactcctcgacatcactgttcatgctggcgagtgaatgccagtgtgctgatgggcgtacgctggtgctgagtagatgcgcagccccatctgtgcattctcctggatgcttagagggatttctttgctgtaagatgtctgtttgctgatggtctggtctatgttccgaattgagcacaaaacctgtcctatgaatgctttgcatttggaatttttgcttgacttcagttattggtggaatctttagcgctcaataggaccaggatccagcctcacttctagggtatgggaaatccaatcagagaccaggccctggctaagacccaaacatatgcacattcacttagcagaaccttaaacacccctcagttgtgcagcttttggtcatcaagggtgcgtctgggaggttggtttaatgcaatagaagtgctcccctctgaaagttgtacatgaaatttttgtaaatcacatccttatccttcatcttttaaagaaataaccactgcaagtccttttgtaaagtgaagaatccttttgtagaatgaaccactgccccttcattgatttcctgtgtcaatccagatggtgggatgtggttttcttaaggtgaggcctgtctgtgacctgcatctaagcccatgggacaaattgcacagaagtcctgtatgtctgtcattgtacccttaagtcaccctagccctctccctctaggctctgccttcgaggtcagaggagagatagcctgtggccctgtcctgccatgcaagaactcatcactgtggctgtctggaaagcccccccttatagtttgggcttcagcctagtggcttgtcctcaccatgatggggccctaattcagccatgtacagacagagaatatgtctgctcctttccccttccttttaagtaaggtccaattctcgagcttggggcaacattgttcacctttgtagcactcaggctctccattcaatttcaggctccccagatcatgttttggtgaaaattagggttggttcctttccaacgtttggaagatcctgtgaggagccccatctgtctaaagatagagtcattgctgtaggatctaaggctgtttgcttcaccgtggattcgcttgagttaggaatgagaagtagccacagtatggatgggtggatgggttttatgagatggatcacatattttattaagaactcaaacttctggctccctcttctttcagacttgccatgtgactctggcttggcctatctcctagggctatggtgtggactgaatgggatcatgaaagtagacagttttgagaacgtaaagaactttttcttttccctcaatctcaatcctgcagtggggtttcgcagcctgagtccacgacctaggcagtaggccggtgtgcctgactgcccagcatttgggtaatttagattgtaaaccgctttggcctgagttattgagattgtcctcatttctccagattatctatttgtgtgtgtgtgtgtgtgtgtgtgagagacggtgtcttgttctgtcactcaggctggagtacagtggtgccatcattgctgtctgcagccttgaactctgggctcaagcaatcctctcacctcagcctcccgagtagggaggaccacaggtgtgagccaccacacctggctaatttttacttttttttttttttggtagagatggagtcttgctatattgcccaggctggtcttgaagtcctggcttcaggcaattctcctgcctttgcctccagaagcactgggatcacaggtgtcagccattgcacccagcccagattgtcttaatttctatcttgttccaaggccagggacagtaataagaatggaaaagagatatgggaacactggcagactgtgtaaaatgtaatgcaactacccaaaacaagcctggtaggaaagggcaagtctttaggtctttgtaagaactaaagaagatctgtaatttttattttcaccctctgtaccccatgaccttatccttcctctccttccttgttacccatgaaaaactggcaacattccaagaatagcatctgtacaaaggggaaagaacataaaggtaaaacaaaacaaaacaacattttgagaacaaagatgaccataaccactgaagggaatcacatcttttaagacaaattcatattcttttatttgttatggcagatgacaagatggtacaacctttattcttttccaaaataaaacaaagggcacagcatctgtagtcagccgacaactatttcggccttttgggggtgggtctggccgtacttgtgatttcgatggtacgtgaccctctgctgaagacttgccccctgcccgtgtacatagtgcattgtttctgtgggcgggcccagcactttccgtcaacgttgtactgtatgtgatgaattgcgttggtctctgcatttttctgcagaagaggagtaaccgctccaggtaccttgacctttgtacagcccagaggccaacactgtgggtgtgtgactctttagcaaaaaaaacccatgtggtgatgatgtgtatatatatgtgaggatgtatcgggaagatttctaaataaaagttttacaaaggg

SEQ ID NO: 1208 - DNA, 997 bp, Homo sapiens
ccttttaactccctgcccttttaatacagggacagggtgtctcctgaagatacttagggaaaacaggagcctaccacaaggctcctgatcattctggagtcactgtttcttggtagcagccaattgggaagagtgacttctgtgagatggctggctggtgataggactaagttctcattgttcaaatagagctgttcaacatcactgaaacctttaagaaaagccctgagatcagttattcctacaagtttaagtagtagacagatactatccagctctaagtctcaactgctcttttatactgtacttttttttttgagacggagttttgctcttgtagcccaggctggagtgcaatggcaggatctcagatcactgcaacctctgcctcctgggttcaagcgattttcctgcttcatcttcccaggtagctgggattacaggcatgtgccacaacgcctggctaattttgtatttttagtagagactggtttctccatgttggtcaggctggtctcaaactcccgacctcaggtgatccgcccgcctcggcctcctaaagtgctgggattacaggcgtgagccactgcgcccagctatactgtatattttaagaagttccagcatgttgcatctctgcatttatcctatatcattaaaagaacataagttatcatggtgttgggtaaattagcgaaatcaacccttcctaagtttaagggaaaagttatttttaaaaacaacttaataaaaacttacactcttttatacaagagtgtatttccccttaattaggatgcatgttgattaaactcgagatacagctttttgcagtatggtgggttggttttggtgtaacatcttcaacatgtcacactggctatcaaagaataagaaaattattgagtatgagtgtgttttataaactttctgagtttttcagatgtcttaatattttttaatagaacttaataaaatgtctagattgactattttc

SEQ ID NO: 1209 - DNA, 107 bp, Homo sapiens
gaccatccatgataaacctcattagtgtccgtgtcaatttctcaatgaaaatgtttgatgtgatcaatatctgtattcctttttttaaaaaaaatgggattataact

SEQ ID NO: 1210 - DNA, 121 bp, Homo sapiens
gggctgagactctcaggtgaggatggaggtgcttcttcttctggtggcgtctttggattgtccagtttgcctcagcccttagtatgatactcctaccccaattgccatgctccaaatcttt

SEQ ID NO: 1211 - DNA, 16 bp, Homo sapiens
actttggatttttcat

SEQ ID NO: 1212 - DNA, 177 bp, Homo sapiens
acacggcccagcggtggaaccagccattccttgacaagccagcagcctgcgtcaggagaagggctcctcgccaacccacccacacgctcgtctcactcaattcaatgtcacacttctgcctcttgcaaaattgctggaaaaagtaataataaatatagctacttaagatttcccatc

SEQ ID NO: 1213 - DNA, 2436 bp, Homo sapiens
agaattctcttgttctttggcaacaatatagtattcttcttcctgaatactgaaactatttacaatgtgtatcaaaactacctgtgagcatgggaatacaaaaggtttgagattcctgtaaatgtgacaaaattttaggattttttttttttcttcattacagattcgtctttttttttttttcttataaaagccgtaacccagtcagacaaattcaccttcacttaggcccctgttctggtatacatttactgtgagcttttgcctgcctgtgctattttacttgtaaagctagagcacccaagcttctgccttctggaatatagagaaatagtttcaccctgcactaccctgttctgtagttattctgatgatagccagtgaggttcttaaagtttgcagtattctcccctgattggaatggttgagtgagggtaagggaaagaatatcttatttcttttatgattggtgcaaattggctaaagtgcatttttaaatttcctctacttaatttgtttttcagagataaggaaaaatattttgcacagatttactccactatggaaaagggatgctgtaggttgaaccattatagcctcagattcgatcttttcctaactaaaaatattaaagcctcatgtgtgaaataaatttttaaaaagatttatctggatttagagaattttagatcaacagatacctctcagtgtgtttgctaattaataaaaatcagtttcttacaaataaagtttgtaagaaaatgttcattttaagtgatagatagtggagaaaatttatcacctaaaatatacccatcagtataaggcaagcaaaagtcttaacatggcagccattctgcctttgccgtggccctgtcctgtttagttcttagtgggttaatttttgtacttttgcagaagaaacttcagcaagctagaactggaaggtactttaatttttcatatatatttgtttttttttttttaatgaaggctcatttacttgaaatgtaaaaactttcactgaatacaaatagaaaaagtgatgtgttttatatcatattgctttttgtccatctttgtggtttagtttatttactcacttcatgtttttcacctataaaattgtcaagctagcaaaaaaactcttgtttttttaattgggagagaagagacctgccagattatcagacctcttcatgttaaaagaccatctcctgtaaaactgacctagtggacaagctgaatttgaaatagactgtgaagtaagctgtaacttgtcattttaattttgtttaacacggttactgacttagatgatgtattaaataccaagataaagaaaaatgcacctaaaatctaattagaattctctgggtcaacaagtcaaggtggtattgatctgtgttaatctgagtaacttattgcctagcctataaataaattccaaaatatccaattcatttcttcttgaaatggtgcttgttttgttttctttccattacacaattagactcctacagtttaaaacaaactttaaaccactatcttgcactgctaacttttttctacctttgtaaatagaaacatttctgcataaaagtcatacatatgaagcaagggctgaatcataatcacaaggcttaattttgataaacgaatccagtgacctaaggattttctgcaaaatttgactgggagttgtgataggtggtatttttgtttattttcttcctcttactccttaggataaaggtaagttgacttgaacaactttcttttgcactgggaaaataagcaaatgtttaaatgcttcaaaaaaattttcaattaaactcaaatattaaatatctataacttataaacaccaactttcaatgtaataaatgtatcctaatcttatgtatgtttaactggattacatagatttttatcttttgttaaaatgtgtataccccgtggaccaacataatattaaagtatgtatatattatataaatatatatgtatatgtgctcgcttgtgtaggatgaatgtcttagagtcgtttgtggtattttatgttgttgactctggctccagggcctgtgcttgaaaaggacagataagtattgcccagagctaagtggcactacttacaaagttttaaatgtcttctacatactgattcatgtttatttgagctctctttatagaattttctcttaaagtttcaaacctctaagttgtagcctgtaattatgagaacagtaaactttaagtaataataaagaatcccatccatatatccaatttgcaattgagttttgcatggttctctgattatgtccatgctgtgtccaaggaggagtaggtacatacaatcagcacagattaatatatgtaaagggtttgggacagcacctggtatagaataaataataaatgtaaactatt

SEQ ID NO: 1214 - DNA, 42 bp, Homo sapiens
ataaactgcagtcacgttggcctgaagcaatgtgtattttaa

SEQ ID NO: 1215 - DNA, 762 bp, Homo sapiens
gcaaggcccaccttcctgacctcccctcattgtggccccacacccagtctgcttctccctgttacacactgtccgctctcagcccactctccctgttacacactgcccacactcagagcaagatgagttgctgctattctttgcctgcccctggggttctctgcagatggtcccagtaatagatactcagcactagactaacataacaggtcactacacgggtgcagaatcactttacaaaagaagactctgttttacgaaggggattcactacagggacttagagaacagtctcttttctgcctttaaaatgagagttcctccatttaccaaaatttgacacgcacacattcttcaggggcatgccaattgcgtaaagtgaggctcgcctgcatagctaatcctgttaaagacaacttctcaaagcacaacgtgcttgtttcctatcgggctccctgcggggctttctctcactacaagtcaagcttgggctctcaaagccctgcgcctgttaccacggatgcccacagggcctgggcagttgctgtggcgacaggaagagctaatcttcagagagctcagactctctaatgatgctgaaggagcaaaggctgagtcagaaacacacttaagagaaaaggattggccgggcgcggtggctcacgcctgtaatcccagcactttgggaggccgaggcgggtggatcatgaggtcaggagatcgagaccatcctggctaacaaggtgaaaccccgtctctact

SEQ ID NO: 1216 - DNA, 798 bp, Homo sapiens
catgaatgtgccccttctttcatcagagttagtgttctggaaggaaagcagcagggaagggaatattgaggaatcatctagaacaattaagccgaccaggaaacctcattcctacctacactggaaggagcgctctcactgtggaagagttctgctaacagaagctggtctgcatgtttgtggatccagcggagagtggcagactttcttctccttttccctctcacctaaatgtcaacttgtcattgaatgtaaagaatgaaaccttctgacacaaaacttgagccacttggatgtttactcctcgcacttaagtatttgagtcttttcccatttcctcccactttactcaccttagtggtgaaaggagactagtagcatcttttctacaacgttaaaattgcagaagtagcttatcattaaaaaacaacaacaacaacaataacaataaatcctaagtgtaaatcagttattctaccccctaccaaggatatcagcctgttttttcccttttttctcctgggaataattgtgggcttcttcccaaatttctacagcctctttcctcttctcatgcttgagcttccctgtttgcacgcatgcgtgtgcaggactggctgtgtgcttggactcggctccaggtggaagcatgctttcccttgttactgttggagaaactcaaaccttcaagccctaggtgtagccattttgtcaagtcatcaactgtatttttgtactggcattaacaaaaaaagagataaaatattgtaccattaaactttaataaaactttaaaag

SEQ ID NO: 1217 - DNA, 592 bp, Homo sapiens
ccagaggaggtaggggggaagccatggcttctgatctccactccactttatttctctgggaaaaataggctgcaggtctccagagcatatcgatgcagtactgtactagagctgttgtgactgattcactcaaactttcctgcatacccctgtgccaggccttgggtttacagcataagttcagactaaagagaatggagaactattgtggtgcaacctggcaaatccctcagaggacagagctaaggtggacagggattacctagattggatcctacttgggctatcacagagcattgaccattggcttccctcatctgaggcgtgggagagcagactggatagatgagaattgttttaaaacaattgtgaacagaaactgaagatggtacagttctacatctgcacctgcccttttttcataccacaaaagtattttttgagtactgtactgactttttgctagtttctattctgggaccgagttcacagataaatccattggtttgtatccttgagaaactttgtttttgtggaagtaagaaagttatctactagattatttcctctaataaaatcttttaaaatagtc

SEQ ID NO: 1218 - DNA, 2924 bp, Homo sapiens
ggtgggcagctctctgggccttcagaacctttgccccctccttttactcaactaactactcaactcatatctggagagaaaacctaggagtttctcatctatgagaaagacctaccatgctgggtagggcttatgggctgagtttctgatgttcctcagtagaactgggaagagaaggtaaccttccaaggtttaactatctatctatctatctatcttcaggaaaccctttctaaaatctttgtgttttcactgcagtttagactgacttcttgtgctttgcacccctgtgtagccgatggccagcaccaggagaggagtcaggccgcgactgtgcaggagatgactttcccagctttgctggcttcagaagcctttgtacataagagatgctgctacccaagcaccaaagacctgttaagcatgtgcactactgaccacgactctggtctttcctgttgttggcccctctggggctctacagaaacaggctgggttccaggagcccatctccccgctgtctccccctgccccgagtctggaagagggcaaggacacttccattcctctgtaccatggagtcctgcagccccttaacccctgcgtggcaactgtgtacagcttacccctgcctccagttgcaccacttctagatgtgcctttaaaagatctaactatgggatgggagaacttgagggtgatcgggaacctcccctgctgagggtggtgtcagggttccgtgactccagtgggccagtggtagcctgtcccagacaactccgtcaccccagctctgcctgtgcctttatccctgacagctgctgcactagccttcctgcttccctaaggacttagtggagggggaaagttgtttttggtactacttggtgggaagtaaggggaaggttggatcttgggtttggtctacccacccaagagaaaagactgttaactggaagaaaaaatatatatataaaattttatgtagacacgtttatttatctaggaaactaagtctaactcattgtagggattttatactcaactatacagagtatccaccaaagtcctaatctaaagtcctgctccctgtcactttttaaaagccagggtagcagtaacatgacaaacggctgctgtggcttcctcttgagagaggacagggaaagcctttcctcttcggctggttatgtggggaacttccttagtttttttccacaagaaattctcctttggctttgtttttctgaatggatggagactatgaaggggtttgtagttgtaagagatttaatattcaaaactgaaatattctgcatttcttagaaataccccatcttcccccaccccctttttgaattattaattcaagatcaacaaagcattcctcaagatcacttttaaaaaaggttagaagtgaagcaaatacattcagcttactgatcactatagtattgcataagcacagctcaagaactgagctttgtatgtgtccttttgggggataacagggctggaccatgcttccctgcccttaaacgcagagcttttagtgggtcacagagcgggaactacacacaagtgacttttttccccatgagccctctggccgattttttttttttttttttttttgagacagagtagctctctgccagccaggctggagtgcagtggcatgatctcagctcgctgcaacccccacctcccaggttcaagcgattctcctgtgtcagtctcctgagtagctgggattacaggcacccaccactatgcccagctaatttttttatttttagtagagacggtgtttcaccatgttggtcaggctggtctcgaactcctgacctcatgatccacccacctcagcctcccaaagtgctgggattacaggtgtgagccaccgcacccggctggccaatcttatcagaagtgagctaccaaaacttccacagatgtgagatttaacacttaattgcagtcacgtgtatgcaacacagcaataatctagaatgaaaaggagggtgattagccttcataagatgacctatagagcaaagaaaggtgactggaagggttcctaacccaacctactccccttagggtgtgtatccaacccagtgcttcctaagagggttacggaccactgtggttatcctctaaagttccagccagctctaggagtttctaaattcaggcctctgttggaaatggcctatttcgatagatagaaagttttctatagctctaaaggtttctcctttgcaacccattcaatttcagtctgctgctttgctctttcaaaacagaacctccaggctgacgaggcaagacaaagcctcccaccagacttggagattgaagttcttaaaaggcctttgttgtagccaaaggcatgcatgcgtcactggtagtaggaggagcctgtcccagcttcatcttgtcctgagatttatccacatacaggaaacaggcgggacacagtggctcacgcctgtaatcccaccactttggaaagctgaggcaggtggatcacctgaggtcaggaattcaagaccagcctggccaacatggtgaaaccccgtctccactaaaaacaaaaacaattagctgggcatggtggccggcgcctgtaatcccagctactagggaggctgagacacacgaatcccttgagcccaggaagcagaggttgcagtgagcctcgattgtaccactgcactccagcctgggcgacagagcaagactctgtctcaaaacaaacacaaatacagtatccaaacattggagattagtgactcacctgcagttgggagccagctacaacccaaatcattttaaaattttcaattctttgatctcatgcaatgcacactttcttctgaattagcaaactgaataaactacagaaattttttagaatc

SEQ ID NO: 1219 - DNA, 351 bp, Homo sapiens
aggggcttcacaagttaaaagactggggtcttgctgggttttgttttttgagacagggtcttgctctgtcgcccaggctggagtgcagtggcacgatcatggctcactgcagccttgacttctcaggcttaggtgaccccccaacctcatcctcccaggtggctgaaactacaggcacatgccaccatgcccagctgattttttgtagagacagggcttcaccatgttgccaagctagtctacaaagcatctgattttggaagtacatggaattgttgtaacaaagtatattgaatggaaatggctctcatgtattttggaattttccattaaataatttgctttttcctg

SEQ ID NO: 1220 - DNA, 657 bp, Homo sapiens
tgcgagtccattttctttcagctggtctaccgatgcacagcaaccagccaatcctgctgtctcaagggtatccgtacctcaatgtcagttacattcagcagaaaaagtgacatttaatggaaagcaaaacaaatcaggtcctgatttaaaattttaacacgtttagatagcttatttaaattctaagactgtttttacagactgtattatttgtatataaatatgaactatagtttttactagtatcaccaaattgagtgatacaaatttcatctattttattaccctatttttaagggaattttatgttttgtttaaccttgatgaattgtataaagagagaatttaaaaaattacattctttattttctattagctgtattcatactttggttgcttcagactttatatattgttcttaaaagttaggaaagaatttcatgtgttttaaattgtcacttctattctttacagaaccttgtagtgccaaaaactttttaaaaggtaaaaaaataaaataaaattacaacatgaagattcagattttttttcttttccatacttgtatattgaacattcaaacttgaatggaaagttgattttgtctgtatttgaagtacttctattttaagttaataaatctttttgacaagagtt

SEQ ID NO: 1221 - DNA, 878 bp, Homo sapiens
tgtggtccaccctccctcccaggcaacaaactgcttgaggctggcagctcctgtttctgaagactgatgcagcccttgaaggtcaacctgctggagcaaaaaaacttgggacttgaatttgtagctccatttacatggatccattgccccagctactggagtatagcctacaatgtttatttcagtcaatattcctttatctgggtgttctgtacaatgtttattacagtcaatattccttcatctggatgttctgtgaagatagccatgtttatgggggtcttagttttcaaactctggcaactctgtgaaaaataggagcaaactagagagccctggagattggtagtagggaagggaggatagcaggaagtttgaaaaattagcagccccggggcctaaaggaatcagctgtcatcattttcatcattattattttggttaggatggcttgaaaatcagaacgtatcttggtttacgtaattgaggtcttaaagaactaagaacagttaaatagtcacaactaccaccctctgacttacataatcattggtgtgggcttcgttttgcctttagagtcacatctttcagtaaattcacagagatcaagagggacgtgcaacatacagcttaaaggctgttatgcttcagggttgctgaagaagatgaaacatcagcctgccatcgtctagaagagacattggcagttaaaaattagcacctccagtgtagtcgcctggcactgcccatcatgctgagggagcagattcttcccaaggcagcttcagctaggagtttgtaagcaaggactttgtgacacatttgtcccctggaactgagcctttttaactgtccctgtgaatgaacaattttgagtg

SEQ ID NO: 1222 - DNA, 288 bp, Homo sapiens
cccccattttaaccttcagcatgggagatgcatgccctgaagagcaggatccagaaggaagatttgtggccagattgccttcatcatttcacctctccagacttccatttcttcacaaggatgatgatggaaataaaatgactggcgtgatgcctggaaccaaggtgctgatcctaccacctactgctaccttccttagcttcaccctggctagaaataatcacgagggttgggtttgctttggaaaatgcctgtctctctacttgaatgataaagaattaaattaga

SEQ ID NO: 1223 - DNA, 825 bp, Homo sapiens
gcctgcggagctgcaggggcaggcgaggcctccaggggcagggtcctgaggcaggaactcgactctccaaccctcctgagcagccggcaggggccaggatcacacattcttctcacccttgagaggctggaattaaccccgcttgacggaaaatgtatctcagagaagggaaaggctgcatgggggagccccatctagggagtgatgggcccggcattgcctgaggccccgctgtgacagtttccccggtgtgagcccggtgagggcggcaggcaggggttatccggccccactttctggatgacagacttgaggctctgagagctgaaaacacttgtccaaggtctcacgttaaggtcaagacactaactcaaatctttcaagccccgcctctcctcttggaggacagggcagcctgcagctgtgtccaggcccaggccccaccccataacaggtggcctcagccacacagttctccccaaggggagcagcccagggccaagccccgctgccttccccaggccacagtgcgtccagtctcctgtcctgccacgtgtcttttgcaaagctccttggatgtggagacagatgtctttactagagctgaaaggcccccttgacacatccaggccaacctcccatggaataggtaggcaagccaggactccgggaaggaggtgcagccaggatgctctggtggagctgccgatggggccctggtgtcagaactccccaaaggcctgtgcgtccaagtggagtcaggttttctattcctttctgtgtttgcaaattcagtgttaactaaataaaggtattttgtttttc

SEQ ID NO: 1224 - DNA, 557 bp, Homo sapiens
tccctcttccttcccagttgcccttaagaactgagaaaggacaaagtactctaagcagcagagcccacagaggctcgttcctttgacccttgtctcctggtggctatacgaaaccttcacaatctgcatgctggactttattacagcttcccaagccccatcaataaagcccctgttcacgctgcactggtgcatgaaggtgaagtaaggaggcagctactccctccacaaataagaattcgtgcagcagcagttcactccttaggaaaatgaagagtatttttaaggagatggtatctccccagtcaagggcaagtttacagagatgaaaccgcgatcccaccatcactcaatgagccagaagccaatggtgacgtactgttacctgaacttactgaacttgctgttggaaagatctttgtgaggattaggaattaggttaaaagaaattaagaaccatcttcaagcaaaaattaaactttatttctgcttaaacaataaatacacctgagttagttttccaaacctttcctcctgattaaatgcccttaaaactt

SEQ ID NO: 1225 - DNA, 151 bp, Homo sapiens
actgaatattggtgtggacatggggggtgggtgggagtagaaaattttgtgtatatcagggcagtatttttttatgaactataaatgattgtctttaataaatatgtgataaaatccaatttttattattttataaagacctgaacatgtg

SEQ ID NO: 1226 - DNA, 1478 bp, Homo sapiens
ggatgggatcacccccttcgtgcctcatggaattcagtcccatgcactacactctggatggtgtatgactggatgaatgggtttctatatatgggtctgtgtgagtgtatgtgtgtgtgtgattttttttttaaatttatgttgcggaaaggtaaccacaaagttatgatgaactgcaaacatccaaaggatgtgagagtttttctatgtataatgttttatacactttttaactggttgcactacccatgaggaattcgtggaatggctactgctgactaacatgatgcacataaccaaatgggggccaatggcacagtaccttactcatcatttaaaaactatatttacagaagatgtttggttgctgggggggcttttttaggttttggggcatttgttttttgtaaataagatgattatgctttgtggctatccatcaacataagtaaaaaaaaaaaaaaaacacttcaactccctcccccatttagattatttattaacatattttaaaaatcagatgagttctataaataatttagagaagtgagagtatttatttttggcatgtttggcccaccacacagactctgtgtgtgtatgtgtgtgtttatatgtgtatgtgtgtgacagaaaaatctgtagagaagaggcacatctatggctactgttcaaatacataaagataaatttattttcacacagtccacaaggggtatatcttgtagttttcagaaaagcctttggaaatctggatcagaaaatagataccatggtttgtgcaattatgtagtaaaaaaggcaaatcttttcacctctggctattcctgagaccccaggaagtcaggaaaagcctttcagctcacccatggctgctgtgactcctaccagggctttcttggctttggcgaaggtcagtgtacagacattccatggtaccagagtgctcagaaactcaagataggatatgcctcaccctcagctactccttgttttaaagttcagctctttgagtaacttcttcaatttctttcaggacacttgggttgaattcagtaagtttcctctgaagcaccctgaagggtgccatccttacagagctaagtggagacgtttccagatcagcccaagtttactatagagactggcccaggcactgaatgtctaggacatgctgtggatgaagataaagatggtggaataggttttatcacatctcttatttctcttttccccttactctctaccatttcctttatgtggggaaacattttaaggtaataaataggttacttaccatcatatgttcatatagatgaaactaatttttggcttaagtcagaacaactggccaaaattgaagtcatatttgaggggggaaatggcatacgcaatattatattatattggatatttatgttcacacaggaatttggtttactgctttgtaaataaaaggaaaaactccgggtatatgt

SEQ ID NO: 1227 - DNA, 386 bp, Homo sapiens
aggagcccccacatgcgcctgcccatccagcactgcagatgccacctcgcccacctgctgtcgctcccaccctccgtgcacctagcaggagtgccaggccacagccggaacagccaggccatgacccaggggagccagcgctgccaccccacccagcgctgccagggagccgccatccgagcttgagctgggcgcacagaggtgcccgccaggatctgtggccctgtaacattccctcgatcttgtcttcccgttcctccccgcagtggttttgaaatcacagacctcgtgtatataaaatatgcagaacttgttttccgttcccctgccagttttatatttttggttttacaagaaaaaacattaaaaactggaaaggagatgtg

SEQ ID NO: 1228 - DNA, 255 bp, Homo sapiens
ttaagtaatataaactgtgttcattacactgctgatacaactacagatgggacagtaaatgttcagcattcttggatcagaagaaaacggactaattagatgcttcctttgtcgtggtggttgctttgaaaactatactttaatgggagaaatcatggaaagaaattctcaacagaataactgaaaactgccttttctgtaccgattgctttttgtgtgtgtggtataataaaatctttattcaattttacagaa

SEQ ID NO: 1229 - DNA, 538 bp, Homo sapiens
ttctcttttgttttttggagcatggttctttgggaagtggcatccactgcaggaaagcagaatgagcagagccagcagaactgatggagtggcacaaattcccagtgtctggatggtgccacactggcgcctaatcacccgtttaacaagcagaaattaaatgttgctcagcacatgtgtctttcagctcttccttttcacccatggatgatcattgcgagcatgcgctgattggactgaaatgccagggaataggttaggcatgctcagtgccgtccctttgccaccacagtcaaatgacatgcttcactgtggtaccttaatacctgaaatagaaccatggaaaattctgatgtcctctctctgaattatgtacagactacctgggggatcctcttctctccaaatgttagccatcctgaagtagccgaacagtagaaactttggtggggattaaccgggagcttgaaaatttgtctttggtaacctgatactggacagctgaactgaatggctgcaaaataaatacctcacatga

SEQ ID NO: 1230 - DNA, 90 bp, Homo sapiens
tgataacaaaatgctcttgcatgattttttaacaatatatttaaacaggaagttgtcactgatatactttattaaaaggatttttatcaa

SEQ ID NO: 1231 - DNA, 149 bp, Homo sapiens
gtgggccactcaggccagcatggaaggctggctggaatggcactgataacccttcacatgaaaatcaaatcctagcgcacaagggcaggaagcagcctttgaaatgggatctacacatcatttctgaataggaattttctctcctcctt

SEQ ID NO: 1232 - DNA, 472 bp, Homo sapiens
gcatttttcttttaaaagacaagtgtaatagacatctaaaattccactcctcatagagcttttaaaatggtttcattggatataggccttaagaaatcactataaaatgcaaataaagttactcaaatctgtgaagactgtatttgctataactttattggtattgtttttgtagtaatttaagaggtggatgtttgggattgtattattattttactaatatctgtagctattttgttttttgctttggttattgtttttttcccttttcttagctatgagctgatcattgctccttctcacctcctgccatgatactgtcagttaccttagttaacaagctgaatatttagtagaaatgatgcttctgctcaggaatggcccacaaatctgtaatttgaaatttagcaggaaatgacctttaatgacactacattttcaggaactgaaatcattaaaattttatttgaat

SEQ ID NO: 1233 - DNA, 525 bp, Homo sapiens
cttcgtgagtcctcacccctccccatctggttccttccccctgggcccctggcccctcttgtgttgttattggtcccctgtatccaggggaaatagacaaaatatggtaatattgtttatggcaaaaaaattggtataactgtggggatgtctaccagccctgcttgtatcattcagaactactcattgaaaacatggtgcttgtttttcctcactcaacaggaagcctggagctaggcagctgctgtattggtccaggggctcaacactgttccaaatgttatctctgggactctctgagcctcacagctgcaagatggctgccatagctccaggcatcgcatccatgttcaagactggaggggacaggggaagtgccagctgcaaatggctctttatcaagaaagcaaaagcatctctagaacctctcataagacttttacaaaatgtcccatcagtttgaactcagtcagatggccatgcctggctgcagaggaagctggggagctggtatttggctttctc

SEQ ID NO: 1234 - DNA, 2265 bp, Homo sapiens
ccctggcctctcttccaaagcctaggccatgagcctgctactgggacccaggaaggagcacagactggaatcagaagacacggagtccaggcctggtcctgctgctcatttgccaggtgaccttgggcaagtgtctttactgctcagaacctctacttctcatctgccccatgaggttaatcactcctcctggcctcctactatgtagaaggaggatgggctgtaggggccctgaggaggtgagcaaccagcctgggagtcagggaggactcttcagaggaagccaagtccaggctgagccccaggaggagtaggagttgggcaggggaagagtcgggaggagcttccctggcccctccgattagaggatctaatgggggctccaactgtggcctcagcaccatctcggattaggggctcctgagtgtgtagggaaggacacgggagaggcttagagctctttggaggaggattctgcctttcctccagtgccatgagcctgacacatgaaggtcttgggttctatgacttgaccacatcctgagagcaaggtggggccctcgactgtcttgtattggccccaagcctttcttgctgtgaacagcttcattctcagtcccctttcctggctcaaaaatcgagcctagcaaaagaagaggcacgggaaggaaacgcccctccctcctcctgcaggcagccactcagcctgtgccttcagcttggtgccctggtgatggttgctatggagatctaaagatagagcaggagtcaggagacctgggtccctctcccagcttgtcccactgagcggctgccgatcacggtccacccaccccaggaacctggcacccctatcccaggaacccagtgcccctgggcagcgcactgcagttaatgaattctgccttcaacagcctgggctctagcgtgctgcaccagcttgggctagctacaggcagtcccagaattggaatattaagccatggaatcttagagttagacttttatagtcatagaaatgtactcttcaccatatcaaagctgaaagttcaggactctaagaaacatacagtgtgacagacttatcgtatacacgggaaactgaagcccagtgagactaaatgacttgcccagggtaaaacagtccatggcagagccagcactagaagcctcctagcttcaacctcatgtgccaattctgcatcagtgattttcgaactgcgctctacaggaagcaagggttctttgcatagcagcagtgaaaggacagctccagatggatccccagtacccccttcaaccagagcagctgcatttttatcccattcatatattggggttttgaattatttttatttgtacaaaaggattttcctagccactaaaaaaaatggcaacaaatctctctgctgtgtcacatttaataaataattgtgacacatagctggggggtggtgctggaggtttcagaccgcctcacaggcagagttccagggtcagagagcatggagtactgtgtgtgaccttcttccagaagcacgggcacaggagcatgttaaaggccctgaaaagaccagtggcaaagaaactcctttcattttgtttaatccagagtttttcaagcttatttaactatagaacacttttctgtgggtttcgtagcctctttctagcacagtatagtgagtgggaaaggccctgactgagagtcaaagattctgagcaggaaccatgatctcttcctgcctagtatgtgacttgagcaagacacttttcctctccccaggcctctgaggtctgcgagttttcctccaccctttcctctccctcagtttgcacatcctattgactcagctccaaatagcgggggcctgtcaggagcctgactctgttcagacaccagggaaacaacagcacaccaggcagatgcagttatgtccatcggggaacttacagcctagcaaggaaggcagcaattcaacctgtaagtctaaaagtgatgggtgtcatgaaaaggtaagtgcagggtgctgggagagtggttggcaggggctttagcctagtctagggagagcccaggggcacaccactgccagcggggatagaggcttcaaaagctttgaagtcactcatattaagagtgttgccggacacggtggctcatgcctgtaatcccagcactttgggaggctgcggcaggcagattgcctgagcccagaagttcgaggccagcctggccaacatgacaaaaccctgtctctacaa

SEQ ID NO: 1235 - DNA, 608 bp, Homo sapiens
tccccccttctccgagacgctgagagagcaggcattgcaggcgggaagatgccagaaattatgcaagaagtgaggtgtcattatccaggagctggtggggagggcatctccctgctcccctcaaccccctcccaccccatccacgccccctacctttcccaattttagtttcatgcaataaaaaggccaaactttttattccataaaacaagaaggacaaaactctcaaaaatgtatttcaagtcagtgaccagaaaaatcccaccccttgccctttccccaaaggaccttttctgtacatgacacttttttgttgttttttgtttggggttttaccattgttgggatttttttatttgttttcaggggggttttttgggggaaaatttttttaaatggaagcttctagcaagccccccaccccaatcaacctctatgctttcttcttaaaaaaaaaaaaaaaggaaaaaggaaaaaaaaaaaaggaaaaccagaagccctgctgtctgtctgtgcccaagcccttccaccagaaaagctagtctaggtgtgagagcccacattgtctgtagccatcaaaaataataataataaactggacagtttac

SEQ ID NO: 1236 - DNA, 86 bp, Homo sapiens
gcacccaggggtggtgggccagcggacctcagggcggaggcttcccacggggaggcaggaagaaataaaggtctttggctttctcc

SEQ ID NO: 1237 - DNA, 834 bp, Homo sapiens
atgcccccagcccacccctgcccccatttgcagccttggtgttcgttctaacactgcattttcctacacccctttcctggactgctctctccagaaacagcacagctcatggagggtgagatcatgttagggaaatcaatttttatctagtcatttgttcagattatttgtatttaaagtcattaacttgatccctttctccagactggccatgccgccatatacctttccttttgtattccattgtggaagcttctaggaggctgagaagcaggagatccaagctccagtcctgggtgttaccctgaggggggaagtcacttcccttctctcagctgagtttttcacgtgtaagatgagaatggctgatggctgagagcccaccaaccttccccaccccgtatcagtttgaccacgggccttttgctacattctatccagagagcaggcctgccagcccctctccactgagaagttgggctgagagtatggggaaaagaatcaagagacctgactgccgccaactcactagtgacttagatacatcccctccccctgctggggcctcagtttccccatctgtaacttgagaaaatagaactagatctgtaaagtctggaactagatctgtaacgtccttataggtgtcactagggggttccatgagaggtgtgtgacaggcagtctgattcctctcattctccatagtctgtttcctggaaagtcgatgtaattaactgatggcccaaaaactacctcaagagacctggccctgttaagacggcttaaccactgagatcccgttctattgatttaataaagtcaaactattgg

SEQ ID NO: 1238 - DNA, 995 bp, Homo sapiens
gccactacacccagccctgtaaggtttttgagtgaaagaatgcaggagcctccactcactgcaggaatcccttctacaattcctggtcagtgagcccccagcctcttctggattggcacgggtggaatcagactgaccagagttgaaatctggcttctccgccttgtggaacttgcagcaagccacttacccccacaaacttcagttcccaaatctgtaagatataaataacaacactttccttaaaatgttgtcaacagacacagtgaggtagcatctaaagcacagtgccttggacatagggggtgcttttctgaaagccagtagaggtcatttaatatagtggatcagagctctggctctgaacacagacagccttggttcaaatcccacaacaccacgtgctacgggacctttggcaaaatactcttgcccagattctgagcctcaatttctttatctgtagactggagttgttatgagaattacattagattttgtatgtaaaactcagcatcaagcacacagtaagatttcataagagactgactgctactaatttaatattaggcatatttttgaattatctcactgtctcttgatgcagtccactgcatagtcattcagctctgcaagttacacacttaggtgagttctgcctcctgctagcttcccgcactggtcccagacctgcctcctagagcccacacagagcccatgtgcttgaggaagccgactcggagctcccagtttacttcactgcaagccgaagagtcctcccatcccctcatcttctccactactatccacatgacctagtggcaaatctactcccagtcttggtctcagtggcttaattactttgccagcaggtacgaggcaggagtgaaattccttcactgtcgtggatgtggttattattctagataataatgacattaaccataatagtaaataataaaatatctctataaaattctgcatttcatcaagca

SEQ ID NO: 1239 - DNA, 2606 bp, Homo sapiens
gctggagcccgcctggagagacagacacgtgtgagtggtcaggcatcttcccttcactcaagcttggctgctttcctagatccacactttcaaagagaaacccctccagaactcccaccctgacagcccaacaccaccttcctcctggcttccagggggcagcccagtggaatggaaagaatgtgggatttggagtcagacaagcctgagtccagttccccgtttagaactcattagctgtgtgactctgggtgagtcccttaacccctctgagcccgggtctcttcattagttgaaagggatagtaatacctacttgcaggttgttgtcatctgagttgagcactggtcacattgaaggtgctgggtaagtggtagctcttgttgcttcccgttcagcgtcacatctgcagtggagcctgaaaaggctccacattaggtcacctgtgcacagccatggctggaatgatgaaggggatacgctggagttgccctgccatcgcctccatcagccagacgaggtcctcacaggagaaggacagctcttccccaccctgggatctcaggagggcagccacggagtggggaggccccagatgcgctgtgccaaagccaggtccgaggccaaagttctccctgccatccttggtgccgtcctgccccttcctccttcatgcctgggcctgcaggcccaccccagccaccactgagtccactcggagtgccctgtgttcctggagaaggcattccagggttgaatcttgtcccagcctcagcctgggacacctaggtggagagagtggtctccgctctgaattggatccaggggacctgggctcattcttcttggctcaccaaccctgcaggcctcatctttcccaaaacccactttgtcttggtgggagtgggtccgcgctgctctgcagcaggggctggggagtggacagcatcaggtgggaaagtggagtccaccctcatgtttctgtaggattctcaccgtggggctggaagaaaagagcatcgacttgatttctccaaccactcatccctctttttctttcttccaccactccccaccccagctgtagttaatttcagtgccttacaaatcctaagctcagagaaagttccatttccgttccagagggaagggaacctccctaggtccttccctggcttgttataacgcaaagcttggttgtttatgcaactctatcttaagaactgcccagcctcagctgaaaacccgaatctgagaaggaattgcgtcatgtaagggaagctggaattaagggagctgagccagtcatggttgtggcgtgtgagtcaggagacctaggtttcagcccctctctactgtcagcgagctgtgcaacgtgggcaagtcattgtcctctgagctgcagtttcctcatctgtcacatcgctacagacaagacctccctggaacccttctgattgtcttagacactgtggttgcaaaacccacggaaagcctcatttgtgtggaaagtcagaggaaaaatgatccagtggacacttggggattatctgtcattcaagatccttccttcaaccccaaggtcagctcccatctcatttccagaaaggctcatacctggcttgcagggaagcatctgtcttgtcattccaggtgccagaatcctctcagagtcattgaagggtgttcacccatcccacccaaggcttggcacactgccagtgtcttagcagggtcttgtgagggctgggggcatccaggcactcagaaggcaaaggaaccaccctacccatttggcctctggagggggcagaagaaagaaataaacctcatcctatattttacaaagcatgtgaattctggcattagctctcataggagacccatgtgcttccttgctcagtgcaaaactgatgattctacttgctgtagatgaatggttaacacgagctagttaaacagtgccattgttttgccagtgaagcctccaaccctaagccactgggacggtggccagagatgccagcagcctctgtcgcccttagtcatataaccaaaatccagaccttatccacaacccggggcttggaaaggaaggtattttggaatcacaccctccggttatgttgctccagtaaaatcttgcctggaaagaggcagtcttcttagcatggtgagctgagttcatggcttttttttgtagccagtcctgtccctggccatccatgtgatggttttggatggagttaaacttgatgccagtgggcagtgcatgtggaaagtatcagagtaaggctctcccctccagagccctgagtttcttggctgcatgaaggttttctttagaatcagaattgtagccagtttctttggccagaaggatgaatacttggatattactgaaagggaggggtggagatgggtgtggcagtgtatggtgtgtgatttttattttcttctttggtcatgggggccaaggagaaaggcatgaatcttccctgtcaggctcttacagccacaggcactgtgtctactgtctggaagacatgtccccatggctgtggggccgctgcttctgtttaaataaaagtggcctggaagctggc

SEQ ID NO: 1240 - DNA, 1788 bp, Homo sapiens
gtgccacccacctcctgagctgtttttgtaaaatgactgctgacagcaagttcttgctgctctccaatctcatcagacagtagaatgtagggaaaaacttttgcccgactgatttttaaaaaggaaaaaaaaaatgttttactatgtggccttccaaaataggtagtgtttgcctatgtggaaacaacagcaaactaacaccaagtgccagagtcctggatgtgcaattggtttaagtgttcatgttctagtgaacacagcttgttcaggaacaaacactaaaacgatttgagtagaggctgctggtcaccttttgtgacctgaggaatcccaggcctgtgagaaaagcaaaaattcacattgcagcacatgatgccagaaatagcactgaatcaagaaaatagccattgcggagctgccctcttgagtctttctgtccatcccattctattctgtactgtgactttagttcaggaagttttgttttgtgttttaaataaaaggaaagagcaagtttgctcagtcaagtgatcagatcccgaatctagattcccagttctaaggccttatcacctcccctgcccataggccaacaaccatagttcctcacattagtgattagcagactctttgtggacgagtgaatttcacaaacagcacaatttcagaagaaatcgagggcacaggccctcacttttcttcttttgacgcatcatcctgtgatgttgaaatgtcaattgcaggatgctgatgttgtgcacgtcaatcaccgggcacttgcatactcttagaaacagttcgacttcggttactgccttctcccttgaaatccttgctgcgtgcccaccaggatttcctgtgagggcccaggaatgagcaaggcatggtctgccaccagctgacggaaagcagccttctgtacaacagatgggagggtgaagggggcagaatgaaaatcgaaccaaccttttagctgttgcaaatcagaaggagccagagaagcaggcagtctcatgcatgagaggttacccttcaggatgacagagctgagggtctttgtaggagttgctcttgctgtgtaaagcactattgtcttggggttgagccctagggcagttcttggtaggttctgctgggcagaacatatgggttaaatctcggtagagagtttccctcatcctctatccgtaagtgtccttccatgcaaggtcccactctaggtgatagacagggaccccttctactgaacctttgaggaaaggaggaaggaagaaatgcgtttagatcttggatgcagacctttcaaagggttaaatgtaaccatatggatcaaccacatgcacatccttactacagaatccgtcctttcatttcaacttatagcaagctatgatttttatatataaatattatataaataatgtataaaacattaaaagttaactatgtaagatattatttctgaaacaatttagctatatccactatgattataaactgtgtctcgacctgtgttatttacattagctgcttaaaaaagcattgagttaatttttttaaatatcaactaaaatatcatagttctgtggtagacattgttttataatgaaataactgcaactagagaaaactgtataaaaacattaaattgtcagtatttttgtaaggttccattttgtaaagagaataatattcaaagacttttgtagcatacaaagtgaaaacttgtatctgcgaaactatacttgtattaaatgtgctttttaaataaaagctcgtaacacaact

SEQ ID NO: 1241 - DNA, 867 bp, Homo sapiens
aaaaatcaagatcaaatgctatggactgcacaaaggagaactagtcctaagatcctagtcctgcgttacatcagtttcagtttacatgtcaaaattttgagatggtggaatctgtggaaactttcgttctgaacttaaaagagaaaaataaaaacaaatcctcaacatttagatgttggttttactcctaaaaggttatctttcaatgtctatttcagtatctacttcactgtcagttcaagagaatgtgaaacagtatgtgttagcatttgagcacttatttaatgagccatatccaaagttagaaatcatgccttatggcacctagtcagttgtgcagatggttagtttgcttctaatattagtatatgagcatttgtaatttctagatgttgtgcactcaaacttggtataatttaattctgaacagtaaacagtgtaaccaaggtcttttaaatactcaagtttaaggtataatcttaattatggctcagtctttaaaaaagtataaatgtccttttactttatcacaaaaataaactcatatgaatactgttccacatttgtttcttttgggaatagtttgcagaaaaataatttattcctaaattcacccatcattttaagaagtgcccaaatgtatttaacaaaataatatatatgctgtattactttaaaacatctttttgtccaaaataagaacaattgtcattattttgtctatgcccaaataactattcaaataatagcattcatatgtactttcatttatatggaattaaataaaaatttaaaagctgacatctattctgttttttaaatgaggtgcactgcatgtcaataagagaaataaattctacatatgca

SEQ ID NO: 1242 - DNA, 192 bp, Homo sapiens
cagatgatacagcagtgggctacatacaatgagagccctgagccctcaagaactcatgccagctcagccctacaccagtttccacctggagttcatgcaagggcaaaaggcagtgccatgcaagctgtttaaaataaagatgttaccttgtaaaatgcaagttgatttaaataaatactgagttaaaggctt

SEQ ID NO: 1243 - DNA, 223 bp, Homo sapiens
gagccagagcctctgtacgcgcagatcaacagacctaagaaatagcatcgatgcgagctcgtggtgggtgctcaagactggcatggacatcagcatcacgacaggctctcttgtattctttcacctcttcccacaagaaattcatgattgcccaatggaactcgctcagaagagggaactaagcatttttggcaaccaatggcagatatctatggcagcacac

SEQ ID NO: 1244 - DNA, 245 bp, Homo sapiens
attaaaatttatgagacacaagatatatgaagaatgttgcagtccttatcattttatgttactttttaaaaaatgatgtttgaagtgaaaaaaaaaaggatattcagggtcaaatcatgtacattacagatattatctaaattcttctagaatttatttttcatgaaatattgatgtattttaatctatgttaaaatatcttcaatgaggaaaatgtcacagaataaatttatattacacatttt

SEQ ID NO: 1245 - DNA, 1214 bp, Homo sapiens
gtacccggcggggcaggggatggggtggggtaccggatttcggtatcgtcccagacccaagtgagtcacgcttcctgattcctcggcgcaaaggagacgtttatcctttcaaattcctgccttccccctcccttttgcgcacacaccaggtttaatagatcctggcctcagggtctcctttctttctcacttctgtcttgaaggaagcatttctaaaatgtatcccctttcggtccaacaacaggaaacctgactggggcagtgaaggaagggatggcatagcgttatgtgtaaaaaacaagtatctgtatgacaacccgggatcgtttgcaagtaactgaatccattgcgacattgtgaaggcttaaatgagtttagatgggaaatagcgttgttatcgccttgggtttaaattatttgatgagttccacttgtatcatggcctacccgaggagaagaggagtttgttaactgggcctatgtagtagcctcatttaccatcgtttgtattactgaccacatatgcttgtcactgggaaagaagcctgtttcagctgcctgaacgcagtttggatgtctttgaggacagacattgcccggaaactcagtctatttattcttcagcttgcccttactgccactgatattggtaatgttcttttttgtaaaatgtttgtacatatgttgtctttgataatgttgctgtaattttttaaaataaaacacgaatttaataaaatatgggaaaggcacaaaccagaagtcggcatttgtgaaaagtccctccagatttctatcacattggtctctaatttcccaagacttgtattttttttttatttcaaattataacacttttttttcccccagaagtgggtgtttcatgttgctactctggtgtgtcctaagatatcctaactggccagtgtaaatgctattctttctaaataagattatttggaaacttccttcaaactgcaggagggtgagcttgagggaggaagctaaaactagctgcttttatgaaaaagagtgccagtctttggtcatctctaaacaaggcttatcaccaatggagacagaaaactctagttcaagagctgtacctcctttgaatcccagccctactttgaaataagtggtactatttccatttagcctttgagcaaatcacttaatctcaaagcgttgtggctctaagattaaacgacttt

SEQ ID NO: 1246 - DNA, 1282 bp, Homo sapiens
agagagaccgtcgggggctgaggggcaacgaagaaaaaaaataacacagagagacagacttgagaacttgacaagttgcgacggagagaaaaaagaagtgtccgagaactaaagccaagggtatccaagttggactgggttgcgtcctgacggcgcccccagtgtgcacgagtgggaaggacttggcgcgccctcccttggcgtggagccagggagcggccgcctgcgggctgccccgctttgcggacgggctgtccccgcgcgaacggaacgttggacttttcgttaacattgaccaagaactgcatggacctaacattcgatctcattcagtattaaaggggggagggggagggggttacaaactgcaatagagactgtagattgcttctgtagtactccttaagaacacaaagcggggggagggttggggaggggcggcaggagggaggtttgtgagagcgaggctgagcctacagatgaactctttctggcctgccttcgttaactgtgtatgtacatatatatattttttaatttgatgaaagctgattactgtcaataaacagcttcatgcctttgtaagttatttcttgtttgtttgtttgggtatcctgcccagtgttgtttgtaaataagagatttggagcactctgagtttaccatttgtaataaagtatataatttttttatgttttgtttctgaaaattccagaaaggatatttaagaaaatacaataaactattggaaagtactcccctaacctcttttctgcatcatctgtagatactagctatctaggtggagttgaaagagttaagaatgtcgattaaaatcactctcagtgcttcttactattaagcagtaaaaactgttctctattagactttagaaataaatgtacctgatgtacctgatgctatggtcaggttatactcctcctcccccagctatctatatggaattgcttaccaaaggatagtgcgatgtttcaggaggctggaggaaggggggttgcagtggagagggacagcccactgagaagtcaaacatttcaaagtttggattgtatcaagtggcatgtgctgtgaccatttataatgttagtagaaattttacaataggtgcttattctcaaagcaggaattggtggcagattttacaaaagatgtatccttccaatttggaatcttctctttgacaattcctagataaaaagatggcctttgcttatgaatatttataacagcattcttgtcacaataaatgtattcaaatacc

SEQ ID NO: 1247 - DNA, 343 bp, Homo sapiens
tattgttaagaaagaaaggggcaaggaaagtaagaagacatggcacgtgttctgaaaccactggtgtctgctcagatgtgttgggacaaaatgaaagtgactttcaagaaagatcagaggaatttgactcagagaaaactagatccaaatcccagctctactgtctcgtccgaattagccttgggaaaatcatttatatgctaaataatttacctttttatctaggagatgaaaagaggataatgtttccttccataaagaaagttcttgtaagaatcaaaagaaatggtgagctttaagtggtttgtaaaccataaaacacatcataaaagttctatctata

SEQ ID NO: 1248 - DNA, 278 bp, Homo sapiens
taacaagcccatattgtgagaacagatgtttcccttatctccctttttacccagacacatgtttctccccagcctaagtgtagtggcggaggcattgtcagagtggaggccgatgcagctattgtagatgcttttgatttggacttagtttctggctatgatgctcactcataagcagttcaaagtgatcagaggaaacctagttttatcttttgatgtggcaagaacccagctacttagaatctccttctgttttaataaaacttattattaatatt

SEQ ID NO: 1249 - DNA, 304 bp, Homo sapiens
gatttgagcctccttgattttaatagagaacttctagtgtatggatttaaagatttctctttttcattcatataccattttatgagttctgtataattttttgtggtttttgttttgttgagttaaagtatattattgtgagatttatttaataggacttcctttgaaagctgtataatagtgtttctcgggcttctgtctctatgagagatagcttattactctgatactctttaatcttttacaaaggcaagttgccacttgtcatttttgtttctgaaaaataaaagtataacttattcac

SEQ ID NO: 1250 - DNA, 2112 bp, Homo sapiens
gggctgcagaagaactggccgtggggaacaaaagccttcttctctggactcctccctcgcccttgaagagggcagaggtcacaggccagagagccacccttctagagaagaaactatgtcaaatatgcacatacattcctgttgtataattctgctcattaggatgctttgtagtttttgccttaggccaagcctgaaaactacacgggcttcagagcagggttcaaggtgcaaggtgaggggtacgtcggtgtcatccaaacatccaaaacatcttcagccttgaattcctcatgactctaccctctgtaacattgtgtagcaagcaggcaggcaggagcacattagcacattagaaaagcaatactttttacatggaattttacagtgcactatctttctgttttttaagcaagtgtatacaaatatgtcccattgatatgcatgtctatagatgggaggggatttaagccaaccccctggcaagcattctgtaggggaccctagaagaatcaccgtgcagactggtgaaactgaacaagcaccatttgggagctttgtttcgatggggttgacagagaaatcttaaaatctgacagggtagaagaagcactttggcatcaatgccatatgtacagtcttgactatttctgagtcatctagtggctccaatttgctccagggaaattggaattaattaagaaatttattatctagtaagttgctatgtaataaagaaaaaaaagaaattcaatccaatgacacacaccacatgtatttgggcagagtcagattctctcagctattttgagtctgtggaagaaacaaaaaaaagcttcctcctgaggatgggttattgtcatcaagaagccacctgcatagccgtatccattacctcatggtaattcccggtgctttcccctcatatcccctagaagcaaatatctgttctgaggttttttgggacttctggctgcaataggagcaagggacccaggcagggcagagcaataccttccgaagcttccatattccctggggccagcacatgcaaggtttatatggtcagtagctcacgtgaagtcatctgaatctttcttaaatctgctctcttaaaatctcttatgcaaaaaaaaaaaaaaaaagccccttatataaaaagaagtaatgtcaaagtttgatgagctttacattggaaactcaaaagcttgcactctcattttggctcagatgccaatttgctgggtgcccctgtggtgagtcatgaaacctccttgggccgcaatttcatcatctctaaaaacagaaattgtcatacaacctacctcctgggaggtgctgcacaagaagcagctgatggaagtttcaaaatccaatttgtggccgagcgcggtggttcacgcctgtaatcccagcactttgggaggccgaggcaggtggatcacctgaggtcgggagtttgagaccagcctgacatacatggagaaaccccgtctctaccaaaaatacaaaaattagctggggcgtggtggcaggcgcctgtaattccagctacttgggaggctgaggcaggagactcacttgaacccgggaggcggaggtttcagtgagccgagatcgtgccattgcactccagcctgggtaacgagcaaaactctgtctcaaaaaaaaaaaaaaaaaaaatccaatttgtaacccattaaggccatctacagcaatggtacagcaaacttcttttgccattgtgattcataagagaggctcagagtcccagaacacaatgacatgtgttgatgcaactcagaggtggagagaatggagcaaataatgagaaaaaaaatgctttaaatgagtttattttgacctcaaaatacattgtaagagcaacatcctacgttaataaatgttctagcccggtgcttcgcgaacatttatgtgcatacaaatcacctgggatcttgttagaaggcagtaggtctggggtggggcctgagattctgcatttctaaccaggtcctgggagatgctgatgctatcgagccacaaccacactttgagtagcaagcctctggcctatccttattgtttgttatattaaaatgctgcctctca

SEQ ID NO: 1251 - DNA, 686 bp, Homo sapiens
actgaatgcacttgttttattcatctgcaaagagccatgtattcaacatcgagtgtgaaaagatctattggaaaacaacatggaatggaattctggaaattattattcattgaagaatgcagtggccaagaaaatatcaaatgtagattgttaacgcttgagaatcatggctatggtttctaatgttctggtaacaagctgttatcttttaagacattttaatgactcaaaggtacactatacatttaccattatttataccatagctaaggttaaaaatttattcactttaagttcgtattttttaatttatattaccatttatagattcattttggaaccattttaaatgtagtaatgcttattttaaaggtactattaaatatgtgaatgtttacactaattttaccgagtgggacttcaaaatttttattattgacaatggcagagaacaattaaagggttgactcaagaactagttccaaacctagcagaataaaaatcatagatagccccaaattaatgagtttggtaactgtttcaaagttattttccatttacatacccaaaacaggaatttagaattgcagaactttacttagtaaaacctttgtgtaaaataatttaaatacggggataactaataccagtgacaacaccttaacttgattaaatcttattacacc

SEQ ID NO: 1252 - DNA, 313 bp, Homo sapiens
gcattaagaagaaatgcactcaccatgagcaccaacttctgcatctgcctgatcatatttaaaggaacagagaaatatttgtaattaatctgcccagtaaataccagctcgtagcagttggcaggtgcatgtctagataaaatttcttgcagctaatttaaactttctacacgcaccagtagataatctcaatgtaaataatacatttcttcttggctctttaatgtaagccaacatggagaggaagatcttgacttatattctgtaccacatacacttctgtggacttttagcatttgtgggtagacttaat

SEQ ID NO: 1253 - DNA, 1338 bp, Homo sapiens
gaagcatgaataacatttaaattccacagattatcaagtccttctcctgcaacaaatgcccaagtcattttttaaaaatttctaatgaaagaagtttgtgttctgtccaaaaagtcactgaactcatacttcagtacatatacatgtataaggcacactgtagtgcttaatatgtgtaaggacttcctctttaaatttggtaccagtaacttagtgacacataatgacaaccaaaatatttgaaagcacttaagcactcctccttgtggaaagaatataccaccatttcatctggctagttcaccatcacaactgcattaccaaaaggggatttttgaaaacgaggagttgaccaaaataatatctgaagatgattgcttttccctgctgccagctgatctgaaatgttttgctggcacattaatcatagataaagaaagattgatggacttagccctcaaatttcagtatctatacagtactagaccatgcattcttaaaatattagataccaggtagtatatattgtttctgtacaaaaatgactgtattctctcaccagtaggacttaaactttgtttctccagtggcttagctcctgttcctttgggtgatcactagcacccatttttgagaaagctggttctacatggggggatagctgtggaatagataatttgctgcatgttaattctcaagaactaagcctgtgccagtgctttcctaagcagtatacctttaatcagaactcattcccagaacctggatgctattacacatgcttttaagaaacgtcaatgtatatccttttataactctaccactttggggcaagctattccagcactggttttgaatgctgtatgcaaccagtctgaataccacatacgctgcactgttcttagagggtttccatacttaccaccgatctacaagggttgatccctgtttttaccatcaatcatcaccctgtggtgcaacacttgaaagacccggctagaggcactatggacttcaggatccactagacagttttcagtttgcttggaggtagctgggtaatcaaaaatgtttagtcattgattcaatgtgaacgattacggtctttatgaccaagagtctgaaaatctttttgttatgctgtttagtattcgtttgatattgttacttttcacctgttgagcccaaattcaggattggttcagtggcagcaatgaagttgccatttaaatttgttcatagcctacatcaccaaggtctctgtgtcaaacctgtggccactctatatgcactttgtttactctttatacaaataaatatactaaagactttacatgc

SEQ ID NO: 1254 - DNA, 271 bp, Homo sapiens
gacaagagcaaatacccaatgggtggcagagctttatcacatgtttaattacagtgttttactgcctggtagaacactaatattgtgttattaaaatgatggcttttgggtaggcaaaacttcttttctaaaaggtatagctgagcggttgaaaccacagtgatctctattttctccctttgccaaggttaatgaactgttcttttcaaattctactaatgctttgaaatttcaaatgctgcgcaaaattgcaataaaaatgctataaacc

SEQ ID NO: 1255 - DNA, 1239 bp, Homo sapiens
ttcatcattcctaatatttttcttgtagttgttttaaaaaaggaattaacatccaatattctgtattacatactgtacaccagattttgatttcagaaaacaatatttgatgtataacttccacttaatttaaatttaataaacttttatttcagagatatttgattagtttacaatctaagagttattcttaagagtttcagtggaattttcttaatttttctaaagatattcctactctcttgatcatattctaagtacatatgagtacatgtacattcttatacaatgtctaaatgggttagaaaattattatacctatagaagcgaaacttggaaattaatagaatcacttaaaccaaaatctttataagacacaattctattgattttaaagcttctgctttccaggctctgttttccagagtttataattacgtagtttttagtagatgaaaataatggattcttgtacctaacattttatcctcttagatctaagagccgaagctatagaactttgttagactatttggcaagcaaaatatatgacagtaaatatcagaattttatggtttgaccagcgcttatcacattcccaattcagtgagaaaaattcatctgggacacaacagggtactcttctctgtttgcccagaatcagctctggattttaagcccagacttcagtggacccagatagaaaatataaagtctctgatctataggccacatcaggatgttattttatgaagagttctagagcaaggttgcggaaatcggggtggagatggggagcagtgactcctccaaatattcattgctaacaggccattctatgcagtttgttttaacaaatcctgggttaaactgaggccacaggacatgatgggctgttctataaagcattctaagtggagaggagacgatagggcatatgaaattcactaaactctctggaaaaaaaatatgtatatattaaaaaccaagactggaatcagtgcaacagtgggaactaccttttacaagtatccattgcttcataaactccatttgtttggaccaatcccttaaacaaaagcaaggcaaattttacatggatttagagcctaggtcaggttattaggattataaattttccactggtatgtcattgtgattatctttgtttttgtctttctgaaagattggattttctataacaccttgtgtaagaaaataaaaaacttgatctaactg

SEQ ID NO: 1256 - DNA, 48 bp, Homo sapiens
aatatataattacatgtaataattaaataaagtctagaaaattttatc

SEQ ID NO: 1257 - DNA, 170 bp, Homo sapiens
ccagaggattgcttcatctgatacgtaggcctaagtttttaatcaactcagaacactggcagttcctacagagacactgaggtgtcttgattatggaggaaataaccattcctttgcacttgtacaatctgaggattgattgctgccttttaaaattttatgaagagaga

SEQ ID NO: 1258 - DNA, 829 bp, Homo sapiens
aatattatgtatgcagcaatatttgagtaacaagaagcaaatatccaagttccaaaattataaaagaaattcttatccaaatagtaatgttctaattgatcatataagaaagcaaagcatagacattagaattataagtcagcagtggtctgttcaagaacaatcaacatttttagaaaatagtaggacaaaattaggaaataattatcaccaagaggatctagttcatgactttctattatctcaattagattgctcaatcatcagccttcctatactaaactctgattcaggaccaagaaaggcatagtctgactctggaaatgcgctgttggaagccaaataacatcaatactcttgttctataattgaatatcaaataagacaaattaccattaatttaatgactgtggagttaattgtataccagcatttcagcaaatcatcatcaatagtattacattagcaatttatgcaattaaaagggctttgtaaaactttgaatagattttattgtcattagtagctgttggaacttcattattatataatgtttttgcaaactttaacttttttctaaattgttaaataaaagaataactatccttaatctaaataattttggtagcaaatcctataaggtattaaacattttaaggtatattattacattgctattttactgtttctcattaacccaaacagtttaaaggcagaattccacttagaaacaagttgcattttgaaagtttatttgtaatccatttgtttggaattcagaaatgtatttcacataaaaataatcttggaagtaataaattccaaaatt

SEQ ID NO: 1259 - DNA, 5395 bp, Homo sapiens
ctggatgccataagacaaccctggttcctttgtgaacccttctgttcaaagcttttgcatgcttaaggattccaaacgactaagaaattaaaaaaaaaaagactgtcattcataccattcacacctaaagactgaattttatctgttttaaaaatgaacttctcccgctacacagaagtaacaaatatggtagtcagttttgtatttagaaatgtattggtagcagggatgttttcataattttcagagattatgcattcttcatgaatacttttgtattgctgcttgcaaatatgcatttccaaacttgaaatataggtgtgaacagtgtgtaccagtttaaagctttcacttcatttgtgttttttaattaaggatttagaagttcccccaattacaaactggttttaaatattggacatactggttttaatacctgctttgcatattcacacatggtcaactgggacatgttaaactttgatttgtcaaattttatgctgtgtggaatactaactatatgtattttaacttagttttaatattttcatttttggggaaaaatcttttttcacttctcatgatagctgttatatatatatgctaaatctttatatacagaaatatcagtacttgaacaaattcaaagcacatttggtttattaacccttgctccttgcatggctcattaggttcaaattataactgatttacattttcagctatatttactttttaaatgcttgagtttcccattttaaaatctaaactagacatcttaattggtgaaagttgtttaaactacttattgttggtaggcacatcgtgtcaagtgaagtagttttataggtatgggttttttctcccccttcaccagggtgggtggaataagttgatttggccaatgtgtaatatttaaactgttctgtaaaataagtgtctggccatttggtatgatttctgtgtgtgaaaggtcccaaaatcaaaatggtacatccataatcagccaccatttaacccttccttgttctaaaacaaaaaccaaagggcgctggttggtagggtgaggtgggggagtattttaatttttggaatttgggaagcagacagctttactttgtaaggttggaacagcagcactatacatgaaatataaaccaaaaacctttactgtttctaaatttcctagattgctattatttggttgtaagttgagtattccacagaaagtggtaattatctcttctctcttcctccattagaaaattaggtaaataatggattcctataatgggagcatcaccacttattaaaacacacatagaatgatgaattaaaaaagttttctaggattgtcttttattctgccacatttattgataaacagtgaaggaatttttaaaaaatttttaagaattgtttgtcacgtcatttttagaaatgttctacctgtatatggtaatgtccagttttaaaaatattggacatcttcaatcttaaacatttctatttagctgattggttctcacatatacttctaaaagaaacttttatgttataagagttactttttggataagatttattaatctcagttacctactattctgacattttaggaaggaggtaattgtttttaatgatggataaacttgtgctggtgttttggatcttatgatgctgagcatgttctgcactggtgctaatgtctaatataattttatatttacacacatacgtgctacccagagattaatttagtccatatgaactattgacccattgttcattgagacagcaacatacgcactcctaaatcagtgtgtttagacttttcaagtatctaactcatttccaaacatgtaccatgttttataaacctcttgatttccagcaacatactatagaaaacacctgctactcaaaacacaacttctcagtgtcatccattgctgtcgtgagagacaacatagcaatatctggtatgttgcaagctttcaagatagcctgaacttaaaaagttggtgcattagttgtatctgatggatataaatttgcctcctagttcactttgtgtcaagagctaaaactgtgaacctaactttctcttattggtgggtaataactgaaaataaagatttattttcatgctcacttcttaaaagtcataaaaacaatcaaataggatcatgtttattgtcatgtgtttcctggtttctgacctgtgtgcacacccctgtgtgtttataatttttaaattgaattttatatggggtttttatttgctaaaaaccaggctgttgaatcacatttgggaagggtacttatcttaatgactaatgacttaattgggaaagttgaattcttgtaaaatacaaaatccaaggacttcttggatttaatctgattgtcacttcttagcagatcacttttttgataatgaaagttaagcatactgaatgctacttttgattgacaaactggctataatagtctaggggaaaaatccctaaacagataaagattcctaaagtaatggtggcagctgatgtttcagtgaacttttatcttgatgcgtttaaatggaagtaatgccagacctgagatttttaaggcatttttacagcttgtattgaaatgattggagacatggtttctttattagctattttgagacctgtggagttaagcaagacttttaaaaattggcaccatatacatctagttagttcctttactcttatttttttaaataaaagtagtacacatcatttccagggttgtaaatatatttggggcttgtttttggtatggatttaaaaggaggatattaagtattcattctaattttgttatttttctagttgccagagatggttgcactgaaatagaacagggagttgcatacaaagcctaaatgtgtattggatttcgaaaatactaggttggtgcaattggttttgtaccaacctaacatgtctttaggaaagtaccatcatgtggaaggaaacaacaggtgttaaaaggttcaaaggaatgagaaataggaagttactagaacctaactgatgttgaccttagaggtaagattattcaggtatattagtggacctccagtccaatggtatagcaaattccagggatctcaggtgcatgcaattttactttctaaagtaaacacttagaaaatagattataacccagacgttttggattatactgagacaaatatgtaaataagttttagcaagtctgaacatgtaccagcgagatcttcaggttaactaagaaaagcccagaaacttcattatttactgtgctttgtatggcataactggtaacaaggcagtaaaatgatacatatttgaactggaccatagtaattaaatgatttatcaatatcatttgcaagataattgtcaggttgagttaatagtaagtggcagcttcccagaaatttgggttatttggcctaagctgtgccctgggattacctcttcatcttccttgacttttaagttcaaatttggaggttatgtgaagtgattgaaataaatctttcaggctgaggaagtcggtaatttcaagaatatagtgaaaacaaggttgtaatctaaacatgagaagcttaagtttaggaaatggttagaatataaattgctaaagccatcatgattttggccacagatgaaaatatgaacactggaaatgagcgccatttaaatgagatgctgtatgtaagccaggggtcagcaaagttcagcctgtgacctggtgtgtgtgggggtgtgtgtgtgtgtgtgtgtgtgtgtgtgtgtgtccgtgtccctgagttaagaatggtttttaggcttgtataggattaaaaaaaaaaaaaacccacagaaaaatgtaggcagcccagcataagataccgcctttcacagaaatgtttgctgaccccggaactgtcactctcgggttacaagagtttgtttctttgaaacagtctggctctgtcacccaggctggagtgcagtggcatgatctcaggtcactgcagcctccacctcccgggttcaagcaattctgcctcagcctcctgagtagctgggattacaggtgtgcaccaccacagacagctaattttacaggtgtacaccaccacacccaagaatcacttgaacccgggaggtgggggttgcagtgagccaagatcatagcactgtactccagtctgggtgacacactgtctgaaaaataaaagtttagttctaggtacaaattaagtggtctacccaacaggaagctgtgaaattagaagtaattttaaagcatactttacacctctatataatcaaagtaagggcaagataaaacttgttagtaaaacatgttttattattttttagataggtagcctgcaacataaaatatattttgaaagctgttaaggggtgtataatctgttaaaaaataccatgattagtatttcacatttagtgactcagatccctttgtgtaagtcctttgcgttgtgcaaagaggtttttctatgagatgagaattatgaacacttcatataggtaaattccataggttgagctggggcagaaattaatggctcctggagattgcatctttttttttttttttttgagcttagaattcccatttggacagaatttagcttttgtgctgttgattacttctgtactaaactggtagccaattgttcacttctaaatggaagggaaaaagttacccacacaagttagaaaatgatttaccgaattatttttttgagttagtatgtatatactgttttaaatcagtaatgtttgttccttttgctgcccatttgggagtatgtggcaattcctagtgctcttgtatgacattactcttcttgagacttgtatatgcaagaaagtatatataaaagatgcctggtggtaactttgtatctgagttctgattcattatggacttttagaaatctatttagataattggttcatactaggtgctcaattactctgaccttgtgtggcttaatccttaaatagttgctttaggtgttactgggtggaagcatggaaagtgaagggctaatattaaggatttttatgtattactgagtagggaaagtgggaagtagcttatctttggacagttgtattactttgcactaatcaccttgtttgcagttgtagctgattcagttctagattttaggaccaaaaagatctctaatttaaagaaacagtttttatatacctagaatgaagattctgtttaaagcggttttggttaacttggttcttgacatttgcctaaaattttgttggattgggactaaaatgttctattagccaatgaataacgtccaagtaaatttttgttttattttggg

SEQ ID NO: 1260 - DNA, 867 bp, Homo sapiens
gaggctgcagcgcccggctgggacggtctctccataccccagcccctctaactagagtggggagcatgccagagagagctcaatgtacaaatgaatgcctcatggctcttagctgtggtttcttggaccagcggcatggacatttgtcagtttgccttctgacggtagcttttggaggaagattcctgcagccactaatgcattgtgtatgataacaaaaactctggtatgacacattttctgtgatcattgttaattagtgacatagtaacatctgtagcagctggttagtaaacctcatgtgggggtggggtgggggtgtattccttgggggatggtttgggccgaatggggagtggaatatttgacatttttcctgttttaaattctaggatagattttaacatcctttgcggtcccagtccaaggtaggctggtgtcatagtcttctcactcctaatccatgaccactgtttttttcctatttatatcaccaggtagcccactgagttaatatttaagttgtcaatagataagtgtccctgttttgtggcataatataactgaatttcatgagaagatttattccaccaggggtatttcagctttgaaaccaaatctgtgtatctaatactaaccaatctgttggatgtgggttttaaaaaatgtttgctaaactacccaagtaagatttactgtattaaatggccttcgggtctgaaaagcttttttaacttcttgcttaaaatgcgttttattttgataagatacttcaaatagcctccaaaagtgtagatccaatcatttaaataaacctgtatgtatatgcatatgtgtacatgcatatcccctcctgctaaaactcat

SEQ ID NO: 1261 - DNA, 163 bp, Homo sapiens
gtcaacaaggcaacacatgtttatcagctttgcatttgcagttgtcacagtcacattgattgtacttgtatacgcacacaaatacactcatttagcctttatctcaaaatgttaaatataaggaaaaaagcgtcaacaataaatattctttgagtattgtctt

SEQ ID NO: 1262 - DNA, 3985 bp, Homo sapiens
tggaatagagaaacagctcctcgcctcttcccaacaacgcaaattatgagcagctccttgaagagatttaccttcagcttatttggtaaccactgctaataactaaaatgttctcagcttggaataatggactctgaagtctctattttccaagttgtcctttctcttaaaataccctttactgatttaatacagaataacaatcttattttccacttggtaactatggctttatgttgggttactgtttaaggaaagttgatctgggcctttttaaaaacataattatatactttagaaatacaagggattccgatatgtcaggacctaaatggcctaagcacctgtcaaattaaaattccaaaattcattgaaatcctaaagccttgatattatattctttataaggcgtgtgccagcctgtatagtatataagagagaggggtgtttgtgtgtatatatatatgcctttgtgtatacacttatcaaagctattttcttatgaaaacgtccctctctccataccatcagtttctcagttccagaagttatacctttattttgagctgtgtataggtagaataaaaaattcctttcatatcgttattgtacaaaaagtaaagagtatcctaaagattgtattcattgtaatcaagtaatgcaatcatctctcctctcttgaaatcttgctggacctcttaggctacaataaactgtaccaaactaaactgacagtccttcgataatatgaaacattaatttacaaggacccgttagggcttcaatgatgctgagtctggaaaaggggaggagacccttgggaggactccaggcagctgtgctcccagggctcatgttctctactggattagggataggcacctctgaaatctccaccctgatgattggaatgaaacggagtgaacatgagcccagctgagagaggagcaggaatgtgtgaaaaacagctgctctccttgtcccagctttgtgattgagccctctgtcttgctctctctgccttccctgtgtctttcttctcttaccagagcatctgtttgcagaggtaacattaccttccccagccacaggtatgtggaatacggtgaggaaaaaaaaaattaaaaaaaaaatgcaagctgtcaggatgcttaagctcttttcagacatctgcagtttcatccctaccttgttcacataccatccaagaggcacataggctacccaagagagccttggattcagtggtacactccttgggcccaagggctttagcagctggatatggggttccttgattttcctctgggcccaaatatagccctcacactcttggaatttccaggtatgggggtagccccaaaaggaggaatctcctatggccaataaggtatcttgactttatcaaagtagaagagagggtcacttcggagtcaaatcatacactaggcctttgatgctttaattcttcttcagttcattaaaagtaactactaaggaaaggttaaaaacttcccctcaaaaaggaatcaaccccaggaagtaattatttacaacgattttcccaaattttgtacaatctgtcctggaaagcaaaccccttttaaaatctaatgtctgggctttgagtattagctcatttagggtggacaaatgcattactgttttcaaactgctcacatttattcagtatttctccaagttgctatctactcagccttatgaatgcccctcgcttttctaaggccatgtgaaaatcacggcactgcccttagccttgtgtcatctgctttttcgttctgcgatatgcccagttcccaaatcaattataggtacctgtttaggagagaggaagattttacctctcaaagggtgagatttgaaatttacactaaaaagacaactttacatttaatgcttcacttaatgagacattcttttttttataagtctatttttctactcagtttcagaacactaatctgattttcactctgatttttaacgtttctttaaatatttataatgtagcttctttcaaaatattttcatgaaaaattacttttattataccattatgtgcatgttattggtagcaggcatagtttattatttagtactgaaacatgctcttttacctaacagtaaacaagtatgttttgatatatatctgttaatatgcttatagtggtaagaaatggacttgaggtcccaggagatttcattttattcaccctggtcagatacaataaaggctatgagtataaatacataacttcctaaccaggtgtagggcatgttcatgaatatcaaatcttttgatgctggacccaagagaggaaaagttgtagctaaatgttgatttacttataactagacgtctatgtgagaaaatatatgtatacatatatatgatatgcagaagtcactttttttatcaggctttattctccttacaaagccacagtttaactgtctgcaacagttggtttatgttaatgatagacaaatacccagtgtttgttactttttccaactaccactgtaatgataatctttctcacgtatatacatgcaacttcttggcttcatttccatgaagctgtttcaatatattcagtatactttgtccttaatgctgcttctgttaacagtgatctctttctttttttcattcttatatcttcattagttcatcataaatctgtccagttgaggcctcaggaccacggcatgatttcatgactccgaagtattttacagaaacattttttaaataagggaaatattttatataccagatggttcacaagtgatggctcatagctagtttttttttttcttctaaaaaatgtcaggtttttaaaatcatttaccttattaaaatgaaaagtgccatacttaacttttaaaggaaagacctgacttgctttttctctatttagactgtttttgtactttactaatctttaaactatcaggaaaaaaaccaaaactttataccaatgatttagtaattttgaggcatagggtagcttacgtagtggaggatgtgccaaatattctcttcaaatgccaccttctcaatttataactaaaatagtgttatctgactaattcctctgaattttgatgtaagatctatataggcccccaaaatgatcgtagtacatgccagtcatttctcagtgaaataaatacaataccagagtacattatgggttttattgctttcttttatggtagacctgttaatggggaaaaaatacatcaaatcaaatagaatcttatatctgtatgttaaaatagagcacttacctgaagtcagtggcctggatcatagccctggatcatttcccagtctgtcctgtgctgtgtgaccttggacaaggcgcttcatctctctgggcctctatttctccatttgtaaaacaagtggctgcagtagatgatggctgagagcccttcctgttcccagatgccttggtccaaagaccccacccctctgctggtcctgccaacgtgttggtgctataagctgcttcagatataaaattggtttatctataatgtttgttcatttaatagcttctaaaaggcctttttgttatacagtgctttttttctagttttatggacttggttactgtaataatgtcttgtttttagccatgtaactacaaacagatattctcttgatgtcttagtaaatttgcatttgatatatcattgatgagattttgttgttatgtaatattctttggctacgcatctgtccagcatcttattaaccataatactgtgatcattatttggaaatatgtcctatggaaagaataaaagcatgtacttcacagctagcatgttcacagatttgaaagaagtttcattaaaagcaccattgctttctgtactgcgtcagtgcctcattgtatcatcctacttgtgttttgctcaataaatgaataaaagaccatttctcttc

SEQ ID NO: 1263 - DNA, 644 bp, Homo sapiens
gccctgggccttaagagccagctcttcctatcctgtagcgtgtagaaaacgtggactcatttcactatgttacatgtacatggttgattttgtgctgttgtttggactgtaacatccatgttgtcaatacgtataccttgtaagtggataacttttctttttcccaggccagagaattcaaattgttaaaacattggcatttgaagaggagaacaaaatgtagcatgatgtatttaaagtaaggcctttagtaatgaatgtaatgagagaaaatgttttgaaaagaacaaaacatcaaaatgaatagaaagaaaaattggaaggcgtccttttggtaacccgattattgtgtattacctttaaatatttcacatcctgtaagtgcttaatcatatcttttaattgtgtatttaagaaaagtgttttcacaacaaaagcttttgataaattgctgcgtgacatatactaaataaaaaaatgaatatgttgatcattaggggtgtgggagcagagaaaattgtgaaagtgactctcactaaagatgttagtagtttctcatgtcatttaaaaatgtttgagtattctgcatagcagtttgtaaaagtgtaacagcttattgacttaataaagcttttcctgcatgc

SEQ ID NO: 1264 - DNA, 952 bp, Homo sapiens
gcatactccagcaagatatgtttttggtagcaaaactgagaaaatcagcttcaggtctgcaatcaaattctgttcaattttagcctgctatatgtcatggttttaacttgcagatgcgcacaattttgcaatgttttacagaaagcactgagttgagcaagcaattcctttatttaaaaaaaaaagtacgtatttagataatcatacttcctctgtgagacaggccataactgaaaaactcttaaatatttagcaatcaaataggaaatgaatgtggacttactaaatggcttttaattcctattataagagcatattttaggtacctatctgctccaattatatttttaacatttaaaaaccaaagtcctctacacttgatttatattatatgtggctttgctgagtcaaggaagtatcatgcaataaggcttaattactaaatgtcaaaccaaactttttctcaaaccagggactatcatctaagattaattacagtaattattttgcgtatacgtaactgctcaaagattatgaatcttatgaatgttaacctttccgtttattacaagcaagtactattatttctgattttataataagaaaatctgtgtttaatcaactgaggcctctcaaccaaataacatctcagagattaagttatatattaaaagcttatgtaacataaaagcaagtacatatagtagtgactatatttaaaaaaacagcataaaatgcttaaaaatgtaatatttactaaaatcagattatgggataatgttgcaggattatactttattgcatcttttttgtttaattgtatttaagcattgtgcaatcacttgggaaaaatattaaattattaacattgaggtattaatacattttaagccttttgtttttaaatttcttttcttccagagattgtttaaaaataaatattgacaaaaat

SEQ ID NO: 1265 - DNA, 1677 bp, Homo sapiens
ctaactgaattaaaaattatgtaatacttgtggaactttgataaatgaagccatatctgagaatgtagctactcaaaaggaagtctgtcattaataaggtatttctaaataaacacattatgtaaggaagtgccaaaatagttatcaatgtgagactcttaggaaactaactagatctcaattgagagcacataacaatagatgataccaaatactttttgtttttaacacagctatccagtaaggctatcatgatgtgtgctaaaattttatttacttgaattttgaaaactgagctgtgttagggattaaactataattctgttcttaaaagaaaatttatctgcaaatgtgcaagttctgagatattagctaatgaattagttgtttggggttacttctttgtttctaagtataagaatgtgaagaatatttgaaaactcaatgaaataattctcagctgccaaatgttgcactcttttatatattctttttccacttttgatctatttatatatatgtatgtgtttttaaaatatgtgtatattttatcagatttggttttgccttaaatattatccccaattgcttcagtcattcatttgttcagtatatatattttgaattctagttttcataatctattagaagatggggatataaaagaagtataaggcaatcatatattcattcaaaagatatttatttagcaactgctatgtgcctttcgttgttccagatatgcagagacaatgataaataaaacatataatctcttccataaggtatttattttttaatcaagggagatacacctatcagatgtttaaaataacaacactacccactgaaatcagggcatatagaatcattcagctaaagagtgacttctatgatgatggaacaggtctctaagctagtggttttcaaactggtacacattagactcacccgaggaattttaaaacagcctatatgcccagggcctaacttacactaattaaatctgaattttggggatgttgtatagggattagtattttttttaatctaggtgattccaatattcagccaactgtgagaatcaatggcctaaatgctttttataaacatttttataagtgtcaagataatggcacattgactttattttttcattggaagaaaatgcctgccaagtataaatgactctcatcttaaaacaaggttcttcaggtttctgcttgattgacttggtacaaacttgaagcaagttgccttctaatttttactccaagattgtttcatatctattccttaagtgtaaagaaatatataatgcatggtttgtaataaaatcttaatgtttaatgactgttctcatttctcaatgtaatttcatactgtttctctataaaatgatagtattccatttaacattactgatttttattaaaaacctggacagaaaattataaattataaatatgactttatcctggctataaaattattgaaccaaaatgaattctttctaaggcatttgaatactaaaacgtttattgtttatagatatgtaaaatgtggattatgttgcaaattgagattaaaattatttggggttttgtaacaatataattttgcttttgtattatagacaaatatataaataataaaggcaggcaactttcatttgca

SEQ ID NO: 1266 - DNA, 986 bp, Homo sapiens
catggagttgctttataacccttgtcatgtattattaaccctggttaattctaaggaggatgtaacatttgttttagtatcatcttaaaaggtgattattgtaattgatcttgtagtttcccagtatcacctacctgttggtataattagcctgggccatattcactgccagtaaatatttttacatttttatttaagatttttgtaaggtgttgtatacatttgtaatggtgataaccacaatgtgttcatacatttgttctaaatgttttgcttatgatttatcctgctaactttcattttcttatagcaagcagttttttcaaaaatgaatttttatttaatgtggttcagtattataataacaaagcatttttgtagaactggttttttttctcatttatttttgtattccatacaatgtgaccaattgacttgaatatgactagccagtttctatgtttttgttagatataaaattaaatcgaattttgttgaatactgttctttggcatttaaaaaataagaccttcttatcttgggccacatgtcaaaagaaaaaggaaacaaaaatatattaaaaataagacttttcattacccatgataggacttttgtgatatggctaatctcagtacacatttcaacttaaaacctttttatttacagcaccataattttaaaatttacttgcaatcttggtaagactaaacttgcagtgtttttctaaaagggaatttgataggtaaacttgatttaataaaaattaaatatcatttttgtttacaccaaaattatcagaagtaggttgattagtcattataacacttaccatatgattctattaagaagtcaattcagtagcatgtatatcaatttatatagataggtagatagcttttggatgattgaggcatgcttatattatgaaaaaaattgctaataaagataaatactacatgttcagaataaaagttacatttttc

SEQ ID NO: 1267 - DNA, 853 bp, Homo sapiens
ctgacgtggaaaaggatgccgtctaaccaaggaaagaaaatacagagaccctagaagtggatccaaatagaagggacaaatgctttcagtgaagaaaagggaattacacattgaatcgacacatcagtaatacgatacagtgaaatgggcctctaataagaatttcagcgagttttctgatgtgccattttttgtctttttaaaaatatacatattataaatgtaatagtttgacacattaatgaccctaagacctgcgtatgtgaagcagctatgagtgctgtgatttgtttttaaaaatttttacacttcttgttgaaatatatatgcatataaatatatctatatctatatctatatctaaaacactcctggaccattaacgtaaattaaatgtcttaagagatatggagcccttttaaacttgtcatctttatgcaaggtgacatttataaatattccttcgagctttgttttcataaaatgtaaactatgtaacattatgtatagttcagtaatttgaatgtttgttcaatataatgaactagaaggaatgcaattttctgtagatgaatgaaccaaatggtaaccattaaacaattgcatttatatgttgcaatacatttcagaaggagcgttcactctgcagggaataaggtacctcctttagcaccttagtgcaattcattgtggtgctatttgtttttacctgaatgtttgttactaatcttcctttcatagaacctctattttttttttttctaaacttgagtttgagtccttgttatggtcatcataaggtaatggttagcatgtttaaagatattcctcttccaaatctcagcactttaaa

SEQ ID NO: 1268 - DNA, 6360 bp, Homo sapiens
aagaaaacacttaacttgcatgtgcacagcttttggtaacaaatatcgctaaaccttactgtgaatttaggcatctctggcatgccactgtttatgcattgaagtggaatttttggtataaagctaaatggtcttagaagcatagaaaatccctatgtgccaaaagtagtgaaacacaaacaaaggaaaatatattaataacagtctagtgtttttgttgagtctgccattcgtagctgaatatgtgattaattatgtgatgaaaacattttttataaatgatcttggtctattggggagcggggatagttaatattccagtacactgaatacatgaggaatttaaccacatacatcattgaagacaagggatagcagtttgtttttattcaaagacattgctgtgttctctttcattgcctctctcgctttctgtcacttttttcctccttacattaaagaaaagtttaattacagttaaaaatgtataatgtatttataatattcatcgataccattattcaaatattgctcaatacagcaaattagctcctaacctaacaaagtttaagtttacttggattgataattaggtttactctttatctgaataagaaccaattccatttgtttgaaatatggagtttgtgactacccaaattgctaattattctttcttttgaatatattttacatttctatgagcctaaggaagattcatgaaactgacctatgagagtcgtgaagtggtttttcagaatgctatgtaaggaccgatttgagcactaactataggtactctgaatatatatttcccttgattattcaccaaaagtgttccccagtctttgactctttaaattccaatactgattccaaaacaaataaatattttgaagactcaatgaatactttccatattttggcctatttatataagaaagttaataacattgacccttcacagctcttctgcctgctcctcaaagtggctctatctaaatatttattactaaaatgtttttcctacagtctacatgaatacaaacctcaatagctaagcttgacgtatttgtgcacaagtagatcactacattaagttttgggaattgcacttcttaaaaatgtctccccaccaaacatagtaatcctgtagttatgcctacacaaagcttgccatattctttggtgcattcattttgtaaacccattaactttttattgtgaagattttcatttgcagtttcttgcactgcttttctagttttttaaaagcttgagatttatttatacttcttgtagtaactgcatatttctgtgtgtgtttagtggtaaagaattaattttgataggtacaatatgtctatcagattgatatatacaccagcctatgtcaattggggctaattattttaaatgaccatgtcaaattgaatttggagacaaaatctgttgagagtgcttatgtaattaatgatggttctactaatctaaattttggaaaaggtgataaatagactatactaaaatctctctatgccatagaattggattatcctgtaggtcatctcattgggtataagacaaaactacctactttttttcaaaagtgcactgaaatcacataataaagaggctttacctcttggttggtcctgtgaccctaagttctagtcagatagacacagaggcaatgtgaatttgagtggcatgagcatgattaggttattccttccagcatctagtatagcacctggaatatagaaactgtctaatacatatttattcagtgaatcaatgagcagaagtttgccaggacagtacacattggcaaggcacataccatatgattgaagtgcttcatgccattacagtccatcaggctgataaagtgaattatttctgattatttaattacagaaatatgaatttatcttcaagggtgtagtgtcatactgctgtacaacacagtgctttatttatactaataatttaggagactgatacttccaaatgatagtggacattactatcacaagaatatcacttttcatcaaactgcaaaaatacagaaaggcaaaaaacctgacacttattcttaactgcaaattaaattcctgcccaggggatatattttaggaggggatgaatggcagcttttgtgttttttttaacaagcttgaaagggaggtggaaaacaaagaaattatgtaaatggcatatgagttttattatctaggcattcgttagtatggggaaacctgataagaaatgaaaatcccaaatgatttcagccttttcatgatggttgaggttagatttcagagatgtacagagactagagcggtggttagaaagaggatatatgtagtcacagcagaaagacgtgtctaagtttaattttattggctttcaagttcactcatgtatacttagtttgtccatacatatgtctaatcaggaaaaatgcatgtatagattatgacaattcctgaattttgaagtattggttaaaagacaattaaaggccaagaaaaccatggtggaagaagtaagcgaatgaaatgtagaaatatatgtaaaattagcaagtgtcaattttaccaagtagtgttgattttccaaacaatgaatttatatactatgctgagtcacagagaagaatgatcacatgttacttaatgagagcagtttacttttcaaataaaataggtatgatgaatgtcttaaaaatatcttgaagttgaagaaacaaaaatgagttatctcaatatttaccaagttaacctagtgctgtatatatcccaagatattttaggtaaatgtaagtgtttaatcatgccagatttaaactagtctgaaatatagggtatacatatatttctacttacatttctttattttatgaaatatccgaccatgttgcagaaaataatgcaaaacctcatgtaagttaactatgaaagatcctgtgagcacattggcattgagtgacagacaaactaaaaactggcaaacagtattttaataagggggtcactctgtggcagtattctaatattggattttcaagtagattaggctttttatttattcaacgctttttataattttgttctttttgactccaaattattggtcagctttcaaccttctccacatcagcaatcactaatagttcttttggttgagatcaactcagaaaaagaaaatagaaaacttttgttctttgaaattttagacatgcataatatctatttattttcataatttaaccccaaaagcttctcctgcaatacacaggattctaggagctgaatgacacagggagactacagagtatttattattacaaacacataaaaagcctaacttgaagaattaaaatttctattttttatctgtataacaagtacaaaccatcaacaatgacaaattttcacagctgcttgtttattgcttgttttatatgtttacatatctcaaaatctgttaaaactgaggtctaaaaaatgtgcagaattgtgcaactgtggcctagtccataagacttttctgagttgcaacaaagtgctgacaaagtgacagatgtctgtgatgtttcatgacataggttatgatcgagccaatttacaaaatttaataaccaacctaaactcacatacatatttgttaagaagctgacatcagttcagtattgtaaggaaactaactaggtggtgatgatgataaaagaattagggaaaatattttatttgatatattcccttttataattcctaaaatgaagattctatttaagggttataatttatataagtttagtcatataccattacattatgataccataagcagagtgcattatgattctctagaaatataattcaatcagatatgtattatatttatttatgtcacacattttctttactgagaataaaaattatcttattttcagaagctttgtatcaatcagtttcatgtaataagcaacccagatatctactagattatgtatttcttcatttgaaactacactgttttctcctagtccccttgactctactgtgcttatccattctttcacagaaagaaagtaacagacataattcctgttgatgaggctgggattgtttttaagaggagagataataacttcatatttttaaagtgccagtagcctaatatgtgaaacagatcagaatctgttgtgtagtaagtctgctttgttgaagaatttattatgggagtaaagataagaaggaaagagatcaccatcagaaacaagtcagccttttcatgcttttttgagcatttttggagatgattccacttctcaagttattatcatttgtgcatctcttcaatgctattgttaaatgctttagaattagaatattttgatcctttaattaaagtaagccaaacgtctaggcaaaaacagccaatcattaaactttaatagtaattcaaatatagatttctcatacagttttccatgtctgtagaaatcaaagttgtaatgttaagcagagggaaatgcgtgtgatttactaatacacttcaacgttctacttttgaaaggatactcatgtgggtggggcagagaacatagaaaaagatatgatggaaaacctgtccattttctacctgttaaccttcatcattttgtgccaggccctggaagcaaagagaggaagggaccgactgcatttatctttgaacacttgagcatcagtagtactactgagtggccaggggtcttgtctgtcaaagcaaatgataagttcactcaggccattattgactgctgaactctcttccttcccaactcttccttgaaagagaaaaaaatactttgccttcttgctctccttatcaaatgtttttgtacaaatagtgtaagcctgtttaagcaaaccaattaaaataggcactgattattttgatctgtttgtaacaaatgaatgtaagtactatttacatggtgtgcctaggaggagctgaaatcattggcactttaatccatattgtaaagatcagtatcaaaagcatagtgttcttcacctctcctcctcagcatccatctctatatacttgattaaatggaaaagtctcttttatcacctctatgtaaagttttatgggtagttatcgtcagtgtatttaaatatatcttctagtatgttttaaaggctggtcttcaatactgtggagacaaaaaataaaagagcgtatgaaaagtacgttagacttttgctggcattcaagtcatggctagtctgtgtatttaataaatgtgtgttatttatgtcgtgtttgtcaatggaaaataaagttgaatattctgaaatgtcgctgtgttttcttcctgatgtcaactcacgtcaggaatactttacctataactatgttaagtattttgctgaaatcccatttgatgtgctttgtcaaataatagcacaatgtaatgcaacagccccatgctatctggaaaaattagatcattttgttttatattccataatcatgtgcataacaaattattgttgatttaatataaatatgagagttgctcttttccgattttcaacatgatgtttctttgttttattatctcaagattattgttcttaacacagagtgcatttataaattattgtaagcttagttatttccctttcttgtggattttggtgtaatttacaggcagccaaaataagaattgtccttgctcatagtacaaccctttaattgacttgtgcctgagttttggtgtgagctgagtattggtggttatgaatactgggatccccagctatttgttcatgtacttattgaggtcactattggtcttccttcttcaatgaagggagaagctctgtcaaatgtagactgcaaagtcaagctcattaaaagtatccctctttcttcgtgagaaaagatatccaaggagaattctgtccctggttcctcccatgtgggggttctaggcctaggaccagatcttattgtctctacaatcttgattctttagtatttcaggataggcagagttttgttaaagtatacaaaaatcatagctagataagagagataacagaaataagttccagtgttctatactcctgtaggatgactacagttaatgctaatatacagttacaaatagctagaaggaggctattgaatgttcccaacacaaagaaatgataaatgtttgagatgatgatgtgctaattaccctcatctgaccagtatacattatatgtatcgaaacatcgctctgtgccctgcgaatatgtacaattgtgattattaaaataaatacataaataaaatttaaaagtcattatg

SEQ ID NO: 1269 - DNA, 949 bp, Homo sapiens
tgaaagaacggagttggacattttattgcaattcctgcttccctgaatttgcatatttcttcccacctgagaaggataattatatattttaatttggattatttcttcatttttatctttttattttaatgattgttttgtcagtaatacccatggagatcaactttattattataatccatgcctctgaatattagattggtttcttggatgggattttgaatatgcatttaagaagttgggaagaatttcacagatgatgattggaggaaaagtgatgaaaagaaagacctgtgttccaggagttttctccaacttcaaacctttacgtgaatcttaaccaaagtggacatctttacatttcatgatagcttgcttttgcaatatgagtttgaaaaatcagtataagcttatgatggtgaaaagtcaacatattgagagtgataattcaattaataggatatgaacttaacgacatataaaagcaaatgagggcaggagggaatcgtgacaaaaaatatttgtgcccaattatgattaatgttttagagatgttgtgtccctgtgggcttagcatggaactaaaagttcctaagtctcaattctagttatgtgtcatttagtaactcaggaatctgcttaattgttatttctaagcttttgatgacaaaggagtgatgcagctaagggcatccttggagtgtcataaaaaacaaatttgaggttgaatgattagctgcgcagttagagtgataaaaaaatccaggtaggccttctgattcaccatgaccaagtcaggatttcttaatatttcttttctggcagcatatacaaaggcaaaattaataaataacagttgttgaataacaaactttattacgtttttataaaataaaagaatctattttgtctgtattaaaataaaaaactttgtggacttctaaaagat

SEQ ID NO: 1270 - DNA, 507 bp, Homo sapiens
gaggaattttggggaaattaaaacctgcctttctgccaggatcacatcactggaagctccatgactctctttttgtaaaagaaaaaaaaatcacagaaacacccacctcccaaactattctcttttacttcttcccccaagcccacccccaaatataactgttatccagaagctgttatgtcctgtttccatacatgtttttgtacttttactatatctacatacatcaattaaacttatgtcctattgttttgtgaatttatatttgcgtatacattatcatatgtaaaatttgcatttttttattgaaaattatgtttcttgagatttatccacattgaaacatggagctctaaatcgttaattttaaccgctatagagtattccataatttgaataaagcataatttgtttgtacaatctcccgccaagggaaaattatttccacactcatcatgacaaggagcactgcaaaaataaaaataaaaattacattcatacatgttt

SEQ ID NO: 1271 - DNA, 474 bp, Homo sapiens
catgaagaaaataactacaggagtgctgtgttttaaaaaagcaagctcctccagctgagtttgtgactctaatccctgcttattttgagcactttccatgtgttgattgactcggaaaggtgggagattaccagcaagccaggtcatttgggcaaacatgggcatatttttagcaaagctgaacaaactggttggtcactcgaactacccaatttagacttatagtaagaatagcacatggttcagaattgccaagactgctgctttagtcaacagaaattttttcatatgcatgctggtaatgcagtgcatctctggaagaaatgcaagagtattttaacatttggtccagaagaaatatgtaaagggtgtttgtagaatttgatgccctcttcagtgacataaggttatgggtttgtgaatggaaaatctgttatttgttcaggttattaaaacacattctaattcaacatc

SEQ ID NO: 1272 - DNA, 1847 bp, Homo sapiens
acgccacaggtcatcatctggatcatcccattctggttcccgttcaagttcaaaaaagaaataatgtattaaaatttacatcttaaaaaaatccagtacagtgcatgaagcatatttttaaagaagttggtgtcttacttggtcagaagtgctaaatctgctagtagaggtgcatgcctttcattgcttttcaaaacaatacagctgtgtttatttgtgaagttaaaagtaaatagcattttaagccataatgtcccaaaatagatgttctgtcattcattatttacaaccatttgcttcatttaaaaccatttcagctataacaaagtactttgcttcctaatttaaacccatttttgtcatttccaaatacatcctgtccattggctaagacaggattacctaggcttgcctgaactttgggcatggaagaaagactggaaactagttggaaacaacatacttatggaaaagaaagtcagcctttttatgctgttaacagatgtcagagtgattctcaccaaaaaaagttaaactatgttgtaagcagccaactgtaaatgtctattttgaaattccctatgctaagggtgccttagaatcattgtgtctcttttatccagctttacttttttgctccacatttaatgcaaaagaatcttgtgatgtctacaaggagagaagtgggatatattttcctttctgacacataatttggggcaaaaaagaaagtcttaagagtttatcttttctctgctgatacggttgcttgataaagacatctcaaaatgtttaccaatgttttaagaagctttgtgtgatattcttccaaatgtagttaccaaatataatatggtagaaaaggctaaatcatacttaatgagcaaattgaagtaagcttttaaagtatatttctcttttggtgaaaggccaatggagacattgtgaatttaagtgaacatttgcctcaagatgttaactataaacacactgcatacaattttcttctgaataacaaatgaatgcttattgctgcatgatgtaagcaaaagtcattatttttcctattcatttgaaataagttatggcttaaaatgcttttggagtttatttctcaaaattaaaatctggtcacatgagctttagtttgttttctggtttaaaaaataaaaaggtttctcttaacagtatttccagtgacaatgcaaggtaagtatatcaaaggaaatcaacagttgtgcttgggggctttttgttatgggatattgatttcttgttttttttccgtaacattgtctgctgcaatttaaataaaaattacgacattttaagatatttcatagacaaaccaaacaaaaatatatgtttttactttaaagtgaatgtttttctcttcagctgatctaaaaatgaaagcaagatatcttatgtagaaatattttgataatatttttacagtgagctttcccatgtttttatgtcttaagtttctttgctgcgtttatgtaggttgcacaagaacttttactcacttgtaattgtgcctcagactttttgaaagtctaccttctaaattgccccgacgatctagattctacatgttaccattggtttattcttgtgctttctgtatttaaaactttggctgtactaagcaaatgcaaggttataatttagctaatagtagtttacagacaattctgatgattatgatttcatttggtttaactaagctgtactagttcatttcataaggaaatgatactgtagacaaatgtaaataaagcctgtgagtcaagcatcaagtggtgtttgttagaaataaactagagatttttaaactctga

SEQ ID NO: 1273 - DNA, 4503 bp, Homo sapiens
attcaaagacccataaaaggcttttaaggattctctgaaagtgctgatggctggatccaatctggtacagtttgttaaaagcagcgtgggatataatcagcagtgcttacatggggatgatcgccttctgtagaattgctcattatgtaaatactttaattctactcttttttgattagctacattaccttgtgaagcagtacacattgtcctttttttaagacgtgaaagctctgaaattacttttagaggatattaattgtgatttcatgtttgtaatctacaacttttcaaaagcattcagtcatggtctgctaggttgcaggctgtagtttacaaaaacgaatattgcagtgaatatgtgattctttaaggctgcaatacaagcattcagttccctgtttcaataagagtcaatccacatttacaaagatgcatttttttcttttttgataaaaaagcaaataatattgccttcagattatttcttcaaaatataacacatatctagatttttctgctcgcatgatattcaggtttcaggaatgagccttgtaatataactggctgtgcagctctgcttctctttcctgtaagttcagcatgggtgtgccttcatacaataatatttttctctttgtctccaactaatataaaatgttttgctaaatcttacaatttgaaagtaaaaataaaccagagtgatcaagttaaaccatacactatctctaagtaacgaaggagctattggactgtaaaaatctcttcctgcactgacaatggggtttgagaattttgccccacactaactcagttcttgtgatgagagacaatttaataacagtatagtaaatataccatatgatttctttagttgtagctaaatgttagatccaccgtgggaaatcattccctttaaaatgacagcacagtccactcaaaggattgcctagcaatacagcatcttttcctttcactagtccaagccaaaaattttaagatgatttgtcagaaagggcacaaagtcctatcacctaatattacaagagttggtaagcgctcatcattaattttattttgtggcagctaagttagtatgacagaggcagtgctcctgtggacaggagcattttgcatattttccatctgaaagtatcactcagttgatagtctggaatgcatgttatatattttaaaacttccaaaatatattataacaaacattctatatcggtatgtagcagaccaatctctaaaatagctaattcttcaataaaatctttctatatagccatttcagtgcaaacaagtaaaatcaaaaaagaccatcctttatttttccttacatgatatatgtaagatgcgatcaaataaagacaaaacaccagtgatgagaatatcttaagataagtaattatcaaattattgtgaatgttaaattatttctactataaagaagcaaaactacatttttgaaggaaaatgctgttactctaacattaatttacaggaatagtttgatggtttcactctttactaaagaaaggccatcaccttgaaagccattttacaggtttgatgaagttaccaatttcagtacacctaaatttctacaaatagtccccttttacaagttgtaacaacaaagaccctataataaaattagatacaagaaattttgcagtggttatacatatttgagatatctagtatgttgccctagcagggatggcttaaaaactgtgattttttttcttcaagtaaaacttagtcccaaagtacatcataaatcaattttaattagaaaaatgaatcttaaatgaggggacataagtatactctttccacaaaatggcaataataaggcataaagctagtaaatctactaactgtaataaatgtatgacattattttgattgatacattaaaaaagagtttttagaacaaatatggcatttaactttattatttatttgcttttaagaaatattctttgtggaattgttgaataaactataaaatattattttgtattgcagctttaaagtggcacactccataataatctacttactagaaatagtggtgctaccacaaaaaatgttaaccatcagtaccattgtttgggagaaagaaacagatcaagaatgcatattattcagtgaccgctttcctagagttaaaatacctcctctttgtaaggtttgtaggtaaattgaggtataaactatggatgaaccaaataattagttcaaagtgttgtcatgattccaaatttgtggagtctggtgtttttaccatagaatgtgacagaagtacagtcatagctcagtagctatatgtatttgcctttatgttagaagagactttcttgagtgacatttttaaatagaggaggtattcactatgtttttctgtatcacagcagcattcctagtccttaggccctcggacagagtgaaatcatgagtatttatgagttcaatattgtcaaataaggctacagtatttgcttttttgtgtgaatgtattgcatataatgttcaagtagatgattttacatttatggacatataaaatgtctgattaccccattttatcagtcctgactgtacaagattgttgcaatttcagaatagcagttttataaattgatttatcttttaatctataacaatttgtgttagctgttcatttcaggattatattttctacaagttccacttgtgggactccttttgttgcccctatttttttttaaagaaggaagaaagaaaaataagtagcagtttaaaaatgagaatggagagaaaagaaaaagaatgaaaaggaaaggcagtaaagagggaaaaaaaggaaggatggaaggaatgaaggaaggaagggaggaaggggagaaggtaggaagaaagaaaggatgagagggaaggaagaatcagagtattagggtagttaacttacacatttgcattcttagtttaactgcaagtggtgtaactacgtttttcaatgatcgcatttgaaacataagtcctattataccattaagttcctattatgcagcaattatataataaaaagtactgcccaagttatagtaatgtgggtgtttttgagacactaaaagatttgagagggagaatttcaaacttaaagccacttttggggggtttataacttaactgaaaaattaatgcttcatcataacatttaagctatatctagaaagtagactggagaactgagaaaattacccaggtaattcagggaaaaaaaaaaatatatatatatataaatacccctacatttgaagtcagaaaactctgaaaaactgaattatcaaagtcaatcatctataatgatcaaatttactgaacaattgttaatttatccattgtgcttagctttgtgacacagccaaaagttacctatttaatcttttcaataaaaattgttttttgaaatccagaaatgatttaaaaagaggtcaggtttttaactatttattgaagtatgtggatgtacagtatttcaatagatatgaatatgaataaatggtatgccttaagattctttgaatatgtatttactttaaagactggaaaaagctcttcctgtcttttagtaaaacatccatatttcataacctgatgtaaaatatgttgtactgtttccaataggtgaatataaactcagtttatcaattaaaatatgtatttgactcattttaaaactctattagcttaagagaaagaaggaagaaataataatttgaagatatttctgctattctctttatttcctgtattacactcatctttctgcttactctaaagcagtacagggtaaaaattctagatgctacagtttcaaatgactccacactatattctttcttgctgttgctgattcctaaaaggtttgatgagctgaactacatctaaactaaaaataaattttctggaaacattttattattaattatttagaacctttacctggtaaaatacagcagagttagcaacagagactaaatatcctgttgataaaatcctgatgatcttacaggctaaacaactgaaaactcaaacgcttgtaagagccaggcagagtgtaatttcttaacagctgggtataaaacaacgggcacctgaaggtattcagatacaatttccttaaaaataccttggtttccaagcaaaacacgttatttggctgagaacctttagtttgtaaataccaaaccataatatacaaatgagatctcaagccaaatgaattttttaagccctctttcccatatctgttcatctatgatagtcaactgaataaatgagaacaatgtgatagataaaacaacaaagcataaaaaagattcatgcttggttttataagctattttgaaatataagtatcattgctattctgagaaatctatatacaccaaagccctccctccacaaaaaaactggaaatgttctaataaatgtctgatttccccc

SEQ ID NO: 1274 - DNA, 2329 bp, Homo sapiens
ggataatttaaagatgtcttctgaagatgtaaagagtggagaaagattcacgcaagcatctcaccaggattcttgattttctctctctcctctttagttgctggttgcgcttgtctgagatgattcccaatctgtcagccctggtcagtagctcagtaagcaccttgagaatagctcaagtagatctgtaggacccttcttagaagcagtggttcctcatggagaaacttgtgaggctgttacacattctacacacctaacattattttcaaacaaaaatgataattttcagatgcttgacttttaccaaagatcactggaaggcccagtcctaatgttaggggtttgtttaaagtcctttttattttacaatacagagccccagtcaattccacaatctcaatttcatacatgggaattttatttaaaaatctgtggtttggggctttaatgaattggcctgtgaaaatgagctctaaatttcctcccacgtacactcaaaactcaagattgctccaaatctctaagttcttccagcaaaagatttcttggcatgtatattcacttatacttagaaatattcattcttttaatttatgccagaataacaaagtggaaatcttatttcaaaatgctctttgtttttttgtgtgtgtttctgtagttctgctttctggggtagactagtaaaatggtagcttccagcattttgtccctggggccttctttatagggccactcaaatttaaataaaagtagtaaataatttagctaagtggaataagtataataattatagtggtaagcatagcacatcagcattatgccaacattctagactctttagttgatgtcattaaatggaaaagaaacttggattaaatgagtgtgctgctcaccttcccaagttctgttatttcaaacctgtgaactaaccttgcagttcattataaatcaacagtaacaactgcattctaaattactccctgatattattttctagttgtgtatcagcctgtctcctaggggttttcatttccctgaagacatacaagtgccccagagcgcatgtatatgtctaccatttctctatatgagaaggtaaaaaaaatttccttaagcagtgattttccagccagaatatacattagattttcatgggacgcttttataaatgactcaacccttttccccaccccagagattcagacttaattcgttttagatggatctacacatcagtatatatatatttttaacttttcacttgattcttctctgtagccaaggttgagaaccgctgttctaaatcatcatataatccatgctggccacattacactcaaggtccctagggaccaggcatattatcatagtaggtattttccattttaatgtgtaatggagccattcaatgatcaaaaatacactggaccagatagtagactggtcccttgatcagaagcatcagcacatcagcatcacctggaaattgttcccagcctttgtctcctacctactaaattagaaactcttggtgggttccagtaatccatagcttaacaagccctgcagttaatactgatgtacactgatgtccaaaaactgctgtcatggactattgattgtattgaggattagtctcagttggaaagccaactacagaggcattttgaactttctttctttgcctctctatgtctctctgtcttttcctgtcttctgatttatctgtctttctttctctagtaaatggcactcaatataaaagtggtggagtcaatcttaaacttatttttattatgattgtattgatacatgcacgaagtccctctgccctactccctattcaaggatattactcactgcacatcataaatctccatcatctgtcttaaagttttatgagtagatttcatctacattatattcaagttcatttattactgagctgtattactgtggagctctaacagtatttgtttcctgatttcaaactcaatgctacagagcactttgaatacatcacaccttataggaaagatagtaaatgtattaatcccattgaaaaattagttttgtacaatgtgctaaatagtattgcattggattacttttatatttaacacactccatcaaaacatcccataacataattttacaatctgcatgtgaatttaactgtgaaattcagtattgtgatattttgaataagtgaattctttctctgcaaatactatgttgataaaattacttgtatgttcccctgaaatggtttgtttcctgtttcttcattattaaaacataaatcaatcatatgtttacagat

SEQ ID NO: 1275 - DNA, 796 bp, Homo sapiens
tgattaattctttcatggatttcctatgtaattagaggtactgtctttcccccagttgtacttaccctatcttttctttaattaacattcgattccatgagcttcttatgtgaaaaaataagatttttctttagagagcagaagcagaagagtaaaatttattgtatagctagcaatatttttttatgccatctgtctcaaatcaaagagtcatcatagtaggaaataacatgttagttgtcatttggcatgagtgtgcattccagtaattcttaattgatatttgattaattccatacctttgattaaaacatgctagttcaaaataagactgctcagtttccaagggttttcaagcctacttacctttataaaggttctctagtctctgattagccatgactgtattggactttgaacattttctgaactaaaaacctctattctaaactaatctcatttggatgtgtaagtcttttgtaaaggcaagaataaataatatccaggacaatttattagttttctcagtattttcccaaatattagaatatttacttcattattggttggctgccaatgaccccatatgttctgtgagaatagtagctttatctttgatataatacatagtctccaaataggtaatacttcgcaattgattagattttcagagtagatttagagttatctgtttttctggtgagggtcaaatatttttgttaattaagctcacaaatttgataaattaagaattatctgcatttgtctcgtaacataataatgtgtaataaagtct

SEQ ID NO: 1276 - DNA, 11 bp, Homo sapiens
aaaagctccaa

SEQ ID NO: 1277 - DNA, 77 bp, Homo sapiens
catacgtcagtgtcctaagttccttaacaatgcttaccaatgtatggcttagaagttaataaaaattcacttcatgt

SEQ ID NO: 1278 - DNA, 3390 bp, Homo sapiens
acttgatgatgaatgaagaatgcatggaggactgcaaacttggataataatttatgtcattatatatttttaaaaatgtgtttctcttgtatgaattggaaataagtataaggaaactaaatttgaatcaactattaattttataacttaaagaaaaataattgttaatgcaactgcttaatggcactaaatatattccagttttgtattttgtgtattataaaagcgaatgagacagagatcagaatacattgactgtttttgaaaatagtaatttccccttatccccttttcatttggaaaagaaacaattgtgaagacattaaattctcactaacagaagtaactttggttaattattttttgtatatcctcccaatcttttgacttatgcacatattttttcccaatatggagatcatatggaatgtactattttgtaatgtcttttttcattttacaatgtattatcaaccttttccctctcaaaaatacattgtgaatgactgcatagtattcactttatgaatatttaattcatttcacagtcttctattgttggaccacttacattgtaccaaatgttttcctttggtttattctttaatgtattaatattttactgctggtcactcatggaatcctgcagctttaattaaaagcaaagatgaaaaattggttttttaatctatggcactgacaatctccaggaccttatatgtttgttgtcagtttatttgggaaattttagacctttgataatttcacgtactgactgctcaagagaaacataccccattgtttttcatttgtaagcgttctgtgatcttctacaattggtcacgtcctcttcattttccatcttgaaagagagagccaacaaggactttatttcattctgttttaggtaaacctccttgcccactggctgtatctatactttccttgagaaaaatcccataaagtggatggacctgtgaagaaaatgtatgcttatggcctagccttcatgtctggctgatgtatcctataaggcagtaagccccttttctagtctctggtaagatgcaagagctcatatccccatcactgacattttagtttggaaataatattgagactgtgctatgaccaacccctgatgttgttttttcttttcaaacttttgcatatgagtagaggaaaagcctaaaagttaagtatttatgtctggggggataccttcaggtgtcttatctgttttatgcaagaatttatgtgttcatctttattcagtgcaaagatttttttttaaattttgtttataattgtaggtaacattaagacaactcttcctccacaagaaaacctcctaaaattaatattccttaagatttgtttttccttttgcacttataatattaccttttaattgcatgcaagattgtcatacttttcaaaaggcaaaggattgactgtgttatctccctagttagaacaaatgatattgaggctttttgccagctctgaatctttattttaattgatctttttattgatgtgttatataaatgaggaagaaaaattttgtctgattatgtgaaggatctttctgtacatgaaaagaagggaaaataaacttgcaattgaatagactgattatagtagcactgagacacaaaaagattgaccatgttgccctccagacactcatacaaggtcgtggacaccacggtgaggcggagctatttagggtggtaaaggaattatgattgttcttgagccaaagtaatttagtttgaatataatgaaacataccctgtaaagactgctagaaagtaaaaggattcgtcttcagaggttgtagaaggtgcccttcttagttaaaaccaaactgggaaaagtaatactggataaaatattcaggataaattttgcctcagcagaatttcaaagggcagttgttcctctgtttcattattgaatcttcagaatatagttaaagccaaaagcttaaaatatgttaaatgtttcacttataaccataatctttttacatagagcatactctgccttcataataactaaatcctctgcatgtggtagatgagtacgtttaggaaatattgtcagtgcaattaaatggcctacactttaaacagtatcataaaaacaaatccttaaatatattctacttgagtcacaaaagctgaacaacagaaaggtgttttgtttttgcctttctcacagtgttgtggtgagaatcagatgagatagtattttgactaaacacttctgaaattgtaaatatatggtggcattattgttcttatgtcggcttaggaggataccaaaggggaagttaatggtcacagtgcacttatgtagctttctaagctactcaatgtgattcttgttctctttgctgttctttttctcctcccccatggtgtccttcagagagaaaaggaatgtagataaatgaatccctgcagatgtgtcctgacatttcagggagggacagggtataatgatgccatcctgcaaaggcagcctgtgtgagaaaaagaaatcaaataatgtggattttaaaattacgaaagacattcatttgcagtttatgaaaggaaaatgtagtttggatacaaagctgattaaattggatcaagaaatattagaattaaatgcaaaaaataatccatgcatttatggttttgatttttatatattcccagctagttgaaaatgatgattcccacaagaagcataactcagcttgtttctgcttactgagtattttctactatggtatatattgataacatttcttccattatgtatgttgtataccagagttacagttactgtgggaatcataatttgaaattttgactcctgtgtttctggaatctttacaacaaatgttgcattaacatataacttttttcagttgactttaccaaaattaagcccatctttagtagatactgttttaacatgtgaaagaaatacgttataaacataccacaagatatggctataaaacaatgagatcagtatccatttttgctttaaagaattggccttattgcttcagtgtcacatctcatactcaagggcatttactacaaagaaagagttctccaatattgctgttctgttgctgcctgccctatttacacatgtacctgctacttaaataggaaagcctttcaattcatggacaatacaccttggtggtaaccaggcttttatttttatttttttttcttagtgtaaaaactgtactgttttggaaatgtgctgtgaaatattaggtttaactgtgtagatcctagaataaggggatttatatagatgaagttgtaaccaagaaactggttattaaaaatttatttactccaaacatgg

SEQ ID NO: 1279 - DNA, 1135 bp, Homo sapiens
catggaagagaacatcatttactagtcctcttcaacacatagcaatggtatcattgttaattatgtgcacagtttggaaagattctctgctttcccagaaatgacactcacagcatgagagcttcctgagtgttctcgtcaagtacagctctgcaccgttgtggctctagatcactgttcagcagctgaacattcctggtgagcaaaggtttccctggtgaatttttcaccactgcgttttaggtggtgatcttaaatgggtgagatggaacgagagcacacattaaagagagagtaaattccaaaggtttcaaagaacttggtcataaatatgataatgagaagacaaagtatttatattaaaacagtttagtagccttcagttttgtgaaaatagttttcagcacagaaactgacttctttagacaaagttttaaccaatgatggtgtttgcttctaggatatacactttaaaagaactcactgtcccagtggtggtcattgatggcctttagtaaattggagctgcttaatcatattgatatctaatttcttttaaccacaatgaattgtccttaattaccaacagtgaagcactacaggaggcaactgtggcattgcttccttaaccagctcatggtgtgtgaatgttataaaattgtcactcagatatattttttaaatgtaatgttatataagatgatcatgtgatgtgtacaaactatggtgaaaagtgccagtggtagtaactgtgtaaagtttctaattcacaacattaattcctttaaaatacacagccttctgcctctgtatttggagttgtcagtacaactcatcaaagaaaactgcctaatataaaaatcatatatatggtaataatttccctcttttgtagtctgcacaagatccataaaagattgtatttttattactatttaaacaagtgattaaatttagtctgcacagtgagcaagggttcacatgcattcttttatactgctggattttgttgtgcatcatttaaaacattttgtatgtttcttcttatctgtgtatacagtatgttcttgaatgatgttcatttgtcaggagaactgtgagaaataaactatgtggatactgtctgtttatatta

SEQ ID NO: 1280 - DNA, 1326 bp, Homo sapiens
tttttaggatgtagagagttctaatgaggaatcattttcatgtgccctgacatgtacacatgcgaaaacattcctaaaagcgtgtttatttgctttattttttttcatcatttatcccatttatttcttcttagtgggcattatggaagaatatattaaaatgtgtaatataccacaggttggtatatttagttttaaatacttaccataaagtctttcagtgtaatttttttttgagacagagtcttgctttgtcacccaggctggagtgctgtggtgttacctcagctcactgcagcctccacctcctgggttcaagcgattctcctgcctcagcctctcgagtagctgggattacaggcacctgccaccatgcccggctaatttttgtattttagtagagatggggtttcaccatgttggccaggctagtctcaaactcctgacctcaggtgatccacccacctcggcctcccaaagtgctgggattacaggtgtgagccacagcgcctggcccagtgtaatatttttgaaagaggagggacaattgtgaaatcagtaggttatctttaatctttacactacatgcagatccatagtatcctttgtagtgttgtaaatacttttgctttgaaaactttttcattgtcctaaatcaccctgactctgaccagtctttcagttctccaaaagcccaatttaattgtatagttttgtcatggcttcatataataaagagcctattttaagttgaaagtagtagtcagaaaattgttaatttcctaaagctcaggaaactagggtgtcactttttttgcactgcagcatatacactaactagcttattaaaatttacaaaatgtctttttgaatgtatcaaggatatatttagtttgagtggaatttgtcagcagatatcagtaacttattgccgcttatattgtacaatgttaaacttcaattcctgtaacctggttagtattaatgtcagtgactaaaaaacttagagttagttttagggcactttttattttgagagcatgaagtgtggaatgtgtcactacgattgttgataaagctgaggccacttgcaacttgattttttaaatgaaatagataaagtctttttgaataatatagtatgcactgctatttgcttgattatgtaatgtcaaaagtttaactatattccaagtacaaaaacatactggattacattgaggatgttgaatagcattcatgatggctttgttttggtttggggcagctgtcaccagctaaagcaatgttgttaaaattagctcaataaaaatgtctttaaaatgt

SEQ ID NO: 1281 - DNA, 80 bp, Homo sapiens
tgcttttcaaattgatctaggataaagatgaagacctgacaattatcagagttatatgatattaataaaatgattagatg

SEQ ID NO: 1282 - DNA, 858 bp, Homo sapiens
taagaagtggacaatacagtatttgcttcattgtgtgggggaaaaaaacctttgttaaatatatggatgcagacgacttgatgaagatcttaattttgtttttggtttaaaatagtgtttccttttttttttttttttttgaaaatgtacaaaatatctatcactactgataggaggttaatatttctgtgtagaaatgaaaattggtttgtttttagtatttagtgtagatgtacacattccagcaaatgtatttgcaattatgtggttgatgctttgtgatataaatgtactttttcaatgtatactttcacttttaaaatgcctgttttgtgctttacaataaatgatatgaaacctcctgtgtcggtaagttggatatgtgggtatttaaaggattcataatttcttagcaatgataaattaagatacatatacacaaatatataagctttccccatgaaatattgagtttttaaacactggcatgtttttccccccttgcagtatagtggtagattggaggatcttttccatttattgtattggctctttcagcacaagtaatcctgatatcttcattttttttccttctgtttgattaaaaactgcatgtgtgtacaatgatcttttggcatacttccattgcattaacagtgaaatttccttttatacatgaccactgtttcagacctgtactgctgctataacagttaacctttctgttcttaatttgataatacttgatttccaagactgtttcggcataactaattttaaacagttttcagatagtgaatatgagtagtctaataagaacagtttttttccatgtgaagcaactctttcaatgtatat

SEQ ID NO: 1283 - DNA, 586 bp, Homo sapiens
aacagaagggaagatcgccattggttatacataacagcaattcatttttttcctctgaagttgaacatgcaaagaacatgaccattaagtgctgttttatgtatataagacatatatatgtgtgaaaatatatgcacatatgcaccctaataacatatatttattatattaaatgatatatgaaagaagaattagcagaaaatggaatataagacttaacctttctggaaacgtaataaaccatgttaaaattgtttacacaaatatgtgaatgtctagaatctgctaggtttataattaattccttcctactagaaatgttatttttgctgcagagtatataaaacaaattgatcttgaagatccaattacagtgttaaattattttctagataacatgccttttgacctgaaaaagggtttagtataataccttaaaaattctcatatatagtagccattttaaatgaaacaaaaagatttagaagcctggtgttgcttgatgataagattaagaagtttaaaacgggtttatcattactatagcacactgtaaagtgctagaaaagtcataacctgattctcc

SEQ ID NO: 1284 - DNA, 140 bp, Homo sapiens
gtttcccaaaccactccttatgatccagtgaatattcaagagagctacatttgaagcctgtacaaaagcttatccctgtaacacatgtgccataatatacaaacttctactttcgtcagtccttaacatctacctctctg

SEQ ID NO: 1285 - DNA, 460 bp, Homo sapiens
acatcttttgtcaaaccattaagagttagaaagatgatctgtatcaacagatctagtttcttgcatttttattatgttgctatatacttttgttatccgtatactaaaaaaaaagaataaataaatgttttgattgtttgaatttgaaaaatacacacgaatgtcctcagtatccaggaacataaaggcaagaagcaagtcaacttacctattaaatattcctctattagatgtttcaacactataatttaattgggaaaaattgctttcagaattttattatgccatatttcccttcattatagtaaaatatatgctcacgaatcaatgctgatttttaaaatatgtataatctgaagtggaaattgtttgcttagagtttttaaaaacctagtctttgaaaagcagtttgtgctatacttttcccccaaccctccaataaatcttaaatttaaaacct

SEQ ID NO: 1286 - DNA, 3517 bp, Homo sapiens
acatgtggactggaatttttttcattaatgtgttcatcaagtttcacatctaagttgaaacagggtgtgtcataaagtcagttatctctaataacttaagatggtctgagttgtttgtttggacttccctgtcttcccccaaagagttgaaatcttaaatctatttaaaaggatataaaagctttggatatgtatttttagtaacagaagcatctggttctgtgaataaaggaatgtatagatgtttggatggaaacaaaagcactagactgagtttcctcttataggtattaaaaatagcacttttaggaaactgattattgtaaatgtttaattttgtctcaaatatagttggcattggaagtttagcctttacttgaatgtatactgtagatttttaacaaagcgagttctatatttattatgtttagtgtggtttgaaattacctctttcatatgttttaaataaagtgaaatttatgtatgttttgtacatagatacacatgattatgttaagaggctttaagatttaaaagtttcacacaaccataagtatagtatttcatgccagtaaaatttttttagtggtattctgtttacagatgtattaggaccattgatgcattacatttaagaattctctttaatacatctgggcaataaatattgaaaggtattccatgaagctgagttctttagataatcaacactactaacattacatttttgagatttttatgacattagatttttattttgtatatgtagaatattataatttttaaaaggactattgatgatagaagaataggggcaagacgacaaaagtacctttgaataaaacaatttaagaaattggtttaagatattggatgatagaagatatttaagatatctagatggtgatattttccttacaagatgggtaccagtatagtaatatctgtatactaactagggctttgtattgtcaataattttttaataattttttaatgaggtatttaccactgaagaaatatgataatataaaaccatcaaattttataattgagatgatactctggaaaaacatgtcatttcattttcagaaaactcttaagctctcttcagtctctgtaatgtttctgattgcatgtttcttcatgaaaagtatgttgttgttttgatagtaataataataaatgtaggctcagctctttcccaggattttcatcaaaaagctttaagtgcctaaccctgcttgtctctgtacatagaagcctgcacagatccaacccttgctaggtatcatagtttaggcccatttaccttcccctgtactggcagttcagccgcttacatgcactcaccctgtttgtggctattttaaattcatattattaaaaaacaaaaaaaacccacctatttgtgttgtccattcactatacgtaactatgtaactctttggagttgcatagcagcagccattttttcagggctgataggatatcattaagagtgtcttatgagacattagtggatatactcatagtaaccatatttatagttttaaagagctagctcttgagcattagtcactaccttcagcttgatgcatggtcacttctttactatttaaaatactacacattgtacaaaatatcgaagacactaccatatgctaaaggaagaaatctagctgggatataggatttttgttgtttttgtttttgtttgttttgctatttagcaataacatggtcaaaaaggcaatcagaaattttaaatacagttaatggatacatttggcaacaattttcccccgagggttttccatggtgtactttgcaagaaataagcactctaatttttaaagtaaatctcttattttagcaaatattatatttcatgacaatggagttctagaaagcagcatctgttttttgttgcgtgtttccattttaaagtgagttgagttctcaaattggaaagaaagattccttgagacgtacttttaaaatctaaagtgtgaaagaaacagcagagtaaaagccagactcattgcaccttcaatgtctgcatagatccagaagttgtacattttacctaacaacatcacttttgttgaacattccaactccagaatgatccccaatcaccctaatctcagaatgctggaatgatgtctgttggaaaacccaggactccacacacaaaactcctgggattttgtttcccatctctttctaggtgtttgcaatgtacaaataatacagctgtgctaatctcacatttagccatgatagatgatggttctagagtgtacttccatttgtaagtcctcctgataagtgctttcttgtttatcactatgtaaatctgaaatattttgtacttcatttgtttttatccattctgaattttcaaagcataaaaatgtcaaagaaaaattgagataaacattttgttcaccattaaatgtttgcatctgcagtctatgatgagaaacaatgaaattatgactaaaatttaacaaatagtattttcttatagaagcaatgtattaaatgattagatacacaggacagttcacagcaaattgtttacttacatggcataattgaaatactgttatttgtaaagagttctatactgcctaccttagctaaccagaattgttcatagacttgtgataatatggtgttatgggaaaacacattttgtgcgcatgatgaagagagcaccgtgaatctagtcttgactgcccctggtggaacatttgaaagcccttgggactccaggagagaggtttttgcagcatgtatgctaaatttgtgagttagcaagaccctgctgtgattactatgttgtacagatcttcaaagtatattgcctaatatgagtcatgttatttctagattgaatttaaagtaagtatggattatggaagtctagtaaatatacttttccctatttttgtcctttttcagtcttttggtaagcatttattaagtacctgctgtatgtcaaggcttactactgctttccaatccttggtgatatgaagacagataagcacgctgcctgctattaggaatctgagctgagtggaaggccaactattaaacctacattgtaataaacaatggtggatgctacggacacattcagtctgttcataaaacatggactgatgggtctgctccaggccacatttgttttttaacagtaacgtggctaggcttccatttataagtcttagcattatttcctttgtgaagtactatgtaacagatgattgtttgctagattttgttttctacaatcaaaatgttgacctgcaaagcagtgtaggattttctctcctcaagagcgtgtattattatctagtagaaaaagcattcccaaagacttggtccatgcagataaggataatgaaattgctcactctaatcctttttctaaatacagtgtttttcaagctggatgtaaattagagtgggtggatattgattaaattatttgatttatatg

SEQ ID NO: 1287 - DNA, 28 bp, Homo sapiens
actctggatgcctctcggcccacccagg

SEQ ID NO: 1288 - DNA, 1101 bp, Homo sapiens
agttctgctaaagatgattaaagttcaggcatccttatccagcggctgagcagaggaaccccaaatgacttggacaagcagttccaaaatgactctcttatttaattgtggagtgggaaagaggactcacagttagccagctgaccatgactgaagttccagctttactttttataaacttgaatgataaagaatagaccatgggctactactgggcattagtgcaatataacagcgataataaaattctctattagtctgttaatttatgacatgatctcggaatggaaaaagatcatttcagagtgtgcgaaataatagtctttaaccatgtaattaaatatgtgtgtttattgtcaaataaggatttgttttaaaggtgattcttgggtttgaagacatttgttaattcatggtctgtacagaaatgaagctggttgcaataccaatctagagagtccaagctggtgaactattaagctgtttaaagatcacccttggcctggcacagtggttcacacctgtaatcccagcactttgggaggcctaggcaggcagactgagctcaggagcttgagaccagcctgggcaacatggcaaaaacccacctctacaaaaagtacaaaaattagtcgggcgtgatggcaggcatctgtagtcccagctacttgggaagctgaagtgggaggatcacctgagctctggaggtggaggctgccatgagccatgatcgtgccactacactccagcctgggtgacagagtgagatcctgtctcaaaaaaaaaaaaaaatcacccttaaatcaacaaaaagacctcatgctcatgcagtggacatttcttggcctgttttcctgtgggttttcttcagcatgatatgaagcaactgttggcatagccagtgggataaataagaaatggaatcatttggctgcctcgtcacttgtgctaatggtcagttgtacacacatgacatgtggaagtgacctgtagcagcggtcactcattttaacaattgaactctgctgggttgggtatttacctttgtctagaaaagaaatatgatatattttctctaaataaatttattttcatcattcc

SEQ ID NO: 1289 - DNA, 1040 bp, Homo sapiens
ctatcaggtttatctgtactttagaggaaaatataatgtgtagctgagttggaacactgtggatattctgagatcagatgtagtatgtttgaagactgttattttgagctaattgagacctataattcaccaataactgtttatatttttaaaagcaatatttaatgtctttgcaactttatgctgggattgtttttaaaaaaactttaatgaggaaagctattggattattattatttcttgtttattttgccatggctttagaatgtattctgtatgcctctcttttgctctgatactgttgctcctgctattctgattgtgcagactgtgtaattagtggaaaacaatccttggtctgactgtgactttggacaactcagtaaccctggcttggaccactctcaggagtccatccttgagagagtgggtgtagttatcatttatacagtaatcattgcattttaaaatcttctcttgaaaggaagaataagagtgcaccagaataagagcgcaccagaataagagcgcaccagctaacaatgtgatacggccatatgtcacttaaggatggagatatgttctgagaaatgtgtcattaggcgattttgtcattaaacatcatagcatgtacttccacaaacctagatggtatagcctactacacacctaggctatttggtatagcctgttggtcctggggtacaaatctgtacaacatgttactgtattgaatacagtaggcaattgtaacacaatggtaagtatctaaacatagaaaagggacagtaaaaatatggttttataatcttctgggaccaccattgtatatgcggtacatcattgaccaaaacatcgttatccagcatatgactgtatttggttatgaaagccaactgttacttgattctgcttttagttcttaagaggatcaggcttttaaatactcatttacaagttttctatcctccttcagtgttaaagtagaaagtaaaaagagtatcttatacatgcatgaaattaaagcatataccaaatgc

SEQ ID NO: 1290 - DNA, 656 bp, Homo sapiens
aaacaaatgaccagaatttctgtactgctaaacttgttgaaatgtttctttggacagattaagttgatattgtgggttattatgccacatctccatgaaaatgcatacgttaatgaactaataagtattgcctcaagaactttccactatagaattctttttttatttaaaacatgtatgtatttaaaactcaactggtgacttgtgattgtgaaattgataacacttggatgcattcttgctctcacagaattggtgacatgctttgagagttttgtcacatgttgacatgccaatgttcttataaaccttttataaaggaatatatttttaaagtaaatatattgtaatgtactgtgaacttgtagggtgcttttcaacagtctttgtacagtgtaaatagatcatggaaataaaattacttattcaatattactattactgtataacattaacatttgaatgtttgtctgtgacaagtaccctatttgtcgtgtgacattttaagttgtaataagaagtattaccatttaaagagtgcctcctgtgttccaggtgctttgtgcatatattttctctgatccttaaacaacctagcgcaaggtattattagtattctcattttataataaagagtgcttgagtagcttgtctga

SEQ ID NO: 1291 - DNA, 1851 bp, Homo sapiens
cactttattgccttttaatttttaatgatgacaaaaaatgttttaaagaatatgactttttataaaatggctgtaatcatttgtttacatttgatgcatgtcttttaaaatgcaatgtaagcatactttgtaaataggatttttagaattaaaaaagcatacttctaggatagctaactgtaaatcatgttgatcatgtactttttagtaatttctttttttcctttttaaggtctttcagtacttttttaaatattttctattttaagactgattttaatagggaatatatctctatttgagaatagacccttactaggaagaacgttttttcctcagtgcatttgtgctagaaattttcaagagtctaatagtctttgccagtcattcagcagcaaattttcagcattaagctgttcctgttcagtaataaaaccggtcactgatgggaaaactgccaatatagaaaaataaaaatctcttttccactccattgtcgtataggcatgtaaacagcctctttttgatactggaggaacacttgatggagtgtgagccacctaagatctcggtttgccaaaattcatttctaattaaccttactaattatactactttgttaggattttcacattcttggcttaatcattttcattcctaaagaaaaatatcttggcctaaacctcagttattacatgtaatttgatgaggtattttttccttttttcttttttttttttttttttttttgagacagtcttgctctatcgcccaggctggagtgcagtggcgcattctaggctcactgcaacttctgcctcccatgcttacgtgatcctctcacctcagcctctcaagtaatatagctgagactacaagtgtgtgccaccatgcctcactaatttttgtattatttttgtagagacggtgttttgccatgttggccaggctggtcttgaactcctggactcaagcaacctacccagcgtggcctcccaaagtgctgggattacagacacgagccacctcacctagcctgatgagatttttaaaaaatattttctctgtacttttcattctcttttaatgaggaccaatgtacagttgaaataactggaacaaattatttttggtgtgtgtgacaattctgtttttaatgctatttgaacaagtgggccattagccagatttgtctttttgttgtaaaacaaaatttgactaattttacatgtttataaatcttatgctctcactgtttgtttttatttaaattacaattttatctgtttcctgacattgtctcctatatatttctattattaattgcaaaaacatagaaatggaaattttgctatcaacaataaaatttttttaaagtagtgagtgctattttggagttccaaattttcagtaggaagtatctaaaactttttttaatacgtgccattatctatagaaaacattacttcaggttgtgagattgagttgcatttctggatggactgatgaatttatccgacatgaagaagattggcatattagctttaaaaatttttaaagattggattttttttagtataagcactttctaaggattatagagaaatgtttcacctccaatgcatagcaaaaatagtggtgttagaaagaaaataggttacatttaaggaaggtgctttaaaaagcagaagcagactttaaaattaaatttgtggacacctttttaaaaattgaatcaaagattataatttagatatacaataacacctatatatagataagttttaacactgagttttctttcagactgttttctaactacatagacaataaaattaagctttgcataaa

SEQ ID NO: 1292 - DNA, 2966 bp, Homo sapiens
gctgcagagtcccccccggttgccggcaagaccgcacaggcaaggccgatgactctgtgcccactcctgttgttttccttgacaatctactgtgccactgtgctactaactcttgtttacaaaatttgattctaagttgaattgcttcattcaacacccccaccctccctcccctcgaggtggtacctaagctgtggatttgctaaatgaattaagcaacctagaagatacagagctaatgaattatcaaaatgtgattaatcccagtaaggaaacactcatttagtgtctgtatttttggtgtgaaaattatttagttgccagtatattctgaagaatgtcttcttgatcagtcagataagcttgctttttttttttttttttttcatgaatcatgtttggttcctgtgaaagtccctggtccagggatcctcctcctttctcttttacttctgaattctgaaattcagttagttacttttgcctttcgctcttctatcacagccaccttgaccttgggtaaaacccaaggtctttccttctggctaccttcctgcaggtccaccctgtctgccattggtctcctctgcctctgactacatctgccaccaacaaccctcccctcacccctgccaggggcagacaggcttctcagcagaactgtgactgaaatcagagctgctgtctggggcagtgttaactacacagaggcacatcctgacagggtttgccccagagatctaaattccagaaggagggcaccacacctaggaaggtaaatccagtatcagaaggttgctaaaagattaaagatcaagaagcttggaaacatcccatgggtacaatgtcttagaaagtctttaagtcacataccatgaatttttgcttcattactgaccatatatgaccttggaggaactcttttttttttttccttctactcatttctgtttccacctaccctgactcaccgtatttccagtcttctacccctgcagttatcctagtccagcaaagtcatttctttcaaaagagacatcatgtctgaaaataattactggtagtctaatatgagccagagtaaacagctcctcatggtcaatgaacatgttcaggaagcgatcaccttgatgcttgaacccaaccccagacagtggacaattctactttgaaatatccgtgaatatttactgtgggatccaatttaaacttctttcttctctagcctttaaattacacaactttgaactgacacggatctcttacaaagaacaatgcggcactgaaggaagagatgattcctttactcaaacctgcaggaatcagcctattaacaggcaggggaaacggtactttccaatgaatggtaactgatccaggcacattatcacacttcctagtcatctccacctttcctgtattgcctgtggcttgttgtttaagattaagaatcaaagagattaagaagtatcacttcaaatcttgctctgctcacttctatgtttgcagtcaaattattccttatgttggtgacctaaagagaattactttcattcatttcatttcccccgtagcagatggaaggagaaacctctgagaaaatgaaaacatccttaaccactatctttcccttttatttgattattttatgtcagaaatttgcaaaagtttttttctcctccttctcttccttgttgcttaactttttaattcatgccatatgcagatatccaattatgtgcatcctgtgaataaaccacgtcttggtcactgtcatattttgaaccatctcatcagagatgaataatatctttttaccagagagagaacgaatgttagccacatgcccaagttaacaaagaaaaaatgttctcaaggttgtccttttgggttaaatctggcccttccttggcaaaagcaaaaattctccctgtgagagctcaacatctcaaatacaaccacaggaaaaatggcccaatctgccagtttaggcttaccagcatataatttttaatatctttacttctatcatcccaaatcaaagaactcttctctattatgtttaatcaattgcaagcaaatagatttttctttgtaacaatttgttctgcagaaggctgtttttcacttttcctttcttttgcttctttctgtctttccttctcttttgtctggagaaatcacttagactctgtgtgcctcttctacattgcattctgctctgctatgttacctgctaggctggcttctttggactccctatatgattgatgatgtgaaaacctaaattacttgcagcatagtattacttctttgatgttctcattagcataatgttatttttgaaaaggaaagatactatcacataagttttcctcatctgttgtgatatacaccaatggataaactaacggaaactgctttttgacattaaaagacaggagaaattatatttaactaagtaaaagttaagtcagaattacttgggtgatgtgattcaatttagttaaaggatgatatagagaaaatacattatttagcattatttcttcagctataatgaattgctatagaaatcaggcagatctttctaatgtgtattgattggtcttttcagctactctgaacagattactaaggccatctcctcatctctaagggagaaaaatagtctgtagatgaataatgtaaggtaaagagttgcatgtcagtctttgtaattatttacactttaactttctccagaactcagacatgatttcaacatggtgttagatttgtgcattttattttcctgaccacctcattccagccaatgtatggttatccactctgtgtgccaaaaccaatcatgcctttcacggccctttagttcagagaagttctgcactgatttttagtctcttgatgtctcaatcttacatgtataccaatcacaatggaataaagtgttgagttgtactgtg

SEQ ID NO: 1293 - DNA, 1249 bp, Homo sapiens
gcattttttctggaagaagaaagtgaaaacttccagacaactgcagcagactctgcattgatgggctgttggctgattggggtattgtcaatgggtgattggaattttttctttgtatgaaaaataagcttaactcttttaaaaaatgtattttataacctcttgaattaattgacttgtaagacccatttattcatattaagaactctcctttgcacttgatcagcatagtacttattaggccctggctttttaatatgcttaattgcttaattccataaactgaaaactttttttttcttttttctttctttttttgagatggggtcttggagtgcaagtggtatgagcatagcttcctcaaattcctgggctcgaatggtcctctcactgcagcctcccaacaggctggtaccaccacactcagctaagttttttgttgttgtttttttttggtagagacagggttgcgctctttcgcccaggctggtctcaaatttgtggcctcaagcaatccttccacctcagactccaaagcattgggattacaggcatcagccaccacacctggccttgaacattttttatttgttaatttcatgcgtgacgaaacccaaggatcacccatgtcaaccacaaagttggcattccctttagtagaacctcactaaacggaaaggctgtacaacgcaccgtctagccacaggagaactaatcttctatcagttgccctttcttctttggagtttttatgtaacttacccttgtgagacaagttttctacttgagaaactcctagtacaatgtcttatactagaagcctggataaatactattaactactgtttcttatattcacttcagaaaatcagtggctccacattgtttgagccattagtgataacaaatttggatctacttactcaagtcttatgaattctgtgcctttcatcacattcctagcccactctcatcattactgcagaagggtgttgtgatgaccagttttatactgtgttttgatatgtctagcaataacttaaagaaaaaaaaacctgggaaatcttcaacatgttattggaacatatatgtatgtattaatgtatatacatggcttaacttatacgttatggcagctctgtatacagtttgatctcatgtactgaaaaaaaattcttaattttattggagtttataccactgtgaaactgcaatatgactgtaagagagtaaaaagattgttacatct

SEQ ID NO: 1294 - DNA, 1311 bp, Homo sapiens
agtctctgaattagttccgaattcaggctgttggccaggtaattgctgcagagggagaaataagacagacagatacagtcattatgaaatgcatgtaataaagcattggctaaatcttaaagaatctcaggaagaacagacttcctcctaagaaggagaaaaggcatttttaaaggactatgattgataaagtatttaattcttttaaaaattatattcatctcagctttcttagagaattccctagaactaaaaatttataaatatggaattcttcagggtatcttatatttttgactgagtgcgtagtacccattagacagctggagatgcagagcactatggagcaatactggctaatgcttccagatgtgcactgcttctgtctaaaaattacaagccacagtctaatatgtcttattttccaaaacactaagctgtattcaggtccccgatgggcatatacatcttagccggtgatacactacctcttacgtgttgcctctttgtgttgcttggtgctctttcgaaaacaaggtgcttatggctttcatagactatttcctttttcatctttgtcattctttaaaagtgtatgtactggttacatcaagatatgttttggttgttagtacttattttaatttgtttggtcacacacttaataacacgtgaaactatttatgtgaagtccttgttttattttaaaattctctttgtgtatttggaatcaaagccagcacattgtaacctgtgcttgtacgcaaaagaattagatttctttgtttttgttttattttttaaattgttgtaaaaattattataggccagctacatctagtagtaggtttggggtacagattgggggttgtgccatactgtttttaaagttcatgatcatctggaatgatacttagtgtatatatattttgtaaagttttaattcagcaaattttttgaaattgctgctgttttaaattataaaacctttatatttctgctttgtagaaattatatgttttgtagtattcattgattttctttcactgtacttaaatttagtgttagtactttaaaatttttaatttaccagtctttaaagcaacatccagaaaaaaaaaagtcttttcccatttaaaataggctcagccagttcaatgtctccttgttatcagagaaatattagttcaatactgaaagaaaaatattatacctcttggtatctagaaaagcttgttcatccattataaatatatctttagccacagcaaaccacacttaacctatctataataaaaatgtgctttaaat

SEQ ID NO: 1295 - DNA, 13 bp, Homo sapiens
attgtcaaattta

SEQ ID NO: 1296 - DNA, 1100 bp, Homo sapiens
agaactgagcattctcaaatggaacacagacagtgtagaagaattcctgagtgaaaagttggaacgcatataaatcttgcttaaattttgtcctatccttttgttaccttatcaaatgaaatattacagcacctagaaaataatttagttttgcttgcttccattgatcagtcttttacttgaggcattaaatatctaattaaatcgtgaaatggcagtatagtccatgatatctaaggagttggcaagcttaacaaaacccattttttataaatgtccatcctcctgcatttgttgataccactaacaaaatgctttgtaacagacttgcggttaattatgcaaatgatagtttgtgataattggtccagttttacgaacaacagatttctaaattagagaggttaacaagacagatgattactatgcctcatgtgctgtgtgctctttgaaaggaatgacagcagactacaaagcaaataagatatactgagcctcaacagattgcctgctcctcagagtctctcctatttttgtattacccagctttctttttaatacaaatgttatttatagtttacaatgaatgcactgcataaaaactttgtagcttcattattgtaaaacatattcaagatcctacagtaagagtgaaacattcacaaagatttgcgttaatgaagactacacagaaaacctttctagggatttgtgtggatcagatacatacttggcaaatttttgagttttacattcttacagaaaagtccatttaaaagtgatcatttgtaagaccaaaatataaataaaaagtttcaaaaatctatctgaatttggaattcttctggtttgttctttcatgtttaaaaatgatgtttttcaatgcatttttttcatgtaagccctttttttagccaaaatgtaaaaatggctgtaatatttaaaacttataacatcttattgttggtaatagtgctttatatttgtctgattttatttttcaaagttttttcatttatgaacacattttcattggtatattatttaaggaatatctcttgatatagaatttttatattaaaaatgatttttctttgctt

SEQ ID NO: 1297 - DNA, 279 bp, Homo sapiens
attgaggcagctaacgtcaaattcttgaatacaaaactttgcctgttgtacatagcctatacaaaatgctgggttgagcctttcatgaggaaaaacaaaagacatggtacgcattccagggctgaatactattgcttggcattctgtatgtatatactagtgaaacatatttaatgatttaaatttcttatcaaatttcttttgtagcaatctaggaaactgtattttggaagatatttgaaattatgtaattcttgaataaaacatttttcaaaactc

SEQ ID NO: 1298 - DNA, 2215 bp, Homo sapiens
aaacaaacaaaactttggaccaaaatcccagttcaaagaaacaaaaaaaagagtggaaactattctatcataactacccaaggactactaaaaggaaaaattgtgttaccttttttaaattccctgttaagtcccttccgtaatttttatgttcttgtgaggaaaaaagtaaaacatgtttaattttatttgactttatgacattgcttttcaacaagcaaatgttaaatgtgttaagccttgtagtactagtgttgtaactttccaagtaaaggtgtccctaaagaccacttcctatctggtttttcccagtaaatgaggcaagcaattctaagatcttccacaaaacatctagccaactaaaatggagagatgaatcattctgcctatacaaacaagctagctattagagggtggttggagtatgctactcataagatttcagggtgttttctaactgaaatctcactgttctcagtatgcaaaacctgaaatcagatgcctatgtaaggaaagtgctattcacccagtaaacccaaaaaaagcaaatggataatgctggccattttgcctttctgacatttccttgggaatctgcaagaacctcccctttcccctcccacaataagaccatttaagtgtgtgctaaacaactacggaatactaaataaaaagtttggccaaaaccaaccatgaagctgcaaaggtgcttgctcttactctttcaaatttttgcaactctaatgtctcacttttaaaggaacagcttgattgcaaaggagaaaatagataagcaatgaatttatctccaacttcctaaaggcttatgacttctaaaaagtgaatctatcagcattccacatcagatttaaagcatcaaatgcctgtgaaacagcaaagatggttgaagattgtgctcattatgtttgtggagtgctgattgattcacagtagataacgctggcagtaagagaaatcaaatgctaagagttgttgaagcagaaggcggctgattgttggtaagtcagtgcagttgcataagcagtgctgtcagaattggtttggtgcaggcaatagattttgccttcaagggttcctgtggatctcaggaaggcatcagtgttgattaacactcataactagggagtgagtggtagttacttaagtaattgaccaaatggaaaaggggaagtaattaaggaaattggtaagtggaggtagtcaggaggttctcgtggtcctttacacagattttacagctttgggtttcattttgtttagctaaagtcatggggacaactcttcaatttagaacttaagatgaattataaaaatgatggatataagtggtagctctatctggtgaagtgtcttgtcagtaagtgaaacatttttttgtggtggcttatccacaaacagtttagttgtagaataaaacttatgagtgacatctggaaagtaacaaccatgctaagatggcaaacacactggaaacaattgggccacttggctttcttttgctgtattgttttataagcctgctttacctccccgtcttggaaacaagttttagtttattgctttggagactagagccaatagtgtaatgttctcaaaggaaacagacttgagttgttggattagaggaactaactcaacttctaattttttttgttgtaattatggcactgtcatgttttaacatttgcaactagggatagtaagtacaacatttttaactctcatttggcagactactactaatcacagaccacaagggtaatgaccaaatttatgtggttgttacacttccatagttgtcttagccgaatccttccatattcttatgattacttgggttaaagcttctgtgaggaccttttggctcttaagatatcctaaatatttaaaatatttagatatcctaaatataggatatagagtttgtaccaaatatgaatgaatattgttcaaagcaaggagtatgttaaaatgaccagacacctgtttgataaatagtttactgaactagcagacgtgtggaaaaagaatcagatcttgattcttctgggtttatactggttgtaaaacagaatgatattagaaaatgttttccttgtttaagtggtagttgaacatagaacttgggtattatagatcacttttcactttttggaatgttttgtattgaaacttaatacaactttaacatggc

SEQ ID NO: 1299 - DNA, 410 bp, Homo sapiens
tttgtgcagaatggattaatgtttctgttagatgacctagtatggaattgttacttagtgctgccacctgctggatgttaaaaggtatttcagtacaactggaatttaaatatttccattgtttttccaaagcagttaacccaactcctaacaacattttcgggggatctgaccttttttttccagttgaaatgtattaacacaccttccacaatcattttataagagtcagcataacatagtggataagaaatgtgagatgtttaacctctcagtaactcggttctctcattataaaataggaataaaatcagtacctgtttcatatgaaggtcgtttctgagaattaaatggactaatgtatgcaaaaagcctggcaaacaataaacactcatctgactttagccggt

SEQ ID NO: 1300 - DNA, 1040 bp, Homo sapiens
acaacagagcttttctgtcatcctaacccaaggcataactgaaacaattttagaatttggaacaagtgtcactatatttgataataattagatcttgcatcataacactaaaagtttacaagaacatgcagttcaatgatcaaaatcatgttttttccttaaaaagattgtaaattgtgcaacaaagatgcatttacctctgtaccaacagaggagggatcatgagttgccaccactcagaagtttattcttccagacgaccagtggatactgaggaaagtcttaggtaaaaatcttgggacatatttgggcactggtttggccaagtgtacaatgggtcccaatatcagaaacaaccatcctagcttcctagggaagacagtgtacagttctccattatatcaaggctacaaggtctatgagcaataatgtgatttctggacattgcccatggataattctcactgatggatctcaagctaaagcaaaccatcttatacagagatctagaatcttatattttccataggaaggtaaagaaatcattagcaagagtaggaattgaatcataaacaaattggctaatgaagaaatcttttctttcttgttcaattcatctagattataaccttaatgtgacacctgagacctttagacagttgaccctgaattaaatagtcacatggtaacaattatgcactgtgtaattttagtaatgtataacatgcaatgatgcactttaactgaagatagagactatgttagaaaattgaactaatttaattatttgattgttttaatcctaaagcataagttagtcttttcctgattcttaaaggtcatacttgaaatcctgccaattttccccaaagggaatatggaatttttttgactttcttttgagcaataaaataattgtcttgccattacttagtatatgtagacttcatcccaattgtcaaacatcctaggtaagtggttgacatttcttacagcaattacagattatttttgaactagaaataaactaaactagaaat

SEQ ID NO: 1301 - DNA, 1032 bp, Homo sapiens
agaccagagccttcctgtcacccctaaccaaggcataattgaaacaattttagaatttggaacaagcgtcactacatttgataataattagatcttgcatcataacaccaaaagtttataaaggcatgtggtacaatgatcaaaatcatgttttttcttaaaaaaaaaaaaagactgtaaattgtgcaacaaagatgcatttacctctgtatcaactcaggaaatctcataagctggtaccactcaggagaagtttattcttccagatgaccagcagtagacaaatggatactgagcagagtcttaggtaaaagtcttgggaaatatttgggcattggtctggccaagtctacaatgtcccaatatcaaggacaaccaccctagcttcttagtgaagacaatgtacagttatccgttagatcaagactacacggtctatgagcaataatgtgatttctggacattgcccatgtataatcctcactgatgatttcaagctaaagcaaaccaccttatacagagatctagaatctctttatgttctccagaggaaggtggaagaaaccatgggcaggagtaggaattgagtgataaacaattgggctaatgaagaaaacttctcttattgttcagttcatccagattataacttcaatgggacactttagaccattagacaattgacactggattaaacaaattcacataatgccaaatacacaatgtatttatagcaacgtataatttgcaaagatggactttaaaagatgctgtgtaactaaactgaaataattcaattacttattatttagaatgttaaagcttatgatagtcttttctaactcttaacactcatacttgaaaactttctgagtttccccagaagagaatatgggattttttttgacatttttgactcatttaataatgctcttgtgtttacctagtatatgtagactttgtcttatgtgtgaaaagtcctaggaaagtggttgatgtttcttatagcaattaaaaattatttttgaactg

SEQ ID NO: 1302 - DNA, 548 bp, Homo sapiens
aagtccaaggagcaaaatttgcctgtccagctccctctccccaagaaacaacatgaatgagcaacttcagagtgtcaaacaactgccattaaacttaactcaaaatcatgatgcatgcatttttgttgaaccataaagtttgcaaagtaaaggttaagtatgaggtcaatgttttacctacagagcaattcaactcatgcttatttatagtactaacttttaatatgatctttaactaaatcctatatttgaaatcatacacaaggactcaagagagatattgtgtaactaggatgcattttccaatgagatatcttgcagtttctgttctgggtagatttttttctctcatatgcaccacccttactgtatattcagtcctatactcttattcagggatttaactatggtcgtagcatagggctgaagtgttgtgaatatgatgaaaatgtgatgagaccaaacaaaccatggggcacagtagagcatcactcctgccaagtggtctttgtatggcatgctggctgcaaataaaggagatctgggac

SEQ ID NO: 1303 - DNA, 398 bp, Homo sapiens
ggtttcttttgttaaaatggtataacgctgttgctcattttaaaagtatatgtgttattgcagtttcatttaagaaaagtttaaaattaaaaagcaaatttcaaagaatattatggcctgaagttcataaaaacaaacttaattttgactaaagtaataattaatagaaatggggaacaagttagaagataaaattattcctagaaaagatttaagtaaagcaaaaggacaaatggtaatataaagaaattattttcaattaatgttatagtcacagagataatttaagttataattagctcttgcaaatcagtgagaagagagtaacgccacatattttaaacaggcaaaaatatgataataaaaatgtttaattttactgacaataaaagttgtgc

SEQ ID NO: 1304 - DNA, 3479 bp, Homo sapiens
gagcctgaatattccaggtaagaaaatataaaatgaggtttattttattttaataacataacactgttgctcattttgtaagtatatgtgttatagcagtttcattcaagaaaagtttaaaattaaaaagtgattatcaaagaatatcagggcctgacatccacaaaaaacaaacttaattttgattgaactaataatttataaacatgggaaacaagtcagaagtagtgacattattcctagaaaagatttaaggaaagcaaaaagacaactggtaagattaagaagccattaaccatttgcaatttatattatagtcacagaaataatttcagttatgactagctcttgccgattaatgagaagagagcagctccacaatttttaatttttttaacttttattttagattcaggggtatatgtgcaggtttgttacataggtaaactgcatgtcatgggggtttggtgtgcagataattttatcacacaattattaatcataatacccaataggtttttttctgatcttctccctcctcccaacctacaccctcaagtagaccccagtgtctcttgttctcctctgagtatccatgtgttctctttgtttggcccccatttataagtgagaacatgtggtatttgggtttctgttcctgtgttagtttgcttatgataatggcttccagctccatccatattgctacagaggacatgatcttgttgttttttatggctgcatagtattccatggtgtttgtatataccacattttcattatccagcctattattaatgcacatttaggttgattccttatctttgctattgtgaacagtgctgcaatggacatacacgtgcatgtgcctttatggtacaatgatttatatttccttgggatatgcattcctttgggaataatgggattgctgagttgaatggtaattctgagttctttgaggaatcaccaacctgctttccacagtggctaaactaatttacactcccaccaacagtgtatgtgttccattttctccacaaccttgccagcatctgttatttattgactttctagtaacagccattctgactggtgtgagatggtatgcatttctgtagtgattagtgatgatgagtgatttttatatgctttttaaatgcatatatgtcttcttttgaaatgtgttcatgttctttgcccactttctttttaatggggttgcttgtttttcgcttgtaaattttttgaagcttcttatagattctggatattagatctttgttggatgcatagttggcaaatattttctaccattctgtaggttgtctgttactttgttaattgtttcattttgttttgtttttgttttttgaaacagggtctcactttgacacccaggctggagtgcagtagcacaaacatgggtcattgtagcctcaacctcccaggctcaagcagtcctttcacctcaaccccccacatagctgggactacaggtgcttacacccaagaccagttaattttttgtatttgtttgtagagatgtgtttttccatgttgcccaagctggtcttgaactactgagctcaagcaatctgcctgcttcagcctcccaaagtactgggatttaggcatgagccaccacatctggccaatagtttcttttgatgtgcagaagctctttaatttaattagatctcctttgtcagtttttgtttttgctgcaattgcttatgttatcttcatcatgaaattttagccaagtcttatgtccagaatggtatttcttaggttatttttcagagtttttatagtttaatgttttatatttaagtctttaatccttcttaagttgatttttgtatgcagagtaagctgggggcccagtttcaatcttctgcatatggctagccagtaatcccagcaccatttattaaatggggacttctttccccattgcttgtttttgtcagctttgtccaagatcagatgattgtaggtgtacagcattatttctggactctctgttatgttccatttatctgtgtgtctgtttttctactaataccatgctgttttggttactgtagctctgtagtatggtttgaggtttggtaacttgatgcctccccttttgttctttatgtttaggattgccttggctaggctcttttttggttccatatgaattttaaagtagtttctaattctgtgaagaatgtcattggtagtttgatagggatagcattgaactatttgctcaactcaacattttaggaatttatttctgctgtctagtgctcaaaacttgcagctagaattgagggaagagagagaccttcttatattgttttatattgtttgatactcagtacctgttttaagaaaaaacaacaaggaagtaaaaccaaagacaggcagcccagcgccaggcccaaaaccaggcctgggcctgcctggcctaaacccagtagttaaaaatcaactcattgcctgtaatcccagcactttgggaggccgagacgggtggatcacgaggtcaggagatcgagaccatcctggctaacacggtgaaaccccgtctctactaaaaatacaaaaattagccgggcatggtggcacgcgcctgtagtcccagctacacgggaggctgaggcaggagaatggcgtgaacccaggaggcggagcttgcagtgagtcgagatcgcgccactgcactccagcctgggcgacagagcgaaactccgtctcaaaaaaaaaaaaaaaaaatcaactcataacttagaaaccgatgttattcatagattccagacattgtatagaagaacatttggaaactcactgccttgttctgtttctctctgaccaccagtgcatgcagcccctgtcatgtaccgcctgtttgctcaaatcaatcatgaccctttcatgtgaaatctttagtgttgtgagcccttaaaagggacagaaattgtgcattcaaggagcttggattttaaggcagcagcttgctgatgccaccagctgaaaaaagcccttccttctccaactcggtgtctgagaagttttgtctgcagctcatcctgctacagaatgaactccttgtaattctacaagatatgccatgggccttttcacaggggacacaggcttcttaaaacaacccggcttcctcaccctatgtcctttatttacaaagctgtgctcctattcatgagcatggaatgtttttccatttgtttgtgacatctcttatttctttcaggggtatcttgtaattctcattatatatatcttttgcttccttggttagctgtatttttaggtattttagtcttcttgtggcaattgtgaatgggattgcattcctgatttggctcttggcttaatgttattaacgccacattttttaaatagacaaaaatatgagattaaaaatgttgaattttactaacaataaaagttgttcaaaggaa

SEQ ID NO: 1305 - DNA, 122 bp, Homo sapiens
agtgctaaatatgggagtttcctttttttactctttgtcactgatgacacaacagaaaagaaactgtagaccttgggacaatcaacatttaaataaactttataattattttttcaaacttt

SEQ ID NO: 1306 - DNA, 289 bp, Homo sapiens
aaacattgcagcgaaggcactgcaatcccttccccatatccctgcccaacccggactgctgcccgtcctctccctgctccaggccactaggcctcccttgcagccaactctggaaggcagaggagtaagagaggaagatgcttaccagtgggcaggggacccccaaagaggagccagccctctgctctccatctccccacccctagaaacagggctggaaatctcccccacagcagtgtgactggtgaaaatgctgaccccacacagagtgcaaccagtaagtgaaaac

SEQ ID NO: 1307 - DNA, 1495 bp, Homo sapiens
aaccaggaaaccttttaaatagccagtttgaattggatgtaaatttgaaattctttttttttaagccacattaaattatctgtttataaatactaaagcaggaaaatggggggaaagtgaattacagtgacatcagagcaaattgaatacttaaaacagtaagtagtctatatattttatatagggtggaagatgtgtttttaaggtttatgaagttttgttggttaactgtgttcactcagtaaaagagcagtacatgtaagcagccattaataaactgttgcacatggatacttatagacagacttattggacaattatgttttttgcagtgttaccagaatcaaggctctgtttattccccacaagacttgcatagaaaaataagatattatattttgtttgtatgtatttagtgttttgtataataccaagaaccgctgactaaatttactcaaattagggcattaaatatcatgtacttcatagtttgagactgttcactcaaatagggcagagtactattctatctagatgtgtaagtgttttttttaaaatcacatggaacggttttttttatactaaaaagtggagggagatttgtttaaacaagtatttctaaaagaaatatgtacatagttctggaaattatttgtggtaaggaaatattctttactccagttgcatttctcagacaataaagtggtgcatccatgctacctcctactttgtcaacaaagatgctatttaccctttacatttttgtatcataatagattttaaaaatctaatgttctttattgcaagacattcttttgttaacaggtttgtttctttttaatgttttacctaaaatttgacatgcttacaggacaggtttgcctcttactttatttaacattgtagaaatgtaattaataaacaatgctcactacacagtttagaatagacgttctcatttatattatcttccaaatttgatcagttagcaaaacttaatacaccaattaaaatatttctacatatgagaatgtttacaatttaaattttagaacttgttttggatgtgattatatgtacgaaaatcgtgtaacactatgctcatgctaagaaccgacataacagaattactgaaataaatgtgctgtgaggaatggaaaatatggtgcaggtgtcttggtcatgataaattgtgattctttttaaaaattttttccaaaaacaattaggtattttaatctgaaatcagattcctttacaaacaacaagtttttgtatgcaagcaccattttatttcatgtagtatggctaatactatagttgaaccaaggatatgcattgattctttgcttcgtatgtaaataaagttaaaaacagttaaaataaggagtattttggtagagtatatacatacctcactgccagtgaaattgctttcctatggtatatctccttaccagaaaaatctctaaataaaaaaaggtttaaagaaaat

SEQ ID NO: 1308 - DNA, 524 bp, Homo sapiens
aacaaacaaatactttttatattgataagagaaagaataaagacacctaatcacaaagcatgctttttatttttaaaaagtagttcataattgttcggatttttttctcctgtatttgattagctttgttcactttttgcaacaaaatgtatgggccgatttattttcccattatattgtaacttcttgaaaagctcttttacagtggctttgtttcaataagcccttaagttaagggctgattgcacttagaaataagttgcacttagaaataattatttggctattaattggattttgacaagaaccaatgtaaaatttcatttttatattttcttaacaagaagaaaaatattctatgaaagcaaagtaatgctaacttaatgaatctgcttattgtatggattaatcactaatattattcccatgtattttgttttactaaagatttttaagaatccagtggctatttgaacctactgttatctaactttgagcaacaataaatgaaacattaatcagta

SEQ ID NO: 1309 - DNA, 1309 bp, Homo sapiens
cccaacccagcccaacccggcccaacccagcccagcccagctcagctcagctactgccaagggcaggaccaatggctgagcctcgtgtccagactcagagggctggattttggttcccttgtaaagacagagtgaatttcagtataaagatcacccgttgtattcaccccacacccagggctagtataaacatgaccctgggcttctgtaccacactagaattcatgtgagaaagctaaaatggtggtcttctccaccagcccctcacaggcttgggggttttcaatgtgaaacacatgccagtttttaaaatgctgctttgtccaggtgagaacatccataatttggggccctgagttttacccagactcaaggagttggtaaagggttaatagccagatagtagaaccagtgaggagatgcggccaaagattctttatatctgaaccaagatgtaaaacaagaaatgctttgaggctttctaagcgatcctcctgtctaatttgcacctttgtctggatgcacacttctgaccttgctgccacaacctgtggggtctgatgtgtcccttgatgggtgctgccctcagggactgcaccctgacaagtgttaaggcaacattcctttcttgtgccctgggccaaaaccaatgctgatgaccttatcagcttcctgtttcttcccatacttgcatacaccactgcaaaatgtcttaatgcaaattttgtatttcttacaggcctacagaaattgaaaatgaccaaaatcaggaaccacagatttgtgcccattcctaatattttgttctgcaaattaatgtataatttgaggtgaaattcagttataaagtcaaggacgaatttgcacagtgatatatttctatgtgtatgcaagtacaagtatataatatgtcacctggcacattcattttctcagttgaagaagagaaaatttgaaaatgtccttatgcttttagagttgcaacttaagtatatttggtagggtgagtgtttccactcaaaatatgtcaacttaaaaaaaaataggccctttcataaaaaccaaactgtagcaagatgcaaatgcatggcaaatcctgtcggtctccagttggttatctgaatagtgtcaccaattccaccaagacagtgctgagattggaaaagggcactcatttggattgccttacttctcttgccttaaatatatcccatatatttaatatgtcaaaaagggcttgaggtgaatttcattaaatggaataatatgatgccactttgcagctaaaataagctcagtgatacctcct

SEQ ID NO: 1310 - DNA, 130 bp, Homo sapiens
aagttccatttcctaaataaaaactaataaaatatagtactttccattatgattcatttaatacctttataaaaaatttttctgtaaaaatttactgcttgaaaaataaatgtagcttttctcatttatc

SEQ ID NO: 1311 - DNA, 1264 bp, Homo sapiens
gcaccctggctggctgcaagcagcagctacacaacactacagagggcagcctccctgcttgccaccactctgctccctgcttgcctccactcccttctgactttccagaccccaggtccagtctgcagatcctaccaggttgctcctccttcgccttacctcctggagctgccagaagaaatgaggtaccttttcaaagtgcagccgagagtgagaaccaagtgactctctaggcttcggacacaaataggctcctctacacctgaagacaaaggcaaagtcaaatggggaccagaataaatcttagaccccacagtccttcccatttccagccctaatctacagacaggaatgcccttcaggtttcttccctcccccctcttgacctaccccagatatttgtgtggaagaggaggaatcaccatttacaaggtggacaaatgctaatatttttatctagaaagaagagtgagtgttaacttttatttttttccttctggggggtctgttgactcctttcttttgggtgctgcctataaatcttggaggaatcatttctcctcctcaaaaactgattcagaaactgacttggggaaggaatttaatactttgaagtcatgagatgcaccatcgaggctacccccaagaagaagcagaagagaagttggtaatgagaggggattagaggtcctcccttcagtagggctgtgaaaacctcatcactggaggtaaaagcacaagcaatgcctgtggacaagatgtcattcattcactcagcaaatgttcatggatcaccggctaccaaggtaccaggcaccatgctaggtattggggaagagagactgaagtcacaacccctgactgctcctcaaaagctaacggttgcacctccaagtggctgggtctgttcttactcttggagggaattctgagaagacagcacagaattgtaaaccttcccttttgacccttttggattttatcaggtgtaaacaaaaagctgaacagttacttcaaagatatgtgtgtatattcagttttttattgttaagctgatattttaaagatttctgagctagcaggcatgtgggaaggaaggctctgtcttcaactctttgaccctccatgtgtaccatagaggggggaaaggtggtattttcactttgatgaggttggtaaatgtttttagatcttctggtaagcattatgtttgttaatacatatttattagagtgatgttttaagttaataaagtattaagagt

SEQ ID NO: 1312 - DNA, 4958 bp, Homo sapiens
ccatcactgtgacctagactatggatttatttaagggatcagttatcatatgattagggctttttggaaataatttgtttcatatgtacatatatatatatatatatatatatatatatatatatatatatatatatatatatattttacagtcttatctgcctttttatctttgccaaatctttaccactgatttaccattgccataaagtagactggtatatggttaatgtgtaaaacaaggttctaacagtattactgaatattaatgtttcttgtttagaaaatgcaactatatctatatgtgggaaccattctgaagttcaaaactatggaaaattgaattttcttcagacaaaactgctcttgtgcaatattttatgctcagtgagcaaattgtgtatttatgtttatcaatttgttctcaaggtggctgtctacagacatttgaccaagacatacatctgatttaccttgtgtttttttttttattgttgtttttttttttaagacagagattcagtctgtcacccaggctggagtgctgtggtgtgatcttagctcactgcaacctccgcctcccaggttcaagcaattttcctgcctcagcctcccgagtacctgggactatatgtgcgcaccaccacgcctggctaattttttgtatttttagtagagatggggtttcaccatgttggctgggctggtctcgaactcctaacctcaagtgatccacccgcctcagcctcccaaagtgctgggattacaggtgtgagccactgcacccagcctaccttgtctgtttgtgtctgggaggttttttttttctatttttattttttcatgaaaattattggtgggccactgaaagtccccacacacaaagcctttattctatataattttataaacacaaattcatgattatctgttttgagagttttaagttttgttttaatgtttaacttttatgtgcatatgatgcttccatgtgttggttactagagtagtaggttaactacagacatactgttttgtttgtacatatttataaatctgtaccacctaacattgaacatcattttatatgaagaacatacatgttgcaaaatgactgctttcagcatctaacaggacttctgtaaataataggttaaaagttaaaaataaaacactaatgttttaagagctttagtattttgcttagcattcaatactagcagattcataactgatgcctgttcaaaaacactgttggtggaatcttttatttcatgtgtatgtaactactaaatttttcatgactgaagaggttatagcacatattagttagtgctaatattctactgaatataatttaagcaatgggctaaggtccaagaaacatagcaattatatctacaaataatctattaacatgatcttcagaatctctagtttttgttctatagataaagccataagaatcctttcctaccagtttttcctatatcatttagatattatttcctagaaaacaggatgcctgtcactgataagttagagaaaacacccaaattatacttgcactatggaaagacgacatgaatatgttgactgggtactttctactctcatttttgttagcctatgaaaaaaaaaacattttgttaacctatggaaaaagccttggaagagaaaagtagaattcagtatgtatggaggcacagttttgcacagtatgttgcatgcggcaaaaaaaaaaatatgaaatagagtagaagagataaaagtagttttctgtcaaaaactaggagttaagccttcaggtacgttgtggactaggctttccagcaaggtttttgtagctatttgcttgcctgagaaatgaaattgaaaacatacccctgcgtgtctgtccttaacaccaggctaaattctggtggttaaataacttatctgtggttacaagctagtaagtagcagagccaagattttttttaatatagagacaggtgtctcactgtgttgtccaggctggtcttgaactcctggcctcaagtggtcctcctgcctcagcctcccaaagtgtggggattacaggtgcgagctactgctcccagcaagagccaagattttaacctagatctccctaacaccaaagcttttgaaagggttcagctgaagaatttctcaattctctgttttgttttgtttttatttttgttttttgagatgaagtctcactgcactcaggctggagtgcagtggtacgatcttggctcactgcaacctccacctcccgggttcaagcgattctcctgcctcagctcccaagtagctgggactacaggtgcacgccaccacaactggctaatttttgtatttttagtagagatggggtttcgctatgttggccaggctgatctcaaacttctgacctcaggtgatccacccactttgacctcccaaagtgctgggattactagacgtaagccaccacacctggcaattccctgcttttttgacaacataatttaaatgaatttgatttaaatgtttcctgaatatatatacagatagatagatgagtatcaacacttacaagctctacacagtctgtgagtgtagatactacttactcgtaggattgtcttgtgctttggggatttttgttcggagttctatactatcagcccagaaagctatcaatgtccaagtgaagtgagatgatgcatggccacattattgctttgaccctcacatcaagaaatctgaatgatctggaccaggggtcagcaaagtgcagcctacaagctattgcagtcagctgccagtttttacttttttaaatagttgggaaaaaaattccaaagactgatattttgtgtcacatgaaaattatatgaaattcaaattgcagtgtccataagtaaagttttattggggcacacccatgctcacccttttaaatattgtgtatggccgctttgtgctacagtagcagagttgagtcattgcaagggagaccatatggcccaggtagcctaaaatatttatctgatcctttacagaaaaagtttgctaacccttgataacagatactctaaaatgcaggtttttcttcttcaatttagctcagtggtaggtcaaattgtttgcttttgctattaagcttatgatttggaaacgtaaaatttcatggtggatattataatcagaactattcaaaagggaaaacatgccagccattttatatgatgaagtctcttattccatagaaaactgtagaaagatatctgtatctttggagaaggagaaagaaaggaaagaactccagaatcccatcactgttctttaaagcatgcatcacagacctttaagagtatgctttattgagtaaaggttatagtttgactttaagataagaaattttctagaatcatgtttgaattctaaacgttgatattcttaagtaccatttctgattaggaattaggtgttaaaagaatcatggtaaggaaaccttaatccgttgaaactcttgtaatttggacaacaaaaaactagaaataacactcttttctttgaagatctgattcaaatacaccttagaagagtttaaaatctcccaggcctttaggatgcaataggatattatgccttggtttgactccttttcattcaaattaatgtaagtatgttgttcaagactttgaagcattgaacaatgttctcgatgaattttatttaattactgacattttgtgatatttgaatgttattaagttaaacacttagagttgagtatattcaggggagaaaagtgaatgaaatgactcataataagaaagcttgctcccttgggacagttaccttcctggtgtcattgccatcctgggttgacaagctgagagtagaggatacaagtgatgtgaataaaatggaaattgcattgagttaatgaaacagacacttttagatcaagaaaacacttcaacagcctttttagaaattggcacactcctatagtcccacctactcaagaggctgaggcaggaggatcactagagtacaggagtttggggctgtagtgtgtaatgatcacacctgtgaaagaataaccactgcactccaacctgggcaacatggcaagaccctgtctctttaaaaaaaaaaaaaatcctgggaaaagaagtcaaagatgtaattttacacaatttctgcccccaccgtcttttttgtttgtttgtttgtttgtttgttttttggctagatactaggtattcagtgtttgctgagatgacaggtttctactaatcagccagttatttgggaaggagaaaaactttttctcaattctgaacatgatgcagcttgttaactctccagatagtgcctttgattgaaaataaggtctacacctttttaagtatattatttctgacatcgtaagaaataatttagttccttattctcatttatcttttatataatgtactgtaatattcaggtttaaagtaaaataagtatatgaattatattttggtaaaactgtttcatgaccagcttgattaatgtatattaacataccagacattgacagcgaacatttcatgaaatcagttatttacttaccaaaacaatgagttttagcttgaaagttactgctgctctattattaacaaaactaagttttaaaaattaattttaattctactgaagtttaatttctggttaaaggtatagtggatgctatttatgatccaagtttttacatcacatccattgatctgcctatcccttctttttactccaaagaggagatgatagaataatacattcagtatactaccaagaagcaaagttataatgtgtttcattttgctattggaattttttattgtaacattgtatgataacctgaaatgtttacttgtgccttttctttaaacaattaaagttttccattttataag

SEQ ID NO: 1313 - DNA, 124 bp, Homo sapiens
ttgtgccaaacttttgcgaagcactgctccagacagcaatcagtgatgccaaacgtcggtttgttcggaacacgctatgtcccacttcgaaaacctagcctcaaataacaactacgtacctctc

SEQ ID NO: 1314 - DNA, 2816 bp, Homo sapiens
aactccaaactagagtacgtaacattgaaaaatgaggcataaaaatgcaataaactgttacagtcaagaccattaatggtcttctccaaaatattttgagatataaaagtaggaaacaggtataattttaatgtgaaaattaagtcttcactttctgtgcaagtaatcctgctgatccagttgtacttaagtgtgtaacaggaatattttgcagaatataggtttaactgaatgaagccatattaataactgcattttcctaactttgaaaaattttgcaaatgtcttaggtgatttaaataaatgagtattgggcctaattgcaacaccagtctgtttttaacaggttctattacccagaacttttttgtaaatgcggcagttacaaattaactgtggaagttttcagttttaagttataaatcacctgagaattacctaatgatggattgaataaatctttagactacaaaagcccaacttttctctatttacatatgcatctctcctataatgtaaatagaataatagctttgaaatacaattaggtttttgagatttttataaccaaatacatttcagtgtaacatattagcagaaagcattagtctttgtactttgcttacattcccaaaagctgacattttcacgattcttaaaaacacaaagttacacttactaaaattaggacatgttttctctttgaaatgaagaatatagtttaaaagcttcctcctccatagggacacattttctctaacccttaactaaagtgtaggattttaaaattaaatgtgaggtaaaataagtttatttttaatagtatctgtcaagttaatatctgtcaacagttaataatcatgttatgttaattttaacatgattgctgacttggataattcattattaccagcagttatgaaggaaatattgctaaaatgatctgggcctaccataaataaatatctccttttctgagctctaagaattatcagaaacaggaaagaatttagaaaaacttgagaaaacctaatccaaaataaaattcacttaagtagaactataaataaatatctagaatctgactggctcatcatgacatcctactcataacataaatcaaaggagatgattaatttccagttagctggaagaaactttggctgtaggtttttattttctacaagaattctggtttgaattatttttgtaagcaggtacattttataaaatgtaagccctactgtaaggtttagcactgggtgtacatatttattaaaaatttttattataacaacttttattaaaatggcctttctgaacactttatttattgatgttgaagtaaggattagaaacatagactcccaagttttaaacacctaaatgtgaataacccatatatacaacaaagtttctgccatctagctttttgaagtctatgggggtcttactcaagtactagtaatttaacttcatcatgaatgaactataatttttaagttatgcccatttataacgttgtttatgactacattgtgagttagaaacaaacttaaaatttggggtatagaacccctcaacaggttagtaatgctggaattcttgatgagcaataatgataaccagagagtgatttcatttacactcatagtagtataaaaagagatacatttccctcttaggcccctgggagaagagcagcttagatttccctactggcaaggtttttaaaaatgaggtaaatgccgtatatgatcaattaccttaattggccaagaaaatgcttcaggtgtctaggggtatcctctgcaacacttgcagaacaaaggtcaataagatccttgcctatgaatacccctcccttttgcgctgttaaatttgcaatgagaagcaaatttacagtaccataactaataaagcagggtacagatataaactactgcatcttttctataaaactgtgattaagaattctacctctcctgtatggctgttactgtactgtactctctgactccttacctaacaatgaatttgttacataatcttctacatgtatgatttgtgccactgatcttaaacctatgattcagtaacttcttaccatataaaaacgataattgctttatttggaaaagaatttaggaatactaaggacaattatttttatagacaaagtaaaaagacagatatttaagaggcataaccaaaaaagcaaaacttgtaaacagagtaaaaatctttaatatttctaaagacatactgtttatctgcttcatatgctttttttaatttcactattccatttctaaattaaagttatgctaaattgagtaagctgtttatcacttaacagctcattttgtctttttcaatatacaaattttaaaaatactacaatatttaactaaggcccaaccgatttccataatgtagcagttaccgtgttcacctcacactaaggcctagagtttgctctgatatgcatttggatgattaatgttatgctgttctttcatgtgaatgtcaagacatggagggtgtttgtaattttatggtaaaattaatccttcttacacataatggtgtcttaaaattgacaaaaaatgagcacttacaattgtatgtctcctcaaatgaaaattctttatctgaaattttaaaagacattgattccacatgtaaggatttttcatctgaagtacaataatgcacaatcagtgttgctcaaactgctttatacttataaacagccatcttaaataagcaacgtattgtgagtactgatatgtatataataaaaattatcaaag

SEQ ID NO: 1315 - DNA, 447 bp, Homo sapiens
taactctccagagaacctttagaatatcttttcaagtttccccagcttcatctttgggaaagcttactgtttttgataaagtaataatgtgcaaatctgacaatatacaagcttttagtatccacaggatattaaacgtgtaaattgcacagagcacacttatttatgaattgtctaaagttactactgattttaaaatgaataatttattattaaggtaactactgctaatgttgatcagcaaatttaagagaagacctagctatgttggctggttgctttctattatcatggtatttgaccattttagttttaattccatgtcagataagtgtaaatagaagagtttaaaagcatgaaacatttcagaaggtatcagttatatgatattctttaaacaaatatgaaaaatgtaaatactcatgaatgaaaatacatctttttgtg

SEQ ID NO: 1316 - DNA, 69 bp, Homo sapiens
gatttaccaagcaaactgcaacattttacattgctcctttatttacttattaaagacgtttggaaaact

SEQ ID NO: 1317 - DNA, 1956 bp, Homo sapiens
ctgacttaggagcataacttacctgtaatttccttcaatatgagagaaaattgagatgtgtaaaaatctagttactgcctgtaaatggtgtcattgaggcagatattctttcgtcatatttgacagtatgttgtctgtcaagttttaaatacttatcttgcctccatatcaatccattctcatgaacctctgtattgctttccttaaactattgttttctaattgaaattgtctataaagaaaatacttgcaatatatttttcctttatttttatgactaatataaatcaagaaaatttgttgttagatatattttggcctaggtatcagggtaatgtatatacatattttttatttccaaaaaaaattcattaattgcttcttaactcttattataaccaagcaatttaattacaattgttaaaactgaaatactggaagaagatatttttcctgtcattgatgagatatatcagagtaactggagtagctgggatttactagtagtgtaaataaaattcactcttcaatacatgaatggaaacttaaatttttttttatgtgtccttgcttatagtttagctgtaataatttaaccttgtattcttgtgccatattctgtctttttattacttataaagacaaaccaaagtaaatctgaaaggagactagaagctttgaaattattgtttgggggttttataaaagcaactactgtcacctccatccagattcttttaaattattgatccatccatagtatatattgctactcattcaagaatcctcaataagtattgagtatttaccatatgttgggatactgtgggctctggagagaggagggggcaatagagctaggaattaagaatcagttgagtaaaatgtgtaatatttattccccattaataactgactaggaaggactaaaagccagaaaggggatgaaaaaaaaatccttaattcagggccgacattatctacttaaacaactttgagatatggtcttaattattttaaagcagaataatataattgaaagtttatagctaaaagagactatataggtcatttagtataattcttcattagtttacgaaccacaaaattgcaaataaataagctatgaactttgatgtacactataaatctccttaattctataaatttgtgtctgtaacctgaatagtttgaaaacttctttaaaaatctcttgtatttcatccgggcgcagtggctcacacctgtaatcccagcactttgggaggccgaggtgggcagatcacgaggtcaggagtttgagaccagcctgaccaacatggtaaaaccccatctctactaaaatacaaaaattggctgggcgtggtggcactcgcctgtaatctcagctacttgggaggctgaggcaggagaatcgcttgaacccgggaggcggaggttacagtgagccgagatcacatcactgcactccagcctgggcgacagagcgagactccatctcaaaaaaaaaaaaaaactcttgtatctcaatatttttaaaccacaggcctaaataaaactaattttgctcaagttttctcaacctagggaaaaagaactatggttccatattcaaaataaatattatagacccttttcctaagtaggattttgtggtttactgattgggtaatttgatcattaaaattatgtgaaatctgcccgggcacacctcatgcctgtaatcccagcactctgggaggccaaggcagatgatcacctgaggtcaggagttctagaccagcctggctaacatggtgaaaccctgtatctgctaaaaatacaaaaattagccaggcgtggtggcgggctcctgtaatcccagctactttggaggcgaggcacgagaatcgcttgaacctgggaggcggagtttgcagtgagccgagatcacgccattgcactccagcctgggcg

SEQ ID NO: 1318 - DNA, 397 bp, Homo sapiens
tctttcacaccgctcgttcctgcagccagaaaggaactctgggcagctggaggcgcaggagcctgtgcccatatggtcatccaaatggactggccagcgtaaatgaccccactgcagcagaaaacaaacacacgaggagcatgcagcgaattcagaaagaggtctttcagaaggaaaccgaaactgacttgctcacctggaacacctgatggtgaaaccaaacaaatacaaaatccttctccagaccccagaactagaaaccccgggccatcccactagcagctttggcctccatattgctctcatttcaagcagatctgcttttctgcatgtttgtctgtgtgtctgcgttgtgtgtgattttcatggaaaaataaaatgcaaatgcactcatcac

SEQ ID NO: 1319 - DNA, 4962 bp, Homo sapiens
ggatgtcaaatttcagggtttttttgttgttgttgtgttattttgtggtattgtgcttgttttgtgaaagaatgttttgacagggcctcttttgtataggactgccaaatcatgggttttgccttttgttgttgtatttatcctctgttggtaatactgaatggtagaatgttttgatagggtcacatttgtgcctcactggaattatctttaaattctgtatttttaaagttgtgaataagataggtggattcgtattttttaaagttcagttgactttccccaccaaatggtccatttgaatgcatccctaatatatgatatagtctcaactaataggtgcaatttgggaaaatcaggtttattttttggagtggaactgttataagtgcttatttataaaaggaatgtttctgaatgcaagtgcctaaaaagatctttgttggtatgcatatgttttgtcacacaattttatagtgcatctttcaccatttgtgcttttttaagatacgtatgtaagctcttatttttcaattggcaattcagttaatttttaaatgtttacataatggccagaaggcttgcaaatctgtatttaattgcattttaattaattgccagtttttacatgtgatagtcagttgtacaaagaaaatgcacttaaacctgtttctaaattatatattcagttatattatatttggctttagatggttttaatacatttgatagtttttcaccccttggctttattttatataaacttttgtttttcagcagttctgaactttttagtattttataaatggtccaaaaaatgcctgtttcagaagtttttgaattcagtgcatttcctcttgatttgtctgggttaaaaccattccttttgtatgaaatgttttgacttaggaatcattttatgtacttgttctacctggattgtcaacaactgaaagtacatatttcatccaaatcaagctaaaatttatttaagttgattctgagagtacaggtcagtaagcctcattatttggaatttgagagaaggtataggtgatcggatctgtttcatttataaaaggtccagtttttaggactagtacattcctgttattttctgggttttatcattttgcctaaaataggatataaaagggacaaaaaataagtagactgtttttatgtgtgaattatatttctactaaatgtttttgtatgactgtgttatacttgataatatatatatatatatatatcaacttgttaaattatttcatgttcccgtggcttcttttcagttgttgcctattacagtatgagagtttaaggttattaaccattggcttagaagtcaacacctaggatcatacatccgttgactacaatgtggaatgaattttatggaaacctgttttatagttctatgtgatgtaaaggtctagggagcaataaccagcccttttttttctgaaggcttgtttttagtcctcattgtacaaaatataaaataatcatattgctatgaatacctaaaaagaaaattagagcccatgtgtattgagccttctctgtgtgccaggaactttgccaaggtgctacatagattattttatttcaagttcacagcaacctataatgggtgggtaagcatgttattatttctgtgttacagataaggaaactaaggcttagttaaatgacttgcttcagtgttccacaggtgtaacaggtggagtcaaatctcaaacatagggctgtcagattttgatggttagtgctcttaatgactgtgattactaaataatatctggtagtttttaacaatagaaaatgcaactttaaaaaatttttattgtggtaaaatacacataacatttaccatttttaagtatattgtttgaaccatttttaagcatatagttcagtggcattaagtatattcacattgttttgcaaccatgagcacctattcatctccagaacattatcatcatcctatactaaaacttagaaaatgtacttttaaacttcttcagttctcttttaatatatggagcccacccaaaggttatatcatgtaataaactcatttctctgttttccctcacagcttaaaaatgagaatttcacttttgggtcctttctgcctttagggctccctggcactttgtccagcgtagagccttaagcctctagatgctttctagtttcctggggccctgaggcaagtatctcttgagaagaggttgctatttctagaggatccacagtgtgcactgtgttgtgctatctaatagtgtggtggaaatcatttatccagaagttgttttttgcaacatggaaagatacgtgaccaaaaggaaagggcaacagcaggagccctgttagtgctgccagaacaccaggaagccttgtgggaggcgtattgtccaagatgatgcgtattgtccaaacgactcagaagaagtcatttctgaagggttgatcataacttccctagccatgttttacctacagagaacttagttagaatttatgagtacagtatgttaaattacttttagtgtaccttaggcagtgtatttgttttgatacagagacaaagactatatgatccctgagacttgttgcctagtgaactcacaagcagatagaattgtacctcagttatttgggtgatttaaagatggtactatggctacactattcccagctatcgttgtgttacagtatttatacaactggaaacatctctctaaatgacaaccattgtatattgttaaataacttatagtcagtggaattctgtgggtttttctttcctacaggcaggaaattatggtgatgtgttgatatgattatatatgtagactattcagttaacatctaggagttagcaaatttgctacattcacaatcagtatgtaagtcagttgtattcctagatatcagcaactaacagaaatggaagtttttagaaagatctcttcaatatcattaaaaaatacaaaatactctacctaagaataagtctaacaaaagatgtacaagatcttgatggagaaaatgttagaccatgtcaggaagcatttaaggagatcttaaataaatgtagtactccataatgtacacgaattagaagactcagtcgtgtaaagatgttcatttacatttgtagattcaatgtaatcccaaccaaaatattttttgcattattacctctatctactgtgtgtttccttaagacaagggcattcctacgtaaccatagtacaaccatcaaacttaggagattgacattgacatcatgatatctaatccatagaccacattcaatctgctgattttgattgcctcagtaatgttcctgtgtttcagcatcccaatccaggaccacatagtgcatttagttgccctatctcttgtttcattcagtccagaacatcttttcagacttgtctttgaccttgacacttgaggaggattggccagtttgtagaaagttcctcagttttggtttatcattagataagacccataaggtttaggatagacatttttgtccaatactacagaaatgatgctctatactcaaatgtgtcatgccaggatgcacacaatgtcaatttgtcttatacctgatagtattaattttggtcacttggttcagatagtatataccaggtttctccattgtaaaattagaattaggaagtaatttgtgaggagattcttaaagattgtaaatgtattgtttctcatcgaattgtcacgggctagtctattgacaattcttgactgaaccaattactattttggttgtcaaatggtgagtccgtggcttctgccttggttggcatcctactactgtaaggaagagctcttccttctctattccttcattcacttaaatcagtatagattcatgaatgcctgctttattcagtgacagtgtattattgtcacttattttcatgctgaaattttccccgatttggtttttgggagtctcttcaagctggcttctgtgttccttagagatgcctcattgctttttcccctcttattttttttacgagctcatcttacactttttcctactccctaccccaagtctagaattagcccttttttccaaggagccctggtttctttaaatgggaaatggtatatggaaatgaagacctgagaaaggctcactgtcttattggtgaacagctcaaaggaaaacgtgtgtctacacacattcaagaatagtcacctacttctatatctatttatatacatacgtattgaaaactttgagttcacattgacaccttcaattcaatcctttgaggttaatctagtctccctttccatctttgtaacttccttctctcatagaaacctgactcccataatcctaaataatttgttcattcttcctccctccctcaacctcttgacatgccagctgctgtctcatcacacccagtcccaaatatgccaaataaatccgcagtcatagcagcgctggtcctgaccacaccaatccctaacatcctccccagcctggagcctggaccatggcagctgaatctttgaccccagtgatgtcagtcctgagcacaccattggaatcctaggctcctgtcatctggctggaagagagacaaattcacaaccttttgataatgagcaattattgaatactcactgaatttatcagagaaagtttaaaagtgtacgattatacatatttaccaggaatgtttaaacatagacatttatgaaatttatagaaaatattgaattgtggttctcactttttggtcttggctgtaacaatttttaaatattaatacttcctacaataactgtatcatgctatttttaagtgtcctcacactcaaccaatctactctgcatccataaaataagcatgcagttcagaaaatagattaaacgactaattggcta

SEQ ID NO: 1320 - DNA, 1143 bp, Homo sapiens
aggaagcactgttggagctactgcaaatgctatattgcactgtgaccgagaacttttaagaggatagaatacatggaaacgcaaatgagtatttcggagcatgaagaccctggagttcaaaaaactcttgatatgacctgttattaccattagcattctggttttgacatcagcattagtcactttgaaatgtaacgaatggtactacaaccaattccaagttttaatttttaacaccatggcaccttttgcacataacatgctttagattatatattccgcactcaaggagtaaccaggtcgtccaagcaaaaacaaatgggaaaatgtcttaaaaaatcctgggtggacttttgaaaagcttttttttttttttttttttttttgagacggagtcttgctctgttgcccaggctggagtgcagtagcacgatctcggctcactgcaccctccgtctctcgggttcaagcaattgtctgcctcagcctcccgagtagctgggattacaggtgcgcactaccacgccaagctaatttttgtattttttagtagagatggggtttcaccatcttggccaggctggtcttgaattcctgacctcaggtgatccacccaccttggcctcccaaagtgctagtattatgggcgtgaaccaccatgcccagccgaaaagcttttgaggggctgacttcaatccatgtaggaaagtaaaatggaaggaaattgggtgcatttctaggacttttctaacatatgtctataatatagtgtttaggttcttttttttttcaggaatacatttggaaattcaaaacaattggcaaactttgtattaatgtgttaagtgcaggagacattggtattctgggcaccttcctaatatgctttacaatctgcactttaactgacttaagtggcattaaacatttgagagctaactatatttttataagactactatacaaactacagagtttatgatttaaggtacttaaagcttctatggttgacattgtatatataattttttaaaaaggttttctatatggggattttctatttatgtaggtaatattgttctatttgtatatattgagataatttatttaatatactttaaataaaggtgactgggaattgtt

SEQ ID NO: 1321 - DNA, 789 bp, Homo sapiens
atccacacagaaggagctcagtatttagtcctttgtttttattcagtgagaaccaagctagccttgagtaatttttatcttgtcttcctaaaacactattaagcttattgtacttttaagaaaaattgccttacgtacattcctttttcctttttctgcctcttccctcaatagttgccttttagtgctgtaatagttaaatcctacagcataatcaataactcgcatatgaagtaaaaaggaatactgtgaaaggggagtactcttgtacagccagttcttttatgcaaaaatctatgcatttttacaatcttatattaaactggtattttcaaacaataggaaactttttttttttttttttttttttacagtttagtgtatctggtttctacatggaagactaaactcatgcttattgctaaatgtggtctttgccaactaaatttaagatgcagcattttagaaatttacatatcaatgtttctacagtattgtttgctaatttttaaataaagtcatgatcagtgtgcatttgtgattatatgtgtactcattctcttacctagcgaacaagatcttttcagagtggtgtttctaaaagagcatgtacaaaagtggcctgtggacatttaggcctgggtgatgcatttgctcttcctgtttgtgccaatgtatcaatgtagagttgctctgttttcttcaactgtatttattgctgcatttctcagcataaacttatcccattgtattttttataaataaatattttttttgaactttcatatg

SEQ ID NO: 1322 - DNA, 334 bp, Homo sapiens
caaatggcaactgacttctttagaattttgcagttaacagtagtatgtactcaaattggggggaaaaaaaccctacatgtttcttgtaaaggcgtctgacagtcctgagaattattgatggtaaggaataaaaaatgtacagatgactcagtgaagaaactgaggcttctcttatgaaacaaacattgataaacgtaactactaaatgtttatgcctctgtaaaccaaatttcttttctagataaaaatatgtattactacctgcaaattttcttctggctgttttagtagtattttttttacagaactaaatatagagtttgtatgattagta

SEQ ID NO: 1323 - DNA, 1232 bp, Homo sapiens
ggtgatttgtgaaacagttgctgtgaactttcatgtcacctacatatgctgatcttttaaaatcatgatccttgtgttcagctctttccaaattaaaacaaatatacattttctaaataaaaatatgtaatttcaaaatacatttgtaagtgtaaaaaatgtctcatgtcaatgaccattcaattagtggtcataaaatagaataattcttttctgaggatagtagttaaataactgtgtggcagttaattggatgttcactgccagttgtcttatgtgaaaaattaacttttttgtggcaattagtgtgacagtttccaaattgccctatgctgtgctccatatttgatttctaattgtaagtgaaattaagcattttgaaacaaagtactctttaacatacaagaaaatgtatccaaggaaacattttatcattaaaaattacctttaattttaatgctgtttctaagaaaatgtagttagctccataaagtacaaatgaagaaagtcaaaaaattatttgctatggcaggataagaaagcctaaaattgagtttgtagaactttattaagtaaaatccccttcgctgaaattgcttatttttggtgttggatagaggatagggagaatatttactaactaaataccattcactactcatgcgtgagatgggtgtacaaactcatcctcttttaatggcatttctctttaaactatgttcctaacaaaatgagatgataggatagatcctggttaccactcttttgctgtgcacatacgggctctgactggttttaatagtcaccttcatgattatagcaactaatgtttgaacaaagctcaaagtatgcaatgcttcattattcaagaatgaaaaatataatgttgataatatatattaagtgtgccaaatcagtttgactactctctgttttagtgtttatgtttaaaagaaatatattttttgttattattagataatatttttgtatttctctattttcataatcagtaaatagtgtcatataaactcatttatctcctcttcatggcatcttcaatatgaatctataagtagtaaatcagaaagtaacaatctatggcttatttctatgacaaattcaagagctagaaaaataaaatgtttcattatgcacttttagaaatgcatatttgccacaaaacctgtattactgaataatatcaaataaaatatcataaagcattttaa

SEQ ID NO: 1324 - DNA, 2825 bp, Homo sapiens
tatcgaagcagatggtttttcactgcattggacatcatccctttttaccatccattcataacacccaaagtttgtttgattgcaagtgaagtttataaagttgtttaataatttttataattttaaaatcaatgtcaacctatctgtttcccccactagactgtgagctcctcgagggcaggattgtctttttttttctgtgtccccagcacttacaacaaagcctagcacaaagtaggtgttcaacaaaaatgtgatgaccaaatgaacaaaattcttaaataaaacattcactttagtttctcacagaatcattgcaattatgttaaaagaaatctctacataaatcgtatttgtgtatgaaaaccttctattttgggctagttatttttttaatcttcatatatctattcagcagtatgccatatttaatttgaagtggactttgaaagtcatgggggtttttattttgttattcagcatgacattatttccattctaacatttcagtgtgtgaaattactttatttttagaaagtatgttctatagtaaaataatgtttccacattatattatgttatatttcacttaaaatactattcatactatacattctaagactggtgcttctgcttttgaaggggaaaatgccaatttttactgtaataagtaatgtatcataattaaaaattatttatttggacttcttctcctgacaattgtggcttaattcatgacttgtttttgaatgcaggcagtatttagggtagtttaaatgagtaaattcagcactggtaccttattattgagtaatttcccatgggtagcagtgtctcaagagtggtcaaaagctccactcttaggcttttttactactaaagattccacataatttaaatgggaaagaactataccctgacacataatttaaattatataaatgctagaaatatggttaatgtattttactttgcatttgtgtagtactttatagtttacaaagcatatttacaccaattattttatgtaatcctcataataacctggtataaacatgaagggtatggctttatttttatagataagaaaaatgaagccaagacagggtaaataacatgccaaatcacaaactagtaagagacatagttgaagcttaaattcaagttttctggccctgaactcatattcctttctaatatagcacagctgtcatctcattttggacactgaggcctttcagagctcagtagaatcctgggcaactacctatggttcaaaaaataaagaaatgccagaatacaaatatgaaagctctgctgtattttaaatgtttatgttttaagaatgaacacttttcaaatataaaactatataataattataatccagttttaagataatatcaagagtctagatgtgaggctttttgtgaaagagaagcctaaattcagcatctccccttccaccctcacccccaggtcccagcctcccactcagcagagtgcccaagggacataccttacatttagcatgtagaattccagattacaatcgccataatataaggaaggtgagctcctcaacaataactttgcaataattaaaactaccctaagtaactttggcttatatggcaaagtaactttggcagtaattgactgaaatgaatctttctaaactttacagtactaaagaaagcaaacttttaatttcctctgtaatttcaacagagatcagcaaataaatataaccaaagattgtccattactccccaaatagatgttatttgcccatttctatcactgtggaagctaaaacacttctactagggccaaaaagagaaaagaaaagaaaatttctactaatttcagacctctagagcaattcagtcctgttggaaatttagaacatgaagaaactttgaatgtcttgaccctttttaaagattttttaggcaataacagtaatagggaattcacttattgagaatgaaagtgaaggggatgatcctaatgtcttagaaagctagattactagtaaggcttccagacttctatcagttctattgattctacatcagacttccaagcagccaagcaggaatgtttttcctgttggaagccttagccatatattcttatgtcaaggttgcttctttgcaccttgctaaacctgatacgaatgcaggagttttaaattcttcaaaaactcagatttaacccagaaccagagtaaagtcacctctactatttacacatcataggctcaagattgtacagtgagtgatgctgtcatgaagaaaattcagatgaaaaaggcaagatacatgtgaataaggcaaaagccagaaaatagcccttattcatgatgctgttactgagaataatgaaaatcatatttcagaaaatattaccatgtaaatatgtacatatgtagtctagtaaaagcaggcaaacacatatctttctgataaaaacatctcctttttattctacttacttggggcccaggtcagtataatttagtcaacttgaaaatttcggtagtctctgtttgcatggcagaaattctgcacatgttttatctgattcctgtgataacttaaaaggctcttttatgttaaaagagaggtgaatcttctttgacagactttgtattttccacttctaactgggcctctcttttctcaggatctatcctagccaaatatctcagttacatttaccatacagtttcctttgtgaaagaacagtaggggaggaaataattctctgctgtgtattgtatttttcaaataaaaatttaaaaattcaattgaaaactg

SEQ ID NO: 1325 - DNA, 195 bp, Homo sapiens
aggaattctgaagtccagcctttagagaacaacattcaagagggtcatatagactataaattaatgtcatgccctatatgtaattctgggtcttaaaggaaagattgtacttcaggagaagtaactctcaaatatttcatgccaagattttaagaatgttggtatttaagaaaataaatagtgatttggaaaatc

SEQ ID NO: 1326 - DNA, 1780 bp, Homo sapiens
ttctagtgtcatgttttactttttattggtattttagaaactcaggtgcttaaaaaatatgtcaacacaaaccagatcctcaaatagcaagtttcaaattttacttgagctgttaaagactggatactttaagtactgcttttatggcagtttataatataggaacaaatttgtacttggggattggtaaagattgtgagtaaatgacattttttggtttgtgaacatggcgttttatagaataatatgaattttattaagctattctttagaaattcagttctaaggaaagagttgatccttatgagggagattctgatcatattaaaaatctgggtaaactaaaacctgctcataacctcatagtatgcaaccaaagaatactaattcattttatcactttcattggtaaaacttttaaattcaacacctgaaaatcatgagggaaaatgattacctcttgagatatattattgatgacatttaaagggaaaagtcctaaatttaccttaaataactgaaatgaattaagccttcatagcgtattttccttgaagcatttaaatttgctagtgatgaatcaaataaatttgatatacttaaaataatttggacagtttttatgtgaccagattaagtgcttttgtcatttgagctgacaagtttttaaaacttcagtgcttcctaaatgtttatactcatctagtttttctcaatttgtagttttattatgcagttaaatctgtatcagtggacttttaaaacttggtactactactaaatctactatatcatgaatattcatttatttttatagtatcagaacttgggttgatttcaatgttaataaactaggcaaaacaaataactgttagaaggtacaattttcttctcttccctgtaactgaaagttttaagaattgttccttggggaaaaatttttttaaaattcacctagaatcatagggcctcattttgttttcttattgacaaacaatacctggtagcattctctaaagagtcttctagatcaatttttataaagtactaatgctcatgtgataatttaaaattattttcaactactttattacacagatgaagaaacatttcaagatattgatgtaataacattactgagtcccatggtaagaaagaatctttgctaattttttttttttttttacgaagccagtatcttgaaactattggcaattgcaagtgtctttaaactagggatctaatctgaaaattcagtaactaatattaggcagttgatactcccccacctcccccatttagatacactactgtattagtgagaatacttggtacagtaacttgaaagcacttgctattctggaaagaagcctcttggtgattttggaaggagctttattgtaaatactatggaaggggctttgttgtaaatactatgtaatatatataaaatattgtgacatgttttggatgggatgcatgacatacaggtagctctcttttttaaaatataggtatctctttgcatatatatacacaaggaaagttgaattttcaggagagatcattctgatatcttgcaaatttgtattaaatgtatacagacttccaagtgtgctaattctttacctcctaaacttttagttgcaattgttttgcagtgtaaaattgtacatgtgttaataatcaaaaagtgttgcatttaatgttatttctgtaaactttgagctttgttaataaactattatgcagcatctacactttgaaaatcaagtacttc

SEQ ID NO: 1327 - DNA, 185 bp, Homo sapiens
tataattcaagatgcccttctaaagaggattactttggtgaattctctaatgtttggatttctgaagtaaaaagaaaagctattaccaaagtttaatgaggccacagcattttttaaagttcatattatttgctatttaaagtatatatttttttgatataaaaatataattaaaaaattttttt

SEQ ID NO: 1328 - DNA, 9332 bp, Homo sapiens
agactgataagacattcttgaactttttgagcttccaaagagtatgtaaaccctagctgtgccagcacatgttcatctttacaatttatattgtaaatgatttgtatcgtatgattaaggatctaaggcacaatatttgtcactgttctattagactttttactgaaaatgaataatggtgtaatggttctcctggggctgtcacattttataggtcagagtgtgacttcttaatatggtgctgatgtttttgtgtcaatggcttgaaactggcaagattaacaaaattaggccgggcatggtggctcacgcctgtaatcccagcactttgggaggcccaggtgggcggatcacctgaggttagaagtttgagaccagcctggccaacatggtgaaacctggcctctactaaaaatacaaaaattagccgggtgtggtggtgggtacctataatcccagctacttgggaggctgaggcaggagaatcgcttgaacctgggaggtggaggttgcagtgagctgagatcgtgctattgcactccagcctgggcgacagagcaagacgccatctcaaaaacaaaaaaacaaaattcatgttactaaaagacaggtagccatatacagacagtatatgccctattttttttaactgactcttaatgaaactttaattttacttaattaagaaatggaatttatatacaaaaatattttccatttccgttattatgctaattgttgtatgaaataagtgcaattatacttctcttttgagatatccaagagtatattcttgctctgtatagagaatatcatctgatagtgtcttatttatattaattaatgtctttgaaaagggaaaagtataaactggccttaaaattgtccaattatagttttataaccagtctattaaaggtgtttgtttaaaatggatatagttttagatttgtggtaatgctttggtattttcttggggaagaccttcacctttgcaaacttccctcatgtaaggaaggtactttaaatgtagcagccactgacatttctttttttaaaaaaaatttgagaagtctacttccttttaacttttttggtcttcagctaaaaaataggataagaaattaaggtctattccattctccatatcctgggtaagaatgtaaataagaggagaaggaagagtctaatagtaattatggatataaaaaataagaaattttgtatagaaatgaaggtttcataatgatcattttgttaaaggtctactttaatcagaaatagcaacgagatgaatgtatccaacatttcaatttgcattcggaaatccatgttgtttctaatattgtccagttgaaaactgtatgccaaaattagttgtttaagtgaagttttgtgacagaaaaaaggttgttttaatatctacttggtttttctcaaaatggaaataattttaaaatcaggaaagaataaatcagccaggtgtgatgacttgtaactgtaatcccagttataggggaggctgaagcaggaggatcacttgaggccaggagtttgagaccagcctgggcaacatagtgagatcccatctcaaaaaacattatttttaaaattagcctggtggctcacgcctgtaatcccagcactttgggaggccgaggtggccagatcacctgaggtcaggagttcgagaccaccctggccaacatggtgaaaccccatctctacagttttgtaaaaatacaaaaaattacctgggcctggtggcacacgcctgtagtcccagctacttgggaggctgaggcaggagaattgcttgagcccaagaggtggaggttacagtgagcagagatcacaccactgcactccagcctgggtggcagagcaacactttgtctcagaaaaaaaaaaaaaaaccaaaaagccaagtgtggtggtgtgcacctatagtcccagctactcaggaagctgagacaagaggatcaattgagcccaggagttcaaagctgtagtgagctgtcattgtgccactatcctccagtatgggtgacagagtgagacctggtctctaaaaaataaaataaaataaaaaaaacaggtcaaataaatgctgttgttgtaaaatttcagataatacaaagagttaaccaataaaagaaaaagtcattcataatcttaccactattaacattttgatgtatctatctgtatgtatggctattcttttttgttaaaacatgatcatagcatatctactattttattatttgatttttaaaatttaacattatattatgggtaaccttacatgtcaataaacaattccacattgtcatgctttaaatggctgcataggctgggtgtggtggctcacgcctgtaatcctaccactttgggaggccaaggcaggtagatcacaaggtcaggagttcgagaccagcctggccaatatggtgaaacctcatctctattgaaaatacaaaaatcagccaggcacggtggcaggcgcctgtagtccacctactcgggaggctgaggcaggagaactgcttgaacccagcggcagaggttgcagtgagccaagattgagccactgcactccagcctggtgatagagcgagactctgtctctaaataaataaataaataaataaatgtctgcatagtattccattgtatgcatttattatacattcaaacattaaacatctaccataccaatcatggttctaagcatacagtagccaccttcatgcttccttgattgggcttacagtctagtaaggagacagatattaaataactgcataaaacactgttcttggtaggtaataacccagatgctatgagccatccagtaaaggttaccgatcttatctggaaggatcagaagatggatgtcccataatttaaccaattatctattgataggcatttattgagttttaaatgaataatgacatgatcaataaaaatgtcctcctcacttaaagaatagaaaaaccaggagaagggagttctgaaataagtaagtatgtaggtccagcatcaatggctcaagatactctattcccaaataacccttaagttatctggttctattccaacccttgggtattactatcttctctttggtctcatgcattgagaattcagcaaaggatttgttccctacagtgtgcacggcccttaggatagcaggattccctgaagagggccaaaggggcaggagcgcagccttagtggcagtgctggtccatgaggctctacaaagcaagggatgggtgtttgggaggaggaaaaggctcttgctgtactcctagaggttggaattaaagtggaaaagccagaaaattcaagtcctttactaacatgtctggagattagaaggtatatgtacatgggggagaagccaaaattattgctgcgagtggtcagcaagaaaatcaaggctcttttcattattttgagcattcctctgatatttgaaaaggaagtacaacaggaaaggaagtctgaggatggaagctaaaattggtatgaatttatattttagagatcaaaatgtaccttatgttgaaacctatgtaagaagtgattatgtagaaagagtgaaagtgatagctcttagtctggaaagcccactggcttgtttgggcatttctcatggcttcccactcaaagtggatccccaaaatcacttgatggatttccttgctgatttctaagtaaactatggtttaagaaagaaatgacagggctcagcactgccctacagtaccaagaatacaaatgtttccatgaagtcttcaaaggcatttgtaaaattcaggctgtaagtgattagttagttcattctgcacttatttattaactgtatattcagttccaggctctagggtagagattatggataaaggtgaattagatagatgaagtttttgccctcacagcaaaagctttagccaataattaaagctatcactggaagtgggtctgtgccaataacctagagaagagcagtgcttttagagttgagctatattcccaatcagttcttaatggtggttttacccccttccctctacactgtcttttcttgagattggatcatgtgtgtgaacccacatcatttccagtcaaaatcaccaagagaggccggacacagtggctcatgcctataatcccagcactttgggaggcctaaatgggtgggcctcttgagtccagagtttgagaccagcctgggcgaccccagctctaccaaaaaaaccaaaaaacaaaaaataccaaaaaaaaaaaaaattaggccgatgaagtgacatgcacctgtgtgccacctactcaggaggctgaggtggcaggatcacttgcatctgggggcaaaggctgccgtgagctgagattgtgccattgcgctccagcctgggcgacagagcaagactctgtgtgtgtgtgtgtgtgtgtgtgtgtgtgtgtgtgtgtgtgtgtgtgtgtgtgtgtgtatacacacacacatatatatacacacacccccaggagaccttttgtctttcttggttcatgtgcccatcagtgtgggcaggagaatagaatactctgtccacacttgagtcttagtcacctttggagcctaggagtcagccatcctcattcaactacatggatcgagaatgggaatctgggagaatttttttatgggcagattaaaaaggaagttaactatgtaaagtaaggcattgccttcccaccccatcccacctcagttcgtgttaaattatgaatttttctaagagagttctttaatgacatggatagagaggaagctgaggtggcagtagagtagggagtggaaggcaaatacataagatactattaaactgtgaagctgtttgttacaattccaagattttataatttctccaacaaaaaacatttgtattttcttcccagtttaagttcaatgttaatttgagaaataattctactctcaaacttcatgttatgctgacagttcaactgatgctgtcaaaatgtgaattactaacttcagtattctctattcatctgatttttcttaaaatgtttgcgtgttaatatactcactagctttaatgctctactcttatactggcaccttaattatggtaaaaggtaaaaggttaagttaaaattcccaatcctagttatttggtcaaacagaagattaacagaactccatggcttaccacaggaatatttatcaagagaaaaagaagatacctatttgaatttacatgacactttctgtgaaatatctggattaccagattagtctgaaacaaatgccttccaaattctacagcgcatgcccaaggcactctttacagtacctgttcgggtcttttcttctaattttaagcacctacccaaacgtcttcccaggcttgtcataataagcaaataacctcagagcagacaaagtgattcaatctaagaaccttgaatttctctccttttcacctcaaaatttctattctcacactttctttttgtttctctttccgagaagtggttctccatcagcaaataccaactgttttctgtcctctattatttattccatctcttcctcctgatccctgccccatgttgaacccccattgccccactttgatccttcagtctcttcctcacatccagaactgtaccagatttactcccttagcacactgattaaaatttatttccatttccttatggaggaggtattagagactgatcccagacctctacaaatttcattgtggcagggtaatgttatgtgtccataaaccttgttccttttctttcagcctgcagttaggtagagccatgtcatttatttgtaactattagaatatgggtatatgggttgaagtaatgtaggccatttccagacatggcccataacacttctcaagagattcttcatattctatctcttcccctccaacatgcacccttcaaggttgaagatggcaccacacaagatagaaggagccagtgttccaaatgactaggcagagcagaatgctcccctccctacaccctagcaccaattggtttggatgtgatagttgaataatacacttttattgttttaagacattaatattttgagattaatctgcaagtctagttagtaaaactcgaactctgagctgtctaatgcagtagcctctagccacatgtagctatttaaatttaaattttaattttaattaatcaaaattcaactcagatatactagccacatttcaattgctcagtagccacactaattaaatttaaatttaaatagctacatgtggcttatagcaccataccagatagcacagatgtagactgtttccatcatcacagaaaattctattggatagtgctgccttaactaataagacacaaatgttcttattttttaaatagtccctaaaacaaacgaaaaacaaagaactcccttctctaatggcaaatttcagtttgcctaaaagaagactcagaatgcttttcttatattgttacctctgactgccactaaatgaataaatttcctgtcttgctccttctgccaaacttcttgaatgggtgatctttaactccttgcaatcctggcttttttccccagtgctcacctgtaatcagtgttggccacaactcccacccagatgtctcctaaatagttctctgaacccacctctgtcctgatctacagacattcattccaatgctttagcatttcaaggtcatcaaatgactcagtgacatctcagacagtcagacagaccaggtcaactatgaactatttatgccaaaccttacatggttcatgttatccttgctatcccatcaaaataaccacaggctttttttttttttttttttaatttttgagatggagtctcactctgtcaccccgactagagtgcagtggtgcgatctcggctctgctcactgcaacctccgtctcctgggttcaaacagtgctcattcctcaactcccaagtagctgagattacaggcatgcaccatcacgcctggctaatttttctatttttagcagagatggggtttcgccatgttggccaggctggtctcgaactcctgacctcaagtgatctgcccgcctccacctcacaaagctttgggattacaggcatgagccacggtgcctggcctgcagcctcctttattttacaaaaggcattaccacttaaacactgaagatagcacgaatctctgatgtttgcaagttcagaataaaatggaaatgaaaattcattatgtggcagtctcagtactgagcacaaaggcttttaaccacaagcaaattactgtgctagccagaccgtgtgagagaactccaggccagcttgctaaaactgagcaggagaatttggagagagtccagaggagagccacagaaacaactgaagcatgacaagaataattgcagttctgttatagagaggtcatctatatcaggcttttatggagtaccatgtggaatgttaccacgcagagcatggggaacagctgttgtgactcaacaagagacaggacagaagaaatgagaacaggtggaagatcaataatttaggtttgatatggggaaagatggaacagtcaaagggattcacactgatttttggctgagcagaaggcagagtctcctccaacgggcaatgtaagtgcccccactcatctacaccccgagaagagccatcaaactgtattaaacttggaaaaagctatttaacttcaagtgtgctgcgagaaaacttcataatagttcctaagatgtgctaaaaagtaaagtccaaaaagatcataaagtctgtagagaagttctaagagtgcagtcagctataaaaacctagcaatttaatttcttagaaaaatgtagctggagttcaaactgtagtaacaaaggcaagtaaattaagttgtgggcaggtgtaattaagttaataggaatggcagggatgaatataaatcagaacaggactaacagtttgaaacattagatattcaaatgctcagagctgatgagccgagccactacgctaacaactctgcaaaccaaaggtttcacaaattgcacaagaacctggcctcgatcccattgtgttgctggcataagattagaagggcctgttggttcaattgttgctttggacagaggaggacaaacttgccacagtgaagaaatcatttttaaaaaccaccactgtcctttagtgcactaatttctctaataactaggtgtatattagaaataatgatatataagtgcagtatactccagtttcaacagaatggtgtcacttctgtaaaatgttgattttcagattgtcatactttctaaatacaaaaatttgtcacagcttccacatttacaagatattaaacattccataaaatatttgtagaaatatgaaaaaccaatttttgtagttgccttttgaaatgtatacaaaatatcccacatgggcaacatggtaaaacctcgtctctacaaaaaaaaaaaaaaaaatacaaaaagttagccaggcctggtggtgcacgcctgtggtcccagctactcgggaagctgaagtgagatcacctgtgcccaggaggtcgaagctgcagtgagctgtgattgcaccactgcactccagcctgggtgacagagtgagactttgtctcaaataaacaaaaagagacatatacaaaatatattagaaagttgggttaatatcctacaaacaaagtattacatagtttgcacaggattatgtgtgtaaaaagttttaaattcagtatagcttttatttctgcagaactaaaagtagtgcataaaaataaaagtgggatgagcatatctttttaatttgctatgcagtaaaaagtatctcagtcaacatataggaaaccagtgccatttctgtatcatttgacaccgaaggggtattgttttttgttttgttttgtttttcttttgaagaaagacttttatgtcttttattctattcttccgatttggggtttaaattacccccaataagtttgcagaatattctgattactactgcttaggtgatatatttcatatgagaactatctttacacaatgggaaaaaatatggtaaccacttcattcatcagagaagttgtgttttgtttacttgtattttgtttgctaaatgaaattggttatttagactcatggcatgctttttctcaaatggagatttaaaagtcatttccaatgtccttctaacttctggccaattcccagtaggctatagaataaacagttttcatataat

SEQ ID NO: 1329 - DNA, 1557 bp, Homo sapiens
aagtaaaacaaacaaaaacaaacctgaaaactgcttggcatttgagtagcttctccatgctatgtatttttttaagcaacatcatgaattttatctactccagaagtctctacaatagaaaaaaaagtgcagtgcttctaggatataaaattcacattacttttgaaagccaagaagttggtcttatccagttaggtcttcttatgaagagttttcatccagggatataactccttggtcagtgattttattgtttacatcctgagactgttctacagtttctttgactcctggcatttgccttaaggacctatagcaagctgtttctaggatcagaaactcaagagaggcatttctctgctttttcactaaaggtcagttgttttaatttgaaacctgaaatgcctctttagcaaaagcctgtggtatggggtaaagccatgtaagaagagaatagtctcagtcacatatgaagaggaaaatttgcagctgccagtgctttccttgtggccctgccaaccagctcttccaggacgaactcagtccagcatggttttgatgtaaccatccatgcttttatttttgttaagtcttttgtgactgggacagttaattttagtagctgaagaacgtctagttgtttgcttgatatttgtgaacatttactgcatggatcacaaaacaatataccctgtatttcttacacgccacttatatgcagcaaggagtaaatgtgttactagattcgggtagtgcattttgtcactgaatctgaccttgagaatgtacattaattcttatattttacataatgtatgtgttgtttaagaaatgtataaaaaacctgaaaaaaatgagtaagaactggcagaagttaaaaccctttgtatcaaaagatctttattggtagagcactggttatcttctggatactaaaaagttgtattacaaagccaaacacttgcattcacaactttaaaaaaagatccaaggaactattcataatgatgaaatttcaactacatacaaggaggagaaaataagaacccagtcataacagaggaattctataggagtctgcatcaattcattcttaaggttgcctactctctgttatgtgaattagcgtctgtgtttcacccattgtctgtgtttagtccttgttcaccactaaggcaaggaattcttaactaggcctctgtttaccaacttctctttctcctcctttccctcttattcctccttctcctcttccttcttatataatgctagtatattctcaaaattgcaaagctgtgagaatattaaaataatcatggctaatgttccaataatgaggtctttgtgcatttagttccgcatatgatggttttttttttacattaaagagtatatgtgtcttaatgcagtcagattgtaaaaaacaaaaacaaagaaactaagaatcttactaaaaatcgataatgtcagttatctgttttgtccaatattggtagtacttttttgcctcttatgattcctctagcagataaataaaagaaacttttgccatccatg

SEQ ID NO: 1330 - DNA, 781 bp, Homo sapiens
acatagatatttaccattgtctgatgtaaatttcagccatatatggattgatatggtttggatgtatccccacccaagtctcatcttgaattttaatcctcataattcccaggtgttgtggtaggtaattgaatcatgggggcagtttccctcatgctattctcatgatagtgagctttcatgagatctgatggttttataagtgcctggcatttcccctactggctctcattctcactcttgccgccctgtgaagaggtgccttccaccgtgattgttaagtttcctgaggccttcccagccatgtggaactgtgagtcgaaaattaaacctcttttataattacccagtctcgggtatttcttcatagcagtgtgagaatggattaatacctggatgcatgcatgtttgtgtaacaaacaggtcttttggcttatctagtaagtataaaacaagtgaccaaaaagaagttgactcaacaatgcttggtttcttgtggcagtgagttttttccctatgatatcatcagttgttgctgctattttggcaaattttcaggatgtacacataaagcagaccaggctggaaagcttgtggatagacatccactgacagaatcatttaagagcagtttttatttatgaaaccaatttatacaaggtggttgttaacagaatataacttagaggtaactggaatttgaatcacttgaatctgttttaaagggtaaaaaatgttatgagtgccaagaaaagcaaataaaagattagtaaatgttcac

SEQ ID NO: 1331 - DNA, 1659 bp, Homo sapiens
gcaaatgtgacatgttttcattgatttaaacagtgtgatttgtgataaactctataagaccccttccgtttttttcttcactattatttttcatcatttctccaaagcaaagcatttttattgtaaagttggtgtttcaaaaacatagctgagcttgtctaacttaccatgttggaaacacatcttaacttctaaatttacaaggcctatcatgtccttgtcatgaaaagcactaaaaaaaaaaagagtttaagtggctaaagtcatagttttgcaagagattaatgatctgccttatattagagtcagagactaatggtggcttaaatgcacgaatgtctttttttttaaaactgtcattttttactgtcttttgctccatatcaggaaatattttggtaggaattaggagaacaaaaagcacttttatcccatttatttctttaaaaaatgtaaggatttcatttatattgaaaaataatattaatcattttgctgttaacacaattctctgatgcggtgctgtacagtcatttttaaatctcttgctaacattttattggcagtatgtatttctaccattgtaaccaccattgtgctattgtatctcttcacttctgtgaaagtaatattttttataaaatacactgaaatttaacctcagtaattgagtccattttcaagtgtggtcaagaataatcttcttggcttacccctttacataagcattataaactaaaatgaaaaccaaaccagacacctgacatagagtctttattttaccccaagttttttgggccactgacattgaatgcaacaactgatttcatacaactgagttactctgttcactccactgaatgcaacccatatagtttcttgcacaaggtgcatctggattccaaatattggatttgagttgactctactcatttattatacactaaagaaattttgttcttcatagttaaatgtactagcatttaatttatattttacatacaacttgcaataatgaaattccttatgtcaggaccctgaaaataagcacatttgaaaactcttagaaaaaaaaaattctgtaatgtcctctagatttagattatgagccctgaggagttattggcaagatttgtgcaaaataaaatatggggagacttgggagttgtctttgtggtttcaaaagtgtaaataaccaattcagaaaacaaaatggaaaaacgaccccttgttaccttgattcactgtatgtggaaaaataatgtaaccaaaagggaagagctttaataatacttatgttaataactctatgaaacatataagctaactatatatcaaacatttcattgagtttggatgtattttccacatattaaaaaaatagttccctaaggcagctttatggaaactaatataggttggttttacaatttaaaaagtatattctataataaataataaaacaaattgttttaaatgtttagtttcacacatacatagtaccatgattttctttgaaagataaggatgtaatgatttagataaagcatcatgtaaagaaatcctaacatttaagtgtaattcatttcaaatgtcacaagtaaagcatcatcctcaaatatctcactgtcaaaattgtagaattaaataacccaatct

SEQ ID NO: 1332 - DNA, 1551 bp, Homo sapiens
gattaagacaaagaacatatcaaatcaacagaaaatataccttggtgccaccaacccattttgtgccacatgcaagttttgaataaggatggtatagaaaacaacgctgcatatacaggtaccatttaggaaataccgatgcctttgtgggggcagaatcacatggcaaaagctttgaaaatcataaagatataagttggtgtggctaagatggaaacagggctgattcttgattcccaattctcaactctccttttcctatttgaatttctttggtgctgtagaaaacaaaaaaagaaaaatatatattcataaaaaatatggtgctcattctcatccatccaggatgtactaaaacagtgtgtttaataaattgtaattattttgtgtacagttctatactgttatctgtgtccatttccaaaacttgcacgtgtccctgaattccatctgactctaattttatgagaattgcagaactctgatggcaataaatatatgtattatgaaaaaataaagttgtaatttctgatgactctaagtccctttctttggttaataataaaatgcctttgtatatattgatgttgaagagttcaattatttgatgtcgccaacaaaattctcagagggcaaaaatctggaagacttttggaagcacactctgatcaactcttctctgccgacagtcattttgctgaatttcagccaaaaatattatgcattttgatgctttattcaaggctatacctcaaactttttcttctcagaatccaggatttcacaggatacttgtatatatggaaaacaagcaagtttatatttttggacagggaaatgtgtgtaagaaagtatattaacaaatcaatgcctccgtcaagcaaacaatcatatgtatactttttttctacgttatctcatctccttgttttcagtgtgcttcaataatgcaggttaatattaaagatggaaattaagcaattatttatgaatttgtgcaatgttagattttcttatcaatcaagttcttgaatttgattctaagttgcatattataacagtctcgaaaattattttacttgcccaacaaatattacttttttcctttcaagataattttataaatcatttgacctacctaattgctaaatgaataacatatggtggactgttattaagagtatttgttttaagtcattcaggaaaatctaaacttttttttccactaaggtatttactttaaggtagcttgaaatagcaatacaatttaaaaattaaaaactgaattttgtatctattttaagtaatatatgtaagacttgaaaataaatgttttatttcttatataaagtgttaaattaattgataccagatttcactggaacagtttcaactgataatttatgacaaaagaacatacctgtaatattgaaattaaaaagtgaaatttgtcataaagaatttcttttatttttgaaatcgagtttgtaaatgtccttttaagaagggagatatgaatccaataaataaactcaagtcttggctacctgg

SEQ ID NO: 1333 - DNA, 2171 bp, Homo sapiens
attcaaatcccgtgttgcaccctgcaccaaaaatttcagagaagggataaatagaagcctgcacagcatcgtgaattaactgaagtgtttaaaaagctgcatttctggctgttcaacatcctccctccttagcccctcctaagtcttaatgctgagatttctaaagatgctggtactgacagattaatggcttgcctagagctgtgcaagaaacagcctgccagtctgtcattgtcagggaccagggcaaaaccaagagctgttcttcccagaagagccctgcaaacacattggttcgtgcttccctttacttcttctggtcagataccatgaatgccagtcatcagtaaatcttaatacacttttgctttattctcacatgccattcaccagattatttgatggtacaaagaagcagaagtgtaattttccttttcccagcatgacgaaaaattggagttctgccatttgagcagcttactggaaagatccagccttacttgtcttaaattgtccaacaaggtgactcattgcccggcaaacacttttaccctcagatgttactcatgatattataaaatatgaggccagtgctcaggtttgcatcataagtgagctatccctgaagggttttaattacttatttggtgtcctgattatatttgcaaacttctttataaaaggtgaaaaaagcacacaaaagagagggtgtcttcatattaaaccttcacaaccttcatgatttcataggattattttggaaatatagcacttgactttatgaaaggatctgggctaggtatattaagggtagttgccaataacctgaagaagctggcattgtttacagaaacagatcaagggctataatttatgtcattttatagcagcagtatctattaatacatgccttttcctcccatccacctcccccgcacacacacaaagatgacctgggacatgatttttttattcccacattttcttggagcacaaacaactttgttgaggattttggaaggaaagcacaactgggtcctttattcatttctgggacagaaagagggtcagtggacttttgtgggcctccagcttctctcagagtctccccctctgcagcccatcctgggagtgtattaactggagggaagatgggtcttgcagtacatttgttttgcccagccatcactcttttttgtgaggagcctaaatacattcttcctggggtccagagtccccattcaaggcagtcaagttaagacactaacttggccctttcctgatggaaatatttcctccatagcagaagttgtgttctgacaagactgagagagttacatgttgggaaaaaaaagaagcattaacttagtagaactgaaccaggagcattaagttctgaaattttgaatcatctctgaaatgaagcaggtgtagcctgccctctcatcaatccgtctgggtgccagaactcaaggttcagtggacacatccccctgttagagaccctcatgggctaggacttttcatctaggatagattcaagacctttacctcagaattatgtaaactgtgattgtgttttagaaaaattattatttgctaaaaccatttaagtctttgtatatgtgtaaatgatcacaaaaatgtattttataaaatgttctgtacaataaagttacacctcaaagtgtactcttggaatggattctttcctgtaaagtcttatctgcgactctgtctcgggaatgttttgtctgttgccgtcagccgaactttgttatggagggagcagcctcacacaagcagaaacactcctgtggatggtattgtagcatgtattgtttattttagtcaatagaccctctccttataaatggtgtttagtcttcctgttgcatttcatgggcctgggggtttcctagcagaggatattggagcccctttttgtgacattaccaattacatctttgtccacgtttaatactttgttttggaaaatttaaatgctgcagatttgtgtagagttctaataccaaagacagaagtaaatgttttccatatactttgtcttgcctgtatgcagccctcgtgtaatacggtgaattagagtggtatttcactttgtattattttgtaaatatgtcaatataataaatagtgactaaattgat

SEQ ID NO: 1334 - DNA, 1828 bp, Homo sapiens
tgttgcattttttgctttagcctgataattgaaactttcaacaatctctggagtgactttttctcctcgaattgaaacaagtctatggcaaaagaagctgcatttttttcacaaaagggaagatggtaacaatggtcacttcaaacttttgggctaaattatatgtacacagaaatgttcaaaatcatagttttaatgtgttttgaaaaggccacacaattatactttatcttttcttaataatcctgcaaatctctgccctgaatccgaaatctgaaaatgtactggcttgaacaaaatttgttttgtgtgttagagttataaatcattaatctttatttcgggtggtttacgtttatgccagttcctttatatttaaatttcttgttttatatattttgaatgtctttatagatttctttaaatttccttatagaaccattaatagaaaatcattacatttaaaatataccttacagcaaaagcatccaaataagtatagggtttatgtccttatttttctttcagctgaatacgaatgaacacagtggtggaatttctgaagggaagtgatgaaattatatttatttcagtgggcacttttccattttaccactgtaccattatttggttcctggagttatacactaattttcagtatattactgttaaattaccaacacaaggcaatttatttgaaagattccgtttatcctgccattgctttgaaaagcagcaggaaacgaaatcctttgacttgtatcagcttctgcagagcatctttgttttcctttgtcctttgtttcctaccttttgaatcagattccgttttagtcaggaagacttcttgggaccattcttagtaacctgaaatttcttttttaattgcatgaagtggattgatcatgagcaaatgatgtgcttatttctccctcactgttgaatatctttgaacttgctgttttcaatatgggcagcacaaaggtgagagatacatattaatagtagtatgtattactcttatacattagatacctatatttaaatgaaaggcccaatttgtaaacatatacattcatattctctcttgccccaagttttaggaacatgttaggatataggagacttaatttataataatgagagcatttttttattttactaaagccatttttatagtcaactatcttttcttatttgtgtgattagaacttagaaaaatatttactagttgaagttattatcagtttttaatttagttcttaaactcatttcacttctaataatttctgttataaatttccagcattttaatgaaaatctaatgatgtaataggcattttctttatttgaacctacctcttttattttctgaaccaaagagaaagatggactggtgtttgtgaaacatttttaaaaatgtagtttcatttatattagttatgtttgataaatgtctcagtatttttataatatgataagcctgggattctacttttagggttatttgtacttttgagtaatatataaagtgacaatattaaggtacatgatcagctctttctatttttactcgtaaaaattatggaaatgaataattttgctaacaactttgaaatttcaaacttctggaaaatatgaaaatattcattgttcattatgaatttaaattgtaaggtatgaatgtgatttgtctgtacatcttgtatcttttccaaaaaatgattctgtatcttttggaaaaaagccgagagttgaagatagtatatttctggtagtactgaatatttacttacagtttctatcaaaaatatatatttgtttctaa

SEQ ID NO: 1335 - DNA, 264 bp, Homo sapiens
accatgtttatttcctgaaatttcagggtctcagcgatagttgtgctcacttagaatttagttttttttgtgtaatcctaattcaagtaatgtttttaaagtttcactgcaaaagtctatgttccaagccattggacagacctgcttgagatatggccagactgcagtgagccctgagaaagatatgagggtttaaaacgggtgctttcctttgattttggacttttttgttttctcaagaataaagaagttggatgtggtaat

SEQ ID NO: 1336 - DNA, 261 bp, Homo sapiens
ttcaacgctaggctaccaaggattcaaaagaaaaaaatgcaaagaaaacttgatcttcccccaaaatgtattttacttactacacaatttaggaagatgactttctagagaaaacacagaaaccataagaaatgggtaacacaaagtacttaaaggaaaaagaaaaaagaaaggacttctgattcttaaaatcaaaagcaaccaacaagtatttattttaaaataaatctatgttcttcttaactcataataaaagaaatc

SEQ ID NO: 1337 - DNA, 2994 bp, Homo sapiens
atatccatttggggatgaagtctactttgacagctagcaaggcgacatgcaactgttgttgaatgatgacagcaattcaggaaagacttaaatatgaaagcaaattgaacacatcgggtgtttgttatcagaaaagagatgagatgagataagacttgtttattgactagccaatatgtcattaaaattaaggtttatattgtgaagcttttttgaaattttacttttttttgagagttttgctctgtcacccaggctggagtgaggtggtacaatctcggctcactgcaacctccacctcccaggttcaagagattctcctgcctcagtctcccgagtagctaggattacagatgtgcatcaccatgcctggctaatttttgtattttttagtagagatggggtttcaccatgttggtcaggctggtctcgaactcctgacctcaagtgacccgcccttgtcggcctcccaaagtgctgggattacaggcatgagccattgtgcccagcctatatagtgtgaagcttttaggaaaatcagaacagggtagacagctgttaaaaacaatgtttaaatggaataatgttgaatgtttacaggctgtaagaactattgtatacacaaaataatacacaaagtttgtactttgtgtacaaatacaaatttgtactttgtgtacaaataatacaaaaagtttgtatacacaaactttttacgttgtggtttggtatattgtcttaactgaattttcttataagaaccccatgaaacttacctgagtttttaaaatgctatccaggacatcataccttatagtatacatgaaacataatgtaatccaggttgtaatttagaactttttttttttttttagctgagcacttaatgtaattaattccaggttatgactcttaaaaaacattggccattagagaaatagttctatttgcccatccaaatcacctgaatgactttttgaaagaataggggtccacatccccagatcccatcccagctgtgcacagtctgaagcaagcagagtgaaacaagttggcaacttgttccaagcgtgggcctttgcagtctgtgatccagtgttactccaggtcccagtctgtcccatacttgtcttttgctacagttagttagttactttgttatcatccccttgtaaactgccttcaatatctgggataaggaagacaaagcttaatgacaactaaggttctagctgacatctttctttcatatttaatttttgtgagttttcatctgttttctgtttgtttatgtgtcctaggttcttgacctaaccacatgggttttgttttttgtttttatattagaacttagaaaagtttgttttacagcagtattatggaacagaagagaccattttaaataatttttttaaacagcccaaaacacacaaaagatacttgttttctagagacagggtcttgctctgtcacccaggctggagtgcagtggcacgatcatagctcagtgcagcctccacctcctgggctcaagtggtcctcctgcctcagcctcttaagcagttgggactacaggtgtgtgccagcatgcttgctgttttttttttttttgagacagagtcttgctctgtcactcaggctggagtccagtggcttggtctcagctcactgcaatctctgcctcccaggggttcaagtgattctcctgcctcagcctcccaagtagctgaaactacaggcgcatgccaccatgcccagctaatttttgtatttttagtagagacagggtttcactatgttggccaggctggtctcaaactcccgacctcaagtgatccgcccgcttcggcctcccaaagtgctgggattacaggtgtgagccactgcgcctggctgctgatttatttttcatagacacgggggtctatgttgcccaggttggtcttgaactcctagcctcaagcgatcctcctgcctcagcctcccaatgtgctgggattacaggaatgagccaccatgcccagcccaagaagtagagtttcttttatactgactttggcctaaaaaaacagattttcatggaggaaaaaaaaacctagatttttagtaagactattttatatacttttttacattgatcaagtacattatttttaccaaacaacattgtttcccactacatccatggttatgtataaaaaaacgccattgtcaattaagatgttaaaaaattatttccataagagtattaaattctaatctatgattcacttaacttcctactttataaacactaggtaaagtaatctcacaagctgccaaagaacacatcccaagcagtaatcacagacgatgaagcaccttacaggacccctccaccctcaaacgcgcatgtccagagaagtattaatgccttaatagactactgaaggttaactatttacatcattctaaaaatattttaagctgtattacagtgctataaattctccttttaaggaaaaaagtaatagattgtttccttaccgtgtttgaaaggaaaaaaaataaatccatagtaactaatggtctgccgattttttccctgaatttttaaactccaacaaagcattattttgcaaaaagtcctttagcccaaagtcagtgtctctgttttgatctctttgtaaaagaactctctgttcatccattctctttccctgggaccgtaaaataaggctgaaaaagtcttcatctggtactgtcggaccctttgtggtagcaggtggtggagcacatctttgatcatctaatctggatccctagaagtttatgagagagattaaaagacatactgtgggaaagaaagcaccaagctatgttaaatctctcagtcacaacaagaaaacgcagttgtaaacttttatttggggcttctcagaaattaatctttgtttttatattgttctctttagttcccagcctgatttctgaaagaaataatctttaaacctg

SEQ ID NO: 1338 - DNA, 1216 bp, Homo sapiens
agcacaccgcatgtcagtctatgcagcaaaagcacagagacttaagactactgagttgtgaaaattacaaatctgaagaacatagtgtccaggaaagtggtttagcacgaagaggccccttattaccatgtatcccactgataggaggtgttgggtggtgttattccgcagtgctttcagtcttccatgtgagctcgtgctgctgtgacctgctatatgtagtctcgttgccaaagtctgcagaagagctcttcagttgttggtgtgcactccaagtcaggatggacaatgtgtttacggtttagtattcaatgcattccttggtctttgcctaaataacagttttatatgcacattgaaatggaattatacttcaactatattattaaatgtaatgcaaccaagttcctcccagattaaacttcccaggtgttcagaattacttttgctcttctcacgatcccatattgtattatcacttgtcttctagaggtcagaattccataatatatgtcactcaaaagttacatggttgctttcacttaaggatcattgtggagtttaaagatgaatgaaaaactgcttcttagtttactacatggtataggcccttttttcttaaacccagggatatgattattttgtcatataattttgtttcaggctaaaaggtaaatgtgtttgcttcagaaacttgttaacttcagttttttgaatgcaacaggatacctcccttccaaactgaactgtagaagcagagcagcagcagttatgtgatgcaacacttgatggtacagtaaatttactggcatttttctccttaaaaattaaaatccttgacatagaccatagcatggcttgaaatgctatgtctgcatgataatttaaaatggaagatttaaactttgcactccaaaagcttatttggatttttttcttgcactgttttgtgtaatgcagaataatgattttatttctacagctttgtagattctaacatttatgtatctttattttcatattgtacagtaattttactttaaattatttaaataggctattttatttatttcaaatgcagttgtattagttctcattattgaactgtctgtgcactgtatgtagcaagcatttttcatctgttgtatacaagtggaaagggtattagaagtgtaactgtgctattatttcaataaagacctcttgacatttaaaa

SEQ ID NO: 1339 - DNA, 147 bp, Homo sapiens
cactttttgtagtttccgaaaattaccatctggggaaaccatatataataattgtatattttctaaagtaagattctgatatctagccatgtaaatgaaagatggagaaacacaaagttttcagcctttatttttatgcctttgatt

SEQ ID NO: 1340 - DNA, 596 bp, Homo sapiens
agagatcaggacagcaagcaagacttcagtagcaaaccactacagtcagtacctggactcgcctctacccagcagaccctgactccagcagattctggcccagggacaggaggaagagatgccaccagggctggtctcccaggagtagagaccatgggaaatggggtggattaggattgagctggagaagacttaaactctctgggttgaaagaagattaggggaaaagaggtcaccttccagcagtgaaatgaacaaatagaagatgagaagtacaggcaagtggtttgtctttatccacccccactgttgtggtcagccccagagaattttatcttcttccttggcattggttcactggacatttccacgtgagcggcctccgtagctaacctccctgccctctgaggagccatcttcctgaatcgcattctctactggactctggcctgcttggagaggtggcagcaggcacctggtcttcagaaattgtttcctgtgaattctgtgactcctaataggccagtttgtgataagcttactctatgagtcttcatttttctaaaataaagtgaatgtatttttatattctctgt

SEQ ID NO: 1341 - DNA, 224 bp, Homo sapiens
ccagtgcccagcaatgaagtgaattcatggcacaggagccagggaccgtgacaacggtgccctcagcagcctggtgtcctctggccatttgctgtcatggctacaaagtgctccctcttttcagtgcctccaggaagcccgccagtggtgagactgtgtcctcaaggagcttcggcaccatgtctggtttggattcatctaaataaatatgtggttccccagtg

SEQ ID NO: 1342 - DNA, 4473 bp, Homo sapiens
ctcttcagaggagctggacccagcatggatggtggaaccacagtacctcttacactccctgtggctccaacttcaggaaataaatttcccattgcgagggacccagctctgtttctgctgcttccatcaaagccaaaaggacctacactaaagaaatgcagggtgggggtggggaaccctgagcacttttttacaattggctctgagaaaaagggagacattttaaattctttaacttcttatttctcgtcctgtctctttgcaaagtatgggcttttttgtttttgttttttaagggaaacgaaatggaattcgaagggaccttttcactaaccccacttctgtgtgttctgcatggcgcctgccccagggcatctgccaactccagtatcagctctcacagtgtacttggtaccatccctgggctctgctggcgagacgaaacagctgtagagatgaaaacaggctgcagaggctggcacagcctggccggcttttctccatctggggacagtcctactccaagaacactgcacaccagctcctcacacagatcccacttactctttttttttttttcagagaccacagaccacagtgatttttcttttcccttgtttaattaggcaatacccttgttaattgccctttggcaactaacttaaccatgtgcttcccacacagtacatcaggaaaacttacagggcaatatttttaacttggggcaggaagaagggagcagcagagaattgactagatatagcacctattaaaagagaactcttgcttcttctgagatttttcaagctgtgctttgtgtgtgtgccagtagacttacgcaaggacagggtacaaacttagctggaagtctgcccaggctgaatgatctcttccctagagttgattgtcgggtacacagtgtgaacccccgaagacggaacctcacagtcttccatgttcccttcttaactgtcgtgtggctcgttgctaaatcatgacaatggctgcctatctgctgcttcttaggttgctgttgtacatggaaccaggactagagattttttcagatttatagacttaaaaaattagaattttattaccaggctttccttctcaccccttttttctgactttgccaagtaatttgttgacacgaaaattttggaggaaccaattgaaaacacacttccagtctagatgatgctttgtgtgatacattaagttcttattttggattaaaagaagttttccatttgatacctctctaaattaaataaattatagaatgtagttgggtggattttggggtggccatatagtaatggaaagctgcaataattagttttaatacagcttgaatatttgctatatagaaatatagtatggaaagtttttggtcttaatgtagctactgtgcgggtcacagtttctcccaatgattatgactgggacattctttggtagataccatttgctactagtttattttgtggctagaaagtcagttttgtgtgtttttttttttttttatttgaagtgccaaattaactttagtcagaatgtgagcagatggctaagttctctcctccccagaatggattaacagctgcgtggaaagtgggggagagagtggatggagacttttagagatgttaaaactgcagtagaatgaaatgagtcagggagcttcagttagaaaataaagttgaggcagtttttgtgaagataatatggttagggctggagtgcactagtctttttgcttattcattttgcatggttttaaaattaaaaataattccgaagatacaccagctcacaaatgaaaacgtcagcctctgccccaccctccctcctgcccaaagtgaatttggtactcagaaaagaactgtttataccactcacctttctcccagcatgtactcactgtgggcagatgcaccaatacatggtaatcctcttactcattttaagacgtaggaaactcaatattcttctctaaccatatacgatagggctcttcgcttttaatgatatctgggatttctgtggaacttggcaaattttcagagcaccttcactcacataatgtcatttgaacctcacaatgttcttgggatggagtcagttgttcagggtccccgtgtgtgtgataagcagtgctggctggctgtcttcagaactcttggaaatctttacacatgcgagtgctaaccactttgagcaaggctgccttcttgtagatgacttgctgttctttatgacagggatcagtggcatttgtttcctagcagtatttagcacctttttgccaccttggtgaacagaaaattgtattttcctgtctttcatggctgaaaacaaaagtaatgggaattttaaatacgtttgcagaaactgcccctcccctcattgagggtcactgctcaagagtgcaggagtggactctccactgatgggtctccctccccatcctggtttccaccccgggctggctagctctgttggtttgaagactgacagccagcctggctcattctcattattggctagttagctttctttatcaacctgctcactcacaaatgtgtgccctcagccagagagtaagaaagcccaaatctgttacagcttctaaaaaaatagatttctaatttgtcctactcatgttaggagcattatctttgaaggtaaaacatagtgtatcattgtgtaaactcccaggcttgatgtagcagaagagatcatttctggaggcttcagcaatggaatttagcattataagagagattggacaaaccagtccaaagtggtccgagttcttaaatccaggtagggaactcactcttctttcttctctggacctaattgggcattgggctttagtgagaccacagaccaggcccgtctctcctgtaggcttttaattcaatggcaactctatttcaaagaataaaagcctttggagagttgcggcagttctgggggcgggctcaggagagtccatagatcagccgtaactggaacgtagaatctacgtctgcctctgaatggacttcccacctcctctctcttgctctgatgcttgcctctgggcctctccatgcccaaggtggtctttcatccttgacaggctggtaatgtgctggccacctccagctcctgcatcgagtctgtaaaccagagctggttctcatggccttcgtcacgataccaggatacggaggggagcccagggccatccatacccaccccagggtaacggggctggcctggcattagtcattatttagtttccaggccaaccatccagatagagattccctctttcctttgagcagtgctctcaagagctccgtgcctgtccacaatgacctagagtgcatcctgctcattgtcagtgtagcccctcgcccctatattcatccaggatacttggaagtgctaaaataggaagggattcggctttcaactttgctaccatcttccctgaagcaggaaaatgaacatggacttaaatgttctttgaaaaaaccaaagttttaagatttgctgtgtgatgaagtgacagggagggccggagtcagcaggtgccagactttctgttctgtctgccatgggtttgtccagctcaggtagctctaggagcaccatcctgccctagcagagcccaggccttgccctcatgaagcatcattgaaatagcaggagcatgttgatttcttggttaggttgcattataataacaagagtcagaacattaattcgaaacaacttgcagtatgcatttcttcacaccagtacattcttaagtgtacttgtttataaggaataacataaactaatctgtacctttatatatatgtgtgtgtacatatatacatatataaactgtatagtgtacatggtaatgatttattgctatgccccagatccttaatgtagttctcatcctccgcatgccctcagccacaagcgggtgactgactgttccctgatgatttggcccacctcctgtgtttggacctctagggaggagggttttggtcatactctccttatcctcgtgcacagaaatgctcagggtccccatgtgcctgttgttcagccctctctcttgttccctttctgagcatgtggtccttccccaggctgtgggacagctgccttcccacgaaagtgtaaagcagtattaagatcattactgcatgtgccctaaaaacccaagttttctattcccttaggacagaaaattgcatgtgaggtgggataatcgagtttcagtgacccacgtcagttacacattaaagccagaccccatgataaaattccacaaaatggaaataaaactcaaatttctttagcattgtgtaaataaatctgaatgtgtttaactttgtactggtaattttctgtatatttggaatatttgggttaaaaataaaacagactggactttgttacctgacctac

SEQ ID NO: 1343 - DNA, 157 bp, Homo sapiens
ggaatcctgatcctcagaacttctctgggacaatttcagttctaataatgtccttaaattttatttccagctcctgttccttggaaaatctccattgtatgtgcattttttaaatgatgtctgtacataaaggcagttctgaaataaagaaaatttt

SEQ ID NO: 1344 - DNA, 607 bp, Homo sapiens
gcaggatgggttggtggggagattctgccccaggagaggtaatgcacccctgaaggatatgaggggatggaagagagggctggctgcccaagggaatggattcctcctgacctcaagggaattggtcccaggtacaacagagagcaagaccccaaacagggcgtggctgccacgattttcaaatgggggtatattaatcctcaggcaaatgctacacccgtacccaaagccctgccaattctcagtgtggtagaggaagagaagcatgtctgagttggatgggaatgaggaaggagtgaggggaagaacagattccctaaactttcatgaggtcatccctagctccttaagagaaaaacatttagaaaaaaaaattttttctatctctgcccacccacacctgtgatgttgtgtgtgttgggggagcttccacaggagccacactggggaaaagctgtagtatcttctttgtttagcaagtcaaacttcacagctggggaagttgaaaacctttggaaaatgagtcaggaaaaggctgagacctcaatcggtaacaattccccaaagctgttgtaagactttgcattaaagccttcctttttcctga

SEQ ID NO: 1345 - DNA, 86 bp, Homo sapiens
tcctcaccattcctcaggtataagttctataaacaggcttggaatctgggtaattaaaaacagaaaattatagtcaatataccatg

SEQ ID NO: 1346 - DNA, 3139 bp, Homo sapiens
gcaggaggcagacttgcagagcttgttttgtttcatcctgtccgtaaggggtcagcgctcttgctttgctcttttcaatgaatagcacttatgttactggtgtccagctgagtttctcttgggtataaaggctaaaagggaaaaaggatatgtggagaatcatcaagatatgaattgaatcgctgcgatactggcatttccctactccccaactgagttcaagggctgtaggttcatgcccaagccctgagagtgggtactagaaaaaacgagattgcacagttggagagagcaggtgtgttaaatgggactggagtccctgtgaagactgggtgaggataacacaagtaaaactgtggtactgatggacttaaccggagttcggaaaccgtcctgtgtacacatgggagtttagtgtgataaaggcagtatttcagactggtgggctagccaatagagttgggacaattgcttactcattaaaaataatagagccccacttgacactattcactaaaattaatctggaatttaaggcccaacattaaacacaaagctgttgaaatattgatgaaaatgtaagaatttttgtgaccacggggtaggagaagtttctttaaagacgtaaaaagaaaaaaaccataggctgctctgcctgtggagtagccattctttattcttttactttttaaaataataacaatcacaaaggaaagatttgccaattgaataggatcaaattctacaacttttcctaaggcacccacaaataaatgacaagtgagacaaaaagcactagtataaagattatataaagacctataaatcattaagacaactgagtttttaaaaatggacaaaatccatgaacaatttataaaatagaaatatagccaaaaatgtctaaaagatgtttatgatgtaaggaattatcaattacaacagtgagaaaccatatttccttctatccgatgagtaaaaagtttctaaagtgttggcaaggcttaggaaagtgatatgcatttcctgctggtcaagttgtaaattagtatagctactttggaggacaattgtaaaatttaaatcatatcctatgacccagcaattccatgctataaaaactcatccatggccgggcttggtggctcacgcctgtaatcccagcactttgggaggctgaggtgggcagatcacgaggtcaagagatcgagaccatcctggccaacatgatgaaaccccgtttctactaaaaatacaaaaattagctgggcatggtggcatgtgcctatagtcccagctactcaggaggctgaggcaggagaattgcttgaacctgggaggcagaggttgcagtgagccgagatcacgccactgcactccagcctggctacagggcgagactctgtctcaaaaaaaaaaaaaaaaaaaaaaaaaaaacattcaaagagacatatactaagatgttcactgtggcattgtctgtaatgacaaataagtggaaaccgtgtaaatacctgtcaatactatggagtaccatgtggcaacggaagaatgagactgaactgtgtgaactaacatgcaaagatccccaaaacaggccaggtgtggttgctcacagctgtaataacaacaccttcagaggctgaggtgagaggatcagttgaggccaggagtttaagaccagcctgggcaacatagtgagacccctgtctcccaaaaattttttttaattagctgtgcgcaattgctcatgcatagtcccagctacccaggaggctgaggtgggaggatcacttgagcccaggaatttgaagctgcagtgagctgtgttcttgccactgcactccaatctgggtgactgagcaagaccctgtctcttaaaaaaataaaaaagatctccaagcatagagaagagtctggagggaaacaccaaactcataacagtcttactgcaggcaagtgggataaaggcccagactccatggtggaagttaaagggcatttccaagttaaggctaagacttgcttttctaactaagagaatgtgctcatgcattgcttgtgtagtagaaactagtttttagaaaagaaagcaaacttaagaaacactgactcctgtggagatgacttggcaccactctcctttcacagagcagagtctgaatagtcttcagagataggcctgtgggccagattgccatcccctatggaccagaagccaaggatctctctagtgatggtcagagggcccaaatggcagggatacccagtgatgtcaggaggaatagtacagacagaaggtgctaagcagacaattcaactgccatgttttgccaccccctgtgagcagggattaggtgttcaggccagtatcttgggcatgggggagcctttggccagaagaggtataaagctcagaagtttttcagtctgataactattgatataatttccatagtgtgagggagcggtatgctctacccttgtgtatttaaggcaggacagagaaattgaggatgcccctggggctagatcgatgatatgaccagaaatcaaaaagggaatgcattatttattgctgtgtaacactgttaagagaggaggtagttaagggatggataggcacatagagagggaaggtctcaggagaagggatagaaaggaactatgttcacaagaacaacggcaagacagtgcctatactgcctctacagttaataggaaaaacggaagaagttacccttaagctaggatgttgctcagaagtgaccatcccaactttggtgcgggcacaataaatcagcctaaatgtccctaatttaacccagctcattataatgtcattaaacatgacattagcattgtggttttagcacccccatgggttttgcttaggcactcatgggtaataaccaagatggagtccctttggcaaaacttaggcatgcacagctgtagtaccccaagaagaaaatgttacttctctcatctgggcaaaacccacagaagacttcccagcttctgccacataaaagacacagaacacagacgccttactggcaacctgctttcaagacccctgtctttgctgagagctttcctttttcccaataaattctactctgccctactcactctc

SEQ ID NO: 1347 - DNA, 311 bp, Homo sapiens
gcaccagcttagacacctccaagaaccaggccccgctgatgcaagatggcagatctgatacccattagagccccgagaattcctcttctggatcccagtttgcagcaaaccccacaccccagctcacacagcaaaaacaatggacaggcccagaggctgaagcaaacagtgtcccttctggctgtgttggagcctccccagtaaccacctatttattttacctctttcccaaacctggagcatttatgcctaggcttgtcaagaatctgttcagtccctctccttctcaataaaagcatcttcaagcttgt

SEQ ID NO: 1348 - DNA, 357 bp, Homo sapiens
tcggttgcatggacctgcagaatgagctgcccacctctttttccattcccagtcgctcccagcccacctctgcctccaagccccagatggttctggaggctgcgagagcagctggcactgtcagcccccagcagggaacacgttacagggtcttttctcttagaacaaggtggggctgcctaggagaaggggcttcgaagcagccaggactcttcctaccacaaactgagtcccctcacctgaactctgggctggaggcagggagacactgccctgcttcctccagactttgtccaagtccattgtcatctctccagctaagacagcttacttggctcatcgttcagggaacccagg

SEQ ID NO: 1349 - DNA, 883 bp, Homo sapiens
aagaaagaagactgcaatcaagtgagagctaaacaaaagaaaacctaaactaatgtcattggaaacaaaagcttgaaagaaacacatcgcatctacatttgtaacatgagaaggaaaacaatttttttttttttttttttgagacggagtctcgctctttcgcccaggctggagtgcagtggcgcaatctcggctcactgtaatctccgcctcctgggttcaagggattctcctgcctcagcctcccaagtagctgggactacaggcacacgccaccacacccagctaattttttgtatttttagtagaggcggggtttcaccatgttagccaggatggtctccatctcctgacctcgtgatccgcccgccttgtcctccaaagtgctgggattacaggcatgagccactgggcgcggccagataagtttttaaggttccttcttgctttagcattctgagaaatgtctaattggtagtaagacaagagtaatagcaacctgtattgttagtatttaaccaaataggctaaaattttaatcaggtaccttatgtattaaatagaaatcggaatgtaccataataaatccaaactctcaattacgccatggtaattcagtcactaaaatatgtaaagatagaaaattttttaatttaaagaagtgtgaaacatagccattgattgatcagaattctggaatctgaatattaaaaccttacttagtgactggaatggtatatgctccctccaaaagtttatctttgtttattgattaaaggtaatccttactttctttgtattacttaggttcttaattaaaggtaatccttactttctttgtattacttaggttcttaaatttctatgataaacatgtattgct

SEQ ID NO: 1350 - DNA, 267 bp, Homo sapiens
tgctcatatctgttcttcagcagcctgtcataggaactggatcctacctatgttaattaccttatagaactactaaagttccagtagttaggccattcatttaatgtgcattaggcacttttctgtttatttaagagtcaattgctttctaatgctctatggaccgactatcaagatattagtaagaaaggatcatgttttgaagcagcaggtccaggtcactttgtatatagaattttgctgtattcaataaatctgtttggagga

SEQ ID NO: 1351 - DNA, 35 bp, Homo sapiens
tcagtccagggcttcttgggtccatcctgtctctc

SEQ ID NO: 1352 - DNA, 128 bp, Homo sapiens
ttgaaacctattaccgtactcacagctcaatggaactaatgcagatgttgcataatagcctgcattgtagtcagtgtgttctacagtgtgtatctggttctgcatggaaagcaatagttgtgcaagtg

SEQ ID NO: 1353 - DNA, 1394 bp, Homo sapiens
tatgtgatacaagtgacatgctgtgctcagtattgtgtggaacgtgcccccttggtctgcctatgcccttgttttatacatttccagaccattcatcaaggaaaggacctgaagaagtggaaagcacacttcattctccctctccctgctgcttcatactgaaacaggtgcctgttttgcaagtgggctgcattctctcagctctccttttccctcttaccctctctctcttaacattgtaaacaacagacttacgttaaacttcatttctagtacacgccctatttaaaaaagagcagtacatcctgggaggaaatgaaactaaagaacagttagagtaactgtttaacctcagaattttaaaggcagttgtttctttcctaagcacatcaattcgtagtaaatgatgcttcggtttgatggacctttcaacgttatttattgaatatgtatttcggttgcctaccctgtagatatgtggatgaagagtctaactagaataatgacttgtaaacccaccatgagttatttggtttttgacttaaattcctatttgaatcccctttcccggaattttaagtgtctctacaactttgaataaagggaaatgcccaagatgtcctgatctgactaattagtttaattctttcgggcttgctaagcatttctaaagcattagactaacagattcctgtgaagttctgtgcatatgtcccagccccaacaactatcaaagtctagaaacagatgttttcagtgttgctgagagaaacaaaaaatttcctaatgcatctgagagataagcttcggcagtatcacaagaagattaaagtggcagacaccccttccagcggaagttactaattcggacctgactgatgcagtttccatagcaacccatgtttcctgggaaacccgaaaaaggttgtcatggcatctcttgctctctagccccacctcccagcccctgccgtttccacagtaacctttccagatggttcctacttaaatgatttcataaggaaaaccactgtttgaataagccgcacaaaaaataaagttaagtctgagactctaaggaggtgaaatgaatcccaaatgcattttttaactatgaaaatcattatgtcattccataatgactgaatcaaggaggaaaatatggtgtttggaatgttagatattaaccacaataaggcatgatctggattaaatgccatttattaggcaataatttttaaagatgcttctctacagttttctttctccaagaactttcaagccaacaaatgaaatttaaaagcaaatgtaaaagtgttctgtacataagcaaatgagagattcgatcagtgtgcctgaaaccttactacaagggaccttcaggctttctcttt

SEQ ID NO: 1354 - DNA, 768 bp, Homo sapiens
aatctcctgtaaagacttcagtgaaatagctgttttttaaaatatacttcagcattaataagttaattgtaggtgtgttctgaaagtgtctttgaatatgaagcttgttttttcatcagtcgattgtacaactttaaggaatacagaaaaggttgattcacatatgacttgtgaataatttacatggggtatctatacctttgtcttagatacctttttttggaaggataaattttatatttttctattattttaactagaattctccaagtttgaatatttgggcagggtttttgttattgtttgtatctttacctaaattgctcaggcattattccagcagtagatagtgactgtgtattactgaaattttacaattcaagagaggaaatcagctccaaacttagcttttccagtggatttgtatatgtacttgctttatctctttacccttaaaatgatgataccttgtattcaccattgttttttttaatgtcgtgaaataatatgtattatggcaacattatttaaacattcaaacatttctcaagaatgagcaacatttgtaactttacaatgtaattttatataatccaaaggtattttagaattcaggccatttgatgttttgtttgcttatagtgatgtgttcccaggcaaatgctgctttttttttttttgggactatgtacatacgttactgagattgtgtaaaaagtagatcctgaacagttatcacatttaatatttcttaaactgtaaaagtgt

SEQ ID NO: 1355 - DNA, 824 bp, Homo sapiens
tgaaaggataaaatatttctgtaatgattatgattctcagggattggggaaaggttcacagaagttgcttattcttctctgaaattttcaaccacttaatcaaggctgacagtaacactgatgaatgctgataatcaggaaacatgaaagaagccatttgatagattattctaaaggatatcatcaagaagactattaaaaacacctatgcctatacttttttatctcagaaaataaagtcaaaagactatgatatcatagttttttataccttatttaagagaaacaacctgacgtgcaccaatcagtctgcacatcccaacccttcacattttataaattattgtagatcatgttttgttaggagcacttttatgagagacattttccatgactaaataatcagcattagtcagtaaatcctttagaactgggttttgaaatgggagttttatcatattaaatcatttcttgtagtcttacattttttgttgttgttctggaatctacctgtaaaggaaagtagacctggattcatgtgggctcttccatggcttaagtgttgcccaagagattttgtaggtaacgatttttttttttctggccacaatgccagatactaagctaattggtctatcatacacatgcttgcagtagtttcatgaagtttagtctctggcgtgaaattttaatcaccaatgaaggagagaggcacctgtaggtaaatttactttagtcatattttatataaaacaagggttagtattcatgtaacattgagaagtttgggaataacagcagatatgattaataaaagtcataac

SEQ ID NO: 1356 - DNA, 426 bp, Homo sapiens
gagctgtggtgaataagaatgactagagctacacaccatttctggacttcagcccctgccagtgtggcaggatcagcaaaactgtcagctcccaaaatccatatcctcactctgagtcttggtatccaggtattgcttcaaactggtgtctgagatttggatccctggtattgatttctcaggactttggagggctctgacaccatgctcacagaactgggctcagagctccattttttgcagaggtgacacaggtaggaaacagtagtacatgtgttgtagacacttggttagaagctgctgcaactgccctctcccatcattataacatcttcaacacagaacacactttgtggtcgaaaggctcagcctctctacatgaagtctgtggacatgtaaggacgagagtaaagaggaaaatcttat

SEQ ID NO: 1357 - DNA, 148 bp, Homo sapiens
gcccctctggtgtcagaaaccagggaaaacccttgtcttttcttctaagtgacatgttggaagccttctcatcccggggcaaagcaggcatcaaaaccagaataggccaatctcttttccattaaataaactgtaaacacaagaaccc

SEQ ID NO: 1358 - DNA, 1339 bp, Homo sapiens
attggatttaagacaaaaagcaagtcccccatgagtgtccacttctttgccctgccctctcagcttgtgagacaacacaggagccttctatagtatgttgatatgctagatctgtgccgttaataggcatcgtctctcagcctgagggaggctggattctgggttcctgtagtcacagggaggaaaagctttcttaaaaatggacatgtatgtgcgtgtgagtgtgtgtgtagatttatagtttttggtagtggcaggaataaaaaaaatccatcctacatcttccctaagcactgcctctctctcaccccccaaaacaagttgacgaaagggttttatgtagctgtctatgaggaattggccgtgtctgggtgggttatgggatgtgggcatccctgggttcttggaagcagctcttatgctactcatagagatgggattgactttatttttttatagtgcttaattcaccattatgagaaatgcttccagtcacaaaaatgcagcccagctcactctgaggaagaagcaggacttggtacggttttacacaactccttaccattaaactgaatcagaaatccattttctggctgaataaaaagtttggcttgcctgtgtaatgcccactcccttccccctggctccctagtgatgggacatatatgagagagaagtgtttttctatcatagacaccataggggaaagtttggggatgaaggagagcttaaaggtgtttcaattaagttagaaaactgacacaggctgttgagaattctttgccacttttcccaccccaaaacagcatggggcctgacatcttctgccctggtcccctttctcttgatgtggaaagtctgaatgcagtatttatagacttctaaggttttaaaatccagtatcaagaagaaaatcagaaatactggttggtgaaataaagagtttaggcattgttggcctgtcttttttgaagcatgtgtgttatgtgtagttagatatatttcacttatgtgagtcatcatggtgttggtcttgtagcccattatttttcctgtgcttccccagcttcccaaagtagctagttagaacttaaggtaaatatttattcttgggttggtggagtggatattgccagttaggagtcatggatcaattactgattatattgaaagtaaatataatcaattatgtacttttgagctttgcaggttcaatttaggtaaaaatcacattatgaaactgggaaagtctgaaggaatatgggcaaaatatttctcagtaaagcttccatgcttcacccttgacatgattacccttgagtaaaacatgggaatttgt

SEQ ID NO: 1359 - DNA, 521 bp, Homo sapiens
ttatccatcagagatgactctgtctcattgaccttcagattccccatcaacaaacacttgagggcctgtatgcctgggccaagggatttttacatccttgattacttccactgaggtgggagcatctccagtgctccccaattatatctcccccactccactactctcttcctccacttcatttttcccttgtcctttctctctaattcagtgttttggaggcctgacttggggacaacgtattattgatattattgtctgttttccttcttcccaatagaagaataagtcatggagcctgaagggtgcctagttgacttactgacaaaaggctccagttgggctgaacatgtgtgtggtggtgactcatttccataccattgtggaattgagcagagaacctgctctcggaggatgcctaggagatgttgggaacagaaaaaataaactgagtttaagggggacttaaactgctgaattcacctgtggatgtttttgagtaaataaaagctaatagctaa

SEQ ID NO: 1360 - DNA, 339 bp, Homo sapiens
ctgaagatttttttaatttagttcataaagtgatgctacaacagaataatcaccatgacaactggcccacacctcagagactgattctgatctcccaggaattctgaaggaccctctatccttgacaacaatcatttgcagccaggtagcaacggcggtagtcagaggagctatgatagaccacacccaagcaaggctgccctcaaataacatctcaagatcttagttcttatgcattccatcagtcagaagtgaagaagaggtggagaatctggattggggaccaggaaatcacttgtattttgttagccaataaattcctagccagtgttgaatgaa

SEQ ID NO: 1361 - DNA, 1220 bp, Homo sapiens
atcctagagacagaaagttgactgagcctgaaagggccaggtcccagtgctgggcccctggggaggagggagggtgggcggtatggctctcgaaagcccaactccaagttcctttcccccagaaagcggggagaagccagagttcttggctcaggactgaagggaaggtggttgggagaggctgtcttgggggctagctggtggaggaggtaagagtagctggagagtgagctgtgcgtgtgtgtgtgtgtgtgtgcatgtgtgtgtctgtctggcatgcatgcactcactttggggctggaggtgacagtaggtgagggcagaggaggagatcagaaaatccctctgacatctccactgcccccaaagacctccgttgaacattctgtatggaaaagagccctggagcatcaggttccccagataggcccccaaataaagacctgtctatggctctcccaaccttctgtcagcttctttggcaagacattgctccaggcacagggactgaaccccaggcctcctgggactggagcagcagtgaggcaaaacccgacctgctagccctttctgccttggaggtttcagtccatacctggactctgagaaaatgagctgaataaggagtacagtgtgtaaggagcagccagggaagccctagacactccccgcgtctcccccatgcacaggggaaggatgttgacatagcactgggctgtttgaatgccttttcatctccatggtctcatttgaaagtgagcgaggcaggcaggcatgatcccattttccagataaggaaacaagcctagatatgctacatgtccaggaacaactgcagccaggaggcagaacagcctaggtctaactgcagagtagaagctggaccctggagttaccaacactcctccccaacagttcttagcaccccgcaggctgggcgctgtggctcacgcctgtaatcccagcactttgggagggcaaggcaggcggattacctggggtcaggagttcatgaccagcctggccaacatggtgaaaccccgtctctactaaaaaaatacgtaaaaattagccaggcgtggtggcacacgcctgtaaacccagctacttgggaggctgaggcaggagaattgcttgagcccgggagagggaggttgcagtgaggcgagatcatgccactgcactccagcctggctgacagagcaagactcccctgtctc

SEQ ID NO: 1362 - DNA, 245 bp, Homo sapiens
aaccactggacagagggccagagtgggtagtggggaatgaaggggactggcatgttggtgggtggtcactgagaccactccctcccccctttccccactatttctgcctgccccattgtacccctagcactgagacttgtgcctggaaggaaaaagaggtagcaaaggggcacctgaggttcacgctgctagcgtggacatagccctgtgatactgcatctcactggggccagaggaagggaggg

SEQ ID NO: 1363 - DNA, 2494 bp, Homo sapiens
gccacgcactgttcatgtgaccttggacaaatcaccaaatttttctgaacagcatctgtaaagtgacagtaacccctacctcacagggttgttgtgaggattacatatatgctaaagcattttgcatatgaaaaagcttcttatgaatattgttattcctaggcaaaccccccttggaagctgtcaaaaaggacaactgtagatgaaattgtcttccttttttcttcattcagcttagcctttctgtttggccagggctacttacaggggctgttggggttgaagtcaagtcaccgcattttggctcctttggtcaaagagaaagaactctaatgtccagctgctccatcgatatactcatagaatggaagtgagcaaaggaaaattttaagccaggatagttaaccgttagggggccagtgggagaatgcttgccttgcatttgcacatccagaatgactaaaacatcttaagtaaatgaggaatagccaccgagatgctcagagataatataagccatgagtgggaagtgggaaaatgagtttgtcaacgccctctcttttctatccctttacctttgaggtcagggacagggcatattactgacaccccactggctattgccctatacctgccaatcacccaaagaaaataatagcttctgagaaagctcaattcactgtagcaactgtgatatatttaccctaataaagccaccacttggtcttttccagtgcttctctcttatggagatcatccctggaatccaaagctctccagttttctaacccagttaagagttaaaaacaaccacaggtcatgagcagtaggcttggcagttataccccatgcagtcataggagactgctccatcattctcagcacatagggtgcacatctcactatctctggcatgaaccagccttgcgaacttatacagtctcagccactctgctttgatggtaattcttcaccactgatctctcctcaccatgcccttcctgcatccttcccccaaccacccaccagaggagttctggtccccaaaccaaagagttgcctgcaggttggtaatgtgactttgtagatattccttgattaaagccagaccctattggtatcctttttgaagtactggatcgaaatctaattgcttttttttttaattgttggggagaggaggatgagcagaactcctatgcagcctgagagaagttctctatgtgtctgtatatgtacacctctgtgtgtgtgtgtgtaacctcatggttgtgctcaggctgacagggagggcaaagagtgaaaaggaagcatctctttcttgttatccaacattgcttcaaagatgcccaacccccgtagtagcaggcagttcccaagtggagggtcggggcagaggcctccaccaaggccatcaataaccaggtgtgagctacaggtctctgtgtaatgtgaagctctcccgtatttcatttctgcacccagggggcggctctgcaggattgcttacggagaactctgtgtctggcacctctctccacaaggcccaggcgcccagggtcccaccgacctgcccaggaatgcatcacattgttctctggtgctgtaatttggctgcaggagctaggctgaatgcctcccagggatgagaaacatactctccctggcgtcctcccttcgccccagctagcttgagcttctgccctatgaccactgagtgcatttaaataaaaacctcagaaagactgaggaaaaaaaaatcctaattatctctcttctgttaagccatgtagagactcgtgtcctgagtgggtctgagaatttggcaaagacttactggttggtgttcttgataagggaagtgagacaaaggagaagaaattactccctgcaacaggaggaatagaaatgaagcagtgagtgttcagaaattagatctacaagaagttttgcaaacagaccctcagggccaggcaatgtttgtttttgttttttgttttttgtttttttttttaatctgaagcccctgattttatttttccagcatcactctaaggaagagtgtggattagtgccattattcagggctggtattaataaaagttagcttttatctgcagggctaggttaaggctggcattcttacttttacattaaaaaaactggctacaggctgcgcagctgaggtacttcagtcatgtgccttctctaaaggattcttagatccttaaaatatatagtatgttttaagtttgtatctaaatagcacttactgtaatgtattatacctaaatgtttattaaaagttagaagaaatgagtaccaacaggaaggaatggaagagaggagaggggctaagacattgctgatctgagggacagacctctatcaaatagaagagggctgggagaaggggtgattagaagcagagtgagggaactaaatggagccctgactgcaccaaataaagttctcattttgctgcttgttccaa

SEQ ID NO: 1364 - DNA, 117 bp, Homo sapiens
aacacacaagaaaccatctctgatctgcctgtgctaacccagctgaacaatggaagatatttgttgtaaattaaaggaattgatttgtatatagttgctgccataaatacatcaaac

SEQ ID NO: 1365 - DNA, 413 bp, Homo sapiens
gatccccaaggcctttcctacatgccccctcccttcacaggggtacagaaattatccccctacaaccccagcctcctgagggctccatgctgaaggctcccattttcagttccctcctgcccaggactgcattgttttctagccccgaggtggtggcacgggccctccctcccagcgctctgggagccacgcctatgccctgcccttcctcagggcccctggggatcttgccccctttgaccttccccaaaggatggtcacacaccagcactttatacacttctggctcacaggaaagtgtctgcagtaggggacccagagtcccaggcccctggagttgttttcggcaggggccttgtctctcactgcatttggtcaggggggcatgaataaaggctacaggctccaacgtg

SEQ ID NO: 1366 - DNA, 169 bp, Homo sapiens
ggggctgaacaccatccctcccactagcctctccatacttactcctctcacagcccaaattctgaagttgtctccctgacccttctttagtggcaacttaactgaagaagggatgtccgctatatccaaaattacagctattggcaaataaacgagatggataaaggtg

SEQ ID NO: 1367 - DNA, 2041 bp, Homo sapiens
atccatggggctgaagggtaaattgagcagttcatgacccaggatatctgaaaatattctactggcctgtaatctaccagtggtgctcaatgcaaatagtagacatttgtgtggaaatcataccagttgttcattgatgggatttttgtttgactccttaccaatagcctgaatttgaggagggaatgattggtagcaaaggatgggggaaagaagtaggttctgttttgttttgttttaatcttagcttttaatagtgtcataaagattataatatgtgccttaagttttagtctttagaactctagagagccttaacttcttaaaccatttttgctgaattcatctatttcgagtgttgtgttaaaaggaaaaataacaactaacttgtttgaggcaaatctaaaatttaaaattaatcttgcttcattgttacatgtaatatatttcagacattttcactggaagatttatgaacagaaatattggttgaaagttagagattttacaaaatgctgacaaaaatattttcctagcatcagtagatttctggcatatgtttctgctagctatatatttaggaaattcaaagcataaaactttggcaacatcttggctgttctagacacagtgtacttgtcaacccctctcaggtaccttttcttgggatgcttattagaagccaagtaaagtgcttaaggtttgttttcattaaattagctatttctgctcccctgttcaaagatgcattttgagtgtttatagatcactgccctttttgaaatcacctggtattatttttcttactggaaaagttagtattaaaatctacagaactacatatttgtgcctccttggtaaatacaacacatctaattaaatgtagacagatatttcaaacatcagctgaattcacttaagtttttccaaaacctcagttaaactgtgaagctattggaatttttttttcctggaatttttcccctttgattcacagtggtcccatttatatctgcttctagcttagtgctatgtgtgagatatgtgtgtgtttggtgtttttgtttttttgtttttttttttttaaggtttgcaaattaaaaagggccagaaaaatttggcaccaggcaaacgaataaagataggattgggaaagaagttgctaagtgtgcttagttttaataagtaattccttctcttttttcagagaaggccttacagaaaattgttgtgcttagaattgctggatgcatttttaccctccacacaaacctaaaaattttgtgacccctttcacttacctgaaaagtagagaaatggattcagtataaggataaggagggaaggtggaccagaatgaaaactgtaaatatttttttaacctaatatcacttaaatcgaggcagaaagatacagacattcaatgaattatattcaatgcatttaaaataccactgtaattgacagagtaaaagtatagatacaaaaccttgtgtaagaggctgacttttccaaataaacattttttaagaaaacatttcttctcccaaatgtctattttcttgaggaaaatattgctgtgtcttcattttcattaccaggtttcattttgggccttgctaaattgattgaattaaatcctccagcttttgaaccttgatatttgtgtatatgatttattttcatttgaatttctcctttcctcttctttgctgtaaggcaaggaggaggggaattttaaaaccatcttatttgaactgagagcatccagagcagttaaccttaaggaaacaatgaaaaactccctttgtatgcctgggcatcatggcagatagaggaagagtgttagaggagaaaactgctgctgagagtattggcaggcttggcctcagtttggactctgtaattttctttggacccaagtctgtaacctctgcgtacttcttctctcttaccttctataaaaatgaggattactgttggtgagggaataaggaatgtaagtaaaggaaatctgaaaaaataaaagtaaagcaagtat

SEQ ID NO: 1368 - DNA, 490 bp, Homo sapiens
gctgagtaaatgcctggactctcccctggctggtatcaaaacttacctatcaaggaaagtgatgactgcagaaaccagtgagatacccacctgcttgttcacatgcacaggtgctctcagctctgccaaagcgaatgaatggtgtttccggaggagcaagtccttttccaactgggtgtgcatgctaaaaacctgtattttcatgcttttcaaacaacatgaatagtcagctgactaaagactgtgtgtgttgtggtaacacaaagacaattttgtaagtttgcgcttcagtactgtgacagttatgtttactggacatagtcttttgggcaactatgatagatgcccaaagcatgaagcaaatatcttttattggaaatatgcaaattcaatacttttccattatagtctatagaactggagatttcatttctctatcaaagagagatcaagcgaactattttaggttaaatccgaataaaagaacttt

SEQ ID NO: 1369 - DNA, 4147 bp, Homo sapiens
tatgtacatattcaaacacattttttaacttttttaaattttgatgtgaagttatagttttataactggcttaagttaagttttattggagaaatcttgcctataattctataaagagaaatgacattccacaaatgtcaagcatatcttttttacacagattatgcaaagttaagagttgtatcttatcccgttagtacagtatgtaatagtgggtctgctgctactttctgttttaaggtgtgaggtaacaattcaatctcttcttcaaatcaaaatgagaattctctggaataacagattcttgtttggtaaattattcacttcccttaattttatcttgccttgtctcttgccatatttgctgtttttatggataaataagatttatggtttagtacttgtgtctttatggcacaggttcaatttctacagtgaaaatggcataggttgcaggaaagaatttctgcatctggtacatgggcaagtaagttatttagttctaaccacaaataacaagtagtttccaaggaaatttcagtggctctctggtttcttaacaaaagagaaagcacagcactttctgatccaaactgtcttttttttgtatctgttatttaaagcccagtggatatttcaattaaaaaaaaaatctaaagatgaatagtccttggtcattcattatccatggctcattaatctcttctagaatatatgctaactgttgaagatattttgggtaaaagagataatgttgacatgatactctattgttctgcttcctggcatcctcacattttgtggggataattttgcttcctaaactgatcacaactattaaacttagagaataataatagtctttctgatgaggctgccatattttgagcatcaatcttatgataaactattcttgtcacttggcatcaacctcttcatgataaatatctactactgagacacttcaattcacagttttaactggtgaatacctgggtttatttactattactctgtgttgctattttctaagaaagaatacagcactagacttcatcctagagtttcaggtaggctaatgcttagtgcctgagtatttaaattttcttttcaaacaggcacagttcacattgctagtatggtcctaactttctgttattttagaatgttaacatgattcacattatactttctcttagttaataatacagtaggccttttgtttattaatggaagagtactccccacacctaagaccagattcttatatctccctggttacagtgcaatttggagattttttttttttcctggatggtaagatttgaaatatttacattaacataggcaaaaaaaaaaaaaaatacaagatgctgctttattatgtctgtcaccatgaaaacttagctgcatcttttgaaatatcaaatatgaattttctctaaaatattctgaaataggttaaatcttatataaatattactttgtgcaatattgttgtgtagttaaatgcatattagcaaagtatagaggtcactgtgtaaaccgatagaaaagtaaccatcagcaaatactgcagtgattagttagaatctgtattattccttatatatatgtatatgtatgtattctctgttacaaaggatgaagacaaatagggatacatttcaatgtaaaccatttatgaattggaagtgatgttggctttagttatctttgtaaataaggtaattagaatggtatgaaaggtaatgtgattattgcaggggtgtttttaaatcttgggtataaattctagggtaaattccagtttatccagactagtttttaacgggacctgcctttgagggtgttttttgttattttgttggggaggggtttaatcacaaagtgtgtgggtttgggttatttcttgtttttatttttctgtccagaagagctttaccaggctgtgcaaagtaaaattcttctcaggcaacatttgcttttaaaaataatcatgaagagaaggctgttaaagcaaaaattttttttttttaattttttcttgtcttccaagatccgatttccccatctcccacttgccatccagcagatgccatctgtcatccaagctggtcattgctaataaacaaggagactgtctcctgacagccagcactgtgtattatcactcaggaaccagcggatctgcaaagacctacaatcaaaagcaaatccccattttccttttataaaacattctaccctcacctccaatataaacacattaaaagagtacaataaaaatgtttaaaatcatgtactaataaattcattgtatgttagaattgcaatagaatgaagagaaacatttagctagtaacgtgatctgaaaactgaatgtcctatgtgagtattagattttaatagcatgctttaaagactgatgagtataaaagcagaagttttgcgttttttactgctttcaaagctgtatcctagtttagtgatacaaatgattgcaatttttctaaatcattaaattatttggtttggtggagtgaggcatggagcaatctggcgtcttctgatttgttaaagtagtgatggcagtgaagttgtaactgaaatttaagctgatcttcctttttggtatattatccgttgtgccagctcttgagattacttgcacaatgtggctataagttttaatattttgtggagcagagggatggtttttaaatgtgcttatggaaaggacccaataaatgaatattcctaacttagtaaagtagaataatttcatggtattcattaaaaagcataaaagtcttcctcttgccccagaagtaattctctataccaagatatgctaggagtaggatgatgattcaaagtggtaacccaaattcataaagcaataataataaaaacctatatagtatgttctctcctccaaagttttaactctaaaaattggttcctaggtttaattgtacctttaatttgcttattcagtacttagaatttgtttaactggtacttttattattttttagtgaaagacttttgaaaagtgccctttccccttaagagacagttggaataccagttgactaatattacaagctcttgtagggggaaaaaggagcttattaaagttgtttactaaactttaggaaaagatgtcttgcatcagtcttactaggcataaaagtcacacttaatgactggaaaaaacttgcttattgcctttccctatataaatattaattgtctagaatgaaagctaatataggaacaagactcccaaatccatgaaaacgcttagtgaatatattcttaatcattaataaattagcccattatattttcatctgtatttgccataaaaaatttatttgcatttatgcctttaggataattttgtatctttctaatctgttttatcattgctacaggtttttaaaaaagaacctttcactagctagcacatgccagaggttcacatctgttttgtttttcaaacaggtcgtagctgtatttattggccatgcaagtagaggaaatgcacagtacaaatgtttttctttagcacgtaagggacctatccttgtcttgaaagtttgttgctttaaaagcaagtatctctccataaatattatggccttccattttcttcatacattttttaggatccacttgtgcatgtagttgagaccactgtctcttaaaatatagcacttttcaattctctctaaagaaatacttatgtactactatcacatgttgtaaattttcatgtaatagtgttttctgtgagtaaactccattttgattggcagctaagactttttttcctgtggcttttatttatctaagaggtctttgcatatagatgaaatgtatatttgcctggcggactatttgcgttgtgtggccttagtttgtttattgacattaacgagtgttttaaaaaggtttttaatgaatagtcttaaatctaaatttgtgtgaataatccttttaacacagtgcttttttgtagctgtctaagtgtgttaaattgttaagctatttctttgtaaaataggacaatggaatgcatagtttttttttttcctgtaaagtatttttttaataaaaaaagtctgatttgtccttt

SEQ ID NO: 1370 - DNA, 1087 bp, Homo sapiens
taaaactccagatttataataatatgggctgcaagtacacctgcaaataaaactactagaatactgctagttaaaataagtgctctatatgcataatatcaaatatgaagatatgctaatgtgttaatagcttttaaaagaaaagcaaaatgccaataagtgccagttttgcattttcatatcatttgcattgagttgaaaactgcaaataaaagtttgtcacttgagcttatgtacagaatgctatatgagaaacacttttagaatggatttatttttcatttttgccagttatttttattttcttttacttttctacataaacataaacttcaaaaggtttgtaagatttggatctcaactaatttctacattgccagaatatactataaaaagttaaaaaaaaaacttactttgtgggttgcaatacaaactgctcttgacaatgactattccctgacagttatttttgcctaaatggagtataccttgtaaatcttcccaaatgttgtggaaaactggaatattaagaaaatgagaaattatatttattagaataaaatgtgcaaataatgacaattatttgaatgtaacaaggaattcaactgaaatcctgataagttttaaccaaagtcattaaattaccaattctagaaaagtaatcaatgaaatataatagctatcttttggtagcaaaagatataaattgtatatgtttatacaggatctttcagatcatgtgcaatttttatctaaccaatcagaaatactagtttaaaatgaatttctatatgaatatggatctgccataagaaaatctagttcaactctaattttatgtagtaaataaattggcaggtaattgtttttacaaagaatccacctgacttcccctaatgcattaaaaatatttttatttaaataactttatttataacttttagaaacatgtagtattgtttaaacatcatttgttcttcagtatttttcatttggaagtccaatagggcaaattgaatgaagtattattatctgtctcttgtagtacaatgtatccaacagacactcaataaactttttggttgtt

SEQ ID NO: 1371 - DNA, 141 bp, Homo sapiens
atgacatttagccctaagattggaagaatggttcgttaagtttagagtaattcacttcaggaagttacttggttcccataatagcttccagtattcattgatttatttctggctttcccagactagaaattttgtaaagag

SEQ ID NO: 1372 - DNA, 4309 bp, Homo sapiens
agagttggagctattcacgagactgaacatcacttccttgttgactgattgggtgattgattcctgggaattcaaacaaacaaataaaaaagcacttttttcattttatcagaactgaacttagctgaataagttattttttactgattgttaaagttgggagcagctgccagaggcctgcagagttggtttttgttttgttttgttttgtcaacttaatgcaaaccacagagattttctactttctgttttcacatgagttttaatgaggttctgttgaagcaaagacccctagacacaaagtaatgacttgttagtagtggaattataagcaacagggcaggcctttgctggaggtattttgagagaaagggagaacaatggaaactatttcttcagatgtagccctgtcttttggtaagaattgtgcctactaattttgcaatttaaaggatttcaggaagctttttggttgaaaaatcttgtttttttttttttagacgtagtctcactctgtcacccaggctggagtgcagtggtgcgatctcagctcactgcaagctccacctcccggtttcactccattctcctgcctcagcctcctgagtagctgggactacaggagcccgccatcacgcccggctaattttttgtatttttagtagagatgaggtttcgccgtgttagccaggatggtctggatctcctgacctcgtgattcgcccgccttggcctcccaaagtgctgggattacaggcgtgagccaccacgcccggcctaaaatcttgttattttaagttgagcattttcattcaaaatcatccctaaacttcatgttaatttcacctgagaaggactattttatgcattttagaggttggaagcaaaaaacaaacaaacaaacaaaaacagttgtttctactaggaaggtcaaagaaaataaaagttactccatttttactgccacaggatgcaggaagtgctggcccacatctaggacagcaaggccaccccagcttagatgaagctagctgcataacacaaagctttaaaagtgtggttcacacaccacttgtggaccttattgaattgctgattcgcattcctagagattctgattctgtaggggtaggctggagcctaggaacctaccttttaaactagttccataggtgattctgatgtacatatagagtgtgacagccatcactatagagaatagattgataaattacaacccacgcgtcaaatctggcttgctgtcttattttgtaaataaagttttattggaatagagcaacattcacttgtttacatattgtccatggccgcttttgtgctacaatggcagagttgaatgattatagaagaccatatggctggttaagtccaaaatatttactagctggccctttacagaaaaagttggctgaccccttctctaaatcaacatttctccttggtaactgaaactctattacagtcctgacaattccagcaaacacagctgtagatagggtttaaactcaaagatatttaactcttctttgggaacttagtctccatatgtttgttagttcttgcataatccacagtttctctgggtcttcagccaatcagagagctctgtagctcctgagtagtccatttctctggccctacaagtgagagtgattggaagcaaagcttatgatttgtatgatcttgtatctcaaaatagtccttaatgatctaatagattagtaggcagtcatcaggtagagactccaaaaaccagactactttcctaaatatcaagaagaaaggcattgctacagtgattcatgaaaagcagcattaataactttggctaaagtttaacaaagctaaccacttcccctctatcagccagccatctatgtatctcctctaaatgcagagaagtaaatatgtagtgctgttaatacatttttgctttttaaagttatgctttgtcctggcgcagtggctcatgcctgtaatcccagcactttgggaggccaaggcgggtggatcacctgaggttaggagtttgagaccagcctggccaacatggtgaaaccctgtctctgctaaaaatacaaaaaattagccaggcttggtggcacgtgcctgtaatgccagctactcaggaggctgaggcaggagaatcacttgaacctgggaggcggaggttgctgtgagctgagttcgcgccattgcactccagcctgggctacaaaagcgaaactgtctaaaaaaaaaaaaagaaaataaataaagttatgctttttcctctattcctagttaaatcacaacaagttagtaatccataaatgatgtgtcctgtttctctttagtagaaattatatttttggctaccagttaagaaacttgtactcctttgtcccttatgttactataaactcaagatgatgagttttgtggtatttgacttcataggcaaaatcaaaatttttactttgttgctattctgttttatgaaataaacttctgtctatgcatttgaactaagtttcagcaaattcaatctaaattgaataattccagctcccagttttatcctatgttgctcataaaacagttccaagtatactgcattatcttgagatttgaagatatggtgcccacggggattatactaggcaaatgcgttaagcagctctggcctaggtgttgtgtattttaagagactctatcttaggagagcttaagtgattgggctgcaggaagaagacattgtaacccaggaattaaaaatggattcagattgcctgattttaacactttagtttcaccataggctaattatgtgacattgggcaagagacataattcttctgtaccttagtttctacatttgtaaaatagagatgatttggtaacttattaataagatttttgtgagagataaataaaacaaatacattttgtaaagggtgagtacttggaatattttaaacactgtgccattagcaatttggaattctgtgttatgcagttcataaggttctagcttgacttttttctctctccattaaccctgtctctcacagatgcaaaccactcttaatggctttactttcacatcaatgtgagtgattcctaaatatgatttatttcccttctcaattccatacccacagatgcttattatttatttatgtgtacctttcttatccccatactctccctgtttgcgatacaactagctcaaaacctcagtcatttttaccttgtctctctctctccagtccaactcacccaactagtttttctcatttgttacttcatttttgtcctggttcttctaccagatttattagcaactgcctggactattaataaagcctcctacttaggctttcaatagattgttctgttcctgctccattccagtctgtcctatatactgccatcagattgatcaaagctgtggtttctttgtctattattttgattcatttttagatatggtatcattcatttttaaatttaacataccaatgaagattacaagacttaaacatcttatcagaagggggcatttattttttaaatcaagaaataactttccaaaagcattgctttgaatgccattctcttaaagtccttcagtggaacttttgagtgtgattagacatgttcattatcttgattgtagtgattttatgggtgatgatttcacaccaacttatcaaactgcatactttgaaatgtgtagtttattgtacatcagcactaccttaataaggttgttttttttaaaaaaaaaaaaaaaaccttcagctgctccctactgttcatcaaataacagtctgatattcaaattcccccagtatctggccctaactgccctatatagccttaatcaatcatgattctcctctacaatcccaatgctctagtataaccgagccagtcactaaagctgccctcctcctactgttccctatgtttcatattcctttttctgaggctctacctgtagacatcttcaagacccaacccaactgtcatgaagccttctccatgaaggctatccatataaccagaataagaagtggtctttgcctccttgaacttttgtttgtaccacttttatgtttcttatccaaaaaatggccttaagttgtaattatctgtatagtcatcttccccactaggataaaggattgctgaatgatacaatttgttgtatacttctgtaacacccctcctcttcattatctggcatgtacatcgatattaaaaatattcattaaatgaatgaatagctgattgactcaga

SEQ ID NO: 1373 - DNA, 2791 bp, Homo sapiens
tggcagggccgagctgctagcttcgacagtgagagctcgtgcccatctccgaaaccacctccaacaccatgagatgtgcagccaaataacacaaatgggactcagcaatgttctctttgcacttgttcaaccgtctaaacagtgttgtgcagtcgcagtggcggcagcagcggcagccgtccgtcactccagagtcttacctgctcctgtgtaggtcaaagctgagacacttgtcatgtggtcagatctgtcttagtcttttgtgtctcccaaggtgatgtttttgtggtttttcactttttatgggtctgctggtaagaaaagggaaaaaaaaaaagagtaggaaaagacaaagggtggaaagcccagaagttggttctagaaaatacaaggtacagttttttggaaagaggtggattgagtttctgaaatgctgcgtctccagcaagctccacaaccctggaaaaggaggaggcgtggtgggactgcggctgcattttcagtgccctgcaggaatggggtgaatccatggaagagcctttgtgaggtgaattactagtctttgaagctcttcgctggcaggacataaaccacgctgggaccctcagtcccgtgttgaaatcacaagacctctgaggcgcttgtgagccttcagctgatgtgcagggttcctcgctccccttcctcgctggctttccccatgaattgaaaacgtcttgattcctcatgggaacttagtcactttctttaggaatgattcagttcagccgaaactaaacacgccatatgttttctgatgcgccacagttaatgatcacatttgtttgaaaacaggatctttgtcctcagaaataatcttgattgtaaagtaagagagaaacatatgttctggaatgatttctgcattatacatagctttataattccatgaagtatcaagctgctgtttaaaatgcctaaacagattaaagaaaaacctagattaaatgttcttttccaaatggggagttttgaaatccaaatagcagtttgagtccatctttctatgaagagtatgtttttgattgaaaccgagtcagcgtaagcctatttcagcccctttggctctttgacaatattcatcttaaactttagttctataaattactaagtacttcagtgttgtttgtttcagtggttgtgagggtttcttgtttcctttagatctttaccttaggccaaactcagtttaggaaaaaaaaaattgtttgaactattctgtgttgtaatagcacatttctgttgagttaatagtggtcttcccaccaacccctaaaaccaggttgatttgctcaatctcagtttgtataaccccagtaagcgcatggaggtgagtttctacttcgacttgtggcgacacagtgccagtttcctgagctgtgtgtactacttgcaagaggcaagtctgctgaagaaccccttcttttaacagtggaaaatcaagaacagaaaatctgttcacacacctgtgtcttattctttatatatgctacatggtagaggagcagcgaccaataaagtatccctcattttaaaccaagttgtcagatttctctgctgatagaacgctgcatagtatcttctagccctaaaaatgaccaggttgggcatgagttaacaggatattgtggcaaaaggaattttctgcttagaaaagtaaatgtagataaacctaaactccaccctgtactgagccttaggctagggactcatgtgtaaagatgacttttctccccagatatcttgtcattgacaggccttcctagtctggtagtcctacatttgggtgttctcctgagagtgagaaaaaacccaaggtcatgacaagattcctggcaggtgacagacttcattatgattctgactctagactgaccccatcaagatagtcgtttccgtcagtgaacagatgctgaaggccttgccattacaaaggagacaactgagttccctgggtcataaggagtccagaaattagtgtgagaaggtccttctggaagtgaactcaaaattcatgtccagctgtcatcgttaaacccttaggcaggtgagtataacccattctaacctcttggagaagggagtgtgatcaatgtgaatcacaatagtattgctcatctgagacattcctcttatatccaagcagctatctcccatgagtgaacatcccagtggtttcagaaaatcatgtcctgaacagattctagccagccccacaccaccctggccaactgcaaccgctgctgctctagcagtctgggtcaattcctacaggcttgggagcccaccccagggaggcttttatctcctgcagcctcatccccagcaccctcaaggtagactactcctcagcctgaatcatgaatgaaacctgaacatctgccaacttcattatctagcccagtatctcttccctcacagagaagaagaaaatgaaatacaaagttgatccatttgttggctttctctggccggagaaacctctcgggttgttgctgtgagctttgatgaagttgtgataaccagggccatttgcacataggtttttttaaaaaacatgaaaagttcccttctcctttatttagcagtgtttccgggctgaaagacgccctcctccccctctgcgcttacccaggacgttaattaattgcactgtcatttaaaatattatgttgttaattactcgtttgtgtcttcccacccgtgtcacagcctggagtttttattcaattaaatctctgtctcttgccca

SEQ ID NO: 1374 - DNA, 4869 bp, Homo sapiens
aatgacatggatttaaatcaattgtttaaaaaaaaaaaaacgaaaaaaaaaaaaaaaacacaaaaaacccagaaaacttttaagtgttgctggaatatcctgcctacagtgggcacctccttgaagaagctgatagcttttacacagtattagattgaaataatggacagaaacacattcttgtcaagaaagggggagagaagtctgtttgcaagtttcaaagcaaaaagcaaaagtgaaatgatttgaggatttctgttctaatggagatgattctctgattgttagaaatggcaaatattgatgattgtgtgctattgattggtgcaggatacttggtatacgagtaaatacttgagactcgtgtcacttgataaattttctttttggactaggtcgcacagttattaaaacaacttttaaccctcccccttcacacacatacatatcaggttgttttctagttaaaaacccaagtagctcagattctactttaatgtcagtgcagatttgcattgaatcatgccattatgttttttctcatttttatgctgttgggtcttagtttttaaattgatataaagaactcagcaatggttttattttctactcatacttagggtttaggaaacactaccactagttatcatttaatcaacttcaatggtctactgaaacaaaaatggtaacttttcattagtggattatttagagttatagtagttgtttccagaaaacacttcctcacaattgtacttcccaatcaaatcatgtgatcatacagttattcccatgaaaggcagaatgtttgtttcaaaattaatctagttttctgtacatttaaatttgagaaggtgacaactggctcttttccagtcttccttcatgtcagttttctgatagaccactattggcaaacagtatctgtcaactaccaaatgtgtaaaattttctgtatttcactttgtcttatttgtaaatagtgaactaaaacttttggcagatcagcaacatttgctgagcctgttttttaagctaatgtgtattcttactaatgttcctatcaagaatggatttgtaatatatgctgtctatttctaatgttcacattcatattttgaggttctatcttattttaatagagaacagacttctcaaaaaatcttcagaagcagcttattattgaaatatcgaaatattgaaataaacccggtggggttagattactcatctgtccaccaagtgggacatttgcatggactgggggcttaaaggacttagaagagacctgtaagtaaatcctgaaaatgagccaatccccacttgaatggttactggagtaaacccacctttaccaccccaattacagcacccgaggccgataaaccaacttggctctggttcatttttcttttcttcatttgtgatgctcagattcaaaatgtgtgttctacactgttacaggcttctcttttgtttgattaaagattttagtcctacttttgtatggacacattagaatattcagagaccaaaatagaagaatttgctgttagatatttttcagaagtcagcagatttgtggcaaatcatttatttgcctttttaaaaattcatttaagcagttcagagagtagactactcagaaaattatttcacgtaattgtctaagaggtcaatattttttaatgcatattgaatcaaataaagtgctctaaagaaattattatacaaattcctttgggttgtttttcttttcttaacaaggggtgggggtaaacaggaatatgattcaggctttctggttgtgtatttaaagagtattgattttattattactattgatttactttattcctggcttccttttcacttttctttcaatttttaaaaaataatttaagccgttgaaaatataccaaactgttgaaacattttactcaaattttaaattcctaaaaatgttttttaataagagggagaaaattatttaaaaatacttatgcctatgccaatttccctcttttttcacaaaatccatgatttcagtttgtaagtagacatatatctaagggcacatttttggaaagtgaggaatagcagcagtataacttcattttgtcaggcctttgagttctaatattttgtattgctcttcaaatggatccttttaaaaaaattgtagataatgagtcataaatagattctgccaactgaggggagaaacattttaagtaaatatttttcagtatttggggccttaaaaaataattgtgtttccttaaaattacatgttagatagagtttttaggtttttttggttttaagattggttaaagcaatttaaaagccacttttttgtcaacatttaatagcctccacttctgttaagataatgtatactgctgaggaattactattaatagctatcaacataccaccattaaattaaggtattcactttagattttttattaaagcttttttcttgcacactgatcgttgtgtttctaagctgattttttcagctctaatatacctatggttaaaaagtataaaaacttaaattgatatttagatatatgttttcctattagtttatgttttaaaaagacaaaattgtatctgtcagtccctgaaggcagtttgtttttatactctctcacatttgtatttgttttttaaatggcagtattttagaagatttggagaaaagtccacataataatgttttcttaaaagcttttaaagtttttgctgtacttcaatttacttcttccatcagaaaactaagaacaaagtgttgctcagtctgttccgctgacctaaatttgtgttttcagcacttggctcagccaattcactgagtgaaggaattgctttatgaggcaaagcatgtgaaagttctaaagtatggttagattgtaggtcgtgctctatatggaaacatcaaaccattactacagagaaatgataaggcattggatccactattgaaattattatttttggatcaacaagttggtactttctgacttctgtatcttaacataagggaattttaggtaatgctaagtcagttgtctcattttttgtgataagttttggaatttttagttaattgaaataaataatgcttttaaatagaagtaaaaggtttataagtgtgcaaattgtagatttatcaattacctcagcaggtatcctgccatgtaattattagtgattagtgttaataagataatagattcaggtcttccaactatgcccttggattgtggcctactgtatgttattaaatggtctcttactatccaaaatgggagtagatgctgtggccccgtctcccttggcttttacgtcccatatccacccccattcatgtacaacatgtgaaatataaaaatctcatttcttgtcaaaatcagcactgcttatttgcatactcagcatcggatcagtgagtagttttataaaaaatccacgcacccaactcccttagttaaaacagattcttaattcataccatgaattcttaatttctgtaccatctatgttaatgatctgctgaaggtgactcaagattttcaaggtgtaatacagtttgatcatgtaccggacctggatatttaattttttttccctcacagttaatctcctccttgataaagcaataacactgctttgagtctgttgcctaatagcatgtcagaatcctctcctggatggtgattttataggaaagtttgtatgcatatcacccagtctatcttttaaaaattaagaaatttaaatgtatgctggaagtaatgacactatattgtggcattttattttaaaaattggggaaagttgcatatttttttaaaagtaagtgtttgagtaaaaaaattgaaggtacttttttaaggaaaaaaatttatatgccacagtttacatagacatttcagattcaacacgtactcttgaatataatggtttcttttacttggtcaaaatgcatgtatagcatttctttcatcttagttccttgtgtttgcctatgtggtcctttatatattttttattgtatcgaagaaacaaaactatcttcaaaaataagttaatttggatatatttgtcatatcaaactacaaagtgtacaaagttaagtttagcccttttctagaaagtgatctttaaaattaaaaatgctcctcttttaaattcaccaaatttatgtgtgggaaggcaccaaaatgattttgtaagtgccactgcaatattccctttcaagtgtggcctaaatttcaatcttaaggatggaatgcatgtctgctccttgttctgaaaaatgtaggcatctactacattttaaaacacagtgaaacatatacataagcctataaaaaaagatttgtgcaatttgaaagcctgttaattttttatgtagacatacctacacacgaaagggttaaattcacagccttactagttccttgcttccagtatttcaattggtctcctcccctcattattattattactactagtactattatttttgcacatagttaactgcccttcaatatgattcttaaaaagtgctgtttctgtggtatcgtattctctaaataatcatatttaattttttaaaacaaggttgcagtttctaattgtttcgttcctgtgtttttgctggtgtgtaataaaagcaagttttttcttttcatggttatttaatacattagctgcctgtaaataattcttgttataatgctctggaatgtgttgtagaagttgtattagattagttttaaacccttgtttgaaagccacattgttttggttatttctattaaattagaaaattgaaaaagttttcaaatg

SEQ ID NO: 1375 - DNA, 568 bp, Homo sapiens
aaagacaatttagcaggtagaagaaaagttgggctttcacaaaaggcatctgaacttttaatgaactttgaaggacaacagcatcttcccaaaaccattgatgtttaagtgtttagaaatcatagaaggtgtaggctgctgtggtaattctatttgtatatctcaacagaattaaaatgtctagcttggtggtatttttatagccataaaagaaaatctttaggctttcaaaataaggatgactttagaataatattgtgtcatagaattaattttcagccatgtggaccatattttgtatccaaggatccttatttaaagctttcaacatgtacaggaagttggaaatttttggtttatgactttgtctaataaagagatagttctaaacacattcttgatcaccaaacaacttcagaaagacagtgactgtacagttatcattatcatcatcatcgtcatcatcataggtaacagttatatcaagcttaatatgtgctgaacattgttctgaacactttaggtagatgaactagatgtatgtgaataaaaattatttggtcctcac

SEQ ID NO: 1376 - DNA, 1025 bp, Homo sapiens
aatctctgattgtctccatcctgaatatacaacagaaagtgccaaagaaaatatttttctaagggtcaggatcccatgaagtattctacaaaattcttgaaattttaaaaggttaaagagcgagtcaggctgttagaggaggattctcctgttgctgctgtagtaatcactggagaattgttgggaatggtctggcaccatgccatctttactctgtctccattttttttttatagcagccttttctatgtgattcttgggctcattctctgttttgtgctttgtctgtgaaagtagttgtgtttcacaaggaaaagccttgttgttgttacatttaaaaaatagctcaaagatgagaataatgagagaaatgctgagtttaaggtagtagagagacatgatggaaatggagaacactagccttatacacataattctcatcactgaactatcatggcccctttaaacccatgggctgtttgacctgggctaaggaatagactcatcacatatctccattgttttgccttatattatatctaggggaatctcacttaggaggaagccctacttgtaatattataaggtactgttattaagtaccttataaaattagacatcttgcaactcctcctccaaattatgtggcatttgagtagtttgcttgtgcctcacatgtcaacattaaactttgtggaggctggatgcagtggctcacacctgtaatctccaccactttgggaggctaaggcaggagtttgagggtgggagtttgagactagcctgggcaacatagcaagatcccatctctacaaaaacattttaaaaataagtaaataaatttaaactttgtgaaattatagctaatatgaaaatgtcctttcaagggcatgggagccacctttattttttagtgtccaccatgtgccatgcactgtggtatatgtatgcatatcatctcaaccaatccttaaatcaaccttatgagatagatatttgcatctccattttactaataaactgag

SEQ ID NO: 1377 - DNA, 2476 bp, Homo sapiens
agctacttctacatgaaaattgcaatctaaagctttcataccaaatgtcacaggagctgtctcccagctcatttttaacactgaaatgacattaggatctaaaataatttgctgtcaattgtacatttgcatgagtacgtatgtttggctcattactggtttaccccttgagtgaatgcctgtttatgatgactgagagcatattcatgtgtgatctgcgtgtttctggaatatgctttatacgtaatgaaatctgtttgctgggaattcctgattcttgttatataagaagaacaacctatttcgctcccagaaaaaaaagatcaaagagctttcagaaactttgagaacttggctatttagaaaaagtgataatgggtcagtttctcagactgtagccattgaaaattagatgcagagaattcagagatttcttcttaatggaagtaataagctgtaagaattgagagatcacaatggagtgttaaaactgactgtgtctaagttgggtgtaagggtttcctgggtttttttatatacatgctctccccagaatacagtaaaccacagttttagaactaaacacatctgtaaaactaaatatagcatggaaaatccaatttgaataagtcatgctttcctagaatttaaaaataaaaaagtcttcctctggaaagagaagtcacacagacaatcatgtgccctataaaagtgagtgtttataggactaaaaaacttttaacaactttttaaggaaatatttttgttcttatacaaaaacatgtaaatattgctttattactttcattttctgaccctgctgtaaactactgcaaccctcacatcctcaaagggacttttatgtcaaactcttctgtttctccaaatataaggaaaaaagactaaagcaagagatctggcagttgaaaattgtgggaaagagaatttgtatgggcactgtatctatgaaatacctcataacttacgtttacatgttttcctaactttttgtatttttcttgtatagccacctagagaattcttcatagattaagaactacagttttcaccacttaacataagtaaaacaaagtccttcataatttaaccattagcatctttggccaaaccaaaataaagaaaagcatcttctcctagttgtgtgtgggcaacagaaacaagttaaggaaacaaaaatacttatatatacacagaacaaaaataatgttctttttatgcaaatcccctgtgaaaataaaattttcaatgtttttttggtcttaacgcttcattttaacttagtaaacccaaatttaggatttacattggcaaatttttcagtgatttttaacgtgttacatttagtaaaccatagattttttaaaaactacattttgtaaggccacacataagtgaaaatacggaaggctttggaaacccccagatgaacttctatacatgtgaaaacacaagtctttgagtgtgcactaaaagtgtcacactcccaaaaaactcacaaaacattttgctaaaaagatatgactgcttgaaatagtctctctcccatggagaaccacatttctctttctgccatacttgctactgctactgattttggaggaaatttttctagaagaacaaaggtcatatttgaggcaagctaaaaacttaattatacatggctactttactgtgtctgtagctaaagaaaaattattttacaaaaattacttcatgaaatatagtttgtaccccagtagttgagaaatgtgaccttttaggcaaagaacaggcagtccatctctcttagctttagtttatctctctgcctgaagacaggaaacaggcccaagtgcatactcgggttctttccaactcagaatcatctctgattccacaaaagtgagtttagtttcctatctgaattaacaactttaaaggagactataatagttaaaagtggaagaatagaaataaataaatttaaaatgaaattaattaaagtagaagagaagggttctgttccatgtacgattaatgtgccccttttggagataagctttccaaaatatgcgtatgagtaaaattagagaattccaccactaagcaacaatagattttatatgtgtgtgtggatatatatacacacacacacagaaagatgaatatatatatatatatatctgtatagacacacatataatatatatagatatataatccctatatatcttgaatctacaaatatctttatatgtatataatttgaatatatacatgtatgtatatacagatgtgtgtgtatatatatatatacatacacatatacataaattttcagctatttctgttcccctgaactaatttgagattagacccaaacatgcttttaaatgtctcatgccaaggcactgaattaagacttcttaatgttgaaatattttaagtgatttcatattaaattttctatatactg

SEQ ID NO: 1378 - DNA, 13 bp, Homo sapiens
aaaaaagtaaacc

SEQ ID NO: 1379 - DNA, 1087 bp, Homo sapiens
ctgcactgacaccctggtcctgacttccctggaggagaagtattcctgttgctgtcttcagtctcacagagaagctcctgctacttccccagctctcagtagtttagtacaataatctctatttgagaagttctcagaataactacctcctcacttggctgtctgaccagagaatgcacctcttgttactccctgttatttttctgccctgggttcttccacagcacaaacacacctctgccaccccaggtttttcatctgaaaagcagttcatgtctgaaacagagaaccaaaccgcaaacgtgaaattctattgaaaacagtgtcttgagctctaaagtagcaactgctggtgattttttttttctttttactgttgaacttagaactatgctaatttttggagaaatgtcataaattactgttttgccaagaatatagttattattgctgtttggtttgtttataatgttatcggctctattctctaaactggcatctgctctagattcataaatacaaaaatgaatactgaattttgagtctatcctagtcttcacaactttgacgtaattaaatccaactttcacagtgaagtgcctttttcctagaagtggtttgtagacttcctttataatatttcagtggaatagatgtctcaaaaatccttatgcatgaaatgaatgtctgagatacgtctgtgacttatctaccattgaaggaaagctatatctatttgagagcagatgccattttgtacatgtatgaaattggttttccagaggcctgttttggggctttcccaggagaaagatgaaactgaaagcacatgaataatttcacttaataatttttacctaatctccacttttttcataggttactacctatacaatgtatgtaatttgtttcccctagcttactgataaacctaatattcaatgaacttccatttgtattcaaatttgtgtcataccagaaagctctacatttgcagatgttcaaatattgtaaaactttggtgcattgttatttaatagctgtgatcagtgattttcaaacctcaaatatagtatattaacaaatt

SEQ ID NO: 1380 - DNA, 1252 bp, Homo sapiens
ccacatccacaaagcacaccattaatccactatgatcaagttggggggaatctggtgaagggttctgaatatctccctcttcatccctcccgaaatctggaatacttattctattgagctattacaccagttttaacaccttcctcgtgttatgtttaaaaaaataaataaatttaagaaaaccattttaaataatgcacagttgcagcctggaaaaacttaaggtggcgccttatagtatcaattttaggagctttatttggtgcatttaacgcaactggtaattgcagaatccactttgcctgtgtaagtgaaaaatatagactgttatcttgttggccctatgaaattctgcacttttcattatatactctaccttcattaattacttctggcaagatgttctgccttagcactcagttgcattcttttcctttttcttcctgttcattatgctttaattctgaggaccatatgagggtagaatatattatcttttaaaaattacaaaaatttgtataggcaaaccatttcttaaagttgatggccaaattttaaaatgttatttttcatatcatttataatcttgtcacaatccacttaaagaagtttggttatatttcagtgaaaattttcttccagagtaggttttttttcgtgggttggggggtaactttactacaattagtaagtatggtgcagaatttcatgcaaatgaggagtgccagcagtgtgataatttaaacatatttaaacaaaaacaaaaaaaatgaatgcacaaacttgctgctgcttagatcactgcagcttctaggacccggtttcttttactgatttaaaaacaaaacaaaaaaaaataaaaaagttgtgcctgaaatgaatcttgtttttttttataagtagccgcctggttactgtgtcctgtaaaatacagacacttgacccttggtgtagcttctgttcaactttatatcacgggaatggatgggtctgatttcttggccctcttcttgaattggccatatacagggtccctggccagtggactgaaggctttgtctaagatgacaagggtcagctcaggggatgtgggggagggcggttttatcttcccccttgtcgtttgaggttttgatctctgggtaaagaggccgtttatctttgtaaacacgaaacatttttgctttctccagttttctgttaatggcgaaagaatggaagcgaataaagttttactgatttttgagacact

SEQ ID NO: 1381 - DNA, 1493 bp, Homo sapiens
ctgaactctgaatgatggctggagattgtctatcaaggaaggaagttactgtcttcccattcaagtactgtccattaagtgtcttgcctcagatttgatttaatcttaattaaaggtatcaggtggcaatttagaattccagtcaatattggctgtccacagttctcagatgtgttaatgtgaatactacatgctgaatttcaccattcctttctcaaagagactacttttaattttcatttctgggaccttgatttatataaactatgttttcagttctttgttatttttcacatctctgaaactttgagcattttttataagccagcaatttattttacatagcattgtaaaatacacttctaggaaattttaggaaagatttaactgtttaaatctatttggcataaaccttgattttttttttccatttgacaaaaataatacaattccacagaactagatcagcagattctctgatttgtaatgtcattcacctgtgacattttaagtctctctggtgctaagaattggcactttatagcctggtgcctttacttttaatttgagagaacctactgctagtcccaggaaacacacttggaaataagtcagctattttttttgcccagtgatgctatagttgtcatattgtccaaagttcatattgttcaaagctgaggagcttgtcctgtgtatgtgaatgcacacatgtgcacttagttcaaatactaaaagtagcttttattaaatataatcagccaaaaacacacacaaaataaaaaaaacaaatataagtagtcagtttttcaatgttatcctactagttctacattctattttaatttttatacaatttccattttatagttaagaaccatcacttacttggattggatgtctttcattcctagcactaatagttggctttctttttttttgtttacatagaagcagggtttttttttatcttttttctttttttttgtttaagctatataaaaaggtgaggaagcagttttgttacctaatgaaaattattacactcataatgctgtgtaggcaacattgagattcaaatgcccagtggtcaactgggttcactcatcaactcattcccgtcccagtttactcacatttcaaatttataaatttcttcatgttatactattctatttagatttgcccagaattagttgaaataatgctaaacctgtcaatattttccagtaacattaagcaccatactgcatgggagagacacagtactaaaaagagttgttagtgctttatgtgagtgatatttctttcgtaatgctataaagaactacagttaaaataacaaaatattttaaagatgtcctaaaagcatctgatcccagtaataactaatggatgtcatctagagcagtgggtgttaatgaataggtatatgtcatttaagaatttttcaaatttctgtttgatatcctgcatagaatttgacaaaaaaa

SEQ ID NO: 1382 - DNA, 154 bp, Homo sapiens
cctgccgacacgctccctccccctgccccttctacactctcctgggcccctccctacctcaacctgtaaattattttaaattataaggactgcatggtaatttatagtttatacagttttaaagaatcattatttattaaatttttggaagcat

SEQ ID NO: 1383 - DNA, 1234 bp, Homo sapiens
cccaactccaaacaattctgatgaaaacaaaatcacagcacccactaccatacagacagcacaaggtggcagcaagcaattctgccccacacccagccagctcctttcccttttccatcatctcttttcccactccctttgcgtcaggagcagcatcattcagcaaatgccttttcaaatgcagcaatcccacttagcagggacaggagaaaaattattcccatgttgactgtcttgactgtcacggaacagatcttgttctttgctggaccatcaagggtcatggcagtgcctgaacatggcagtctagggtgaacaatcccctaacacaagtttacttgtctttgattatgacagtaacaaaattgacagctttctaactcacaggcatagagtgaccttttaatcagagcccagggaagacacatgattaatgatttagctccctccatacctcgaacatcagttgggatccctcctccagccaagatgatccttcttagagaaggctcagccttggaagcaaacttataaatcatattctcatggctttgttaaacttatttcaagtgatggtcattcatatcactatgaacttggatattcaagcctttggatggctatggagagggcttgaaatgtgtacaggtgtcaccatcatttctagtatattaggaaactgggatgggaggttgatttgctctctaaacttccctctagttggcaagtctcacatattcatcagcaggagtggagggtgggggaaaactagaaagatgaaaacttttacatttttctgatgggttcatgtctctgattgggtcagctggcttcctagcctaagctgggatctgaataccccttctctgtagctgctagtgagccttcccatttagattaaagattgctttatccagcagtcaattaactctccagttatcagtactcccacaattggccagggcaacaataattggagttcatactgatgccctgaggcactgaaaaaaaaaaaaatcccaaagtgccttctgagctgtctaaaagttacattgtgcttggtagatttagtgttaagtgtgcagtataattttctaatttattttctcaatcttttagcacatgtgtaagacactgtgcaaattttttgaaaatagagcaatactttttgtggaatactagctaactaattctgtcattaaactcatattttgaaaatattcagacaatgttg

SEQ ID NO: 1384 - DNA, 1586 bp, Homo sapiens
ggcggggtgcgccgcggggggccgcctgtcccggcgtccgcgaaacgctacggatccggacgggcgccgtcgctcgggtggcggaggctgcggtggcccagcgagacggccgcctcgagagacggccggggaagaagctcgctacctgttctctctggtcagcagggcgacgagggaaggtttccgacgcaggcaggtggggttgtctggcgagcccgggggctcgcaggggggattttccaggccaggagaacctcgtggagacacccgagatgagccacttctggggctccccaagggttgtggttttaacccactggagactttgagttctcctacattcatccgccacaaatcttaatgtgttgaaagaatgagggcagaagttcagagtatgcaggctcataactttaggctatctggaatttttctaatggacaaatcaccaaacactgggaaggaggagagaggagggatctctcccatagagatggaaggcacagaaaggtgcgactggaaactttcctttctgttgtgaaaataaagattatattagaatccaaataaaccctgaatatttagtaagtttaaaaagacaaattgagaacaagtagacacactgtgggaggatctgagcttggtgatattttatccccaagatatgacaccaaggtagacaggaaaatccatatttaaatggaaactttaatatctgattacttttgcaggcgaagtgcccctttatatatccaaaaacatctatttgtgaccttaaacatgtggacccataggtgcagttagaaaaagacaacctatttttatttatgttagaaggagtagagtatttttttcaagacatttatttttcagagtggtgatacttttactttggatactctgtgccaatttatttatagtcaagtgtttacactttttcctgtggaataattatgtctaactttttacgtgtttgttgagattatactgtggtctttctttctgctctaattatattgcacttgtataacaaatttcccacttctccctgtttctaaacatattttatatattaagatgtttgttcttgaaaggttcttttgttgtgagatcagcaacactagcacttcactattatagttttttaaaaagtgtattattcttatctgtagttatgtctgagaagtcctttacaagctgtttataaggagagtagcttctttgtgtgtgtgatgtttgtgcgtgtgatgaatttagcaaattaagttattttcctaaaaaaaaaagaaaaaaagaattcagaactactttcctctgtgacaccaaaaagaaaagtctataacctgaaaatgtttcatgttctctgctgtgaaactcttaaaacaaggagtgtattttagagacaagggaaaaaaaccacatctgctatccaaagattttagtctttttcagggtttttttgtgtctctgttgctttatataatgcaatattttgtagtgaaaatagatataatctggtttctatctgacgagtttttcatatctcatgaatggtgcgctgttttgcatataaataaaggtatcaaata

SEQ ID NO: 1385 - DNA, 278 bp, Homo sapiens
ttggtaacagaagatgaagacaacagcataactaaattattttaaaaactaaaaagccatctgatttctcatttgagtattacaatttttgaacaactgttggaaatgtaacttgaagcagctgctttaagaagaaatacccactaacaaagaacaagcattagttttggctgtcatcaacttattatatgactaggtgcttgctttttttgtcagtaaattgtttttactgatgatgtagatacttttgtaaataaatgtaaatatgtacacaagtg

SEQ ID NO: 1386 - DNA, 2903 bp, Homo sapiens
gcgggtgatgccccagcggatgttggccacggaggagctgaggctctccctttctctgtgattggacagttgacagcacccaaactctggggtgcatgtgtgtggaaagttgtcagacttgaaaagtgttccaagttcccagtcagtcacagagacagactgcctctcggtggcagtcttggttggttagctatttgcgcgcaaatgttgtgatcctgccattatagatttcttgtttctgtttttagtaatgtagtgagtagctccaggtgccacatctactcacagatttatctagtattctcagatagatgttacagggcttcttattctttgtaatgtactctttttaaatccctttagtttaccctttttggattccttaatgtggacgaatttctcttacgtacaactgacagcaaaaggaagggcgaactttctagtgacaaggaatctcttccaagactttgtttttgcacatttgaaaatgccacccatggatcaaaatatacccaaacgttttttactttcttaacaagacttaagaattgtgtgtagtgtgggcaaaatttgtatgttgtcttttccctcagctggagttattggaaccactttgtagtcaagacgaaagcactgaattttgcttcaaagaactgtgtatgtacaagagaaatcctgcataaccccattaggagtagatggtgcccggcctatctgtcagggaggcaaaaaaggcttcatcccatccttgccaaaaaataagaaaactgtcttggagaatgggtcagaagccccaaacggcacacactttccaaattaaagtgggcaggggctgcttttagcagctgctgacctgcagatttgtcaaagccagtgactagagaaggaagggagaaaggctggctgttggcttgctctgagctgcaaggatggtctctaactgattaactgtgagcaggtgggcctgtgtcttcaggtgctttgccaaactcttaaaagaaagtgtccagtgaacttggaagtgggcccctgagctgagcacagggccaaagcagccatggcagacacctgacggagggcacggggctggctgacactaagtttggtgggacagtgaggggtgggaggggggtttccagggcctggtgttggagagtgcagagaaatatctacctccctggaggtgtgaagactaggtttttcttcttccttccaattagattttccttaattatagtgatgtcttccttattcatttttctctccctgcctctcactgccataagaatatcagcctgggggcagtccagacgcagccctttgtcatcctttctgtttgcctagtctcagcagactgtgatcacaaggcattgtctgtgggatttttcctttccctttcttgatctctcttgtggttctaggttgtttggttgttcattgttatggtggctttttattttaacgccccttgagccccatgatggctggtgtcaccctgttcttttacactgttgggccaggtgctgcttgtccttcttagggcatcatcaattgcaaatatttccttttgctccctttatgaagatgttcttatacccttgctttcccatatttttctggccaagcatgccatctcctttactctgggaacttacatcctgaatcccaagagggggtcacagtttggaaaaagtcatcagggattctggaactaagtctgataaaagattccagtgaagccctgttctgagaacgagcagactgcaggggaggccatgggattccccaggccagtgtctgtgctgatccttcaagggtctgcaggtatgcaggtggcctgggctgctcggcagatactttgctgattcccagctgaggggagcatggtggcgattgctcagccattttctgacagacacacagacctgccttttctcccccaagtataccgtaccctcctgtgagacagtgtgtgcaggcaccaccaccttaatcctgctgttgcctgacatgctgattctcatttattatgctgcatcaacacattagaggtacaggagcggctcagtcatgaaaaaagaaggtcttttgccccatttctttatttcagagatgtgggctttcagtgggaatttgctgactcctactttataggctgagtcaatgagggaagatgactggcgtttcctctgtctaaatgggaggttgccagagcgctggctgggactaggatgtgtaactaagatttcagtttgaaatcttagatttcagttcacggcgataaagaagtaggtgctgcacacaaatatgtaaagcaattgtaggaaatttgaaaggaaaaaaagaaaccgaagccagtattttaataattgctttttctgtgtattttgtattgggctgggggatagcatcaaaggttgaactttttgagctttctatgaaaaaccccaggaccttctttctttggccatttctatggaaatgcgatgtcagatggatggtaatggtgccctccagtggctgtgagacctcattgcgcattgtctactggagctttagtcttctgagacggaggaaaactgctgaatactctggattcatctatgtctacaatgttgcatttatgaaaaactacactgtgctaggcgcattctaggacatgaatatgaccacaccctctttcaccgggtgtttctgtagcaagttttcatattcttttcaaacaatggtttctctgcgttaattattgaggaaaaaaaaagatggggtaagaaaactacccatgcatgatgtagagagctgttgatttgtttctgtttttttaaaggaaaactatttgtaagatgttgcactaaaacattttatatacacttcagagacctgtagtaaattatgttgaaaat

SEQ ID NO: 1387 - DNA, 1237 bp, Homo sapiens
tgggtttgtgctcagccttttaaagctgcaggcagcaccacttgagatttccagaggacccagaccttcgttcattctaaagagactgatagaattaaaaacaaagtgccttatcttgcactggagttcaagtgctcttttgttagttattcactgattgtacttgtggatggttgagcacaaaaaaccacctctacatttctcttaaaggtaggttggcaacgttctttttctaccacaggatactccttttcattttgtacagtatggaggtatctattccattggcactgaagggtctaggtagtttagttcctttctgatataaccctttttttttcttttttttttttttttaaagacagagtctcactctgtcacccaggctggagtgcagtggcatgatctcggctcactgcaacctctgcctcccggttcaaatgattctcgtgccttggtgtcccgagtagctgggattacaggttcccccccaccttcccccacacccagctaatttttgtgtttttagtagagacggggtttcaccatgttggccaggctggtctcaaactcctgacctcgtgatccacctgcctcggcctcccaaagtgctggggttacaagcatgagccaccacacctggcctattatgacctttttcatttttctctgagctacacattatttagatatttcccctagagattagaaacctcctttcatcctgtccactttttgttagcatactttcattggatttactggtacatgttttgtgatcatgataatgtgatcttgttttggtggtgtccccctactccgtctctatgccatgacagccttctgccccaaagcctggaagattactctttggtcaagggcatacaaatagaaagttaataaaggggaatggtgttgaaatagaacctcatacatttattacagttctacttatacagaaaatctagacaccttcatccttctcacagctctgttttttagtagagtagtctttagagtagtcttcactgttatctatatacctagaaagttaactgggagctttgactcttactgtgccttcactcatagtgtgccttcttagctgctggagaatttggggagaggatgtacacagcactggtgcctcagccctgccaaggtcttcactgtatatattttgtgtgttcttctgaaactcttgatttcttatatggcaataaactcagcatgtatt

SEQ ID NO: 1388 - DNA, 1638 bp, Homo sapiens
ggatctacagaactatttcaccaccagatatgacctagttttatatttctgggaggaaatgaattcatatctagaagtctggagtgagcaaacaagagcaagaaacaaaaagaagccaaaagcagaaggctccaatatgaacaagataaatctatcttcaaagacatattagaagttgggaaaataattcatgtgaactagacaagtgtgttaagagtgataagtaaaatgcacgtggagacaagtgcatccccagatctcagggacctccccctgcctgtcacctggggagtgagaggacaggatagtgcatgttctttgtctctgaatttttagttatatgtgctgtaatgttgctctgaggaagcccctggaaagtctatcccaacatatccacatcttatattccacaaattaagctgtagtatgtaccctaagacgctgctaattgactgccacttcgcaactcaggggcggctgcattttagtaatgggtcaaatgattcactttttatgatgcttccaaaggtgccttggcttctcttcccaactgacaaatgccaaagttgagaaaaatgatcataattttagcataaacagagcagtcggcgacaccgattttataaataaactgagcaccttctttttaaacaaacaaatgcgggtttatttctcagatgatgttcatccgtgaatggtccagggaaggacctttcaccttgtctatatggcattatgtcatcacaagctctgaggcttctcctttccatcctgcgtggacagctaagacctcagttttcaatagcatctagagcagtgggactcagctggggtgatttcgccccccatctccgggggaatgtctgaagacaattttggttacctcaatgagggagtggaggaggatacagtgctactaccaactagtggatagaggccagggatgctgctcaacctcctaccatgtacaggacgtctccccattacaactacccaatccgaagtgtcaactgtgtcagggctaagaaaccctggttttgagtagaaaagggcctggaaagaggggagccaacaaatctgtctgcttcctcacattagtcattggcaaataagcattctgtctctttggctgctgcctcagcacagagagccagaactctatcgggcaccaggataacatctctcagtgaacagagttgacaaggcctatgggaaatgcctgatgggattatcttcagcttgttgagcttctaagtttctttcccttcattctaccctgcaagccaagttctgtaagagaaatgcctgagttctagctcaggttttcttactctgaatttagatctccagaccctgcctggccacaattcaaattaaggcaacaaacatataccttccatgaagcacacacagacttttgaaagcaaggacaatgactgcttgaattgaggccttgaggaatgaagctttgaaggaaaagaatactttgtttccagcccccttcccacactcttcatgtgttaaccactgccttcctggaccttggagccacggtgactgtattacatgttgttatagaaaactgattttagagttctgatcgttcaagagaatgattaaatatacatttcctacacc

SEQ ID NO: 1389 - DNA, 1151 bp, Homo sapiens
cctgccatctttcagtgcttcttggttcccaggatgccacttcctccacgaatagctacctgttgaagtgatattcattgttgctgtacagatccagagagccttttgtccccacctctctggtatttttttattgactgtatattttctggcacataagcaatctaaaaatggtaggccattctgaactgcacacattttaaatttgtatatttatatgaaatggaaatgttcatttttagattgttaatagaaattggggagcaacttttgagtatctttagtttcctgaaggacaccgaattctccattagataaaccaccaagactgttcacatcatctctctaacattgcacgcttcctttgtgtacttaagtgattctcgaaatatacagaaccaatgtatgctaaccagatgcattgtttgcttcagatccatggtgttaataccatgtatattttataaagataatttggctgtgttaaaagagaattacctgagtccaagaatgtggaaatgtatctgacaaaaaacatcaaaatcattagcaaaacataggacttagaatgttaatgtacaagttaagactaaagtttaaggactaaggttccttggattatatgacttgttaagattgccacagttccgatctcaacagtgtggggtgaaacaagaagactgtatcttcagcctttttcctataatcatggatgatttggtcttattcaaaaggaccgcacatattagtactcttaagagcatcttccaagactccagcagtgagcatttagagagtgtgttgtcttccagagtcatgaatgattttgtttagctatcaggtctactacctctaaggacatttcatagcagcatctcttgagttgcctgcatcagtgtggaggaagtgtgtcacagtgaacaaatccagggagctgataattggcaaaagaccacttttaccactcaggctctatttgtgccttagcttggttatgagtaaaaattagaattatgctgcctacctcacagaggtatcatgaagatagcatttagaaagggctttgttgtggtggggtatcttcagttagtttttaaatgggaataaatatatatgagggaatgctacacagcactcctcttgtccttgat

SEQ ID NO: 1390 - DNA, 385 bp, Homo sapiens
tttcttctcggtacaactcaatagcctccataatcctctcagcctacagaggatgagaaaggaaagaagtcatcacaacatactccatcatcccaggacactgaaactggaagaactgaccagaaatttgccaaatgaaatagcttcaatctgtttaataaagacgtgcgaatagagtgccaaaaagcatttaaagacatttttggttttcttattttttaatgtacagggaagagactgagtgtcatggactcaggtgggatgatatctagacactctgaatagggcaggtcccaggaacacctgaaaggagcacatattgatcaaagagattcaggactactcccatctttggttacaagagaaggaaacaggttataatccc

SEQ ID NO: 1391 - DNA, 1689 bp, Homo sapiens
aggccagtccaaacaccacggagcatttggcaatcaaggccccagagtctccgtggtcagatcctcctctttgggagtccagtgtctttgaaaaacaggaaccgtgttttttttttttttttttttctggccgaagacatatacccaagaacaagagatacctttaagccagtgaaggatacttgcgatagaatcatccgcaactcagtggccattcttctgccttcccagaccttagttttataaagcattgtctgttccagagtggcctttgaagagactgaataatcacttcgtcataatgttaagggagatgctagtgtgtggcagccatgaaaagttacacatacacacccacatacagacagacctacctatacatacgtgcacacacacatacatattcatacacaattcatacacatgcaatcatacatgcacactgactctgaactgggtgaactctgtggagggaggcccagaatgggtgctttcaccaagaatttgtctgtgtacaactctagatggagtgggccagcagtagctgccagtctttctcccctgcagcttcctctgcttctggaatgaaccatgtatcctggagaccctcccaatggatgagagtggaaagacatcagtacaactggacttggcttccggaaaaagattgcttttgaactttggctctcttcacttgtatgctatcattgatattcccagtggtgcccgtggaaagagggagaaagagaagctgaacaggagaaagacaaacagaaagaatagagaacaggaacgaggtggagagcaagactgacagagaaagtgtgagcaatgatgagaattttaattcaccaaggagacgtgtttttggtttgtccccccaaaccccgcccgccccactacaggttatggaaagaatcatggcattactgaggagtaaacctctctggcacactgagcatggtcagggcattggtcagagggacagagcaaggaatgcatcctgagcccacagctttgaccactgtgatccagaagagaggtgcactacgtgggaagtgctgattccacagcatgcagcctggtaggggaaggaaaataaaagggtgtgaagaaggaatagttttataatctcggaagatgataccaagagcagaggcaacaaatagaggcctggcctccaggtgccggatccagacacctgacctagaatgcctgcccgctatccctgtggcaggaaatatcccctcatgtcccagggaattgcagatgggtcttctatacccttctacctgcccttagatctccatttttatcaaatagtacattgcattttgaagttttgggttttgtccttcatctttccctttcccttcaaatcttttaatggtaagaaagcaagtgaagcttggtgcaagctaaaatttttaaatggtgtggaaatgcaaataataccaagtaaaataatacagatattattaaagtttctggttttgaggtgttgtagataaatgtatttatgtgcctagtggggaatccaatattatgaatatgaaaaagggggcaataaaagggtatgtaaaatatgtatgaagaaaaggtgtacaaaaatttgcccttatgcacggaactctgtttctaagtgccaagcacagaaagccgctaaataaaatctttgcaattgttttc

SEQ ID NO: 1392 - DNA, 2144 bp, Homo sapiens
catccatgaagaaggtaaaatccctacgtgatccttctgccaaaatgtcgaaatcagaccctgacaaactggccaccgtccgaataacagacagcccagaggagatagtgcagaaattccgcaaggctgtgacagacttcacctcggaggtcacctatgacccggctggccgcgctggcgtgtccaacatagtggcggtgcatgccgcggtgacggggctctccgtggaggaagtggtgcgccgcagcgcgggcatgaacactgctcgctacaagctggccgtggcagatgctgtgattgagaagtttgccccaattaagcgtgaaattgaaaaactgaagctggacaaggaccatttagagaaggttttacaaattggatcagcaaaagccaaagaattagcatacactgtgtgccaggaggtgaagaaattggtgggttttctataggaagtttcaacgaatcacagcaaggcttttgtgccttgcactccatgcattctgataacggcagctttcctaaaaagaaaaagttatagttttgggacatttaatttggtatagctgattattggctttatttgatgaatattgctttgtagctttgaaatacgacagtgttccaaatcccatcaacaaaatgctgtgaacaacaacaacaaaaaataaatcaagaaggcatagctgtctgaatccccaattattgaggcacactccttggcctgcagaaatgtgattgaagtaaggagtaatttgggaaatggagtatcatttgtgcttctctctggagtacttactgtaacagatgcacacgttatctacttcaacccttttataaagcaatatatagaggtcttagatgtataatccttgagatgccatttgatcagatgccaatttgtattcagagctcataaaaacaagtccattcttatagtttgtttgtcactgagacggtgcctgatttaatatatttaagctgcttaacttgttttccaagagataacaccaactgttccagcaataatttgttttttaattcagagatatgggatatgatcttctaaggaggttgcattattttgacctgatttatttattgtacaagagcccaagtccctgaattatattcttaataagtgctttcttgcattcatttcagtttagtctcaccaaccccctatgaattaggagaattattgtcattttacacatgaggaaagtgaggctgagagaatccaattagcttgtacgatatcactccataagagaagcaaatctgagagtaaaacccttaccccttattcttaagaatagtgcttgtttattcagtacaaaaaaaatgctgaaaggcagcgttttttagactctaaacattctgattttgaaggtgggtgttggaacgactgatgatgttttttatatcatcaattcagccaatggatgcgaacttaaaatctggattcacagaaccgtggtcacatttccccatcaaaatccccaaggcgggtcccaagttctctcctctacgctcattgcagaaatactttgaaataggttctgccagtctacaatagcagtgaagactgacaaatcagatattcccaatgactgacagcttctcatcttgcctctacctcagttaagtaatgtcaccctgaaacctagcttttctgcacttccatttctgacacctgaaaatgaaaatgataatcctaacttatacaccaagacctgttagcaagatcgattttgtaacagaaattgcttataagttttttatcagtaaggaccatgatcaccatttgtacatacataactaggttgttgagcaaagcatttttgctcatgtttcttaaggaagtagagtagtccttgtgtcagaacacatgttaatccacaaaacgccccatcccagattccaaattaaaacatcgtttttaggattcttggagctagcctggatcatgggtaaaggaaacattttgccttttgtatcttatactggaatgggatgtctgtaagtcctagaacctctttgagcatatttcttacaagcctctgttttttcccctttaaaggaaactttgaaaggattgtgaatactggaaaatgacaaaactaaaggtagatctatcaagccaa

SEQ ID NO: 1393 - DNA, 460 bp, Homo sapiens
ttctgcagatccatggaaagcttcctgggaaacgtatgctagcagagcttctccccgtgaatcatatttttaagatcccactcttagctggtaaatgaatttgaatcgacatagtagccccataagcatcagccctgtagagtgaggagccatctctagcgggcccttcattcctctccatgctgcaatcactgtcctgggcttatggtgctatggactaggggtcctttgtgaaagagcaagatggagcaatggagagaagacctcttcctgaatcactggactccagaaatgtgcatgcagatcagctgttgccttcaagatccagataaactttcctgtcatgtgttagaactttattattattaatattgttaaacttctgtgctgttcctgtgaatctccaaattttgtaccttgttctaagctaatatatagcaattaaaaagagagaaagagg

SEQ ID NO: 1394 - DNA, 532 bp, Homo sapiens
agcaagaatcaagattctgctaactcctgcacagccccgtcctcttcctttctgctagcctggctaaatctgctcattatttcagaggggaaacctagcaaactaagagtgataagggccctactacactggcttttttaggcttagagacagaaactttagcattggcccagtagtggcttctagctctaaatgtttgccccgccatccctttccacagtatccttcttccctcctcccctgtctctggctgtctcgagcagtctagaagagtgcatctccagcctatgaaacagctgggtctttggccataagaagtaaagatttgaagacagaaggaagaaactcaggagtaagcttctagaccccttcagcttctacacccttctgccctctctccattgcctgcaccccaccccagccactcaactcctgcttgtttttcctttggccatgggaaggtttaccagtagaatccttgctaggttgatgtgggccatacattcctttaataaaccattgtgtacataag

SEQ ID NO: 1395 - DNA, 430 bp, Homo sapiens
ccgggcaatccatactcattcagtaacacaggctcatttatttaaccagctaatcatttatccaaaggctttccattcttctcccaatatttttttactttaatttttcccacaagttttgatcagcaaataaacagcattcttgttttggaaacaaaccagtgcattctacttctcgagtgttcacttgcccctcagtttgtgaccaagttgtgggtattctgagaatcatgctctaatggcttttccatacactaaagctctgaaagtagtgagtttcctagaattaccatgctattcaaggtatagtcttgtttctcagaatcccagggaacaaagcaattgtctgcctctccctctgcctccctcaacttgatccatgtgaacatccgcacctgcacccatgctgatcaataaatgccgacaacac

SEQ ID NO: 1396 - DNA, 3751 bp, Homo sapiens
gagagtccacctccagtgtagagacataactgacttttgtaaatgctgctgaggaacaaatgaaggtcatccgggagagaaatgaagaaatctctggagccagcttctagaggtaggaaagagaagatgttcttattcagataatgcaagagaagcaattcgtcagtttcactgggtatctgcaaggcttattgattattctaatctaataagacaagtttgtggaaatgcaagatgaatacaagccttgggtccatgtttactctcttctatttggagaataagatggatgcttattgaagcccagacattcttgcagcttggactgcattttaagccctgcaggcttctgccatatccatgagaagattctacactagcgtcctgttgggaattatgccctggaattctgcctgaattgacctacgcatctcctcctccttggacattcttttgtcttcatttggtgcttttggttttgcacctctccgtgattgtagccctaccagcatgttatagggcaagacctttgtgcttttgatcattctggcccatgaaagcaactttggtctcctttcccctcctgtcttcccggtatcccttggagtctcacaaggtttactttggtatggttctcagcacaaacctttcaagtatgttgtttctttggaaaatggacatactgtattgtgttctcctgcatatatcattcctggagagagaaggggagaagaatacttttcttcaacaaattttgggggcaggagatcccttcaagaggctgcaccttaatttttcttgtctgtgtgcaggtcttcatataaactttaccaggaagaagggtgtgagtttgttgtttttctgtgtatgggcctggtcagtgtaaagttttatccttgatagtctagttactatgaccctccccacttttttaaaaccagaaaaaggtttggaatgttggaatgaccaagagacaagttaactcgtgcaagagccagttacccacccacaggtccccctacttcctgccaagcattccattgactgcctgtatggaacacatttgtcccagatctgagcattctaggcctgtttcactcactcacccagcatatgaaactagtcttaactgttgagcctttcctttcatatccacagaagacactgtctcaaatgttgtacccttgccatttaggactgaactttccttagcccaagggacccagtgacagttgtcttccgtttgtcagatgatcagtctctactgattatcttgctgcttaaaggcctgctcaccaatctttctttcacaccgtgtggtccgtgttactggtatacccagtatgttctcactgaagacatggactttatatgttcaagtgcaggaattggaaagttggacttgttttctatgatccaaaacagccctataagaaggttggaaaaggaggaactatatagcagcctttgctattttctgctaccatttcttttcctctgaagcggccatgacattccctttggcaactaacgtagaaactcaacagaacattttcctttcctagagtcaccttttagatgataatggacaactatagacttgctcattgttcagactgattgcccctcacctgaatccactctctgtattcatgctcttggcaatttctttgactttcttttaagggcagaagcattttagttaattgtagataaagaatagttttcttcctcttctccttgggccagttaataattggtccatggctacactgcaacttccgtccagtgctgtgatgcccatgacacctgcaaaataagttctgcctgggcattttgtagatattaacaggtgaattcccgactcttttggtttgaatgacagttctcattccttctatggctgcaagtatgcatcagtgcttcccacttacctgatttgtctgtcggtggccccatatggaaaccctgcgtgtctgttggcataatagtttacaaatggttttttcagtcctatccaaatttattgaaccaacaaaaataattacttctgccctgagataagcagattaagtttgttcattctctgctttattctctccatgtggcaacattctgtcagcctctttcatagtgtgcaaacattttatcattctaaatggtgactctctgcccttggacccatttattattcacagatggggagaacctatctgcatggacctctgtggaccacagcgtacctgcccctttctgccctcctgctccagccccacttctgaaagtatcagctactgatccagccactggatattttatatcctcccttttccttaagcacaatgtcagaccaaattgcttgtttctttttcttggactactttaatttggatcctttgggtttggagaaagggaatgtgaaagctgtcattacagacaacaggtttcagtgatgaggaggacaacactgcctttcaaactttttactgatctcttagattttaagaactcttgaattgtgtggtatctaataaaagggaaggtaagatggataatcactttctcatttgggttctgaattggagactcagtttttatgagacacatcttttatgccatgtatagatcctcccctgctatttttggtttatttttattgttataaatgctttctttctttgactcctcttctgcctgcctttggggataggtttttttgtttgtttatttgcttcctctgttttgttttaagcatcattttcttatgtgaggtggggaagggaaaggtatgagggaaagagagtctgagaattaaaatattttagtataagcaattggctgtgatgctcaaatccattgcatcctcttattgaatttgccaatttgtaatttttgcataataaagaaccaaaggtgtaatgttttgttgagaggtggtttagggattttggccctaaccaatacattgaatgtatgatgactatttgggaggacacatttatgtacccagaggcccccactaataagtggtactatggttacttccttgtgtacatttctcttaaaagtgatattatatctgtttgtatgagaaacccagtaaccaataaaatgaccgcatattcctgactaaacgtagtaaggaaaatgcacactttgtttttacttttccgtttcattctaaaggtagttaagatgaaatttatatgaaagcatttttatcacaaaataaaaaaggtttgccaagctcagtggtgttgtattttttattttccaatactgcatccatggcctggcagtgttacctcatgatgtcataatttgctgagagagcaaattttcttttctttctgaatcccacaaagcctagcaccaaacttctttttttcttcctttaattagatcataaataaatgatcctggggaaaaagcatctgtcaaataggaaacatcacaaaactgagcactcttctgtgcactagccatagctggtgacaaacagatggttgctcagggacaaggtgccttccaatggaaatgcgaagtagttgctatagcaagaattgggaactgggatataagtcataatattaattatgctgttatgtaaatgattggtttgtaacattccttaagtgaaatttgtgtagaacttaatatacaggattataaaataatattttgtgtataaatttgttataagttcacattcatacatttatttataaagtcagtgagatatttgaacatg

SEQ ID NO: 1397 - DNA, 1032 bp, Homo sapiens
cccttgccttccaggaaccatgcaagaagcgcagccaccagaagtccttaaaacagcaggaaaggtgggcctgtcccccttttgtgcagctacctatctgctgaggagcatctgggcctcattcctccaagtccacgggagggtccagaagagggagtcagagatgtatcctggtggagctgggagaaaggcagaaagcctttctgacggctatggaatacgattagccaaggtccacttggcccagcactaagaaaaagatgcgtagtttgcacagaaggttttgtgatcctgcctctcaacagccccagcagcttgggaactagcaagagcacatttcttgcctcatcagctgtcctgagatggaaaactcagtgaatataggaccctgattccgatgaaaggggcacgtggtcccaatgctggagctcctctggcaggttctaaaagcacactactgagcagcggtgccctgccggacactgctggcgggggctcagtgagcactactcacagatccacacctgaccctgttgggtcgagtcaggctgggccttggtctgcactgtagcacctgtgttctttgagttcacatcatgaatgtggtgacttcccagataccatctcaggcttaacctagcacatcctatttcttttcttctatgatatccaaattggactgacctcacttcaaagttgctgtcccattttgtcaccctatcttatctcggggaaattgcagactgatggccagaccaactctgttgaaattcttgcatagagcaaacctgtgctcatttttaagtggcatgggagaggccccaagcctagtaaagcctagtctgtgtcttcacagtgctggtagaatgtgtttgtgtgtataaatatatgatatagatttatatatgttgctaacgccatatattgaaggccaacataactggtggacagggtgggtgacagaaaatgaaagtctttttggtgattgttaaagcaagatgtgtataaagaaataaatagtttttctttcac

SEQ ID NO: 1398 - DNA, 1623 bp, Homo sapiens
cttcagaagcatttttacttgcaagacgatggacacattccccttgggctttttgtaactgaaacgcaccacagaagacagggagtcatcgaagggctgctcggggaggtggcagggcggaggacctgcttgggaagaaactccaagaagattggaatgcttccaaagcaagaatctttctcagtgaaatctcattatacaaagagaaccttatgcaacctgacaaaccactgaggtcatggtgactcagtgatcagcagatggtacttcaacagcaatcccctgtcaaacctcagaacttgaggctgaaacattgcttccacccaccatcagtgaagatgtaactagcatgttacaagagtgaataatctggacttcagagattaagtcaccaatagtgatctcacaagcactcaccggaactcctataatgtctccactttgtccatgccatttagcaatctcatctcctaaatggactgtgcctatgattcttaaggagaaagtgaatcattggtagatatcctgcacaagcagctggactttccagtaatagctttcttggggctattaggaaaattaaacaagaaatgaggctttctgggtctgcctgtatgtcttctgcataagacaaagaagagacatcgaatcaaccaataagaagagcccaaataagcatcctcaaatcttttgggatttggcacttggggacatgagtagttgtctgggatacgtcatattctcaacagtttctttgtagtagtaggatcaccttcttataataggatcaccttcttgttgctatagctgtacccgaccttcccttctcccttgagtgcttgcatgagctccacttttccttttgcttgaacagcttctcctgagtcctccttaccgatggttgtgactttaattatatacatctctgtccctccagacagatccctctgtcctcactctctgatttcattgaggatcttgggtgagagagagggacctgcaggatgaacaaatgtctactctaagacagctagattgggaggttggctggtcactgatggttataatgactgtgggacaggattaacttcagaataaatgaacaggagacacagatatgaagaaagtttctgattgatatggtctgaagtactcctggtattgcaagtcatttgctctaattctcaattgtaggcaaactgatttgtaaatttgcttcttcagccttctttcctgtagcctagcatggagaatctgaccagaccccattttgagaaggtcagcctacactggaatgaactttttacattagggcatttgtatttccctcacaatacttgccacattacttggcataggagagatgcttagtgtaattataagttaacaagcctttggatcagggcttgactcatgatagacaaagtatatgcctgctggatggaagaatctcttgggcgagcaccatttttctttccatcacctttccttgaaaatatatcttcagctttgggtaggaggaatcttggtgtatgaaatcattgcaaatttacttcatcttttctggagtttgaagttgtgactctcctgctaccaattaaataaagcttactttgccataac

SEQ ID NO: 1399 - DNA, 436 bp, Homo sapiens
gtgccttcggtgctctttttgtcgcttgtcttttgcccattctcaaggcatacagcagctgtcctgttccctttcaaggactgacagtaggagcttcactatttctaagactttatgggcccacaaccgaagacattcttttcagggttgaattttcagtggtatccattatgaaaactcacttcatggattcagtgggcaaatagcggcaagcaagagacatagattcacttattcagcaaacatttactgggcatgccacatgccagataccgggctaagtatctggcatgtgttacagaaacaaaagacctaattcttgtcaccaagaaacatgttacatgattttaataagttccctgatagaagagcatggggtgctctggggaaatattggagggtcatccattccacattaaaagagcaagttgtctgc

SEQ ID NO: 1400 - DNA, 401 bp, Homo sapiens
agaaggactctggaccctcgtgtctttctttaggatacagagagtaactgtacctattatttgtttcttcagacaagcaaatcatttggtcagagttcatataatctgtctgttccctggagatgggaatagaggatgatgacagtttattttctacacttcccctccttccacatttgtatcacctttgctatcttggggaaagtgcaaaggacaaacatctcaattgtatgaagggagaaaggagaattgaaagaagaactggggttgttagagctgagatgactgtacacatacccctgcccaatttatatagctctttgtggagataattaggggtgggagcagtttgaaggagtaagcctggttttatacttttaaataaagtgtttttatctgtc

SEQ ID NO: 1401 - DNA, 94 bp, Homo sapiens
agtgtaaaatcccctccctagcccatctccatgacactcacagaacattcacaacctttattatgggtgagagcttcactacaactttagaaat

SEQ ID NO: 1402 - DNA, 85 bp, Homo sapiens
tccagaagaagcatcttcctcagaagatctggggggatggaaagcaaaataaaggaggtgcctggatgcattatttgcagtggga

SEQ ID NO: 1403 - DNA, 795 bp, Homo sapiens
gccttgtgccaaaagaaacttttaaaacagctacagcaagatgagtctgactatggcttagtatctttctcattacaataggcacagagaagaatgcaacagggcacaggggaagagatgctaaatataccaagaatctgtggaaatataagctggggcaaatcagtgtaatccttgactttgctcctcaccatcagggcaaacttgccttcttccctcctaagctccagtaaataaacagaacagctttcaccaaagtgggtagtatagtcctcaaatatcggataaatatatgcgtttttgtaccccagaaaaacttttcctccctcttcatcaacatagtaaaataagtcaaacaaaatgagaacaccaaattttgggggaataaatttttatttaacactgcaaaggaaagagagagaaaacaagcaaagataggtaggacagaaaggaagacagccagatccagtgattgacttggcatgaaaatgagaaaatgcagacagacctcaacattcaacaacatccatacagcactgctggaggaagaggaagatttgtgcagaccaagagcaccacagactacaactgcccagcttcatctaaatacttgttaacctctttggtcatttctctttttaaataaatgcccatagcagtatttggagtattttcttttctcctaaatccacaaactctcttctttctctttggacagatgacctcttgtcatagttaagcagagagtgggcaggatattcctgataggaggaactacatgaataaaggggtaag

SEQ ID NO: 1404 - DNA, 1850 bp, Homo sapiens
tggaagtggaagtgcctgaagtcttacaggactcactggatagatattattcgactccatcaatgtactttgaactacctgactcattccagcactacagaagtgtgttttactcatttgaggaacagcacatcagctttgcccttgacatggacaataggttttttactttgacggtgagaagtctccacctggtcttccagatgggagtcatattcccacaataagcagcccttactaagccgagaggtgtcattcctgcaggcaggacctataggcacctgaagatttgaatgaaactatagttccatttggaagcccagacataggatgggtcagtgggcatggctctattcctattctcagagcatgccagtggcaacctgtgctcagtctgaagacaatggacccacgttaggtgtgacacgttcacataactgtgcagcacatgccgggagtgatcagtcggacattttaatttgaaccacgtatctctgggtagctacaaaattcctcagggatttcattttgcaggcatgtctctgagcttctatacctgctcaaggtcagtgtcatctttgtgtttagctcatccaaaggtgttaccctggtttcaatgaacctaacctcattctttgtgtcttcagtgttggcttgttttagctgatccatctgtaacacaggagggatccttggctgaggattgtatttcagaaccaccaactgctcttgacaattgttaacccgctaggctcctttggttagagaagccacagtccttcagcctccaattggtgtcagtacttaggaagaccacagctagatggacaaacagcattgggaggccttagccctgctcctctcaattccatcctgtagagaacaggagtcaggagccgctggcaggagacagcatgtcacccaggactctgccggtgcagaatatgagcaatgccatgttcttgcagaaaacgcttagcctgagtttcataggaggtaatcaccagacaactgcagaatgtagaacactgagcaggacaactgacctgtctccttcacatagtccatatcaccacaaatcacacaacaaaaaggagaagagatattttgggttgaaaaaaagtaaaaagataatgtagctgcatttctttagttattttgaaccccaaatatttcctcatctttttgttgttgtcatggatggtggtgacatggacttgtttatagaggacaggtcagctgtctggctcaatgatctacattctgaagttgtctgaaaatgtcttcatgattaaattcagcctaaactttttgacgggaacactgcagagacaatgctgtgagtttccaacctcagcccatctgcgggcagagaaggtctagtttgtccaacaccattatgatatcaggactggttacttggttaaggaggggtctaggagatctgtcccttttagagacaccttacttataatgaagtacttgggaaagtggttttcaagagtataaatatcctgtattctaatgatcatcctctaaacattttatcatttattaatcctccctgcctgtgtctattattatattcatatctctacgctgcaaattttgggtctcaatttttactgtgcctttgtttttactagtgtctgctgttgcaaaaagaagaaaacattctttgcctgagttttaatttttgtccaaagttaattttaatctatacaattaaaaccttttgcctatcactctggacttttggattgttttttacattcagtgttataatatttgattatgctgattggttttggtgggtactgatgcgaattaataaaaacatttcatttcca

SEQ ID NO: 1405 - DNA, 905 bp, Homo sapiens
gcagcccttactaagccgagaggtgtcattcctgcaggcaggacctataggcacgtgaagatttgaatgaaagtacagttccatttggaagcccagacataggatgggtcagtgggcatggctctattcctattctcaaaccatgccagtggcaacctgtgctcagtctgaagacaatggacccacgttaggtgtgacacgttcacataactgtgcagcacatgccgggagtgatcagtcagacattttaatttgaaccacgtatctctgggtagctacaaaattcctcagggatgtcattttgcaggcatgtctctgagcttctatacctgctcaaggtcattgtcatctttgtgtttagctcatccaaaggtgttaccctggtttcaatgaacctaacctcattctttgtgtcttcagtgttggcttgttttagctgatccatctgtaacacaggagggatccttggctgaggattgtatttcagaaccaccaactgctcttgacaattgttaacccgctaggctcctttggttagagaagccacagtccttcagcctccaattggtgtcagtacttaggaagaccacagctagatggacaaacagcattgggaggccttagccctgctcctctcaattccatcctgtagagaacaggagtcaggagccgctggcaggagacagcatgtcacccaggactctgccggtgcagaatatgagcaatgccatgttcttgcagaaaacgcttaacctgagtttcataggaggtaatcaccagacaactgcagaatgtagaacactgagcaggacaactgacctgtctccttcacatagtccatatcaccacaaatcacacaacaaaaaggagaagagatattttcggttgaaaaaaagtaaaaagat

SEQ ID NO: 1406 - DNA, 4457 bp, Homo sapiens
agggatcccttcttgcctctaaggattcaggagaagcatctcccttgcatttctggactgaaccagtcttacctgagactggaaggctgatttgctttgaggctgatatgtgtgtttcagagcctctgagtaggatgctctgcttttgcatttgattgcagatgagagctttatgagttcacggaatttattttaagaaaaaaaaatatacatatgagaagaaggtaaatggaagcctcctagccccagctagaagtattgtttctgcctgtgggttttcaccaagacctgtttgggggcgctgcaggaataactatataggaagatttttcctaaaatgaaagaacagcaaactcttaggatccttgttgggtggagattctatcactgctaccttggctctccaaggaatgggcttgtgctagaccgctgccctacttaacagctgcctcattgcaagggcagtttttcttgcatgggttctctatattcccagagtatgtggcacaatctgtgttgtttatatgataccagatgccccacaagaacccttattcctctcatttcacattcttcctttaatagcctccttcagatcccatacctgacccctctctaacacaaaacttattgggtaagtgactttgaaaagttttgtggcacctgacccaccccagacactagggctatcagaaggtctcctttttagcccagcacaggcccaggccactttgtcgtgtttgttttaacttctaaagaaaatatgtttcagcattataagaaaggcagaatgcagaacacctacatttttgttttagtttggtgccaaggctcaggctgtattggcaaattcccgaaagttttcccactttgcctggccctgcttctgtcttttctttctcagtaaacagttctgaaggcaggagtggaacccgggagtattttcatgtctttcatccttgaaagatttttatgtgcctgcattttttttttaattaaaaaatgccttttcattggtcttaagagaccgcattggagaatttcaggcttttgataaatgcttcttcaaagagattttcttctctagtctagccttccacattcttagattaatatggccaaccctgtacacatcactacactaaacactgctctagataaactgctcaagttcatttaactcatttgatgcacctaaaggggttcctcattttaaagatttgttaggccaagaagcaagagagtattcctagtattcccaaccatgaaaagtatcattctttgcaccaaatgttaacaaaatcattttgttctcctgcctcttctttttaaaggtgtttgatgattaagtggggtcactgaattccatttgtggactgaaaagtattcaatccacttttggggttcagagataaaacattttttcccaagtagctggggctcttccattttgcagataagtcaaataatcaacactaaaggaggctaaactgttgatgaatgagagactccctgactgctcagatgaccctagccacactgaaagggcacctacaggtcagtttagctacctcctgtctttcccatgcaaagctgataacacagttgtctttggacttgtagacctcttggattccaggtgtgatggagtaaagtgtgggattgttgttttgctgggatgcaaataactaaatgctttggtggttaattgctaagagtaaatactactttagccatccaaggccaccttctgcagcaaaaggcttttgtggagaaccttttatgttcccaaccactttttgaatggtgtgccatttaaaaatccaggccagatcctattataaccaactctcaggatttacagccttcagttgtactagaattttgtttttatccaatactcattaaataagtgggccacttaggaagattcaaaatcttggttattacatgaagtttgttatatttcttgtcaacagtattgaaatgtaatatgtatgtgttcatgtatgaaaatttttactccacacaggtgtttcagtagagtggggcaggaaaagagatctcttcgatttctttcaggcctgaggcttttgtgaaatgcgtcagccccctgtgacagtaggttttgatgctagtgatcttcagatctttctctctggaaatgtgcagagagtgtcagtttcccaagttctgaggtaactctcagcccagatgtgaaatgggagcctaccagctggtatagaagggaatgggtaggaggcactgggtgctgactcattcagcactgtcccttttctatactgctgatacatcccatggttctgagaagccttatctcagtctatttggaagagagggaggaagagaaggaagtaacccaaagtactactcatttatcattgtatattgattagttaaagggataattaatttaatgctgaggagagtttgacagattttgaaaatgagtaaaggcaaaaaaaatttttttagcctttattttgcttttgggaattttacagagtcaaagtaggcagaataagaaaatagttcttcaggagggccgacctttaaagaacttcaacatagtttcggaattgtggggaagagaagagtgactgagctgagaagtaataatagaataaagggttgagtaacttagaactgaaaatgatctcttttaaaaagaaattaaatcagacaccacatggtggtgtccttggatctcactgtacagaattagcagtgtataaccatcttctcttttcatcttgttccaattctctcctctttcctttccattctgctttaagctcatgtgtcaggcagactttaccagagtgtcagacattacctaaaacacatacgttagccatgctgctggtatggagaaattccacaccatgattattagcctcctttaagctgaatgggatttaaccattctaggcaacacccctgaagggcatacctaacctcaatagtgttggcttttaaaacgtatgtttgtatggtagagaaactttgtaaaagaagaatccaagagaagtttgtgaggatcctacaaacccaggcccactcactttgctctaattctttctagtatcttgtagatctaatgggtctgggataaaaactttgaaaagtgtcaatattccatgtatgctgctgaaatgaagttaagtttggaaagaagtgatacctctagactgggtttatattaatctgggatataaatgaagaagacatactaatagaactccttgcttttaattggggaaatagggctttaataattttgacctcaactaaaaatgatatgcaatagtctctgtgtgtgtttgaaatacattgtgttctcagagatttctacattctcacgttctagtgatttggggcatgggcttaatagcagatgtacagtgtattcctgcattattgtgattccccttaaagcccagttcttgctgtcttctaccaggggctgctgactccagttacccatggaatgcaggacctgggaggggtagccattagggtctttcaaaactctttggatctaagcatttgtctctccttaagtgccaatcacaattggatatggaaggactgtgatttctgcaatgaacccaaacttttagagtaaaaagccaaatttaaattataagaaagaagggaaaaaagagaaaaactcaagtctattacttgtagagtccaattcttagcaatggaatcgctctaggattctagtttgggctttgtctggatttgcttttctcagttgtgctttgaagtgaataagctttgttacaaattaattttttattagttccaatattagttggagttaacttgaattgattgtatgtagcacagcacttttgcagtaagattggtgtgaaatactaaacactatggattttgtaggtgtcaggttaaatggtcaagggatacctacattaagtcatatattaggtattgatgatcttacttcttttctgttcccctgtacaaaacacttacctaacccagcttgtggttttaggacagccaaagctcactgttgttggttagtcctaatcactacacgggtctcataaatgagacttgtttgaattttggtacattggagcatgttggttggtattacacggcagcatttcgaatgagtgcagctctgtgtctgtcagaaaggagagataagactactttgaagggaattaaatatgtgagtcctctttttaatggtgctttttgtaacctttaatgctgaggtacagagctgcttttcaatatttcataaaggagtggcagacaagagtggattttaaagctgttcttcaaacgtaatttgtcactggactctgacacacctggaaattatatgatatgatacatacagaaatgttgtgggttttttccataaaactttaataaaagtattatacagcaat

SEQ ID NO: 1407 - DNA, 641 bp, Homo sapiens
ttgtcctattgtcactgccctgtttttcattgggaagcttatctacagatgccttcagaatctgacgagattgactctcagtttcatattgcccagaaatctactttaatgtctctttcgaaagcattaattcactttcctttttcctacaatgaaacctgttttccatttgtattaactcatctcccttccactcatgatccgtcactcttccttgtggtaatccctagactgggagctcaggtactcttttagtcatctttgtatgtctttagcagagttcttgacatgtggtaggtgcttaataaatgtttgttgtttatcaaattttatggtagggagagtaagtcagcatcggtataaaatcgcttactccacgtaactcttcttctgatagggtttgattttctattagaagctcaattttagttttttttcatattataactaaatatgtttcctgagagataagagaaataatgttcctacaatagttgtatgtatctaagataagacatatagatgcttaagacattttgtttcacttgctattcactagtgtacttgaaacatggtcatttttagcccttttccttaggaaccatgtctttattttctcaataaagaaattactttcaact

SEQ ID NO: 1408 - DNA, 57 bp, Homo sapiens
ctgatttataaaagcaggatgtgttgattttaaaataaagtgcctttatacaatgcc

SEQ ID NO: 1409 - DNA, 1938 bp, Homo sapiens
ccctcctttatgggaggatcaggaccaggtgggaacaaaggaggctcagagaagaaagacgtgtcccttctgaactgatgctttctcactgtcatcactgcttggctcctttgagccccgggtctcaatgacgttgctcattaattctagaaactataaccagggctctgggatagtaagagaggtgacaacccacccagactgcagttccctccccaccctctacccagtatacgaagcctttcagattactcatgaaacagggtagagggaaagaagggaagcatggcaaaagctggcctggaagggatagccagagggatagaatgactctctctctacataccagcagcataccaaatgcgttctctaagttcctacctccttgacctgatcaccctccctcctccaaggaagagctcaaagttcccagccaatagacagcatgaatcaaggaacttgcattatatgtgctcttgaatctgttgtctccatggaccattcctcggagtagtggtgagatggccttgggttgcccttggcttctcctccctctactcagccttaaaaagggcttcttggaactttaccagcagcctcagctttacaaatgccttggtatgtacctctggcaaatgccccaccttggtgatgttgcaacctttccttctgctagggtgtacacctagcctgtgcaggtgtcagccctgctagggagtcactgtacacacaaactctactggaattcctgccaacatctgtcaccctgcagctcctttacagttcaatccaatgatagaaaccatcccttccctttctcccttggctgttcacccagccattccctgaaggccttaccaacaggaatatccaagaagctgttgtcccctctcgaaccctgaccagatcatcagccactgaggccagtggaatttccccaggccttgttaaaacaaagaaagcattgtacctctcagattccccttgtggaaaaaaaaattctgctgtgaagatgaaaataaaaatggagagaaaacactggaaaactattttcccctcctatttacttcctttgctgactgccaacttagtgccaagaggaggtgtgatgacagctatggaggcccccagatctctctctcctggaggctttagcaggggcaaggaaatagtaggggaatctccagctctcttggcagggcctttatttaaagagcgcagagattcctatgtctccctagtgcccctaatgagactgccaagtgggggctgtagaaaagccttgccttccccagggattggcctggtctctgtattcactggatccataatgggttgctgttgttttggatgaaggtaaacgatgcttggaattggaaactgagacttatagagggattattacattattaaaatgcacgtgtgtgtgtgtgtgggtgctgatgggatgggtaaaggcttggggagtcctgaaataaggaaaggaaaccacagagaaacttgtgtcttcctgctctcctctccggctgcctggcagttattaacctaaacagatagccacaagaggttgggacagaggagggtaaaggctcagaaggaggttcaacctctgactcacctgcccatctctgggccctctgctgacacttggatgctattgttgggtggaaagataaatgagagtggagaggtggaggaaagtgactaggatgccatttaggaaggaatgtctgatcatcccgggtccctggaggggacaccttttaatctattgcctagcattaatattttctctccttctatctctgaaatgttttatgaaatgagtgttcttgaattagaaattctgtgggatcaatctttgatggtgagggttttagaaaggaaaaatatagtaaaatgtgtaatttgtcttaataaaatctatctctacatcta

SEQ ID NO: 1410 - DNA, 1379 bp, Homo sapiens
gagtgtgcaagggacgcaatagatcaaccacctaaccccaaaggctcttttcagagccacttcagtaatcgagaaagcagctgtaaacacttgtcagagcgtttgatagcttttggtcaggtagggagtgttaccatggtcacggatgcattcgggtttaggactaaggagtttcctgtagtcctgtaatgagttggccctcagtcatccccgtccagtcttactgagttgcttgttatctgtgctacgagattcgaaaggtttgactcgttctgggatatttgggagggatggagggaaggaggcggggggtggttctacaccccttcggcctttaacctgtatctttaaagtcgttttcctttttgtttctgaaagtaatgaacgagatgagatttcccatacagatgagaaaccctcggtccgacctcttactatttcttagtgttttaatctgttttccttaccatatacctacaggcgtctgtcacaaactttgtctaatatagccatgtgctttcgtcccttagcctttttgcaagtcctgacttagccatcctcccctaacttccattccagtgacttcaaacagggagatatattgccaccaccccaccccctgtggagtatttggcaatatctgtagatgttttgggttgtcaggtgtgtgtgtgttgcgggggaggtgctagaagtatccaatgggcagaggccaggagtgctaagcataaggcacaggacagtcctctggggggacaaagagctacctggcctgtaatgtcgatctttggtgattgagagaccccagcgcccaaagacatccctaaccttcaggatttaatcctcttcagtcaaacgtttccttaaccctatcagcccatgtttttcttttcttggtgaaagctgagcacttcataggctgtttacaggtccttctccacaggaaaatacttcctccaggacaagaaccctgtcttggttccaaactttcccaattataagagtcacctttgcgcttgttaaacctgcttccaggtgcttctcctgaggtttcctgattcagctagactggaggtgggacctgacgaggtggttggtttttagtgttctcaggagtgtggatgttttaataggtgttgggtcctcatgttaatcgacctgtgggtgtgtcacagtctttgtgtcacagatgtcctgagaaaggaaacaatttgaggatgagtggaggggaatttgtggtgtagagaaggccacagttaatatgtggggtgaatttctgaagacctctcagttcaaaacttgaataactcaagactcatcctgacaaaagccagtggatgtttcttttgccaaataaaatatacccttggtgcaactgg

SEQ ID NO: 1411 - DNA, 1798 bp, Homo sapiens
gtccctgccgggacctggcgctcgctcgctcgagtcgccggctgcttgactccaaaggctcttttcagagccacccacctaatcactagaaaagagcttgttcacttattcccttagtttcttttcataaagtaagttattttagtgtgaaggtcatgggaaatggcatacgtagctttttaactatttggaactcgaggtccccagtgcgtcattggatttgcttttgaatctagagcgtgtctttactcattgtgctgcttagccttcccaggagtcggttctcaattaggctgttgggaatccgcctctttacccgcccccactcccgccccacacgcgccctggtggctccttgggtctgtttcattctaaaacgaagtggctgagttcggctgtcatttaagagaactccaggacacaattcagcccgggttccgcaaacactgcgtgacagctctgtatgactgacgcttggcagcagcttttgtgtccggtcaccagttctgccgtgcgatggggcctcctgtggataccagccgttctgtgtattttggacgaaggccgcgcagccgggtcccagccttgtcctgattgggcgacaagaatattcaaaattctgcgcctttttctaatttgtagatttcagtttccgtcgttcactttgagactttgaaattcctatttctcattttgttgataatttctgcatttaatggtctgtgctttaaatggtaacgctacggccccaggtcactgcgaggcacttaccatgtagatacgggctcaaaagtcacctctcagagacctacgtcatccactcaggaattcgcgcctctcatacttgcctgtctcattttatcttccttctagcagctgtctgaaattggttcgtctgttttcttgtttatggtattctcaagcccttgacagaccggctagtgtggttttcccgtgcatcttcagcctggcacattatggacacttaaatactacgtattgatctaatattgttgggttaatttttccatcccacccttttcttaatcgcttccgtggatggatgaagggtgctgttcatttccattagatgtatgtgaaggcacagtgaaaatggaaatgttcttggagctacttcctcaaaatgtatccttagtcacctcagtgcaacagctgggagggggccgtgttaagattttttttgctacaaagaggaggtggcaatggtagatccacccttatgcttctcagtttagcataacctcttatggattttcatcaaattcagcgtgttggtcactggaaagagccttttccttctccttttcttactctcccctcatggtgttcccctcttaaaggagaggagcttttaatttacacttaccacctcatttgcttttctggaggccatgcaatataggcgggactacagagttaatctcctttttacaaatgaggccaagagaagcctcattggttcacagtcatgcagctcatactgtccacccttgtattctcagatgcaggacaattgcattttagttttattttgtggaggtgcagaatatttactctttctgtccaacccttgattctgccgaggaagacactgatggtttgatgagtgattcagctgtttttggctaagggcttttggagctgatggcaggggtttgatgaatccaaatgagctctagacattatcacagactgaatagatcttaactgtctcctacatgtgtgttttcaaatgtgtatagatgctattgttattaataaagttaccaattaattt

SEQ ID NO: 1412 - DNA, 54 bp, Homo sapiens
ttaagaggcttgacaccatactcattcaccccaaaggctcttttaagagccacc

SEQ ID NO: 1413 - DNA, 1326 bp, Homo sapiens
aggggtctctagggctttgggattggcaggcacactgtgagaccaacaactccttccttcccctccctgccctgccatcctgacctccagagccctcactccccactccccgtgtttggtgtcttagctgtgtgtgcgtgtgcgtgtgcatgtgtgtaaaccccgtgggcagggactacagggaaggctccttcatcccagttttgagatgaagctgtactccccatttcccactgcccttgactttgcacaagagaaggctgagccccatccttctccccctgttagagaggggcccttgcttccctgttccaggggttccagaataggcttcctgccttccccatcattccctctgcctaggccctggtgaaaccacaggtatgcaattatgctaggggctggggctctggtgtagaccatggaccaaaagaacttcttagagtctgaagagtgggcctcgggtgccctctcacatctcctgttggatgctgggggagaagcaataaacctcagccctctggcctccactttcctctcaatttgggctgcaaatatgaagcctgaattttatgaaattagctttctgattcttatttattaatagattaagttctgaggcagctccgcaggactgtgtgtgaatgtgtatgtatacttacatatgtgtgtgcatgtgccatggggcggggggtatcactatactgtcctcaaatataagccaagggtaatttcagcggatgcacacacaaccctgcctcccacagttcctcccctaatctggtttctgtgttgagcctgggatggaggagccctaggccagcctgggataagagtcccacagtctagggagatctgagggcatccgacaaggcccatctccttccctcctcaagaagcagaggcctcctctggagtgagaggctccacccactacagcacaggcgggaatagcacagctgccctcccatgctccctacctgtcccctcacagggaggggagcaggggagggaaagaaaccaggcatctggtcaaaccagcagatcaaaaagcacaaagagctggggcagaggcaggaagcaggggccctcctggcagctcctctgagtggggagaggttgggcagtgagtgagggacccctaatgcagggactagaagcctcagtttccccattttacccttccacacaatagcctctgtaggttaggctgccccatcccaccctactctgtgtggctgctttctttggtgccctcccctcaccccactgtagctgtgacgtgttgtagtttttagatgtttgtaaaatgtttaaaaaaatgtt

SEQ ID NO: 1414 - DNA, 223 bp, Homo sapiens
attcacattttccttcctcctgttacattttcccaatatcttttctattccttggaccaatcagagatgctgtagctccttggggcaaaggtactaatccctttcagcacccccactccattcccctttttaatgtaactttttccacaggaggtatttcttttttatgttggtcctgagtattttgcaaatgcacagagaaaataaaactaaactccttgtt

SEQ ID NO: 1415 - DNA, 215 bp, Homo sapiens
atcatgagatcagagatgctgttcatcagtcccaacaagatggcctagaaatcgcattctcacctcgccttgctgctgctttaattccaagttctatttcttcccttatagttttctatgggaatgaggcggatacaggaaacaccctatctcctctgtatttttgtagtggaatttctatttaaggggctcattaaagcatagtatttatacac

SEQ ID NO: 1416 - DNA, 3525 bp, Homo sapiens
acgggtggaacactgaagggcaaggaggctaaacaaagttaagctcaactaattggctcatcaagaacacagtccccatgttgagggggaaaatgcagtaatgtttgtgggagcctggctggaaacttttaagtgtgtgcacacaggagtgctgccaggctggcaagagcaggtcggggctggatggcacctcaggggctgtactattcctctgcagagcttgacttgatgaggtttgaggtacaaggggaaaagatggcgattctgtcttataacctcctgggtcccatccagggacctaagagaaagtagcaggggaaggtttggtgtgtgggggtgggaggtgggcagaagtcttggggaggaatgggcaaaggaggttctcagtcaataaaaccaaagttctttaggttgggaaaaagcacatggtggagtgagaagtgtggaggggaagtgggaaattggacacatttgctattgatttgaattaagctagaaattaaggttggataaattcttccccttgaaggatctggaaagacaaggcagtaatgtgtcctcatgggtgcctgttaggaggtgggggtagtttaaatccgtttgtttagatgggaaagggaggaacttaagagggaaatccttttcctcttaaggtttatttccttccaagcagtcatatgtcatctgttacagtttgagaagagattgctgattaccccctgtcttttcctcatctaagtctttaattgtatttgtttaaagggaagagtgtggtgagaacagccgtcatgtgtgttgcattttctccaggtgaattggggcagagctgatctattttttaaccacagcaataaccatacgttggggtttgagtgcaccttgggaggggtgggaggacagacattttagccagaggctgtttcaaacaaaaccaaaaacctaagtagagcattacaggcctctgtggctgctgcgtttctgtagaaagcaacttattttattgacttttttttttaaggaaaagaaataaaaagaccccagcaagcaaaaacatttaaaaaatgatttttttccctcctacttaagtggttctttctccctttgctctacttttggagaatgaacttaacatcccggcttcttttgttaagccatagctgaccttaatctgtggttagtttattaaaataattaaaaatactttctaagaagagatatttttgatattaggactgatgttgaaacatataggggcaatttataaaaaggtagttagagaaatatattttagtgaactataaccacagagcacagatgactcccaatgagctgatctgtctttaggtttctccctttccctgacccttccctgttctctaggggctgggagtggggatgcggacacagtagggggagctccttcgcattttgcacaaagcacaagtctgaacagcctatgctctggccagagccatttctaagagctttaaaccggaagacctatcctgggccaattttcctttttctttatatttttttccgggaaaaaaagtcaactatgcaattgtatacactcccgggtgcatgtgaagaaggggaataagtgtacttatgtgtccagagtattaactggggctgtttttctgtgtttggatttctcttttgaggtatgtactcataacccatcccttggaacgtaatccccacatttgatctaaagcacttgagcgtgcatgcatgtgcgtgcgtgcatatgtgtgtgtgttttcctcctcggtagccagtcaagattgtccttgttggaaatgctcacggtttataaaggttattttctcctcaacaaactcagaagtcacctattttccaaatctgatttaataatttcctatggctattaattcttagggttttctttgaaaatagatttgtgttaaggaagcagtgagattccaaaggaagggatgtgtatatgtctaggcaggtctggaacctggtatgagatgagcactcccctaagttgcaaaatttaagggttactataaaactcattaatcaagatactataaaaaatgcagtatttaaaaaaattaatgcaaaaaatttatgttggataaaatagcgaaatcttacaggatctgacaggactgagattaggaggagggaagtgaggctgaattgaataagtatggggatgaatccttcttatttaaatttttgatacattgtccatcatagactttttacattaattgtgattttttaaaaatgttgcattaaaatagtatttatcttggttactgggttttttggcactccttaaattttgtgcccaaggtgagtgctttgctcacctcaccctagttacgtccctgtttctgtgatttgaacactagcgagaacaccactgtgtgcgcctccacccccatcacacaccaaacaacaggtggctcagacaccctgaatttgcacagctcacctagctttcctaatttaggccttcatatcatagaatggtggcctggaccaataggaatgaaaacagaccaggggttttcccagagaataaagccggaaaagttttgattctccactggactgctgtgtttggatttgatctgttgttagattctagttaacacttttgtttttaaaaactaaggacaaatgaacaaaaaaccttgtatcatgtttgtttttatttataagttagccaatcccaattccgtttgctttattttcaaataaaaaaagatggaaattttgaggggtggtctaggggtgaatatggtaaaatggggctttaggccttatagctttttattaagaaataaattattttttttatttgggagggtaactatttattgaggcattgaaaaacctctccattctaaggatgagagaccctgagacaatggatattttttataggagatagtgaagtttgttttgcttcattctttcggggagggttttggtgggatggggggaggtgaaggaataatgcctgggaaattaatatagattcagcttggtttgtggtattttgggaagatgagggaatagaagaggcaagcccatgtcgttactgggttggggagaaggaaagaaggggcatatggcctgcactcgaaatgggcagaaaaattccttagttaaggaggggtgtgtgagtgaagggggaaggtagaccctttaaccccaagtgagggatgatatcatctctcaggcttaaatttaagtgcacttagttcctttaatccagggcaactggggtacctactgaagtttttaatggagaggggagattttcagggttcttgtttttccctttttgatgttagacagtgctactccctccctgctgtgctctctgccccatctccaatggagtaagtattactgtaggataggcctccgcttctcccttaacctatgctgcatttattgaaagttacaagatttaaccagaagtttttcctccatactggtttttatcaacaaaataaaaagattatatccaaa

SEQ ID NO: 1417 - DNA, 2138 bp, Homo sapiens
atcattctaagaccagattctctaatgtttctgggtgtgcaatagagtgatcacatctttgtttcttcatgtacgatagctatccctacagaagataatgtgtaactttttataggaaaagtgtggttttactatttttgccttatcattccaaataagaactagtctgttaatgatcatattgtatgtagagaaaaattttcattgactcccattgtggaattccctagcaatttatttagacttaattttttaaattcaagcttactgtattagtcatttttagcccataattaaaacatgatcacttttacacaggtgtagtatggtgcatttcattccttatttataaattaactgaaattacagtttgctataatataaaatgacaatagtctcttgagtggtaagttggttatttttttagaggtgatccaggaatctttagtttgaaggcagttaccttttttttttttttttttttttgactaagagtgtttggttgcttttttgtcacaagtaacttggaaaatagaagcagaatagtaaaggttctattcagcaacatagttcatggattttgtggaggttctattcagtaatatggttcatggatttagtggtgactgataagattttatttttgaaggaaaaattgcttatactaagtccagagacatgcaggtgagcccttttgtcaggctgcaaatcatgacatgccgatggttgtttattttgtttttaggtgtgcattctttttcttcttagcaattcctttatgatcaccttcccttcttgtttcactccctcccgctctctcaaaaggaacttgggaaacttgtgaaacccaggaaaacctttagtcttatacctcaactacctttcagtcctgtctgggttttaaataagtgaagtagaagaaattgagtattttctgacataagaatatattatcaatacagttttatgcagtaagctctccttaccataaatgtttcttggttgacaacatctaagacaatattagtgggatgaagaaagaaaagcaggggtgcttttggaagcagtgttagtgttcctcaaaagtcggaacaattgcctgttgatatattaataagacattaaagtcaaattttaatgttggcctctcaaatgatttggataccactctgcaaagtatttctaacctttaattcccagttttaaaacagatataataatagcatttaattggaatatactaggcagctggaaaagtatttgaaactaaattgacattaaaattaagatttgttttcaagtggatgtccattaaaagtagaaaaatatttgggataagtgagtgtgtgtttccttacatggctactaaataaaatataatgagtatacaagtatatctcctcttttgctatggaggctccatgttcaaggcaatggctttttaaatcttggctatctaaaattttttccctttgttttgaatatttgtaagtttttaagaagttagtgtcagcaaattaattgaagttatgcttctatactgggacatatttaaatactgagtatagtactgctgctactgcttctacaatgtaaaatgtatgacttggtgttttaaagtaaaaattatgatgttacttgtggagaaactaaaaatgttgtacaactgaccgaaagaaaacccttggggataagtttagtgaggggattggaatccccaaaaagataacatttttcttctgcttttaaaaactgaaattccctgttctagttcctaacaattctcattacatactatgccagattacaaaatacttatttttaaaatgaaatctatatattgactttcttatcaatcatcttactgtgcaatcaaaattagagtactttggtttgaaaacaacacttagagcctccagataacttttaagacttatttagctttgtgggtggtattttcatgcaaataagtaagggtgggttttatattttgtagaagttttcggtcctattttaatgctctttgtatggcagtatgtatatattgtgttaagttcctcaagaatctccttaaaaactttgaagttaatacttttgtgcaactgtgttttgaataaagccatgacagtgttaaaaac

SEQ ID NO: 1418 - DNA, 1123 bp, Homo sapiens
ctacctggactgatcgcctgacagatcccacctgcctgtccactgcccatgactgagcccagccccagcccgggtccattgcccacattctctgtctccttctcgtcggtctaccccactacctccagggttttgctttgtccttttgtgaccgttagtctctaagctttaccaggagcagcctgggttcagccagtcagtgactggtgggtttgaatctgcacttatccccaccacctggggacccccttgttgtgtccaggactccccctgtgtcagtgctctgctctcaccctgcccaagactcacctcccttcccctctgcaggccgacggcaggaggacagtcgggtgatggtgtattctgccctgcgcatcccacccgaggactgagggaacctaggggggacccctgggcctggggtgccctcctgatgtcctcgccctgtatttctccatctccagttctggacagtgcaggttgccaagaaaagggacctagtttagccattgccctggagatgaaattaatggaggctcaaggatagatgagctctgagtttctcagtactccctcaagactggacatcttggtctttttctcaggcctgagggggaaccatttttggtgtgataaataccctaaactgcctttttttcttttttgaggtggggggagggaggaggtatattggaactcttctaacctccttgggctatattttctctcctcgagttgctcctcatggctgggctcatttcggtccctttctccttggtcccagaccttgggggaaaggaaggaagtgcatgtttgggaactggcattactggaactaatggttttaacctccttaaccaccagcatccctcctctccccaaggtgaagtggagggtgctgtggtgagctggccactccagagctgcagtgccactggaggagtcagactaccatgacatcgtagggaaggaggggagatttttttgtagtttttaattggggtgtgggaggggcggggaggttttctataaactgtatcattttctgctgagggtggagtgtcccatccttttaatcaaggtgattgtgattttgactaataaaaaagaatttgtaattgtg

SEQ ID NO: 1419 - DNA, 2814 bp, Homo sapiens
ccttactgtaagtgcaatagttgacttttaaccaaccaccaccaccaccaaaaccagtttatgcagttggactccaagctgtaacttcctagagttgcaccctagcaacctagccagaaaagcaagtggcaagaggattatggctaacaagaataaatacatgggaagagtgctccccattgattgaagagtcactgtctgaaagaagcaaagttcagtttcagcaacaaacaaactttgtttgggaagctatggaggaggacttttagatttagtgaagatggtagggtggaaagacttaatttccttgttgagaacaggaaagtggccagtagccaggcaagtcatagaattgattacccgccgaattcattaatttactgtagtgttaagagaagcactaagaatgccagtgacctgtgtaaaagttacaagtaatagaactatgactgtaagcctcagtactgtacaagggaagcttttcctctctctaattagctttcccagtatacttcttagaaagtccaagtgttcaggacttttatacctgttatactttggcttggtttccatgattcttactttattagcctagtttatcaccaataatacttgacggaaggctcagtaattagttatgaatatggatatcctcaattcttaagacagcttgtaaatgtatttgtaaaaattgtatatatttttacagaaagtctatttctttgaaacgaaggaagtatcgaatttacattagtttttttcatacccttttgaactttgcaacttccgtaattaggaacctgtttcttacagcttttctatgctaaactttgttctgttcagttctagagtgtatacagaacgaattgatgtgtaactgtatgcagactggttgtagtggaacaaatctgataactatgcaggtttaaattttcttatctgattttggtaagtattccttaggtttttctttgaaaacctgggattgagaggttgatgaatggaaattctttcacttcattatatgcaagttttcaataattaggtctaagtggagttttaaggttactgatgacttacaaataatgggctctgattgggcaatactcatttgagttccttccatttgacctaatttaactggtgaaatttaaagtgaattcatgggctcatctttaaagcttttactaaaagattttcagctgaatggaactcattagctgtgtgcatataaaaagatcacatcaggtggatggagagacatttgatcccttgtttgcttaataaattataaaatgatggcttggaaaagcaggctagtctaaccatggtgctattattaggcttgcttgttacacacacaggtctaagcctagtatgtcaataaagcaaatacttactgttttgtttctattaatgattcccaaaccttgttgcaagtttttgcattggcatctttggatttcagtcttgatgtttgttctatcagacttaaccttttatttcctgtccttccttgaaattgctgattgttctgctccctctacagatatttatatcaattcctacagctttcccctgccatccctgaactctttctagcccttttagattttggcactgtgaaacccctgctggaaacctgagtgaccctccctccccaccaagagtccacagacctttcatctttcacgaacttgatcctgttagcaggtggtaataccatgggtgctgtgacactaacagtcattgagaggtgggaggaagtcccttttccttggactggtatcttttcaactattgttttatcctgtctttgggggcaatgtgtcaaaagtcccctcaggaattttcagaggaaagaacattttatgaggctttctctaaagtttcctttgtataggagtatgctcacttaaatttacagaaagaggtgagctgtgttaaacctcagagtttaaaagctactgataaactgaagaaagtgtctatattggaactagggtcatttgaaagcttcagtctcggaacatgacctttagtctgtggactccatttaaaaataggtatgaataagatgactaagaatgtaatggggaagaactgccctgcctgcccatctcagagccataaggtcatctttgctagagctatttttacctatgtatttatcgttcttgatcataagccgcttatttatatcatgtatctctaaggacctaaaagcactttatgtagtttttaattaatcttaagatctggttacggtaactaaaaaagcctgtctgccaaatccagtggaaacaagtgcatagatgtgaattggtttttaggggccccacttcccaattcattaggtatgactgtggaaatacagacaaggatcttagttgatattttgggcttggggcagtgagggcttaggacaccccaagtggtttgggaaaggaggaggggagtggtgggtttatagggggaggaggaggcaggtggtctaagtgctgactggctacgtagttcgggcaaatcctccaaaagggaaagggaggatttgcttagaaggatggcgctcccagtgactactttttgacttctgtttgtcttacgcttctctcagggaaaaacatgcagtcctctagtgtttcatgtacattctgtggggggtgaacaccttggttctggttaaacagctgtacttttgatagctgtgccaggaagggttaggaccaactacaaattaatgttggttgtcaaatgtagtgtgtttccctaactttctgtttttcctgagaaaaaaaaataaatcttttattc

SEQ ID NO: 1420 - DNA, 3510 bp, Homo sapiens
cctgagcccccctctcctccccttcctcaaccactggacgtttatatattataggcagggatgaaatgggcacctagtcagatcttctcagcttgctagccagaaatgactgtgattctgctgggggctgctgagaaggtaatgtaggttgaaaaggggctctaagtttatttatttcgttagattgacacttccacacactccctgtagtccaggtagggcccagaaataggaaaggctaggattggataatgctgcaaatgctttttttgtgtgagaaactggagagatgtgatttctccttttgggagagaatgtcccaaaattgattaggctgagccttgggaatagtttggcaggtttaacatcccaaggctaacctaacgtagttgggaaaggtagattgaatgagacatgttttctgtgcttctaagtgttctgtcccttaggctgctattgcttcatgtttccattatggcaggtttagagaatccttaaaaagaaaaattgacttgcttgcctaaaactacagtgcccccttagcctccattacttagtatctcttacagtttgctctggctctcaaataatataaagattgatgaacattattcacagaaaatgggcaccttctctctctcttccagcatgttgcttttgaaagtatcatgggatagtgggacgagcactggtttaggagtcaagatatctgggttctcactctactcagtcccagcagagctgttgtataaccttgattaagtcatttagcctctctggatttctatttcctcatctgtaaaatagagttaaatgtatgtaagattgattctgattctgaagtcttaactgccagcagaaaaactccatactgttcattgtaaaactaaaagtgaggaaggctcgtgggtggtgaacctctgctctgtaatactgggaaagtactacagaggggaaccatttgagggatacatgaggagagagtaaattgaggtttggggattataaattcaggcaagagaaccttatagatatcacagtcttgagggtcaaaaaaaaatacttaggaagctagccatggaagcttcttgcctctgacccagcccactttcccagcctacctctgggccttagctgctaaaaagcttctctggcagcggagctgcaggcctgaggaaacatgctcagtcatgcacatgtgttgacccatgtttcagatgcagtctgatgccaggtatattgttagggaaagaggaagaagggtaaactgagctagcccctggggctgagtactcctgcagggctggaggaacaggttcttagaagatgattcaccttggaggaagctggggaaagtggttagggagggagaggaggaagactgagaaatctctgcatccccagaactcagcaacccagctcttttatcatgaggagaggtagccatgctgactcatgaacaggtggaggaaaggggttgcaggtgaccagcatcttcaatctagttaccaccagcttggctagaattttattgaacgcaacttgctagttatgacagagaggaccagggtgagaactaatgctcaagagagcaagattctgtaatcctcttgccctctcacatcacaaattctgatatgccaaacatttggcccaatgagaatgactgatagacttgctgatgtgcatgtggggggatgaggtgtgtatatgcctttctcctgactggccattcagtgttcaggctgtcattcaaattggataggagaaagttggtgaggaaggaatggagagagcaggatccctggactccctggtccccaaactccttgactgtcacttgtaattgtatataatttttgtgtttcttgctccatttcctcatgctgtcatccttaaagtccatctgggaaggggaaaatgctgaacaccattgtatagtttcttcaactgtcccagccatgttgtacatagatatgtcatgttattatatatataaatatatatataattttgtacgttttcttcatctccgatcttctcaaattctgtactttttttcttttctgtctgagctgccttctctatcattcagcttgagtcctcaagactactggtcacaatgagtctgatttttaggaaggaataggaggagcagggaaatcagaaaaactgttggtctcactctgtctctctacctggtcatcttcaaggctaagaaaacaaacaagctacattctgtatttgccagtttccacagcatgaagtacatagcttccttagcaaggagtggtcattccaaaatccaaatgcaaattgctttgattaaacctagattattaaatccattcagaacagcatgtgtgtggtctggttctggcctccacacagtcaccacctcatctctgtgctacctcagtctttgcaagtagctgtggccatgcctctgaaacagcctgctctgagccaggcagcttacccacctggaaacctccagttattttgatcttatctaaagaattatttttctatgtttgttatccatggatatcccagaaaggcagataacgttgtttcgtggataggaaaagactgaaattctattttttgattttttttgcaactcccttatggataggattgagacatgccaggtagcctaatggttgttaaatgtggaggaatcatggggtagagactgggttggagttcagggtttttttcccctattacttgacagtgttgttttttttttttttcttctgtgttcgtccgcagtggccaagttgaatgatgctgcccggggctctgccagatcctgagacgcttcccctccctgccccacccgggtcctgtgctggctcctgccccttcctgcttttgcagccaggggtcaggaggtggctcgggtgtgggctggagaggcagaagccctttcctgttggtgtcccagcacatggagccccttgggctgagcaccaagaccttgaaccttttttgttttaccttttttccaaataacagttgggagaaatatcaatgaaattctgggggtgggggtggggttgaaagggtggggtgggagatatggaggagtatgaattagggcttggagttggtaaaaacattcctgactatccttcttaaccacgtggctgatgtggggtaggtatgaggggaaggaagtggagtagcctaatgaaaaggggttctagttgagctctgtagataaatgccttgtttcagtgtggttggagacctggtgtcagataaaagaaactccatccgcacagacagatgcaaacagctcctctagttctgcagagctagttgagaactcaacattaatcattttaaaaagtactgtccttgaaatagatttgctgtgggaagaagggcagtgagtgtgggagaaaggagccgtgagcgtggggaaccccacagagcccaaaggactttttcagtattcgaaataaacaaaacaaaaacccatgaaaaaacccaacccag

SEQ ID NO: 1421 - DNA, 286 bp, Homo sapiens
aaagagcaagtcaaattaatgtaaatccctgatgtggtatcaattccctcctgatttcccatgtaggaaattaaggcctaaattggagcatttgggtgtgtggggaaatgagggaaagatgttagaaactgaaatgcagactgcccccaggcatttgcctgtttgaatgttggaggttttaggattgtgcactttttaagcattagagataaattttgggatgcatcatttcagaagaagatcaaaccatctctcctacagaaataaatcctcaacttgaaatgaa

SEQ ID NO: 1422 - DNA, 2091 bp, Homo sapiens
agccggcaggtggatttctccttttcccctgctggctggtgactgtcagagaccccatcactgagttttgtgtgatgagatgttttcatcatttttgtttccttttcttgaatcagacttgtgatttggggagagcaacttcagggcttctccatagaccttgaccattataagcagaccttatttctccctacacttccactccataggtaaataaactgggtgaagccacacacacccaatgaacattttctcccatttggtggtttagtttcacccagtgtgcttttggataagcagaaatatctaaatgggattttgagttctccagctatagaatgtgaatgagataaaaagtgaactatctattatatttttctgagtttgttttctatcataaatacatgttttcacagcctttgtctctcagactctgctaaataatgtagcttattgaaataactgtcgctgaataaggagcaatgagaaacaaaactaatttttggagcagatggtctctggaattgcatatcctgctagtgattttctcatctttccttttctaacctaatgagaatgtcccagattcaattacctggatgtcaaagtcctagagccagaaatatattctctcatccctcttagcattctcttgctccctcattcactagggcaaatgtctaaatgaagaaaagtctctctcaacacctcgttcatgcaatcagcattagaatttgtaaggaaggaaggggggtggcatgaaaatttccattcttggggtatatgactgtcctgtttcccccaggccactttttttttttttttcttttgagacagggtcttgctcttgcccaggcaggagtacagtagtgcaatcacagctgactgcagccttgacctccagggctcaaggatcctcctgcctcagtctcccaactaagtgggactacaggcacgtgccaccatactcagcttttttttgtttgttttagacaagagtctcgctttgttgcccaggctggtcttgaattcctgggctcaagcaattcttccacctcagcctcccaaagtgctgagattactggcttgagccactgcacccacccctccagactactttaaatgtctctgctctgactgaattgaaggaattgtaagtttcagttgctgaatatatcagtatatctgaactccagatctttttatttcctatttttggcttcctacataaattaataaagtctgtctatatttaaggtttctgggagtagttttgtctatatttaatccatagatgtgctcctagtcatcagtcttatttcagtaaaaccatctttctggccaaatctctaacacgttttttacttcagtagtgagggcaatgagaagctttattaagaaagatcctatttaaagggctaatttggtattgaaagcatgctgatataaagtccagtatttgaggatataaagaggatgtgcactgagctgtgctgatgttcagcatttattatactttaatgggatagtgcttcttgaccattatagaacaacaaactgtcaaagggttaatacagatgacccagacctgacattaaatcctcttgattagaaataattaaatgaattatttattcatttctctcctctgccaaatctacttagccccacaaaaatgccccagctcagttaacatttttttgtttttcactttaggtatctcttaggcaaatagagatataaattgtaataggaaacagtctctaaatgtgaggctgaatacagcttcagtctggctctctaataggacaaaagccagtccatgtgttgtctctaactgatttagctttttcttttctttgaacaattcggcatgaattgaaaccaggttttcctgtggaaagttatagcttgattgggagatagaagttgaattgagttctttcttgcaactcttagtgtttatttttatatctcagtaagacgaggataccttcagtttgaatctgcataatgttcactgccaaactccttctcatttaatgcttatggccttcacatttctgtataataaagatcaattatcagctc

SEQ ID NO: 1423 - DNA, 588 bp, Homo sapiens
aaattatttttgttctgcaggcttgcagagttcttctcaccatttaaactgaaggaccctatattatatttccctaactctgaagatgtatatgtagtttaaagcagtttgtacactaaaactaagtttttggctgactgtcatattgtggtccttaatcttgagataaatccaatagaacttttgaataaaagcaaaagtacaaatgtcataattgattcggtaataagtaaaatttcaaaattgattttgttcattacctacttaatatttcctttaaatatatactaactgttaaggccctctaatgccatttttctaaacagtaatgtttactttggtattaaaatttggtatggattcactttttacttatgttaaaattataccatttaactggctcttttgtcattgtgctgttattaaaacaatgttcttcaatattttgacataatgtattaacattttaatatataatgtacaatttaagaattggtgctttacctttactatgcttttttttacaggacaaaaagactgatttttaaagtatggcattttttgcagcataaataaaatattgttcag

SEQ ID NO: 1424 - DNA, 588 bp, Homo sapiens
ctccagccagccaaatccatcctgctcttccatttcttccacgatggtgcagtgtaacgatgcactttggaagggagttggtgtgctatttttgaagcagatgtggtgatactgagattgtctgttcagtttccccatttgtttgtgcttcaaatgatccttcctactttgcttctctccacccatgacctttttcactgtggccatcaggactttccctgacagctgtgtactcttaggctaagagatgtgactacagcctgcccctgactgtgttgtcccagggctgatgctgtacaggtacaggctggagattttcacataggttagattctcattcacgggactagttagctttaagcaccctagaggactagggtaatctgacttctcacttcctaagttcccttctatatcctcaaggtagaaatgtctatgttttctactccaattcataaatctattcataagtctttggtacaagtttacatgataaaaagaaatgtgatttgtcttcccttctttgcacttttgaaataaagtatttatctcctgtctacagtttaataaatagcatctagtacacat

SEQ ID NO: 1425 - DNA, 2968 bp, Homo sapiens
aggatctctcctttttataacaaatcaagaaatatgaagcactttctcttaacttaatttttcctgctgtatccagaagaaataattgtgtcatgattaatgtgtatttactgtactaattagaaaatatagtttgaggccgggcacggtggctcacgcctgtaatcccagtacttgggaggccaaggcaggcatatcaacttgaggccaggagttaaagagcagcctggctaacatggtgaaaccccatctctactaaaaatacaaaaaattagccgagcacggtggtgcatgcctgtaatcccagctacttgggaggctgaggcacgagattccttgaacccaagaggttgaggctatgttgagctgagatcacaccactgtactccagcctggatgacagagtggagactctgtttcaaaaaaacagaaaagaaaatatagtttgattcttcatttttttaaatttgcaaatctcaggataaagtttgctaagtaaattagtaatgtactatagatataactgtacaaaaattgttcaacctaaaacaatctgtaattgcttattgttttattgtatactctttgtctttttaagacccctaatagccttttgtaacttgatggcttaaaaatacttaataaatctgccatttcaaatttctatcattgccacataccattcttattcctaggcaactattaataatctatcctgagaatattaattgtggtattctggtgatggggtttagcaactttgatggaagaaaatattaggctataaatgtcctaaggactcagattgtatctttgtacagaagaggattcaaaacgccacgtgtagtggctcatgcctgtaatcccaacactttgggaggctgaagtaggaggatcgtcttgagcccaggagttcaagaccagcctggacaacatagtgagaccttgtctccacaaaaataaaaaagaaactatccaggagtggtggtgtgtgcctgtggtccctgctatgcagatgtctaagacaggaggatcacaagagcccaggaggttgagaatgcagtgagcttgtaattgcaccactgcactccagcctgggtgacagagcaagaccctgtcttaaaaaaagaggattcaacacatatttttatattatgttaaagtaaagaaatgcataaaagacaagcactttggaagaattattttaatgatcaacaatttaatgtattagtccaaattatttttacgtagtcatcaacaatttgaccagggcctttatttggcaaataactgagccaaccagaataaaataaccaatactccactgctcatatttttatctaattcagatggatcttccttacaactgctctagattagtagatgcatctaagcaggcagcaggaactttaaattttttaagttcatgtctatgacatgaacaatgtgtgggataatgtcattaatatatcctaaattaacctaaacgtatttcactaactctggctccttctccataaagcacattttaaggaacaagaattgctaaatataaaaacataaataataccataatacatggctatcatcaaaagtgtatagaatattatagtttaaaagtatttagttgattacttttcagttttgttttgttttttgagacggagtctcactctgttgcccaggctggagtgcagtggcaccatctcagttcactgcaacttctgcctcccgagttcaagcgattctcctgcctcagcctcccgagtagctggaattataggcgtgcaccaccacgcccagctaatttttgtatttttagtaaagacagggttttgccacattagccaggctggtctcaaactcctgacctcaggtgatccacccaccccagcctcccaaagtgctaagattacaggcgtgagccactgagcccagcctacttttcagtttttaacataatttttgttttatccacaacttttcaagtattgaaagtagaataaaaacatgggttcttagtctttagctatctgttaaagcctatgaatgccttcttaaaatcatgtttttaaatgcataaaatatataggattacaaaggaatctaattatatcgaaatacagttattaaaatgttaaaagataagtttgttatatattaatatgcatgcttctttataaatgcattaaataagagttaatagctatcctaaatttgaaatagtgataagcataatgaaaatagatgcaaaaaactaatgtgatatgaaaatatctgggtttttcttttgatgatgaagtattgctaatattaccgtggtttatgaactatgttcagaattgaagaaaatcctaactttcagttagaggttagtgacggggttcaggacaccctacacaaaatacagcactttgacatattgaatattttaagctgaaggcatttgaggaaattgcagaagcaggaaggtgactctgaccttctgcctgctgttctccccagaagcagccataaaacctgggaaggattttctgaccttcccctgaagtagatcataagactgtcatgtaagaggtgctctcctggcacccagagaaaaggagcatccttacctccaaaagcacagggacacaaagaggaatctaaacaaacaggcctctcagtttcccccagtttattacatttagcttgttcacactttgccctatgacatttctacatcactggctgctcttcatcaaacctactataaaaaacattcaagttcaactgtttctttgggcctttatttccttatggagcccctcgtgtcgtgtaaaacttatattaaataaatgtgcatgcttttctcttgctaatctctcttttgttatagagatctcagccctaaacctaggatggatagaaggaaacatatgttctcccctacattagtaaaaataaaaatggaattttttacccatac

SEQ ID NO: 1426 - DNA, 2401 bp, Homo sapiens
gagatgctgtccatgctgggagatcagagcaacagctacaacaatgaagaattccctgatctaactatgtttccccccttttcagaatagaactattggggtgaggataaggggtgggggagaaaaaatcactgtttgtttttaaaaagcaaatctttctgtaaacagaataaaagttcctctcccttcccttccctcacccctgacatgtaccccctttcccttctggctgttcccctgctctgttgcctctctaaggtaacatttatagaagaaatggaatgaatctccaaggcttttaggactgtctgaaaatttgaggctgggtgaagttaaaacacctttccttatgtctcctgacctgaaattgtatagtgttgatttgtgctgagatcaagaggcaggttagaagaacctgacatccactgtttgccttggatagtatggcttgtttttggaaagaaattctgaagagagtggaggagaggagaaatgtcctcatatttgaggaccatgaaacattgtaggtatatatggggctttagcaagtttgagcataggctctttttgctgcctgtgagcagtccctctggaaagaaacatgtgagtaagtgagagagagtgtgtgtgtatgtgtgtgtgtgtgtgtgtgcgcacacatgcttctgtatttcactctttctccctattagggagttatgcaaaatttgtccccgattttacctttgtctttctgtgtacttttcaaagagtcctaaggagttaaatcttccaggtattttccacttagtattgcagccaaagaatatttaaataaacgtctttgctgcgcttgcatccatgcccagccaatatacaactgtaaagcaaatatagaaagtcggctgttgatacgattgtctgttatcgaacacattcagtgataaagctgggttactgctgcttttggtgctctcaccttatctggaagatctgcaaacattacctaaataggctggcaagataaacactttctggaacccgagacttggccataaagataatgctgcatttttctgtcagaatcacatatgatgtgtgttctgtagaggttatttctgcatggaaactcaacttcttggattagccgtcccagtgaaaatcctcattgttggagtgtaaaccaaatacgaagccctcttgcaaagtagcctctttcatcccatactcaaaatacccagtttagcaagcaactgagatttaagtctctctggccctaagaggtttttcctctttgctccctccaatcttgagattgggttttgctttagagtgcaagtatcataattccgtatgatagatggggcctggacacccatctcaacagggtcacttggtaattaacaatagccatataaatgcggatacaggttactaccctcaccctttaccttcctcaggtaacagtcgtagataccagcttttttttttttttttttaaattggctttggccagtagctaaagtgcaagactgaattaatgagaagatatattaaatgtagtcataggggactgaggagcaagggtggccttgaagaggccaaaggaatgtccatttgctgagtttcccttccttatgtctccagtctggtgccaggtagtggagtaaaaaaggagacagtttatttttttattctatgtgcacacttacagtatacatatatatttatatcacaatttacgaaaccaaaaagttgagtttccaatggaacccttgttttttaataatcgactttttaaatgtgatcaggactataatattgtacagttattatagggcttttggggaaggggaggatagcgagaagatgctctgggggttttgtttttgcttttccttcagggttttatttttgactgttttgttttcttgttggccatttctgtattgctggcatctgtgctaagctttacagtggcaaaaataatgacatgtagcaaagattttcaaacaaaatattttttccttttgtaaaatttcttgtgttgtgtgatcttgattgcggctttatcattcctttccagttcataaacaacaggcacccacaaccagaggaatctatagtttaagctccagacatacaaacataaggcacattgtgtctttaatttcaggaatcagaaatcatagggttctgatcacattgcacgcctcccccctcacttgtcctcctgatcctgacacattctgagtaacatcagcaggaatgctctgaccatgaggtgggggttttggggtgggcgttgcctgggttcttgggagagaggggaagagtcgggacttgaaaaccactagggcacatctggatgccttcccccagtatgtccttttctggattaaaatgagtgaaatttaaactg

SEQ ID NO: 1427 - DNA, 974 bp, Homo sapiens
accattactccagctgcctcccagattaatgcataaagccaaggaactaccccgctccctgcgctatagggtcactttaagctctggggaaaaaggagaaagtgagaggagagttctctgcatcctccctccttgcttgtcacccagttgcctttaaaccaaattctaaccagcctatccccaggtagggggacgttggttatattctgttagagggggacggtcgtattttcctccctacccgccaagtcatcctttctactgcttttgaggccctccctcagctctctgtgggtaggggttacaattcacattccttattctgagaatttggccccagctgtttgcctttgactccctgacctccagagccagggttgtgccttattgtcccatctgtgggcctcattctgccaaagctggaccaaggctaacctttctaagctccctaacttgggccagaaaccaaagctgagcttttaactttctccctctatgacacaaatgaattgagggtaggaggagggtgcacataacccttaccctacctctgccaaaaagtgggggctgtactggggactgctcggatgatctttcttagtgctacttctttcagctgtccctgtagcgacaggtctaagatctgactgcctcctcctttctctggcctcttcccccttccctcttctcttcagctaggctagctggtttggagtagaatggcaactaattctaatttttatttattaaatatttggggttttggttttaaagccagaattacggctagcacctagcatttcagcagagggaccattttagaccaaaatgtactgttaatgggttttttttaaaaattaaaagattaaataaaaaatattaaataaaacatggcaataagtgtcagactattaggaattgagaagggggatcaactaaataaacgaagagagtctttcttatgccttccttgc

SEQ ID NO: 1428 - DNA, 1215 bp, Homo sapiens
ctgggactacaggcatgcgccactgcgcccagctaatttttgtatttttagtagagacggtttcgccactttggtcaggctagtcttgaattcctgacctcaagtaatccgcctgccttggcctcccgaagtgctggaattacaggcgtgagccactgcgcccagctacctgtcatttctaatatagcctgcagggggaaccaaagcctgactttttgtttttgtttctgtttttgtttttgttttctatgggaaatagtgctctcctgggaggtgggtttccaaatctctgcttggacacatgaatttgagggttgtgctctccactaacccaagaattcccatgctggggagggtagcttggccctccgcttgcttcccagttcatacagatggtcctttgctccctctatttctcaccttgttctaatgcctgtttctcaattattttgcctgaagtttcctggagaatgagggtgaggggagacctggagtgggagacctgggtgtggattactgtagcactaaggcaaaacaggattcctgcggaatagccaagtgcacatcaaaggcacttccaactccagtgcctcttcccggtccatgtcctgctccacccaaccttcaatcagggaacacaaacaacagcgaagtttgccaaaagaattcgagtatcagtgagatgttctggccagggtacaggagggatgagtgaggcagaaactatcaaagaaaactcatttccccacacccaagaaggagctggatgacccaggtacagatataattttgagatgggaaaattaagggattttaaagaaacagttccagcctcaacaagaagctagagaatgtggtgctcagtgaggggttatcctacttggaggcccagctggtctcccaggttcagccaaacacggaaatctcagatcctcggatgtcatgtggggtggggcagggaagtctcacatgtcttcagccctgcacaaggccaggagggctgactggcaatcccctttcactgcatcctgcagacaagggaattcagtgttagaaagatccaccaccactatggcccaagtgctctctcccctcctttgggctggtccatcacagttcatctgggagggaagggtcctcccgggagctcagagtcctgcactacattaaccaaagactcctgggttttcttttttaagatggagtcttgccctg

SEQ ID NO: 1429 - DNA, 2355 bp, Homo sapiens
gttctgccatcttgaaacccccattctgtttccagcccagaagaaatgctgcccctaccagatccctccttgaaccagtgatctaaggacccctcttttccctatctgcctaacagtgcctcacaaggcttgggggctggactccctctactccctctggccatagcccctcctggagatggggtcaaggcagcaggactgatcaagtgactactggttagccagaggagctcagctgaagccctggaaaccctcaggtctgagataggagttctctaggaacctggaatgagttcctgtctcctgaatgatggtctgggtgccacctgtttttaaactcttaaacctggaactccttaaatggggtaggtgggtgagattatcaaagctgaagctggctttgctgagaagctccctacctccctgcccttctcctccttcctgctggaatgaactaaagcagatgtcaagcaggggctggtgggggtgcctactcccttttccactctatctttagatttcaaaccttaggcttacagcccctcaatatctctctgctaacaccagtgtctctttctagttaggcctctaatcttctgtttctgtttaccagcttcccagcaactttccttttttaaaatattaaaaatttaattcaggttctcttaattatcctcatcctgctgttgcctccgcccttaactctatccctattaggaaccttgtttcccaccgaataagagttaaggtaagaggtagctcttcacctgatgacattccatttaagttttggggcatctttcctgccctctgccaacctccctgctggcccaggtgagaggaggaagaggggtctggaaagaaacccagaatgcggcagaactaggagtaagtccatctcaaggtggacttctgatcattgaggatggtgagataaataggttgaaaacaatcatctgtgagtttaggagtcttaagatcctcacagcacgggagcagggagaggctctagaacaaggtttcacaaccgagatgcctttgacattttgggctgaagtgttctttgtaaggaaaacctgtttcctattttgtgcattacaggatatttagcagcaaccctggcccactctagttatgacaaccaaaaatgtctctatacattgccagatttctcctagggggcaaaatcgcctccatttgagaaccacaactctaaagtcaagatatttttctctgaagtgatttctgcttggcacgctaccctcatcatcttactcatcttaagcccgagccatggatcaactaggagcccatataaatgaggctcagtagggctgcacataatctccaaacaattctttattcagtgttttgcttgtgtttgcatgttgctatgatggacaggtccccctcctccattcttgccctctggagaagtggttcctgcagtgtagagatatgaacagggtatggtaggattggggaaaggggagagagaagcagtagatacactccttatcctccccaaattttaagctctatttctgtgccctagtcctagacacacattagactcagggagttttgtctgaagaccaggtcccactgccccctggctgaagagtctgctttaaatgggaaaacaacgtaggagcaggggtttttaggcactttcagtattctcaggtgttcttcgttctggcccttccagggtaattaggaaggcagaacaagacagatgagctcctgcctgctctgagacaagaagggtggggtctcattagctttgcaacaggaaacatcctgttttatggtagtggggtcaggaatgtaggaactggtatccattctgccaattccaccacccattcagtttgcttatccctacagaacagtgactgaggttctttttttttttttttttttttttttttcaaatttccatgtattttctgccatttttcagggtctaagattggtcatacattcccaatttactctcagttccagtcaagctggttgctctgaaagtaacccagcttgttgctctaaaatacctcagtagcctgagtgttatactagagatctaaagggttaacaggatagggtggaaaggttagagactcctagaaatctctggtcaccgtgatcttcggcctcattctaatacctgttctttggacagtctttttcctttggtgctctcttgcctttagctaccttctctaatatgtatgctaccatcactaataaagtgatgggaatgggtttgagagtcgtaatttatattaaaaagttgttggacttttaaatacattttttcaaataaaaaattaagcaaaatagttgcacagt

SEQ ID NO: 1430 - DNA, 795 bp, Homo sapiens
agggagcggcccacggcctccagcgtggggagcgcccgagtcctctcggccacgagctggacgctcttcaggacgtttcaccgccccctcgccccgcacctccagccttcccgactcgcagagtctcccgaggccccttttcgcctcgggtttatttattgactgtctttccccctgtcctcgacagaagagtgggaggtgagaagcccgtctcctcagtgagccagcatttcagggggagctggcggactcccactccccgctcccttccagccaagctgccttaactcgcccctcggggctcccccagagactgtgccccgggcgggccgcgcgcgctgtgtccagagtcctcgggccttctgggtctgggacgtgcctctcctactgtgtaggagcctccgcttcccaatacagccgtgtctgcagccactgcctgacttcactcgggcgggggagggcggcagtcggtcggctcgctctgggcgccctcgctctctgccttcatctgggccctgggctctcccgggtaatgggatggctgcggtcccgccggggggcagtctggaaaggtttcctaaaggagacgagcgaattaacggtgtcgaggtgagccagggccagggggaccccggtaaagtttagttgaggctggggaaggccctcggagctcgtttccagatcgaggtaagagggactttcttaaaggcctagtctatgggatggggcggcggagggaattttttgagaaataaaatgaagctgcagtgtacgttacttgaagttccacatcag

SEQ ID NO: 1431 - DNA, 1134 bp, Homo sapiens
tgtccccagaactgactgagagaagcaagatgttgaaagagaaacttcagggggagaggagcctgaggtgaggctcaagaacatggcttatgagcctgcctccctccactccagccatcctccccagcctccttgtctgccaaaaattccttggcctggggcagttttattggcaagattagggaatgggaactggacctttcccagttcttgggctgaatctagagttgagtcctttagactcaaaaggctctttttatatccttgttgcctttcctatcctttttacctttccctggccttagaacagggaagcagagactccccctcagcttcttcctcatctccaactatgtgacataatttatttggtgctaatattgaagtaatatttatttgctatattttatttcttcccactcttagctgaaaaatggaatttctatagccctggggtgaggagaacccgggaacagtgagccagtgactgctggttctccactttccccaccttgttagccaaacatgttattgaggatgaggcaatcggtgatatagcccaccacagagaatggatgactgttggccttttctccaatctcaaagtgacagatttgggctgattctttttttttttttttttggtaccccattcctgttgaatgggctcagtcttgacaaaccaattccctgtaactttttcacaattcttgactctgagaaaaagcagcactgtagggacctgaactctccattctaccagttcacccttctgacctgttctgctcagcctgtggtgaggggaacagatggaagaaggctttccttggggtttgaagaggaagccagttgtgggagtctctttgttacaccccctcccctccagaccctctctctctatgccttcctcctcactgcatatttatttgcgatttgtagcactgatctatggtacagttgttttgtttcttaaacagaagtaggtaagggaacctcagtaataatggaaatctgcctcagtctcctgtttggaaatgatgagaggtgagataagtaatgtttatatacctcctttcttctgtgatgattataaggtatacgaagctggacagattaaacattgagccctgtgca

SEQ ID NO: 1432 - DNA, 93 bp, Homo sapiens
cactgcatttccctttaccaactagcgctgggagcactggacacttaaatcctcatctgtcctcctttcctgtaaataaaagcccttctatcc

SEQ ID NO: 1433 - DNA, 186 bp, Homo sapiens
agagatgtctagtcctcagaaacttctttcctgccctgattggggctcttgctgttccgtttcttctccctgcttctcccctttgtcatctctgatctttgcctaatctgtttctttttccttttcccctagttcttacaggtttcgttgtgttttttaatctaataaaatagaaagatccctttt

SEQ ID NO: 1434 - DNA, 915 bp, Homo sapiens
cacgctcctcagcccaggagtggtggggggtccagggcaccctccctagagggcccttgtctgagaaaccccaaaccaggaaaccccacctacccaaccatccacccaagggaaatggaaggcaagaaacacgaaggatcatgtggtaactgcgagagcttgctgaggggtgggagagccagctgtggggtccagacttgttggggcttccctgcccctcctggtctgtgtcagtattaccaccagactgactccaggactcactgccctccagaaaacagaggtgacaaatgtgagggacactggggcctttcttctccttgtaggggtctctcagaggttctttccacaggccatcctcttattccgttctggggcccaggaagtggggaagagtaggttctcggtacttaggacttgatcctgtggttggccactggccatgctgctgcccagctctacccctcccagggacctacccctcccagggaccgacccctggcccaagctccccttgctggcgggcgctgcgtgggccctgcacttgctgaggttccccatcatgggcaaggaagggaattcccacagccctccagtgtactgagggtactggcctagccatgtggaattccctaccctgactccttccccaaacccagggaaaagagctctcaattttttatttttaatttttgtttgaaataaagtccttagttagccacttgtgtcatttccaggttttctgggggagtgcagggggagatgggtgatgaggtatgaacggatgcctcagtgtccaagatacaaaaggcactacatagaagtttgctttttccctgcctgtcttggtcactaccacctcttccctgagaagggcgggccttccatgttctctcacccgcttcaactccacat

SEQ ID NO: 1435 - DNA, 1545 bp, Homo sapiens
tacaggtctgtggggaagagtgtttatatccctacgttaactttgcctagtagaggcccttctttgcacttgcttctcatttggctattcttttcctaaggaagtccattctcctctgtacagacagctgagtcacccagtctacttagtacctggttgctgcctctgaccttttcagcttgataccctgggctttagtgtaaccaataaatctgtagtgaccttacctgtattccctgtgctatcctgtgggaaggtaggaatgggctaagtatgatgaatatataggttagggatcttttggttttaaatcacagaaaacctaattcaaactggcttaaaataaaaaggatttattggttcatgtaactagaaagtccataggtagtgctggctccaggtgaagacttgacccagtagttcagtatgtctctaaataccggactgacttttttctcactgttgcatcttctgtaggaccatttaagtctgggccacttaatggctgccagcattcctaagattacacttttccccatttatgtccaatcagaaaaagaaggcatctttgtaccagaaatctcagcaaaagccctaatattcacactgattaggcctgggtcacatgtccaccctgaccaatcactgtggccaggaggatgatacatgctaatttgcttattctatatcatggacaacacctttggggaaaagggtgggggtcagcctccccaaaatcacatggattccccaagtggaaactaggagcagggagttgcttgggtggccgctaacaccaggctactcttattttagcttgctaagttgagatcagctagacctgctttcttttctcctcagtcttgcatttccctcaatacaagctgtagcctctttcctcgtttctagtctcagaaggaaggagagggaagccattctcctctagggactcttcagtctcatttagatgatagtccctttttttctacctccatattagagatggagctccttccttttcctgtttcttaatttttgtcttctcattcctgcttccctctcaccctattgccagttccaccaactagagtgaaagacttcctagccatttcattaaatctattctgtatccaccaggtggcagcatcttgtcatacgtgtcaggacttaggactgcggggtttaggttagatgtcacggaaaaagctagttctgtggtcaggcggcaccaatgagaaaggaatgcagaccctccagatgtatccttgggaaaagcagtaaaccaactaatatttattgaagacctactttgtcctctacatagggtagcttctgtcagggaatcttggttcttcccaagaaacactgattttctttcagggagacttcatgtgttcatttatttccaccacagcagattttaagaaattataatatgtaatatttgatatctataaagagtatatctaacgtgaataaattatgaagcatactaatgagtacctatgacccataacacatatacattaaaacattttaaatacc

SEQ ID NO: 1436 - DNA, 238 bp, Homo sapiens
actccaccctcatcacccacactccctattttgggccctcacttccttggggacctggcttcattctgctctctcttggcacccgacccttggcagcatgtaccacacagccaagctgagactgtggcaatgtgttgagtcatatacatttactgaccactgttgcttgttgctcactgtgctgcttttccatgagctcttggaggcaccaagaaataaactcgtaaccctgtccttc

SEQ ID NO: 1437 - DNA, 2078 bp, Homo sapiens
gtgttggggtcatgagggggtgtggagtgagggtgggaacatgtgagggagggtaaaggggcttagggaaaagggggcataccaggtggggtatttggtttctattttttaattttataccaccactcccccctgaagttgacttacacttccctgtggatttgtggattaattaggaaaaccaatagtaatcacgtctgagccaaggagctggcccattggtcattcacttctgctaaaaacaggtttttgtgactttttttttttttaaatttaaatcactgtgtttggtatttttctgacaaaattaagaaaaagaaaaaaaattatttgtgggcaaatgttaaatttttttgtttccccttttacctcaattgtatcatagtactgggtttttttgtttgttttattgtgtggccaatgtctttgggcatgatgctatctaatcattgttaatgtgagaacatttctgaagatgggaaagacaaattatgtagctcacaaactggtttattatatatatggataaaaaacttttttcattgtggtcttaacacttttatataaaaatgaaaatggaaaaaaagtcccactgaactctctcttccttctccttttctttccttccctctccagagatgttggtttctacagcaaccctagatataaaattgtggctttaaaaatgcatgaaaccacctttaattatccagaatgaatagatttgtcttttcctcaccaccttccctccaaaacatgacataaacaatattttttgcacttgtgatccttggcccctttccccattctcaacaccatccatccctctggacaaaggatcatacaggtgttattagcaagcaagagatactgaagcgatcaaacagttttagggtggaagccattcccagtttgagtcttcatcctgtaagcccccaggggcagtccctgctttactgaacttcatcctgttagatggagagcatgcctgtttaagggattactggtcctacagccaggagctaattgttcaagaagtgttgaactttaaaaagacaagaccacttgttgaaatccagcgtgctctgtggctttcccctatttctcttaatacttagggaagaatctgacaggaagaagcgcacaggggtgtgcacaaagaaaatgacatgaatctttatttttcactgccagcttcaaggaaagaaaattttttctacaatttgcatgagggatttttttaattgtatgtactcatggttgtaaaccaaaacgtactgtaccgtacagagaaaaggagcaaaaaaccaagtcttctgtttatcctgaggctttccacaatgttcccctcctgtgagccaaggaggcaaactgcacaagcttgtaaatggttcgtctttaaaatgtacataagtggaacatttaataaaatgaggggaaatggatttataaacttgttttttttctaggtgaccctgtttaataggctttcacagactggggaatgctcaagatgtgatgggcctggtggtacaggtgtgacatttgttaccacccatttctcccaccccaccctgcttttttgtttgtttgttttttcatcccccagcacactataatatagtgaactggaaaagtcccttccagaaacagcttggccagctttgtgaacctttgacatctgaaaacaaccaaggatccatctgggcttctcttccccagctttttgcctgatgccattttattgacagacaatggactttgaagtcagcctttgcctttgagaaagttcaagaactatggttggtcacgtctatctacaacctaatcctactctttggtagtctctgcagcagccacagccttagcagagctggggttcctgtcttctgcacacgattgactttcttgatgggtaattttttttaagattataccaacagtggatcagctgggttttggccaggaagttgtctttgtggactctgcctgcatggcttagtagtagaaggaaatttttttttggttttgttttttataattcagtttaatcaataaacatgtatttattgactgtt

SEQ ID NO: 1438 - DNA, 841 bp, Homo sapiens
aagactctgagcagccagtcattcaaaaacattaataaagtgtttgttgtatcagagctttatactcagaaatagaaaaataaaataaaatacagctgctgtagtttgttcttacagaaactttagtaaggagaaagccacttacaaaaagtgtaactgaatcagctccaagaaattatgtgtgtaattgtgctttggagattagtgaaattgattgattaaagatgggtgagataatgaaagataacttcatggaagagatggatttctgagcaaggttttaaagttaggatttggtagagagatcttcaggttgagaatgatgagcatgagggttttcagtggtctagagcaggggtcggcaaatgttttctgtaaagggcctagtagtaaagttgtaggctttgtgcacaatatatagcctctgttgcagctattaactgtgctgttgtggtggggaagcagccacagatacataaacgaatgagcatggctgtgctccactaaaaactatttatggactctgaaatttaagtttcataaaattttcatgtgtcgaaaagttttattcttttatttcaaccatttaaaaataaaaaccgcaaggtatagtggctcacacctcatcccagcattatgggaggccaagacgggaggatcacttgagcctaggagtttgagaccagcctgggcaacatggtgagatcccatctctacaaaaaaaaaaaaaaaaaagattagccaggcgtggtggtgtatgtctgcagtcctcgctactcagaagtctgaggtgagaggatggcttgggcttgaacccagaaggttgagcctgcagtgagcc

SEQ ID NO: 1439 - DNA, 1095 bp, Homo sapiens
gtctggagatcccagaggaaggggcgcctcacaccctcttcccacgactggccccggccctctccgcacacctgccctgggccttgactgggttctggggcaaacgctgcttcgtggcccccgggggcacaagacaccggcccctcccacccccctgcctctctgaagggccatggctatgcttccctggctccaagggcccatttcctcctagatgcccttttggcctttgtgagggagcgaggaacaggctcgaaggctccggggtatctgccttctgctgggctcctgtgacaggccttctgtacccagcgtttgtacttgcctcccccaacagtgggcctgttctacccgtgcaggccccaggagagccgcaggggcctgccacacactcccagctcaccctcaccccagcctcttccccacattaggggtttcttggaagctggctctcactcccctccaccctcagctagaggtaggatatccctgattcctgggctcccagccttaaaactcactgcctcccccaagggccccctctaaggagggtgtgggggagccctgagggctgcctctctgccagtcagccacagagaccctcctcctttcacgaggaaaagaccttcccctgaacccctaaaaatgtttacagtctctgctggttccctctgtgtaaataccactaccacccgtgcgttatccagcccgcccggcctggcccggacgctgccatctctctttctgggagtttagacaatgttgcccttggatttttttctctctcttaatttctccctttgctttggggggtaattgggtattgggaggaggggtgtggggaggggtcaaggggtttattacctgatcattttctttaggaagaggttttagggaaaagaaaatggggtgggggtgggggtggtaaggggagaccggggagtcagtttcagacagttctctatgcttaacttatttatttattgcattttacttttaaagagttggtcttttctgtctaaataaagaaaaaagtttaaaagcatcaaataagagtcttggaaggttgagggtaggggattgttccctacccac

SEQ ID NO: 1440 - DNA, 154 bp, Homo sapiens
ggaccccttggccctggccttcaaacccaccccctttccttccagcctttctgtcatcatctccacagcccacccatcccctgagcacactaaccacctcatgcaggccccacctgccaatagtaataaagcaatgtcacttttttaaaacatg

SEQ ID NO: 1441 - DNA, 401 bp, Homo sapiens
atctactctccctccaaggcagcaaagcagaatcgggagcagtggagcagaaatgtgcaagcaccctgatctcactcccagctctgaccaaatacagaattttagagaacatctgaagacatcagactgcactgcgtatacatgttgaattcttcatttttgccatctttaactgtcatcactggggcagggaagtcctgttccagaagtaccaggctgtagatttgataagctagatgcagtagaccgaaaccatccaaaacctgtttagcttcttcctccattggagtttattgggacaaacaggagagccagccattgtctccagtacttgcctcattctcatcatccaaactgaacatttgtatcccaagcagaaataaagagaatatgttcttttt

SEQ ID NO: 1442 - DNA, 422 bp, Homo sapiens
atgttgcctgcaatgaactcgctgaagcatgctcagccctggaactggtgctaccagagttccgtagggaacctttactctttagaggttccctgatataaatcattcataagacttcctaccctggaaaatgagtaatgtctcattcttacctgcagtttgttactatgtataaaagtctttttctttaatatgcctttaagtcttacctgtttacagcccattctgatgggttctttgtcattctgttagtataacccagtacttttcctgctgcctggaatgccctcttctatgttacctattctgtccgttgagatcccccaacttgggccaaagccaagagatctatgtgccttctctggttttctccacatctatagcacctcaactgaaatatatggataaaaacagcctaacaa

SEQ ID NO: 1443 - DNA, 634 bp, Homo sapiens
cctttccttccccagtggggaacccaccaagtccgcttcagataccaaaggggaagacagaaccaaggctgcttgaaccagaacctagtcccgagcagcaccgctctcctgcacctcccgcctgcgttgtgcctcctgccggagagtctgcttcctgagcttttccggtctgaggatagcattgtcatttcttctctgagggtcccagggagctgcagatgcagaccccgtcgttagtccagcccctgcttcaccccctccacacacaaaacaggaaacataatcaaagcgctagtcagctagtctaaccactaggctttcttcacacatgcttatatcctttaataaccaattgccaaccacggctataagattatttcagaggtggggctgggaagtgccacttgctccttagagtctgtttgtcaaccaggcagagtccctttcttttctgctccccaccccaaccctgcccctatgtacaggaataagagcaaaggacccacaggctacagagaagaggatggggacagagtgtgggatggagaggacagaccatatactgcactgtgtttgcatgagcctctaccaccttcctctatctaccagatcattaaacctgctgtcaaagggc

SEQ ID NO: 1444 - DNA, 1399 bp, Homo sapiens
cctggaagagggactccttgcctctccctatggcctgctggcccacctccctggaccccgttccaccctcacccttttcctttcccatgaaccctggagggtggtccccaccagctctttggaagtgagcagatgctgcggctggctttctgtcagcaggccggcctggcagtgggacaatcgccagagggtggggctggcagaacaccatctccagcctcagctttgacctgtctcatttcccatattccttcacacccagcttctggaaggcatggggtggctgggatttaaggacttctgggggaccaagacatcctcaagaaaacaggggcatccagggctccctggatgaatagaatgcaattcattcagaagctcagaagctaagaataagcctttgaaatacctcattgcatttccctttgggcttcggcttggggagatggatcaagctcagagactggcagtgagagcccagaaggacctgtataaaatgaatctggagctttacattttctgcctctgccttcctcccagctcagcaaggaagtatttgggcaccctaccctttacctggggtctaaccaaaaatggatgggatgaggatgagaggctggagataattgttttatgggatttgggtgtgggactagggtacaatgaaggccaagagcatctcagacatagagttaaaactcaaacctcttatgtgcactttaaagatagactttaggggctggcacaaatctgatcagagacacatatccatacacaggtgaaacacatacagactcaacagcaatcatgcagttccagagacacatgaacctgacacaatctctcttatccttgaggccacagcttggaggagcctagaggcctcaggggaaagtcccaatcctgagggaccctcccaaacatttccatggtgctccagtccactgatcttgggtctggggtgatccaaataccaccccagctccagctgtcttctaccactagaagacccaagagaagcagaagtcgctcgcactggtcagtcggaaggcaagatcagatcctggaggactttcctggcctgcccgccagccctgctcttgttgtggagaaggaagcagatgtgatcacatcaccccgtcattgggcaccgctgactccagcatggaggacaccagggagcagggcctgggcctgtttccccagctgtgatcttgcccagaacctctcttggcttcataaacagctgtgaaccctcccctgagggattaacagcaatgatgggcagtcgtggagttgggggggttgggggtgggattgtgtcctctaaggggacgggttcatctgagtaaacataaaccccaacttgtgccattctttataaaatgattttaaaggc

SEQ ID NO: 1445 - DNA, 1456 bp, Homo sapiens
ctgggacccatcaaagagcagggaggggtcctcaagcagcaattggtgaggcgagggaaaggacccttttctctgagtaaataaagtctcacagtcccattctcggcccagggcctttctgtggttggaaatcaaaatccttccagggcatctcacatacccaccttcccattcagcaccgactgaaaagatttactgagtacccgccaggtgtcaggcactgtgtgaggcaccaggcacccagaagtgaaagacagggccccggtctcaagatgcacaatgcgggagccaggtgccaagtcagagtgccctatcacgctcctcccacacccaccctggcttccatcatgagtgcagtgtcatctcagcgggaggaagggctaattttactctacaaaagcaatcagaaaacatcttctagaagaagctcttcctgaactgtctcaaaagttaagtggtgttcattaggcaggcaggggagaggaggatatcccaggcagaagggaagtaagaagtaagacaaaggtgcagaggtgtgaaagtgtacagggactttggagaagagcaaggtgttgaggagggcaggcgtttagggaaagagaaggtgggcaggagcaaaccacaggaaggcttcataatccctgatggagagctggaactttgtcttgcaggcaacagggagcctccaaagggcttgggctggggagtgacagagctttgttatttagaaagatgactcagtggcagtaaggcgtcagcaagactgaaggcaggagtactagttaggagatccccacaggctttacactagagacagtaagggcctgcaggggtcagagctgcgaagctgagagatatgagaaaatgttacaaatacaggaagtgcaggactgtgccactagttatacaatgtggatctgtgaagacgagctccaagtttctggcttatgagtttccaggtggttatcactggaaatacagaaagaggtgggggtaaacaatgagctcagttttacatgcatcgagcttgaagtgcccatggaacttgtaccatgtggcaagtgccagcaggaacgtggatattgtgatatggagcttggagagataagctactgactcaaatcgtgagccaatataaaatgtgacatgaggccggacacggtggctcatgcctgtaatcccagcactttgggaggccgatgcgggctgatcacttgagtgattcgagagtcgagaggctggtcgggagttcgagaccagcctgaccaacatggagaaaccctatctctactaaaaacacaaaaaattagccgggtgtggtggcgcatgcctgtaatcccagctactcaggaggctgaggcaggagaatcacttgaacccgagaggcggaggttgcagtgagccgagatcacaccattgcactccagcctgggcaacaagagcaaaactccgtccc

SEQ ID NO: 1446 - DNA, 1304 bp, Homo sapiens
agagctgctggtgaactccatctcattctcgcccctccagaagaagcagttgtcccccaaatactctgctccctcactgctgaatccctgtagggagaagcctgccaacagtgaccttccgaaacagccttctgaatacaaagaggattcagtttccatcttctcaactttttaacacagaaatacttcctgcgagcatatcgacaactctcgggccaggcgctgtggctcacacctataatcccagcactttaggaggccgaggcaggcggattgcctgagctcaggagttcaagatcagtctgggcaacacgatgaaactccgtctctactaaaatacaaaaaattatccaggcatggtggcgtacgcctgtagtcccagctactcaggaggctgaggcaggagaattgcttgaacccaggaggaagaggttgcagtgagccaagatcatgccacatcactccaacctgggcaacagaacaagaacccatctcaaacaaacaaacaaacaaaaaaaaaaaactcttgtctccttaggatatgttacctgctccactgcagactagagaaataaatgtgtattgaaccttttactgcaaacttgaaaatgctagaaaaccaagcatgaagaataaatacatggtgggaaacacacaggcatgtgcatatgcatatacattgtaagttagtaagttagaaagctagctttgttgtatctgaacacatgaatcttttttggtcagtgtaggaagcacagccagatcctataggaatgaatacctcaaatctgttgtctgagattctagagattaaaccactgtgccatttttaacccaggctgtactgttgtttcttaccaacagcataggttttcatcactggaaggagcctgtgttcatttcctagggctgctgtagcaaagtagtacaaactggattgtttaaaccaacaaaaactcattgtctctcagttctggaggccagaagttcaaaatcaaggtgttgaccaaggccattctcctgaaagtgctagggaaggagctgtccacgcctccctcctggcttctgggagcctcaggtgttccttggcttctagatgcatcattccagtcctccatcttcacatggcattccctctgtgtgtctccacagtgtcttccctctgtgcagatctatctctgtgtccaagtctcctctttttataaggaaaccagtcataatggacccacctgaatgacctcattttaacttgattacctctgtaaaaaatgtatttccaaataaagtgaccttatgaggtattg

SEQ ID NO: 1447 - DNA, 252 bp, Homo sapiens
gcagaaatgagcagttcgctcctccctgataagagttgtcccaaagggtcgcttaaggaatctgccccacagcttcccccatagaaggatttcatgagcagatcaggacacttagcaaatgtaaaaataaaatctaactctcatttgacaagcagagaaagaaaagttaaataccagataagcttttgatttttgtattgtttgcatccccttgccctcaataaataaagttcttttttagttccaaatttg

SEQ ID NO: 1448 - DNA, 823 bp, Homo sapiens
atcattatcatctcaacatgcccccaatttctctcccaatcaccctcaatactcacgtgtacacattcagatgcagattaacaatcttttaaattctcttcctaaatttctacaaaaacaaataataaaatattcagcagtgggggacaccactaaagaaacatctgagcaaacaaatacagtcagtaaaactcctaccaaacaatgctacttccaaatgccaaaatgggctttgtcatgagacagtttatctcaatgtacctgtcattaaaaatggaaaaattccttccatatctttagcaggtgccagtttttccaactgattcattgaatttaaaatagagcagtaggaaattataagactctgcaataatatctcataatcataaaatattaattcatatatatagattactctgcttcatgacatttcctagaagtatttcaagttcatcctaaaattttatccttcaaaataattttagacaatgccataacttaattatgattttctagcacttgattaaagtaaatttatgactctgctcatgttcaggtgcagctgaatctatcgccatggattcattctttcaattactcatccaacaaatttttattaaatcccactccttacacaaacttttcatagcttttggctcaaataaacaatcaagaataattatgagagaaaacacaaatctaaagtatgtttgattttataagaagctcttgtaaccaaccatccagtgagtctactaagtgtttacctatatggtttgatgagggtattaaattaaaattgataattaaacaacctgatgat

SEQ ID NO: 1449 - DNA, 994 bp, Homo sapiens
ataataaacataaatgcaatttactcaagtagcaatttaagaaataggaaagtcatctatgaattcatcatgaaagacaagcaatccatcatgaaattcgttctaaaagtgaatcaatgcatttctgtctctttctttagagcctaaaactgtagcatatatcttgttatggggttccttccaaagactgttaggcatttgtgctactttgttagaaaatactgagtggaataacttgttagaatgagggttaaactttgaggaataatgaaaagcttttaaagagctttgggtttagttggagttgtctttttgagagctcatcattcatttatagatggtgccaaagctaaccttacatttcttagaagcaaaatattacaaatgcattaccagtcctagatacaaagctttgttttacagcaattagtgtaccctaatttttagtgtgccccaagtttggtgtgtcccaatttttggtattgtggcagaaggtgaaggctctgaaagcaaagatgcagcagcggtagtgtctttacttatcaaaaccatcaagtcctttttcttgggtatatatttaatcagtaagttaattagtggcataaaaaagtagcatcagggtcttttcccaagccagtgagcaagagcattatttcataaagaatagggatttatcatttcaggaaaaaaaaaaacattcaaatgtgggctttagcttgttttcagcagaaagatcttgctccctatttctaagaggctgctcaatattgggaaatatattgaggagttattccatggaaatacaatgctttccacctactactgtagttcaataacgtttccacctgaaaaaatatcatccatgcccagatgaaaaggaagagtatctgtcactgctacatagttccttaatttgactgtaacacatttgtttcaagtctttggattcaaacaaccggattgtattaaaattgacaataaataaatgttgatt

SEQ ID NO: 1450 - DNA, 525 bp, Homo sapiens
gaaattaatggcaaaggaattaatccaagaatagaagaatgaagcaagttcactttcaatcaagaaacttcataatactttcagggaagttatcttttcctgtcaatctgtttaaaatatgctatagtatttcattagtttggtggtagcttatttttattgtgtaatgatctttaaacgctatatttcagaaatattaaatggaagaaatcaatatcatggagagctaactttagaaaactagctggagtattttaggagattctgggtcaagtaatgttttatgtttttgaaagtttaagttttagacactccccaaatttctaaattaatctttttcagaaatatcgaaggagccaaaaatataaaacagttctgtataccaaagtggctatatcaacatcagggctagcacatctttctctattatccttctattggaattctagtattctgtattcaaaaaatcatcttggacataattaatattatagtaagctgcatctaaattaaaaataaactatt

SEQ ID NO: 1451 - DNA, 1873 bp, Homo sapiens
cagttattttctagttctgaccttatagtatccaaagcaactaaaagaacaggaagacacagtttaaatcatgaacagtcaatggtaagttatgaacattcagttgattctcagtatcagtctcgacctattattataagaagtcaggaatctagtcatggacattctatagtaactcataaacagtcaaacaacacctatgttcaacctggatataacacagccagaagggagggatgtacacatagccagtcaaatgaccaccttggatttggccatggacaatccatatcagttcatggccattcaaaatctagttcaatcagaaaacaggaatcccatactgataacaaaaagcattcagaagattgggagaaagacactcatgagcaattaggatctaggcatgggaagttagagttcaatacaataggtatacatggatctagccagcaacatttcggagatacaacttttcatgggcaggtaagatccagcacaggttttgccagataggtattaagtcatgggccatcaagagatgcctagggtcagtctggattcagtaccaatgaaagacaagtatacagccatggccaatcaaatgatagttatgagtagtcaaatgacagcaaaagtcaaagatacattttcagtcactttcttgacagccaagaccctgcaggaattgaagagtataggtatagatattcatcaagcagtgcaaccatatgcagtgggggagacaaaggcaagagtcagagtcaagtctgtcaggaggtatcagaatatacggtgaggatgtgggcaaaaaacaaagaggctctgaggccagcggttaccatacaaaggaaagaacaggctctggttccttctgcttagatagcaacaccccactctatgaatatgtccaagaacaaaggagttattactttgaataagaagccaacataaactagcccaagataagaactaacccagagaagaaatgagacacatacatgaaattaaggtatttaacatgatctcctcttttggtagtaagggtatatgtctgttctttcattttaactatagttctgtactatattacttttgtttggtgccaggtgtttttgtaaggctccacattcattgaactccttggttagaaaatagtgaatgaggccgggcgcggtggctcacgcctgtaatcccagcactttgggaggccaagatgggtggatcacgaagtcaggagttcgagaccagcctggccaacatagtgaaatcccgtctctactaaaaatacaaaaattagctgggtgcagtagcgggcacctgtaatcctagctactcaggaggctgaggcaggagaattggttgaacccgggaggcagaggttgcagtgagccgagatcgcaccactgcactccagcctgggtgactgagcaagactccaccttgaaaaaaagaaagaaagaaaatagtgaatggaagaaaaagataaacaccatttggggctatattcagaactatataataaagagagatttgtgtggttgggaataaaattaggttttaaaaaaatttccgaatttcaaaatttggattttccagattttgttttaattaattattgacaaacctatccaaggagctaaatgacgtggtttaggagccaaaacgtctctagaaacattataacacatcccatcctgaacaaagaatgttgtcatagtttcccacatgaatattcagaatatttgcatctttttgtgtcactactggaattctgtacaattatatttaaatttattgtcatggccttctggatataggatccagaaaattgtacttcataaaaattggcaataaacatttcatcaagtta

SEQ ID NO: 1452 - DNA, 351 bp, Homo sapiens
cttccccgactccaatgtccagtactggaagaagacagctggagagagtttggcttgtcctgcatggccaatccagtgggtgcatccctggacatcagctcttcattatgcagcttcccttttaggtctttctcaatgagataatttctgcaaggagctttctatcctgaactcttctttcttacctgctttgcggtgcagaccctctcaggagcaggaagactcagagcaagtcacccctttgtactgaattgtcctcatcttgtggggggtttcaggactatttttatctctgacatctctctattgccccatctaccctaatgcatcaataaaaccttaagccactgg

SEQ ID NO: 1453 - DNA, 275 bp, Homo sapiens
tccagatcctgatgctgagacaagcgatctttggaggaaacaagaatcccaagaggccaagaacagccccatctgacgcatgccttcccatataccctcttctgactttcacaggctgagctggaggttttcctgtgggggatctgagctctccccagaaggcacttcttgttttatgtacaggatgtcatatgtccccctacccctgtacctgccaaggattggcagtgcttgtgcccaacctcgtaaaaaagataaagttccttgtcctcatt

SEQ ID NO: 1454 - DNA, 273 bp, Homo sapiens
cctggatcctgatgctgagacaagcgattttggaggaaacaagaatcccaagggcccaggaaaaccccatcttgatgcatgagttcccagataccctcttctggctttcacaggctgagctaggggttttcctgtggaaggtctgagctctccccagaaggcacttcctgtctgatgtccaggatgtcacatgttcccttacccctgtacctgtgaaggattggcagtgcttgtgcctgacctcatcaaaaaataaagctccttgtcctcatt

SEQ ID NO: 1455 - DNA, 287 bp, Homo sapiens
agtggaccctgagcctagaagagcagaatccaggaccgcaaactgccaaggacatcccccttctcctactaggcctgcctgagaggctcacaggtccaagggaaagctctgaacttgccaagagcatatcttttccctggagtccagaaactcagatcctctcctggatctccattcactggccttggacctcacctttgtggctaccctcccacgctctgtctaagcccctagcttactcaatgtcatttgcagcgtgcatctgctgattaaaggactaaaacaag

SEQ ID NO: 1456 - DNA, 403 bp, Homo sapiens
cagcttcaggattcatcaggagcatgagaggataaggataattggctcacctcgttccacagctccacttgcatcttctcaccaaagccttccatggatgcacagggagcttctttctccttaacctgtggcctgcctgtgatgatctgtgacagcaaaagattccctttctgaggctgccatactgccactgtccaggtggagctaagaaaaggaagtcctcagctgtgccagctcccagagcttcggaagaaagagcagcagctctctccctgggaaccatcagacaattctgttgatgtgttctgtgtctgtctgtcacctggtcatgagcttctaccacctttgcaattgtcatttatctttcactccctgaataaagtatctatgcatatatatttgt

SEQ ID NO: 1457 - DNA, 377 bp, Homo sapiens
cagcttcaggattcatcaggagcatgagaggataaggataattggctcacctcgttccacagctccaccttcatcttctcatcaaagcttatcatggattcatagggagcttctttccccttagcctgtgatctgcccatgatgttccctgatagcaaaaggtttcctttctaaggctgccatactgccactgtccaggtggagactgagcaaaggaaccttggctttgtcagttcccagagcttcagcagaaagagctgcagctgtgtgcctgggaaccatcagagaattctgttgatgtgttctgtgtctgtctttcacctgggcatgagcttctaccacctgtgcaattgtcacttttctttcactccctgaat

SEQ ID NO: 1458 - DNA, 376 bp, Homo sapiens
cagcttcaggattcatcaggagcatgaaaggataaggataattggctcacctcgttccacagctccacctgcatcttctcatcaaagccatccagggatacacagggagcttctttcctcttagcctgtgatcggcctgtgatgatctctgatagcaaaaggttttctttttgaggctgccatactgccactgtccaggtggagactgagcaaaggaagtcctgggctgtgccagctcccagagcttcagaagaaagagcagctctctccctgggaaccattagagaattctgttgatgttttctgtgtctgtctgtcccctgggcatgagcttccaccacctgtgcagttgtcactttcctttcactccctgaat

SEQ ID NO: 1459 - DNA, 396 bp, Homo sapiens
cagcttcagaattcatcaggaccaagaaaggataaggatatttggctcacctcgttccacagctccaccttcatcttctcatcaaagcctaccatggatacacagggagcttctttctccttagccagtaatctgcccatgatgatccctgacagcaaaaagtttcttttctgaggctgccatactgccactgtccaggtggagactgagcaaaggaagtcctgggctgtgccagctcccagagcttcggaagaaagagcagcagctctctccctgggaaccatcagagaattctgttgatgtgttctgtgtctgtctgtcacctggtcacgagcttctaccacctttgcaattgtcacttatctttcactccctgaataaagtatctatgcatat

SEQ ID NO: 1460 - DNA, 397 bp, Homo sapiens
cagcttcagaattcatcaggagcatgaaaggataaggataattggctcaccttgttccacagcttcacctgcatcttctcatcaaagcctaccatggatacacagttagcttctttcctcttagccagtgatctgcccatgatgatccctgatagcaaaaggtttcctttctgaggctgccatattgccactgtccaggtggagactgagaaaggaagtcctcagcagtgtcagttcccagagctttggaagaaggaccagcagctctgtccctgggaaccatcaaaaaatgctgttgatgttttctgtgtctgtctgtcacctgggcatgggcttctaacacctgtgcaattgtcacttttctttcactccctgaataaaatatctttgcatacgt

SEQ ID NO: 1461 - DNA, 306 bp, Homo sapiens
catcactagaattcatcaggaccatgaaacaacaagatccagtggctcttcttactcccaggactccatcatcttcccttcagctgtagtgggaggctgcatcttccctaacctctgtctggcttgagcgttgacagagaaaaggcttagttctgaaaaccgatatgttgttggaagatgagcagccagatcactgcctaatctcgctttgctgtctgtgatgtagatggtggttcctatcctgagagcaagtgtgtttattcttttgcttctccccaataaagcacatgtttcatggtcaagccc

SEQ ID NO: 1462 - DNA, 94 bp, Homo sapiens
aggaggccccactccctttgagactgccctccctcccctgctgggtctctccaaccctcaccagccaaggtggctcagcaccttgtgtccccct

SEQ ID NO: 1463 - DNA, 647 bp, Homo sapiens
gagaagccccaggtccttctgagactgctttccctcccctgtcaggtctctcctgtcctaaccatccagcttggctcaacaccttttgccctcctcccctgccacacagtcctgtgcctcctttttcaggttgggatgatcatgccctctcctgccaacatcctccaagggcctccaaacctcatagctggacattcacagccctctgagtctgagtccagatttcttctctccttaccttcctctcccttggaaacccaactcctcagccaggtgagacaatgggctggttcttgtttcatttctctctctctctccattcccctctgcctggtgagccttcccctggtgtctgcctggcagcccccacctcccacctatcacccctcacccataactcaggtcaacgtgaccaaccttccttgcttacacataaacttgtatatatttggatgtagcccttatttaatggctgtcattatttatagatatgtctatccttgctacttggttgtgagtttctccaggggaggaactgtgttttattcatctctatgtcctctgtttctcagcagtgtctgaaatttaatgggttctactgatgtttattagagaaatggatgaataaatgaatgaagagatccaaa

SEQ ID NO: 1464 - DNA, 119 bp, Homo sapiens
gtagctctctgaaggctttttacccagcaatgtcctcaatgagggtcttttctttccctcaccaaaacccagccttgcccgtggggagtaagagttaataaacacactcacgaaaagtt

SEQ ID NO: 1465 - DNA, 70 bp, Homo sapiens
ctgagttactgggcccagaggctgggcccctggacatgtacctgcagaataataaagtcatcaatacctc

SEQ ID NO: 1466 - DNA, 61 bp, Homo sapiens
cccagccccaccaatgggcctccagagaccccaggaacaataaaatgtcttctcccaccag

SEQ ID NO: 1467 - DNA, 96 bp, Homo sapiens
aaataaatagggaagatggagacaccctctgggggtcctctctgagtcaaatccagtggtgggtaattgtacaataaattttttttggtcaaattt

SEQ ID NO: 1468 - DNA, 148 bp, Homo sapiens
ccagggctgccctccaccctcaccctccaccctttgctgctgacctcggctgctcctctcacagaccctctttggccccctgccctcctctccctcccagatggacccttccatgggaggaaataaagtttccatcgcaggtgctggg

SEQ ID NO: 1469 - DNA, 140 bp, Homo sapiens
aaactcctctgatgtggttggggggtctgccagctggggccctccctgtcgccagtgggcacttttttttttccaccctggctccttcagacacgtgcttgatgctgagcaagttcaataaagattcttggaagttttga

SEQ ID NO: 1470 - DNA, 349 bp, Homo sapiens
cctctgctccagggggtgcgctggctgtcgggggctgggcatgtctcccacaccccctcctaccctctctcctgtacccctttcaatctggacttgcccaggtcttctgcgatcagttaacccattttacctaggaggcccagagatgtgagggctccttcctcaggatgcccagcgaatgaggggtagagccactctggggcccagcctgcctgccgcacccctgtggcctcccttgtggatgggaggaggcgggatctgctctgaggccctcgaggctcagcagagcgtgcaccaatgagaccacgatgggaaagggcctatttaactcctaataaaaaactggcat

SEQ ID NO: 1471 - DNA, 328 bp, Homo sapiens
agcagaactcttgacttcctgccatggatctcttgggcccaggactgttgatgcctttgagttttgtattcaataaactttttttgtctgttgataatattttaattgctcagtgatgttccataacccggctggctcagctggagtgctgggagatgagggcctcctggatcctgctcccttctgggctctgactctcctggaaatctctccaaggccagagctatgctttaggtctcaattttggaatttcaaacaccagcaaaaaattggaaatcgagataggttgctgacttttattttgtcaaataaagatattaaaaaaggc

SEQ ID NO: 1472 - DNA, 643 bp, Homo sapiens
agacccctttggccacaccttccaggcactggcctgatgccccgccctggtgctctccccaggctccctcctcagcctcctgcccacccagggccctttactctcttctccctccagaccttcctctgacccttgctgaactggggtccctttgtgagtgtctcagtctagaggtacctccctccctggggggtctcagctcctggagtcgcaggcccttggggcccctctgtgagatctcaatgctgtctggggaccctaagagttttctcacctgttcagtctcatctaaccttccaatgtctgatgttcctgccaaattcctgcctgattctgggtccgtcctgacctccaaaggtcagcttggtgcttgaggtctccctgctcttggtggcagtggtagcagcaacagcagcagcagcagcagcagcagcagcagagacctctccactttcccttagcccctctgctgggtagagaggcactttcagggacttccctccagctgcctcttcatctgggaatgagctaagcaaggctgagcctcctcctgttgcttgaaataatgatgatataaaggctggatttggagtttgtatcccctggtccctctgggatgctcattaaaaccttcccactcctt

SEQ ID NO: 1473 - DNA, 627 bp, Homo sapiens
gaactccctctggaattcttggggggtgttggggagagactgtgggcctggagataaaacttgtctcctctaccaccaccctgtaccctagcctgcacctgtcctcatctctgcaaagttcagcttccttccccaggtctctgtgcactctgtcttggatgctctggggagctcatgggtggaggagtctccaccagagggaggctcaggggactggttgggccagggatgaatatttgagggataaaaattgtgtaagagccaaagaattggtagtagggggagaacagagaggagctgggctatgggaaatgatttgaataatggagctgggaatatggctggatatctggtactaaaaaagggtctttaagaacctacttcctaatctcttccccaatccaaaccatagctgtctgtccagtgctctcttcctgcctccagctctgccccaggctcctcctagactctgtccctgggctagggcaggggaggagggagagcagggttgggggagaggctgaggagagtgtgacatgtggggagaggaccagctgggtgcttgggcattgacagaatgatggttgttttgtatcatttgattaataaaaaaaaatgaaaaaagtg

SEQ ID NO: 1474 - DNA, 91 bp, Homo sapiens
agccgcctggctgagatggggtgggcagggcagagctgatcagggccgagcagaaccgcactcttcccaaataaagcttcctccttgaaac

SEQ ID NO: 1475 - DNA, 357 bp, Homo sapiens
cattcccttcactccttttcctacccaagggggaagactggagcctaagctgcctgctactgggctttacatggtgacagacatttccgtgggatagggaagatagcaggaagaaaagtaaactccatagaagtgtcattccactgggttttgatattggcttagctgccagtctcccatttgtgacctatgccatccatctataatggaggataccaacatttcttcctaatattctataatctccaactcctgaaaacccctctctcaactaatactttgctgttgaaatgttgtgaaatgttaagtgtctggaaatttttttttctaagaaaaactattaaagtacttcctagt

SEQ ID NO: 1476 - DNA, 3548 bp, Homo sapiens
cgcctgttccacttgtactgccccatccttgaatcctttatccctttcctctttcattcccccaacttctgtcgcatgcagtgcctgtactggtgcctaccatacacggaaagcaaaacagaaaaacagaagacaaaaaatagagatcagcaagaaaacacacgccctgccctgccacctcccctttatttcacactgctgcgatctgttcttctgccgctctgtcttctctcttcagttttctttaacagtgaggtggatctttacctctgatagaggtcagaatgaggtcctggggagaatctaagccctccgatgtgtgtttctaaagttgttttatgctataattattaccatttttaatgatgttgtgtgtcctccctttgttcagtggacggttaaaccttcccccactcaaccaatctttttctttttccttttcttccttttttttttttttttttgtaaacacaaatgacattcagttcaatgatacgagcattgcagattgcagtaggggtcccagctgccaagtaggacatgactaggagtgttaggggcagaagttttgaatgcacttaaccggaggagggcgcagggtggggggtatcaaagaaggacgaatagcaccctacctgtgggtgtttgggggctggacaatttgggtggcagtgtttggtactgaagttgggctctaagaatgaggggaaagagcctggggaggagcttaaaactcaaccactctggaatttacccatagaagacgggaagaaagaggtatgaagatgggctcaattatgagccagggaggattgaaactaggtcctgcctttctgtatcttggggaaataagaccgatctcctgaccccattgggaacacggaagtctattccaggccaaccagcccaaaattatttcatcttgtattctttgtaaaattctccctcaccccaccctgcttttaaaaattctaatctatcccctctaaccatagccccatctataatacagaggaacggctgttccaaggctgtttgctgggtgtcccacaagttgggtggacataaatgagtcaagtgacaacaggaggaaatagacttagacgaaagaaaggatttctcttccaacagttgagattcgcatatttgcctattctttcaccctctgagtgccaggagatgagaggctgggggtacacaatcaggttggagtcctgtccttactctgctgcaccagctgcagaaccaactgctcaaagccaaacagctcatggcaaaaccagcttaggacctctgctgtacaaatagttgcttcccactgccccccgcccgcccccagaatgatattaattttgccttttttttttttttttttttaagcgctactaatgtagagaatgaattgaattgtgcaatgttgctgttctggggactggggagattagcatcccatttgcccacactgtgggaagacggagtggaccaggctgtttttgaagtaagggaagccccttaaaggtacgggtttctgctcttctcatagtgtacacccacctgcctctctggctccagaagctgccagagtgcactggggggaatgttctcagcagagaagaatgaggagaagtttaatattttgcccttgaaagtcacctgaggaagtttccccacttttattttttaaaattaagtaattttttaaagaaggcacttttaaaattaacacacacatgaactgcacaccttccccataaaatttggaggtggggtgggagaaagagctaaaatcaggctcagttcccctactctggcctctactccccacaccccagtgccactgtgggtgactatactggccctacgggccttcctggcttttttctttcctcccttaccccaaattcattgagcacttaaaggagcagagatgcagccagtgtctgggctcccccagtggtgaaatgatctggaagctagatgctagtaacaggtagtgattgggttttttgagtatttttccggggaatgtggtacccctgactgtaagtggtgggagagggaggggggttaatggaactgggtctgggattattttaaaattatatatatatatataaagatatattcttacatcttttctttgccctctgtgctttgaaagcactggataaattgtttggttttgcttttctctcttccacaaaattggaagctttttttaaaaatgttttccccacaagtcatcttgccttgtggcatgtctgtctagcctcttcctccctccctcatgatgaagtgccatttctgttacgtctccctctccccaagctcagaggtgctcagaggtacgagatgcccaagtttgtcagttgagattaaaagtaaggaacagagaatgtgcaataccgtctggctgggggctgtccctgccctgccctgagctgagtcctttccctgggagccaggccaccttagaatggggtttggaagtaagatgtatagagttggggaatcatggagaaggaaagcctatagtcgagtgcctgcttaggtgctgaggtcacaggggagatggtggaatcttccctgtttttatcccctcagggtcagttacatagaagctgcttcttgactagtatagctcggtgaccctttgttcaaccgctgaggtttgatttcttaccctttcttctccccattttcatactcttcccagggattagtgatggaggtgaggtctccctaatcatggtaaagtgttaaccttccacctcctcccttccctcctccttcctcatccttctgtcttcctcaattctccgtctcttttttttcatcactgattgccttgtgtccctccaagtctacttgttactatccatctccaggctctgggccgtgtagacactaaacctcatgccctaaggacaggaggaaagaccctctgtttggagcattattagtagagtgaggatcccaccagttctgcctggcttcctccatccccagaggcactaaaagcagtattttaaggttggtgtcttactccctggaagcctgaaatgggtggaatagcggtaaggcttgagtaaaactaggggacagaggttcttatttgtcgattttattttataatttgaccacagcatctgaactccctctctccctggaataagtatttttcccacatttttggatatatgtatggtagacaatttttttttaagacacagagataaatgttttcctgctttggttacctttcctttcccctttaaaaggaattagctatagaactgctttgtaaagatgcttcttgatattttacttttgttccttttccctaatcattcccttttctccccactcctccagaaggcataacccttctctccacaccccctacccccacccccgtcctaggctcccatcctttccatcaagaccttcattagcttatgatatttgctgccgagatgttataacaaggactcgttcatgtatataagctatttcttgatccatttaaaaggaattgtacattgtgt

SEQ ID NO: 1477 - DNA, 431 bp, Homo sapiens
gggcacctcatcaccatccctcttcttggccccatcccccaccaccattcctttcctcccttccccctggcaggtagagactctactctctgtccccagatcctctttctagcatgaatgaaggatgccaagaatgagaaaaagcaaggggtttgtccaggtggcccctgaattctgcgcaagggatgggcctgggggaactcaagggagggcctaaagcacttgtaactttgaaccgtctgtctggaggtcagagcctgttggaaagcaggggtagaggggagccctggaagcagggcttttccggatgcctaggggtgggcagtgccagcccctcctcaccactcttccccttgcagtggaggagagagccagagtggatactattttttattaaatatattattatatgttaataaaaaaatcatatc

SEQ ID NO: 1478 - DNA, 985 bp, Homo sapiens
ggggcttcaagagaggggcaggggagattgatgatcaggtgcccctgttctcccttccctcccccagttgtggggaataggaaggaaaggggaagggaaatactgaggaccaaaaagttctctgggagctaaagatagagcctttggggctatctgactaatgagagggaagtgggcagacaagaggctggccccagtcccaaggaacaagagatggtcaagtcgctagagacatatcaggggacattaggattggggaagacacttgactgctagaatcagaggttggacactatacataaggacaggctcacatgggaggctggaggtgggtacccagctgctgtggaacgggtatggacaggtcataaacctagagtcagtgtcctgttggtcctagcccatttcagcaccctgccacttggagtggacccctcctactcttcttagcgcctaccctcatacctatctccctcctcccatctcctaggggactggcgccaaatggtctctccctgccaattttggtatcttctctggcctctccagtcctgcttactcctctatttttaaagtgccaaacaaatccccttcctctttctcaaagcacagtaatgtggcactgagccctacccagcacctcagtgaagggggcctgcttgctctttattttggtcccggatcctggggtggggcagaaatattttctgggctggggtaggaggaaggttgttgcagccatctactgctgctgtaccctaggaatatggggacatggacatggtgtcccatgcccagatgataaacactgagctgccaaaacatttttttaaatacacccgaggagcccaagggggaagggcaatgcctacccccagcgttatttttggggagggagggctgtgcatagggacatattctttagaatctattttattaactgacctgttttgggacctgttacccaaataaaagatgtttctag

SEQ ID NO: 1479 - DNA, 410 bp, Homo sapiens
ctacattccacccttgtatcctgggtcttagagaccctatctcagacagtgaaagtgaaatggactgatttgcactcttggttctttggagccttgtggtggaatccccttttccccatcttcttctttcagatcattaatgagcagaataaaaagagtaaaatggtttccttcccttctgtaacttggagcaggaagtcatgggggcagagagggaaaggaggtggttacttaaggccccaatctaccaagtcttccccaccacttctcccttgttttccccctcttctactacttatttcaaacttctgggatacaatttcagctaaaacgtttatttctcactcaaaacttatttcccctcaaccctatacccaaagaagaaataaaatcacagatacataacagaa

SEQ ID NO: 1480 - DNA, 445 bp, Homo sapiens
ggaccctttcttgcctccccaccccggaagctgaacctgagggagacaacggcagagggagtgagcaggggagaaatagcagaggggcttggagggtcacataggtagatggtaaagagaatgaggagaaaaaggagaaaagggaaaagcagaaaggaaaaaaaggaagagagaggaagggagaagggagaggaatgaattgaggaagtgaaagaaggcaaggaggtaggaagagagggaggaggaaaggaaggagagatgcctcaggcttcagaccttacctgggttttcagggcaaacataaatgtaaatacactgatttattctgttactagatcaggttttagggtcctgcaaaaggctagctcggcactacactagggaatttgctcctgttctgtcacttgtcatggtctttcttggtattaaaggccaccatttgcac

SEQ ID NO: 1481 - DNA, 141 bp, Homo sapiens
cctctgcttggacaagtttctcttaactgcaggggaatgaagatttctagtcctcgacaagaagcctaacagcaacttctacattaagtttccagataaggcttctgagaactataaataaagcatcctaagctgtttctt

SEQ ID NO: 1482 - DNA, 2335 bp, Homo sapiens
aacgccccagtcccaccctgctgctgctcctccctctgacccagactccgcctgaggccagcctgcgggaagctgacctttaactgagggctgatctttaactggaaggctgctttctcctttcaccaccccctccttccctgtgtctttttcgccaaactgtctctgcctcttcccggagaatccagctgggctagaggctgagcacctttggaaacaacatttaagggaatgtgagcacaatgcataatgtctttaaaaagcatgttgtgatgtacacattttgtaattaccttttttgttgttttgtagcaaccatttgtaaaacattccaaataattccacagtcctgaagcagcaatcgaatccctttctcacttttggaaggtgacttttcaccttaatgcatattcccctctccatagaggagaggaaaaggtgtaggcctgccttaccgagagccaaacagagcccagggagactccgctgtgggaaacctcattgttctgtacaaagtactagctaaaccagaaaggtgattccaggaggagttagccaaacaacaacaaaaacaaaaaatgtgctgttcaagttttcagctttaagatatctttggataatgttatttctattttttatttttttcattagaagttaccaaattaagatggtaagacctctgagaccaaaattttgtcccatctctaccccctcacaactgcttacagaatggatcatgtcccccttatgttgaggtgaccacttaattgctttcctgcctccttgaaagaaagaaagaaagaagactgtgtttttgccactgatttagccatgtgaaactcatctcattacccttttctgggtttgaagctgctgtctctagaagtgccatctcaattgtgctttgtatcagtcagtgctggagaaatcttgaatagcttatgtacaaaactttttaaattttatattattttgaaactttgctttgggtttgtggcaccctggccaccccatctggctgtgacagcctctgcagtccgtgggctggcagtttgttgatcttttaagtttccttccctacccagtccccattttctggtaaggtttctaggaggtctgttaggtgtacatcctgcagcttattggcttaaaatgtactctccttttatgtggtctctttggggccgattgggagaaagagaaatcaatagtgcaactgttttgatactgaatattgacaagtgtctttttgaaataaagaaccagtccctccaaccctcagacctatttgacttttatttattaaaactaaatgtgctttctccacagaagctatgaggtttgggttaaaaatagcatctttgtgggtggtagcaacaggatttattctttattattattatttttgagatgaagtttcattcttgttgcctgggctggagcgtaatggctcgatctcggctcactgcaacctccgcctcctggttcaagagattctcctgcctcagcctcccgagtagctgggattacaggcacctgccaccatgcccgggtaattttttatattttaagtagagacagggcttcaccatgttggccaggctggtctcgaactcctgaccttcaggtgatccacctgcctcagcttcccaaaatgctgggattacgggcgtgagccaccgcacccagctggagcaacaggatttaatatagagcaaatgtttagttttatcatctgtaaaatggagataagtattgtcagagtaaacatgaagattagaaagaacacttaatgtgctgggccttttataggttaacactgacatctcaggctgaactatatacattttccttcacaaccatatcaatccttataaactatggatttatgctccttaaaacaatatataatgctgatcactactataaatgcgtggttttaaccaactgtactgaaacagctttgagtttatattctgtttggatatttggagaaaacaacaagtgctctcaagagtatttgcttagaggccggctgtgtgagtggataactttgaaagctgcttttgagacgccagtgtctggcatttcctgcattctggcctggaggccggacgtgaatctgacttctagtaaaaatacacggttcccttgacaaagtcgagctgtttatcccagagactgcacaattttccgttgataggcatggaccaatgctaactggaaatcattgcaaaaagtttttttgtcgggcggagggtgtggtgttaagataaacagtgtgcaacagaagaaattaaaactggaagaaattaaagggttttttttagacttt

SEQ ID NO: 1483 - DNA, 6123 bp, Homo sapiens
ttatcaccgtttctgctctgttctggatctgccccctttactcctcggggaacccaaggccccactctcgctctggattccatttgggtcagcctggctggtccccaaggcattaggatgggggagcaaaaagcaacttatgtattttcttccacccccaccccaaattaaaatgttaagctgctggaaacctcatgccaccctgcatttgtgtcattgacaaagctgttgctgtccctaagaaggagccttgggggtgtgatgtggggaagagctattgtaggctccccctcctctgacttatgtaatcaaagccacttttgtgtgtgtctattttttcttgacatttaaactcagctgatctgattctaccagagtgatggatttagtacaggttactcaggatagtaattttagttatactcctcaagctgaacaagattaaattccttatttccaggttcttaaatcatcctgcctgcagtgtttccattctctcttcaggtattcctcctttggtgtggtgtcattgagaagccattgaagtgactctcaatacacattctgtacccttttaccggtggttcaaatggtgcatcctcagaacacccagtgaacccaatacattattgctaagattgactaattatgtcaactccagtcacagaaaaatacacaatggatagaattctggacggtttttttactttttcttctttaaacctttcttacatatttgagacttgctaccatttgcctgctagtgtgtgactagtgggatataagataagtgataaattattattgggaaaactaaaatgaccaatcatgcatatttcaaataatgtgcatatgaggctaatgatttattacatacataaatttctgctagtaaaattttccttggttcatattgtggaattaaatatcaacattttagaaattcccattataggccgggcgtggtagctcacgcctataatcccagcactttgggaggctggggcaggtggatcacctgaggtcatgagttcgagaccagctcggccaacatggtgaaaccccgtctctactaaaaatacaaaaattagctgggcatggtgggtgggtgcctgtaatcccagctactcgggaggctgaggcaggagaatcgcttgcacctgggaggcggaggttgcagtgagcggagatcgcgccactgcattccagcctgggcaacagagagactccatctcaaaaaaaaaaaaggaattcgcattccaatttacacagcagagatttcttaatagtatagctgtgaattatactaatccaagcacgtaagtgttgttcacttagtactttagtttcccagcagggtatgtatttaaaatttgcttttcttttagctgggtgcaatggcacttgcctgtactgcctgtagcttcttgggaggctgaggcaggaggattgcttgagcccaggagttctgcactgtagtgtgctatgcaggtcagatgtcctcactaaatttggcatcagtatggtgacctcctgggagtggagaacaacaaggttgcctaagaaggggtgaactggcccaggtcggaaatggagcaggtcaaaattcctgtgctgatcagtagtgggattgcacctataaatagccactgtagtactccagcctgggcaacacagcaagattccatctgttaaaaacacttttgctcttcttttaaacagatataatcaggtagggaagttttccttaatctaaaactttaagtcatatcaaattcacgtttccttttgtccattccatttcttactgccgcatagcctttgagattaaggttcagattcatttattcagctgacacttcctggtatcttctaggtataggatattaagatggagacagaaataaagatggaggcaccattcctactctcaagttgcttagaatctactaggagagaaaacatacataaagctacagatactgtgtgatgaatgccacaaataatagtgttatgggaattgagtagaggggacgagattgatcctagtgggaatgaattggaaaaactcatggaagaaggcatgtaatgggtacttcataaacatgttaaaacttttttctttttttctttttttttttttttttgagacggagtttgactcttgtcacctaggctggagttcagtggcctgatctcagctcactgcaacctctgcctcctgggttcaagcagttctcccacctcagcctcccgagtagctgagatcacaggcgcctgccaccacacccagctaatttttgtattattagtagaggtgaggtttcaccatgttggccaggctggtctggaactcctgacctcaagtgatccacccacctcagcctcccaaagtgatgggattacaggcttgagccactgcgcccagccaacatgttaaacttgcatattcatttttattgggttccaaaagtggatttttgacaagcagagttgggttgtgggatagtgaatattgagcattccattatttatttatttttctctttttgagatggagtctcgctctgtcacccaggctggatggagtgcagtggtgagatcatggctcactgcaacctctgcttcttgagttcaagcgattctcctgtctcagcttcccgaggagctgtgattacagatacccaccaccatgcccagctgatttttgtatttttagtacggacggggtttcagcatgttggccaggctggtcgcgaactcctgacctcaagtgatccacccgcctctgcctcccaaagtgttgggattacaggcgtgagccactgcacctggcctgagcattccatttaaagagaaacaaaataataaaggcattgatagagatgagaaggccacaatagctctaaaggtagatttagacagagtagggaacaggttgtgtcttaaaatgaggctgaggagttataattttacttggagttaatggggatgccactggagattttgaataggatatgttgtgatctgaataacatataagaagaattaatttggtaactaatttgcagattagcaaagtgattcactaacatggtgtttctcacatttcagccatttatgttaccatttttgatggctttttccatattcattgctgcctacattgttttcttcagatctactcatttccagatttattttgttcttacttgacacaattctattttgaaatcaaagttttgatgtgttagtgttttttcctaatcacattaaagtaactatagcagtgaatacaccacactttggaaaaaattgggttaggttaatttagttttctaggagagaataatcagggtctgagctagagtagtggcaggagagatagcactaaataaagacaggcattgtgaaaggcctggccacttgatgtgaggaggaaagacaaggatgactggtttttagagtaggagaattagccgggtgcagtggctcatgcctgtaatccctgcactttaggaggctgaggtgagaggatttcttgaatccaggagttcgagaccagcctggcaataaagtgagaacctgtctctacaaaatataaaaacttagccaaacatggtggtgcgtgcctgcagtcctatctacttggagggccgaagccagaggatcctttgagcccaggagtctgaggctgcagcaagctgtgatcacactgctgcactccatcctgggtggcagaatgagaccccccccaaaaaaagagtaggaaagtggtggggttaaagatgtagggagatcatgttgtcctggtttggggagctgggggaagggaaagaagatacggctgacaatctggcaggtatctgggtgaaaacaaaattctagggcgtgaggcagagaggttgacataagagagttgggaatccatatggggtacaggtagtttatgccatggaggtaaattagaaccatgaaggacaattgcaaatacaaaaaaaagaggccaggcacggtggctcacgcctgtaatcccagcactttgggaggccgaggtgggcggatcacgaggtcaggagatcaagaccatcctggctgacacgttgaaaccccgtctctactaaaaatacaaaaaattagctgggcgtggttgcgggcacctgtagtcccaactacttgggaggctgaggcaggagaatggcgtgaacccgggaggcggagcttgtagtgagctgagattgtgccacggcattccagcctgggtgacagagcaagactctgtctcaaaaaaaaattaaacaatgaggaaaacgttatgtaagaggaggaaccaaatggaactgattggagggaaagaagacggttgagtagttctttaaaaagttccgggttggatgctttctagtggtttttcaacagagaggctaagaaggaagataactgaaaatgggacatgcattgatactttagtaatttgagggtacattttgagtgttaagaagtgaagaggaggagtcattttcaggggcaaaagagtgtattggtaggaagattatataggcaatataatttactttagagcagggctttccaacagaacttttggtaatgatgtctagtacattagccacatgtggcagtcaagcactcaaaacatggctagtgtggctgaggggctaaaatttaattgtatttcattgtagttcatttaaatttggctacctgtggctagtggctattatattggacaatgcatttctaaatattcagatcctgggcagaagttggctttgacatgaagaaagacttcttagaaaggaaggaagtagaccgggcatggtggctcatgcctgtaatcccaacactttgggaagccgaggcaggtggatcacaaggtcaagagatcaagaccatcctggccaacgtggtgaaaacctgtctctactaaaaatacaaaaattagctggacatggtggcacatgcctgtagtcccaactactcgagaggctgaggcaggagagaaaaaaaagaaggaaataagagggagattgggagaaaagtaaggtgttatagctctgatctgtggtatctcctgttttccttgcggtatgactagtgtgagccaaggatagagaccaacaaactggggtaccaaagtggacaatgaagtactatgtaattagtgctaatgctaaattcattcctttgtttaaggcttaatatccttgcagaagccatcctgtgttacttgagcctggactagtattggggtgaagtcaagcatcagagtaaaacatttgtccccttaatgttaccccctcttaatttctaagaaccacaggcccattttgcccttccttgttaccatcattgagataaggaataagatgtagtaaccccaagttatctgataggtacaactgacctattctgtttggcagctttatcttagacctattctgtttggcagctttatcttagccccaaccaaatctcttcctttcacatggtgttggttgaatactatccaactccatggggttggtttgtgtttttttttttttttttttttgagacggagtcttgctctgttgcccaggctggagtgcggtggtgtgatcttggctcactgcaagctccgcctcctgggtttaagtgatcctcctgcctcagcctcctgaatagctgggattacaggcacgtgcaaccaagcccggctaatttttgtgtttttagtagagactaggtttcaacatgttaggctgatctcaaactcctgacctcgtgatctgcccgcctcggccttccaaagtgctggggttacagacttgagccactgcacctggccatggggttgtttcttaattagatatagctgaaaagaacgctagaccaaataggttctctgccttgccttttcgtttgttttgttttagctattatcagggaaccaaaaactttaaggagctagtactggtcttaatttttaataactagagatagcagagttagaaactaagttcaaagtgagagaacagctgcatttgtctttctgacctcatgcaattcctaggaaactctgtgttctgtgatttagtcaggcaataaaatgctctcactcct

SEQ ID NO: 1484 - DNA, 55 bp, Homo sapiens
tggcatccaaaacactgctcttccattctcaacatgcctgctaacctagccttct

SEQ ID NO: 1485 - DNA, 746 bp, Homo sapiens
cggagctgaaggactcttgccgtagattaagccagtcagttgcaatgtgcaagacaggctgcttgccgggccgccctcggaacatctggcccagcaggcccagactgtatccatccaagttcccgttgtatccagagttcttagagcttgtgtctaaagggtaattccccaacccttccttatgagcatttttagaacattggctaagactattttcccccagtagcgcttttttctggatttgcattcaggtgttattcttaatgtttctgtcaaagcttcttaaaaatcttcacttggtttcagccatagttcaccttccctgttccaggtttatttaattccaaaggtgagagttggagtgagatgtcttccatatctatacctttgtgcacagttgaatgggaactgtttgggtttagggcatcttagagttgattgatggaaaaagcagacaggaactggtgggaggtcaagtggggaagttggtgaatgtggaataacttacctttgtgctccacttaaaccagatgtgttgcagctttcctgacatgcaaggatctactttaattccacactctcattaataaattgaataaaagggaatgttttggcacctgatataatctgccaggctatgtgacagtaggaaggaatggtttcccctaacaagcccaatgcactggtctgactttataaattatttaataaaatgaactattatcaaataaaacgtatgaatcagt

SEQ ID NO: 1486 - DNA, 309 bp, Homo sapiens
gggcacgtcgcccgctgagctgagtggccagccagtgccattccactccactcaggttcttcagggccagagcccctgcaccctgtttgggctggtgagctgggagttcaggtgggctgctcacagcctccttcagaggccccaccaatttctcggacacttctcagtgtgtggaagctcatgtgggcccctgagggctcatgcctgggaagtgttgtggtgggggctcccaggaggactggcccagagagccctgagatagcggggatcctgaactggactgaataaaacgtggtctcccactgcgcc

SEQ ID NO: 1487 - DNA, 4664 bp, Homo sapiens
gattcagccactgcaagccctgggcctctggcaccttcaagggcatcatcagcgcacaaccagcatctcagaggacaaggctggactagcaactgctagaaaatgggagtcttccttgaaaagtcagagagtgatttgttttgttttgtttgagacgaagtctcgctgtgttgcccaggctggagtgcaatggcgcaatcttggctcactgcaacatctgactcctgggttcaagcagttcttccccatcagcctcccaagtaggtgggactataggttcgcaccaccactcccagctaatttttttttttgtatttttagtagagatggggtttcgccgtcttcgtcaggctggtctcaaactcctgacctcaaatgatccacccacctcagtctccccgagtgcctggattacaggcatgagccactgcacccggccaagtctttggtcttaaagtgattccatgacactttgtttgtggcctgtcccttgtttccttgctaagtagttctacaataagaaatcatgatttagctgttgcctccagctctggggtagggtgttctttttatggtgtgaccctcaggaaggttaagtcaggagttcaggagcatcagagttctctagaaatgtgcctacttgttacctggaatacctggtctctaaacaaaccaacaaaaaatccacgtggcttttccacatgatggtgcagactggaagaggatgttatattggactcgttattggggaaatgaatgagcgggagaaaatgtgaatgacgggcaagaaggtggtctttctccctcagaagtcctaattcagctctggagttcatggaaatccgcaacttcagagtgtggcctaaggattattttgttggtcagcctttccaagaaagtgtgtgttctctcaatctctgtggattttctcattttttagcaaatcagtgagataagcataaataggaaggaagataccccaggtttaagaatcaccaatatcattaggcattggcatcattattagaattctgaattatagaataaaaggtacaacaaaaatttcatttctgaattttaaaattctggaaatttgcaaagctccacaactgtttttttactgaattaattacatagaacttcgatgtcttttgtttcatcatcattgggcattttagttgctatggaataatttttaatttttgtctctaaaattagatttgctttgtagtaaattttttaaaaatgcaaccctaagatctgattatatgaactgggtctctaaagcctacaaagattctctcgttctgtaccaagcagactgccttgtactatacagaagtgtttgaaaagacctagaggttttctcttaaataccattacttaagattcatagtattaggatctttatgatttatcatgagcttatatcaccagtttatttactgtgaaaaaaaccatgggaatggcatactgtgagaagagtactatggtgaatggctccagaattaaaattcagcagatgtgtctgtattctggggttggtcatttgggtctcaaaactgccccatatgcaaatgtactgactgtcatcaatgaaaagttaacctttgtagcttataaatacacacaaaatgttgatttggttaattttttaggaaagtatacctttgtagttactagttacatttgactgtaagatttagaggttagtaaatttttgcttctttattcagataagatctcagccaaaaggttgtgtgatctttgattttaaaaatttaagaggaacttttcctcactggaacacaatgattttattaataaagaatgtaggctgggtgcggtggctcatgcacgtaatcccaacaatttgggaggctgaggcaggcagatcacgtgaggtcaggagtttgagaccagcctggccaacatggtgaaaccctgtctgtagtaaaaatacaaaaattagctgggcacggtggcgggcacctgtagttccagctgcttgggaggctgaggcacgagaatcacttgagcccaggaggtggaggttgcagtgagccaagattatgtcactgcactccatcctgggtgacaagagcgaaactccatctcaaaaaaaaaaaaaaaaaaaagcctggcctggtggtggatgcctgtggttccagctattcgggaggctgaggtaggtggatcacctctgctcaggtcaaggctgcagcgagccatgatcgcaccattgcactccagcctgagtgacagagtgagaccctgtctcaacaagcaagcaaacaaaaaaccaaaaggaatgtttttttcagatactgatagaatgttttcagtgtgtattggttcatttactatatctttagtgtaagattttaaaaggttttttcagcatccattcaacaaatatttattatctttatacaaattattcattgtgttaaacttatttttagtttaacattctagaaatgaaacgtttttacttaaccttattctacaaagggaatacagcagttattctaattttaataaatgctaaaagctttatacaatttttctttgtgcactaaatgatttttggcccatacccagcaactgtgatgaatgtataatgaaataacatcttgaaaacaggccagatacattaagtatttattgagcttctgtcatatgcccagtattatgcttcttctatactgtttctctgtgacaagtcatactatattctttatagaattaaaagtagaggagaggcagagtttacatattgtccagttgctttacagttgtacaggaggttataagaagaaatatagtaaattagtgggaagtcagaggtgggggcgttagtgagctattttcttcttgaggttgtgacacaagctgacaaaagccagggagttcacagctgtgtggtggcacaaagttccatatgttctaaaaacaattaggcccagcagggtgtccctaatggcttccttgttaaacctccatggccagctgatctgaagctctgtgacatgttctctgagctctgaatgctctggctttttgtcattttgtcttgagacaagtattttcctgtagtcctcattccttcgagttattccatctcccaggatattctctggtgagaagaatgtctttcagtgaatttgccttgaatttagcatccatagagctgtgtcagtgttcttcttgatcacaccttctttaaaaaaaatacttgcttgcgatgactggacaagttcagttggttagtttcaggcctataagaagagagagtaaaggaccttgctatttactttgataccatagttgtatctcaggatggcctgcaaaccactggccttgtgtgtatttaagctaggaataaaataatggagaagtgttaatatgtatacaaaaaggtaaatattgatatatctactctctgttgggggcagaagtgtcattttaagttattcaaagcactttcttaagcattttagaaagcctttattctttgctgttggaagtctccgtactttgcagaattggtatttgtgtactagcctctgccgcaggatggggaggtgggcaggtagctgataggggcagccaggagtttttgaggcaggtggtgggaaattgtcctaatttgttaattggattatgtaactctgttactagtctgttattggctgttgttactggatgcatcttgatattcagaagaataactgtgaggcattcttcagttgcgggttaagtggggttagtttctgttctgtcagatgccctttttcagtcaaaggttagccccttgtttctccctccttccagggtttagggagtgcagtgatgtcgatttcatttcccttccccgcaccccttgacactcagcaggattgcactgaaacccttcacagatctctcgttcactagttgtctcctatttttccataactagcactagtttggccttatgacctggttagaatcactcttctgtattctcatttccaatttttgtgccccactaacgtggactagagaaacttggcctgctgtgcagtgggccttctgttcaacttaccctccaccgctgaccctgtgtgaagagagatggtgcgttactgccatctaatgggaaaagagaaaactgcagttgggaaaagcagctgtgcatttaagggtagggctttctgaaggatttctgatacagtccagaaaagggaaaatgatgacacagcagttgccatcttgaaaaatgccctttcctgcggaaagggtgttttgaagtctaatacaactatcatcacaaggtccctggactaaggctggatcgtgtaatttagaatctcaaattgtattttaattaatatgctggcaacagaatcattgaaacaggcgtctcattttgtcaagttcttagccgttcagtttgtcaggggctttaatattttagatatcaactaatacatagtttcaacttttaaaaatgtttgaagattgtatgtaatataggtgtctatctatagtgccttagtaatttaaatcagaaatattttataaaacttctggttgttttgcagtagccaatataggcttcatgccctcctgaagatagtttcctctgaaatgtaactttaaataaacattattccaag

SEQ ID NO: 1488 - DNA, 1863 bp, Homo sapiens
ccctggagtatcacccttcctccctccccaggcaccactggaccaattacctttgaatgctgtatttggatctcacgctgcctctgtggttccctccctcatttttcctggacgtgatagctctgcctattgcaggacaatgatggctattctaaacgctaaggaaaaaaaacaaacacagaactgtttcaagtactcaagactgacttacagaccaaccaaccaccttgctggaacccttgctagcaggcattcttataaaagaaactttcgagcctccttatattgctggaaactcagctgtgctccagactagagcctccttacctatgctatggatttttaatttattttctcttatttcatgtacactgctttttttggttacagtgtatgatggatgtgtatgaaaaaaatgtatctttgggaaaacaattacagtttgttaatttgaagatgctggtcttgactcatctttatttttattcgcacatcccaccccatcccctgaactacttgggaggtggggaggggtacgagtccactgttgctttggtagagatgagaggccgcattttgctgctaaagcaagagaaacttggagctgaagcacacacctggtctgcccctagatttctcctcaaggcctctggagcaaccagcacttgcccccttggaatgcagagcctggcctgccaaactacaatgtggtaggctgaaacgatggtgttaattcttaggactacttttctagtcacagatgttttcaaatttctaagaaaaagaaaatgaggctcaagaggctgcttcgtagaattccttttgaatgaattgagtggggatggggacacagtctccaagtgtgtatgtggtcttttctgatctcagctgtgtggctgcaactcttcgctgttcattggttcctctcctggaaagtggcttctaaccagcactggatggtgatcattggtaagctttgctcacctccctctctcttgcttcatttggctttatcaaaaagaacagacctagctctgaatttgtttggcttgggaaattatggattctttcaagccactcccacaaggtgggtcctactagaaagggttagcattttaaggggggttgttctatacacctgtgtccttaccccaggctcaggaactgccagggagggaagatgaggtggggagtctgtactgagatggaactgtcagtgctgtgttgtatgtacttgctgttgtaaaagtttgggcatgactttgcatctagcgggtgctgcctgcatctctttgtctgtaagcttgctctgggactcagcctcttaggacctacgatgccagcagctctcattaacagtgaaatgacagaggccaaagatggccaagtgaagacccaagtctcagaaaacccagacttgggacaactgcctgggaactaggatgctagagcagttctgtaatgctttgagacacagcaattttcacattggccattctttcccctcccctaccccttttcttttgagggacttttaatgtttgctgctttaggtggatggagagtccaccagtcccactcaatgctgctctaactctacccacacccacctaattaggggtgctaataaaacatgctgaggttgagataaagacgggacataaggggaaaattcattccatagagctgaaatctggttttcaaggcctctgtggctttcttctgaacttaccaccagccctggctggaatgtagattgtgtttttagtaatgtgtactgtgagctgtcttctgtataatgtattttgtaatgtatttttctcatctaccaaaggatgaaacaaataaaattatttaaatagt

SEQ ID NO: 1489 - DNA, 2746 bp, Homo sapiens
tatgctccagtgacagatggattagggtgtgtcatactagggtgtgagagaggtaggtcgtagcattcctcatcacatggtcaggggatttttttttctcctttttttttctttttaagccataattggtgatactgaaaactttgggttcccatttatcctgctttctttgggattgctaggcaaggtctggccaggccccccttttttcccccaagtgaagaggcagaaacctaagaagttatcttttctttctacccaaagcatacatagtcactgagcacctgcggtccatttcctcttaaaagttttgttttgatttgtttccatttcctttccctttgtgtttgctacactgacctcttgcggtcttgattaggtttcagtcaactctggatcatgtcagggactgataatttcatttgtggattacgcagacccctctacttcccctctttcccttctgagattctttccttgtgatctgaatgtctccttttccccctcagagggcaaagaggtgaacataaaggatttggtgaaacatttgtaagggtaggagttgaaaactgcagttcccagtgccacggaagtgtgattggagcctgcagataatgcccagccatcctcccatcctgcactttagccagctgcagggcgggcaaggcaaggaaagctgcttccctggaagtgtatcactttctccggcagctgggaagtctagaaccagccagactgggttaagggagctgctcaagcaatagcagaggtttcacccggcaggatgacacagaccacttcccagggagcacgggcatgccttggaatattgccaagcttccagctgcctcttctcctaaagcattcctaggaatattttccccgccaatgctgggcgtacaccctagccaacgggacaaatcctagagggtataaaatcatctctgctcagataatcatgacttagcaagaataagggcaaaaaatcctgttggcttaacgtcactgttccacccggtgtaatatctctcatgacagtgacaccaagggaagttgactaagtcacatgtaaattaggagtgttttaaagaatgccatagatgttgattcttaactgctacagataacctgtaattgagcagatttaaaattcaggcatacttttccatttatccaagtgctttcatttttccagatggcttcagaagtaggctcgtgggcagggcgcagacctgatctttatagggttgacatagaaagcagtagttgtgggtgaaagggcaggttgtcttcaaactctgtgaggtagaatcctttgtctatacctccatgaacattgactcgtgtgttcagagcctttggcctctctgtggagtctggctctctggctcctgtgcattctttgaatagtcactcgtaaaaactgtcagtgcttgaaactgtttcctttactcatgttgaagggactttgttggcttttagagtgttggtcatgactccaagagcagagcagggaagagcccaagcatagacttggtgccgtggtgatggctgcagtccagttttgtgatgctgcttttacgtgtccctcgataacagtcagctagacacactcaggaggactactgaggctctgcgaccttcaggagctgagcctgcctctctcctttagatgacagaccttcatctgggaacgtgctgagccagcaccctcagatgatttccctccaaactgctgactaggtcatcctctgtctggtagagacattcacatctttgcttttattctatgctctctgtacttttgaccaaaaattgaccaaagtaagaaaatgcaagttctaaaaatagactaaggatgcctttgcagaacaccaaagcatcccaaggaactggtagggaagtggcgcctgtctcctggagtggaagaggcctgctccctggctctgggtctgctgggggcacagtaaatcagtcttggcacccacatccagggcagagaggtctgtggttctcagcatcagaaggcagcgcagcccctctcctcttcaggctacagggttgtcacctgctgagtcctcaggttgtttggcctctctggtccatcttgggcattaggttctccagcagagctctggccagctgcctcttctttaactgggaacacaggctctcacaagatcagaacccccactcacccccaagatcttatctagcaagcctgtagtattcagtttctgttgtaggaagagagcgaggcatccctgaattccacgcatctgctggaaacgagccgtgtcagatcgcacatccctgcgcccccatgcccctctgagtcacacaggacagaggaggcagagcttctgcccactgttatcttcactttctttgtccagtcttttgtttttaataagcagtgaccctccctactcttctttttaatgatttttgtagttgatttgtctgaactgtggctactgtgcattccttgaataatcacttgtaaaaattgtcagtgcttgaagctgtttcctttactcacattgaagggacttcgttggttttttggagtcttggttgtgactccaagagcagagtgaggaagacccccaagcatagactcgggtactgtgatgatggctgcagtccagttttatgattctgcttttatgtgtcccttgataacagtgacttaacaatatacattcctcataaataaaaaaaaaacaagaatctgaattcttag

SEQ ID NO: 1490 - DNA, 535 bp, Homo sapiens
ataaatctccccactccagaagcattacccataggtcttaagatgcaaatcaactctctcctggtcgctttgccatcaagaaacattcagaccagggaacggaaagaagagagaccgagctaattaactaactcatgttcattcagcgtgcttggtccgacatgccttgaaaccagaaatctaatctctgtttaggtgcctctacttgggagcgggaagaggagatgacaggaagcgacgcctctggcagggcccttgctgcagagttggtggagaacagaaatccacgctcaatctcaggtcttcacgcggggggtgggggtcagatgcactgaagtagccaacagcgaagccagtccagaagaggggtccgctgggagggagggttgtgtcaggcttgggggatgggctcttcgccatgggggtctttgaacacacctctctcctttccttttgtctacggaagcctctgggtgacaaaagtaaaagagagctgcccacaacttgccaaaacagatatactcgaatcagactg

SEQ ID NO: 1491 - DNA, 396 bp, Homo sapiens
tcactaggttctaggagtgagctggggcctgctgaggtgggggtggggctgactctgcaaaatgggggtgtcccccgatcctggccgaggtgaggaacagacagggggggtctagattctgagggggttggtggatattgggcaaggcaggaaacctctggagacctcattttctccatggggaagacagccatgctcttcaggaggagactccaagggcaaaggagggtgtcttggctgtgcttgaaggcgaaaccctgccatatccccagtgccagtcccctcagcctgtggtggccttgcatcctgactggatgttctcagccccttgttctgggcaagaacccagagctccccagtgtggatactaataaacctcttggagcacactctcag

SEQ ID NO: 1492 - DNA, 940 bp, Homo sapiens
caccctgccccacagggaatggccttggcctggcccagcccaagatcccagcgttatctaactcctggagggtggactctgtcctggcttgtttggtgtcctcagatatctttcacacagtagagcaaaatcaccagccctgcactgatgtcactttatgtagaaaaaggccttagctggacctgcgttgccgtctatgcaaatgcatgcaaatactccaggccctgggatgtgggcttgtgttttgtcactgtgaagggggagatgggagaggagcctgttttggggtggggtctggggaaggcaatctgattctgaagctaaagagctttcatcctcttgagtgtatgtccccatagtgggccccttgacccacatgctgaccggtgccttgggatttgactagagttgctggctcgaggcccagcacgaggacttaccctggggttttgttaggtttggaagcagctgtccctagggggtgaagtcccccccctttttttttttacccctgcttctcccacggcttcacctccctatgtgaactgtagactcagatcccaataaagtgctgttgcagctatgatgctaggtggtttctaagcacaggggacaccccacaccccctgcctgaatggatgggtccatcccaggcactggtacttgcccccttgttctgtatccccctttgcccttgccttgcccttccaacaaaccctaggcccttgagaagctgatacttctccttttgctcacagctgccttggccccacccctgggagatgtagcaaattgagtgtgggttttggagtctgagcctcaggctcaaatccaggccaagtgatcttgggcaagttaatctctgggaactttgggtttcttatcctcaaaaaaggcgatggaagggctggggaagtgattaaataaaagcaacgcaaga

SEQ ID NO: 1493 - DNA, 1752 bp, Homo sapiens
cgctggtgaagtggcccagggaagtgcacatgtctctccctgctcttccagggtgatttttttgatgtttggctcttggtccttgtttccactggctttccatccccatggggcagaaacagtggctcctgggagcagaaaaggaattgaggtgggcaggcagaagagcctggattgctcactgttttgggaaacttacatgttgagatctacagagatccaggaaaccaaagccctgctgagcagagccattttgtggctatttctggaggcccaggagtgtggctgcaagagaaaaggggctggaggaagatccggagggcaggggtgttccctctgctgatgatggatgcccctaacacctgtgcctaacacccctactgaaccccacagctccagccttagtttttggagtcaagtgttaaaggtttctggccagaggaattggggtcttgccatccctgcaatagcccttttatgggctctgggagacagctttagggaataaatggggattttcccctttttctacccactcctttgcttcctccaagacttacccaactccttccccctcagagaaccaaatagcctgaggaagcaggagagttcctggttatggcagtttcttggtgatttggggcttcaagacagtaggtgagagatgctgtcaggacgtatcttcttcataccaaagtcactggtcctttctcagcctctctcgtgcttttctcctaatgaccatatttttgccaaaaattgggatatgttatctgacagaccagaatatttgaagtttgggctgtcctgaaagtctggactttggtggtaccctcctcccccagcccatctgttgcacattatactccgtgtgttcttcaactttcggcgcccttattcccctgccttcctggcttgattgaaggaaagcttgaaaaggcgcagagccctatacctcatttcctccatgataaaaggatccaagtgaggccctgtcacagcctgtgggtaggggatgcggcgggatcctcattgccatggtactcaaaggtagaagagcctggagtttgttgcttctctttgctattctttcatatcctcttgggcctggtgattaattagcaattctcattcctctcagccaaaggcctgcactgggctttatttgtctttttttattttttaagcactgcctgccagagatgggcctggggcctgatgaggaccttagcgctgctcgttctccttttctgttcatgcacacattcctccatggggtggggaaggcaggcatggggtgtggccctcggagaagttaggagtcccccagctcaagatacagtggcaaagacctagtggtcccctacccccacttctctcagttcctggcatgaggagagaagaccctgctctggtggagctgacaacctttgaggctgggaggagagcagcctctgggcatcgttcccagtgtccctcacactaaaacggcgtagatggcaaccccccacccccaccccgctgctcaactcttgtgtttgttgttctgtttgccccatttatctgttgctgtttttgtgttgtcttcccctgctccgcattttgtaaaatggcccctgggggagtgtttttgctggatctgctccctctcgctctctcactccactactttttggaacaaagtgatggcagaatgcggtggtggtgggggtcttttgtactgttggattaataaaatgattttaaaatccc

SEQ ID NO: 1494 - DNA, 1505 bp, Homo sapiens
atctgccctagcgctctcttccagaagatgccctccaatcctttccaccctattccctaactctcgggacctcgtttgggagtgttctgtgggcttggccttgtgtcagagctgggagtagcatggactctgggtttcatatccagctgagtgagagggtttgagtcaaaagcctgggtgagaatcctgcctctccccaaacattaatcaccaaagtattaatgtacagagtggcccctcacctgggcctttcctgtgccaacctgatgccccttccccaagaaggtgagtgcttgtcatggaaaatgtcctgtggtgacaggcccagtggaacagtcacccttctgggcaagggggaacaaatcacacctctgggcttcagggtatcccagacccctctcaacacccgccccccccatgtttaaactttgtgcctttgaccatctcttaggtctaatgatattttatgcaaacagttcttggacccctgaattcaatgacagggatgccaacaccttcttggcttctgggacctgtgttcttgctgagcaccctctccggtttgggttgggataacagaggcaggagtggcagctgtcccctctccctggggatatgcaacccttagagattgccccagagccccactcccggccaggcgggagatggacccctcccttgctcagtgcctcctggccggggcccctcaccccaaggggtctgtatatacatttcataaggcctgccctcccatgttgcatgcctatgtactctacgccaaagtgcagcccttcctcctgaagcctctgccctgcctccctttctgggagggcggggtgggggtgactgaatttgggcctcttgtacagttaactctcccaggtggattttgtggaggtgagaaaaggggcattgagactataaagcagtagacaatccccacataccatctgtagagttggaactgcattcttttaaagttttatatgcatatattttagggctgtagacttactttcctattttcttttccattgcttattcttgagcacaaaatgataatcaattattacatttatacatcacctttttgacttttccaagcccttttacagctcttggcattttcctcgcctaggcctgtgaggtaactgggatcgcaccttttataccagagacctgaggcagatgaaatttatttccatctaggactagaaaaacttgggtctcttaccgcgagactgagaggcagaagtcagcccgaatgcctgtcagtttcatggaggggaaacgcaaaacctgcagttcctgagtaccttctacaggcccggcccagcctaggcccggggtggccacaccacagcaagccggccccccctcttttggccttgtggataagggagagttgaccgttttcatcctggcctccttttgctgtttggatgtttccacgggtctcacttataccaaagggaaaactcttcattaaagtccgtatttcttct

SEQ ID NO: 1495 - DNA, 15 bp, Homo sapiens
accaaaagtggacac

SEQ ID NO: 1496 - DNA, 69 bp, Homo sapiens
cagcctaaccccattcctgtgcggacagcccttcctcccatttcccattaaagagccagtttattttct

SEQ ID NO: 1497 - DNA, 32 bp, Homo sapiens
ccctgaatgttcaataaagttgattctttgta

SEQ ID NO: 1498 - DNA, 252 bp, Homo sapiens
ggaggaggccaccagattcagaattcagaattttagaccctttggccttggggtccatcctggagaccctgaggtctaagctacagcccctcagccaaccacagacccttctctggctcccaaaaggagttcagtcccagaggggtggtcaccccacccttcaggggatgagaagttttcaaggggtattactcaggcactaaccccaggaaagatgacagcacattgccataaagttttggttgttttcta

SEQ ID NO: 1499 - DNA, 543 bp, Homo sapiens
tggagcagatactcaaggaggcactgggctcagcctgggcattaaagggacagagtcagctcacacgctgtctgtgactaaagagggcacagcagggccagtgtgagcttacagcgacgtaagcccaggggcaatggtttgggtgactcactttcccctctaggtggtgccaggggctggaggcccctagaaaaagatcagtaagccccagtgtccccccagcccccatgcttatgtgaacatgcgctgtgtgctgcttgctttggaaactgggcctgggtccaggcctagggtgagctcactgtccgtacaaacacaagatcagggctgagggtaaggaaaagaagagactaggaaagctgggcccaaaactggagactgtttgtctttcctggagatgcagaactgggcccgtggagcagcagtgtcagcatcagggcggaagccttaaagcagcagcgggtgtgcccaggcacccagatgattcctatggcaccagccaggaaaaatggcagctcttaaaggagaaaatgtttgagccca

SEQ ID NO: 1500 - DNA, 576 bp, Homo sapiens
cctaggcttcttgtcacactgaacacatccagccacaggcaccagctggttgggaccagcagcccccagcatcctcttgcactggctggcacaaaaagaaacctgctgtataccccccaaagtgtccctttccctcctacctctggggtctcttgctgcttgcctctgctgctctggactgggagagcttctgtcctgtgctgcatgggtatttagactgtgggggagatgccccttcttatagcactggaggaggaaaacaaattcttgtccccctcagaatgagagtggctctttctgatttgcaagggcactatggtcagggcaaaggcatggcccaggtgtttaagtacagggtgacgtgtgcctatgcaatggggtggtaaggcaggcacgaagagtccaaaaaatctaggtggcctctcagctctgccacctctagctgcatgaccttgggcaagctatgtaaccccaattgcctgctccattaaagactgtgaaggtagaatgtttgtaaagctcttaacagtatgtaagccttcaataaatttcagttttccccttgttttcttgatc

SEQ ID NO: 1501 - DNA, 294 bp, Homo sapiens
cccctgactgggatgccctggccctgctacttgagggagctgacttagctcccgtccctaaggtctctgggacttggagagacatcactaactgatggctcctccgtagtgctcccaatcctatggccatgactgctgaacctgacaggcgtgtggggagttcactgtgacctagtccccccatcaggccacactgctgccacctctcacacgccccaacccagcttccctctgctgtgccacggctgttgcttcggttatttaaataaaaagaaagtggaactggaactgaca

SEQ ID NO: 1502 - DNA, 349 bp, Homo sapiens
cgatcaggccctgggcccccctgcatcttttatagcagtgggtgtccagtccaggacactggtgcttttttatacaagagaacgagccagagttcactccttcctcctggctctctatatacctgtgaatatgtgaaatagtgtaaatatgaaagaacttgtacctatcacttcaacccctgccttgtacataatactattccatccacacagtttccaccctcacctgccccctcatacggagttggatgggggccgagtgaggtaaccaggtggcatctaccccatgttttataaggaattttgtacagtctttgtgaaataaaataacgtgcttcatttgaccccc

SEQ ID NO: 1503 - DNA, 733 bp, Homo sapiens
gacgcccctccctcctctggcccagcctacccttgtaccccatcccttcctccccagtctacgttctccagcccacacccctccaaagccccacctttaagtcctctcttctctattcctgaccctccctacctgaggcctatctgagactataactgtcatctagccccttcgaggttgccccttccccatctccatttcacacaggtcctgaaagtctgtgtccaattatgcactggccacccaacagcaccaattgtacattccctgcatccaatctgctcagcaggccctaagatgccttgagtctttaatcccagtttggctggttaattccataaccccaggcatcccatcccttggggtgggggagaggggagacagggcaatcttgtccacagtctcccattctcatatgtagccctcatgataatctgggcatctcgtgccagggcaggctaccccttcatggtgactaacagttacatgaaagtccacgcttttgggaaaactgggtgggatggatgctggggagaagtgagggctgggcagctgattttgtcactgtcttcacaacctccgtgctgggcttgtagaccactgtcctggctgctctcatgcctgcctgataccctgcttggtcaaatccccggctgcttccttctgcacccagaaattccttcccactcatgttgttcccacacacaaaccaagagccaaaaatgagtgtgtc

SEQ ID NO: 1504 - DNA, 2398 bp, Homo sapiens
ccctcaaagaatgagaacctcaagcatctgggatccagtggagctaatcagtcctgcctcctgctctctgggtatagacaggggtgggaagggtccatctgggcaaggggaatggggccatgttgttgacattaggtacttaataagccttggagctagtggagagggagaggaaagggttctgtccaagacagttcaggttaattaattttcttctccattgcttcaccttaagggttaataatgtagagaggagggaggaccacattgatgaccagaacctactggtactttatagcatttgccccaccccacagcttaggtttttctgtcatcctcagatcccacaggcattgcgaagaagctgcttcctatacccaggtataactcaaaatccaaagggatagggccaggatccctattcctaccccatctattctctgttggctccaagagctaccccagagaccttaaacagaaacagtagctgaggcttcttcctagatacctgactagggaagtttgtctctcctttcttgcccaaccaggtcaaagtaaaatgtgagttgacagctcaaagcacttgtaactgctgccccctccctacctctactccccaaaatggaatcatgggatagggaaggcccccatggggtcagaagggcacggtagttcttgcaattatttttgttttacccttcataacctgtcaaacatatttttttctaatgagaaagccaggcccccgccagcacacatgctgtttttaatgcgctgtagttcttgtgtgtctgctgtgctgtgcaaatggagattcagttcaaaataaaatcatttaaaaacctacataaaaagaactctaaacccacccctgcaacaaaagtcactacataaactgttcagcagtattcacctatcagagtatttgttgtgagtatagattatcaattgaaaacactactcttgttttcttaattgtacagttttcaatgtccctttcttaaagagacagtatatttctcttcacccctagcccatcttccctcaccctcctgaatgacatcaggaggtatatccagggtgtctccttccttcctactctcttgaccagaagttaacagactatactgtctctttaaaaataaaatttaaaaagctttgttgtcttttcagacatacatatgcatatatgttttagatgttcttataagagaaaagatggtttttaaatgtgccaagttgtgtgtgtgtgtgtatatatatgtgtgtatgtgtgtgtatatatatatgtgtgtgtgtatatatatacacacacacacacacacctgctgtgtgattggtaagcaatacaatagtaaacatgtccccattacttttttctaatattggaccaatgctgtcctaattgtacatttccccttatggtgacgatgctctgactcgtttaggtagacacattgaccaccttccattccattaaatattttttcctttttcccctttctgtgtcattcttgaggaaaaaacaaaagagagaggggatgccaatgatccccttgagcagagaaaaagcaaaataaatattttattaaagaaaaaagagaattaagaaaatagtttggagtattttcttactgtagagaagcactgtacattactaagagacctgggtataagatactcacatgtggagctggaaaaatcgcatgtccaagcccgtttgagtggtttcttttgtttttcattgcagggagtgggtgggagggaggtgggactaggggcactttgggggtctccttttagtcaaaagcgagaaaatgacaagaaagagattaaaattcaatgtttcctttatagtgttaaacactaaaattttaaaaaagatgaaaaagaaaaaaaaactttgtaaaatgcgagaacagaagcaaaagacactacgctctgtcattttatctttcttttgttgaaagactaaaaaaaaactgaaatgttttttagacaatcaaatgttaggtaagtgcaaaaacttgttttttcttactggtgtagaaattaatgcctttttttatttttcagttattttataataacgaaataaaaagaaccccccagctgccaggcgggttttggtgtttgaaatgcggggcaaagcactacatcactgcaaatagatacagagttagtctgcatgtctgtaggctgtgtgattgcggaaaatataaatgctgctaatatatttcctttttacaaaagcatatctaaatagatgattgttttgatgttaatctttgtaaattatgtattaccaattttaacattggatgtaattgcatacaaagcttgcatctcaatccttgaaagtctagtattaaatggaaaaaacttttcctaactgtgg

SEQ ID NO: 1505 - DNA, 214 bp, Homo sapiens
gctaggagaataagagtctggagactgggagccttcacttcggcctccgattggtggcgcatagggtgtaaccaataggaaacccctaaagggtacttaaaccccagattttgcaactggggctcttgagcagcttgctttagcctgctcccactctgtggaatatacttttgcttcaataaatctgtgcttttattgcttcattgtttcattg

SEQ ID NO: 1506 - DNA, 865 bp, Homo sapiens
gactctgggaatcatctacacaggaccaaacccaacaggcgccctggcaccggggagggggtagttgtactctgcttgtacagtccttgagcccagtttacagatctggagagcaggaggccaggacaaggacaaaggctggaggatggagtaggacccaggggctctgccatcctaggcatcattcaaggtcttttatgaagactttacagatgtcctctgtaaatagcatcgagagtggagttcagctcctttctctacttttttttggtctgatggcacatatttattgttctgtggtctaatcacagtgtttctaaatgtaaaaagtgcatatgttggtgtagctagtcccgcgacattgagctcctctgcatgaagacactgggctcctgcatccagctgtttttattgcaaactagctcctttctcccacactgggaactttagtccacgaggctgtcaccaccctggtagcactgggccaggctttgtagctcctgcagcagctctgctacgtcatcgtgctccactccagcatccatgaagctggcccagcgccgcaagtcgagtttggtgaggtctctggccaaggcttccagggtctggtgcagggacgaagaggaacacagtgccccaaacactgggatgctctccactgctgtggagggagaggaaacagagacctgtagatggatgattattctgccctgggactcgccaaactgataaggaagtccaaccttagtagacttgattgtaaactcaacaaatttggtgtattgtccccttagtacaccagtactccagaggaagaatgcttttcttgggagccatagggtgaataaaggaatgtttaactgtg

SEQ ID NO: 1507 - DNA, 99 bp, Homo sapiens
tttgtgaatgcattatgggacatgattgtggagttgaggtgaaatgagatggaaaggatgaaattttacttattatattaaactcgtttacacattaaa

SEQ ID NO: 1508 - DNA, 2578 bp, Homo sapiens
agagaagatgtgaagtgtttatctgtgaactgcagtgctgtatcaaagcagtccagtaacctgcagtactgagtatggtgcttgctctttcacttaactgataagagggacatgcctactaggagtttttaatgatgtggtatttaaagtattgtctcttagttaagtatgatttattaacccagtggagcactgtctgcttttaaattgtcacattagaatttgttctaccaatgttttgggttctgttgcgctattaattaatgtaaatttgtttatacccaggagaatatgtataccatgtgtgtttgactaagttcacaagggaagtttttggctctgcactccacattatcctttaatttcaatttcctgggactatcccagagaaagacctcagtctcttctattcacactatgcttcctagagacagaacaaaaatcatgtagggaaattggggctaatgagatcagtgccaaatttcagcagatacctgtgaggctgacacctgttgcagactatggagtggtgagatttgggaaagttgggctatatgtttgcagggacttaaaaaggtaggttcagaacagtattctcagtacaagcttcgcttttctaagaagtacacatttggcccaaattcaccgggataagtgagaacagccagaagcataaaatgtgatgaaggtttctcctgggaaccttattttactcttcatttcagggttttctttttttttttaccttcaaaggtagacattttgggaatcataactgtattactaaacgtgtttaatcaaaattcatagttggatcagccattgccttgtacaggtttattttttccccacagacgcacacaccaacacatttatattcattgcttcctcccactttgtgctctgtaaaagagctacagctggcaagatgttttttcggcccttcatcactgattgcattttccatacagaagagacatcaggggtgtgggtaaaattgtgtgtgtgcctccttgacgtggacaatcactagactcagtgctctgagaaaatctgctatttctgttgaatgggtcagtcttaaagctttaaaattcacataggtggagtttcccatctgaagatttctttacaaggactttgctaagttcatctcagggttatctgagccttgaccaagtttatcctaagggaataccactttgctccctgtgcatagtttaggaactgtagtcctaggaggaaacagctttaaatattggtagtgagttgtctaagatcaggactgttttgatatctgaccttgttatatgcggagagtaaatgcaaaaatgctaagagtaatgcatcatgtattgaatattaagtgtcactgaagcaatgtttgtgttgactagaaacgtaagatgacttgtgtagcacctctttataagcacacagctcatcttaatattttccatttttattagaggaagtaggacagagttgtgtttttctttataaacaaatgataaactagcttttttaaaaagtgactgttagaacttttttagctctgagtagtggtccctttttaaactcctggaaacatttttgttaccaaataaatcatgttttatggtactcagccatccaaaagtgaaagacctagcatttgattctgtgcaggacacaaatctcacaggaactatagcactttggaaaagcatcaaagtagaaaagaaatacagtgcaattctattatgagaatgttttacatttaaactggtttagcaccttttaagtttaaagcccatagcttcttattactagtgacctagggaattgttattaacattaagagatatatatatatatatatatatatatttttttttttttttttttttttttttaaatagagatgaggtttcactatgttgcccaggctgatctcgaactcctaggctcaagcaatcctcccaatatgctgggattacaggcatgagccaccacctggcccaagcaagaaattgacactatatagttatttaaggtagtcaggcagtagaaacattgccagaaggatagaaaggaatttggattatatataaggaaaataacaaatcggtgtttttaagactatcactgtcatatattagatccttgtattagtccatccattaatattagttctattcgtggtgctaggtagcttgacaggtatgatatgcataagtcatagctctattcttagtgtcataaagtgtagctaatttataagctctaagtaatcagctttatctaatttgagggcattaaaattactgcctagaactttgagaagagaaaaattcagggataagttgaaaggcactggaactgttcatgtccataccagaccggtaaattataagatccagatgttagtgtctagaattagctgtttagaattcagaggggacatatgttttaactttgtcatatattagcaagaattggtctactgtgatgtttggggaggaggagggggggataatttttttaatgcacttgtatgtgaagacagtttgtatgacataatacaaaacttttaaac

SEQ ID NO: 1509 - DNA, 1076 bp, Homo sapiens
gaaacagtggaacagagttttgaccctcagtgactcttcttagcaataatgcatgcatttgatttaacaagactctggggcctgtgctgggaaccatctggacctttgcagaagttagagattcagtgcccccctttcttaaaggggttccttaacaaccacaaaaatccttatttctgcagtggcatagaatctgttaaaatttaattagaatcacaaatttatctcagaagctttttaacagttggtgaaatgtgcttgtccaacaaagcatcctaacagggtcgttcccatacacatttgacctggtcagccttttccaggtgaatagccccagttctgacataaagaaagttttatttgtattttactactgtttggtcaattttgatatataactggttacaaacagagccttactatttattagtggggaaatgattttaagaccgtccttttcagtatttaattctgacagatctgcatccctgttttgttttggattatttctgttttggaaaatgctgtctcatttaaaactgttggatatagctggatcctggataggaaaatgaaattattttttcattgtgttttttaattggggtgatccaaagctggcaccttcaggcacattggtctcatagccattactgtttttattgcccttctaagatcctgtcttcagctgggtcagagaaaacttcttgactaaaactggtcagaactcatcacagaaatgaaatacagtggtctctctctcccagaactggttgcagctaaaacagagagatctgactgctggctataggattttggacttaatgactgaaattgcaaattgtcctttttcttggcattacagattttgccaaaataactttttgtatcaaatattgatgtgtgaaagtgaaggagctagtctgctgaaccaggaatagtttgagatattgaactgtcatttttgcacatttgaatactttgcaggctggctttgtataaacttatcctctggtttcctatatgttgtaaatatttagaccataatttcattataaataaatctataaatattc

SEQ ID NO: 1510 - DNA, 1087 bp, Homo sapiens
gggggcccctcccccctgccccgtgccccactgaagaacattactgagggggctaaccttggggactccaatttgccaatgatgagggaacatttgaaagaactgcaaattgtccttgccagctcttgggatccttggatacctggggccatttaagaagctaggggaattaggccacaacaccccctgggacatccgaaagctacaccacagatgccagtggttcatgccttcttcccgcaactttaggaaaatttatttatttattgtttattagttatggggggagaggggagatttaaaggaccagggacatgggaaccaagccatagggatcagagggccttgtccttgaacactactggggtatattcaggctcatccacgcagctgctgggttcttgccctaacggccctcccctgcaacatccgtcttggaggagaggctgcagccacagcaccctactgccctttaaataaaggagggctgtgggcagggccatgtccctttctcctctcccctcaacctcttactgctgttctccctttctccgtccttcatggaagccctgggagataacctggcttcctggagttgatggaataaaggttggggtggccataatggtttgttgggggtgagggaaaaaacccacagggaccagaatgttttgttgttcttttgttttcttttttgtaccaaagtcaactgcacgtgttttatatttttaagagatcgtaggcaattagagatcgaagcctcctatctccacatctctgaagaagttgaggggtgggggagagaatgacttctgccttcatctgcagtaacggggggacctatactgacctcttccccagccatttagaaacaagttctagggtgggttggaaaatctccaagagccctgacctcatcttccacctcagcaaccatgacctgaaacctcagcgtgaatttgggggatttttcagtggaacccttgcccccaaatgtcgaccagcccccaaatgtcgaagaattttcttcttgccaattttgttgtttaaaaaaaaaattcagggaaaattaaaaacctggaactcc

SEQ ID NO: 1511 - DNA, 491 bp, Homo sapiens
ttggggcttccacagccctcctctcccaagaaatccaggctcctctcccaagaaatccaggtgctttccagactccaaagggtatcttaaatgcaatctcttctctcttagcccttggccactttctcctggatcctgccctgctctcagccatagtgaaggaccagccctaggagtctgcgagagcctccttggttccatcgtgaagccataaacaggaatgcctttggcaatagccttgagcctagagggccctctgatgccccactgaggtgctgttggtttattgctggcaacgtgaattctctcaggggtctaggaggggcattttggagactgcctgacaccacccctatcccctgcctccccctctcagaagagggtggaagatgaaatgaaagctatgggactcttggaggatacccagtgtctattctgggttagagaagtgcttactaaggggttttctaataaaaacaaatgccacattg

SEQ ID NO: 1512 - DNA, 1676 bp, Homo sapiens
tccctcggcccatgcctcctgcctctcccctccctcgatgtcagcattcggttcttctgtcaatccttaccctctgcagcttgtcctcccttccgtcttctccctcatcctttccaaacagcagggtgactttagaggcatgggctccaaccccttagctctgtctgagaattatggttttactgctacgtctctaacagactcttctctcctggtctccttgagcagtgctacttaaacagttttcacagtttcattgattgactctacctccttgccccacaccacttttgcaatctttaaactttcagtggctgtgcagagtcgagggaggaaccagctctctggtttactggaacatagtcttccatctataccactagggttttgtcttatgtttacttttggtaactctcttccttctttttctccctaccccccaacccctagcccaaccaatgctagaatttcttgctctgaaggaggagcaggtgaaacaggtggtaattttccttctcggcccctattctggttcattcagcactttttggtgggaactgttggaaattccagggtaaggaggaagatgcctgttctccctgtctgaagagggagatgagacagctctctggacaggaattaacaaacgctggagcagcccagaggaaattcgtgtgaaagaggagggaatgagattattcggaggaagggaatgggggagacagcctgagtaaaaggcttggaagttggaattaacagtggggagcagaagcactcatagctcttttaggcagaagaatccaggcccgagctggcagaagagacttagagatgctaatggaatttaaactgaaaaaaggagcccaatgaagctaagcgccacgccccacaaggggtcatattggctttagttcctcaagcatatgtgcttatatgcacacacacacacatttccatggacccaggtcttgcttgtgtccccaggcaccagtagtttgagcccccctcaaaagacatgaagggggttggggtctgtgtgagtagtggggaggtgcatgtgtatccacatgtgtgcatacactcttaagttgggtgggaagtggattccttgttggtttctggttcagagtgctctcccaccaccagagacaagtgggtaaaaaggtcagtccattgcaggaatatatatccgggagagctaggtcccttggggctctggatgctgggtaacccagaggtaatgtgggtaccctttctgaagctgtcagggctgtgactagcacccttatcacccctcactgccttgtgggaatagtagagggtttttttcctccagagcccctggcctttcagttcttaactatttccctccaggccagaaagttttctttgaggaaggagaggagagggtggcaatgatgcctttgatctggaattggacatttctctgtcagagcacagaggaggctcatatcacctcttccctctcctacttggcccagctgcttggaggaccgaccccatggctgagaatatgacggcaagaggaacagagtttgctccaagtgggaaagggtcccaagcagtccagagaagatgtctgtgtggctttccctccctgcctcccccagctcccacactggcctttgtaaataaatggcgtggtctttgttgtg

SEQ ID NO: 1513 - DNA, 713 bp, Homo sapiens
ggccccatccctgaccctgtcctggagggggcagaggccaggccccagtgctgacgaggagcccagatttgggcctaatcaggtggggacgcatctcagcctggaaccaacaggggctgaggagagagggcacaggagagagggcagagaagaggaggggtgtctagggggactggcagagtgtgagagggaccgtgagggggctcttgatgggagtggaagaagtgctgagggtctgagaggggagatgcatgcgtgtccaggctgaagatgcccctatattctgtcaaaggttggcggggggaggtgttggggtcctttcatctggctccgtttctggtgcttctggaagtctctgctcagcacagggaagaactaacacgactaacctaggcctaccctgaatgcttcttgctaaccaggccgagaggccacacacttgcccccccatccccacaaaccaggtaatgccagtttgccagcagctatttgcctatagagatgagtctgtcctggtcataactgtgtgctcaaggtgtccaggcttttgggggtgggcctatctgggtgcattatggatggtttggtggattgaggtgtggggaggagggtcctaggctagagggggtatccctagttagactttgggaagccaccttcaacgttttctggaacaaggcaggtacaaataaaaaaataaaactttggaaagc

SEQ ID NO: 1514 - DNA, 1363 bp, Homo sapiens
tactgacccccaggccctgcagtggggctgactccagatctctcctgccctccctggcagccaggaccagcacctgtagtcaccccaccacacgcagactcatgcacgcacacaggagggaggcctagctgctcagaggctgcagggagggcccaggagccggctgggagggtggggtccctttgttgccaagacgttaggaaagcgaggaaagtgcttggattaggagagtcttgtgggcccctggccagccttcctgcctcagctcccctgctgtctccaggggcaggtggtaggcatgggtacctgcatttcactggaatgggttcttggatctctgaggggaaggaacagcaaaagaggcccttcttcctcacccaagatgcagggtggttggggccaggagtttggaccctctaggtcttgggggaagagctgggtaatacctggtgtctgagtgattctctgcagacccttcccctcctcaaggatcacccatcctcctttcagccccctttatggggaccaggcagctctggagccagccacaggggctgttagagaagcaaggcctggagtggcctgcaccgagtagcagggtcagggttcgtgtgctcctcctcctgctgcaggggctgcacatcccattgccccacttctgctttgtgtctccctctgtctagcttccagggcagggagcaggccccacctagggctgcaggcagtctggcctgtgccagcacggtctcctgtgcccaccagccccacaggtgctgtgctttgtgctcttggctgctgtgctgggacagaatgggatgccaggaagagaagaaagggggtgcagtctgaggccaccaccccccttcctatctaagggagggctgaagacaaggggccggcattcagtgggcagcagaaaggagaggctccttgaagctgctcagtcagaggcccccgtccctccttttgccttccgcaggactgaagacctgaaggggctggcttttggagtgttgaggtgaatatctgggagcagagatcatgaatagctcagggcagtgaatggcgcaccaagagcagggctgtgtgtgggaggctgcagccaggattgcctcagctcctccccctcaggctgggaggatagcacaggctaggggctcggggtggagggtctcagctctgctgcccccaccccagtactagcctagcttcccaagctgtggcttagaggatagttggcttcctgcctctctcctctaaaatagcaagtctgggaaatcctggggtgagtggagtcaccccactcccagttgctggcagagactgagactaaagcatcacttaataaaccccccaagcccaa

SEQ ID NO: 1515 - DNA, 350 bp, Homo sapiens
ggcccgctctctggagggaaggacattactgaacctgtcttgctgtgcctcgaaactctggaggttggagcatcaagttccagccggccccttcactcccccatcttgcttttctgtggaacctcagaggccagcctcgacttcctggagacccccaggtggggcttccttcatactttgttgggggactttggaggcgggcaggggacagggctattgataaggtccccttggtgttgccttcttgcatctccacacatttcccttggatgggacttgcaggcctaaatgagaggcattctgactggttggctgccctggaaggcaagaaaatagatttattttttttc

SEQ ID NO: 1516 - DNA, 145 bp, Homo sapiens
aagagcaatgcctccaggttgtcggaagcctagtcaagcccaagaattacaggagactggacatcgtcagatcactctatgacgatctggaagatcatccaaatgtgattgaaagacctggagcggctgacgcaggagcacagtg

SEQ ID NO: 1517 - DNA, 238 bp, Homo sapiens
gtgctaggcaaggctacttcaatgcacagaaccagcagagtctccccttttcctgagccagagtgccaggaacactgtggacgtctttgttcagaagggatcaggttggggggcagcccccagtccctttctgtcccagctcagttttccaaaagacactgacatgtaattcttctctattgtaaggtttccatttagtttgcttccgatgattaaatctaagtcatttgagaaagtt

SEQ ID NO: 1518 - DNA, 291 bp, Homo sapiens
taagccttcccagttgactgaaagatgaggctaggctctagcaagttgaagtcaaaccagctccttcaagaagctttgagcagaatgaagtggggaggacccagcttccagcccaggaagcccactgtacctggagccatctgggataagactttgacccatgactcccatatccacagcctgtccatcctagcccatcccagtttatcctgtatcatttgagctgggattcccacatcctctgagttggaagtcccatctcaagtcttcaataaagactcttgaatattg

SEQ ID NO: 1519 - DNA, 3917 bp, Homo sapiens
cgattcccactcccctcctctcagcctccctgatgaagagttgacaatctcaccgcccgcccttccctgccccgggctcctcccgctcgacccccacttcctttcttgtgcttcgtgtcctgttgacggttacatttgtgtataattattatattattattattattattatattttttttaatttggattctcgctttggagagggggatgctctcatcccctctttctgtaccccccaccattttcactggctggggggctctctttttcgcgggaaggggggacactttgcacgttgtacacatatgctgcaggaagggggtggggggcccaataaggcctttgggaaaggacaggtgccgagccctgcatgtggagccctcccaccccacccccagatagagggaaataaccaaaaaactaccaaacaacagaaacccacactctagactgaaaccccaaagtgggcttgatgggtgggtttgtgtttcaaggggaaagtgaggcagaggttctgaaaagggtctctgtttttgtgttcatgtagccataggcacatggagcagaatacttaagcctggcccccaaatgcccctgcacacacacgtgccacacctgcgctgattcttgtgtgtgctgcacccccaaggtgtgtgggtgctggctgagctttgggccgggaaggcagcctgggaatctgaggctggagacaggggtttgaggtgggggcctctctggaagcacatttggagggaaagacaagagagccatgaggagagggctgaggagggcagaagggctaggcagggggcaaattgagcccctcccttccccagtttttctctaagatatacagtgcaatagctccccacccctcagttgacgccagccctgtaaagctggccacagtgtgcagggagaatggggagagggtcttcagtgaggtggctggggcgagagtcggcctggacttccctggggtgctccaggccagagctctttcattggggcgagtgtggtgaggggacgtccttggtcttgcacgcacactacctgggggagtcaacactgggatggtctgtggggtgggagggcctacggatgggtccgtagaggtcccacctccctcattcctccttggcccctctccctagcttctcctgttagctccttctgctcctgaccccacctccttgctcttggcgcccctattgtctctggctacctccttgtcccaccacctccaggctgcatcccaccttccctcttggctactgtaattgtaaatagcgacctttggaaaacgttagcggtgtaacagtccaggaaactgtttttttttgttgttgttgtattgatatgaaatgagattctatttttgtcaaagtatattgtaataataatgactcaaacggcccgtactgtacagacgagattcttctgctgttgttcttgctcccctcccctcctctgagtccgcccctccctgctgcctcctcagtggggcagtgggcaaggggcccaggggcagccgaagcacggggtcctgagacctcaggcaggattggagatcaaaccagagggggcaggcccccagcctgctctctaggatcaccccccgccctaaggggcctggcctggggtgacgtggccaggcagactgtctgccccactccttcacacaagcccagctcctctgcccaaggggtgcggcgcccccttggggtttcctcccagttggagagtagagttaagacaaggcccagttttgtgttagccgaccgtctttgcccacctctatgacccagcctcttgcagtattcccatacttgatgcagggaaggaaccagaagcagaggggcctctacgcaggtacacacgtgtacctgagtgtgttcatgagggcatctggtgtttatgtgtctgagtgtagctttgtatttatgtgtgtgtgtgtgtgtatgtctgattgcacgggtgtacttttgtatttatgtgtgtgtgtggttgcacgggtgtgcctctgtgtgtctctgaccctggctgggtgtgtgtgcaaatctgtgtgactggagctctaggggcatctctgtgtctgagtgtgcctggtgtgtgtttacaaagggagagttggctgctccagctccacagccctgggaccccaactcctgtcttccctgctcctttccctgtgttcaccctcagctctgacacattgaactgcagttggggggattggcagttagccctctgtgcttctccctgcagccctacctctgccaaggtctctccctccagggacctctgcttccacccacatatgtccacttagtcacccacacttgacacagttcctggagtaccctcttcccccaaccccagacctgctttcagagcaaaactcaagtccctcttcctccgtgaagcttctccctcagctgagcagtgatcacttactcactcttaaccccaatccgctgactgggtggggacagcacgtccagccttcccacctctcctgcaggcttctagacggagtttcaaaaactgatgagcctcgatccagggcttgaaagaagccagggtgtaatcttgttcatgcatgcgtccccagagcctcgcccagtgcctggcacatagtaggcactcaataaatgctgaatgggtgaatagttgaatgataggtgctcaataaatgaatgaatggccttcccttctcaggctattcccaccattagtctgcccacctttctaggctgggcttggccaccattaaacacggggtgggggtgagggcccctgcaattcacggtgcaatattcaccagttttgccctctgcctcataaaggcaaacctggcttttgattaccatgtgtggatgtttcagtgtcctttcttctctgtccctggggatggggtggtctgtgaatatgtgacatttctgcagttcagtatccgaaggtttctcttgggggtaggggctcctgggcggccagatgaatgggtccctgggaacccagacctcagatgaggacttaatgtcttcttcctctcaagccaaattcgcctccacccactccctctgaagaactgggcatttgccaaagtaaccactggagtcatctaatggccctccccctccccaggtttcccacagctttcagggacagtgggcaagaggacacccccccccaccacctcagtggaacacaccattctccccccctcaacagcacactcagtgcagcaagactgacccctgaccccctcccagccctccctaccttggacaggaaggaagtaatgcaccttctcttgctgattatttatttgtttggagagacagaaatgtaaaagtgtatctagaaatatctatatctctatatatttttaactgactctttggaatcccctggggtggggtgaggggtaagtttaggctttcgcggaggggaggagacatggagcctgggaactccttgttctcccctctgctgcctctccccaccccttaaagcagttggtagaaggaatggtatttgtatggggggagggaggctggaatggagaatctggattctctcctcttccccattctccagagggagggaggtggtgaggaagaggaagggaggggcaggatgggccatggaggtgccccacccccacacctgacaatcacccacactcctggggctcttcctgggtcctggggcagggcgagtccaagtgtgaggctgttgatttgttttcaatatttcttttcgtgctgtatggtgatgctttcttagtattctacacaataagaaaagacaaagtcctcgagattcttatgagttttgtttgaaaactctttcactatatttgttgtaaagaggtttactattaaaagaaaaagaatacacgtttctgat

SEQ ID NO: 1520 - DNA, 1081 bp, Homo sapiens
cagaggcaaagggtgctacccaagcccctcttacctctctggatgctttctttaacactaactcaccactgtgcttccctgcagacacctagagctcaggactgggcaaggcccagggattctcaccccttccccagctgggaggagcttgcctgcctggccacagacagtgtatcttctaattggctaaagtgggccttgcccagagtccagctgtgtggcttttatcatgcatgacaaacccctggctttcctgccagatggtaggacatggaccttgacctgggaaagccattactcttgtgtctgctactgccctcccacagtcaccccaatattacaagcactgccccagcggcttgatttcccctctgccttccttctctctgcactcccacaaagccagggccaggctccccatccctacctcccactgcatcagcagtgggtgttcctgcccttcctgagtctaggcagctctgctgctgtgatctgcacaccctccaacctgggcagggactggggggatgcagtgtgtgttagtgcccatgtggcattgtggcactgttgccccccatggcggcatgggcaagatgaccttccattagcttcaagtcttgttctcttgtctgtggtctgtttaatatgtgggtcactagggtatttattctttctcccatccttacactctggatcattgtgcagacttaatcagggttttaacgctttcatttttttttttttttttttttttttgagctcaaagagagttctcattttccctattcaaactaatacccatgccgtgttttttaccttggatttaaagtcaccttaggttggggcaacagattctcactcatgtttaagatcttgttatttcagcttcataagatcaaagaggagtctttcccttttctcttttaccctcaggattctcatcccttacagctgactcttccaggcaatttccatagatctgcagtcctgcctctgccacagtctctctgttgtccccacatctacccaacttcctgtactgttgcccttctgatgttaataaaagcagctgttactccca

SEQ ID NO: 1521 - DNA, 723 bp, Homo sapiens
tggaagaagcaggaaaagcaagaagaaaagacagcagcatcaagaggaggaggacatcttggatgtaagggatgagaaggatggcggggctagggaagcagagagcagagcacacactggctcaagcagcagaggtaagaggaagaggcagcagcatcccaagaaggaaagagctggagtcagcactgtccagaaagccaaaaagaaacagaagaagagagactaaaggtctggtaaaggtagggctcaattgattgattttcaggagttgaagcctcaaagaccagggttgatgcaggtctgcaggtcttctgcacccccctcaatgaggagtccctcccagaaaggaaactgatctctgggacgtcagctgctgagaggagcaagcggtagtaccaccccttagttgagggagtcagcacagtcctttctgcagcttctaacccaggaccatgaactcaggtgcctagagaagccaggcagctaaaggacaaggaatgctgggggctgtgggaacaggaatgcagataccctttgaaggagcattcctgctaaaagaagctgaaaatgtagacctatgtgaagtgctctgatttctaaatattgtgaaggttaagaaaaacataaatttaggtctatgggctagatttagcccacagttgccagtttctagcgctaccaaatgaatgaataaacatgagcttgcgctcctagcctagagat

SEQ ID NO: 1522 - DNA, 559 bp, Homo sapiens
gaaaagaccatctgcccggcactggggacttaggggtgcggggaggggaaggacgcctccaagcccgctccctgctcaggagcagcactcttaacttacgatctcttgacatatggtttctggctgagaggcctggcccgctaaggtgaaaaggggtgtggcaaaggagcctactccaagaatggaggctgtaggaatataacctcccaccctgcaaagggaatctcttgcctgctccatctcataggctaagtcagctgaatcccgatagtactaggtccccttccctccgcatcccgtcagctggaaaaggcctgtggcccagaggcttctccaaagggagggtgacatgctggcttttgtgcccaagctcaccagccctgcgccacctcactgcagtagtgcaccatctcactgcagtagcacgccctcctgggccgtctggcctgtggctaatggaggtgacggcactcccatgtgctgactccccccatccctgccacgctgtggccctgcctggctagtccctgcctgaataaagtaatgcctccgcttcaaa

SEQ ID NO: 1523 - DNA, 408 bp, Homo sapiens
gtggccacaggtagaaccgcggccgaagcccaccactggccatgctcaccgccctgcttcactgccccctccgtcccaccccctccttctaggatagcgctccccttaccccagtcacttctgggggtcactgggatgcctcttgcagggtcttgctttctttgacctcttctctcctcccctacaccaacaaagaggaatggctgcaagagcccagatcacccattccgggttcactccccgcctccccaagtcagcagtcctagccccaaaccagcccagagcagggtctctctaaaggggacttgagggcctgagcaggaaagactggccctctagcttctaccctttgtccctgtagcctatacagtttagaatatttatttgttaattttattaaaatgcttt

SEQ ID NO: 1524 - DNA, 728 bp, Homo sapiens
tggcagtggggacgctggtgatatgaggaggcagaggcagcacccaggagaaacagggcagtggaccaatggacagctccaccagctccacatctttggaagctagatttggggagagagaagctctaccccagacttaatacccattgaaatttcacctcaggtgttgtgtcctgtgtctggttaagtgtcccatggaaggggaaagccttcacgtcagaacccaaccctataccttttacttcttaaatggtgctaaccacaggtgtcccagggtgctctgtgccagttaagatttttaactttcaaggggcagggcatactgggaaatgtagtttcccaaactgccttatcacttgggtggacatatgtctccttttatgccttttggtcttgagtaattaacagcatcctcttccacgctcagaagtgttctggttggggccaggcatggtggctcacacctgtagtcccaacacttagggaggccgaggcgggcggatcacctgagatcaggagttcaagaccagcctggccaacatggcgaattcccgttctctactaaaaatacaaaaaatgtgtggggtgtggtggcaggagcctgtaatcctagctactcaggaggctgaggcaggagaatcgcttgagcccaggaggcggagattgcagtgagccgagatcgtgtcactgcactccagcctgggtgacaagagtgagactccgtctcc

SEQ ID NO: 1525 - DNA, 96 bp, Homo sapiens
gcctggggcagagcagctcctccccaacttctgtcccagccttgaaggctgaggcacttctttttcagatgccaataaagagcactttatgagtcc

SEQ ID NO: 1526 - DNA, 1339 bp, Homo sapiens
ccaccaatgtttcaagaggagcccccaccctgttcctgctgctgtctgggtgctactggggaaactggccatggcctgcaaactgggaacccctttcccaccccaacctgctctcctcttctactcacttttcccactccaagcccagcccatggagattgacctggatggggcaggccacctggctctcacctctaggtccccatactcctatgatctgagtcagagccatgtcttctccctggaatgagttgaggccactgtgttccttccgcttggagctattttccaggcttctgctggggcctgggacaactgctcccacctcctgacacccttctcccactctcctaggcattctggacctctgggttgggatcaggggtaggaatggaaaggatggagcatcaacagcagggtgggcttgtggggcctgggaggggcaatcctcaaatgcggggtgggggcagcacaggagggcggcctccttctgagctcctgtcccctgctacacctattatcccagctgcctagattcagggaaagtgggacagcttgtaggggaggggctcctttccataaatccttgatgattgacaacacccatttttccttttgccgaccccaagagttttgggagttgtagttaatcatcaagagaatttggggcttccaagttgttcgggccaaggacctgagacctgaagggttgactttacccatttgggtgggagtgttgagcatctgtccccctttagatctctgaagccacaaataggatgcttgggaagactcctagctgtcctttttcctctccacacagtgctcaaggccagcttatagtcatatatatcacccagacataaaggaaaagacacattttttaggaaatgtttttaataaaagaaaattacaaaaaaaaattttaaagacccctaaccctttgtgtgctctccattctgctccttccccatcgttgcccccatttctgaggtgcactgggaggctccccttctatttggggcttgatgactttctttttgtagctggggctttgatgttccttccagtgtcatttctcatccacataccctgacctggccccctcagtgttgtcaccagatctgatttgtaacccactgagaggacagagagaaataagtgccctctcccaccctcttcctactggtctctctatgcctctctacagtctcgtctcttttaccctggcccctctcccttgggctctgatgaaaaattgctgactgtagctttggaagtttagctctgagaaccgtagatgatttcagttctaggaaaataaaacccgttgattact

SEQ ID NO: 1527 - DNA, 330 bp, Homo sapiens
gtctggcctgacccccaacaaagaagcctggaggtcagagaagcaaatgcggagcctgctccctcctaagaagatcccaagaatccaatggctcagtccttggtgatctaagacagcaaagaagtgtgcaaggagggccctgttagctcccactgtcctggtttctcctcctggagtctaatttccttggccctctgagccttttgagtctgggccctggtccaatgctgctgttgtctgaggaatggtttggtgagaacagatgttagaacttgtttgttgattcttgtctggctaataaatcatcaccaactgccttctcctacaggg

SEQ ID NO: 1528 - DNA, 1159 bp, Homo sapiens
ccgtacaaaccaccaaatcctctgcgtccccactcctccttcagggactggcctgagaccggggcacagggtaggggggatcccaacactcctccctgtggaggaggcagttagggaaactaggatccagccaaggcccggggggagacccgcatgttgcttggtctgctcaagtcggagtcaggtttcagtgtcttttccctcccttagcccaaccctccaaggcctcatgtctcctaagcatgctgactgcatccgaaaggcccccactcaccatggtctgccctcaccccacatatgtgtgtacacgcgcacgcctgtatgtgcgctgccctcagacatgcaagtgaaaggaggaggcttctgtgtaaatgcactttcttcctcccctctttctccataagaccccaggcagaggtgggtgcctcccctcccctctttgtcactttggtttcctataaatatgtatgtatcgtatgtgcatctttgctattgtaaataactttgaccttttttgttcctgttcctgaagtgctggaggcagttatggaaggagctgcttagggaagaggggtttcacttgtatctccttagttaacaacccagttccaggatcgagcctaaagcgggagccaggcctgagtgttcctgtccctgtgagtgggaaggtcttctggctccccatcccacctggctccagagcctgccctccacagcttgctgccaagctactccctccctccctggacttctcatcttcacaagatggggatcatgggggtttcttaccccacctatgtccccctcttccccaccctgtccctgtagaaaaccagtgaagcaggtacggagctgaggactgggccccaggaggtggggacaggggtctgaatgccgagtccctgaattcacccaggaccatccaaggggccaccgcagcattggccccatcaccacgtcctcacccaactctccctgatgaatagaatatacacactgtgctaggtgtatatatacatatatatatatataaatatatatataatatataaaatatagatatggaaatgactgttctgctgttaagataatgtatactcttttattttcttcctttcatggttaagattttttttttaagaaaagttaaatatccttc

SEQ ID NO: 1529 - DNA, 605 bp, Homo sapiens
ctagagaggaaggtgggaagttggggaggagtcctccaaagtccatctctcctcttgcccaccgcctctgggttagccccttcccctggctggacatgggctgaaattgcaggatttgaaggggtggagttggacccaaggtggggagcattgcagggaaggtgtgaatgtggaaatgggaaaaaccaagacagggtgcccctcctctttcaccatattgctaagcagactaaggggacattcctaatctcaacttttcttcagggagacgagaataaagtttctataatttccatcctgcccacataagggggaaaattaagggtctagcctggggagaggacaggggtggttgtgttccctgagtcttgtctggggcccatctccccattccaggctaaggtctccagtccctttctcacccctccatgcaacttctctcccatccctctgatttctgagaccctggaaacccctgtcccatgcaggcacttcctcctctctccatttccccaggacccaggcaagtggggtggggagacactggccttctctgctctgtaatactccactgtgaccatgaataaaatgcccttgcaaactgt

SEQ ID NO: 1530 - DNA, 894 bp, Homo sapiens
ttttgaattgaaaagaatttttaaaaatccaaatctaagacatggcatgtttaggaagattttagaaacactaaaataatgtgatcctttggattgcctcaatgttcttactcaagtcatctcacttataaggagagttataggctattcagtatcaagatagatttctttggtttatttggttggttcccttttctgcatattgtttgtaatctcctagatactattacgctatcttgtttgggaatgatgtttcataggtttgtgatgatctttacgttcaggactcagttttaacacccagcccagtggttctttcatagatgggaacctgtttctacaaacacttccgattttctgtgaaactaccaagctctcccttatcaagtgaatatcatcaaaaccacagcatccttgatcagagaagggggaggttcacatgtttgcagtgaaaagcagtgtctttgatctgcaacagcaaatcctcagagaaaaagattctggggttacttgaccttctctcctgttaagtgcagtagggcttcccctcttgactttcctggttatagctttccatcacagctccccacattctctcttgatgttgaaagcagtctctcaaaagactttgttgttgtgtggttttttgtttgtgatttttttccttatgcaaatcatactcctgcccaagaaaatacagtagttccccttatctgagcagtatatgttctaagacccctagtagattcgcaaaccacagatagtaccaaactccattcatatatatgatgttttttcttcccttaaccccactcatatgtatctgtgataacgtttaatttataaattaggcacagtaagagattaatgacaataataaaatagaaaaattat

SEQ ID NO: 1531 - DNA, 2297 bp, Homo sapiens
gtccacacgtctctccaactgctgtttcagcctctgcaccccaaagttccccttgggggagaagcagcattgaagtgggaagatttaggctgccccagaccatatctactggcctttgtttcacatgtcctcattctcagtctgaccagaatgcagggccctgctggactgtcacctgtttcccagttaaagccctgactggcaggttttttaatccagtggcaaggtgctcccactccagggcccagcacatctcctggattccttagtgggcttcagctgtggttgctgttctgagtactgctctcatcacacccccacagagggggtcttaccacacaaagggagagtgggccttcaggagatgccgggctggcctaacagctcaggtgctcctaaactccgacacagagttcctgctttgggtggatgcatttctcaattgtcatcagcctggtggggctactgcagtgtgctgccaaatgggacagcacacagcctgtgcacatgggacatgtgatgggtctccccacgggggctgcatttcacactcctccacctgtctcaaactctaaggtcggcacttgacaccaaggtaacttctctcctgctcatgtgtcagtgtctacctgcccaagtaagtggctttcatacaccaagtcccaagttcttcccatcctaacagaagtaacccagcaagtcaaggccaggaggaccaggggtgcagacagaacacatactggaacacaggaggtgctcaattactatttgactgactgactgaatgaatgaatgaatgaggaagaaaactgtgggtaatcaaactggcataaaatccagtgcactccctaggaaatccgggaggtattctggcttccctaagaaacaatggaagagaaggagcttggatgaggaaactgttcagcaagaggaagggcttctcacactttcatgtgcttgtggatcacctgaggatcctgtgaaaatacagatactgattcagtgggtctgcgtagagcctgagactgccattctaacatgttcccaggggatgctgatgctgctggccctgggactgcactgcatgcatgtgaagccctataggtctcagcagaggcccatggagagggaatgtgtggctctggctgcccagggcccaactcggttcacacggatcgtgctgctccctggccagcctttggccacagcaccaccagctgctgttgctgagagagcttcttctctgtgacatgttggctttcatcagccaccctgggaagcggaaagtagctgccactatctttgtttccccacctcaggcctcacactttcccatgaaaagggtgaatgtatataacctgagccctctccattcagagttgttctcccatctctgagcaatgggatgttctgttccgcttttatgatatccatcacatcttatcttgatctttgctcccagtggattgtacagtgatgacttttaagccccacggccctgaaataaaatccttccaagggcattggaagctcactccacctgaaccatggcttttcatgcttccaagtgtcagggccttgcccagatagacagggctggctctgctgccccaacctttcaaggaggaaaccagacacctgagacaggagcctgtatgcagcccagtgcagccttgcagaggacaaggctggaggcatttgtcatcactacagatatgcaactaaaatagacgtggagcaagagaaatgcattcccaccgaggccgcttttttaggcctagttgaaagtcaagaaggacagcagcaagcataggctcaggattaaagaaaaaaatctgctcacagtctgttctggaggtcacatcaccaacaaagctcacgccctatgcagttctgagaaggtggaggcaccaggctcaaaagaggaaatttagaatttctcattgggagagtaaggtacccccatcccagaatgataactgcacagtggcagaacaaactccaccctaatgtgggtggaccccgtccagtctgttgaaggcctgaatgtaacaaaagggcttattcttcctcaagtaagggggaactcctgctttgggctgggacataagtttttctgctttcagacgcaaactgaaaaatggctcttcttgggtcttgagcttgctggcatatggactgaaagaaactatgctattggatctcctggatctccagcttgctgactgcagatcttgagatatgtcagcctctacagtcacaagagctaattcattctaataaaccaatctttctgt

SEQ ID NO: 1532 - DNA, 1774 bp, Homo sapiens
gagaatgaaaagttacgagaacgtcctactcatgtgatttctcccttgtccaaagtcccaggcccagtgcagtccttgcggcccctggaatgatcaactcattccagctttctaattcttctcatgcatatgcattcactcccaggaatactcattcgtctactctgatgttgggatggaatggcctctgaaagacttcactaaaatgaccaggatccacagttaagagaagaccctgtagtatttgctgtgggcctgacctaatgtattccctagggtctgctttagagaagggggataaagagagagaaggactgttatgaaaaacagaagcacaaattttggtgaattgggatttgcagagatgaaaaagactgggtgacctggatctctgcttaatacatctacaaccattgtctcactggagactcacttgcatcagtttgtttaactgtgagtggctgcacaggcactgtgcaaacaatgaaaagccccttcacttctgcctgcacagcttacactgtcaggattcagttgcagattaaagaacccatctggaatggtttacagagagaggaatttaaaagaggacatcagaagagctggagatgcaagctctaggctgcgcttccaaaagcaaatgataattatgttaatgtcattagtgacaaagatttgcaacattagagaaaagagacacaaatataaaattaaaaacttaagtaccaactctccaaaactaaatttgaacttaaaatattagtataaactcataataaactctgcctttaaaaaaagataaatatttcctacgtctgttcactgaaataattaccaaccccttagcaataagcactccttgcagagaggttttattctctaaataccattcccttctcaaaggaaataaggttgcttttcttgtaggaactgtgtctttgagttactaattagtttatatgagaataattcttgcaataaatgaagaaggaataaaagaaataggaagccacaaatttgtatggatatttcatgatacacctactggttaaataattgacaaaaaccagcagccaaatattagaggtctcctgatggaagtgtacaataccacctacaaattatccatgccccaagtgttaaaactgaatccattcaagtctttctaactgaatacttgttttatagaaaatgcatggagaaaaggaatttgtttaaataacattatgggattgcaaccagcaaaacataaactgagaaaaagttctatagggcaaatcacctggcttctataacaaataaatgggaaaaaaatgaaataaaaagaagagagggaggaagaaagggagagagaagaaaagaaaaatgaagaaaagtaattagaatattttcaacataaagaaaagacgaatatttaaggtgacagatatcccaactacgctgatttgatctttacaaattatatgagtgtatgaatttgtcacatgtatcacccccaaaaaaagagaaaaagaaaaatagaagacatataaattaaatgagacgagacatgtcgaccaaaaggaatgtgtgggtcttgtttggatcctgactcaaattaagaaaaaataaaactacctacgaaatactaagaaaaatttgtatactaatattaagaaattgttgtgtgttttggatataagtgatagtttattgtagtgatgtttttataaaagcaaaaggatattcactttcagcgcttatactgaagtattagattaaagcttattaacgt

SEQ ID NO: 1533 - DNA, 521 bp, Homo sapiens
ccccttacccagagtggcccacaggaaacagcctgcaccatttttttttctgttctctccaaccacacatcatccatctctccagactctgcctcctacgaggctgggctgcagggtatgtgaggctgagcaaaaggtctgcaaatctcccctgtgcctgatctgtgtgttccccaggaagagagcaggcagcctctgagcaagcactgtgttattttcacagtggagacacgtggcaaggcaggagggccctcagctcctagggctgtcgaatagaggaggagagagaaatggtctagccagggttacaagggcacaatcatgaccatttgatccaagtgtgatcgaaagctgttaatgtgctctctgtataaacaatttgctccaaatattttgtttcccttttttgtgtggctggtagtggcattgctgatgttttggtgtatatgctgtatccttgctaccatattgggaacagccaaaagaagttatagaacaagaatttaaggtgactctatctg

SEQ ID NO: 1534 - DNA, 1000 bp, Homo sapiens
cacttggaggaatcagaagggaagatcaacagcaaggatggggcatcattaagacttgctataaaaccttatgaaaatgcttgaggcttatcacctgccacagccagaacgtgcctcaggaggcacctcctgtcatttttgtcctgatgatgtttcttctccaatatcttcttttacctatcaatattcattgaactgctgctacatccagacactgtgcaaataaattatttctgctaccttctcttaagcaatcagtgtgtaaagatttgagggaagaatgaataagagatacaaggtctcaccttcatctactgtgaagtgatgagaacaggacttgatagtggtgtattaacttatttatgtgctgctggatacagtttgctaatattttgttgagaatttttgcaaatatgttcattgggaatattggcctgaaattttcttttccactgtgtctctgccagaatgtttgtatcaggctgatgctggcttcatagaatgagttaggcaggagcccttcctccttgattttttggcatagtttcagcaggattggtaccagttattctttctgcatcttgtagaattcagctatgaatccatctggtctagggcttttgtgttggttggtaagttttttattactaattcaacttcagcgcttgatattggtctaggaggggtttctgtctcttcctggttcaatcttgggagattgtgtgtttccaggaatttagccgtttcctccagattttcttctttatgtgcatcgacttgagtgtaaacataacttatatgcactgggaaaccaaaaaatctgtgtgacttgctttattgcagcatttgttttattttggtagtctggaactgaacctgcaatatcaccaaagtatgcatatagttgcaaaaatgtgatttttgacatagtaaatatgagtatttgcaataaactatgatattacttttgtaagtatatagaataaaatgtaaataatct

SEQ ID NO: 1535 - DNA, 1234 bp, Homo sapiens
ggttatggaagattctgctctttgaaaaccatccatgaccccaagcctcaggcctgatatgttcttcagagatcctggggcattagctttccagtatacctcttctggatgccattctccatggcactattccttcatctactgtgaagtgaagttggcgcagccctgaagaaactacctaggagaactaatagacacaggagtgacagggactttgttatcagaaccagattcctgccggctcctttgaaaacaggtcatattgtgctcttctgtttacaagaggaaacaagatggaataaaagaaattgggatcttgggttggagggacagtgaagcttagagcacatgaactcaaggttagtgactctgcaggacttcacagagagagctgtgcccatcattcagtccaagtgctttctctgcccagacagcacagaactccagccccgctacttacatggatcatcgagtttccacctaaaatatgattctatttattttgagtcactgttaccaaattagaactaaaacaaagttacataaaaagttattgtgactccacttaattttagtgacgtatttttgtatatataggccaacctataccacatccaaaattatgtatctattacagcccctagaagctttataaatacagtgtgtcttcttttattcacaaaatttttgaaatcgtggtaatatggtttgaaacctgtatcttaattattttttttttaaattgagacagggtctcactctgtcactcaatctggaatgcagtggcacaatcttgcctcactgcaacgcctgcctctcaggctcaagcaaacctctcacctcagcctgctgagtagctgggactacaggcacatgccaccaaacttggccattttttgtcttacgtagagacaagatttcaccgttttgcccaggctggtctcaaactcctgggctcaagcaatgtattgaattttaaaataaccaggcactcactcttatgaattaataaacatttggaggtatataaagtaaaaagttaaagtctttcctgtaagttaacacaaatgttaactattgttaaaaactttacaggtagctctctagatatttttctatttttgtatgtatacttatgcatacatgtaagtatataaacatttagaagtgtacctatctaacaaactattatgaaatactttcaaatctgtaaatagatctattatactatttt

SEQ ID NO: 1536 - DNA, 1049 bp, Homo sapiens
tatcctggtgttgcttgacctggcccccctggccccgcctgccctctgcttgttctcctgagccctgattatcctcatactcattctggggctcaggcttgagccactactccctcatcccctcaggagtctgaacactgggcttatgccttactctcagggacaagcagcccccattgctgcctgtagatgtgagctgttgagttccctcttgctggggaagatgagcttccatgtatcctgtgctcaaccctgaccctttgacactggttctggcctttcctgccttttctcaagctgcctggaatcctcaaacctgtcactttggtcagatgtgcagaccattactaaggtctatgtctgcaaacattactaatctaggtcctattactaatctatgtctgcaaacattaaaggaatgaaacaatgaaaggaacatttgaaagaaaatgtgggtagacaatttcttgcaacttgggggaaagtttagaattcttttgattggactactttttttttttttcctcaagcttcaggtgaccacaatagcaacacctccctattctgttatttcttagtgtaggtagacaattctttcaggagcagagcagcgtcctataatcctagaccttttcatgacgtgtaaaaaatgatgtttcatcctctgattgccccaataaaaatctttgttgtccatccctatacaacctgccaacatggttgacatttaatgagaggaatgtcaaaaatacattttactttattcaaagaaaaatatattggttactgggaaaaggtcaagaaagaggcagaaagagatcagggagggctaaagttgtgtcttatgccaagcgaaagtgaaaaatatcattttcactttatcaactgagactttggggcctgtaagcttgaggcaagacagaaataagagaatcaagacttgattgtaaaaattgacaactttagattctgaggctaggctgagtacttattatacggctacatttacacatttacacttatctaataaatcagatttcacagtctca

SEQ ID NO: 1537 - DNA, 286 bp, Homo sapiens
gccatcatcatgtctcctctcccattcgcaataagtaccaagaagcccaagatatcagcccaaaagtcaatcttatcatatttcaaatgattttcaaatttgatgaaatcagagttttcatgtattttaaaataaattattatttaaacatcagcaaaaaagtacttaaaactgtaaatttattatgagactgtactaacagtgtgattcaccctgattttacacacattaaaatgttagaaaaaatgtgtctcaaaataaatgaaatataatacatatgacttaa

SEQ ID NO: 1538 - DNA, 558 bp, Homo sapiens
taagcagctcctcgtggatcgtagaaaatcttagtgtcgtgggaaatttactggggggcaaagagtacaggcaaatgtggaagataaagatggcctcgtgtgtgtgtgtgtgtgtgtgtgtgtgtgtgtgtgcttgtgtttgtgtgcatattacatttattgtaggatcttaaaaaatctcaagggtgggagatagaaaggttaatagagttggaggagtggaagctattttgtatgcaactagtcactgctgaggggtgtcaaagtttctatttttatttgttctgttttgcacgtctttatcattttgctttattccgattatagaataaagtaattctttttaaaaatattttttggggcaaagttaagtaaaatgttgagcttctatatttctgggaactgtactcatataagagtgggcagctaattttactgtaaagaagggccatggtatagtagataaataaaatccaaggcaattttcaaacaatttttttaaactttggaatgtgtttaaatttaaatttgaaaataaagatatttgattttctgggg

SEQ ID NO: 1539 - DNA, 207 bp, Homo sapiens
agaagtaaaaaggaccaattcaagccaactggtctaagcagcatttaattgaagaatatgtgatacagcctcttcaatcagattgtaagttacctgaaagctgcagttcacaggctcctctctccaccaaattaggatagaataattgctggataaacaaattcagaatatcaacagatgatcacaataaacatctgtttctcattc

SEQ ID NO: 1540 - DNA, 1236 bp, Homo sapiens
ggcccagctgtgggtcctgaaggtacctcccggttttttacaccgcatgggccccacgtctctgtctctggtacctcccgcttttttacactgcatggttcccacgtctctgtctctgggcctttgttcccctatatgcattgcaggcctgctccaccctcctcagcgcctgagaatggaggtaaagtgtctggtctgggagctcgttaactatgctgggaaacggtccaaaagaatcagaatttgaggtgttttgttttcatttttatttcaagttggacagatcttggagataatttcttacctcacatagatgagaaaactaacacccagaaaggagaaatgatgttataaaaaactcataaggcaagagctgagaaggaagcgctgatcttctatttaattccccacccatgacccccagaaagcaggagggcattgcccacattcacagggctcttcagtctcagaatcaggacactggccaggtgtctggtttgggtccagagtgctcatcatcatgtcatagaactgctgggcccaggtctcctgaaatgggaagcccagcaataccacgcagtccctccactttctcaaagcacactggaaaggccattagaattgccccagcagagcagatctgctttttttccagagcaaaatgaagcactaggtataaatatgttgttactgccaagaacttaaatgactggtttttgtttgcttgcagtgctttcttaattttatggctcttctgggaaactcctccccttttccacacgaaccttgtggggctgtgaattctttcttcatccccgcattcccaatatacccaggccacaagagtggacgtgaaccacagggtgtcctgtcagaggagcccatctcccatctccccagctccctatctggaggatagttggatagttacgtgttcctagcaggaccaactacagtcttcccaaggattgagttatggactttgggagtgagacatcttcttgctgctggatttccaagctgagaggacgtgaacctgggaccaccagtagccatcttgtttgccacatggagagagactgtgaggacagaagccaaactggaagtggaggagccaagggattgacaaacaacagagccttgaccacgtggagtctctgaatcagccttgtctggaaccagatctacacctggactgcccaggtctataagccaataaagcccctgtttacttga

SEQ ID NO: 1541 - DNA, 119 bp, Homo sapiens
ggggagccttcgtggccctcaggatgccttcgggggacagattctgcccagtctctgggcatccataattgctgctaacctagacatttcatagttacagattaaatctacttgacttt

SEQ ID NO: 1542 - DNA, 687 bp, Homo sapiens
tcccaccccaggccttgcccctgccctcccacgaatggttaatatatatgtagatatatattttagcagtgacattcccagagagccccagagctctcaagctcctttctgtcagggtggggggttcagcctgtcctgtcacctctgaggtgcctgctggcatcctctcccccatgcttactaatacattcccttccccatagccatcaaaactggaccaactggcctcttcctttcccctgggaccaaaatttaggggcctcagtccctcaccgccatgccctggcctattctgtctctccttcttccccctggcctgttctgtctctgagctctgtgtcctccgttcattccatggctgggagtcactgatgctgcctctgccttctgatgctggactggccttgcttctacaagtatgcttctcccacagctgtggctgcaggaacttaatttatagggaggagcctgtggcagctgctgccccagccacagctgcactgactgtgctcaccacacatctggggcagccttccctggcaggggccctcgtggcttctcattttccattcccttcactgtggctaaggggtggggtgaggggatggagagggagggctgcctaccatggtctggggcttgaggaagatgagtttgttgatttaaataaagaatttgtcatttttg

SEQ ID NO: 1543 - DNA, 436 bp, Homo sapiens
gcgcgcgcgccgggccgggctgcgccccagccaggaggagggcgcggggctctctgtctgcagctggggacacgtcggggctggggacgacctcgctcgccccaggctgccaggcggctgggggtgaaggcatttccctaaggaaatgcgtagggaggcagagcctcctccccaaaagtgggaaggggcgggcgagggcggaggaaggcgatcctgagccttctccgcacccccgggaccgaaggcttgggggagagggagggaggaggaggctgagtgtcctagagcggctgaggccggaggcctggtgtccccagcctaagcagagggccccgggggccgggtgggtgggggtctgtctggacgaattgttctgtgtgtgaggtctgagctctgaggcagcagtgttagcacaataaagaaacattgagacgtg

SEQ ID NO: 1544 - DNA, 303 bp, Homo sapiens
acatccctgatgtgaggctgtgaaaaggcatatggacctgcaaaggaggcccccaaccagacagacctagtttcaaacgagggcactgcccctgcctgcccctttggtgcccaggcacagaccctgatagtgggtttgggtcaccttggtatggaatgtatgtgctgaccccctaggtgagtctggggattggaacagggatcttaggtctgcctctctctctctctctctctctctctctctctctgtgtgtgtgtgtgtgtgtgtgaagttttttacaggtgaataaacaaagtttgaaag

SEQ ID NO: 1545 - DNA, 167 bp, Homo sapiens
ctgctccttgggaaccccagtcctgagcttggtttcttcccagcacccagagaatccttcctcagctctcttctttccaggggaaggaggtgctcaggggtgggtatccagagagccatacttctgagggaagactggctggcaataaagtcaaattaagtgaccac

SEQ ID NO: 1546 - DNA, 2796 bp, Homo sapiens
tgtatgttccacaccctctgctactgtgttacattctgattgtcttgtatggaccagaagagagctttgggacattttttctgaacattctaagcattctagtgaaagttcccatgttccaacagaacttaaaagcaatgtttgccttatatataaaagggacacaataattgaggtccaccttctaggaaatcctaggactcgtttatttgggacatggtgggaataaaggtcacatattggaaaatggaaaggctgatgaaactatcagatactaaaacattcttaaaatagaggaatatagttagagacatcaggtttaagccagtatttgttcctgttttacaatgcttctgtcttaagctgtgtcttaacttttaacacccatcttttctttctaaagctttcctgacagctgtgaaaatccaaaaaatattcttaaactgtgtatggtggcccttgcctgtagtctcagcactttgggaggctgaggtgggagggtcgcttgagttcaggagttctagacccacctggggcaagatggtgagacctagtctcaaaaaaaaaaaaaaaaattagccaggtgttgtggtgcacccctgtagtcatagctgcatgggaggctgaggtgggagaattgcttgagcccagagcaagaccctgtctcaaaaaaaaaaaaaaaaaaaaaaaggaaaggacaactttttagatagaaaagtattaaataatactaagatgcttagtagtattattttagagagttttaaacttctatattaaatgtggggtcttacaagataatccaaagactttgggaggccaaggcgggcagatcacgaggtcaggagattgagaccatcctggctaacacggtgaaacccctctctactaaaaatacaaaaaattagccgggcgtggtgggtgcctgtagtcccagctactcctcgggaggctgaggcaggagaatggcgtgaactccggaggtggagcctgtagtgagccgagatggcaccactgcgctccagcctgggcgacagagcaagactccatatcaaaaaaaaaaaaaaaaaaagataatccaaagaatttaaattgtaatcatgtttcatgtatttgttttattacttacttttatagcacttagtcccagtggtattagactgctatttggtttcatacaaaaaggattaaatttaaattcattcatgtttagacttgagttattacatttttaaaactatcatcttgcctttaatgtttgtggtcctacacaaactattagtacatttcagtatcctcttacccctttgtttttaagtttttgattgctaaagcaagacttttttcttctagaatttaagtcaaccaagtgttatctatgttgtaaaaatggataatagtagattttaggtgataaaacaacttgttagtaagacatttcctagcttaaaaaaaaaaatcaaaaattccatgatagaaatgcagacctgtgagggaaactcctgaaaagcataagaagcatcccagagagccatgggttttctagaccagagaatttagagggagattgtggaactgaggcttaggtggtcagatcgtttcccttatcactgtaatatttctgggggaaaaatgctttctgagttgtttaaacaagcatccttacatttttttttttaattaaacagcctgtctaggcttgggattccctaatactacagtagcagtatatgaatatgattttgtgattgtgttttttaaaagataagtaatttgatgaactgttcttttgcagtcagaaaacactcacaaaaagacaaaaaaagttccacagtattatatttcatgtcagttcaggcctaaaatcctttgcaaataagatgtttataggctggtcacaattaacaatgttattattggcagcacttcttggatggataccttttgggacctttcattagaaagagggaaagaatggggtggttttgtatgggctcctgtttggggtaaaaatagcagagtcagttgctgaggacaatgaccttccttataacatttagtttcatacccatattaggtcttgtcttgaggaccctttatatgtgcttgtttactagtggccttccagccatagcattcttacctttttttcctattctaagaattaaaaaaaaaaattatagagccagcaagggaggaggcaggaaacagaaatcgaatttcatcattccagtatagttgtccctttttttgtatttctgacttggttttataattatatttacttactaattattgttttttaacattctttattgtggcttactcttcatacttagaattgaaattgttggacatcacatgtatattcacattataaatacatcattcttccactgttagacctttagattgcttccagtttttaatattctaaataagactttcaacattttctgtgttttagctcattctcttaggacattcttagaagttagaaacatttctgctgggatcgttggagggaacttcaaactttggaatctttcctgcaagaaattctttaccaaagaaaggcaggtgtttcttaaagggatgcaaaagatattttgcactttgtatgttccaaaacatttagtaagttaactaaaaaaatgagttaatttggtttcttgggggattttaattttttaatttgttttctggttatgtaaaaaaaatgttttttttttgcttcttatcacaatccttttgtttcctttttaatcctttaataacaccttcaaattttataag

SEQ ID NO: 1547 - DNA, 3149 bp, Homo sapiens
tgacctgttcccactcccccattcctctggtctcttttcctctcttccaatgccctggtaaggaatactacccgggtttactggagatcccccgaagcacccatcctccactccctcttctttaacccagtggcctgttggtagcttaggccaactggagtccaggttcgcctcccactgtcccctttccacttccccagcttctgccccaatacacatacctcccttaagccaggatgggggaaagagtgggattaggctgaagtggcttagaaggcctcagccatgcttggatactcacattaggaggaccatgtggttggaaggatagactgccccctacctcccaccaccaccatgaagtttggtgacttgaggctggagctccctctgttacctttccatctagcaagttcccaaaggcaagactctctctgatggtcactttgtggtctgtgctttcagaaatacaggaatctgatatcaacatatcctagggtttctaccaatctctgttgaaagaagccagggtttgccactgtgaagcttgatttctgctggtgacttctgaccataagctagaaccatggtcgccactgttttccctctgtagtttctcaagtgaacactctcaggatacccagttccctcatagcctctgttctcagagaattggagttggcccaagaaacataaacatataaccacccatatctatcctggattctgaactcttcaatttggagtgactaacacaagttgttatctaaacctttaaacctatcttccaggcagcccagagaagatctgtttccctgtgtcctgtgaatggaaggacccaagccaatatgttcctttgaaaagagtccagtacccaggccccatggaaaggtctgaaaataatattccagattacactgtacctggcttctcttcttcctttcctgctcagcctagatccttcttccttaaccccaactctttgggagaagggagggaaaatgcaagggccttcctctcttaacacggatgctcaagtaaaactagattcacagggcacagattccccagaaagttaacacaatcccaccatgagggatgggtaaattctcagatttccaaactgctgtacagagcctctgagaattggtgatgctttgttaaggtttgggcaggagcagaactctgtggctggcagccactattctcagttacacctcccagtgcccttctgaaaagtgccagctatttcattaggcaatgctggaaggaaatgaaattataccttctgatcaaataaccatggcttccctcagccattcctgagacttggtataaaatgaagaaatcagtgtcatctctactctcctctgccatgaggccattttcagacaagttaaaaagtagactttaagagatcaaactcagcctattccttgttccctggtggggtctgtggtaagggtcagggaagggcatataggcaccagagctttatccaaagccccaaatccctagagtgctttctggtctcactttggtaccaaggaagcctcacatagtggtactgcatagtcccactataagtcaagttgcagtttaaggtggtctcagccaattgttacaagctacagaatatatacatgcatctatgtacagagccttgcagagaaacacaaaattttgaggctagacccatgatcaccaccaactataattgcacaaggtcttgttatattgatctctcctcgaactcaactaactatatcttgaaaacaaagacccttcggtgtccatctacagtaaaccccaccattaccttctagttggcataaaaacaagaaccacaaaaacttgaaaaatctgaaacagagaacagaaggccaagagccagcttctgcgttctcaactttattcaacattagacttaccttatttctttcagtgtgtagggacaagatgtactgctgtgtgtgtgtgtgtgtgtgtgtgtgtgtgtgtgtgtgtgtgtgtgtgtgtctataccttcctatccattgccaagttaacctccatctggtttatttggccatgctatgctttcttcccattcccctgctgtctattctaagcccccagactcaagcctctagactcttggatgaaacagtgagaagaaaacattttctgacttacccttttggaatctcctccattattacccaggctttgctttaagttgcactttaaatcacactgtcctattaatgcgatctggcatcttctcccacaagccccctacagggaacaactaccccctaccttaactctaaatggttctttagactatagtctgtctcctctgacctgaaatcctcttttaggcaataggccgagctttagaagcagccaggtctggtgagaaatgggcccccataccaactgtggacttggaatatcagcagagtagtaggcacagttgtaaaaaggggagatttcggtaggcacaggtgtaaaaaggggagatttcagaagacgggcgaaacaactgatgggggaagatacctggggtgagaagatgagaaagaaatgatgctgagggacctagtgaaatcaatgaaactcttgagtcttgcttaggctcgcaaacaagaagtggggaggcttgggaaattaggatatgacatatatgaaaggtttatctaagaagaaagaaacagagataatatatatatagaaagatgtatatagatgtatatatgcccaaatatattgaatgtacagaaaggaaatattcagagactttagcattgggggcagatatcttggcctggttatggggtaggacacccagattttcagacttacaatcagtggtcctggtttcaacatggaagtgagatagctgatgaaggatttcaagtctggaaatgggaaagggaggggtagaagttccttttcagaaataaagaggcattcatgaaggcttttgttgaatcctatgctactgataggaccaggaagagaggaactcggaggacaatagggaggggaagtcttggaaaatctaccacttacactgtgtgtccccatccccagcagcgtcctgccactgtagcgcctttttaaaataaataaaataaaataaagcaccattttgtttccctttc

SEQ ID NO: 1548 - DNA, 273 bp, Homo sapiens
tcaggtcttgcaggtgtcgactgtcttccggcccagctccaagccctcctctggttgcctggacaccctctccctctgtccactcttcctttaatttatttgacctcccactacccagaatgggagacgtgcctccccttccccactccttccctcccaagcccctccctctggccttctgttcttgatctcttagggatcctatagggaggccatttcctgtcctggaattagtttttctaaaatgtgaataaacttgttttataaaaagca

SEQ ID NO: 1549 - DNA, 1877 bp, Homo sapiens
ggcctcatacctaggtggggcaggctggggctgccaacctgatcctgcctgggcaaccctttcctgtcccaggccctacattcagcagaaacgcactttggactttttgctttagataaaagaaagacatcccaggagaaggacaaaccagaggagtgaaccaacaaagagtacctaggaatgggagttgagccctggaatggggctctatggagaggtgcataggactcggcagaaatggcctctccccaaagcctctttttgagaggagagggaagcctattttgttaactggtttgggatagggaatggggtttctttttctttaatctcccttgtttcttgggctgggggaggggtggggggaacaactggctattcagtaccaaggggccagagtggagggtaggagtgccactctctctttggtttaggtttttgaccttttcttcctttgttttttaaaagtttatgacagttggctccccccccacccccagcaaccccatcccagaatcctattttcctgggaagtccttaaagcccctaaccatcccacactcttcactttcctttccaccttattcattctctgtacttaccacagtattttgcacttgattacatatccttcactctcttctcttcatcccatcaccccctaaataggtcaggtgagggaggctgggaagaggtgggaggaggggcagaagtgaaggaagaataggaaggatattacctcttctgttatttttttaagaaacattgtttggtggcagcaatctccctgtccctatcactgttagaggcctaattttatatctataaatatattaaaaagcaagtcaaacttggatgtatcaaggtaaaattattgtcaaagtttaaatacctatatattctctgaatgcaataaagggacttaagagtgaacaagagtaatggtgtggaagtgacacctggggtcagtttacctctgtgtatggtcactagagattgggacttaccctttaggttttaggaggcttgagaatggaaggatcctcatttctgcccttcctggttccctgctttggtgtaggggttgggaaaaacaggaaattcctctcagctctgcctcagatctcctacctctccttaagtcttgtagggggttccaaggatggctcttctaaccagaggctggcctgtctttaaaacttaactactttagggtggtgccaccactgcagactattgtggtactttgtgacagaagacatgtacacacacaccacacacatacatacacactctctcactctgtctctcttacctttagctgcttgatcattaagccatccaacttcatgccagttcccttctttatagaagagtgaagggaaagacttcctgggtttgacttaaaccttgtccacctcttgatattttaggattgaggaataagtcattaatctaaggactgattacagtggctggagcttgggcacttgtcttatcactggtcactgagtctgaaagtcccagctgaattcttgcccttaagtgcttttgctgctatttttttgcccccagttccacaagatccaaccaagaattctgtatcctgggacagtcagattcttctaaatcaggccaggaaggaggggaaaagagtgagagaatggtattcccagatacttcttcctcctgccccttttcccagcagctctgagaccagatgttggctgctgtacttactccctgaggtagggaatgtgtggtgatcgagtggtctgtgttcctattgctggtggggtgatagggtgggctaaaaaccatgcactctggaatttgttgtattttctcccagtaaagcttttcttctcccgactgct

SEQ ID NO: 1550 - DNA, 2739 bp, Homo sapiens
aacacaacacgttttcctctctgagtcccagctatggggaacatctggagtcagcagaaccattgggacctgaggcaggagtgtcacctgcgggagaagtctgcccgctgccctctgtcatcccattcaagattgtgccataccagctgaggtttttcctctgtctctctaggaatagggtctgtttcacaggccatttctgtgaaccctactccattgtggtttctgccactatcaaagttccagctacctgcaaggtgaaggaaggcatcccttttggggcatgcactttctttcctttctcaaaataatgttatatgtggccacactgatgttcacctttacgtccagggtctttgtgccttgtctctactccctctcttggatctggggaggaggggcagagacctgggactctgtatttctatagttctcctggcagagcctttgagaatggggagaaacagcctgggctggggctacaggtctgtcactatgctctcttgccttcagacagaccattctgaattctctaaagggaaagggcttttgcatctaatcacaatagagttgaaagagaggccttaggattctcctctctctaggtgctgagccctcacctccctgttccaggctgagaactcaaatggttaccctgcttcttcctacaatgctgtgtgatatgggtgaacccagcccctgaccttcctctatcccctgcccatcctcccttttacctcctctcttttttaaacacctgtttatcccaacctttttgagctcaagctgtgataaagaagggcccatcctatttcccctcatctagtccatttacgattctcactgactccccgtcttcctggcagacacaaataaacccagtgtcaggtctaggaaattaatggctattcttccccagatacattctggcttatttgagatacatgattctcttagaatcctgtcccttggttcaggaaagtagcttggaaaaggagtaggggtatagcttgggtcccttttcctgcaaggccccatggggcagaatataataaatattctgagtgaggagtgtggtctttttctgatcttcctcagcttccgtaagttgcagagtgaggtatattaggagactagttctacacaatattgtaatgctgggttccatcaacacccaccttccacaactcagtctgcacctcagttggcaaaggagactggatggccatctttcctcatgttcccttgagtatttcaatgtagaaagcccttcaagtggtattatattttaaccttttacattattgttattaatgttagtaatatattgttatgttttctaaattatttttctttaagctgacgtggctttttttctgtggctcccagtgggtctacggaccttggctgacatatgttggtaggtactctggtcagctcagctggctgtcctggttcactcagaagataagtctctccaaagcaaattcacatgcattatgagtcgctttgagcttctgacatgtcacttgccccgaggttaaaacttttcaccccttgaagaccttacatgttttatggtattggtgaggaaggaaatgttctcaaggtctcaggctatttgggaaattccaactcctataccttaccagagcatggaagagcccagatctgaatgtaaaacgtctctgttctgccagagatggaaaaaatacaggtatacttgtgatatagtcatggggcttcagtgtcactattttctccttaaagctccagccaaaaactggacaaggatagagaggaggagggaagaacaaaagagcccttctctatgaaccttgtgccttctgtcctaccagttttcttttacagattctcacttctgctagcctagccagggcttactccaggaatctaaatagatgccctagtccactttatctttgttcccaaggcactcatttttattttgattttgattgaatgtgagcaggttgacctcaggtcacactttgttccaaaaacttttggaattattccaggacttgtggtggagttatggtactctagggcagtctttctcaaactatgtatggtaaaggaccaggttttttgttttccagtccttcacttatcaatatgcattcctattgcccatgacaggtatggagttcacactgtgtgctgccgacccggcaagtttgacagcacccaaactggccagactgttctgtaggttaagtccattgatcatgtacttggatatcacagcaacattgaaatgctaaaaagtttttaaacactctcaatttctaattcaccatgtcacagactggtgaaaaaaaaaaaaaggtgttcactgaccagcacaagtctgcagatcatctttgagtagcactgttttggggccctcggtctctctgaagaccctagcagaactgatacctacctgtatctcttgttctctcctatttgagtttcacttccagagaacttgttcttcagcaagaatgtgtcactagtaaggacatctctagcatttctctagccttccttttctgctgctcaaaaataatcgttacaaagcttaggtttaagctgtatatgaaatatttatgcgactctcaaactttaaaggagttgctcctttgttccaaaattaaatgtgttagataaatttgtgattgtatgggtggcttcatgaattaagaattgaattaatacagactttttgataat

SEQ ID NO: 1551 - DNA, 1570 bp, Homo sapiens
ggccccctttgtgtgcatgggtcagtcaccatatgttccccccagagaatgtgtctatatcctccttctaacagcaccttccccctgcagctactcttcagatctggctctctgtaccctaaaacctagtatctttttctcttctatggaaaatccgaaggtctaaacttgacttttttgaggtcttctcaacttgactacagttgtgctcataattgtccttgcctttccagcttaattattttaaggaacaaatgaaaactctgggctgggtggagtggctcatacctgtaatcccagcactttgggaggctacggtgggcagatcatctgaggccaggagttcgagacctgcctggccaacatggcaacaccccgtctctaataaaaatataaaaattagcctggcatggtagcatgcgcctatagtcccagctgctcaggaggctgaggcatgagaatcgcttgaacctaggaggtggaggttgcattcaactgagatcataccacttcattccagcctgggtgacagagcaagactctgtctcaaaaaaaaaaaaaaggaaaactctgtgatggacatttgtttagtaaatcccttcagtatttatccctcctttccccacagcagctttctttcctgtcaactagaaaggagcaggatgtaataaatacattttggtgtgactaggccacaccaactcttaatcatctcccattttccttagacatttaaatttcaaggcaggtaccctctgtgtactcagaaatttgaagaagttatttggttttccaaaatgcacactgcgggttattgatttgttctttacaactattgttctcatatttctcacactaaataaatctctatgagagcttcttgacttggccatttatttcttggacactctcatgttcttgttcacccatgcaggcaccccaccaaagtacatatcttccttccagtaataatttttaattacaaaataaacatccactattggaaaaaaaaaaaaaaagctagccgggcatggtggtgggtgcctgtaatcccagctactctggaggctgaggcagaggattgcttgaacccgggaggcggaggttgcagtaagctgagatcgcgccaccgcactccagcctgggcgacagagtgagactccatctcaaaaaaaaagaaagaaaaaaagaagcacatgtttttcatagggtatatatgaggacctaaactgctgtgaaaatgatagaaagcaagtagctcccttattctgtttttgattgcagccttttatcttttgctaattatagcaatatttattgagcacctgccatgtgactgtcactgttctagatattttacatgtaatatacagataaaagaatagtactttatatatattacaatgatacaatgattacattaacaatacaatattttgcttgtcatatgctaagaataattgggtagagtgacattactgtgccttcgattaaaataagtacttttttgcgtgttaaattcatgttttcaataaataataaatgcatatagttgaaaaatcagtaaata

SEQ ID NO: 1552 - DNA, 1677 bp, Homo sapiens
gttgctgaaaggcctcagaggaattcgggaatgacacgtcttctgatcccatgagacagaacaaagaacaggaagcttggttcctgttgttcctggcaacagaatttgaatatctaggataggatgatcacctccagtccttcggacttaaacctgcctacctgagtcaaacacctaaggataacatcatttccagcatgtggttcaaataatattttccaatccacttcaggccaaaacatgctaaagataacacaccagcacattgactctctctttgataactaagcaaatggaattatggttgacagagagtttatgatccagaagacaaccacttctctccttttagaaagcagcaggattgacttattgagaaataatgcagtgtgttggttacatgtgtagtctctggagttggatgggcccatcctgatacaagttgagcatcccttgtctgaaatgcttgggattagaaatgtttcagatttcaattttttttcagattttggaatatttgcattatatttagcggttgagtatccaaatccaaaaatccaaaattcaaaatgctccaataagcatttcccttgagtttcattgatgtcgatgcagtgctcaaaatctcagattttggagcattttggatattggatttttggatttgggatgctcaacttgtacaatgtttattagacacatctcctgggacatactgcctaaccttttggagccttagtctcccagactgaaaaaggaagaggatggtattacatcagctccattgtttgagccaagaatctaagtcatccctgactccagtgtctttgtcaccaggccctttggactctacctcagaaatatttcttggaccttccacttctcctccaactccttgaccaccatcctgtatccaaccatcaccacctctaacctgaatcctaccttaagatcagaacagttgtcctcacttttgttcttgtccctctccaacccactctccacaagatggccagagtaatgtttttaatataaattggatccttcagtttcctgcttaaaaccctgcaggtttcccaatgcactcagaaagaaatccagtttccatggccctggatggtctggcccacctccagcctcagctagcattacccttctgacactctctatgtagcctccctgatcttctttcagctcctctattaaaggaaaagttctttatgttaattatttacatcttcctgcaggcccttcctctgcctgctggggtcctcctattctttaggtttaattttaaatatgtcacctcctaagagaaaccttcccagaccactctttctaaaatgaatcttctaggctgggcatggtggctcacacctgtaatccctgtactttgggaggccaaggggggagatcacttgaggtcaggagttcaagaccagcctggccaacttggtgaaaccccgtctttactaaaaatacaaaaaaattagccaggcgtggtggtgcacccctaaaatcccagctacttgagagactgaggcaggagaatcgcttgaacccaggaggtggaggttccagtgagccaaaatcatgccaatgtattccagtctgggtgacagagtgagactctgtctcaaaaaataaataaataaaataaaatgaaatagatcttat

SEQ ID NO: 1553 - DNA, 2251 bp, Homo sapiens
gctgctgggctgaattctccctctggaaactgagttacaaccaccaatactggcaggttccctggatccagatcttctctgcccaactcttactgggagattgcaaactgccacatctcagcctgtaagcaaagcaggaaaccttctgctgggcatagcttgtgcctaaatggacaaatggatgcatacccttcctgaaatgactcccttctgaatgaatgacaaagcaggttacctagtatagttttcccaaacttcttcccatcatagcacatgtagaaaataatatttttatggcacactgggataaacaagcaagattgctcacttctggaagctgcatatgactagaggcctcttgtgactggaggtaacaaccctgcccagtaactgtgggagaaggggatcaatattttgcacacctgtaataggccatggcacaccagccaagatgctctgctcacagtcagtatgtgtgaagatccctggtgcgtggccttcaccacgcatcttgagcaaattaggaaaatgtacccttcgcttgaggcagatgcagcccttcccccgagtgcatggcttggagagcagaatgtgggctgcatataagcacactcatccctttgtctgggaatctttgtgcagggcataacaggcttagtaagtccaaacacagatgacagtgctgtgtgggtctctgtcagagttgtggctctcagccatgtagacacactctccaaatggagtgttggaaaatgttctttctgcagggtctagagactgctgggacacttttcttggagtgctacttcagaagccttataggattttctttctggccaagatttccttctgtatcactccaagcagcctcagcagaagaagcagccatgcccagtattcccactctccaaaaggaactgaccagcttatatttctcacacttctggggaactgggtataatccaaccatcaaaatagaagaccttgcaagaagcagagtcattctccagaaggaacttgggagatgatggtgcagatgatgaaactgggttcatcccagttccaaagactcagagaactagagtttaagctgaggcagagtgccgccaccctggcatgccccacaaacagatcaccagccagcttacacaggcattaactctcctcaatgaggaagaatcattcacaactgagcaagacattcatatgatcatttaaggaagtgtttcccttatgtgttagcaagtataatcggctaactcctaaatcccaatgaatagtcctaggctggacagcaatgggctgcaattaggcagataaagacatcagtcccagtaaatgaatccatagactcatctagcaccaactaccattagcactatgttaggagctgcaaggccccaaagtagaagatgtgcataatgtctgctcttgtgtagctcaggagacaattccagcacagacactacagttaacgctgaactgcagctgcaagtaatagcatgaacagtcagaaaaataccttatgagggggcagggctgaagctgggccttgaaggatggatgaaatttggatagagaatgaggaagacagagggcctccaagtgagagaagcatgaaaaatgagcaggggcctggatcagtggggtgtattcagagcacctctccagatgcaccatgcatgctcacagtcccttgcctatgtgtggcagagtgtcccagccagatgtgtgccctcaccccatgtccatttacatgtccttcaatgcccacctcaaaaggtacctcttctgtaaagctttccctggtatcaggaatcaaaattaatcagggatcttttcacactgctgttttttcctctttggtccttctatcactaaaactcatctcattcagccttacagcataactaattatttgttttcctcactacattgtacatgtgggaattacagataaacggaagccggctggggtggtggctcacgcctgtaatcccaacactttgggaggccaaggcaggcggatcacctgaggtcaggagttcgagattagtctggccaacatggtgaaaccccatctctactaaaaatacgaaattagccaggtgtggtggcacacatctgtagtcccagctactctggaggctgagacaggagaatcgcttgaacccaggaagtggaggttgcagtgagctgagatcacaccactgcactccagcctgggagagacagagtgagactccatctc

SEQ ID NO: 1554 - DNA, 648 bp, Homo sapiens
caccagagaccaacaaagggactttctgaaggaaaatggaaaaaccaaaatgaacactgaacttggccacaggccccaagtttcctctggcagacatgctgcacgtctgtacccttctcagatcaactccctggtgatgtttcttccacatacatctgtgaaatgaacaaggaagtgaggcttcccaagaatttagcttgctgtgcagtggctgcaggcgcagaacagagcgttacttgataacagcgttccatctttgtgttgtagcagatgaaatggacagtaatgtgagttcagactttgggcatcttgctcttggctggaactggataataaaaatcagactgaaagccaggacatctgagtacctatctcacacactggaccaccagtcacaaagtctggaaaagtttacattttggctatctttactttgttctgggagctgatcatgataacctgcagacctgatcaagcctctgtgcctcagtttctctctcaggataaagagtgaatagaggctgaagggtgaatttcttattatacataaaacactctgatattattgtataaaggaagctaagaatattattttatttgcaaaacccagaagctaaaaagtcaataaacagaaagaatgattttgag

SEQ ID NO: 1555 - DNA, 304 bp, Homo sapiens
gatgagctcttttaactcaagcgaaacttcaaggccagaagatcttgcctgttggtgatcatgctcctcaccaggacagagactgtataggctgaccagaagcatgctgctgaattatcaacgaggattttcaagttaacttttaaatactggttattatttaattttatatccctttgttgttttctagtacacagagatatagagatacacatgcttttttcccacccaaaattgtgacaacattatgtgaatgttttattattttttaaaataaacatttgatataattgtcaattaactg

SEQ ID NO: 1556 - DNA, 1186 bp, Homo sapiens
ttgctgcagcaattctcacctttcttgcacatcagcatctgctttgggaattggcacagtggatgacggcacaggagtctctatagaacagttcctagtctggagaggatatggaaatttgttcttgttctatattttgttttgaaaatgatgtctaacaaccatgataagagcaaggctgttaaataatatcttccaatttacagatcagacatgaatgggtggaggggttaggttgttcacaaaaggccacattccaagtatttgtaatctagaaagtgttatgtaagtgatgttattagcatcgagattccctccacctgattttcaagctgtcacttgtttccttttctcccctctctgggttgactgcatttctagactctcgccggcccaggcccatcttccaaagcaagaggaaggaatgataatggtgactcaggggaagaagaaacagccctcctctgaaagcctggactgtccggctgtgaactggctggcaggttctgcacgtgggtgggggccagggcctgggctttactcaattgcagagaaaaaactttctccctgcatctcatacctttacctctggccagttggccaccagggggagtgggctgaagggagagtagatggtgcaaagcaagcccatctctaagtagaaaaatcacccagagcacatgctgacctgataactggggtgttgagaccagctttgtccatggtatgatgtttgatttatgaagacgcattgttagaaatccatttggcttcttcatagaagtggcttcccagaggaagaggcctctcagaaaccatgttctatttaagttctgagtcctgatgagtgttccccaggatgcacattgaagggagggctcaggcagctgagggctgagaatgaggcagttggaatctagacactatgctgggttccctgagtcgtcaggccagacatttcaacaaggctgtggggagcagggctgtgactctggctgagcccaggaaagcgacaagggtgaactgggagaggacttactcagagaccccaacaggtgatactgcacaaagcctggttcttcaattttcctaccctgtatctaacataggagtttcatataaaacggtgatatcatgcagatgcagtctgaattccttgcctgaattaaatttatgtatcctctcc

SEQ ID NO: 1557 - DNA, 124 bp, Homo sapiens
gagttttgtgggagggaacccagacctctcctcccaaccatgagatcccaaggatggagaacaacttacccagtagctagaatgttaatggcagaagagaaaacaataaatcatattgactcaa

SEQ ID NO: 1558 - DNA, 114 bp, Homo sapiens
gacagagctctgcggtgtcagggcgagaacccatcttccaaccccggctatttggagacggaaaaactggaattctaacaaggaggagaggagactaaatcacatcaatttgca

SEQ ID NO: 1559 - DNA, 112 bp, Homo sapiens
agtgtccagaccattgtcttccaaccccagctggcctctagaacacccactggccagtcctagagctcctgtccctacccactctttgctacaataaatgctgaatgaatcc

SEQ ID NO: 1560 - DNA, 2676 bp, Homo sapiens
gcctggtcggctcaccgcctatcatctgcatttgccttactcaggtgctaccggactctggcccctgatgtctgtagtttcacaggatgccttatttgtcttctacaccccacagggccccctacttcttcggatgtgtttttaataatgtcagctatgtgccccatcctccttcatgccctccctccctttcctaccactgctgagtggcctggaacttgtttaaagtgtttattccccatttctttgagggatcaggaaggaatcctgggtatgccattgacttcccttctaagtagacagcaaaaatggcgggggtcgcaggaatctgcactcaactgcccacctggctggcagggatctttgaataggtatcttgagcttggttctgggctctttccttgtgtactgacgaccagggccagctgttctagagcgggaattagaggctagagcggctgaaatggttgtttggtgatgacactggggtccttccatctctggggcccactctcttctgtcttcccatgggaagtgccactgggatccctctgccctgtcctcctgaatacaagctgactgacattgactgtgtctgtggaaaatgggagctcttgttgtggagagcatagtaaattttcagagaacttgaagccaaaaggatttaaaaccgctgctctaaagaaaagaaaactggaggctgggcgcagtggctcacgcctataatcccagaggctgaggcaggcggatcacctgaggtcaggagttcaagatcagcctgaccaacatggagaaaccctactaaaaatacaaagttagccaggcatagtggtgcatgcctgtaatcccagctgctcaggagcctggcaacaagagcaaaactccagctcaaaaaaaaaaagaaagaaaagaaagctggagctggtggcttaggccatcacccttcccttggctggaactactggacagacccttttgagatgtgcctgtggtgctgtggagatgtgtgtagtggtcttagctctttgttgagcttgtgtgtgtgttgtgtagtcttagctgtatgctgaaattgggcgtgtgttggagggcttcttagctctttggtgagattgtatttctatgtgtttgtatcagctgaatgttgctggaaataaaaccttggtttgtcaaggctcttttttgtgggaagtaagtaggggaaaaggtctttgagggttcctaggctcctttgtacaacaggaaaatgcctcaaagccttgcttcccagcaacctggggctggttcccagtgcctggtcctgccccttcctggttcttatctcaaggcagagcttctgaatttcaggccttcattccagagccctcttgtggccaggccttcctttgctggaggaaggtacacagggtgaagctgatgctgtacttgggggatctccttggcctgttccaccaagtgagagaaggtacttactcttgtacctcctgttcagccaggtgcattaacagacctccctacagctgtaggaactactgtcccagagctgaggcaaggggatttctcaggtcatttggagaacaagtgctttagtagtagtttaaagtagtaactgctactgtatttagtggggtggaattcagaagaaatttgaagaccagatcatgggtggtctgcatgtgaatgaacaggaatgagccggacagcctggctgtcattgctttcttcctccccatttggacccttctctgcccttacatttttgtttctccatctaccaccatccaccagtctatttattaacttagcaagaggacaagtaaagggccctcttggcttgattttgcttctttctttctgtggaggatatactaagtgcgactttgccctatcctatttggaaatccctaacagaattgagttttctattaaggatccaaaaagaaaaacaaaatgctaatgaagccatcagtcaagggtcacatgccaataaacaataaattttccagaagaaatgaaatccaactagacaaataaagtagagcttatgaaatggttcagtaaagatgagtttgttgttttttgttttgttttgttttgtttttttaaagacggagtctcgctctgtcacccaggctggagtgcagtggtatgatcttggctcactgtaacctccgcctcccgggttcaagccattctcctgcctcagtctcctgagtagctgggattacgggtgcgtgccaccatgcctggctaatttttgtgtttttagtagagacagggtttcaccatgttggtcgggctggtctcaaactcctgacctcttgatccgcctgccttggcctcccaaagtgatgggattacagatgtgagccaccgtgcctagccaaggatgagatttttaaagtatgtttcagttctgtgtcatggttggaagacagagtaggaaggatatggaaaaggtcatggggaagcagaggtgattcatggctctgtgaatttgaggtgaatggttccttattgtctaggccacttgtgaagaatatgagtcagttattgccagccttggaatttacttctctagcttacaatggaccttttgaactggaaaacaccttgtctgcattcactttaaaatgtcaaaactaatttttataataaatgtttattttcacattg

SEQ ID NO: 1561 - DNA, 668 bp, Homo sapiens
ctatggggattcaggggctttgggcccaagaactgcagatagcccaggagcaacagcctaatcccgtgcccctttccttcactgccccacttctggcatgggacagggggaagttcagaaggtgtgtccttgaactgaggccctgtgatatggcggcctgcagtggtgtgaaacacacaatgtggacgtgcactgacagccttgcccacccccaccatgcagcccctgggcccttgtgctcctctcgcacaatgcatgtgctgtctccatgctggatactggacacactaaactctggggcttgtcctgtgcttgcttagagtgcccagcagaggtttgctgacaggtgatgctctggcttgccccaggactctggcacttccattggttcttcctttccctggagctgaggtttagatgtgcaacctgtggctcaggggagcaagcttacacaagaagtgagggaaggatgtttagcagtggctggtgcccatgaagaggagattggccagtgagaagctgaggcctatgcagacatctctggagccagagagaacaacaggcaggggcccacttggggccttcccccttgtgggggtcgttttttttttttcttttcttttttttttttttttttttttttttttaagataaaattgttcaaagcc

SEQ ID NO: 1562 - DNA, 772 bp, Homo sapiens
ttaggaccacagccctgggcaaaggggaccagcaagttgtcttgaatctccagggttcctgactagctgtctcctctgcagcatgagcagctgtagtgcccaactctataggctttggccctccagcttctctctttgactgtgggaggcactgccttggttggtttacctgaacttgtctccgacacaaagcacttatctcttaggagattcccaagaaagtcaacaagatcttgttcccagggagtgggtcattggccaaagggaacataaggtaggcagaaaacttaaaagagtttgttaaagtgaagactggagaaattcctcccttcctctgagctgtgaatctctcttcatgaaagccaaaggtagagacagggaggacagggccaggttagggccttccacacacaaacacttctagagttgcccattcctgttatgttcttggaccctaagatacctcctgtcccttttaaatccagattaagagaaacgtccaggaagagctctttgaagccctcaatatttgttggagggactggactcctctccagctccccaccctctgcctccagtcaccatgtgcaagagaggtcctgtacagatctctctgggctctcctttctcctttggaataacttgttcctatttcaggaaagggaaatggtgtcactcaggccctgggactgcttctccagccaggctggggccacaggtcccactctagtgaaggtcaatgtctcagaataaaagctgtatttttacacat

SEQ ID NO: 1563 - DNA, 955 bp, Homo sapiens
cccaggcctgcctcccttccctaggcctggctccttctgttgacatgggagattttagctcatcttgggggcctccttaaacacccccatttcttgcggaagatgctccccatcccactgactgcttgacctttacctccaacccttctgttcatcgggagggctccaccaattgagtctctcccaccatgcatgcaggtcactgtgtgtgtgcatgtgtgcctgtgtgagtgttgactgactgtgtgtgtgtggaggggtgactgtccgtggaggggtgactgtgtccgtggtgtgtattatgctgtcatatcagagtcaagtgaactgtggtgtatgtgccacgggatttgagtggttgcgtgggcaacactgtcagggtttggcgtgtgtgtcatgtggctgtgtgtgacctctgcctgaaaaagcaggtattttctcagaccccagagcagtattaatgatgcagaggttggaggagagaggtggagactgtggctcagacccaggtgtgcgggcatagctggagctggaatctgcctccggtgtgagggaacctgtctcctaccacttcggagccatgggggcaagtgtgaagcagccagtccctgggtcagccagaggcttgaactgttacagaagccctctgccctctggtggcctctgggcctgctgcatgtacatattttctgtaaatatacatgcgccgggagcttcttgcaggaatactgctccgaatcacttttaatttttttcttttttttttcttgccctttccattagttgtattttttatttatttttatttttatttttttttagagatggagtctcactatgttgctcaggctggccttgaactcctgggctcaagcaatcctcctgcctcagcctccctagtagctgggactttaagtgtacaccactgtgcctgctttgaatcctttacgaagag

SEQ ID NO: 1564 - DNA, 126 bp, Homo sapiens
ggaccaaggcctttgcatttttttctaccctgactcccacttctaatttctctttattgttattattattattttctctgctattgtaatatttttttgttaattaaatgttttggtcagaatctt

SEQ ID NO: 1565 - DNA, 1166 bp, Homo sapiens
cctattccctcttctcactttggggactgttcccatcacccacctctggagcttacactgttctggggtttgttctctacccttccaaccaatcacacccctgcctttttttttttttttttaaagaaaaagacaaaagaaagtggaagtggtattccccacccctccctgcacccatgtgcctgggcttcccctttatttcccttttccatttaccccgtaatgtgtctctacagctaccttaccactgagccgtaagacaaatgtataggaagaagcaaagtctacagcacatagtctttgtaagggattgatgtgaacacttttttttggatgcactaaggagttatcaatacttctggctttatgagagctcttaaattttgtctaaaaaaccaaagggctgtgagtaagggagctatgtggaaagtgggactctgaagtgtattttgaaaattaatcgccaccctcttccaaattatagaattttttaaaaacaagctgtggccctttccactctctcctggcctctggtgctgctcctctctgccgcctttcctccattccatggcttgaaacctctgcctgatgtggctccttcctttttcccatttgtcaaaccctcttcaaaggaggaacagataagactgggtcagcctagtcatgcctcccaactgtggtggtatatgtgtacacacatacacagggtggatggagaagaggttgctgattaaaatacactccccctataaaggggaagggggagtgtgacactttctttccatgttcaagtgaaaataaataatgtaccctgcagcccttttcccctttgctttcttctggcttgggcaaagggcatcataggtgtaagtgaagtaattcctttttccttccccctcctccactcctacgcccactcccatgcttgggagaatggggctgggacatgcactgagtgttgcacttttatttaggtagggaggcatgttgaatgagccaggaggtctagaactggagcttagtccagctggtacaataccaactccccttctagttcccaaaggcgatgtccagacacagactttatgattattatatttttcaatgccagtgctgctcagccctcagcagaacttcagtttccatgaaataaacaatgactatat

SEQ ID NO: 1566 - DNA, 505 bp, Homo sapiens
ctcctccttcctgtctaccttaatcatgaaaccgaattcatggggttgtattctccccaccctcagctcctcactgttctcagagggatgtgagggaactgaactctggtgccgtgctagggggtaggggcctctccctcactgctggactggagctgggctcctgtagacctgaggggtccctctctctagggtctcctgtagggcttatgactgtgaatccttgatgtcatgattttatgtgacgattcctaggagtccctgcccctagagtaggagcagggctggaccccaagcccctccctcttccatggagagaagagtgatctggcttctcctcggacctctgtgaatatttattctatttatggttcccgggaagttgtttggtgaaggaagcccctccctgggcattttctgcctatgctggaatagctccctcttctggtcctggctcagggggctgggattttgatatattttctaataaaggactttgtctcgc

SEQ ID NO: 1567 - DNA, 1389 bp, Homo sapiens
cctcactatcccggctgccctttctgggcaccggggcctcggacttagctgggagaaagagagagcttctgttgctgcctcatgctaagactcagtggggaggggctgtgggcgtgagacctgcccctcctctctgccctaatgcgcaggctggccctgccctggtttcctgccctgggaggcagtgatgggttagtggatggaaggggctgacagacagccctccatctaaactgccccctctgccctgcgggtcacaggagggagggggaaggcagggagggcctgggccccagttgtatttatttagtatttattcacttttatttagcaccagggaaggggacaaggactagggtcctggggaacctgacccctgacccctcatagccctcaccctggggctaggaaatccagggtggtggtgataggtataagtggtgtgtgtatgcgtgtgtgtgtgtgtgaaaatgtgtgtgtgcttatgtatgaggtacaacctgttctgctttcctcttcctgaattttattttttgggaaaagaaaagtcaagggtagggtgggccttcagggagtgagggattatctttttttttttttctttctttctttcttttttttttttgagacagaatctcgctctgtcgcccaggctggagtgcaatggcacaatctcggctcactgcatcctccgcctcccgggttcaagtgattctcatgcctcagcctcctgagtagctgggattacaggctcctgccaccacgcccggctaatttttgttttgttttgtttggagacagagtctcgctattgtcaccagggctggaatgatttcagctcactgcaaccttcgccacctgggttccagcaattctcctgcctcagcctcccgagtagctgagattataggcacctaccaccacgcccggctaatttttgtatttttagtagagacggggtttcaccatgttggccaggctggtctcgaactcctgaccttaggtgatccactcgccttcatctcccaaagtgctgggattacaggcgtgagccaccgtgcctggccacgcccaactaatttttgtatttttagtagagacagggtttcaccatgttggccaggctgctcttgaactcctgacctcaggtaatcgacctgcctcggcctcccaaagtgctgggattacaggtgtgagccaccacgcccggtacatattttttaaattgaattctactatttatgtgatccttttggagtcagacagatgtggttgcatcctaactccatgtctctgagcattagatttctcatttgccaataataatacctcccttagaagtttgttgtgaggattaaataatgtaaataaagaactagcataacactc

SEQ ID NO: 1568 - DNA, 129 bp, Homo sapiens
ggccatgctcacttccttccccagctcacctggaacaccctggatacactggagtgggaaaatgctgggaccaaagattgggccgggttcaaagggagcccagtggttgcaatgaaagactaaagcaat

SEQ ID NO: 1569 - DNA, 1139 bp, Homo sapiens
cggttagcgggccgggcgggggatcgggggttaggggtggagtccgccaaaggcccaaaggtgatggtcatcgagatggagctacgaaaggatgagcagagcccggagctccggcctgctgtcaagtcccccagcagaaccagcctcaaaaacgccctcaagaacatgatgggcctgaactcggacaagtgatcgccacccccccaccccaggccctgccagagcagggggacctaggctcctcttacccccgtctaggtgctttccctctttgctcccccgccctgccctgccctcacctccctttgagatgtaagtttcattccagaattcattccccaggcaattgtattctcccccaccttcacccctggctttctgggagcccaggagctaatcctacccctcacctgccccgggggctgtgtgtttggtgcctgtccacctgagcactgagaagaaagggactttgataccctctgcctcaagtccaggccacctggcattcccatctcctgcatcccccagcctgtccccctggctgtttcctctcccgtccctccctcccctctaccaggtggcccagctccatactctgtccccccagctaatacccagagcacccagatcagactctccttcagggtttatttaggttattattttttattttttaatccattctttgtttgtttacctgtgctcatcctctgcccttacacccatgactgaggaccaatgacgtcatgtggcttttgcaattcacgccccccttaagtccttaatgaagagccagcccaagtagaggggcccctgatcctcacacttcagtatagcattggttccccctgaccactttggagcactgttctgggactccaggtcttgaggagagagacagagagagagaatggatcctcataggtcagggagtgggggagggggcaaatgagccttaagaaatggtttttaaacaaccaaacaaaaagcaggaaaaacaaatgggaaatgggggggcgggggggaggaagaggctgcactgcagccacaggggattcttaggatttttctacattctgtatatttcttctcaaacctccaaatgtccttaaatgtttaataaacactgacatttccag

SEQ ID NO: 1570 - DNA, 234 bp, Homo sapiens
gagcccacctggaagtccacgtatgctagaactctgggcagggcctaatctagctgaggtccagaaatacaaacctggaacttcatatggaccaagtggccacacactgaaaaacccgtatagcgactcagtgaaataaacaagagcccccagtcagaactgtgaaacagggaaattttggggtgggagtaaaagcaaatttggaaaataaacttttttttgttgaatctttta

SEQ ID NO: 1571 - DNA, 1314 bp, Homo sapiens
agctcaacaagagactggaaggaccataaatttaaatggagaaaggaccctcaagacaaatgacccccatcccatgggggtaataagagcagtagcagcagcatctctgaacatttctctggatttgcaaccccatcatcctcaggcctctctacaagcagcaggaaacatagaactcagagccagatcccttatccaactctcgacttttccttggtctccagtggaagggaaaagcccatgatcttcaagcagggaagccccagtgagtagctgcattcctagaaattgaagtttcagagctacacaaacactttttctgtcccaaccgttccctcacagcaaagcaacaatacaggctagggatggtaatcctttaaacatacaaaaattgctcgtgttataaattacccagtttagaggggaaaaaaaaacaattattcctaaataaatggataagtagaattaatggttgaggcaggaccatacagagtgtgggaactgctggggatctagggaattcagtgggaccaatgaaagcatggctgagaaatagcaggtagtccaggatagtctaagggaggtgttcccatctgagcccagagataagggtgtcttcctagaacattagccgtagtggaattaacaggaaatcatgagggtgacgtagaattgagtcttccaggggactctatcagaactggaccatctccaagtatataacgatgagtcctcttaatgctaggagtagaaaatggtcctaggaaggggactgaggattgcggtggggggtggggtggaaaagaaagtacagaacaaaccctgtgtcactgtcccaagttgctaagtgaacagaactatctcagcatcagaatgagaaagcctgagaagaaagaaccaaccacaagcacacaggaaggaaagcgcaggaggtgaaaatgctttcttggccagggtagtaagaattagaggttaatgcagggactgtaaaaccaccttttctgcttcaatatctaattcctgtgtagctttgttcattgcatttattaaacaaatgttgtataaccaatactaaatgtactactgagcttcgctgagttaagttatgaaactttcaaatccttcatcatgtcagttccaatgaggtggggatggagaagacaattgttgcttatgaaagaaagctttagctgtctctgttttgtaagctttaagcgcaacatttcttggttccaataaagcattttacaagatcttgcatgctactcttagatagaagatgggaaaaccatggtaataaaatatgaatgataa

SEQ ID NO: 1572 - DNA, 481 bp, Homo sapiens
cacccttgtccccacaagcagaagcacagaggggtcactagcaccttgtgtgtatgtgtgtgcgcgcacgtgtgtgtaggtgggtatgtgttgtttaaaaatatatattattttgtataatattgcaaatgtaaaatgacaatttgggtctatttttttatatggattgtagatcaatccatacgtgtatgtgctggtctcatcctccccagtttatatttttgtgcaaatgaacttctccttttgaccagtaaccaccttccttcaagccttcagcccctccagctccaagtctcagatctcgaccattgaaaaggtttcttcatctgggtcttgcaggaggcaggcaacaccaggagcagaaatgaaagaggcaagaaagaagtgctatgtggcgagaaaaaaagttttaatgtattggagaagttttaaaaaacccagaaaaacgctttttttttttaataaagaagaaatttaaaat

SEQ ID NO: 1573 - DNA, 31 bp, Homo sapiens
agagatgccaataaagttagtcacagccttc

SEQ ID NO: 1574 - DNA, 2014 bp, Homo sapiens
agataaggctgccggacaaagcaagttgaagagatgagtaacagttctcactgatgacccacttctgcaggcataggtccagagcaccaaactctagtggacaattcagactctcctggttgtgtaactgaagatgttctgcccaccagcaccagaggtcactctccacatccccgcctcccagacatataccaggagcaatttcaaaaccctctccagtttcactcttctttcttggaatgggacagcctgaacattttccctttgacttgttaaaggtaccaccctacatcatggttgacaccctcctttggaccatgcagtcagaggggcagctttatacagaggaggggcacacttgtctgtgagtttgaagccctgagttccagtcctgtggctgtgtgactttgaacacgtttctgcccatctccaggtcttagtttctttgtctctgtggttgggtgggatgataaacattgccccagtctctctgttgagcctgcttgtgtcaggtgaaggtgagggatcgggagtgatggagatgcatacagatcagcaccttctctgtacctgctggacccccatgtgcacccttctccctccagcctgggctactctcctcctggttctttctaatcttaaacttcctggtgagcattgccccagccacactttctccctggttttgcttaattccacttatgcatcagtcatttcaacagcatgaatgtggttctgtacagtgatgtatgtggagatttctaaaatattctatgtgtgatttctgttcccaactaggttctaagtgccatcaaagcacggttgggtctcccttgtatcttccacagtgtgtagaaatttgtgctgcccagagctgtgcctagttcatagaaactgactggaagcacattgctgagggaggtttgttgaattggtttttaaggtttactgaaattgatttgctgaatttttctgctagttcaaaatgtgaattaggacctggtcagtttgaaatataccaaattctatgccctttctcttacctatcatcaaattgtagtaatgtatttcaccccactggacttatcttcagagttttaaaagagaggagctctcgacttagaggtaatatgaacagatgaacagacactgtggctggagccccaaagtgtggagcattgtgagatttggggtcacagcaatttatggctactattccctgggtctggtaggtaggacaaatgtcctcttttacttttcaaaactggcttaggtattcatggaccttgattcttctatatacattttataataaatacgtgaaattgcttaaaacctctttttggaatttttaatgaacttgcaacaaatttgtaaataggagagaactgacgttcttgtgatgttttcccatgcataaacatgccacatccatgttcttgggtcatcttttttgccctttcatggagtcataaattttcccaactgaagtcttgtatattctgttagattaattcctatttctagttgctgtaaatgatatcttatgttttattacatttctaataggatatggtgttggtgaaatgttaaccctctcattagatctactagtttacctgttgattctattgtgttttctatgtaaatgattttgtcagctataaataataacattttattttctctttccttgcaatacctatgctcatttattttttatgtttacccattggttagggcctcctgtatacattaaacagttcatagtcatgatagtgagtattcttacactgttcccagtattacagggaatgcttagaaattttctttatttaaacattatgtttgttgtagccttgttaaaggctattttataatttttactagaaatattttgacatttattgtgatttttttctatctctaatctattgagatagtcacattccttttgtcttcactccattataaaggtaagttaccttaataaaattgttgatatcatttcatc

SEQ ID NO: 1575 - DNA, 468 bp, Homo sapiens
ccgtttaacatagcctgacaataacatatgccattattgctaaggaaatgtgttcctcaaatgactatattaagcaatacagagaaaaacaaacaaacataattgaattacaattttattttaaactccctattattttccgggaatataatatttcttgaatgaacaatgctaatatatgaaaaaggagaggaagaatgaatcttctgaaaatattttaagtgatatgtttatgatgtcatcaaaaatatgaatatatattgatgactggacttgggaaaacagtaacagtcttgctttcagggacttcctgtttcctctaggagattctcatggtgccacctgctggcaaaacggcatagctattctctctgttttagtttgatatatagtagtggtaggaataggaatgtgattgtaaataggtactgtaacatggtctataaagaaaatctgctctttaaccac

SEQ ID NO: 1576 - DNA, 5034 bp, Homo sapiens
taatttagccaggctatgaaatcatcctgtgagttatttcctccataataaccctgcatttcccattaatctacatatcttcccacagcagctttgctcagtgatacccacatgggaaaaatcccaggggatgttgcttactctttttgcccacactgctttggatacttatctactgtccgaaggccttctttccccactcaattcttcctgccctgttattaattaagatatcttcagcttgtagtcagacacaatcagaatcacagaaaaatcctgcctaaggcaaagaaatataagacaagactatgatatcaatgaatgtgggttaagtaatagatttccagctaaattggtctaaaaaagaatattaagtgtggacagacctatttcaaaggagcttaattgatctcacttgttttagttctgatccagggagatcacccctctaattatttctgaacttggttaataaaagtttataagatttttatgaagcagccactgtatgatattttaagcaaatatgttatttaaaatattgatccttcccttggaccaccttcatgttagttgggtattataaataagagatacaaccatgaatatattatgtttatacaaaatcaatctgaacacaattcataaagatttctcttttataccttcctcactggccccctccacctgcccatagtcaccaaattctgttttaaatcaatgacctaagatcaacaatgaagtattttataaatgtatttatgctgctagactgtgggtcaaatgtttccattttcaaattatttagaattcttatgagtttaaaatttgtaaatttctaaatccaatcatgtaaaatgaaactgttgctccattggagtagtctcccacctaaatatcaagatggctatatgctaaaaagagaaaatatggtcaagtctaaaatggctaattgtcctatgatgctattatcatagactaatgacatttatcttcaaaacaccaaattgtctttagaaaaattaatgtgattacaggtagaggccttctaggtgagacacttttaaggtacactgcattttgcaaaaaaaaaaaaaaaaagtaatcttttagcaaccccagtattccttcactatttcgcttcctgcattagcaaattttacttacagtcaaaagtgcagatttatactcctgacgtgtctcattcacagctaaataataggccataggacttttggtaggtttaaacttttaattctgtatttcatgattataagtcttgctagaattttttctaatctttagtagatttgattaaataatgattcacagaatttagtaacagaatcaaactaagccatgtatgagggtaatcgagatgaggatattaactcaaaagaaatagggtgatttttaaaggattaataaaattctgaaatgttaagtagaagattacattgtctagtcttgtatttcctccttctgttgctctctttcattcacacactctcagtttctcatatttgtagctcatttatttggttatttcctaagaatattgaaagtgaagcaactatgtgactgtattcttcaggtaaacactgactgcgcttgttggattttccctatttttgtgacttcaagaataatatgccctgctgaatacatgccatttcacattctgaaactgggtagagtggttgggtgttctgccaacaattgctagtggtgtgaattcattcatatttgccagtattgctcacttcaaagaaactccttcatcaagcagtccagagctaggccagatcaatgctacaatcatgaagttctcattgcatgcaattgtgtaggattgacaaggaactcagataaaaatttccagggtgcacttccagaaccagcttcaacatatgtctacattgcccccaagttaataaagtgccaaccctttactctctcatacagccagaaatgttagaaatccaaaatcttggtgcattattttttcataaacgctaaaacatttgaagaaacaatttaattatttaaaattcaagtattttattcacattatttgcaatatccaaatgtttaaaaattcccagataattaactagctattacagatctcacctagagggttgatgttatgaagactccagtggactgtactcacaaattgactggacaccctatgaaagtgggtagacctctcagcggaaaataagaagggcttttacctacagggcaggacagggtcccatgagagcagttctgtggagatataaaaagaatggaagaaggaatgccttatagtgatattgtgacattatatctatatatctacatatatctatctatctatatctacatctatataatcttacatttaaaattgtattcctacacatattagaaactcttctaataaatgaagtaaaaaaattaaaaagaatacaaatattccagccccaaatgagaaatcaaacatattaaaattgttcaagaaaatttctttgaacacttctgaaagtttttggaaacttagaaaagagggaaaaaaatccagtgttactagtaatttccatggtaatacagataaaatacattcttttaattctgggaaattagaaaaagtggggtgatctttccaggaaaaacatgtgtaacatctgcttatcactccagctccctcctcctcctcctctccacgttcccttgagtaaatgtctgggaaagcatgaagcttgatgcaagaaccctgttgtactggcgttttcctcccctgtgaaaacgtaactactgttgggagtgaattgaggatgtagaaaggtggtggaaccaaattgtggtcaatggaaataggagaatatggttctcactcttgagaaaaaaacctaagattagcccaggtagttgcctgtaacttcagtttttctgcctgggtttgatatagtttagggttggggttagattaagatctaaattacatcaggacaaagagacagactattaactccacagttaattaaggacgtatgttccatgtttatttgttaaagcagtgtgaatagccttcaagcatgtgaataatcttccatcttccccgccacacatacacacacacactttttgtttctttcaggtagacaccttttaaaatgcagaactaactgaggcatttcagtaactttgctttcaaatcaataaagtcaaatgtatggaaacattttgtgccctactctccataccccgtgtactcaaattctctactgtatgaattatgctttaagtagaattcagtgccaaggagaacttggtgaaataaattattttaattttttttttatcctttacaaagccatggattttatttggttgatgtgtgctctgtacacaagccatttcaataggatggagctgttaattattttccaaagagtaatagacatgcaaaagtttcaataaaaactgggccattaacaaataaattaataaactaataagcattcccttctaggtttttgccaaactgcctatccaataacaaatttgagaatcgttgtaaaagctagttatatttcagagaaatgattttcattattgaaactgttctccctagcaggccattttccctttttcctgggagtttagcaagtttaggagagaatagtcatgaaaagaaagggaagaaaggggagaagggaagaggttaaaaagtaagtgctcagacctatgaacgtaatccctttgctacaaatatttaagagcagctcagcttggttgaaactgagttttgtcatcttccatatttgcaggaaggtattttctgacttgcaatgcagctagatgtaaaattttattttatcatcctagaaagccttgactagaaaaatgaataaatattgagggtttcctgtccatatctggcttgcatgtgccagaaagcagagaatagaaaatgtaatctccaacatccaagcatcgaaacccaaggggtaggcaattctatgtaggttttggacatgaagtttggtgcatcttggtttatgctggctcaactgctattaaacctctctggcttatagtctcttcattctattagacaagcacgtatcgaacacttgcttcgcacaaggctctttagttaacaatttagcagctactgtttgtgttaaacacacttttcaccaaataggttctgaggcaaacgagagcaatgactatttaaagaaaggctttcccagcatcacttacacatcccaaaactaaaaagatcaactcttccaactgagaaaagactcctggctttgaatggaaacttacagcagagagtcacaggccacggcaacaacaacgacaacaacaaacatttggaatattattctcaactcacgttttaataatacatcttattatttttctagtagagaaactacaaatcagcctcttcaacatttatatacagtttaataagcctcttgcaagttacttgttctctcacctgaggtatttttttcctccccaccttgcccctgttcctcccttcctcttctccctttgcaagaggaaatatttaacatatttgggtccaacttcaataatgtaataattaatacattaaaagcatttaacttcctttctagaaaaatgcacaggctaaggcatagacaaaacaaagagaaatgctgagaaatttgccactggagacaagcaatctgaataaatatttgccaaaagttctttttatgtcatatagtgtcaggatttgaaggagctatttttttttaatgttgcaactagcaactcatcttcggaagacacagccaggagaatgaagtagaagtgaaaggtttataaatccatttgtaagcatttatcccatatattttaaattcaagaaaaattgtgtttatctttagaattttgtattcaatactttatgtactatgtgactcatgcttctggataaataaagcaccaaatatgtatctgtaaccacaatcacacatattatattaaatatatatctat

SEQ ID NO: 1577 - DNA, 2012 bp, Homo sapiens
gtcttcccctagagttctgtgactaggctcccatatggaacaaccatattctttgaggggtcactggctttaggacagggaggccagggaagaggtgggttggggagggagttttgttggggatgctgttgtataatgatatggtgtagctcagcatttccaaagactgaatacattatggattgcatagtttaatgtttctaataagagtcttagcattagatatgaagacgtgtttatcattaaggacagagacttttaatatagacattctcatgcaaactagatacttagggactcctaacaacttcccaccatgtcggggaagctcttgtcaagaggtgcatatgtctatccatctacacaccaatagacagaaggacagatagatagatgtgtgtgtgtgagtgtgtaacctttcgtattttaccctcaaagtttattcctaattataacagacaccaactgtacagcaaaagtaactttattttcagtgtgaactatatttaaggaaatgcttgatgcacttaagttataaaatgagataatttacttttataaactttatttttagcttgacaagacttgtcagcagggcagagagggctgctccacctagccccatagctttgagtgctggggttcattctgttttcagagtgtctttcagatctggaaagaaattctgtgtggctgatggtgttctctcttgcattcttgctctctttggggttgaatcactgggcaggggtgggacagaataatctctgatcatgttctgagaaaatgtaaagcccagactcctgggctttcttttaaattctgacaagtggttgttgggcagtgctaggatgattggttcagctcttgagcttcagcatctgcaaatgtggatgaggctaatagtatgtacctacctcactgggaaacaccaaggcttaattcattcccaggacacatgagcagggctgagactaatatctgatatttgtttaagatacaaccaggccactcacttggcaaaggagggtacatagggttgcagagcaggagggctcctgaactccagagggcagttctgcctgctgaagtccctctgcaaagcctgtgctgaaggagacaccagctcagagcagttcagagggatcccagagtcccagagtggggaggaggtgaaggctgaggggatagaggagggcctggtggtgttctagagcagggttgggcaaactcctgcttgcgggcctgctttctatggcttgccagcaaagaatggtttttactttttttttgaggtcattaaaaaaaaggagaagaagaatatataacaggctgtctgtggcctggaaagcctgaaatatttgctatctgtattgtctggcccttacagaaaaagtttggggccccttgttttagagggtctgtttctaaagaacctcatggcgctcatagaggcagaaggttccagtggaaacccttggctcttccttccaactcactcctctgatcctcggcacagaagacccagcagccattgtacatggggacagttccacaccctggtctccagttgcggtgctaggatggtattgttctgtgctaggaagtctcctgggaacccagaatgagttggtggggaagacagcgggtcactgtggacccatccaggaggggccaggataggcttggcctcatttctggggacatcattggagacttgaacacagagacacgtccctatcactctggcaaggccagagggaacatgtccccttatggtagagtctatgttgtgtgatttttgtgctcttgtttataatttatgcaaaccaccaagaaacccaaaccagtctgatgagtgaaaattatgcagatgctgtatggccccacaggtttctgtggtaaagaccagttggagaatgtaggagatactatgtgagtgaaaatgaatagagatccttattccactccttaatggcataccaagatgaaattaaaatctcttacaaatg

SEQ ID NO: 1578 - DNA, 221 bp, Homo sapiens
aaacagatactgtgagccctgaaccctccaggaggctgcttccccatgacactagtgaccagtaaaatgaaaaggaggagcaaaggagattttgagtcacagaaatgaaacccaggcaaccagcctagaagaaacactccaagatattcattaagtgctttgtttcccgttcctctgacatcttgtaaatgctttttgaattaaagatgataacaggcttt

SEQ ID NO: 1579 - DNA, 149 bp, Homo sapiens
gccccaccagccacagcctccccacccaggatgacccctgggcaggtgtgtgtggacccccaccctgcactttcctccacctcccaccctgacccccttcctgtccccaaaatgtgatgcttataataaagaaaacctttctacacatg

SEQ ID NO: 1580 - DNA, 838 bp, Homo sapiens
aaacctgcagtgaaacctattgacatggccacgctgtggaatgatgtgaattggccctgtttacagaggcagtacaactgaatgttattttacatccagaattttggcgttcagtataagagaatggttcatgttactctttctctctccatcagcttcctcactgaaaatgtgcattaagtgccttgtagatactaatcaagaaagctgtgattctcctcaaagcgtatttttgtgaaatcttttaagagccagtaacatacttctagagaacaggaaaagagactaggataatacatcttccacacatttggcccactgataatgttaattctctggcgtatttcaaagaacttgttcctggctgatccaagtgcagtggtatttacaactaattgatcacaaccagtttgtagatttctttgttccttctccattcccactgcttcacttgcctagtcttgaagaaaaaaaacaaaaaacaaaaaaaaaccttgttcctttataggttcctggtagaatcagtagagatgatttcagctcattgacatttttttaagctatatccccttgtcattccattgagaaagctgacaactgggatagggaggggattagataatagatggggtcaaattctgtgtgaatgtgaacttgcctagtaagcactttgtctctgttcactactgcgatagaggaaatctatctccctatcttgggtccttgaactacagcctgctgtcttacaccagtggagctaccctttaaatgtacaaattatttgtatgctaatgtaatatggtgaaattaaaataaatcacactgttaattgttttcc

SEQ ID NO: 1581 - DNA, 752 bp, Homo sapiens
actcaagaactctttattttctatcattctttctagacacacacacatcagactggcaactgttttgtagcaagagccataggtagccttactacttgggcctctttctagttttgaattatttctaagccttttgggtatgattagagtgaaaatggcagccagcaaacttgatagtgcttttggtcctagatgatttttatcaaataagtggattgattagttaagttcaggtaatgtttatgtaatgaaaaacaaatagcatccttcttgtttcatttacataagtattttctgtgggaccgactctcaaggcactgtgtatgccctgcaagttggctgtctatgagcatttagagatttagaagaaaaatttagtttgtttaacccttgtaactgtttgttttgttgttgtttttttttcaagccaaatacatgacataagatcaataaagaggccaaatttttagctgttttatgtacaaggagagatctgtttcattttgttttgccgtatttctagatataagttttagcatgggccaggaaggactaaaataaaagtttttaaggtactgtactttttgccatacttgactcatatactcaaaatacagagttgtcttggtgtaggaattggaaagcaagagtggaaaggaacgtaataactcgttggagtttaaaaatgagggtcttggcaagtaacactgatgtctgaaaaaaaattaaatataaataaataaataaaaatg

SEQ ID NO: 1582 - DNA, 221 bp, Homo sapiens
aagcagactggcctgactgtgtgtggatcacacgcctctgagacatgcagtgagggtgccaggggtggcaggagccaaacagagtttctgagccaaagcagacctctcggtttgccagcctttgcagccacttttgaagagtagggctgctccttgggtggtagaaccataatccttaggaaaaatcccttcctcttaggaataaagaaatcactgatttg

SEQ ID NO: 1583 - DNA, 1057 bp, Homo sapiens
attaggatttgagggtgtgggaccctcaccgaattcattgattactgaaaattgaatgttttttgggtccacatttcaaggctgaagtgtatagtgtatatataacctttcctatggaaatgtgacattgagtacattttgtgttgctgttgtgaagccattaatataaatctttggtaatgacccatatctctatatgtatgtgttcccagttgtgggagcaggcactaatgaaatcctgtgcctggaatggagatatttaggtacctgaggcttagtgtcctgtggtctgcatgtaagatagatgacatcctagaacaaagaagctgttttaacttaatccccctgatcagcaggatatctgtgtgttcagtgacatcatacattctgtatctagaagtctaaaatttctgcctttctcctaaagaatgtgttcttgcattttggttgaaataacctacacagtgttaaaaatcagatacctcctttagtgaccagttcaaattttaatagcgataggtagcccctgagaaatttatcactataactccacaggaaatatgacttggaagtgctctgtgtactaaacaaaataaagcccctctttgcatttaaaaccaaagtcaaaacaaaactcttgtaatgcaattaattaactttatgtcttcccatgactcaagttttgttaaatatgcccaaaaactttgattggcagtttcttcggttaattattcctatagaatgtattttaagaaatctatacaaattggatatatgcttggtaattctccagtttctaggaggtacctatttctaccgtttcaagtgatgaagtgaaaataatttacattcgatagtgttactgataacaaacctacttaagagatatgttgctttttacttaagggatagtgttgatagataaattagaatgtatagataggtttgtgaaagtctaaataatggttgtatagatatgtatatatggttcacatatctggatctgtgtatttgattttgtactttaaatgtgacaaataaaccttttgggagaaaa

SEQ ID NO: 1584 - DNA, 596 bp, Homo sapiens
tgttgtcaacatttctctggataatgagaaatcagacatggactacggggacaagacacaaatctaagaaccagcaggcccaggaccttctctggccatcaccttggaagatttgctgatctctgctttggcaagggatggcaggcagcctttaagggaggctgatttcaaacctctgtgcccatctaactagtttgagaagcttaccaagaaagcaagaatgtgtgagaacattcctacatacagagtttctcaactatagcgtttatcctgcccagcctcctcccttaacagaaccaggactccatttgcaattctgaaagagagttagctctggactgctaaactccagaaattgcctatgcctacaatatgcttttctatacctcctgtgctatacttagagacagaagaatttattactactattagaaggccttcttctgacaagggaagatagcttcaagtcaaaatataccttttatccccatcactttacagtcactagtcaatgactgttgttacactaaaatcaaaaggcctttggtgagctcagtgacagtgacctctgggacaatcacagaaatgacttcact

SEQ ID NO: 1585 - DNA, 1489 bp, Homo sapiens
caggccagcagcagagggcggcggaggaagggttaggggttcattctcccgcttcctggcctcccttctcctttctaagccctgttctcctgtccctccatcccagacattgatggggacatttcttccccagtgtcagctgtggggaacatggctggcctggtaagggggtccctgtgctgatcctgctgacctcactgtcctgtgaagtaacccctcctggctgtgacacctggtgcgggcctggccctcactcaagaccaggctgcagcctccacttccctcgtagttggcaggagctcctggaagcacagcgctgagcatggggcgctcccactcagaactctccagggaggcgatgccagccttggggggtgggggctgtcctgctcacctgtgtgcccagcacctggaggggcaccaggtggagggtttgcactccacacatctttcttgaatgaatgaaagaataagtgagtatgcttgggccctgcattggcctggcctccagctcccactccctttccaacctcacttcccgtagctgccagtatgttccaaaccctcctgggaaggccacctcccactcctgctgcacaggccctggggagcttttgcccacacactttccatctctgcctgtcaatatcgtacctgtccctccaggcccatctcaaatcacaaggatttctctaaccctatcctaattgtccacatacgtggaaacaatcctgttactctgtcccacgtccaatcatgggccacaaggcacagtcttctgagcgagtgctctcactgtattagagcgccagctccttggggcagggcctgggcctcatggcttttgctttccctgaagccctagtagctggcgcccatcctagtgggcacttaagcttaattggggaaactgctttgattggttgtgccttcccttctctggtctccttgagatgatcgtagacacagggatgattcccacccaaacccacgtattcattcagtgagttaaacacgaattgatttaaagtgaacacacacaagggagcttgcttgcagatggtctgagttcttgtgtcctggtaattcctctccaggccagaataattggcatgtctcctcaacccacatggggttcctggttgttcctgcatcccgatacctcagccctggccctgcccagcccatttgggctctggttttctggtggggctgtcctgctgccctcccacagcctccttctgtttgtcgagcatttcttctactcttgagagctcaggcagcgttagggctgcttaggtctcatggaccagtggctggtctcacccaactgcagtttactattgctatcttttctggatgatcagaaaaataattccataaatctattgtctacttgcgattttttaaaaaatgtatatttttatatatattgttaaatcctttgcttcattccaaatgctttcagtaataataaaattgtgggtgg

SEQ ID NO: 1586 - DNA, 1037 bp, Homo sapiens
cagccaggggatttcaccactcaaaggccagacctgcagacgcccagattatgagacacaggatgaagcatttacaacccggttcactcttctcagccactgaagtattcccctttatgtacaggatgctttggttatatttagctccaaaccttcacacacagactgttgtccctgcactctttaagggagtgtactcccagggcttacggccctggccttgggccctctggtttgccggtggtgcaggtagacctgtctcctggcggttcctcgttctccctgggaggcgggcgcactgcctctcacagctgagttgttgagtctgttttgtaaagtccccagagaaagcgcagatgctagcacatgccctaatgtctgtatcactctgtgtctgagtggcttcactcctgctgtaaatttggcttctgttgtcaccttcacctcctttcaaggtaactgtactgggccatgttgtgcctccctggtgagagggccgggcagaggggcagatggaaaggagcctaggccaggtgcaaccagggagctgcaggggcatgggaaggtgggcgggcaggggagggtcagccagggcctgcgagggcagcgggagcctccctgcctcaggcctctgtgccgcaccattgaactgtaccatgtgctacaggggccagaagatgaacagactgaccttgatgagctgtgcacaaagtggcataaaaaacatgtggttacacagtgtgaataaagtgctgcggagcaagaggaggccgttgattcacttcacgctttcagcgaatgacaaaatcatctttgtgaaggcctcgcaggaagacccaacacatgggacctataactgcccagcggacagtggcaggacaggaaaaacccgtcaatgtactaggatactgctgcgtcattacagggcacaggccatggatggaaaacgctctctactctgctttttttctactgttttaatttatactggcatgctaaagccttcctattttgcataataaatgcttcagtgaaaa

SEQ ID NO: 1587 - DNA, 1282 bp, Homo sapiens
agcagactgtggtgaatttagcaacacttatgaagtttcttaaagtggctcatacacacttaaaaggcttaatgtttctctggaaagcgtcccagaatattagccagttttctgtcacatgctggtttgtttgcttgcttgtttacttgcttgtttaccaatagagttgacctgttattggatttcctggaagatgtggtagctacttttttcctattttgaagccattttcgtagagaaatatccttcactataatcaaataagttttgtcccatcaattccaaagatgtttccagtggtgctcttgaagaggaatgagtaccagttttaaattgcccattggcatttgaaggtagttgagtatgtgttctttattcctagaagccactgtgcttggtagagtgcatcactcaccacagctgcctcctgagctgcctgagcctggtgcaaaaggattggcccccattatggtgcttctgaataaatcttgccaagatagacaaacaatgatgaaactcagatggagcttcctactcacgttgatttatgtctcacaatcctgggtattgttaattcaacatagggtgaaactatttctgataaagaacttttgaaaaactttttatactctaaagtgatactcagaacaaaagaaagtcataaaactcctgaatttaatttccccacctaagtcgaaacagtattatcaaaacacatgtgcacacagattattttttggctccaaaactggattgcaaaagaaagaggagaagaatattttgtgtgttcctggtattcttttataagtaaagtttacccaggcatggaccagcttcagccagggacaaaatcccctcccaaaccactctccacagctttttaaaaatacttctactcttaacaattacctaaggcttcctcaactgccccaaatctcttaatagcttctagtgctgctacaatctaagtcaggtcaccagagggaagagaacatggcattaaaagaatcacatcttcagaagagaagacactaatattattacccatatacatgatttcagaagatgacataagattcctcttaaagaggaaatgtcaggaatcaagccactgaatccttaaagagaaaagttgaatatgagtcattgtgtctgaaaactgcaaagtgaacttaactgagatccagcaaacaggttctgtttaagaaaaataatttatactaaatttagtaaaatggacttcttattcaaagcatcaataattaaaagaattattttaatg

SEQ ID NO: 1588 - DNA, 32 bp, Homo sapiens
catgtcaaagaaaaaagattttaataagcact

SEQ ID NO: 1589 - DNA, 251 bp, Homo sapiens
aagagttcctgatcacctgaacaatctagatgtggacaaaaccattgggacctagtttattatttggttattgataaagcaaagctaactgtgtgtttagaaggcactgtaactggtagctagttcttgattcaatagaaaaatgcagcaaacttttaataacagtctctctacatgacttaaggaacttatctatggatattagtaacatttttctaccatttgtccgtaataaaccatacttgctcgta

SEQ ID NO: 1590 - DNA, 770 bp, Homo sapiens
gggcctcagggtgccgtggggctgcagcctgagaggctggcccggggaggagttcccatcaccgcctgtgccgcggccttgggagcatgtcactgtgtacagctggccacacacagggaaggagcagcatctggtatgcagccaccaggacaaggactgaaaataatgtctacagtccacagcttcagcatttccagagaccacatgtgagcttcttttaggtcccagtgatgggaccagaagcatctaaagcaaaaaaaaaaccaaaaaaaaatctagagatgtggctgtggctttttgggaggtggggcatgggaggaccagagacgaagggcttggaaggagacccccacatgcatcatttcctcctcttcacagtgtgctgggagtccagccgtgcactgtgccagatgcctcaggaggagaaccctccccagtgtactgtgaaggatgacacagcacttcttcctaatgacacgcgaccgtcctggtgcctctacatggttgatgcgggcagtgtgggaccctcagttctaggactggtccgcagagaaagcacccaggagcagagcgcttcggagcggtcctcagtggcgccacctgctggtgctaatagggacagccacaggcctcttgcagactggcccaccctgcctacttccctactgacaagttctttggtatttcaaaagggagaaaccactataaaagacaagaggaagggcaggtactaggtgtttcatttccagaattaaaaaaaaaatccattt

SEQ ID NO: 1591 - DNA, 98 bp, Homo sapiens
gcctctcacctgtcgcgttttccctgtgttgcgtttcccccgtgtcgcgtttcccctgtgcaggctcaagagctggcggaggggcatttcccacggtg

SEQ ID NO: 1592 - DNA, 185 bp, Homo sapiens
tagtctctggcaccctgtccgtctccagccagccagctcatttcactttacaccctcatggactgagattatactcaccttttatgaaagcactgcatgaataaaattattcctttgtatttttacttttaaatgtcttctgtattcacttatatgttctaattaataaattatttattattaag

SEQ ID NO: 1593 - DNA, 1080 bp, Homo sapiens
atttgccacataccaaatctgggtgaaaggaaaggggccggggacaggagggtgtccacatatgttaacatcagttggatctcctatagaagtttctgctgctctctttccttctccctgagctggtaactgcaatgccaacttcctgggcctttctgactagtatcacacttctaataaaatccacaattaaaccatgtttctcacttttcacatgtttcatagcaactgctttatatgactgatgatggcttccttgcacaccacatatacagtgcgcatgcttacagccgggcttctggagcaccagctgcagcctggctactgctttttactgcagaatgaactgcaagttcagcatagtggaggggagaggcagaactggaggagaggtgcagtgaaggttctctacagctaagcctgtttgaatgatacgtaggttccccaccaaaagcaggctttctgccctgagggacatcttcccactcccctgctccacatgagccatgcatgcttagcaatccaagtgcagagctctttgctccaggagtgaggagactgggaggtgaaatggggaaatggaagggtttggaggcagagctgaaaacagggttggaaggatttcctgaattagaagacaaacgttagcatacccagtaaggaaaatgagtgcaggggccaggggaacccgtgaggatcactctcaaatgagattaaaaacaaggaagcagagaatggtcagagaatgggattcagattgggaacttgtggggatgagagtgaccaggttgaactgggaagtggaaaaaggagtttgagtcactggcacctagaagcctgcccacgattcctaggaaggctggcagacaccctggaaccctggggagctactggcaaactctcctggattgggcctgatttttttggtgggaaaggctgccctggggatcaactttccttctgtgtgtggctcaggagttcttctgcagagatggcgctatctttcctcctcctgtgatgtcctgctcccaaccatttgtactcttcattacaaaagaaataaaaatattaacgttcact

SEQ ID NO: 1594 - DNA, 252 bp, Homo sapiens
tggtgtggaaagtaaagaagtcacaggttgggacatttagacaagagtgaatcacacacgaggaatgtgttcattcttttattgtccgttgttttaacctgactgaatacaagatcaacaagagcactgtactcctggcaattattacatatgttagaacatggattttgcactgtagacaacatttaacaccagtctatggggtactgcattgctttttataaagttcaaaataaagatttattttcaaac

SEQ ID NO: 1595 - DNA, 171 bp, Homo sapiens
aagtttctattaaatatttcagtgggcagctgctatcaaaattttggatatgatttcttagggtctgtgtactttggttgtattctaaattatggaaatggtatttatcttttattgacagtgaatttgtttttttaatactagaacaaaataaatttttttctcacagtg

SEQ ID NO: 1596 - DNA, 1919 bp, Homo sapiens
tatactgctgaagggcttcttcttatagcaagaactctgcacagcaactgcctggatgtgtttgattttttaaagcgtagacatatatttatgaatgtgcatttcttgacttcacagcagccacttgactaataccttgtgttccgggaataacatgatactattcagaggagccagaagtaaagtttatttcatggattatttatgagagctaatttaaggatgactttttttctgattcaaaagtgaacttgattttaaaaaccagtcaagagcaatcaaagcagcacatggtgttgtatacttcattagcaagtgagtttggtgttttataggtcacatatgtctgtatctacttagccagatgcttggcctggtgggaccagggctccacagaggccacaaaatgttgcaagtcatgatggatggaaatatgttctaacagcatctgcctctattcaatttaattcttatttctgtgttactcatgtacattggtctttctacatagttattctatcactggcaatatttgttctggtttagtgttctgtattttaaggtgtacgtatcatttctaattttaagttattttaaaaaaattcatcatatgaatgttcttggttcccattgtgacgattatttatttctgtaaaatttgtttagaagtacgtttttgcattattcatatgcttcccagagaagctcatttagttagaaaataaggcaagttttgaagcctgctaaatgaagagacttaagaaagcttaaggtacgcttgcttgtctttaaatcttcaatatgaaggactattaattccaagattaaaagttcatatataggctaaagatgtaactaggccatttgtatttgtattcccttttatttccaaaataaaatgaaaaatctttttttaataatttcatccctatttatagtttttatattaatttgtttttcttatccaagtaaagatgtcaataggaattgcattagtccaaggcctttttcataaactgagcctcttttcaattatttcaatgggacaggaactaggatagatgtgattcctgcatttttttaccttaaatctgcctttgtttctaaaggtagatcatcttgaatatttgcttaaaattgctagtgatttcattaccaagttacttgaaaaaatgttctatatgcatttaattctgaaatcagtctaccaaggggctgctagtatatgtcagacatgaaaactattttaaagctgactttgttgccttatcttgaaaagaatctagataggtgcttttaactggggtattaacttttttagaatgacacagctgaacagtgttaataatagtgtgtcaagattgcaaagtcgacatactcatttggtttaagcaggaatcctagaagcaaatggatggggataagaataggtcattttctattcaccatcctttactattaagggaaaggaaaagaacactagctaaggaagggaaagggaagtgatatcataaaagtagcaaccttcattttacattctgtctgtttttctttttttgctttgttttgtttgtgctaatttgggaattgtgtactccgaaacaagtagaaaagtgctgtttgagggattttattaaatctttttttaatggaatgtggtacaaattgttcatgttaccaaagcaatatttccctggaatttaattcaaagtttgtggcatacaacctgagccttttcttatataagacaagaatatgttcacatcttggtatgtggccatatttatagaatgctgaactcaatgtgcaagttgtactgtatgcagttttgtaaataagtgaaaataatttgttgtactttttattcaattctgtatagattataaaattatttttattaaataaatattttacagtat

SEQ ID NO: 1597 - DNA, 2359 bp, Homo sapiens
aattgaacattcaaaaacccctggaagagactctttaagacctcaaaccatttagaatgggcaatgtattttacgctgtgttaaatgttaacagttttccactatttctctttcttttctattagtgaataaaattttatacaagaagcttttataatgtaactccttgctaccagtaagtaagataatggctattacttctgcattaatttgaatacaggtaggaaaatatcaagaaccaacaagaaaagggcttatctttcttaatgattgaaaatgctatgaagtaatatttatgtagttaaaatgcttcattataactcttttaaatcctttacacactagtaaaacagatattactttaaataataattgatagacctggataactttcacaaacacatgattttttaatggtttttcttgagtgaagagaaaaacaatattatcaaatgaaataagtacttaaaatatcctgtctttcccatataacaatgatttttctgactttccatgagtaaaaaaacagccaagcatctttccagtagccccattgaaattgtgaatccgtcctggtctccctaaggactgcacacattgatattcaaggttggtggtcattagatatggaacagaactgaaataaccatggtagaactgaatgtgtaatgttggctttattctagctggtactacatggcacacagtttcaaaacataatttcacctactggaaagctcagacctgtaaaacagagcatgggaactgctggtctaaatgcagttgttcctgctcaaagagacctctggccaaactggcaagcagttaaagttttctttcagggccttcctctctatggcctcaacttcctcctctctcttcttccagcaacttcccctttcatcattcctttccctggggacttggcattcagtgatcctgtagatattgcacaactggggaacctttagacatccttaaaatcacatgagatagacagtcatttggggtgtctgaaataaaccaccccaaaacttagtgttaaaagagcaaccaaaaaaaatttatgtgagattatggatttgttacttagcttgatttaatcatcctgtaacgtgtacatatatcaaaatgttatgtataccataaatatataaaattttatcaacgaaattcataacaatctctcagaccacagagaaatcaaattagaactgaggactaagaaactcactcgaaaccacacaactacatggaaactgaacaacctgctcctgaatgactactgggtaaataatgaaattaaggcagaaataaataagttccttaaaaccaatgagaacaaagagacaacataccagaatctctaggagacagggctttgcttttgctgcattctattcgttgtgaacacaaattacaggccagtctcgattcagtgtagaagggaactgcataaggaccacataccaggaggcataattcactgggagcatctttagaaactaccagagttacctgttgcccataccagtggggtaagccctatgaatgtatatgagagtttcaaacatccacaaaacattggctttctaatattcgtattcccactattcctttcttttcatgattcatgtcattgtcccatcaacatttctaagatttccattccgttaagagcaaaagagaatgttggaaggtgggggaaaacatttctttgttttctacagggccagcttcttggatgtgtgtgatctgttcagttgcaaagggtcacatgctcagaaggaccgcatgctaaatttaatgctttgcagttaccctcttgaaatcctttattttttaagaaggaattcgacatttccatttttcaatgagccccacaaattacgcagctagtcctgggcttctctactctgaaattgggcaggatctctcttgatctagaatttactaaggcataataggggcaagaaaatcttatgaaataatggggggtagggaagagatgggaatggagcatgagatccagcttcgttattctctacttgagaaaaataaggccccaaagattaaacaacttgcccaaggatattgcttgttagtgtcagaactgaaaccagaaaccaaatgatcatatccctagacttttagtctgctttctcttccataaaatgaaacttataatgtttctaatccattgctcagacaggtagacatgaatattaattgataatgactattaattgatctggaaaatacttgtttggggatcaataatatgtttgggctattatctaatgctgtgtagaaatattaaaacccctgttattttgaaataaaaaagatacccactttt

SEQ ID NO: 1598 - DNA, 610 bp, Homo sapiens
gtttccataaacacccatgaatcaaagacatggaattaccttagattagctctggaccagcctgttggacccgctctggaccaaccctgtttcctgagtttgggattgtggtacaatctcaaattctcaacctaccaccccttcctgtcccacctcttctcttcctgtaacacaagccacagaagccaggagcaaatgtttctgcagtagtctctgtgctttgactcacctgttacttgaaataccagtgaaccaaagagactggagcatctgactcacaagaagaccagactgtggagaaataaaaatacctctttattttttgattgaaggaaggttttctccactttgttggaaagcaggtggcatctctaattggaagaaattcctgtagcatcttctggagtctccagtggttgctgttgatgaggcctcttggacctctgctctgaggcttccagagagtcctctggatggcaccagaggctgcagaaggccaagaatcaagctagaaggccacatgtcaccgtggaccttcctgccaccagtcactgtccctcaaatgacccaaagaccaatattcaaatgcgtaattaaaagaattttcccc

SEQ ID NO: 1599 - DNA, 1116 bp, Homo sapiens
atcgcccttggtgaaagaaaattcttggaatactaaaaatcatgagatcctttaaatccttccatgaaacgttttgtgtggtggcacctcctacgtcaaacatgaagtgtgtttccttcagtgcatctgggaagatttctacctgaccaacagttccttcagcttccatttcgcccctcatttatccctcaacccccagcccacaggtgtttatacagctcagctttttgtcttttctgaggagaaacaaataagaccataaagggaaaggattcatgtggaatataaagatggctgactttgctctttcttgactcttgttttcagtttcaattcagtgctgtacttgatgacagacacttctaaatgaagtgcaaatttgatacatatgtgaatatggactcagttttcttgcagatcaaatttcacgtcgtcttctgtatactgtggaggtacactcttatagaaagttcaaaaagtctacgctctcctttctttctaactccagtgaagtaatggggtcctgctcaagttgaaagagtcctatttgcactgtagcctcgccgtctgtgaattggaccatcctatttaactggcttcagcctccccaccttcttcagccacctctctttttcagttggctgacttccacacctagcatctcatgagtgccaagcaaaaggagagaagagagaaatagcctgcgctgttttttagtttgggggttttgctgtttccttttatgagacccattcctatttcttatagtcaatgtttcttttatcacgatattattagtaagaaaacatcactgaaatgctagctgcaagtgacatctctttgatgtcatatggaagagttaaaacaggtggagaaattccttgattcacaatgaaatgctctcctttcccctgcccccagaccttttatccacttacctagattctacatattctttaaatttcatctcaggcctccctcaaccccaccacttcttttataactagtcctttactaatccaacccatgatgagctcctcttcctggcttcttactgaaaggttaccctgtaacatgcaattttgcatttgaataaagcctgctttttaagtgtta

SEQ ID NO: 1600 - DNA, 1869 bp, Homo sapiens
aaacaggtgcatctggggaactagagggatacactgaagttaacagagacagataactctcctcgggtctctggcccttcttgcctactatgccagatgcctttatggctgaaaccgcaacacccatcaccacttcaatagatcaaagtccagcaggcaaggacggccttcaactgaaaagactcagtgttccctttcctactctcaggatcaagaaagtgttggctaatgaagggaaaggatattttcttccaagcaaaggtgaagagaccaagactctgaaatctcagaattccttttctaactctcccttgctcgctgtaaaatcttggcacagaaacacaatattttgtggctttctttcttttgcccttcacagtgtttcgacagctgattacacagttgctgtcataagaatgaataataattatccagagtttagaggaaaaaaatgactaaaaatattataacttaaaaaaatgacagatgttgaatgcccacaggcaaatgcatggagggttgttaatggtgcaaatcctactgaatgctctgtgcgagggttactatgcacaatttaatcactttcatccctatgggattcagtgcttcttaaagagttcttaaggattgtgatatttttacttgcattgaatatattataatcttccatacttcttcattcaatacaagtgtggtagggacttaaaaaacttgtaaatgctgtcaactatgatatggtaaaagttacttattctagattaccccctcattgtttattaacaaattatgttacatctgttttaaatttatttcaaaaagggaaactattgtcccctagcaaggcatgatgttaaccagaataaagttctgagtgtttttactacagttgttttttgaaaacatggtagaattggagagtaaaaactgaatggaaggtttgtatattgtcagatattttttcagaaatatgtggtttccacgatgaaaaacttccatgaggccaaacgttttgaactaataaaagcataaatgcaaacacacaaaggtataattttatgaatgtctttgttggaaaagaatacagaaagatggatgtgctttgcattcctacaaagatgtttgtcagatatgatatgtaaacataattcttgtatattatggaagattttaaattcacaatagaaactcaccatgtaaaagagtcatctggtagatttttaacgaatgaagatgtctaatagttattccctatttgttttcttctgtatgttagggtgctctggaagagaggaatgcctgtgtgagcaagcatttatgtttatttataagcagatttaacaattccaaaggaatctccagttttcagttgatcactggcaatgaaaaattctcagtcagtaattgccaaagctgctctagccttgaggagtgtgagaatcaaaactctcctacacttccattaacttagcatgtgttgaaaaaaaagtttcagagaagttctggctgaacactggcaacaacaaagccaacagtcaaaacagagatgtgataaggatcagaacagcagaggttcttttaaaggggcagaaaaactctgggaaataagagagaacaactactgtgatcaggctatgtatggaatacagtgttattttctttgaaattgtttaagtgttgtaaatatttatgtaaactgcattagaaattagctgtgtgaaataccagtgtggtttgtgtttgagttttattgagaattttaaattataacttaaaatattttataatttttaaagtatatatttatttaagcttatgtcagacctatttgacataacactataaaggttgacaataaatgtgcttatgttt

SEQ ID NO: 1601 - DNA, 43 bp, Homo sapiens
ttaacattcactgagtatccaaaatgaaataaacagaaggacc

SEQ ID NO: 1602 - DNA, 623 bp, Homo sapiens
caatagatgtgagttaaactttaggaaaaaggattccctttttttaaaaaaaatcaatacctcaaaagcaggctttgggacaagaaaaccccaaagtggcctgcttttcccatcccaggagctcattatccagtctgtgccaactgaagtaggagactgactgtgagtgctggctaaaagccctgggtggtgaggctcacagtactggtttccaggaggaagagcctttgtgcatttgactgaggccagtttctatgaagagcaagtagctgaggagaggtcgaatttactgctttttccaggacaattctggaagtaaagaaaatgtaattcaagctggttagcttaattttgtgccattctttaacataagagtaagctctattatgaaatacaactttaaaaaattttagctataaattatataaatgattttaaattgctgaggtttccttaggcagcttatttatttgtttacagttagactatctgagtaaatggttctttgtggacctaggcagttcctgactgttccacatgtagtacattgtaccaaagttcttaataagaatattccccacaatcctgttctctaaatgtcaaataaagattattttcactag

SEQ ID NO: 1603 - DNA, 345 bp, Homo sapiens
taaagtatctgtttccatgtgtaatctcagcttagaagaaatctgtgtgggttgggttaattttggatctttgcctaataatgcatgttgatgttattgtgggtctgtgtttgtttttatttttatatgttgttagctgcagattaaccccagcccctctgtcttctgttaagtacagttgatactgacattgttcactcatcaaaccacatcttgatgctaagtaacatttcccatgagccacaaaactgaatgctgaaaagctactagactggaaaacaaacactgcattatgtatgttaagtgactaatttaatttcaattaaaaagcgtaaagtgaaaatg

SEQ ID NO: 1604 - DNA, 506 bp, Homo sapiens
aaagcctccaagctgtacaggcaatggcagaaggagatgctcagggctcctggggggagcaggctgaagggagagccagccagccagggcccaggcagctttgactgctttccaagttttcattaatccagaaggatgaacatggtcaccatctaactattcaggaattgtagtctgagggcgtagacaatttcatataataaatatcctttatcttctgtcagcatttatgggatgtttaatgacatagttcaagttttcttgtgatttggggcaaaagctgtaaggcataatagtttcttcctgaaaaccattgctcttgcatgttacatggttaccacaagccacaataaaaagcataacttctaaaggaagcagaatagctcctctggccagcatcgaatataagtaagatgcatttactacagttggcttctaatgcttcagatagaatacagttgggtctcacataaccctttacattgtgaaataaaattttcttaccc

SEQ ID NO: 1605 - DNA, 1486 bp, Homo sapiens
tttgatgacagagatcttcattaaacaagatctgggacagtaataaaagattgctgcataatttaaatgaaacctatgtgtatataactttcaaaacttctttttcaagaaactaagaggcaagtatcacttcaaattggaacgttgagaatgtccaattatcttctccctttctaacaaaatgttcttttaataattatgtttaaggcaaagagaactagcctctatttttccatatttcaaggatctaatttgaaactagatacttgccagttcattatttgtgtatataaacactgattataatatttcatattaatattttaatggcataaggacttgcattattgcattagggagcgggtcatgctgggggtcaggaagcctgtgtagagtaccaaattatatgctgaaagagatgcataaccattctgtcaatatttgcagaaatatagttcctttcatattacagttgttttgcaagcaatttccacatttataggtgtaacaaaagctaaatgttgtaaatgttgttgccctcaggtataactaaaaacattccagtaaatatatttttgactgtgtaagagaatgtgtagtaatttttttggcattggattatggaaatggaaatttttaaacagtgtgaaaaaacatggtatggcatcataaaactggagataataaagttattgaagagtgtcattggagtatttgaaaatgaccaatatatagctgccagtcatggtccagtctgttttctgttaaactccaataaagagagaccagtcagtcctaatgtgagtaaatgaaatttacaggtaacttacttactccttaattttattttagttaatagcctctaacttccaactatctcatttaccaaaagtacaaaaagtagcaaaaccatctattaatactttgaattttatatctttgcatttcctgttcatccttgaggagatgtatgttgcacaatcaaattttgcatcagccaacagtaatgagtagtagaaagtcaggaacctatgtgtatatatatatatatatatatatatatatatatatatatatatacacacaaacacacacacacacacacacacacacgcacacatatgataatcagtcagtcggtaaccaaatgctagagagtgaccattaacctaagcctgtttttataatgaaaaaatgtgttaactttaaaatatgccaacctccttgtgtcttttaaacaagtcagagtgaaaatacattgtcccctaaggtgtggggagaggaagctttataataaaattagtgattctgcagaaacttgtgcactggatatcttgacaatatgaatataaaactccctaaattaaaaatagggttaatagaaattatcagtatttaaatagggaaaaatgattttatgtttattttatttaggttttatttctttggtcatcttaatgcaaaatgaataaagcatagaatctgg

SEQ ID NO: 1606 - DNA, 271 bp, Homo sapiens
attaggacatccattacattattaaagcaagctgatagattagcctcctaactagtatagaacttaaagacagagttccattctggaagcagcatgtcattgtggtaagagaatagagatcaaaaccaaaaaaaatgaaccaaaggcttgggtggtgagggtgcttatcctttctgttattttgtagatgaaaaaactttctggggacctcttgaattacatgctgtaacatatgaagtgatgtggtttctattaaaaaaataacacatcc

SEQ ID NO: 1607 - DNA, 56 bp, Homo sapiens
agacttgatttgatctcctcattcccttcagcacatgtagaggtgccagtgggtgg

SEQ ID NO: 1608 - DNA, 2784 bp, Homo sapiens
ggggctgatggcaatatctaaaaccaggcaccagcatgaacaccaagctgggggtggacagggcatggattcttcattgcaagtgaaggagcctcccagctcagccacgtgggatgtgacaagaagcagatcctggccctcccgcccccacccctcagggatatttaaaacttattttatataccagttaatcttatttatccttatattttctaaattgcctagccgtcacaccccaagattgccttgagcctactaggcacctttgtgagaaagaaaaaatagatgcctcttcttcaagatgcattgtttctattggtcaggcaattgtcataataaacttatgtcattgaaaacggtacctgactaccatttgctggaaatttgacatgtgtgtggcattatcaaaatgaagaggagcaaggagtgaaggagtggggttatgaatctgccaaaggtggtatgaaccaacccctggaagccaaagcggcctctccaaggttaaattgattgcagtttgcatattgcctaaatttaaactttctcatttggtgggggttcaaaagaagaatcagcttgtgaaaaatcaggacttgaagagagccgtctaagaaataccacgtgctttttttctttaccattttgctttcccagcctccaaacatagttaatagaaatttcccttcaaagaactgtctggggatgtgatgctttgaaaaatctaatcagtgacttaagagagattttcttgtatacagggagagtgagataacttattgtgaagggttagctttactgtacaggatagcagggaactggacatctcagggtaaaagtcagtacggattttaatagcctggggaggaaaacacattctttgccacagacaggcaaagcaacacatgctcatcctcctgcctatgctgagatacgcactcagctccatgtcttgtacacacagaaacattgctggtttcaagaaatgaggtgatcctattatcaaattcaatctgatgtcaaatagcactaagaagttattgtgccttatgaaaaataatgatctctgtctagaaataccatagaccatatatagtctcacattgataattgaaactagaagggtctataatcagcctatgccagggcttcaatggaatagtatccccttatgtttagttgaaatgtccccttaacttgatataatgtgttatgcttatggcgctgtggacaatctgatttttcatgtcaactttccagatgatttgtaacttctctgtgccaaaccttttataaacataaatttttgagatatgtattttaaaattgtagcacatgtttccctgacattttcaatagaggatacaacatcacagaatctttctggatgattctgtgttatcaaggaattgtactgtgctacaattatctctagaatctccagaaaggtggagggctgttcgcccttacactaaatggtctcagttggatttttttttcctgttttctatttcctcttaagtacaccttcaactatattcccatccctctattttaatctgttatgaaggaaggtaaataaaaatgctaaatagaagaaattgtaggtaaggtaagaggaatcaagttctgagtggctgccaaggcactcacagaatcataatcatggctaaatatttatggagggcctactgtggaccaggcactgggctaaatacttacatttacaagaatcattctgagacagatattcaatgatatctggcttcactactcagaagattgtgtgtgtgtttgtgtgtgtgtgtgtgtgtgtatttcactttttgttattgaccatgttctgcaaaattgcagttactcagtgagtgatatccgaaaaagtaaacgtttatgactataggtaatatttaagaaaatgcatggttcatttttaagtttggaatttttatctatatttctcacagatgtgcagtgcacatgcaggcctaagtatatgttgtgtgtgttgtttgtctttgatgtcatggtcccctctcttaggtgctcactcgctttgggtgcacctggcctgctcttcccatgttggcctctgcaaccacacagggatatttctgctatgcaccagcctcactccaccttccttccatcaaaaatatgtgtgtgtgtctcagtccctgtaagtcatgtccttcacagggagaattaacccttcgatatacatggcagagttttgtgggaaaagaattgaatgaaaagtcaggagatcagaattttaaatttgacttagccactaactagccatgtaaccttgggaaagtcatttcccatttctgggtcttgcttttctttctgttaaatgagaggaatgttaaatatctaacagtttagaatcttatgcttacagtgttatctgtgaatgcacatattaaatgtctatgttcttgttgctatgagtcaaggagtgtaaccttctcctttactatgttgaatgtatttttttctggacaagcttacatcttcctcagccatctttgtgagtccttcaagagcagttatcaattgttagttagatattttctatttagagaatgcttaagggattccaatcccgatccaaatcataatttgttcttaagtatactgggcaggtcccctattttaagtcataattttgtatttagtgctttcctggctctcagagagtattaatattgatattaataatatagttaatagtaatattgctatttacatggaaacaaataaaagatctcagaattcact

SEQ ID NO: 1609 - DNA, 629 bp, Homo sapiens
aaactggataccattttagaaaagggtattaatgatacaaatatgatgtgtggagtcaggttaaagaccaaactactttcctcgctcaaatactaaaggattatctgcaaggagtttacttagaagctactgaaacaggttactgctgcatttagtttataagcaatggatggacttctgtaaaacttcttaattttaagtagttgcattatatttgggatgttaaaaaagtcttcaggataatataaaatacactgaaacatatgtcctaccaaatgaaaccctgtttccagctaagagcaaattttaacatagtgcattataaaaagtgttgtataactgatatgttactctctaaagcatagaacctgtaattttcatttgtgaaattgttataattagtgcctccctaatattttcccgagtatagctattctccccttcccagtttggtaaatattgaaaaacagaattatattccacaatcttagtaactttcagtaagtaagtaacttttgctttcagtgaaatttaggagaaattaatattctcatattgcatagtactgtttgatgtcacctttcattttatttttaaaaatcaaataaagttgagttttatggttgtct

SEQ ID NO: 1610 - DNA, 1809 bp, Homo sapiens
acatacgttctgtaaaaggccacattttcttttagtatctgaaaggcaaacctattcatgccatttgaaatcgagaaaacagatgtgggtttctttaagtatttaagtacaacattacatcgcccttgttttgtttgacctgttcagcatgcttatgtccggactctggcctcgcctctgctcctccaagcacagccccatgtgagtttcacgtgctccttcaggaaagcacttgggtataaatcattcgtgaagaccatgtggaggctttaagaactactcagagaatctaataattttctgtgtaattgaggcattccatataaaaggacatatttggctatttccagagaaaaaatttgttctccctgcctaaaaaggaaatcttatggaatgacacttggagcaaggaaatattaagaccagcttggattaggagcctctgggtacaactatcactttttatgtccaaaattaaatttcacctgtgaggtggggtatacctctgagtaaaacccctctttatctttgacctccttctatctgtaaattaataaacacaaatctgtatagttttatacttagaagagttctcctattctgtaaggctggcaatacagatattgtaactggactgaagaccatttcccctcccattctgttttatatttcctaggttttaagtacgatagttggtttcatattggtggtttggaaagccttttttctaatttatttaatcaggcgcctcaaccttctcttacgttgtgactttatggaaaagttttatagaaaagaagatggtttttaaaaagcacttattgttcgttcttatggctttctcttctttgtcctgttctgaaagctagttttcccttatggggagaaggaaaaggaatgggtaattcagtaatactttgtcagttgacatttatttaaccatggttttgagataaccctgttttaaatgtctcccaaagtttttagttttttatccttttaatgtatgagcaattcagtttcaattttttaaagcaaaagaacactgcaataactttcagccacctttttggccgacccagtgggtgtttatggagcagtacaaagaagacctgtgtttgctccttttttttttttaccctccttctcccttctcccttttcccttcccttccccttctccttcctctcccttcctctcccttcccctcccttcccctcccttcccctcccttcctctcccttcctctcccctcccctcccttcctctcccctcccctcccttcctctcccctcccctccccctcctcttctctctcctcctcctcttccctctccaactccttcttcttcctctcttatctctctctctctctccacccccgcaaccttcttgacagggtctgcctctcctgcccaggctggaatgcagtggagttatcatgatcatagctcactgtaacctgtaactcctgcactcaagtgatcctcccaccatgcttgggtaattgaaaaaataaacatttgcaggctgggtgctggctcacacctgtaatccaagaactttgggaggccaaggcaggcggatcacctgaggtcagcggtttgagacaagcctggccaacatggtgaaaccctgtctctactaaaaatacaaaaatttagctgtatgtggtggcacgtgcctgtaatcccagtgacttgggaggctgaggcaggagaatcacctgagcccgggaggtggaggttgcagtgagccgagatcgcaccactgcattccagcctgggtgacagagtgagactccatctc

SEQ ID NO: 1611 - DNA, 568 bp, Homo sapiens
agccttatgtggactataagttatagattatatactcttattgataacttgcctaattgctatgctgaaagagactgcaggagaaataggcatctatctctgcatctgttttccccaccatgcctttggagttgccaagatggaagccaagaaggatctagaagaacaaagaatatggtagtagatgagccacagccaggtgcccatgtactaatcatgataacctgacatgccattctcaaaatgctgagttgttaatttcttgtcatctttaaatatatatatataggctgggcttggtggctcacacctgtaattccagcactttgggaggctgaggtgggtggatcatttgaggccaggaattcaagaccagcctggccaacatggtgaaaccccttctctactgaaaatacaataattagctgggcgtggtggcacatgcctatgatcccagctactggggaggctgaggcaggagaatcgttttaacccagaagacaggctgcagtgagccaagactgcaccactgcactccagcctgggcaacaaagtgagactctgcctc

SEQ ID NO: 1612 - DNA, 85 bp, Homo sapiens
aatgttcttattctttgcacctcttcctatttttggtttgtgaacagaagtaaaaataaatacaaactacttccatctcacatta

SEQ ID NO: 1613 - DNA, 1942 bp, Homo sapiens
aatatgaggagtcctacttttatcttctgctcctaatcagtttgtcgggcataggggtaggagaacgcataacttctaaactttttctcttaagagcggtcagagaaatccaggaaattcaccagaggcaatgtgcacaaacaccactactaaaaacaaaccctgcacatagttcacattaatgcatttttttaatttaaagaaaaagaaaattagcagtatctgcaagcaattcagattaaatttgtttttgttctgtgaatgaactttattttaataactttggacgccttggatccagggctttaaaaaaaaaagatattatatatacactctgtttgattaattgtatgatcttaatgaagtaggttttcttgtattttggtattacatacccagtgtataatttgtataattcctcacccccaatccttatcaattctcaccaccccataaacttaaaacagaccaaaaatgtcagctttcagagaattctgtggtgcttgagaaacagacagtactagactgagttattagaaaatgtgcagcaaaccaacttttcccagagctgttatttggaattctttatccctttctagatcactagcttcattggatacgtatatttttcttgacattgaagctttttgtttgtttgggagggttttatttcttgtttttattttcaacttttcaaatagaattaccaattttgaagtcctcattttcatattaaggatcatttgcattctcttaatataatcagaaagctgattcagtgtttaattagatttaaatgttgatcaagaattaactgtaacttactagcactgaaaatacatgtttggtgtttcgcctgcgttcagctcatggttggaaatttgaagcagtgcttttcaaattaaacttttgctgacatcataggatgctaaaaaacaaggacaatcaactatgttttaaaactgcaacatttgatttgaacttaaaatgaatagagccacattattttaatggatgttttgttttacttgtgaactgattgagtcttaaggatagtttatgaattgatcacttgttgctcagaatcattagtataagtaggtaggaaatagtttgaagtcatttttcatagacttaactgtccaatgttgcaaatgtttcttcatgaaaatattgaaaagagtaaggttttttttttttttaattctgctgcacatattctgatgccatgtgtctgtgcttaattaactaagaccctataaaacgtgtttagtggggactgtttgatatagttgccctctccattcctctatttgcctgatttttttcagtttccctttctgtattttactactaaattagaaagcactggttatgtaataagttactacattgctttggttgagtaaaaacaagagtttatatttttcttgtttcttattttcttaacccttaactcctgctgaggtcataacaacctcagtctaagctctgtgtccatcatactgttaacttaaacaaatgggtggtgggggtgggaagggtaatacagtcctgccattgcctaccagtaggagagtccaaacagaacactcttttgagtagcaattatttaatttgcccagtcaaggcaccgtgtttatatactatttcacattgaatttgattatgccctacagacctggctggtcaaggatttgatatacacatattggcttgggattcgagctttcttttttatttaaataaaaatttatatatatattatatatatacatatatacatagctatatctgtatatatattgggtatgttttaaggattttttcgcatgagcgcagctgttgcgataaattgaccgattgggaggtggtagaagcactgaatgaaggtgaggctttttttttttccagttttcttatacatttgtcttcttttttt

SEQ ID NO: 1614 - DNA, 677 bp, Homo sapiens
atgagctccagaacctattgagcttgcagggaagccaagcttgcagttccagcaagcaaagattttttttaatagaccaaaccctaatctctacaggggcccagtacagttgtttggcctacctgatgctatctctaaactacttttaaaatgaagacatttgggtgtttcatgtcagtgaattatcttttctcttggacttaacaaacatactgttcccatacatagtacaaagagtagcataataaatattttctgtgaatgttttttataccctccttttaagtttaatcttttagtaacatataggggtttttgtattaagagcattatttcataaaatgctatcttatacataatccaactaattgacatgtagctcatgtatggcagtttgtaatcctggactagctttgctgacctgcagagctccccttaactattattgttagataaacagattggatagcaaggctgctgttctggattatctaatgctccacttcttcttgtgatggctgaacaaaagaaccactaagtgttttcttgtccatccttaagggactttaaaacaaattatgcctctttaagtccttgaaagtctccatctaaagaggaaaagtttgttggaacagtatatattccctatttttatgtttatttaatccataacagaa

SEQ ID NO: 1615 - DNA, 558 bp, Homo sapiens
gcagtgggcggctgcaagccaaccaatattttctgtcatttgtttgtattttataatatgaaacaaggggggagggtaatagcaatgtgttttgcaacatattaagagtatgtgaaggaagcagggatgtcgcaggaatccgctggctaacatctgctcttggtttctgctgccctggagcctgaccctcagtctccattctccctcctacccaggcctcctcaaccttcacctcctttcccaccaaggaggagaagtaggaagttttcttaaagggccaattcaaagccaagtcgtggggtgcagattgttatggtgacaggcacacacatttttctacccttcttctgagatgtcctctgccttccaggtatttgtgattttgtcacagcctgacatggccaggttctcacactggcccagagaaaagagcctcagcaagagagttttgccaacaattccccttaaaaggaaacagatcaactacaccgcatcccaacaacccaggttcttttccttccttccttccttcctcccttccttctttcctgccttccc

SEQ ID NO: 1616 - DNA, 321 bp, Homo sapiens
agggttaactcaagtcaaattgtacttgatcctgctgaaatacatctgcagctgacaatgagagaagaaacagaaaatgtcatgtgatgtctctccccaaagtcatcatgggttttggatttgttttgaatatttttttctttttttcttttccctcctttatgacctttgggacattgggaatacccagccaactctccaccatcaatgtaactccatggacattgctgctcttggtggtgttatctaatttttgtgatagggaaacaaattcttttgaataaaaataaataacaaaacaataaaagtttattgagccac

SEQ ID NO: 1617 - DNA, 3216 bp, Homo sapiens
caccataaggccagggagctgctgccagaatgaagtaggaaagaggagggatccatctgggttggtctgtggatttttaatattttttaatggaacatgaaaacctccacagcaacatcgaaaccagggagaaagtgatccttgctccctgcagaacttcttcagtatgatgttctccatctgcatgattgggaaatctgccagccagtggcttcatgcagtgccatatttctttagaggattactttggggtttgctttgccattaatttgttccattcatttttttttccctgagaagtttaccaaaatgctcaagagctctgccgtgctccccatgaaaagtctattaagtaggcaccctgtgctcactcagttcctaaatccattgcaactgggagcagaggtgaggccagaaagttgttaggcctgccgcaggccccaccctcaagcattcctcaggaagcgtctcactctgggagccttggccctgctcacagagagagacaatagaaaattgaggaaggtggcccttgtctgtgtctcctggttttcttcctaggccttgctatcactatttccatacccgaaaggtgaaaccagctttcattataggccccagtgggccacttgggttttgagatccttccttattttaagccaggactgggattaaatctccctctgtcagatctctgtcccttcctctgaacaacatgatctttgagagggaacaagatgccatctgtcaactgcaccttcagaaaagtctacctgggagactagttagcagtccacattcaagaggagacttggagtttattgttttttaaaaaaaccatgcttcctttggatagacttctccagcctaccaatatatatccatgtgcctggattatctttaacccccacacctcttaccttggacaggtaaggcttggccgatgtctgattgggaccaggaggggtcaacactttcatatcagtgttacagtgaactaaagctattattgatcacaaaaaacttctgttcatccccaccttgctaaatttgcttgtgttgctagttttgcaaatcgtttctctgatgaccataagcaggaggattccaccatggtcactgcccatccagtcacagggattctgtgtagggaagcaccactgattgcagttaacatctagagtgttgtttccatcccactgcccaagcattggcatggtcatgaatggtggcccagccaacaggaagcccagcctttcagaaagagcctggcaaggccctgttgactagcaatggccttagctgtcccacacaactcagtggcctgaacacacaccttcagccaccatgcctttgaccagggctcctcatctggaaacatatgagaaaggtcagcaaacagatgcaagacctataaggctagtcattgagctatattggttttttttctaaatagtagtagtgacagataacatttattgagtgcttgctgtatgccaggcgctgatgtaagcactttaggtatcattgaattctcacagcaactcctgaggaaagtgctattcttgtctccattttagtgttgaggaaaacgaggcaaagagaggttatacaacttgcctcaaatcccttgtgcactgtaactcacactgagtttcagtgtgatttcaggctgttggtctccagggcacaggatcttagctactctgggatacccagttctgttttcagtatcatctggcacacaactgtccaagctctcagccccacagggaacctgcccagagagctttacctttcccaagcatctgtggcatggacatgtcctctgtgcagtggaaggaggaggggcgaaagtacgcccttagcctttggagctagagcacccttgggacccctagttccactgcacatggccctcctccccaccctcatgactgggaaggaagcctgtgatgaggctgagataaagcacagggtggtttcactctcctctctccttctttccaaacactgaaggatttatttcaaactctctaatgcacctgcctcagagattcccctactttcaaagcaaagatcagcagaaaaattggctgtcccacctgtggcaaatgctggagcctcagttaaagtgcctcaaggggcaaatatttcaccattgccagagaagatgtgacaggccaatcagacagggcccagagcatctctttgctgctactgttttgccatccttctattcatatctgtgcagaacacggtgttttaagcttgagtgaaaggagggtgaggctgccgatgccttcctgcccagaagtggatgatgtgggagttgacaggccagggagagggtgaagcaggtatcagagtcactcctctgtaccctctccttctgtttttattttaggcacactatcttcctctctcctatctttccctcagtctcccaagttcctctaccttctttatctttgtcttttacttcttctttctgtgaccctccttttttggcctcctctttccccaagactttcttcctcctgtttctcgttgagttctccccactgaatgtgtgtatgtatgtacacacacacacacgtgtgcacacacaatgcacacaactcctatgactggctcctacttacattcaagttaaaaaggctgatatgaacagggcaggggaaaatcttaggatggttgtacaattgactggaggattttttccccttggaagacactattgatctcaacctgctgacttttcctaatgcttacctgaaggaacccatcctggctagaaagggtgatggtactggaccggtattcaaccttgagttttcaagctgccaaacaggtcttaagggaggtgcttatatcccaccaacactctcccagctcccatgtccccaagacctctggagtttcctcttgaatgtacatgaaccactgtaatagcattagacttttaattgagtgtgcaatcgttttccatggagtttggtccgttcattattttttagttaactacacttcttgatattcaaatgttctattaaaaaaactgagtatgaagaaaaacactttactactgcagaaggaagaaagaatataatatgaccatcttcaggtataacagtgttgtttaaaagagaattattgtatgattataaaagatgaaataattaactgaataataaaacaaagctattagtaagc

SEQ ID NO: 1618 - DNA, 22 bp, Homo sapiens
tcaataaactaagtcaaccctt

SEQ ID NO: 1619 - DNA, 751 bp, Homo sapiens
gaataaacacacgtcccaggctcatctcccaggactgaaactttcttgctctctttttctcaatctcccagcccctctctaccatattgggaccctcaagaggtttgtgctagcccgatgcctccaccgggcacttagaaggcaagaggacaggatctctcaagacacagcacaattcagtctcttaagattagcttcacaatgatggaaattatttcatcaggtggaaagtctgggtctaatagcagactgcacatgagcagagtgacatggtggtggcacttatggtggtggcttgagagccttggggaaattagggccctaacagctagaatcaaagatgataccgcagggccctgtagcaagaaatgggaagcagggggaggggcaggggctcagaacaatattctagaccaactttgactacttcctgtcttagtaatagaccaatacatggctctatttagcaaagtttttatactgaaacttgattattgctgccctttataatttcctcttcaatgatatttcagcagtttccctcttggtcctagttttgtgcacatttttttgaatgtggttcagattaattatatttctctcactttcttagctggtcctattttttcacattctggcatgtggctatcaagttagattgctgtaggcatcatattgtcatggtaactactgaacctaatgatgcagatggatggcacatcagtataataaatgatggaaaacggttcct

SEQ ID NO: 1620 - DNA, 1593 bp, Homo sapiens
agagagacactcgccaatttaaatgacacagaactttgtacttttcagctcttaaaaatgtaaatgttacatgtatattacttggcacaatttatttctacacagaaagtttttaaaatgaattttaccgtaactataaaagggaacctataaatgtagtttcatctgtcgtcaattactgcagaaaattatgtgtatccacaacctagttattttaaaaattatgttgactaaatacaaagtttgttttctaaaatgtaaatatttgccacaatgtaaagcaaatcttagctatattttaaatcataaataacatgttcaagatacttaacaatttatttaaaatctaagattgctctaacgtctagtgaaaaaaatatttttaaaatttcagccaaataatgcattttatttataaaaatacagacagaaaattagggagaaacctctagttttgccaatagaaaatgcttcttccattgaataaaagttatttcaaattgaatttgtgcctttcacacgtaatgattaaatctgaattcttaataatatatcctatgctgattttcccaaaacatgacccatagtattaaatacatatcatttttaaaaataaaaaaaaacccaaaaataatgcatgcataatttaaatggtcaatttataaagacaaatctatgaatgaatttttcagtgttatcttcatatgatatgctgaacaccaaaatctccagaaatgcattttatgtagttctaaaatcagcaaaatattggtattacaaaaatgcagaatatttagtgtgctacagatctgaattatagttctaatttattattactttttttctaatttactgatcttactactacaaagaaaaaaaaacccaaccaatctgcaattcaaatcagaaagtttggacagctttacaagtattagtgcatgctcagaacaggtgggactaaaacaaactcaaggaactgttggctgttttcccgatactgagaattcaacagctccagagcagaagccacaggggcatagcttagtccaaactgctaatttcattttacagtgtatgtaacgcttagtctcacagtgtctttaactcatctttgcaatcaacaactttactagtgactttctggaacaatttcctttcaggaatacatattcactgcttagaggtgaccttgccttaatatatttgtgaagttaaaattttaaagatagctcatgaaacttttgcttaagcaaaaagaaaacctcgaattgaaatgtgtgaggcaaactatgcatgggaatagcttaatgtgaagataatcatttggacaactcaaatccatcaacatgaccaatgtttttcatctgccacatctcaaaataaaacttctggtgaaacaaattaaacaaaatatccaaacctcatagtggtattattctttgttttacctgtggtcatcttaaactggtttttcagtccctctccacttccttcagaaccaaagaatctgttataagattcctggaaggaactgggcatctaactgttacaccaaatcttaagtgaataaaactttaccaaggcttctcagtt

SEQ ID NO: 1621 - DNA, 8391 bp, Homo sapiens
ccactgttagcctggtgggaaaatgcacacatttctgaggggagagggaaaaggacttgttttcctgtgttcttgttttcagaaaatgaaagactcatacttgagtgtgtttatgtgaagtacctcagatccctgagttctcacgtttacagtttcatctcaaaaataagaagcaaaccacataagtataggagaggtaaattaagtgggggcaaggcagtagtggacagggttggaaactgcactggaaaatagggaacatgtgtatgtcataaggaaggcaatgcagcccatccctacctggaatgctgggaagtgctaggcagggctgctctcagcaagactgcagcagctgcacccagacctggggctctggtaggtactaatggtgattatgctccaatttacctaatgaatttggtgggacagcagaaaagaaagctgggaatgtaccaagagaaatttttgttcagggctgttggaagtagctgttagccttgcttccacaaggccattgctgctgtaataagaactgcaaatcagagtgctacaacataaaactgggaaatatggccctatctgaatgcctctgtcctattttccgctggtgtatcagttagtgcaggaagtaaagaatgctggaaagttgaatcagaaattgaaaaccttctaaaatcttacacagattagcagaagtcacttctcccagtctggtatattatttcataatggaccaggatcggcttcctgcctgttggtggctatctgtaaaccataagtacaggggtctccctagtggttcttctctgtcttttgctgggcaggctgtcttcctttattcctggtagcattcagagcattaaccagtgttgattttgaaaatagtagtccctacaggttctcacaaaggaatgaatcctgttctgatacagttcccctgcatactgacatactggccaaggacttgagcagctgtgtatttttctttatcaactaaaataccagggagatggtcttttcttgaaacccagtggcctgtatgtgactgagaggaaaagctggcttggtcctaatggctgtttctctgtacctttcccttcccttaccaccttaagcccaatccaggtagagaatagggagaggcattctcctctctatggatttgaagtgaatcacccccacattattctcacatgcttttcttctctcacatattcctccctactcccccacccaatcattgtgcttatttgtacagatcttattgggaatattctttatttattttgtcatttcacttctattttaagaatgcataattgaaggagtagtcattttcagggagcaccaggtagaccctgggaacctaatgacttaatccttaaatatgttttgcccttgaaaaataggccttttccttccttccttagttataattgtggaagctaattaggatggcatggaagtgaatctaatgagttaggtattattaatgttcttggtatcgggtctaattccagttactgcttcattctctttttaaagctttatgaatacttcccccatcctccccaaggagagctcaatacacacatatttttattttattctctcaaaggaatattagcttaggaagataggaattcaacattgagcactgagttttcttctggctctgtcattgatacactgtcaaaccacagcctcatctcttaatctatttaattaaggtaacagtacatgttctcaagggtgttgcaagtaagtgtgcagctatcccttggagagcctctctggaaagctcttttagtgcagtgttgttatgctgaattgttttccattatcttatttgctgagtagaaaatattaatgaaattaagaattgttgagattatatgaattgggctagaatactaaggggaaaactatgttttgaatagagtttggcatttttgaccaagaacaaaattgagttttcattggaaagaaaggaaaccttgattcttaccattgctgctccaaaggaggcccaggttaagaggattagaggagacacgcggtgctgggcattcctggcaggtgttgggtgatccccgcagtatgtcacctgcagttgcagcacaggcagctagtgattgggttcatctcctcctagtggttggaagagaactcagatgtaaaaaccagcggtccttctcccaccttctttcctgccattcttgctcatcatacatgtccgtaaacttgaagaactcgttttagcagctagccttttaaggtcgaggatgggaaagctaaaactgtagaatattattatgctgctttttaggtttatccctgttgttgtgggatgcaagttaagggattgtaattgtttttcagggtttttttgttttttgttttttaagcaagggctctattttcccttgagagttctggaactaagccttggagaaacactactgagtgtatttaggctccctggttttcttgcccaacaacaatctgaagggtagggggtgggggctgtgtcttactcaggggcagcacctagctgtcttgcctacagtgggtgcacgatatataaatggaattgatttttgtcaacactgtcaagagtggcattgactattggagcataccccgtccacatgatgcttgaactatgtaacttcaggggttgagggctcaaggttcaggttaaagaggcactgtcaacttactatacaagcataatttaggtttttcctttttctacttgaaaaggaccagcttaaacacaaacccttatgtaaattaaaaggtttgaatccaaagcagagagaactgcttctggaaaagtgtagtttaattttaactattctaaaagcaatgagcaaaggcccttgtccaaggcgttgacagttttctaaagtggttatgctgtatatctggatgcatgcctttgggctgccactgcttgattcctttcatgtacagataatattacttcagtttagatttcccactttaaaatgcagtgatttgtgttgaatacatcttgattgtgctttacctaaagtattttcttaaaaggctttgtgtaaaatttaaatgtatatattttcctgtagacttccatcatgattttcagagattagccttaaaaaatttggccctaagaaattcattcagtgtttttctagatgacctctgtacatagaggtcattatagtggagaccctttaccagcagcattttaagatttaaattagatagaaagtttcttaggattcaactgaaaattggctagtaaaatatgtcccaggtaataaagcatgctgactttgctaaggcactgcccatttttatttaactaaagtcatggagattttgagtttaaaggatgcagtatagatagtggtttagtgtttaggctctaatgccagtctaaaaggcaagtcatttaaccttgggagcctcagtttcctcactgtaaaacagggataataatagtaactacctcagggttgttgtaaggattaaatgagatgatatttgtaagatacttagctcaagtgcctggcacacaatgagcacactctataaatgttctactactactattattaacacctagtctagggatgcacagcagaatcccctagggttaaaaaacaaaacaaaacaaacaaaaaaaactgacggaatagccccactccagatcagaattcccagtgggctggggtctcggccagtgtattctccagtaatctcgccaggtgtttgaaacacccagtgctatctgaaaactatcagtaccccaaccctttggtttatagattaagaaactagcagaagatggttaaattacttgcctattgtctcagaacggttaattagtggcggagccaaggctagaattcaagtctcttgactttatggttgtggggtctttccaccatacctgctgccatgtgagacactgcaaaaaagtggctcagaccgacaatcagcctgtgtggtgctgcacactttctaaagcacatgctcctgacactttgaccttaaggggcttgaatgtggagtaatgggaacacaagccaagcaagcactcagtagaattcagtcatttaaaaaattcaatggggtcattcttttggacagacctcagcaacacagcaatgtgcactttgtagtaaagaaataccaacttgagtttttaaaaaacctagttagtcctacattcccttttctttaaaaaaactttattgttcacattattttaatgactatgagataatgtatatgacagcactttgagaaaatatcaactgtaatataactataaggttgtagtattgtctgtttaaaagataagacagttgattcaatgtggatggaccctgtggggtacctgaaaatgtagatacgtaagaatcacctctgtcatttatcacatttagaaatatgaaactgcttaacaggtatgagcaggtatagcaagtgtttgctaaagttgtagttcagagctgaattacttcaggaaactagggaccaactttttggtttaattccgatctttaaaaagtaagaatgtgtactcactccagaacacagaagctcttccaaggaccttgactcaagaaggatgaggtcctcttactcttctccatttatccactatatgcttggccatttatcctaaatgtggtgggaacagacttgttatctgttgatgttgacagtgtcttttttaacctatgtcctgcatagttttgttaggtttacagggggaggtggatggccataaaaccagtgcactttgggaattacttttctaggatttcctaccagttataaatgacattgacatttgtcatcttttttttctttttctaaaaagaatagctgaatttaattcacctattataaaatactcaaaagtaaattgccttggtggccacttctgaattatagctacatttcattatgaccccttctgctcccttccattttgctactgatgtcattcttgttatcaggctgtgcccctaccaggagttcatattgggttgacagggttatctatatttttgttcttgatttttgagtttcatcatcttgcattaaattgttccacctggatttggggttcatctctgtgccctaaggatctgctatgaccaatcctctttttgtaggtgggtctctggcttaagtattgataggcttcagcggtttgtgtctctgtcttagcttgtatcaagccagtagtagctcacttcctttgtaaattcctgcttcagtctgggatccgtaggagtatgtgagaacttctgaaacgtctccaactcttaacagtcaagatatctatatcatttggatagagttctggttttccaactactagacttaaagaaattctggccgggtgcggtggctcacgcctgtaatcccagcactttggggggctgaggcgggtggatcacgaggtcaggagattgagaccatcctggctaacacggtgaaaccccacctctactaaaaatacaaaaacttagctgggcgtggtggcgggcgcctgtagtcccagctactggggaggctgaggcaggagaatggcgtgaacccaggaggcggagcttgcagtgagcccagatcgcgccactgcactccagcctgggtgacagtgagactccgtctcaaaaaaaaaaaaaaaaaaaaaaaaaaaaaaaaaaagaaattctaatgcaaagcttgctttttttttcttttttccagcaagccagtagtaatagttattgttacttgctctgttcagcacaactgtagttcacttgaacttcactgtcattccctacgctcctctcttactgagaagcatgggtgggattcagggctgtgggacaagctacagcctactctggagcactcacccccatgactcagtccagcctgtctcttgggaagtttattgcaatgtgcagacggatgaatttctgcttttcatgccacctctctgaggtatgtattctatcttgagtatgtacaagatgataccttttggctgggcacagtggctcgtgcctgtaatcccagcactttgggagaccaagatgggcggatcacttgaggtcaggagtttgagaccagcctggccaacatggtgaaaccccgtctctactaaaaatataaaaattagccgggcgtagtacatgcctgtaatcccagctactcccgaggctgaggcagaattgcttgaacccaggaggcggaggttgcagtgagctgagatcgcgccgctgcactccagcctaagtgacagagtgagacacgttaagaagaaaaaaaaaaaaaaggataccttcatttctgactcaatatcctagatccaaaggacaggaaattagggaaggcttcaccctgtgggatcaagataagaagatcccatacttcttcccaggtaaggaggcctgtggcaggtcatgattcaaagctgacttggaatggcagaaactgctgagaggccacccttggagatttgtgccttcaaagatgggtttcatgagtctcagagaggaaaagacttgtcagctgggttgattttgcatgattattgaactagagctggtagacacgagcttctcagatggcagtggccagatcctccatctgtgagaatccgccacttgaagtggtttcctgagagtgttcacttggcagttgctgcgtttctcaagcccacctggcgaggtctcgccggacccttccctccaagtgcacttacttcttcatccccatgtacatctctaactttgaaattgtttacctctcctacaaaaatcttaccttttgacctgagcagagtagcaaagccctgttcactctgagggagcagctggcgtgttgaaggggaaaggccaggcacagcactgtcctcagaccacaccatatttggagcagaattgtgatacatgtcatctgtgtctattctggaaggttctttgttcatcactgtactcgcatcagcaaattttcagggtcctacctgtcactccaggctactgagctgaaccctcagaagctgaggtctccgagcatgctaagtaaccttttagaaaagctggaggcaaactgtcgaatgctagcaggctttatgaaaggaaacataaggagtttgtgtagtcagaacttgcttaaatttgcttcggaattaggcaccataaactttagttggagaatgggacttaaattttcacatatatgtatacttaattttcagcaattatgacacaataaaaagaatatgcaaatttattgttgtttcagaaggttttgcaggactgggaacgctttagtgtcatcaacagtaaacctcagatactgttctgcacagttcagaagtaccataccaggtattgtgagtggcaagaacgccaggggacagagatgcttctggtagatgagggccagagaaaccagctctcctccattttgacagcaatttctcactgtggccatttggcctccattatgttttgagaggaatttcttgagatcttgagaaatcaccatgattaggccaattgtcaatcagtattcagaaactagaaaggaacaatgagatacttgtttatggttctttagggcatatgtttgaaaaccctctcatctcagatctgtatagctggtgtgtgtttgtgtccataaatacacgtgcattgctgtcgtgcccattaagaaagggggagtaagtaaaagaggaatcgctcagatctttccttggatgaacagcagtggcgtggttggtgtgttgactgtgaacaggctgacttagctgttgatgtatactcagaacctccatctcctcccagaccctgcacttttccttctctgcagtctgattctctaatgactgtcactggacaaaccccagttttatgctcgcttagtaaaaataagtttaaacatttcatggtggttgacagaactttgtccccaaacatgcggattcaattctttaaaactcgttgaacgtttataccaaaggtcccgccccgcaggtgtgtatgtggtgcacagagggtgaggtttggagcatcgggcactgtgtgcattgctaaggggacatagtgagacaatgtgggatttaactaaaaacacatcaattgtgtgtcacattaccagtgttgtcaggtatttgttcttaattgttattgtaatatattttcagttgtttttctaatttaattctctccgtctgttgtctgactgtgaactgctaacagtgttaaacttgatgtaaataaatgaggcccttgaaagggactgctttctctgtcttctcacaaggtttgccaagttgtgttctgttttaaataaaggttgcaatattttattggcaaagta

SEQ ID NO: 1622 - DNA, 632 bp, Homo sapiens
gaaggatggggcataatgtgactgtaaaggggcctgccatagaaaagtcacatgcctgagggagacactctgtcctcattccctgcccttcctttggttgccatatggaatggccatggaatgcacgaagtcacaatgcaccatccatgagaagacggtgaaatgatgtaatgacagagaaggcagacaacatgtttccgtgactcatctagtcagagcaattatgggaaacagctttggtcaacattctactttggaaagaattttgagtctagatgtggttaaattttgacttctgggaacttggttcagatgtccctttcactgtatgtcctctgacccctttggcaaggttgccacagctcccacagcccttcctacaagcacctatcattgggcttgtcacactctattgctcttctgtcccaaagatgcagtcttctctccaatgatactaccaagtcttagttttcctcaaccacactcaatctttttgctccaccctgaattcctcacacctaaccctgatagttacctaaagtgacacttaaatgtttcagagtgaatgcaaaaaagagagatgtacttggagtcggatatacaatttatccctaattaaagcatttaaaagg

SEQ ID NO: 1623 - DNA, 1253 bp, Homo sapiens
agctaagcacagagttggttacagaaggtatatgtttatgaaaaagtttgtttaaagaccttccatttatatggaaggaggttgataaaatagcttgaggaaatagcctgaaaaacaaagatgagcttattttagaaacaagtttttattttttattccttgtaaaatctttctaatctaagccttgacaaagctaaaaattaacctgactttttttctttggaccaaatcaggtttgaaatatcgatgatatatatgagaattttttttaaattctaaaatatagcaacattgcacaggaagatactcttacttcttagagtaactacagagtgattttttttttttcttgagtgagactctgaagaaccttttcgataatgtttggacttggactaaagcaattagaattatgaagcaatgataacctttagaaaatttttctatcacatgttgaatattttcaaaccttactttaataatctaaagttacgggattatatcttatattaattttgcagttttgagtagtatgataaaagaaataagaattcaaaccattaagtacctacctaaatactacatgtaaggcactgtgcttttatttcattcagctgaggtataagcagctgtactcaaatgttcttaaaaatgagaaccagtggggaaattgtttataatcattggaaatgaagaaattccaattggctatatctttacttcagcttttcttgaacaatttacagcattgattttcaaactgtgtctactggcacccttcccctttgtatcagagcagttctgcttttaactgttttatatgttggggttctctatgagatttcattggaacaaagagtttcactgatattcgagtttgaaaaccattgattaagtgaaaaaacatcttagaagataggaaatatgtttaaaaaatgaatgtattaaatcttatgagtaggaagatgaaatacaggtttattgtatagatacattatttatgaaggataaagatctatacatgaacagcagaatgtataagctagcatttactagcatgtctctgatgcttttgttcatttctgttaatcgtcatttctgtcccctctgcatggaattttatacttgtctagggtaagagtttgtagactctttcagcagaacagattttaataaccaatttatttgttttattttaaaaatttatttttgaataaccaatttaatagtaaattttatatgaacatttggca

SEQ ID NO: 1624 - DNA, 132 bp, Homo sapiens
tcaaaagactggaaaactgcagtctgtaatagcataaggcttccattatgaaagaaaactacaaaaataatacttcttttccacccgtctttggtatgtattggctaataaaatcagttctgtggaactggg

SEQ ID NO: 1625 - DNA, 3527 bp, Homo sapiens
cggcggggcctctgggtgcgagttcctcctgcatatgaaccgaggggaggaggagaagctgagcacgtgtgacattgccgtctactcacattcctatcctggaaacatactgctgcactgacttttctccgtgtgaccccacaattgacatggctcctccatcccagcgctggaagggccagtgggaagaggaaatagatgtctgcactcctggctgcagctggacaacagaagccccatgccgcctgtccagttcggaggagaactagctgctgccttgccttccgggacctcgtttgctgaggagggacttacagactccactggtgttttgctgttgctcattccatgcatctttggcagctcttttcttctgctcagacccttccccgtgctcagacagtgcaccgctgtcccatctaaagaaacctgtcaggaatacgagcttctgggtatgtttcgtttcccattgctgtagcatttcttatcccctgagagctgatgattattgaggacagaaggctcagaaacagtttgtgacagaaaatgcagtgtttcatttttcagggataaatgctaagataaaattgcttttccaggtcatttttttttgtggtaagaataactaatggaaaataatgaaacaccctggggtttgggggtgctaacaacttgtggctttaactgacaggagcaattaaaaagagcaagagggttctgcattggcatagcttagggaagggttaatgatgtcgccacaggtcagctcctgatccttgccgacttgatgttgctgtaccagggcttcctccccagaggtgcagcttgcgttttgagggtgattgctacatatgttgttgctaaacagctcagtaacacacttgaatgaatttggataccagattgtcctcattacagttcttttactcttagggcactctacactgggggttggggttgggagtggttagtacatttattacatttattaagaaacgtaatgacataaaaggttagctctgggccagacttctcttactctgtgggtaatggcaaggatgtgtaggtaaacttggttcttttttttccctaagatgacagcttgattttatcatctgcagtcaaataactgagccaatccaaatttaaatgatagatgctttaattgagtttaagtagctgaaactgctgagacactaaactttaaccttctgatgactttttaaaatgcctcaaatgtgcacatgtatataggatatttttataacttccctgatgaataatctgatattaaagtagtatttggacccagagccagaactcggtggtggaggctgctggtctctcctcaccaccttcttttgcacttggaaagaacagcaacatctggatagagttctagctttgacttctcatttccttgtctttttgggtgcattcctcagcacactttttttttaaacctttttgttttgttttgtttgtatttcatgtggttttatttgggggttttggttttttcacccttttttgtgatttgcaatgatgtgcttgcccagctaacttttgaattgcactttttaataaatattcttaacaatttttgaagaaggatattttatctcatttgagatcatggtaggttaagaaaatatgcctgttgatgaaagctaaaagcaaatttatgaaactaaaagggtgattgacatccatgtttacactccgctctaatgtttgatatataaataagttattttcaaattaggaaaaaacagtgagtattacaaagggcttcagatgtttagagtactaggttatttatgttttacaaagtttgaatcttctataaactaagaaaggggatgatccttagatttgcattaaaatatagaagtcttttaaagtaaatgtgaaccttgtctaagtactgtaatccacacaacacattataagaagcaaaccagcatcttaaggaattataaaattaccctatttaaaagccatgctattgttctgctattaccagatttattgtgccacacaaaaggatcatgtgtgtcagcaggggccgtttggaacaaacctagtcattaatgagtaagatactcctgttagttcagggaccaagttttatgacccagaggcttaatgatgtttggatatatttcaaatcggcgtgcttacctcactgatttaaattattttctaaatagtggccattgtagacctgactcaggctgaagctaaatagagaacaatttagaaagttaactaacaatacagtgcattctacccgtagggccaccatgcccttctgcccctggctgatttgatcctgtgtctgatcccattgcaccctgactgggcagtccctacagaaccagtgttaatttgaagggcctccactcaggctccaaatgtggcagccaaagagaacaatccagggaacctacatttatttttaaggacaaatatttcctcctcagtggtcctaatgttcagggctttagagggaacccaggtggtctcttcaccctgtgtcctagaatgggagagtaagtagacagtggtgataaccccacactgcttataagtgcatctttatagtatttggggctttcctacccctttagccttctgtacctagtaccatattccagttttaaagaactggcagaatgtgatggataacagaggaagagctcaatttatgtttattggaagaacattttacttaaatgatttgaggggtgggagggagtgaactactgagtttgccagagtgaaaatccatctgaaaaactcagctacctttagtttttagtcctcatttttggtcttgtctctgcggactgtgaagaatcacaatgctctatatgccctggactgtgtggcaaatgcaggttgcagcgtgtgtgttacatgaggatcttccacaatttcagaatgcacgccagagctgaagggggaaacttggtaacttgcccattattctctgcttttagccagagttaaacagactgatgggtctggtagccaacaacttggcaacttccactccttctcacctcgtgagattaagggctgtgaaaagaaatctagtctaactccaacagaaatctgtctctgttaagtgttttaccttctgtaagtagagatggtagagccaagatttttcttttggtaatttccctgtctataaagtgagaccaaagggatatctgttccctgttacctttttggagaattcataacatttgaagatcaaaaaattgaatgataaatatgaatggcttttcaattctgtggactttgtaccatttggcttcaccttgtactgcaagatgaatttgtaaacaaaacaaaattggactgtctggaaagctaaagttctgaaatatggaatgtactgcctctaatttttctttgtcttcctctcactggcatttttttctctcccaggtttcttaagaataatgttttttaaaggaggctttttgcccatcaagaataaaaagaaataaaac

SEQ ID NO: 1626 - DNA, 1732 bp, Homo sapiens
agatagcatcgtcgacctcactacttggaaccttcccaggtgggcccactcacatggtattgccagcctcactggtcagcctcgcctcccagcaggtcgcgggtcatcagtggtccatttgattatttatttgatcccttgaacagaaagtcaccaccgagagagcacccaggtgggtggtttcacatcagtggttctgagtgtccgaggtcataagcaattggaaaagggaaagacaaagtagtgggagctgatcaaacgttgagttccttgggttggggaacctgaatcaatcagaaactgcttctagaattacatgctgggcactgggccgggctccagggataaggtggggaaaaagactaacctgtcctaccctcaaagccatatgcaaatactgaaaagaaggcctgaggggctggtcctctttagagaaagatgctttttggtttttatataaataaaggaatccccagaagtggtccctatgatgaactcccccaaagcaacgccgtttttggaggaactcaaacccagtccaacatcccatcatttcacttgactgcagaaatggctttacccttaggatatatctttatgagtcttggctttgaagtggagaagggctttatcttagagaaggtggtttatgtcatattccagttattctagaagttcaggacagccttagcatctgaaaaagaagcccattcctctttatagtggaatttagtaagtagatctaacccgagtctcacccacagaattcatataaattcatatatgccttctctctggctgcctcttttcctgtttgcactctgagggcttaagtcatatgtgatatttacaaagcaattggcccatttacagagagacatatataatttctccacaaagccttgaccatggttcatgaaaccgtttgggttcatttaaatttgtctgaatcattagtcttgacttgaagtgaacaaaacaccctttgcccaagtgccattggcttgtctgcatttcaaaatcattaaaaccaggtatggaagcctacgtgctcacagttatctaatgaggttatttcaaagtttgcattactaacagccattctgcaaagtgtattgatgtgtatagtgatctgtataaagtcagtagttcttagctgaacctcaactgtgaggaatctatgactccacagatgtccttggtgcacataggcaaacggcacttctcatcttactgaagttaaataagatattccataagaaggtatagtgccctttttgggggagtacctttagtatattcctaaaattgccaccaaagaatgccaaatctgaatttctcttggtttccacctgatttggaactagggtgtgacctctaaatagcattctcatgacacatgggggcgccaaagagaagtaagagagatagctagatagctagatagctagatagtcttgtgtcttgtttgaccaaggtaaccgtaataaaagagtccatccccatcctttactgttgatgtgaccttgggcttcagtttctgcatctgcattggcaaaatagaagtgatagtagtaggtaaaagttagagtgatcctactatatgacggaaactttggctggatgcaagagctttaaattggtagaaaagtcacaagatgagcttgtgactatgaagagagcaaaagctaacttttttttcctagataatcaataaaatatttgaagactg

SEQ ID NO: 1627 - DNA, 1871 bp, Homo sapiens
gtggactagacctccagctgttgagcccctcctagttcttcatcccactccaactcttccccctctcccagttgtcccgattgtaactcaaagggtggaatatcaaggtcgtttttttcattccatgtgcccagttaatcttgctttctttgtttggctgggatagaggggtcaagttattaatttcttcacacctaccctcctttttttccctatcactgaagctttttagtgcattagtggggaggagggtggggagacataaccactgcttccatttaatggggtgcacctgtccaataggcgtagctatccggacagagcacgtttgcagaagggggtctcttcttccaggtagctgaaaggggaagacctgacgtactctggttaggttaggacttgccctcgtggtggaaacttttcttaaaaagttataaccaacttttctattaaaagtgggaattaggagagaaggtaggggttgggaatcagagagaatggctttggtctcttgcttgtgggactagcctggcttgggactaaatgccctgctctgaacacgaagcttagtataaactgatggatatccctaccttgaaagaagaaaaggttcttactgcttggtccttgatttatcacacaaagcagaatagtatttttatatttaaatgtaaagacaaaaaactatatgtatggttttgtggattatgtgtgttttgctaaaggaaaaaaccatccaggtcacggggcaccaaatttgagacaaatagtcggattagaaataaagcatctcattttgagtagagagcaagggaagtggttcttagatggtgatctgggattaggccctcaagacccttttgggtttctgccctgcccaccctctggagaaggtgggcactggattagttaacagacaacacgttactagcagtcacttgatctccgtggctttggtttaaaagacacacttgtccacataggtttagagataagagttggctggtcaacttgagcatgttactgacagagggggtattggggttattttctggtaggaatagcatgtcactaaagcaggccttttgatattaaattttttaaaaagcaaaattatagaagtttagattttaatcaaatttgtagggtttctaggtaatttttacagaattgcttgtttgcttcaactgtctcctacctctgctcttggaggagatggggacagggctggagtcaaaacacttgtaattttgtatcttgatgtctttgttaagactgctgaagaattattttttttcttttataataaggaataaaccccacctttattccttcatttcatctaccattttctggttcttgtgttggctgtggcaggccagctgtggttttcttttgccatgacaacttctaattgccatgtacagtatgttcaaagtcaaataactcctcattgtaaacaaactgtgtaactgcccaaagcagcacttataaatcagcctaacataagatctctctgatgtgtttgtgattctttcaaatccctatgtgccattatatttctttatttcctaaaacaggcaaaataagctcaagtttatgtactctgagtttttaaaacactggagtgatgttgctgaccagccgtttcctgtacctctctaagttgggtatttgggacttaagggattaagtttttcacctagacttagttacacacaatcttggcatttcctagcctagaggtttgtagcagggtacaagccccactcctcccccttcctttgctcccctgagtttggttttggcttaccataacattgttttgaccattcctagcctaatacaatagcctaacataatgtaagatt

SEQ ID NO: 1628 - DNA, 1547 bp, Homo sapiens
gacagggcctacagtggctggcacatcgtccacctcatcttcctcctgttggctcctcagccacgagcatggtaccctccttggtaaaggtaatggccttgaaggctagcagttggtcccgtctgctggttcattttcttttcttctcttttctttttttttttttttgagacagagtctcgctctgttgcccagcctggagtgcaatggcacaatctcagctcagtgcaacctccgcctcccgagttcaagcgattctcctgcctcagcctcccgagtagctgcaattacaggagcctgccaccatgcccgtgctggtgcattttctgtccctgagcctctaattactgagaagataaggggagagggattgagaaagagacgctgatgggatttgcgggagggagggaaaaggacgaggagaacacttcttcttagtgtgcaagaaaagccactgggggaagagaatgcaacaaaaggaagagctgtgaagggaggagaacagagtctagcagttatgctgtcattagcgtcatcaggcacaagggattgccttttacctgagggaataaagacttctcacaactcaaaactggacccattcaaatctcatcttgataaagaaaagtgggtactttacgtgctcaccaaagtggtgccaccatgtggaaatagcatgatagaatttataattaattcatacaggctgaaattatgctcgctttgcctccttctctctccgcagctttcaagaattggcttcatttcaaactttacatataaagtgagactttttaaatacttaataacatttcaaatttccataatttaaatttgtatagaattcaactgctatagcatttttatagcattcaaatgcttggtacttccctgacttctcattttattactcttattctagcccaaactttccttttcaccatgaccacccttgcacatgcaatttagcagataccattcttgggtctttgcaaatttcttttccttgcaaatcacagccagtcatcctacagtcacatatttaccatgttattcgattcccagaataaacctacatccacccccacaccgcaccaagtatccccaaggtggccttctccagaactcttactgattcccttgttttggaactcttgggcacttacattaaatctgctttgttagtttgctcatacaggtgacccactttcttttatactgctgctgaaatcattttctttcagaaggttcttcctcacccactaaagtacaggctcctaaagggaaaagactttgccttatccaagttaccaaatttcctatgtatactccagctatggatcatggttatgtttaataaagccttctttgcttccagagtcttccctaatcctgtttcttctaaatgtattgctggacaggttggaggttttgtgaatctctctgggtgacaacaacagtcctgaacactgagtcactgccttagtaatgcacccactctcttccttgttttggggtataataaaatccagtaacttgtttctgaa

SEQ ID NO: 1629 - DNA, 1755 bp, Homo sapiens
tggactgatttgctggagttcagggaactacttattagctgtagagtccttggcaaatcacaacattctgggccttttaactcaccaggttgcttgtgagggatgagttgcatagctgatatgtcagtccctggcatcgtgtattccatatgtctataacaaaagcaatatatacccagactacactagtccataagctttacccactaactgggaggacattctgctaagattccttttgtcaattgcaccaaaagaatgagtgccttgacccctaatgctgcatatgttacaattctctcacttaattttcccaatgatcttgcaaaacagggattatcatccccatttaagaactgaggaacctgagactcagagagtgtgagctactggcccaagattattcaatttatacctagcactttataaatttatgtggtgttattggtacctctcatttgggcaccttaaaacttaactatccttccagggctcttccagatgaggcccaaaacatatataggggttccaggaatctcattcattcattcagtatttattgagcatctagtataagtctgggcactggatgcatgaattccactccttccagaaccaactgcattggttttccatgaccttaaggcagtagttctcaactggggggcaattttgcactgaagagagcatttggcagagtctgaagaagtttttggtgtcacagctttgtggggagcatgctatggcatttagtgggtaaagaccagggatgctgccaaacctgccttgcacaggacagcccctgcaacaaagaattatccagacaaaaatatcaatggtgctgaggttgagaaaacctgacttaaggggctgggatgcttttgaactagcttaaggcccaggactgtggagtgtgtggaccaccccacagaggagggactcagatttatttactcttgctggatctgtagtgatggagttccttctggtgtcagccccacaggaggctcccaggcctccctcacttcccatacccagtctaggagctccttctggctcccaagcacccagagctttcctccgccttttagttttggttcctccactggaatgtaggctcctcacgggcgatggctgtcttttcttgactttgtatcttcactgccaagcaaaaagtctgccaagtgggaatgtttaataaatattcattgaataatgaatgaaccatcttcgtacatgaataataatactgtcttacgtttttctggtgctttataatgtatacattacatctgagtattttattttatttaattttcaaaacaatcctttaaggtcaacattgttatccctattttgctgatgaggaaactaaggttagaaacattttgatttcctctaggacgtatagctaggaagtgttactatcttgatttgaacaaattttctggtgctaagtctgatgttctttccatgaatcattgtggtggttgagatggagctttgtaatgggaataaaacagtaccttaggttctttctgaaaaggaggtatctagcaatggataaatagataccactgaatgaaattaaatgttgattaggaacaaatttaaggcttaaaaaatactttatgagcagcaagattgctttaacttttaaaatgaagctttggttctctgatttgtaatgagcacctggacatgtcaattaaaatgcccatttgtgaagcttactcaataaaactttaaattgtc

SEQ ID NO: 1630 - DNA, 1668 bp, Homo sapiens
gtctccacggcagtgaggaagccagccgggaagagaggttgagtcacccatccccgaggtggctgcccctgtgtgggaggcaggttctgcaaagcaagtgcaagaggacaaaaaaaaaaaaaaaaaaaaaaaaaatgcgctccagcagcctgtttgggaagcagcagtctctccttcagatactgtgggactcatgctggagaggagccgcccacttccaggacctgtgaataagggctaatgatgagggttggtggggctctctgtggggcaaaaaggtggtatgggggttagcactggctctcgttctcaccggagaaggaagtgttctagtgtggtttaggaaacatgtggataaagggaaccatgaaaatgagaggaggaaagacatccagatcagctgttttgcctgttgctcagttgactctgattgcatcctgttttcctaattcccagactgttctgggcacggaagggaccctggatgtggagtcttcccctttggccctcctcactggcctctgggctagcccagagtcccttagcttgtacctcgtaacactcctgtgtgtctgtccagccttgcagtcatgtcaaggccagcaagctgatgtgactcttgccccatgcgagatatttatacctcaaacactggcctgtgagccctttccaagtcagtggagagccctgaaaggaggctcacttgaatccagctcagtgctctgggtggccccctgcaggtggcccctgaccctgcgttgcagcagggtccacctgtgagcaggcccgccctggggcctcttcctggatgtgccctctctgagttctgtgctgtctcttggaggcagggcccaggagaacaaagtgtggaggcctcggggagtggcttttccagctctcatgccccgcagtgtggaacaaggcagaaaaggatcctaggaaataagtctcttggcggtccctgagagtcctgctgaaatccagccagtgttttttgtggtatgagaacaggcaaaaagagatgccccgagatagaaggggagccttgtgtttctttcctgcagacgtgagatgaacactggagtgggcagaggtggcccaggaccatggcacccttagagtgcagaagctggggggagaggctgcttcgaagggcaggactggggataatcagaacctgcctgtcacctcagggcatcactgaacaaacatttcctgatggcaactcctgcggcagagcccaggctggggaagtgaactacccagggcagcccctttgtggcccaggataatcaacactgttctctctgtaccatgagctcctccaggagattatttaagtgtattgtatcattggttttctgtgattgtcataacattgtttttgttattgttggtgctgttgttatttattattgtaatttcagtttgcctctactggagaatctcagcaggggtttcagcctgactgtctccctttctctaccagactctacctctgaatgtgctgggaacctcttggagcctgtcaggaactcctcactgtttaaatatttatttattgtgacaaatggagctggtttcctagatatgaatgatgtttgcaatccccattttcctgtttcagcatgttatattcttataaaataaaagcaaaagtcaaatatg

SEQ ID NO: 1631 - DNA, 78 bp, Homo sapiens
acctcagaagggaactcctggaaatcaccggctttcccctccacttgctgccaagatcatattctaatgtgaaatgtc

SEQ ID NO: 1632 - DNA, 117 bp, Homo sapiens
agcgtctgaattgatgttaaagttttatatttcacaaatttgtttaatacatgattctcataccccactgaaatggtagtttcaattcaaagcttaattaaaaaatatttaaatatc

SEQ ID NO: 1633 - DNA, 4397 bp, Homo sapiens
cagcccctcgtcctccggcaacacaatggcccctccatctttgtcagccccctgtttctctcctgcctctctgtttctccatctcctcgtcttgactgttttccctacttgctgacttaaccccccatagtgtgggggacctgcagagaaccatggcattccctattccacagtcatctttggacagactttcctctagtctccgggttgggggtgggtgagggaatggggtgggagtcgggggaagtgcagtccttggagatgtactggtgtccgtctcccagcatgctctagagaggcggctctggtgcccatcctcccagcacgctctggggaggcggctctggtgcccatcctcccagcatgctctagagaggcggctctggtgcccctcctcccagcatgctctggggaggcggctctggctcttgccttcccagcatgccctttactacaaagggctatttttcttttctttcttttgtttatttatttttctttgttcactccctgtagaacttggatgaaatcagtgtccatggttctttatgtttgtagtcttgatgtgctcctgtggtattacttcccctctgataggacattgtagccagcctcagcactcagtgagttcatcagggccacacccagtagagaaggccaagcaacctccacttcttcagcaccacacacacgcacacacacacacacgcacacatgcgtgtgcacccgcgcacgcacatacacacacacatatagcagtagcagcagcagcagcagcagcagcaacctttgatcaggagtgagattttcgggttctgaaacctgggacacgagtctgtgaatagtcggttttctcagaataatttgaatctgttttcttagtttcaaatgaccatttccctgatgctctgagcttatgatcacacagagccagtccatcctcatttcctggtggcatctgttcatttacctttgtggactgtagctgatggcacagtgcgggttccctaccagccaggggtttccaagggacctttggaggccatgcttagacacattcctgtacctgagaacaaccacataggcaggaccagatccacatcgtgcagtcgtgtcataaaaaaacaaaacaaaacaaaaaaacactaggagtccactcaaccctggaggtctttgctaattggaattatgtattgtctgttgggctgggaaatgtctctttcatattgtaagtccaggatgaactaggagaaagcaatttgttgccctgatgataactgatgattttcaccctctctagctgaggtaactcagacagtgcatgaggtcagtttcttcttgagaagcagtgccttggtcttgtttctgtggttggttctagcccctgcagagcctgggagctgcaggaactgtctgagaaaatctccctaataggggagtgggttcccagaagggagatctgggaggggtcaggagccactaagttgcttcactccttttttctctaattttctaccttcctctctgttcctgcagacagttttgccagctttgcttctggttactagggtctcatgcgtgtcctgcttggagagccataaggaaattgctgtcttgtgctttgtgtctctcatccagtctctggctcttgggattctggtctttgagaaatagtccctgagtattaggatacttttatcaaaatctagtaccagctacggccagaaagggccaggtgggacctgaaagcaaagacaatgttctttaccacacgtttcacatctgcaacatccttcaattgcgggaaaaggaacttgatttaacagaagaacatggtagagcagcatccagaaagtctgttattcctcttggattttttgaaataatcttcagaggaaggaaggaaaatcctattttggggtatcagtgtttgactagggatcatgaaataataaactgaaaaaaactttagagttcagttgatccaacactttcctttaaaagttgagggagcagaggcccatgggattaaatggctggtccaggtcagccagcaggtgtagggcctgacaagaacatattgtttccctgacccctaggccgtcacaccacaccctccatttcctcatgttgctgaccaggtgcccatatgatttctacacttcccaagccttaccctggcatctttcttttaaattatatctgtcccaggtgctctccacacataggatggtaatgccagtcccaggggagggtgtgatagtaaggaaggccactgttaggtttcctttagaaataaagagatctcagcagcttggaagaaatcccagaagcggactccatcaatccaagaaagagttgctttgtggaaggtgaaggaagacccacagagtgctcaggatgatgctattgctggagagcgaaagatggaacagccttgtccaggcagaacagtcataagccaggaaatgaaacaaaggaaaacaggtgcctgaatttcctggggaaacatggcttgtttaaggacttggagttatggatggaatttatgggacccacgtgagcagacctgaggaaggctcgatttcttttgtttcttggtccactctgtcactctgctctggtcaagccccatttggtctacagcccatgagaaggaatgaggctggttctgcactctcagcatgcagtccgaaagcatgtgggagtggggagggaaagtgagatgaattaagacaaagaacaggtgccatagaagtagatttctaggaatgaagtggggcagatcttatctttgtggattacaggcactgtactaaaaacaggtttcctatttaatataaaaagaaagtgaatcttcttttggatagaatcatccattcccatcgccgcaccccctaccccccaaacacacacacacacacacacacacacacacacacacacacacacacacacgccctactcttcatttgctaggggaaggtcacagcacaactaaatccaggacaggacattgtgaccatgacccagccacagtcaataccagaaagatgattcagagtctgaagtggtgccccaggtgccaacaggataacctctaccccccgactttgtctctggggtcctgttccttcctgcaaagcccaatccaagactggcatggctcagaggttgtgagaaaggcatggactggaacaatcatgtccagaggggtctggagctttgtttcctgttcaccagcaaaaaatgtctctcccatttttctgaaagtggctgatgtaagaacaggcagaaggaaaaccctttttgtcaataactctgtccttaaggaatggtcctctgggagggctgtgctgctagtgggtacctcagtcacacacccccaaccccaggcagcctctagagccttcttgctttcattttccttgaatgtacataggaacaagggggaaagtctcttactgaagtgcctgaaacccaaagctagagcttctagagacgccgttcttcctgtctcagcttggccagcctttcaacaatgttctctagtttcaagctccagcttctcagaaagaattaaagaacttgctgttcaaattaagtagaaagtgagactcaataataactgaactacagcaaaaggcagagaattacagggagaaaaaacttgtacttaccagcccaattctactctcctcaaactgacacacacacacacacacacacacacacacacacacacacactcttttaggggactaagagagagaagcatgttattacattttactcatccaaacagtaatgcaaaaataaaacggtagaatatgaaaagctcaggatctctcccaaggctacctactgcaggagggccaacaggtgagatgggaagaatggaaacagggaccgattttgtagctcatacaattaggacaccttaggaatagcattgtagtaatggtgatgaatatgctctgccaaattcatccagtctgcaccatcttatagctgcccagcacactcgactgttcatgtggtctctttgtagtgtgagtttggagtgtcctattagcctgttctggttaggaatgagttaacggctctttccctcaaccttagtctagtcccagggctgaggattcagctggatccacatggtcttgagggttggcatgaggagggggaagcttttttgaatcgctttttgatcacataatctgccattttaagagtaagatttgctttatggaaatcaattcattaataaaaaatgatattcaagttgcaataccatttcacagtgaaatattttgagtacaattttgttgctagaatagtcatgggcaagagttttatgcaaaatgtttcaattatgttaataaataagacaatgc

SEQ ID NO: 1634 - DNA, 555 bp, Homo sapiens
gatgtttcacaaactacaaagctgaagaaaatgaagccctattacttgtttgtaagatttagcacccttctgctgtatactgtactgagacattacagtttggaagtgttaactatttattccctgttaaaatttaacctactagacaatgatgtgagtacccaggatgatttcctggggcacagtgggtgaggagatggggacaggtgaatggaggagttaggggagaggaaaagtggatggaagtgtctggaaagggcacgagagagtcttccaggtactgatcctgtttcttgctctgagtgctagctagccagctgtgttcacactgtaaacattcatcaagctgtacatttggtgcacttttctgtgtcataccacaataaaaaaaaacctagcatcttacaaaaacaagacacccaagtccaggcccaaggagtaagtacaaatattcctgtttctgaaccattactgtaattggctcttaaggcttgaagtaaccttataggttactcataaggcatatacaaataaacttgtttgttttcttttttc

SEQ ID NO: 1635 - DNA, 1333 bp, Homo sapiens
tctggcaggaagtggattatctgcctcgggagtgggaattgctggtacaaagaccaaaacaaccaaatgccaccgctgccctgtgggtagcatctgtttctctcagctttgccttcttgctttttcatatctgtaaagaaaaaaattacatatcagttgtcctttaatgaaaattgggataatatagaagaaattgtgttaaaatagaagtgtttcatcctttcaaaaccatttcagtgatgtttataccaatctgtatatagtataatttacattcaagtttaattgtgcaacttttaacccctgttggctggttttttgttctgttttgttttgtattatttttaactaatactgagagatttggtcagaatttgaggccagtttcctagctcattgctagtcaggaaatgatatttataaaaaatatgagagactggcagctattaacattgcaaaactggaccatatttcccttatttaataagcaaaatatgtttttggaataagtggtgggtgaataccactgctaagttatagctttgtttttgcttgcctcctgattatctgtactgtgggtttaagtatgctactttctctcagcatccaataatcatggcccctcaatttatttgtggtcacccagggttcagagcaagaagtcttgctttatacaaatgtatccataaaatatcagagcttgttgggcatgaacatcaaacttttgttccactaatatggctctgtttggaaaaaactgcaaatcagaaagaatgatttgcagaaagaaagaaaaactatggtgtaatttaaactctgggcagcctctgaatgaaatgctactttctttagaaatataatagctgccttagacattatgaggtatacaactagtatttaagataccatttaatatgccccgtaaatgtcttcagtgttcttcagggtagttgggatctcaaaagatttggttcagatccaaacaaatacacattctgtgttttagctcagtgttttctaaaaaaagaaactgccacacagcaaaaaattgtttactttgttggacaaaccaaatcagttctcaaaaaatgaccggtgcttataaaaagttataaatatcgagtagctctaaaacaaaccacctgaccaagagggaagtgagcttgtgcttagtatttacattggatgccagttttgtaatcactgacttatgtgcaaactggtgcagaaattctataaactctttgctgtttttgatacctgctttttgtttcattttgttttgttttgtaaaaatgataaaacttcagaaaataaaatgtcagtgttgaat

SEQ ID NO: 1636 - DNA, 1395 bp, Homo sapiens
aatctacattcctacagcatgaaaccaattaccaagggacttattagataggcaataaaaatctggaaactttctctctcagggctgagccaagatggagataaactgatgcactaaaagcaaaccttgaattatttaccatatcaactattataaagttacactattttaaacataatccaaaatgtttccataagcaacttgatctctctcctttattttgaaagtggcagtatcaaaatggaaccattagcagcttgctaatattttgatgcagaaaaggaatctcattattctattttactcacatcatctttccactacaaaagcccatggacaaaatagctacctaaatttgtttcggtaaaaaatttactgtaaaattgaaaaacagcctgaagctactgacattaagtgctgtttgcaggagcaaaccagtgattttctattaattgttaatcatggacagaagattttaggcagctcatttttttctaaagtgattcaaaatagttttgtgtgggaaaaagctcttctgctgattacatatagctataaagattaaaacctagccacctgctcagtttgatcttccccagctcagacctctcccttctgagcagatgatagaggtaagatgatacatgagaacctccaatggctcctgtcatcacatactgtataaaatccaagttcctcttactggctttcaaggatcctcctttaacttcctgttgccttgtctcatcagcaagatcataagtacctacaggtcaagcactgtctctcccttctctttagcttttcccttaggatctagcacattacccagcaaaatgtgagtagcaaggctgaaatgacatctcaataacttcaccaatgattgtaactcagcatcccttctccatcccagctgaaagcctgcttcaccatcctgcaagagatgttttttctttttgttagcatccattcccctttctaatgcagctcccaatgcataatgtgtgttttacttccctctttctgactccatcctcgtcaccagtgaatatttgtaccttctcttaaaatcttcaaaacacacttctaggaagtgctccttgattaatcctctaagcacttaaatgaaagcactttgcttatgcttatttcacatttgctgccacttgcctctttgaaatatgtaaagatacattacaagaaaaatgtacattttctcgtaacttgctattaatttttttctttatatatatatataaagtaatcctaagctaataaaagagtttgccatgacattaaaacatttaatactccataagggaggaggagaaagaaaaacatattttaggaatagcaattagtattgtggttaaaataaacatgaataaaaatttt

SEQ ID NO: 1637 - DNA, 2928 bp, Homo sapiens
aggctccctgggagtgtggcccacatcagttcaacatcctctggtttttctaaagggctattcatctgtttgctccagttttctgttttgttttgttcttagtggtcacagtcatctaaccaaagtgatctagtgtgatagatcgaaattaacatatttttgaccatggaaggaaataaggaaattcaacccaaatttcccaagacggctgaaagacaggttttttggaaactgttaagataaactgtaatccagacacctaattcttcagttcactactcatgtgatactgattcccacattaaggttgaacaacatggctcagagtcttgttcaagagaaagtgatcaccgagctgtcacatcagcaaatatgtagtcaaggcagccaggccaactagaccacacttattggtctagtttgtccgttttatatgacattgaaaacttgtgtgtgcaacttttgggggacaggaatcacttaaaatcatatttatttggctttttatttaaaggattctgtcacaagtcttattgaaaagtagattttttaaaaaaaaaaaatcttagtccctgttatccagtaggggtgggtatttgggtccgactgagacttggcctgtgaccatcatggcagttggagttctcatatagaggtgaccagtttgccatgtggatataatttagtagatatttgacagtttgtgtaggtatttgagggaaaaaactcaatgtttggcttttttattatggccactcgagtcaggatgctctatttataaagataaatgtaatatataaagggtgaggactggctgtgcatcctgccctgtcccgggtttgcgcgctgctacagagcttcacgctctccgctccaccccttagcctgggaacccaccgcaggtgtgagttctgtgagtcactgctaagagacagagcacattttcaggccagcaactatccttgccagagttttttcattatattttgaattatttattttacaaaatgggcgaagatattgtctttaggataaggcagagaaacagatgttgcagacttccacggcacccgggggagtggtgggtgtggacacattggttcggcaatctgattctcctgaatttcccagccaggctcttgtggggaggcctgtggatggggggatttgaactatttggaaacaaatgattctctatctcaggtgagaaacctggtcagaaacaaagggctggtcacctgatttaggccagcaaccagggaagctcttagaatcccaggcggacaccctttctcaaaagatatcccctaagagtcctttctgctttcttcacagattgattttatgtaaaatgcagagttggactacacgatttcttcccactccacaatctgtcatcctagtatagatcatggtggtttccctcaagtttatgttctcatgccctcaatctgtaaatttttgtctccagaaaaaccctcccaggcatcccataccagcaccgttcctcatcactgtccatgcaccatgcagccatatggggggccgtgcacaccccaaaccctgagcttcacacttaaactcatggggagggcccttcagagcagagtccacaggcgggtggtgctacatacacaagcttagtgtacgagtgtaagatacactttaagccagacacctaattcttcagttcactgcccatgtgatactgattgccacattaaggttgaacagcatggctcagagtctagagaaagtgatcaccaagctgtctcatcaccaaataggtagtcaaggcagcctcatctccccaggtgaggggcgggtccccactttaggacaagaggcagcttgccttccaccagacgccagcctcggccttccttcccgactcactgtgggtacccttctacactgaccagcaagctaggccgctggaggaaagggaactcacccaactctaaattgtgccgcttagacttagctgtcagtgtgacttcctttcccacccacccccagaaaaacagaaagagcatctggggagcgagtgaaaattccttaggtgattcctaagatttccttgggtatctggtttttgttttcatatttgagtgtgtgcatgtgtgcatgactttaatgacttttttaatggggtgggaggtggctggggtgctggggttgaaggaagtttgggttgatttttgtggtgttttgtttaatagagaattttttttttcctgttcccctgtcagctggtctgacagatttaagaactctcattcttaaaagactttggacttaaattctagcattttagactaggactgttctactgtgaagaaagttctgtctcctttagcccggtttgtttctccctgctcaggtctagaatcccaagcagtgttcttttctggtgaacactgtgagccgcagatgtgactttttttttaaagtcatctcttcagcaatccagaggttccttgacctcattatttgtcctatctctcccttatagtcctaagccaagacatttgacctttgacatttgacctttgcagtgtcatgtgagggcgtcagtatagaggcctttgcatctgggcctggcacccgctctctgcctctggaggctaaaccctgtctggatttctcttgggatctaacgtgggatcttctggacagacaaccgtgacatcagcagtgctggtgctgctgtgtgtggactgaacacctgcactttgcagaggacacgctgcatgggccccgcttgcggttcattcaggcctgctgcaggagctctgagaacaagaaagagtggacacccgttcccctgcatcatctgtcttgcgtgctatttcagagtggggaagtgataaactatttgccttctggagctctttgtgaaaaattaaaaaaaaacttagctcaaag

SEQ ID NO: 1638 - DNA, 3559 bp, Homo sapiens
cttgctaaacaatctgttggtaggtatttaaaaagaaaaggtaaactgtgtgtggttaatagacatcctaatactaagcaggctttctaatgggaggctttaagtatggtgatgaacaaccacgttctgactggcgtagttatcgtaggaatctggagcatgctgtgttagaattgaccttgtttaaaactgtcccatcaaaaatggaaatccacagttcccccttcaaatgcagcactgcaccaccctgcaacacctcaggccagggaaagattactgagcattcctgcgaaccagatttctgttgtctctggatagacaagaaacaaaattcatttagtagtggagtggggaataggagtttggatagccttctaattaaaggaagctcgcctttcttggttttgggggttagaggctcttttgggaagatgcatccgagtattgtggcattctgattatgctgccttcacaaaacactctaagtgacctaagtggttatgaagcaaatgcatttatggtgaaaacagtctttgctcattgctttctcttgtttcatttagtgacaaatgatcaagatgacttgattttttttccttcttaacaatgtcttttttatttaaaccaaaggtgaagccagtgtactttctcagtgagttctctgcataaagactaatcagtgggaccaggtaaaaaggtcatataatacattgtggagattgcttacttaatacttctgaaaaatggagtaagggagaaactgtaatgttgcaatatgaacctcccattgggccttccatagggaaagctgtgactactctgaaatggaacctagcattatatccttgtagggtagattataaatcatttccagttcatttctcttagaggtgattacctctagccatcagccttactccatcccatgtttggtatgcaatttgagccacaaggctcgtatcgccaacagctatatacattttgttccatttttctgtcttacagagccatgatagaactgtggttagtgagttaaaattcctggagtaactactgtttttctcctttgaaacttaggtttctaaagttgcacctaaggaatctgtcacattttctgttgaatcatggtttttgtttttgtttttaacagatattccttctgatacggacttgaaaattagtgtatggtgacctgtgtttaaaaaaaaaagtacaatacaactacatatagctatatagcttaatgagacttccaccccccccctttttttttttggtttgttgttgttgtagtagtctggtgctggccacatttaagtcttaaaaatttttaaattttgttgttgatgtttgtagacagccctgttgttgaaatcatggctttattcattttatttattttttaaacttgcctgaatttgttctaaaggaatatttaagagacataattttcttctctttaccataacattacacaaaactttttcctaaaacacggttgtgaggtactgatgaggtgtaagtggagctgttaaaaacagcagtgctgtattgcagttatgtatattcgtgtacagtatgtttagatcccaggtaaacatattcttttctgagaggataaatacctgcattcagatattccaggtaaatataattgagtcagggagtagtaaatctgatggagaattcactttggggaggggaaaaagaatagtatgcaagacccttattggcttttaattatacctgaaaccaaaatggatatttttagtctctctgcatgtgagatttggtgtaacaagatagaactataatatatacagtatatggaaggatagatatagtgctttgttcattttaattgcaaagctgccaaaatagttgaagcttaattacttgacttgccttgatttataggactggggcttggagaaaatgagcagatgttcctctaagacatcgattacagaagccttatatacatggatttgattttgtatttgtagctgaaagtcactgttgtctaaaactaacttttctaagttatcaaaacaacctaatttcttttccaacaaggagaacttaatggcatgaaggattgtgtgacacattggaaaagccagcttactgccactctcttcctttggccattagagggaggtgttgcctttcattgacgcttagaagcaaattgttcacttgttaagaaaagtaaatccttaaaaaaagaaaaggaaaaaatttaaccaatttttcttaatacccagaaggaattatactcaatatttccctagttaagaaaagaggagataatgttcgtctaaaaaactccaacgttgtaattacaactctacattcatttacttacttgacatactgccacaaagtagtttttgagttcattaaaaattccaaaggcattagttgttttttttttttttagtgttttgttttttagttaacttttatagacattttagtaacttgctaaagattcaggggattctatgaaaccccgaatttagaaacatctggtctacctcagttaaatgttgactgcttagaaatatagctgaagtgatcaccacagccataaaattgtttaagaaagatttatataatgtttacaaatctggaatcaaggattttagctgaaatcctttaagagatattagagcaagtatttaattcaggtattttcaagttttaaaacttaacctgtttacctactaaaaataaaatagctagtttttttctgcatataaaagttcattgaaatgatatgcccttatttgcaatacttttcccataaagttttaagtgtgaaagaattgtaatttactagatatgtttggtatgggatattttgttaggcaagttttcttttttcttcttaaattgcaataggcttccaaaaagagtataattgtttcagaacaaattaactcttggcattatacgtctccctttttctttacagtattagtaaaaagaaaaattgtacactttctgattttaacttcactaatgtaattactctctcaagaagcttttaaaatttaaattaccatcacacaaccttttttatagtaaagccaacatttgttctctcaccaaaccccatgccaaattcatcatgaagaaagctcagcataagtaattcaaatactgcttataattttagaggggggtagaatttagtaaatattccagccggtcgttttatgcacaaggcttcagtcagaacatagaaaaaaaaaacattctgtgaatgaaatattgtatgttcagattttataaaagacatttttaaaagcccaatttacagccgtatattttcttatgatgtaatttatgaaaaagatgtctgtactaacaggtgctgtaacactactgttgttggattttattgtttggtgataaatgtatacaatatttctaagggaaactatgtactgtgatgtaaaagtctgggcaaaatgtatataatcctgtatataattatgtatttgattataattactgattgtaaagatttaataaaatatgtaaatattcc

SEQ ID NO: 1639 - DNA, 3943 bp, Homo sapiens
aagggacaatttggctgaagtctttctctgaaaaaagccaaagggttataggggtacacttaggggttgcatgcaagctgttaccaaaaaatttttaagtattttcttaatttgaataataaaaccagaggaaatgcatacagggcatgagcaactgaggcaaacctttgtggacatgaattgttctacgatgaatttttgctttagtattttaataagaattacaaagacaatggcatacttggggtgagagggagctgaggatgtctgaggagggaatagtattgcagggaagactgagaaaacagtaggatgacagttttgagtatactctgcacttttcaattgtgcaatcttcttgtgcactttaaggctttttaattttgtttgagaatgcaaatgtatactgtaagtctacctttactatctactatgcctacttcaccatctcttaaggactcggcatttgtccacagtcagactgcaagagagggtaggtcatgaacagtcacccgtgctggctgtagcccccacagaggcaatcatgcccaatagattcaagagaagctaagcggaaatggagggtggaaggtgtgatctgtgggactgtctgggcctgttactcatcctgctatcaatttcttattaattaatcttgatgattcttattaattaatcacatttgcaggaaattcagatgaggcaagaaaattttattggcctgggtaagactgaaagcattccaaattaggcttagactgtgcaaagggcttagctaagttatcgagcttaaaacccgtcaattaaacaaacattatttgaacagttactgcatgccacgcactgtgttgggcttagtaataaaaaaaagaaaagataagtgcttgttctagcataaattaaaaggtccaagggaatttaatctggaagagaacatatgccaatttttaaactatgacagcttttttttttctctttccattcaaatagtcctggttcattcccagaagggcacaaaatgaatgaataaataaataaatgaataaagacaaaagccaaggtgtatgctctcaagttccaaagatgttatcaaaagctgaaatcatttgtttggtcattcagcaagctaattgagtctctgttatataccaagcactggggataccatggcgaaaaacaactttgttccttcctcctagaacttacattttaatggaaatagacaaaacacatcttcttaacggatggtgacctataaccattaatgttgaaaatggaagagacttgcttccaaaagattaaaaggagttgttcttttctccttcagaaaaataccagatcatttcctaaaatctccagtcccaagtattacatcgtggtttccctccccgactttttattttattttattctatttttttgagatggagtctcactctgtcgccaaggctggagtgcagtggtgtgatctcggctcactgcaacctccgcctcctgggttcaggagattctcctctgtcagcgtcccaagtagctggaattacagccatgcggcaccattcccggctaatttttgtatttttggtagagatgggttttcaccatgttggccaggctggtctcaaactcctgatttcaagcgatccacccacctcgacttcccaaagtgctgggattacagcgtgagctacctggcccctccccaaattttaacatcagatctcaacatatttgttgagaacttgtttagatcatcactatcgagtaaatttatgtcagttctttagagcatttgcttcacacacagttcaaccatttaaccagaaattaaaatatcacccttttcagccctcccatgaagaatttctaggtcataaacatgaataatactcagtatatgtataatatcatatttaattgttgcaacttttcttggcgtgtttaaatcctcatgtctttgagggatcccaccacaggtgaaggaagtaaagaccacttctcccccagtctctgctttctgcagtgctcactcatatcctggcatttagcatggtgtgttgaaattaggtttacttcttgtctctccaagtggctcctctcttaaaagacagaaactagggtttagtcatcatttgtgcttcctgctagaaacccacagccttgaataatggcttcctgcctccttgagtcactttaatatccctggtgcataggacctggcatgcgtcaggctgctcgggaaatgtgggaactggacacccagaacactgctgtgctggggctatttggggcctgctgtcaggcagaaagacgttttgaattgggctttctgcccttgttgagttttctcttaagtaaagtccaaagtccaaggggcagatggccagatgcactgcccagtaaggcaggaagccaaagaggcagtgcccagccccacaaaggctgcccgactccctgggacagtagtgtggagtcccagcccaggctgacctcacaccggagcttcctagcttcctttctttgctcaatgcagggcttcttgcaccccctggaaagctaagagatttttttcaaccctaaaagagagtacctttcactgcattggatggatgaacatcagtgccctaactttatccatcatgtaggtcagggaggactgggcactatttggcaggatgtactccagaatataatcaaagaattttctgtacatatttcactaaagacaagtttttgggctggatgtggtagcttacacctataatcccagcactttgggaggctgaggtgagagggtcacttgagcccaggagttctagacaagcctgggaaacatagcaagatctcatccttacaaaaaataataatggtgtgtgcctgcagtcctagctacttgggtggttgaggcaggaggattgtttgagcgagggaagttgaggctgcagtgaactatgattttaccactgcactccagcttgggcaacaaaatgagaccctgtctcaaaaaaaaaaaaaaagttttctagaataagcaggatgattgtttaatttgaagatggaacaggaaactagagtgcatttaaaatactctgtcttcattttaacatgttgaatggaataactgcatatcaccatgagtttgttttgcttttcatacagacttgtatgtgtcatttgagtggtttccagattggagcgaggttattctgatctaaatgaacagcatttttttccttagcctctgtttgccactctgggtatctctcctatgggcaaagccattagaaatgcataaaacctcgagacatggtttttggcaaaaactccatgactttaaactagctcttttactactgacctttcacagagaaaaaatatttcccttgaaaaaaactgggcttgtcattttttcccttgtagctttaagcagagacataagtgccttgcattacacatagtaaactttctttaaaaaaaaaaaaaaaagattttggagactaccagggtaagattccaacttgtccaaaagctttctggccttacatattttattataaaaattctcaagtctggtaatcttctatgtcagagctagtgatttcaaaaggtttcacaattccccaagacaaaagtgattttcgttcattataataaggttaagtgatatgtgattcatagcaattttgatgtgaagaagggaaggacatcattgacttaataatagtatcagtcggtgcaacagttggcaacatgtgccttcacactttaccataaagagacgggtttgagggtttgccttctaaagtctgcaacttcaagaaaaaaaatcgacactgtggattgactttcccggtcactatataaagcaaataaacttaaaacactttgtaaccatgtatttactctgccaggtgcctatattccaataaaatgttcatccttg

SEQ ID NO: 1640 - DNA, 1914 bp, Homo sapiens
acgtagagaagaattggttctcaggtgtctgtatagatggcctaatagttctctataccaactgtagttctttttctgttctttcaattcagtagagtaaaaataaaaaacagtgtcattttcattcagaaactgagcagtttctaacttagctggtttgggagctttgctttccaagtttttttttgttttaaggcaaacttaaaattttaatggaaacatttcatatgaagccaagtctcactgagatcaccctactgcttaataattcagaaaattttcacatgcaaagtgtttggaattttatgtatgttatgaaagccatcttttacaattcttaatcacatctctgcctaaactgattcatgatgtttatgttttcctgtttgtagtgtacaaaatgaagctgaaggctcacatgttaaaatgaccctgaatagaataggaagaacaatgttcttacaggtcataatgtatttcacaattaaaaaactaaaatatgtacccatttttaagaaatcatacttctctccacattgatcttttcatttcttactagcttttaagaaattaaatacttgcctgagatagaaatactttatttttgtaactttaaggtctaaatgactaaacttcaaagtaagattttgtcagaataaattgagaccattaatctaatataatacttgttcatgagcactgaaatcctgaagaggagagatttggttataaattaaaaaggttgggtgatcttaagtgcctcagttaatgcacgtacagtattcatttggttggttgtactacctctcagaagtaaaatttgtcaccttatggaatgagagtttttgggtttgggggttgtttttttgttgttgcttggtttggtatttttggttttgtgtgtatttgtataaattttctgtataattagcccaggctgatgtaactataaaaattagttgaaaaaaaaaatattgtttccttaatggaattctcacttcatttgaatataagattttggatgaaaggatttggtataaagtttgggtttttgtctcaaggatttgatccatatttatccctaaatatttcttaagggatgtaactttttataaccattaagtggggggaagggggtggagggggtggtaataattataactgaaaggtttaaatatactacctaagaaaaaagtacttctgtgacatatacaaaaaaatctagtggataggcattagatgaatagagaatattaattttgcagaaatgaaggaaaatctcttcgtgctagtacagcgtattcccaagagagtttattttcctttctccaattaatgtggtcataaatttcggtaaaatcaagaaataggtgaagtgcaagctagtttctataatgaccattaaaaaaattctgctgtgtaattcttgccagttaaaattataacttgcaaatgagcagaataaatgaggtttttttcaattaaaaattactataaatccaggaggcaaactattttagcactcagattatctgatttaatacatattattgaatatcagtctcaaattttgctaaatgcttatcagcatgaaatatgttgatcagtgatgagttgggcttaatgcaaagatcctaatttaataaagaaacctgtaaattactgttacctaaaatatatgtgtatattaatttcacatataaaggtagatttttcaaagaaaaatttggtaggcggtagtttagaactctgatcaggtactacatcaaccaaaagaggaaatactttaaaaattccttttagcaacctgagcaatcttattctcgtaacaatagtagtaatttgggacattgcaaatgtttatcatgttgtaaagtagcatcagttgtatcctttcattaaaacttgataaac

SEQ ID NO: 1641 - DNA, 1646 bp, Homo sapiens
caaatttaagaccctctcaaactaacaggcttagtgatgtaattatggttagtagaggtacacttgtgaataaagagggtgggtgggtatagatgttgctaacagcaacacaaagcttttgcatattgcatactattaaacatgctgtacatactttttgggtttatttggaaaggaatgcaaagatgaaggtctgttttgtgtacttttaagactttggttattttactttttggaaaagaataaaccaagaattgattgggcacatcatttcaagaagtcccctctcctccacatttgttttgccaatttgcacattaaatgactcttccctcaaatgtgtactatggggtaaaaggggtagggtttaaagatgtagacagttgggttttttaagggccctttttcaataactggaacactctataacaaaggatacttatttaaatagatgacattgactatttttgtttttattaaaaggaagcttacatgcctaccaatatttaatcttttatgattgcctttttataactttttatattctcagcagagtgctttaccaattgaagtaaaatgtggcaggctggagttattgaagcagagtggcagtcttcagtttgcagagtaggggtctgtcttttaaactctgagtgcaaacttcagagttcttgccttggctgcagtttttttccttcaagaatgcagtactaacatttatttgagtggagttactgaacagtaacatagctgtgatttttggtatttgaaacactggttttaaatattttgacttgttgagggtatgttttatatagcaagacattatatagcagtaaaaaatggtgttttatcttctatataattcctgtttttattattaacaaaacagtcctaaatagcagccctcaattgtgaaaaaatttactttaaactacattaggttgtgaatgcaggttttatcagaactatgtttttgttcagtttatctgttcatatggataaatattggttgggatgacttggtgtctaatgtgtagtgctacacacctaacttatggggccaaaatagcatgtcctaatgcttgctgctgatttaaacacattaaaggtactttgcaggaaatccttgcaccatgggattaatatccaattgctgcttgtacactcattcattactaaaagttttgagaaatttttttttccagtaatgagcttaagaaatttgtggaaaataactcacctggcatcttacatctgaaataaggaatgatataaggtttttttttctcacagaagatgaagcacacaggaacctaatgggccaactgggatgaggtgactattctgagatgactattcagtggctaacttgggttaggaagaaaataattaggtattttctccaaatgttcactggtactctgccactttatttctctcatctgttacacaaagaaccaccaggaaagcaaatcagtttggttggtaactctgtaattcctaactatcactggtttggttctggactaaaactacattgacagattgaatttgcctaatatgatgactgtttttaatatggatctgtatgtgttctattcagcacaaggaaataaaattttagttgaggattcagcactaaa

SEQ ID NO: 1642 - DNA, 2315 bp, Homo sapiens
atggtctgtaaacaataacaactgtgaataagattatcaaatctgttttagtgtaatgattgtcaagtttaaaaacatttttatatataaactggtatactcatgtcaatattctttattaataaaatgtttttcagtgtcaaaatttattattcatttcttcattagttgactcctcctttgctcatcagtctaaggacagttgtaccagactttggataaggtctgcccagaacgagtagtaattgctcttgctgttctactaggcacatcaatgttatagtattgatctaaatggaagagaaaacatttttttagttaaaaagaaaacaatgcccaaactaaaaaataacttatgttgactattatgctcaaagacaatgtttatcattttaatagagatgtttttactaattaatttgaactttataacaaaaagaaaaacaattgcctagacttttcagcttttttgatgtttcaaaagattgacatttcaccatctttttgtaaaatcaggttcagctctcctttatgaagtaaacattaaagagtaaccaagtttgaaaaataatttacttggggttattccttttaaaaaatacatgccaatgtcattcatattatgaaattacaggcagaataacttagatttctgggcatttcaaagaaaagcatcctgagtaatataatttaattaataaaattagtttctcaggaacttctttctgatcttacagactctgcagtgatgcaaatcattataaccttgtgccaaacaaggtatctgttaaatgccacaaatgatagaagtaaaatactattgtcagtagcaagtttactctagtaactggatgttttatcgtaatctcatgaaggttagagcagaattgaattgcagtgccatcattttaattgaaattaaagcaaaagtcttaactcttttccacagcaattagaataagtaccgtagtgtaacttctcacattcagtcatcattgcagccagcatttttactttatcttcatgttttcacaaatgatatcacctccttgggaaactgttagttaataccttacctttagaaaaggcatagtaatcatagccgtcaggttttctgatgttgggcagtgatatagctgaggtaaccacatttggaagtcctctccacagtatactcactttaacttcattatgaaggacacctgtaagtggcatgtttaataaaagataccagattaaaaggcaatgtactatcttggaaagagccagacatctgagttttaatctcagttttagccctctgatgtagaactattgagggttatagactggtatataatgttcttggtaagaagtacttgataaatagtattggttataactaacaaacctgaacaaactgctttacttacccacaaggaaaaagaaagtattggtctttggttattcactaaggcaagtggatgagtttttcatcagtaagcttaaattattagggctgtttgatcagtatccatatttcataagccttactgtataagaaactgtattacatctacttatgtttaaggatttttttaacacaataaaaatgttacctttgtcttgataagccagtctggcaggtgaatattgaattctgatggtgtgtgtttgagaaggtcctatagcacgttcaaagcgacgtctcctaacctgtgtcgtttctccatacactggataatttagagcaggccttcttccagggcacttctgtacaggttcctgtttataaatatactgctgaatgctgccacctgttatgtattagaatatcacatggaaaatgaaaattaattttaataccctcagaaaaggtggaaaacaacttttacaatgtataggaaacagttttgttctcatttttcatataatatattgatattaataatggctattagtcaagggtattataaaaataattattaaactgaaatacttgttgaatgaatagatgcagcaaattacatagttatatatttaatttcaattgaaagtgacaagtgctcagtttggcagcacatatactaaaactggaatgatacagagattagcatggcccttgtgcaaggatgacatgcacatttgtgaagcgaaagtaaatgacattctatcagtgacctgaaaactcaaatgaattgtgacttgcctgtgaagaaatgaaaataaaaattgagggcaataagaatactaccctcaatattgatttttttcactgaaaatatttgatttcagccattaaagatatcttttgacagtaaagtcaataataaatg

SEQ ID NO: 1643 - DNA, 389 bp, Homo sapiens
agattcactatgtcaatatctcatgtttatcctttaggtattggatgatggttttggtagtatctatattgctttagtgaacacagagtatgggcacggctatgctaacttgacaaaaatgactgatgcaacaatcgagttattagcatttcttagtattagttactcaaattgatacaatgcttgactacaaaacagagctgtcttcagcaacattattagtagacaaagaggatgtggataatattatgacatttttcaaaaatccctttcaagttatgttttgtcttttttactccattttccctcatcactgttattatttggacttttcaaattacattattcattataattttctttgtgtaataaaaatgaaatctcatgag

SEQ ID NO: 1644 - DNA, 2515 bp, Homo sapiens
aagtctaatgatcatatttatttatttatatgaaccatgtctattaatttaattatttaataatatttatattaaactccttatgttacttaacatcttctgtaacagaagtcagtactcctgttgcggagaaaggagtcatacttgtgaagacttttatgtcactactctaaagattttgctgttgctgttaagtttggaaaacagtttttattctgttttataaaccagagagaaatgagttttgacgtctttttacttgaatttcaacttatattataagaacgaaagtaaagatgtttgaatacttaaacactgtcacaagatggcaaaatgctgaaagtttttacactgtcgatgtttccaatgcatcttccatgatgcattagaagtaactaatgtttgaaattttaaagtacttttggttatttttctgtcatcaaacaaaaacaggtatcagtgcattattaaatgaatatttaaattagacattaccagtaatttcatgtctactttttaaaatcagcaatgaaacaataatttgaaatttctaaattcatagggtagaatcacctgtaaaagcttgtttgatttcttaaagttattaaacttgtacatataccaaaaagaagctgtcttggatttaaatctgtaaaatcagtagaaattttactacaattgcttgttaaaatattttataagtgatgttcctttttcaccaagagtataaacctttttagtgtgactgttaaaacttccttttaaatcaaaatgccaaatttattaaggtggtggagccactgcagtgttatcttaaaataagaatattttgttgagatattccagaatttgtttatatggctggtaacatgtaaaatctatatcagcaaaagggtctacctttaaaataagcaataacaaagaagaaaaccaaattattgttcaaatttaggtttaaacttttgaagcaaacttttttttatccttgtgcactgcaggcctggtactcagattttgctatgaggttaatgaagtaccaagctgtgcttgaataatgatatgttttctcagattttctgttgtacagtttaatttagcagtccatatcacattgcaaaagtagcaatgacctcataaaatacctcttcaaaatgcttaaattcatttcacacattaattttatctcagtcttgaagccaattcagtaggtgcattggaatcaagcctggctacctgcatgctgttccttttcttttcttcttttagccattttgctaagagacacagtcttctcatcacttcgtttctcctattttgttttactagttttaagatcagagttcactttctttggactctgcctatattttcttacctgaacttttgcaagttttcaggtaaacctcagctcaggactgctatttagctcctcttaagaagattaaaagagaaaaaaaaaggcccttttaaaaatagtatacacttattttaagtgaaaagcagagaattttatttatagctaattttagctatctgtaaccaagatggatgcaaagaggctagtgcctcagagagaactgtacggggtttgtgactggaaaaagttacgttcccattctaattaatgccctttcttatttaaaaacaaaaccaaatgatatctaagtagttctcagcaataataataatgacgataatacttcttttccacatctcattgtcactgacatttaatggtactgtatattacttaatttattgaagattattatttatgtcttattaggacactatggttataaactgtgtttaagcctacaatcattgatttttttttgttatgtcacaatcagtatatcttctttggggttacctctctgaatattatgtaaacaatccaaagaaatgattgtattaagatttgtgaataaatttttagaaatctgattggcatattgagatatttaaggttgaatgtttgtccttaggataggcctatgtgctagcccacaaagaatattgtctcattagcctgaatgtgccataagactgaccttttaaaatgttttgagggatctgtggatgcttcgttaatttgttcagccacaatttattgagaaaatattctgtgtcaagcactgtgggttttaatatttttaaatcaaacgctgattacagataatagtatttatataaataattgaaaaaaattttcttttgggaagagggagaaaatgaaataaatatcattaaagataactcaggagaatcttctttacaattttacgtttagaatgtttaaggttaagaaagaaatagtcaatatgcttgtataaaacactgttcactgttttttttaaaaaaaaaacttgatttgttattaacattgatctgctgacaaaacctgggaatttgggttgtgtatgcgaatgtttcagtgcctcagacaaatgtgtatttaacttatgtaaaagataagtctggaaataaatgtctgtttatttttgtactattt

SEQ ID NO: 1645 - DNA, 351 bp, Homo sapiens
ccataaatgtcaagcacaacccaaaatcttgaaggagtttttacagtgcttttgtggaacagtttatgtttggaagagtaaatttaaattgtcttttcaatatctgtcttatatcagtcaataacattggatggcaatttacacacatgaacttgctgacaatgaatatattatacagcagttttggtttatgaatgacataaatactgacaccagtctagaagacattctactttttacaataaatttcatttgtaattttatatgttccgtggcaatgcttttgtgcattacatcctctagagggaacataaaaagataccaataaaattttgtagctgaacagttatt

SEQ ID NO: 1646 - DNA, 581 bp, Homo sapiens
agatgttttcagatatgtacacatttctgcttctgcacatattttcatggaaaccattatgtataaagaacttagagcaacatcctaattggctcagtgcacgtttggcaatagtgccagcctgtcttgtctttaatgcatggattcataaacttcttccctacctgcatcatgtgcatgtagtgcatattaaatgaaagtgatattaagaatgctttcccaaattccattatttgacattgagtctgacaactgttagttttctggttgtctaactaccatatgaagctagaaaatgcacaaacgatattccttatctgtaatttaaatacttaaaatttgcaattgtcagatcttgattaaactggttgtcttatttcttctcatcattaacggaaaaaaaatcagtatttctatctttgatatctaagtgttttgaggattttaaaactgaattttatctgctataccagttatttgagaaagtatgattttaatgtaaatcatttaaaaaggacaaaagtataatttccagtgattttcactgctgtcagtagaaaagtaataaacatctcaatttt

SEQ ID NO: 1647 - DNA, 155 bp, Homo sapiens
tgtttatactaataagtttgctagtacagtgtcagttatttaaagtggtaatgcccgataatgtcttttaaatgtttgaggatgttttaaatacatgcattgtcttcacgaagaagatgtaaaaataatgaacaataaattgcggtggaaacctc

SEQ ID NO: 1648 - DNA, 1248 bp, Homo sapiens
aaaagacaattttttttcaaatgtgcaatttgtaaatattgctaaaagcatgtatagttagaactgattacatccgtaggacaagttttagttaaaactcatcacataaagaaattcaagaagtatttttttaatttctgaagaagttaattcttaaaactataacattatataacaaaaaaggtttcccaaaacaatctatttaaaaaactgtataaggagattctgtgtattaacatgcaataacaagcatgcataaatcaatggttcaagtcttctgttaggggccaataaaatgtatctgcatatgttttccacataaattttaattcaagaaatgacagtcaaaagatccttcattttagattaagcttttcattttaatatataatttaatgtaaataaaacatcactatcaattttaaggaaactttttaattgtgcaaaggataaattttttgacctattttagggttctaaatgcaataagatttagttgagttattccacaaacacattataaagttcagatgtttcatcaatgcagttctcacgaaagtatttactttttaaaaataactgagatattattttaaatttcttttattaatactttcttttattaatatatgggggaaaattattttgacatgacgtggtaaaatgtgaaaaactaatgtgtctcaggctcaagtttttatagttattaaatgtttcaaaatagacaagttttgtttcctcattgatgttaagaaccaaactcctatttcaatgagttattggattagaccaattactgcactcttaaacagcaccaccatttaatttcatgtatatctaacttcgaatatatctgtaaagataatcgaagcaaaagtaatcacttaaaggcacaaataggatgtactgttgaaaaagataaagagtgcaggtgcagtttcattcaacacatttttaagatgcatgtctgccaaaatgcaacatacgggaagtttatttcctgacagcaggtgtacacatgccaacacttaatcattttatggcacctatttctttcttggagtgccaagtttgcaaacctgcagtttttaatttggtagatgacaaatattctgaatcaccaattaaaaacctttttgggagggatggggaaaactacaaacgtttgacaaacacaattctaggatgaacaatgtatacaatgcacttttatgaagtttttaaaaataaaggaaaacaaaaaacttt

SEQ ID NO: 1649 - DNA, 2441 bp, Homo sapiens
taaaaataaaatgagaaacttttttcctacaaagaccttgcttgaaaccacaaaagttttgctggcacgaaagaaactagatggaaatatatgtaattctctcatatttaaaaacgtaatctcttctcttagaagtatagatcattttgaaacttaatgtactacttactggtactctccctattaatatttgaaggacctcaatggaataaatttgaaaagctaaattaaaatacaaaaatttaaatctgacatttaattgttttataataatccaaactctatgaaagcaattttaaaaattattaaggttttatgaagttgacaaaatctaactatatttggtgcatcacaatggacacagaatgctgctgctcctcttaaaaattaaatgtgtcatattatattctttaaacttactgttttacaaaattgagctcatcgtaaatgtctagtcttctcacatagagattaaccaacaaacttgtgtggctgacttttgtgtaagaatcatagtttgctttagaatacaaatctttaagtcattttaacttttttttctgccttacgatataaaaatatttatcttagaatttgagatgttcatagcatgttttattacattgaagaaactaaaacataaatgaaaagaaacactaggttcctgcactttttggtaactttatgtctagcaaatattttatgccaagaaaagcatactataaagcaaatatctattattctcctaaacgaatgcctagcatagagaaaatacttaatacacatttgttgacttaaatttaattcaaggattgaaaaattaactggatatcttgaaatatacagtaatgattgtccttagactcttgaactttaccatctttcctattcatatatctatatagtaaatttcactagaaaaattcttttaaaattgacagaagataatttataccttttatggactctgaagacacttcaaaacattaaaagtccttatgtctttggtaatgaaacaataacactcaatgaaggatgtattaaaatttttgacttaattttgaaatcgtatatatgagctatactttaacattatgagagaaaagcataaaacaaaaataggtagttcttggcttttaacattaatgcaaatcatgcagaatttgagttataaatttaaatataaattgaccattgatgatatccagtttttcattttttacctgtattgcattttccccctagagaaatagatcaaaagagcacaagagtatgcgtacatagtttaccaggtagtagaagtgtgttaaaatgttcctgtaaaagaaacattggtaaatttaaatacatactgttctaattttgtattttttaatttttgaatttgacattgagtttaattcagcaacaacaaaaaatacatataaaactagaaagggactttttttcctttcttttcataatgaagcagatcaacttaaaggataataaaatttttaaagaaaagatattctaatgtactctcaataattctacagaaataaaactgtaaagtgcaatgtgaaatcaaagattatagtcattgtataatttggcttggaggctatgaaatgtctttttttctttttggtattttacattattcacattttagaataacaagaacaccaagaattacccctaaaacagagaccctgtatttaatctactttgatcagagaagtagaatttataacaggttagctaaaattgggagcatgccttaaaacttaaagattgtatgcatatatgtgtatatgttataaacgtgaaatatatttgacacacacattcacatataaattgttaaaaactgaaggcagaatggaactaatatatgtaacagagaaaaacaataaattttatgaacttgttttatatttgcatatcaagagtcaagtatgatgtttctttaagttgactttttttacttcattatttttaggaataaatgtaagattttacaaatcttttatttccccacaagatctgaagtttggtatttttgcattatgacagttgttgagactaggattttaagctaggatatgattatatttcctatataactaaaaattttgtttcataaattttaaaataattatttttgactatgaacattagtccaaatttaatatttgacacagttcataccagcttgctacaataatgataatttattagtctttctgttatttaaagaataaaaacatgcttataaaagacttttaatgaaatgttgcctttttaaaataattatacttgcacatgaaaataaaatataaagtcaataatagtccttgtagcccaatgggaattgattctgtttattgtctgtaccattttgctaccagttacattgaactgctttaaaataaataataaaattatttctaatgatg

SEQ ID NO: 1650 - DNA, 187 bp, Homo sapiens
aaatgaatggcagaaagaggagtcatatttcaatacatcatgaaattccttataaaatataattttgaggaaataagttaaaaacttcggagtttttccttgcttaaatatttgaatctaaattatttgtgctgaacatttcgttatttataaatgaaaaccaataaatgtctaatttttagtttgt

SEQ ID NO: 1651 - DNA, 80 bp, Homo sapiens
taaatgtaaacattttcagtatgtatagtgtaaagaaatattaaagccaatcatgagtacgtaaagtgatttttgctctc

SEQ ID NO: 1652 - DNA, 5675 bp, Homo sapiens
gtaaatctaaacattccacagatttttggatggttatatgctaatggtagagatgatagcttttaaatttgtggggctgctattttcttgttttctctagtttctcaagtcctcagaacagtttcaaatcaagaaaactatgtgtctctgtttactgaacatgaatatttggacaaaatttctggcataatatttgaagtgcacatttttgtgatttttaaagattatttagtgctaacttttaatggtttcttaaattttttgcaattattagctgctgatattatggaagtattttttttaatcatcagtggaaatttttattcttctttagtctcattcctctccttcttcttcctagcccttcttacaaacaagtttgaggaccatgtagcctttaagaaggaattaagagtacactgataattgcaactgtttcttatcctaagattcaatattacgttatacaaatttttaaaattgaaattaggaatttgaatttacaagaatgccttggatatttctgtgttgtctttccattcatacataattttaggttatcattatcctttggacttttgatatactcaaagccagaaagcttaactaatgtaagattagctattatttgtaggactgaaataataatccagataattggtttttgcctatacttcaattgttatgaataagaaaggcaaacataggtctgggcattaaattatacaaactgaaaatgtgttacaagaaaaatatgagagttttaactagatgtttttcaaggtaagttcaccttttgtactttactatttatttcagaaatgttgacaatacaacatagcatatgtcttcatctcactaagaaaagagcagttgtaactcaatgaaatttaattaaacatgctacttttgatttcatttacttggctgatagaaactctgggaaacagaacctagatattttgtgttcaattgttagaaaaggtgccaaacagattatgaaatttgtgcctaatttaacttaacattgtttaattaaatggaaccactacttatatacagatttacatgcaatccagatctttaattttgccttcacaaaagcctaatgtctgtaattaacctttaatttttatttctgtatgagacaaaagttgaggacttggtgaaaggaaatagcagttacagcaaaacctcagtgattacaattgaggaaaaagtcaaaattataaaatacctttaaagacatgcactttccatattttcaagtcaattttaactaaaaactaagataatgtttcctagtagagttgcttgaagattagactagacagggttgatttattattagcatgtcatttgtacataaactagtagaaaatagcagttttaaaagttttctatttcagttttgtttacactcctaattgctttaagcactttttttgtgtgtgtaaactgtaaagtctagcccagcccttgtgaaaaaaaaaatcacaaataaaacagtgaagttttaatgaataaagtttaatcaattagtaatggcggaaactgtcgctgaagcacttaagaaataaaggtactttacagcaacattcgccatactagcggaggtaaaacaaaagaaatattgaaaactgaggcagttaaccaaagtagctcatataaataataaaaccaatctgagtttagcctcatttgtcaaggtttggttgtaattgtcttaagactagtggacatacttactatgttctcctttttaaagtattcttatttctttgtgtggaaatgttatatctggggtacttacatgattgaggttgactatatgaggtactgttagtctgttagtctttcaaattgacttttaaaaatacatatctttatgattttcatcataaagactggcaatattataactaaaaatcttactataatgaaagaaatcatacataaaaatgtagcctgccttacatataagctaatgtagaaaagtttagacttataaaaaggcagatagtatatatatatttatatacatgtatgtatatggtatattatacatttggtggcagaaaaagaagatactgcattttcacattgaaaagaatactttgatttttgaaggtatttactttagggttcttttaataataatgtccgtcctaatgctttaaatatatgatttaattgtaggaattggtttacacagaacttttttggaatacatctcttagtaaagtgaaatataataatataattgtatttagttactattgtagataacttaaacttgagtagtgatttactgttttataaaatgctttcatatatgttatctcatttgaacctcataaccagccctgaaatagtaaaaacaagctatattcccactttataaagaatttgaggttaagataaaaggactcatttaagctcacatggtcagtaggtggcagagctactagtagggaaagaagaaagctagcattaatgaatgcttactatgtgccaggtactacatcctgtcatttaatcttaacctagtctgggagatgcgtaatataattctggtgaagtaatagtttcagtggatgattgaaaacaacaacaacaaaaacaaaatgaaactaatctgctgcctctaatttccaaaaatgtaagaaattttacaattgtgaaaacctcatggatttgggcaaactgaatgtatataggcttttgacaaaagttggcacaaaaagtataaaaggaggcctattcttttcagttgaccttttgtaatatttgatttagagtattttggacaaatgctctataactctaatccatttattttgtaactgtacttaaaattttgaatcttgcaactaagtttagcctcattcagaatttttttattttgtgagcataatttattgttttaaattaattttttagcagatagcagttagcacttaatctgtaaattgaataatttatcaagtgcaggaatgtgttaatctaatgggttttgacttaaatgcaccaaagatttttagtaggtattaaatagtttaaaagactttaaattctttcttgcttgaataactatttgtccaaagaagcacagttgaagtcctagaataatggatttttttaaaaaaaaaaagttgttagtttgaatactgagattgattattgtgtttatatgtataaaaataggagcaaaagaaaatactctgggaatagtcatactgacaaaccaattataagtgagaatactgttttccttagtttaattaatacaatgttatgttttttagagaacactactaaatgctaaataagcctattttttacactacactatcaaaataatttttgccttcgaatttttttaagtcaagttgaggttatttttgtaagaaacccaacctattttttttgcagcctaaaatcccatttaaggttaggggttggtccttatgccagcaagatttaaccaactgtaaagatagtagtctttgcatacatttaagtaattaaggcatttattgctgggagaataggagtagcaaaaatatggttttaaattggtgctttattaggtgacttccttttaggcgatggcaggtcatgaaataggtacactaataattttctatcaaccttaaaaagtgtcaaagcatctttgtagggtgactctaaactgctaattaagggttaataagtaattatcattggttgcttttcaatataattgcaaacaaattaaaaacacagttaaactaatatgtttataagcttgagttttcttcctaccatatcactctcatatatcagtgatgaaatgtcagattttgagcagtagctctttgacagtgtccttttatacccagtcttttctgcattgaatgctttgtgccttttcgatgtgttgtagttgcttagagttgattctgctggctagattgtactgattaatagatttttatttttatttttttttggttatgggtgttatgattgtgttgcctgctggttgggcaactttttttttttaggttgctttatgtttatataggcaaattggcactaagtgttagtgtgaatatttgtttttatgatttatatatcattttaaaaatctctgttgtggcctttatagttactgtgaagccactcttgggcctgtctctatatgcttattagaggaatctgacaagtaaaataaaatgagtagtgtgtctgcatctgtgtctctgtttctctgtcttttaaataaccagtaaccataactacacagccctgcactgaatgaccttatttcagtttgcctaaaactgaacaagaggtgatggtttgagatgagtttctcattaggagcagcaacatcccaaccaatatataatgagttgatcaactcaggaaaaattaggactttaaagaaggttgtatttggatattctaagattcagtgccaaatttaaaatgcctagaaatgtattctacaagtagcatttctaaaactttaagtagtgttatagtaaatgctacttgctgttagagtgaataatggataatgtgagaataattttctaaacgacttctagaaactagacagttcttccttatatcctacccttttccacatttctctaatgtggggttttttgtttgtttgtttgttttgagggtagagggaatcccctccttatttcctctaaaattgtttttacttaagataccttttccctataatcttagcatgctttctgctctttctctttggaagtagcattaataagatagatgtaataggattaagatgtgtggaagatgagaaaaagaaggtttttgtagagagagtgcttatgttttgtttactcatgtttcaacttgctgtgtatgatcataaatctatgatcttgagaaaaatcctaaaacaatttaaatttagcctatgcagccaattacataaagagaaattaaggattatattcagaggagaaattaaggattatatttagagcacagaggttatacaaagaatataaccttgtttggtcaaattcttaggtaaagaaaagtaatcaatgcttgcattgctgttggagattctaaaagatgtattgaatgaagaggatgtacacatctcattgttactgcgtatttttttgcttggtattcctgcttgcattaaagctggacaatgtactgtgatgtaattacaaaatttttattccttctaacgattgaactcttcttatccctattgataaaactgtattacaattgatgagtgtggctgccagaaaataatacaaaactgggcatttagctgttccacattgtgtagtaaatgttttgattatggggatttacagtgtatattaaagtagaaatgcttttgcacttgttttcagtctcaaataataatttttgtttttaattaaggatactttaaaagcaatgacagaaaaatctaaaatatcagaattaattattgtgaactgtgtgtaaaatatcttgtgagttttatacatactttggttgtctgatgtttcctaagtataaatgtctttatagaaaatttcagttctctgtgaagagtaggaagtgtactgtatattgaactagttctttgtgttactttgatatttaaaataaatataaagttctttggtcct

SEQ ID NO: 1653 - DNA, 816 bp, Homo sapiens
atcttgcatccaagcttctatggagacattttgagattcaatgcaatctgtataataaacagaattatttgtaggaatggcaactcatactatttaaatttttttttgcatttgcaacatttttctcacttgttcatttcgaggatatatgaaatgcattgatttttaaatataaagcgaattctactgtgcttttaaatcaggtactagtgtgtatgtatgtttaaagtatgtattgaccatgagatttcccagtgtttggtgcttaatgccgtttattttatttaagctaagaatgcatatgtaacccatgcacataaccagtagctactatactaatctggttgagcatgaactgatcaagatatcaaaacttatcaaaactagcctgaagctgatgaaactgttaacccactaattgccttaatcttaaagctgttttttaagcatacttaaataatgtatgaaagtatgtataaagtttgaaggataagttattagtgttctgcagagcaataatgcctttttctattcatcaaatcaaggtcaaaattcatcttttcaagattaaaaagctctcttaatggaaatatttaatttgcttatataaagcactatagccatgttttccaaaaagtataaaaatatacacttacctttcattcagtgaaatataggaagtgctgaattacaatgtgaagttaatgacttctgtttacaaatgagacactctaacgagttttcagtctctctgtatgcctttgctatttaggggtccaccccaagaaagccaaatacaacataaaccgtcctgac

SEQ ID NO: 1654 - DNA, 726 bp, Homo sapiens
caattttcttggtctttgcacttgtgtctgataaaacctatttcataaacaactaatgatttcctcctaaatatgtaatgtcttaaatacatttttcatcttataaaagctatggaattagcttattttgcctgatacctgttactcaaggcattaagttggcctcctgaattggcagctgttggcctcgataatctcttaatattgctggaaattagtaatacagaaatccaatcaactcatatcttcctgtctttccttctgaatagtagtattctctgctagaaaactactagtgatggttattactgagtatgaatttaagaactgaggttatgattggtaatacaatccaaaaagaagggtctgaacaccaaaattctttatacatatttaagtaactgtattattattatacagatgtctttacctttttgactttatagatcactgcagcattaagaaagtttccagtttaccattccataagtacaattaatccttctagtgtaaatgttcaaatactgttataattatctaggcaattaataatttacaaactgatatttttgcacgattgtagtggtgtatagtcttgacttgcagagcattttgcttgagtccttgaaatgtcgtgttcattcattatttgctgagtgcttacaatgtattaggcactgttctaaatattaagtgtactaaataaacaaaaatccttgtattctg

SEQ ID NO: 1655 - DNA, 339 bp, Homo sapiens
ataatgggctctcagaataatctctcagatgaaatagaagaacaaacactagggaagatacaagaacttaatggacactacaataagtatatggaaagtgtgatgaaccagctcttgagcatggtctgtgacatgaaaccagaaatccatgtgaactacagagccaccaactaaatgtacatcacagttttcaagaaaaaaaaaggtgtgtgagtgccacctggttgcttatggcttcgtatttttatgttgagaaatttgaaatgagaaccttaaatttacatttacaggaaatgtgacataactcatacatcggcactgaattaaacaaaacaaaat

SEQ ID NO: 1656 - DNA, 719 bp, Homo sapiens
ggtcccaaaagtggccaggctggaggtcttctaatgtaattttgttttattttgagaacactgccattggaatgtttctacacgatcctattaagaataatgtgatgccctttcaatgcaacttttcatatttagtttattttgttagcgtgattttagctctgtttgtattatgatttttaatcaaaatcaatagattaaaaatagtttgacattcaaagtgacaatgtttagcaatcaaatttacatgtatagatcgtcagggaatagcccaaatgttttaaacgcaaaaaaaaagacaaaaaaaaaccaaaaaaaaaaaacctacaaaaaaaactttgttgctaggattaaggttattctaattgctttactctcaggaaagtgtaataacgcatgggaattctgtacgttatcactgtaatggaatatccaatttacagatagtatgatatacatttcatcatttaagtaagggatcgaaaacatttcaaattgctctatctgggctgatagacatttcgtcatttaagtaagggatcgaagacatttcaaattgctatctccatctgggctgatccaaaattctgagattgttggctacctatattttgttgcagcttttaaatgtactctgaacttccaaaccacattcattccagcctggtagaacaaatattcttggatctttgatcaaagcctggaatgatagctttaat

SEQ ID NO: 1657 - DNA, 1209 bp, Homo sapiens
atactgatgtgtaggcacttttatgaccacccatgaaagaaaaagaacacttgctcggtaattttctttatgcaggagagtttaagagaaatcagcacagatatttcaaaaaagtccatgtctttttatctttaaaatatctatttatcaaaggccagacacagtggctcacgcctgtaatcccagcactttgggaggcgggcagatcacaaggtcaggagtttgagaccggcctggccaacatggcgaaaccccgtctctactaaaaatacaaaaatttgctgggcatggtggcgcgtgcctgtaatcccagctactaggggggctgaggcaggaggatcgcttgaacctgagaggcagaggttgcagtgagccaagatcatgccactttactccagtctgagcaacagaacgagacttagtcaaaataaataaataaataaataaataaataaataaataaataaataaaatatatttttatctttaaagtgtttaacattggtatactgtctgtagttggttcattagtcgtttataaagggttattttctcatgagtggaaacctgaacaatcagttacctttgtgcctatgccttctctctcctcagacagctgggatgtttatggtgaaatggcctgtacaagtttaactaagacaacttaacttgcattgttaatcaaaaattcttttctcaaagggttaactggttgccattttgaatagtatgttcaagggtgtagcttcctgtttctttccaaattataagtagctacctaaatatagtataattatatattaataatatggcttgctggcacagtagtttaccctgttatctgtgtttcataatgggggctgtatgaatattatttaaaactaataaaatgttgccagaattatactaaactgttggatgagattaggagatcagaggctggaccttctcttgataatgcttgttttgttaaaggtataatgaaataatttgtatatgatttgatgaagattaaagacccttattttccacagctttaaaaaaaaacctttatttatgatcaagtaataaagataatattctacttgtgggatcttacattacggaaatagtttgacgtttttgacctcaagagtatgtataatttgaagagatactttgtaactatgcttgggtgatattgagcagttcctaaagaataattcattt

SEQ ID NO: 1658 - DNA, 988 bp, Homo sapiens
atgaaactttatgtaagacccaagcttcctttatgtaaaaataggatactcactaggctttggggctgacaatggtttttaaatcttgctaatcttccctggaatgaaaccagcatgactcaaagagaaaaagagagtctataatattttctaatccctgagttcttttctttatatattaaaaaggattactaggctgggtgtggtggctcacgcctgtaatcccagcactttgggaggccgaggggagtggatcacctgagttcgagaccagcctaaccaacatggagaaaccctgtctctactaaaaatacaaaattagccaggcgtggtggcgcatgcctgtaatcccagctactcaggaggctgcggcaggagaattgcttgaactcgggaggcagagccaagatcgcaccactgcactccagcctgggcaacaagagtgaaactctgtctcaaaataatattaatgataataataataataataatagggattacttgcataattgttcttttaaaattattggcagtattgctgaatgtatttagattttttcaccaagtgacaacaactgaattcataaagattcatcaacaagacctgataaaaaaaaatgtaagcatattatagtggatacttccaagactcttggtctaacatgtattagaaagcagaaggagcccaggcacaggggctcccgccggtaatcccaaagctttgggaagccaaggcaggtggatcgcttgagctcaggagttagagaccagcctgggcaacatggtgaaatcccgtcaccacaaaaaaatgcaaaaattaactgggcgtggtggcatgcacctgtagtcccagctactctggaggctgaggtgaggggaatcacctgagccgggggaatcacctgagcccagggaagttgaggctgctgtgagccatggtcatgacactgccctccagcctggacaacagattgagaccctgtctcaa

SEQ ID NO: 1659 - DNA, 129 bp, Homo sapiens
ttttctctgccacttgaatatttttttttattgtatatagtcagcaaaaaattatggtttgcataaatggaaatgtacatgaattttaaaaattttaagatatttttaatttaataaaatttatataac

SEQ ID NO: 1660 - DNA, 4703 bp, Homo sapiens
ccctccccaactctccctgtctcctctttcattcttcccctctttccttttccctctctttccccacttcgatctgagctgcttcttaacggtatgagattattttactccttcttcttcctttcccttcctgtcctgcctggcctagagaggtgccctgcctgtccctcctgcacccaccgtccttttccaagcatgaacagtgggacaggccccaggagatgggtgccagggagcagaagggggagccttcaggcctggacaaaacgaaacacccccccaaaaaaagaaaacccatgacaaagctcccctgggggcctctgagtgcacaggcctctccatctgcccagcaccccaccacctgcagtccacctccccgtaagccatgcttgcctcccagccccaaccacatttggggagtttggggaatccagttcatcctctacttttgggggcagccagccaagcccactgcaagagctgaccggcacccctccactttgtcctccaccccagtgacctgacggtgaagttctggagtgtccggcggttaccccacagcggcccaccctaggagtgaggtcagagggatgcccccggaccctcgaccccagcagcctggacaccatggaagggaagctgtgacccggccgatggggccagctgctctggggacagagggcgtggccccctctcctgccctcctccctctcccttggccttcccacaggacactgttccctcatccctcccctgcctctcaggagcctctgggtgagagagaggctggggaggaaattaagctgtgaagccaaagggcattatcccttcttgttcccctcctggcagtcgtggccacattgtctcctgctgaaccggctctgcccctttctcaggcctttggcccagtggtggagccctgtggggaggtgcagcagcctggccccatcccacccttccgaggagctggcctccccgcttctcccagcccagcctctagagccactgcacctgcctctgagcccaaaaagataagtcctcaggtagctaaggaaaccaggtgtgggcggctgggccttgcagctaacccttaaccctctggcaacccgcagatagccccaactggccccaacagttccctggggtcccttttggatggggccaaggtggagctgctagaaagattcctttggggagatggtcagaaatacttcagttatttattattttgttatttttattttttgctgttgcctcctggaaacggacttgaagtttcttcccctatattctttccctcagctcttgggggccagaaatcccaaagggagtccgctgccccggccctccagggccgcctcctctgtttgctttgcagaggagggaactgctccttcgactctgcagctcaggcctgtccccgacacagcccccagggagtcttctagctacccctggcctctaggccgcctgacgctcagtgccttcctccgttccggggcctggcacccgtgccgggcagccttacaccagccatgcccgcggcaccacatgtgtcttctcactcgcgaggtcttgtgcccagcgcccccgggaaggcgggggcgctcaccccacagcccaggccccggggttctgccccacagtcctgcgtgggccacgtaggaagcagcatgggggctgtgtctgctgggaggtggcttggatggggaggacagcccggcaccctgacccccgcccctccccagccctgcagtcccccactgggccggggagtctctccagcttctctctctctggttattcaggagacacattttcggccttaaaactggcatggagcgcaggccctcccttgcagaaaattatcaaggaagagggagttggcagagtttctctgccccggggctggggacgcggagctccggggaaattgttaaatcagtgttctggcgccccctgttgggggaactctggaattacaggagtgggccttgggggggactgagctccatccctctcccccgccccacccccacccaaagttgcccaccctgtttttccgttgcatcgctggtcttgtgcttcccgcttcagtctgggagccaagagccagccccacctcccttcagaggacgcagtgacttttggactttccagaggtggttctgtgtttctgcccttggctcctctccgtcttgggctggggcacttggagccctctccatgtggcgcccagtgttggggggaggcaggctccagtggaggctgagtgaggcctggtcccttccccgtgccctcctcggagctgccacagaggctaagacggctgtcctgctggtgctggccctgctggatgtggtattgaagtctggggcagctgatagcaggaaggagacccccttggatgctggtctcctgggacctgaacagtctgtcagcaatggctggaaatccttcttcctctggccaccccgggggtgccgggcaacccccttagctctaagatgtggccacaaatctcttcccactcctccccgccaacctgaacagaaagttttgaccttgcaacctgtaagaaagaatccgtccgcatgactgtttacaagcgatagaaacacgtaagactctgtccccttgagctcccacccccgggccggggatgccccacctggggtgactgcactgtagctgcaaggcgtgttcttgcacgaagtgtgatcttatggccctgcgagaggtgctcatcatcatgcccattttctgctgtttctgatgggtcagctacctcacggcggggccagctctgctgtcctggcaagtgtcattgactctctaaacttgaagtccttcaggagccctgagcccaacatccatgagacaccccgagttgtgcttcatgagagttggattctctgcccactctttcagggatgtccaaggtccatgttagggggcaggcccccagctccactcactgcacaagcaccctaaatgttggaagcacaaaatggttgtgatttgagcacaatggcagggtcccgcaggcagacttgacaggcccaggcccgggaggatccccccacgttggctctgtccaaagtgagattgggggtgcctgtgtctgggacagggggctgcccttgctcagaccaggccttggctcatggcttgtcctaattctgggactcgtcatcttacttcttgcccttctgtgcccatcttaagactggaggctgagccttgtcaggcccagccacatctttacgccatgggaccaggagtaaagcgctctctaaaccccgcaccccaaatctctaaacgcctgagttcaggctgagtcctagccctagtgagcctgaagagcttggactgattcccagtctcctgggtcaagccccactttgtgctttcgaagcttatgagcgggttccctggatagaaggagtcttccatccccactgcccttgggcctcttcagcatagtcctgtgccagggccctgtcctcactatcagtcagttcagtatttgctttcacgtgagtggcggactcttctgaagcagccagaactctcaaaggcagcgcatggagttgccttgcgagatttccaaggaaggaggaaagattaacaggcggagcctggcacacccaagcctttgaggtggtcagagtgccaccttcagccccttgggaagggacagcggtgggtctgggagtggcctcaccctggattcagcctaggaatctcttcaccctcagctgtccagccctgctgcctgtctggggatgtgtggcctgggcagagggcagtttaaagcacaaaaccacatggggaaaacacaaggttgcggggactttctcatgtgcctgatgtggtggagggagacaccagcaggtggctgcagtgacgttagggaacataacacttctttgccctgctagctctcagctctggggggcatcccccgatgtggtctgggctgggagcaggcatatcccctggttgttgcctgtgcctggtctgttcaccatcgtgtttgtgtgggcagagcctgccctgcaggagcagtgactttcttcccactgtgtgtcccggacctgtggtatgtgtccctttgccatcccaaacaggcaactgcttgctgctctccttgcttggcatagcctcctggtcagtggccaatgccccacaggccttcctgggcctggccctcctctcctgactcccagatccttccctgccctcttgtgtgcaaggacagattttgcagggaaagttctgtttcttctttgatacctttgttctgtcccctgccccatccccagcactcatgatcttgaagcccctatcacactctagttcagtcctgtgaaccatgtcctgagggccttgcagggaagtaggaaatagaaactcctccacaaagagccgaggatcagagaagacccctgagatgaatcagggccctgccctgcccaccaactcttttctagcaatcatgtcctgcccaggctgcaggcttcattaggctcctgctgtcctccatgatgtgactagcacaaggtgtatatatgttttgtacctctgccgatggctgtacatagtgtatgaaagttatttaagccccatgttgtacatttctgttcctagattggatgtgtgtgttctaagaagttgtcataaataaaacctgaatgacc

SEQ ID NO: 1661 - DNA, 317 bp, Homo sapiens
tgcccacacagcatcagcatgggcttagagctggcatgaccaatgggggtggggaagttgctggggtggagaagggctagcccaccgcagcagcctccctccctctcagcagctagatgcatggcctgaggcagggtggtcaggaaccacctcaaaaagtgcggaggaagtagctggacaggccctgcccctcaccagcaagaggcatgattggatggagcttctaatgtcattcaaaaaggcctggtcagtgcctgtctggcctagggccactcccacctgcaggacattaaaatctccaggcctgtgacactggc

SEQ ID NO: 1662 - DNA, 890 bp, Homo sapiens
atgggctggtgtggttgggtcaaggccccaacaccatggctgccagcttccaggctggacaaagcagggggctacttctcccttccctcggttccagtcttccctttaaaagcctgtggcatttttcctccttctccctaactttagaaatgttgtacttggctattttgattagggaagagggatgtggtctctgatctctgttgtcttcttgggtctttggggttgaagggagggggaaggcaggccagaagggaatggagacattcgaggcggcctcaggagtggatgcgatctgtctctcctggctccactcttgccgccttccagctctgagtcttgggaatgttgttacccttggaagataaagctgggtcttcaggaactcagtgtctgggaggaaagcatggcccagcattcagcatgtgttcctttctgcagtggttcttatcaccacctccctcccagccccagcgcctcagccccagccccagctccagccctgaggacagctctgatgggagagctgggccccctgagcccactgggtcttcagggtgcactggaagctggtgttcgctgtcccctgtgcacttctcgcactggggcatggagtgcccatgcatactctgctgccggtcccctcacctgcacttgaggggtctgggcagtccctcctctccccagtgtccacagtcactgagccagacggtcggttggaacatgagactcgaggctgagcgtggatctgaacaccacagcccctgtacttgggttgcctcttgtccctgaacttcgttgtaccagtgcatggagagaaaattttgtcctcttgtcttagagttgtgtgtaaatcaaggaagccatcattaaattgttttatttctctc

SEQ ID NO: 1663 - DNA, 195 bp, Homo sapiens
agcctggcctccttcaccaaagatctgctcctcgctcgcacctgcctccggcctgcactcccccagttcccgggccctcctgggcaccccaggcagctcctgtttggaaatggggagctggcctaggtgggagccaccactcctgcctgcccccacacccactccacaccagtaataaaaagccaccacacactg

SEQ ID NO: 1664 - DNA, 1048 bp, Homo sapiens
caagccccgccaagacagacctgcaagtcttcgtctcaagggacctccctcatgccaggcccctgcctctcacagcagcaccctttcctctcattgtccctgttccctttttgcctgtggatctgtttggccagggtccctggggtcaggaatatttgcaagactcagccagctccttcccagcccagcctcttggggctgggactttctcaccctgcggcaggcacaacagatgctgggacccagtctctgcccaggtcacagcacaagtgcacatcagcactatggggcctatgtcctgcccagagacctctgctccttcctgctcacatccacagtcagggcacggcgcccctcaagaactccagagtcacctgtctcatcggctcccagcaagtgcctctttgtctatgatgtcccccttctctgaggcctggacccacccatctttgtccctggggcctgctcccagccactgaggcccgctctggccaggggagaaggagctgccgtgcgtcttccctgtgccccgtctccctgcttggttctcccctcccttccctggccggctgccatggccaggagctaagtgcctttttgtgtgcaaccacttaccctttctctgaaaaacctgttctcaggaaggatctgataaactcatttactctcaggtgtaagagactgatgagaccttagaagcgaattcctctctggaggccttgctttctagcagaggtcacctgaagtgtgtgaggaggatcatcattttcctcatcccccctcttctcacattaaggtggtggcttgccactcagcagtcctagcttggtgactgggaactgccacatacagggccaggcctaccctccttccccacaagccccctccaacccccacccccatgctctggacctcatggctcctatgagcttggagcatggtgaaccatcagagaatctagaaccaaccaagctaggaacatcagcctggtgccctgttaaccccttaaagctgtggtttacaacttttcaaaaatttaaatcattag

SEQ ID NO: 1665 - DNA, 5483 bp, Homo sapiens
gccagcttgctgtgctgcgctctgagctcctgcttcatgcttcttctccaacccagctcactcacctctctgcctgtgtctggagcatcccttcccacctctcccccacttcttccctccagcctgcatgccctcctctggaactgggattaaacagatacccaagaggcaggaaaaacgcgagtgtctgaagacctcaccctggcagggtgggcttctatccacccatgaggcacctggggcttctcagccaccccgtggtgtaacaagtggaggaggaggagggggtgagaacacctttcctccagccctgtgccacactccttctatgtgtgtacagtgtccacaggcatcacaccttcttcattaaaaacccagtttcctggtcatttctgcagctctgactgtgagccctgagaagaaagggaagacttggggcttgggaagagagggctgtgctgggctccagtcaccctgtctgcagtccggagctcgggatctgaagggagggctaaggaattggtggctgcttgccagggtcccctggggccccttctgcccagtccctgtgacgtcacactgcacacactcaccacccaggatgctcagctcaccagagccctgacctccgagaaatgaccccgtcctgcccctgactctggccatcagaagaggcctctccattaagagccgcttctcctgccggctttcatactctccttcctctgcaaacctggattaactctccctgatgtgtgctgggttgagaggtcagggcactttcaatccctcacctagtcctgctgcacagggcaggaggcctcacagaagagatacttgcagttccaggcctggccaccaggtgacgccttccttctctcctgggctctcctgtccctccggcctctgctctccccacgttcacccaccctcctcccaattgtttccccttcacactcctgcactggtcctatcccccaggactgattctttcccggagatggggtggccacttatctgtcctctggatcaggtcctttctccatcccactacctcctgggtccaaagcctggtgagagcatagggccttctggggtggaaggggggtctggggcagcctctcttcccccaacatactcactagagtggctcctgtgaagcagagaccaaagttctgacttttctttttccttttttttttttttttgagatggagtctcgctgtgtcacccaggctggagtgcagtgacgcgatctcgactcactgcaacctccgcctcccaggttcaagcgattctcctgcttcaacctcctgagtagctgggattacaggtgcgtgccaccacaccccgctaatttttgtatttttagtagagacagggtttcaccatgttggtcaggctggtctcgaactcctgacctcgtaatctgcccacctcggcctcccaaagttctgggattacaggtgtgagcgaccacatccggtcaagttctgacttttcagggcagtgggatggtgacttctgagctaagcctgcaagggaagtggctgttcccagacctggggtcccttggcttttcgaccaccctagcactggccctaggaggggctgagttatcagagcagcaacccttctacccaccctactgagtccccattctaccttcgaatcccatgtattatcttccataagtgccagaaattggtacaaagtgcagtgccagctgctccccagggcatggtctggctctctgggctgctgggctgccagcccctttcagaaagcatggcagtgggaaccagcaacttgggctaccttaggggaagcagcactctgcccagggttcttgctataaataggtcagtgggcagagaggcagatgtgtgcaaaaagcacaaccccaatcacacacagaaacccgtaggcacggacacacccagtctcaatgcacgaagttggagaacctgacagggctggtccaggccacagaggatggggttaggcttcatgccttcatgcccaggcagccacagaaacccactcttccccgcctcacagggctcctccggttggcctggatccaaagcgatctccttgtttcacctctttccagctcttccctagagcctggccccaagttccagagtcaaatcccagttttgcagtcaactattaacctggggccctggcagattggggtatccacccagtcatgtaaaggcaggagacctgctctgggcctgactcaaagcaaacacgtgggtgcagaagacccatgggaggaggaggtggggcccactcaacacacctaagccagtggccctctaggaggggcagaagagccaaccagagggttcctggaggtcatcgggttcctccttctgcttccaggcagcaacagacctaattcatctcctgtgaggatggagcaagggcgaatataggcatagacatatctggagcgcaaggattgagaggccctgtggacaaggggaaggagagcttgggggtgggagagggatctatggaaggggctgttgtagccaagaatggggcctgggctgggggcctggcctctggagagccctgattctactccagtcttctctcaccatggagacaacaccagtagagctgggagctggggcctgccactgagtaacagctcacacatgtagcacacttatgcgtcaggcaccagcatgtacaccttaatttatttaactttcacaacaaccctaggagaaaggtacagctactattctcatggtacagtggggaaaactgaggcacagagaggttagggacttttcatgatcacacagctaataagtggtggtcccaggattcaacccaagaagtctgttagaatccatactcttatcgactattttaataacagcatttcaataatagtaatatgtgatgttaaatgctttatctgagttatatcattgcattctcacaaaaatggtacatttgttagctcaaatttacagatgaggaaatggaggcctggagagttcaagtagctcactctaagttacagggtttgctagctgcagactggagactagatctcaggtcactctgccttggggttgcccttttctgagatcagactggccttaacagagcccaactttcttggaaggacacagctgggggtcgagggtcctgcatatgcacctggggagtccccacacacccgcaccaaaggggaaacattcaaaggagatgcaggtgacatacagatgggctaaggtgaggccttcctccaacatggggccctggctgagagtggagggatagggtgctacttgggggatatctattactaatcagcacacaatagctgggtgggcaccccctctctctgcagctggtggagatgggcctggtgctcctctctgcttggtaggaatgaccagggcaggatgccacctgctacactcttgcctgtcccagagcccttgggagaccagctgttgctcccacctttccccacagggtgcccggtccccacggcgcaaggaggccaagctcagctgtgtgtctgagcccactcagcagcaggcatgatcagggcagggcccagcgctaagggctgctggggctaaagtgccttgctgaaggaggggcagagttaaacattagccacaatggccccccgcgaagtgagtcatactccccacaagtctctgggctgggcagccgggggcgggggggttagcttcgttccaggtgggtgaccaagctgcggaagcccaggacagttcgctgggaccagtgctaatggcagcttctgctcctgacccccatcaggtctctttcctcagacatccccaaagcttgtctgcctgtgggtctttcattaaaggtgacgggcaagggttttctcttccttccaagacacacttctaggctggcttgtgggtcccctgagacgaaggctgagcagggtgagcctcgaaaaccccatagcactggcccagagcactgcggtcaatgtccgaaggaccagagagggagggtgacttgctcaaggtcacaaacctaactggagctaggaagtaggtccccagactcccagtctgaggaaattggatgtggacagggctttggtctcctggccagaggcaaacgcccagggatctgaacaggctgcccatctctggcctcaactcagcaccccaactggctccagtgccaaccattggcctctctcactggttggcacaggctgggtgagcctggccctttgccctgggttcaggagagaggtatggctttgcctggcagtcaggggaggtgttccaacctgggagcccctgggggaggagcgtgtgtgtgaacgcttgtgcctgttcatcagaaggggtgagcatggtgtgtatgcgtgggcatgcagaatgcagggtgatgacctgtctgcccgccctgagtgtcacagacacctgtgtgtcccctgtactagtgcctcccagatgctcttctcctgactggctctttgtgacctaaatttcaactgctccaccccacaaggaggaaaccagggccacaaatgtagtgagattttcataaagctaaatgtattcagtggaaacgaccttcctctgatctaaaagcatgcatgcctttgttttattactggagtattaaattagcccttacttatggaataggaggacagtaggtggcaattgttttctaatgctcttacttcacaaaataaaatggtggcagcacaatgtcagtatttatattacacaatattattagtttgtaaaaaccgaaagccagggagcttactgccctggattctttagggcgtgggtcttatcacctcattcatttcttcccttcccctaagagtgccacaagcatggcagttgctcagctgagacacatgaatgggaacagaactgaaatatcaggatgtgacctcgagccagctggttggggctggggatccccctggatctccactctgtcctgtccgagaaaggggaagctgccctatgagtcttttttctgggggattccagaggttgaacgtctgttctgaggctcctcagaacctcgagggaggggacgagagagatgaccccttgcccaaccactggctgaaaaatcttgaaattccctgactttgaccagggaattcccagttgtgctaagccctgcctggtggaatgtccctggaggaagtaaccaggacacgcatacgtttttaatgtacgtataaagaatcgtaaagtgaacacccatctgccaaccactcattttaagaactaggatatggcacatacttttgaagcccttatgcgtccctccccaatcacaaccccttcctctccacaaaggtaaatacaatcctcaattttgtgtttgttattctcttggttctcttcataatgttactacgtatttatgaattcctaatacatcattcagttttggatctttttgtaaacctt

SEQ ID NO: 1666 - DNA, 684 bp, Homo sapiens
cttcgttgttccctctggcttgtgggggcacggctgtgctccatgtggcaaggtggaaggcatggacgtgtggaggaggcgctggagctgaaggaatggacgagccctgggaggagggcagaaggctacgcagggctgaggatgaagatgcagcccctggatggtcccagactctcaggacatgcccagctcaggggcttcgagccacaggcctggcctcatatggcatgagggggagctggcataggagccccctccctgctgtggtcctgccctctgtcctgcagactgctcttagccccctggctttgtgccaggcctggaggagggcagtcccccatggggtgccgagccaacgcctcaggaatcaggaggccagcctggtaccaaaaggagtacccagggcctggtacccaggcccactccagaatggcctctggactcaccttgagaagggggagctgctgggcctaaagcccactcctgggggtctcctgctgcttaggtccttttgggacccccacccatccaggccctttctttgcacacttcttcccccacctctacgcatcttccccccactgcggtgttcggcctgaaggtggtgggggtgagggggggtttggccattagcatttcatgtctttccccaaatgaagatgccctgcaaagggcagtaaccac

SEQ ID NO: 1667 - DNA, 1181 bp, Homo sapiens
ggccaccatcacccaccacaccctgcccactcctgcgcttttcatcgccattccattcccagcagctttggagacctccaggattatttctctgtcagccctgccacatatcactaatgacttgaacttgggcatctggctccctttggtttgggggtctgcctgaggtcccaccccactaaagggctccccaggcctgggatctgacaccatcaccagtaggagacctcagtgttttgggtctaggtgagagcaggcccctctccccacacctcgccccacagagctctgttcttagcctcctgtgctgcgtgtccatcatcagctgaccaagacacctgaggacacatcttggcacccagaggagcagcagcaacaggctggagggagagggaagcaagaccaagatgaggaggggggaaggctgggttttttggatctcagagattctcctctgtgggaaagaggttgagcttcctggtgtccctcagagtaagcctgaggagtcccagcttagggagtcactattggaggcagagaggcatgcaggcagggtcctaggagcccctgcttctccaggcctcttgcctttgagtctttgtggaatggatagcctcccactaggactgggaggagaataacccaggtcttaaggaccccaaagtcaggatgttgtttgatcttctcaaacatctagttccctgcttgatgggaggatcctaatgaaatacctgaaacatatattggcatttatcaatggctcaaatcttcatttatctctggccttaaccctggctcctgaggctgcggccagcagagcccaggccagggctctgttcttgccacacctgcttgatcctcagatgtggagggaggtaggcactgcctcagtcttcatccaaacacctttccctttgccctgagacctcagaatcttccctttaacccaagaccctgcctcttccactccacccttctccagggacccttagatcacatcactccacccctgccaggccccaggttaggaatagtggtgggaggaaggggaaagggctgggcctcaccgctcccagcaactgaaaggacaacactatctggagccacccactgaaagggctgcaggcatgggctgtacccaagctgatttctcatctggtcaataaagctgtttagaccag

SEQ ID NO: 1668 - DNA, 1915 bp, Homo sapiens
gaccaggctgccaggcaccatctgccaatgccatgactgctcaggcctcacctcccagggctacacagaccctgcccaccccatccctggctgacctgctgtggatgtccctattctgccatgggagagtccaggcctgggtcacgctcaaggaaggatgccttatctcttctcactttccttttcttgtctctgaggctctccaaattttgctttagtacatggagctcaggtttctggacaagaagagtccttttagcacatcactgagaagatggcactgtccagggcccatgtagctggcaagctgcaaaaggcctgtgatccaggaaagatgtcccacagggaccacatccaccccagccccactgccctccagggccaggattcaggcctctgaggagcccacggggcaaagctgctgggccagtggcactctgtgtgggaaaatggcagaaagatggagaggcatgggggcccaaaggggagcgtggggaggggctgaggataccccaaagtccaggctaattagaggatgtggcaggggcagtggcctggatgcacagtgcctgatgggagtaggctccagacaggaggagtgggacagacagcagctggacttgaaggtttgatgccaaagcagacattttcctcacacccacctgctgctgtatgaatagctgtgtatctgtttttccataagattttgataatatatacaaacctttagctgtgaatggctgtgccccacctgttgtcctgaactgtgagtcctgatcctaaccctgggctccctggaggactctagaagctcaggttccctgccacactatttgagttggccaagaaataaattcacatcctcagaaagtgcagcatggaggaaaatctgaactctaagcagaagactctccactgacctggttgtccaggtctagaaggccaggcctctactaggtctgctcctgaaccagtcctgctgcctggagtcagtagccagagttgttctcaggggtgctggggcagagtggagcccagggtgctgggatggctatattaggcatgttcagggatgctcattccatgactctgcctaaccatgggctcagggccaggtcctcacagcagtcacaggcccaggaaggcggcaggcagagaagtggagtgactatttggagaatagcacccatatctgtgtgccctagggctcagaggggcctcatcttccccagccctccccacctgctcaccaattccacttcctgccccaactgcaggaatgctgacaatgctgccatgcccaccatcgggtgtaggtgaaaggcatctttctgaatttcattctcttgaaggtgctgccaccccttggcactgtggaactgccaccttgggtctgtgtcacttgtaggtttctctgcctccaggttgcctcaacagcaggaggcacagcagtttcaccatctttgaggtgagggtggggtgccccagctaggaagcaagatcgctgtgctaggtctgaccaaaaccagagggcagtctagtcctgggggtaaagccctcagatcccagggtacactcttctccattccctccacccacttgcctgtcaccccagtcacctaagcaatcactgggcccagaggagaggagacagacacacactggctcctggacctaaagggtatgagctggagctaaggccagctagagcttccactgtcagccctcactgtcagtcccactgcacccccctgtgcctgctgggcactgggcactagctagatgctttaggttgcttcagctgatccttcaactctgtgaggtggataccaatattctattttgcagatagaatttggcccagagaggttaactaatatatccatgatcacacagctaataaaagtcagagctc

SEQ ID NO: 1669 - DNA, 1618 bp, Homo sapiens
gactccagcccttctccctcagaccagggaccgtcatcatctaaacctgaagccgagctccccgcccacccctgtcgtccccctaagcccacccctcctcacccagtgtgaggagggccctctggggaccccagagtcctgttctgctgaggtttgaactcctgtttttattgtaaaataaattgccccccattctggtcccctaacttctcacccttccccgctgcctttgtcccatcacccagccctgcctccctcccagcagccctgggccacagcccccgcccctggcttttccccggcccgctcttgtacctcccttttcaacactctctgttattgtcctgtgtgtacagtatatatatgtatatatattttaattttttaatttaagcaaagactaaaatcaaccatttgatgctgcaggggcctttcaggatctgggagggggcagtctggagagaaggagggagacgcaggtggacttggggcaagttcagatcagaagaggtgcaggctggcacctgcggcaggtaccagcctgggcactggtggccgcctccctgtcccgtgtgtttccaccgcccaatctggcttgtcctggcagtgcttgaatgccacaggctggcaggggcctctgggggcccctcccctcgacccccagcctgggtagagccaccaggtacgacgaccaggtaccagaaaccaccaggcacacggggcagaaagccagcgtccatgccccagcagccccctcctgcctgttcctggctcccagctcccgcccctccccagggcccccacctccacggcccacttcattttctgttctcattttgcagagttgcacaaggagagaactcagcatggggggttggttctttgggttctgtttgtttatttgtttaatttaatgatttgtaaagtgatgttcctcttccttttttacacttttcagctcatatttaacctctgtttggaaaatgattcttgtaactgtacatttttttgcttcctaataacaatgacaacaaaaaaaataaatgaccagttttgtgttggggggggtgtatggtgctggttacttttccgcagttggcatgggttgccctacaggcccacagggccaccagcacacccccgcacgctgggcaccaacagagccacggagcgcgagcacatgcccgcccggggagcacaatggcgctgcacaaaacggcctcccacacgtgcgtccaggctcttgcgccacctccttctcattctcttttcagactttcatgtagtcccagctttgagccagcagctgccacttggggctgcagagctctgttgagggaactgcccagggctgggtagaggcagcaaggggacagggctgggtgctgttgtgtgcgaactgagctgcactctccttaggcccagttcaggcctcagcccctctttcccaggccctggatctcaccagcagccaaggttgagccagaaccagaaccctgtccctccggcccccagttcctaccccagaaccagttaactgtgcttcaggggtagggctgggcccacagagcctgggggagtgtcaccgcctttgctgcctctcagttagtgtcaatgc

SEQ ID NO: 1670 - DNA, 1591 bp, Homo sapiens
cccctgccaccctccggtggcccaggtgcctacctccctcaagcctgggaaggtgggtctggggaaagtgggccgagtgatctgggggtaccccttgggttggtgtggggaaggagtgcctccttagtggtgcttgcagtcacaggaagcagcagcagtaaggacaaggggccggattccaggtcttcaacactggccactcctctgcttcctctgttggccccagatggacagtaaggggaacctccaatgtctctctgaacttaaagacaggagctggcatttatgacagacaaagaaagaagcccaggtgtcctggtgttctctgagacactctttgtgagcttcagtttcctgttctataacatgaacataagtgcttagctgccatgagggaaaagtaatgagagaagtttctagaagccactccagccactccttcctggggctgacaaaagggtgattccaagatcatccttcacccgaggtcctgcccaagcacaggccagatgcaagaatggggaaaagtctggtcctgatctccaagtctcaacatcctatcagtgactctgctccctgaccacacatcggaagggctggatgaccccaatcaaaagaaagaacaaggactctggttacccttgcctccacccatgtgtcataagagtaggctacagaggtgaccaggcctggcagttgaaatctctggaagagggaacatgtggggactactcagaggcaaagaggagctgctcctgcctccatggttgctggccactcccaccaactactcttagggaggctaagcagtctctgttttgcttccatggctcaaataataccctgggtatgcaggacccactataccttgcatttgctgagtacacctagagagcttggctgtttccaaaaacaatcagggtcataaccatccatgcagacatggaggctcggctgaaccaggactcctcactgtctacctgagagaatgagcacccctcatccatctcagcatcaacacaatttccaggggacctcaggtctacctcaggactgaacgccacacctcaggattcctcctccttgaatctgagactggctgcccattctgagatggggatgaaggtaagatgccgcatcaccaggcacgccgcccctgacagctgccttgataccagctctctgtggaaacccccgaggagttggatctggagaacagctgggcctcctcactcaggacttctctcctgaagaacacgcagtgctaaaactgaggatgatttccctaatgcttctgcttggccttatggaggagctgctccttccttacagccttggggatggacttgcccacacctccacctcccctgagccctgtgagaggcacgactgtctatgccaatgaggctcggtggggggctctcaagtgcctgatcctgccctgggctcagagccagcccagagggaagcaactgcacagccccacaggccctccctggcactgtccccccaaccccatctcagagctcagagggtacaagctccagaacagtaaccaagtgggaaaataaagacttcttggatgactgac

SEQ ID NO: 1671 - DNA, 178 bp, Homo sapiens
gggacttgtcctggttcatcttagttaatgtgttctttgccaaggtgatctaagttgcctaccttgaatttttttttaaatatatttgatgacataatttttgtgtagtttatttatcttgtacatatgtattttgaaatcttttaaacctgaaaaataaatagtcatttaatgttga

SEQ ID NO: 1672 - DNA, 651 bp, Homo sapiens
gcatcctccagcttccctggtgctgttcgctgcagttgttccccatcagtactcaagcactataagccttagattcctttcctcagagtttcaggttttttcagttacatctagagctgaaatctggatagtacctgcaggaacaatattcctgtagccatggaagagggccaaggctcagtcactccttggatggcctcctaaatctccccgtggcaacaggtccaggagaggcccatggagcagtctcttccatggagtaagaaggaagggagcatgtacgcttggtccaagattggctagttccttgatagcatcttactctcaccttctttgtgtctgtgatgaaaggaacagtctgtgcaatgggttttacttaaacttcactgttcaacctatgagcaaatctgtatgtgtgagtataagttgagcatagcatacttccagaggtggtcttatggagatggcaagaaaggaggaaatgatttcttcagatctcaaaggagtctgaaatatcatatttctgtgtgtgtctctctcagcccctgcccaggctagagggaaacagctactgataatcgaaaactgctgtttgtggcaggaacccctggctgtgcaaataaatggggctgaggcccctgtgtgatattg

SEQ ID NO: 1673 - DNA, 997 bp, Homo sapiens
acagcagcggctgggaccccacacctttcacggacactgacaagatccagagctatcaatacctcagttatgcaaccttagaggttttcttttttctttcatttgttgggtggttgtgtccttgtttttccttgtttttctctttttaaagaccaacttccctttgatggctgtgtgaggagagtcccctaagaggtgaaagagaagcctggctctgttcacggtcccaggagctgtccttgctgcatgccctgtcacagttccctcgactctttcaaagcttcacatctgcctcaccccaagcgaggctctctactggcacaaacttgcagcagttcctgttttttgagccttctggaccaacaaaatggcagcacatcctgcttcctgacagggaaggcatcacagtggccaatgatcgtgtgtgtgtgtgtgtgtgtgtgtgtgtatgtgtgtgtgtgtgtgtgtgtgtgtgtgtgtgtgtgtgtctttgagcatttctcttcattcctggaatgtgtgtgtgtgtgtgtctctttgagcatctctcttcattcctggaatgagccatggacagtaaagttgtgtgggaaaagaaggctctttggggaccctgacatgaagaagtccactaagtgggagatcttctctcatctatggcaaagtctcaggatcctgttcagatatcggggctttcatactcctgttggtggctatttgggaggcagcaagatgtgaagactggatgtgttcagaactaggaccaaacgatgccatcaaatacttcctcctgccagtcatggtttccccagaagtgtagttcctgggacattcatggatatgagctattcactagttgggtcagactaacagggactctcagtcccaaaatctcactcttattgacaataaatatcaaactatgaagaaacagaagtcccattaccagaaagaccaaaattaaactcctggatcttcaccccatccagtgggaaac

SEQ ID NO: 1674 - DNA, 1631 bp, Homo sapiens
aaacacaaaaacagatacccccctacttaatgtaattcaggactccaaccaagaggatttcttcaaatctcagcaaagctacaggactggtactcaagccagcctgtaaacggtgctatttctattccttatgggatcatttttccaggactctttgaagaaaagaaaaaacaactaaaaaaatttttgacactttttgtattttttccttaagagctatttgtggttgttgaggtttgaaaagctgactgttttttttgcaggggttcccaccaatttggaaggcattgaagcttgcaccttttcatgtacagcattaaaattttacctctctctgggatttaccagcttaagagtccaactcacttccagtgcccaaaagggcacccaccagaaattccagtaaatcctcatttgaggaagctctcccttgtttactctgttaccacattggggaaatttttaagtttttcactttgggagtttttgtttgtttcttcttttcctttatccacttttcttcttcctggtagactaggtttatttatctgagcaataacttctatgttggtttcagtggctggaattaaaacaaaacaaaacaaacttccaaacagtgtgttggtgctttagcgattgattgatgtacagaacacaaatgtctagtttctagtgtcactgatgaactagtgatgtagaaaagagacttctctgtaagtaattgccacagctgtattttggctttctccctgtcccttcctttctcccctattttttggtagcttgtatcaaatgttacagtttatattgtggaataaatccttcgtcctaacataacactaaatgctgattatttagagccattagagcacagcttcttctgcccctctactgttgcacagccagaaggggctgcttgcttttgcctctgcccaaccaggttgcagtagcagtggatgttagcctgcaaacaacattaggggattcttcttttgtgtcctgctctgtttggtgggccatatgcctacagccctcactaacaaagaacccctctgtcttcaaggactagaacctatctttaaagccgtgctcttttaaaataagctttctcagaatgttggcaaatcacttcaatcctcaaatcagtcttccttgtggaatgctgcctttattatatttgaattgacaggggaacttggtttagggttaagacgttggaaggaaatctaaggaaaattaatcctcacagaggtccgggtttagtatatgtcttgagaggagacttgtgaattcccagactctgcctcctggtttcctttctcatttctttctaactgtagctatcattactggctgtggatagcccatagctattttccttgcttttcttttttaaaggggtctgttctgcagtggagaagacattctggtgaccagacttttgcttaccttttcctattctgttgccaatttttgttttccccacattctatagccataaacctgaagatgagtaaaactggtgggtctttaataaaacaacaacaaaaacagcagtttgtgatatagcagaggtttaaatgtaccctccccttttatgcacttcaaataattaaatctctttaagaatg

SEQ ID NO: 1675 - DNA, 2020 bp, Homo sapiens
ctgaggggaggggtactcagctccatctccaaagataaacctactccccacaagaactggcctttaatgtggtataactgttccgctgccttcttgtctgtgctaatataaatactgagtaccagcatgtccatttgaacatgcagagggttaatcctgcttcctaaagcctcaagtacatgcctcctgcttagttcactttgtatcacatttcctaagctcccttttcccccagttttgggacactgtgcttacctccaaaaatctcatctcttccctggcattctccctaggctctgttttgcccaggggctcccgctttttcttgctctagaagagcagtattcaaccttttagctatgatgacacataacaaaagatgcttatgtactaatagttgaaatctgcctttttctcattcaagaaggcatacaaatatctgagagtgactttgttgtatggctacccttgtgatctacagtaatttattctttctaaaggtaaagcattttcaaaactcagtatttaaaccactaaccagaaacattactttggatgcatctctaataccatgtttgagcacctctgctctaggttgagaatgacattttattgtgaagatgggtgtggtccctcttcccttgaaatcttgtagtttctttttatattagctcctcactgctacagcctagaaggtgagaagcagattttaaccccatctggcagccattcaaggaaaacccagccctggctgtttactcaggctctcttagaatgagagtggagggtgtaggatatgagggttaggcctttgccacattatacaaaagtttataatttgccacatctggacaagtaactttcttcttttgttcataggcaagacttctttaatggatagtatcatttactgaacctactgggcatggtcctcatggagttttggttcaactggaatctctgtgccaacccaggatacaaacttccatccagatgcatggatacaaatttccatagctccggggctgctctaacagtttgatatcagcagacgtgtttaagccttcaacttgatttccaattattccatcatttctattctgaaatgactcactgtcgtagaaggaagtttattatataaccaaggtttcaggtatcctcctgtcaccacctctactattcaggaggcctaaaattgaaataagtactaaacagaaaccttaccatctgaagtcccttccattgttttctagttgcttcctcattcctttacccccaaactttctaagggctccccgactgcagtgcaaggtggccttgggcacagttttgcaaccaacctactcccctggaaagatggcttccttctccaattagcctgaatgagctttagtaagcaattgagagaactgtgtttttccgacaaacggtcacatgtccatcgttatggcatgtgcagaaaaacagagttatccacacaagtcaggagcaaaacccaagtagatgcctctaggggcacatggcccctcacatcacaagccagaacctaagctaagcattttttaaattgagtttgagactagcctgggcaacatagtgagaccccatctctatttaaaaaatgaacaaaattacctgggcatagtggtgtatacctgtagtccctgctacttgggaggctcaggtgggaggatcacttgagccccaaagatggtggctgcagtaagccaagatcacaccactggcactccagcctgggcaacagagtgagaccctgtctcaaacaaacaacaacagtaacaacaaaaaaatatatagcgacttgaataggaaaccatagtatttcattgttttaatttgcatttattttatttctagtgaaacttttatatacgtatcggtcatttctatttccttttttgagaactgccaaatgttgccctagtagccaaaaatatcaggttgctattctgccttttcagtttgatctgaaagaaataaaggcatttaagcaatggaa

SEQ ID NO: 1676 - DNA, 1431 bp, Homo sapiens
ccattgttggagcaccatccagagctagtgaccagtccagtggacagttagtgggagaatcaaaaatcctttccagaatgtctgtttctcactatgtgcaccgggtgattacaggcaccagtgcagtgatgattgtacttatttgacacatactccccgtcgtcctggttcttgttcctgagaagggtgggtaacagatattccaggaaaaagaatgcacattgaatggatgtgagagaccacattgcctctcccactgctttggggagcactttcctgtcatttctaacttaccacatgcttggtgtactatatgtatgttgtgcctcatatgttgcaaagaactaaggtgagtatagcctactagatatgggcaatatccagcctagatgattggaaagataccagtttaagtaaacttggtaaaatccaagtctttttttttttttccaggaacaactacattttctcatatacaggtagctaggggcaacacagttccattctagagggaaacaaaagggagagccccacaaaactttggggacaagggagagagagactcatctgacacttcttttggaggtcaggatttgtatatcagaattgaagttagaattaagtgaattaaactgaatttgattgtgagtgaacctagaacagcactgaagtattacataacctggaagactgagaagggtatattatttgaaggatctttttatttccccgaggtctttcgcactggagacagcataaaagagtgaacaaatgttgggatgagagaagatgacatcaatgtgggagttcagtataactggggataaactagaagaacctgtgattttacagtcatcttattacctgccagggctcatctagccatggcaatgtttgccttgaatgggggtgaaagcctttctttgttggatcaaatactactacactattacacttccacactatttatttggggatgggctgggagtgacagtagcctagtagttcagctacctgattactgccccattcttttagaagcacatgtctgccaaggagtggtttgtactgctgtgtttggtacatctagtcttttttctgctataagttttccttacctgtcctttagtgtagattttattcatcacaggacagaataatcaaggacaaccaaaatccttttgttagtttcagtacctcagctatcaacatttctgagctaccattcaatgttcctctgtgtcatggagtgaaattcttgttttgtgggtattaggagtgtgggaatgtgataacctaaacaacctttgctctgaaattccatttttccctctttccctgagttgtattgacctacagagttaatttcctttgtatttttttaagaaaatattaaaaatcaacggtctcaaatgccgagagtttgtggct

SEQ ID NO: 1677 - DNA, 747 bp, Homo sapiens
gccttcccacctgcggggtggaggaggaacttcccaagtgcttttaaaaataacttctttgctgaagtgagaggaagagtctgagttgtctgtttctagaagaaacctcttagagaattcagtaccaaccaagcttcagcccactttcacacccactgggcaataaactttccatttccattctcctagctggggatggggcatggtcaaacttagccatcccctcctcagcaaggcatctaccggcccctcacagagacagtactttgaaactcatgttgagattttaccctctcctccaaccattttgggaaaattatggactgggactcttcagaaattctgtcttttcttctggaagaaaatgtccctcccttacccccatccttaactttgtatcctggcttataacaggccatccatttttgtagcacacttttcaaaaacaattatataccctggtcccatctttctagggcctggatctgcttatagagcaggaagaataaagccaccaacttttacctagcccggctaatcatggaagtgtgtccaggcttcaagtaacttgagttttaattttttttttttcttggcagagtaatgtaaaatttaaatggggaaagatatttaatatttaatactaagctttaaaaagaaacctgctatcattgctatgtatcttgatgcaaagactatgatgttaataaaagaaagtacagaagacacttggcattcaaagatttc

SEQ ID NO: 1678 - DNA, 781 bp, Homo sapiens
gattgtcttccaagccgggcatccttgcgagccccccaagctggccacagatgccactacttctgtagcaggggcctcctaagccaggctgccctgatgctaggaagccagctctggggtgccataggccagactatccccttcctcatccatgtaaggttaacccaccccccagcaagggactggacgccctcattcagctgcctccttagaggagagggcatcccctttccagggaggtaaagcaggggaccagagcgccccctcgtgtatgccccagctcagggggcaaactcaggagcttcctttttatcataacgcggcctctaattccaccccccaagtgaaacggtttgagagacgcagtgccctgacctggacaagctgtgcacgtctcctgttctggtctcttcccgatgccagtggctgggctgggcctgccctgaattgagagagaagaaggggagaggaacagccctctgttcccaagtccctggggggccaaacttttgcagtgaatattgggaaccttccagtggttttatgttttgttttgtttcgtgtgttgtttgtaaagctgccatccgaccaaggtctcctgtgctgaagttgccggggacaggcagggaaaaggggttggggcctcttgggggtgatttcttttgttaacaaagcattgtgtggttttgccattgttttgtattttttttttttttttttttttttgctaacttatttggatttccttttttaaaaaatgaataaagactggttgccagaa

SEQ ID NO: 1679 - DNA, 1718 bp, Homo sapiens
gcagccctggcaccgggtactgggcggagagcccccgtggcatttggcttgatggtttggtttggcttttgctggaaggtccaggatggaccatgtgacagaagtccacgggcaccctctgtagtcttctttcctgtaggtggggttagggggggcgatcagggacaggcagccttctgctgaggacataggcagaagctcactcttttccagggacagaagtggtggtagatggaaggatccctggatgttccaaccccataaatctcacggctcttaagttcttcccaatgatctgaggtcatggaacttcaaaagtggcatgggcaatagtatataaccatacttttctaacaatccctggctgtctgtgagcagcacttgacagctctccctctgtgctgggctggtcgtgcagttactctgggctcccatttgttgcttctcaaaatatacctcttgcccagctgcctcttctgaaatccacttcacccactccactttcctccacagatgcctcttctgtgccttaagcagagtcaggagaccccaaggcatgtgagcatctgcccagcaacctgtggagacaacccacactgtgtctgagggtgaaaggacaccaggagtcacttctatacctccctaacctcacccctggaaagccaccagattggaggtcaccagcatgatgataatattcatgacctgatgtgggaggagacagccaacctcaggcttagatcaatgtatagggctatattttggcagctgggtagctctttgaaggtggataagacttcagaagaggaaaggccagactttgcttaccatcagcatctgcaatgggccaaacacacctcaaattggctgagttgagaaagcagccccagtagttccattcttgcccagcactttctgcattccaaacagcatcctacctgggtttttatccacaaaggtagcggccacatggtttttaaagtatgagaaacacagtttgtcctctccttttatccaagcaggaagattctatatcctgatggtagagacagactccaggcagccctggacttgctagcccaaagaaggaggatgtggttaatctgtttcacctggtttgtcctaaggccatagttaaaaagtaccagctctggctggggtccgtgaagcccaggccaggcagccaaatcttgcctgtgctgggcatacaaccctctgctttcacatctctgagctatatcctcattagtgaaggtggcttttgctttatagtttggctggggagcacttaattcttcccatttcaaaaggtaatgttgcctggggcttaacccacctgccctttgggcaaggttgggacaaagccatctgggcagtcaggggcaaggactgttggaggagagttagcccaagtataggctctgcccagatgccatcacatccctgatactgtgtatgctttgaagcaccttccctgagaagggaagaggggatctttggactacgttcttggctccagacctggaatccacaaaagccaaaccagctcatttcaacaaaggagctccgatgtgaggggcaaggctgccccctgccccagggctcttcagaaagcatctgcatgtgaacaccatcatgcctttataaaggatccttattacaggaaaagcatgagtggtggctaacctgaccaataaagttattttatgattgcatct

SEQ ID NO: 1680 - DNA, 281 bp, Homo sapiens
gtgctgcaggcctgaggggccaggtccaccaggcctacagtcaaactccagagatgcccaagacccccgcttccatagcgacggctgatggaaccgcccctggtacctgctggcctcccttccccagaggctggtgtccagaactcaggaatgggcctggtaggccccaggccagactaactgggctcaaggggtgctggaaggcgcagagattggagtgccctgcggagttgcactctgggtgggaagcactcaaataaagatgcgtggtgttaacagtg

SEQ ID NO: 1681 - DNA, 514 bp, Homo sapiens
ccctctgttctgcacacagcacgggggccaaggatgccccgtccccctctggctccagctggccgggagcctgatcacctgccctgctgagtcccaggctgagcctcagtctccctcccttggggcctatgcagaggtccacaacacacagatttgagctcagccctggtgggcagagaggtagggatggggctgtggggatagtgaggcatcgcaatgtaagactcgggattagtacacacttgttgattaatggaaatgtttacagatccccaagcctggcaagggaatttcttcaactccctgccccccagccctccttatcaaaggacaccattttggcaagctctatcaccaaggagccaaacatcctacaagacacagtgaccatactaattataccccctgcaaagcccagcttgaaaccttcacttaggaacgtaatcgtgtcccctatcctacttccccttcctaattccacagctgctcaataaagtacaagagcttaacagtg

SEQ ID NO: 1682 - DNA, 222 bp, Homo sapiens
gtcgctaaagcccctccagtcccagctttgaggctgggcccaggatcactctacagcctgcctcctgggttttccctgggggccgcaatctggctcctgcaggcctttctgtggtcttcctttatccaggctttctgctctcagccttgccttccttttttctgggtctcctgggctgcccctttcacttgcaaaataaatctttggtttgtgcccctcttc

SEQ ID NO: 1683 - DNA, 804 bp, Homo sapiens
gctgcctggatccccagagtttgtctggaaagcctcttgagatggggttatgtgctccgaggatcccaggaggaaggatggggcaagagcagacaaacctatgcctctacagcagctgtaccgttgtcctgggagtgagccccagccgtggctcaaggcacacgtgcctccagaggacaatctgggatgctcaggggacagagaggcagagggactatcagggtgaagctgtctttttcacttgtttggcactcagcccagggcctggatttatcctgcacaaaatgaacagtgcagggcccttcatctggggaaagcctaacagtggcacccaagcagagctaggaggtccaggtcctccagtggcagggagggagggagctcctttccaggtactttctttcctagatagaggatcttggtgactcatctcccagttcaactgtaaaggctaagggcctccttgaagtttccttccttatgaaaatgtccatagcaagtttgtcacttaggaatgtttttcaatgataggaaacagaaaagccaactagtaggagatgaaataagttgagatttttttttttaatagcaagaagtctggatattgtcagtagccggcattggtttaggacacaataatattggggatgatgtcctgtatttttcttggcctttttcttacagtcacaatgtggatgccatggctcaaggtatcacatccctattcaaggcaggatataggaggaagggatggtgccagatacatctgtcccatttattaaaaagcaagcttctccaaaaccc

SEQ ID NO: 1684 - DNA, 1194 bp, Homo sapiens
gtacgcagtgatccgattcaaccagtacttcaaggtgaagcctcaagcgtcagccttggagatgccaaagtgaccagccaccccatccctcccctacccatctgtctggccagacctgttctccagagctcaattctgcactctgggatccacacccttggacagggtgggagaggggacacatgggtgtccagggagaaggctctgtccctgccgccagaccccagtggttgccactgaagacctcattctcctgtctggaggggctgataggacccccttccgggggtccccttcaccccaccaggcttgggaggaagtgcctgcagccaggtcctgaaccataaccacccctgggaaacacatcattcccagcctcaggccctgctggaattggggctgccttatatgtgtgtttaccccttcctggcctggggaaggaggcggggagggctcctttctacctccagtgccctgagcctccagtccgtctccccctgcatgccccatgtgggaggtgctgagctccaaaccagcatcacaccaactctgacacatggatgtacctatcttggtgatgggtgggggccaagaattgagcatgacatcttccccagcagccacctcctctgagatccctcaccttctccaaaccagatccaatcaaacctcagcccgaggaaacatgctccccaacgtgctctcctgtgcttctgttttgtccccctgctggggggacaggagagggagtggtgaggccctgggcctccagagcctggctctgctttgtgctgtggcttagccggaggggacgtggccaagggtgaggtggccaaaaccagaaccagcagtctcctgccttgttccctccctggccctcaggccctccttccagggatgtctctccagctctactttatgtcctgaagctgacccgaggtcttcctatctggaatgactagagggagccaagaggatggggtgggggccagggccccccagggcctatcgtgggagagcctgggcaggatcccatcagaaaggtgctgactaaactggttgcccggacactcaacagcctccacctccctttctaccctcacagctcctggggccttcctggctctggcccagaaagtgattcatttgtaaattatcatggttttctttctgcattaaaatgctcatttccgg

SEQ ID NO: 1685 - DNA, 196 bp, Homo sapiens
ggccctctgccacccaggcaggccctgccttcagccctggcccagagctggaacactctctgagatgcccctctgcctgggcttatgccctcagatggagacattggatgtggagctcctgctggatgcgtgccctgacccctgcaccagcccttccctgctttgaggacaaagagaataaagacttcatgttcac

SEQ ID NO: 1686 - DNA, 142 bp, Homo sapiens
gggcgcaggtgcggggcagtgaacttcagaccccaaaggagtcagagcatgcggggcgggggcggggggcggggacgtagggctaagggagggggcgctggagcttccaacccgaggcaataaaagaaatgttgcgtaactc

SEQ ID NO: 1687 - DNA, 298 bp, Homo sapiens
aaaacagagatgagctccttgaacttggatcattggttgagggggctagagggagaatgggaaccaccccctcagtcccctgcactgactcactccccgacatatccggacctccccaagtccagaaggaaggaatggagctgagcaactgacgtcaaatccccaagtcgactcaagaggctgccaggaagcagagatgcagaccccaaggagactgggctggggctggtatcacaccctcactctatatttatgggaggaaaagtgaagattaaattcccaagttgtgcgtgtgtct

SEQ ID NO: 1688 - DNA, 3926 bp, Homo sapiens
tgcaagccctggctgaggccaatgctgtgaagctccacagagccacattctgaagccgtcctctgcccacctgaggtcctggctccccaccctggccccctgcccctgcactcccatgggaatgccgcagggagccaggctggggccatgggctgctgccagaggaccgtggatacctcagtgtccacacacccaccatgcccagccctggagccatcactactcacaccgtggtcctgggccagggcctgagatgacagtggggagcaccatcctcattaatgtccaagtcacagggagcctcagccttgccctggctggggttgtggtgactccagtggaacattccctgatgggggacatgccgtggtggagaacacacctgtggctatcttatgtgaggactagaggtgaagaggagatggacactgcctctggagccagcctgacaccaaggacagcacttgtcatcatccctatcctcgtcagccccaccctactgcctcagctggacccagggctttgacacaaacccagtgctttgcttatgggtgctcgctggggtccggtggagactgaccaccctgcttgagccaaagacaaggtgatgagagatggggagaggccattggctcccagagggaacagtgctggctgtggctagagaacagcaggtctgtgcagtgtctgagggcaggttgggaagggtagcagagagagagagacagaaagagagagagagagagagagagagagagatcctcagagtggaaggagggggaagcagcaggacacattggcaagtcaagcaggaaggagggagatggaaaggggatatcagattggtttcccccggtggagccttaggttagtgcccagtgcagtgccagactgtctcctctgctcctcccacctcatccctaggaggacccaccagtggagcacatgcagcctcagtggagatgcttggtgtggggatctgggtgaagggggttgagtagcgactgcctgggagatggctgttagtaggtctgtgcctggtgtctgcctcgccatcctggggtaaggggcagagagaaggacttgtcttatgtagggtgtggtcagccttggggccttacctacccagttccatgatatttcttgccctgttccccctggaatgtgcagtgggccagctgagagtacgccttgaggaggggggatgaggccttaatctgggaggcctatccccctatcccaggcatcccagacgaggactggctgaggctaggcgctctcatgatccacctgccccgggagggcagcggggaagacagagaaaagcaaacgcattcctcctcagctccacccacctggagacgaatgtagccagagaggaggaaggagggaaactgaagacaccgtggcccctcggccttctctctgctagagttgccgctcagaggcttcagcctgacttccagcggtcccaagaacacctactaattcctctgcactccttcatggctgggacagttactggttcatatgcaagtaaagatgacaatttactcaacaaatatttatcgagcaccttttatgtaccaggcactgttgtaggtgcttaggatattctcatgtttctgagggattacagcctgggaggattccaccgatcttcacttctagcaggttttttaaacgtgacccttggctgtatttcccatcttcacagttcaagcaccccaaacctgccctttctcccctgcagactggcaggtgggattggctcccaggtcatttcctctctctctctttctcccaagcctttctccctccacaggaaacagatttttcagggccttccatgcctgccactttgtccgtctctttttttttttttaaagtaatattttttagaaatacatgtaaaataccaagaaataatgtctgcgcctctgccacctctctctcatctcttatttcataaagctggctctttatgttgctttacatgccttaatatatgttttatggagattatacatattatagatctatatatgtaatatatttgtttggatgtctgatcttttcctacagttcctgcccaggcctgtttttctctcccttattttccacatcattcctagcatatcaagaccataccccttgcctttttgatccaaagaaggggagaggaaagacttattttaagacatctattttatgcttttgtttaaaaaaagcaaatctattttcaaattgtgcaatgtctgaatggaattggcaaatgaggtgaggagatggggtaactgcctttaggtcccaaccctgtgcctgtccctctgccacagtggcttccttccatcctattccccagtcacgaaagggctggtccccagagctcacccagaaagcatcttgccgggggcagggcattccctcggaagtcctggcctaaggattttattacactgtctgctcctgatgaccctctgcggttgtcaggcgtgaatcctctggaaggaactgtttgcagttgtatgcacaaaggagacccatgcaggcatgcaccccagatgggctgctagactacccctcttcatcagcctgctggaaagagcagacagcgtaacagcagcctatgccaaacagcactaaggatgtcagtgtacgagacggtgcgaagcccagaggaggcggcttgggatcctctgggccatccctggccctgtagcacagacacatacaagttccttggacttgtcacactccttttcacttgatccctctctggcctgggtcacatttatgacatcccccctctgcaacctttctctctgggggctgtaccaaaggcatggtacctcagtctggtatccagactgtgaaatcagcctctgggccaaggagggtcctacagacaaggtggcatctcaacctcacccaagaaacccccgggactttaccccagcaggctgccactggggcaccgaactaagccagctcagccttccaagctgcttagcctttgtcaaccatcaaagtggggaaagggtctctggccttgcaaggatttgggcaggatggaagtctttgtctaggtctgaaatcaagggcttgggaatctagagcagagctcctggccagcgtttgaagcctggcctcccacctggggcatttactgacaccctgtcgccagcctagaacatcctgctctgaatgaacagagcccagatgggggtccagagctaagtgacccacctggggaagctctgattattcatccagggccttctcaatgagcacattacctccatgatcaataaccaagaggctgcagtcaaatactgctactgtcactttgaagattttctaagggcacaagtggcacacttgctctccggcctttgggagaggcatgttcttgggcagggctggctacggcaagagggaaccaattcctttcccctttaggcaccctctacctggcagctcttaaaactaagaaaaaatatgatatacacacacattatatatatatatatatatacacacacacacacacacacacgtatatctatttatgcacatattggggccaatttgatttgctagtattagacaataaactgtacaaggaaatttattatctcagtgtctttatttagcataaaagtggccttagaagaagggtgaaggttagatagatggaatctctgtcaggggacaaacagctgtagcatccccttagcatctttctagccaatgagccccctccccaggaggagggatggcctgactgaaacaggtgagagtttgcttccccctttcagcagcattctttttagatttaggtactgaagaatcccagtgagttctgcatttgtatcttgcaagtttgtataaacccaatacaggaaataaaatgaatggtttgt

SEQ ID NO: 1689 - DNA, 2699 bp, Homo sapiens
gttggcagcctgtagtcctagctagcatacactacctcttacctgagaggtgtcttttaaaaacaaatcttggcagctgtcctttgacatttttttttttagaggaaatgtaacttggatctagtttaatttttttttttgcaacatatcccactcagaaacattcaggtttgaagccagccctgataatgaaggatgaactagtgtgatttctaatcctcccttttttgatttagttggatgtgcttttaaatgtcctttgcctgcatgaggtggaaaggggacctttttgagttgtcattttgcactttcaaaacttattttcttggaaaacaatatttatagggcttaaagcccattttcatttctaatctaaattatgtgtgcctatctgaaaactttgggctctttcttgtttctttcccaaaattcagaagttaatgggcttttatgtttttctatattttttttatttcaatgatttggcctgtctatgttaggctaaaaaataaccttgtgtatgctaccaacttaaagtgcattattttgtgtcacttttttttttcttgtaaaaatgacttggattgaaaatatgtggtagcctttttatttctacattaagttctacctaggatatttccaaggactgccacaaaacccatatgtgcagtactttactactttgggaaagctgcatctttctaccacattttaacatctaatatatttaatttctttgaagagggttctgtgtacgttattgtagttcccagtttaatatagttctttgtatctcttaacaggttgaagttattgcaaaacactctggaaagtaataattacatcataatcatttattttttaaacttaaaagcctagaaatttcctagaaagaaaataggagacatctcagagcaatttggttttggtgtatatgttctcaacagaaaaccagtgttaatgaatatcatgcctcagcactgtcacttttaaaacctgtcaggatcccactgtaaaattggaaatgggcagttctgaattttcacgtttgaaatgtaaaatataaacttcagtcaatatccaggtttattgtgtcctactatttaataatgagagaagtaatggcaaggcctttactttcaggaaaggatagaagtatagattaatgactggaaagttttaatatatttagcccaaaggttactttgaattgaagtctttgcattgactgtttgtgtttggtttatttgtttagctttacaaggtacacataagttaggttgaggggttgttaacccttccgtggtctgctttcattccgtgtgcttcctgtcacaggtaatggaaaacataagtagaataggtgacctcttagttttgaacttatttaagtgtggggatgaatttttcatcagaagtgcttacagggttactacctcagtttacaatctacctggtcattattttatttctatccagttctaagaactgcctccactgtttatatattcataattaaacacattgagaatgcaacactataaaagctggtcaaatttttgcagagcccttattctgtgtgttttttgtttttttcttttttttttgagacagagtctcgttcggtcccccagcttggagtgcagtggcgcgatctcggctcactgcaacctccgcctcctgggttcacgcgattctcctgcctcagcctcccgagtagctgggattacaggcacacaccaccacgcccggctaattttttgtgtctttttagtagagacggggtttcgctatgttggccagactggtcttgaactgctgacctcgtgatccgcccgcctcggcctctcaaagtgctgggattctgtgtgttttgtgcacctccactttaggtaatcatagggagcacatttacaggatggtctaataacatgaaaacaggctagtttcaagcaacagcaatgtcggttggaaagcaggcgtcatttgccttgaaaaaagccttttgacaacatacaggcattcttttaaaaccaggctgaaacattttatttccgagacttaacgttgtgtttcctgtttcttaaacctagcacctctgtgtatttgaaaataatgagacatctttcattggattttggaaaattgttccccatgggattctaacctcactaccaaatgagtgaaagcttgattaagagttcttccatatactagcctccttggaagaagtgatcagaaggtgataagaaggacagaaaggactattttaaagttggactgaaggagaaaaaagcaaaattcttgtttcatcccaattctagttagaacaaagttaaacccccgtaatcttaaagagaaaatctttggaggttttaattaaacattttatacatttaaagtcttgttaatggtgctttaagtgtcaatgtagcatgtaaaaggctttgtacagacaggtaaaagttccatttctgagtgatgaaatgtaacacttcttcatctttaacttgaaatcaaaactatcagattttatttttgtataatttaaggaaggtaaagttaggggactagaagactctaaattggcttctacagatcaataatttaaatgtaactagttgggattttatagttaaaattatatttgtgtatataacataactaatctgtaaattgtaataaatatatttgcaatt

SEQ ID NO: 1690 - DNA, 2212 bp, Homo sapiens
gcccagcagagccaccacccagcatcccaggctggtggcaggagctgggggagaggactctcccctgtgagactcctccttgtgaagggccagggccctgggcaggcctccagctcggtccaggtgattctggcctctgtggtaggaggcagggagagtaagacatgctctgctgtctcttcctctggagactgaacttgggttggttgtgatgagcagccccttggaggctgtgaggttgcagcaaagttttaagtttaccttgtgtcaagggagcaatgcttggtttggggagtgtgtggggtgggctgtatgaagtagcattttgggggtgggtgggtggatatcttaatttttatttttaaaaaatgaaatagtgatgttgtcctaactgggacaggaagccttgcgagaagggacgtacctatgccccagaaggcaagagaggaagactatttggactttttgtatgattaaggttcttattggacttttccctaggttttttttttttgttattgttgttgttgtttcgttttctagctataggaactatctggggaggggcccagtgggtcctcggccagagccctctctaaggacaggttggggagggttggggagggctgcctgtgctggactgaggcttgtgccactgggcctttctgattttgcctccaaaggagagcgctgtgatacctacatgtgtaaggaagggccttccgtattggggttctgccaaggacccgtattcagggacccatgctcttttggggggacttttcctcttgtcttccctactttattaggacttgccctgaataccattttctaccccttgcccctccattctcctggcccttctgggggtcagctggtctctatgaatatgctgggggtgcttccccataggtctctcccttcatttgtctctggtgggacaaaatactgactcagtccttagatgtagtttcacccaagagcatcttggccctgggaagaggtccctaggctgcagatgctactgactgcttgctaggtagcctctggaaagcattccccatccatcactccccacttctttctgctgtgctgcttccctcccaaactccatttctgtcaccctttttataagacttttcctcattctgtggggccataaacctatttagtctggagccaaagggatgccctatctgaaggaaaggggcatggggtgggggattccatcaaaactgttgttttttgccccatgatttttctttggtcagtaggaggctggattggagtggtgattattcccctggagctaagctcaggagcccgaagggagagactgagactgactcccttatctcttcatattctttattccctaccagatggatttttttttttttttttggagacggagtctcgccctgtcgccaggctggagtgtagtggcatgatctcgactcactgcaaaatctgcctcccgggttcaagcgattctcctacctcagcctcccgagtagctgggattacaggcatgtgccaccacgccaagctaatttttgtatttttagtagagacggggtttcaccatgttggccaggatggtctcgatctcttgacctcgtgatctgcctgccttggcctcccaaagtgctgggattacaggcgtgagccaccatgccccgccccagatggattttacatttgctcttttgtgtttcgctccaaagggttgtcttcctcgccaaaaggagggagggactttgaatttgatatgaatctttaaaaccagaattggctggatatttcccatgattgggaaaagagtgaaatgaggacattctgtaaactgtccctccctaattccaaggatcagaaactccccgttttgctgactcattccataactggagaaagaagctccattgaccgaagccacagggcagcatggaagtttaaattttctctaaaattaaaatgccaaggataaagctggctgcttccaggagggggaagaggagtggggagtgggcggtgaaacttttccagatgaacggaccataaatgtgttactggctttgtgcctgtagctcattttattatgacctatatgctcctgatttaaagagatctgtgtactgtttacttcccacttcccagaatcccttgtatctcctttctcgggaattgtattttctaataaatgacatttgag

SEQ ID NO: 1691 - DNA, 674 bp, Homo sapiens
agctcagcctgttctcagcagtagagaaatcactaggactactttttaccaaaagagaagcagtctgggccagatgccctgccaggaaagggacatggacccacgtgcttgaggcctggcagctgggccaagacagatggggctttgtggccctgggggtgcttctgcagcctcgaaaaagttgcccttacctcctagggtcacctctgctgccattctgaggaacatctccaaggaacaggagggactttggctagagcctcctgcctccccatcttctctctgcccagaggctcctgggcctggcttggctgtcccctacctgtgtccccgggctgcaccccttcctcttctctttctctgtacagtctcagttgcttgctcttgtgcctcctgggcaagggctgaaggaggccactccatctcacctcggggggctgccctcaatgtgggagtgaccccagccagatctgaaggacatttgggagagggatgcccaggaacgcctcatctcagcagcctgggctcggcattccgaagctgactttctataggcaattttgtacctttgtggagaaatgtgtcacctcccccaacccgattcactcttttctcctgttttgtaaaaaataaaaataaataataacaataatacgggggaaaggaacgaaagg

SEQ ID NO: 1692 - DNA, 423 bp, Homo sapiens
cagcttcaagaacttaacagccttgctcctgaagaactggctgcccaggaagccaagctagctttttaggggagtgttccagctgctggtagtggatcagcttagagggaacactcccacagccaaaagaatgagtgggagaaatggaggggacaatctcctgggagctatgcgcagtaacctaacttccttatgtcccatggatctcttcctgatcttccctgcccattgggtacccaggaaactgcaagcattgcctgtgttcctgggaagagttctaagaagcttgcattcattttctaccctttatgacttggatgcctccccacctccatttcccctcttctgagctgtgtattcatgtagagggatgtattcagcctttttagtgaacattttttttcaataaaagtaattcacagt

SEQ ID NO: 1693 - DNA, 1936 bp, Homo sapiens
agaccttcgaagttcttcattctttctcactttgccatcatgtggcctctggacactgtggtcagtcatttgaaaattgactttaatttaaaacaaaggcctgtgcctcccacccaggaggtgggagggtgaattttatgtttaaatgaagaagtgaattatggaagaagagtatacgaccttcccttccctttcaagcataagtccaaatagactctcaggaatgaagatttgtgaagacatcagataggaattttgactcatttaaactttgatgcttagttatgttgctggagaaaagatacttatgttttgctcatctaacttcattgtacccagcgtcattttgacatgtcatttcctatctcccatttgccttcggtcctcaatgcatgtctttgagtgacttcttatctgaaattttgctactggtatcctaggaaagcttttgttggatactctcattttaaacttctcctctccccagatacctcctatatttccatattgtgtgcaaaggatgggcagaaaagaaagtgcttgaaagatttcaaattttcagaaagggaacaacgaaggccctctcttcctctcataccacgttttgctcaagaagctgggctgtaacaattcagggttttcccttgttttcctctcattgcatgtttccctccaatattggttcattgtcatcaatcatggtttttgaagatagctagttttatccatctccagcaaagaatcatcaatagtttatattgctttacctgtgctggcttccagagatggaaacaaacccaggtgtctctcaacaagctacttttttactggggtgggggaatctatgcaaggagtaaagtaaaaccatccagaatcaaagcagcaaccacatagttcaaatcaaagatcaaggtgaattttttgtatcactgcctgtggaaatctatcctcatcagtcattgcatttttccctgcctatacctgtgctcctttttcttactgtgttttcagtcacttcctttctgtgaaaggttgcttagctttttttttgacatttgttgttctttataaaaataacagattggatagatgtgtacatttggtgtttgaaattctctgaaaatcccattaggaaaccaggtgtgaaaagggctcagtagcttctctgagtggcgtttttagctgactggaagtgcttaatctggatcgtcttttttttttttttttttttttcaatattttaaaaggagaatttaaatactgtgcttactgtgaaatatatcagttggtgagccgggcgtggtgggtcacgcctgtaatcccagcactttgggaggccaaggcgggttgatcacccgaggtcaggagttcaagaccagcctggccaacgtggtgaaagcctgtatctattaaaagacaaaaattagctgggcgtggtagtacatgcctgtaatcccagctacactggaggctgagtcaggagaatcacttgaacgtgggaggcagaggttgcagtgagtggagatcgcaccactgccctccagcctaggtgacagaatgagactctatctcaaaaaaaaaaaaaaaatgatatcagttggtggatgctcctataggtagccaaacacattgattacctgttagattttaggatagaaatcaaagtagagcacgtcagcaagagcctctttgtctcactccatcatttaaaaccagtatattcagtagttgaagaaagagctctccctgagtcagttgcaaaacgtctatatttttagatgccactacttttttcttaaatattcattttgagactgtcatgagttagaccagtggttgagattagtagatggctcactagacatgtttttgttttgcagacattatatccattccagtcctctgcactgtacactgcagcagtgtgcaaactatg

SEQ ID NO: 1694 - DNA, 5053 bp, Homo sapiens
aagcaaagacctttctctttcactctctagttatttccttccccctcaccttttggccatggggagaatttgacatttattcactataggacacactcccaagggaactggtgcttgctgggaaacttggaaccttcccaggcagggatgactcctggacagtgaagagttgaatgactgagcatattcagcagctcactgaagcgccaagctatccctttagcaaaaaagtgtctcagatgtgtaaaagctgaggaatgtggtgttctggcttcacaaatgaaaaggaggcagatgttaccattgtcttttcactgtatatacttctaagacagcaagcgggacactgcagtggcaatagtgttaaaaaatctcattctcatgatttttggctctagctaggaatagtttagtcaggactcagaaaatttgagcttagttctgggattatgaaaacatggggacaaaaacaataacttgtggatgtctggttcctgctgtctgcagccaggtatctcaggttgcaatggtcagaagtcccagtgagggagctagaaacagagctatctgttcctcatagtgccagtgtgtttacatttataggaccacatatccctggtttctgggggagggtttcactgttacatcaccaagaggccctgaaaagaggaaaaaaaaaaaaaaagaggccaggcatggtggctcacgcctgtaatctcagcactttgggaggctgaggcgggcggatcacaaggtccagagttcaagagcagcctggccaacatggtgaaaccccgtctctactaaagatacaaaaaattagccgggcgtggtggtgcatgcctgtaatccaagatactcaggaggctgaggcaggagaatcgcttgaacctgggaggcggaggttgcagtgagccgagatcatgccattgcactccagcctgggcgacagagtgagactctgtctcaaaaaaaaaaaaaaaatagaatgtgtatgcatatatttgtgtgtatatgtatatatgtgtgtgtgtctatatctctatctatatagacatacacacaggagttattggatttagagttactgctaaccccagaacagaatctgttcttttacctttgagtcttttcttttgtttacctcttttcatctcaaagtgggaaagctccagataacatggtacttaggagtgagtgtctaagcaaaaccaacccaatgcgaagtatttgggtgagaactgagaggtgggagatgattggaggccatggcctatgtacaaacatactggaagaaaaccagcttgtttttaaaacttaacacaatcagaaatttttctttttgtgtttgaatctaacacactgacgtttggaaaacttgatcaatgagcttttaaccacgatttctcccgcaatttgttccttctttttacctttttaaaaatctgttagaagaaaaaaagcagcagacgaaagagaaaaaccctcctctggtagttctgtgtgtgcccctcacccctgtgtgctagtgtctgggaagtttccctgaaaggtgggaggcgggtgggtggtcttttggagggttcctcatgaagtgtgcttgaggaaagaaattctgattctaggcagaggaaggggaacaatttaaatattggtgcatctcagatgcacttgacttcaagccttcctcaaccaaactggtccattagattccgaaaaacaggtagacgaggaagtagacagtggaagtgagtagtctccctccatctgcctaatccccaataactgtggtctggcccctgtgttcagcccgagagtttgtaaaacaggtccccaggtaggtgtataagatgagttgcaaattagccgggcatgctggcacgcaccagtaatcccagctacttgggaggctgaggcaggagaatcacttgaacccgggaggcagaggtcatggtgagccgagatcacgccactgcactccagcctgggcaacagagcgagactctatctcaaaaaaaaacaaaaaaaaaaacaaaaaacaaagatgagtcgcacatctgctgctgggattttctagggttgtctatgacagaatgaccatcttttaaatattaatggagtataaatggagtctataatgggtctttcatataacttttaactctttggctatcctgggctctgatcatgatatgtttgagcatagtagctccctaaactcttggagcctttcagaaattccatgtagtgctaataacctttttacttgcaaatgataaagtaactgactcagtgtctttgggctctgcaggctttagccttgttttggtaggatgttcagtatattctcagaatttttaccacctatttagctatacttcaagtactctattctctgcactaacttactgtccttctgggaactatgatggggcttcaagggagtcaggtgtcaagaaaggaggggtaagtactctctacttgctggaaaatcattgtaagtctgttgtgtatgaaattttaggaaaagtcttatatagttccctttccagactgttttcttttgactctaactataatcataagtctgtgcttccattatgaaggtcacattcctagcattcttgggaagtattagctcatactctcattcacatatgggaggttagatttttttcctctacccagagtccctttttagtttaccccacggcttagtttgctgtcagataccagttctctagcagattccccaacagttttttccccagtggggagggtggaagggagggactgatataagtaaggagatgagtagttgtgttacagttcattttctttaaaaaaaagtattttgagaaaaggtgcaaaatattcttgaaagtctctaggccagccaaagtccacatatggatatttggggatgttatttaaatactcagcaggctgagtgcaggtatacgtgtgtatagagtgtgtatactttgcttttgttttataacattgtcagctaattttggctttgttctttggcatccattcttattataagtgatggaatgccatgaaatgtactgtattgtatattacttgggaggacactaggttttcaaagaagtctggcagcacttgggttatagagggctcagcatgaccaaagtcctaaagattttacctcccagctttggttgtatgtgttcccaagtggtgaggtgagattgtggctggaggaagaaaaaggatggcatgaaagaatgacccttattgtggtctgtccttctaatcaacataattagggcagcttaccccaacatgaaaatgatgacctggccatttttaatggccagagcttgaagtctggtctctcattttgtttcagaaatgagtgagaggccttcctgcagagcagtcaggagaaatggtggagcctggggccctggaatggctgaccctgtgcctagagagctgatggcaagggctgtctggcatggctcatttgggtggggtttccccaggcataccttagttccctgatcctctgcaaagagtagctcattgactgagcaagcgcttcaggaggactgtgctggttgttcccagaccaaagagagtcacttttgactccatcaacttcaaggggacagagcctaggcagcagattctcctaatttttaacactaaaattcaaggaagcagtggaggaaagaatgcattactaccacagatagaaataggggactcatagaactctcgactagtacctgtcagctctcaaatgcattcttgtgtctttgcttgagctgccaaagaagggtcacaaagtgttcttcctcatggaagaagtgcctcggggttgcagggctgcaaagtgacaactgcactgaatgacactttattttttggctttggcttattatttagcactgggaggcccaggggaattggtgattacagtagcactttgggaagttaaagccccctttgggcttgctttggagagatgatggcatgcttggtattccatttggataatcaggaagcctccctagtccatccatattgtgtcagagtgggattaacaaccctggaagagtccactgccaaaagagtagttgctttcctggaatttccaaagcttttggattttctggatcaagtaacccactttttaaaacctgaggtcaggagttcgagaccagcctggtaacatggtgaaaccccgtctctattaaaaatagaaaaaattagccaggcatggtggcgggcacctatagtcccagctactcaggaggctgaggtaggagaattgcttgaacccaggagacagaggctgcattgagccaagatcacaccactgcactccagcctgggcagcagagcaagactccatctcaaaaaaaaaaaaaagaaaaagaaaaagaaggttaatccttcagttatggaggtgggatgaatagagcttgtttgatgttaaagtgggtaaggagggagtggccttgagacacttgtattccaaactctcctggaggtttccagtagcactactgttcctaaaagggtttcatttttaacttcatctgttttgttaacatccagtccaattgaggtgatctcagaggtgcatcaggacatctagcactggggaggccaccttgcccagatagttgaaaagaaaattggtctgggcagcctgttgtcttttgtcttcatgtaatgttttttctttgttttaaaggactaatgtttattacagtgttaaataaaagtgtaagatactaagtgtgtagaataaaagtgcaataacaaaagacaatgactttggcacacacttcagtctttatcctctctcctttcttgtgctacctggctctttccataatattgttacagcaggaccgtcttaattgtgtgcattttgaagagatgcgactctgggttaatcttcattagtgtaatattgaagggttgggtttggttttatagagtattctgtatacttgttgggatacacaaataccagatgtgctgtataataaagatcacattaacgttt

SEQ ID NO: 1695 - DNA, 1385 bp, Homo sapiens
gtggagtaggcattgccccagcccggtcaggctctcagatgcagctggttgcaccccgaggggagatgccttctcccccacctcccaggacctgcatcccagctcagaaggctgagagggtttgcagtggagccctgagcagggctggatatgggaagtaggcaaatgaaatgcgccaagggttcagtgtctgtcttcagccctgctgaacgaagaggatactaaagagaggggaacgggaatgcccgcgacagagtccacattgcctgtttcttgtgtacatgggggggccacagagacctggaaagagaactctcccagggcccatctcctgcatcccatgaatactctgtacacatggtgccttctaaggacagctccttccctactcattccctgcccaagtggggccagacctctttacacacacattcccgttcctaccaaccaccagaactggatggtggcacccctaatgtgcatgaggcatcctgggaatggtctggagtaacgcttcgttatttttatttttatttttatttatttatttatttttttgagacggagtttcgctcttggtgcccaggctagagtgcaatggcgcgatctcagctcacctcaacctccgcctcccgggttcaagcgattctcctgcctcagcctccctagtagctgggattacaggcgcccgccaccatgcccggctaattttgtatttttagtagagacagggtttctccatgttggtcaggctggtctcaaactcccgacctcaggtgatccacccacctcggcctcccaaagtgctgggattacaggcgtgagccaccgcgccccacctaacccttccttatttagcctaggagtaagagaacacaatctctgtttcttcaatggttctcttcccttttccatcctccaaacctggcctgagcctcctgaagttgctgctgtgaatctgaaagacttgaaaagcctccgcctgctgtgtggacttcatctcaaggggcccagcctcctctggactccaccttggacctcagtgactcagaacttctgcctctaagctgctctaaagtccagactatggatgtgttctctaggccttcaggactctagaatgtccatatttatttttatgttcttggctttgtgttttaggaaaagtgaatcttgctgttttcaataatgtgaatgctatgttctgggaaaatccactatgacatctaagttttgtgtacagagagatatttttgcaactatttccacctcctcccacaaccccccacactccactccacactcttgagtctctttacctaatggtctctacctaatggacctccgtggccaaaaagtaccattaaaaccagaaaggtgattgg

SEQ ID NO: 1696 - DNA, 879 bp, Homo sapiens
ctgtctctgggctcagtacctttgccctggaccatatcacttcactcttaacatgaggaatgatcttgtccaagcagtcggggctacttccaagaatgtcagctcctgttagcaaccagtggagtctggccttggggctctaagttgacctctctatagctccaaatcctaccaatctcagaaaactgtaagaggcacagatgactccaccagctgcagagctgactctgaagagagtcttcacttactgcacaggcaaagaaaggcacaggaatatttcctacctctccctcctgtgagtcccacctccccccacccccatctccaggaggcaggtagagcagttctgaccgagaggatagactgctgttgctgtctttccccagctctgaactagttttaaggtagcttaggatgaaaaatggagaatgattgggggttccaaaccactttcttctcccttggcttatatctcttcaccatttggtggtcaactgtgggcctaccctggacctcatctactcagcgagaattggacatgaagctagaggcagctgccttggaagggaagtcaggctcacttggacagcccaggccatggcaggaagaatcccttcctcttggggtccttgatgggcatgtgtgatggggaaggagcagtctcccagccctgggtctgctccccacatctctcctaattccacttcaccttttgccaccccctccccaccagaggcctagcccttttgtcaccgaaggcccccagagtgtttctgtgtgaaaccctctcatttacactgtggcatcaaaatccacaaaagatggattaattgcactctggttaatagcagcagcacaatgattaaaatctatattcct

SEQ ID NO: 1697 - DNA, 350 bp, Homo sapiens
agcttgctgtgcttggtattttcatcattgtggtgtttgtctacctgactgtggaaaataagtcgctgtttggttaagtaatttaggagcaaagcaatgctccaagcgaggcctcctgcttcaggaaagaaccaaaacactaccctgaagggccagcctagcctgcagccctcccttgcagggagccttcccttgcactgtgctgctctcacagatcggtgtctgggctcagccaggtggaaggaacctgcctaaccaggcacctgtgttaagagcatgatggttaggaaatcccccaagtcatgtcaactctcattaaaggtgcttccatatttgagcaggcgtcaaac

SEQ ID NO: 1698 - DNA, 558 bp, Homo sapiens
aagttaccccatttctcatcttaattaggattgctaaaatagaaagtttggagtattttcttaaaaaattcattgttctacaagtaaataaatattttgatttttctatttcctcctaaagaaagtacacacactctctcgctctctctcggtcttataaaactcgttggtgtcttataaaacaaacagtgataatctcaagttagaaaacagtaggtcctgagaaccataagaaaaatgactggtgtgatgttgagtaacaagttggtacagttactttagctatttattaacttgctcatctcatagaacattttagtagatttttcacacacctcattattaaaaaaaaacaaacatgctggtgtcttggttacccattattcctctgtacctgaattcaggttggtttttctatttggaaaagactttataaatgttggcttaaaaagaggttgagcaccagaatctcagaatttaccaccaaagaactcatccatgtaaccaaaaaccacttgtacccccaaaaactattgaaataaaaatttaaaaaatttt

SEQ ID NO: 1699 - DNA, 437 bp, Homo sapiens
cctatgcacttgtggaatgagagaaccgaggaacgaagaaacagacattcaacatgattgcatttgaagtgagcaattgatagttctacaatgctgataatagactattgtgatttttgccattccccattgaaaacatctttttaggattctctttgaataggactcaagttggactatatgtataaaaatgccttaattggagtctaaactccacctccctctgtcttttccttttctttttctttccttccttccttttcttttctcctttaaaaatattttgagctttgtgctgaagaagtttttggtgggctttagtgactgtgctttgcaaaagcaattaagaacaaagttactccttctggctattgggaccctttggccaggaaaaattatgcttagaatctattatttaaagaaatatttgtgaaatg

SEQ ID NO: 1700 - DNA, 1381 bp, Homo sapiens
aaaacttccagcacattggggtggagggcctgcctcactgggtcccagctccccgctcctgttagccccatggggctgccgggctggccgccagtttctgttgctgccaaagtaatgtggctctctgctgccaccctgtgctgctgaggtgcgtagctgcacagctgggggctggggcgtccctctcctctctccccagtctctagggctgcctgactggaggccttccaagggggtttcagtctggacttatacagggaggccagaagggctccatgcactggaatgcggggactctgcaggtggattacccaggctcagggttaacagctagcctcctagttgagacacacctagagaagggtttttgggagctgaataaactcagtcacctggtttcccatctctaagccccttaacctgcagcttcgtttaatgtagctcttgcatgggagtttctaggatgaaacactcctccatgggatttgaacatatgaaagttatttgtaggggaagagtcctgaggggcaacacacaagaaccaggtcccctcagcccacagcactgtctttttgctgatccacccccctcttaccttttatcaggatgtggcctgttggtccttctgttgccatcacagagacacaggcatttaaatatttaacttatttatttaacaaagtagaagggaatccattgctagcttttctgtgttggtgtctaatatttgggtagggtgggggatccccaacaatcaggtcccctgagatagctggtcattgggctgatcattgccagaatcttcttctcctggggtctggccccccaaaatgcctaacccaggaccttggaaattctactcatcccaaatgataattccaaatgctgttacccaaggttagggtgttgaaggaaggtagagggtggggcttcaggtctcaacggcttccctaaccacccctcttctcttggcccagcctggttccccccacttccactcccctctactctctctaggactgggctgatgaaggcactgcccaaaatttcccctacccccaactttcccctacccccaactttccccaccagctccacaaccctgtttggagctactgcaggaccagaagcacaaagtgcggtttcccaagcctttgtccatctcagcccccagagtatatctgtgcttggggaatctcacacagaaactcaggagcaccccctgcctgagctaagggaggtcttatctctcagggggggtttaagtgccgtttgcaataatgtcgtcttatttatttagcggggtgaatattttatactgtaagtgagcaatcagagtataatgtttatggtgacaaaattaaaggctttcttatatgtt

SEQ ID NO: 1701 - DNA, 299 bp, Homo sapiens
aagtgatgatggtctggggagagattttattaaaaaaaaaaagaaaaaaaaagaaaaaagagggaggaaaaaaaagaacctacttaagatagaacatggttttggctatggcttgactcatgggctttcagtgcttttttccatttgttgaaagtaacatttctctctctctctctttttttttttttttttttaaagcaaaccattgtatgtgtaagtgtttaagttacctttttgtctattggtctctttgccagccctcccctttcccaatgaaagccatgtcaaattaatcactg

SEQ ID NO: 1702 - DNA, 1792 bp, Homo sapiens
tagtgtttggcttattttccatcccagttctgggaggtcttttaagtctcttccctttggttgcccacctgacaattttattaagtacatttgaattgtctcctgactactgtccagtaaggaggcccattgtcacttagaaaagacacctggaacccatgtgcatttctgcatctcctggattagcctttcacatgttgctggctcacattagtgccagttagtgccttcggtgtaagatcttctcatcagccctcaatttgtgatccggaattttatgagaaggattagaaatcagcacctgcgttttagagatcataattctcacctacttctgagcttatttttccatttgatattcattgatatcatgacttccaattgagaggaaaatgagatcaaatgtcatttcccaaatttcttgtaggccgttgtttcagattctttctgtcttggaatgtaaacatctgattctggaatgcagaaggagggggtctgggcatctgtggatttttggctactagaagtgtcccagaagtcactgtatttttgaaacttctaacgtcataattaagtttctcttgtcttggcatcaagaatagtcaagttttttggccgggcatggtggctcatgcctgtaatcccagcacttggggaggccaaggcaggcggatcacatgaggccaggaattcgagaccaacctggtcagcatggcaaaaccccgtctctactaaaagtacaaaaattagccaggcgtgatggcacgtgtctgtaatcccagctactctggagactgaggtgggagaatcgcttgagactgggaggcagaggttgcagtgaaccgagatcatgccaccgcacttcagcctgggtgacagagaaggactccgtctcaaaaaaaaaagaaaaaagaatagtcatttttaaactacctatctcatgcaatgaaagcattttcttccacaaagagcttaatcctcatgataggattgcctagtgtctcccatttgcaggtttctgggttgatgtcttaatgcataatactgcaagtgacatcagctggctgtgatgcttcgaaataggtctgctcctcacagctttgggaatctgaatggaagaagaaaagagagaagttaacaacctccactggggcaactttgtgaacacgtaggcacttagtcataggaaacatattatgtgcaggtcctagcctgggggaggaaagtagatagacagaaaatcattaggtaatttaagtactaaattgggcagggctttttagtatcaaatcactactagaccatttaatttgttaaattatctctaggatggtgatttataacctacccaaagttatcgatattcttactaaactctgaggcctgaagttctgtgatagaccttaaataagtgtcctaagtcagtggttcccaaatctggctggtcgggaatacctgggaagtttgttaaaattttttaaaaatgttttaagatttttgggtcctgagccagccgtggtggctcacacctgtaatcccagcactttgggaggctgaggcaggtggatcgcctgaggtcaggagttcaagatcaacctggccaacatactgaaaccccgtctctactaaaaataagaaaaattagctgggcgtggtggcgggcacctgtaatcccagctacttgggagactgaggcaggagaatcgcttgaacctgggagttagaggttgcagtgagctgagatcacaccattgcgcttcagcctgggcaacaagagtgaaactccatctcc

SEQ ID NO: 1703 - DNA, 2439 bp, Homo sapiens
cttggtcactcaacattttccccatccctctgcactttctatttgaaatttttcttttgttcccctgtccctcctccaccccacactcccacctctttctaggacttcactttgataccaaattctcattattttcaatgggaatttttatacattgagccaagtttgtatagcaagaatttgggaaacacagatggcctgagataagcagtacaagtaggtttttgagacaatcaccaagtgcagtttcatggtgggtgcctccaggtgatgtggactggagcaggggagttttgtctggaatctggggacatggggtttggctttagcaacctgtcttggccctaatgagaaaccctttgtaagtgggctctggatttttggttttgttttctttttatctgttttgttttatttttggttttggttgaacagagggacagaagaataagtaacactcccaaacacagacatacttttgtagaagtggaccaacttcaaagctctggacaggagacacctgctccaggcccctgtgatcccagttctgttctcttgccctctggacctaagcgttcccactcgcagaaagagtaaggtggactgacttttcaatttgtgcacatgcctcttgttcaatggcctggtcaacatcaacaacccctccctctgatcatttccagttgattgtcatatccaggaaaaaatggaacagtgcactcttctccctgttgacccatgtccacctattggttccccaaaatccacattctccctgggcccaaatgactttgtctccctgggcccagattctttgtctctcttcaaccttcatctcaaattgtctctaagcactaccttccccagagcttgccaggttgggttttgagattagggtcaggtcatgggtatgtggagaatggtttggaggttgaggacaaccacaggtgtctcattgctgccatttctcctgaggacataatcacttggtcaccttggaccctgtcacttcctaaaattactcgttctgtcatgccatagaggtcagttttcctctttcttggcttctacccacaaacattcaccaatcatttattcgttcatttagcaaatatgcagcctccgcaagatgagctctcctgcagacaagcatggtctgaaacattctttgagcaatatttattgagtgcctactatgtgttaggtactgtgccaggcactgataagccagtggtaagggaaacacagctctaacctcacctcattctccaggttacaaaggccatgtgcccctttgaatctggcagagaaagtttcctcgttgtaagtatttgcatctacttcaagccagattcttctgcctctttctcctttccagacccctactctgtgcagtgctgaccacagctagagccaccgccccattgctcaaccagtatttatttccctaaacgacccttcctcacattcccttccctccacctctccttaccaagcacccaaaagaggatttagaactagcagggtggacatcatctggttgtttctacttttctctgcctagcacaaaattgggagaaaactggagcctccatccgcagtcacacgtgtacagatctggggatttggatgtaggctttttctaacttctctctcagaagcttctacagaaacccttccatctgtagcctcaagggcccacctccaagggaaggcttaggcaatgatcctgtttctaccaacactgcaccttatcccaggaacctgccctagacctccagagaccatattttctctccctccatttctacccagacctccaggcctccttctggaatcatagaaccgtagaattggaaggaattttagaggttttctagttggagttgtgtccaacagaattcattaacaccagcctgggcttgtttttcctcctccctctggacttttttcatcttttcctccacctcaaaaaatacttacacacagattcttcttgtacaggcatcaaaaccaactcctctgcccctaaggctgtgtccctgtggtctccagccacccctaccccagtcactcgccccttcctcatctctggaatttggccaggcagtcccagaagactctggagtgacctcctttgcctaaaaagcagacagataggcatgccccaggccctgagtgagcagaggaggactgtagggtgagagggaaagaaaatgaaggtgactttcatggaagtttcatttcttttccccgattgtaccaactgcatgtacttttggcctggctgcaaggagcaatattggtttactctcgtatccttaaaaagttacagaactgtgtcttaagagaattatttatagttactataactgaattgacaaatgtcaacttaactgataaattatatttggtaaaataaagaggacgtttatttag

SEQ ID NO: 1704 - DNA, 595 bp, Homo sapiens
ggtcaaggggcctgctgggttaggcatgcccgaccccgggacaggactaacccaagggggaaagctagtgttgatgaaacttttgatcaaaaccacattgtaaaacattgcccatctgtcttgctcactcttaaactctcccaagaacaaggccggggtaaggtaaagtcagcagaaatctggcttctcccttcctcccgacatctgcatcccttgatccactggcatttgctgccctcttgtcccttatctgtcttatgctggttatttcactgcttcaccttccaggcttgacttaacaaatgtagatttgagaaatctcaaccagttgttacctgataggagtctttaatttagggcactcttgctgggatgctttctccagagcttatatatttcttcttactagaactttcttcccccttttattcccctctcttcttggactcatgagctgtctcttcatctctcctctctctcctgcatctctccccttactcttcaatttattctacttctggacctggacttacccaaactgtgatactaccataattgtcaccataatcagtcaaataaagtgatctgtgcatca

SEQ ID NO: 1705 - DNA, 2306 bp, Homo sapiens
gggctcagccagtcctcatgctgcctacagagtgcctggcacttgggacttccataaaggatgagcctggggtcacagggggtgtcgggcggaggaaagtgcatcccccagagcttgggttcctctctcctctccccctctctcctcccttccttccctccccgcatctccagagagagcctctcagcagcaggggggtgctacccttacaggagtgagagtctggtgagcccactcttcacccgtcaggccctggccgcaatggacaagcctcctgctcactccaccccacccacctctgccctgtccttggcagctgaaggacaccttgacttccagcttttacgagtgagccaaaaacagaaggacaagtacaactgtgctggcctgctgtacaagcttcaaaaagtgtcccagagcccacacggctcggtgtcagatggtgtcaggctgtcacggacatagggataaacttggttaggactctggcttgccttccccagctgcctcaactctgtctctggcagctctgcacccagggaccatgtgctctccacacccaggagtctaggccttggtaactatgcgccccccctccatcatccccaaggctgcccaaaccaccactgctgtcagcaagcacatcagactctagcctggacagtggccaggaccgtcgagaccaccagagctacctccccggggacagcccactaaggttctgcctcagcctcctgaaacatcactgccctcagaggctgctcccttcccctggaggctggctagaaaccccaaagagggggatgggtagctggcagaatcatctggcatcctagtaatagataccagttattctgcacaaaacttttgggaattcctctttgcacccagagactcagaggggaagagggtgctagtaccaacacagggaaaacggatgggacctgggcccagacagtcccccttgaccccagggcccatcagggaaatgcctccctttggtaaatctgccttatccttctttacctggcaaagagccaatcatgttaactcttccttatcagcctgtggcccagagacacaatggggtccttctgtaggcaaaggtggaagtcctccagggatccgctacatcccctaactgcatgcagatgtggaaaggggctgatccagattgggtcttcctgcacaggaagactctttaacacccttaggacctcaggccatcttctcctatgaagatgaaaataggggttaagttttccatatgtacaaggaggtattgagaggaaccctactgttgacttgaaaataaataggttccatgtgtaagtgttttgtaaaatttcagtggaaatgcacagaaaatcttctggcctctcatcactgcttttctcaagcttcttcagcttaacaaccccttccctaacaggttgggctggcccagcctaggaaaacatccccatttctaacttcagccagacctgcgttgtgtgtctgtgtgttgagtgagctggtcagctaacaagtcttcttagagttaaaggagggggtgctggccaagagccaacacattcttggcccaggagcattgcttttctgtgaattcattatgccatctggctgccaatggaactcaaaacttggaaggcgaaggacaatgttatctgggattcaccgtgcccagcacccgaagtgccaaattccaggaggacaagagccttagccaatgacaactcactctcccctactccacctccttccaagtccagctcaggcccaggaggtgggagaaggtcacagagcctcaggaatttccaagtcagagtcccctttgaaccaagtatctagatcccctgaggacttgatgaagtgatccttaacccccaagtaatcattaacccccagaccagcctcagaactgaaggagattgttgacccagtgacctggagttgaggctcagggagagatctgccacatgtctgagggttgcagagcccgctgtggaggtaagattggaaacacatgaggcagagggaagacattgaagaaaacatctctgctggaatatttggaaaagaacactcttctggacctggttgaagcaggaaagatggaggcaaagtagtgaaataatccagaatttcaatgcttttgaatgttcttagtgatactgacctgtgataatataattcccagggaggactgggaaccttatctcttgagatatttgcataatttatttaatttaagcctcattctccttttgttcattttggtaataaactggatttgaattgtgaac

SEQ ID NO: 1706 - DNA, 507 bp, Homo sapiens
attccaaatatttttaatggggtccagttctctatggattcttacatttaatttgtagggaaatgccatttttcccccttaaacaaggcatggggctcacaagtctatggagacaggccaaaaagaatgtggagaagaaaactgataaatacacagaggtcctcaagacccatggactcctggtctgtacccaaaaaagctgttcgttcctcaaaaacaaaaacaaggcttggctgggaaaacaggccaatgccccggcaagaaaggttgagatcagatgttaggaagaactttcaggtaaagtatgagaactatggagtccatcagcagagatagtagtgaagtctctccccagggaaaattttaaaaaggttgaatcagctgttgtagagttctatttggcaatctcatggttaaatgacttccctttgagctctttaattattggcaataaacaacttctttaaaagttttaaataaaatagcaaccaccaccagttcctcttt

SEQ ID NO: 1707 - DNA, 130 bp, Homo sapiens
cagactcttttgtctcacgtggtggatccggtggaaatccaagctctgggctggtaatttttatgagcattttcagcttttgcaaatacaaaatataattctttacaaaaataaatttttattctaatct

SEQ ID NO: 1708 - DNA, 1791 bp, Homo sapiens
acggtgtcgccgcctgctccctgcacccatgacaatcaccttcagaatcatgtcgatcctggggccctcagctcctggggaccccactccctgctctaacacctgcctaggtttttcctactgtcctcagaggcgtgctggtcccctcctcagtgacatcaaagcctggcctaattgttcctattggggatgagggtggcatgaggaggtcccacttgcaacttctttctgttgagagaacctcaggtacggagaagaatagaggtcctcatgggtcccttgaaggaagagggaccagggtgggagagctgattgcagaaaggagagacgtgcagcgcccctctgcacccttatcatgggatgtcaacagaatttttccctccactccatccctccctcccgtccttcccctcttcttctttccttccatcaaaagatgtatttgaattcatactagaattcaggtgctttgctagatgctgtgacaggtatgccaccaacactgctcacagcctttctgaggacaccagtgaaagaagccacagctcttcttggcgtatttatactcactgagtcttaacttttcaccaggggtgctcacctctgcccctattgggagaggtcataaaatgtctcgagtcctaaggccttaggggtcatgtatgatgagcatacacacaggtaattataaacccacattcttaccatttcacacataagaaaattgaggtttggaagagtgaagcgtttttctttttcttttttttttttgagacggagtctctcactgtcgcccaggctggagtgcagtggcgcaatctcggctcactgcaacctccgcctcccaggttgacaccattctcctgcctcaccctcccaagtagctgggactacaggcgcctgccagcacgcctggctaattttttgtatttttagtagagacagggtttcaccgtgttagccaggatggtctcgatctcctgacctcgtgatccgcctgcctctgcctcccaaagtgctgggattacaggcgtgagccaccgcgtccggcctctttttttcttttcttttttttgagacaaagtctcactgtgtcacccagactggaatgcagtgacacaatctcggctcactgaaacctctgccttccaggttcaagctattctcatgcctcagcctctcaagtagctgggactacagatgtgggccaccatgtctggctaattttttttttttttttttttttttgtagagacagggtttcgccatgttgacgagactggtctcgaactcctggcctcaagtgatctgccgcctcagcttctcaaagtactgggattatataggcatgagccactgagcctggccctgaagcgtttttctcaaaggccctcagtgagataaattagatttggcatctcctgtcctgggccagggatctctctacaagagcccctgcccctctgttggaggcacagttttagaataaggaggaggagggagaagagaaaatgtaaaggagggagatctttcccaggccgcaccatttctgtcactcacatggacccaagataaaagaatggccaaaccctcacaacccctgatgtttgaagagttccaagttgaagggaaacaaagaagtgtttgatggtgccagagaggggctgctctccagaaagctaaaatttaatttcttttttcctctgagttctgtacttcaaccagcctacaagctggcacttgctaacaaatcagaaatatgacaattaatgattaaagactgtgattgcc

SEQ ID NO: 1709 - DNA, 1033 bp, Homo sapiens
gacatcagggtggcgactctatagactctaggacataaattagaggtctccaaaatcggatctggggctctgggatagctgacccagccccttgagaaaccttattgtacctctcttatagaatatttattacctctgatacctcaacccccatttctatttatttactgagcttctctgtgaacgatttagaaagaagcccaatattataatttttttcaatatttattattttcacctgtttttaagctgtttccatagggtgacacactatggtatttgagtgttttaagataaattataagttacataagggaggaaaaaaaatgttctttggggagccaacagaagcttccattccaagcctgaccacgctttctagctgttgagctgttttccctgacctccctctaatttatcttgtctctgggcttggggcttcctaactgctacaaatactcttaggaagagaaaccagggagcccctttgatgattaattcaccttccagtgtctcggagggattcccctaacctcattccccaaccacttcattcttgaaagctgtggccagcttgttatttataacaacctaaatttggttctaggccgggcgcggtggctcacgcctgtaatcccagcactttgggaggctgaggcgggtggatcacttgaggtcaggagttcctaaccagcctggtcaacatggtgaaaccccgtctctactaaaaatacaaaaattagccgggcatggtggcgcgcacctgtaatcccagctacttgggaggctgaggcaagagaattgcttgaacccaggagatggaagttgcagtgagctgatatcatgcccctgtactccagcctgggtgacagagcaagactctgtctcaaaaaataaaaataaaaataaatttggttctaatagaactcagttttaactagaatttattcaattcctctgggaatgttacattgtttgtctgtcttcatagcagattttaattttgaataaataaatgtatcttattcacatc

SEQ ID NO: 1710 - DNA, 633 bp, Homo sapiens
caactccccagctatcccccaaccccaggctcggactgtggtgccaaggagtctcatctatctgctgatgtccaatacctgcttcatgtgttctcagagccctcatcacttcccatgccccatctcgactcccatccccatctatctgtgccctgagcatggctctgcccccaggtcgtcttgcacaccttggcagccccctgtagttgacaggtaagctgtaggcatgtagagcaattgtcccaatgccacttgcttcctttccaagccgtcgaacagactgtgggatttgcagagtgtttcttccatgtctttgaccacagggttgttgctgcccaggctctagatcacatggcatcaggctggggcagaggcatagctattgtctcgggcatccttcccagggttgggtcttacacaaatagaaggctcttgctctgagttatgtgacatgcctcagccccatggactaagcaggggtctggtataaaaacactcctggaaacgcctttgccctgatccaaatgttagcacttgctagtgaacgtctacttatctcaagttctatgctaaaggcaatttatcttgatgtgatgataaaccaaacttattagcaagatatgcatatatatc

SEQ ID NO: 1711 - DNA, 485 bp, Homo sapiens
ttcagatgacacattttctggaagtgaacccccaagcagaccagctgccccatgtggaaagaaagatgctccaggatgactctcttcctgctggggccagcctgactgccccagagagaaatccaggaccctgagggacagagagatgaactgctcagttaccatgggagaaggaccaagatcaaaggccttcaggaccccagcctctttccatcatccttcctccacctgtgggaagagaagctgatgcagccggtgctccacccatggaagaaaggctggctgtccttgggcccaagaaagtcaagcattatccacgtccaaaggtgacaagatgactcaaaggagacttcaagaacagtgtatgaaacactggaagaggtcacctaggaaaagcatgaaatttccattcctgaatgtttgaaaatagaagaggcttccaatcagtgtggaaagtgacaaatcccctatcaacactcccagcc

SEQ ID NO: 1712 - DNA, 3437 bp, Homo sapiens
actctgcgaccagtacagaccctgtcctggctgaacaagaagagacacatgctccacttgggagcctttgccaccacgcaactcagggctcaagatgaatgggagggagagatttgagtccaagcatacatttatattcagtgttgtgccattgagttcccatgtggatcattctgaaggtgatctccacaagagggtgtgtgtgtgtgtgtttggtgtgtgtgtggagggggggccgctggatacatcactgaagctattgatataacacaatgagtcactgttcagaattttgctcttgttagatgttttcttacattgggtagagtccagcctagtgagagctgagtgaaggggctggccatgcctgagacaaaaagtcaaatgagacaatggacgtgtcaatgacttgaaaaaaagtcacatccagcaaatgcagggtcacatgaaatatgggcctcctggaatccctacagtggatggagactggctcataccttgccagatccctctctcagttccagccttctggacaaggcctgggctaagaggagctgattcgttatctcttcacccactgccctctcagtatcaccagtcccaaagacaggatacgtccctgtaacccaatctctcggttgattgatagcagaacagctcttgttggtctgagaaggcaggataagtgaccacatatttatgccactacctccaccagggagagtccttctccacaggcttgataaattcaatcaccaactgtgctgtcgtccctgactctgctactcccgttcttcctgctttcctgctccgtatctcagtctgcactgaccccagggctgggctgacatcaagatgggagcccagcccacgggctttataaacacccaagaaccgtttcagatcttctctgtgctgatgcaggtagttttaaatttttctcagttccagtgatagaaaacccacacaatacatcctctgccagtcttaatagaatatcagaggtaagaggggcctcagagaagctctgacgcagtgctgctggggaagggaagtgactaaccccgggtcagcctgccatttagggaaagagctgaggttcttacccttgttgcatgctgccacctctccttagccagtgctcttgtacatccacacagcaccctaaggagccatagtcaccatcaaagactcaaccctaaggcccttcaagatctcaaagtgccttctgaagcatcagagattaaatattgttcaaactaatagttattgctgtggcttttaattttatctttggaagatagctatatggtaactcatcattaaccagaacacctctcccctcaaattccgtgaccaagttgtgcagcttgagcaaatgccgaaagagggtattatgggtgggtggtgtgggcttgcaaatacaagcttggaggtgagacatggccagacatgactcctgcttccccttaggaagtaaatcttacttatggttgtgaactgcttggagtccaggatgcccagatgtgaggggcagatgaagggaatgttgctggaaaggtgccttttaaggctgctgagaatttctggactgtgtcctgatggacgcagcaccatcaaagcccagaatttctgaaaacggtgacaaggttaacataaggacaacaaatactccaccctgtcatggtatgtgaggtgtgggtgtggcggtttctgtgtacgtttgctcatacacgcacatccaaaagcctgtgcctcattcctggccatgggtgaggacttggtctgtcacggctgatgaggactcccacaaccggccaagttatgtcttattatacacccccagaaagagagaaagctgccttctggaggactgattccacatgctatattcagctgagttgatttctgtgtctatttcaacccataacctgaagaatgatcaccttattccttattcattaattttcttgattaatagggaaacttgggaatagctataaagtaaaacttgggtggaacctggggccctggcatcacacaagtgtgattaggatggtcaaggtcatcaggagtacagcctattatattcccacatcctgagaaaggtcatttctcccacacacgacaaagtcacagacatcctgcacctgccactaggcatcctcatcctactgacatgcccatttctccagttttcttaatctgagactcccttcccttgttttttaaagataccgtgcttctccacatcctcatccttcaaggagcatattttgctcttaggatggtctttgggattcaagaatagaataataaatccaaacttggtcattcccattttgaagagatgcaagagggcccagtgaggacatccgcctccctgaaagtggtgctagacagagctgaggtcattgtatctgtgtatccacataggatttctcttaattcagcttgaattgatggggagggaggtaagagtagggtcagagttactcatcccttttcaaagaattgtgggtggaagtttgtaaaggccattcatttgattttcaaaatcaaagcgacagctctacttccacttggccttagatctctgctataccctgccatagccttgatgccactgggcacaagccacctgccaaatacaggagtggcctctcccagcctggcatgataggggggtctgtgccctcagatgtgttgacagctgctcttctgaattgccacacctgtgctacacttggaattctgtgctctgactctgcagggtaggaccacgtgccatctcacacagaggtcaaccgatgagcccactcactcgtacatgccttcttccacagtgggaagcatgatctggcaggggccgccctgtaggctggggatgggctgctgtgtgaatgttgacgttcgtttcatggagaaaggggaggtgaaagattgaagagcaggttcctgtcaatgttctgagttcgagctggaggtgtagattgaatagtctacatggtctgtgagtgtgtgagatgaacccttccatcctttgacacctggttgtatgtgtaggctaagaaggaaggaccctcctgtcagtgtgcaaagctgtaatctcatggactagaggagagggggccaaggggatggacaggagaagtcatgcagaatctaagcaggaatgcagatagaacacatctaggctcttttccccaggagagtgatgatggagcatatagatctggctcaaattcagcctccatcacttaccagtcaggaaccctggcgatatcactttaactttctgaacctcagagtcttcacctataagacggggaaaataataccaccctttcaagattgttgagataaataagtgatataaaacatgtaaagcttagttctggccacagtgtagctactcaataaatgataatactacc

SEQ ID NO: 1713 - DNA, 5171 bp, Homo sapiens
cctatgcatgaatgagggttgaagcctactacctcacacatccagaaggctctgggttttccaataagctatggtaaccctaaagaacaaaggatacaatgcttgaaccatccttttaacttaaaaccactaagacactgaaattccttgttaagattaaaattagtgtgcaagtttacagatgtgtgtctacagtggtaaactgtacatacatgcctctttctgctggagtgacagaataggtgatccttgccacctactgacactgacctgaaggttgagattgagtattataaactagcacccagcagctttaacttgtagaagaaagcatcacattttgggtaatgtggaaggcctcctgtgagtccactgggcatacgattgagattgagtattataaactagcacccagcagctttaacttgtagaagaaagcatcacattttgggtaatgtggaaggcctcctgtgagtccactggacatttaccacagtgtctccagtaactgagtctttttaaaaactctgaatgagttaagtttctaaattatgaattgattcatcaaatgaagatactcagaattgtccaaactgattttatattgcaatttggtagacattataaatgtgtgcttaaccactgataagtacatcacaagcaatttttacagggatgagtctcatccttgagaatgttatcacaaaacaggaactgattgtgccctgtttaagatctctagcatataaaacgtagaatgtatgagggaataggtgcctgagcagcttcctgaagctttaaaagaccgttggcctcgtgttttaatgcaattcatgtattggtctttgtcacattggataacattttaaagttaagcagggtacttttttaattgaaattccttgaaattcgagtcctcagttttttcttcatttgcgtaaagtttatcggggggaatttaattttctcagctttttgttaagagcacttcctccaaaaaatttttttcaagtaataatgctctgctttgggttggtttttgtaagattttttgcacacctaaagagtgtttgcttttgtgctagccttatccctccactaaagttattttaaataatttcacatttctgcaaattagcactttgcttatctgcaatcttttactttgatttttgaagttttaaagcaattggagtaatactgttgaatgaactagtttcacttccaaaatagaaaaaattgtaaatccttgccttatgcagctttctcagaattctgcttcttcctagtactagatgtgtagccatttgcttagtggactaatccgcaaggcacaccctctaaaacttagcttcactacaagatcttccagataaaagttttctacctcttttcttaattattctgatcagggatgctaaattataatttgttatgtattatctcacataatgtgaagaggcttaatgtgaagttttgttattttggtctcttttttattaagtatctcacttagaaattcagtggtatactttaaagcacttggatctttttcagcatatctgcctagcaaatgttttaaaattgacatttatttttagcactttcacttggtgaaggtggccatataaaattaaggaacatttgaacaatataagagaaaagaacttttaaggaacaattcacaaagtttgtttgaaattgtcagatgacatttcttgagtaccttttgtgtgcatagttattttagacaatataagctgttatggtcagcataacttaaaagtgtttagttttctattttactgagccttaaaaatagcactgatgagcttatgatacttaatgtttggcaatcataatgtgttcaaattaatgggattgaaaatctctccacacctgactctcatctgatctggatggttttggttttgtatcttttttacttctcccagaaaatactaaatttaaaactgtaaattaagaatataccactagataacaattatcaaattgagctttatgcatcattactcagaaagcttgccttcctttctttgctacttcaggacacagagttgacatttgcttactacagctttagatctagaagtttattcgtgcaacaaatatttattgagtaatttatactgtgccaggcatgttttgatatgtttctgtcatatgttttgatatgttccaacataagtttctgtcactttatattcagtatatattttctacagtgggtaaatttaacaaatggaaaggaatagaacactgatattttacagaattaaaccccttcattgtaagggctttgtttacatattaagtgtcaagtatttattcaggggatcttatttcattgtattttatctgttatctaggttgtccatttaccggttggacactgatactctgtcaaattcctttcaaaaatgactctttagtctgctgaaatttagcactagtactttagtgttctgatcctggaaaattcaaggtgaagctttatttgtggaccatctgatttaattattgaggattaaaaacctaaacctttgctcattctaaactcaagcttttaagcctcacagaatttacaggggtttgctttttgtttgtttgttttttcattttttactgtgcttattaaactcttggaattagttattaaagggagtaaattctcatcttgggaattttgaaaatctatggacttacaactttcaggaggattaaatgtcttaagttttgtactagagcagaatgaaatctttcctattcattgagtttttgcctgccatagaggaatttttttaaaaattaaaatgacagtttatattagtggcaaagtgaataaagacctcactttcccaccccacccttcttcctttctcttacttttctttggattaaaggtcaggtgtagtactatgaagattcactcctgaataaagtgatttcagaagctaaaatttaacatacctggaaattttgtgatgtgttagccaagtgaagacattagtgtgttccatcttttgctaatggttcatggttgatttcttcattgtttcccatgaaattagcatagtcaagtggtacccttgacgcttgactgctggtcagtttgaccctgtttttaacaactaatgtagtcatgccgcttgattattccatgaagtcccagcaaaataataatgaggaattaactaacattatgttatctatctaatttgtctgtgtccctaaatgcccatgcctaacttgcttctctagtttattccttctgtggagggattaaaacgtgggtgttgcaagttgccctaagctaaacatagttttcttacatctttttgggaaaaaaaatggaatgggaagtatgcaagattaagcaagagtgatttttttttttttttgacaaatcaggtggccttcctaaacatactaagaattatgttctttcatgtgtggagacacatttgtttgcagcactttaaaaaatatatatggaataaaagtttacatgttggccctctagggatctaattaaggacattaaagtacaattcttgagctactaaccatcagctcttcttaatcaaagattgccatcagtgtagagtgtatctattggcacaacattctggtgttttgataacagtagaactcaatttcagtaactattaggagcatggtctgtgccctagcattaaaaatgttacttattattatgtgaatatcttgtattattatacaatgcagtattcaaatttgtccttgtagtgcagagatgactgataatttctaaaagattcgatccttaaaacttgtttccaagcagacttataaggaagctgatttttgagtcagaggccttaaacgtgtcatatacaagtggcatcattttaagtccaaagtgaaacacttgatttgaataagctagtttataaactaaagctgttttcttatgttacagtatttcagcacatttcattccacataaaaagaatattaagtgtccctggttgtgggagagtgtttatttttctcaaaattatctagcattttgcttacagtgctttgaatgtttgacttaaaattattattgatgttgaattgtagggtgctgatttaggtcttgattcatacacatttaaaggaggttggtaaccccctcatggtagagtgaagggagaaaagggccaagaagacaaagtaccactgataaagaagagattgtcaaatagatgcattcctagtcatgaattacccttttccaaacatttttaaagcaatgcctttgtgtcaactcaacccttcttccccatttcttgtcatagaatgtagcatggccataggtgaaaaagcttatcattaaagtatgaaaccatgaattataagcattttgccatgatgcccttttatacatatgtttttaaaagtactaaccaacatataggagtttaggaatggtgaagatataatttgattaagttgtaggtaaacagaaaggatcatcttaggctcagaatttctaatatgattacatgagtctactttataaactggtataggctatgtaattagcccgtaagttacttaaaggaccaggggacctaatttttgtcagttttccagtcacattggtgccattcaggactccagctgtttacaggaaatatgtacttagcagaatagtatttttccttgaaaaaaatttgaattcagcctaaatacagaatgaatatgaatagtttgtgaaaagggttagagaacaacaatattcctatagtttctgtattaatgcagtagagacagaggttcctaacgcaaaaagaaaaccacaagtaaagaccgtcaaattagagctttagaatatgacttgaaaaagtagggatgggcaaaacagcataagaaaatattttttcttaatgcagatggacagtgttttcttgttttaaaaatgttttgcctatttgccagcattttttgaagtaatacactgctgctacctggaagatgtctaacttcattttctacaactcttatgtgattttgccattgtcattaagatgcattgattttatttatgaggtgtatgactttaaatatctaaatgctgtattaagtgacttgtttcaaaggaataaatgaagtgaaaacgt

SEQ ID NO: 1714 - DNA, 1565 bp, Homo sapiens
ccactcttcaggaagaaaggagtctgcacatgcagctgcaccctccctccgatccttcctcccacctccccctcccccttctcccacccctgcccccacttcctgtttgggcccctctcccatccagtgtctcacagccctgcttaccagataatgctactttatttatacactgtctagggcgaagacccttattacacggaaaacggtggaggccagggctatagctcaggacctgggacctcccctgaggctcagggaaaggccagtgtgaaccgaggggctcaggaaaacgggaccggccaggccacctccagaaacggccattcagcaagacaacacgtggtggctgataccgaattgtgactcggctaggtggggcaaggctgggcagtgtccgagagagcacccctctctgcatctgaccacgtgctacccccatgctggaggtgacatctcttacgcccaacccttccccactgcacacacctcagaggctgttcttggggccctacaccttgaggaggggcaggtaaactcctgtcctttacacattcggctccctggagccagactctggtcttctttgggtaaacgtgtgacgggggaaagccaaggtctggagaagctcccaggaacaatcgatggccttgcagcactcacacaggacccccttcccctaccccctcctctctgccgcaatacaggaacccccaggggaaagatgagcttttctaggctacaattttctcccaggaagctttgatttttaccgtttcttccctgtattttctttctctactttgaggaaaccaaagtaaccttttgcacctgctctcttgtaatgatatagccagaaaaacgtgttgccttgaaccacttccctcatctctcctccaagacactgtggacttggtcaccagctcctcccttgttctctaagttccactgagctccatgtgccccctctaccatttgcagagtcctgcacagttttctggctggagcctagaacaggcctcccaagttttaggacaaacagctcagttctagtctctctggggccacacagaaactctttttgggctcctttttctccctctggatcaaagtaggcaggaccatgggaccaggtcttggagctgagcctctcacctgtactcttccgaaaaatcctcttcctctgaggctggatcctagccttatcctctgatctccatggcttcctcctccctcctgccgactcctgggttgagctgttgcctcagtcccccaacagatgcttttctgtctctgcctccctcaccctgagccccttccttgctctgcacccccatatggtcatagcccagatcagctcctaacccttatcaccagctgcctcttctgtgggtgacccaggtccttgtttgctgttgatttctttccagaggggttgagcagggatcctggtttcaatgacggttggaaatagaaatttccagagaagagagtattgggtagatattttttctgaatacaaagtgatgtgtttaaatactgcaattaaagtgatactgaaacac

SEQ ID NO: 1715 - DNA, 4999 bp, Homo sapiens
gaggaggagcctcgcattcctgggaagagggacctgtccaagctgtcacactgggagtctcagatggaaggacaagtgatggggatcaggccccagagcttgctgtcccctgagaccccatcctggggagaggggaggactcctctccctacgccagccaagtttcgtcatagccagttccagctgggagagacagtgggcgtcgtccatcctcagtgagaacaccagagaacccggggccgggagaaggtggttcttcaagccgagaggcacgagctggggacagttctgcctctgtgactgctgctttgcatgaaaactcatttgatgtatattggggaaataatgagaactttatttaatttttttaagaaaaagggaaaaaaacagaaataaaacaaaaagccgccctgttaatcccgtccaacttttgtttaattctgatttctgtctcccttccatcttttctcccattcctccttctttatataatgcctatttccaaatgccagagaaagcagagatgctgagagacattggagagaaaatgactgtctccttttccttgaaattaaaaaaaaaaaaaaaaagagaaagaggagaagaagaatgatgagcacaagtatgcaccaaacacttcgcaaaaacagaggccagtaaaacctggaattatcccggcagccagaggagtatggaacttccagaactttgcacaaattgcaaagccatcaagagctcaccctggctgactggaaactgagctttatctaccacacacctgtatattctcatcttttgagaggagatgtgtacctagatagtaccaatgctttttgctactgttttttgttttgttttatttaatcctaaacctcaacaaatgaggagctggtctttgatatgtttcctttcaatttccctaaagttactatgagaagtggggtgaggtgggcctctcccagaccagacacctggcagccctgcctcatatcaatccctgtcataaaccaggcaccctggggaaacggcctggaggtgtgtgggccaggcctccacgaggttccatttgaaagttgatttggagacataggtgtttgactttggagttcactccaatcatccagtggtccctggcaattaaaaagaaaacaaaaatcaaacactgtttacagcaagcaatacttgaagagcataggttacagaagctgcagtatttattattatgctttctttctttcattctctcgtgcctggagaggggagaccacccttcgctcatatacggaagctcctgaccatctgggcctacagcacttcctcagtagaaatgactgtggcatgcccacgttactaccttctgcctctctttctgcctctcacggacttgtgagtgtgaaggacaagtggatgacttctcactggactttccttctctgtctcttctgatgatgcctaaaactatggataaccaattctcctgagtgtagattccaaacaaagagaccaaagctccatgcccaggtccaaaggccccatagaagccagtgggagtcatcgagaggaaaggcgctctgtgagtgtcaggaccttggtggccaggatagccatcagagtgtccaggcctcccacattaccttggatccgagcagccagctccaactgttctgcaagcagcactggagtcagggggtaggaggacaagtggaagcaaaggtgtgggactggggaagacaaagaggaacaagctgcccttcctcacttttcaaagggtcaggaatcctaggctatgatgctgggaagctagaccagctcctccaagagagactagaccagggtcattttctctgttattaactctgggctccagcttctccgtgccctgctttacctccaagtggttccaatttccaaaggccctgctgaccacatgtgattcccaggagagggctgggggaggggagcgcagaggtctggcttccatccttggcgtgtagctttggatcgctgtctaaccacacagcagacgttgcccggtctccccagctctagtttcttgcctgaatgcggctgacaaatgggaagagaaaagcattcagcaaaatactcaggaaacttgctgttttcattataattcacaaccagccatgccaaggccactttcttttgaaaatccacttctttaaagtttctcaggccctattagtagcctgaaggaaatactaatgactggccttccgcactaagccaaagtgtttgctcttcatagcactcaaagcttatcagcgcagagcccataatttatggagataaaaggaaaggagatataggtaagaagagtgtgaccaggagaccttatgctacctgtaaaaaagttcagcccaccccatctaacttctgagctctgtttgggtgaagattttctggccgcatggctgctcagactggcatccaggctttgctccaccaagaagttaaaggcagtcggacatctcagtagcatctctaccagcccttaactcaatgcatctacctggcatctcccagcagttacttttggagacgattcactgcccctggggcgtttccttgaaggtttgtggagagcgtggagaatgatggggcaatggccaattggagggtggagagtgaagagccggagctggctgtgagtggtttggccacatttctcaggattccatgagagacttggggaacttgggctgacaaaggaagtagcctggggcatccttaaggaaggaattaagaaaagggaaaaagctggactcaagccacgccatgagggtgaaaggttataaggccctgccccctttccagctgcccacctgttcctcctccacacctcttcgctttgggccaccaagaaccaatgaagtccacaccctttggatgagaaaaagagggagttggttggcctctcttctccctgttatccaatttgaggatattttgaccttgggtaaggatgaagtgttaaagccacagctcctctccacaagaagccattcatcttgggggaggcagagagggaagtctctctccaaagtctatccagcttcgcttcgtttcattgatctgcacaagagacaatgctctggaaaaggaagaggaccccagaagggtgcttggcaagacagaggatgctaatgggcaatggagagcactccctccagctggcccctgctgctgcctcccgtcctctgcatggggtcaggtgcttctgtgcttgctgtcctacctctctccacagcagggctctcaaaaccattttgatcccccattggcagagggttcccctctttacagagttcagtcattaaaagcatggatcagctgttaatctcattggaggagggaactgtttcctgcattcattcatctgggaaccttcttgagtagccactgtctgccagccactgctctagagatgggaaaacagcacggaacaaaaccaaggtctttcttccagcgaatttatatccttcaggaagctggttcctgccaccaacttagcaggcaacagttctcctcccctagtggcacagggtaccagttttgtaggaaaagtggtccagcaaaggaagaaagcagaccaacccagctgccttaccttattctggggccattcccccagcgatgagagctgctcttgtttctactgccaccatctcttctggctgcacttcacctgctgcttgagcttctgaccttccttcagttccaccaaatgaggacaggaaatagcagtcaagacccctggccctgctgagcgtgaaacagaagcaatggatgagtgctggacgaagaatggcctgggcagaacaaatagggagcatttgaaagcttctggctgataaatctccaggtgcatcccggttgccacgcctgcccccattaacctgctcctggtaaatactgatccagcagctgctccaggagaggccgtctttttttcccagccacgctgtgtcttgcatgagactcctggggcctgggcacagagagaaaagaattgagactcaggaggctcagtgggtgagaaaatgcaaagtggcttcacagacacagggctgtgggagcagatcgacggggaacttgggagatgaacttcagggccttccgacgccttgtctcaggaacatgctttgagaaaaatggtagcatcctttccataactcagtctctcttccctagtttccctgaagtgtgacgttttagtatctggagctcagtgatccccatgaatgagggataaagtttcactcttggtattttctaactagtgctagggaaagtcctgagacacgatcacagccactgcttggcatacagggcctccacccaataagcaaactggagattcctcagcctctcgtggacacccacatctcattcttctcacagcagagaagctctcccttcagcctgagctgtcttctttctgctgcagtgcagcctgctccctcctaccctggcctcaaggaaggtaggaaacatcttctgcatttcaaagtcctcactttgacttatttggccttcatcttggcatggaaggtggcaggcagaatggaaatactccccccaaacagaacagatattcttgcgtgtgtaagggcagaagggacaagctctctatcccatgagactaggggccggagcccacctgcctttccccacaacttttcctgctcaaacccactcctcttgacacactggaatctgtattatatatatttttaagaaaatacaatgatggttgtctggttttgttgtttttacaggtgttgtggaataaaaactgtaagaaaattaagtatttaaaatgttccaataaagtggggttttttgttattctaatatattattgtgtacctattgtaaatatgaaacactcctattttgcaagctgaggacacaatttgtactgttgttatatataaataaagtttactgaattaaaaaaaccttaaatctttaaata

SEQ ID NO: 1716 - DNA, 396 bp, Homo sapiens
tgctacagcttccagcccgttgccccactcatctgccgcctttgcttttggttgggggcagattgggttggaatgctttccatctccaggagactttcatgcagcctaaagtacagcctggaccacccctggtgtgtagctagtaagattaccctgagctgcagctgagcctgagccaatgggacagttacacttgacagacaaagatggtggagattggcatgccattgaaactaagagctctcaagtcaaggaagctgggctgggcagtatcccccgcctttagttctccactggggaggaatcctggaccaagcacaaaaacttaacaaaagtgatgtaaaaatgaaaagccaaataaaaatctttggaaaagagcctggaggttcaacgagg

SEQ ID NO: 1717 - DNA, 508 bp, Homo sapiens
ctttaactctcctcccatatagaaggtactcagtaaatgatcatctctaggttggggatggcaaataatcatctcaactgccaattccaagtgtcttgaatacactaaggcacaatgctgtagatcagttggccacaaatgcaaagggcatgtaaataggtaatggtggtgctagtagcaaattggtagatagtacatacttgccatttctatactaggaagtcctcttagtggagatgttttcattttcactggataaaagatagaaggaaggagatgatagaggaaaagcagggtgatggaagacaagccaaacactcttgcatggtaaccttgtaaatatacctgctctatgtgggtgctgcatgctaggaaagtagggctgggggcttttctgcatgtttatatgcctccaactgaatttgaggagagtagaccaccagtatgcttaaatatgtgatacttgttaatgtaatacaccattcaggaataaactgagagttctgag

SEQ ID NO: 1718 - DNA, 503 bp, Homo sapiens
ttgtgaatgccatcttcttccttctcttttttataatattgtacatatggatttttttattgtttagatttaaccagcttttaaatctctcttttctctaacagtgttagaagtttgtgattctccaaatatgcctagatttaaagctgatttaatttatggaaaaatcacccttcagactttgcttttctttttcaaatctcctaatggtagtatgatatagcatagtagaaggagatttggcctgggagtttggacaccaaagttctagctgcagctttgcttccaatgtgaccttgaacaagtcctttaacctctgggcttcagatttattgcttataaagtgaagagattggagtagtgcctgaaattgcatccagctttagaacggactcaatgaccttcttctacttgtacaaggctaaactgcctggaacagaatccttctgcattgttcttgtaccacatttttccttggttttgttaaagtttcctcaagcact

SEQ ID NO: 1719 - DNA, 68 bp, Homo sapiens
gaggtctatttaaaaaaaaagtcagagacagatacctccaaccctgccgtcaccaccacccctaccac

SEQ ID NO: 1720 - DNA, 1597 bp, Homo sapiens
ccccggccgcttccctgcccagaagcggagccttctgcagggggaatgataggccggtgaccggagcgccgggccctggaacctccccacctaggcctgacgaggagacccaagaggcggccccatcccaagacgctgctataaaatgaagcgactccctgccccatcctcttcctctggccacaaagctgagttaggtcgtagagcggcaccgccctctccctctcctgcgctagtctgcaggagcagccccttccctaactggcagattcaaggttttggaagacagaccattgccccatcctcatctcctggttctgtctaaaaggggacagttgccctgccttttggcaagacctaggttctcaccccaatttcagggatgtcccattcacccccctacccccatccccaatgagaagggacctgttggctggtatgccttcttgctagtgactggctgagctcaccactgcaggtgggtcacacacagcctcataggcaggcacagctggaagggaccagagagacatttagatccactctcttcagctagtaaatgtggaacttgaggctcagagagggacacttcttctgcctttaactgcagccagctcctcatgaacagtgagattgttcctgcatgaatagtgtctgttcctgagtttggaatcctgggctatgaagggacaggtccaaaggctacatctctacctacctgtggcctgatccatctcttaccttggcagtgggatgagaatctaagctgctctccaagaagtgtagctaggggtggaggtaggttactcattaccccacgccacaatgtcatcgcatgggctgtggccagtccctaacagcttcttccagaggctcagctccaaggacttcagatgctgccctaaagagcccaggtttctcaattccagggttccgctttctgcagctggtcacacctgctctctggctttctccagaaagtgatgcccaaacccctgactgaccttgaggcagctgagtgaaatgttctagaagagcttcctgcagcttcattgtccttcccttttctaacatggttaggccttgatgatgggcatgtggattacccaatgtgtggatcacccatggaaaatctggaaggccaggaggccttcccacacactctggggttgaagtggggtgtaagggggatgggtggggaagtgtctaccctcaactaccagcacacatgcagaaaatgcaagtggaccttaatagtagcctaaataaaatacccggaggagatataatcaacaggggggaaaagtgtgtattccctcagtggaaaaaagtttttttgaatgatttggttttgaacttcccttttgaagtttttttggattttcacttgaatctggacagagaatcataggatggtggaaaacctctgatccaacactatcaagatgaaagagttgattggcttattaatgtaattggtagaagttgagaatcacttaaaatatacatcttaaacatcttacgtattttatttgaagacataaaaagttcacttggttgccaaacttttttttttttttttgagactgagtctcac

SEQ ID NO: 1721 - DNA, 347 bp, Homo sapiens
gtcttgaaaaagatgtgatatttgacttttgctttaaactgcaagaggaaaaagactccactgaaattctaagtttgccaagtagtgtaattgaagtccttgtctggtcacacagtttaattctatttttgtaagaacataatgggactgcataacagagttctatattacaattttgtgattattagtacagagtacagctatgctgtgactgttttggaaagccagttttaacactatgttacatttttgtttaaagtaagttaaaccttatataacataatgacatttgatttctggatttttcccatgataaaaattagggggataaataaaattgttactgg

SEQ ID NO: 1722 - DNA, 646 bp, Homo sapiens
ccaggtagagagacacagagctgtgtacaggatgtaatattaccaacctttaaagactgatattcaaatgctgtagtgttgaatacttggttccatgagccatgcctttctgtatagtacacatgatatttcggaattggttttactgttcttcagcaactattgtacaaaatgttcacatttaatttttctttcttcttttaagaacatattataaaaagaatactttcttggttgggcttttaatcctgtgtgtgattactagtaggaacatgagatgtgacattctaaatcttgggagaaaaaataatgttaggaaaaaaatatttatgcaggaagagtagcactcactgaatagttttaaatgactgagtggtatgcttacaattgtcatgtctagatttaaattttaagtctgagattttaaatgtttttgagcttagaaaacccagttagatgcaatttggtcattaataccatgacatcttgcttataaatattccattgctctgtagttcaaatctgttagctttgtgaaaattcatcactgtgatgtttgtattctttttttttttctgtttaacagaatatgagctgtctgtcatttacctacttctttcccactaaataaaagaattcttcagtt

SEQ ID NO: 1723 - DNA, 4912 bp, Homo sapiens
gaattgacgtggacttgtcaaggtcaccgtaggagttcagactttctttcataagtgtgcattattttacatgtgcaaatcagaatatatttaaaaaaaagcaaaagaaattcaatggatggattaatatttatccccctttgggatattttaaaatctactaaaatgaggattagtaatataatgacctgctaatatattttaagaacatgttttaaaaagatacactctatcacatatttaagcaaacatcacatttggagaagaggaaatcataaaatcatcctagaagactatctgagagaaattctgttgccaccagttatacttgacaatttagttgaagctcagaaagttatattcatccctcttagctgtagtctatattagggcagttctctagaacgcccacatttccaccaactcagtaaacttgaggggagctggttggcacctcgtgaagaactctttccctgtcgtttgcagtaacaaactccagtctgttgcagtaacaaactccagtctgttgcagtaacaaactctagaatattgacattctctgtgggggaaaagcagtgtccactggaccccttctggtactggatgtgttctttacaaaggctagctcagtccaacactgtgtttacatacactcgtgcttttccttatctgacttctcattttgtatcagaggcatatcataaattgataattttgcaaaatgcacttttttgagatgcagatatagcaaaggattagtaatatagcctgaaaacaaatgggagcatagcagtgtgtgaggttctcgagaactgtcttgtctctgtgtgtttatttgcctgccagtgctctccagcgccatcctgccctggacaccaccctgacgtgatgcctctattgcagctcagaggctttattttttccattttgacattggcactaaatgcatttggggatggttaaaacaaattactatagaacatttaaatgatcagtttaaggggaaataggctagtttatagaaaaataagagctagtggcttataatggtgacaggttctcatgtggcacccctaggacctgtgcagacagtagtctgttgaatcattacatcaaggagctgcccctgtcagggtgagtgtaattaggaacgataccagcacataaggctccccccaatctcttccagttgctttttcttttttcttttttttttagacaggtcttactctgtcacccaggctgtagtgcagtggcataatctcagctcactgcagtctctgcctcccgggttcgagcgattctcctgcctcagcctcccgagtagctgggactacaggcacccaccatcatgcttggctaatttttgtatttttagtagagatggggtttcaccatgttggccaggctggcctcgaactcctgacctcaggtgatctgcccacctcggcttcctaaagtgctgggattgcaggcgtgagccaccacgcccggcctccagttgcttttgaagagggtaaagtcaagtttctatttctagaaaacattttttagaaatttgttgcgatgtttgtacaatttacctcataagagaaccacacccttctccaaaagtgctggtactgcatcagtgagatgagtagggtttttgtttgggattgtaagactattaagatcctagtaagtcagtggtagtttactgtgatgtgagcattgtagattcccccgttgtcactaatcacacaacaattttgagaagtaggctataaaacaaaaaaaggttgctgttttctatttttaaataaaccaaaaaaaaacagaaaagatgtgaattttccccagttatgtgggaaaggtaaagcaacaccaaataaaagcccacagcagcttcatctttacgataactcagtgcatatgtgaaagagaatgatgcattaactgaaatacctcattgaatattatactactactggtaaaatgcagaagacagtgttaatgtgtttggtttggggactggttgttataaaatgcaatttttttttaaatctaagcatttcattatgtgttctacagtgtcggtgaataaatgaaaccaatctcaatttagaggtatggatgatgacagaaagcccaatagaagcttaatgatgcttctgtttgaggcccagcaagcaccactaaattactggatgaaatgaaattgttcacttgagggattagtcaaccatctgggggagaagttgctcactgtcaaatacagcatgcacggtcctagctgatagaccttttcctcattgctacagcaagccacagggtagagtgaccagttctcctatccaaaaataaatgcgaacatgcatacataaatgtggctgagggccacttttgccatcactgtgctccaaaggaacatgatattgttaaatatactgtacacattaaactattctataagatgctttacttttcaagtacggtgtcattttcacagtctccagggtgacaaatgccaatagatatgtgagttaatttttttaaatatctccgtgagttgtaaatagatgtgtatttgatctgccctatccttctttgattctttaacatgttctctctcttctgtttgcaaaatatgtttgaaagcattggtagtgctttccttatcagtaactggagttctcctgcttgcactagagaaggtaaagagagaatcagtattcttatatggcaatctggggaagcagcaatatgccactgtacaaaactgaagaaaagttcctaatttgtactttgtgaagggagatgaaaggacgtttaaagtatatatattttgtcaagaggaaagaagataaaactatgccagttttatatcaatagcttgtagaagctcagctcttcttggtcttggctagactgcctagattcccacagcagacaaggttgagaatccattgctggaatcttggtattgatgagttacagtgatggaacatgtgcttggccacaggcaggtccagtcactgcaaaagtgaccaagccagcaggtcacccttaacttcagaaacaattattggtggtgaactgtacttaaattgcagagaaacctgtaagtaatggaaggtaaagaaaaattacagaatggaaaataatattttgggcaagcaaacaaattcactgagaattccaaaagtatattaaaaaagaagatagctatgagttcagatctatcttattggtctttaatattacaaccaatccttaactttccactataaaggaaggattactagattgattactttctggatagataatctggtaataaatgataggtaaatcaaaaattacttttatttaggagtttgaattcttactctcatcagacattttttttctagggacgcttactaattaaatgatttaagttgtttcttaggggttttttgcctatatatttatgactgtgttaatgagtagtgaaatgatgcggaaagacagctatcaggaagaggaaatacagaagcctgaataatctatgggttagaaaagcatccctgaataatcaaaaattggcagtattggcattgttctcaagcctttttatgaaaatgaaatctgaaatcaccaaatgtaaacctgggaacattattctagtgttgctgtcttggattcatgttaagaagcgtcttcattctttgctcatgttgcccacttcttgtggatttgtctgagtgttttttgacaatcacttccttaaagactcttctgaactagttggacctggttaatcatagagagtagcctttaatcatggatagtcttcttggattatttttatatttgaaaagaaaatgttttatttgcactactgagtaggaagagttaattgttttctttgttctttttttgaagtcattacacaggacttcactccagagttaccattatgagtgtgttcagctctggtccacagaggatggataaaaatggtttgttatgtttttttgctctgcagtgctatgagccttatatctgttaatatgaaggacaaagtcaaaagcagcagtggatagcaggaagggtagagactaatatgtttgggaccaaaaccatctaagttagagatttccagatcacagaggggctgggcattctctggagcagtcattggttggtgctttattgtaatcattttgcgccaatccccaacaattaggaactggaccctgggaataagctgagggtgctgaactgttggggaagggtgactgtagccacatggaagataaaatatgggtttttctgcaaaatttccatctgagggtttttacatttaatatttttttaagacagtttaaagagcaaacgttttttaagtgtattctagttgcaaagtatgcacacatatcttgaatggctttatttttattgtgtaaaactgttgaacacatgactgtgatgcacaaattctttacgtgtaaggagtctatgcattttacagtaacttattttatgatcgggtgatgagacagttatactttcaactgccattatttttattaagtgctttcattttctttacagttattataaaattgtatttattttatacagatgggttttcattttcctgatgctgtaatgtttacttcagcttgttgacctttctttgtgttatctgcatgttgtaacgtgtgataagaatgaatgtaaaggctgtggcaactgtaattaatttttgtaaagggctggtcacacgtggatctggtttatgaatgcatttgggatgattttggtaaccagatcaccttttcagaaatttagatgtgaacaccaaaagaagcattttctcaacaaaaattaatagctggttctattttttttaaacctagaaaaaataaagttgatttttttc

SEQ ID NO: 1724 - DNA, 468 bp, Homo sapiens
ccatggaatgaatgcactgcagactctcaagagatcaatcaaattgccagaaacagtttggtttttcatatggaataagtattaaagttacagtgtagttcatttattcattgatttttgtaatgtaatattctggaaaaaattttgttttcttaaaaattttgtctgacagctgggcgtggttgctcacgcctgtaatcccagcactttgggaggctgaggtgggcggctcacgaggagatcaagaccatcctggctaacacagtgaaaccccgtctccactaaaaaatacaaaaaaattagccaagcatggtggcaggcgcctgtagtcccagctacttgggaggctgaggcaggagaatggtgtgaacctgggaggcggagcttgcagtgagccgagactgtgctccagcctgggcgacagagcgagactccgtctcaaaaaaataaataaatacattttgtctg

SEQ ID NO: 1725 - DNA, 741 bp, Homo sapiens
agtcacctcgcgttgtttagagaactgtccacatcaatgggagctgtcatcacttccactttgtaaacggagctatcaacaatcctgtactcacttgaagaaatggggccttgctgggaggaacagcatgtaaaactggaacttctaaccccgtcccaaaagaggcggtgtagagcctaatagaagagactaatggataaacctacaagttatttaaatatttaaattattaataaactttttaaagagctggccaatgacttttgaatagggtttgtagaagatgcctttcttcctgtttggttcattgtattgtattaggttaagctctactagggtaatgaaggctctacttttcactttttaaaagtggacaaaagagtgtgattttctttttccaaaaattcctgagtatcaagacgtgcaggtcatgctttggagcctatgcactgtacacaaaggcaaaaccctatgactttggcatcatctgccattgatgtccagcctctgacatgctctttgatttgttaaatgttaaatgagactttaaggctactagaaactagtaattaagtttcttaatggactgagtagccacctacttgtccggctagaatgtttgttgatgtatgagtttagattaacactcaaaagcactaggacagatgtacatagaaggtgcctactcattgtattttgatgatttcattaacaggtaaataaaagttaatacaaaaggaa

SEQ ID NO: 1726 - DNA, 373 bp, Homo sapiens
agccggggacactcctctgcccagcaaggagccttggtcattttcatacctgggaggaaggcttttccttcacaattgtatacagggggcacctgtggccaggcctcctcctgggagctccaggaccagccagctgtgttccctgcagactgggctcagcccgacatccaacaggcgccaaactcacagagcccttgtgcagatccagcatggaggccaccctcaggagtgacttctcatccaccctggcagctagtaggttctgctgttatgcagagccatttcctctagaatttggataataaagatgcttattgtctctcccttctccagttctgggaatttacaggcacaatacacttccttttcctgg

SEQ ID NO: 1727 - DNA, 12254 bp, Homo sapiens
gctctttctgtttattttgggagttgaaaataggcaccatcaacatttagattacagcctaattaatacctagataagacttcatttgaaataagaaataactcttttactagtgattcatttatacagatatagtatctctgtgcggggatatgatataatattgtatttccttactgttttatctattgtaaataaaaagcattttaaaaagtattgacacaaagcccatcagtgggcattaaaaatattaaaagtgcagacttttactgtccttaagtgccatcaactctcagctcccttgtagcttttgtgggatttaacaagtaacaaattctgttgtgtttccctggtatacatctttctaggaaaaaaaaaaaaaagagagagagctgtataatgatttttcgtttacatgctgaaaagtaattatcagttctgcacagcagcagatgcagggtttttttttaaagatgtagtttgatttatcaaattaatgtgctgatgataatactggctttgactttgttactccatgttcagctaatttaggtttgtgagattaactttaggattttttgttgtgtaagacaatgataactattatttgtgcaacattactctttgaaataaaaattggcatgtagccaatgtttcctgcccacactcacttttttctatagaccattaacataatttgacttggaactaatggtttctttttagggtttcttatttatttctttacaaatcattccagttcaaaatatatatcagattaatacactggcaaagtgtcattgtgttattgaactatttcacatttgaagatgtttatatatcaggtatataatcactgggagaagtctgagaaaacgatattggctttacttctaacatttaactatagtttcttatagctcttattgtgtgtcttacattatacagtgtaggcagggccatcaaacttaccaactgtttccccttttgatgactctgataccttcattcatttttcaaaggaatttactgatcatgaggttggaaaatctgtatttctcttgcttattatgtattaataatcataaatgtctagattcaccagaagtcaccagaaggtctgtctcagtgaagaaaacttataaagccactttgttgcattttgtgtttcagtgttacagtttgagatctgtatatttgtacacagctatgtgtttttcattgaaataatgtacaaagactgatcttgatgctgtgtatttttatgagttgtcttaggcattcctgagctcagcttcagttggatggtgggtcagcaccctgcgtttctgaacatactagacttcagtttaaaactgttttgaggctgtataatatgttgctgtttttacagtgctaatgtttttatagtattaaaattctgtatgatttgtttcacttcagaggtccccaaacaaaagagttattgttaattctattagattatataagctacttgcattttgattatataagaacatggtccctcccttttaagagaggtatattgtgctacatagagtttttaaatgacatgatagatttgctctgaagtattcagcagagaaacaaggaatcgattaaggaaatgtgacaaaaatcctgttaatgttgaatctgtgtaatgactatattctactttgtgttggaaatttttataagtttttaaaaaatggttatattttaaagtccccaggcagacagctgagatttgaaatcctcttgagagcccaaagttttactccatagttatagcagagtttaaaatagaaataccactgggaaagacagtacgtattagcattattaactaagaaaagcatgaccaatagcagtaataatattgaataagtatactgtgtaagaggagaagttgcatttctgcataggccaagaactagtaagctaaggattaaaagcaagaaagtctgtagttttaaggaattggaaaggttgaaggaaaaaattgaaaatcaaatcttgctctatgataaaaagagtctggattgaatagggtcttaaaattatctttcagaaaagaaatagccaggcgcggtgggctcatgcctgtaatcccagcactttgggaggctgaagtggacagattacttgagcccagcctgggcaacatagtgaaactccatttctacaaaaaatacaaaaattagcagggtgtgatggcacacacctgtagtcccagccacccaggaggctgaaatgagaggatcacttgagccctggaggcagaagttgcagtgagccaggatggcaccactgtactccagcctgggtgacagagtgagaccctgtttcaaaataataataagaagaacacaagaaggttaagtctagtcccaaagaagagagaacactgtcaaagctggtttctgaaaactggtaccaaaatctacatttgtttatttaggctactataacagaataccacaggctgggtggcttaaacaacagatacttacttctcacagttctggaggctagaagtccatgagaaggtgctggcaaatgcagtttctggtgagggctgtcttcccgacttgtagatgaccacctccttactatgtcctcacatggcctttcctcagtgcatgcatgtggagagagggacagagtgcaagctctctggtgtctcttcttataaggacaccaattgtatcagatcagagccccacccttatggcctcatttaaccttaattatttccttagaggccccatctccaaatacagctataggcacatgggagttaaggcttcatcatacagattttagggggacacaaacattgagtccataacacaagcccacagaaaatcttatcctagacctctttccctggccctttatggcttgggctccgtagaggacaaagtgaataaaaccaaattttttattgcttcaaacagtatgatttcatcttgtaagatgtactttttcttttctaaggctgaatttgtttgatttctggtgaacacctatcttctctatccaccttcattcatttattcatctgttcaacacatacagttggacacctactcggatcaaaagtcagagatcttaagagcacagcctctaagccagatcatctgagttcagatttcagttctaccattattagttcaatgatattggacaagttacttaacctgtctatgatcaaaagtcagagatcttaaagagcatagtctctgagccagatcatctgggttcagattgcagttctaccattattagttcagtgacattgggcaagttacataacctgtctatgctgcagttttctcatgtgcaaaatggggataataattatgcctacctcatagcgttattctgagaagtaaatgagttcataatgtgaaggccttagactaataactggtgcatatgagtactctatgatcactgttattacttcttttgataaaggaaatgaaaacactcaggacaagtgttgccttcaggaaggtcatattccagtgaagaggatgagtgtgcaaacaatgataatgccatgcagcaaatggtatgatagatgtatgtgtggaacttaggggagtagtcatggaagtctttgtagaagaggtggcatttgagcagtcttgaatgttttaggcaaataatcagggaaggaatacaggaataaagaacaaattactgttataacaatgtggatcaatatcaaagatactatattgaataaaagaagcaaagccaggcacaagagaatacatcctgtgtatggaatcacagaatgggcaaaactaagccatggtggttccctctggggagaggggagatattaactgggaatggcacgggaaacatttttgggtgagcaaaatgttctgtatcttgatctgagtggtgctcacatggctgtatatgtatgtaaaattttgttgaactatacacttaaaatttctgcactttatttaagttttatattttaaaaatgcacaaaactgattcaccaaatatttgaggagcgtctccagcatcaaagacagacccaaaaactgtaagtcccttaatggcaggaatctttgttccatccacctggaataattgctggcacatgatgggccctcgatgcatagtggttaactgagtgaattaaaacaaaaaccaaagagaataaaggacctcaaagaaaacagatacatacaaagcaaaatcccagaatgatgactgtactcccagaaagaagagaaaatcatacattttttggaaaatcggaatgctattaaataatgttcagtaaataagaaaaagtttttgaaaattaaaaatatgaaagttgaaataaaaattcagtgggagggctgggagataaaatgaaattttcccaaaaataaaacagaaagattaagaaatggcaaattagaaaagtaagaataaagagaataagttcataaagttcaaagtctaatcgatacccattccagagatagcatgcagaaaaagcagcagagtcaaaattatcaaagagataatgcagttaccatatggcccagcaattttactccacgttctaaacctaagagaattgaaaacatgctcacacaataacttacacacaaatgtttgtagcagcaggttgaactttcatgaactgatgaatggataaataaaatgtggactatccactcaatagaatattatttggcaataagaagaaatgaggtactggtaaatgccacagtgtagatgaaccttaaaacatgccaagtgaaagaagcctctcacaaaagactgctgaattttgtagactccatgtaaatgaactgtccagaacaggcaaatctacagaaacaaaaaatagatctgtcactgcctaaggctggaaagatggagagggtggaaggaataggaagtgactgctaatgggtatgggatttttttttttttttttttgtgaaacaaggtcttgctgtgttgcccaagctggagtacagtggtgctatcttggcttactgcaacctctgcccccgcaactcaagccatcctcccaccttagcctcccaagtaggtgggactataggcatgcaccatcatgcccagctaatttttgtattttttgtagagacggagtttcgctatgtggctggtctcaaactcgtgagctcaagcgatccgcccacctctgcctcccaaagtgctggattacaggcgtgagccactgcgcctggcctgggatgtcttttgagggtgatgaaaaccctctaaatttgattatggtgattcacgactgcttgttgaatatactgaaaaccattgaacaatacagtttaaaagggtgagtgagatggtaaagtatatctcaatttaaaaagagaataaagaaatagaaataacacaagaaacattcccagacctgaggaataccaagaggaattggaatggcatcagattactaaacaacaatcctaaaatctagaagcatctggagaaatattctcagcataaatgatatacaacctaggcttttatacacagtcaaactaataatcaagtgcatgattagctaaaagatatctcagatatgcaaagcgtcaaaaaaaattacctccaaggcatcccgtttgggggttctaccaggggctgtgctctattccaaagggtaaaccaaaaaagcagcagccatgggatctgggaaactaaggctcccaaaacacagcacactcgagtctacaggctactaactaatcagcagatttggagactaggcagaccaggttggaataagactatgtaggccgggtgcggtggctcacacctgtaatcccagcaccttgggaggccgagacaggcagatcacctgaggctgggaattggagaccagcctgaccaacaactaaaaatacaaaattagctgggcgtggtggcgcatgcctgtaatcccagctactcaggaggctgaggctggagaatcgcttgaacccaggaggcagaggttgcagtgagccaagatcacgccatcgcactccagcctgggcaacaagaacgaaacttcatctcaaaaaaaaaaaaaggactatgtaggactccaaaagagatattttcagaaaaaaataaaagtgacaacacgagtgataatgttaactatgcagaaaattgtataaaggagatgttttgtaatatgattaagatgttcaaagaaacaaaaaataaggcagttattcactacagtagaggcagaaagctgtacaaaaaaagaaatgtaatcatggttacaaattagttctccagtgaacaatatttatatagccataataataaaaaccctgaatctgaattcagtaaaaaaaaaaaaaaaaaattgggacagttacactgggaggctaaaggatgggaattagcaattagtacagcacaggcactgaacagttagatggacattggttaaagcagtaaggtggggtgtggaggcccttatagctgctgggtcctggggcagggtagggtgtcccaggacatggagctggagcagccagagtggcagggatagtgaggaggcttctgtgccaaccagtacaatccatatgtttgtaacagtgtgactgtctgaacaccagctttgacatggcagtggggagtgaaatcttcacccaccacaactggaagtcagtggatgtctaaaaagctgattcaagatcatacaatatggatataatttagtgcagcagaataaagagctgacgaagtgggaagtattaactctgtggatgaacttaggtgggggaactgggccagggactgataatttttgatagaagcctcatagatttgatttttaaaattaaatgcatatagtaattaagggaaaataaatttggtttaagagacaaatcatcccctagaacctttctcggggtttcagtttttcagggtttcagaagctttctcagggtttcaaaacaggcgtgtgccaccatgcccggctagtttatttgttttagagatggggtctcgccatattgccccggctggtcttgaattcctgggctcaagccatcctcctgcctcagcttcccaaagtgctgggattacaggaatgagccactgcacctggcctatcacagtatatttcagataagacttactattctctgtttttggctgataattctagttttggtttcttcaggtttttttttttttctcccctctgaccatttgttttgcaaatagattatattatgaaagtctctgaagaaaaaaatatctctctagagaaccactgaagggggttcttggggattttatatgaaaggatttgagaaaattaatgttatattcatttgaagcttcaggggtaaagaatcccttgtaattcgttgctgtgtctctacattgctcatactttgcccatgggctgtaaactaatattcgttgaatgaatgagttcatattgcaaatttctaacttgtcggtttccctggatcacaatctcacacattaatggcttgtggcatttatattcattattaattgaacttagaaggtgagtgtggggaggggagaggtaaaaaactgaggacagatcactgggaaactgacctgaattaggactccagagtctcctgtctactagaactacgtctactagaactaagtctaattcccatatccctgcaggacataagagcagaggatggcattgacatccctcagtgacatcactgtgctagcaggtatagttgccttctgatcaccttttcctttggtcacatcccctgacttctgggtggcctgggatagctagagaagaaaattcaacttctccctgcaggtcttctgctccagctgactcctgtgcctgtgtaaaagattgggcatttctatcatcaccttgactagccttactcagagaatggctccagtgcctttgggctcatacctagttgcagattttaagacctcccttggtgcccattcatgtagctctgtggcccacatcttctacaatgatgtcattggagttcttttgtccatttctgcccctgatgccaccttgatgggaatgccaccctccacacaactcttcaccagtccataaatacctgagacttggcgcatttcttttttttttttttttttttttttttttgagactgtcacccaggctggagtgtagtggagcgatctcaactcactgcaacctccacctcccaggttcaagaggttctcatgccttagcctcccgagtagctgggattacaggcgcgtgctaccatgctgggctaatatttgcatttttatagagatgaggttttgccatgttggtcaggctggtctcgaactcctgacctcaggtgatccactcgccctggcctcccaaagtgctgtgattacaggagtgagccgccacgcccggcccatttcattcttaaaaaaaaaaatccttccggaggtttagttcctccacaaggcagcttctggttacctgccccctcagggtccttgctgcctgggtcaccccagcaaccccttcgtccacacatcactgccctttgcagcaccagctgattacattgctttttccatgttctagctgttcttttgagccgttttatagccgagcatctccaccagaagagcggataggaaaaaggaaaagagaggaggatttgaccttggtatcttgcttcatttccttctctgacaaaaatttggtgaaaaggttaaaataagtgttcgaattctctctgacttgtcatattctgtctatgccctgtgtgcctgcctctgatcctgaggaagtgtagaaatgaggggatgacactggcagaataataaaaatgggcaaagttgtagggcacccctgctccaggtcccatacaccccagctccagagcctcaggatctttcccagccatgtgccagacaatattgtaaaatgatttttcgtagccacaccttttattacacacatactcgatgaatctaaatactgtgctaagagctgtgtggatgtacacctgtaaaccaaggcacagaccctgcccacaagcaatttgccgtcagttaggggagccatcagtagcatctagggatccattagagggaaaagagggagctgagggagaggctaggagcccaagcaaacctgcacttctgctcctagagggaacctgagagtgaaactcatgggtttggaaacttctgtggaattacctgcttgcaagaaatgattttgtctggttttagaaactacgatggaacactaatatattcctgtaattgactggcaagttttaacacttactgcaatttatttttcttgtaagcccaacccaagtattcttcctttaaaaaaaatttcagattgacaaatgactgcttctttagaaatcctccttactaaaattactcctcatttctttttctttcatattcaaagggaacaaacgttcaaacacacaaataaacactgctctttgccagagtggtggactctggcctccccacccccagcactcccagtcttgccctcctgcaaacactagacttaattttctctgcgctgagggccctcctcgagtcagagtgagaggaaaaacagaagggagaagctgcgagatgtggcaacaaaggggacggtgatcaggtttatccctgatgttgtctgtgaaggtgttccattctccagagatctcaccaaatggtataagtgatgtgcagataagcctgtggttcccttcactcatcagatcagagcctcagaattctcagaaaccatttttttcctaacataaaactccttttctcatttctatccctctgtaaatctgatttgaaaaaattgtttgaacaaaccaacaatgtcagatttgttccagctatatgagctcacaattcatctactcttggtagttcaagataaaagattacccaaagaaaaggaagagattgagtaaagccacaactgtaatagtgtcccagattgggtaaaaggccattaataaatagcgtgaattgtagaactgtttaaagcagcatatttttaaaacaggcatataaagaatccactttatgcctggaattgtacaaaaatactttaaataaatgtttacatatataatgttatcaacttatttgctgaaggtaatatcaatataatgctagtagttaccatgtattgagtgcttactacatgccatgatcatgctaaaagcttcacatgcaccatctcttttaatcctcaagacaatccatgaattaagggctattaccacgcccatttcatgagaaagaggtggagatgagaagggaagtgcctggccaccttcccagcggtctatagaccatgtagagcagagcgaggccttctgaccacaaactctgcttccaccttctccccgtggttcacagcaaaggccttgtccagagtctcagacgctctcaccgctacaccacagcgacctcgttggttcttctcattttttttcaatgacacatagcaacagagagtatcaacaaacatttttaaatttcccagcagttaacgaatagtgaatattactatgtaatactagtgtctaagaaagtgctcaaagttgtttaaagcaatttattatcttaatgaggttaaatatgaacttttgctgttaatttcttgggaaatataaatcatcatagctagtcattctttcatcgtgggaagctaacagtcctgattgttcaggattataattatagtaaattctgaatttgtgacgtgtgaattttagaaggttacaaaacaacttccagacaactgagtcataaagtttttgagagaagtatgtggcacacgtctaattcattgtcctttctctccagtggtatagttatgatattaacctaaattgcaaaaggaatcgttttagttgactgctgcttgaaattgtgtcacttttccaaatttaggtaatgtctgttacaaggagtatattttggaaacattaacttgactgatacttatttccctggttaagtgaccttcctgccatgtgctgagtgccaggacttactgcccctcagtaatttggaaggggatcctgggccctgcctggaacaaagggttgtgaaacagctctgagtctcaaggcaagtcttgaaagccatatatagttttcagaaaaagagatcttctaaattccattcacccccatttaacacattaggagccaagcctggtggactagctctaggggcagtttaggagagaaggggatcggggaaccttcatcccttctgcctctggtgaactggcaagatgaagaggatgaagctgggtgacccagagcccgccctccctctctcggcagtcatctccaaggccggagtagactggactggagggcctctgagaggacacagccaggaagcacactctccctgtgctcttcacccaccatgaagagacaggacgggaaagtccgtgctgtgctggtgtccatcagagggagggacaccatccagcccctgggaccgggctcggctctgttgttgcacagaagtcatttggagatccccacgtgccacatggaggattgtgggaggaccccaccgaggtggctggcagcctctcatggacaccatggagagtgacccaatcactctgcatttgaggactgcagagtggctcagcggtctggacattgaagaggagccaacctcaggggtaacacagtgccgctgggagctgagatgagccaggtggtcggtgggggacacaagcctagaacaaattcaataaaccagccacagacgttatcatcagatgtgcccagagacaaggtggacaggggcatttgctgtggagaccagagggccagagagagtacagggacctggatagatggctccagcacctcttcttctccctacacccatatgccatcttgataaacagcagggaaatctgaaaaataccaagtcttcccatagggacagtgttacctcccaaaaactgtttgaataattggcttgaactggattttctgaactgaactaatgctattgttttgtgggtttttttcttcctactgagtagagtagttgtttatgggggacatctgatcctttcattttcttccagagagctaaccacctgttctgacaccatttattgaatagtacctcttttcccccactgatgtgagaggctgcatttttcatctaataaaatcgaatatatatttagatct

SEQ ID NO: 1728 - DNA, 97 bp, Homo sapiens
agtgcatctccagagacacacggaaatacattctctttgattcttcttcagtgtgtctaaattatttacaaattattaattataaacaaagctaaac

SEQ ID NO: 1729 - DNA, 2858 bp, Homo sapiens
ctctctttgatcacatactaattttctttccaatttgtattgtttttcaaagaatgtaaagttcttaagtgtatgcatgttgtttatttttgcactgtggagattctgaagcggttatgttagatgctttgaaactccatatcagaagaaataactttataacaattttttttaataatgaaaaatattttcgtgacaagtgagctctaaattctctttattgtaaaagagatgtaaaggttttatattctaaatcctagtaaaattgacagtgatttttaaatataatgcatcttcctttgtctgcttagtaaaaaatttcatttcataattttggcaagctctgtagtggatccaaagtatctttgagttcttgcaaactacaagttgtttcctttccagaaggcttgatttcattaggagacccctctattgagttctaaatagtttatcttagaaagccttgggtcattcacaggtatccaaccagccattgtttagtttgtttttgaaggggtttgataatgctttttaagttgtacagaatgcttaatccatcttattactgtcctgagccatgtaatatgcctgcatcgtgttggggaaatgtttgggaaatataagccagcataacgtgtaaagctcactctttcaccctggaacagacaagaggtgggcttaatagaggcagagactggggatatacctttgtttccctagcatttttatttatttatttttattttattttattttttgagatggagtttcactcttgttgcccaggctgggggtgcaatggcgcaatctttgctcactgcaacccctgcctcccgggctcaagcgattctcctgcctcagcctctcgagtagctgggattacaggcatgcgtcaccactcccagctaattttgtattttcagtagagacagggtttccccatgttggttaggctggtctcgaactcccaacctcaggtgatccgcccacctcagctctcaaagtgctgggattacaggcgggagccactgcacatggcagcattttttaaaaattcagttttaagatctctggtttaggggagagattttattttactgaaccagttctatagaaatttattttattaggaaatttgtctttggaacaaagtggcagctataaaattatttttgttaagcctcagaaatatgaggaagcctgtaaaactctagtggggagatattaacttggagacctaatgctctgtaaatagtcatttaaactgttggttttagtggttttgtttctaaaatgttttcttttaccgtgatgcaccagtatgagatggtgctgacactttctatgaagtggttatgagcaggtttaataaatcctctatacaagtgtttgaatcaattttaaaacataaaaagtggaaatttccttttttgtagacagtaggaacaaggaattatatgcatttttactaagtagtaattttacactgaattgtaaatgtttttacagtgagttttattaatagaatgcttcaccttaaattggaaaacaataatagtcttggactaagtctttgtactaaagcatttgctataattatttttaaaaaaacaaacagatgaaaacctcagagaaggcatgtggattataagatttgtctagtaaaaattgtaattgaatatgtttaaatatttaatttctcattttggggggtttttatttttttattttttagatggtgtctcacgctatcgcccaggctggagtgcagtggcgcgaactcggctcactgcaacctccgcctcctgggttcaagcaattctccttcctcagcctcccaagtagctgggattacaggcatgcaccaccatgcccagctaatttttgtatttttagtagagatggaattttgccatgttggccaggctggtcttgaactcctgacctcaggggtgatccacccgcctcgggctcccaaagtgctgtgattacaggcatgagccaccatgcctggcctttggggggattttaattacagtattaattatagttctaggatttcccacattttatagtagtagtttgcaggatattatgtgccctaattagcagatatagacattatcaaattataatgatagtataattatccctttttaatattggggaaagaaaaatgaaaattcattagttaattactgctttgtgttgtgtgaatttattaacaaataacattattacatataggtcattgttaacaaacaaacatccctgaaaacctctgtgaaaatttaattttttatatcctgattaatatattgtgactttaggcccatttttcatgtgcttcactttgatagagttaatccataaaattgctctttactttagcttatcaaatgaagtattattttgtggactggaggccaaaaagtcaatgtgagcttctcacaggtttttaaagctccactaaaaataattatccacttgtctttacttttgttgaccagaatagttggtaactctgccagagcctgtacttacctgccaaaaacaattaaatctggttaatgcctgaaaccaaatctctcagtctcaagtgttatactatccaagttttaaatggaaaggtaaactgtggagtaatgaaattttggttttactgtaccttttgctatcaagataatattcatgtttgaaatcttgtctttatttggaatttagttactgtctgcttttaacctttgctttcctaaagaaagtttgagatccagagagttcaagggattggggaaagagaggcgtcaagtcatttgcactttgtacctgtaagttaggtaataaactattatactcgt

SEQ ID NO: 1730 - DNA, 254 bp, Homo sapiens
tcaccccaatccagctcctggaggagggacccagctccatcgcgctggaggagagtcacctccagacaacatctgctccccccacaggggtgcaggtggctggcagcaaacaggctctctgaagacagtagccaagattattcacacataccatgtattattttatatgagataatttatttttttcccctttggaataacttttgtgaattattataatgcagtttccctagtaatatagtacttttcatttg

SEQ ID NO: 1731 - DNA, 2887 bp, Homo sapiens
aggatggaaacccagaagacgtaaccctggaatgcaaggtctgcacccatttcctcctgggttatcactcacacatcataaatgctgaaaagccattgtttattatcctataattctttaaagaaatgatgactgtttttgaaagtgttccttcctaatagaggtctaagaaatgatatttttctcatcttaaatgagagagaatattcatatgaaaatacttgatttgctcttattttgtagaagacaaagaagtatgtaattgtcacttggttctgtttggcagtgatgctcctggttaactgaataatcagtggcaatttcaagatggctcacagttgttagaagtagtaagttagttactggctcaaaaatgattctgttgaaaggatgtcactgctgttcatttctatctgccatttctgtcagggttgacacaatcctgcaagaatagttattctaatgatcacagctgctaaatgaatcccaaactttgcaccaggtcgacaaacttttctgaaggttctatttatttaccatacatagggttacttaccaaactttttgacaaggctgaaggttctatttatttacaatacatagggttactcaccaaactttttgacaaggcaacacataacttacacataaatgtctctgttcttgcatttatgaattttccaaaaatctaaggagtaaacagcttatttatacattttgaggagaaaacaaagtgtttcactaggaacacctctacttgaaccaatgtttttatttcatatattttatagttttgaaactagtttctcataaaattctgtcaattcactgaatatcagagaatactgacatcttcaacctagcacatttcaaatggaaactactgttctatttgcaatattaggctgcgtgaaattttaaaaggaaaaatgtatctgttccttctagcattaacatatatacatgtagagacaagactatacctatgtgtatatatatgtatatcatgtatatattactctgcactatatcccttctttttggagaactagccattattttagccacagaatcagtaagaacagatgatatgcaacagtaccaattacggttcaaaaatgtctgtcacctgctctagttggattacaaagtcattggtgaaagtcctatggcaagaaaaattttcttgcaaatcatccacataaaatcagatatttaaatttgttcttcatggaaaacagagtaagaaaacctcttgtcttccttcatccttaaaggtctttgtgaccccaggaaaatattgactctgtctaacacacaatagtcacaatactttttgtgaatctacaaccagagacaggcaaaaacttgtaaagtaagggatagtcttacttattctgcctgaaaacaatgtattaccccagggcccaacagtaaaagattgtggactttttgggtattgagatttcatctagctctgtgagagagcagctcctcagactgaccaactcctagacaaagtttgccaaccataagtgtcaaaagcacaggccagtattaagcagaagttctaccaccttattagaactgctataaacaaaagcatctgaaataattgtgcacatctggcagtgactgtagaaaatacgaaatatatatttctcgccaagtttttatactttctgaaatgaaaacataggattgactagtttactggtttttattcccatatgccgattctgggacaataaagttgtttaaagctggcacaaataagcattaaccaaggctgtgtccaccttctgtgagctacttaaggtatataggaaaggagtggtcacaaacttgcatcctaatccttggtggactcttctaagaatacagtttgctagtcacaaagaatagtctacaaatatgctttgctaggttcagaagattgagtttatcctgatttttgaaaaattaaccaggtatctttatcactgtgtatttttccaagcacagtataaaattttaacaacgcacaaaaaaatacagaactgcaggggattttatcttggatcattatccatttaatcatctaattagacatgaactcagttagctgaatcatttacattttgactccatagcttagggcagacagaagcctgtatggcttctgcccagaactctgtcccctgctacatgtctaagtttacttgtatttatttcagagaagaactctaagatgttgctttgctactttaagtggtattgcgtgccaagcctctattatacaaaccatgcagactcgcctctagagattctgattcggttgatctggggtgtgtggctgaggcatcagtactttttaaagcttccaggtgttctaatgttgagacccactgatgttccacaatctggaagaaatcatgtacaggaataatatgctatgcacagggactatgctccttggctcaccccttctcccttataaacaatgagcagttcttgatgaacctctttaaatttaaatctcctgactcacattttaccaattgtacatgccacattctcagcttacgaactaccatgttttgttattcttaatatcaactgtttggtaagagtacagttgtttttatacactctaagaaatgtgtttataatctactgtaatttccactaaatggaacccaaatattaatgttatggtaccatatactgatgtaaaaatcatgctggcatccatgaacacaccggtaaataaaacatagtccaagtggaagaattcattaataaggaacttttaattatgtcacaaatgaatagttggtttccaatgcacaaatatcatgtaaactaatctaaagatggtttgcttaataaatatttgaatgtgacc

SEQ ID NO: 1732 - DNA, 1287 bp, Homo sapiens
cattgctttatttaggagacacgaagctccaaaatgttttctatattttcatatccctttacaatgaatttttattatacctacttagagaaatactaattcagccctttgatagcttttgcctgattgtttcagcatgtccatctttttagaattctggggaaaaaagtcaggtaagtgaaggaaaggaaaaataaaagatgaagatgaagaagcagccttattggatcaaagtatgtgctttgtatttgtctttttgtgaagtatgtgccaggacatgtttcttgaaatattattcactgtgttctctgagcaaatgagtttgcaaaatgccctcatgctattggagattctcagtatgcaccccgttactgaaactccaaaaagcattgtaagaaagctattcaactttgcttagctaatcatgcctaacagatatttgatgtaatgttttctttttctttctcttgctgtttccttcttctttttttcactgtgacaacttaatatctcatgttctatgaagaacattgtggggaaaactaatcccagggaaaagataacttctctaagccaggactatggtaaagcaagtgaggctcttgtttcggtcacaaaatttaaaggcactaaaaaactcagtgttaatgtaaattttaatgcaatatttttaaaaatgaaaatcaatgtgaaagcactataaaaatattatcaaaagcttaaataaagacagattgaactctgtaccagcacaatcctgcctcactggccttaccctcctcctggccttactagtaccgcaatattttggaagtcccatgacctctgtgacttacagcttctaatagcatgatttcaatatagctgtaaaaaaactctacttatggtacaccatttttccaatttttaaaaaaatttacaaagtataagatatatattattatgtaaactcataaagatgttcatttaatcatccatgagaaagtcattttggagcaaatagctagtctttaaaatattgcatatgtgaagacaatgaaatggaattcgagctataaaaatttgtattgttttatttttacttaaaatagtaaatagtttgcttttcattgagactggctgctgatgcaccttggtaatgaatcatgattatattctaactgagatatattgagattaatgcatgattaactactctctcagtacatcaaaatcattgcagagtattagaaattgaaccattgagctaaaaatgctcaacttctgctttatattcttaaaatggca

SEQ ID NO: 1733 - DNA, 3693 bp, Homo sapiens
ctaaaagctccctgggccttcccatccttcatgttgaaaaagggaaaataaacccaagagtgatgtcgaagaaacttagagtttagttaacaacatcaaaaatcaacagactgcactgataatttagcagcaagactatgaagcagctttcagattcctccataggttcctgatgagtttctttctactttctccatcatcttctttcctctttcttcccacatttctctttctctttattttttctccttttcttctttcacctcccttatttctttgcttctttcattcctagttcccattctcctttattttcttcccgtctgcctgccttctttcttttctttacctactctcattcctctcttttctcatccttccccttttttctaaatttgaaatagctttagtttaaaaaaaaatcctcccttccccctttcctttccctttctttcctttttccctttccttttccctttcctttcctttcctcttgaccttctttccatctttctttttcttccttctgctgctgaacttttaaaagaggtctctaactgaagagagatggaagccagccctgccaaaggatggagatccataatatggatgccagtgaacttattgtgaaccatactgtccccaatgactaaggaatcaaagagagagaaccaacgttcctaaaagtacagtgcaacatatacaaattgactgagtgcagtattagatttcatgggagcagcctctaattagacaacttaagcaacgttgcatcggctgcttcttatcattgcttttccatctagatcagttacagccatttgattccttaattgttttttcaagtcttccaggtatttgttagtttagctactatgtaactttttcagggaatagtttaagctttattcattcatgcaatactaaagagaaataagaatactgcaattttgtgctggctttgaacaattacgaacaataatgaaggacaaatgaatcctgaaggaagatttttaaaaatgttttgtttcttcttacaaatggagatttttttgtaccagctttaccacttttcagccatttattaatatgggaatttaacttactcaagcaatagttgaagggaaggtgcatattatcacggatgcaatttatgttgtgtgccagtctggtcccaaacatcaatttcttaacatgagctccagtttacctaaatgttcactgacacaaaggatgagattacacctacagtgactctgagtagtcacatatataagcactgcacatgagatatagatccgtagaattgtcaggagtgcacctctctacttgggaggtacaattgccatatgatttctagctgccatggtggttaggaatgtgatactgcctgtttgcaaagtcacagaccttgcctcagaaggagctgtgagccagtattcatttaagaggcaataaggcaaatgccagaattaaaaaaaaaaatcatcaaagacagaaaatgcctgaccaaattctaaaacctaatccatataagtttattcatttaggaatgttcgtttaaattaatctgcagtttttaccaagagctaagccaatatatgtgcttttcaaccagtattgtcacagcatgaaagtcaagtcaggttccagactgttaagaggtgtaatctaatgaagaaatcaattagatgccccgaaatctacagtcgctgaataaccaataaacagtaacctccatcaaatgctataccaatggaccagtgttagtagctgctccctgtattatgtgaacagtcttattctatgtacacagatgtaattaaaattgtaatcctaacaaacaaaagaaatgtagttcagcttttcaatgtttcatgtttgctgtgcttttctgaattttatgttgcattcaaagactgttgtcttgttcttgtggtgtttggattcttgtggtgtgtgcttttagacacagggtagaattagagacaatattggatgtacaattcctcaggagactacagtagtatattctattccttaccagtaataaggttcttcctaataataattaagagattgaaactccaaacaagtattcattatgaacagatacacatcaaaatcataataatattttcaaaacaaggaataatttctctaatggtttattatagaataccaatgtatagcttagaaataaaactttgaatatttcaagaatatagataagtctaatttttaaatgctgtatatatggctttcactcaatcatctctcagatgttgttattaactcgctctgtgttgttgcaaaactttttggtgcagattcgtttccaaaactattgctactttgtgtgctttaaacaaaataccttgggttgatgaaacatcaacccagtgctaggaatactgtgtatctatcattagctatatgggactatattgtagattgtggtttctcagtagagaagtgactgtagtgtgattctagataaatcatcattagcaattcattcagatggtcaataacttgaaatttatagctgtgataggagttcagaaattggcacatccctttaaaaataacaacagaaaatacaactcctgggaaaaaaggtgctgattctataagattatttatatatgtaagtgtttaaaaagattattttccagaaagtttgtgcagggtttaagttgctactattcaactacactatatataaataaaatatatacaatatatacattgttttcactgtatcacattaaagtacttgggcttcagaagtaagagccaaccaactgaaaacctgagatggagatatgttcaaagaatgagatacaattttttagttttcagtttaagtaactctcagcattacaaaagagtaagtatctcacaaataggaaataaaactaaaacgtggatttaaaaagaactgcacgggctttagggtaaatgctcatcttaaacctcactagagggaagtcttctcaagtttcaagcaagaccatttacttaatgtgaagttttggaaagttataaaggtgtatgttttagccatatgattttaattttaattttgcttcttttaggttcgttcttatttaaagcaatatgattgtgtgactccttgtagttacacttgtgtttcaatcagatcagattgttgtatttattccactattttgcatttaaatgataacataaaagatataaaaaatttaaaactgctatttttcttatagaagagaaaatgggtgttggtgattgtattttaattatttaagcgtctctgtttacctgcctaggaaaacattttatggcagtcttatgtgcaaagatcgtaaaaggacaaaaaatttaaactgcttataataatccaggagttgcattatagccagtagtaaaaataataataataataataaaaccatgtctatagctgtagatgggcttcacatctgtaaagcaatcaattgtatatttttgtgatgtgtaccatactgtgtgctccagcaaatgtccatttgtgtaaatgtatttattttatattgtatatattgttaaatgcaaaaaggagatatgattctgtaactccaatcagttcagatgtgtaactcaaattattatgcctttcaggatgatggtagagcaatattaaacaagcttccacttttgactgct

SEQ ID NO: 1734 - DNA, 653 bp, Homo sapiens
gaaaagcaaagaagaaatgttttacagactttattcactatgtcccattgttctaaaatgataacatgacttctgtttttgaagcaaaaatctacattgcctcaaacacatcactctagcttccttactgcatacagtcctgccatagtgagagaaatgggatttcatcacaattcatggtgctaaaatgaaaacctctgcactttaatttttttcagtaatttccagctatttctaggtataaagagcagctcgtttctcttatttattttagtctcatgtgtcaatactttccgatgctttgcttaattcatgtatgtgtgcagtgctgcaatgcccagacaaacgtgagcacacccaccagtttctaaaatggaatagacaggaaaagattgtgttttatatcatccctatctattgtaacccaaaagacctaccatcgcatcagtgaagtccgaacacatctttgtttgaaaggcttgtcaatttcatattccttgaattggcttcttggtgaggattttctgacagagtgatacccatcaattttctatccttagacaatgtagtgtgaagttcacagttgacaaacaacaattaatgtttcccttggatgttttgacaaaaataaacctcatcgttgttatcaccag

SEQ ID NO: 1735 - DNA, 1184 bp, Homo sapiens
tctggtactcacataatcagaccatatagacgaggcactttggaaccacaagcttggctcacaaaaagagctttctgggttgtaggcccagactagacttgcagcatgcatgctctgtgttcactaggggttggctgtttgggattttagttaaacgtgtctgtgaatttttatgtaactaactcctttccattcccctgggtgtctcatgctgctctttgactgtttcagcttgaacatgcattttctaaagcaaactgcactagtgtatatatcagggacattaaagtctgggactggggctcaatagctgcggatacagtgttcaaagaagttcttgtttctaaactgattagaacttctagctaatgctcaggtgagatcatagcttaaatacattgaaaaaactaaagtaccacaatagctgtatttttcccaatccccttaacgatcataaaagaggcaagttaagtatttctggcactgaagaaatatcttttttctttgattcatttttgaataaatataaaatgaataactattaaggtagaaaatattctcagaacattctagaggaggtaaaggttagtaggagggcgttggccatctctacattttgtgaggtgagagaaaactaatgtttactttctgctgtgaactgaactgcagctatagaatgtttcaaatgcttaaatatataatacatttttttccatggaagtgagggaatatttcagtttcctgaagtatgacacaaatactcatatactgtcttttagagtcagtatagttggagctgttttcatttagtgctttgataatgatttacttatttttccaaatttcgtttgaattttctttcatatgattgcattgatctatgcagcatttaccagaaaagagtattcctgggatagcagaatgcataacactgagtgttaattcttgtgaaataaataagctagactgccttctctttaattagacatattttaaagtatttattatagttgtcaactagtaactcaatgaaaaagttgatgcccaagggagaaatgagaattagcttaattgctgcctttaatgtgtttttgaggaacttaaaattttctttcatgtcgctgatccatattaccaagttcaaataaaatttttataatcggattcagacccataaccaaact

SEQ ID NO: 1736 - DNA, 204 bp, Homo sapiens
gggatgaacgaaagccccctcttcaactcctctcactttttaaagcattgatattagtatcttctcagatacagaccgttttatgattttttaaaaagtaaaagttctaaaatgaagtcacacaggacaattattcttatgcctaagttaacagtggataaaagacttttctgtaaacaactccagtaataaatatcatgaact

SEQ ID NO: 1737 - DNA, 1360 bp, Homo sapiens
aggaaagtttcatttggccgggcgcggtggctcatgcctgtaatcccagcactttgggaggccgaggcaggtggatcacttgagctcaggagtttgagaccagcctgggcaatatcgtgagaccccatctctacaaaaatacaaattaactgggcatcctgtcatgcgcctgtcatcccagctacttgagaggctgaagcagaagaatctcttgagcccggaaggcagaggttgcagtgagctgagatcgtgccactgcactccagcctgagtgacaggagttaagccctgtctcagaaaaaaaaaaaacaaaaacccaaaaagtacttaaagtttcatttacttagctaggagaaagacttggttctcaaaataatacattttaagattaattgggtagaattagagttccacctttattcattgttgagcagtgatttatatttagttattatatttaggaatagaaaatagaattaaataatttaacttgattaatcaaccagaccaattttgacgtctggagaacttataaactcaatatgttatatttgttttcctgtatttaggtggagaaatgagaaaaagctttagttccaattgacagttcaggtcaatgttcaatgaacattcctatcttctaaaccagatttctctttttttttcctgagacggagtctcgctctgtagcctaggctagaatgtagtggcgtgatctcggctcactgcaagctccgcctcccgggttcatgccattctcctgcctcagcctcccgagtagctgggactgcaggcaccgccaccacgcctggctaattttttgtatttttagtagagaaggtgtttcaccgtgttagccaggatggtcttgatctcctgacatcgtgatctgtctgcctcggactcccaaagtgctgggattacaggtgtgagccaccgcacctggcctaaaccagatttctttagggcacaattttttctggaatctcactcttgtttttcacagtaattttaaaaacgtttctactccaattaagaatatatatgatgttattatatatgcttatgaaacagatttatgagaaaagttttttttaaataaattatttaatcctagctctttgttattcaccagctttttaaaaaagtgtttgaaaattatacattctcgactttggggattagtttattcttgtggcatcattataaggcttaattgtggaaagctaagtacttgcttctattccttccaatgagagattataacataaactattaaaattattctgctaatatacctagatttttatttttaggtctctgtccattgcttttaattaaaattatctgttttcaaatc

SEQ ID NO: 1738 - DNA, 866 bp, Homo sapiens
cacttacctactggaaatagtctaaaattatgattataacatgaagtagtgcatggttattttacatagtaagacctggaattttatgggaaaagtatgtctttttttttccttttgtaaaataaataaaagtatatacaacttttaaaaagtgcaaccctggctaaattccactcctttggttaatactgaagataaaatataaacaaatgtcaactctgttataattaatacagatgttttactgtttatttctaattcaaacacttaagtagctttattgttaaactttgctatttaaaattggttataatttagattatgttcttataagattctatatttcctatctaaaatgttgttgtaattcaatttaaatgtgttcatgtacagtccccatcagtagcgtatagaacaccccactctcctttagtaaatgttgagaaaatgcctttgttgtcatgctccaaatcccacactgggctgccacctgggagttctggataccgaaaggttcctttcccagaggttctgctgttgccatcagaggaggatgaccgtgcttgaggaggaagaatgggttcaagatcatcatattcatcagaaggggacactaaatagaacccttaacctgttgtacttgccaaaattgagaatcagagatgtgtaaaatgcagcaaattaattataatgtaagttaagatttgctttttgccaagttgcaaagttgtatccacatcaggtcactgtaaaaatgtattatcttgtaaaacttatgtaaaaaaaaaaaaaaaaaaaaggcaaagatactaaaaattttaagtccgactttatttttcctacaagtgtttagaaatgcttctggg

SEQ ID NO: 1739 - DNA, 3908 bp, Homo sapiens
ggtatcacaaagccatccatggggcagcctatgaaagtatgttcacacggagggaaaatatcagtgttcatatatcccttttagtgctgccttcccttttccactcccacaccacccccaaaacattttaaaaagttagttttggaagactgactttgtcttattctaaaatgtgtgcacagtaacagaagtgagaaagtcattccagtcttcatctagtcacctgagtcacaactttaatgcagcttctttttgttcctcaatctttgattacataatcatttgcaaaaatacactcctgaaatgaaatcacagttagccttgcattttggagtagtattagaattaagacttgccatcaaagaggttgccatctagaatgtttattctctttactgtgccccaggggttttacatgcatttgcaactttatttttattttatcctacaggaaaaaaggctcagagtgaatggctattagcctaaggttactcagctagtgatataggagttaagaagaaattatttaggcagatagtgagggtactggagtcctcagaaaggttttccttttaatgaaaagcagccccaaaatcattttcttttctaacaaagagcagcctgtaaaatcgagctgcagacatagacaagcaagctagaagcttgcacaggcgaatgcctgcagttgtgccaacaggaaaaggctacctggaactaggcatgttcaaaatggcagctctgtcttctcttctctttgccagccaggtgtacagtaaggagcagacaacatggcactggccaagtggaaaggctgtttgcataataagattacgatggggtggcctgccttccctgtgtgctacgtaaacatcacacctgatccaaccaatctgcaggccctacataaatcagacaccgcctcctccagcctgcctataaaatctggtacactccacgtgggccagaagtcccatttggatgcccctctctttcgcaagagagagagctgttctcctttctctttcttttgcctattacattccgctcctaaagtcacttctcatgtatgtccacgtccttaatcttcttgatgcaagacaatgaacccgggtatttaccccagacaacaacaccacttcactaggagttaaaagaacttgaaatgcaaattcatggtcatctggttccaaagcccatattaacaaaatttttttaattgtgataaaatacacataacataaagttgaccgtgttaactgtttttaaatgtacagtccagtagtgttaagtacattcacattgttgggcaatccttcttcagaactttttaagtttcccaaactgaagctctgcgtctattaagaacaactctttcttccaatccccagctgttggcaactatcattctactttctgtctttatgcatttaataattctacgtacctcatataaatgaaatcaaatggtatttgtaactggcttatttcacttagcataatatcctcaagattcagtcatattgttatatgtgtcataaattgcatttgtaatatcacaaactacaccttgatatattgtctactgattagcatggatttataattatttttatgctttgccttctacattctataaaagaataaaaagttgagttaaaaaccaaaattataataatgaaagtttttacatttgcccatatttttaccttcgctagaaaattttatatggcctagcatccattcattttaacttaagggattctctttcacattccttacagaacaggtctagtagtaatgaatttcctcagcatttttttaaatctgggaagttttaattctttgcttttgaaggacagtattgctggatatagaattcttagtcacaactttttttttctttcagcattttaaatatattatctcactacttttttatttgcaaggtttttgctgagaaatctgctgatagtgttattgaggacacattgtatagctatttttccatttctgttttcaagatttcctttgtctttgatttctcacagttgactatattttagttggatctctttggattatcatacttggagtttgttgagcttcttgtatttgtagattcatgtcttttctcaaatttgggcagtttggggtcattatttctccaaacacagtagtttaccatcacccacagtttcactttccacagtttccattgccaatggtcaacagcagtttgaaaatattaaatgaaaattccagaaataagcaatttataagtttaaatcacatgccatactgagcagtatgatgaaatcttgtgctatcctgctctgttctacctaggacatgaatcatccctctgtctaggatatctacactgtatatactacctgcctgttagtcatttagtagccatctcagttatcagattgactgtcatggtatcacagtgcttttgttcaagcaactcttagtttacttaacaaagtccccaaagtgtaatataggtaatgctggaaatttgggtatgccaaaaaaaaaatgttcatggagtgcttcctttaagtaaaaagttgaaaattcttgacacaaggaaggaaaaaaattatgcgaggtttctaagatctacagtaaaagtaaatctatccatgaaattgtgatggaagaaaaagaaatttgtaagtagtacatatagggtttgatactatatttgggatgttggaacatacccaattgataaaagaggactactgtaagttctctgttctttgtttctctcttctcctaaaacttcataatgagtatattggttcatttggtagtatcccatagtctttcagtctctgtttacttttcttcattcatttttctattggcaccttagcctcaataattttaaatgatctctctttaacgttaaggattttttttctgcctattcaagtctgccattaaaacattaggctggatgcggtggctcacgcctgcaatcccagatttttgggaggctgaggtgggtggataacttgaggtcaggagttcaagaccagcctgactaacatggtgaaaccccatctccactaaaaatacaaaaattagccaggtgtggtggcatgcacctgtagtcccagctactcgggaggctaaggcaggagaatcacttgaacccagcaggtggaggttgcagtgagccgatatcacaccactgcactccagcctgggcaaccaagggagactctgtctaaaaaaaaaatacaccgtagtaaatgtttgaattcagttatcgtgtttttcagctccagaattaatttctgttaggttcttttttataacttttatctctgttttgctttgttttgagacagggtctcactctgtagcataggctggagtgcagtggcacaatcttagcttactgcagcctcaacttccctggcatcaggtaaccttcccacctcagccctactagtagctgggactagaggtgcacaccatcatgcccagctaatttttgatttttaatagaggcagggttttgctatattacccaggctggtctctaactcttgggctcaaatagtcctcccacctcaacttcctgaagtactgggattataggcatgagctaccaggtctgactaatttccatttccttgtgaatatgtgcattttgttcatgtatcttttttatgattttctttacttatctgcctgtgttcttctttggctcatatttaagaatataagcatatttaagacagttgttttaaagtctttgccaaggaagtctgaaaactgtgtttctttagggttagtttctggagatttatttggctctttgaatgtgccgtgcttacctatttctttatatgctttgtggtcttttttattgaaacttgggcatg

SEQ ID NO: 1740 - DNA, 988 bp, Homo sapiens
caatggtctggatggaaaggattgctgctctccattaggagacaatgaggaaggaggatggattctggttttttttctttctttttttttttgtagttgggagtaagtttgtgaatggaaacaaacttgtttaaacactttatttttaacaagtgtaagaagactataacttttgatgccattgagattcacctcccacaaactgacaaattaaggaggttaaagaagtaatttttttaagccaacaataaaaatataatacaacttgtttctcccccttttccttttaagctatttgtagagtttatgactaaatagtctgtgcaggttcatagaccgaagatactacacactttaaaccaattaaaaagaaccaaaagtaaatagaaaagacattgaatcaccaaggcctgggatcaacctgggctgtccacacagaaaacaaaaacccaaccaaaccaagccctgttgtgctcactggtgcaaagagaagatcagggcagcttaagtggtctaagaatccttcaggcattctttaaggagaaaaaggatacctttgattttgtgtgtttcatgctctggattttttttttttttccttctctgggtttaagagattttttttgaaatagtgaggaactgaccattatatgccttcactggcttcttgtgcaataatatgatgttttaagtgtgcaaacaagttagagctggcagctgaatgatagacaaatagtgcaaatttgccagcttggagatagaaaggaattcaacaatatatcaaatactttccttcccacctttttccttttttttttttttttctgatttgattctggttacagtgccataaaccttgttacatatgtatatcagaatgtaagaaaaaaaaatttatttaaaaatatttttcgcaaaaaaaaaaaaaatcttggtgtgtttctgttgattgtgtaaaaatttattttcattatataaatgaaactgg

SEQ ID NO: 1741 - DNA, 341 bp, Homo sapiens
cctattggtcaaggtggccgacagggtgacgtgagagaggagagccacctcatcaaatgaaagtcactgctgaataaagaccttagaagtctgggaagccagggtagaggtggggcagggcggttttcctctccctgggaaatcttgctgtctactgaataaataaatgcaccttctctgtatgcagtgcttctgtgggagaccatatcccagattgctggtgcacctgggttatggtaagcactagtccatgagcctgcttggaatcacactggatgtctccgttttgtcttgtaaatgcctacaacctgaggtaataaatcaacatttgctcaaactgg

SEQ ID NO: 1742 - DNA, 336 bp, Homo sapiens
tactgaattttagttatttcacagttgtagctacacagtaagtagcttggtagatagttattgaatgtatttatgtagtgtattaagaagcttatattactacaaaaaacttatttttatatatttttatatttttgtattatttatagctagagaaacaatattactgcctttgctctttgtaactatgtctgttttcttttttgtaatgttaaatgttacatttgttaaggaataattcttcaaatgacaaactaattacagaatatagctctacagcagttattgtttgcaaatactttgcctcttgctattgtgtaataaactgtaacttgt

SEQ ID NO: 1743 - DNA, 1880 bp, Homo sapiens
tcctgacatgatgaacctggaacttctgtgaattttaccactcagtagaaaccatcatagctctgtgtagcatattcacccttcaacaggcaggaagcaagccgtacccagaccagtaggccggacggagtccaatgcaaagctgtaccacagaattcagagtccagcacatcacactgacgtataggactccttgggatacaggtttattgtagattttgaaacatgtttttacttttctattaattgtgcaattaatagtctattttctaatttaccactactcctaccctgcttcctggaacaatactgttgtgggtaggatgtgctcatcttcagacttaatacagcaataagaatgtgctagagtttacacatctgttcacttttgctccaatatgctcttttgacttaacgtcaagctttgggttgatgtgggtagggtagtgtcaaactgctttgagaggaatgggaccagttctgctgcctaagaaggtctgtctggatgtttataggcagcacctctgaagtggcctaaattcaccctgatctgatagttttcctgcttagaaagtgtgccttggccagatcagtatcccacatgggagtgttccctaggttgtagctgtgattgtttccagatgaccagattgtttttctgaaaatgagcatatttttagtcatgtcgattagctgttcttctacatcacattgttactctttctgatgatgattctagggttaacattggaaccatctcaaaataattacaaagttttagatgggtttacaatgtcttctaaacaatgtaatctaaaaataattgagtcagatgctaacgagatactgcaggcataactgctgtttttctgacaactgattgtgaaaccttaaaacctgcatacctcttcttacagtgaggagtatgcaaaatctggaaagatattctattttttttatataggtagataggatcgccatttatttcctatttagatatactgacattcatccatatgaaaatatgcaggtcattagcttactataatttacttttgacttaatggggcataaataaaactttcatagtacacatgaggtggatatttgatacacagaacatttgcggtgggctttctgtgggttagatgtaaagcccacatattttaatattcactattttaaatgagcaatgcatgaggggaatgcagtgtcagtacctggcctatttttaaactagtgtaatcaccctagtcataccattcagtatgtttgctttttaaaataagtaaccacaactaagttgttgtagcccttgcacttcaagagatctagtctttactttcagttgtctgttaggtccattctgtttactagacggatgttaataaaaactatgcgagcctgaatgaattctcagccaaatttagtcttgtctctcatcttgattggattaattccaaattctaaaatgattcagtccacaatagctctaggggatgaagaatttgccttactttgcccagttcctaagactgtgagttgtcaaatccctagactgtaagctcttcaaggagcaagaggcgcattttctccgtgtcatgtaatttttctaaggtgcttggcagcactctgtaccctgtggagtactcagtaccttttgtttgatgttgctgacaagacctgaaaaaaaatcccttaaaaaaaaaacccattaaagtgtagcaaaaccgatgtattattttttctcttttctcataaaccataagatatgtatatcaaaatgataatttatatgaagcatctgctatccttcacataagtatagtttatatgaactacaaatacctttcatcaacattaaagaagcttaaattgaa

SEQ ID NO: 1744 - DNA, 1373 bp, Homo sapiens
tatgggtcaagatccagatgactctcctgctccttcggggaaaggaccttgtatcttggagtgaggtcacagaaggatagagcctgggggcaaaatgtctaacttgtctacatggggaccacagttcacattatgcatctcaggctccacagtgaggctgacaaactgcaatggcagtgcttttaaatgagatttgaggattcaccaagacccatggggaaccggggcagcagggaagccctcgcgtggtcttggatgaggggtgttaaatgtgtatcgtgctgtggaacatgggacaattccacgcacatcccaccgaatcatcacgcatcccattgactggcaagtactccccgccccctctgaaagcatgtcacatcatgtaaatttgcttctaacatctgcttcaaactgtctctggactccaaatttggatgggtcagcctctgcagaaagtttgtgttgagatgctggaagaacagcagagcctcctgcaccctcagcaagggaccagctcccaaaggaaaggtccttgtgtgacatttggagaatcttccttcatccagacaactctactcgaagcaagacgaaagcaggatgtggcagttgcagtgagaaaggaaaggaaagatgggcagactctgctttctggaaatttcttcacaaagtagagctcatgaactctgtgctgtcttctggtaacatatcatcagtgtttgtattcatggtgtggcacatggatccatggcattgggtaaatctggtggtttttacacatggtcagaatgtgttcaaatacatctcatgatggagacagtaaccaaggtaatgttttgtttcagcattttaaaaagactccacttaacatttatctcagaatcatgagcctctctctagttgacaattgtcattgttcccccagccccaaattgaaccatacatttattttccaaaacagaaattgtttctgtaaacatatccgaccttcaaaagaagtgtgaggttggatttttcccccttttatttgtcctaagattccaggaggctggcctcccagcccagatagctcagccacctcacctgcctatcattcctgcattcctactttgagggtctcatcatgcccactgggtgttgttcctaagaaactgattgattaaaaaatttcccaaagtgtcctgaagtgtctcttcaaatacatgttgatctgtggagttgattcctttccttctcttggttttagacaaatgtaaacaaagctctgatccttaaaattgctatgctgatagagtggtgagggctggaagcttgatcaagtcctgtttcttcttgacacagactgattaaaaattaaaagaaaatgacagtttgaa

SEQ ID NO: 1745 - DNA, 42 bp, Homo sapiens
atgttgttctcctgcaataaaggacgtttgaattaaacattc

SEQ ID NO: 1746 - DNA, 959 bp, Homo sapiens
aacttccacacagaattttagtcaatgaagaattaatctctgttaagaagaagtaatacgattatttttggcaaaaatttcacaagacttattttaatgacaatgtagcttgaaagcgatgaagaatgtctctagaagagaatgaaggattgaagaattcaccattagaggacatttagcgtgatgaaataaagcatctacgtcagcaggccatactgtgttggggcaaaggtgtcccgtgtagcactcagataagtatacagcgacaatcctgttttctacaagaatcctgtctagtaaataggatcatttattgggcagttgggaaatcagctctctgtcctgttgagtgttttcagcagctgctcctaaaccagtcctcctgccagaaaggaccagtgccgtcacatcgctgtctctgattgtccccggcaccagcaggcccttggggggctcacctgaaggctcgaaggcactgcacacttgtatattgtcagtgaagaactgttagttggttgtcagtgaacaataactttattatatgagtttttgtagcatcttaagaattatacatatgtttgaaatattgaaactaagctacggtaccagtaattagatgtagaatcttgtttgtaggctgaattttaatctgtatttattgtcttttgtatctcagaaattagaaacttgctacagacttacccgtaatatttgtcaagatcatagctgactttaaaaacagttgtaataaactttttgatgctagctgtttactggtttttgtttttgatgtcataaatagaccttgtttaatagtcacaagccgttgggatatcatacccagctgaaaaagaacaaactgcttaacataagtatatgtatcgtaataagagttttttaccagctaagtgattcaatgtaagtggtttttaaaataaaatactgtagagatcatggtg

SEQ ID NO: 1747 - DNA, 291 bp, Homo sapiens
tgtctccagcagccggcttagaggagctagcccatcaagccggcagagaatcccccacacgctctgaaggacccactttcagctggacacaggcgcggcctcatgtaaacattttattttcaaatgaatgaggccaagctgaagctgaagctgaagattcttcccatctggccagccttgtgtgaaaatgccttcttcctctttaagaaaaaggacaatttttaaactgctgaaataaaatgactgttacatttttcaaataaaacttttactttgaactattttgactat

SEQ ID NO: 1748 - DNA, 4343 bp, Homo sapiens
tggtgaatttggagcagacgacttctgtttaacttaaaattagtcgtattttaatggcttgggatttggtgcaaacaaacatgattgatagctggacagacatgctcgtcatgaaaaaagaaccatttctgaagcccgattggggccaaacatttacaccttgcttcatagtaaccagttgagatgaagcacgtcgttagaacgttgttggacaccatgttgaattattcccccatcggttgtgaagaactgtgctacattcaggcttacccattgaactcagtatatatatttttttccttcctgtcttttgtctggcaggataccattcttgttgctcttctgtgtaatgaagtttaaatgcttgtttggaaaactttatttaacagtttagaaggcttgatagaaagagtgcattagtctgaagagtatacattggataggaaagaatttccttcttttgtttctccaaatctttccgccttatttagcttgagatctttgcagcttggttcatggattctagccttgcccgttgcgcagtatatactgatccagatgataaaccagtgaactatgtcaaaagcactctcaatattacatttgacaaaaagttttgtacttttcacatagcttgttgccccgtaaaagggttaacagcacaattttttaaaaataaattaagaagtatttataggattaaagtgacttcatttgtatacatttggaatctaaaccagcttaaaaacagtttcctcaatgacttagatacacagtataactgatgctcttctggaataccacatgagacatggtcagaaacagtgcttggaaggacattacacaagaaattcagagtaatgctttgaagatttccccccttttgttttattcctgaaggaacatcagtacccgatcttgaagaaattcaagattcaaaaagaattttaaatacaccaacatgagacatcagtagtcagttggttttcagtaaagcttgttccaagttgttctcaacttaggaagtaattttggtgtgatctagcaaaagagtaggaatcagcgatacaaccactttggaagtttatagtataattgaaattattagaagaattcagcaggttacagacatacttaaactgggattaaaacctcatagtcatttttcttaattgcccttaatattttgacatatagggatacataaatttaaagaatattttttctcagttttttcagatattgccatactgaacctcattctaaactggtgctgtggatagtctttccctctcccctcctgttttagtttaaggaaaggtttccttcatggaaaagcacttttaattttgagaatttcacatttaaaataagccaaaagcctgatgttcacattgtgcttttaaactccgtaacagctgaatacaacataacatagtctcccttgaaattccctccctttttcagtagaggataaatagggtgactccagctgttggaatgagaatggggatacccccaaaataagattctggtgaagaaaaagtcttgtactaagttcccctttaggtgtagccaagtctataatataattatgatcatgaatagactccagaatccacaaagagaagagggcttggatgtcaaaaattcttccattgtggggtaggtggtcggggatgggagaaagggaaaagtcagggaaggggagaagaaagaaaaacacatttggccttaaaatagcatgcattctcccagaagcccatagtaaagaaaatgacagatcgtggtcagcagactcttatcaaattggtatgtaaaagatttcttcaagctccattttgcagagaccaccacttagagaatcaaaaaattcctgttttgatacttctaagttaaaatatatgttacagtttatctggtacttcatttttcttaactaaaattactttttactttaagcttgaataaaaatcttcattggtaactgtatgtaattaagtggcaacttctctttacctcagtatagttaaaaaccattcatattttaagtgattcatgtataccctgaagccgttaatacaccccagtctctatggtaacatcactaaatgtgggcatagaaactccacagctgtttacaaatttggttacagtgtgctacggtgcatttgtaacactcagatttgtgcccattcaggggcaatttggcactcagattctactctacttcacctaaccacccctagatctgagttttcagagtgcttctgaagtacagtttaaaaacactttttaaaaagtggagtaaaagtgaggcacattttacaagaacataactcctattaaaacggagtaacaactatgcaaaggtttctatagcagctaggtgagtttgttttccgggtctgtcttaactggcagcttcctgtacatactggtacttatttgctgtaaacgtctgtttcatacatttgccatgcagtgactgtgctcgaaaggtgaaatcaatggtaaagaagcctaggattttatggtatgagaaactgatcgcaggattttctgatccatagctattaattgaaaacttctgatagtgctgtaggctctatagtaggcttaagagtgagtcttatactatgaagccagccacaagatactaacaaatgtataaattgaaaagtaccaatactttttgcacatagatcaaaatagagtggagaatttgggctccaaaaatcaggttagtaggctcatttccatgtgcttaaaaatgtttttgttgttatgcattgattaagggctagagcaaatataaaattaaatgtctttttcctccaaataattggttattaatggtaaaatgttggacttggggattactgagattagtatgtgggtagtaaagaattggagtgggagttagtggggagggatgacaaagcttcagctttggtttttgtatttttttagtcttcataacagctacatttctgttgctcttattggccagataaatgtgttatattaaaccaggtaagtattttaaacagagaacattttatttgcatatatccctacaaattggcccattttattgggtggggggataaaaaagggattccctaactttaaataatcagaatatcctgcaattgaaaggagaaaaaaatccaattttgtcagtattttcttagtctgaaaaaaacagcagtagtaatctggtgaatgttattattaggagtgttctgcctctacagtggcatattccatgacattaatagaaaacccttctttcccacccctccccatcttgacattttcttttttaggatgttggttcctgcaaacaagaactgaccctatcacctctgcctcacagtgggtaaatatatcatacatctcttgaaagggaaaatatccatgtcagtttctttcacagtagaagaatggctgcttttgaatggggaggaaagaagacatttttcttaatatcctttttgtcccatctctaaaatgtataaatattttgatttggttttactttaatttctcattcataatttcgcaactgtccttttgggttgccctccaacacattacttccatttcagaaaccatatctgatttaatataaactgctaacttaagaagaggtgaatttgcatttacacttagacactttctaaaaacagggtgaacttaattgaaatttttcagtgttgttaagctattgttatagtagctgccctatagttacaaaaataaaaactataaaaacccatcccctatctacttaatccagatagcctggatttaacaaaaccaatagtataaaaatgtgtgtgtgtgttctgtgtgtgtgtgagagagagagtacttgattcattaaaaagtcctggaaacagctgttctaggatcttgtcatttttactgaaagtctcgtgcacatgtgaagtgccctctgagtttaaggtttggttaatactggtatatttttataagattgaaattgtgtccccatctttaacttaaacattttcattatcagggtcaatgtgctagaactgaattgtaacatttttaggcacagatggaaaaaaatgttattggctccttgaaaatgtgtgtgtgtggcgaggggaatagatccacaaaagcatgtatgtacttacaaaccaagctgtagagatcaagaaaagaacttaagtgttgatctcaagatttctaaattgtcaagatttacatggcattgtggtggaactagttaacacttagagcttttggtatgtaataactatttgctatggactgattaaatgtttcaaaagattgtgttcttc

SEQ ID NO: 1749 - DNA, 1800 bp, Homo sapiens
tgctcttctggcttttctacaaaatactcctgcaattccagctgccatttgcaaaaacaaggaaaaaaatccgaaactttcttttgttgcactgacagggtctgtacttttttttttctttttgagtcaggactatggagccgagtagttgatcttttaatatagccgtgtttacttgtattaacttacagttaacataggaaaaatacaagtaaggatgtgagaatttgcattttaatgggaaattttcaacccttaatctgaaaacagaagacagtcttaatataaatgtactgtgaagaatgctattgatgtttatggtttctgattacttttcaaattttgatgtttttttgccagttggcttttcttaaatgaaaacactgttccatttaaagtacatttatgttttattcagtaagagaatagaattttcatttgtttttctttaaatcctttactaattatataatttgaaagcaaaaagaagggcctatattaaatgctgaaagtgaaaagtgatgacattattagcagacactgcttaaaggagaccatttgtagcagttggcttaacctcaacttctaaaactacattgaaaatgtaaatacatagcttagttttttgtaatatatggtgacttcagatttttttgtacagtattttgaatgtgagatgattgtcaggactaactgtctttttaacaaaacattttcagtattttaaataaaattttgtaaagtaatgtgaattaaaaattttggaacaattagaattcattcactattgtatagaagatgctgttaaaacataggaagggtatttttcttgatccaaagtttgtgaatttggctttgctacctcaattgcaggtgtttgtttgcctttataaactgttgcaaatagaaaaaaaatagaataagtatatatttttggagtaacatcaatatttaaacatttttacacagatcggtgtttgaaaatttgccatttcaggctaatatttttatatatttttgactttttaaaagttcatcagtgtttttgctactgttaagcttatgcagtttatactgtattttttatgtatcctttatatttaccaaacctgactccctgtaaaggagtgctgtcttaaaaacaactgaaggggttaaagtcgtttcttttagtttaatagatgtgcataaggtagctttagcaattaaattctagtgaagttgatatagtctcatttttaattgtcctgtaatggaacagtagcaaattcactaaacttttgtgttcagagttaaattgttctcagtactttcaatgtaggggaatgtaataaacatagtgtgtatgtttgggttttaattacacattttatatatgagccatttagatatgcagtgttaattctatactgcatttgaagtgtatgtaacttagcttatgttaatgcagtcatgaagttggtttgctccagcatccggtagtctttaaacattcttttagtgaaattgtcattgttttatcagtgctaatgtgtgcaagcagtttttttattttgcttttctcctggcatcagaaagtggtggcgttttctgtactggattgcaccaaggaagcttttggggaggaaggaaggacattaaattctttccctggtaatgaaaagagccctttatcaatacagtgctgcaatttctggatatcagctacactttgtttttaagtttgtttttgacatgtttatttggcaaattttataatgaagttttaagttgaaaataaaatgtagcaacattttgatc

SEQ ID NO: 1750 - DNA, 10943 bp, Homo sapiens
aggaacagactaaggagagataggactttaatctggaggaaaaatatcctacaaacaacaactgttcacaacagcaaacccctacatttatgagctgtaagaagaaaatggagacaaacagaaggagggaaaaaccaacctactctgaaagccttcagacattatgactctggtgataagctctttccctctccgtttgctgcttttttctggcctttacaacagaatggaagagaatcatttaagagttcctgtaacagttatgcagaaaatactaaaacccatcaggcaagatcaccacgcattgaaatattttcatatcaagataaagtcgcacattttccacaatacattgctaaaataaagaggagaaaggcttaggaagtttttttgcagagagtgctggtaaagaattgagcaagtttgctattgtattgtaatgtttctctcaggtttgttcttcctatcatgtttgatattccatgaataattgagatcagccctatgtaagttaagatcataatatgtggaacaaatggaattgtaagtgctttcaaagggtaatatttataagaaagtgtccgaaaaatgtttcttcagcttgagaaattttagaatgataggaagtttctcgagttagccttcatgcaattttgtagattaaaacataaaatttgtccagaacttaaagatttagatgccttcctaaattgttacaatgctttaccaaatctatgacttctacataacacaaaccagtggtcaaatgtaaacactatattgtagatttactgtaggttttcaaccttttttagatttatgcatgtggacatttttataatgtaattacaatcaccacaaggttagcttttttaattgcagacagtaatgcatgtcacactaatatgtagtggccttttcaaggcctagtcccagggaaaacattttgtagagtataggggagtgggaggaaggggaggaataattttttatttaaagttgatttctgcactatctttttctcagttacctgcatgaataaataatgagaaatattttgtgactttaattggtaaatatgttacaaaaccaagtacttaatcttttacatcatgtcttcagctatttgtattttaaccagtaatttcaatggtctgaaacatgattctgagcttcacataatatcttaactgtggaactcaaaagtttgatcactgaatttggcagttattattacctaggtacccccgctgttacacaggtgtttagatacgtgttcctgaatgaagctgcttttgaattttgttatgttgaaatgcaagaaataacaatgatggcagcaattaaggtcacagaaatcattaggtaaaggaaaaccaatgaggagttctgcagttttcttttaataagtaaagtgagacttgggtggtgggaagaaggaaggtgggaagaaggaattagacactctgcctgccactctgcgtgtgtgtgctctcgcgcacgtgctgtctatatggaagccactcccttttctttcctttgaaactggtaaggttaaaataggggagaaatcctacatgttggaatgatagctttttggaaaatttaagaaactctccaggctctccatcttgatttatgcttgagttgttatgtgccatatttgctttgaactctgattatcagaagttttactaaaactttgaaataattcactttcatctgctttctagattttgtacatctcagtccataaagcaaagcttgttgatagtgtagttttctaaacgctgcaaatttgcagcctttaccactacaaagaagtttggatgagggattttttttttctttgtcaaaatagttcctgtttctgtagaaatttcatttttagattaaactgtgatggatgagctatcataattcaagtatacatttcttttttctatcagatattcattgtcatgcagtagtagtaaaaacatcaaagatgcagcaagcttattaagtattattttctaaaagaaataggaggcattttcatctttattattgtacttttggttatgcaaacactttgataatataaacagttatgtcccctataaatctggtcagcaacctcttttgattttgttgggtaagttaaatagtctgtagtaggtagagtactgggtacaagtggtccaaactaagataagagactaaaataaaatgctaaatcttaaaagaaactgggtttatgcactaaacgttttgtgccttggtctaatattaacatgatgtatgtgtaaactgacaaaaaaaaaaaaaaaaaaaaaccagtgttgaatcatgctatatttcccatcatcccagattgctaaatgttctttccaagaagtctgaatgaattattatatacatttgctatcatacatgacagttgtgtcattattagagatttcagtaattaaaatgggaaacagaagcctaagttatttaccttatcaaaaccacgttccttggaaccacattattatgatggtttttgtgctcttgtacgttggatgtcttaagctgagtacagtttaggggatcctttctaatgacaggaaggcactgctttcctcaacactgtgatctgacctgtgacaagtctgtactatccactatgtaaatggctcacaagtcaattgcaaacaaactgaatgtacaaatcttagtgctggtgctgaaatctcttcagaatagtcatcatgatttaaaagtttgtttaaaaatttgcaagcatcaagtgtcaatcaaaactgaagatgaaacactaatgaatgttgaattctcatgcttttaggtgtacttcctttttagaattttcagttttctgctatttttaccgtaactatttcgtttaaatttgtttcatttaagtttcctacacgctaacttcgtttgtgcgattgaaataaaattgcagtatatatatgttgcttgtttgtgacacttagataatcttctgaaataatttgttttaaagtaagttatattggatgtgaaaaacaccttttaaagtccaagactttactacttaaaagtttacatgtcacgtcactattctttacagatttcatagaagtcgtgaatactaagtaatgtatacaaaagaaatatgtgatgatgtgtctactttttgtttgaaataactgttgggtgttccctcttcttattttctctctgcccaccttgacacagtaacttcctcttatagtcaagatgatgattaagtgtttaatttttattccattttgttctgcaacacgttcaggtacttaaaactcattcatgcagttagaattatcctttatgtagtttgcatggtaaaggacattgtgtggtaaagggcattattgagtaatgaattttaagtatagcaaaatatgtatagtgtttatacatgatgctgatttcttaaaacctacatataagcagtagtactttttctctattataaagtattaattttgagttccattttataattctgatgtcttcattagaaatacaaaaatacaatccttgtattttttctttgaccagacccaaattttccccttcccccctccattctcctctccacttctcgtggaccgcgtgttcccaatattcattaacatttgcagccattacagagttacagttgtaaaattttcagctgtttttttttttttttttttgctctagcctgtctcatgttcttgcttctcttcatatgtaagtcagtatttttgtctacaaattaaaagtcacttgtcattcaaaaatgagttaagtaacatgataatcttttaaatttacctagctacaacttttatgtctcttgtaaatttatatatactttcagtgccattgtgaagaattggccttttaattctaagtagtattaccctatgaagcacagtgtgcaaaggtatgctacaaggtctctttaattcctgtgtggccattataattttataacaccattaccctttaaattctaccgattataagcagcgtaaaagtaactatataaagcaaacatcgcaaaggaactctgcaggagctcttaattcctttatgtagctatcataaaattcactttcctgaagacatttactctcattcacttccaaactccaaacctttttctggtagcaccacttttgtttttaatagaaagatgagttcatatctgtacatctctccaaagctctaaggaatgagaaaaggatcctagtatattgaaattactgatgtttaatacctctgccttttcactaaaagccatttaatatttttaaagtcaaaacttgacatacaggtatttataaggaatctccatgactctgaaggaatgaaattgatgtaggtagctttggctatgtaaagacatagtagaggacaattacttaaagaagagttttcttttgaggatttgtagatttgactaagcagctgaagtcagtaacccctcaagaaagtccgtttatagaagccaagaactgttggaggtctgtgatgcaggtttttctgttcccaacatcaaaagctgtggattatttggtgtgttcccctttatgttatctctcgataatttttgagacatcaagattttttaaaatatcaatactggaaagatgaaaccttcaaattaaaacctaaaattgattagaaagaaaagtaaaatattaatgcagtaaatttaggatggttacagatactcaccatcaacataaataaatggagttctaggataaattatttgtggaatactaatggtcaagtcacataagagtaaaatcttttggtgaggagacacatttgacaactgctaaagaattaactaaatttgtctttctaaatagttttctttataaagtaacagaaacattgtaaaaggataaatgactgtcataatgacttaggatgttgtaagaatgtctgccacatttattggttatttctgttgaaatctgaaggaatcgatacatctgaaaattgagaaagggaaataggactgtccccgttacagatactctgtgatgcacacaaccttctaaacggaagtgttagtatcatttaaagcacatagtaggccttgagtatttgcagattaacatgcagaaaaaatcaaagatgaagccccaattaagtgtttgaaccaaagaatcacagtcactgagctgcacccccgttctgtgaagcatgttaaatactcataaagagcagagagcagggcccgtagacgcttctggtgtaggacacaggaattctaggcagagggagaaaattaggggccccagttggtggctgagagtaaaaagaatataccatttgagtagtgctgttctttttcctcagtttttaaagacatataattcctagtagttaggacatctaaatagctcggtaaactggtcagaggcgggaggattgcttgaggccagaagttttgagatcagcctgggtaacagggagactcatttctacaaaaaaatttaaaaatttaggccaggcatggtggtgcacacctgtaatcccagctactcaggagactgaagcgggaggatcacctgagcccagggaggacgcggctgcagtgagccgttatcatgccactgtactccagcctgggtgacagagcgagaacctgtctctaaaaaaaaaaaaaaaaaattctaagagaatatagcttttcatagaaattattagaaaagcttacatatttcattagagagcccagtttgttagactacatttattccgtaaaagttctatatacaaatgacaacccatagtttatcatgtaaatctgatttaactgttcccttcaattccaagaaagatttcttcagcagtagatgacaattctaaaagcataaagaaataactaataaaggagatggatgatgttataggttggtttggttgggttttagtaaatagttattcttctaagaaggcttagaaaatcgagaattgaatagttggtactttgaattccataggaaaaagcactcagaagaaaaagtctacattggctagtgtttagattgagagttaattttcccatcaagtccaaaagtttccatccaagtctatagaaactgagagaaaaggttcttggcttacacttaaaatacacattgttgcaaccatataagagagatacattacagaacgcttttaaaaatttggtctcttaagcgcctaacagtccatgctttagtcacatctgtgaaacctcttttctttttttctttttcttttatttttttttttaaagattaaaggcattttaaaaataaatgtttcatggccgggcatggtggctcacgcctgtaatcccagcactttgggaggctgaggtgggcagatcacctgaggtcaggagtttgagaccagcctggccaacatgatgaaaccccatctctactaaaaatacaaaaaaattggctgggcatagtggtgggcacctgtaatcccagctcttcgggaggctgagacagaagagtcgcttgaatccaggaggtggaggttgcagtgagctaagaccgcgccactgtactccagcctgggcgacagagcgagattccatctctaaataaataaatgtttttcaacgtgttttatgtgagaaataccagcttttcattattactaccagttgatctcaggtgtcacttggttggttctgctgaccgaggcactgggcattttaaatatggagtttccctccacccattgatcaagtctgaggtttgtccatccttggtggcaggctagcttaaccatggattcacaaaccccatttgattgtcgtaagtcataaggccaccccagtgccagtggttgggcatcacagtgagtctgaggtgatgaatttgagttagctgtaggctagttccgcaactcagcaatagcccatggatggttggtaaaagacgttgactttgccacttaaatttccaggagaagaatagcttatagtttatctgaggaaagtaattgggaaggcttagatattgagaagaaagccctgttaaaatctaggtagcatttcctttcttctttattactagagggatgggaggttcaggcctgagtcaggactttacaatttggtgtccttcccagaggtactttgggcttgatcattttaagtttcaattgcaaaaaaaaatttttgacggagtgttgctctgtcactcaggttggagtgcagtggtgcgatctcggctcactgcaacttcccccccctgggttcaaagggattttcctgcctcagcctcccaagtagctgggactacaggcgcgtgccaccatgcccgactaatttttgtatttttagtagagatggggtttcaccatgttgcccaggctggtcttgaactcctgagctcaggtgatctgcccgcctcggccttcaattgcagaagtttttgaagggagaatatttgatcctcacataaaatgtccttgtttctgaaagaaaacatggtaaaaattgttattgagtccatgtctttgccaccttgttggacttgatttccctttctctgtgttcctcccgccctcagtctctctcagtctgtccttttttgtgtgtggagttgtgggcaggtcattggactgggactgactttaccagttttcaggctgtggggctagtcagtcattctctctgagccttctacctctaaagttgagttctttttttaaattctttttgttttgtttttattttttccttgccactatacaagcaaggatagataaagctttttattattattgttattattattatttcgagacagtctcgctctgtcatccaggctggagtgcagtggtgtgatttcagctcactgcaacctctgcctcccgggttcaagcgattctcctacctcagcctccttagtagctgggactacaggcatgcgccaccacacccggctaatttttgtatttttagtagagacagggtttcaccgtattggccaggctggtctcgaactcctgacctcaggtgatccacccaccttggcctcccaaagtgttgggattacaggcataagcgaccgtgcccatccccgataaagttgagttctgaatttcctctttcactgtattctcggcagctactggttggtttattctttttttttaatcttttttggtttattcttcttttgatctttgaagagaaggagaaaaaagatctgagtttggctctcccatcttaagtgcagcttttagttgttttatagtcatagacgctattgcactggacagcatgcatcctggatgtaaacaatgcggaaaaatcaatggagtgaccatcttggggtcagtggtgttgcataaagcaccagtggtgtgctgttctgtgtcagtttcctctgcgccacgtgctttcacagtttgaattaccagcatctctgtggtggcttcagtacattctccattgtgcttcaacctggaagcacattctgccgttcagaaagactgattccaatcatgtaatgggaccacacgagatccatgctccaattatatgaatagcagaaggtccatttgactcttgtagttcaagagctgtttctaagtaaacagactttccagagctcgatgaagtgaagaagcccttctttcaattcctgggcagaattcagtggttttcatatcatctgaacctgctgtgctgctgtttattctatcactgtcagccttgaaaggaaaaaaggaataatcttaccctcctgcccttcttattttatatcttccatcttatccatctatatccatgtagtcattccttccgagttccctggttttaatccaaaagactctgtttaacagcaatgtcttggcagaccaggtgccgcttccgtgccatttgagggctctgagtctttgcttcgtcttaggaagataaagataatttggcagaaagtcagagatggaaatagcagtttgggatgataaaagatgggtcctgttttgctgacattcttttactttggttcttggtgcgtgtcctttgggattcatttcttgctagcatgaataggacatgcttttcgttaggtgcttttcttttttggagaacatgaagtgtttctaacaaaactgaatgagctagaaagaattctattttgagacatctgtagttgatgcaaagtatttctgtaatcctcaatgacagtacttacatatttgcatagaattttttttttaatttttgaggaaacctctctggagtctgtatttataggagcatcctgaaagtccctattatgtagctggtgggagcgagagagggacagccacactcgtgctgtgagcagagcacaacttcaggcagagtgaatgccttctgagttctcattggaagctttctgttgctcagcctctggcagatttcagaaccttctacttaagccaggtgtggtggtgcgtgctcctaggcacagcgactcggggggctgaggcagaaggatcacttgagcccaaagttggaggccagcctgggcaacatagcgaggcctgtctccttaaaaaataaataaataaataataaataaataaataaataaaaaccttgtccttgactattgtgctgtctgctgcccctttgtagggatggggttggggtcagaataagcatgtgcatgaatggcggaaagctttggtggtgtttgtttgtttgtttgttttttgagaggtgggggagtcagcagtgaacctttctggttaaagaacaacgtacataatttctattatgagatttagaaggttaaatacttttttttttcaggcctaccaagttgatagaccaaaagtatatagtagaacagcacagtagaaaaaatttaaaagtgaatttcttatggtccaaaaggatggatagtcacagtccataacctttcataatatatgctggaattggaatctcttgtcatcttgctttgctctgaattttagaactagaagtgtgcatgtatgtcaaaagattatgcagagctattttctttgctaacaatgtaaacatttgcaccccatgaatgggactttataatctggaagtgagcctaaggttgcgtatactgaagtcatgttttaaaagttaaggttgacttaaacatatacaaggctgtattttaattgtaactagaaatcatttactatgcatacagaacctcatgtatcttatcatggaatttgtgaattaatgggccttgccgaattcaagggtaagggaaactggtaacaacttgttttaaatcaacatactataagctcctgcttgcttgactcaagttgtttgaaaatctgaattaaacaggatctcattgtcaggaaacatcttctaagcttgacatctacgtttaagaagggaacgtggaagagaaggtgagacatgaaactaaaacagctgggagggtaggatcagactgcacctgatttttggaccaaagtttcatataggaataaataaaaaggaggaccacttgtgagccaacctaggaaggacttgccagaaagtagcagctcctgctgcaaaatacagtgccttcaaaatgattctctgtgtgaattgcatgcaatttcatgtaaccataaagtgtaacctgtatgtgcatgacatgtgtctagaatgtgtaaagttaggattcagcaggaaggggcctggccctgtcactgtggtggatcagtggacctgctgaagtcactggactcatgtgacttaggtttgcagcatcagacccctgtgtttgcattaagtggccacatcgttgaaatcggatcaatctctccctcagctttctttcctactttgcagctttgctggttttaactgcttcattcttctgcttcttggtatccttttttcttttgaaataaaaacatgaaatacttaattc

SEQ ID NO: 1751 - DNA, 1394 bp, Homo sapiens
gtctcactgctctgaaaagacacaaccagaatggcctggggctcaggcccttggctgagtgggaatgcgttgggactgcccagctgagctatcaggtgcccatcttttctggtcccagcagtggtgaggagagcacaggcaggcctcgcccctcccttgctcacccagtttcccctccggcacaagcttccagctctgcagctggggtgacatccccagtggtttgtcgccaagaccatgtggtggacttttcgccccccaaactgatgagtccgggagaatatatggagagagagatgtaacaaggggaaggcctcctcccttctgagcacacacacaaccgataaccaaagagatgctgcagtccaggtctgaggtcccgctggcatccagctccctgctccatggccagtccctccccagcccagcagtccctccaggctacatccaggagtaagctatggggaacaggttgggaggtggccagtgctcctgccagctgtgcacacatctctgtatcccgctagagttctgtgtttttgtatcatgttgtcagggacgctagctgggtcagggttaccccatagcaggcagggacaaggaccactcataatatgcccattggaccacagttaagatccagcctctctcacctcttcagggctgagtgcatgagtctgcacctccaggcaggctctgtgcagtactcaccccctccgtctgctccctccaaggtgtgggggtgggcagtgctcagggcctcctcggagccaaaggacagcatggtcggcacagaggaaggggtacctgggctgggtgcagggccatcccactgcccttgagctgtggctctggcaggaaggaggggcagcccatccctcttctccctcctggggattctggggaatgggatgcaacttaagacttctgcctgagaagcctcctccctgctgcctccagggggcaccaaggcacaagcctgtgcagtaggggcgggatgggggtgtggaagagcaggtccaggctcctagcacaactggcctggggccttggcacctctgtaggccctgcctgtgcctgtccgctggcctggggggcctgggcttatctgggccttctcactcagggactctcttgacgctgacttgcccccgcagtggtggccagtgctgcctctgctccaagctgcccctgcgctgggaggggtgggggcggtgccattggtctggtgcagcatagccctggccagtggcctcatccccagcaggcctcccgtgcctctgccagcaaggaggggccggccagctctgcttgcacagggggccccatgtggggtcagcgcacgctcatgtcactgagttccagccgcttttagagtaaagtcgtttatcatc

SEQ ID NO: 1752 - DNA, 444 bp, Homo sapiens
gcgcctagtgtagccatcgagggacttgacttgtgtgtgtttctgaagtgttcgagggtaccaggagagctggcgatgactgaactgctgatggacaaatgctctgtgctctctagtgagccctgaatttgcttcctctgacaagttacctcacctaatttttgcttctcaggaatgagaatctttggccactggagagcccttgctcagttttctctattcttattattcactgcactatattctaagcacttacatgtggagatactgtaacctgagggcagaaagcccaatgtgtcattgtttacttgtcctgtcactggatctgggctaaagtcctccaccaccactctggacctaagacctggggttaagtgtgggttgtgcatccccaatccagataataaagactttgtaaaacatgaataaaacacattttattct

SEQ ID NO: 1753 - DNA, 837 bp, Homo sapiens
gcgcctggtgtatccattgagccctctaactgaacgtgtgcatagaggtggtcttaatgtaggtcttaactttatacttagcaagttactccatcccaatttagtgctcctgtgtgaccttcgccctgtgtccttccatttcctgtctttcccgtccatcacccatcctaagcacttacgtgagtaaataatgcagctcagatgctgagctctagtaggaaatgctggcatgctgattacaagatacagctgagcaatgcacacattttcagctgggagtttctgttctctggcaaattcttcactgagtctggaacaataataccctatgattagaactggggaaacagaactgaattgctgtgttatatgaggaattaaaaccttcaaatctctatttcccccaaatactgacccattctggacttttgtaaacatacctaggcccctgttcccctgagagggtgctaagaggaaggatgaagggcttcaggctgggggcagtggacagggaattgggatacctggattctggttctgacagggccacaagctaggatctctaacaaacgcagaaggctttggctcgtcatttcctcttaaaaaggaggagctgggcttcagctctaagaacttcattgccctggggatcagacagcccctacctacccctgcccactcctctggagactgagccttgcccgtgcatatttaggtcatttcccacactgtcttagagaacttgtcaccagaaaccacatgtatttgcatgttttttgttaatttagctaaagcaattgaatgtagatactcagaagaaataaaaaatgatgtttc

SEQ ID NO: 1754 - DNA, 574 bp, Homo sapiens
ggcagcatctgtcccctctgtgattcagagcccttagttgagagcccctgccgcccctgccacccccctgccccgctcccaccattgcccctcctcagctgtgcaaggagaaagcatgcttaggaagttttcaggtccttgtgataaaacctccttaaatctgttcagaccaagcaatgcgagcttcctctcctgtcccatgttggaagttgctctgaaggggtggtagatgctggaagccagacacaaccctgcgtacgctgctcagttggtggagactggggctgggactggagtcagcccagctgggaggaggggctggggaggatctgcagctgaagcccgaggcagggttggtgtgatgccaaggcaaagtggtgaggagaaaacaggaaacgggctttctctgaattggtaaatgggaaagaagtgagcaacttaagattgtcacaattaatcacaagtgtacaggattagactgggtttatatttaactcttgcttcataggtgtaccatttaaagagtgttatttaatgctaagtttaactgctttaataaagtttatttttaaat

SEQ ID NO: 1755 - DNA, 2600 bp, Homo sapiens
gtatcatcagagctgattcctatttgtttatagtgtctaccatttacaacctgcataatgtggactcttgaccagtattcctgttgatattaaaagctaactttttagtaacccaattctaactatcccctttttccttgtcagggctgtagaattaatgtctgaaaccatctgggccttaaattttctttgtctggttttctatagtgtatttaataaatatagggctattcacattttttggtttgatcttggtgtcatttaggtaatgaatctatccaagaaatctatccttttgacccaggttatcaaatttgtagacataaggttatttataatggtcccttcttacccttttaatgtctttaggagctgtgttgataatttccttttcattatgatactggtaatttctgttctcactttcctaatcaggttgggtaggggtttatcagttttactgatctgactttttattttattttattttttttgagacagtcttacactgtctcccaggctggagtgcagtggcgcgatctcggcttactgcaagctctgccttccgggttcatgccattctcctgcctcagcctccccagtagctgggactacaggctcccaccaccacgcccggctaattttttatatttttagtggagactgggtttcactgtgttagccaggatggtctcgatctctttacctcgtggtccacccgcctcagcctcccagagtgctgggattacaggcgtgagccaccgtgcctggccgacgatataacttttaaagaaccaacctttggttttatttttctcaattgtttatataattaatttctgttattttctttcttctatttagcttgagtctcctttgatcttttttctttagttccttaagataagccttaggtcattgatcttagacgttatttaaaatacatatttaaagctatacattttcttttaagcattactttagttgcgactttacaattttattatgtcgtatttttattattcagttctaattttcttttttttttctttttgagatggaatttcgcttttgttgcccaggctagagtgcaatggtacgatctcagctcactgcaacctctgcctcctgggttcaagcgattctcctgcctcagcctcctcagtagctgggattacaggctccagccaccatacctggctgatttttgtatttttagtagagatggggtttcaccacattggccaggctggtctcgaactcctgacctcaggtgatccacccactttggcctcccaaagtgctgggattacaggtgtgagccaccatgcccagcctctgattattttctaatttcctccctcagttcttctttgacccatggattatcagaagtgggttgtctgatcagcaaacatttgttttttttcctcttaatatcttcttgttgctgatttctactttaattccattgaggtcagaaaatatcctctttatgatttcaatcctcttagttttattgagactcgttttatgacccaatatgttgtctgtcatggtgagtgtaccatacacagtttaaaagaatgcgtattttaggccaggtgtggtggctcatgcctgtaatccagcatgagattacatgctgagattacagctgtaatctgtaatttgagaggctgaggtgggaggatcatttcgagaccagcctgggcaatgtatagtgagaccatgtctctaagaaaaacaatatgtaatttgaattgttgggttaatatgttttgtaatatcgatgagattaagtggttgatagtattgttcagatcttctatgtctttactgatccttttgtttatttctatcaggtgctgagaaaggatgttaaaatcttcaattatgattgtggaattgtctatttcttaaattctaccagtttttgtatgaagctctaataacttatgtcttcctaatgtattgaccattttatcattatgaaatttccctctgtctctggtaatttgggtttgaaatctactttatcttatgtgaatatagccactgcagccttcttaagcttagtgtttgcacagtatacctctttctattaatttactttgtgcttctgtgcctatttaaagtagtttctttaaacaacatatacttgagacttgcatttttatctgttctctctgtatcttttaataagtttaacattaaatgtaattattaataggtttctaatttacatgtttcctgtttagataagattattttataattgtattttaatttattggctctttagctatactgttttaataatttttttaagttggatgttctagtgattacaatatacattcttaatttttcagtctacctagagttgatgtgccacttcacataaaatgtagaaatcttgtaagtatgtacatccatttatcatacctgtcttttatgctgtagttgtcatacatattaaatctacatatttaaatattgtaagtcctgtcataagttacaatttctgctttaaataatgatatgtattttaaagaaattaagaggaaaaaataaaatcttttgtatttattcacata

SEQ ID NO: 1756 - DNA, 1929 bp, Homo sapiens
aaatgttgttacaaagtctggagtctagggttgggcagaagatgacatttaatttggaaatttctttttacttttgtggagcattagagtcacagtttaccttattgatattggtctgatggtttgtgaactcttgctgggaatcaaaatttccttgagactctttagcattcatactttggggttaaaggagattcctcagactcatccagcccttgggtgctgaccagcagagtcactagtggatgctgaagttacatgagctacatgttaaatatttaaagtctccaaaataaaacaccccaacgttgaccttacccggctgatggttagccccttgctgcctgctccatgtgtcttatgagagcccgtagttacagtgtcctctaatttgaaatccataagttaacaagtctatatcaggtgcagctggctttgattaaaggccatttttaaaacttaaaaactcaacacctcacagattataatagaaaaagaaatggcctcagtttgatctcgttcagaatgacccagattgtttctgctttgggtgcagctgtttagttcagagttatattacagagaattattttctgagataatcttaaactagaatgttcaaaactaattgataattgaagtatcaagatacgtagaacacctcagagatttttcttcaggaacttccacaaactttgaatccttgtatctttatttggtattcatactactagtagcaaaatacaggttttttgttttgttttgttttgttttggcttcatagagtatctcaaattgaaacttttctgcacaaagaataaaattaaggattttataaactcaaattggcacctactgaattaaaatacataaaatcatttaaatataattcagcatatgggaagtaacattgcactaatatggaaatcactgccagagacagtctattttcttttaatttgttactacttagtcacaaaccccacattattccagtttggaattacttattaaggagaattggaaatacatatgcccatgcttaaattttatagctttaatttgtgttatttctttattgacgggaagaggtacatctttttttccttactgaaaacaaatatggattaattgcctcaaatttgtataagtgattggctagtgattcttgttttcagaagggagagtggtatagatagaaaatgacaaagatggcaatatacacttaatgttgttattgtatgttgttactgaagtacttagatttttaaaatttcaaatcctaaatcacttcttgtaggagggttttcattaactgcagtatatacagttcactacatatgggttgtttgagttttttgtgtgctgtatttctttctgttttttaatacctggttttgtacatatctaactctgttctcttttggttgttcagaaactggattttttttttcttaagcagtgcttaatttgtgttttttaattttgattcagaagtagtcccagctcataggtgttcatactgttacatccagaacatttgtcaggctctctgtcagctttcatgtacatatggtatagaaaccatggagttaggcacttcctggattttttttttatgagaaaaatactgtatttaaaatgtaaaataaacttttaaaaagcaggcactaatatatatttcttccagcctttgattacaaatttgtccttgcacatgttaagatgaattatctcctaaaaatatcattgttcttgggagcagtgtatgttactttacatagcagcggttcctgtcatgtgttcatgtcagaatatttttggttttaaactttcttattgcctttggctgttgattagtacagtacaagtgcgatttcaaaaagatcttgaaagtaatatatttaatcaattaaaatgtttatctgt

SEQ ID NO: 1757 - DNA, 1337 bp, Homo sapiens
gtaaagatttcattattccaactgcacgggacattgtttttgagaagttcttttcctttatataggcttccaacaccaaataacctaactgctggaaaacaagggaaatttaaatctccaaataaggcattttaatagactgtactgcttcttaaaccagcattgctgaccagcattatatttatttttcttttattattcagatgcagtagcattgcttatgttacatatgtttatattcacaaatatttttaaactgaaatatctgaacataatataatttcgtggaagaatacattgaccattttttttaatgtgcatgaattcaccgcaacacatgcagacaactgctgcaatggagagtatgaagaaacctggtctttttattcatgtcggtggcagtgtggaaattccatccagaaaattacaactccacttgatttagttgatcaccatctcagtcttcaaaagataacatcatgaggtgtgggaagtcctagttttaaggaaaccactgaaatatagatgggaaatgtggactttacaagtatatgttatatatacttgcaatgtgacatggttctgtagatcattttataataataaatattttaatttatcataacatataaaagaaacctttgttgtttgttgaaagaaaatgaaggaacagggggaaaaaaggtgcaaaatgctaaatttctaaaaatggatttggcatgtcttcccatcagttcaggtcaaaagtgcattgttgtgagatttattaaaaaaaaaatgataacacactattttcatatttttttgtttatttgcacaacttttaaaccagattactggttaaaatccaacagtacacaatttataaagtaaaaagattttataaggaaaacaaatataataaccagtgctgtgaaatgcagaagaaaggcttgttttggttgtttttcttttttaggaaaacgctgcctaaaatgttaatcttgtaaaaagtatgtatttggaattttcttcgttttaatagaatattataaactcaaaatataaatttttttcaaatttggagtttaagatatagctgtagaggtggttttaattcctttagatgtctcataaaatgagactttttatatgttaatgtataataaaactgaaacaagattattttccatttgaaatttttgtatagtttaaaaaggcttccgtattctttgttggtattgtgccactgcagaactttagtgcagagtttatatttagctaaactgttatgttaattaagaaatgcataaatcttctattcttaatatttgtaattctaaataaattgatctatg

SEQ ID NO: 1758 - DNA, 655 bp, Homo sapiens
ttgggagaggtagccgagtcacacccggtggctctggtatgaattcacccgaagcgcttctgcaccaactcacctggccgctaagttgctgatgggtagtacctgtactaaaccacctcagaaaggattttacagaaacgtgttaaaggttttctctaacttctcaagtcccttgttttgtgttgtgtctgtggggaggggttgttttggggttgtttttgttttttcttgccaggtagataaaactgacatagagaaaaggctggagagagattctgttgcatagactagtcctatggaaaaaaccaagcttcgttagaatgtctgccttactggtttccccagggaaggaaaaatacacttccacccttttttctaagtgttcgtctttagttttgattttggaaagatgttaagcatttatttttagttaaaaataaaaactaatttcatactatttagattttcttttttatcttgcacttattgtcccctttttagttttttttgtttgcctcttgtggtgaggggtgtgggaagaccaaaggaaggaacgctaacaatttctcatacttagaaacaaaaagagctttccttctccaggaatactgaacatgggagctcttgaaatatgtagtattaaaagttgcatttg

SEQ ID NO: 1759 - DNA, 2980 bp, Homo sapiens
gctgcccacgccctccctggcccccgcctgggcctcctttcctcctcctgtgcttcctttctcgttcctaacttttccttcacttacacctgactgaccctcctgaactgcactacaagacactttgtagaagaggagatgagagtttctagtcattttcctaacttcagggcttggaggtggtgtttgcactgctttttgtagagagggtcacctactagaagagaaatgcccagtcttagaggtgggtcaggtgtagagctggagggggtccctggctgctgaggggaccctaccagatgagccctgcctctgggagccccctaggaagcaccagcctggacctaccacctgcggaggcctgctgccccctggcggccagtgctgttagagtgctgccaagcacagccttatttctgccggggcctccccaccggagagcccagggggccggccgggttcctggtccctggctgggagcagggctttctggtagttggggcacaaaaccatcggggaaccacatgttgactgtgagcaaagtgtcttccgattagcagcctcagggatgccctggtggcctctccagggctgctcaggcaaggccccccacccatctggtatggaaacctgccggctccaggccagacccaggagccaagagaaggctgaagccagcttggctgtgttctctgatctaggccttcccagaggaggcgagcagaagctgtgccacttggaattgcaacccatgagttcagaaggcacactctgccatgctgagctccaagggtgctaccaggggaagatgggatctatagagtctctgggccctggccccagggaggagcacatttttcttgaccctcacctacctggtgctagttggtcaaccctgcctgcatacatgggctcctgtcatggggcccagagtcccttgcagatatagaaataggggaggagctcaggtctgcgccaggcaggaagaaggcaggcttctggcttccagaggtgccgcggtggcctcctggcatcatttgttattgcctctgaaacaagccttactgcctggagggcttagattcctgcttctccaatgtagtgtgggtatcttgtagggtatgtggtggatgccagggcgtgctccaggcacctcttcctgaagtctctgcatttggagattcgtggagaacctatttaagcccaattttaactgaaagccagtgagtctgatatggaagggaatgtaaaatttgcctgacttcttaagaacaaaacccccagctctgtgccccatgctccttggggcttgccacccactcctttgctgtcagaggtacaggagctgggagagtccaggagctagggacacagagggagactatggaccaaggtgtgtgtgtctggaggaaccactgcccaccccaccaccccggggtctctggggaactgtcaacctgcccacgggacatgtacatttccccttttgtgctggaagtgtgagtgacacttgctgggggtggagggtgggacacatgaggatgtataagtacagattttaaaaaaggaaatcaacttacacttcctggctcttgtttaaaacagtggtgagctcctgtgtgggccgacttgctaaaggtcacacacgcgcccggtggagcacgagagacctcgtggcagcatgtgatctggaaggcaggcaggacgggggcgttggggagccaaagtcaactctgggcctctggagctatagtgacttttgggctagaagggaccctggtggtctgtgcttcagccatttgcagggcaggggcatcattaattcagacgtaaagattctatgaatatggactggccaaaagttatccttactccatctgtgaaagaagtttgctaaagcaaatcatgatatgaacaaaaattacaggggacctgtttaagagaacaaaatgttccaagcactttaggcagacaccagctgtttgcaaacaatgtgctaatatgcaaatgatgtgcttattaaaggaggcccatggggcctcttattggcaatacttggctgtgggttacattaaatatgtgaacatagtatgaagtagcatcattttagggttattctgttacttagggtttttgttttctgttttttttttctctttttttgtatttaccgtgctagttctcttctacacctactctgtctctcaagccattttgccactcgcttccctgccatctggcccttccctttgtctcagtgggatagatggattgtgaaatggaatctcccagaacccctgccctggcagcctggaagaccgtgcctgcccagccctcgtcaccacagggactccttgggtcctggcagtgcatgtgccagcaggcaggacaaactctgtgtacctgtgcccaggtgaatgggcgcagggtcctcttgccctgtcctgcggggggccccacgagttcctggcattcagcactgcttagcattctcggaaggtttcttcaactgcttgcttttcccaggcttgcctttagtgtcatgtaagacatttttaagttatatttattttgttgggttttaaaattgcacagaacactaagaccgaaaggctggactcttgtttctccttgaaagctttgcctttgttttgaacttcctttcccacttggtagaaagagcccagaagcagccctggccctgtaagatggactctttcatccttcagttgtatttagctttgagtttctctgcatctgtccaccccatgtgtatataacccagcccctggctctggggtggtcacctcgtcagtgccttttgttctggaggagaggaccccccccgcctgccgagaggctctcttcctgttctgcacccctctccccatgggaccttggagaaaactgaactgttacaaacccctgcacagtgcctgtcaaacagatgcaaaccttcctgaataaagccttggagacc

SEQ ID NO: 1760 - DNA, 4402 bp, Homo sapiens
gctgcctcagcactgggacctctcgctctccgctccctgccactcgcctcctctcactttcatctcttccctccacctcgcctgctcggcctgaaagccaccaggggctggcagcagtagcaggacagggattcaggagttctgacgacacgactctcagatccacgcccccagcctaacagcaacaacaaagacagactttccgtagcagcttagattaacgttgatttcattccatgcacttagagttgctttcagtaacattttacccctactcccaaaggtagcttaaatagacagattacacaaatgtaagtgataagaataagattagacagattttgctttcacagtagagtctcattatagtcctaaaatagctcatgggcttctccgcatccagaagggagaattggtccctggagtggctcactaagctcttaatcagcaaacgcagtgagtatcaacctgattgttgccaggaaatccttatgaattaaaacaatgcatattttactacagtacagagtttaaatgaatacataaatgtagaagtactgaatgtatatatttaaaaggagcctcttgtattcaacaaaagatggatgcatatataagagagatgatttaatttaaagaaatatgttgtttcttgtctgtaatgtaatgtaaagggtggaaaggcctcaagctcacatttgtagagagagagcgagagaaatcagagttccctttattgccctgtcctcaaactggtcataggctctagtcacctggggagctgtagaaaacacttgcagagccaggttttgctggtttggggcatgccctgggcaccagagctttaacatttgaagccacttcagcagcagcagcaaaaggcgaactcatctctacccaagatgtttcttttcctagtggtggaatttgaacacttctcactttttattgtattttatcttccgcagataaatgtagaaatacacgattctgtcacctctgatcccttccatctgaaaggttacaaggagtgttgtagcttctgaaggtgcagaaaacaatttctaaaaatgcttttattcctgggctaatcctgtccctccctaagtcacagcgaggtgtctgtcccagggctggagatgcttcccaaggaggagtctgttttgttgagagtgggcgtgggcttcttcacataagcctggggaaggaagaaaaaacggctttcattaccaaataatgtaaaacctcaaaagcaagggcttcaacagccttaaccaaatattattccccatagccagtggaaaatggatgtgacaaccccagtgcgcaggccagagtgagtgagcccagcacggcgctccgactggcttcctctctcaggtgctggattgtggggttagtggcatttccagctggattcctcctgttgtagttgccataaggaaatgagatgcagaatcagaaggatctatttctacagaatcatttcaccagttaagcacatgagtagagaaagagataaaaataaaagtatctcatgaaggaaagagattttgcctctcttttacttttcacctaagtttctctgagaaatagagacaggattctctctttaaaattcagtgaaaatgaagaaagttttcctgcagttgctaacctgagttgcagtgtttaaggccatcatttcactgctgctgtctgtgactccacgtctgtgtcactgaggtgacctgcgtgtcactgaggtggccaccatgctggcctgcggcatgtgcagggagctgaggctgtttccaggtgatgctgctgtgtggagaaggttctgagatgcagtgagggaagaaaggatcctgctggggattccattgtaagcacctataatcgggaattttcatgtaacagctttgacatttaaacattctgagtttggtgccagctcagatttgattatattttattttggatgggtgtaattcacagcacagttctaatctcccaaatctttctgctttttagaatgaagtataaaaatacttttctcacctgaataccaagggttggccctttagttggatcattgtcatatgacttggtagatccttgtcctcagcacctcacgtgagagaagggagtcagccagccggccccctgcttggtgctcgtgaccagctcgcaccccttctgtccacccttctctcctctcctccccactctccccaccctcctcactctccccaccctcctcactctccccaccctcccctcctctcctcctcactcttcccaccctccccatccccaccctccccatcctcctcttccctttccccttgccttctcctctctcccttctcttctcaggcagggaggaggccatcccaagccgagattaacaggacttgacataagccattagtttgtagctttgacaagtaattatgaatttttgttgcttataggtgcttattttgcaaaggatgcttttaagatcaaaataataaccctacctaaagtctagctccactgctatgggtcatactcttcagcctcccaacagggcagagagagagagctactgaggcttgtctaggttgccaggctaactgggcgacttgtccatattcaccccatggattgcaccatggcactctttgatttttccactgcaatggcaagtaatctcatcagtcataatagagcagtcccgaatgcgtgcagattctaaaagcagggctttaggagagaaacactgccagggggaatagttttggggagggttttcccaaaataacggtcatcctactgggtttatcccacccttaaatatgaagcctgttacctccagaagcttctgagaagaatgatgtgaaaagacagggagtgggttctaggcaaagaaaacataatgaccattcagaggagtcagtagcacagctcacagataaagtattttattactatctgaagttttcttttgttttcatgcaggacattttaaaaacgtatatggcagcagaaacctgtttctcaatagaaaaaatacattcagaggcatttctgggatagtctatctgtgttagtatttggtgctatctatgtccagccaagttatctaccctcaaattctgactaatcatgtttgtgctttgggtatttaaaattacatacatatatattctttttgccaaaaacaaaagtcttgcttcttgtcaaatgattgctaaagtagatcttacattttttgttattatgtatgtatttatacacatccccaacacacttagtgatttctgttatttcctagggagcacagctttaaggctatgagatacaactaaaaggagcccatctatttggttttccagccaattattgtactcacatttcaggggagaatctgaaattcctgtcatgtttacagcaacaatctatcattcctggctagctctcagcctctctctccttccataggttagaattatgtcattttgttacttagtggccacgtctatttctgagaaagactggttacatttatgtggcatctcaggtatcattaaggaaaagccagagcaggggtgagcagaggtcaaaaccacagacgcagcagggccatttgccgcctttggccgggatcacaaccactgcagtctcccagcaggtaggccttgccaagcctaaggctccccatccaatctagacagaggggcgctcagagcagactttgccgtagcccatgtctggtgagcacaacagggaatgaattgggcactccactcccccgtctctctggcccagccctgaactagatgagctgcatttcatggagcccattttaaaatctctttccttatgactttgttactcaagtccagagttctctgtgcacttctgctagataaggagtgtaagccctgccccccagcactggcagcacgctgggccctccccacacaggacaccgtgcagttccgggggaagctgactcaaatcaaccttgaaatctcatgaaaacaaaatgacttgtctttttatttgatagtgtaatatcattcattttataaattttttagggtttttctcgtaatattgtacagttttgcatggcctggtgtgatcattttttggttagaatataatgctgacaaatgtggatggaggggaagatactgctttagcctatcactccttattttattttgtttggttttatgccctcagtgtcttagggaactttttaagagatcctctgctaccaaacaatgatgtggattcttttgcacagaaatatttaaggtgggatggtaaaaaatgtcacaaaagactcctcaccaatactttatgttgatatcacttaatattaaccagactttgctgtattgcaataaaacagagaactgtt

SEQ ID NO: 1761 - DNA, 1158 bp, Homo sapiens
cacctgtcgtgaggatagaaggacgggtggaagagaggcagcctcctgctccggggcccttccagaaataaagaccgccctccctgtgacctggggcccacccctgtcgaggcttgtggcctggctgttcatggccactgcctgggtgcctgttttcaggtgaggcccaatgaggtcagggacccaagatgggatgtggcccttctgacctgcagcaggcctgctgggagctcggagatggtgccaggacctggctcttttgggggccctgcctccttaggccaggacgcctgagctgacaggagtctgtgtctggtgtgccttctctggtggctcctcttaataggccagccctgtcccctcgtctcaggccattggaccacccctggctctgccctgtgggttcagggaggggttggagcagtgctgggcaagctcaccagggcctccaggcagggctggggttggcctccatcacctccaggtgatgggctgtggaaccagcggcctgcgccttcctctgggtacccagagtggagggctgggttgggctggcctttgccacctccctgcctttgcagggcctgtggacagctggagaggccacagatggggtggaatcccatctgctgctgaatcctcacctgggcctgagggactgtgcctgctgtgcactcacagctgggtcttcccaaggatgctgttctcaggagtggtgggtccccagcccctcttcacactgggtatgatggaggtgtgggcgggctcgtccaggccgatcaaggcacagcagtgagcagcggaggcctgtggtggggaatggactctcgtgggatcctcttgcagaggatgccccaggcctgaaccctctagtggatccacagtttgtggagactggcactctcccagccctgtccttgaccgagagtccagcattttttcagttggcccctggttggctgcctcaccccagcaggggaggaggcatccgaatccacagggacggcacgtgccatggctatgcacattgcctgcccgtggcatcaactggggccgctggcacttgtctaggatggaagcccccaagaagggcaggggtttctgtctgctctgttcagtgaatcatgtgaagtgcttgcaaaggcagctttacacagt

SEQ ID NO: 1762 - DNA, 522 bp, Homo sapiens
gttcccaggccctgccagccctgctgcacagggtgcaggcattgcacacggtgtgaagggtctacacctgcacaggctgagttcctgggctcgaccagcccagctgcgtggggtacaggcattgcacacagtgtgaatgggtctacacctgcatgggctgagtccctgggctcagacctagcagcgtggggtgagtccctgggctcagtcctagctgcatggggtgcaggcattgcacagagcatgaatgggcctacacctgccaaggctgaatccctgggcccagtcagccctgctgcacatggcacaggcattgcacacggtgtgaggagtgtacacctgcaagggctgaggccctgggcccagtcagccctgctgctcagagtgcaggcattgcacatggtgtgagaaggtctacacctgcaagggacgagtccccgggcctggccaaccctgctgtgcagggtgagggccatgcatgcagtatgaggggtctacacctgcaaggactgagaggctttt

SEQ ID NO: 1763 - DNA, 403 bp, Homo sapiens
tggctggaccctgctcactgctgttgtgggaccctgaaccctcccttcaccttgcttgcctcctgcctcggaagctccttgggtgtgggtgaagcccgaggctgctcctgtggaagtggctctgggcaccagcctgtggggctaaagacttgacagctagctctggagcagccggcttcctggaaaacctccaggtttcgcataccagggatggcccctggcttggcctgcgaaggtgaacctgcccagatttatcagtagaggctggactccctctgtgtcctgcccatggttgcagcagccatgggcctatgagcggtctaactgtggccaagtatggtgacctctatttttctttatattgactctttgtatttcaataaatatattttaaaaggaaggt

SEQ ID NO: 1764 - DNA, 80 bp, Homo sapiens
ccgtggctccagccaccccgggacattgctaagatgggagggctgttcttaaatcactcgttcttgaagctgccacctgg

SEQ ID NO: 1765 - DNA, 1027 bp, Homo sapiens
ctcgggccctcctggaggagtcctgttgcctctcctgcccctccaggccactgagtgttttggccacttggaggacctgggaggagggagtgtgtcctttgagcaagaggaggaactcctggtgcctttctgagcctgcgtgggagaaccccaattctagcactccaggaaactgtgggagagtgtggggcaggctccgtcctccctgggagacccctccagccaccgggtgccacttaatgccaacagcccttaccaaagctgggagccccattgccccggcagctctggcctgtggttccagaagctgagaaaactccactggggcttgcagaatccagggttcacctaagctgcacagttcctgcagctttgccagccccctgaaagtcttgtgtaccccacctctgaagatgctgggggaggcagctgggatgggagccagccccatgcctgtctgtgaccccacagtgggtgagagcccgtcacagtcctgggtgtggctgctctggaagaattaggaggcagccataataagagtcttcagagagatgatgggaggggccagtgaggacaggaacagagagtagatgtcctataataaaggggcttctgggaggtgcctgggcacagatgtctgttcagcaggtgtgtgggcctagaggagagagcagagcccagaaatgtcttttgcaggcccacgttctgacttgaagctttcgtgggcatgttgccattgggttttgcccttgcaaaggcttcctaggtctccagtggcccctcaggacccagggtcccagctgctgcttggggatgtgcactgctggccgccggccttgcagtctctctaccctggggaggaacagtggcttctcagagcctggggcatacagaagaaggcaggagttgatttttgtgttgggtttggggtttctttgtcctcaaggtactgttctgtttctctttacccctctgctttatttattgtaagcattcccacgttaaataaactttggctgttgtctac

SEQ ID NO: 1766 - DNA, 261 bp, Homo sapiens
acacagaccgggggactcgggcactgctcctggctctgcagaaggtgtgggccttctgcttactgcaggccacctgccagggttctctggcatcacgctggcagccattagacacacaggggggtttctcaaattctaaatataattgtgattagaactgtcaaacattaagagggtatactgacagatgcttcctagaggaaacttttgaaagcccctgcgttctgagtggaccgatttctaaatccatacctacacacc

SEQ ID NO: 1767 - DNA, 70 bp, Homo sapiens
gagggctatctcgccacctgagaggttgcgcaacgttcaccccaaaggctcttttaagagccacccacct

SEQ ID NO: 1768 - DNA, 60 bp, Homo sapiens
ggccgcccgccgcccccggggcccctttgatggacataaaggctcttttcagagccacct

SEQ ID NO: 1769 - DNA, 251 bp, Homo sapiens
acacactccacctccagcacgcgacttctcaggacgacgaatcttctcaatgggggggcggctgagctccagccaccccgcagtcactttctttgtaacaacttccgttgctgccatcgtaaactgacacagtgtttataacgtgtacatacattaacttattacctcattttgttatttttcgaaacaaagccctgtggaagaaaatggaaaacttgaagaagcattaaagtcattctgttaagctgcgt

SEQ ID NO: 1770 - DNA, 4223 bp, Homo sapiens
agaaacacttgcgtggacagcctcttttaaaaagtgtaaatgactgaaaggaaaaacaaaacaaaaaccatcaaaagaaacggacacaggtttaagaaaccaactgattatgcaaggttttttttagggaatttgtaaaagattgttttattttgatgaatattggtcacctacctcggcagtagggcagacagttgaagccatagacatttggttatttatgaagataattccctaaatctttgatattcttataaggtttttgttttaaagcatcttaatcttttaagatactgacaccaaatgcctttaaatggcaacagatgcttacagttcagtattcttttcataagcttaggtagagcctattatcatcttgttctaaataactttccagattccatagctataagatcattccatcctacagcataagactcgttttccttatatgccgttttgtttgtgaaagaatatcaagtcaaaaatgagtgtcagcactactactgattccatgtataatgaaagtagaactttgctagttcctgaaaatttttaacttatttgtatttcagttcagcagcatctttatgtagattgtgatatttaagaattatctgggctgggcgagggtctctttttctctttcagtgatcatctaggcagttattatttaatagtttaatagctcaagtacattccaatagacgaagtgcacacaacacaatatgtgtgtacagtagtagtaaagtttcttttgagtagtcaaagactcactttttttattgcctttttttttttttttaaagaatacatactgtggattcagtcccttgtcacacttgaccttttggcatacacccactgtggacttttgcctcttctgtaatggctggcaatgacatttcaaacttacaatctggaattgcacttggtacattggcattgcttgttccactgggatggggaccagtgtgaagatgcctgttagatagactgcccacccctactttctctttttctttatagcacttaacaataacaaagtcttgatgatgtacagtattcaaactttaggttgaaatacgttactctttgattcctagccagtagatcttatctacactttaatgggagagaatggtggtgtgtgggtaggcacaaatttatgtaaatagtgctccttctctttagtatgtttgctttgggggtagaaaaatggttttaacaaacactggtttccatcaaatgaatgatgtcttctccatcctgtggagacaagaatctgctagaaggatatgtgctaagttccttataagagataatggtgctctgcctatgccagcttggcacccgaagatgtgtgagtggacgtgaggctgagtattaccttagtatttttctctgggtctttggaaaaccatagtcaatttttagaacatattgctttcattccccataaactcttcacacatgataactgtttaagctttgaaaacacatactgaagtattgtgagcttaaaaaaactttttaaatatttgcatagttttgaggtgaatttgtttccttacagatctctcctaatcattgagatgtatatttcaaaagaggaaattttacatgttgtccaaaacagccttgctagtaactggtgaattttggtattaactattattaaagtctttaaacgacacaggtacctaaagatcaccttaatgtggcaatttgtgatggtgtagctagctgattgtgaaaactgttcctttaaagtcgcttcttgcatgttcggtgttagtcatccagctcaggcttgtgttgcagctgacaatctaggaaagacggccttagagagtggtgcaggccccacactgacggactgccttagaaacccgacttcctctagactttgaaccgccagacttttctcttgtttagaaaacaaacttatatttaatgtacttactacttaaaactccagacagagatataatgtagaaggcaaatattggccaattttttcctctttttaagtggaagacaaatgaacgggatttttaaagtgcttttaaagtgcatgaatggttaataaatcagtatgaattgtaagccttcatcttacatccaagtccttagttggttagggtttcttttctttcttttttaaagagtgtcaattaccttttgaacctgtgaaaatttgatagttgttaacagtctgatggtcctaattctttcttttcattctagaaatgaatgtggttgtaatcatgttcctaattcttgggacaacctgcaagacagtgagacagtttaaaaattacctttcatgttgaaaaagtctgaaacagagaacccaatgatatttaaaataaatgctacataaaactctttttaaaattttgattttaacttaattaaaacaatgtcataaatatgctttttgattttgttactgcttttaatattaaagtaatagaatattgaagcaatattgtctagcactctgctggacattaagtccgcgggaggagaagtgaacaggaatcgattctttgtcttttaactgcccttagttaggagatgttaaaatacttggcacctctggttatatgtatgttatgtgtgttctcccccctaaaatttctaagcacatttattcacttttaaaatgaatctttaaaagattatagttagtagttatagttaatattctatttacttggaaaaatgtgaataaatggatcttcaaaagattcattttaaaaatgaataaatgtataataggctataggtgatcttacttgcgtattaggtaggaggcacatatttataccatttcatatgtaatatctttgtcattgtgtttcatcgaagatcaattgctagcaacttgaagggtatttatacttgggtcacttgaactcagctgactaaattgtaagaacgagagcaagcaagatggctgttattggaagccataacttccagaagataattctgcacaattcgtaagttaaaaaaaatctgtagggtcttccactatcctttttcaggttgataatgctgttctgggcacacactttgtaaatggaatgttatggtacagtcgcctctcagtatccatggggcattggttccaggcctcccttaggatgccaaactccatggatactcaaaccccttctataaaatggtgtagtatttgcatatatcctagacacatcctcctgtatgctttaaatcatctctagattacttaaaatacctaatacaatgtaaatgctctgtaaatagttgttatactatattgtttagggaataatgacaaggaaaaaaaagcctgtacatgttcagcacaagtgaaaccatcctttttgcccccaaatattttcaatttgtatttggttgaatccatggatgcagaactcacggatacagagggccgactgtactttctttaaagtgttcaaaagtattactagcaaagaggaggaggagcaaagcatatatcagaagtaaaacaatttttcttgttgactgctttggtaaaaaacagtttgatggatagttttacatttcactggactagataaaaaatggtgctaatatttatgtagcttgatgctatagttgctttggtatcaaacttaatacctaacccatataagatccttattatataattttgtgatcagtaaaatgatattttaaagagtgatcttaaaaatatgacctggtcattgcacaacgtttgcatttgaaatgaatttgtgtactatagggtggatatggagttattcagtgcaagtgtgtgcttaatatcaaaccctatgcaaggagctatgtctagatttttggtccaaatttgcctccttcaagcctactagtgtgagatggaaaaaaatcgattgctcttttaatattatttccattttgaaattctcgacacttgaatgaaggcagtagaggcctctttttggatttctcttctaataacaaaactttatttagggaaggtttccctgtgctatcgtaagtttgttttgagcactgcattcactttaaaattctggaggaacaaaggctgggcacataatcacaaagcccaggccacacaataattcggggttgtattttctaagaactatgtattgtttttagcttatagttaatattgtatttacttggaaaaatgtgaataaagttaattaacattacaa

SEQ ID NO: 1771 - DNA, 607 bp, Homo sapiens
ctttttctaaaaatggccattgtttatgaaatctgtataagtgtgtccttatacaaattttaggccataaacaagtgtaagtttgtacaatttcataacatgtatagctgagtttttatactttatatgtaggaagctaatataaaatagttatgtaactgtgattttggttttcagttatgtgacttgttttttccacctgaaatgtgtcagttgttgttcctgtactcggtgccctttctttttactctcacgtggtcccaggttctggagttcttgtcctggttctagctgctcacatgtacaaatcacttctaggcctcagtttctgcgactatgaaaattactagattgcactagcttgtctctaaaattgctgtgactccagatactttgcactgaagagaatctagggtgtttgatatctgtttcagttagggctaatgggaaatgtctagtaagataaatgtcaacttttgctgacttattatgagatgaaaaaccaaaggagagtgggcctaactcatgtgagcttgataactgatgaactcattgggagcattttaaacttttctacataaataataaatgagcactaatgaaagta

SEQ ID NO: 1772 - DNA, 1596 bp, Homo sapiens
ggaagcaattactggtaaacaatatgagactttaatgcaaaacagtgttgcagaaaaaaaactcagagactatgaaatacataaaccatatatcaagttatttgaaaaatacctatttttttccaaagtgtgtaaaagattgttttgaaacgtacctgttctcaagatctttttattcagagttttaataattgtaactttttaaatgtctatagcactgaagttattttcaggttttgtattttcttttcttgtggaatattttaattaatatagcatggcacctcattttcttttgcctgctgttaaagattgaagctattgtcaaatgacaactttaaaaaggcaattataaataaaaagcctgattattttaggccagtttaccaatcactgtgtaattcttctggtagtattctacctacttttaagtctaattttacagatagaataatggaaattgaaaatttaaccctttattccgataatctcatgaagcaaacctaactatttaacatcagctggaaagaagggaacatttatattgcccatctcctgtgtcttcaaaggtgtgagagctgaggaatatgtgttcctatgggaactatgtttgaatatgtgcagttttcaacattttggcacatgaaagcctgacaagtttttaaaagggcagaagctttattttttgaacaggaaaacatgttttttaaattcacatgtttgtatgagtacttttgcgaagcaaggcatgaactgctaggtattattaagaatgaatgatttttgcatttaagttgtttgaaggcatgtattttgaaaaatatctgttacaaatttataatttcaagacaaattgaatcttattttataatacttttggaatttcattaataaggctaaaatttgaggaatataactaattttcagccttaagacatttaagtttggaagtccttgctattcaacagaataacaagaaaacttcagaatgtatcactctcctgaaaagaagatattaataagcccttttatttatggttatagttttatttatagtctcaaaattcctaaagcaatgctacaaccattgaatttgccatattttgtatcagtgctgttaatttgctgttgcctcaagaaaaagtgctttttctccatggatgaggctagaccctaagaagtaattaagtcaatgtaaatcaaatggaagttttcccatgaactaagcatttattagttccctgattagactggaagaagaaaccactatttcatgaaaagcatggaatattatattttattgttcataattaatgaataaaattgatatgaatgaatatagtgttctttgaattagtaaacagtacatctgtgacaatcatttttaacaagctctacttgtgttctttataaagtgtgattttcagaaagcaaacaacacaattacaaggttgaatctgaggaaaataatccttgtgccatagaagtatttacgaaattgcatttcattgttatgttttattttctgatacatgatgttcaattttatctttaggtaatattttatatcatagattaaaatttatagtgaacttt

SEQ ID NO: 1773 - DNA, 2994 bp, Homo sapiens
ataccatttttttcttccctgcacccgccttcctaatttccttagaatgtccttaccaaacacgacatatcttagaatggacttcctagtttccctcatcatatagctaaagccagactaatgacatgttacctgtagccattgaattcctgcacatgcctaacctaagatgcaaaaacaatttttagcagcattaacttcttattaatgaatggtcagtatttatactatgtgaaatgtggatagcaacactaagcctaatgaaagacctttagctaatattgactttagctgagatttgcagtaaatatacacttatgtgtgtgcacatttgctcaggtacaaataatcggtagtaggataactgagtcgaagggcctccattgtcaactgtaatgaatattattttccccacagaaggttgtgccatttcacagtctcagcaacagtagtaagaatactggcatccctgcaccctcaccacactggatggatggtattggctttctgaggccagtgcatatcctgtggctccatgtaccccggggtgttcccagaccccacttggagaagtaacacaggaagtagagttgccagctcccctccccccgtcagtcagtgttcaatcttgtttggcttgtaaccgtttaggacagtcattgaaaagggcaggcgcagcttgggtttcaggtcaccaaaaatcactaccttagaaaaaatgtgggccaaggaagatagaaattaaacttcacagcattaacttttctttagagtggtcctgaaaaagctgtgggccaaagtatttttgtcttatcaccactgaaattcaggtagctctgcctcacattactttggatggaaaattctttacacaatgttgaataattaaggagcaaaaaaatcactctaattaaattacagttaatgataaggatgtcaagaatattgggtgccctaaattaaaccattgttttcctgttcctgttttctgagtccacttccagttaggatggcctttgaatttttgattcttgcaaccgagacagtataattgaaggatttccttgtgatgagtgaagagtctagattcccatgtagaagctttaatttctagaattttatagtactctccaaaatattttttattacatttgtatttgaattttcaaacatctcttttccttggagacagttccctttttgggagttcttctgataaaactgaggaatactgcctgcatttgctttcgattttctgtaaatacaaaaaaaaattacactgaccttattagctttgatgatacagagtttggagattattctgtgcattaaaaattaatattaaagaagatagcattatgacatctgataacagtagaccaaaataaaacattttaagactctggccactactggtaactagctctgtggcttgtcctatgtttatttccgggtatcagaagtgtatctgaagactcagaagtgaggaaccgcatgcggaattccaggaactgaaagaaattaagtatggctggagttaggagaggggccaagacaggaagtgatgtagtgacactgtcttatatgagcaattatggcggccaaactagggtagtggcagtggcaaaggagacatggatggactagagaagagctcggttattcaattactgtaggggataagggagagcaagcatcaagggtgacgtttgtgtttcaggcttaaacagttggatgtccatcaagaagaaagcaaaagacgtcattggaatggtggttttgtttaagcatttctggctttccatcatggttcatactgaaagtactgtagatgctagctaacctctgccctttttaagaataaaccttttttttaaacttaagaactaaagctgagattctcctattctgttgttgaggggcttcctgcatgcccgcccattttatcacagcaatttgagaagttttctttttggtttctgacaacaagcatttggggagaaagccaggcataaattagttacgatagttggtgtttaatgtttctccagtgaaaatttggacttttctttttcccttatagaatgcataattaaaacagactattattttgaaatgaaatattgaatattaaaaaaaataaaatagagactcttaatacaggagccacaaactcacatacctagagaaaccaaacaggtaaaagcaagtggtgaagccacatggattaatgagatgatagaaagtacaaaatcactatgtaagtcagattaaaaagccagcttgcactctctgctttcatctttttgaagcaataactattacataaatcagtgaatacagtatttctacagtatttgaaacggtgttcacacccagcaattccacttctagacatatatccaagagaatggaaaacatgtgcacacaggcacttgtacatgaatatttatggaagcattattcacaatagccaaaaagtggaaacagtccaaatggccatcaagatgaatgaataaataaaatgtagtgtgtgcatgcagtggaatattatttgcccataaaaagaaatgaagcactgatgcaggctgcaacatggatgaacttgaaagctttatgctacgtgaaagaagccagtcataaaaggtcacctactgttattcctttcataggaaatatccagataggcaagtccatagagacagagaggagaggagtggttgccaggggctgggcaaggagaatgagagtgaccgctaatgggtgtggcatttctttgtgaggtaatgaaaatgttctgtattagatagtggtgatcattgcacaactctgtgaatgtactaaaaatcattgaattgtacactttgaaagaattatatagtatgtaattatatctcagtttaaaaaaaaaaacaggataacagtaaccaaaatcttctatgtaagcttaaaattttctctgttaattatgccaaataaaactgaattcacagc

SEQ ID NO: 1774 - DNA, 1178 bp, Homo sapiens
ttttttaactttgttggaacggactggggtaacagtggaaagcctccagttgcaatccttcaatgagctgagattgaatcattgactgtgaaagagccccctcctcccctctctcctgggccctcattccgggcaggtcccccttcactcagccccccagtgtcgaaggccaaggttggggaggggaacaggagagaggcaatgatgagtgatcaagaattagagtgccctggaggtcactcacaagtcctcatggagactctgccgtgacctcgcgcatgcgagcaccttcctgtctctcattttcaccatctgactggggctaggtttggttagagggcggctgtagagcaccctcaggagaagtggcgccgcaggggtcacgcatggtccagccctcaggtgggagggaagtccttgttggcagagggatgtggggcgggaatgaggaaaggggagggcatgatcctggcaaatagtctttccttttccgtaattacagagaaccaggattttttttaattattgttattataattataattattattattattgacatgaggaaacctagcactggcagagggcaccttctctgcttttaatctttcaggtttgactcctggcactggttttgatacttggaattttgaggttcagggaattcagagaatttggtagcacagtgtattgggagaaagggaaatttcgggtgacagattgatcaccctggctgacatgtttctggaagtgggtgggtgggtttgattgagaacactttgggctcctgcagtgatggtgggaaagaaaaattctttccaaagctgcacttctcttaataattctctcccctcaaaagaaagattatgataaagaataatttggagtaataagtaacaagatagaattagaaaaatgttgaatttctgaatgaccattcagaggtgtggctttttccacgtctttttctcctgcaatgaactgctcccacgtcctgcactgcaataccagtctaatgaacactttgtgaaacaaatcgtaagtatgtacgcacgcatatcaaactatgctctgaggataaagcaagttctaatttgtggaaaaaggattaaatatttctgttttctgaaaagagttattttgtattttgttttctattaaaatgtatttagtttcaa

SEQ ID NO: 1775 - DNA, 1778 bp, Homo sapiens
tgctgggggcgcaggactcggtcaagggaggggcaagaggaggaggagagcctgccgttccaacttgcccatcagagacccggacacggcctggtgtgtggcttgctgcctgggagggatgcacagggcctctggagggacaggatggacctggtcagaggacggttgctgtcctcatttgcattccaagaagagcatgtcctccctcgagaaacagtgccgccggtgtgatgagcacttacacccacgttctcaagggcagattctctcatgacatccgtggagcttgcgaggcagcgtggactggtgactgtgaaggaaggcccccgtggtagaatgagctggagcacgctctaagagagatgcctgcttcctaaagatctacagcaatctgggacgtggttcaagttcaagacttgaaggaagcaaagacgccctgcatggttacaatggctcaggtgtcaggggaggccggagggttttccagcatttgcctcatgccagcacctttgaaccggtctcttagaagaagacacacatcctgggtgtacagtggtgaaatggggagtgggtgcccattctgaaaaacgaggcattcctgctcattccctctgcttagctggtgggcaggggagagagggaaatgccaaaaacttggagtgaaggatgatgctattttttatttttaaatatatcttcaggttattttcttactgttgcttcagatctaatgtaaaaggcagatgtcccctcctctccacccccgacgctgaccccggcctcagtcacggctctttgcatgatcacagttctgtgttctggcctgtggcagggccgggaagggccgctggcttccgaacagacgtggttgctctccacgaggcgcatggggagcccgcgggccctaagctttgtcgcagatgtcatcattggcagaattacttgtcttgaaaaataagtagcattgctgaaacacacaaccgaattctctacgatggccatttgctcattgtctttcctctgtgtgtagtgagtgaccctggcagtgtttgcctgctcagagtggcccctcagaacaacagggctggccttggaaaaaccccaaaacaggactgtggtgacaactctggtcaggtgtgatttgacatgagggccggaggcggttgctgacggcaggactggagaggctgcgtgcccggcactggcagcgaggctcgtgtgtcccccaggcagatctgggcactttcccaacccaggtttatgcgtctccagggaagcctcggtgccagagtggtgggcagatctgaccatccccacagaccagaaacaaggaatttctgggattacccagtcccccttcaacccagttgatgtaaccacctcattttttacaaatacagaatctattctactcaggctatgggcctcgtcctcactcagttattgcgagtgttgctgtccgcatgctccgggccccacgtggctcctgtgctctagatcatggtgactcccccgccctgtggttggaatcgatgccacggattgcaggccaaatttcagatcgtgtttccaaacacccttgctgtgccctttaatgggattgaaagcacttttaccacatggagaaatatatttttaatttgtgatgcttttctacaaggtccactatttctgagtttaatgtgtttccaacacttaaggagactctaatgaaagctgatgaattttcttttctgtccaaacaagtaaaataaaaataaaagtctatttagatgttg

SEQ ID NO: 1776 - DNA, 616 bp, Homo sapiens
ggccagggccccagaacacagtgcctggcaaggcctctgcccctggcctttgaggcaaaggccagcagcagataacaaccccggacaaatcagcgatgtgtcacccccagtctcccaccttttcttctaatgagtcgactttgagctggaaagcagccgtttctccttggtctaagtgtgctgcatggagtgagcagtagaagcctgcagcggcacaaatgcacctcccagtttgctgggtttattttagagaatgggggtggggaggcaagaaccagtgtttagcgcgggactactgttccaaaaagaattccaaccgaccagcttgtttgtgaaacaaaaaagtgttcccttttcaagttgagaacaaaaattgggttttaaaattaaagtatacatttttgcattgccttcggtttgtatttagtgtcttgaatgtaagaacatgacctccgtgtagtgtctgtaataccttagttttttccacagatgcttgtgatttttgaacaatacgtgaaagatgcaagcacctgaatttctgtttgaatgcggaaccatagctggttatttctcccttgtgttagtaataaacgtcttgccacaataagcctccaaa

SEQ ID NO: 1777 - DNA, 2732 bp, Homo sapiens
aatgtattagaaaaatacaatgaagaaccctaaaatgttttccaaagtggtgtggtggaggaggataaaaagggccaccttttcctatgtattttactggtttcttgacactcttttcttaatcatttggaaactggtcaatattgccagatttttttcttttttggtagaaccagatatatatgctattttcagtgatttgataacagaagttttccatttggaatttttaaggtctgttaataattcaggagatcttgtaaataaaacttctgttcccagctccacccaactttccccctcctcaaaggatgtgtttcaaccatgtcacaaaaatcatataagtgatttccatctccttctccattattccccctcccccctccgctttttaccgtatgggttccttttggtgggtgattgagggtgatgttatcagccatgacatcagcatgctggctgtgaccccggaaagactggcccccagcgacgttctcagccagcgctcgcagctgtccggggcttctctggcagaagccatgtctctcacatcatgtgccagcctccaccctcacgccatttccagggaacagactgcgggtatgtagcagtgtagtctttaacctgctctgatacatattcagagtatggattgttgtttaaaaagagttgcatgtttaaagagttttgtactagcttttcattattttgtatctagattatcaacaatggggctaccactttccttggttttatatccatttcctcttggaagttcttgttgcttatgtgacctgttggttgttccccggactgggcacctacaggagtcagggcagacggcagatgtggctggaggtcagggctcttctgcttagttgtgttagagtcttccagcatgggactgatgggagcagtgggcattctttatcccaagggctagccaggttgcgtcatgacggaccttccccagccctgaccaccaccagaagtggaagagtggagtttgcggtcaactcagcagtgcccatggagacctgcgtggtgtcagagcagcagtatctcttggagctggtgcagacaccaaggctgcccagtggtacaacgtggtccacctcccctagggaagctgctgcactcagaggctgtcctgcccagtggcccctgagccgtgtgagcctgcaggaggcgtctgagcagagcctcaagcccggtatggcgccatctccatgttgccatcactgcgttctcacctgaagccttaatctttgcgacacctgccagtgagcgctcggtttcaataccaaagtgtgtcttcttcttttttttttttttttaaatgcctgtttcataggaccttctgaaatgatttccagaatattttatctggctccaaaataaagcacatagcaactcacctcaacccctcatcatctccaggaaagtttctgccaaagctgtggcatagccaacttttgatttggttcttgccaattgttttatgtccctaaacctcatttggatccttggggtatagttttatctttctgcttcagtgatttactgtaacttttcaaatattggttctttctgtaccatttaagtatagttgatatatgtgaggcaaaaaaaggtttcagcatggtggtgagggaaaaaggagcttagaaatcccagttggcacagcctgggcaagcgccagctcccctcagggctaacggcactgttcacacagggatcctcagaatcagcggccacctgcctccaccttctgcctggagggcatggggctgttgtagaacctatggtagcaaatgtatatgtatgagtttgtattctgtagtgttggtgtagcacagaagaaagacctgtgtcctagagagtaggccaaggtgatctgcctcttctattgggagaaattctaatttctttcccactttctcaacaagcccaatattccctccaagttcttcttggtgctgagggctgtaggaattattgaaagcttctgcctcacttagtatcgtctggggcccagcacccagcaataactctaataatgtttcttaatggtatagcctcctgagattaaatgtaaaatcaaaaattaggaaatcttggagggagtcctcaagttgtattgctttgctgtgcttttggaagaagggacgacctggaggacacaggctcctgtgtgggtcttcatcctgcctgaccggcagatcttcctctacaccttgggcaaagtctatgcgaagatggtttcttagctctccatttgccatgattttcctcccattcatcatgagggagtttctcaaaccaggagtttatatttattttttagaaaatacacacttttcaggagaaacctgagcatgattttggattctccacctccccccagtctctgcacctgggattcagctcaaggattcagtgtcttcatttttacaaaagttcccccaagaaatcagcaaccagcctctgtttcatctgggagcccctcccttggccccctgggtttgggggtgctgccctactgggaacagcgggggtctgtcacccgtctgagccgcacccccctgtgtggatttcaggaagagcctccctttctttgcgtctccctttctttaattaacattttcaaaagtaataaattcttactgacgacttgtaacttagtcatattttatacttgtagcctttaataaagccatttaaaaaatgct

SEQ ID NO: 1778 - DNA, 661 bp, Homo sapiens
ttctgctgctgtatttatacaagtaaagggccggacctcttgcttcttaagttattttttaaaacatggaattataaagaaattaggtcctctattacttttgataccaatttttataggaattgaatacttgaaatcattttctttacttttctgaaccataatgaaaatcatgaaagaggctttcggggggaaaaagctacttgacttggagggaaagcgtatgtattagccggcagcctgttggttcccacttataaagtcatataactccttccttacagtaaaaaaaattttcctcaacaactaaaatataatactgaagatgaacaaaaacaaaaccaaataggagtgtttgtattcctttagagatctggatatttttcaaagacttgctttttacgcacattgtgatagagcatcttttgttgactcacgtaacctccatgtgtgggtcctttgttttattagaaccatggaagaaggttcctgggccatcagtatgtgttgcagagctcacagccaggaacacttattttgaacaatgcagacagtacttgccagagtcccaaatgctgaattattgaaccatgtttttttttcctttgttgaaaaaaataaaccagggtgatttctataaatcaccagtttttggcattgg

SEQ ID NO: 1779 - DNA, 674 bp, Homo sapiens
agggtcttgggagggatgtgactgttgggaagcccttcctactggacacgctgtcatcatttgctgcttctcttgcaagaaagcacctccgttgtggacggtcctcgggcacaggggatgagcgctaccagtttcatttgtaggcagggagttctccgcggatgcatggtggcagtctgctttgatggcagcagtttctgcttaggtgacctagaggtcctcagcagtatcctccacacctatttattgaggtgcacctgctggggattcataatgagaatataacaagaggatctcggtgaaaggccttagtgggtgttttgtgtgaggtggcttgtagctagctacttccttacagatggtagagtattccaatcctctttgtgttagggttcttgcttccagtttgggatgtattaaaaccaccatttcactgcttcccttcctcaatatgctctgcagcttttcttgctgtttaaacctctcgcctcagctttatttatttgtaagctgcattactaactgcccagtgattcggtgaaagctttttactgaaaaagttaacatttctagtcatcccaatcaactggcttttttcaaccaaaattttatatcattctttgtctatcagatacgagaggaaggaagataatacgaagacatgttgaatagtg

SEQ ID NO: 1780 - DNA, 515 bp, Homo sapiens
agtactttgtcaaataaaacgaggatgggaacaactgagtcaactgcagcggccctggaccctgtgcgactctagatagatcgttcttaacacgcatttcacagactgctttttcattttagaaaaaaagtcaaacagaagtaacatttctagttgccgaagtgtctgcttcatggtgctgaacgtgtcaggcccagtgcagcatgaatgtgaagtgaacccactgaaaagtgatttttaatgttctccagcaaacttcactcctgtttcatgttcactggtatttggtgcatttgcttgtaatacagttttttataactttactgttttgtaaatgctagtagtttacattaaattgccttatatttttaatgatttaatgttatgatatcatgaaagaaccaagaatctagtaatttatcagttttgtggaaaagcagttttaatttttagcctaccatgtgtacaaaatctacttcataagaagttatataaataaaataggtttgtagtat

SEQ ID NO: 1781 - DNA, 2831 bp, Homo sapiens
tgcttgggtctgtttatatgtgtatatatgcagagagagagcttatatattatttatatttatattaagttgtattagcatactctatagtttcaaacacaacttgaaaattaaaagtgccctcttaaaaatacaaaaatcaaaaagaggaaaataagttaaattaagcccaagtaacaaaaatactggaattattaaaacgtatagtatgctagctatccttttaaattatgctaattctcttcttctgaaattatggtcacactatatactatagcatttcggttttatcctttgataaaacttttcttttttcttttttttttttgagacagggtctcaccccgtcgcacaggctggagtgcagtggcaaagtctcgactcactgcagccttgacctcccgggcccaggtagtcctcccacctcagcctcccatgtagcaggaaccacaggcaggcaccaccatacccagctaatttttgtattttttgtagagatggggtttcgccatgttgcccaggctagtcttttctttcttctttttttttttccccacagtatatattatacagcagtcataatatctataaatacatagagtttatgttgtgaagtttcccagttcactgaaatgttaggtttcctaaagggtacagtgccgtataaaacaacctgcctcatatatttctcctcaaaacgttggactatttgggaaaaggaaaagagttgggaaaattggttttaaggtaagttttagtcaaaagaattctttcttgaaactagctggtttgtggattcagatactctgatccttacagaatccaagaggaagctttcataaaaacaattcagcaaatatttccaatataatttgaatggctaattttcagttgctaattaattagcagctttgtaatacttgatttgggagcatttacttggaaatcctaaggactataataaaagttttcaacatatttctaaattgtgtgagtttccagctgtagcttttgtctttgtcacattttaaaaaataataagcaagacacattggggacactggcagcagttgccaggttttagctgccaccgcttcagtatgagatatagctgtcccatcttcccccattcagggtaggagatatagtgacccagacttcatgcaaatggaaaaaaagttttaactgaaatatttatttagatttcagggtctagatggatgggaaagtagaaaaacatatgcaaatctcagtgttctcactatgaccactctgagcagagatttggttttgtttccttttgtaacaaagtgaaaacaggtgagacaatgtgcccaaaacaaagggaagaagagaaccttctgtgactcctaaaatgttccatgctgcatttttgtttcattttttatttttccttgctttgtttttaaacatgaatataatgcttacttcaaattgtttagtaaaacaaaataactaaagaaatgtgagcttcccaaggtttctaaactatcgctgttgtatattctatagcgttccttattctttgagggaaactgtgcttgctgtgatccattttgtctctagcttctagttgtgattcttgtccataagcaccaaatttgatgcccatgatttcaaaaggtcatttcttttatctgaatgaaaatggtggtactaagactgtgaaaattatgtgaaacctaaagtagttgccaaagtggctcagggttgtaaaattcattgacttaattattcatgtgccagatcaacccctttattttctctttagctgtgcatatttaaaatattggaaagtatcagatttacagattttctttgactaatttttttcacataactttaggattttcgaaagttgtaaccataactggatatcttagctgagcaaaggcggttataatttgtctttttaagatcactggaaattgataaaattttgtgataattatgattattctgtgccatttacagtttctaatactatactgtatgaaatatgtataaatatatgatgctgagtctgtggaatgatacttctgaaatcaaaattcctcataaggcatgaagttgtaaaaacttgaatgtgtatagttagatatttaaatggttgcttcttcatagaattgtctgctttttaaaactggaagtacaggattttcttcaggtaaaatctgtgtgttccaattacagttgtagctgaaggaagtatgctttggtgagtcaattagtatgggaacttgactaaagacccccagtgttgtaacgtacctttgtacccagacaaaacaattatgttacattcctcaaagtggcatgggctttcttctctaattcttctgttttattagacccaagacaagttctaaaaattgaatgcaatgagagattgtccagaaatgtaatatatactaaaatataccacttaagcattgattgccttttcttgtttgcttcaagaatataaaacttgttacttgagcttggaatcatgggcttgattgaattaattactcttggggaaaaaagacaccttgtggcattaagtcttgctttggttaaagccttatttcacataattgctaaaaactcatttttgtttaatatactacctatagtttaattatcggcacttgtattttgtaacttgatatcttacctaggattgggaatttgggacatgacatgtactataaaagtcagtctatgtacatactgcttattgatgtgctgtgatatgagggaatctgaaatgtttcataaaaataaagcttaaaaattgtcttacactggataaaagtgatattaag

SEQ ID NO: 1782 - DNA, 726 bp, Homo sapiens
agcctttgatccagcaataccccacttcacctacaatattgttaactatttgttaacttgtgaatacgaataaatgggataaagaaaaatagacaaccagttcgcattttaataaggaaacagaaacaactttttgtgttgcatcaaacagaagattttgactgctgtgactttgtactgcatgatcaacttcaaatctgtgattgcttacaggaggaagataagctactaattgaaaatggtttttacatctggatatgaaataagtgccctgtgtagaatttttttcattcttatattttgccagatctgttatctagctgagttcatttcatctctcccttttttatatcaagtttgaatttgggataatttttctatattaggtacaatttatctaaactgaattgagaaaaaattacagtattattcctcaaaataacatcaatctatttttgtaaacctgttcatactattaaattttgccctaaaagacctcttaataatgattgttgccagtgactgatgattaattttattttacttaaaataagaaaaggagcactttaattacaactgaaaaatcagattgttttgtagtccttccttacactaatttgaactgttaaagattgctgctttttttttgacattgtcaataacgaaacctaattgtaaaacagtcaccatttactaccaataacttttagttaatgttttacaagg

SEQ ID NO: 1783 - DNA, 1161 bp, Homo sapiens
ccaatccgcacctcatcaagggaccactgggaaatgccccttgtccctttgaagtcacaaacatgtggtttttctgtgtgctttcaaccaatcgtagatgtttttgctgttccattctgtgtagcaccattcaccacagcaggatagggagcctcgactctttctcggtaaccacggcagagagcagcgccgatgtgaagatgaatgaatgtaactcctggtgtgaagatgaatgtaaaccctggcgacagttgagacctttttcttttagactctgctaaaacagtgctctggcttgggcttacctcaagagggaagatagttgagttttatttcctgtatatcaggtgacctggtagagatgtaaagcaatttaccatagtttgggctttagtattgtaaaataaacatgagaacaaataatcagacatatactttaatgttaaaggtgctctatttttttggatgtacagtagttttatttccacagccacattaccatagcaataagaaaggaggcatagtacatagttggaaaagctttgtggggggattaaaaaaaaaaaaaagcactgttgtgtttaacactagttcagatgcagttaccttagagacttatttatttgcaggaacaaatggtgcctgaatattaacagtgttctgattaaaaacaaaaaaaagatacatatgccttgtaaatggctcaccgagtggtcagtagtcacttcaactcttagttcacttttgtatagttgctctgctggaaagaaatgagagtgaatctgcttactcactagaacttccctgtgtgctgtgagccagcggaaccacttgtacaatgccagatttgtttatctttgtacagaagctttgatgaagtgtcttgtatttaacacccttatttaagcttatttaaccttaaattgttaattttataaaatttggtttggcctgcactacgatgagggatggaggtagctgcaggctcagaagagactgagcttgcacagatcagaccgagaagcagggtgagagattctaacgactggatgctgctagtaacacattgtttgtattgctttaccatttttaactgttagatttgagatgaacatacattttgcttttttaataaatgtttaaaagaagtccacataagaa

SEQ ID NO: 1784 - DNA, 168 bp, Homo sapiens
cgggcgtgcggccgggcggggaggctggctcccccacacctcccacctgcattgctctccctcgtgctccccaaatcaccacaaccaaccaataccgcgatccatgagggactcctcctgtggaaaaggagagctgttccagaacacagaactgatctcaggtttttg

SEQ ID NO: 1785 - DNA, 262 bp, Homo sapiens
tgtgccttccttagtgaactgctgctgctgttcagacttttttaaaaaaaactatttggactaaagaaacagattctgaaatttattgtgataatttgtatttcttttttcttgcaatttaatgccaaaagtttgccatgtgccttaaacatattactatatattttcccctttaataaacactttttgttaaattgtattcttcctttaataaaatattttaagcaattgtggaaataaaacaatggattttttaagagag

SEQ ID NO: 1786 - DNA, 2868 bp, Homo sapiens
cttttccggtttcagaaaaacccaatgattacccttaattaaaactgcttgaattgtatatatatctccatatatatatatatccaagacaagggaaatgtagacttcataaacatggctgtataattttgattttttttgaatacattgtgtttctatattttttttgacgacaaaaggtatgtacttataaagacatttttttcttttgttaacgttattagcatatctttgtgctttattatcctggtgacagttaccgttctatgtaggctgtgacttgcgctgcttttttagagcacttggcaaatcagaaatgcttctagctgtatttgtatgcacttattttaaaaagaaaaaaaaagccaaatacattttctgacattgtaagattgccttactgtctgtcattccttattgctggcccctttctcaggccggaggccaagtggtggagaaggaaaggaaatgatcgaacgggcatgttgtcaagtgggcatgccactgggaaataccaccagtttaccctgaaacattgtcctcagaggagtaggaaagtggattttgaatctctattttgctcaaaagttcagttcctgagatactgatgactgagagtgctgctgggaaattttcaggattgtgtggtcttttggggttttttgtttttttttttttaagacaaagttgaccgctgttcactgtccacgtgatcagttgtaagattacaatgctgcatgctagttggttacataagatacaattccagtgatggaaggcggttataatggatggtggtgtgtacaagatggcactgccatctttgagcagagcccagctctgcagcgccacttcatctttttaaacaccctagaggtctgtttgttgttgctgttgtcctttattttgaaagagttgcaagagaagttacagtccaggtgaacttggagattgtgggattggttttgtttctgttttgttttgtttatcatttacctgtagtgctattgctgttgatactatcacctataccctgtttctagtgagtgctgaatacagtatggtacaatgacagtaacagccgcgtggtgctgccaggactgcccttgggcatatcagtgacagcccaaatgtgggtggaggaaacctgtaatttccttcttaacatgtgtttgaaataccaagtgaataatactgttctggaaaaaaatgataaactagtggaaattaaagaaattaagggttttatataatagacaggccccacctctcaaaatatttttagaagtctttttgtaaactaatttcttttgatcactattttgcatcagtaaaatgatttttttaaaaccaataaatcatcaattattagaaatagttgtctcacagtgatactggtttttcttttgtgctgttatgatttaacattgacaggaacactattttaaatccttacgttcaggtgtttgtaacttggccttataattaggctgaattatggcttcaaggtctacaatttatgtgtatggttcacagcctagcttctatttacatttgaaaatacagatttttaccaactttggattcttttttagttatatgtttgtctttcctttttaaattgttcaaaactattttttaatggtcaagttactaacacttgaaaatcagatactgcaccaaatacagtgtttttccgtagtgtttttaatgagtgcacctattactactgtgcgagaattcatgttttaccagtcattgttatattacaaacagacttgcatgattaaccagttgttacacttactttttcaagttggagtatatatgactcagtgcagactggtctctcttatgtgaatgcacacatgcagaaatgcagagtcaattttacatgcccataaagacatttgtaaagaattcagctcttatggtctgttgtataaatgtgtatctaggcactttggaatttgacctcacagatgttacaacttgatcagtcgtttgacctaatttgtggtagctatctgtatgttttgcaatcttaatacagacatgctttccaaaaagattaatacagaaccatcctgccgttttggataagtctatccagctgtggaaagggcaacctgtggtttctctgtactggtgtttaatgggggaagaatatgaacagctttaaagagctgtgtattgtggttactactattaaaaaataagatctgcacgagtctgactggcctttgggtggcctttgtggacggctcgtagctggaaagtgttgatctgggttttctggcattcttttaagttaaaaagttaacatcgggacatgggtttgatcttttgttgtacctgatgacagtgcagagattctccacagctggataaaaatgtcacaaagctacttactgtacatgggcagtatcagatttcaaatcctaatatttcagctgtgcttttaatactcaaaatattaggggatggggtgttgaagctttcccttttttgcttttaacaatttatagaatttaacagatgtactgtctttcatgtggcctcacatttaaagttatgagaacatacacatggtttacaacttttactatatacctttccttggccaccaagtattttaaaagtgtgccaccttttaacctttactttttttaagttgaaggtgatactttttctatatatgatgaaactcatgtcaactgaagtgagtgtaatctcagataccaacattattatattttaaaatcacgctatggaaatatcacctgaattctgtcatttgtcagatttacagtacctttttttctttaacttttagcattaaataaaaataaaattgggagcactgaa

SEQ ID NO: 1787 - DNA, 78 bp, Homo sapiens
caaccaggaactgctttttcttttcctgctgagtactgctaataaaagtgctattatctgctgatagcatcgtctgct

SEQ ID NO: 1788 - DNA, 2719 bp, Homo sapiens
gaaacaaatgtcaacataataaaatctcagttaaaaatattttaaaaattcttggtagttgagcagctctgggggaataagggcaaatatgcttgttatgaactacactgaaatctaccaaagttaatgtttactttgtgtagatccatttgtctattttatttatttttcccagtgaaaagtgtattttgatagagaacttttcattctataaatacactatgagttactaaaatatcatggattttgtttattcctgaaacatagttacatagttaaactgtacatatgacatggcttatgttaaaaatacccagtgctcagttttgaaagataggcaaaaaaaaaaaagtataggagaaactgaagaatgtacacttttttagagggcacattttgctgtaaatctggaaatttgatagacttgactgtgtttgtgaaaactgagcattaaaggttttgattgatcctttctttccatttaatctctgagacgtaaatatgtgaggtgtgctgctgtgctgggttaacagcttccttccctttctgtgtagcagtcttgaaatgttctgtttaaatcagtaggcttaatgtgttctgggtatttatctccttgtattttaaatatatgtagttgcaaatagcaccaggaattagatttctgtacacccctaatctagccttgtgagcttcgctagttaatgtgtgctcactttccctccatttgttacgtgagagaatgcgtctgctgatcactgaagtgtcccttttagcttctgattcattgggttctgttgggcatctttaaatccaccttaacctgaggaatgtatgtgggcaaccaggccctgcatttttttatattctgaattttgcatgcttgcctgacttagtatttctgaattgatgttttttttaatggtataactatcttgattttcactgaaattatatggttctgtcactactctgtaaattaatccgaaacttttaaggtaactgggatgatctgcttgtaaaaatgcttgttgccttttgctttatcttcagtgtacctccttaatcctgcttcaacttgattatcttgtgaaacgatgagagtaagttgcaaccttgtgactgaaaacttgaaaagagtggagcaggtgggacctcttattctcaaatagtgacatattctccgtagtcacagtttcagaactgagtaaggatccttggtacttggtggcatctgttgaactgaggagcatttctcattgtaaagattgcctttgttctgtctaaaagtctggagaaatcccaaagacttttcctatgtactaggcattttattttgattgacttacaaactcttcttaatcattatcaatctcggtttttttgtggtgcagtggaaggagaaataggtctagtttctgcctctgattagccgcacagccttgaacaaatcacatttcatctttgaacttacctctactgttagactaggcgactcacatttgaggacttttctcgggtatcttgagggtttgtgatcctgaacccttaaacagtgcttttttgttacacaggagggcttttttggggggatgaccagtacagacatgccagttagttttactagtgggatcccaaatccaaagcagtgtagtggtgattggtcagtgactaaccaggcagctaagaagtcttaggcagcagcccagacatgtatagaggggcagttagagggagaacaggggtgggaaagggagcaaggggcagatagctcagcaaggaaagaatgggctcagaaaaaggagggctggctggaggagtgaggggcagcttaagtttggggagggtagaaacgccgtttccttgggaactggagtgcagtatgagctgggtgtcacttggctctgaacatactggctttgctgtaatgcttgaaaaggcgttggtatcttcattttacagttcattaacccaagtacgttttcttatttaaatgacaactttggtgctttaaaatgaggtaccactttttaaagctagctgtgtcgagttaaagaaaaaatcagcagttttttctcccagaaatgtaattgccaaacactattcatccccatcttaagttttacaaggtgatgtaatcagcttgttgtagtgatgctggccaaatggtgctcagcaggtgagaacaaaaaaaccccagatctcagtgaactaatacacagcttgagcgtttccatgtgctaatgttgcacacttactaaaaaactttggaaatggaaaataatgtattagtgcaacagttgatgtgcttctttgggcaaagatatagttttgttccacaatttgtacttaaaagcgaaagaacattgaaaacatagacttactggctgtagcaatgctggcctgttaactgataactagaacttaggttcacgtttatgtaaagtgtgtaaaacctagtagagcttgcatagtcggcactcagtaaatgtttggttccttttgccccttggtaagtttattttaccatcctcccacctgccattctgactttattaaatcaacatgtggaccagagtgttaatgagatgttattgcagaagagattgagaaaattggtatatcatgcagataacatacaaaatctttttgtaacgtaaaaaatgcagttttattattgcttgtgcctcaactgtttaagtgaatattaaagggcttggag

SEQ ID NO: 1789 - DNA, 78 bp, Homo sapiens; identical to SEQ ID NO: 1787

SEQ ID NO: 1790 - DNA, 1629 bp, Homo sapiens
cagcaggacttgctaaagcactttgcacttaatggctgttgagggccactttttttttatactgcacagtggcacaaaaaaatatcagacaagcactattttatatttaaaaattgtttcttgacaagctgacttggcacttaagtgcacttttttatgaagaaaaagtacaatgaactgcttttcctcaagcaataattgtttccaacttgtctgggaattgtgtgtctggtaactggaaggccttccactgtggcaaatggaggcttttcactgcctgtagagacaatacagtaagcatagttaaggggtgggtcagaacatgttaagataacttactgtatatgtattcccttgtattttgttaaagctggaacatttgatatttttccatttatttatgaaaaaatatgaacctattttcatttgtacaaggtaattgttttttaaagcaagtcaccttagggtggctttaattgtataagtcaagcacatgtaataaattcaaaacctgcagttaacaggatattagacatcaatcctggtaaccaaatattaaagattctctttaaaaaagactgaacatgtttacaggtttgaattaggctaaaaggtcttgcagtggcttttcatggcccttcaaattggaatggaactactgtactttgccatttttctataaatcagtatttttttttaattttgatatacattgtgtgaaaaaagaaaatggctaataaactgtattaaatcttaaacaatgtataaagattgtacttagccagttcaaagtgtatatttattcataatgaattataacagttatatttttgtgttttcttgtaaatgtttcttttcccttaaatacagataattcatttgtattgcttattttattatgagctacaacaaaaggacttcaggaacaagtaatgtattagtatggttcaagattgttgataggaactgtctcaaaaggatggtggttattttaaatataaatagctaatgggggtggtaggcctataaaattaaatgccttgtataaaatccaaaatgaatgcaaaattgttttcacttgtattgactttatgttgtatgattccaatctctgttctgtttggcacttgtatttaattcttcacctttgtaagacatttgtatattgtggatgtgttcattcaagctatttaatatctggcactgttaatacacagtactttattgtacagactgttttactgttttaattgtagttctgtgtactttttttggatggggctggcatgttttctttgtttcctggcaatacgacgtgggaatttcaatgcgttttgttgtagatgctaacgtgtcagaatcctttacattcaacttttctaagaaaagcattttcagtcttgtagtgtgtgcttacagtaactaattttgttgaaaatggtttcaagttattcaaatttgtacaggactgtaaagatttgttgacagcaaaatgttgaagaaaaaagcttatagaataaaagctataaagtatatattaggatctgcaaacaatgaagaattatgtaatatattgtacaaatgtaagcaaaggctctgaaataaaatgccatagtttgtgaatccttg

SEQ ID NO: 1791 - DNA, 274 bp, Homo sapiens
cagggacttgaattagcagagtctaaaatcagggcaggcaaacgataatctgagtgcaagtctgaggagtcccagggtttagcagtagactgtatggtctttcaagagagttccagactggcactttcacccagaaccaatgcggtgtttcttaatgtttgcacaaatttccttaaaaatcaacttgtactgtagcataagaaaagtttttatttatctattggaagattatcagaaaaataccaagttattttataaaagaaaaaatatttct

SEQ ID NO: 1792 - DNA, 4424 bp, Homo sapiens
ctccgtgtgtgatgaaaacgcctccttttctgaccttcaaagtcccctgtagagaccatgcatgctctaagccttagggagtgagaccaacacccatccctgcccagccaacagtggccggggcttgtcttatgtttccatctgttttcttcgtggcattcaatttcatttttttccttttcattttcatgttattttcattattggcaaagaaaatcaaaatgtttatagccaaataacaaatgtgccatgtaaaagtaagtctggacttaagagtttaaaatttttaaacatcagtttccaagtttatatcatattaatacatttcagtggataatttattttaaaaaaaaaactatgcctaaatatcccttatttgcaatattcagtatcaaattagagcattttgaccaactgaaacatataacgttttcatctcctttcctggagaaagcagctgcagaggttctgtatttcctgcatttccatcatcctagtaaaaagacaacaacccacaggattggaatggttttcttttgttttttttttgttgttgttgttgttttgagatggagtctcgctctgtcacccaggctggagtgcaatggcgtgacctcagctcactgcgacctccacctcctgggttcaagcgattctcctgcctcagcctcctgagtagctgggatcataggcacgcgccaccacacccagctaattttttgtatttttagtaaagacggggtttcaccatgttggtcaggctggtctcaaactcctgacctcgtgatccacccgcctcggcctcccaaagcgctgggattacaggcgtgagccaccacacccggccgtggaatggttttcttagcatatcctcctggggccgtggcgccccggctgtgggccgtggtggatgtcccttgtttcagtggtcctacaaaggtagatggtgggcggacaccgaagtcaacttgactgtaaaagtaccccataccgttgacgcgctgtggcagacctgtgggtgcggtctcccctctccaaatgccacctcttcctgctccctcctcttttggctcctactcagtagttccattgtgggctgcagtaatataaggacctgttctggacacagcactgggcccgctggggttttagtagggcagccccttccctgcaggagtgaggcatggtgacagcagtcccctatgtgcccccaagtcatctgagcattggtgtgcattaaggtactcaatcttccaacaataaataccataagtgcatgtctgttttattttatttatttatctttttgagacagagtcttgctctgtcgcccgggctggaatgcaatggcacaatctcagctcaccgcaacctccactcgcaggttcaagtgatcctcatgtctcagcctccctagtagctgggatgacaagcacacgccaacatgcctggctcatttttgtatttttagtagagacggggtttcaccatgtcggccaggctggtctccaactactggcctcgagtgatctgcccaccttggcctcccaaagtgctgggattgcaggtgtgagccagtgcacccggccgtatgtcttagagtgaggggaaactgaggcacaaagcgtttatgtagtttgcccaaggttacacatggtaagcagaaaaactgggatttgagggcaggcagcccggccccagagttcccttagccccctgaactgtgctaccttccaggtctacctgtttgcaggtagggagacccacaaactatcataactgcacaccgtgaagcaaacacctttgttgcagtaacccgtggcacacttcacttcccacattctccaggaggaagccgtattctggtagtttaaggaaggtgattcatggatgccccaaggaaaggctagacatcgatgaattagctcttggattgtctaagatcaacctgaaggtcctacctaaaccaaactcatatgatcccgatgaaagaggagaatacacagtgggagcagagctctttgtgtaagtttgttctattctgtttatttggaaactgcctctctccctagttctgaaagagacttgctgtgtgatagagaacaggccatttgtgcctgaaatgttctaacctgcaaattgggtttaatggtaattatcctgcctttctgtctgggaggaaacagagatgctacatagatgaaagctctgattatcatttaaaacaaataaatgtactaaatgccgtggtataatatagggaagaatggatgacttcaaagagaccatggttccgttggaggcataaaattgcctgcaaagaggcaaatgtaatttccagaccaattaatgacttgctgccctcgtaaatggatttaggacatctttgttccttgcttcttttgttaaaactcattcttagtttcattatcagctcactaataataccagtgttgttaagatgctcaaactagagcagaattgtatgctggatgtgacgctaggacctcagatcctttgatagtgcagttatgaccaggatctctttattctgtgcttcacgtcaacatcattaacccgatgaagcgaagcacaagtcataaaggcacatcagagaagccgagaaagcggggccgtacagagagcatcaaaatcaggtcagaaaaatgctgctttcctcttccaccaaaccttctccctgttgtttttacatgccccgtccctccagattcagcctccgttttgttctctctccttttccttttcctcctctcttccttaccttcccctgtgagatgcttttctgtccttttactgcacctcttccagacctatggcatttggggacgggtcacccttcctagagtgatcctgaatccagctgcctcttctttttttgtttttgtttttgtttttgagacagagtctctttctgtcgtccaggctggagtgcagtagcgcaatcttggctcactgcaacctctgcctcctgggttcaagcgattcttgtgcctcaacctcacgaggagctgggattgcaggcgcccgccaccacacccggctaatttttgtatttttagtagagacggagtttcaccatgttggccacgctggtcttgaagcccagacctcaagtgatccgcccgccttggcctcccaaagtgctgggattacaggcatgagccaccgcgcctggcctagttccctcttcttagatggagatttctgcacatgagctgtgagatccacagacatgtcactgagctcccccactctgtcagtggaagatgaatggaataaagcctgcttgcattgtggagtgcagctgtggggacagttgtcatttttgtgttttcagcttaactgtccagcatctcccctcccttcctacagcagggacatcatgccttagatataaacttagtggtgtgcagtacccaccgtggaagctgaagaagggaagtatttcctgtctctcaggcacaccccgcttccagccccataccagtcgggaagtggtcattgacctggggtggactacctggacccttgcttggggctatgagcctggagaatgtgacacaaatgaagggatgctgagactcatttcaaggaagccaccgtggtccggggttggtagtcatacagcaaggcaggtgggtagggctggcaggctgcagggatggtgtgtccactggtagcaatgtccagggatggcagcgtcctgggaatgtcatttctgctccactccttggactcgctgagctgtctccgcctccacctatcttcctacagacctcccttctagttttctgtcaattctttgagccagcaaactccatccagtacattctttcttctttcatgaaagagcttgagttggatgtaaatatatatgacctaacaattccacccctaggtgtataccctacagaaatgtgtacatgtgttcatccagagacatgctctaaatcttcacaaaaacactctccataataaccccgaacaggaaagcaccccaatgcccatgttggctggataagcacattagggtatattcacacgatggaatcccagactgcaatgggaatgagctgcaactccacccccaacttggagtgtattcaccaaccctagtgttgaacgagataaggcaaaaatgcaccataggattccatttatataaagtttaaaacccagcaaaattcatccatgcggttgcaagtagagatcagtcctaagaagacagtaaccagaagcgggcatgaggtggtgcttctggggtgttctgtttcttgatctggttgccggttacctgggtgctttccgtttgtgaacattcttggagctgtacacttttgatctgggcacttttctgtgtgtatgttatacttcaataaaaagttgggctttgtgactagcaa

SEQ ID NO: 1793 - DNA, 1892 bp, Homo sapiens
atgcgaatgaacttcacgttctccaaagcactttaactccaaactagatttgttgacttcaccagttttaggaggttgaacctaaagaaatggatgactggacaaaccatccaaataatgataaagtctattcatctgcacaaaattctgaagagtcacatgatcctaagaggaaagttctgttctattttagtgataatctggaagattgtgtcaatatgcactagccaacaagttttaagcctcgcatggtacattaaaatgatattcttaaaattttttcccaccaaggtattccaaagaaaatattaaggtctcccctttttctatgattccaaaaggaccagtagaatttaaattggttggttgattgtttatataaaacacactaaaattatattttaaaagtttactgccatgaaatactcctcccaccacacacacatgctccaaaagaggaaagaaaaaaagataatttttaggacttgataattgctttctttgagaagcaaattattcagtaggtgcctctgtaccaaatattttatggaatatctaaatactaaaataaactatgaatgaatctcaaaattaggcagtttttgccagttgctttcttagctcaaaggagaaccagaatttttttgacagccacaaacaagaatacaggtatcttggatttcagacacattctgtttcttcataaaaattttacttaaaatctgtaacgctagatattgactatccttagttgagtcactgaggtttaaacacaatggtaagtcttaaagtctgctatttacagagcattgaatctgtaccaatttgcaatagaaagccttcagtatgcaagaagtttgcatgggtattaagaacacagcctaaataaggcatttgatctaatctgcaggaagaattttcttccccaaaacagaattataaaagcttactttaaacaggaggcagaataattcttttaggaaaccatttcattctgtttctactaacctataccatctgagaattctaggaagaataataaaatctcgtgtattccacagcaaacttacataccataaagacagaattcctaaacatcttggagccgtctgtctctcccatatgatggctgtctgtatatttttacttggggtgctgctttattggctttgaaaacactgtcagataagctcagtaatatgttaccatgggataaaaatatgtatccctgcctaagaataacttgtgcatttgttatggaaatttaattcatatggtgtttacagtactacttttgtaacttccagactttctaaaacattctgcttaaaaaccatataaaatataattccaaagtctctgctgtcaagatagattcgagagaaagcacgtggccatgtatgctttaaccttaaactgcatacacatgtagtgatacctaggctgcatttagatcaccgtgtgctcaggccaggtgtgaatcctgaggtccatggaggtgcagagatgagattactcctattcacgttgaagtgatttgctttgttaacaaaaaattgcagctattgtctagctttcatttttttactgagaactttaaattagtcccctattagaatagggttgctactcatctttttttaaaaaccgaatttcatcatttatctaaagagaaaatatgcagaataactggtcttgttaagagtgcaatattatatttttatgtaaaaataaaaattaatttggggggattatttattcagcatgaaacctaatatgtatatgtttgaaatacttcataatgtgcatgttgtagcaaacatttctgtaaattatcacaagctctgttacctttatatacactgcctcttcaatttggaaataaatttcat

SEQ ID NO: 1794 - DNA, 2026 bp, Homo sapiens
agacaagagtgccttatttcctttccaagtatttcacagcaacactctacttgaagcaacttggtccagattgaaaagtgtcctctggctgagtggccactaggcccagacccagcccagcctgagccccaacaacttttccctcactgttccccaaaacatgcaccctggacttctctaatagaaaagtctccacccctacacaaggacagaaccctccacccctacccccaaccctcagacagacttatacacccctgagtgaggattacatgcccatcccagtgtcctaggaccttttcccaatactagccccccagtggtgaacagaacctcccaaatttgagttgcacccttccctgtggccttatgagctcagcctcgctttgaggtacccaccgtcctgtcagctccttgacctatgagccggggcctgactaggaaaagttgggagttaaggaggaaattagcattccttaatgttttgttttggtgctctgaatttcttctttattatagtcctatagttttactcctcagttcctcaccatcatcatcttgtctaagacccccattataatattcatgcgctgctttttcatcaaaacctaccctgtcctagagatctatgggcatttggtggatgataatgagcagcccctcccagatagaatgtcaatatttgagcagtaggatattggcatttgttagttaaaggcttaaatcaaaagaatgtccaatggtaggaatttcaaggtgtaggtcagatatttgagaataggggatttttttgatgtgccttaaattataccaaagattactaattattcctctttgcccaaaatacttgcatccaaggttctagtctctgttgctgtgctggtctttagccccactgcttgcactgatgtccctccttttcacggagacctatctgaggtacaggatggggctggcaccagatgatgtcccaccacagtccctcacctccggcctccacatgacagaaccaatttacactcaaccatgacctcacccctccttggtttctccctcgatctgtggccctttttggatgtattcttatctaacaacacaatccggaaagactgaattgaatatttatactaatggttcatatcctttattgctcaatgatctaattaaagggatcattgccacatttcatgtttatatttctacaatttgtttagaaaacatctcctgaccatatcagtagctcgtgttatctttttatcaactgcttcccagagtcctaaaacaatagaaattttggattgaaaagttcagcataaggagtttgagtcagtaaaggatgggataaaggagtcgagatgattcaatgaaaagtatcacaaaaaagagattgatcaacaagagaaataaaaaagcccaagaggaagtggtaggggaaggaatttaagaacagcaataagtaaaactcttaagtaactccaaaaagaaaatggtacattttgccaaagaccacttatacttgagaacatggaagaatttgcctgatactctctttggggaaaagagtctctcctcttttcctcaaaccccagtacactcagcctctctgccccaccttctcctgactttgtcctcacttgcttctgcagtacattggaacctgaattgaaagaaagtcttccttgaataattggagtttgtcttgagaggcaaatatagccccaagaatcacaagattcgaggaccatgtaggtcttttacgtagcccaaatccataaattagtctcactttttgtatttatcgtttcatattaaaccctctatatcaaatgttcatcatgattttgtatgatttttataactattttattcattttattagatttattctaaaattttttaatggtaaattcttaaactgtggaaaccactgaaggtgcttattaactgttctcccagatttgtacaagtattggatgattccttgagtttacagctgtacaaatagtgtggaaaataaacttttttt

SEQ ID NO: 1795 - DNA, 1355 bp, Homo sapiens
taaaggcttttatgtgtctaactagagacataaagtgactgtggaaagccttttaattatggacattcatcagaaagacactaatctgacttcaagaattctgaactattaaatagaaaatttaaatgctcacttgaatatttatgattcttaatagattattatcaactagagatatttataaatgaagtatatacttttaaaacatgtaagttatactaattttgtgtttaatttcatatgttttcatgtaatgaaaattctattttttttagaattggttttgtttttattctattatcctttatttccagttgtcaaactttaaatggctatgtctgcattctaataacactgttcagtctgttatggaaaaggagaactagggaacaaatgttgctcagggctggtgtcagtgagaaaaatttatcaatgctttttaatgtgtttttacccttgcctcactgtgtgtgtgtcactttctataatataaagaaatactataatatttctagaatctggaactgtcaccatgatgaatggccctttcaatgcatagttacagaaattcctgaagattccccaggacttcaatttcattggtttttatttgcagtttttagttgctgtaattgttgctgtttccagtctaaaggacctcctttggtaaaggtgaacaagacctctcccctatgctacccagccagattttgtgtgtgtaatgggctggcccaagagtgttcttttacttagaactccttttgattttgcttttctctgcccctagaaattttagggacaaagacattttggaaattgtcagttacttttagaaagaaaacactgcagaaatatttaacagattacttcttgataaaatttaaatgggattatatgaatttataatgccaattgaaaatattatatacacaaaatttgctattttcacttaaagtaagcatttttaaaggatttattttagaatacaatctatgcaatcctcgaactcagtgtgcttttccctgacaggatatataaaaaggtagattaggtcaaccctcctttaagcttactctcccctcaccttttcttttcactgtatataaacggtactttctgtgattcataccaacagaggactttctgtgattcataccaacagtcctaaactgtcattttctaaatctgggatttaaaatctttagacaatatttaaaatcttgattttttttaaatgtcagcagatacaatttggaagattgcatctgtgtagaagtaatgcaggtacaagatctagagtttttccttagactctttagtcttttctgaattaaagaataagtgctcttaaatcc

SEQ ID NO: 1796 - DNA, 231 bp, Homo sapiens
gactttctgtggtgtttcatactctactcagagttcacactcatatttcatatttttatttttgggtgttgggtgccatgttacttttggtgccttaatacacctacttggattacttacaaatgttttatcacttctttacaaaatccccacctggcttgtgctgccacataagcctctcctgcctatcgtatagagctgcagaaagagtaaatgatacacggtattttt

SEQ ID NO: 1797 - DNA, 11 bp, Homo sapiens
aaccagagtgt

SEQ ID NO: 1798 - DNA, 3394 bp, Homo sapiens
gcgccgggccggacgcagctcagccccgcgcgcgcccggccgctgggtggcgccgccgccgcctctgtccctgccctccgagcccactgtcacgctgcctggtgttccccctcagcagcaagcacttctcttagggctgacggtgtccttgtcacagacgtggatcgcaagtggagcttttgctgatgtgttcctgaccgaccccgggtcccacctgtgccccctaaaccaggcggtggatcaggcccgaaggaaaatgctggaaaaccaccaccgccacccagcagtcagagaggacctttcgaggtgatgcactgtaaatccggcattgatgtttccaccatgtggaaaagcaaggatttccctggccccgccctgcactccagctcgcccctttcccgcgcgaagtgaaggatgcgtcacttttctgagcggcccctcagacctctcctgctggtccctggacctctggctgggagcgctcattcttgtgactggcaggctgccctcggtcgctgctgtgatgaggatatgtgcaacctccataaatatgtcggtggacggggcgtctcctaataaacctgataccaagaagacaacttgagccacttggatcccgaagtgggcttcccgggaaacctcgagcagagcaggctacacaatcccccatcctcaagtccccaccgcctcttcttcctcactgtccccgccccctatttgtggactaaagatgaactctggtgtgcatgctattattgctgcaattagaatattatcacacacaaaggtctctatattaacgctggttttataagtgaccgtatattgtaaagagctgttaaaaagtattatagacctattcatgtattatttcacatgttttgactctggcttgcagcaccattcggagtaaggatgacagcaggcccagaaggtgtcttactcagaaaaaaaaatgcctggtcagcaattcactgtcatgcacctatttttagattgggcagggagatgggaggagtcgtgatttttactttgaatactatttcactgacgttactaagcattgcagcacaatgtagaaattggcttgggatggataggtatagggaagggcattcgttgggaaattgatgaccggaaactagaaagcccctataatgtggaatatgcatatgtggggtgaaaccgtatactactttcactgccatgacactaggcaaaaaatatttcctgttaaaagaaagagaaaaagagagggatattgaaaaatataaggagttgagtcgctttgtggtatagaagggagtaaggaataaaagatatagaatagtaatctagttgaactgttctgcacaaaacatgcttccttttcaaagaatagacttcaaaagggacgaacaaacattaggtcaccttttgtgtttataatgaattgttgacgtttccatgctgtggtctcttgatatacggaagtagacgtaacttattttccagcgaaattatatacttcttctgggctcctttgctcagttgccccaggaaggcttccctgtgagtaatgcttatggaatctgacaaatgtgaatgagctgccattggtgggaatcagtaaactttgaaaacctttcactgatgattccctggtaagtgctcctgtgaggggccacttccctagtatgtgagagagaccctctgcaagccgctgtggggacttagcttcctgatactaggtagtgatggtggatctagagacattcacttgaagagcaaggattggggtggggtgggttggtgaatctatctcaggccactgcactgcaaggtgcatttctgtcatttctgcaacaccatgagacctgagcaagaatgtgctgtggcagagggggtcttggtttcataaatgggtatatacagcctgaactcaggaggcagaaatcaaaagaaatccttgagggctggaacctgaggatagagcgaaaatggagagaagggtgttcaaggtcaggagtgatttttgcatttggtggaaaacctcaagtcagactcagtggcagaacatgcagcagaaaagctgtgaaggaaggaaatttacgtgattgtaatggaggctaggggtggattgggaggtgagtggaggagagtctctgaccagctgcagagccaacccctatcattttattaacatggaacccacacagataggggagggattaagctaagaacttacagaatgcaaacacgagcacactctcttcgaacccaattgtgggtgtagcaatgaaagcaatatgatatgctgcagtgtgaagctccttctggggttatcgtatgtacaaagtttaccttataatggctcaaattgtatttaatttttttgttttgtttataaatgaagaaaagctataagtataatgtaattattttataggtatactattaaattatagaacaaataaagataatctaggattatatgtgatcccggtgtgacgtgccataaaagtggaatttttgacttgttgcagtgagctgtgaagcagcactatgcgttcagagagtttttgttcaaccatggtgagttcaacctctagcttatgtcacatgatctcctttggggtctggaatcttctaagagaaatagaatcaggcatccaaggagcagaagtgatggaggtggccctcaatcctggtctttggaagcttccaagcctcttccacatcccctgccagctgaagacagagtattctcactgtgctggctgaaggagaaacactaaacaaggaaaccttgagaaactgcagcaatggaagtccactgttagtctctccgttagcaccagggacacacttgttctgagttttgttcattttcacatttactcctcatgagttccaacatttcttaatttaaatatttcttagtttatagcatctccatttttctattaattgacttaatctgccatttaagaaaactccgtaatcaataaaaaataaaatccacaatcaaactgcacatggttgatccactgtgtaggcttcaaaggaattaaactcaacttcctaggaaataattcatcttagtttattaaatgggacagaatatttcactgctaacgtattctaactcacttgtttttgaaattggccagatgatttttaagttataaagtcaatgaaaatgacttttgctattgtgtgaacaacttagaatgtatatattcccagaaggcttatttaatgattgacctatcaccactgattattaatgtctgcatgaatgataacaataagaccaagtcatcaataatgcaatgaaaattttttaagtgaaagcaagtttattaagaaagtaaaggaataaagaatgcctacttcataggcagagcagcct

SEQ ID NO: 1799 - DNA, 592 bp, Homo sapiens
acggatcatcttgtagcatgaatgcagactggagtcactgcacacactttgtagctcaatgttgtgacctggagcagaggacattagaacaagatgttgcatgagcaaaggacctaaattgttatttttgtgtgtacattccatctccaatggactcttccgtctcaatgcctccattccaaactgttgtctgctttctttctccttctactatgctggatctgtgtctcttcctttttaacaagttcaagtgaagtaaaaccttttctttttttccttctttctctctctctctctctcaaagcttcagttagacacacagttcactgaaaattcagtcagtcaaaaactggaagaactgtaaaagaaaaaagtatatatcaataagtatacatgtggcttcacatttattaaacaataaattccgcacagaaagtttcatttcaccaatgtgtcacagtcagaaacaaactcatgtcttcgtctgttgtctgtacattctccgttaatgtttctcgcatttatttttataccatatttaaagaagaaacaccttttactccaaatgtattaaagttgatcccttctctgt

SEQ ID NO: 1800 - DNA, 222 bp, Homo sapiens
tttacataaatttataatgaaaataaacatgtataaaatttaaaaaaacagactcccatttcttaaaaacggataagtttgaaaggaaactgctattgaacttaagcatctctagcagagcaatttgatcagtatataaaaccctaggatgtgctaggtctaagatggattaaacaagtataaaataaaatacatttataaaataaaaaggaaaacagactt

SEQ ID NO: 1801 - DNA, 1278 bp, Homo sapiens
gaatgaagaatggcaacgaaagatggggccttaaattggatgccacttttggactttcatcataagaagtgtctggaatacccgttctatgtaatatcaacagaaccttgtggtccagcaggaaatccgaattgcccatatgctcttgggcctcaggaagaggttgaacaaaaacaaattcttttaattcaacgggtgctttacataatgaaaaaaccacttgtggcacacgatgggcatctaacatcatcatcttctaatgtgttggagattttcatttcaaatatattttttaaattactctattttccaaaacacgtaatgcatttttctcgaaaataccttactgtaaaaataactgtcgcgtacacatgtgtgaagtagctagaacatactgaattttttttgtactgttggactctattcagtgtcatgtcctatatctgatcaagttatcaaggagataattctagaatgaaaaagaaaatcctcttgttggaaacaaaagacgttttatatgtgcagtatgacaaagaggagtttcagagacaactttgaatccttgtcagcctggagaccagcaccagaggaatctacaaggcaaactcccatatatttgcttcccccaaattgctgcccctacagactcaaagctctttttctttgttttgttgtttctctaaaaatttactgttctttgtcgatgctatataagccagggagttctaagacgccagctctttgagatttgctcattcccctgtatttcccacatatatattacatatacccgctaataaatttatgtttgtttttctcttgtcaatctgtcttttgttataggggccccagccaaggaacctaaagtgggtagaaggaaaaattattttttctttccctacaaactgaacatggattattagaactcaaggttttcattgacaatatagaaaagaaacactgaatcattttattttattgcccaatttttatttcttatatgactctagtgtttcatcttcataattaatcatgtttgaaggatttctgagtgactcagcagcctgttaaagaaggatgaaccaaagaaaacatttcactaaatgtgcttttaaaaatcaagtgtattgctggttctgctgcagtatgtagtcgaagaataaattagtaaattgcttctgagggtctgaaattgaataaagtaatggctttgtatttctataaaagttgtctccccttgtttcctttccattctggcacatgtagacatttaattta

SEQ ID NO: 1802 - DNA, 4929 bp, Homo sapiens
aaaagagcaatctcgaaatgctgttttggacctccttcatggcatcagaattttctcatttaaaggacagtttcccatatgagtaattagaagtggttatatatgatgaatgctatgcagatgttgtctttaactctcagacattcagcattgaatatctttgttaacctatcaatgagtgatttattgattattgaacattttgtttagaatgggctatatgacccagaatcttaaaacagagttagctttattttagtattgggtatatatgtaagggttccatattagcaactcagcttaaaggtaatgtatttgctaatgatcttcagattttatctttgtctacagaacaattagtaatacccaagtaatattttaattacttttgcagctgttacagttgctgcggcctgttcgaatagtgaaacatacacaaatggtaaattatgtggatcttttgcatataatataaatgtatagacatggtggtaggaatagcaactaatacaaatgccaatatgataataaaatacatttgtctataatcgtttaaagattagctttgcatgatcctttatgcactgtgaaggtctgaagtttataatactcacttgacccttgtaactgatgaggcaatgatgccaccacagtattctaatttacaaaaagaattggagttcaattagtggttgtaaagctcattttggggaggttgattgcaaaggaaatttgaaagataagatttattcttatttaatacttcagaaaatttctgcagagccctgccctggcacttaaaatagcttccaataagtaacttagaccaaaaggaaaaatgaagtgccccaggagaagatacttcagaagggctgttctgaaattcctaaggaggaattcttaggaattcctaaggagaaacagagtgaggcctttttaacctgagattacagatacttataaaaccctctataaatagattacccaaggtttttcagtgagaatgaaacataccaccttgttggctctaccactttaattaatatcactataacataactgataggaatgaatcaaaggaggatttaccatgccctttcggttgtgtcccacttaacaaattgtgaagtaacaattttctgtaatctctcttgcctcttagctgttatccagagtatagaaactttttttctcccagagccacccaacgtcataaaactggtagtactctaatggtgaaaacctgtggagctgtcagaagacatgaacttgcttttcctctagtccagtttccattcttcagtcagagtatgatgatccctgtgacagtttttgctctgaaatagtatttatcatgtgtttggtacctagtattatgctttctcatgacagtttctcaacaatcctgtgaggcaaattcgcatgtaccctctgtattagtgtgttctcatgctgttgataaagacacacctgagatggtaatttgtaaagaaaaaggtttaatggactcacagttccatgtggctggggaggcctcacaatcatggtggaaggtgaaaggcacgtcttacatggcggtggacaagagagaatgagaactaagtgaaaagggaaacccttttaaaaccatcagatatcgtgagacttatttactaccatgagaacagtatgggggaaacaactccatgattcagttatctcccaccaggttcctcccacaacacgtgggaattataggagctacaattcaagatgagatttgagtgggaacacagccaaaccatatcaccttcaaagaagaaataagagaattattagtaatttgctcagaatctggtatgtggaagagccaacatggggacccagccttttgtgattctaaaacctttgatctttctactaacattcactgttagagagtgtaggcgctgcaggagaaagagaaagtgcccacgaaaattagtctagcattgccgggggtaaaaagcacacactggtcctgcagcttattgaatcagagaaatgtgaagataagatgaactaaacaaacatattttagagcatggatctcgaagcagaatttggctaaattttaacaaaatgttcttcagtaacacatctcatgatctgaagattgtgttacaaaaaatattatcaggccaaaatttgttcggaatacactaatttttgctcctctatatgtgaggaaaatgagactagacagatttaagtaattgacaacttacttaaagtagcaaagtcatggattgtattgacttttaaaaatatagtaaaagtcatatttaaactttatcctaaagtttaaatctaacagaacaactgaaatacttgaaatagacctataaaatagtaattaaaatgagaaatacataagatgataaataaaatgaaggtgaaggtattccagatctaccgaaaagattttcagtatcacagattattcataagaaattgagaaaaggaacaatcagaagttgcaaaagatggtatagccgaatataatggaaataggaaaaattagtcgaaaataaaggttgatttagaaatgaagaaaatgaatatatttcttaatacaaaataagtgggaaatgagaagttataccaataaaaagcatttaaaaatttaggggatattgtaacccagtataattttctgacaggttggactttgaccctaatggacttactggtgaactttttcaaatgtttaaataatgtctatccatgtatcatgaaggacagtatgcttcaaattgtcttttgaggcagacatgttctcagtactaaaagacatttttagaaggattttattctcaacagatgcaaaatgcaaaataaaatattggcaaacaatacagcaacaaataatttactatcactcaggattataaggctggtgttaagcagaacagccattaaatcagcatcaaaagaacaaatagtaaaatccaaagtattaattacagataacttttcaaaaattcatcattcacccttgatttaattatttctctggcaatgatttaatagacttctcggagtctgttaagtacttaaaccaagaactaccattattcctactgggaaaacataaacatttctcaagtggaaagtaaacagtgttggcactatttttatatatggttaaagagacctgtcattgcaataaaagccagcattcacaaaatgaggaagataaggaaagtagcataaatattttctattaacatggctttacaactgctaaaacttatagtataaaaatgtactaacaaagactaattcaagaagttgcaggatacacaatttttaaaaatctcatttctacatcttagcagtgacaaactgcaatttaaaaagtgtgtttggttattaatatatatgagacttttaaagaaagttatataactacatagagataaattaagaaagatgcctaaatagaagcaagtttaaagagctatatttttaaacatgaacaaactcccatgggagccatgccagtgtagtggaaaagtagtacatggggagatggggagtttttttgaaaaccagaattacagttctcatttcactacttaccagttgtatactcttgggaaagtcactcctagtatctatttcaccatctacagaagagaaatacttcacagaattattgtggggattaagttagataatgtgttttaaaatataaagctacatccaaagaaatgccaatatgtgacattagtatgaaatttactacagttccatttaacattccaactggttgctgtgtggaatatggcataattgtaataaattatttaggaaagcaagcaaagatgtaagtttttttaatttagggggaaaaaatgggagccttgctctccaaatccttaaaacatgctattaagcaacctttctgaatattctgtggtgccaagtagaaagtttaactgaaattaataagccaatggaaagaaagaaatattaataactgctggtggaaagactagctagatgtcagtgtggaaagattagatccactttacatgtgatattccaaatgaattaaaatgttaagtataaaaagaaaaatactacaagtctcacaccaatagtggtataaaggaacttcatggcaattggcaaggtagatcaactaagagaaaaagttttaaatgtgtagtaaataggaaaaagacaaaacaagatggaatttaaaagaagctatttgcattacacatggatgcactcagtttttgtaaaactatatgcatatccataagggtttgtactcttaggcaaatttataaagcgatcgtgtataaatgatataaaaaatcaatttgaatggtattcaaatttcctaatattaaaaatgcaactttgacttagttcatgctattgtattagcaaaactgttttaattgcatgtgtccttatagcagcagcattgtgtattagtagccttttaagagaactgtgtagaagactataaaaagggctttataactgatcttttgacatactcactttgagtggcatatgcccaggaaaatatttaaaagaaagaaaagctatttgtacaaagttttctagcagttccactcagataactttaagggggaaaaaagcccaacgattggaaatggttaagtaaattttggtgtattgctagtgctatcacagaatgttatatagccattcaataatattgatatatgtcaaattgtatgcaaaaaagtgagattcaaaaatgttaataagaacataaattgtgtttactgatacatgtgaaaatttaggtctacattgaaaagaatcagaagataacatgtaattcagtttaacattaggggttctttatttttcttctgttaaatattgatgtatgcaataaaaaataaaagattaattggt

SEQ ID NO: 1803 - DNA, 673 bp, Homo sapiens
cccatgtcgggaaggatgtgtgctctgacagacgtgtcagatgctggcagaagggattggttttctcctgtgtatacagtggaggagtctgagaagcagggatgcctggggtgatcagctccaaccagtggcagcagagtggtggctcttcctagtttagtttttgtgctccgtgttcttgtgtccttctaagaaaaatgtgggctgctcttgaaagttatataattatcatttttttttttttgaaacagggtcttgctctattgcctaggctggagcacagtggcatgatcttggctcactgcaacctccgcctcctgggttcaagtgattcttctgcctccaccccccgagtggctggtattacaagcacatgccaccacaccaggctaatttttgtatttttagtagagacggggtttcaccatgttggccaggctggtctcgaactcctgacctcaggtgatccacccacctcggcctcccaaagtgctgggattacaggcgtgagccactgcatccagccatataaccgtattctaaataagaaatggttggcttgtgtgatggttttgtgtaatgagctagagataatattttaagtgtcttctgtggtatatgtgggagggccattaaggagtgggtttcactccctgcatgtgggcaggtgtcc

SEQ ID NO: 1804 - DNA, 884 bp, Homo sapiens
catgatgaagaaactgacaggacagctctgtatttcatatttatacataaaggacttgaggagagaaaaaacactttaatatgtctctttttttagggaaaaagcacacttataaaaaatattctctgaacaacacataatacctatctaacaatatcttagcgtcgtgtacactaaaattaagacttttgtatttgttacctctgacagagaatgtcattctggcgtagaagttagtttttacgtttgcatacaaattttaagactttcattcctgctcctttctagttttagaactttttctgctgacctacccggtcagttgttaggaagcttagcatgaggtgggctctttaacaccattctgagaactgttgatttagagaggaaggtgaggattttgccttggagaagagactgataaaaccaagtgtttattcttgtaaatcgtctccaagacctacacagtcagctaagcatgaatagcttacatctcatgccagccttcaacacccttgaaaaatatccttttctgtcttgctcattttcttcttataccataagttttatttggtatcattttctcttctcacaaaatgttcctattatatagcattttctgtattcacctcaacattacttctaactatgataacatcttttgaaaacatacaaatttttcagaatggatactaagtggaaatagcagtctttcattttcacctttcaactgaatccttttttcccctaccgaattggtatttaaaaaaaatcacagtcagcaatatgtatcctttctctcaagctcagaaaaattatgtagccacctgctaatatccagcaagctatcaagtctgcattttgggaataaagtagtttttcac

SEQ ID NO: 1805 - DNA, 2020 bp, Homo sapiens
ctttctcttgattgttgaaaaatcattacctgtggaatggctaggaatattggaagcagcatagtgttgatgtacgcaaaacaagacagcttggtcagctacaatcttggaatccctgtcttcttaattttatttatttatttttgacgtataatgtagtatatcaatcctttcaaactatttagataaccacttgatgcacaaataggaaaaagcagattgtggcagtgtcgccttttgtggttttatgattttcaaattgaatttaatgattacaccctttcccttcatagatcttttttcttttttttaagccatgctgtgacctacaagcaaactaaatagccaacatttctgaacccctaagtctcctgtgccaagctgctccctgaaatggacttcttcatctgtacagatttgttaaaccattctatttgcttcttaataataggatttatattagtactcattaccattggacacaatgacataagtactctccacagtaaagcagacctttcacaacagtcactctgtgtcctaaaattttccaacatagatgtgatttatataactttgttgatacgtaaattgtcttggggtttacggaaattaactattatgtttgcactaagatttgctgggagtggtaggtggacatatctatatatcaataaggactaaccgtcttttttgtacataggagattgataatactgtatttgttttaagcccacagtgttttactccactttcaaaaagatcaatttggcactttttttcattttttttaatggaaataagatttggtctctcattttaggttaaatgataactagaaagattaaactagacagatagtttaggtggagtatatttttaaaactcagaacatgtatattggtcctgtgttaccaagtttatatgtgacagttgaaaaagaaattcccttgaaatgatcatgaggttaaaattttcttcattaggggacttggagaaccagtagtcgtaagattagttgatagtttcactcccaagcaatgaattgcttctgtgtgtttccctgtaggactcaatagtaaatgctgtctgtcttacacatttataaggaccctgcaagacgacgacaaaggcctttggcctgtgctactaaacaagaagcctatgaaaaatttcttctttaaacttgttttttctctttccagtaagttcacatttggataattttaaaaagaaaagtaattacctttgtgtttccagaacactataattggggtgtatcttaattcagttaaatattattagtagacctggattttcccccttgaccccatcagtctataaaggttaaactgcaacttttatgaaatggtctttaatatttccacaataatcctgtgctatatttgttttaagaaacaaagtaactctatacacttcaagactttacaggattttttaaatcctgtattgttggatcaattaataaagatgcaaaaaaactttatagagatgtaaaaacaaaactataatggatctcctatttttctttaaatacaaaaaaaaaaaggtaaatgaactattctccttgtaaagctaaattccccattctgtctaataaaggaagactgaaaaaaggttttaaagaacataaatggaaagatacaaatgctttgaaggaataaacgaaatgttaaaacagggtcaatccatttgaagaaaaagttggacaaaataatcagcattgctccctcttttatttaatatttgggtactgattatatccacatggaagtagaaggtaaggagtttaggaaaatactagaatctactctgcttacattcttgtttaagtgtttacacagtttggttcaattataaacatttggccttttactatgttatttttattttgtatgaatacattatcctccttatttatttttgttacatttattacttatgttattttgttatgcatttacaactccatttttaaataaagtgtttctggaacttt

SEQ ID NO: 1806 - DNA, 2067 bp, Homo sapiens
gtctctttcattctgctacttcactgtcatcttcaatttattactgaaaatgattcctggacatcaccagtcctagctcttacacatagcaggggcaccttccgacatcccagaccagccaagggtcctcacccctcgccacctttcaccctcatgaaaacacacatacacgcaaatacactccagtttttgtttttgcatgaaattgtatctcagtctaaggtctcatgctgttgctgctactgtcttactattatagcaactttaagaagtaattttccaacctttggaagtcatgagcccaccattgttcatttgtgcaccaattatcatcttttgatcttttagtttttccctcagtgaaggctaaatgagatacactgattctaggtacattttttaactttctagaagagaaaaactaactagactaagaagatttagtttataaattcagaacaagcaattgtggaagggtggtggcgtgcatatgtaaagcacatcagatccgtgcgtgaagtaggcatatatcactaagctgtggctggaattgattaggaagcatttggtagaaggactgaacaactgttgggatatatatatatatatataattttttttttttaaattcctggtggatactgtagaagaagcccatatcacatgtggatgtcgagacttcacgggcaatcatgagcaagtgaacactgttctaccaagaactgaaggcatatgcacagtcaaggtcacttaaagggtcttatgaaacaatttgagccagagagcatctttcccctgtgcttggaaaccttttttccttcttgacatttatcacctctgatggctgaagaatgtagacaggtataatgatactgcttttcaccaaaatttctacaccaaggtaaacaggtgtttgccttatttaattttttactttcagttctacgtgaattagctttttctcagatgttgaaactttgaatgtccttttatgattttgtttatattgcagtagtatttattttttagtgatgagaattgtatgtcatgttagcaaacgcagctccaacttatataaaatagacttactgcagttacttttgacccatgtgcaaggattgtacacgctgatgagaatcatgcactttttctcctctgttaaaaaaaatgataaggctctgaaatggaatatattggttagaatttggctttgggagaagagatgctgccatttaaccccttggtactgaaaatgagaaaatccccaactatgcatgccaaggggttaatgaaacaaatagctgttgacgtttgctcatttaagaatttgaaacgttatgatgacctggcaacaaaaagtaatgaagaaaattgagacctgagtgaagataagaaatgatctttacgtggcaaaatgaacacatcttgagtatttaggaaatgggcagtgaaggctaagaacctggtgtgtttcttgggatcatggtacatttatcactgaattaagccatcagggaaaaaacaacaaaaaaagagaacacctccagcttttctttttctgtatatactcatgtcccccagattccaacatttctcactgaaagggggcatgtatgcaaacctcatctttctccttcattaatgatgatcttcagattaaaccctttggtgctaggagctgacaatttccaaagcagcctgtgaagtcctaggggctgggggccactcttgcggcaagcagaaggccatcctactccgcggagtgatcatggaaatgtattttagttaaactctgacagctcccaaacggaagactacagcatgacgtagtattatgattgcattgtatgaaagagcaagtgactttctaagtaggatgaatcatattcatatgcagatgtcttagcctcttgacgctggaagtgtggatttatagctatgaaaccactgctggcagtgggtgggccactgggactgacgggggttaaagggcattttactaaggcagctaagacatattcagacatcaacgttatccttctttttcatatttctacctgagtgaag

SEQ ID NO: 1807 - DNA, 218 bp, Homo sapiens
tcggcttcctacagccagcagcacagtcacccatggaactgttggctttggattaaatgtggaattgaacgactacccagaagtgttctggaaagaagcgagatgtgtggcctgcctcaccgtcctcacccatcaaaagcaccagcaggcacgttaactcgaattctcacaaggaaaaggccattaaagctcaaggtgcatttcaaactccaggctac

SEQ ID NO: 1808 - DNA, 4150 bp, Homo sapiens
atacccaaataaaacgaactgatacatatttctccaaaaccttcacaagaagtcgactgttttctttagtaggctaactttttaaacattccacaagaggaagtgcctgcgggttccttttttagaagctttgtgggttgattttttttcttttcttttttgtacatttttaattgcagtttaaaagtgaatcgtaagagaacctcagcattgtgcacgataagagaatgtgtcagtatttcagggttctacattttatctgtaaaatgtgacttttttttttttttatcacaacagaagtaaaatgttgctttgtacctggtgtcttttattaagaatttactccccccatttctcacagagaataacagtcgggagtcattgtcacaatataatagaaatgttagcaaccagattcatgtaaggactaagtggtcctcatgaattgcattaagactctgtactgctcatattacactccatcctctctgtagtttgctgggtagtggagggggtaagctaaatcatagtttctgacaataactgggaaggttttttcttaaaataacaatggaattggtataattgggattgaaaactaaaacttggaactaagatagagaagatggagtgtatgtagaagggctgttaaaaatgtaaaacttggttgcattatttgtggaggctcaaacttgtgaaggttaataccataatttttccatttgttctgcattttgattctgaaaagaaagctggctttgcccatttcttattaaaaaaacttgttgtaaatccagttgtctaatgggatctatatgaagttagccatgtctgtatgcccttctcccacaaaatactgtataactagtgtgcttgtagtagttaactccaccatctttgtaagctaatgaaattgtgagtcacccatttatatcttaatttttaatcatgtcagttcttgaatgggtatctccttagcctgctgatttctttttctttctaaagaaagtgggtggagaaattaatttagacgtttgtttgcaataaaaagaattcattttactcttgttttgggattctcgccatcaaggttcaaaatccctttatataactcccaagaggagaaatttattaagtgtgtgctttctggacagcttattctttactctgcatagaacatttaggttttaaaaacttaaatgtatactgacaattgatacataattatgaagtaaagttgaattcttcccttcccctcccccccagacaacttttaacatatttaatgaggggaaaaggtactggctgggagaagttaacactgagtttatcatctttacagaatgctaatgctgtcctcaactgattattttatatacatatatatgatacatgaaactctgggatcagatgcttttagaagccatcatgcaagccagtcattgatgtcactgctacacaacactgctaacttgactgtagctatgtaataacattagatcccctaattgtaattatattgggtttgcacagaacactttaatcttcccctcaccaatgtgaagtgaggaatcaggagtcaaactgtagaactaaaatttgacttcagtctagcgtttccttggtgtttttaggttgctttggtaagtttaggtttgctatatttctgattgcttagaattttgttttagccctttaaaatcagatcataaatatgaattcatacttctaaggaattttcttgctataagctggagtttaggtgatgtataggttcagttgagacatttttggaacaggcaaatccttagttaacataagatatttaacagttgaagatagtgtcatggatttttatcttttttagcaagtaatgctaagaaccactggcctgagctactactcttcagtatacattattaggattgcatagacttactagaggaacagtttcaggttttgatgctaatcagtgttgtgtcctaaagttgtcctttgtgcctttaaaaagttttggatatatcttctagtttaaaattgcttattaaggaattcattttataattgcagtgggaaagtaatggtcaagtaacactaggtagactatcatgcctgtttagcccagagaatttggggggagagagaatagataaaaatggcacccagaaaaatgttaaaatctttagtcaagactagaattaatacaattgtctacacttgtatggcagaaataaccttataaagtgtttaaggaattcagagaagggaatgtaccaaataagcaacagggagaaaattaggtaagaagtaagatacgaacgagaaacctgatttattgctcatccttcccttgcctccctaatggcaagcaaaactctgaacatctgaaaaggatgtagttctggacaaatcctgactacccagaggaaactcactgtgagattgctgttgatttgaagggtgctttcactaaggttatattttaaagtagaataacacatgctgagtgtaaactggctttggattggtcagctgcagtagtacaaaaacagcatagaatttgagaaaactaaaactgctatgagatagctatgagaaaactaaaactgctatgagatagaaatgatgtaaaattatgtggaaagttttccctcatatactcacatacagcctttgaagggctctggctctgaccggttgatggccttgagcgagatgaaatcatgaaattgagtcaaatcaatttgacattgaaatgacaagaggaaactcttaaatacataaaaacaagctctcatttgcctaggatagatactgtcttaaaaataaagactgaacctagatgttctgagcactagcaacaaggtattttaacaagtttaaaggaattctctgaaaaagttataaaattattctaggaaacataaccataatagtgttttaagggactttcacctggggattttatattcatgaacagagtgtattctgtatttaaaatgtctcatttgtgggaattggatgacatgttttttgataaatttattcacaatataaattgactttttattctaggaccatgtgaataatgggttccattgcacaaatacaaatattttaatagcttcttaggcagtggtgtagacatcttggatataaataattgtagatcttgtatatttgatttttaaaaaactagaataaacagagaggcataaacatatcttagagtccaagtggtagtgtttagcattggatataataaatggatgttttacaaagtgtttccataattctcttcctatacataaatgtcttgttttcaaaagtggatggaacttggctgggtgtggtggctcacgcctgtaatcctagcactttgggaggccaaggcgggaggatcacttgagctcaggagtttgagaccatcctgggcaacatagtgagacctggtctcttgaaaaaaaaaaagtggatggaacttgtagcagagaattttatctacttctcaacctgcttcagaatacccatttgagatgttcccctggaaagatgaacacaatactgcatctgaagccatttcttcccacctaacattcttaaaatgattagagtctaaactttgtcattcattcctaattctggagctctgaggttgaggtgttcagagtttggtgaataattgggtttaagttttaacattttagtaataataaaagcaaacacatacatgttaaggcctgacaataggttgcaatacccatgcattgggactcatacccagcataaatggtgagggactgaacattagtgctttgagcaagaattggttaactacctgagatctctaaaacagtaatttgaattactaatacataaaccacaagtctcttcgaattgttaattgcctaaatttaccctaaaacttagttaacgctgcagtgcctttattaaagcttttttttgggggggggtgtgggcacagctactccataactttaaattttaaagcatgaaggtgatctagctagtgttagtgcttgagttggtagttacataggctgctcttgaatcgtcctgttttctttgcctagtattagcaccacaggtacatatttgtaaaataagcattaaaagtactttgtccagc

SEQ ID NO: 1809 - DNA, 1091 bp, Homo sapiens
tgattgccagtaatgcaagaaacactccttgagagggaggggaaaagactttcttaaatatttcatttatgacctgcaaattcaagaataaagacactgaagtaagtttgaagccctacagttgtttccagtcttttcagatggatgcctactgtggagattaactttggcatattccagtgtcagctttctttagctggaattgccaaatcatttgttgctcctgctgctctcatggtgccacgttttttttttcaatgtttagtaatagtataatccatgttgtttgatatcaaaagtagaattacttttaatgtagtttttcttcattattgtcattgcgtgttcttaagttttacccctattagatggtaagaacaattaatgcagttttgcacaaatatttttacattctgatcattcagttctgtcattgtaatctttgttgttagaaacaaatgatgaaaacataggggttctgtaaacttttgtaatgctatgaattctgtttaaattttgggctgtctattttctgctgaaaccatgcaaaattgagctttggtggggctgggagggggttatgtattcatgggacctttaatttgtacagaacacagaacttatttctgtcagttatttaatacattgaaaatttagtgaaatgttcaaagagaatagatgtttcccaaaacaacaatctttatgttaaaaatagtcattaaaagatctgttgtaatatatggtggatatttttctttaatttcaaacattacctctgaaatgtgtatcttttcttttttatcttaccattaattttaaatctagtggattggttttcaacatcgtgcctgccgatatgcctacagaatcatctgtaagtgtcaaaatgaacccacgttgttagccataattttgattatgcctttatttctcctttcttgaaaaaaaaaaggtgttattttgacaattaggcataacattgttttgtagattatcttttaatgaactattttaaatgttaaattaggtgccacttaaatttattttattacaccatgaatagctgattaaaagaaccaaatatttctagt

SEQ ID NO: 1810 - DNA, 220 bp, Homo sapiens
gggaacgcagtcagagggaaatacggcgtgtgtctttgttgaatgccttattgaggtcacacactctatgctttgttagctgtgtgaacctctcctattggaaattctgttccgtgtttgtgtaggtaaataaaggcagacatggtttgcaaaccacaagaatcattagttgtagagaagcacgattataataaattcaaaacatttggttgaggatgcc

SEQ ID NO: 1811 - DNA, 465 bp, Homo sapiens
caactagactgtcgtttttggtggagcggttcatttatttggaaactatgacatgaaaaccaaatttgaaaactcacatcctttcagcagaaggtaactgttcttgtcttgcacaagccaggcagatcatttctcctaagctgatatcattggcttattggatgaaacagtgtctgctattttattcacaattgaataaaatgaaaacttcaattaattgtggatttgatcagattgaattcgttttgtttcagattcctatttaaatatttcacttgtactgttgctgatttttgcatcttcttgaagagcaagagtctgtacattattaagcttagaaagtaagcaaaactgatttactggtttgcctttcagtttgttgaaatgtattgtcaagtactgtacaatgaaattgtttaaattttaatatgatttaagctttttagaaattaaaatattttaaat

SEQ ID NO: 1812 - DNA, 1704 bp, Homo sapiens
tttcttgggaagattttaatgtacacctatttgtaaagtcatcagaatagtgtggattattaaatatctagtttggaagaaaataatttatataaattattgtaaatttttatgtaaacagaaggtcttcaataagtaaagtaactccatatggagtgattgtttcagtccaggcaatttttctattttatattaagacttcatacatttatatatgtaaatatggcttattaatggaatgttaaataaaatgtatacttcacagtcgtttgtgtcttggatttttgaaagggaggggatatctgtttaaatagttttatatgctcattggtctcattttctctataattaaaatactagaccagtcttaaaatggggatgattgaagtattgatatttctttttacagttactattttataatttatgcactttgattctgtgattcagatttctaatcagaaaatgtatttttttgtttttggctgttactatgttaaaattgaattatgggcatgtcattttgccatctttgtagtttcacaaattttgtgtaatctacctcaaatgaataatccaagtattggttaactataatgttggcatctcttattcggcaagcttaaaggctctttaaagtcttaattagtcaaagactaatccaggttagattgaccggttcactgctcacttgcaaccttatcaaagggtttgacaaagggaaatgtaaaataaatctgtttatggatattgagtgcatcttgtatgtgcctaatattgataggatgagatgtctgaacaaatttttataatattgctgtgaaggagcttgctattgaaccacagaaatcccttaatattcaggttttaaaactggcaaattctcacaggacctcaggcacagattattgaggttgggagagagtgagtagatgtagaaaaggagaaaaacaacacacgccctgttctctacagtacaactgtgtgcaattaagcaatggtacttgatgtaggctctaacactcatcaataaataagtgttgtaaaataatttataacaggtaatcgatagtgtgtaatgaatggactattaataattgattatctagaaacgaactgctttcgtgggcttttaatattttaatgtgaagcatatgcagtgtgctttctgcatttatttttctaccaaataatacagataatgagaaattggtgaaaatgcctacgcaaagtgttgacagtgtgaaagcagtgcgagtgcggccttttagtcaggttagtgatggatgttacgctgccttgttgaaaatttcactgactttgattttattacttttttaatgatagttatcaaacttgtatttaagctgcttgtcatttatggaatattgaacttatttaaatgaacttgttaaatgaataaagagctaaacataattcagtaaacaattcctttgcgcaagtagcacaataaacatggatgcaacgtatgtcaagttaatacttttttaaaccaacgcaatttggtgaatatagatgtgtggtacctgtttttaataagtgtactttttttcccccctccgtgaatgtagatcataagcaaacaaattgcctgttctaaatgaactttacatatattttaaatgaatgtatgtacttacgtataaatgtctttatatagcttgaataaaaacactgctcatt

SEQ ID NO: 1813 - DNA, 1643 bp, Homo sapiens
gaaaaaccctacaattctaaacaatatggcatagtctttaatacctattcacaacttcacagcagaatatttttactgaataagagtgttacaaatgtaatgactgtcaaaaggccatttacagtctatgagcctttgagtgcactaaaatgtttaggctacgaacaatacaaatagaccggttcaacacctccacttatatcacagctcttactgtacacagaagaatttatactggagggaaaccctccagttgctcaaactgtattcaatttcaaagactttgtattggagagaaaccctacaaatgtaataaatgcagaaacaacatttgttcaaaaaatatacctcagaaaacaccagagtgttcacactaaaaactgttttacagatgcagtaaatgtgaaaaaatgtctaatcaaaaattacatcaaaacacatccaagaattcatagtaaaaagcactaagtcactgacactttcagacattactgtaaatctgagtgttggttatagagaataattcaaagttaagttaaagtaagtaggagattcaccttttggggaagttataattacatttcaagtataccttttggtgccaggcacggtggctctttcctatagttgctgcacttttggatgccgaggtcgggggattgcttgagcccaggagtttgggaccaggctgggcaacatggcaaaacctcatctctacaaaaagtaaaataaaagccaggcttggtggcacatgcctgttgtcccagctacttggaaggctcaggtgggaggattgcttgagcctggaggttgaggatgcagtgagctgctatctggcaacttcactcctgcctgggcaacagagcaagaccctttctcaataataataataacaacataataataaagtatactcggtgcactgaaagagttttagcttttttgaaaatcacatatttatgtaattcaagtcttaaatcacttgataccatgccttcatttctagtgtttatgtgaaggcatgaggcctactgttgctacatgaaagctgtgagagtttcttctatattcgggtgggtgttgttcatatccttttctttggaagattatggacattgcattgtaagcttcctgaagaaatttaactggagaggctctttgtacttgtcttataatagggttgtaagtgattcatgagataggtcttcagagtactattctgcattatatttaagaaagaaacatttgagttttacaagtcagttgtttttcctattgcacattaaggtaataaaattcagtggattttgaaatgctctttttagactgtttgaacttaatttgttttaataagacattgttttaatgtctttggaccgttgtacattaagtgatgcgtatcctaccaccaacgttaacctatctcaccttagttacggttgtaggtaacaaatggtaacaatacaatagtgggtaacatggtggaatagtatctctaatgatcccttctcccagtggcattaaacttcaaataatttgaaaaatattgttcccacacgttacaccttcattctgtttgctctttttgtaatgacagtgtcattattaaggctataataaagcctatataggattataatcaa

SEQ ID NO: 1814 - DNA, 664 bp, Homo sapiens
aaaacaacaacaacaaaacacctctgtcaatgtaagaagtgtgttaaagctttcagttattctagtttcattagaacacgtgaaaaaattaaaaactcaaattagagagaaacccaacacatgtaaggaagattagaatgtatgcaattttcctagttcccttctaaaacttagaaggacccgtcctgggaaagaacgtcataaaatacgaaaaatgtgttagaacactttattttcccagccgctttcaaatatatttttatcagtggttcattgttaaagaaggtgtctatactttagattttcagttttttgcagggaatcatggagctgagaatttcacagatactttataagccatagtacatgagcttaataggctgtgttttgtttctcatcagttaacataatttttgtctattcatttaaaaatttgttggatccctagactaagttgaaatgtatttctaatagtaggcaattttaattttcatgtagttgtttaattgttctctaattaatggaccaatgaaaaatgagttcatgtgtgtgtgtgtgtgtgtgtgtgtgtgtgtgtattctacctttttatgggaaaactacttttttgttgtaaagattttcttctgttttctttgctaataaagaattgttattaatttgc

SEQ ID NO: 1815 - DNA, 383 bp, Homo sapiens
gcccaggagttcataaccagcctggattaaaacaatgtgaaacaacctgggcaacatggtgaaaccctgtctttacaaaaaataaaataatgccgggcacggtggcttacgcctgtaatcccagcactttgggaggccgaggcgggtggatcacgaggtcaggagatcgagaccatcctggccaacacggtgaaaccccgtctctactaaaaatacaaaaaattagctgggcgtggtggcagacgcctgtggtcccagttactcgggaggctgaggcaggagaatggcatgaacccgggaggcggaacttgcagtgagccgagatcgcaccactgcacttcagcctgggtgacagagtgagactctgtctcaaaaaataagat

SEQ ID NO: 1816 - DNA, 1351 bp, Homo sapiens
acccgagtcctcccggcgccccgggcccttcgcgcgcctgccggtccccgtagcccggccctgcgcccgcccgggccccactactgcggccgagcgatccggcgtgaccgcgggacccacagggcgcccctgccccgcggctctctccacccccgcgcgctggggctgcggcgccgtgtctggcgcgaggctgggggccgagggtgcgtagtcgggggagacagccggtcctagggggccctttggccgggcgcgggggctcacgcctgtaatcccaaccactggggagactgaagcgggaggagcgcttcagtgcaggagttcgagagctggtggggaaaccagccccacaccacccggcgggtaccccgagtccggcgcagacaaaggatttagaaagagaatcacagtttaaccggcgggtccaggggaccagggcgtcggaggcttgctcgcggccccgagctctcggcctccacccaatttattggtttaccagctcttcgttcttagggcaaatgggaggggtgagaagggatgaggaaaaggattaatcaatgaaggagaactcgtgactcatttaataagatgtgtagccgtggcggtttctgtgaatttcctctagcaaaggcgtgtgtctaaactatttaagatctttaccttatccggactgaaatgcgtgggagcgggtttcaggagcagccaagatgtttgattgtactccactgcttcaagggagtgttatctccgccagcacctgtggcatgcgtaaagacatgaaggcaaaaaggagacttttctcctcagaggccgcccatggcttcccatggatgtctcacgcaggggggaccaactcatctggcattccagaaactctctttcccacatatgtccccctttttttgtctctattaattttttttttttgagatggagtctcgctctgtcgcccaggctggagtgcggtggcgcgatctcggctcactgcaagctccgcctcccgggttcacgccattctcctgcctcagcctcccgagtagctgggactacaggcacccgccaccgcgcccggctaattttttgtaattttagtagagacggggtttcaccgtgttagccaggatggtctcgatctcctcaacttgcgatccgtccgcctcggcctcccaaagtgctgggattacaggcgtgagccactgcgcccgactctattaattttttttttattaataaccgccattgctatttcgttcactgtgtctggcttctctaccaaggcgccgtcggcatctgtagactaaaaataaacagcataaacagacacaaaccaaaataaaatttgcaattgttg

SEQ ID NO: 1817 - DNA, 665 bp, Homo sapiens
aggctttaatcactacagtttttgtcaaaaacatgaacagtcacatacttgagagaaactgtgaatgtaaggtgtaggaaagtacttaattttcccagatttcctcaaatacatgaaacgaatcaaactggagataaaccctatgactataagcaataaggtaaagcattcaatttttccatttctttttgaaaacttgaaaggactcactgaagaaaatccatatgaatgtttaaaatgtggtaaggcctgcagttgttccagtggtatttgatggtataacataactcattctagagaaaaactttatgaaggtatcgaatgtgagaatgccttcatttatcctataactcactcagagacacatggtaacacatactccagattgaccttataaataaaagaatgcccaccagattgaaatcctagaaatacagaaaattctgaattttaacaattactttaaaggtcatgtgaaaactcccactggaaataaatcctgtaaatgtaaatattatggaaaaccttatggaaaataattatagtacaattctcaagaaaattcactatgtgaatgagatgttttaggagctataaataaattgaatatattggttgctcatttttgaagagagtctctagaatatagattttcacttcttttg

SEQ ID NO: 1818 - DNA, 198 bp, Homo sapiens
gcctctccgcctggggcggcctcaccctggctggtgctgccccctcaccttggtactgatcagcgcccccacccaggacataccttccccaggatagagagcacacctccctcctgtccttgctctcaggtagtgagcgttcgggtggtgccatgggagcactctccctcccccaggtaatgaaagagtggccaagtg

SEQ ID NO: 1819 - DNA, 1416 bp, Homo sapiens
agactccagtgccttctgagaaggaagatcaagtttacatcgagcaaagtgaccttggaagacagggcacttgggatgtcgtttttcttctaatattgtttgagctcaaggtagatggaaatctgaaaggagtgtgctcatgccatttccagaccaagaaaatacatttattatttgctaattatcatagttttgttcaattgcgttgttggtttttgctatatatacacatgttgactgtcatcttgttttgtaaactccttgcgttgttgttcagctgttcctcagtatccgaagcgggtggattccaggacgctccgtggataataaactttgacgacgctgagagcgcgcggggagaccggagccggcctgttccccagagcccccggagccctcccagccctcaggcctgcgcctggggtgagctgagcccgggactccgccttgcaggctccggaaccctcgctgtggctcccccgctcggcccaggccttgaagccgcggcgaacctcttcctaccctacctcggggacctggtggcagcggcggcctcccccagcctggaccccgccggccgcgggtctcccggcccaaccccaccgacccagaccaagaccgcgccgagccgccgggactcagcgccttcgggtggcggcggtaagcggggaggaaacatggcgccgcccaaatgcgcccggaggccgttaggctgtggagggcgaggaaggcggtccagaggcggccggcaggtccacgtcctgggcgaccgctctgtcgcagttgggcgagacctacctagtcctgacgggtcgtatttccaagacattttcatattctatccattgttttgtgtgcattttattacttctgtatatagaggtaacaacgctaagcttttttgagatgtctgtttcttctagatgttctgaagtacctgatacatgttaaaattagaggtagtaaaatgacacattttgtaaataactttttgttaaaattcataggaaatgttattttgtgggggggggatggcatggtgtttgtggactggttcagggaaggaggggaaaagggaggtgcagagagctctaagccagtgtgcttacagtgaggcgagattcaccattgtttcttatgattgtgcattttgttttacttatctatgtatacagtgtatctaaaggacaaacgagtcctaatttacaacagctagtctttccagatgttaaagaacttctatcaatagagtaacctatcactagagttcacctctatcaatagagtaacctcattctctgcctgatgattcaaaggcatgggaagaccaaaaccatgtggcagttcctgtttttgattttattatatatatgtatataatatgaaagtagtcattaaagtagtctttcctttcgt

SEQ ID NO: 1820 - DNA, 204 bp, Homo sapiens
gctctcctccagctttggctttgggaagccagactccagggactgaaaaggagcaacaaggagagggtctgcttgagaaatgccagatgcttggtccccaggaactaaggcgacagagtgcagggtgggggcaagactgggctgtaggggagctggactactttagtcttcctaaaggacaaaataaacagtattttatgcagg

SEQ ID NO: 1821 - DNA, 2156 bp, Homo sapiens
agctggcccttcccggagtcaccccgatgattactcttttcagacacagcggtttttgtttccaagaagccaaaattgtttagaatttgcttcccattttgcaccagcctttaaacacttttcgtgaagaaattttgcacagtagtttaaatcttttgttaatgctcctccgaagtttttcagggggtaaaagtaacatcagtggagggtattattttaaataaattttaattgagaatttgttgcattttcagcaaattttaaaacatttttaggttttacagagattttaacctttaaacaacagatctttaaaaaacaggtgaatacaagtgagtttaacaaagaaacatttagaatagatctgaatgtaagaactacagaactgtttcagaaataaaacatactaccttgatgtgacatttttttcttaaccttgttgagctggttttgttcagcttaatttactgttcaaaggcattatctgttggtcacaccagtgggtatatgattgaatttagggaacagggttgacacagcagggctagtcctgcatattttttcttaaatatttcccaattgtgtttttcattatttcttttcaatatataacttttataacaaattattagctttgatcttgtagtttaaaattgcagggaactggggtaatcttttactgagctggatcttagagaaaatgaatatttaaattttaaagtttgcacatttcatctttgtcctaacatgagtgcttgtaacaaaataaacaacaaaaacaaagccaaaaactacctttatccatatgtgaaattatagatgaggcatacgaatttgtttaatgcttcccttcccttcccacatatcatctcactgcctattatctggtgtcacctcatgtatcgtaagttaatactaaaagaagagaaagcacttaagtttcacagaagccgttatgtttgtagtaatgggtcattgcctactaatgaactccatcactgtacacagaatgaagaataatgcatgttaattttcttgtattaaagatgccgtgatttgtaaaaagtctgtattttgcggaatgtctggattaagaagcattaccaataggaatggatcgatagttgaataatgattttttatacatagatatataaaatacagccaggaaaacttaaattacttttcttttaaaatatctcacaatttatgtggtatttttaaagactgatcttagaccaagtcaaattcccatttatcatttagttattttttgaggttagagaataatttgtacatatttatttagacctttgatatttattaaagcaattactcacaatggaagtgaaagaatcaggagaaaagccttttaaaaagtattctccaggtttgtcagggtcactctaaagataaaaatgtaactaagtcttctgtgaaatatcatccatctaatcttgatgctgttgcagatggtggtgacacaagttaattgacaaactactgccaaatggtgcacaatattttgtaaaaagtacccagtagccccatttcatacaatgtacctaaattatgcagtaacttggcatcatcgttccctccttgttgctgtgtaattagtcagtgttgccacagtgtgtggcgctgatggagatgtcagaaccgagaacacttaaccttctttgattgtttttcaagttttaagacttcgatccacccctatgagagcaagtaattgtggaaatatttttggtgtaaaatcattccagagtatgtaatatttaactgatagctgcatgaaagtgagattcgtgttactttggcttttctgtctctgttgacacggttgcacatttccaagttactacagcgtgaaaactgtgtgtttaaaaaaaaacaaaattaaaaaaagagattgtggcctggttttgtaaaagttttaggtaaaattacaattgattgttttaggaatcattattaaaaattttctgcaaatcataaagctatatcgaggtgttgagcttagccactatgcacattgtaattattcattgtggctgtccagttctatgatgcattctggcattttgtaagctgctctgactagcaatatatagattcatttaatgtgttaacattggttaataaatgtattt

SEQ ID NO: 1822 - DNA, 150 bp, Homo sapiens
acccttatttctgaaaatgtaccacaggtatgatgcccgttaattcagaaggtagctgtggcacatgcagaagatgtttctgaaataagatcaaatgtgaaatggtcagctttagttttaaaaattttattaaaagtcctatgatctctc

SEQ ID NO: 1823 - DNA, 537 bp, Homo sapiens
tatccgtttggttggcgtggcttcgctagagtgttgctgtttatttcctggtttggcacagtatggtttcatgaaattggagctctgtataaactgaaaaagacaaaataagtaaagcacttgttgctttgctgaaaactatggttaaccctatataggtgtgggaaatttttgtcactgcataatattacaaatattttgagtagacagtgtttccacatttaatggagtatcagttgcttcagattttcagaactgggaagatttactggtttaactaggttgtttttgatggagaaaaaccttattttcttttgtaagagctgggagcaaacacgtttatgagtgtgtcggaatcccgtgcttaaaatacgctcttaaattattttctagtcttattttacaatgtctcattgtagtctgtcttcaactattttatccaaaataaacctccagaagaaagtagttttcatttacttagctcatgttttggtttagttatagtcgctatggatttggccaaataaaaaggcaaac

SEQ ID NO: 1824 - DNA, 2953 bp, Homo sapiens
ggacaccggcagcccttagtttcactgtttgccagcacagacctttgatgggtgcaggcttttctgcgtattaatcagccatttttgtgagagtttgaccctggaaagggtgctttgtatatgttcttttcacatagtgcccagcttgcatgaaatgtacagagaaatgtgtggtcgtattttttacttttgtcttgtatatgtatgtatattgggtcctctgggcagtagaggcaaagctcacctcccatgtagcacatgaaatgcttgtgagttgttgacattggacaggtgaacagtagggcattacatttgtgtgaattaaatgtgaacttctgtattacgttgcggcgtcggcagtcctgcgttccctggagtaactgtacgtatctgcctttgctgggaagactgtggggctgcctgtgttggctggcgaccagcaggattgctccaggattttgtgtttacctcgcgtgaagttcagcacgtgctgtcgtgtagtcagcttctactctaatttctgttacagttctgcaaaggtaacctggagtttagaagttaaaaaaaagcatgggatgttggatttgcaccatttggagtttctttaggaaagaaaagttttctgcttttttatagaaaatcatttcagtctcccgaggtctcatgctagcaaattttgaaataggattctaatcactgatttcaaatattaagcaaaatgtaaagcactttaatttatagctatggttataaacaggttttagatgtttcaaatgacttgtccactgaatgtcacttgaccttgataagaggccgcctgcacacagagcccagttaattctccgcacctcggttgtgtgcttccgaatgggctcactcccgtggtggtgtttgagagccaacaacactacctcagagacgggtctttgggaaactttgggtctcactgttgcctggctggagcactttggtttatagctggaatactgagttcagttcagaaggcaggaaagacagtcacaccgacgtgtcctgaaggtgtaggctctccacttaggcgcacaagctgacggctgcagccagcaggccccggtgacgagacacttccaggtcttgtggtggggacgcctctcagtgccagtcccgccactgctgagtgagcctggtgttcttgccttcttggaaattactgctcacctggtatctgtacgttaatgtttcttgctgagttacagttttgataaagaggctctcatttcctgtgtcttgtatattcagtcctttcaatacgtccacctggaggctcaccacttggagagacacaggaaggtaatatttacagctgtcatgtgacatccccaggtctttgtgttttgccctgttttacggtgaggtaggagggaacccatctggggaccggtaggtgcaggtgcagtaggacgtgggacttttggacccgtcctttggtgcagctcgccagggatgagaggcacctccctacttgggtcttcaggagctggtccaaggagcttcgaatctaagtcatctagaatgaccctgaaatgactgacagccccgggcccaagaaaaacccataaccacctcagatggatctgacgtggctaagggacaaacagcaaatatttcagtcattttgattttacaaataaaaaatgtgttgtgtttttgtccgacattatttcctgactgcactgttctgagaatggagtccacctggtccctctggttgattagaatctcaggtttcagctcctgctgtcctgagcgaacttgcctgatgcagggctgtgctgtgtccagatgttgctggggcctcactttttctcttggctggaggtccaattgccagagcctcccacactgcacatacaaaggtctgagcccagggcagcttctggggccactgcacaggccacctgcttgggttcctcggagtttaatttgaaagtctgggtgtcttaggatgatggttaggaacattgaaaaatggctgcaaatagccaaatcaaacttaagaaccagatctctgccagattaaacatttttgaagcttttaaaagtcaatattcctagtggccactgagttccaggcacactggtgccctttactgccacagctgctcaccttgtctggcaaactggagggacctcagaaactggactcctgcatgtccttgggggcgcagccctgtggtgctcaggcagagctctcaggagccggggcaccttgctgttcgctgctgtgtcgtcttctaatgtgagctcatccactgctgctgcagcgtggtgatcaggagtcacagacaagatcggggatggtgtgtgtgtgtgtgtgtgtgtgtgtgtgcacgtgtgtgtggctaaattaagtcatactgtcaaccacacgtgatctcgtctgaaacagtgtttggaagtgggaacagttttgtcctgtatgctgatgtgtccagaatttcatttaatgatagacggaaaatgtgtggttactgaaaactgtatatgatacagaatttcataagagccatgctgttgggcaaagcaactctttttcaaccactgctcatcagtttctgtagagacaaaaactctgtacatattttggaatctgaagaatcctatgtaaatcatttgttacttaagtctgtgaaaaacatatttctttggaggaaaatgtatgcatttataagtgttccatggaatcagtttttattgtatcgatataattgtctctaagtgttgactgtcttcattgcaatatgaaattcattaaaatgtccatgttccataattactattataaaagctttgtgttattgggagtcttattatttttatagtttttcatgttttgctttggtgaaacattgtgaatgactatataaacatcacgatgagctagaaattgaacaaatataatactggtcactcg

SEQ ID NO: 1825 - DNA, 224 bp, Homo sapiens
cccagtcccgcctgcatgtgcctgcagccaccgtggactgtctgtttttgtaacacttaagttattttatcagcactttatgcacgtattattgacattaatacctaatcggcgagtgcccatctgccccacctgctccagtgcgtgctgtctgtggagtgtgtctcatgctttcagatgtgcatatgagcagaattaattaaacatttgcctatgactccaac

SEQ ID NO: 1826 - DNA, 223 bp, Homo sapiens
catggagggcattgcatgaggtctgccagaaggccctgcgtgtggatggtgacacagaggatggctctatgctggtgactggacacatcgcctctggttaaatctctcctgcttggtgatttcagcaagctacagcaaagcccattggccagaaaggaaagacaataattttgttttttcattttgaaaaaattaaatgctctctcctaaagattcttcacct

SEQ ID NO: 1827 - DNA, 181 bp, Homo sapiens
catggagggctttgcctgatgtctaccagaagccctgtgtgtggatggtgacgcagaggacgtctctatgccggtgactggacatatcacctctacttaaatccgtcctgtttagcgacttcagtcaactacagctgagtccataggccagaaagacaataaatttttatcattttgaaat

SEQ ID NO: 1828 - DNA, 187 bp, Homo sapiens
catagagggtgttgcacgacatctagcagaaggccctgtgtgtggatggtgatgcagaggatgtctctatgctggtgactggacacacagcctctggttaaatccctcccctcctgcttggcaacttcagctagctagatatatccatggtccagaaagcaaacataataaatttttatcttgaagt

SEQ ID NO: 1829 - DNA, 1467 bp, Homo sapiens
agaaggctctgtgtgttaactgatgggagagactgtttgtttataaatgtgtacagttttgttttctcgtaaggggagcatcatagggttactttataccagttgtaacattttcattgtttttggttgttcttttttctttttttaatggcagctaaagatatacagattactgttaaattgcagtccttttttttttaaagatattttcttgaattatttagaacatggtaagcctggtattttttaatcaaacaaaatatttatgaaatgggttttctcttaattctggattcatcatggctttctaataccaattgtaatatttacaatattcaccaaaacttagaattttgcaaatgctggaattctgccagtgtttctttgctaagccttgcatgcaaaatttgaaattttaacattggcacccaaaacctacatggaatgtatgtctggagtatttcaaactttacattgaaacataatttccttggaaaacaaaccataagcctgaggaggtttttatcaactggaatgctttatattagtttgtttttcactgtacattcctcattttacattcatttaacctgccgattatttaatttttttattgtaaagtagtttttagcatttgcttttatttttttactttgatgccttttcaaattggcatgtctttaaagtatttttcttcctgattaaaaatgtgtgtgtatgtgtgtgtgtgtgtgtatatatatatatatttttaaatcacattaattttaccaagtgaaaccaagccatactgtttttgagccaattaagaaaattgccatttttaaagtgtagcatttcagggtaaagacccatgaaatggcttgatgtattctagactactgaaagaaaaccacttcaaagattttgttgaaagttttagtgttgtctgaaatgcaagagggaaggtgattggtagtgagttaaaagaaaaagagaggaaaagagagtagttttgtcttcaagtaaaatgtctggttgtgccagacatttcacaagtgtgaaaggagataggagaagctcaacttgagggcgtgtagtaagttgtagaaggctcgaggggacgtggacttatttgccttggtttgcaatacctgcaaataatgagtttgaaaagaaacaatgaaatgtgttaaaaatttgaccatattagataaattttcgtggatttagtcataagatggaaaaagactggtgaatcttttattacaaaatgtttctgttaaaatgggatcatcatctttgaaaggggggaggaggagtaaaagcccgattataatggtgatcaattcaagtcagtgttgactattctgtgaaatatatttggccagtggaaatgataatcagaaaagactgtaaatagatccatccaaatgatttctctgtacaaatgaatgatactattaaaaaaaaaaaaagcacacacat

SEQ ID NO: 1830 - DNA, 727 bp, Homo sapiens
ggccggcgcccaccatgctcctgggcgcccacgcggcccacagggcaagaacccggggcctcccgcctcctcccccatccccctgcctcccctgggcactgtggcttcctcctgcgcctggttgattcagcccacctctctgcatcccgcttcccgcgtctcttctctgcactcctgccgaccttcccacctgctcgtctgaatgacacggaacgctcccactgcaggcaaaccgtgacgccctccccactcgggagaagcagagctgaccttaggaccgagcaccagggcaggttgcgctgactctgcggccctccaggacggacaccgggtgaccccttagggcacccaggcaagatccctaagaggcacccaatgcccaggccaggggggctgcagccctcagcccccgccaggattcccgcaggctcctggactggaagctccctccgcggtcggattctggagggtgggaggcatcttggcctgcagtaagcggtgctgacggggactctggccacagaggtcaggcctcctgaaaacagcactgccttccgcgctgccccagcttgccccattccttgtccgccaacccaccgtgattcatcttctgaagctgggagtgaaactgggtcagctgtaacctgttcctattcatctggaaggagggaggcttggatgagcaggggatgagagctgcagggaaataaatgagatattcgtcctt

SEQ ID NO: 1831 - DNA, 312 bp, Homo sapiens
ggacaaggcgcacgttctccgcagtgcagagcagcttgccgaggaccccgcgtgaagaaagccagcgaggggggcttctgctccctgagactctgggttcacccacagcactttctgaggaagaggacaccagcccaagctggacctgccatttctccactccctacagacagccagtctccacttgcctcccctctggatgtatctggtcagggaagtgggggatgttcttttgataaaaaaaaaaaaaaaaatttatgtatttaaacttttattacaagatttcaattaaacaggcaccatagcactggc

SEQ ID NO: 1832 - DNA, 1320 bp, Homo sapiens
ttttaagaactagagcacgagtcatctccggtgatccttaaatgaactgcaggctgagaaaagaaggaaaaaggtcacagcctccatggctgttgcataccaagactcttggaaggacttctaagatatatgttgattgatcccttttttattttgtggttttttaatatagtataaaaatccttttaaaaaaacaacaatctgtgtgcctctctggttgtttctcttttttattattactcctgagttgatgacattttttgttagatttcatggtaattctcaagtgcttcaatgatgcagcatttcttgcactaaaaaaaaaaaaaaaaaaaaaactagaaagttttgggacatggggttatattaaattattctttgtttttctttttcttttaataaagcctgcaagttactaaattgtagtttcataaattctgtagtaaagtatcatcttggcagtgtgccaaaggtgaaaatgatgctttctctaacagagaaattcttagtgactccagtcgtagaaaaacgtctttacaacctgaataagattgaagaattgtgaacataccatggcctattggatgaatcatttgccgtaggctaaatcagactgtagggtttgtgatggatttatggagtatgtgggtatagaaatcatgaatctagcatttgttttcagagattcaagcatagtcttaagggtagatcagaaatgacaaatgaattcaaaacctagcaggtgcattgtaaatgtgtgcccagttatgttttggaaatggcagttccttggggtcatgtttctactggcaaaatttgcaatagtgttctattgtatgtaattttaaaatttataagattatccacgttggccaagtaaactgtactgccaatagaattctggaattgtgagaaattgtatcattgaagttcagtaggatgtgtggcttaaaaatttatcaggaccacaaaaaagaaaacaaaaatatttggtactgaggttcattgccagggcaggaggtatttccagaaaatactcatgcctgtgttctgttccttgctttcccaaatactgcatgtgactttcctaagcggcagctgaaagactcgagcccgtgctgtctcctttggttattatgacatgaaagtgtatcaagaactcagcatttctttgcatccatggacttggtttggagacataaggaatattctgaccctttttaaaaaaggattttctcatgtttttatttaacataaataaaagaataacattttatcttttgtggtattattttattgaataaaattgagttttatgat

SEQ ID NO: 1833 - DNA, 2587 bp, Homo sapiens
ggcagacgtgtcggttccattccatttccatttctgcagcttagcttgtgtcctgccctccgcccgaggcaaaacgtatcctgaggacttcttccggagagggtggggtggagcagcgggggagccttggccgaagagaaccatgcttggcaccgtctgtgtcccctcggccgctggacaccagaaagccacgtgggtccctggcgccctgcctttagccgtggggcccccacctccactctctgggtttcctaggaatgtccagcctcggagaccttcacaaagccttgggagggtgatgagtgctggtcctgacaggaggccgctggggacactgtgctgttttgtttcgtttctgtgatctcccggcacgtttggagctgggaagaccacactggtggcagaatcctaaaattaaaggaggcaggctcctagttgctgaaagttaaggaatgtgtaaaacctccacgtgactgtttggtgcatcttgacctgggaagacgcctcatgggaacgaacttggacaggtgttgggttgaggcctcttctgcaggaagtccctgagctgagacgcaagttggctgggtggtccgcaccctggctctcctgcaggtccacacaccttccaggcctgtggcctgcctccaaagatgtgcaagggcaggctggctgcacggggagagggaagtattttgccgaaatatgagaactggggcctcctgctcccagggagctccagggcccctctctcctcccacctggacttggggggaactgagaaacactttcctggagctgctggcttttgcacttttttgatggcagaagtgtgacctgagagtcccaccttctcttcaggaacgtagatgttggggtgtcttgccctggggggcttggaacctctgaaggtggggagcggaacacctggcatccttccccagcacttgcattaccgtccctgctcttcccaggtggggacagtggcccaagcaaggcctcactcgcagccacttcttcaagagctgcctgcacactgtcttggagcatctgccttgtgcctggcactctgccggtgccttgggaaggtcggaagagtggactttgtcctggccttcccttcatggcgtctatgacacttttgtggtgatggaaagcatgggacctgtcgtctcagcctgttggtttctcctcattgcctcaaaccctggggtaggtgggacggggggtctcgtgcccagatgaaaccatttggaaactcggcagcagagtttgtccaaatgacccttttcaggatgtctcaaagcttgtgccaaaggtcacttttctttcctgccttctgctgtgagccctgagatcctcctcccagctcaagggacaggtcctgggtgagggtgggagatttagacacctgaaactgggcgtggagagaagagccgttgctgtttgttttttgggaagagcttttaaagaatgcatgtttttttcctggttggaattgagtaggaactgaggctgtgcttcaggtatggtacaatcaagtgggggattttcatgctgaaccattcaagccctccccgcccgttgcacccactttggctggcgtctgctggagaggatgtctctgtccgcattcccgtgcagctccaggctcgcgcagttttctctctctccctggatgttgagtctcatcagaatatgtgggtagggggtggacgtgcacgggtgcatgattgtgcttaacttggttgtatttttcgatttgacatggaaggcctgttgctttgctcttgagaatagtttctcgtgtccccctcgcaggcctcattctttgaacatcgactctgaagtttgatacagataggggcttgatagctgtggtcccctctcccctctgactacctaaaatcaatacctaaatacagaagccttggtctaacacgggacttttagtttgcgaagggcctagatagggagagaggtaacatgaatctggacagggagggagatactatagaaaggagaacactgcctactttgcaagccagtgacctgccttttgaggggacattggacgggggccgggggcgggggttgggtttgagctacagtcatgaacttttggcgtctactgattcctccaactctccaccccacaaaataacggggaccaatatttttaactttgcctatttgtttttgggtgagtttcccccctccttattctgtcctgagaccacgggcaaagctcttcattttgagagagaagaaaaactgtttggaaccacaccaatgatatttttctttgtaatacttgaaatttatttttttattattttgatagcagatgtgctatttatttatttaatatgtataaggagcctaaacaatagaaagctgtagagattgggtttcattgttaattggtttgggagcctcctatgtgtgacttatgacttctctgtgttctgtgtatttgtctgaattaatgacctgggatataaagctatgctagctttcaaacaggagatgcctttcagaaatttgtatattttgcagttgccagaccaataaaatacctggttgaaat

SEQ ID NO: 1834 - DNA, 185 bp, Homo sapiens
aggtttatagtttgggaaattatatatattaatatacatctttcccctgtcacttttgcagatattcttcggtttgaataattaaaatgaaccagatatcagggtggttaattaaaatgaaccagatatcagggtggtttataaagcctgtaaacacacctaagaaaataaacattttacaaatg

SEQ ID NO: 1835 - DNA, 134 bp, Homo sapiens
gtaaagaaggaaaattcagccagttgattttgtttttagcttactgctgcctttgtccgaagaaactgttcctccattatttgaattactgaagacagcaagatatttgtaaattatcttaaaataaacaactt

SEQ ID NO: 1836 - DNA, 1176 bp, Homo sapiens
agccctgctcgatgctcacagggcccccagcgagagtccctgcagtccctttcgacttgcatttttgcaggagcagtatcatgaagcctaaacgcgatggatatatgtttttgaaggcagaaagcaaaattatgtttgccactttgcaaaggagctcactgtggtgtctgtgttccaaccactgaatctggaccccatctgtgaataagccattctgactcatatcccctatttaacagggtctctagtgctgtgaaaaaaaaaatgctgaacattgcatataacttatattgtaagaaatactgtacaatgactttattgcatctgggtagctgtaaggcatgaaggatgccaagaagtttaaggaatatgggagaaatagtgtggaaattaagaagaaactaggtctgatattcaaatggacaaactgccagttttgtttcctttcactggccacagttgtttgatgcattaaaagaaaataaaaaaaagaaaaaagagaaaagaaaaaaaaagaaaaaagttgtaggcgaatcatttgttcaaagctgttggcctctgcaaaggaaataccagttctgggcaatcagtgttaccgttcaccagttgccgttgagggtttcagagagcctttttctaggcctacatgctttgtgaacaagtccctgtaattgttgtttgtatgtataattcaaagcaccaaaataagaaaagatgtagatttatttcatcatattatacagaccgaactgttgtataaatttatttactgctagtcttaagaactgctttctttcgtttgtttgtttcaatattttccttctctctcaatttttggttgaataaactagattacattcagttggcctaaggtggttgtgctcggagggtttcttgtttcttttccattttgtttttggatgatatttattaaatagcttctaagagtccggcggcatctgtcttgtccctattcctgcagcctgtgctgagggtagcagtgtatgagctaccagcgtgcatgtcagcgaccctggcccgacaggccacgtcctgcaatcggcccggctgcctcttcgccctgtcgtgttctgtgttagtgatcactgcctttaatacagtctgttggaataatattataagcataataataaagtgaaaatattttaaaactac

SEQ ID NO: 1837 - DNA, 7656 bp, Homo sapiens
tcctaaccccagaggctccctgctctcattttagctttcttagggtaagtcccacgagccagcctgtctcaacagggaaggcagaggaggaccacattgccaacttttaccaagagagacggttatttttacaataaggcctccatgtccccacccacttcccctacccagtttgccataattaaaacttgggctactttgtttctattgagtaattcctcctccagttgtgccactgtattctcctttgttttgcgatttgaatctccttttacctttttttttaatttttttcatttttgcttttttttaaagagaagcatatacacaaataaatggcatcttgagaatttaaaaggcaaacaaacaaacgctaatgtgcaattctaactctgaaaccactggtgccccgagagcactgcctggagaattcacccctccttgcccggcgcccgcccccggagggagggcccggtgcttagaggttaacttggtggcctaggagagggagaagccaggagaagcacttactccaaccacacgtctttccactacatcggcttgttttactaagtaggattttattttagggttcaaagaaacatgacatttattggtcaaaatattacactggttgtctattttgttattgttttattttagtttttagaaaggattaatgtacaaaaagatttagagatctgtttcttaaagctacagggtttaaaaaataaaaatgagtgaaaatacttgatgtttcttgaaagataaatttaataataataaataaatacataaatacataaataaaaaagaaagccacaggcctgtaaattttatttgtaaaaaagcatttctatttttatacaaaatttttactgcctcagaaataatggaagttatttattgcctattgttaacttattgggtacctaaagagcagttctctgtctagctagaaccttctgaagtagtctctagaggaattgttctaggaatgggctttttttcaccgttgaaccctagacctgaagttcatgctttatcctctcgttgtttgtatctgtctgattattttgtttgtaacttccattatctagtttacagttcagtcgtctgactttccccgtatgtcacatttgttgaaactggaccttctccccctgtccctcaccccaaaacacccggaatccatcccgtttcgctctctccagatggattctcttggggtttcattgtgctgtggataaggagtgtaagaaatgcaaattatgtgaatggctcggagactccctaatgacctaagatttgcattagtttttctcctgcacccttaaaagtgattttgttgccgctgcatagattctgtgtaactttttactcttccttgttttttccctagacatcttcatgcccgttagttcatcgtttgcctagcatgtccctgtggcgtctcaaaaaaaagtttcatcgtcccgtcattgtttctgatgtctttctgacctcacatcatatttggttctcctactgacctttgatctagtttgacctttgaaatttgcatgtgacctcatctagctatgaattctgggaagtcaatgtgaaaaacattgctgcattcatgcaagactgaaatttattattagacaaattcattatagaaaaaacctgtggcaaaaacgtttctttcttattttttttcttttcctaaaacagacttgaaagtattatacagggattggcattcttcccggtcactggtaacaatagcaatatgtgtccagggacacagaatgttggtttctaacagactacttccaaaaacagtttgagaaaaaaactgtctgattttaagtctctagaggtctgtaatagtttttacatttttcaggcagtgtaaagttttttgataaggccattttaggtggctcactttctcattaagatatatatatagaaccactttttgtagattagtataagaaaaatatttaccctgttttggggcaaatgctacctatttgtgtcaccttttgctgaactcacagttagacaatccatggtttaatgcacatgaaattacctatattttatactgtttcaatgtacaggagaaaggttactgtaaactgtgttatgttggtgcttctgtgaattaagttgtggtttcatcatgagtcttaatgttctttgttgataagacaagtttagaattggtttacttaatacaaaaaaaaaaaaaagaatttcaaaaaaaaaagttgtttgcttaaaaaaaatttcatgtgagggaaaaaaaaaaaacctattccagaataagttttgtgttggcttgtgaagcattgatgtcattttttttaattgtggactatttagatgtgtttgtgttcagcaaaatgtgatgtttttttcttttaaagaaaaaaagtgaaaatatatagtgccaaattccaaaggtacttccttcctagagcttcagtgtgtttcttgtgagaagtaatttgataacatgggtattttattatgtgttttgtataaatccctaatatttaaaaaaaaaaacaaaacaaaaaaaggttacaaagtttgttaacttgctatcctgtggtcttgttgcctgaaattgttattgtttgttatttctctctgatgttttttgtaagacattgtataagtgcccatgtcccacttttttaaccactccgcacatcagtgctgtgaaggcaacctcaccatgtattttcttcataatctatggaaacctctaaggtgagaaagttttgaacttttaaccctttctacccagagctatctggaatgttgatgactttttatactgtcatgatttgagtttgttttggggtgtttccaatttggatttttttccctgcatctatcctctaagttgtttcggtttgactactttgttctttggttaagatccaaaagaaaacagaaaacaattccacgaggccaatctaaagggaaaaaatcctacactacttttactacttttgattatttctcatttttgggaaaagaattcctaatgtgctactagaattccttcttcagttttaacgagtaattggataaaccctgagggaaaacggaggtagattcagcacctaacaatcctgtatgcttttgagatcacgtttagtgctatgtcctagtctagaatattttcatataccttgcagtaaaacgactttgtggcaggacagtctcttgaggggttttgtttctgtttcctaaatactcctaaataatatttctaatcagccattatgctggggcatctctgatcccagtaggtacctctgaatataccaggtgtctggagttagaagcccatagccctttcccagcctttttggtttttttaattgaacacatttcatctaagtaaagctcagttctttatcacaatttactgaccaaatacctagcaccagttcctgctgccactttttaaagtgccatatgactttctacgaacaggtaccttgctgtcttgacaaatcctaatgtcacgcctacagccccaacacaagctccagtcttcctcttcggcatgccctggaagcttcttccagtcttcctcttcggcatgccctggaagcttcttggcctcagctccccttccccgctcagcaccctgttaggatcagtgtgtgtggatgggatagccctgggatggaaaggactagcctctactgatgcaaaaaaacaaaaagcaacacaaacgtttccttcttatagcacatgcacttccttacaatgacatgatttgtattatcctcacatgtgtttactactgctggggccttccttcatcctctgagggctattttgtactttctgcagcaatcagcttaataacaacacttattgcacctgtctctctctgagaacacggtgtgtctcgacacgtaccacgtacgtggaaacacaagagcccaccacttgaatttctaagaccatttcattctgaaacttcttatcaattacctaaatctcaacgaaaaacaatttactgaagccgactcccctccccatctccctctcaacctcaacccacctgcatgcatctcccccagaggaaacactgagggtaggggacaggaggctcaggacgcgccctctgaatcgagtgtttcttcttcacaagtcaccaagagaggacatgagggggaaagtcctttttgcccttctccaaaaaataaccttccacagagacaaactgtccttctatccacttttatcttttaataaatatcaaaaggaaaaagctgcaagggtgcaaagggcctgtgccagaagaaaacacacacagggaaaccgctttttttaatcaattgtagagaatagtcatttttaatctaaattagagaattgtgatacaatggcagtcctcaaaggcgtaacgagttcatctttctttcaccataggggttatagttggcttgtgctactctggaatcattttactgtttgtttttattatcttaagtgctaattaaaaaaaaaataaaattttaaaaaaacctgtagtttcattacctttttgaataatgtcatacaaaaaatgtatttgtttttttgtgctgtgagaattgatgtttgtagattaataatcattttgtttagaattacaaaatagtttttaaatattgtctgagaaaagccaaagttaatgcaacctagtggaaactgtaagaccatttgagtattgtttgttttattgatgcatttggattttgttgtttgatggaatttgagccaaaaaaaaaatacgcaggctttcctatttctacaactgattgtacttatgcattttgtaccagtggaactttttatactggagattaaaaaaaaaatggaaatttttgtggcttgctctggtgggcccctgacaatgactgatttcaagtttgatttcgggttgattgattgattgattgatagaaagaaagttgcttttcttttgagaattaaaaactttggcttgatttcttttttccctttgcttatatctagcattagaattttgtcttaaaataacagcggtaagtttcactttttattctgtattgtgcagttacacaataaggtaattagatttagaagtactcagtcactttaagtggataaatgtattagttaaaactttagggtttgcttttttgctgtttagatcaaagttttttctgattcttctgtcctcattgtgaacataaccgtgtagttgaaacagtcaaacttatttttgtaatgtatgttattgtgtgatgcagttttttgcttctgtctccaatattaaaccattttcctaatacttgtttctctctctgcgtgttgtattgttggtagtcattatatgttggtgatacatctgcacacctcactgtttcacgtatctgtttttttctctatgttgtgtaaaaagatacagtcgattccacttaagtgaatatctgatttggggaagaggaaactgcacagcagccacctttgatttatgtacaaccgcccacttgaactcctgcttccaagatttatacacttttttcctacagttcacctcagtaactgcctttggggttggatttgccaaggtgttttacggtcttttgaccacacaggttaatttccccttctctcccctccctcatgagtctatccacgcagttcttaacatacattccaaactgctgcggggtttcctctccacacccacgaggccaaacccgcatcattacagtccaactcttcttagacactaatcactttctaaaagaagtgagttctccagggaagaaaaatcaacttagccagtgaaaagggttaaacttaagtctattatttgttgccctcaatcaaaagatatgtatagaaaagtcatttaaattatttatttctacaagctaattgaatccaggagcagctttaattattaacactaacggaagagaaaagaagtatttccaagggctcaaatggaagctgtactcagtccggtggaggcagggggaggtaaagtttctcacactcaagtcgtcttcatagtttactgtccttttccaaacaaaagctaataacgccatacgcatccacacactccctcctggatgaacctaagtctcgtccccactgtcaccccaaggccagttatcaaaaactgttccttctctgccctcaaagactgaagccgcaggccctgttctgcctctgctcaggaatctgattgctcttaaagtgctcttacaagattccgtcgatgtttgctccctctgtcttatctctccttccagtattttcagacgcacaagctctgactcaggccacccagcacctggcagccttcctctgcgtgccagtgaaatctctcccagtaggtgctcaggctcttcaccctctcgttgcagcagcccctctggcccgagattgtattttctagtctgctcaagaacagaggggcctggcgaggtggaggaagggaggctccctccccggggctggccgcctcagtgatggtgatgccaccagctccagcctgcacggatggagctcacttcctaccatcacttctgctttcagtctcctcatagccttcggcagtctcctctgaaaacacactgcctacgttagtgggaaaggatggctaagggtgtgatttctttttattagggaggtgggagggggatgttgggaggcatggggggtgattaaattatcatttccaaggtgcaagtgtttatttttcaaatctataagtacatagttccaccattttggcacaagacaaaatactcatgctaagcaaaggaagagaaagacaaagccagtttttgttgcttttctaaagcaacaaataattctccaaagaaggggatgaaaatgctagttcctttaagcacttactgactgtaaagttggtccctgcttaaattcatacccatagttttgagtcggtatgacaccactgcagtgtgagcaaggtgaatccgtgtgccatgcatggaccaccttgggataccgcagcaccatcaacatccgccttgctgatggaagccacacacgctgcccagcccacagcagtcgcacgcagccgatgggctcggactcttagctggcaggctaggacacacagtgaacattaatgtactgtgaatcgttcctgataagtgaataaaacattgtgaccaaacaatcagcttattcacttatcaggaatcgactgttctgctaatttgctgttgttgtttttcatctctgttgtagttcactatttttgctgtgttctgttttctcctctcatgcttgggcaaatcactgggaatattatcttcatgtgaccatgaaacgtttctattgagtgaaaatgatatcttaacaaaatctatgcacttgctatcaggaacacaatactggatgtgtcttatatatattgaactatatagtactcgatttcttaaataaagcttaagaaaggactctgttgtgtgtaaagttaatgtgattatttttcaaagcagtgtttctaaggggtatttttgttcttttaagtcttgagtgatacaggatatttttcattaaaattatatcactggctttatgacttaatattcaataaattgactttggaaacaa

SEQ ID NO: 1838 - DNA, 522 bp, Homo sapiens
gtggaggcagaggagtgaggcccacgggcagcgcccaggagcccaccttcccctctggcccagccaccactgcctctcagcttcaacaggtgacaggctgctttcgtgacttgatattggtgtcatagcatttggcctacattaaaagccacaatttcatggggaaaggacaaaatggagagtgactgaggtgctgacctcagtgcaaggctggtgaaccctgcagcgggccagctatggtgggaagcctggcatttggggtgctccttgcaacgtcttaagcaagcgaccccccgacatagcaaaaggtggcaacccatggaggcagaaagaaggacgccagcctgacccttatctgaaacgtcctaagcagagttaatcctggctgctcaggagaggcgacacatttcaaatctccacgagatattctccacacagaaaatcttcttgattctatagagacttaatcatgcctatggctttgaataatcttatgtgatttaaataaattaaatctttata

SEQ ID NO: 1839 - DNA, 1869 bp, Homo sapiens
gggccgcgcgggctccagtccaccccgtttctccccaccctgaagagagggtgaaagagtcgctgcacccaggagctgtttggtctaaaatggaagtgacagcgggagcccctgccctctgtggcacatcggagtctagaggtgcctggctggggcctcctggctgagcacgcaccgcaagctccagccaccggcacagagaactcttccctaaaggaatctggccgagggcttgtctcccttttcccaagaactgagagagagagaataacctgttagacccataggtttccgtgatgtgtaaatgccatcttttgggggttgggaggagtaggactggtctgattatcattcttgagtctcatctaccctcttctcgaagtacatgacatgaaagttcagatcccttccactcaggattctcgccgccttttctaagaaaataataaaaaaaaatgcttgtttcattttttaatgtcttaatatacttgcttttgtttttgaagggtgaggcatcatggtactttgcttttgtttcttgacgtactttagtttgcccagttttgttttttactgaaaactgaaatgaaacctttagatattgagttttgggagtgaaatggaaaggtggtaattttgagaaagcaagtctcatcagactctgaggtctgggacgtgtgcgtgagcctgtgtttgtgtgtgtatgtttttagatacgtacgtgtcaacacatacatgcataggtatcctgtgtgtccacatgcatcattattatataaatagaaacttctgaacaccctcctaagtcactacaggatgccagcgcttcctattcttgggtagacagagccacctcagcatcctgatggatgatacaagaaattgttacttcctagtatggaagtgtcttaaggacacgtctccatgatattttggtgaaccaaaagtgctttatcctcaacaaaatgttcctctgttcccagttaaagtaatattccctgcttccaagtaagcaagactgttcactaaagaaggaactttttagaaaactaatctcctttatcatccaattttagttctgcatgttccgaggtagccagtcaacagaaggaagcaaaagattcttaaagatccaccgactgtcatgttccacaagcaagatctcagggtagggaaaaaccagtgaatgaggttacacagcaggaaaagaaccggtttcctcccagactatgtcttacacgctgagttatgccacaagcgttatcatcaaaactatttaaggctggagtcttagacctctaaaaatagacaggaagggctgccctgagcagtgacacctttgtgtttttatgtctccgccagcgccgtaacagagcctgtttctttcccgttgagtattacttaaattcaggcttaaatgtgctatgaagggcatttttcatagtatcccatttgccttgtaagttatataaagtgcatgattataattttttccttagaaatgcaatatttagtttcatccagctcttatgaataataacctcatagattcctgatcttaatttaaataggtgctttaattttacagctttcaaaagtagttactgtaaattttactcctgttaatgctggattggtttaaaggatttataagggctgtgtttgctctttacaaggcaagatgccatacagtgttcaataatagaaggtcttgatacaaccgacattttaaatattctttatacatgaggactgcatctttttcactgaccctatgatttcactgtgagtagggtgaactggactgcatattagtttatttgttgccataatcacatttttgaaaaataaatttaagagttttttctt

SEQ ID NO: 1840 - DNA, 2337 bp, Homo sapiens
tgatgacttttgaagaaacactatttctctttaagaaaatggccattaaggccgggtggggtggcacatgcctgtaatcccagcactttgggaggccaaggctggtggatcacctgaggtcaggagttcgagaccagcctggccaacacggtgaaaccccgcctctactaaaaatacaaaaaatagccgggtgtggtggtgggcacctgtgatcccagcttcctgggaggctgaggcaagagaatcgcttgaatctgggaggcggaggttgcagtgagccaggatcacaccattgctgtccagcctgggtgacagagcaagactgcgtttcaaaaaaaaaaaaaaaaaaacccattaaaagaggcctccttcctccactctctcaacccctctgttgggtaacatgaaaagactgtattcctctaagatgttgggattgatatacgtgatttaatctgcaataggtggaataaccaggggaactggttatgaatatgtgaatgcaaccagcaaatttatccttgaaggtgtgatggtagaaataggaaaacaacaaaagaaaaacaataacaaaaaaagaaagtgtgatggctgggtgcagtggctcacgcctgtaatcccagcactttgggaggcttaggcggctggatcacctgaggtcaggagttcaagaccagcctggtcaacgtggtgaaacgccgtttctactaaaaatatgaaaattagttgggtgtggtggcatgcgcttgtagtctcagctactccggaggctgaggcaggagaattgcttgaacctggaaggcagaggttgcagtgagccgaaatggcgccactgtactccaacctgggcgacagagcaagactccatctcataaattaaaaggaaagtatgatagtgttatggattttagctctgagtgagctggaaaactaggtcattatctagatgatttcagacttgaccctaattgaccatatatgaccaggaaacacttctgagtttacagctccgtggagatgacctcaacactgcctcttgatttgtttgatgcatgtcactttcattaattttccccctcctttttgaaagtcctgtggcagtactaatattttcattttatgtaatctctggtgctgctttccagtcactgtatgaagtgtctccccaacactagcaaatctaggtcctactaaatacaaatctctgggtggatgatcttctagtactgtatttttaaattaaggagttttagttataatgaaattgatttgtagtctgttttgccgtaaacttgtttttctttaaattgttcttacagtgatatcttactatttttaactgtctggggtttctgatatggggatttcagcccctggttaatcagtcttgtccctacaagtccctgatgcagtatgtttatttgtgatgtttaaagaacatttcttggctgggcgctgcggcttgcgcctgtaatctcagcactttgggaggctgagatgggtggatcacctgaggttgggagttcgagaccagcctgacaaaacatagtgaaaccccgtctctactaaaaatacaaaaattagctgggcgtggtggtgggtgtctgtaatcccagctattcgggaggctgaggcaggagaatcgcttgaacccaggaggtggaggttgcagtgagctgagatcctgccactgcactccagtctgggtgacagagcaagactccatctcaaaaaataaataaatagaaagagagagagaggaaaaaaaaagaaaagaacacttctttatttgagggactttcccaacaccaggtgcttggggatttcttagagatcaccaaccgactccctcactgtgaaattaaaccaagtactggaaacgtaactaaacagcgaaccatgtagcttcacctgactcagtgctgggggcctctaccatctactgtgcttgtgtcatgatgctttttctctgaagtggtgtgggaagtaccaggggactggcagaagcccaggccctctctacttttaccagcaactgatcatgtctttcagaatccatgtacatataggctgttctagccacagtggtagatttatgattcacatccgaaagtgtgccttagttatcaatttaacatttctctagtattcatatcccttttcttaccatatacctcagtgtatccttcctgtgtcaagccttataaatcatgtaatttagtgccactcatgtaaatcagtaaaatcacaaaggtctatttaatgaaaacgatttaccaatgttgtttttttttaacaagaaaaaaaataaaagcacattgtcattttttttcctca

SEQ ID NO: 1841 - DNA, 373 bp, Homo sapiens
atgttcaaatatttcattttgtgcgtgtgaaagggaaaacactttgacggatcgtttttgtcagatgacactggtggctccccttttctcccctcacagtttcttgtttcgagtgctgactgacccgtttctgaaatgggcaccgagctaagtctgtgtgcagcattagtacccgctgccttaaaactcaagtttacattattcattaaaaaaagtacatctagtgttgcctgtaatgctggaaaccagtgtatctaccttgctgtgttaaatcatgacagtgagacggtgagatggattcgttttgcacacaacattcaaaacacttcatattgcccccacttgttgaaaaataaatgtagttcaaattgcc

SEQ ID NO: 1842 - DNA, 251 bp, Homo sapiens
tgagcgtactggaactggagaagaggaggccccgccccaccgctccgggagctgctcatcagccgcaacttcctgccgaccctgatgcgggtgggccgagcagtgtggacatcagccactttttatattcatgtacattcacctggggaaaaaaacggagggactttgctacttgtaaaaataacataataaatagatcttaaacataggaaaaccatactgttctgataataaaatgctttctatgaaat

SEQ ID NO: 1843 - DNA, 845 bp, Homo sapiens
ctggccctggaggtggggcccggggtcggggctggggaaggggagccccagggtcgccagagccgcgagccactccagcgagaccccaccttgcatggtgccccttcctgcataggactggaagaccgaagtttttttatggccatattttctactgcaattctgaagtgttcatttctcacaaactgtactgactcgaggggcgctgatttcataggatctggtgctgtatatacgaatcttgcaaagctctaactgaacggaccttcttattcctctcccctaacaccatcgtttccactcttctcagtgtaggtaaccgtctatggtgtgttttttcattaatgacaaaaaaaaaaaggtttcaactggattatttaaatattggtaaatattgtgcattagggtttgtttttccttttaagaagtatgtcctttgtatctctaagttacatgacctatatcttttcctctttaatagtagttttatgttaacctttaagagatttgtttttcctcaaaggagaatttaaaggtattttttaaaattctaataagaggatcagccgggtgcaatgactcatgcctgtaatcccagcacgttgggaggccaagtcgggcggatcacaaggtcaggagatcaaggccatcctggccaacatggtgaaaccccacgtctactaaaaatacaaaaaattagccgggcgtggtggcacacacctgtagtcccggctactcgggaggctgaggcaggagaattgcttgaacccgggagacggaggttgcagtgagctgagatcgtgccactgcactccagcctgggtgacagagcaagactctgtctc

SEQ ID NO: 1844 - DNA, 411 bp, Homo sapiens
cactgaagacgagcctggggtggagaggagggagccggcatctgccgagcacctcctgtttgccaggcgctttctatacttaatcccatgtcatgcgaccctaggactttttttaacatgtaatcactgggctgggtgcagtggctcacgcctgtaatcccaacactttgggaggctgaggcaggaggactgtttgagttcaggagttttaagaccagcctgaccaacatggtgaaaccccatctctactaaaatataaaaattagccgggtgtggtggcgagcacctgtaatgtcagctacttgggaggctgaggcaggagaatcacttgaacccaggaagcggaggttgcaatgagctgagatcacaccactgcactccagcctgggtgacagattgagactccctctc

SEQ ID NO: 1845 - DNA, 1410 bp, Homo sapiens
gtgttgatgtatcacctccccaaaactgttggtaaatgtcagattttttcctccaagagttgtgcttttgtgttatttgttttcactcaaatattttgcctcattattcttgttttaaaagaaagaaaacaggccgggcacagtggctcatgcctgtaatcccagcactttgggaggtcgaggtgggtggatcacttggggtcagggtttgagaccagcctggccaacatggcggaaccctgtctctaccaaaattacaaaaattagccgagcatggtggcgcatgcctgtagtcgcagctactcgcgaggttgaggcaggagaattgcttgaacccaggaagtggcagttgcagtgagccgagacgacaccactgcactccagcctgggtgacagagggagactctgtctcgaaagaaagaaagaaaaaaaggaaggaaggagaaggaaggaaggagaagaaaaggtacctgttctacgtagaacacctttggtggagttccatcaactcgcaaagtagaatccttacctactactcttctgataataattttaatattttttatgtttggttgatgcgagcagctgcactgctcatgcagttagctagcatgtgacatcatgtgacaaagttcatgtaattagatggaagaaacctcactgattaattttaagaaccttttagggatgcaggaacaatgaagtggccacagtatgtgctgtttttgaagcatttttaaaaacgaattgtagttgtttttcttcatttaaaatggatctgttggaggttatgtgtgtatgttgtagttttattgcagccacaataattttaccaaagttttcacataggcagttagcctttacttaatatcaagacaagtgaaaaaatattggcatcgatgaaaccgataacattggcctcattggatttctttacccattcacagtgtaaagaagttaccttcatgctttcattgtacctgcaggcctgtgggcttgtacagtagataattaatttctaaaaagaacagctgcctattttcttcctaggttaggttatatcttcataatcacaagaattagtgatggcaaaataaaattttgcttatgaatcttttacattgtttatatatgattaatatcatcatatatattttctgtattaagctcatttggcttcatttaagctgtatacttagtcatatatctttcattagttctatggatatgagcagatccctttactggagcccagtatgtgctgtgtgagttagaagtcattcttgctgagaaggtgaataggtagggatttgccttgttttgtaagtctacaatttgccaagagtaaataacactggaccagctgtaaaagtaaacagtgtgtttatgcattgagatactaaagcattt

SEQ ID NO: 1846 - DNA, 1790 bp, Homo sapiens
cccgaacttcagacattttcccacagacttcctggcctcctgtgactctggaaagcaaaggattggctgtgtattgtccattgattcctgattgacgccgtcaaaaacaaatgcttgttaagcccataagctttgcctgcttactttctgccattgggttggtttgataccacatttaacattgacatttaagtggaaaaccaagttatcattgtcttttctaagctcagtgtggatgattgcattacttcattcactgaagtttttgcccaaaaattggaaggtaaacagagagctatgtttctgtatcttttggttatagagtgttcacttctttatcataacaaaattctagtgtttatacgaacacccagaggcaaaagaatttggcttaattctcactccaggtaagtagcttaacttctgggcttcagttttctcatctgtaaaatcaggaagattggactaagtgatcctgaaatgtattttttagcactggatttctacaaataataaaactttcccatctagataatgatgatcacatagtcttgatgtacggacattaaaagccagatttcttcattcaattctgttatctctgttttactctttgaaattgatcaagccactgaatcactttgcatttcagtttatatatatagagagaaagaaggtgtctgctcttacattattgtggagccctgtgatagaaatatgtaaaatctcatattattttttttttaatttttttattttttatgacagggtctcactatgtcaccctggctggagtgcagtagtgcgatcgcggcacactgcagccttggcttccctgggctcaagcagtcctcccacctcagtctcccaaatagctaggactacaggcgtgcgtgaccaagcccagctaatttttgcattttttgtagagatggggttttgccatgttgctcaggctggtctcaaactcctgagcactagcaatccacccacctctgtttccaaaaaaaaaaaaaaaatgaaaggtcaacccctatgcaaattaccacagcaaaggtttcattcaggagattcttccatctgggcaacctggttttccaaatatcatttgacctaagtgaatgttgatactagctaaagattgggtaaattggttgaattattgtattgaagcttgagctgtagctaaaagtaatttaggtttcccctaagatgttattatgttagggacataacacttttgggaggttgttgtgggagatggttgatttaggttttcaaaagctagaaataaaatttacatgccttagatttcataaaattctgctctaattgggtggaaggtgctgtatctaacttgtgttcctcctaaggttatgtcctaataactattcttttaggagtatacttctactttatagaaggttgcttttctttttaattttttctaacaaagaaaagaataaagtatttattaataagaaccagaaagcacttgaaactgatgtttttaatggctcatttagggtagatttatttatctcattaacttaaaacagctatgtgtatgaaataggtcacaacagaacttgaacaccaggttggtgtctgagcaatccctttcttatgggaaaaacaatgttcttgtttgaacagagggtatcattgcagtcagtattcacgtgtatattgttatataagttgtataatatgcttgtaaaggctgagggtgagctgtatctggatgcctttttacaatttgattttaacttttaaaataaatttaaaac

SEQ ID NO: 1847 - DNA, 527 bp, Homo sapiens
gatctgtgtatggtgtgttaataacaataagaaacttagggaagcaggctgtggacttctggaattaccaacaggaatgaggaaagaagaaaactggagtttccagtctctgagttctacctgatgtaactcttgattggttttaagaactttgttggccttcatttcatatctgactgcaagctgatttttctttcttgctttcattttaattagtccaaaattaagttttaaagatttttcctcacaatttaaatccatagacaacagaagggggtttaaaatgacctttttttcagttgacccgaaagttgtggttagatgattaaaaagaaacatttgaggatggacttaattatttcagtaaaatattataatttgcctattgtcttttatgtaatatttatataaaatatttttatatatttcaaaaacatgggaccattgaatgaaactttatagtccttaaatgttgctgaacttttgctgtcttgcaatagaatttgaatgtaaatattattactggt

SEQ ID NO: 1848 - DNA, 133 bp, Homo sapiens
tgttttagagaaatcaagaatttttaaaaacaagaatatcaacatttggttttgtgtataagtggtgtttgtattaaaatactttttcaatgaactgtataaactatgttttattaaactacaatatatcagt

SEQ ID NO: 1849 - DNA, 1791 bp, Homo sapiens
actttttcaggaaatagagctgatgattataatatttttttcctaatgttaacatttttaaaaatacatatttgggactcttattatcaaggttctacctatgttaatttacaattcatgtttcaagacatttgccaaatgtattaccgatgcctctgaaaagggggtcactgggtctcatagactgatatgaagtcgacatatttatagtgcttagagaccaaactaatggaaggcagactatttacagcttagtatatgtgtacttaagtctatgtgaacagagaaatgcctcccgtagtgtttgaaagcgttaagctgataatgtaattaacaactgctgagagatcaaagattcaacttgccatacacctcaaattcggagaaacagttaatttgggcaaatctacagttctgtttttgctactctattgtcattcctgtttaatactcactgtacttgtatttgagacaaataggtgatactgaattttatactgttttctacttttccattaaaacattggcacctcaatgataaagaaatttaaggtataaaattaaatgtaaaaattaatttcagcttcatttcgtatttcgaagcaatctagactgttgtgatgagtgtatgtctgaacctgtaattcttaaaagacttcttaatcttctagaagaaaaatctccgaagagctctctctagaagtccaaaatggctagccattatgcttctttgaaaggacatgataatgggaccaggatggttttttggagtaccaagcaaggggaatggagcactttaagggcgcctgttagtaacatgaattggaaatctgtgtcgagtacctctgatctaaacggtaaaacaagctgcctggagagcagctgtacctaacaatactgtaatgtacattaacattacagcctctcaatttcaggcaggtgtaacagttcctttccaccagatttaatatttttatacttcctgcaggttcttcttaaaaagtaatctatatttttgaactgatacttgttttatacataaattttttttagatgtgataaagctaaacttggccaaagtgtgtgcctgaattattagacctttttattagtcaacctacgaagactaaaatagaatatattagttttcaagggagtgggaggcttccaacatagtattgaatctcaggaaaaactattctttcatgtctgattctgagatttctaattgtgttgtgaaaatgataaatgcagcaaatctagctttcagtattcctaatttttacctaagctcattgctccaggctttgattacctaaaataagcttggataaaattgaaccaacttcaagaatgcagcacttcttaatctttagctctttcttgggagaagctagactttattcattatattgctatgacaacttcactctttcataatatataggataaattgtttacatgattggaccctcagattctgttaaccaaaattgcagaatggggggccaggcctgtgtggtggctcacacctgtgatcccagcactttgggaggctgaggtaggaggatcacgtgaggtcgggagttcaagaccagcctggccatcatggtgaaaccctgtctctactgaaaatacaaaaattagccgggcgtggtggcacacgcctgtagtcccagctactcaggaggctgaggcaggagaatcacttgaattcaggaggcggaggttgcagtgagccaagatcataccactgcactgcagcctgagtgacacagtaagactgtctcc

SEQ ID NO: 1850 - DNA, 623 bp, Homo sapiens
atattttccctttcacttttaaaataatcaaagtaatatcatactcttctcagttattcagatatagctcagttttattcagattggaaattacacattttctactgtcagggagattcgttacataaatatatttacgtatctggggacaaaggtcaagccagtaaagaatacttctggcagcactttgggaggccaaggcgggcggatcacgaggtcaggagatcgagaccgtcctggctaacaccgtgaaaccccatctctactaaaaatacacaaaattagccgggcgtggtggtgggcacctgtagtcccagctactcgggaggctgaggcaggagaatggtgtgaacctgggaggtggagcttgcagtgaaccgagatcgctccactgcactccagcctgggtgacagatccagactctgtctcaaaaaaaaaaaaaaaaaaaatacttctggcagagtcttttatcttcctattaaaatctcacttgattctcctttatgggaagtttgtcgacaaaattcatgattagtaaattatccattttttccttcagttagtttaatggtgaagatgattaacaggggaaatgcttgaagtaaatgattgtttcaatggc

SEQ ID NO: 1851 - DNA, 91 bp, Homo sapiens
tcttgcataaacttgtcatgtcatacagtttgtgaaaggacaccttgtaaagaagccttgaaactaataaaatgagttatacttacataga

SEQ ID NO: 1852 - DNA, 2481 bp, Homo sapiens
gatggttgcttatgaattcacaccttgagtataaaacttgcagagaacattcagcgatttccagtccactgtgagatattaatcagttacctaggactaatgacagatcatttccttctgatgagaactaggagggtttgccttctctgagaccagctattacaactgtgcctctagggagttactcagcctaattgagccctattattttaacttaacaaaataaatacagaagtacctatttctaaacaatgatttaaagtctatatcccctaagcggagttgttgtttttctccctaatctatcagctgcactacttgagaaaatttaaagtgtttctagttaaattatttccttcttgagcgatctaatgtttcttgtaatattgatgatcctactaattatcctgctgttctttaattaatgcttaatgaataatatggcactgtaaaatagcttctgcaacaagggaagttaaattttgagacttttttccccaaaggatactgactgtaatacaattaccaattcacaatgataaaaatattttgaaaggttaattttatactgtccacctatctatatattcttctactgaaatgattttgatatctttggctttccggtatctatttttgccatacattttgctgttttgcaaagtttgtataagaacacataacactactgaattataaaaattcaatcataaaagtcaaaatatattacataatatagtttaatgaatcattacatttataataacaaaggccacaatttaattaattggtaagatataatgcaaaaaaaaaaagagaaatgtttgccttatgtatattccctttatttcctttaccttttgtttttccttggacctaaacagagaaaataatgcttatgtatctgaagaaaaggtcagatctattggaaatgacagcccgatacttgagcctcctctttaaaaggtatccagccctgatattttgtgtaaataaaatgtttttaaaacctgttagttaaaacacttaggtgatgggcactgctgcttataaattcatcttttggttgaatcctcactatgctatttggtacctaaaaatattctccaaacccttgctgccagttcctctttgataaatatatagttaattcgaaataaaatccattgcaattcatttatgagttatcttacatatcacaaagaccaattagaattagtcattattcttgatgaagagtctgtttttaatcataaaaatcatgacagttactcagacccaggcatttcaacagagctaacaccaccttcagataggcacaccatgcataactcttgggaagttgagctttgctaaataaaagatatttctgctgatcaaagatgatcaagctttctgtgtattggaacagaaagtaacaaagaggaatgagccaggagaacaaactaattcctttaaataaataaaaaaaaaaaatgcaaatgtccttcaccagtaaagcaagcaaatttttaaaatctctgtttttgaaatctactcgtcaaagagttttcagaggcaatgaaaggggaacagatttttcattgtaatagtggaagttgtgtgatagttaggagatatcaacatgcatttttaatcttttccttagatgaaagagatggcttttggcagtgtgttctaaccagaaagaaaggatttgtattactctccaaatctactgtactgtcagcttcactccacctgagaaaaaagaaaaaaaaattgatagctcaaatgcatgtaattcataaacactgcaaaggagagccacttggtgtctgcagtcctcatattaacagtctgtcacagaatgcagttaaagtattgattggcatatggtaatagagcaaccatagccttaacttacagacctgtgaaataaagggcattttgacctaatacaattaattttctggataactcttaaagagaagtcattttaactgtttttgctactccatatattgtcattcaaaatatattttaacccaaaataagttaaataatttgtgcatgtttgtgtgtgtatatatgcatacacttttttatattaaaattttgaggctatacagccactgtgccctgtggaataaagccatatatataaatgttttatatgtatatgttttatacataaataaaacatttcatctaatatatatatgtgtgtgtgagtatatgtgtgcatgtttagcagatatttgtataaaatataaacactctgttgtcatataggctatatgcgaaattgttaattttaaaataacctcaggccacagacttgtagtaatcatttgaaggcctcacctagtgtccccttggtgacgtatgcagcagctcaaattaaacctttgtgcattgggttatgaataatcttttcttccaaagatggcaaaagcctcggtttgatttgatactaaagaataaatttctctgactttc

SEQ ID NO: 1853 - DNA, 322 bp, Homo sapiens
aaattgcacacactcagtgcagcaatatattaccagcaagaataaaaaagaaatccatatcttaaagaaacagctttcaagtgcctttctgcagtttttcaggagcgcaagatagatttggaataggaataagctctagttcttaacaaccgacactcctacaagatttagaaaaaagtttacaacataatctagtttacagaaaaatcttgtgctagaatactttttaaaaggtattttgaataccattaaaactgcttttttttttccagcaagtatccaaccaacttggttctgcttcaataaatctttggaaaaactc

SEQ ID NO: 1854 - DNA, 1128 bp, Homo sapiens
gacccggtgttcctcttggtggcagatacctgctaaatgccactgacaatgttatgagattcattactatcttaagatgtgtttatcctcagcttataggaatctctccaggtcaacaggttcaaatattcaagaaggtagaactctcctcaatttacactgactttttagaggttcttccccccccgcccctgcagaggaatgaaactacttacaacatttaattcctttcataatatgaaagaattgatacaaggctatttgtctcgtaaacctggtctgcagaaagtcaaacttacaaaaactgttgtgacaaatgttatgtacatatattgatatgtaactgcattagtggccattttgaatcacagtggtgatcgtgtgaatatatttaacactgtgttaaattaatttacgttgctattttattttaatcataaacaactaccatgtttcttaatgttttgtgtaaatttaaggtaattatactatccttttaaacttcaagaaaacaaagttgttagcgtatttacatgaaggcgcattatgttgtcgtgtgtttcagtttcacattaaactgaaccttttactaattgtgagctaaagagatatatatatatatgtgtgtgtatatatatatatctacatgtctttctgtagcctctgcatactactggctgtcatcacaccagcgtacagtagctaaatttttggtgcaattatagcaaatgataatgttcccttttgaacttttacattttggcatgacatttcagagtattgtgggaccatgagacaaaattaagtacgatcacattctttatttctcattttaaagaaatgatgttggtttaccttttcctagttgaagatagtaattaggtttctaagctgtatactgtgtttattggtggcagtgacaccaaagatagaggcaatggatagaaatttttaaactggaaagaaaacctgaattacactacattttcgaagtctcttgtaattatttgggatatcaacaaaatttgattcgtctgtctaatcccttgctagtattttaaatatgtctttaacacattgtatcctttaattcttcattaaaatggaaataagtagatgtttcaaagt

SEQ ID NO: 1855 - DNA, 697 bp, Homo sapiens
tacctcaatgcgattctgagatatttgaatttcataaaattgtaactgaaatttaaaatttttagttcaatgtgattgttttctttaaaatgagtactgaattgtactggtctgtccttttttcctttgcctaattgaagaaataattgcttgttttctagcctggcaagatattttcataaaagagggataacaatgctgattactaccttttaaaatattttagataaatgcacagcaccacagcaccacatctaagcattagtgatgggtagctgatgtcagcttcatgtggattttaagcactctagaaacaatgaagcttcttggcatattttaaggagctcccaaaatgtgttacctattaaattgtaactcagcaagtagaagaccatttgaaaagtcaggtacaaatatcctcaagtggcataaaaatgtagtcagttttctcttttaccagtttttatttccactccaattatttagaactttatttgtacatgtgcagaagaataaggcagctgagaatcttgtttcccccaagagagttttacaggctgagtgttgcaaatgtgttctttgtcctgttatatgtatatcaggaatacaaggatgtgaaataaaactgtaaatttgcataactggatgtacttagataatgtgaaataaacattaaagacaaggtctatttttaata

SEQ ID NO: 1856 - DNA, 2165 bp, Homo sapiens
ggtaggttctataacctctgtgggtccccgtttccacatgtaaaagatgaacataatactagtactacattaatagggttaggagggttaaagggtaaagagtcctttgagcacattttctggcaaaccataataacttgataaatgctaagcattggaacgggtaccaagtctccaagaaacaagtatctcaatgcagttttagaaatttcctgttttattcttttctgtggccctgctcaccctctgggaataatcatttcaactttgcatttgtgaaaaataatacatacaatcttaaggttacttcagactatactttttcatcgagcagtattgtattcaaaagtgatcgatctgctgaatatataaattaaaatggacacaagccttcattcatcagacatttgagtgtctgtcctctgagttcccatagaatctgaattacaccactttattcatacttacattatgtgtttacttttctgagtgtcctattaatctttattccttaaaggaaagcctgagggcatcttgtttaacaatgcatctctctcttcatcaatcaacgctgcaggtgcttacaagacttataacttaaaaaaattataatacaaggctcagcgcagtgcctcaagtgccaacagtttcggaggccttggcaggcggatcacttgaggccaagagttcgagactagcctggccaacatggtgaaacaccgtctgtactaaaaatacaaaaattagctgggtgtggtggcacgcgcctgtagtctcagctacttgggaggctgaggcaggagaatcacttgaacctgggaggcagaggttgcaatgagctgagattgcgccattgcacaccagcctgggtgacaagagtctcaaaaaaaaaattataatacaagtaattactttcgaattctgccatgggtatctttttattattaagaaaagcctgtcatcaagggattcatttatgatattcctaaatatgaaaatattttgtgtaagtatatatttatctccatattagaacttagcaacagtgctcagataaactcaaaagtattacttgagtttagaatgcattttgtatctaatattttaatatgaatgtgcctgatattttcggaagtcacaacactttatacaaataatgaaggcatgtacagaagattatgtgtaggaggaaaattgagtagctaatttaatttcatttaatattttacttagagtgtatacatgtttatagactgcaagtctatgggatttaatagatattacagcaaattacactgcgaaaacattgatagttctacactgtaattaaatgttatatatattattaaaattattaggttggtgcaaaagtaattgaggtttttgccattgaaagtggtggtgcatgcctgtaatcccagctactcgggaggctgaatcagaattgcttgaacccggagggcagaggttgcagtgagctgagatctcgccactatgctccagcctgggcaacagattgagactctgtctcaaaaaaaaaaaaaagtcaagtacagttagttaaaggaatgtgcatttaaaaattaatctatgattaggctattaatatatagtctaataattttattgcattataattataaagtagttttataattttataaaattttattgatgctgtaatttttataaaattttatttattttataattttacaaaaaattctaatacctgtaatacactttttagtgccttttctttctaaaagttaatgtttgaaattacaatgtgtaaatgttatctcgtcttgtttttcttattagggccccatttcactgaatgacaattgcaatgaggcataggaaagaaaagggaaatgaaattgcttgctgaagtcctactatgttctgggcactatgctgtttgcctaataaataattgccttgtgctgtgtaccttggagcagggccttacatagtgaatatatcaatagttgttcacaaaaagagcaatataccacttagaagctacagaacttaaaaatggctacttatactccatagaagatatagtaaataatagaagaaaaaaatgaaatggctaaagacattttgttttacaatggggctgtttttacatgttaattaaaattctatgtttaaac

SEQ ID NO: 1857 - DNA, 697 bp, Homo sapiens
tacctcaatgcgattctgagatatttgaatttcataaaattgtaactgaaatttaaaatttttagttcaatgtgattgttttctttaaaatgagtactgaattgtactggtctgtccttttttcctttgcctaattgaagaaataattgcttgttttctagcctggcaagatattttcataaaagagggataacaatgctgattactaccttttaaaatattttagataaatgcacagcaccacagcaccacatctaagcattagtgatgggtagctgatgtcagcttcatgtggattttaagcactctagaaacaatgaagcttcttggcatattttaaggagctcccaaaatgtgttacctattaaattgtaactcagcaagtagaagaccatttgaaaagtcaggtacaaatttcctcaagtggcataaaaatgtagtcagttttctcttttaccagtttttatttccactccaattatttagaactttatttgtacatgtgcagaagaataaggcagctgagaatcttgtttcccccaagagagttttacaggctgagtgttgcaaatgtgttctttgtcctgttatatgtatatcaggaatacaaggatgtgaaataaaactgtaaatttgcataactggatgtacttagataatgtgaaataaacattaaagacaaggtctatttttaata

SEQ ID NO: 1858 - DNA, 450 bp, Homo sapiens
gtgaggatcttcaacatctttcaaaaatgcatttatatagtcttactttgtttctttcattgcactctataatgatttttaaattaagaattttttatcttaggcaaagtgtgtctctttcaattcattaacttattaattttataatgcagttttatttttggaaacatataaatatcagactgtccttaattgaaattttgtctttggtttccaacaccatgatgaagctcttgctttttaaaaagtagttagtaaattctgcatgaattttagtaaactttaaaaaatagattttttccctaagaaagaatgtttgtagaatttaaagtggacagatgcctgttggagtaaaatcaactgcaactttttgatgttaatttttttccctgtgcaattataaactataagcaagttaagtgacaagcaaatgtaataaagactagtttt

SEQ ID NO: 1859 - DNA, 2035 bp, Homo sapiens
gttttgcccgtttgtgtttttttttttttttttttgaagtcttgtataactaacagcatccccaaaacaaagtctttggggtctacactgcaatcatatgtgatctgtcttgtaatattttgtattattgctgttgcttgaatagcaatagcatggatagagtattgagatactttttcttttgtaagtgctacataaattggcctggtatggctgcagtcctccggttgcatactggactcttcaaaaactgttttgggtagctgccacttgaacaaaatctgttgccacccaggtgatgttagtgttttaagaaatgtagttgatgtatccaacaagccagaatcagcacagataaaaagtggaatttcttgtttctccagatttttaatacgttaatacgcaggcatctgatttgcatattcattcatggaccactgtttcttgcttgtacctctggctgactaaatttggggacagattcagtcttgccttacacaaaggggatcataaagttagaatctattttctatgtactagtactgtgtactgtatagacagtttgtaaatgttatttctgcaaacaaacaccttcttattatatatataatatatatatatatcagtttgatcacactattttagagtcttaatgccaagtcagcagatttgctttatgaattacagggactagaaatgcccacattcaggaaatttgtaataacattgtctagacacctatcctcattctagtagaaagtgtgtacatactgtaaatatgtgtgattgcttgacttgaaaaggtttgaattctgaatgttataccatccttgtaagtaagtttgtaatttccaccataaattatggtaaatataaaactccagaggttgttctactccatacagttcacactgattgtgacacattcttagtagctagtgtctgttctagtcactgcactggagtctacgagccggaactcgctatatgcacgtgtgtgtgtccgtatgtaagaaagtgtgcaccgagtgactgaatggttgagatgaattggaatgctgaagactaacgaagaaactagagactgatatcgagcattctgcccacctcgctctgtatttaattaattgtgctatatgttgctttaacaacccattgagcagtcagggaatgtgagtaagcttgctgccaaaggtaactaggaaagcattcatctgctgcctccttgtttttgctcctagagagtgaaaatacaggcaattttactgtgagtgtttcactggaaatgtacaatctttgtgtgttagagtatttgttttagtaagaaatgtttacacagcttgtggaattatttcgtgggaaaataaatttttataacttctcccacttcaatttctaaccttgcctattgttcctgttgtttgtttacctcccagttacctaccattcctccccaccaccgactccagcaggttcactgtctgtcagaacccagaagtgcttcttataaccaaagtttctgttcttcagaagaaatcagggcaaaatggggtgacttgaagtgaataaaatgttaagaatattatcctacataagacatgtacacagaaggggaaccttgaagacattatctccatgcctcaattacactgctgtaagaagcttacaatgtcatcatgtttaaggctaagaccttttccgtgtctcaagtgtatattttgtccagttataactggatggtaagacagtattaagagtgcaagtacctggcacttgaagtttgtcccaggaaaatgcctgtgtataattacctaacttcagatctgcacattaacttatttaacaaaataaatcagccgggcgcagtggctcatgcctgtaatcccagcaatttgggaggctgaggagggtggatcacctgaggtcaggagttcaagaccagcctggccaacgtggcgaaaccccgtctctactaaaaagataaaaaattagccaggtgtggtggtgcacacctgtaatcccagctacttgggag

SEQ ID NO: 1860 - DNA, 2795 bp, Homo sapiens
cttttttgcttgaaagagactgctctatttattctgtgacatgaacattttttcctagtacctttggctgctaaggcagcagcatgtttaatttataacaacacaaacctctgagagcaacacttgaatcaagtgcagctgaactggaacataaaagattttttcttaactttttttttttaacacactaatcttcagttggatgaatgtaatgtataactatgttttcagcaacaattcttctgtttattctaattaatcagtgactgccttgtaagaaatgtttgtcatatgcgtgatgtcttctgaaatattcttataaccttaatgaccaattgctttcaattcttgaccagcactccctcccaaccagagaattactggtttgatagagtagtcttggaaaccatcaggtactgcctgcagacttctccagcactaaatatatttgttccctctataaaccattcatctttcggacagaacttactgtaaagaaagaaatctgcctagaggatatatgtaaggaagattccacatcatgagtacttgccttttaactttcccccacattactgttgagtcatggaataatgtttaagttgttatttgcatggaaattaagtaggctgtttatttatctaaaggaatcaagtccactcttctgcctgcaacatttgttcaaaaactaaccaaggtaaaatatttatttgaaagcccaactttgatgttaaatattcttgaataaatctgttattttaagaatatcacattattcaatgcatataaaactatcagaagttagtaaatcataccagcactaaaaataagacaattggaatatattttagcatcagtttacaaacaactttattatcaacagaaattttagctcttttctttgcaagatatatcacagctgctttgggcagtagctgaagccgaagtatgaacagtccattttgtttcttaaaatttgaagtcgtgtctgtcatagcatttttactaccagcagtatgttacttaaaaaactacatggctttccttgaatttatttgacggtattatgtaatagacttgaaacaattgccatctttgtagttatgccttgggttctaaaatgttataggaaactgctgaattgaatcctagcttttagaatattaataggagactcaaagttaatattcttaacaacttaaaattaaaaaaagtcataatctatcaaaagtttatttattggatggcattaaaacatttttgaggcagttgtctaatatgaacaataatctaaacaatatattccttaaattaagaggaaagacaagtgtcgtatttcgatcctgtttattcaaatgtgtgattttgctgaaatgaaagggataaaatgaatacttagagaataatacttcatttttgcagtactttttaattttgataaaaaagatacaaagttcataatatcaaaatatgtgttcaaaattggtattttaattttaatatttttgtaagttgatttaaattttgctcttttttcaggtgtgcttggtttattatatttagtcaagttaatttagtcgaatgtggtaacatttttctgatttatctttagttggagcacacccttgaactgaacagtggccaaaggaaagctttctgggctttggaaagtagttgtttaactttgttttaagccgttttcttagtgattctgtatcaagtagaggataagtgtagtttaacttagtttttaatataacccataatcaagaacatgagcgaaaagcagacataaatcgatatggatggtttgtggtgtgtgtgggatgtgggggaattaagaaaatgccatttacctaagcacagtttgcctgaatttctgcttggttgtgttgtttaccgtaagtactgagggtagtttccctaagtctgtcctgagaaaaagcatacttagtactcctgtatttgttcttatgaaatgactatctgccttcttgtatctagtaagattggctggctcaattttcttctgtcaaattatatggttattttttatattaccacatcagcattatattaaaagtgtttttaatagttgattgtattttgccaactactagtatagactcaaatttgctatttaatttttaaaatacaatttattttgtaaatcctttaaaaaatatttggttagttttggattagaaatgatttatgttagccatgtgttgaagatgaaattggcatcagtgtagacggtgctgattgggaaaagttcatgattaggaaattcatgtaagactttttaagagtattttttaggttttcactcaatctttcctgtcacagtaacgtgaaaactgattattctttactccaagagaatgttttaacccaagcaagtatctaatactagagcattggttctgacattcattgtaaatcagtgaactgtaagatactgtctaaaaaatgtacatttgtaattagtgcctttattcatattttgaaataagttcttagttttatattatacctgttctttagaagtcatgttagcagctaattatttcagtgatgaaataatttgtgttttatatcccccttcacctccatgtattggttagcacagtttatagtaagtgaaaagcaagggacccacctacattaccttcaggagactgttctaccttttaatttgaaaacaaggaaattaaattttaacagaaatcttttaagtatgttataaccaaagtgttcaattatccttgcaagttcaaatacagcatttttct

SEQ ID NO: 1861 - DNA, 367 bp, Homo sapiens
aatttctaggacagaacaacaccagtactggtttacaggtgttaagactaaaattttgcctatacctttaagacaaacaaacaaacacacacacaaacaagctctaagctgctgtagcctgaagaagacaagatttctggacaagctcagcccaggaaacaaagggtaaacaaaaaactaaaacttatacaagataccatttacactgaacatagaattccctagtggaatgtcatctatagttcactcggaacatctcccgtggacttatctgaagtatgacaagattataatgcttttggcttaggtgcagggttgcaaagggatcagaaaaaaaaaatcataataaagctttagttcatgaggg

SEQ ID NO: 1862 - DNA, 1688 bp, Homo sapiens
agacttagtgataaaactgggcctgtagctcaagagaaaagttgacacctgagaaacatctagaaattgcctatcctgctgttctagcacttcatctggctgcctttgcagtccttttactacagctatgaagaaacgcaacaagaaactcaatgcacaacaaaggattaattgctgcaaggacattcttgtaaggctttgattagttttcttgttgctttgttgcactgaaatggaattcccatgcccctaccccttaccccagttttttgaacatggaaagaaaatttaataactttttaaagtgacataatttacatgcaatatgtttatcaactcaagaatttaatatagttggtacacaactagttttgtttataaattggagatgcaaatagcaaaactaaatacttgctccatttacaaactacttgattttattgtacaagttgaaatatgctcttttgtttgggttacagtatgcttgctctaagtcaaattccaaggaactaatttcttctcctggagttgcattgattcagtattacaaatatatagcacatcacctgggacttggcaatctttgttaaaaaaaaatttcctttctaatgggatttggccaattttggtaatgaagttaggatggtaatgtctgcatctgctaaaggtaattttcttttgagaattgctttctttagtgttaagacctactcatattttgaagaaatcttgagttaagtgagttctgaggctgctgggggaaccagatcaattcaaagctaaatacttctttcagaaaggggccactgtggaaagtgctggtggggtttgcccttgatcaagtgcctccattgtgctgcaagggctgtagacagcagggtgggacagtcagtcctccgagcagcaggaatcatcccgtcacctgcagccttcccatgcttccgcctttattcagaactttctgtgccactgtagatagctcaggcaaaactattacctgggtatttatccactaatgagtcacaagaaaaggagtggatttggtaagaatagagatttgttttatttaaaccacttcccattactgaccattaaaagctcaccactagagttcctgaaacaggtgaaacctgtatgacagcccttccactttggggagccacgcttttgatgtgacagtaccgcagagtgattcccccactgaggatgtcatcatcaaactcttctttggtgtgtgaattattagtggaaaagacccagctgtaattagacctccactgtgtacttagctggaagaacatgttaattctgcaatatgtttcttggttaaacattgcacagttcttacctcatttctgtaaataaagttttgtgaatctgttttgtattgtgacaaattcataagataacattgatattttgatttgtaatatttctaattggtagatttaattgaaaagtaaaattaatttatttttatatgttcaggggaattttaaagtcaaatcttttgtagataatttaaaaaatcagtgtggtttattttacttatttaacccactggttgttattctgtaacagtttgtataaatggtaaattttgaatgtgttgttattttacctagatgtaaaattccacatgtattaaaatgtacaaaatgttttgttaataaaatttaataatgttt

SEQ ID NO: 1863 - DNA, 309 bp, Homo sapiens
cttggggaagttaacgatccgcccgagtgcagaggaaaaccagaaacgccttgccttcagctgaaccaccgtttgtgcgagctggatgtccttttcagtagaaaagaattttccttttgaatttataccattcatcaattttgacactttaaaaacgtgtgaaagggttaagagggaaagatactgcccaagtatttgaatcgtttagtagtaactgtccatttatcctattttgatctttttcaagtcttctgaaaggaagtagacagtattacaccctgaataaataaggtgttgttttccacaaag

SEQ ID NO: 1864 - DNA, 1713 bp, Homo sapiens
tacctgagactgttaaggaaaaaaattttaaacccctgatttatatagatatcttcatgccattacagctttctagatgctaatacatgtgactatcgtccaatttgctttcttttgtagtgacattaaatttggctataaaagatggactacatgtgatactcctatggacgttaattgaaaagaaagattgttgttataaagaattggtttcttggaaagcaggcaagactttttctctgtgttaggaaagatgggaaatggtttctgtaaccattgtttggatttggaagtactctgcagtggacataagcattgggccatagtttgttaatctcaactaacgcctacattacattctccttgatcgttcttgttattacgctgttttgtgaacctgtagaaaacaagtgctttttatcttgaaattcaaccaacggaaagaatatgcatagaataatgcattctatgtagccatgtcactgtgaataacgatttcttgcatatttagccattttgattcctgtttgatttatacttctctgttgctacgcaaaaccgatcaaagaaaagtgaacttcagttttacaatctgtatgcctaaaagcgggtactaccgtttattttactgacttgtttaaatgattcgcttttgtaagaatcagatggcattatgcttgttgtacaatgccatattggtatatgacataacaggaaacagtattgtatgatatatttataaatgctataaagaaatattgtgtttcatgcattcagaaatgattgttaaaattctcccaactggttcgacctttgcagatacccataacctatgttgagccttgcttaccagcaaagaatatttttaatgtggatatctaattctaaagtctgttccattagaagcaattggcacatctttctatactttatatacttttctccagtaatacatgtttactttaaagattgttgcagtgaagaaaaacctttaactgagaaatatggaaaccgtcttaattttccattggctatgatggaattaatattgtattttaaaaatgcatattgatcactataattctaaaacaattttttaaataaaccagcaggttgctaaaagaaggcattttatctaaagttattttaataggtggtatagcagtaattttaaatttaagagttgcttttacagttaacaatggaatatgccttctctgctatgtctgaaaatagaagctatttattatgagcttctacaggtatttttaaatagagcaagcatgttgaatttaaaatatgaataaccccacccaacaattttcagtttattttttgctttggtcgaacttggtgtgtgttcatcacccatcagttatttgtgagggtgtttattctatatgaatattgtttcatgtttgtatgggaaaattgtagctaaacatttcattgtccccagtctgcaaaagaagcacaattctattgctttgtcttgcttatagtcattaaatcattacttttacatatattgctgttacttctgctttctttaaaaatatagtaaaggatgttttatgaagtcacaagatacatatatttttattttgacctaaatttgtacagtcccattgtaagtgttgtttctaattatagatgtaaaatgaaatttcatttgtaattggaaaaaatccaataaaaaggatattcatttag

SEQ ID NO: 1865 - DNA, 928 bp, Homo sapiens
taactgagcaaagttatattgtgatactcaaattcacagcagagtagttttgagtaacagtaattaaatccttctaaatatttgaactaagtatattctagatttatttaatgggaaatacctttagataatattttctaaatttatgtaatactttaaacattcgtagcttgaatatgtgaggaactattcatggtcattcgcatgcataggatttgttctacaggtagattttaaaaacacgttaaagggccttaaggcattttgttattctgttaaaaaccacacacactcgtacatgcagacacctccaatgagatatagttaagagatggcattcaaaaaccctaaattattctagccaatttgtcataggcataggcaaggaaagctggccttgctaactatatagtagtatacacaagagaaatctttgaaggaggaaactgatgacagatatacagggcacttgaaggagactctgatgctagttatataagtgcattaacttaagacacggactctgtgggtaacctgttaggttttactaagaatttaggaaaaatttactcctctttatcacaagttttccaaacctccttccccaccctatctaaagtgttccttacctttcatgggcccagcgagggtagaattcagaatagagagttatactcctgcatacatgctctccctctcattgaaaggtttcttagtctagctctgctcatgaatgaacaaagaagcaggcatgtaaaatggatccttgtcctaacgtcactttcccaagtttcaaaagtcacattttcaggtatttaaggaatagtttgaagctaataccatcaggctcagagtttacatgcatttttacttaggaagtggtaaacgggtgaaagagggtttcaataaaattttaaataaaaacagc

SEQ ID NO: 1866 - DNA, 106 bp, Homo sapiens
gccatcagacgaacacaagagaggctcaaacaagaaattcactgtgtacactctctaagacattctccaaattgattttatctctttaaataaaaactttaaataa

SEQ ID NO: 1867 - DNA, 1150 bp, Homo sapiens
ccatcttcaagagtcccgttcccttgccaccccttcacgtgcaccctcaatttccacaattcacttgaatgacttgttttatttgcaataaaactgggctgaatttgctgctgtctccagcgagtcattgcttctcttaatttatttacctggaatcaacttaatcctgtgtgttaggctgttcttgtgttgctataaagaagtacctgatcaggatctgggagaatttgaaaaaaaaagaaaaactagaaaaataaacaaaattaaaaagaaaaaaaaatacctgagactgagtaacttataaagaaaagaggtttaattgactcacagttctgcagggtgtacagaaagcatggtgccagcatttgctcggattctggggagacctgagggagcttttactcatggcagaaggtgaagggggagccggcgtctcacatggcaaagcaggagcaagagagagtggtagggaggtgccacatacttttaaacagccagatctctcaagaactcactcactgtcaccaggacagcaccaagccatgagggatccaccctcatgacccagttacctcccggcagggcccacctccggcactaggaattatacttcaacataagatttggagagggaaaacatccaaaccatatcacccaactcccacttggagtagaacttcacaaaacgacagagggacagctgtttccatcaaacacttccacagcttcacctgagacgagggcatgactctgggaacatcaggaggctgatggactattaagccaaacaattcctacaaaaattccctgcaccttccactgcgtttcagtccttgacagacataagtaagggatcaagtgagaagaggaaggaaaatacaggatccaaggaatcaacaatgctagcactgaagagcaggattacggaggagctgtgctctgggagcatatatggtgatcaatcagatgcatgacttttttttcaaaattttaaatgtcttgagcatgctacttccaaccattctacccacaaataaactgcaataggacttggttagatttcaatgattatgaataaatgttcaccttcataccttctggttacaaagctaaactttaaaatgtccaaataaaatattcactaaaattt

SEQ ID NO: 1868 - DNA, 346 bp, Homo sapiens
gaagtcccagactcggctgaagatctgattatgtctctgtgcatattgtacatgtaaatatctataatgtaaatgtaatttaagaatcaaatttttcgaatggcaatcaactgtttattatttatctatttattatcctgttgagttgatgaaatagatgatttctttttaaatatataatttatataacttatcctgattttctgaaaatatgcaatagcctatgattttcctgaactctgtgttgttgggagaactctggccagaaaacgtcctgcttatttattgccagatatggtttatttctaagcgttgtcaataaatgctatttacaccttttcctgaa

SEQ ID NO: 1869 - DNA, 1519 bp, Homo sapiens
aggtcaaatcctattaggcacaagtcggagttacatttaaaaaaaattaacagtctacaacaactgttttcacaagagaatgtaacatattgctgtatcgtttgaggcttaatgctaaatatgtgctaaatactggattaatagatttcagtaaagctcgttcgttttgtttggttttctttttacctagttgctatagtgtctacagtctatactcaatacctataaaatgcagtaagcatgtgttacagaaagaggttctggtgggagagaaaggtgcgtgtgagacaggagaattgtcttaagcatataaaacatgtatgattccagaattttagtatgttttgtataaaactatttttcattacggagactagaagtgaacagagaattacacaagtgtgactatacaaattgtaaaacagatactataatatttccttttattttagtgttatttagctttattacagatttctatttttgtcaaaacttcatggttcctttcaagatcttttttgccaaaacattttgatactatagcattgtacatttgaaagtagtgttctagactataaaaccaatgaacttctacatgagccctacagacaggcatgtgtagaaggcaatttatcaaacctattgcactgccatgaaaagtgtgtataataatttgctagcccaagcaagctagttttctttgcttgcttcttttctttcttttttccttccttttttttttttttttcttttttaacatgttgagattctctagttgttttctttggcgtatctaaccccttcttttgttttctgagacctggtaacccacgctcttgcattgtggattttaaaatgtatactctgtacggttctgtaaaccgaaaaacttttgtaaatatataaatatacatagacataaaaatactgtatgtgacagcacatagagtagttttcccacaccaaagttaatttttatgcatgctttaaaagtatatatcgggaccggcagaaatggaagtatccatacatttttaaaaagcaacaagtttgcacagctagagtgtttttgtaaataaatgtatttgtataacacagtcatgtaatatacagaactataagcagagactttgcaaaactaaataaagggctgcatgcttattattttttgtaccttgtcactataactacttcctagtcaaagaacgaaatgtaactgttaccgagttaaatgtttttccgctttgagggatgtaaccacatccactcagaggacactacttttctgaaagctctggggtgactaatgatgagttcctaataaattaattgcaagtgtggtgccttggatgtggcctgttggctcgctttcttctctgtggcttatcaaggtgtagatgacagaaagcaaacctggatacagagtttccaccctcagttcctggaggggctcttattattttctctctttttaaaaaacttccagtagaagtaaagtggaaataaaatgtctttatca

SEQ ID NO: 1870 - DNA, 1209 bp, Homo sapiens
aagctttcagagtaaatttttttttctagctataagcatgcaataataaatctcaaacactgatttggagtacagtagcattttgtcttttatgtaaatatctctatatctgtttggaatttcaaaagtctgatctctagggctgacatgagaactccatgtcacctcctcagatctttaatctggaagtgacaaaaggtaacacagtgcacggacctttgagctatcatacttttgccttctgctcatgaggggtgtatcaatttccactcccacaccctcactgttatgtggaccaaaatgtctggtatactatttggcgattaaaatatttaagcccagttttcaggtactacatctgtaactagtgaatactctgttgattagaaagttaatttaccactcaaaatggctaacttgaatggaggaagtagtaaactcttctattaggatttgggccagtgttttttgtttgttttttggtgcagtttcagctcactgcaacctccgcctcccaggttcaagtgattctcctgcctcagcctcccaggtagctgggattacaggcatgcaacaccacacatggctaatttttttatttttaatagagatgaggtttcgccatgttttccaggctgatcttgaacctctgacctcaggtgatccatccacctcggcctcccaaagtgctaggattacaggcgtgagcctctgcacctggctagggccagtgtttttaaccctcctcaaattccattttggactacaactaatgtgtatctcacactgtccaaattaaagatgtactctgtccttcactctcctttggatgtgtacggttagggtgacgatgtttgaaaatcaacacataactgaaatccaggatgaaacagtaagcagaactacttagaagtgaatacagaaatgatctatttcaagaggaaggttttccaaaattaagagtacttgagtagtctcaataggagtgtatttgtagacagcagtttccctatattatttggagtcaattcttacgtaatttgttgtttatttcttcagtgaacattgtctttttctggcagctgaaactgcacacaactgatacacatatttaatttgtattcctttgtagtaatacattttaaccatgatttatgtttgtgaatttactggatgttttctttctgaattaaagattgtcaagaccaa

SEQ ID NO: 1871 - DNA, 2952 bp, Homo sapiens
catctccaggaagaagaggaaaaggagggaaccccggattggatatgagacagaagatataagaatcaaatattcccaaggaggatttgtcaatcaaggaaaacatgacagatggtgaggtaaagtcaaaggcatgggtagaagaggaccaggggggcaagagcaacaacgtcataatggagaagtcagactttggtcaagaaagtccttcccttggtaacactaggaaaatctttccatttcagcatgtttaaggaaaatagcccacaatgtctgccctgatcaatatgtatccatgggactttgaagatcctaagccaggtaaaccaggagacacagaagacgtaccagatttgcaaagaaagaaaaggtataagacatatataactgaaattctaagtagctgaccgagaagaacttactttacctatttaaccttgatagcactgctaacttaatgcatcccaaaaatatcttttatattaatgattgctctcattttcttataaatgtatgtttcagtatatcgttgtgtctcatattcaagcattccagattgtataatttttgcaaataactttggtattatgtgacacaacacatttatgcaatctgcagctattcaattgttattgcaccttacagaatacctgctatctatcaactttagttgattcttgaagtacagtaagctttctctggcttgggaagccataactgttactataaaaacttttagttttggctgtggtttatatattgtgactttgaatttgactctattatttcacatcatggtttgttatactgtcttaatcagggttttttatacaagttgagttacttgttttgcacttcttgttaggactcagaagctttattaatattggagatcaagtggtcctacttagtcatatgtctcaataagttaaggacaacttatccgttgtttattcaaagtcagagatagataacgccttcattccaattaattgtcccttttaactctttcagtatttcctacttagcagcatttccaaaggaagaagctaagagtgagaaaaatataccgtgcattattattactattggaaagggaagactctagggatgacataagaattatagcagtactataaacccaggaagtttgcctttcaaaaaaaaacacaggtagctcctgatagcactttcaagggattatttttttaaagagaaaaattatggtagcatcaagatcattgtatggatatatttttattatgtgtactgaaaatacagtattttaaaataccttaaagtatttattctcataaactcttattcattgcttcagctacaggtagaacttgctgggctcaaatcccaaagaggttttataaccttatttattcaaaacctataaggtggtatggaatcttcattctcccaagcactggaaaatgtctaagtcctgcaaattgccattgtgagccacttgctcgacatgtaacatgtaaggtccatttgcaaagcaaagcagcccccaaagcatattttataaagcttattgcattccacactgatctcttggcatgggaatcctaagctgccgactaagccctaccgacatgatcatgcagtgagattccaaagctcagtctcatttcatttaaagaagaatcactcagaaatagaaccgagacttccctttttctccctgtaaacacccaagtatcaactgcttatttggccaggacactcccagcacaaataactattttttatgtcacaagcagcaaggaggacatgctagggtgataaaagatggagaaacaggatcagagggtggatatagggctgttcttagagagtattttcagtggaaggtaaaaacagaattctccatattcatcatcaaatttttctcagtgatttttttattcaggagtaagcaagcacttcactgtttcacaaagctgtgcgcaaatcttcctcacccatttgctgactttatgcattactcaggttggtggggtcggtttgagaagatatagaaattctatttttgtgtctttacaccatttatttcttttatctcttccttttcaatgaaggcctatatgcttggtgacctcctttaaggaatctttgtgaactgggttggaagttcctagacccacatatttgtttcatttatgtctgaaatctgttagcacttgattcctttcttgagaattatgcagtcaagcatcagtgactttctattgcacttcaggattgatcctgctagagatgtgagttaaaaagacttgccaaattatatcttagcgacattctatagttcatagattattctccaccagcataaatcagtgagagtgcctagagtctttctgagagtttcattgccattatcaacaagagaagttgaaatttacaagtcaggaggttatttttccagattgataaccatagaaagtgaataaacacttttaaggtcgcaaacatttgctaggttgtccttctcaatgcatgtgcaggctgcatcctgtccttgtttttaagccagggtttataaataagtagatttataccaatcttaatagaattgtatattttatgcaagaattaaatgctttacaacatgaagtataactcaacccattgtaaactttggtggcaatatggatttgaaactcgacagttctcttgtatttgcttcctaggtttctgcatgcaagttatgacaggtaggactgaaaaaacactgccttttgacttctagcatttagcaaccgagagtcgtagagtcaataaagctgtaagtgtcttcacttaatctgtggttctcctaaaactattatctgaaacctacagcatcccaccatgaaatatttggtaaatttatgttgtgacgtgttgcagcatgtaaataattataacttctctgcaataaaacatatttatatg

SEQ ID NO: 1872 - DNA, 573 bp, Homo sapiens
ccgttcaacgaggcagtcaccgccgtcggaaggcgctggagcctgcggggcagcaggggccaagcaggcactctggggctggcaccagcaggcactgaagctgcggccctgatctccgcagaggctgcctgctgcgctcggccctcaagtgcccgggccggccttcgtgctccgaaacaagagacctgggagccctcgggaaacctcccccgacgctctctctcggaactcccgcaccctcctttctcaccagcccgccagttgtggcaaccctgtccttgttcccctaatctatcactttgttctttttttttgtgactcctgtggactccactgcgcctgggatctcgccaacccctctctcatttggggtgactgaattcacagatttttttttttattggaaacggcttttcttggccaacagaacacttgctagcggttgaatcttagagaaaaaagcccgggaggggtggggagaatttcgaagatgtatttcatctcaagcttgctctttctcttcctttggttattaaggtcactaaataaaggaagtgccttggaaaacccgtg

SEQ ID NO: 1873 - DNA, 524 bp, Homo sapiens
agaacatgccctcagctaagccccctactgagaaacttcctttgagaattgtgcgacttcacaaaatgcaaggtgaacaccactttgtctctgagaacagacgttaccaattatggagtgtcaccagctgccaaaatcgtaggtgttggctctgctggtcactggagtagttgctactcttcagaatatggacaaagaaggcacaggtgtaaatatagtagcaggatgaggaacctcaaactgggtatcattttgcacgtgctcttctgttctcaaatgctaaatgcaaacactgtgtatttattagttaggtgtgccaaactaccgttcccaaattggtgtttctgaatgacatcaacattcccccaacattactccattactaaagacagaaaaaaataaaaacataaaatatacaaacatgtggcaacctgttcttcctaccaaatataaacttgtgtatgatccaagtattttatctgtgttgtctctctaaacccaaataaatgtgtaaatgtggacac

SEQ ID NO: 1874 - DNA, 313 bp, Homo sapiens
ggacgggcatgatgagtgttccagagggagaagcatcgctgaccccgagcgcaggttttgctagcagattgccctgacatcttgttcatttcagataaaatgtgatgggaaacttctcactgatgtgctcaagtacaggcataaccattaacccagtagagttcagaatatctgcccaaatgtacatatcgttcccatgtattttaacctaaatggaatgtatcttcccttccaagctgcctaaagcgctgttttaggttcatttattttattatgttcagaagcatcaaataaaagttaaacgtttttccgg

SEQ ID NO: 1875 - DNA, 322 bp, Homo sapiens
caactctttctgttctttctggcagctatcttaccagactgtgcctaaagaattttgtggaatacactttgtttgcttcatgtgcagataaccaaaaatcattttaaaagatatcaaacttattgatgggcaatttatttttttttattgcaaaagttttttcagaaaactttttaaatgtaattaataaaccacctgaatctgtcattctagtcctataaattataatcaaggtatcttgatggttatatgtggtattgtttacactgttaatatccacatgtaaggccattacacaaataaataaccaatgttaaaattc

SEQ ID NO: 1876 - DNA, 383 bp, Homo sapiens
cacaaaaattttccttttagtctagccttgtgttatagaatgaacttgcataattatatactccttaatactagattgatctaagggggaaagatcattatttaacctagttcaatgtgcttttaatgtacgttacagctttcacagagttaaaaggctgaaaggaatatagtcagtaatttatcttaacctcaaaactgtatataaatcttcaaagcttttttcatttatttattttgtttattgcactttatgaaaactgaagcatcaataaaattagaggacactattgagagtgagccactagcttgattttctttctcctctgatttcagttcactgttcagtttagcattaaaataataaaataatcatacagttcc

SEQ ID NO: 1877 - DNA, 2117 bp, Homo sapiens
actctgggaaattccatctcttgcatatttgatcagatagtgacatctttctgtatataaactctttaactgctattttagggaccttgcagtttgcacataattgttttatatcatagcagtaaatatttgcaagaaatcccactcatcgaccccgggtaaaatgttatggtaagcatgcacagtttgcagtctacagtttttttatgtagcacaaaataggtgtacctttataagtacattcaattttatgatttacatttatcatgtaatttttaaaaaaatccatctatctaggatatgttgatacaaagtctgcttttgctattctttttgcttaaatactcctatcattttctgaattacttggtatttagaactcctagcaccacggggaagaatagaggtatcatcaaacgtggcaaattttctttcaggaataataaagagcatgattccacagcttttctgggatgtttgagattcttttttagtactaagcaaaattctcatcacagaatgtagcccaggccaatttataactaaatctctatttgttcagatgatgcttctaaaacagcattgataggttaaagaagcttggtatttttaatttacttcaatgattagctcagttgcttaactggagttttaatcctgtgatatgtacattggattcatgactgtgcagcatttttagttatgtggtgtttggcagaatgacaataaggttttcccccattttggtttcaggaggacatgaatagtgtgtttattgtaactcctcatacacttttaaaaccaacatcttttttcataaatgttggtagtgtttgtccaggtaccttaactgtagcttgtgtaatgttgatgaatatctgtatcttacggcttccataatggctagttgatattcaaaaacctatttctgtgttttgaggggtggggaaaaaaaacactaagtgataatttgaaaaaggcatattgcttccagattctgatgtgtgagggaaaatactgtcacaatgaaaatcttgacaatttacttaacaagtaaccagtagttcatcaaaaccaacttgtacagactaataaatctttttcacagtattcagttttctcacctcttgctattgtatattgtagatttttttcattcatgtgttatttaatttacactgatctctgctattttaaccccccaaataagttatttgtcctttaaggttggttactataatacccctcagtaagattccagtattaatttctgggcagtttgttctctgtatacaattgcaaatgataagcatttttgtgagtgaccacctttgcaatatgtttgttaatttacttcatgttgggttctttctgaaatgtacatctttacatataaaaacctcacattctacttgatttacacttcctagtctacattacatgtggttgaaggttttatacattctatatgcttttactaaatatacaagatttactactagaaatttggagaaagaacactaacacatgtacttgtgatttgttcatgttatattaaaacttgagatttgtgtatttatgtagagtctgtattgacaagactgttgttttttgctccttgagctatataataatctgtgtattggattgttgtcttgatttggtctaaatttgaatatatatgagttacttgaatataacaaaaatgaattttgtttgatagatttatattgtaacctttttctagttcttgaataaatatagcctgctttccctagatgcatttgtgtaggaagtatatacatttccctattactctcatcagctgaagaatatgtactattgtgttactcaaattatgtggctttcattttgttgttttgttgcaagcttagtgttttgtagtggaggttttgtaaatgaaacagttgtaatatctaaggtcaggcacctagtaacagggttttgttaattcttttcagaatcattgaagcagtcttaaagggtcttttgcagatggtacaaattagaacaattagaatatagtattttgagttctagtagtactgagattgacccaaacaaataaaaaactattcaatttctgagtaatagtt

SEQ ID NO: 1878 - DNA, 928 bp, Homo sapiens
agatgtgaataattgcacatggttttgagaacaggaactgtaaatctgttgcccaatcttaacatttttgagctgcatttaagtagactttggaccgttaagctgggcaaaggaaatgacaaggggacggggtctgtgagagtcaattcaggggaaagatacaagattgatttgtaaaacccttgaaatgtagatttcttgtagatgtatccttcacgttgtaaatatgttttgtagagtgaagccatgggaagccatgtgtaacagagcttagacatccaaaactaatcaatgctgaggtggctaaatacctagccttttacatgtaaacctgtctgcaaaattagcttttttaaaaaaaaaaaaaaaaaaattgggggggttaatttatcattcagaaatcttgcattttcaaaaattcagtgcaagcgccaggcgatttgtgtctaaggatacgattttgaaccatatgggcagtgtacaaaatatgaaacaactgtttccacacttgcacctgatcaagagcagtgcttctccatttgttttgcagagaaatgtttttcatttcccgtgtgtttccatttccttctgaaattctgattttatccatttttttaaggctcctctttatctcctttcttaaggcactgttgctatggcacttttctataaccttttcattcctgtgtacagtagcttaaaattgcagtgattgagcataacctacttgtttgtataaattattgaaatccatttgcaccctgttaagaatggacttaaaagtactgctggacaggcatgtgtgctcaaagtacattgattgctcaaatataaggaaatggcccaatgaacgtggttgtgggaggggaaagaggaaacagagctagtcagatgtgaattgtatctgttgtaataaacatgttaaaac

SEQ ID NO: 1879 - DNA, 538 bp, Homo sapiens
cggagtcttatctgaactacacttactgaacagcttgaaggccttttgagttctgctggacaggagcactttatctgaagacaaactcatttaatcatctttgagagacaaaatgacctctgcaaacagaatcttggatatttcttctgaaggattatttgcacagacttaaatacagttaaatgtgttatttgcttttaaaattataaaaagcaaagagaagactttgtacacactgtcaccagggttatttgcatccaagggagctggaattgagtacctaaataaacaaaaatgtgccctatgtaagcttctacatcttgatttattgtaaagatttaaaagaaatatatatattttgtctgaaatttaatagtgtctttcataaatttaactgggaaacgtgagacagtacatgttaattatacaaatggccatttgctgttaataatttgttctcaactctaggatgtggcttggtttttttttttctcttttcttttttaaacaagaccaagatcttgcttattcttccatg

SEQ ID NO: 1880 - DNA, 169 bp, Homo sapiens
actggaactggacccaggatgctttgcagcaacgccctaggatttgcagtgaatgtccaaatgcctgtgtcatcttgtcccgtttcctcccaatattccttctcaaacttggagagggaaaattaagctatacttttaagaaaataaatatttccatttaaatgtcttc

SEQ ID NO: 1881 - DNA, 996 bp, Homo sapiens
aggatgccatgtttgctctaaattaagacagcattgatctcctggaggctggttctgctgcctctacacaggggccctgtacagtgaatggtgccattttcgaaggagcagtgtgacctcctgtgacccgtgaatgtgcctccaagcggccctgtgtgtttgacatgtgaagctatttgatatgcaccaggtctcaaggttctcatttctcaggtgacgtgattctaaggcaggaatttgagagttcacagaaggatcgtgtctgctgactgtttcattcactgtgcactttgctcaaaattttaaaaataccaatcacaaggataatagagtagcctaaaattactattcttggttcttatttaagtatggaatattcattttactcagaatagctgttttgtgtatattggtgtatattatataactctttgagcctttattggtaaattctggtatacattgaattcattataatttgggtgactagaacaacttgaagattgtagcaataagctggactagtgtcctaaaaatggctaactgatgaattagaagccatctgacagcaggccactagtgacagtttcttttgtgttcctatggaaacattttatactgtacatgctatgctgaagacattcaaaacgtgatgttttgaatgtggataaaactgtgtaaaccacataatttttgtacatcccaaaggatgagaatgtgacctttaagaaaaatgaaaacttttgtaaattattgatgattttgtaattcttatgactaaattttcttttaagcatttgtatattaaaatagcatactgtgtatgttttatatcaaatgccttcatgaatctttcatacatatatatatttgtaacattgtaaagtatgtgagtagtcttatgtaaagtatgtttttacattatgcaaataaaacccaatacttttgtccaatgtggttggtcaaatcaactgaataaattcagtattttgcctt

SEQ ID NO: 1882 - DNA, 542 bp, Homo sapiens
tcgtttttctagaaggaaaataaattctaattgataatgaatttcgttcaatattatccttgcttttcatggaaacacagtaacctgtatgctgtgattcctgttcactactgtgtaaagtaaaaactaaaaaaatacaaaatacaaaacacacacacacacacacacacacacacacacacacacacaaaataaatccgggtgtgcctgaacctcagacctagtaatttttcatgcagttttcaaagttaggaacaagtttgtaacatgcagcagattagaaaaccttaatgactcagagagcaacaatacaagaggttaaaggaagctgattaattagatatgcatctggcattgttttatcttatcagtattatcactcttatgttggtttattcttaagctgtacaattgggagaaattttataattttttattggtaaacatatgctaaatccgcttcagtattttattatgttttttaaaatgtgagaacttctgcactacaaaattcccttcacagagaagtataatgtagttcc

SEQ ID NO: 1883 - DNA, 127 bp, Homo sapiens
tagagtttctgaaatactttggaaaagtctcccaaaccttcagagagtggatgggagcgaagtaaggagaccccacctgagcagatacatggtattgcttacaataaagtacatttttgctctttac

SEQ ID NO: 1884 - DNA, 170 bp, Homo sapiens
aatgtgtctttaccatatggaacaattttgaacttctaagatcaagcctttttgttgctgagggtaagaaaggagctctgtgatgaggttccagcttacttctattcgccagtgtccctgtaatgctttctggtgtgatgtaaaatcaattaaacaaaacttgtgctctg

SEQ ID NO: 1885 - DNA, 1559 bp, Homo sapiens
ctgtctttgacttggaccttgtttactctaatcaaggcaggagatgcagcagtcctacttattgccatgtggacttgtgggaaggacacgtgtgacccttaagaatccagtttggattagtgtttgaaattgaattgggaatgttgttccaggatgtggaatgcagccgtgatcacacttaccgagcttactttgatctgtttgtcaatagcatgcaaaaaatgctttgtttgccctttgcttctgctttttttcagggaagctgccaaagaatgtcgacgtcgaaagaaagaatatgtaaaatgtctggagagccgagttgcagtgctggaagtccagaacaagaagcttatagaggaacttgaaaccttgaaagacatttgttctcccaaaacagattactagaaatatttaactatgaactgaaggcagcatgtatagttgcttttgaaggaatacaatatatagctggcaagaatggtggcttcttttctttgtatcattcatcttcttctttaatcacttaacattcctaaaatgcttcactgtacgtagttaagtcgtagctataacttcaaattttttaaaagagacaaactgtaaaaaatgtgtgtattcttaaaatgcaatatttgtaaggcttgttccaatgccacatacttgcagctcccattctatgtgtcatcaatagtgtcctatgcaataaaattatttgcaggtctttaaatcattttaggaaaggatgatcaaaaataatgcatccagcagtacaataaaagtaaaccacaaaaaaatacctcaggaaagaatagaaagaaagtctatctaatgacatgcctatatgagaagaatagcctagatatgaatatatggcatttgcagatttttatattagttgctttgttaaaaaaaaaaagattgtattgctgtccttgaatgccatagtcaaagagagtttttaatagaaccatgttggttgcactttgtagtgtttggtgctcatttaaatatctgaacatttactacagtttttaactctactgtgtaatataaaagatcttgcagaagttcttagtgttggtttaatattacctaatgaaagtgatgacatattttttatatctggaatgagcctgttgggatcgcattgcataccttcggggtacaagtcagtttctacactgggtgctgatccttgcacgcgccctttctaccatctcacggtggggatggccgcagggctgtgcacccagaagaagatggctgttagcgtttcggccttcataatggcctgagactttctttctgtaggtggtctggagctgtccggctggtggccccctattttgccatttagcgaacaaccacaggaattttaaaaacaaaaacatcccaagattttttcatttcaaaatgcttcaaagtccacattagatcagatactccgctgtcggcacattcagctgaggttcattacaatcgagactgcaatgtgatctatgtttcatcttgtttttataataaaaagcttcagggaacaagcccaaagccctcaccac

SEQ ID NO: 1886 - DNA, 517 bp, Homo sapiens
ttatattgaagcaactcaggttttggcattaaattgttccattttaaaatgcatcattaatacctaaactgtatcatagaatgaaagtatatgttaaaaagtgagatctttgtattgacagctgtcatataattttgaaaagtaaaaattttgactgccgaatatagaagaaaattttggggtaaaaaggagaatttttcctatttacatgtttatattaatctctagtaaaacattgtttttgttgtctttatgatgcatgcgaacataaatgtctgtatttcattcttgttggcttttgttacccacaattacatactattcttactaatctgagagttttctaaagtatgttttcaatgtttcactactctctactctgttaatttgtgctacagtttttcctaaaagagaatggaaaaatgatttaattttttaaactgtagcaattggatagataattttatttgaaattttacacactgaaagctctaaataaacagatacattcacattc

SEQ ID NO: 1887 - DNA, 1050 bp, Homo sapiens
ctacggaggcccgccggaggccacaccatcccttagtttctcctttagtttgagaaaagacagacttggggtgggtttgtttttgttttttctttccttttctttttttacgcatagctccgtcaagctgcctggatgagcgcccatgcagcaaggcttggaggaagcgtcagtgccctggagatcccagctcgctctccccactgtcagcaacagcacttccttcgtggaggaagtggactcgaatcctggaggaggaaataaagggaaagggaagtcgtggagaggcagggaaaatggttaagcagcccggccctctggagtccccatgggggcggtagctgaagttggcgagcgcagcggtggatgcagagctggctgcacccagggctgggccagtgtgtcctgtaagacttcttgcattccttctgctgcttttttgggatgggggtatttttgttcatttgtttttgccctgttttgattttggtcccacagagcaggggatgtagtttgtacccaccatggcgcagacttccaaataaatagtactggtcatttctctctgcactatttctgcgcgctgtcttctgagctttcttcctcaccagtgggctgtgcttgttccatttctgtacacccttattttataccgtttttcttcaacaatggcgaaattgactgtagtgctgaaccaaaagtatccctttccctccttattcctcaccccaagaacattctagatcacatgggtgcttgtgccttccgattttcttgcatttgtttttttcctgacctgaagttgttgttacaaaatcagtcagactttgtgggctgaaggacacggtgcagcagagggtgtccctgtgagagttctgcagagtgctgggcatgtgcctggaactaccgagtaggagccatttctttgtacccctgcctaatccattcctctccttccaagtccattgttgcaagcaatattcttctcaatttttatatgtttactttaaatcaaagttagtctatttgtataaaatttttaaaaaatct

SEQ ID NO: 1888 - DNA, 309 bp, Homo sapiens
aaaaaacagcacctggcggtgccccggggctcacgcctgtaatcccaacactttgggaggcccaggcaggaggatcgtttgagaatatatctccttgcccaagagtttgagaccagcctggacaacataatgagaccctcgtctctacaaaatatctaaaaattagctgggcacagtggctccctcctgtagtcccagctacttgggaggctgagatgggaggaccatttgagcctgggagatcgaggctgcagtgagccaagatcacggcactgcgctgcagcctgggcaacacagtgagaccctgtc

SEQ ID NO: 1889 - DNA, 69 bp, Homo sapiens
aattgcataaagctgcacaggattcccatctaccctgatgatgcagcagacatcattcaatccaaccag

SEQ ID NO: 1890 - DNA, 3506 bp, Homo sapiens
ctatccacaaactcaccttatgttactccaaagtaatagtaggggataaacccatagactacaacaattataggacagcttttgttaggaagtgatattctatgtaatatcagatggttaatacgggcataacaccttacagattttttttgaatttgtgaaagtttttggcaaaaatgcaaataaggttatgttagaatttacactgaggagaaaattgtcaatttaagaaatctaaagtgaaaattttgcttagaaataaaatacgacaagttatgttttgagtttgatgccataatagtttttagggcacctaacaataatttatagatgtatattgtggaatgtaaagctttaagaacttaaacaaaggtaataattaaaataacctcacaagaagtttaatgagtagagagaattcccatgtacacttcaccaaacttcctctaaggataatgtataatcatagtatatggtcaagtccaagaaatcgatgttaccttgctggtagatagagacttagtcagattttactatggtttgcatgcactctgtgtgtgtgtgtacgtgtatgtgtgtgtgtgtggttatatcaaacttttacgacttttacatttgagtaaccatcaacacgattagtttacagaactgaaaaggaatctgagatctgtactgtatcaggattacaaaggatttagcctcaagtagttccctttttgtattaataaccacacgctttctgcaaccctatcccttgcatccacttgactatgaagtttttttaaagcacagataaattgaataatcagggcaatagcattaagcacatctgcgaattatccctgaagttcaaaagacttatatatgtataagtggtatgtgatataaatcgtgtgtttcatatgcataatggaatttaacgtaattgtgaataggaagtaggtatcctagtttagtagtggttacattatcaggcccatcccagatgtttgtgatgtcctgaaacaatttaaaaggagacccacagagctaatgtttatccatttaaaaggtataaatcaaaataacaaattatctaaaaaaaatctatcctgtacatgtgaagatctaggctcgcctccatgttactccctttctcttcctacctgtggctcatgccatgccatgaagtgcctagggtacatatgtgaacattccagccttcagcataagtggtagtccaaattttctttaagcagctgctctccaagacagggccctggaaaggcccacacatacagcccagggctgcccagggctgttggactgtcatttcaaggctcattgtccccagacagggatctgggccctcagacttttgagaatatgaagaggagggttgaggctggagcagaaccagaatcaagctggtgtggggcttttattgatagtgtgaagattgtacactatattacatgatcagatcatacaaataatctaagattatacagtctagtgatcctagattacacaagtaatctaagcttccactttaggaaactagaaaaagaagagcaaattaaatccaaagtaacctgaaaaaacattagagtaaaaatcattgaaattgaaaagagaaaatcgataaaacccaaaactggttccttgaaaaggtcagtaaaattgataaacctctagctagcttaagaacaaacagaagacaaatattgctaataccaaaaatgaaagaggccatcacagctaatcctatggtcaccaaaaggattagaaagaaacatggacaactctgtccataaatttgataacttagctaaaatggaccaattccttgcaagacgcattctctcaaagctcacacaagatagacctcaataggcatatgtatctattaaataaaccaaagcagtaattaataaccttccaaggccaggtacagtggttcatgcctgtaatcccagcacttcactttgggaggctgaggcgggtggatcacaaggtcaggagttcgagaccagcctggtcaacatggtgaaaccccctatctactaaaaatacaaaaaattagctgggcatggtggcatgcgtgtgtagtcgaagctactcaggaggctgaggcagaagaatcacttgaacctgggaggtggatgttgcagtgagctgagattgtgccactgtactgcagcctgggtgacagaatgagactgcatctcaaaaaataataatgaaactttccaaaacaaagtgccaggaccagctgggttcactgatgtgtttttgagatacttaaggtagaaatgataccaagtctctaccatctctttcagaaaataaaagcagagataacacttcccaactcattttgtgaggccagtattaccctaatagcaaaaccaggcaaagatattacaagaaaggaaaactacagatcaatatttccattgaacacagatgcagaaatcctcaaaatattagcaaatcaggaatgcaaggcttgttcaacatttgatattcagtgtaatccattgcatgcattagcagctcaaagatgaaatacgatcatatcaataggtacagaaaaagcatttgacaaaatccaatatccattcatgttaaaacctctcaacacagaaggaatacaggagaacttactcaagttggtaaagaacatactacaaaaaaccctacagctaacattatccttgatgtttccaactagacactttcctactaagatcaggaacatggcaaggaacaccacaccactgcttttcagcattgtactggaagtgctatataatgcagtgttaaaaaaaaaagaaataaaatgcacatagatttgaaaggatgaaatacaactttgttcacaagtaacatgattgtctttgtagagaattctaaataacaaaaaccctgctgacattaataagcaattacagcaggattgcaggatacagtcctcaggtagatgataaaaaggaattggacatcaagtcattaaaagacacggagaaaccctaaatgcttattgttaagtgaaaaccaatctgaaaaggctttctattttgtatgattgcaattatatgacattttgggagaggcaaaactattgagccagtgaaaggaccagtggttgctgagagttgaggggaaaggagggatggcaggtagagaggtgatttttaaggcagtgaaagtactctctagggtactgtaatttgtcaaaacgcagagaatggaaaacagtgaacggaaaacacagagtaaaccctaatgtcaactctggacttcagttaataataatgtatcactgttggctcattaattgtaacaaatgaaccataatgatgcaagatgttaatgattggggagcctgtggaagatgggaggggaaagggttatatgagaattctctatactttttgctcaactttctgtaaccctaaagctactctaaaaaatgaagtgtatcaagtaaataaataaccaaccaaccaaccctgaggaac

SEQ ID NO: 1891 - DNA, 4511 bp, Homo sapiens
agtcagaactttgtagaacacagaacataaagggtgagagaaatctgttaatataatgataatgagaacacctttgccctgaagtcagttctcacagtatagaagagaacttaaagagggaaaaaacaatatgaagatagggaatgcaggaaaacattattctggaatttggaccatacactatgttacaaaactaaaagtggaaaaaacttattggtgaatgaatataggaaacattttgcccaatgccactcttcattaaacatcagagaattcacacggggtgaaacctgggtcagcatccctaggttgagaagggatgcatttttctgctactactacagtttcacagaatacctgagaagacacacttggagaaaccttttgggtgtaatgaatgtgggaaaacctttcatcagaagtcagctctaattgttcaccacagaactcatataagacagaaaccctatgggtgtaatgaatgtggaaaatcattctgtgtgaagtcaagaggccagagaaaatgcacaaactgtaggaaactataggaaagcatttactatgaggttatattttatggagtatatgtaataagaagtagcttctcagtgaacatcagatagtagagaaagtatttttaactgtatccaatgtgtggatgttttaagttaaaatctaaatttaatatagaacagaggtgttgagttgcaggatatctagcaatttaagaaaatgtggaaaaaatatttttattgagaaatagcattttactttgttaatatctagtttagttcattgtcaagactgctattttctaagagacttctaaagacgccactcaagccaatggctataagtagttcaaaggtttattgcttagccatatgaaaaataagggaagattttttagcaaggggacccacaaacaagagtgctcttgtatgtccagaagaaagagaaagaccatcaatcaggggccatagtacaggagcccaccagcaggatttttgaataatcctagggcagactaaattcagacgacccatctcagaatggtggatcaaagcagcaagtcaatttgccttgtatgcaacttatgaggattagtagaagagagtgggtccagatttctggtggtttctgccctgcagatgtctaacacataagccaggacattctgctgtgagtgacttattgtacccaactctatttctctccatactgaaacatgtctttcataggtgatacaactttttaaaatgtatgtgtagatataacttaaatatggagctttcaaaaagcacaaataggctggacatggtggctcatgcctgtaatcccagtactttgggaggctgaggtgggcaaatcacctgaggtcaggagttccagaccagcctggccaacatgatgaaaccctgtctctactaaaaatacaaaaattagccgggcatggtggtgcacatcggtagtcctggctactagagaggttgaggtgggaggatcacttgaacctgggaggtgggggtttcagtgagctgagatcatgccactgcactccagcctgagtgacagagagagattcaaaaaacaaaaaaaaagcaaaaatatactttgctattgggtaaggtatagtagttggcagcagaatggacccattgaggataactataaaattacagaaaatatttaaatgcaacttattgctatagaagcaaagaggactaaagggcaaaattctagagagtggtaaatctcagaaagcacaagcataaaatgcagctctgggggccctttccacttctggctatagggaagaacctgaatactgaacttgattcaggcagaggaccataacctgggggtcaggggaaggcatgggggggaccagaaaccagaagaacaatcaagactgcaatgaaaaaaatggatacattaggagcttcaaacacatataatttctcaagaaatttccagatgtctcatgctgcatagggcaggagcctgaaaagctaatttgagaagataataagtaggatttttgttttgttttgcattttgcagtacaaaggagaaatgattagaacttaggaagtgccagtgggttggtgaacatgccatcagtaaaagccctggaaacaaggtcatactagagattggttgtgccttgtcacaactgcaaacaatacctgagtggagtattcaaaaacttgcttagaaagaaaactctaggaacagatggcttcactgaagttattccaaatatttaagaaataataccaggcttttataaacttttctagaagaaaaaagatggaacttttccaattcagtttttgaggccagtacaaccttgataacaaaacctaaaaaaaaaacaacaaaaaaacccataaagctatagaccaaagtctcatagatttagatgcaaaatcctaaaattgaaaaaaacatctagccatatccataaactatatcatcaccaagagatgtttattagggcaatcaaaagatttattattttaaaaaaatcagtgtggacttccattcctctttcttttgattcccccctttgacttttcatgtatctctcctgccttccttccccagagtggaggagttagacttgcctcgtgggatgagaggagttgtggctttgtgtctgctggcaccaagagggctgagggtgaggtgtggaagggacagggggaggagatgggcagcattgttgagagattggtaacactgagcaaataaatatgttgagaatgatgacagcaagatttctccattagagaaggtatttataaaaataggaatgaggagagctagaaaacctggagtgtggcattagaatagaactcatatcttttaaatatataggaacaaataaataaattgttgtgtgtgcacatatgcatatattttgtgttcattctactgagaggacctaaacacaatgacacctcagtaacagtaagcacaccaactgccaagttattagttcctaaatactatccacaaaaaaggggaacagggatgattcctagtcagagattgggagaaatacaagatgagcctgaatcatctcatgtacctgacagtaagaaaatactctggctggtctcagtggctcatgtctgtaattctagcatgttagaaggtcaaggtgggtgggttgcttgagctcaggagtttgagaccagcctgggcaacatggcacaattgtctctacaaaaaatacaaaaattagccaggcatggtggcatgcacctgtagtccgaggtactcaggaggcagagacgtgggaggatcgcttgagcctgggagattgaggctgcactgagctgtgatcgtgccactgtactctagcctggaagacagagtgagaccccatctcaggaaaaaagaaaaaaaaaaagatgtcattcagcaggttaatggataaactgtggaacatccagaaaactttaacattcttcaaagaaatagaaaacacaatcctaaaatttatatgggaaccacaaaagacttagaatagtcagctatcctgagcaaaaggaatcaaactggaggaatcatattacctgacttccaattattcaacagagctacagtaaccaaaacagcatgatactggcataacaacagacacataggaacagtatagacaacccagaaacaaattcatacatctatggtgaccacttttgacaaaggaatgaagaacatacactggggaaaagataatgtctttaataaatggtgctgggaaaactggatatccatatgcagaagaatgaaactagacccccatctcttagcatatacaaaaatcaaaattaattaaaaagttaaatctaagacctcaaactatgaaacagctaaaagaaaacatcggggaatctctccaggacattggagtgggcaaagatttcttgtgtaatacctgacaaacaggcaaccaaagcaaaagtggacaaatgggatcacatcaagttaaaaatcttctgcattgcaaaggaaataacaaagtgaagagacaacccatagaatgtgagataatatttgcaaactatccatctgtattaggccatttttgaagtactacaaagaaatacttgagactgagtaatttataaagaagaggtttaattggctcacggttttgcaggctgtacaggaagcatggtgctaacatctgatcagcttgtagggaggcatcaggaagtttccaaccatggtggaaggcaaaaggggaataagtatctcacatggcaggtgcagggcaaagagaggggggaagggaagtgccacacaaccagatcttgtgagtactcagattttgtgaggggtgcttgaggtcatggatacccatttaccctgatgtgtttatacacatttcatacctgtattaaaatatctcatgtaccccataaacatatacacctactttgtacccacaaaaatttaaaaataaagttaatttcaatgtttaaagacttgttatt

SEQ ID NO: 1892 - DNA, 305 bp, Homo sapiens
gcctttggactggagggactgtccctggatctgcggaggtagacagtttcaaacatcacagtttgaatgcctgtgaatgacaagtcagtgggaaagagctcaagagatgtctctactcaaactgtgcctgcaggaggaggaacagagaagcctgggctgctgggactgggttcattctcatgacttggggctgtcgagatttaaagtgatgtaagctgtggttatgtggattctcttactttcctctgcctgcctcagtttaattattttgtcctacagaaatatcattaaaatatttttttgtt

SEQ ID NO: 1893 - DNA, 2080 bp, Homo sapiens
catttctttgtgaaaggtaatggactcacaaggggaagaaacatgctgagaatggaaagtctaccggccctttctttgtgaacgtcacattggccgagccgtgttcagttcccaggtggcagactcgtttttggtagtttgttttaacttccaaggtggttttacttctgatagccggtgattttccctcctagcagacatgccacaccgggtaagagctctgagtcttagtggttaagcattcctttctcttcagtgcccagcagcacccagtgttggtctgtgtccatcagtgaccaccaacattctgtgttcacatgtgtgggtccaacacttactacctggtgtatgaaattggacctgaactgttggatttttctagttgccgccaaacaaggcaaaaaaatttaaacatgaagcacacacacaaaaaaggcagtaggaaaaatgctggccctgatgacctgtccttattcagaatgagagactgcggggggggcctgggggtagtgtcaatgcccctccagggctggaggggaagaggggccccgaggatgggcctgggctcagcattcgagatcttgagaatgattttttttaaatcatgcaacctttccttaggaagacatttggttttcatcatgattaagatgattcctagatttagcacaatggagagattccatgccatctttactatgtggatggtggtatcagggaagagggctcacaagacacatttgtcccccgggcccaccacatcatcctcacgtgttcggtactgagcagccactacccctgatgagaacagtatgaagaaagggggctgttggagtcccagaattgctgacagcagaggctttgctgctgtgaatcccacctgccaccagcctgcagcacaccccacagccaagtagaggcgaaagcagtggctcatcctacctgttaggagcaggtagggcttgtactcactttaatttgaatcttatcaacttactcataaagggacaggctagctagctgtgttagaagtagcaatgacaatgaccaaggactgctacacctctgattacaattctgatgtgaaaaagatggtgtttggctcttatagagcctgtgtgaaaggcccatggatcagctcttcctgtgtttgtaatttaatgctgctacaagatgtttctgtttcttagattctgaccatgactcataagcttcttgtcattcttcattgcttgtttgtggtcacagatgcacaacactcctccagtcttgtgggggcagcttttgggaagtctcagcagctcttctggctgtgttgtcagcactgtaacttcgcagaaaagagtcggattaccaaaacactgcctgctcttcagacttaaagcactgataggacttaaaatagtctcattcaaatactgtattttatataggcatttcacaaaaacagcaaaattgtggcattttgtgaggccaaggcttggatgcgtgtgtaatagagccttgtggtgtgtgcgcacacacccagagggagagtttgaaaaatgcttattggacacgtaacctggctctaatttgggctgtttttcagatacactgtgataagttcttttacaaatatctatagacatggtaaacttttggttttcagatatgcttaatgatagtcttactaaatgcagaaataagaataaactttctcaaattattaaaaatgcctacacagtaagtgtgaattgctgcaacaggtttgttctcaggagggtaagaactccaggtctaaacagctgacccagtgatggggaatttatccttgaccaatttatccttgaccaataacctaattgtctattcctgagttataaaagtccccatccttattagctctactggaattttcatacacgtaaatgcagaagttactaagtattaagtattactgagtattaagtagtaatctgtcagttattaaaatttgtaaaatctatttatgaaaggtcattaaaccagatcatgttcctttttttgtaatcaaggtgactaagaaaatcagttgtgtaaataaaatcatgtatcataa

SEQ ID NO: 1894 - DNA, 750 bp, Homo sapiens
caccgctgtcccctttgcactatccttcctctctgtgatgctttttaaaaatgtttctggtctgaacaaaaccaaagtctgctctgaacctttttatttgtaaatgtctgactttgcatccagtttacatttaggcattattgcaactatgtttttctaaaaggatgtgaaaataagtgtaattaccacattgcccagcaacttaggatggtagaggaaaaaacagatcagggcggaactctcaggggagaccaagaacaggttgaataaggcgcttctggggtgggaatcaagtcatagtacttctactttaactaagtggataaatatacaaatctggggaggtattcagttgagaaaggagccaccagcaccactcagcctgcactgggagcacagccaggttcccccagacccctcctgggcaggcaggtgcctctcagaggccacccggcactggcgagcagccactggccaagcctcagccccagtcccagccacatgtcctccatcaggggtagcgaggttgcaggagctggctggccctgggaggacgcacccccactgctgttttcacatcctttcccttacccaccttcaggacggttgtcacttatgaagtcagtgctaaagctggagcagttgctttttgaaagaacatggtctgtggtgctgtggtcttacaatggacagtaaatatggttcttgccaaaactccttcttttgtctttgattaaatactagaaattt

SEQ ID NO: 1895 - DNA, 1757 bp, Homo sapiens
aatcataattaatgcgttactgtatgaaccacaaaacagcactatttatttagccttacttctacttccagatgcagtgcctcttttggagaagacatgtttatttttcatgttctttctgacattactttagcaattcaacttgatgtgagaagaaaaaacaaatgtttcaacacaaaatctctgttttgtgagaatactgcactatggaataattgacaaattgaaatctcatatttgtcccaaaagttgttttgagttagttctacctggtgcccatgttctgattgtgtgtgggattgcatggtgtcctgattgcatctaggtggagcggatggaatgtgctgggccactgttgggtggagagcagcacattcttacagaggagatggagcgttatgagcatagtatgtggataggtatcttcacctgcccgcccctgagtcagcctccttgacttgatagcttgaagaatccttttccactgaaatagaggataattaattgacacatctgaaatccccaatcaatcaatcaagagaaaggtagaactaaaaactccttaacttactgttgcttacacccctgaaagtctgtttttaagcaaatgggtaatagtagaaaataggttagaatctatggcttgattaaaaatatgttattacattatcatgttcaggattaggattagtagtcagttgctgtaaactattttgaacaaacagaaaagaacacggaaacatttttaacagagcatttaattatgttggaatacaggatcctagctctgtctgggaacattagtttatttgagccagctctatcagggtcttcccatggtggttcagaatagatgagcatagcatggttttgtttgtttttgctttcaattttctaatttggcatggatccatatgtatttactatcctttttctaatatattaatatatgctacatttgtatttgcattactataatactttgagttgaaaaagagtttcattgtggagagaaaaagcaaatggtatgccacaagatcactctgatttgagaaaagggaggaggggaagatagtctgaatggaaatctgaaatacggaatgttttagagaaatatgtcacttgcatatagaatgttttaattgaggtataaattaatgagacaaagtgaaaaagaaattatattcagataggactgcactacattatttgtcacacatggatctgttaccatcaggtcaattcctagtatgcataaattttttaacccttttaaaagagacctatgttgaaaacccctgaaaattcactgaagaaaaatcattactctttttctcagtaaatcatatcatctgaaatattacaaatttcaaatttctaggtgctatattaattcaatattacaataactcttacctaattattcttacaagttttaagttgtggtagtttagtgatttttttaaaagatgtgtgaaatgttctctgcaaaataattcaggccactgtctccttttatatattattataattatttattatgaagaccagtgaattacgatatttaaagtgagagaacttaattatttgcaaaggtaagttacagcttgttttttgagagaatcaaatgagtttacttttgttcctgttgtttttaactagctttaagtttaaagatggaagctaagcaatggaaatgctatacgtttttgacatttattaaatggtaccaataaagtattttattaccaaaagtt

SEQ ID NO: 1896 - DNA, 169 bp, Homo sapiens
gcacaggactggcctccagggatggcctgaagcctaacactggcccccagcacctcctcccctgggaggccttatcctcaaggaaggacttctctccaagggcaggctgttaggcccctttctgatcaggaggcttctttatgaattaaactcgccccaccaccccctc

SEQ ID NO: 1897 - DNA, 534 bp, Homo sapiens
tgtggcaaattgtgcagagtagtttattccttctgaccatcatagaggagacattaaataaattatgcatttaacagaaatactctgtacttctgagagaacacatcacttgtgaggatattcattgtgaggttctactagtgaaatatttgaagaaactaaatgtatgtcagtatggaagtagttatagcatactgtgtgctaattgaaaagaatgaggtggagctgtaaatactgtacaaagccaggcatggtggcatatgcctgtagtcccagttacttgggaggctgagacaggattgcttaagcccaggagtttgagtctgtaatgcactatgattgtgcatgtgaatagccactgcactccagcctgggcaacatagcaagactccatctctaagtaaaaaaatacaacagtagaaatatacccatgataatatacccaatatacccttgttaaagaagcaagtttcaggaaatctatattatatgcattcaaaaagacctggacaaataaagaccaatcttaacagc

SEQ ID NO: 1898 - DNA, 1393 bp, Homo sapiens
ctggccaacacctgcctcttccaaagtccccagcagtggcaggtgtacactgagccctggttgctggccccggccggtcacattgactgatggccaccgcctgacgaatcgagtgcctgtgtgtctacctctctgaagcctgagcaccatgattcccacagccagctcttggctccaagatgagcacccacaggaagccgacccaggcctgaggggccaggaacttgctgggtcagatctgtgtggccagccctgtccacaccatgcctctcctgcactggagagcagtgctggcccagcccctgcggcttaggcttcatctgcttgcacattgcctgtcccagagcccctgtgggtccacaagcccctgtcctcttccttcatatgagattcttgtctgccctcatatcacgctgccccacaggaatgctgctgggaaaagcagggcctgccagcaggtatgagatctagcctgctttcagccatcaccttgccacagtgtccccggcttctaagcctccaatatcaccctgtgagcctcgcacagctcagccccaacacagaggtgagaccaggaataaggccacaagtatctcactttctctgcagaaatcaatctttacttcatcagagagacctaaagcgattcttacaaggagcttgctgcaagaaacacggtcattcaatcacattgaggagggtccacatggcattgagagggtgctgcccgctcaatgcccagcagcagctctggaaggcagtgctcagccccatcaccactgtcccgtggatgcctgtgtacctcttgccttttctgggcttgcgtttctctcctctagtgggtggggatgactttcaatgactttcaatacttcccctgaaggaagaatgataaggagaaatgtctgttttgaggaaagggctttgaattccccagatactgaacaatttgtgtttgtgactgatggagaatttcaggaatgaatgagaaagcctttgcgaaactatgcaacagtttacatcagtcatgtgaagtatttgtctaaaacagagcaaactgaagaccaaattattctcctgttgaggtccgtggatggcagatttaaagggaagaaccacaaaggcttgcaaagataggagaggctccatctctaatgcatgtagaagctccttacgggtgcccatcaagagcatagcttggaagccaccatgctgtgcggaactgcgtcagggcaaatgtcacagcaggatttccccaacccagctccatcatcacagacacagagagctgcaggggaggcctgcccactgttttgtcgactctgccctcctctggcagcatagatccttaggtgctcaataaaggtgtgctgtattgaactgaagaagtgag

SEQ ID NO: 1899 - DNA, 1282 bp, Homo sapiens
gtatagggctttttgacagctttttgagacctcttaagaaaaaataaaaagtaaaaaatgaaaggaatcttttttagaaatagagatgctttatagtagatcacttaaatactggatcttttgctagtgtgaaaacattgggaatttaatgacattattgagctgaaagaaattacatgagtccagctaccctcatttcttttttatgtgacatggagcacaaagaactgaaaatatgttttgagggagcatgacatccttgacctcatttgaaattacttccattttcaaaaaccatcatgttttgtagatacattttgagaaaaaccatcatgttttgaggatacatttgtgaaagtgcaggcatgccaatgactactcagttttaggactttctgtggaagaaaaaagggagaagaaatcaattccactacttttgaagttctgcaacagatgagattttgtttgtaaagttttgtagtatattaaccattggtttatcactctagattcaacatattaaaatgtattcaagctcacagatttttaatcagtaaggcctatctatattagttgtcttttatttcttctccttgtggacagttgttaatgaaaggagtaaggatttccctttttttgttttgtttgttttgttttttttaaccaaattcttagagatactatagaatccaaatgagaactgaattggacctcaagtcttctattcctactaatagagttctttgtgatggtaactgctgtgtcgtttgttttccacaagttgggatggattcatgtcgatacatccccatgcccttgacctcttctggcattctcctgtgctctgacaaactgagccagccttttagatctacatgaataaacaaactattttaccaagaaaaatctcagcttgcttactgcttaattaaaaacctacaatttacacacctccctgccttcaagactgtgagctttggatagccctgcttaaatgtttgtcaacaacaagagtcgtaatgtgtcagtacattgtagctcctttgaaatttaactctttctgtgttacatgaattgttttaaggagtccggcaaacatgtttcttcacttccatgagaatggtgccaagtgtcagactctaatgagccctcagctcaggttttaatttctattgaatgctaacattcttctgattttttggtatcttttataatcatatcggtttctgctgtattaatgacaattattcatgaaaataaaaaatgaaatattttgtatact

SEQ ID NO: 1900 - DNA, 426 bp, Homo sapiens
gcacactgccagtctcactgtgggaaggccagctgccccagccagatggactccagcctgcctggcaggctgtctggccaggcctcttggcagtcacatctcttcctccgaggccagtacctttccatttattctttgatcttcagggaactgcatagattgatcaaagtgtaaacaccatagggacccattctacacagagcaggactgcacagcgtcctgtccacacccagctcagcatttccacaccaagcagcaacagcaaatcacgaccactgatagatgtctattcttgttggagacatgggatgattattttctgttctatttgtgcttagtccaattccttgcacatagtaggtacccaattcaattactattgaatgaattaagaattggttgccataaaaataaatcagttcattt

SEQ ID NO: 1901 - DNA, 563 bp, Homo sapiens
agcacacagggtatccacatgttaccctgcagctacattgttgagttagtgatgatattgtatatgctcatggtcttaactggattacaaaaagcaaatactagaacagctagctcatcttttacccaatgtacttagtatttttctgcactggtttaatcatgcttaatactacaaaacaaaaataaatatttcacagtggttggtttgttttgtttttaaaccacagtttgatttagttagccttgctggggccataatatgcttcagggtgtgtaaaagaagaaatctctttgtggctttcatgggcagggaatctcagagatagcaaatgccacctgaccagaagtctttgttatatggatgggaaccctaacttagggcttgggcaggggaaagagaaagaagatgagagattatacttcatgagtcttagcaatatgggagcaggttttcactgaattctgagggtgcctctgcatgtcctccaaggcaaagtttggcaaactgtggcccccccactgtcatattttgttaataaaattttattggaacacaatcac

SEQ ID NO: 1902 - DNA, 310 bp, Homo sapiens
ggagctgtggcccttggagctggcctgggcccactgacttagtcctagacctgggccagggacggtgggggctccgtgccccctggacccaccggcagctgggcacatctctcacctgaatattggctgcctccagaccacaggactgcagcctggggcttccggccctacacagctgggctgttttcttaagggcttgatttccaagggccacatctctgcaccttccgggctctgaactttgagacagggctttagcactgtgcagaggggagatcctgagttttctgtaaaaaatgaccttttgttc

SEQ ID NO: 1903 - DNA, 408 bp, Homo sapiens
ccaggtctaggtcttctccctgccatgtcccttgccaggctcttccacttagctaagtgggcacactgcaagctggggtggcaccccagcattcctggctttctggggtccagataggctggcaagagctgtttttgcatccatttgcatcgtgaagactggcattttgatacttcagctgtttgttcctgggagaattctgagcacagattccagaggtcacagtaagccttgcagcttgagctgaaagatgccagagccggagatgtctgctggcagcaggcagggttcattctggtgacacagcaacagatgcctggcctgggaacccagggatttcacctccaccagtgagaccacggggccactgtggggtgagggaaggagcgcttggagtcagagctctag

SEQ ID NO: 1904 - DNA, 851 bp, Homo sapiens
ggcacagaagaacaagagcaaagaccatgaagccagagtctccaggactcctcactcaacctcggccatggacgcaggttgggtgtgaggggggtcccagcctttcggtcttctatttccctatttccagtgctttccagccgggtttctgacccagagggtggaaccggcctggactcctcttcccaacttcctccaggtcatttcccagtgtgagcacaatgccaaccttagtgtttctccagccagacagatgcctcagcatgaagggcttggggacttgtggatcattccttcctccctgcaggagcttcccaagctggtcacagagtctcctgggcacaggttatacagaccccagccccattcccatctactgaaacagggtctccacaagaggggccagggaatatgggtttttaacaagcgtcttacaaaacacttctctatcatgcagccggagagctggctgggagcccttttgttttagaacacacatccttcagcagctgagaaacgaacacgaatccatcccaaccgagatgccattaacattcatctaaaaatgttaggctctaaatggacgaaaaattctctcgccatcttaataacaaaataaactacaaattcctgacccaaggacactgtgttataagaggcgtgggctcccctggtggctgaccaggtcagctgccctggccttgcacccctctgcatgcagcacagaagggtgtgaccatgccctcagcaccactcttgtccccactgaacggcaactgagactgggtacctggagattctgaagtgcctttgctgtggttttcaaaataataaagatttgtattcaactc

SEQ ID NO: 1905 - DNA, 2309 bp, Homo sapiens
caggtgaccgcagaatgacctgctgggtgcagcagccagcctttggcagaggggggctccctgggcctgcgttgagggggctgtcatggtcctttgcagagctgctgcttttggcattcatagataaacagctcaggcataatttgaaaaagccacacctgcatgatgtgttttgaaggaaatgaagtcctgaaataaagtgatgggctttgcaaatccagggtagaggccctaacaggcacagagagcaggggcaactcctggcacacatcatgggctttggaggcacacaagcctggattcgaatctgggctctttcacatactagctgtgaccctggacaaagagctttaacctgctgagtccccattttctcatctgtgaaatggagatgataacactgtgtcttaggttggcattcaggtcacatgaaaggtgtgtggaaagtggccagcattctgcctgcagaccctgagcactgagtcaacaaggtttgtgatgatgtctgtactagttagctattgttattaacaagatctccatggcagacaagctaaagcatctgcctaagtcgtgagtctgtgggttggctcaggttaagctgagcttggctgggcttggcagcaagtctcagatttgatcaagtcatattcgttttcttcttcggctggtgggctacccagagcgagcacgcttctctcgtggtcatgccaagaacacaggagggtgagtctaacaagcacacctcaagcctctgcttgggtcacattgccaatgtcctctcagcccatacaagtggcaggaccaggcccaatattaaggagtggaaaagtgtaggctgcccttggtgaagctgtgacaagggagtgaccatccatcccctccacaggagggtgaggaattgggacaggtaattccagccaatacctggtccatagttcttcacattgtgagtatatgaatacggggaaatagaaccccctccccaccacctacacacatgctgttttaccttccaagaataggacatgtgcaaaaactaggcttccagatcgtgaggctggggagcattctaggtaccatttattatctactgcgtttcggtcagtagctgttgtaggtacccgcatcagcccttgttcctaaggatgtgtggagcccaggctgtactctttgacattccacaggtcagtctgcgtgaaagccctttgtggggagtttccaagccagtgtcgtttttgcactggtttccacctcactgtcagatattgttcttttgatatgcagtttccagccctccaatgagtccccagcacagatctcaggcttgtggctgggaataagcccagctgagcaggtggggatctcagccagcctcccagactgcacctcttctattgctctcctctgtccaccgttccaggcagcagcactcccacctggctgctctgatgtcctcgctccctccattcctgcctctcaccatgcacgcatccattgtccacacacacacaaccagataatcttctgaaagtgtaactcagatgatgcctccaaccctgtggctgcccttcacacttacaggcctaaccccagcaggacctgccagctgcttcatgaacaagtccctgcctcatgttaattgcaagcactcatttcactctccctgtgtgccaggcaatagcataagcactggaagaatacagatgttatagtgagtcctacaatagccctggaaggcaagagctgtttcctttccatttctacaatgagtcaattgcagatgatgctataacacttccagtgtttctgacacttccctgaagctatacctgctaccttcatgggccgagcttgcccttatgaggcccacaggtggcagtgggcagaggggaccccgctataccacctcgctgctgttccactgtctgctcccgtgttctgaccacagctctggtgccgtttctcaagcctgggcttcattcaacattttctatctagctcttcatggtgctgctcctgctatggttccacagggcttcttctcgcaggtcagctccttagagaggtctcccagattccccgtaaagcagccctgcagcctctgcctctctcagccgcatcaccctgttgcttccttcacagcatgtctcaccatctgcaaccatctttctgtttgtcgtcttgttgatttgctgcctccacactgtcagctccttgggaacagagattggtttgtttactgtgcatccctggtgcccagaacagggcatggcatattgttggtgcataataaatattgtggaaat

SEQ ID NO: 1906 - DNA, 244 bp, Homo sapiens
tcaatggctctcagcatccatcatcatcgtcgtctgtcaatgatgtgtcttcaatgtcaacagatccgactttggcctctgatacagacagcagtctagaagcagcagctgggcctctgggctgctgtagatgactacttgggccatcggggggtgggagggatggggagtcggttagtcattgatagaactactttgaaaacaattcagtggtcttatttttgggtgatttttcaaaaaatgt

SEQ ID NO: 1907 - DNA, 471 bp, Homo sapiens
ggatcccaagacgacctcacccaaagggctccctggctctcctctgatggaggggcactgcttgcttggcccggtcccctccgtgccagttcccaggcgcactctactccagcccttctccctccctcccttcctccctctcctggcccaccctgctcttccctcgccctgcaaattaggtgggtgtggcaagggcaccgcctggtcccaagtgtccctctgtacccacacccacccactcacttgtaagctccttgatgagcaaacccctaaggcccccagctcagactcagcaggcattcaggtcaactcaggcagactggctaaggaccagcccagggcaattttgcagaaatgatcatttgcacagaatgggtttccttcacagggagaaacttgcctctgaaagctattttctgatcaagaaaaggcccactttttaaaaagtgaaacaagtttgcagatacggtt

SEQ ID NO: 1908 - DNA, 58 bp, Homo sapiens
ctcctgccactaggtttcacctcccaaacccagcctctagaacagccagaccctgcag

SEQ ID NO: 1909 - DNA, 380 bp, Homo sapiens
catccccactcctcctccagcccacccaaccgccttgggtcaagggggctgctctgcaagcccactggccagctctggctcagggcccacctcctccagcgagtaccccagccactcctcaaccttgacttctgcccaaatcccctccctgtgacccgttccatatccctttctctcttgtccaatggggcttggagcaccgaggccagcgaagccatcgcgctccttgcggaggtgaagaggaccctgagtccccacctgcggctcccctgtgtagagcctgcatctgtctgtccttccttccattgctcccagtgccaaacttgggccgctgcaccgcggcgcctccgcccaaatcaataaactgtgtctgtcccagg

SEQ ID NO: 1910 - DNA, 293 bp, Homo sapiens
aatcgacaggacagattgtgggaaaggggttcatttcacaaaaggaaaatggtgggtctgtttccagaataagggtgaatagatgctgagtcccccaaaacaaaaattgtcccacatctcccgaacctctccagctagatgtcccacaggcaacctgtggcaaacccaacgtgattctccccagctctgagtctctacaactgtattcccgtgttgaagttatgatcgatgaactacttactcaatttgggaacttggggacagcccccaccatcttctgaagtgaactgatc

SEQ ID NO: 1911 - DNA, 195 bp, Homo sapiens
tctaatgtgcttctagtaggcacagggctcccaggccaggcctcattctcctctggcctctaatagtcaatgattgtgtagccatgcctatcagtaaaaagatttttgagcaaacacttgaatatgtgtgtccttttaatttataatttatgtatgcattgatttaatacacattataaagaatacaaaacattt

SEQ ID NO: 1912 - DNA, 1502 bp, Homo sapiens
aggaatggacaagagttgagcagcctttctgctgattatcacacatcatgagctgagtgactgcagcttgccaaatctttgtgtttctgggtctgaccaattagcttagttcttctcctgcctaattttgaactagtaaagcaaagtgagtcatcagattatgagttactgtttaaaagaaaaatgctgtttattcatgctgaggtgattcagttccctccttcttacagaagtattttaattcaccccacactagaaatgcagcatctttgtggacgtctttttcacaagcctccaaggctccttagattgggtcgttactaaaagtacattaaaacactcttgtttatcgaagtatattgatgtattctaaagctagtaaacttccctaacgtttaattgccctacagatgcttctcttgctgtgggttttcttttgttagtggtctgaaataattattttcctgttctattaatacatagtgtattttgcacaaaaaaattaacctggtcaatagtgattaccaaaatatatattaataatcttggcaatttttgacattaattatgaaacattttagcccacgttagttctacattattcttcacttaaactcagctactgcaaattttgtctttctgtaaatgttattaaaatatccagtgagctctttagaaggactcagtattatttcaagactatttttgaggtaattctagccttttaaaatattctacagacctacggggcttaaaagaaccccagtaccgactaagcaaataggcaaaagacatgttggaaatgtagtatagtacttgaaacagtcactatcatagggataattggtgcatcctgtgtaaatggaagctgagcttgacacctggtgcttttaagtagggataaagtcatcctctcactgcaagcacagcatacctgtacctccaaaagtgacgttttagtgaacaggccgttttcaacacttgtgccttggggtgttcattgaagctttgtgaaaactactgatgttttctcagtctccttaaagttacgtccatgctttaaaatgtctgtgtaggagagaagtggggtttataatgttttctctaagatatctttgctgctttccagactttgaaactattaagcttcttaactgcctcttaccggaaatacttctggggaaacttcatggtcccaaaatgtcattgccatacagcttcactagagttctttgaaccacagctgaaaagagctttgtattattttttaattccctccccagatatcatttaggagtattatataaaggtggtgggcaaaaacaatgtaaggagcctttccagttatcttgagttgcagctctgtagtttcttgaggccaaacacactgtattttacaagtcaaaatataatttacattaatcactatgttaatgagtatgtaaaacattcttttgcattgatgaattttgtatctgcttccattaaaagcataacagcca

SEQ ID NO: 1913 - DNA, 563 bp, Homo sapiens
agcacacagggtatccacatgttaccctgcagctacattgttgagttagtgatgatgttgtatatgctgatggtcttaactggattacaaaaagcaaatactagaacagctagctcatcgttcacccaatgtacttggtatttttctgcactggtttaatcatgcttaatactacaaaacaaaaataaatatttcacagtggttggtttgttttgtttttaaaccacagtttgatttagttagccttgctggggccataatatgcttcagggtgtgtaaaagaagaaatctctttgtggctttcatgggcagggaatcccagagatagcaaatgccacctgaccagaagtctttgttatatggatgggaaccctaacttagggcctgggcaggggaaagagaaagaaggtgagagattatacttcatgagtcttagcaatatgggagcaggttttcactgaattctgagggtgcctctgcatgtcctccaaggcaaagtttggcaaactgtggcccccccactgtcatattttgttaataaaattttattggaacacaaccac

SEQ ID NO: 1914 - DNA, 1614 bp, Homo sapiens
tgtatttctcttacctgcttctgccttgctgaagacagctttttctgagacacagctgccagcaaacctgagggaaagagagaagattagtgctcggggtcaccatgatgcctttgatcgatgctgctccagtaactacagtggcattaggacttaccgcttagatgacaatagtgctctttacatgttttctgtttgaacctaaaatagcagttgacatggtggtcctgaagcaaagcctttcaccagtaaaagatgttttctattgttgcaatgaccttgctttgctctgattataatttgaaagactgtaggaaacacttcaatgtagtataagagtctgtaccttgctggaatattcaagaagatgaaagaataatatattgggtacaatagattactatggtacagaaactgggctattccctttcttcaagtgaaggctgtgggatctattactgcaggccggtgtatataccatacaaaagaggaccacacatctgttggtcacagagttcatgtcacaccagtgctagaagtttcatgattttatttcccagcagtgctgatgacaagactgaatgttaccttttctttctgacagattttaaaaattgatatgataaaagcacaactgctatagattctgctgagacctctcatagtaggtatatatgagttttcacagaagactgaaaaataatgcatgatatttgtttgttttttttgataaattggcatgacagagtggggaaaaaaagcaattcacaaaaccatttcatattttttaaaatattgtgcttaaagatggtcctggaagtaaatgactagcagccaattggttttacttaacataccctcaaactgaggcttaaagtattcccttttataaaaataaatgcttggggtagggtggagtggggagggattaaaacccatccaaaaaataaataaaaactatataggtgctatgtatatctttcatctgtaaatgtcagtgtctgaacagacaacacaaattcaaatcattatacgtgtagccagaaactcaagcattttcactaaagttattaaaccaaactcctgtccaatttcacttatacaacatagtcagtctagagttgagagacaaaggtaattataaacctatttgaactagcttcttgtcttaggcctgaaccaaaaaacaacaaacaaacaaaaaacaagaatgaaaaacagaaataaaagaagtagaaaagacaaagaaagaaagcccaaagtcaaagttgttaatatttacaggtttaccagatctggaacattacttatttgaggtcagagaacaaaacaagaacctggccaggtgttgattaccttttagtgaataagctgagtccatatacttgtctaactaagaaagcagtacagaggaaaacaggaacctgatttttttaaaataaattttaaataaaatagaattactacaattctgcaatttcatactacctaaaaaagactagatttgaaaatgtcaagctgatttactttattcacatggagaaaagaatccacaaattaaactgagtccttcactggcatgccagttgactattattagctgtcataagtaac

SEQ ID NO: 1915 - DNA, 849 bp, Homo sapiens
accagctatccaaatgcagtgaactccttttatataatagatgctatgaaaaccttttatgaccttcatcaactcaatcctaaggatatacaagttctgtggtttcagttaagcattccaataacaccttccaaaaacctggagtgtaagagctttgtttctttatggaactcccctgtgattgcagtaaattactgtattgtaaattctcagtgtggcacttacctgtaaatgcaatgaaacttttaattatttttctaaaggtgctgcactgcctatttttcctcttgttatgtaaatttttgtacacattgattgttatcttgactgacaaatattctatattgaactgaagtaaatcatttcagcttatagttcttaaaagcataaccctttaccccatttaattctagagtctagaacgcaaggatctcttggaatgacaaatgataggtacctaaaatgtaacatgaaaatactagcttattttctgaaatgtactatcttaatgcttaaattatatttccctttaggctgtgatagtttttgaaataaaatttaacatttaatatcatgaaatgttataagtagacatacattttgggattgtgatcttagaggtttgtgtgtgtgtacgtatgtgtgtgttctacaagaacggaagtgtgatatgtttaaagatgatcagagaaaagacagtgtctaaatataagacaatattgatcagctctagaataactttaaagaaagacgtgttctgcattgataaactcaaatgatcatggcagaatgagagtgaatcttacattactactttcaaaaatagtttccaataaattaataatacct

SEQ ID NO: 1916 - DNA, 451 bp, Homo sapiens
atggacacttttgatgctgcaaatcagcttgtcgtgaagttacctgattgtttaattagaatgactaccacctctgtctgattcaccttcgctggattctaaatgtggtatattgcaaactgcagctttcacatttatggcatttgtcttgttgaaacatcgtggtgcacatttgtttaaacaaaaaaaaaaaaaaaaaggaaaaaccaacctgcatggcctgtgggttattttggtcttgtaaggatccatttctttaaaatactgacatatagagttgtaccttatatagaatatagttgtatcttgaagtcaacatattaaattattctcaaaattatgtatttgcagattgtacttgtaagtttcaaagaaaaattaccatcttttcatattgacctggaaactaaataggatgtgattcagctacattaatttcttaatacaatct

SEQ ID NO: 1917 - DNA, 1984 bp, Homo sapiens
aaatcaaaaacattttcatatataccagagtactgtaaaatctaggtttttttcaacattagcagtaaattgagcactgtttactgtttcattgtaccatgaaaccatttgatttttacccattttaaatgtgtttctgaagcaagacaaaacaaacttccaaaaatacccttaagactgtgatgagagcatttatcattttgtatgcattgagaaagacatttattatggtttttaagatacttggacatctgcatcttcagcttacaagatctacaatgcagctgaaaagcaaccaaattattttttgctgaaactagatgtttttacatgagaaatactgtatgtgttgtctaagatgtcagttttataaatctgtattcagatttcattctttgttagctcactttataatttgtatttttttactgtatagactaaatatattctatttacatgtatgtcaactcattacttttttcctgtgaacagtattgaaaaaccccaacggctgataattaagtgaattaactgtgtctcccttgtcttaggatattctgtagattgattgcagatttcttaaatctgaaatgatctttacactgtaattctcagcatactgattatggagaaacacttgttttgattttgttatacttgacttaactttattgcaatgtgaattaattgcactgctaagtaggaagatgtgtaacttttatttgttgctattcacatttgaattttttcctgtataggcaatattatattgacaccttttacagatcttactgtagctttttccatataaataaaatgctttttctactatttgtcttgattacttaaaaaaataaaaatataagtaaggatcaaaactctaaaattttgcatgaaaattacatccaaattgtgaaaatcagatctattttgtttgccattagtcaccattagttatataaattttattgttttaggttagtatctctttactaaattgtcagtctataagataatatatgttgatcccttgctgtagaggagaatttagagtaatttggggtttgtcttggattatatctaaatggattatttgttaaaagtactgaaatgagtataaggcagtatcacccatccaaaagaaaggtctttatagacctgcacagtcactagattaattcattaaaatgcccccaccctgatgtaattgacattacatttcttaacattttaaaatctagaatttctaaaatggaatttaatgccatcacaatttgaaaaactttttttttttttttactatagaagttacaaaggaagttctaaaattatgcctccctctgtttttataagttgccatcgaaaagtgatttaaataagcaggttatctttatagattttaaagaaaactagaaagttttaatgttttaacttggggaaaaatacatctctttaatgtttagcatgcttgtcaaccttgagtgagtgtcatttttaagaacagttgtagcccttctgattattgcagtagctgtagaagtatgtaagaatatgtgatgggtgtagtcattagcaaagcatttaaatcacttgagtattttgtcatggttcattattattaaagcacaaaataacctattgttagaaaatatgtgtttttataaatgaatgtaaaataattaaatgaattgtgaaatggatgtttaagaaaatataggcttaaaaagtaaatctataaaatgatgtcttaaaacagccatatcatgaaaaattctacttagctatattattataagctacatttgccctgaatttgaacactcaacatcactagatttaaatatttagtatattttgatagtaaagggttttgtttcttgaatatcttcactttaaacaaaaaaaaaaaacaactttcatttgtgtggcatttatttttggaagtgtcttcttttttttctttattaaagtttttgaaacttgc

SEQ ID NO: 1918 - DNA, 1062 bp, Homo sapiens
aagtagaagattgagatgtgttcacaatggataggcacaggaaaccagttaggtctcaatacctgaagctatcgtaaaattaagaaaggataaagttggtaaaccttttatatttagtatctttttattcagctcatggacttctgccagcataatacttgctttggaaaacccagataaaggttcatgcaaactttattttgtgtttaggaactactgaggatcagagtaatccaagcaaatgtgaatcattttacctttgacaaaggtaaatcagactatgaagttttttttatacaggatgatgactatggaaagagtactcttgtttccttatattatggaggcaggagtttcgttttcaaaattgttacaaattgtagaagccacggtgttctgtgatataagtgtgtgtttttcataaagcaggcagaactcatctaggtaaattacagttcctaggtataattcacattgtattcagagttgatggttgtacatataagtgattgctggttttagttgcaactttgtataaaagggactgagaaatttataaacttttttcttactgtcttttttctaaagtaaaaacaaagaaattatgtgccagatttatgcatattattttatgttgcatagaataaaatttttaatctttaattttacatttcctaaatatattttaagacgaaacatttgttctatagcttttccctttttttaagtaaggaattttatttttttctgaattattttctctcgtgagtatattgatccagaaagaaaacttgtattatgtgtgttttaaaatgagaaatctaaaaaacgaaaagtctccaaagtctctggaatttgaaacactttgcataacgtataaaagcctgtttaagagacagccaactatggcctgtggatcaaatccagcctgctgcctgctttttatggcctgtgagctaggaattgtgtttataattttaaatgtttttttttaaagacttttatgatacttgaaaattaacatgaatatttagtgttcataaataaagtttgttgaaacac

SEQ ID NO: 1919 - DNA, 1702 bp, Homo sapiens
tgcccacttttcttattcttactcagccccttttcctcccttaggagcattggtcctctgttgtccatttttatcaccagatgttttccactgaagcatgcacatgccactgtcaccaaaacaaacaactaccactttccaaatttcattcagaaccattttagtgttttcctattccctacccctcccactactttcaatgatgaaataccctaagttaagttctccttttgacactttattgcctagatgctgcaatgtttttatgtttcctttatgccaaacataacaaaacagttatatagactgctttagcaaagtacacaataatggcttataaatggtgtttaaatatgcattcattttaatctactgaacaaatattgggataactccaaaccgcatgaaagggtgtaattgcagcatgagttaaatcttgaagcctagaattgtcagcacttccaacttcttgtttgacagtgttatttatgttatttatattagctaacaggaaacaactactgtgtttcaacataataaatataatagaaaaatattttatttgtattgttgtataaaatatttacaatcatatagaatatatagagttacattttaatagcaactgtgtacatgtcacgaaaccatttcccttatcaaagatgtaatttgtaaacctcaaatagttgtgtatctgtcctgttagaagtagatgacttcaattaaacaaatttatgaaggacattattctgattcataaaagttataaaatattaggtaaatacagagaaaacaataagcctctgaaataagtctgtttctgaaatagtcaatagtcttcccatccaaactataagagaatgtgaatttcttcaacatcatacttaaacattacagaaaatagaaatacaaacaaggttggtacatgagagaaaatgttgaccttttacttccttttacaaaaatgaaaataataaacatgttttcgtataaaataacacaaaatgatatacactgaagttgatgaagcaaataaatattctggcttctttttcaaggtatcagggcaaacaatttccaaacttttcattttgtacagaaggatgaataactacagctcatgggaaatgttttgactttacaaagtatagatgttggaacattaagaaaaatgtatattcccaatgaaaaaatagttatatcatcttatagtaaaccaaaagattagcaataatactatggacacattagattatatactacagacacatatctatccaaaatacctattttaaatttttaatacaatattttattttaatataaacatctgtcagttatagacaaagataataattcacaaagtacatgctatcagaatgaactttggtaaccagaaatgtaaaatttcaaataacggataaaataatgtgttatttttatagagaaagaaaaaaatagcaacacaatctagtttattttagggtactgagagcctagcagacttaaaggacaaggtagtaaatgttttatcactcaaaaatccattagaagtttcaaataaattgctttcttgctagctgtattccttcctacttgaaaagcgaatttcttttcctcctatgattgattttttaaaatcatgctcttttccatacatcaacataaacagtctttggatactaaataaactttccctaac

SEQ ID NO: 1920 - DNA, 191 bp, Homo sapiens
ctttctgacaaaaagtttccatatgttatatcaacagatagttgtgtttttattgttaactcttgtctatttttgtcttatatatatttctttgttatcaaacttcagctgtacttcgtcttctaatttcaaaaatataacttaaaaatgtaaatattctatatgaatttaaatataattctgtaaatgtg

SEQ ID NO: 1921 - DNA, 318 bp, Homo sapiens
ggacttggtacaaggagagtgatgctaaacttcacagaaacaaacaaaaccagccagaataacagactctctggagcgtcgtgtctccatcacttagttgtgaaaggaaaaccaagccccactttttattttcctaagtaattagaaaagtattggtcccaattttgctatctcccatcccataacagcctctgaatttattgcaccaagtgtaatgagaacattttgtatacaagagtttgaaaaattatatataaaaatacaattacttttatgatagtcctttgacgttttgactaataaatcctattcatcttc

SEQ ID NO: 1922 - DNA, 3914 bp, Homo sapiens
gctcagctctgcccagcagtccaaagcggcatggccaacagagcttcactccttacccaggagtgctggcttatagagttagaagtcagtatttcttctaatctgaggctatgatcagtcccagctgtaggggcccagaggggaggtgaacatgcctgatttttgtgggacaactctagcccacaaactgactggctggtgagtcttgactcccttccaacacagatgcccaggcacctccagatcattcacttcgcacgtgggccttgtgaagggatttgtgaatatccaggaagaacttagaggaccccatctgagttcggatggtcaggaaacaatctgggcaaaaaagaggcaggcatttcaaaggaaggggcaaggaagactggcaaacagatggcaagggatgcccctctttttcataaaactctccaaggttcaatcaatgcaatgtatagtgaaacttcaatagatctttcattttgacactattaaacaatccagagaagtaaacactgttaaattgactgtatatatttgcttcttaaaactacctgtatcactgtttgctcacctaatttatatacaggtagttccattttctcccagttccttctcgtctttttttttttttttttttttttttttattaaatggtattgcttttgtttgcaggtctttttgtttttgttttgtttttgaggctgactgactgtcctagttgttgtgtgtttgtaatttttccacatcttattttgagcagctttgggtggtaaagttattgtttacaaattgaagcaactgattctagtggaacaaatgaaaaagaaacagtcaagcacacaatagtgcaaagaacgttcctttgtagatccgcaacttaaggattttgttcctcataaatggcatagttgaaagagcttatacactgcttacccagccaaatgctttgctttgaagtattgggttctgtgaaaatattgagcattgtacttaccttatctaggctgtgaaactgtcctacataccagagaatcataaaaacaaaaacctcactggcagcaagctgccgaataacaacagagtctagaggacatatttgtgggctgcacagatattttaggaatttcagaaattagaacaggagccaaaatgatttacattggcgttggcactgattcctttaaatggtctgggaaagggggttgggaagaggatggagctcaactggccagaagaggagcagctgcagtcctgatagcttctctagcctcggtcttttgagtgataagtagtcatgttgttttcatccagttggtttcttgtcattcccaagaagaatctcccaggccacatctttggggataactgacatactggattagccttttcaaaagaaaagtcatcctatttggttttatggggtgtgagttttgtgtgtacacacacagaaacatgtaaggtggtttgggtcatgtttttaaccacctggcaatacagtccactttctggtttcttttattgtgggaagtaaatggtcaagctgctcaggcagtgaaaagatgtggagaatgtccgttgtcattcttgccactgtattccatttgctaccgagatataacattaaggtggacacattttctaactgtattaattaaaagtcaatggatacagagagtggattttctccccaagtcccatccctgctgaagaccgcttggatgaactccccaacccactgtgcccctcccgcaacactaccagtagactttagaaccatagttaactaagtcttttacctctgagatacttaattctgggaaaattggtgacaattttcaacttctaaataggtaactcgactgcaaaataatcaaaactgataacaatgaaactgcggctcttaaacaaagccatgcatgccgtgcatttgtattgaaatgtctccatgatatgaagccaaatattcaatgtaacatacttaatatccaaaggtggaaacaaaagaatgtagagatccagtgttaagagttccatttgcttcaattaattatttaccttcctgtggaataatatatatatatatatttaatagaaccatagatagactagtagaatttagattataaatgtgtgagtgcagattatcctgctattgcacaagctagaggggggaaaaatctcaattccagctggcaagatgctagccaggacacatataagaaagttgcactagattgaatggtcacagaatcggaggacatggaagaaaaaggaaacttcggtggttctgcagcagacatgggctaggtcatatgtggtttctatgagttcgtgtctcaaaaaaaaaaggagggggggcatctgtccccggtggagctcacctatttggaatatggggcatttgttttttccactgcaatgatttcagtctggtttcatcatgttggaattcgatcacaccattttcaaacaatgttaacatagtccagcttttgtttttctcatctcttctgagaggagactcactgtttctgtctgaggaagctcataccctcggcaaaacatcaggacaaataaagagaaatgggggtacgcattcccaacagaagcagtgtgttatttgttttaaaactctgaacagagatcttggaaatctttcaaaaagaccattgaattcttcattggctgagaacgacgttttaaaatgtcttaaataaggctttgtttgcattgtttgagttcaaggggccttattattgaatggaattgcacaagcctttctttgtgcaatcaaaccattgttattggtagttctgtaaaggaaactgtggaatcgaattggcagtggagtcataaatctatttactgagtgtggcttccaagaaatgttgcaattcaaaatgcactaagtctgtgatttattggagatttggagattctaaataatatttttaaaaaacttccatgcaacttctggtttaatgtttggcaactccacatgataaaaaaataaaaacagcccaaccgagtttcggaattaagtattcttctagtaagtgattcaaacttgtaatatttgccacaggactgacttatttatttactagctagaagctcttaagttcacttgtttatcagggcatatacagaagggtttgttaaaactcgatgttaactttacaactttctgacctggtgcatgaattctcaagtactgtatttcactgtgttggtgtgtctgatggaaatttcgaggtggtcccacaaaaatattttatgtagtgtgccttcaaagagaaccatttatttctcttcacttatcgtcccacaaagtcacatttggtggtggtcagccaagtcgcatctggtctagttttactcttgtcccaattttaaagagaaatgggaatgagtttgccctggtgagacccataccattgcaatgattatcttgagcacttaaagtccagtgttggctgttagtgtatttgatattctgcctgtctcctcatggttgaaatatgtctgaagaatagcagcataatctcttggctgtttatacttttttaaactttcctgtgttgtaaatattgtatacttttggtgattccagctatgtaacctctatgctctgtaaggtgattatttgtatatagcaacatggcccagtgatattatatagtttcccaatggagaggttattgagtaacctttgcattagtttaaacactaccagaagaatgctgagccaactataaacactcaattttgtatgttttccaaattgtacttattactgcttttgatactgtattacgtgccaatagtttcccaatcacatagcaggcaagagatattttgtactttttgatccactgtaatatttaataaaaaatgttactatctgtttc

SEQ ID NO: 1923 - DNA, 2669 bp, Homo sapiens
aagggtgggtggtgctggaccaatcatcgctgggctttggggaacgttgttccaggagccaacagtaatgtctttctggaaacattccatagtaagacacattggaaaagccaagggcataacacaggcaagcacctcaattaaccagagcttagcaaatgggaatcttagtgaaccagaattttattataacccccttttagaagcttgcaaattacagaaagaataaaaaaattaaatcaatcttaaagctctaacttctaaagtaactggcccagtctccagtaatcttggcatctgggcttctatgcagtggtcactaattttcaggaccaaggccacacaaaatgtcaggcctagggagaaaattcatctgtgcccactgctctccaaagtgcgaggcaaggaatggcagtgtaaagttctgttaatagcagtaaaatgaaaatatttgtgtttgtgtataaccttcccctcagctaatttgaaagcctccaaaataaggattcccattccccgagtattctggttaatcaagatttcaatttctgggttgctcaagggactcgttcagtcagacttcagttctcattccgacagggtgtctttcagttcgtttgtttgattgaggttttttggtggcctagatgcatgtttattcagattttggtacacctctgccgtcttctttggctgagtattctgcacccacagaccatgctgccagcctctatcttaatagctgcttctgtggatatggctggggagcgaagtaaaatcctcttttgattagcacccagcatgggctgggtggctaggtggttggaatgacagtggactgcacgcttggtgcatcgtgcatcgtgaccatcctggaagcactgcgggtgtcgccaagccctttcctaagacctgcttcccggccagtgtcagtggccctctctctctctgctatgggcatgactttctcttcgctggcttaacttttccactgggtggttcactttgcctcctgctgcttctgtgccctgttaagggcttcaggtatctttcaaccaagtatctggagtgttcactctatgttgcattctaaagtaatttctgaaataaacaatgcatgtaggagccagaatctgacactgtcttcccctccttccctccctaaaatggctttagtttccacaaagagctgttaagaatttcctgctgtatgattttcctcaagaatgaatttccatgttattttttccttaaatttagcaatatcatcaggtctcttgcagagtttacaagtgctgacattcttctgaaaacaggaataattttgtccacaaatatatacatatatacatatatataacacatacaaaatatatatgttaagtatattaataatttatttttaaatactcatggagaaagtgtgtgtttgtggtgggtggtttttaaactatatatgtttgttcatgtaaactgaattctcttatttaaaaaatcaaaactgtaacgtaattaacattggcagaattatgattgttactgcaataagcatcaaattagcagcgcattaaaaataggaaataaagcagttgcttaaaatgccagtcaattgaaaagtgtaacttatcattatacaaacattctgaacctaccataatgaaaatgttcttgaatcttcactttgactttcagtttatggggggggtagatcattcatgtgatatataagcagctatcaagtgggcaaaaacattgctgtgaatagcactgtttaggctaacattgtaaaaattgtaatgttataattattatttatttggagaattaacttccccctctaaagttatttattattgatgcttataccatgattgcaccttagccttttacatactaaaaacatgacttgttagttgtattgcatgctctttgtcctgtaatgtgtgtgcaatgacaacttgtttctgttttatttaaagtaactgacattttggattttcatctaacatagagggcatggcaactctctttgacagtggtaccccatgatcttcagaaagtaccataatgtcatcctactctacatttcacaagacgaattattttgagatttgtttattatattaaaatgtttttttacgttcccactaaattttgaccccatataaagaaatgtgttatgtatgttgtgcctccttagagacataaatttagtgtcaaaacatgggagatggcttactcagaagcatactccacttaacataccatggcctgagctaagtaccatgtcctgtttgtgtcttatttttaaatattttctttgtccacatgggccgttgaccttagagttaaggcggttgcttttttgaagaaatcaccaaagtttctgggaaactatgttcaaggttgaaatggagagtagatttaattttatttgtcttgtagggaagaaatcttcctttgaaccgcttttcttgctttttccctttttcccaaactaggttacaggttcttatctgcaaggttcaagttgcttagacattgttttccagtattctgcagggccagtcagttgtacagaagttggaatattctgttccagaattaaagaagtttttagattatgaaatattatgataataaagctatatttctgactaatgtgttga

SEQ ID NO: 1924 - DNA, 1710 bp, Homo sapiens
cagaaataagaagaaaacaggtgaaaaagacagtgtgataaggccatggtggtggattgtggatgccctgccctgtatccacttgggagagagcctctacaacatgctggcaacttccccctcactgattcaaatgttaatctcctttggcaacaccctcacagacacacccaggatcaatacgttgtatcctttgatccaatcaagttgccactcagtattaaccatgacaccttctaagccatcatctcctcctaatcctcccataacaatgggtataagttatgaaggtgggttagaaactagtgcctatccctcactaagttgccagatggatttaacagcacctcaaagtcaacatgccccaagtcaaagtcttctttacccatggaataagctggcttgctacttccctacatctctgaagggctccaccattcctctagcaaccatgctctcaaagctcagagggaggaaaaggaaatggatctaaatggaattccaggtcccacgctggatattttcacaccttacctcatttaatacaacaagcaaggaggtagacaatattgtctacctttgcaaatgaggaaacagaggcttagagaagttaaataatttgcctgagaataaagctaaaagtagctttaaaatactagagctgggattgcaagtttgatgcaaagtttgtgctctcttcatccttcaccaagatctttcattttccctttaaatatctcttatgtctgcatttcccttccattcccatcactagcactgtcctctaatgccccacccagtggggaagtctccaataggtccccctgcttataacagccaagagggtagctataaactaggtccaataacatgcttcatgtgagggaactgatggacagctgtctaattcataacctctggcctcaacggaatttacagttcagagtccaaaatagcaaggaagtggtgggaagaaggtgagagaaaagggtgggagggtgagagaggggagggaggggaataaggtgtgggcagtagagggaatctgtcagtctcatggtttgccctaggaaaccttctgctcagccccagcctgcttctgggcactcctcctcacccctccttgctgtccatatgggttcaatgtgagtaaccacaattgtagagtgtggccatcttcttctgacatggtcctaaataaacctaactgagtagccagaagaatcacttctaaggtaaacatctgtaaacattggttatatttattttcaatattactggttaacattgtggagctattactgatgggccagactctgtgctaggcacagactttctagggattatttcatttaattctcatggcaaccaccatgcatttgcagataggcaagtcaggctcacaaaaatgtatgcagagcttcagggttgtgatgggtagagccaaacccatctgcccaacccaagggcccgtgcgctccaaccctgcatcgaactgccaacatagtacaccttttagaaaaagattcttgttgcaaaagtaccataggcagtgtgtgtgtaaggtcattgtaaaagtgtagataagcaagaaagtgttataccaccactcagaagtaaccactgttaacatgttggcttatctgctctcaggtgtttctgtgcctgtacatactattcttcttgaataaaaacaggattacacagtgt

SEQ ID NO: 1925 - DNA, 393 bp, Homo sapiens
tgaacttcgaatgatgtgattctggatgaggacttggatcaagagaatcgcaaattaattgtgccagagaagctttcattcattcaacaaatatttattaagcatgttttacactccaggaactttacaagaaacttgggctacttggtgactttactcaccaggagtgggttcagactcctgatggatgagctccaggtcctccctaacaagactgcagacttcctgagggcacagcccacccctcatgctttgagtttctcatataacccatcatagcaagtagaagatgcttcagaacatttgtccctatgagatagagtcatattctatttagcttgggacatggcaggtactcagttgttaaataaaaaatagttattgagtaattta

SEQ ID NO: 1926 - DNA, 2606 bp, Homo sapiens
agccactggcgcccaggagcggtgggccgaagacgtgccctaccctaccacaagggctgtgtctctaccccctagcctgggcgttggatctactggaatgagcagcagccgcttcctcggcagccttgggaagcacgggcgactggacagcagccgccgggcacggttatgggggcggggtgggcggggaggctagattgtttcctggtactgtcactgccactggggctttgatttggaggaatggggcaggggactatctgaagcgcttccatcctaaagccataatgaaaatatcttcctctcttccccattctatacaaaatactaagtggttttcttgctcccactccctaccccttagttaaatagggtttattttccactcatgcccttatgcctttttttcttatagttttttaacttattgactgtgcatgacccagtggtttgaattgtttttagttcaagtcattggtaaaaactaggtttaaggagatgagctactgtttaaagtgagctggcctgcctaattaattccttgtgaaaactaaatgattttttcagtttggggatcattctcacaacataactatgcatgtagaggacaagatttattttctttcctccctttgcccagtagccacatctggtttactcaggcagcatctactaagaaattcagcacctgcatatctctgtgacatggtcacttagagcttatcttccctatgaatctccagatctgtgagtcgagcagatttcatgttgcagattcacctttaatgcaaagactgtattatcctcacatgactttttttcttgtcttactgtaccttaaaaggtgatagagtaattctgtattttctaacgggaagattcaaaggagctgaatgtgttatgcttccaaacaactgaatgtaaaacactcctagccagttgttgcattccctatatttatttacttccaatattttactgtaaaagtagggagaaatattatgttgatagttgtttcatattctctcaggaactttaatgttcccgactcgggtgattccagctgtgttgctggcagtgttgtctcaaccctctccctaaaatgactgagccctgggttcatctaatgtggttttccttaggaagagatagaaggcacagaagatcacagctagagaattgagaattaactatactactagccattttagggcaccaaaacttgggattaaacacttcctacttcccactcccaactcctgaaatgaagtcttgctatctgtgactagttttatttttgtgcttttaatagtccgagcagtcttaccttgtttacacatgtattgacaccatttgcttcaggccatggagcactgtttctccctttttactatttataggattccgttttttcacaagacttttaataaaaagaaattgtagaaataaacacattaaaatttgcccagctgtcgtctaagccctcttgattgacttgcccaagtggcaatagagttctaatatctataataaagggagatttgctattattagtggaatgttgaccccgtatgtagagaaacagtacgtgcctttgcctctttatgcacacagagacccagggtgagggagtatttgttcccagtttttaagatagtataaaaaagcaaatacttggtgagtgatttaaaaataaaaccaaaacaaaacacaaaaagatattccacaggacatgccactttattataaaacctgacacaggcatagtaccaagtatttcctgcattgttgctaaaattgttttattgtagctccacattctggtgtagtttaaaatgcctttgggggcagtttgaagcagttcttcatgccacttagtttgaaaataaaattctagatatgcaaatgattttcttagaaaacttcacaaaataaaagatcttgtttttttttccatagcacagtaatgaatgtggttatcaatcacatacttttttggattatattgtagcaaaaagttgattagcttaccaagattattaatagcaatgtatgtgttataatacaacttagtacattaaagctacgaaaactcatcctggctgtaggatagtaataaaggaagaattatgacttcattatgaaaaaaagaagttttaaagttttcaattacgagcaatttggaagaaaaaacctaaggtgcttttcaaaagagtaactgaaattgttgcaggccaaaacagcaatatgatatctcagatttagttcaataagaacagtgaaacttttggttcactaataaattctgagtaaattagtggtgaagacaaaatataacttgttttagtgagccactgaggaaagaatatgcttattacaaagacaaaatgtggtgcagaaactatcttgcacctgtgtgcataaactgttagtcgtgactgacttggtgtgttgctattgtgtttctatatactccgtccaatatagataatgttttaataacaactgtgggataaaagttatcttccccttggaaagactaatgagcacaatgatattaatcacttttatggtgaataataaatgcaataattgcctcatgggtg

SEQ ID NO: 1927 - DNA, 806 bp, Homo sapiens
aatggaaggccacagaaaaggggaaaagaggaaataatacagtaatcgttaatccagcaaaaagaaatgaaaagggaaaaccacatagaagggtaatcccggaaatgcttcatctggtggactgtgggagcagaggcattgccaggacttgggaaacagtcactgtgaaatgcgctgcgtatctcattcactcacttcagctaatgattccgacttggcagacgctaaactcatggaggttcggtttctcctgatacaaaccaaatggctacctggaagaatttctttcaagcaacagttatttttcttatcttcagggttaaaatgtataaaagttatgtgtaattaatctataatgccataaatgataatgcaaaacctaaataatatggtggccggaggggctgccttatatttgaaacatgctttctatcatgcattgactgtatgcattttgttaatgcacattctgtttgtttaaggtgtgtaagatacacacccttctagatgaaactatatgtgccacactttgcactactcataatgataacctcaagactatcagaagaaatatttaaatttccattttatgaagaaaggaaccaaattattatgctttttaaaacaaattaccagtttacataattaatcagggtgcattttaagttctaacttcgtttattgtataatgcatcatttgaaaataccaaggaggaaataccctttgtttttaatgatgcaagagtggacgtaatgctagttggcagtattttattgtaagaaatcaataaagtaattgtgtttta

SEQ ID NO: 1928 - DNA, 1342 bp, Homo sapiens
tcatctacacgtcaaatatcccaagacagattatgctaaatacatcgacttcatcttctaacatgatatattcaggatttacacattaaaatgattatttaaattgtggcagtgatggggtttactttcatgaatttaaattgtttttatttctgtaacaattgcttccaaatattgactactaaaggcagttctgcaagatgtactaaatatgtatattagaaattatagaaaatcatgttgtccgttttcaaattcatcaacagcctagagtgcctgagatataagatgaaacacaaatccacagtatacttgaaaggagcctttttacggttcaggataaatcagcctttgtgatgtactgtgtttacctccttttgtgttgtatctggtaattaaataggcctcagattcagcagtgacataacaaggacataatgtaagataataaagtaggttttatatattctttaaatttttacttatataatactttctagtttttccaccatcagctgaaagtttttgaaacaaatatttgaaaaccaggtatccacacatagcacttttattcctgactagttttgcacacttgaaaattgtttacttattttacaactgttttactgatgctatctttattgtttttgccgtattctgacatgtcaaatctatgccttgaattatatcatctcttttcctgtgggtttcatttgttaaattcattggattttaataatataaaagtatagctaattgttcagttttaactatttttaattatcttcttaacaaataagaagttgctttaaacattaaccaattttctatatttagctatacagagtaattgaacttaacatgtttttgtcaacaccaattacattttcagcttttaaaaatggtagcttttgtgaaatagaatcagtgaccagtatagcacttagatcccttctaactcatataatttttctcagccaatccattcacaagcttggcattgacatgtgctgctagtttataaactggcattgacgaaaatcatttgaatctcttctggctgagataatttgccaatgcaaaatacagttgtcattaatcctgcacattagaaattattagaaacatattactttttaactttaaatctcaaagagattttgagttattgaattcttaaggctttcttagcttgaactgataactatgcattatgaaccctaagtcaatatatttttggtggttttagtgatcagtaatcaaatttgtacttattatgcttgttcaggtaatttacttgactgttctatttgtttgtccaaaagataaaatgatgagagag

SEQ ID NO: 1929 - DNA, 3313 bp, Homo sapiens
ctgagatcattggtagccaggggttgctaccaaactttgtaacctcaaggacaaaatgaggaagatgtgttcattgtggactctaaaaacaaaacaaaacacaaaatcccctgttcaaataaacaaaaaatccaagattgattcatgaaataaagaagacatgaattgttttaagtctacactttgtaattagctaagttgtgcagtattttttgacttaaacagagtatgaccctgaaaaataaaagaatctttttttttcaaaactcatcctacctacctgtaaaaactgtacaaagctaatgtatttttcatattgtaaagtttcaattgtagaaacaactggtatgtacagtaccataatttaattacattttactttaaaaactttacacatttcagtttctaaaattttaaattaacaaaaattatttcttgtgttattcagagttactcagttttgtaaggactgttttgttactgcttttgtgcccagaaaccttgactctaaaattctgtgctgtgcgaaacatgcacgatttttattatgcttactgcgtagaattttatctacttgttccagaaataatacattaaccaaaaaggatttaattgttcagacttgtaagaggttcttcaattacataggcaggtttttcttaaaaatgaaaaaaaaatcaaagatttttttaacagttctcagacttaactgttgccttgaattacagcctagtttctaagcagtgaaatgtaatgataaagagggatattttaacatatttccgaatgaatgactcattatttcattcttttgagtaaccattgttaagggttgggggaaagcatggacaaaacatcactggaaacaaaggctgtaaccacagcaacagactttgtgatacagttaaaaggtgcagctgccagtgacaaataaaaacttttgttacatctcattattttcaggccaaggtgggagtatagtgcataataattgtacagtagcaatttttatcctaattaacccatagcggtttacctaaaagtaaccatcagtcagtgcaaaatgtgcctggttcttaagacaactttttatttagaactgtgagaccggtattttggaaacatttcaaaggaaacatatgaatttgttttgcgttgtgcactacatcatttctctcctgaggaagaattttaaacatgtacagctcattcaatatagatatgagccatggtggagaactttatcactcaagtagacggtaaacatccttaatatgttctaaattgtttatattgctatccataatgggattcacctccaaattatcaaagaaataactcagagtaatttgacaccagcccagatcatatattgattatacaattgtattataaagttcattcaaatcaaattaagaaaacctgagtctttagaagctgaaataatcaacttgtttgtgctgtttgcttgacataggttattgtttgaaaatattgttactttatcaatagtaatcatgcattcttgtgtttttttttaatggaaaactgcaagtttcaattactgttgcactagaagtgctttttatgttgtcattttatattcatgccatcaaaagtagattgacaatacatcaatctaacaggggccaatcaaaacaatgaagaaaagaataactgaaaacaatgtcaaacttttaaatttttatctcttccaaagaagttatatctataaaatctagttttatgcaggtttgtcacagcaaatgtaaaagcggattcaagaagaatgaacttaaaaactgtggagcaaatttttgttgaaaatatataaagtcagaaagaaaaaagatgtaaatgttggaagaagcaaattctattactaattcaaatgaaactaaatgtcaaacacagtacttgtgtcaactatttagcatcccagattttgtaacatattttgcataaattatttgctcttcaaaaatttttgtcattttaaatctaattttaatctttatgttttccattttctaatttccttgcaatgtattattcttattcttaattctctacattgaaatttggctttacgtcgttagcaaatttataaagggttataaagctatgattcgtgagtctaaaatcaaatgcaaaattttatttattatgtaaaccaaaatgtcatttgcaagttttctcattagaagttatccttgcaaagatagaaaaagaagaattaatttgtgtaaacaagcacaaattaacatatttgttaataaataggtttatctactaataaacctatttctagacacattcaaattgataatgatttttagaaatgttaaggttccaaggagtcttacaagtgtatgcccttgatttcctgaaggaaaccactttctttcttaaatattttaaattcatctaaagtgaacgactataaatagaagcaatcaccttggaaccacagctctgtgcaaccaaggccctaagctacaccaaatacgccaggaattttgagacttctcatctttaaattcaaccaaaagggtctttagcaagaaaaaaaatgctggatgatgattattattatttttgcttaatttttattttgccatgtccaggttaagggtgagggtggtgacaatctgaaagactgtgtctggaatctttatcacatatttccaatttatttcagtttttgtctaaaacttgcatttctaacctatcttttccagcatttgataatctcccatttcctccttctaacccccattcctatgtctcccttcctgtctattcctcaccgatttaaacaactgaaatgtttacttatgtttggagctgaaaaatggaaagtttcacccagcatggttacaataacagccagcagctgcagcaaaccataaagttatgcagtgttttgaagttcacaaaccacattttacataaattatctcattttgtcttcataacaaccctatgaagacacattaatctcaaagaaattgagctcttaccccaaaacacagggccaataattggtgcagttgaattattctcaaaatttacaggctgttagtctttccactgtactaaaagatttctttctctgatcagagcaagagaacttccagagataatggatagaatgaaagaatatatatctatatatatttgacatgttgtttagtaatccctattttaattcaattctccatctgtaaaatattagctaactgaattatttctgtgttctactctgggctctcacattaaaactctgttcaaaaagtttaacaagtcacat

SEQ ID NO: 1930 - DNA, 1791 bp, Homo sapiens
tgtaataattgtgcaggtacaggaattgttccaccagcattaggaactttagcatgtcaaaatgaatgtttacttgtgaactcgatagagcaaggaaaccagaaaggtgtaatatttataggttggtaaaatagattgtttttcatggataatttttaacttcattatttctgtacttgtacaaactcaacactaacttttttttttttaaaaaaaaaaaggtactaagtatcttcaatcagctgttggtcaagactaactttcttttaaaggttcatttgtatgataaattcatatgtgtatatataattttttttgttttgtctagtgagtttcaacatttttaaagttttcaaaaagccatcggaatgttaaattaatgtaaagggaacagctaatctagaccaaagaatggtattttcacttttctttgtaacattgaatggtttgaagtactcaaaatctgttacgctaaacttttgattctttaacacaattatttttaaacactggcattttccaaaactgtggcagctaactttttaaaatctcaaatgacatgcagtgtgagtagaaggaagtcaacaatatgtggggagagcactcggttgtctttacttttaaaagtaatacttggtgctaagaatttcaggattattgtatttacgttcaaatgaagatggcttttgtacttcctgtggacatgtagcaatgtctatattggctcataaaactaacctgaaaaacaaataaatgctttggaaatgtttcagttgctttagaaacattagtgcctgcctggatccccttagttttgaaatatttgccattgttgtttaaatacctatcactgtggtagagcttgcattgatcttttccacaagtattaaactgccaaaatgtgaatatgcaaagcctttctgaatctataataatggtacttctactggggagagtgtaatattttggactgctgttttccattaatgaggagagcaacaggcccctgattatacagttccaaagtaataagatgttaattgtaattcagccagaaagtacatgtctcccattgggaggatttggtgttaaataccaaactgctagccctagtattatggagatgaacatgatgatgtaacttgtaatagcagaatagttaatgaatgaaactagttcttataatttatctttatttaaaagcttagcctgccttaaaactagagatcaactttctcagctgcaaaagcttctagtctttcaagaagttcatactttatgaaattgcacagtaagcatttatttttcagaccatttttgaacatcactcctaaattaataaagtattcctctgttgctttagtatttattacaataaaaagggtttgaaatatagctgttctttatgcataaaacacccagctaggaccattactgccagagaaaaaaatcgtattgaatggccatttccctacttataagatgtctcaatctgaatttatttggctacactaaagaatgcagtatatttagttttccatttgcatgatgtttgtgtgctatagatgatattttaaattgaaaagtttgttttaaattatttttacagtgaagactgttttcagctctttttatattgtacatagtcttttatgtaatttactggcatatgttttgtagactgtttaatgactggatatcttccttcaacttttgaaatacaaaaccagtgttttttacttgtacactgttttaaagtctattaaaattgtcatttgacttttttctgtt

SEQ ID NO: 1931 - DNA, 1561 bp, Homo sapiens
gaatgtctaggtacctgctgtgtaagagagcggactgtggagggggaatgagaacaagccagacttggtggtttccaagcaaccgaagttgagtaagttcccacactgctggacctgtggcaaagagtgctttgaataagtcagctagggattcttgcagtctcagctgagggagaaaggtagggctgtgccttctaaagattccaacagagatgtgagaagataatacagatgaaccaaagatgtcacacagttgccatccactgctttgggaaaaaactagcatgctcccctgctccctgttgtgttagggatgtttaggtcatactaggagcaattaggagccatatgcctgggctgagaagagctaggcagtagtgaccttaggatatgactaactcaccaaacaatgccaaggagaaaggcggacaggtcaccatcacctttcatcgattacatgtatagcagtagttttggtgaattcaccaaatcagcttccacttagcattaggaggtcatgccatacaactcacgtatgcgggcaaacacttttgatttgcatatcctgggtgtactgagccacataataaggtgtcaaaatgtgcttgagattccaaaaacttgctgaaacacttgatattgcacagtgcacttattttgtggccaaagcatggccttaccagcttgtctgcactattttcttttgggtggtgactgtttttttctgactttgcatatccctagacactagaactaaaggattggtaataaaccaatcagaaagaaatcctctgtggggtcactttaaaaactactagcttcaactaccacttacaaaatgtgcaagagtcatcatttgcccataaaatacacctcatgggctcctacccctttccccaaaagtctgaaagtgtaggaggaaggaagagatacaaacaaggagaggaaatgatgggagagtgttgtttttgtcacttgccccagcagagcaggggttttggaaggagaggtctttaatagctttgaaatgctttgagatcattggtcaaattgcattttctatgtagagaatattctgctaggtggaaaagttgggagaaaggggaatatgcatctttattctaatcaccaattcaaaccctgcctcttaaggaatttttagacttaagttcactgtgatatccctagtacctagaagagtacctagcacaaagtagacattcaataaatatttgctggttgaatgaatcttctgttattatgtctattataagataacctaatcttatattctgcaggaatatgccacccacacaccagtccaaacactgccctgggaatgctcatcacagcacagtttgctctaggctgtgcagggaaatgaattgcaggtgtctgttttcaattccctgtgctggaatccctggtgctgtctgtgccaagcacactcagctggcattgtatttgtgtgaacagacagtaactgcttagaaaggcttgaaactgtcttcacttcaaggcaaggatttccagcataaaaataaattcattcactggagaa

SEQ ID NO: 1932 - DNA, 1135 bp, Homo sapiens
aagcaaaaacaccaacatacaagtcttgacaacagcatctggtctactagactttcttacagatttaatttcttttgtattttaagaactttataatgactgaaggaatgtgttttcaaaatattatttggtaaagcaacagattgtgatgggaaaatgttttctgtaggtttatttgttgcatactttgacttaaaaataaatttttatattcaaaccactgatgttgatactttttatatactagttactcctaaagatgtgctgccttcataagatttgggttgatgtattttactattagttctacaagaagtagtgtggtgtaattttagaggataatggttcacctctgcgtaaactgcaagtcttaagcagacatctggaatagagcttgacaaataattagtgtaacttttttctttagttcctcctggacaacactgtaaatataaagcctaaagatgaagtggcttcaggagtataaattcagctaattatttctatattattatttttcaaatgtcatttatcaggcatagctctgaaacattgatgatctaagaggtattgatttctgaatattcataattgtgttacctgggtatgagagtgttggaagctgaattctagccctagattttggagtaaaaccccttcagcacttgaccgaaataccaaaaatgtctccaaaaaattgatagttgcaggttatcgcaagatgtcttagagtagggttaaggttctcagtgacacaagaattcagtattaagtacataggtatttactatggagtataattctcacaattgtattttcagttttctgcccaatagagtttaaataactgtataaatgatgactttaaaaaaatgtaagcaacaagtccatgtcatagtcaataaaaacaatcctgcagttgggttttgtatctgatccctgcttggagttttagtttaaagaatctatatgtagcaaggaaaaggtgctttttaattttaatccctttgatcaatatggcttttttccaaattggctaatggatcaaaatgaaacctgttgatgtgaattcagttattgaacttgttacttgtttttgccagaaatgttattaataaatgtcattgtgggagat

SEQ ID NO: 1933 - DNA, 1877 bp, Homo sapiens
aggcttttctccccctcttaatgcctttgctagtgcagtgtattttttcaaggtgctgttaaaagaaagtcatgttgtcgtttactatcttcatctcacccatttcaagtctgaggtaaaaaaataataatgataacaaaacggggtgggtattcttaactgtgactatattttgacaattggtagaaggtgcacattttaagcaaaaataaaagttttatagttttaaatacataaagaaatgtttcagttaggcattaaccttgatagaatcactcagtttggtgctttaaattaagtctgtttactatgaaacaagagtcatttttagaggattttaacaggttcatgttctatgatgtaaaatcaagacacacagtgttaactctacacagcttctggtgcttaaccacatccacacagttaaaaataagctgaattattatttcatggtgccattgttccaacatcttccaatcattgctagaaaattggcatattcctttgaaataaacttatgaaatgttttctctcttaaaatatttctcctgtgtaaaataaatcattgttgttagtaatggttggaggctgttcataaattgtaaatatatattttaaaagcactttctatttttaaaagtaacttgaaataatatagtataagaatcctattgtctattgtttgtgcatatttgcatacaagagaaatcatttatccttgctgtgtagagttccatcttgttaactgcagtatgtattctaatcatgtatatggtttgtgttcttttactgtgtcctctcacattcaagtattagcaacttgcagtatataaaatagttagataatgagaagttgttaattatctctaaaattggaattaggaagcatatcaccaatactgattaacattctctttggaactaggtaagagtggtctcttcttattgaacaacctcaatttagtttcatcccacctttctcagtataatccatgagaggtgtttccaaaaggagatgagggaacaggataggtttcagaagagtcaaatgcttctaatgtctcaaggtgataaaatacaaaaactaagtagacagatatttgtactgaagtctgatacagaattagaaaaaaaaaattcttgttgaaatattttgaaaacaaattccctactatcatcacatgcctccccaaccccaagtcaaaaacaagaggaatggtactacaaacatggctttgtccattaagagctaattcatttgtttatcttagcatactagatttgggaaaatgataactcatcttttctgataattgcctatgttctaggtaacaggaaaacaggcattaagtttattttagtcttcccattttcttcctattactttattgactcattttattgcaaaacaaaaaggattacccaaacaacatgtttcgaacaaggagaattttcaatgaaatacttgattctgttaaaatgcagaggtgctataacattcaaagtgtcagattccttgggagtatggaaaacctaatggtgcttctcccttggaaatgccataggaagcccacaaccgctaacacttacaattttggtgcaaaagcaaacagttccagcaggctctctaaagaaaaactcattgtaacttattaaaataatatctggtgcaaagtatctgttttgagcttttgactaatccaagtaaaggaatatgaagggattgtaaaaaacaaaatgtccattgatagaccatcgtgtacaagtagatttctgcttgttgaatatgtaaaatagggtaattcattgacttgttttagtattttgtgtgccttagatttccgttttaagacatgtatatttttgtgagcctaagg

SEQ ID NO: 1934 - DNA, 284 bp, Homo sapiens
taaaatccatgtagtgatgaggaatggtgttaaataatgtaatatataaaaatcatgatataagaatgtttgaaggtgatgcatgtttgattttagtagtataaatgtattttagttcaaatgatgtataaagttttatgaatgtgagtttctgcttttgaaaattgcttgtaattcctagccttcaaattattaaacactccttgagtgaaataattttgcattgcaaagtgttttaggatgaactttgttatagttttaactccaataaagttcatcagttt

SEQ ID NO: 1935 - DNA, 323 bp, Homo sapiens
ttttcttttggaaacctacttttttctttataaaaaggtagagcattattacagaatctttcaatcatgtaagaattgagtatataagaattgtctaaaggcaagcatatctatactattaaccacattacacattttgttctaattactggctttttttcctcttttggtgtcttaaggctttttgaagcttattttactgtgagtttattgggagtatatagattattttcgattaaaaagtggaattattggtccccttccaattgtaattatcttgaatttttatacattagtttctcaaatatatagaatgccaattt

SEQ ID NO: 1936 - DNA, 216 bp, Homo sapiens
gtatttgatagttaatctaccagtgtgagcttgcctatttctgcctaatcatgtacattatccaccaaaaattaggtcatcatagttgaggtatgtgtctgctatttgcaaagaagttggtcgtatttttttaaaaagtatttcacaagaatggaacaaatctacttatccagttatacctttgaataaaaaaacctccttttattgtctcttttc

SEQ ID NO: 1937 - DNA, 1711 bp, Homo sapiens
ttagaaatagaagatttatatagcaaaaagagaatgatgtttggcaatatagaactgaacattatttttcatgcaaagttaaaagcacattgtgcctccttttgaccacttgccaagtccctgtctctttcagacacagacaagcttcatttaaattatttcatctgatcattatcatttataactttattgttacttcttcatcagtttttccttttgaaaggtgtatgaattcattacatttttattctaatgtattatctgtagattagaagataaaatcaagcatgtatctgcctatactttgtgagttcacctgtctttatactcaaaagtgtcccttaatagtgtccttccctgaaataaatacctaagggagtgtaacagtctctggaggaccactttgagcctttggaagttaaggtttcctcagccacctgccgaacagtttctcatgtggtcctattatttgtctactgagacttaatactgagcaatgttttgaaacaagatttcaaactaatctgggttgtaatacagtttataccagtgtatgctctagacttggaagatgtagtatgtttgatgtggattacctatacttatgttcgttttgatacatttttagcttctcattataaggtgattcatgctttagtgaattcttcatagatagtatatataaaagtacattttaatagaaagccagggttttaaggaatttcacatgtataaggtggctccatagctttatttgtaagtaggctggataaatggtgcttaaatggtaatgtactccacttcttcctattggaagattaacattatttaccaagaaggacttaagggagtagggggcgcagattagcattgctcaagagtatgtaaaaaaaaaaaaaaaaaaaaagaaccaaaccactggaaataatcaaatgcaaaaaggtaacaaattcataactggaaagcaaagagaagaacaagtatgatttggatgataaagcattgttttaatggtgaaaacttcacagatcactaatgtttctagaggttaacttcaagtgggcaagctggggtttttaggtagtcagtggcctagttcctaaagccacagtataggatctgttaaactgaatgtctgttgaaagtttgttttagctgcttggaggcttccttttaagacaaactgtatgtgattaagttgttttgagggaactgaagaacctgatgtagcccctggccagataactgcctgatttctcagatattatttctctgggaaacattctacatagcacaggagcttaagagtggcattatcttctcgccttaatttccagagattatttctgtactgagaatcctggaactactatgctaggaaatttaaagctgcatggtctgtcttgttttcatttaattattgtgaatacctagaatctttcttggtcctgatttctcttgcttaatccagtctttatctctaactgccccttatttgatcaccatgtactaggagctctgatagccagctcagctcctaatccttgaggcaacattctttttctatttgaacttcagttctgtccttgaatcccgactagatatttcttgccctctggtctcagaattctcttggcttttattccttgatccacttgccagttttatcactttacccttgttcctcatggcttcccatcaagccatgggt

SEQ ID NO: 1938 - DNA, 562 bp, Homo sapiens
tccttgtttttaaagaaaggaaatgtgcaatattgaagtgatctttttccctagtcagacaggcccaattccattgtgatgtttacctttatagccaggtgagtgcagtttgaacttgagatacagtcaactgagtgtttgctaggatcctaaggaacataaagttaattaaaaacttacacctaattatgtaaattgccttgttaaagacatgtgatttgtattttagatgcttgtttcctattaaaatacagacatttctaccctcagtttctaaatgtagactatttgttggctagtacttgatagattccttgtaagaaaaaatgctgggtaatgtacctggtaacaagcctgttaatatattaagattgaaaaagtaacttctatagttactccttctaaaatatttgacttcctaaattccccccacccaaaatctttcccttttgaaaatactaaaaactaagttatgttattataaagtgtaaaatggtttgtcttaattataggagaaaaaggccttgttagaaataaaataaactgacttatttcactaatg

SEQ ID NO: 1939 - DNA, 689 bp, Homo sapiens
aagaggattttcccaccttgacaccaggcaatgtagttagcatattttatgtaccatggttatatgattaatcttgggacaaagaattttatagaaatttttaaacatctgaaaaagaagcttaagttttatcatccttttttttctcatgaattcttaaaggattatgctttaatgctgttatctattttattgttcttgaaaatacctgcattttttggtatcatgttcaaccaacatcattatgaaattaattagattcccatggccataaaatggctttaaagaatatatatatatttttaaagtagcttgagaagcaaattggcaggtaatatttcatacctaaattaagactctgacttggattgtgaattataatgatatgccccttttcttataaaaacaaaaaaaaaaataatgaaacacagtgaatttgtagagtgggggtatttgacatattttacagggtggagtgtactatatactattacctttgaatgtgtttgcagagctagtggatgtgtttgtctacaagtatgattgctgttacataacaccccaaattaactcccaaattaaaacacagttgtgctgtcaatacctcatactgctttacctttttttcctggatatctgtgtattttcaaatgttactatatattaaagcagaaatataaccaaaggtt

SEQ ID NO: 1940 - DNA, 1674 bp, Homo sapiens
aaaactgaggaaacagagaacaaactttcaccagcgatttgaatctccagaatcacaggcatctgccgaacagcctgaaatgtgaactgaacaggagaaaaaaagaaaagcaaaaaactcctgtaacccttgagattaagttcagcaggttaaagatggttgcagctggagggggcggaaaaaggccaaaactccatatatgttagtcttcctttatcttacagcgcagcatttattttatgatataatgaaatgttcgttcatgtatatacatttttaaaagtgctttctttgaaacactggaactttgttaagctgcctttttttttttaacttcctactttgatgataagcactcagatatatatcagcgtaaacatgaaaaattttcatgtgagtaggctggtatttgtaattttgctttctttctgcataatgttgattataaatcctctcttttcaggctaatgattacctcttattctctacatgcaaaaaattaaatattttgtgttcaaataaaattagaaaacctgagtggcctcttgtgtcctgcagagatttaaaacatggcatctcaatatttttgagaactacatttgtttttaacatatgtgtttgagaaaagcatatggagtgtttcaccgcaggcacttctgagtaccattccatggcttccagaattttatcctctttgaggtcttctgtgctatgaatattagatttctttccccaagggattatgtggcaggtcattatggccttcttttttttggccatattaagtaacagttttgctatattccagtagtaccgttgtgtgttttctgcaatgtggagttgacttagcttggcattttagatttgttaaaactattttttccataaatactttgaaacatatttatatatttcaatttaaggaatctttttgccatgtgtatgcaaatattattttcttcatacattcattttcttttcaggggaaaattttgggatgggggactcaggaggacctgtgaagcatgtagttatctagatctgggtaatttcatgtttattaaactcgaactttggctagttaaactcatattgaaacttcatctagtctcttaattttttaacactaaattcaagtcatttgttttaagtctctaaaaaagaagattgcagtcatccattcatatgcatggggtctgatcgcaaatacactaaatgtggagtgtaggaaccaaaatgaaacctgctgtatggaaactactttcacttatggttcattggtttttgtaccaatattttttatgcacttcagtgcaagtcttgtcagttaaccttactttatgagtaagctaaataacccaaattacatttctttaaacctgttttactactatggcactttgataaaatggtcaggaaccaactttactggcaaaagggtccatgtaccaccatgtgctggagcatctgttctacatgtggatatctatgaatggtaatgttttccttcatgtaagtgcctattcagagtttcagaattttaaaatgccaaatattttcatggtcatttgcatgtagtaagccagaaaatattcaaagagattttgaaaaccaattgtatttaaccagcctcaaattgtgcaaccatgatgtataataaagaatttgaaacag

SEQ ID NO: 1941 - DNA, 58 bp, Homo sapiens
ttttctgttcctgtttttttttttttatttaattttgcaaataaaaatttattttgaa

SEQ ID NO: 1942 - DNA, 795 bp, Homo sapiens
gaacccctgggattggacctgatgcatcttggatactgaacagcttttcctctggcagatcagttggtcagagaccaatgggcaccctcctggctgacctcaccttctggatggccgaaagagaaccccaggttctcgggtactcttagtatcttgtactggatttgcagtgacattacatgacatctctatttggtatatttgggccaaaatgggccaacttatgaaatcaaagtgtctgtcctgagagatcccctttcaacacattgttcaggtgaggcttgagctgtcaattctctatggctttcagtcttgtggctgcgggacttggaaatatatagaatctgcccatgtggctggcaggctgtttccccattgggatgcttaagccatctcttataggggattggaccctgtacttgtggatgaacattggagagcaagaggaactcacgttatgaactagggggatctcatctaacttgtccttaacttgccatgttgacttcaaacctattaagagaacaaagactttgaagtatccagccccagggtgcagagaggttgattgccagggagcactgcaggaatcattgcatgcttaaagcgagttatgtcagcaccctgtaggattttgttccttattaagtgtgtgccatgtggtggggtgctgtctggggcatctgtttttcattttgcctgtggtttgtgttgcaggtgttgatagttgttttaaggattgttaggtataggaaatccagtaaattaataaaaaaattttgattttccaataaa

SEQ ID NO: 1943 - DNA, 744 bp, Homo sapiens
gagtccgggatccccagcctactgcctctccagcacttctctcttcaagcggcgaccccctaccctcccagcgagttgcgctgggagacgctggcgccagggcctgccggcgcggggaggaaagcaaaatccaactaatggtatatattgtagggtacagaatagagcgtgtgctgttgataatatctctcacccggatccctcctcacttgccctgccactttgcatggtttgattttgacctggtcccccacgtgtgaagtgtagtggcatccatttctaatgtatgcattcatccaacagagttatttattggctggagatggaaaatcacaccacctgacaggccttctgggcctccaaagcccatccttggggttccccctccctgtgtgaaatgtattatcaccagcagacactgccgggcctccctcccgggggcactgcctgaaggcgagtgtgggcatagcattagctgcttcctcccctcctggcacccactgtggcctggcatcgcatcgtggtgtgtcaatgccacaaaatcgtgtgtccgtggaaccagtcctagccgcgtgtgacagtcttgcattctgtttgtctcgtggggggaggtggacagtcctgcggaaatgtgtcttgtctccatttggataaaaggaaccaaccaacaaacaatgccatcactggaatttcccaccgctttgtgagccgtgtcgtatgacctagtaaactttgtaccaattc

SEQ ID NO: 1944 - DNA, 689 bp, Homo sapiens
ggcccagcctgccatggcagctccaacaaggaccgtctgggatagcacctctcagtcaacatcgtggggctggacagggctgcggcccctctgcccacactcagtactgaccaaagccagggctgtgtgtgcctgtgtgtaggtcccacggcctctgcctccccagggagcagagcctgggcctcccctaagaggctttccccgaggcagctctggaatctgtgcccacctggggcctggggaacaaggccctcctttctccaggcctgggctacgggggagggagagcctgaggctctgctcagggcccatttcatctctggcagtgccttggcggtggtattcaaggcagttttgtagcacctgtaattggggagagggagtgtgcccctcggggcaggagggaagggcatctggggaagggcaggagggaagagctgtccatgcagccacgcccatggccaggttggcctcttctcagcctcccaggtgccttgagccctcttgcaagggcggctgcttccttgagcctagtttttttacgtgatttttgtaacattcatttttttgtacagataacaggagtttctgactaatcaaagctggtatttccccgcatgtcttattcttgcccttcccccaaccagtttgttaatcaaacaataaaaacatgtttttttttttttttt

SEQ ID NO: 1945 - DNA, 540 bp, Homo sapiens
cctctgagggctgataggggtgggtttgttgagagggacttgctgggccttggtgtgagagcaggcatatttggaggggatctggtggtgccttgaaggtatgatcagagaggggaccacaggtgtgtgtttcccctttgtgttaagcgtgaggcagagggagacgttagtccagcatttccaaagtgtgggtgggtccgttggttcccaagatacttttaggtggtatggggcctgcattaagtggcacaaaatcagagcaagaaagcgatgcccttcccaattctctcaatccttttatgccgagaagatctcagctggatgccaacatgttccgatgcctgtggaagacatgccgacgtctcctctgcctagggagcaggacttgggcttagggcaggtggaaaaaattccagacttttttagcactgtttttgttttaatggtatatttttattggctactttattgtttaggacaagtggtagtggcattctatttattgtgaccttttcaataaatagatttaagtaaaaatga

SEQ ID NO: 1946 - DNA, 446 bp, Homo sapiens
tgcctctaaccttggattggcctgtgtgtgtgtttgtacatagaatatttatttttatacagttttcactttttgaaaatgccagaagtatgatgcatcttacagattattaaaaaagaaagaaaaacctgcatattttgtacagaaaatatcaacctcttcccttttgtttacaagatgttttgtataagcctatgtctctaatacattttttgtttggtcgtaatgtctgcatgatatttgtgcacatttattaagtatcgaagcttaataaattattgtgtcctggtgccaaagggggccagccagaactgaggtgctggctagctcatgtgtgaattcacataaatgtagaggtccatgatatttgctaagctaggtgtgtctaagagtattttaaacccttatggattttcattattaaaggaaatgaaacatggcaattc

SEQ ID NO: 1947 - DNA, 600 bp, Homo sapiens
ccgccgcactttccagcagggatcggaggacgacccgagtcccaagagtggggttttgctttttaaaaggagagaggaggggtgatggcaggggagtggagggtggccgggcaggtcctgccggcgcagggagccctctgcccttcacactctcctccaaaagagcctccatctgtaaggaagcaggtctccgcgaggggtttctttccatgtgttttcctcctgttgttttagaacttttttaaaaaaacagacctcgttttagatttatagcattgacttttacacacattcacacaagaaaaaaatcctttcaaaattcttaaatcttctgttcctcctttttccaagggaagagggcaaaaagtggcctgggctctgttggtgtgcgtgttccgtggcggagagaagaaaatgggaaagacatctcactggtgcttttctcttttgttttagtgccccccgcccccatccctataatatctgtaactactcctaaaaaggttttgattcaggcttttttttggtttcattttgtttttttaagaaaaagaaaatgaaaggaaaaaaataaaagatccagtgtctttcttacaacat

SEQ ID NO: 1948 - DNA, 2166 bp, Homo sapiens
ctctcctgcaaggattagaagaaaagcagcaacactgatacttgtgtgcacctgatttggccaataggatcaacagtgaaaagacagaagaggcaataccagcagtccccattacagtctccacctccccgtcttcctctgggtgccaaatgatgggaagatgagcttcatctgaccatttcttctccctgtctcctgttccccttcccagttaaacaggttagattgaaggcccttgctgtatttctgtagagctaagcagcccttagaggaaaacagttcaactctgactttcctagttgtttttttattgagagccaccctcataccctgtaattttgtcccaaatcaaatatcaacctaccaacaactgcctggctgggaagtctggggaagggatacagagcttggtgggcctaacaccattcatattccttaccctctgtctctcctccctgtatcccacctatggttcagtgttgcaagagtctgggcttggggtctttaaaaccagcagggggaaatgataaaaagagagctgctttcccttttaccttgaggtattcgtccctcgggacagagcacagcttgtgcaactctggtagcgttaccctgtgacactgttttgaggtccacttcctttctttcctctgggaggaatgtcttctgtctttggtattatagttcatcttcccattcttttacttagtgcatttgtgcagatatttttaactctgtacatcagaagagagcccttggtaaccagttttgctcttcttctgccactcctccctgcttgcatctcgttgctggcagagtcctcttgtacttcaagaaagcaaagtgattttgtctgctcctagagcaggtccataccaagtaatagaggcactttagcttccacttggtgggtaaggcctgatcatagtattctgtcagataatgcctaagaatgaccgctgaagaacgttgacccatttgagtacccggtctcagtcgtcatttttaagtccagtgagcattgtggtagttgttcttagattgcagtttcttatgttttgagtttgaagttgattttcagaatgttcttagaaaagaactgcatttttttcctttgtggatctgctttgtttggctgctgggatagataagcatgggcttaaaaaatgtgttcctcccagttttcttgcctttcctgttgtactctgaatttctctccctacctccctcactttcttcctctctccttcctttccttcctttttctctaccaggccatttttcaaatttacatcaaagatacctgaagtgttggtatctgagaatatctgtcactcctcttatctgagaagtgaccttttatttttaagatgactacagacctatttttagatatgttttcagtacaattttgaacagcaactttttaattaaacatcttccagtgttaggaagttgagaaacgttcataggcaagtctgctgttctatgtcaccatcttttgtctcccctagtcccccaggagctctttcctttcccctctagttttgggtgtgcatgtttggagtttgtagtgggtggtttgtaaaactggaccattctgccttgctatgggttgttcaagaaagcctcattcttttctgtgaccctttcgcttttgcattcaccctccttcccacctacctgtcctggggctgttgagcagcataataatcccgggagaatgattcccctcatagaaagacaaaagcatccatcccctcatagttaagtagccactggtgtcctgggaatttctggttggatttggtgccctgaacttttttattaagaaatcagatcccagggtgagagtaacaggccatttggccaagaaagaaacctgtttgtttttcttttgaactatgaaaagaccctgtttgtgaatatattttagaaagagaggaaggatgtctgcagaactttgttctgttttctgccacaaaaatgtgaatagttcagagtgaaaaccttttgtgatggttgatgtctcaggaataagctggatctccaatgttttggggatgctttgagtctcaaaaaaaattgataatcagaaaagtaatttttgtttgtttgtttaatgtatccctgttctgtttttaattaaactccaagtctcatttt

SEQ ID NO: 1949 - DNA, 1716 bp, Homo sapiens
ggggccttactccctgtccccccacccacagggccccacgcaggcctggggtgtctgaggtgctcttggctgggagcggccctgaggggtgctggccttgaaatgattcccccacttcctggagagactgagcggagttgggagcctttttagaaagaactttttataggacagggagacagcacagccatcccttgcaaaccaccaaggtgtgtggctgacctccagggaggagcactcactggagtgctcacaaggtgcacactgctgtgtgtaccttgcagacaggccggcgttcagcctccaaggggctcactcccccagttgccaaacactgtggatctctctgtcctcttctcccctctctcagattggcctggcagcccctggcacagagcagacccggccactggtagctccccacttccttactcctgctgctctgccattgccgctccccttgttgctgcccaagcactgccctcgggcgtctggcagcctgaggtgggtggaggggacagtgttctggatagatctattatgtgaaaggcagcttcacccagttttctggactctcatgcccccatctccgacctgggagacttcaggaatgacaacctacccagcctggtggggctggcaggatggtggaggtttctcaaggagctggagacttcagggagcccctctcatggggaggaaagagcttccagggggcgaacgcagcacagaggaagaggcctgctccacttgtctgggaacctgggcaggaggcacagaggaagccaaggcctggagctgcaggtcccccggcatctctctctgtcccggcagcccaggatggcctggtgcccccacctgctgcagcaggagccccaaggagtgctagctgagggtggttgctggggtggtcctcatggacagtgaggtgtgcaagggtgcactgagggtggtgggaggggatcacctgggttccaggccatccttgctgagcatctttgagcctgccttccggtgggagcagaaaaggccagaccctgctgagttagaggctgctgggatccactgtttccacacagcgggaaggctgctgggaacaggtggcagagaagtgccatgtttgcgttgagccttgcagctcttccagctggggactggtgcttgctgaaacccaggagctgaacagtgaggaggctgtccaccttgcttggctcactgggaccaggaaagcctgtctttggttaggctcgtgtacttctgcaggaaaaaaaaaaaaggatgtgtcattggtcatgatatttgaaaaggggaggaggccgaagttgttcccatttatccagtattggaaaatatttgacccccttggctgaattcttttgcagaactactgtgtgtctgttcactaccttttcaggtttattgtttttatttttgcatgaattaagacgttttaatttctttgcagacaaggtctagatgcggagtcagagatgggactgaatggggagggatcctttgtgttctcatggttggctctgactttcagctgtgttgggaccactggctgatcacatcacctctctgcctcagtttccccatctgtaaaatgggagaataatacttgcctacctacctcacaggggtgttgtgaggattcatttgtgattttttttttttttgtacagagcttttaagcattaaaaacagctaaatgtg

SEQ ID NO: 1950 - DNA, 1584 bp, Homo sapiens
gctgtgccctgccatcccactggcacgtttacactctgtgtactgccccgtgactcccagctcagaggacacacatagcagggcaggcgcaagcacagacttcattttaaatcattcgccttcttctcgtttggggctgtgatgctctttaccccacaaagcggggtgggaggaagacaaagatcagggaaagccctaatcggagatacctcagcaagctgcccccggcgggactgaccctctcagggcccctgttggtctcccctgccaagaccagggtcaactattgctccctcctcacagaccctgggcctgggcaggtctgaatcccggctggtctgtagctagaagctgtcagggctgcctgccttcccggaactgtgaggacccctgtggaggccctgcatatttggcccctctccccagaaaggcaaagcagggccagggtaggtgggggactgttcacagccaggccgagaggaggggggcctgggaatgtggcatgaggcttcccagctgcagggctggagggggtggaacacaaggtgatcgcaggcccagctcctggaagccaagagctccatgcagttccaccagctgaggccaggcagcagaggccagtttgtctttgctggccagaagatggtgctcatggccatactctggccttgcagatgtcactagtgttacttctagtgactccagattacagactggccccccaatctcaccccagcccaccagagaagggggctcaggacaccctggaccccaagtcctcagcatccagggatttccaaactggcgctcactccctgactccaccaggatggcaacttcaattatcactctcagcctggaaggggactctgtgggacacagagggaacacgatttctcaggctgtcccttcaatcattgcccttctccgaagatcgctcctgctggagtcggacatcttcatcttctacctggctcaagctgggccagagtgtgtggttctcccaggggtggttggaccccaggactgaggaccagagtccactcatagcctggccctggagatgacaagggccacccaggccaagtgccccagggcagggtgccagcccctggcctggtgctggagtggggaagacacactcacccacggtgctgtaagggcctgagctgtgctcagctgccggccatgctacctccaagggacaggtaacagtcttagatcctctggctctcaggaagtggcagggggtcccaggacacctccggggtcttggaggatgtctcctaaactcctgccaggtgatagaggtgcttctcacttcttccttccccaaggcaaaggggctgttctgagccagcctggaggaacatgagtagtgggcccctggcctgcaacccctttggagagtggaggtcctggggggctccccgccctccccctgttgccctcccctccctgggatgctggggcacacgcggagtcattcctgtgagaaccagcctggcctgtgttaaactcttgtgccttggaaatccagatctttaaaattttatgtatttattaacatcgccattggacccc

SEQ ID NO: 1951 - DNA, 2773 bp, Homo sapiens
acttggaccctttctagtctcaaggggattccagccttcagaaggttcttgggatatggaacaggccgtgcacaactttgacatctggtcttgctccatagagcacaactcaagatagaccatgagacagcttgagcctcaggattcttgttcttcctcttatcttccttttgtggtttttaatttgaagaccccagagaattccattacataatgattttgcccttgttataaatgttaccctaggaattgttttaaccatttccttttctaaactctctagctttcaactttacttaaacattgtgtggtagctctgacctgtcctgattctttagagaagctggggtacagtttatgagatagctagagcttctttgttatctcaggcaggaggcgtttacataacagatgtttcctcagctgggtgtgaggtatactctaagcaggaggctttttcagccttctctctcttttttttttttttttttttttttgagatggaattttgctcttttgcccagtctggagtgcagtggcatgatctcagctcactgcaacctccacccactgggttcaagcgattcttctgcctcagcctcccgagtagctgggattaccggcacccaccaccacgcctggctaatttttcaattttctttttcagtagagacgggttcaccgtgttggccaggctggtcttgaactcctgacctcaggtgatacccgcccccccgcctcagcctcccaaagtgctgggattacaggcgtgagccaccgtgcctggccctgtctctcttaagagtaggttcattgtctgtcttagagtcacttctattgcaactcattttctttttccagggcacagatcgaccaagctgccgttccctattctgcaggacaggactattctagcatacctgcttcgtccacccaggcagggtttggggtggtctcttctgtgcctgcagtccccatttgacacttggttgccaccatctttggagattattgtttggaatgatgcttccattggctttttcttgttaccatggactaggaagaaaacatggtttccaaataatctgggagcttttggccatggtgccgccttcctgaattggcagtggtcagagcacacctgaaccctatcctgggctggtgatgagcagaaatcagacctttttctatgcttttttgaatatcagagtaggatgaacacccagattcaaatatgtcaccaaagttggtggtggtccttccctgcacccttgcgttaagccattatgtaatgaaaatgtgtttgcttgaaggaacagctcaaagcaccttcacaagttgccttgacttaccctaggtgggtgtgaaagagcacccgtagcaaggaaaattttctctattagtgtgttcttctgcctcttcccccttgattcagctttcagaggtactatggcagttttgcctcaggtgctgaacatttctcagccctggctaaaagggagcagcacagggagagaaacaggataggaaagcagaatggcgagcagcctatggcccagggcctgtaatcccttcccaagactagctgctcagggtggtgcagggacaggaccagaccctgcgcctatttcctgccttctttcccctatagggaactctgtaggctgagccactgtcctgctcttatgacattatatcttgtgcctttctcctcagcagtgagcagtgagctactcctggcccaggccctaggggaaatggatcagtctttgaggtttctatttggggaggggagtacttaagatgagtcaaaagacactttcctctgttccattccccatctcagggactcctgaatattcagcctctccaggctggtgtcttctagtttcccccactgggaatgctggctgggagagccatgactaccagacttttcctcaggctccttggcatgttagtctgaattgttcttgagcactgtactactgacccaacaactgtgactagctggccacgccattcagggctggtgtggcatttatgtgtgtgtgtgtgtgtgtgtgtgtttttcctgtttgcccagcagtgcattgtgggttccaagagtgggtagtgtgtgtatgtgtgtgtgtcagagggagacctggcaggcacctctttgagagtagctgtggtcagagctgtttggtcagtgcattatgttgaatgaggtccaggaacccagagccacccagcagacaccactgtggcttgccagctgccaagatggagaagcatgtgcccctgtagagcgtctccccagaaccagaccccgagccactcgcttcctctgtgctgtgacaacattggtgccaggggagatggtgtttttcaaagggacctactgtagccactttaatttacaattaagagccttagtttgacttaacacttttgtaggcttttcattgtgtatttttgtgtatgtgtgcatatagcagctactctgtagcagaggtgggtagagacacttaatagtatcatgtcgcatgcagatgtcacatcggcctctgcaaaaactgtactgtcttgtttctgcattagacttaagtagtcatgtgaatatactgctatgtcacttttaatattacgagttttatacttggaaaatggtacttgcttcttttaaatctctgtcttctctaacctcccccttcccatttcaatgctcccttcctaatttcagcaataatctcaaaaagcaattaaatagttaaatgaccctaattgt

SEQ ID NO: 1952 - DNA, 674 bp, Homo sapiens
gcctcctgggacagcgggctggcagggactggcaggaggcaggtgcagggaggcctggggcagcctcctgatggggatgtttggcctctgcttcctcccagttcacagccagagttgcctctcctcctcctcttccccaacccccagaccatgaccagccttagaaaatccatgtactctgttgttagagggcccagagttccttctccacccccgctctctctctcttggcctgagatctctgtgcaggaaccaagatggggctgaagcctctggaggcagttggttgggggcgggcaggcaggaggccctccctccacccccccaccctcagcccggcaacttctgggttccatgggttttagttccgttctcgttttcttcctccgttattgatttctcctttctccctaagcccccttctgcttccacgcccttttcctctttgaagagtcaagtacaattcagacaaactgctttctcctgtccaaaagcaaaaaggcaaaggaaagaaagaaagcttcagaccgctagtaaggctcaaagaagaagaaaaacaccaaaaccacaagggaaaagaaaaacccagtttcttaggaaacgcaaacgatttattatccagattatttggataagtcctttttaagaaaaaaaaagaaaatgaaaaacaacac

SEQ ID NO: 1953 - DNA, 782 bp, Homo sapiens
aagggaggacacaaggacattggtgcttcagagcctttgaagatgagaagagagtgcaggagggctgggggccatggaggaaaggcctaaagtttcacttggggacagagagcagagcacactcgggcctcatccctcccaagatgccagtgagccacgtccatgcccattccgtgcaaggcagatattccagtcatattaacagaacactcctgagacagttgaagaagaaatagcacaaatcaggggtactcccttcacagctgatggttaacattccaccttctttctagcccttcaaagatgctgccagtgttcgccctagagttattacaaagccagtgccaaaacccagccatgggctctttgcaacctcccagctgcgctcattccagctgacagcgagatgcaagcaaatgctcagctctccttaccctgaaggggtctccctggaatggaagtcccctggcatggtcagtcctcaggcccaagactcaagtgtgcacagacccctgtgttctgtgggtgaacaactgcccactaaccagactggaaaacccagaaagatgggccttccatgaatgcttcattccagagggaccagagggcctccctgtgcaagggatcaagcatgtctggcctgggttttcaaaaaaagagggatcctcatgacctggtggtctatggcctgggtcaagatgagggtctttcagtgttcctgtttacaacatgtcaaagccattggttcaagggcgtaataaatacttgcgtattcaatgtaa

SEQ ID NO: 1954 - DNA, 669 bp, Homo sapiens
ctagacagggaagccttgtgggtgtgagcagcacccatccaccgtcccctcccagggagcaagggcagggacagggccggtcgggggggaccctccaaggccaggccttggggacaaccttggcttggccctggcagcccgcatcagctgctcagatcccacttttgccagacgctcattcagcatctgacctctaccttcataagatctgttatttttataagaaaaccaaacaaaaatgttaagcatctaaggacaaggtaaggagggtcactggggcccaagagtctggggaccagcttggctcaggctgagctgaaagaggccaaacaggccctcctccctcccagctccaccccgcaagcaccatcccctccggctaagcaggcgcaagggaggcccagcgcggacatcccctgctggccggacacccgactccagtccaagtctcgctacatttccgccacatccctctctgctggacgtccaggtggaggtggcatccccacgtggacaagaaagtcaatgtcaatgaacaagcattctctccatttcactggcttcccaaatgtgtgcccagcttataaacagaagtgactgatgttccctccggttttgaatgtggagtgtttgtgtgtgttccttttttaaattaagttattccctcaa

SEQ ID NO: 1955 - DNA, 19 bp, Homo sapiens
ataaagtttttggactctt

SEQ ID NO: 1956 - DNA, 5083 bp, Homo sapiens
gggggccggggccccgtatgcccctcctcgtgaaaggcctgccccgtctttctgccgcagccctcgcagagggcgggtgcacagcgccatgagcgggcagcgcctcctgtagcagtagggcccccagccagcgctccagccaaagcggcggccccagggttaattgcggagaacaggacagtgcccggtccccttgagggccatcacacccagacccaacgggttgcagcctcctgagcaggcctaggcaggcccgggcctgttggcaagcttcgatctcacacacacagaaacatacattcgtgcctggagaccctgcaggccagagtccaaatatttaacaatcagaaggggcaaggctctgaccagtgacagtcagacctcctgctttatttggtgttaaccgtttcttgtctggatggtgaagtctggaatctgggtgggtccttggaggaggggctaggacagccgtgggtgtcaaaggtggcatttgaggctcgtttgaggtgacagtggctgtttaccaactagtacagagcgattcagcgttttcatgaatgggttggctgtgctggttactgatgaatatgggccccttatagagctgcaaaacacacacatgcgtatagacatacatacatgtacaccatacatagacaagcatcataaaggcacaagtgcacacacatctatgcagacaagcttcctcgctgcttatgcccacagggtttttctgtatgacacacctcagaggagcctgtgcttaacatttgtaggattatttcgagggcagggcaggggaaagaaacgcgttaaagggccatgacatgacacagttccctggccgggtttggactgaacagtggattcagaactgcagcgttcaaagcccctgcccgccttagattctcatggctacctcctctgacccatccacatccttgcggctggcaggcaggatgttttgaaatggtgcagccaaaggccccgtctagcttggctggctcccgaacatgtccatatttgaaggctgcctcaggcctggcaggcagaagcagctgtggtccctggaggcaaaaggcagctcacggggccttccatttccagccaggcctcatctggggtagggccaagaggaaagtacagagtgcccgtgggggagaagtcccaccaggatgccccccctcccctgagaagcccgccttctccctcgtggacaggagtcagccagttggttgctgtggttacagccagtgcctggaattcctccttagggccctgggaagagtattgcttaacgcaggatgtgctgggtgttttgtttcgggcttttatttatggcttggtgtctttcttgtttcatggctgtgtttttgcttttgtttctgtaggagcgcctcttccaagcagtggaggcctgagggcttgagggaggctggggaaaaccagcagggagcacttggctcctggcagagggagaggacaggaggaggagccttccccaggaggaacgaggagaggtggccacgtggcaggccacagtgccctatgggcttttctgtttgaaccccatgtgggatgaatctcaaagccaccagcgttcttgcctagtgtccagagcagcagagatttgcagccctcgcccctccctgagaagaagctggatttgaaaatccctcacaggccctaacatgtttcctgggtgggcaggggcctcatgacaagcgacaagtgtacccagagtagaaggccttccccactcccacctcaaacccaggagcagaactcagtatccagagcttacaaggagctgcaagggtttgccgagggctgcccagctctgcttctggtttcctggacaatttctctgtcagatacggcccattgtaaacccagagggctgcattttgggttgagtaatatggacaccatggaagtacaggatctgagtccaacattgccatgggggagggaagagtgtgtcctggcaggaagccaccattggagaaggtgaggccagtaaccatctcatgggattcgctataatcagcctatttgagctgctgggtctctgtcactgtggactccagtcattcaaggaggtctccactcttgggttttttttattttcttttcttttgctattttgcctgaacaccccaacactcttggttttagagtccaagagtaagttgtgcagagacatggttctaatttggagttcaaaggaacaccagctctgaaaacatgaccgtggggccaggatgtttctggcaggcccagaagtgctggccgttcttccccagcctccccactgctccctcctctgttccccatgtggaggtcggaggggctgggactggggagggggcagccacctccatccaaggctcttcctaggggccctgctaatgtggacagtagactttatccctccttcttactctgggccaagacctcccactccgccctctgaggatggtaccaagaatgggcctttgggacttctcaggacattgacaatgtgcacactgcaggttgacttaatttatttattttttgaaaagaagagacagaaaataccttattatctgcagggactcaaagctgtacccaaatcaagaaagacaaaataacaatagaaaccattcacacactccgttcatgcatggacaccagaagacgattcagaacacaagaggagaatgagctggagcgccagcaccacgatggccccaggacgttgtttaagatctgagatcccttggtttctctcttgttgatctgagatgctacatcagggcccttgctgctgtattacctctgcccgggtgtttgagacaggtcacaagcgcgtggatgtttcctggaagtgtattcccctggggctcagcgatgctctgggaacccttggggtttggggaaggacagtgtggtgtgactattggcttgaaacgttatggatatggttggagtcacccatgtggatatgattttcagcttggagctgggatggagaagatggaagcactggtggccgggcctctttttccagcgaggccagccctggcttctcctctgttccagcttgtctgccagaagccttcccctgcaaggtgcccacctgcccggagacagagggagcagctgaggcctctctccactggccgccagcctccctagcacaaggggaccattcagcaatgagtgtttactcatgttctttcttgttgatgagttctgcggcccagcatatagaaatggctcagaacgttccaggccttggtgagacacagcagcgtccaatgctcacaggctgtccccactctgcctgttcccatcttcccctcgggacctgtttataaattgaggaatggatgagggccctggagggtccttgggagtagttagtggagggcaggattctcaggtccccatagagagggaaagagaagaccagatgtgcatagaagccagtctctgtcacatacaccgcaggtggtcaccgagttattttccaaaagctgaggaacataaagcaaatttaggcttttgtccttctgcaatacatgcacttgaaaataaacagaaaagagatgtttaataacaagtttacttccggtctgctagcaccctcagcctgggagctactgccagaggctggcgtagtggggcagctgctgaccaaaccccacagaacagagggcaccaggcatcacacgacatctttccctcccatctctgccatctgtctgtctggcaatggaaggagcttcagcaggaggtccttcccagaaggttgattcttggcctgggtggtagaggagatatcctgaccctaaagtcttccagccccgggtcatcctctcctatactagggcctattgaccgtagaggccaggtgcggtggctcatacctgtaatcccagcagttggggaggccaaggtgggaggattgcttgagcccaagagttggagaccagcctgggcaacatggtgagaccaattgactgtagggcttgtcccttgctaagacaggagcagaagactggatggctgtgtcctcaaggcagtcccctcccatccccattcccaaagtcagaaagtgaagccagatctcaagggctgatacctgaggcaaggagagctaaggggagagaaattggggctgagtggaagcagatgcctgcacaagccaagtgtgtcttattgatctgtacaagctgatagaaggaccatctgctgaaatccagggctcctgagttggtgggtttgcttgtgaagcttctaggacaaggcgcagccagatggaagggagagggtccagggcttcctaaatgcagccgcatcacctgtcaactcgctgcagtttcagagacagtggaagctgctctttacctcaaaagcacaaagcagaattggcaacttcacttgtctcaagagctccaagatcctttggtctcgtgtcctttggcaccccgtaactggactggggacaaatttgttacgtgtttccaaggctacagacatggcgccatcctcacaggcctagctcatgtcatggatcaggtgctttgctggggggatacaatgacccatgtggtctgcgtcttctgccattggcttgaactgggcaccccctgaagtctccatctcagctgtatattctagtccaaattttcctggctcccctgctccctcccaggtcctgcacactgtctttttgccaacacctcagccctgtttgctatttcatgtctgcatggtacgagacaccccttcacggcatacactgccatggtatgtacatatgcatccacgtgtgtgtatgtgtagcatgtagctcattctgctcagcctctggcgccgttccacattgctcccagccccattgctgtcactgtcgtcccagatgtccttgccatggccacagacaatctgccgtctcctggaaacgctggggctgcccttcagagagctggcagccccagcagtcagggcctgctttgcagaatagaatgtgaacccaactcctgatggcctacttgacttatttaattaaagatgaaatcatgcaatgagc

SEQ ID NO: 1957 - DNA, 2742 bp, Homo sapiens
tactgcctggatggtcacctctggtgcgcagcaagtgcaaagccagtgggggactttctcacagcttacatagccatccagagatccacagctacgtcactgaattgttaatgcacatttgtacttggtttctctgtatctattcacaggcaacaaatacttatatgtgtgatctttcagggaatgttttgtttatttgtttttaaaagtattgggaatcagattaagacaatcagtttcagagaaccaggaggtttggggttaagagatactcaaaaattttcacaagccaagtagggcatatatcagatttggccaactgaatggcgtctgtcctgtcatccatatggtgcctggaaatatttaccagtcaaggtcaaggtcagcatctgtggttaaaaatatagcattctgacctaaaaaagttattttgcagatgaatgtgttttcaactcaggacctatccaaatgaggaatttttaaatattcttttttttttcctatttttagacatcaattctatagattctgactttttctaacctcttatagacatgccaaatgctggcaaaaagaagtgctttttggatatggcagcacttgtaaaaataaagcagtaagcaaaatccttttaaacacagaaatcctgagttcttctcattggtggactcaagcaattctgtagcaaataaatcctttgaaagagctccaaattggtggcattatcctttcaaaatctcagggatttgggatgaagtgaagaggtcaaattactttttagaagaagggaatctaaaaaccatctctcctaaacaaatggtagactggctttacttaagggatatttgtctttataggagtacataaatttatcttaatgatatttaagtagtttttttttttttttgagacgaagttttgctcttgttgcccaggctgtatcgcaatggcgcgatctctgctcactgcaacatccacctcccaggttcaagcaattctcctgcctcagcctcccaagtagctgggattacaggcacccgccaccacacccagctaattttttgtatatttagtagagacggggtttcaccatgttgaccaggctagtctcgaacttctgacctcaggtgatccacctgcctcagcctcccaaattgctgggattacaggcgtgagccaccttgcccagccaatttttttttaaagagacatggtcttgctatgttgcccaggttggtcttgaactcctggcctcaagagatccccccaaccttggcctccaaagtgctgggattacaggcatgagccaccgcgcctggcctcaagtaagtttttataccatgataggggaaaacctggaaggctaagagatgtgctgttttccttcatgggaccccactttccacagtaaacaactggtataatcatttattacgttgtatgcaaattttgccttagacaacatttgtctggttccttattaataacttgcatctgatctgcttagagttgcttaattataagtaaatataatcccagtagcatttagccttaatctcaagagttcaaaatgtttaacacattctacctgacgggaggtggtgacctcattcagtcggttaagagcctgagccctgtgaagttaaacacctgctcatggtcacatagcccaggcagaagaaaatctcggacttggaatagatcccagttgcctgataattcatctcattattgcctctaaagcaaattggagactgggcacagtggctcccacctttaatcccagcacctggggaggctgaggtgagtggatcactagaggtcaggagttcaagaccagtctggccgacatggtgaaactcagtctctattgaaaatacaaaaattagctcagtgtggtggcacacacttgtaatcccagctactcaggaggctgaggcatgagaatcgcttaaacccaggaggcggaggttgcagtgagctgagatcacaccattgcactctagtctgggtgacagagcgagactctgtctcaaaaaaaaaaaaataaagccgggcgtggtggctcacgcctgtaatcccggcactttgggaggctgaggcaggcggattgcctgagatcgggagttcgagaccagcctggccaacatggtgaaaccttgtctctactaaaactacaaaaaaaattagccaggcgtggtggcgggcgcctgtaatcccagctactcaggaggctgaggcagcagaatcgtttgaacccgggaggcggaggttgcagtgagtggagatcgtgcctgtgtgctccagcctgagcaacaagagcgaaactgtctcaaaaaaaagaagaaaataaataaataaaaatcagagcacaagaagtaccagtccaccaactcacattttctatattaataattcttaactaaaagaagttccatattcgacagcattttagttttttaatagtacttattagcatcaaccatcttgataatcaccaagggaaaaattaaaaatacctagactgcaataaacctttaaattggattttcagtgagaatttagaagcaatcactacctttctcgtttcatttgtgtaaccatgcagcataggcactgtgttacatcatctttacgctttggtatttgaacttattacagaattttttctctaaattggatgtttctttatatgaccttggaaactgaagtgatcttagcattaaacaaaaatgctttttg

SEQ ID NO: 1958 - DNA, 851 bp, Homo sapiens
acttcaacctgagggggccgacagtgccctccaagacagagacgactgaacttttggggtggagactagaggcaggagctgagggactgattcctgtggttggaaaactgaggcagccacctaaggtggaggtgggggaatagtgtttcccaggaagctcattgagttgtgtgcgggtggctgtgcattggggacacatacccctcagtactgtagcatgaaacaaaggcttaggggccaacaaggcttccagctggatgtgtgtgtagcatgtaccttattatttttgttactgacagttaacagtggtgtgacatccagagagcagctgggctgctcccgccccagcccggcccagggtgaaggaagaggcacgtgctcctcagagcagccggagggaggggggaggtcggaggtcgtggaggtggtttgtgtatcttactggtctgaagggaccaagtgtgtttgttgtttgttttgtatcttgtttttctgatcggagcatcactactgacctgttgtaggcagctatcttacagacgcatgaatgtaagagtaggaaggggtgggtgtcagggatcacttgggatctttgacacttgaaaaattacacctggcagctgcgtttaagccttcccccatcgtgtactgcagagttgagctggcaggggaggggctgagagggtgggggctggaacccctccccgggaggagtgccatctgggtcttccatctagaactgtttacatgaagataagatactcactgttcatgaatacacttgatgttcaagtattaagacctatgcaatattttttacttttctaataaacatgtttgttaaaacagtt

SEQ ID NO: 1959 - DNA, 1870 bp, Homo sapiens
tctgcaaaaagcctctgaatcctggcagaaggaacacctgtttgcctttttaattaaagcattgcaggtggaagctgggagccatgtggggggtagagcgtttttacctttaattataaaacaaaaacagaaaggatctgagggaagaagggaatgttaaaacctgaggatcaggcattgtggaatataagctcaaagggcttagtgaatattgtcttaaccaagtatctcagtttctggatgaaaatgatgcagttatatagttgagagattcataaagagaaaacaatgctgggggtgttcgtttcttgcatcttctttgcagagtcagcaaaagagtaacacaccagcaccccactcgactctatttgtttttaatttaactgtccctatttttgacataggagtaaataaatatactagaaaagcaaattctcatgatatgctaaaatatcattagcatttattttaaattggacccagtctctgcagagttaccaggaatctttccttccagcatccctttactgaccacctacctgtacctcttggttacactcattttttccatttgataattggaaccaacttataactgtttaataattgacactttagattatctcttaataccttcttaaatgtctatatatcccagtgctctggatcagtgtctaaaaatcactggcaacactgcatgaggttgttggttttgttttgttttattaattagtctttcacaggaggaataattgccctcctttatatacttatctattgataatcccctctccctccagaacacaaatcagagggaaagggggtgttcagctgtactaccaaatcaggaagatgtaaggtttacaaattggctaagaatcatggctctgtagccatttcaaccagaataattttattgctaatctgctttgtgtgacagcattccaggccagccagatgggactgccttgtctggaggctttgttcatctcgaaggacacacacttccacactgtttgtgagccctcccacctccacaacttcagttgtaaatcaagtgtgtggatctcaaagggtgcaatttatctttatataggaatacatttctagggcttccttcaagcccactctcttcaccctattttttcttatcttaaattgagagaaagagaattaatcttatactttgtcaaaacattttctaccatatttccagatgacatctgcgcttgaagagtcaaaggaatctgtgtctaatatcctgtttttaactgctgtaggggcaggatggaaaggatgatgggggctgccacaccactgattggccttttctttcacgtgattcatccttcctcattgtggcaaggagtttctttctctttttcttcctcctttgggatcattgtgtatgaaaagaaaaactttaaatgacaaacccagactccaggtgccttgcaaaggttgaaggccagccaggattgctgctgctgctgctactcctgccaacacccctttcattggcatgacggaatgaaaggatgcatgtctccacttcctgaccctccgcccacttccttctccctccaccacccccagtcgtcagctccttccctcatttatttttgttaagttgtgtgaattatttttaacccatttatcctgtttgtgcatagggtttttaagaagaaacagcacagtgcaacgagcaaatctttttggggtgtgtgggaagcaagggagggaggacatggagaaaagttctttaaacaaatagcaaactattgaacatgtgtaaaatcctgtatcatttatgaaatatgtataaaaagcaatgtaccttctggaacaataaatacttattcaatttttg

SEQ ID NO: 1960 - DNA, 505 bp, Homo sapiens
ttcgtagccatacctcgagtccctgcattggacggctctgctctttggagcttctccccccaccgccctctaagaacatctgccaacagctgggttcagacttcacactgtgagttcagactcccagcaccaactcactctgattctggtccattcagtgggcacaggtcacagcactgctgaacaatgtggcctgggtggggtttcatctttctagggttgaaaactaaactgtccacccagaaagacactcaccccatttccctcatttctttcctacacttaaatacctcgtgtatggtgcaatcagaccacaaaatcagaagctgggtataatatttcaagttacaaaccctagaaaaattaaacagttactgaaattatgacttaaatacccaatgactccttaaatatgtaaattatagttataccttgaaatttcaattcaaatgcagactaattatagggaatttggaagtgtatcaataaaacagtatataatttt

SEQ ID NO: 1961 - DNA, 919 bp, Homo sapiens
cccggatcaagtcacttagatcgctccttggtattcctgagggacaaactagagatcagttgacaaaggagaagtgacaaaagataagctgcagaaggacctcagaagggcagagcaaagggtgagcctacagtaagacacttctatcagcagtgttaatggaagaaattcctaccaatgggcaatcaaaaaagccagtgtgagaagaaaactgatgagctgtcaactgtcaaaaatcagggggaagggggaagcattagtttggatgtaggcccttgttcagtcattttctctaaggccttggaagcaaacatcttctggcatatggcttgttaatgttgtgtttacactaactgccaaaatgtgcctgttgtaagtttggttaaaacttttatcttagtattgaaaatatatagcaagttttaagtcattactgagttacttgttacccttacagaattaagaaaaatagcacagtatgacattttaaaattcatgtacaggtgcattctagttacatgaacatgctagttaaataaaagtcacaattaagtcattatgactcagagtactttataataaatcagatgccctgaggctctgttgaggaagtagaatcccaatgggactccagacagtaaatctttttcgctgttttcagctctgtcacatgctcagtttgtgacccagggaaaagactattgctttgccatgcctgttttcctaaataaaacagttgctggcatttgcacatccacaacgtgttgattaacaaagggattggtggagataaacagatgccaaacctgacctatttcttaaactttatggaataaactaaatttaggatttctcatcattcatatatgatgccataagggagaagagtttatttggggaaaataaaagaaatttccac

SEQ ID NO: 1962 - DNA, 1064 bp, Homo sapiens
agcaagtgggtaaatggcatagggcccaggctagcttccagaaagcaccccaggatgtcagagaaattgggacagtaacatatcttatgtaagctgacctcagtctctctggggggagggggagatataaggagacaccttctttctgggctcaagtatcctgccactctgtcatgtcctgctgatggaaggtgcccctgttccctcattctaccctctttttcctgctaatcctgtcataatgaatgtagcttctcagttcactgtatatgattcggtattgggggtttggaggcacccagaccctggcaatattatgtgtccctttggaccagtctcccaagaggagaggggcaggcaggaaagagtggggatcctaaggttactacagggggctcagtgtcatccacaacttcctatattagggataaaacatataggtgcacaagagctggggtatagcccataggtggtggagagaaaagtggtcagtccttcttgggcctggaggttagcagtcaagtttctctgctttcactgctcgctcgctctctcctgcaatgattgatgatcactccgtggatagagaggcacactgtcagaggtgaccggagaactgagttgcaaaatatattaagatctggtagaggtaccagcttcctttccagctggagaggccccaacactggatggttctgtagggagcctagggagcctggtcatcaacttgcaatacctcacagagccagttcacatcccactctgagctcccacgagaaacactgcttctccaggcccggggttgttggggagagaggcagaggcagctggagcgccgttctctcctgctgggacaccgcttgggctttggtattgactgagtggctgacagttatcttccaaccccaactggcttgggggcaggacaagggctaggcttgatggtggccaggcttgcctgctccccacctgggatgcccctgctctggacctctcatttctcttcattggtttatttttcaatgcatctttaatttgtaaagaaataaaataaattaagatgt

SEQ ID NO: 1963 - DNA, 533 bp, Homo sapiens
gtgcccttgcaagagcctttaacttggcggagctaaggagatcttattctaccatgggacataaggagcatccactgcacaaacccttaatgaacactgtcttttcatggattcaaggaattccagttttatctattaagattttatcttaatgatgagtagccaaggtctaacatagggcctctcctcaaggagagatggagggatacaattcttggttcagtgggaaacagaaccctaaaacatccatttgattcaaggtgctggtccaacagagtttttaaactactcacttctttatttcatcctttcgactgtacttgattaccagtgaagtaagatgggtcaggttacgacttacaacttttgttctattccccagactcctcattattcagtacatttcccaataatctctttttctcatctcttgctttataaattgttacgttggtggagaagcaaaacatttggtgagttgtattctggttttccggagttggatttttttatattatatactttcatgtcaa

SEQ ID NO: 1964 - DNA, 184 bp, Homo sapiens
aaatggacaagtattttcaatgactgaaatatagcttctgacaactatgcagaggcattttagagacattggcattgccatgccctctttggagggtagaagaggcaaaacacttttttcaccctttggaatcatagtatgggtagaagttatgatttatcttgaaataaaatcctctgaacag

SEQ ID NO: 1965 - DNA, 274 bp, Homo sapiens
gtctttcacccttagggtcctatacagggacccaggcctgtggctatgggggcccctcacacagggggagtgaaacttggctggacagatcatcctcactcagttccctggtagcacagactgacagctgctcttgggctatagcttggggccaagatgtctcacaccctagaagcctagggctgggggagacagccctgtctgggagggggcgttgggtggcctctggtatttatttggcatttataaatatataaactccttttttactcta

SEQ ID NO: 1966 - DNA, 931 bp, Homo sapiens
gggtccccagggaggaaacgggcaccacccgctttcttgctggttgtcatttttgcagtagagtcatctccatcagctgtaagaagagactgggaagataggctctgcacagatggatttgcctgtgccacccaccagggcgaacgacaatagctttaccctcaggcataggcctgggtgctggctgcccagacccctctggccaggatggaggggtggtcctgactcaacatgttactgaccagcaacttgtctttttctggactgaagcctgcaggagttaaaaagggcagggcatctcctgtgcatgggtgaagggagagccagctcccccgacggtgggcatttgtgaggcccatggttgagaaatgaataatttcccaattaggaagtgtaacagctgaggtctcttgagggagcttagccaatgtgggagcagcggtttggggagcagagacactaacgacttcagggcagggctctgatattccatgaatgtatcaggaaatatatatgtgtgtgtatgtttgcacacttgtgtgtgggctgtgagtgtaagtgtgagtaagagctggtgtctgattgttaagtctaaatatttccttaaactgtgtggactgtgatgccacacagagtggtctttctggagaggttataggtcactcctggggcctcttgggtcccccacgtgacagtgcctgggaatgtattattctgcagcatgacctgtgaccagcactgtctcagtttcactttcacatagatgtccctttcttggccagttatcccttccttttagcctagttcatccaatcctcactgggtggggtgaggaccactcctgtacactgaatatttatatttcactatttttatttatatttttgtaattttaaataaaagtgatcaataaaatgtgatttttctgatg

SEQ ID NO: 1967 - DNA, 1985 bp, Homo sapiens
gcacctggctgagcctggctggcacagaaacctctactaaaaagaaggaaaatgatctgagtcccaggagctgcccagagttgctgggagctgaaaaatcacatcctggcctggcacatcagaaaggaatgggggcctcttcaaattagaagacatttatactcttttttcatggacactttgaaatgtgtttctgtataaagcctgtattctcaaacacagttacacttgtgcaccctctatcccaataggcagactgggtttctagcccatggacttcacataagctcagaatccaagtgaacactagccagacactctgctctgcccttgttccctaggggacacttccctctgtttctctttccttggctcccattcactcttccagaatcccaagacccagggcccaggcaaatcagttactaagaagaaaattgctgtgcctcccaaaattgttttgagctttccatgttgctgccaaccataccttccttccctgggctgtgctacctgggtccttttcagaagtgagctttgctgctacaggggaaggtggcctctgtggagccccagcatatgggggcctggattcatttcctgcccttcctcagtttaatccttctagtttcccacaatataaaactgtacttcactgtcaggaagaaatcacagaatcatatgattctgcttttaccatgcccctgagcaatgtctgtgctagggaaacttcccgtcccatatcctgcctcagcccgccaaggtagccatcccatgaacacactgtgtcctggtgctctctgccactggaagggcagagtagccagggtgtggccctgccatcttcccagcagggccactcccggcactccatgcttagtcactgcctgcagaggtctgtgctgaggccttatcattcattcttagctcttaattgttcattttgagctgaaatgctgcattttaattttaaccaaaacatgtctcctatcctggtttttgtagccttcctccacatcctttctaaacaagattttaaagacatgtaggtgtttgttcatctgtaactctaaaagatcctttttaaattcagtcctaagaaagaggagtgcttgtcccctaagagtgtttaatggcaaggcagccctgtctgaaggacacttcctgcctaagggagagtggtatttgcagactagaattctagtgctgctgaagatgaatcaatgggaaatactactcctgtaattcctacctccctgcaaccaactacaaccaagctctctgcatctactcccaagtatggggttcaagagagtaatgggtttcatatttcttatcaccacagtaagttcctactaggcaaaatgagagggcagtgtttcctttttggtacttattactgctaagtatttcccagcacatgaaaccttattttttcccaaagccagaaccagatgagtaaaggagtaagaaccttgcctgaacatccttccttcccacccatcgctgtgtgttagttcccaacatcgaatgtgtacaacttaagttggtcctttacactcaggctttcactatttcctttataatgaggatgattattttcaaggccctcagcatatttgtatagttgcttgcctgatataaatgcaatattaatgcctttaaagtatgaatctatgccaaagatcacttgttgttttactaaagaaagattacttagaggaaataagaaaaatcatgtttgctctcccggttcttccagtggtttgagacactggtttacactttatgccggatgtgcttttctccaatatcagtgctcgagacacagtgaagcaaattaaaaaaaaaaaaaaaaaaaatccctgaatgatgattagagacatcaccgctaaaaaactacatttataagctaggatttgttatatgcaaatattttctgcctcttcttttgttctgtttaaaacaataaaatgcatttgtat

SEQ ID NO: 1968 - DNA, 856 bp, Homo sapiens
tggaagagctgaaaacacaagcccaggagtgcagacactgccctaattgcttcctgagaattcccatattaataaagaagaaaattatctgccattttttcctactataataatgctgaatcttaatttagagggtacaagggtatggtaatgcttgtagaatctttattatctcaacaatctaaaaaatgatgtttatttccatagtttgatagtgccacttaaatgccaattaaacaagaatataacatttcaatagaaatttttatttcattttcaattactttgtaaattcgtgtgtatttagtacactgatttgtttttttacatttctgctttgaatgcagatgcaatttaatataatagattttttaatgaattaatcttaacatagtaatctttagctttttatacaaatatatttaatttaggagtatatgtgtgtctatacacacacatacataaatataccacatatacacctgatagtcaaataaggtacagaaattttatcttgtcaattatgccaaataatctctttaatgtgcactcaaacatgtaataaactttggataattaaataatgtgccaaatttaagttgtaccacaatattcaaatcatagtcttatggaactctgtaattggacacaaacaaaaacttgtcatataggaatttttttctgtcttttccctgtgtacagcaaactgaggaagaaagatcattatttaatactgggccctgaaatgacacccaatttgttaatggaattatgaagaacagcaatataatacactgaagaataacttagtatcagagaccaataaatcacttttttaaggatgacaaaatggtat

SEQ ID NO: 1969 - DNA, 1835 bp, Homo sapiens
acaacgtgggcagtccacaaaacctacggggcatcactattggattgatctgcacaaatacctttgaagagtacgatttcaaaaccagcaattggtgtgaatgcaaaaacatttgttggcaccatttatttaaaaaaaaaaaaagctgtatgcagcagaaagccttatacaagttgtttttctttttttcctttttcttttttttggtaccttcatttctgttacttttatataaaattctctgcaaaggaaggcctctctttggactacaatttggaggcagccacttgttgtgcctgcttctgttaaacaatgtggatatcaagcccccccaaattatctgttttaatattgaacctagagctttttttttcccttccctgtccactccatgtaaatgcctttagcatttcagttattgtatattttgtttaaggtgacacttcagcatgccgctaatgtctttgttagtgacagtgcattttgtagtactgtacaagtgttgtgctaacagtaagccatttcttaagttttttgccttgattagggtgccctaatttgagggttttaaaaaaaactatatttttgttaattataaaactgtaaagagctataaaagctattcccatttggttagtcaaaagggttttattgctaaatgtttggtgtaaagttgagacccttttccattttggtgacagatttctttggggaaaaaaggcagctttctgttttataaatgcagacttctgtttattgaatgaagcatatctcagtgtttatctgtcaggttttgaaacatttcatatatgtccaaatacttggcaggatttaaaaaaaaatagtgaatttggtgtaaagttgctattttatggaaatgcctctaactttacattttcattccatctgtagatttttctatctttataaaatattggagttattttttaaggaaaaatagaaaagtagcttgtgaatagctcaaactaagcttacaaatcgcatgtaaaaaagcaaaaaagttatttgtgtctgtttatattgcttccttttttgtagcctttgtacctgtacagggtgacagtaagggccaagcaggagaggcgtaatccttgtataaaataggatccagcgacactcttgtatttatctgttctctttttagtcagtcacttcaaaaaaacaaaaaacaaacaaaaaaaagctgtacattttaacataaaataaattatgatgagccatttttagcctcttgtgtcctgtcatattatgattgatagagaatgaccaatggaactgtatcatgtgtcacgcctcagaacacatacacattttgggaaaataaattatttagtgtaaattggagttatgggattttctgatttgttttgactttgggggaggggttggcaataaataagagtaatatctaataaaaccatcacatataccaaatacctatttaataaattaatttataatggattttaatgcttttcatgaaagtttattttatgcgagtgcataccttctgtatgccaatcattgtctttaaaataaagtgaaattgtttttttcttttggactttgatcttcatttgcaaagagatcccgcacaaatatccagctgcctcactcgcacagtctgtagaaacatccctccaagcctcgcaccagggtagcaaacttcctttttataaagattcataccaaaaaaagcacccaatttgggattgtatgtttgaaaaatcattttctttttaaaaagtgtgaacgttttgctctgttgtgaatgattaattgtatgttttctttagagtctaaagtttagaccc

SEQ ID NO: 1970 - DNA, 437 bp, Homo sapiens
ctagctgcagtgaaggctgtgggaagggtgtcagatcctgtgaagaatggcaaaacagcctgacctgagaaacgtgactgagaagcattggaaggaatgtagctttaaaatgatctttctgtccttttcctagatacaccaagaagctggaatttcttgcacactttatcctgggttctcaacctctttggaatcttcttcatcttggctgcccatgaacattattctattgatgtgtttattgctttttatataacaacaagactctttttgtactaccatactctggccaataccagagcatatcagcagagtaggagagcaaggatttggtttcccatgttctctttttttgaatgcaatgttaatggcacagtacctaatgaatattgttggccattttcaaaaccagcaataatgaaaagactaattggatg

SEQ ID NO: 1971 - DNA, 457 bp, Homo sapiens
tccagctgaaagaaacctttgggaatggatatcagaagatttggccttaatatatttccattgtgaccagcagcaggcttttttcccccaagaagatgatcaaaacaaaggatgatctcaacaagagctgtattttaagtatttagacagttctttgttagctggtttctagttggttatctagttaccaatgctgcagtcctgcagtcacctatacattatttaaatgtatttaactgttaaatgcgctacccaccaataatgaaatagacctttatgaaaactgtgcaattgtgtgcatgtttgtttttatgttcctttagaaaacattgactgttaccattgaatgagatggatcagtggatattaagatgaggttacaaattttgttaagttcagccattattacttttggtatcccagaacatgacaaattatgaataaaacaagtatacat

SEQ ID NO: 1972 - DNA, 80 bp, Homo sapiens
agccaacttctgtataccttcacccatttcatgaaaataaaatcaaaagggaaatcaaaaataaagaaaacgctaaagaa

SEQ ID NO: 1973 - DNA, 99 bp, Homo sapiens
ccgaaggagtaaaggtgctgcaatgatgttagctgtggccactgtggatttttcgcaagaacattaataaactaaaaacttcatgtgtctggttgtttg

SEQ ID NO: 1974 - DNA, 3767 bp, Homo sapiens
gggccacccggtcggggccatccctccacactctgcatcctaccccacctacccaacacacttttccacctgggagcctgtgccctcagaccgccccgcaccagagccacgggctgtggggcggggagccctcccccgctgcagccctctcagaacagaggggtagggagggtgcaccagtgcaccaggaaggctgtgtgggtctggagcccacgtcccacctccacacccttggcttgggcccatgcccagcgcaggcctgaagaccaccctcccgagaggaaccagcccggtaagagggcacacgctgatgcggcttcccggtccctccgcgtgtgccgattccagatgaccttccagtgtccccaaggttcttccatcttctagactgtaaccctgcctccctgcttcctggtccagagcctccctccagtgactgtggagcctgagaaggcccccgggccccagcatgggccccgagccttggaggagcactggcagttggtggcagtgagaccagcccacccaccaccacccaccacagaaaagcacaaacctctgggaaagacaacgtctctcgggggccaggggtcatcggtttgacccctgacctataagccaagataccccataaacacactcagaaagcagagaaaaaggacaagagtctgtgtttgagagggggtctgccattcctgcttggggactggtggggaagagggccaggacatcttctgagccaggacgtccctgaggctccacctccaagctcagacagggcccaggcttggggaacagagagagcaggtgtacacccaaccaaagtgattgtgcccttggttggggggcgcgggcatataacctgtcagaagcaaacaggagcggcaacttctaactttgctccaagccactctctttttaaacagcaacaatttaaagctatgaagtcacctggagaaaaggaacgttgctcttggacagcaagcaaaccatttctctccgtctgttctgtttttctcctagtccctctcctgccacctctccaagacttccgtgggacacccacttccctctgtcctagttctctttgtccaatcagatggcaagggcagtgcgtggaaaggccggggaggtgcagaaaccagagcccagggcaatggtgtctgtccagcccctccctctgtccctgtgctccaagctgcccccggctgcagcccaggccatggacatgtgcaccagtatgtacctgcaggcatgggggggaggggggcgtgtttctgggcctgccccagacactgcccttggctgccagcctaccctgcctgcactcctccaccatcacaatctcacccaaactcctgctcactcaagcaaaagcagcctctggccttccctccaccgctttgctccatctggcttaccactctccagggcctcctggggagcctgtcctgtgttcactttgtttcaggctggtctgtgccccgtgagccacatggcctagggtgatgccaggttgtcccgtcactggggtcccatctgtaaattctttgcgcccttcccggctgctgcctggggccctttcctgctctcccgtccgctgtgggtggtccccagctctcctctgtgggttttaccggaaaggtggccccagctgttgacttccagtcactgtcccagacggcacaaggttttctgtaggaaagctgccattgccccggccccttttcttcctttgtcccgttgtcgaggttttttcaaatagcgtgttgttcagtatgcaaatcaattattttaagaatcgcttttgtaaatatctttgtgaatattttagtatcgtctttgataatattcaacattttcatgacctggttatagcctttgctggtgtttttaaaatacctggactcaatgacaaagaccgagtcttctttttttttaaacaaaaacaaaaaaagcaaccagggctatttgtacagttgaaggggtgaacagaatgggcggctgtgctgggagttggaagaccgggcagcccgctatttagagccatccctcagtcagctggcagggacaagccaacgccaggtagcatgtggccacccttgcccagtgtctgtggcctggcaagtggccacgccctgtgtcagaccatctgggaattaagctccagacagacttacagatgccttccttaggagttcttgcttcttgcgttgatactttgccccagaaaggcctgggattcattctggttcttatcagggtgtgtccacactctgctcacaggtggatccacggctttccagtgcggagagtcgagatgctccctgcagcccaggccccgggcacctcctgcaaccatctctgggctcagcacctgaggcgggtttcctgggtcccctctccagcaagcctccaccagcaagctcggcccagagcttcccttccggctggctctgaaccgtgcgtggtgcctacagcctgcagtctggagacaagctcttccggagtgctctgggagccaggccagggtgtgagggaggtgcagaggcatccggggcgggagcaagccccaggttgtgacaggtgcaggtagacaacgcccataaacagagatggtcctgaactctggagagatccttccctgatcctttcggacgactacttggagccataagtaacctcagcaaaaacgaggcctctgcaagccacttttccatgccaagcatccacccggcccacaggcatgtttctgccgccactccgcaagatggacagggagccagcaggcaggcgggaagggccaagtacaggcaatcacccccatcttcttggtttgaagctttatccatgtatcatgttccgtgtagccattttattttttaagaaactgctaatactttctccctaatggaagccctgatcccccagagagctacaggtctgctcccgacgggcctcgggcctgacccgtccacacagggccgtgtcaacagcagcgactcaagggacgtgtgtacatatgtaaatgagaaatagagacgtgtcaacagatgcattcatttctcttggaatgtgtattgtttttattttgcgaaacaaaacaaaacaaaaaaaaaagcttggaactccatcacgtggaaaaactagatcctgttggttatagcatttgtgagttctccacgtctgtctctctcgctcatgtaatatactctgaccctgagtggaaaggggtttttgttctgtttttattttacctacatgtactatttagcttcagtgtactagtcctgccacctgtgtatttttagggtgctatggaaataatgaaaagaaacggggatttcagaagaaaattgtaaccaaattcatactttgtataatttttgatatcatgatcacaggtgattcacacgtacacacataaacacacccaccagtgcagcctgaagtaactcccacagaaaccatcatcgtctttgtacatcgtatgtacaatgcaatcatttcatactttaaactggtcaaaaaactaattgtgatttctagtcttgcaaagctgtatgtagttagatgatgtgacaacctctaatatttatctaataaatatgtattcagatgaaacctgtatattaggtgttcatgtggttattttgtatttaaagatcaaattatttgactattgctagacatttctatactctgttgtaacactgaggtatctcatttgcccatgttaatttttttctaaataaattgacaaaaac

SEQ ID NO: 1975 - DNA, 1486 bp, Homo sapiens
tctgtggccagggtgctggcatggtggcagctgcaaatgtccatgcacccaggtggccgcgttgggctgtcagccaaggtgcctgaaacgatacgtgtgcccactccactgtcacagtgtgcctgaggaaggctgctagggatgttagacctcggccaggacccaccacattgcttcctaatacccacccttcctcacgacctcatttctgggcatctttgtggacatgatgtcacccaccccttgtcaagcattgcctgtgattgcccagcccagattcatctgtgccttggacatggtgatggtgatgggttgccatccaagtgaaagtcttttccttgaccaagggggacagtcagttttgcaaaaggactctaatacctgtttaatattgtcttcctaattgggataatttaattaacaagattgactagaagtgaaactgcaacactaacttccccgtgctgtggtgtgacctgagttggtgacacaggccacagaccccagagcttggcttttgaaacacaactcagggcttttgtgaaggttcccccgctgagatctttcctcctggttactgtgaagcctgttggtttgctgctgtcgtttttgaggagggcccatgggggtaggagcagttgaacctgggaacaaacctcacttgagctgtgcctagacaatgtgaattcctgtgttgctaacagaagtggcctgtaagctcctgtgctccggagggaagcatttcctggtaggctttgatttttctgtgtgttaaagaaattcaatctactcatgatgtgttatgcataaaacatttctggaacatggatttgtgttcaccttaaatgtgaaaataaatcctattttctatggaagactggtacctggtttctggaagaggggtctgtgacttggagctgatctttactgagctcgccgtggcagatgccatgctcaggacgttcatgtggatggtttcatgtcatcgtgctggcaacttgtcctccctgccttagagatgaggctcagacaaacgaccttagcacccatagcctatgccatgagcactggctccaccctgaatcccagctcctccccttagtgaccccaagtctgtttccctcagctgcataaggaggcgatatagtttgaatatttgtccccagccaaatctcatgttgaactgtaatccccagtgctggaggtggggcctgctacgaggtgtttggatcatggggacgggtatttcatggcttggtgctgttttcttgatggtgaattattgcaagatacggtcatttaaaattgtgtggcacctccccctgcccccttcttgctcctgctttcaccatgtgacatgcctgatcccccttcaccttttgccatggtcataagcttcctgaggcctccctggaagctgagcagatgccagcaccatgcttcctgtacatcctgcagaaccataagccaattaaacctttttaat

SEQ ID NO: 1976 - DNA, 99 bp, Homo sapiens
gaggcatttaggccatgggacagggaggacgctctctggccttcggcctccatcctgaggctccacttggtctgtgagatgctagaactccctttcaac

SEQ ID NO: 1977 - DNA, 99 bp, Homo sapiens; identical to SEQ ID NO: 1976

SEQ ID NO: 1978 - DNA, 1633 bp, Homo sapiens
agttgtctgaaagcttgctctacacttttacattcatcctcacccttttttttgtggggtagaggaggtgcagtaatttactcagtgatctttctactttctagaaactgtccttcaaagctctttaagaccccctcgttagtcagttttttctcttatatgctctggttgagcttgaatagaccagttgttacttaagaaagaaacagagaaagattttagcttttcaatcctatttggcagaggacttcagctaccttcttacagtctttggctgtgttggtaccctcgtgtgctctgagctaagccacatactaaactgactttttggtttgtatacccttgctcccgccttctgatgaaaacaccttaccctcacaaccaccatctttcctctcctttccaaagctctttccaccttgctgcactaagataaagtgacacttccactatatgtcaattccacacacatttattaggtacctgtgaggtaggatcctatcctctcaaacttccatttctcatgctacagagaaagataaggaagatgagcaagtgcctggaatggggcaggctgagcagtcacacaggcatagaggcacgctgagaacctggaggggagactgcagagtgccttccctgatgctgcagccggaagtgatccttccctccacctggcccctgggacactgtgctctgcagtgtgcagggcctgatggcactgctagattgctccttcagctcagggccacagcttaaacagctttacctttcccctcagcacctgtcccactatcttgcacacaggtgctctaaccatgtttattgaacaaaggagggaaactgatttcactttcacttgttcattatcattccaatttttatgtgaaaatggcacaacccatttggggtaccctcaccccaaaataaaagcccaagtctacctttgactggtaccaccttttttgtggtttcgttggtgagaaacctttatctttttcatacctttctattctcaatcacttctccaaaagtgtgtctttccagctctgatttattcaaaacacaagcatttctgtttagagattctagcccatgggttatctggctagttattacctctcctgttcacttagttatactttattattgctcacaggctggggaggcagaatgactctgtcaccactaggagccattagggcttcttccctggaggactgcctgcttgctttctggggacactagccctcatttcccttctgtggtacagtggggcaaattatttgtattaagcaaacatttatgggaaacaacccgctcccgaaaacggagcccccaagtaaagcacaaccctgaaagattatgaactatgaattgtctctggtagagataaatttctgcaaacatatctcagtcttccctctgtttctctggtgattaagaagttcctttttggtaaggaaaaggatttttaaccatagagttaggcatcatggaaattcaaaccagatttcttaatacctggtcttcctcaaagagaaataataacagtaatagtggtgctgggaacaatatggcagattattgaatgaaattgattaacttgaataaaatgctgtgaattttctct

SEQ ID NO: 1979 - DNA, 118 bp, Homo sapiens
gccctggagctggagcccagcagttggaggtggtgcacctgccaggcagcgcccacagaaccagccctgtcctctcgacttccttccttagcttcatgtgaaataaaagctattctgg

SEQ ID NO: 1980 - DNA, 1122 bp, Homo sapiens
gttacagaaggtagatgcttctgatttacttctctcaaagctagaagccaagaaaatggccagctagaaccaagatttaaggggctgtaaaaggcaagttcagggactctccagcctactccttttctgaaaaacccttaatcatgtgaacatttgaactagttataggataaaataaactcagaataaggatttaaaataagtaaccaagtggctgtgactttttcctcttgttttatcaacgttttggagactacacaatgaaaacacatctgttggggtgatcagacccaacacccggccatgggggctacaaagtccagccgagtcaaaggaaagagaaaagacaagtcaagagagaaagtgggaccagggggccaatgctagtatggaggctgtgaagtccccaagctctggaagcccacactatttgttggtgatcaaacaaagaaacaggtgatgaggatgtgggagttgaaagaaagtggtgtatcaagcgaatgaactacagctgtgagggtttagcattttctttgaaacatatggctacttgagataatgggagtgctagaagcaaggagccagcaagtctggacacattacaaaggccacaaggggttttatcctggaccccggacatgttccaagccctgcctcaacttttctcccaacactaagctttcctcccaacacacatccatctcgtgtgttcatgtcttaacttttgcttcacttcacagtcaggcctctccgagtattttttacacatatcctggagtctacctatgtcactgatagcagatatttttcttcaacatatattatcaatgttttaatacttttcttcaattttagtaactggtaaaatacatgtaagatgtaccatcttaaccatttttaagtgtacagatcagttgtattaagtagattcatattcttgtgcaaccatcatcaccatccggctgcaaaactctttcatcttgcaaaactgaaactctacacccattaaaaaataactcgccatttctctctctccccagcccctggcaaccaccattctttctgtctctgtgatttagattactctgtaagtatgttgtataaatagactcatacaatgtt

SEQ ID NO: 1981 - DNA, 898 bp, Homo sapiens
ttgtgtgaaactgcccagctcagggataaccagggacattcacctgtgttcatgggatgtattgtttccactcgtgtccctaaggagtgagaaacccatttatactctactctcagtatggattattaatgtattttaatattctgtttaggcccactaaggcaaaatagccccaaaacaagactgacaaaaatctgaaaaactaatgaggattattaagctaaaacctgggaaataggaggcttaaaattgactgccaggctgggtgcagtggctcacacctgtaatcccagcactttgggaggccaaggtgagcaagtcacttgaggtcgggagttcgagaccagcctgagcaacatggcgaaaccccgtctctactaaaaatacaaaaatcacccgggtgtggtggcaggcacctgtagtcccagctacccgggaggctgaggcaggagaatcacttgaacctgggaggtggaggttgcggtgagctgagatcacaccactgtattccagcctgggtgactgagactctaactaaaaaaaaaaaaaaaaaaaaattgattgctgtgcctcattacaaatgcatatgatgtttgagtgctgttgtttgaaattatttttcttttcgggtcttcaaaaattcaagaaaagttgatgattgacttgaagattacaaaatttaaggttttttggcatgtgtgttttctattaataattggttatatgatgtcaaagtaatactttcataatagaattgacatgctctgggatagtttgacaaaggtaaattataaagtgaaatctcttgtttcattatcttccattctaacctcagagatctgtttctctagaaaaaatgtccatctctggctttaataaaattatgcatcagaaatca

SEQ ID NO: 1982 - DNA, 1652 bp, Homo sapiens
ggagcagagttgagggagccgagctgagccacgctgggaggccagagcctttctctgccatcagccctacgtccagagggagaggagccgacacccccagagccagtgccccatcttaagcatcagcgtgacgtgacctctctgtttctgcttgctggtgctgaagaccaagggtcccccttgttacctgcccaaacttgtgactgcatccctctggagtctacccagagacagagaatgtgtctttatgtgggagtggtgactctgaaagacagagagggctcctgtggctgccaggagggcttgactcagaccccctgcagctcaagcatgtctgcaggacaccctggtcccctctccactggcatccagacatctgctttgggtcatccacatctgtgggtgggccgtgggtagagggacccacaggcgtggacagggcatctctctccatcaagcaaagcagcatgggggcctgcccgtaacgggaggcggacgtggccccgctgggcctctgagtgccagcgcagtctgctgggacatgcacatatcaggggttgtttgcaggatcctcagccatgttcaagtgaagtaagcctgagccagtgcgtggactggtgccacgggagtgccttgtccactgtccccctgtgtccaccagctattctcctggcgccggaactgcctctggtcttgatagcattaagccctgatggcgccggtggcgcggtgggcatggttcttcactgagagccggctctccttttcttaaagtgtgtaaatagtttatttataggggtaagaatgttctcacaccatttcacttcctcttcctctcctccagcattctcctctgagcagccttagatagtgtccatggctggagccgaccctttgagtccccttgagtgtcttaagaaccagcccacaacagcctctctttctcctccacatactgcagcctccctccatgcatcccacatacaagcactcccccactccccagcgtggcctcactgtcttctggtcttggtgctactgaaattgtcacccagaatttgaatcctgaccctccccactgcaagcccagggagccccagcccaagatggccagcctgaaactgttggccagggctcctcttgtggccatgtacccagggctggctggcctgccatttgcctctccccggagacagccgttcttctgcaaccacaccccgtgcctagccacaaccccaggctgcagctgctcagaagctccaggcattttgtttctggtgaccgcccctaatgggatatcggtgatcactggtccacccttcctgtcagggcttttctggggctgctcttggaaatgaagtcttaagtactgaataactcccctggggatagctggggcatttgtctagctgggctactttctaacactttgccatagctcagaccacttctcatcgttcagggatggactgcaaccttaatttacttgccggagtgtacattctagtgtggtgtatactggtggctgttgatgatgatttttttttttttacacaattctctgtagactaggagaagaatgcttgtgtttttcggaagtgtgatgcttctctttgactgccaaactcttttatggaatatatctttatatt

SEQ ID NO: 1983 - DNA, 2479 bp, Homo sapiens
ataatttttttccttatcaattggattcattttggtatcctgtttttgaactcagcttaagaacttctcatctcaaatcctatggccttctggaagatccaccactatccaaaggaaaaagtagattaatatgcctcaagggatatgacatctatggcatagggctactggtctcatcccagcgatcgggacagaaattgctaatagctcatgcaactctttcatgaagagcttagctatgaccttagaagacaaagcctgtttgtcatggctgccgtaaaccgagctcttacagtgcgtggaccatgttttaataatccaaaataattccagtgccgaaccctgaatttaacatatggtagacattcagtaaatgtttgttgaatgaatgcatgtcttctaaaagttttccaacacaaattagcagtggtttcttgtaaattatttcctactcgccactctataaaatcatggcaataatagaagattatgaaggatttctatggaggacataaatgctgcatctttcataatctccattatcaccctcattgatattatcattggaattatctaaggtgagccccagtttccagggcagctgattgacaccgtcctgccttccttatttaacctcttcttttgccactcgcctctatctttgaatcatattttggccttggttttgcaatggttttatgtcatcctacagatgtcttcaagacctggggtgagttatcaatgcaagaatggttcttagaaatctgatgaggcctctgctctctgggatgtggccctctctatgcaggttactccaatgattagctctgtcctcattgtccttttaattcccttgtcaacttaatctcagtatgttgcttatattaacaagaagactcacgcaataactcctcgataactctcagtgatggtatctgttggtgcatacttgtgttccacagttatggccatatacacagaggtagtatatgatgaagagaagattacagtctttacagtcaagaagacttgggttcatatcctaaccctggaacttactagcattataatgcttgcagcattgtgtttggtgagaggaaaagaatgaatggattctaggaatgttagggaacgatttactttacccgatggctgtatcaaacatctatgccccacttcttctcttgcctcacctattccttagattcttggtcacttctctaccacaagccaccagcactataaccagttttgcgtgggttctgctcttcctccctatgttgatcagtgtcatgtgagcataagccaatggtagcttgccacatgccccatctcccattgctgcagaggcataagacagaagagatgggaagtgaatgcccgatgtggtgaatctgggatgaatgggagtcataggctggtagatcgctttttcctccttcttcctcctggaggaactattctgagagtcatctgtttgtatggtcttgtagaagacagtcctgtaagatcgagcaaccagtcatgatgaaaccaagtggtggccggatcagtatgacaccctgctgcccccgtttttaattcttctctgccttgccctgctctctcctgttgctctgggattgcacttctgaatgaagtagcagctcataagcttttgccacaggctctgtcttttggggaatccaggataagaacccattatacagaagtgttcaataatatcaattttgcaactcactcagctccatggcttcccccggtctacctgtctcactacatgcataaagtgaaatgatggaaggaatctgctttctgaactctaatgtgccttcattgattatcattaaaattatcattaaaattgccttatttctatggactcagaggaatgatgttttagttttggctctctgatttaccaactatgtgactttgtccaagtcatttaacttcagtaaacctcggtatgactgaaaagggagttttctgtatggccgtcactaggtttttttgtgggttagttaaatgataaacatgaaagctctgtccaaatgaaaaaggtatttctaacaacaaccacaataacaataacaacttagtgcttagcccatgatgtatcaggggatatgatgtgatgattttcaaggtgttggaggcaacttctgttccaagaactcccagcagctttgaaagcagactgagatgagttgagaccctgaatccctgggctgttgttcctgtcacccctaattaatatgtgagagacaacagctgggttttccatccctaacacatttatttcattttatttggggcctgcaatttctgcatgtctcatatattttaggttttacctttttacctggctttaaaataaatcccttgtaagttgtcctgcaaatgaaattactgtctggaaaactgcaatttcatcttgagagttttattatgctaataaatgtcaggattctcatat

SEQ ID NO: 1984 - DNA, 1207 bp, Homo sapiens
agtgactcagcttctggcttctctgctacatcaaatatcttgtttaatggggcagatatgcattaaatagtttgtacaagcagctttcgttgaagtttagaagataagaaacatgtcatcatatttaaatgttccggtaatgtgatgcctcaggtctgcctttttttctggagaataaatgcagtaatcctctcccaaataagcacacacattttcaattctcatgtttgagtgattttaaaatgttttggtgaatgtgaaaactaaagtttgtgtcatgagaatgtaagtcttttttctactttaaaatttagtaggttcactgagtaactaaaatttagcaaacctgtgtttgcatatttttttggagtgcagaatattgtaattaatgtcataagtgatttggagctttggtaaagggaccagagagaaggagtcacctgcagtcttttgtttttttaaatacttagaacttagcacttgtgttattgattagtgaggagccagtaagaaacatctgggtatttggaaacaagtggtcattgttacattcatctgctgaacttaacaaaactgttcatcctgaaacaggcacaggtgatgcattctcctgctgttgcttctcagtgctctctttccaatatagatgtggtcatgtttgacttgtacagaatgttaatcatacagagaatccttgatggaattatatatgtgtgttttacttttgaatgttacaaaaggaaataactttaaaactattctcaagagaaaatattcaaagcatgaaatatgttgctttttccagaatacaaacagtatactcatgattgctaagtgtttttttatttttgcatatttattgaactgtctaattgaatacagcttgctcttgtcacctcttcaagctttcaagcctttatagaaaagcttctttgtggcttacactggaaattatgaaagcagtttttctcctaagacttttggtttctcgcattgcctctcagactaagcactaaaaagcaaagcaaaacagaactagttctgtcttaatgaaatatatcaacccaaaagtgtaatgaggaaaatgcttcattagtttcccctagcagacttttacttctcttacactgctacaccattactttcttgagacatttgtaagttctttgatacagaagagttatatttagaagtctttaatgaaggg

SEQ ID NO: 1985 - DNA, 528 bp, Homo sapiens
cactcccaaagcaagactccagacagcggagaacctcatgcctggcacctgaggtacccagcagcctcctgtctcccctttcagccttcacagcagtgagctgcaatgttggagggcttcatctcgggctgcaaggaccctgggaaagttccagaactccacgtccttgtctcaattgtgccatcaactttcagagctatcatgagccaacctcaccccacagggcctcagtcgccaccatgtgggcctctccagtgcaaaccaccgagcattccaccatgaccggtcacagctacaaatccagagaccatcaatcctgctagagtgcagggtggcaagcacccaagggtggctgaccaagactgcagagtctcctccatcttcaggtccattcagcctcctggcatttaactaccagcatccagtggtccccaaggaatcccttcctagcctcctgacatgagtctgctggaaagagcatccaaacaaacaagtaataaataaataaataaactcaatgcagacaca

SEQ ID NO: 1986 - DNA, 2742 bp, Homo sapiens
tgtatgccctatgaccccccatctttcctccgcccctgacccccaccaccctgctgctcggactatgctccccttcctctgctccttaaggtcactgacccctgttttgcacaatggtataatccccactgtcctcatctctaccgccaccttctggcgcaacaagaagttgcgctctgacagggctctagtcagggccttgggcaagacattgggctctaggatgcaattggcaaatacgtccccgttactcaaatccttggcactactacaatgccctccattcttcagggctgagaattgacgagaagccagctcacccatcccagacctcacagtccctcaggttctactgggatctcatcatcatccttagtcaagcagcagggccctggccacgtggagcaacactgactagaatctggatcctgacgcctgcagctgagagcaggagcaggaaaaggaggctcagcactgtctcaggctggaggtcagcgaacctcgtgggctgtaggaaagcaaatgtaggtaaggggagagcaaggatgcacagaaaacacactgactgtgggactgtgccaggatgcatttggaaagatagagcattctgtctgggcagagactgtggaccctggtatgcccacgtgggacagaggacacagaggtggaagattgatcttgccaagagtgagggcagatgtctccagccaggactgccctgagccgcaaaatgtcaaagctggagctatagaggtagccctaaaggcaactagaagagcatcagggctgctctctgaggagctgccccaccagccatccttgaagagacaattcagggcagttgatgaatatcagggctgagatgtggtgagacttccgtttttatccagctcttttgctcacatcgcgtaaccttgggaaagctgtttaaagtcgctgatcatcctcttcctcatctgtaaatgaagaaagtaggccctgtctacctcacatgcaggtctagggtgaggattgaagaaaatagtggtgatgagggctttaaccaagtgcaaagcggcatgaatgcaaagtatttttctgcagcccagttctgtgggtgcagctcttccagaaagtattaggagcctcacatctactctgccaagcgccccagcaggcactgtgctgggcttaggggctaccactggatgatggcattgccgtgactcacacacctctacttctgttcttccctcactccatccccgctaccgtcctggccagctaccgtcagagagaaccagagctccaagtctttaatttgccaagatgaagaaaatgagttctcaaggagggaatgctttgcttgaggccacacagcaggttggtagcaaagatcttgtctagccagggcagcccttatcagcttgtgacaaccttccccaggacagaagtcatacaaggcctctggggttaatacaaataggttgtgccctgctttaaggaacctgctatcaggaaatctacatgtgtgcacagagagagaaaagtagaacagttctttgcatttggctctacttactaacaacccctctagaatacattggtgatttcatttaaagagattgtatgcatttgtggctttcctgatttctgagtctgtgtttggaggtgttactgagatgtgccagtgtgcagaatccttgctggggtttctacagtccccaacgtgaacagtattaagcaagaggtggactcgagcaatccaggagcccagactgagcaaataagtactttccagcctgtgtttcaggagaggactgtgctggatcatgcttgccctccacagggaatacagcatccttacagcttgcatgcaatcaacctcttttgtaaatggaaaataaagtctgttacccaaaggccatgctgatcccctgctccctgctttcatttatgtttgctgacctgtggagaccagtctttctgacacacagtgaagctcaacttgcctcctggctgcttcagcaggtggatccattcttcgacccccagatgtgactctaaagaaggctgaaaatttttgtccaaattgccatgcagatatcttgaacagcaggacatttgcaggccttgtctactggacttttctcccaaacaggacaagcccaggcagggctgcatggagaggaatggaacctggagctagaattaattgcccactctcccaccctaccagtgcagcccggcaagggcaggaattgggaggcctagggtgggcatgaaagcttgggaagcactgtcgtctctcagacaggcgtcctaaagacctctaggctggaagcttgggcttgcaagtggatccgggaccgagggtggtctcttggacaaccccaggaacttggaccaaggcagagccaatcttgcaaactggccatggatggggaagtgcccggtagccagcatgagccacactaggaaagaggaggagggtgcagccaaacttaaggcaccggcaagtgttgtcagcactggaggagaccccgccagtggggtgaggccagccaagtccctgtgttacgaatggtgggccaaggggctgtctgctaggtcccagtaggacaggcagagctccaggctggcaccatggtaggcctccagggaaagagctgggaggcaggaatggcacactgggcaggcttgcccattcctggccctgagaatggagctgtagcctcatggacaataaatggatgtgacacc

SEQ ID NO: 1987 - DNA, 549 bp, Homo sapiens
gcctgccaccctggagtgagccccaggccaggaggctgttccaggagtcctgcccagcagcctcagtggccaagcccagacactcacccaccttccccagtggccccgtggatcctggtcctaggctggacacaggattcagaaagacaccaggctgcacagaaagagccagatggacctgagtgtcggtcacagccccctacactcaaggctgagaggcctcaggaaagtcattcctttttaaaaataataataaatgtaagggggtacagtgcagttttgttacatggatagattgcctagtggtgaagtctgggcttttagtgtaaccatcaccctaataatatacgttgtacccattaagttatttctcatccctcaccccctcccaccttgtcacccttctgagtctccaatgtctattattccacactccatgtccacgtgtacacattatttagctcccacttacaagtgagaacatgtggtatttgactttctgtttttgagttatttcacttaaaataatgacctccagtttcatccatg

SEQ ID NO: 1988 - DNA, 4977 bp, Homo sapiens
atgctcaatccaagacatgcatcagggcggtgcacatccggaagaaagctttacacacgtcttgcaccaagaaagcaactatggtttggaagagcagcctttttcatcaggcccacaattaacaatggatgtggctaagagtacaccttctgaagcaaacttaaacattactgtaaatgctcaagagccttatcatttggcaaacaatcaaattagtgacatgcagtttatacccacttctcttcagacacctcccgagtcaagtacagtagaccaggctaagagagttggaagaaatcagtctccgccagtgggttatatgtctcagcccaagtccttgcagcttttaaagccatccatattgagttctttggtaccgcctccagtttctgaatcatctccaagtaggactcccacttgtaaaaagtcaccaataatcacaacatgtaattcagcaaaacttcagccaacatctagtcaaacaaatcttgcaaataatcagaatctgaaagcatctaagctccgccccccctcaggctctttcaaacaaaaacaaacaaacagcccccaactagagcctcaaagcttccaggccaagacaagcatcccaaggccactaacacaacgaaaagaaatcatgcagaatccaaatggcaatttgcattctggggattgtttggcctctaatcgatattctcgtcttcctaaaccaaagatacattaagtacatagccatcacctgccaatttgtttcttaaaaacaatctcttctgtaatagctttatgtgcagcttgcagcttgctactgtggtggaggttccattgaaagcctgcaaatcttaaattaaaatgtggaagcttctactagtttggctccttcattttatatcctggttgaagtacatgccatttgagcataattatctcaggtaaacacgaaagtttgcttacccatttcagaggcctgccaaaggcccaaatcatgttatccatccctctccacgtcagaaaattcataatattttactgagcaggcaagaagtgtgctttgctggtttagtcctattaaggtctgtatttattgtggttgtcagaacctcaccccttttcacttgtctctcctgtgaatatggctactattttaactaaagatatggtgataatggaagatggtagtctgtaagcagagttctggccagtgttttgtatatttaaaaggtctatgcaaaagctttgtgatgaataaaggagattaggcttttaatggaaagtctatgtaagttttatttttccttgccagggtcagtcagctaatgttactgttgattcatttcccaaattccccagactgaaagtgtttcttattacatataaatcagttatatattcctttacatcttgttttacaaacacatgtgcatgcacacacacatatacacacacataccatttatgtttgtatttgttactgggtaaattttggagcgcttgagatacaccttgaaacctgtacctaaagatgtattcatttgtaacatatgttggtgctagagttttgctggtaattcaggcttgaacccttaggcttgtggatccatgatagccattttaaggttccacagcattatgtctttaattgtaatatttatatttattgattttctgctaatatctgaagactgaaataatgaacttgaaacatttgcacaaaactttgatggggtataaatataccatatatagggattgtaaactattttctatagcaaaacaagttaaaatattttgagaaaaataacaaatttaaataagactatcttgagaaagctggagttcataatattctccccctcccccatctccagtctcctaggtttcccttttctgtgttttttgtttttttctgtttgttttttgagacagagtcttgctccattgcccaggctggattacagtggcgcaatctcggctcactgcaacttctgcctcccgggttcaagcgattctcctgcctcagcctcctgagtagctgggactacaggcatgtgccaccatgcctggctaatttttttgtatttttagtagagatgagatttcaccttgttggtcaggctggtctcgaactcctgacctcaagtgatccacccacctcgtctatggtgtatttttgaaagacaattttttaaaggtagatttgggaaaaaaatagaattgaagatgggaaattttgttttattaaaaaggtgctagaagatgtttcaaagacaatattcttattttaatacgctgtagaaggtaggtgtggaacctccatgctaccatgtgcacaaacctaattatgctttgggtcacttgtcagttcagtaaatctgccttcctcttctcccaaatcatgtcatctttaggttgttcacctgcagctgctttaaatgaattagtatctttcagatagataaccttacaaggagaatgtttgttttgagcagctgaccaaaaatatatcaaacaggattatggccaaaaagtcactcaaatttctagagattcctttaaaagatgtatgttgatgaaattgcccctttataagaaaaacaacagcaagtcttttagtagaaatttgaaagaagtgtttgctaccattttgacccattattcccttacctatcagatgaatttgccattcactggatagaaaccattcttggatttggtaagaggtgagcaagacaaatcttgtaccatactcttatgtaccagcacttctgatggagaagcagtgaagttcagaacgttcttcacatagtccagatactgttagagtcaggcaaatcagcaaagcactttgttatggagatgacccatgatggctgcagttgtaagtgggcatacatgttctatcattttgaaggagaaagaaaaccgttctcacatgttgcaaatatgtgaatcatactatattcccctaaagtaaaaccagtgacttagtggtttttggtttatttagaagttggtttagacccttatgaaacattatttacgagttggccttatccttaagggaaaagttctaaatttttaaatttatttttaattccctagtctgagggaaatgtctttattgtccattacataaaaatgttgactccagtaatttatttttctctattttttcctccatgtatttactccatttttctctattttttccttccctgatggatttgcagaaatgttaaccaattagctcaacttttctctacctttgttgagtcttaatcttttagaagataggcttatcgtatatttatgaagcataatatattaaaagaaaacaaatctaggatgcttgcatgacataaagtatttgcctgcagttttcattaaaaactgcaagaatatcatgcttgtctgcttcttagtaaatgttaagtctgaaatggaagtgaggatgtaactctactgaataatcaaagatcatcttagatttggcttgatctgtgtttattgcttctattaatgtaaatcaactctgtgccaaatcctcctccacaaaccatttattgtcttagttctagtggtatcaatgaagatagttacagtatatgaattctaagtcctgaggaagaaattttatggggtttgttaagtttcacattcgtgaaagaggaaattagtagagtattcagactttgatatttggctgttaatgggatgcatatcaaatttttaaaagaaggcttggcctaaggagtttattggtacaggtgcagatgattttaaggcattaaaggattatagagttatgtcatttagactgtttctaataactgagaccatctaacatttttcttttggagtctcatttttatttgtgcaatattttcaggcatataggctactgttcattgtatttatatatatattagaatttactaagtactttaacaagtaaaaatctgaatatgaaagaaaatatcagatttgcactttaaatgagcttaattgcttgaagttgtgcctgaaatatcgaattgcctcctattgggtgtggctttgttgaaataaatttgtaattgttgctgtttgaagatatcagtacagctgttcacagaaatatattcccagcatgtcacttttccattaaagcactaagttttctttgaatgttccattgttccgataagtattttacttttttctcagtacatcagagagagcgtgatccccctacagctgtcacttccaaatgttcctgtagcataaatggtgttacagacactgaggtgcactcttggtttctgagcagagttgtcatactggtttcctggtctctagggcactggggatgtactttgaaatcaccgaacaggcttgcaattaagatcaataaggctgcagcaccatttcaatttactttccatcttacccagtagtttttgtgtttttaaattcgtttgggtggttatgtttgcatgcttaagcacacatttgaaaattaattatagctgtactacccgatgtttttccttggggatgatggccttgttcctttttaaattctgatgcttgaattctattttctagtgatttttcacatctccctttaagtttttgctgcagcaatttgagagagtacttttgattaaatgattctgatggtgggcaccaatctacaactatgtcattaactgaagatacatgttttaatcttgttgggaataagcttacccactttctccttggtaaagcgtttacttaacaaaataatacccgagaatgtaaggtctctaagtcattactaacaaagagcaaaaataatatctgcagtattgtttttcccattgattttaagtcagtttagagtacaaactgtatattagaatttgcctgtaaaatgaattctaaaaagcagatgtaaagtctctcctgaaaatgttggcatagtaaataaaaataaagttcataattataaaagtt

SEQ ID NO: 1989 - DNA, 708 bp, Homo sapiens
gacgcccactggctctccctttcttctgagacacatccagcccccccacgtctccctcatatacacagacccaggattatgctgtgagcctgcaggctttggaagtggccctgtcacccgtgctgcacgggattcacagccccagccccatggcccctctccacacctcaaaactcctgccccataacgtcctccgcatccactttccagctcagcagccgcacccgaggctcagcctgaggggtatgtgcccaggccctcccacttcccgagttgtctgcctctcctcaaatgctgtgtgctgcaattgtccaggcgatgacaatggtgatggctccagagaacacaccagctatttatgagcctctgcccccaggctgggcctgtcactggcataggaaggccagccccgcatctcccactgccaacagctgaagccgagcacagacctccctttgcacgctggaacagttactcacctgtggcttcttcccccagtgtaccgttccactgtggcccacattcttgtgcacgcgggcatttgcaggcacgctctcgcgtagttacctatctgaatgcacaccaagcacatgcgtgcacactctgcgtctgtgattcatttcatgtagtggtctaagctcctcccagggctgtgtggatctgacagggtataggaaaataaaaagcggagaaggtgtcttcagacaa

SEQ ID NO: 1990 - DNA, 3091 bp, Homo sapiens
gcggccaaggccgcctgtgctgacgaggcccggagctgctcctgctgctggcaacaaaggattcgggaggctgatgtttcttctgaggggaatggggagagagaggaagcgactgagccctttggaagtataattttaggttttttcttctgtacacagatcgtgcatttgcatagttcagactaggagccaaatgaagactcaaaaccaagctagttattaatccaagactggaattgtacttcagacatttagagcagaattccaagaactcaaaagtgaaaagcaacaagcagctttcccaaagcgatacacttgctttggtcaccagaggaggacagagcttagagcagctgtggagaatctgaagcattctgcggagttcttaagcgctcccctggcaaacaaattgaagtgccaaacagcactcgctgcagggtatttttagagtcatagctgagagcttgttagctaagacccattgggctttcctcaccaaaaaaggaagtgttattccattactagcgtcatggagctacctctgcgcatcagacttcagaccttgaacaaacttaaaaccttcttgggagcccggacgtccaaagagatgtcttctgggagccactgggcaattgccagggctccaggaagggctctggctcaggttgcagacagctgagaaaagatggccctgtcagccaccctctctcagtctgaaacatccaacatccccagaaggcttagctcctttttgaattgtgatgggaaagtagagttgggtttttccagttttgctctgtggtgtgtgagagatttttttaaaggctttgggttgtctttggcctttgtttagctttaagggttcgttagcatgagtgtccagtcgtgtgcatgaatttcaccccaacttgtgactgctcacttatgacgtctcccccagtaccctccatctcaaataggcttggtggcctgtggaaaagaagagagacagagagacagtgtctgaaacaggatggcagaataggctcacatgcccaaactctgggtggggaagaggaaacttactttctgccaccctcagtaagaacacacgaggaggcaggacctcccaccttcaggtctgcatcatccttttcaaatgttcctttaaatgcagcacactgagtttgtacaattgtgttaactgctggaagggacagatgcactgatatatatgcatttgctgttttggccaatattttgaaaatgtatgagctgagttgatctagctattatttaagtatttattgaagtagaggggccttcaaactactttatactagtgatagtttgagttaggtaagcatcttaaagctgtttggtgataaagaaggcagcttagattctgtggttggaaacagtgtagtcgcttccctttttaggaagccctgttaatatgctcattgaaaacatggcattgaagcaggcacttgcgtggatgtttctcacttgagcacgatatttaggctctcttccaactcactctattctgtcctcactcctgttttggatttttctctttgcatgtttgaaatgttttatgggaatgtattagaactcttttcttctaaggactgagacttccaggggattgccatcttacctgtctcttctccatgagggagaaggaagcagctagctatgtccctagctgcaggaagcccctattttttccaagcacgaagccaccagtctcccccagggagcatcaggaagggacatggatgtgctcctgccacagggcccttcctacctttggatctgtgagaaggtgaatacaaagcagcaggcagagtaaaatctgctgggactgcctggagatttgtcaggagctgcagacaagtaccttggagcattctgttatttttggaaagttcaaatatgcagggacaaggaggttgctgactgtactgacaggctctaagtcattttctccaaaaactatctattcaattatcaggggctggtcttgaggaaggaaaaaaaaaaaaaaacgttcccagaattcagtttccaaaatctctttttaaagggtttacacacacacacacacacacacacacacacacacacacacacacacacgatcattaaaaagtgtatgctctttaagaagaaaagtaaaatatctcaaaggacggtttcaccaccgtcctttattgaatcaatttttctacatttcagagcaagtgtagattctgagggactcctatttgccaaaaagacaaaactagcaaaaaaaaaacaaaaaaacaaaaaaaaaaccacttaaaaggtagcaggaaaagaaggtagttttgagtgtggttcactcagtgtctgtgagtctggtgtagtgtcaggagtaaggccgtgtctagctcaagtttacatttggatgtcctacaacactaaacaaaatttttcataatccatggtggggagcacactttggagctacatttcttgtctcctcattgttgacattaattaaacatttataggccaggcacagtggctcacgcctgttatcccagcactttgggaggccgaggcaggtgaatcacctgaggtcaggagtttgaaaccagcctggccaatatggtgaaaccccatctctactaaaaatacacaaaattagccaggtgtggtggcaggcgcctgtagttccagctacttgggaggctgaggcaggaatctcctgaatcctggaggcggaggttgcagtgagccgagattatgccattgcactccagcctgggcaacaggagcgaaactccgttgcaaaaaaaaaaaaaaaaaaaaaattataatcacaactttttgcaatggagtgacttatatctgcagcttatatctgcagtgtttgtgttaggaacctagcttttataatgtgttaactttttaactcagtattctggctttgggattttttgttttgtttttggaaacatttcagaagtggaatgtagcctgttaaaggtgtgcacaaaaatattttgcatgtgtttttttttttgcctgtgtgaattctactttttagcaaaaataaagccccccaaaggatgtgcaa

SEQ ID NO: 1991 - DNA, 1468 bp, Homo sapiens
tggttaaaccatcggaggagaaactctagactgcaagaactgtttttacccatggcatgggtggaattagagtggaataaggatgttaacttggttctcagactctttcttcactacgtgttcacaggctgctaatattaaacctttcagtactcttattaggatacaagctgggaacttctaaacacttcattctttatatatggacagctttattttaaatgtggtttttgatgcctttttttaagtgggtttttatgaactgcatcaagacttcaatcctgattagtgtctccagtcaagctctgggtactgaattgcctgttcataaaacggtgctttctgtgaaagccttaagaagataaatgagcgcagcagagatggagaaatagactttgccttttacctgagactttcagttcgtttgtattctacctttgtaaaacagcctatagatgatgatgtgtttgggatactgcttattttatgatagtttgtcctgtgtccttagtgatgtgtgtgtgtctccatgcacatgcacgccgggattcctctgctgccatttgaattagaagaaaataatttatatgcatgcacaggaagatattggtggccggtggttttgtgctttaaaaatgcaatatctgaccaagattcgccaatctcatacaagccatttactttgcaagtgagatagcttccccaccagctttattttttaacatgaaagctgatgccaaggccaaaagaagtttaaagcatctgtaaatttggactgttttccttcaaccaccattttttttgtggttattatttttgtcacggaaagcatcctctccaaagttggagcttctattgccatgaaccatgcttacaaagaaagcacttcttattgaagtgaattcctgcatttgatagcaatgtaagtgcctataaccatgttctatattctttattctcagtaacttttaaaagggaagttatttatattttgtgtataatgtgctttatttgcaaatcacccactcctttacaaccatactttatatatgtacatacattcatactgtagaaaccagctcatgtgtacctcatatcccatccttaagagaagaaatgttataaagtagaactaaatataaattttcagaattaatgcattcaaagtaatatatcaaatccaggactttgttaacttcaggtaaaaacttcattagggtaatatcatctcaattttttcaaatgaaaggattctctaattagaaatttatatgtcagagctgttataaatttatcaactgtcaaatatgttctggacagctaaatcatttgagatttttggttttttgatttctattccctaacttgtgaagacaatgaaaaatcaggcagaaatatttagtatctagtcagtatctgtagctacactgtataactgttcttcaataaaatggttcatattttatag

SEQ ID NO: 1992 - DNA, 273 bp, Homo sapiens
agggctacaggccagcgtggatgacctgaagagcgctcctctgccttggacaccatcccctcctagcacaaggagtgcccgccttgagtgacatgcggctgcccacgctcctgccctcgtctccctggccacccttggcctgtccacctgtgctgctgcaccaacctcactgccctccctcggccccacccaccctctggtccttctgaccccacttatgctgctgtgaattttttttttaaatgattccaaataaaacttgagcccactcct

SEQ ID NO: 1993 - DNA, 327 bp, Homo sapiens
cagcagggagacttgggtcggcctcctgaaatgacagcagggagacttgggtgaccccccttccaggcgccatctagcacagcctggccctgatctccgggcagccaccacctcctcggtctgccccctcattaaaattcacgttcccaccctgtgtccacttcatgattcctcgcaagctgggcccagtcctctcatcccaagagcagagccaccgtagccggagtcctagcctcccaaattcggaaatccaatccaacggtctcaggaatgttttccatcccgccacgcgcctcccgaagctcccagaccggaggctcagccccc

SEQ ID NO: 1994 - DNA, 782 bp, Homo sapiens
ggccagaggaagaaattgcaggcatttcaaggaagaagtactgaaatgatttgtcttttgaaataaatgaatgacagggcttttgctttggattttttatgaaatatattttacaaagagaattgcactagatatataaattaaaacttttttctaagaaaatcctgtgaggtttaaaaagattgtttttgtcttttggtttcttactttctcctggagaaatgatctaccagtcaaggcaatatgtagcagatccctgggaattaaaggtttgcccatttgttcactgtatttagtccctgctacattccaggcattgtactaagtatggggaaccacagagaagacattccctcagaaactgctgcagtgctttcgcttatccctacctaaaaaaccgtcaatgtgaaatcatttccttgattataactataatgataatggattagtttatataaacctatgtttagacaagttcaagacaagcgtgtctttctataaaaagtattgaaaatgaaggaaatgagatcatgtttcaatttattaaagcagggaagagcgttctgtgcttagttcgtgtctaggatttgagtgccttactgaatgcatttaccagcaaacatgtagcaatctgttctctcattgtgattgtggaagaagctcatgtaaaatgatagtcattaatgaggaagtatggcgtggtacttattctgtaagttcagagtatgctgagtgttaatagattatcatattgcctgaaaataaattcatgatgacatgaa

SEQ ID NO: 1995 - DNA, 909 bp, Homo sapiens
gtaactgaagaacatttttaattctttaggaatctgcaatgagtgattacatgcttgtaataggtaggcaattccttgattacaggaagcttttatattacttgagtatttctgtcttttcacagaaaaacattgggtttctctctgggtttggacatgaaatgtaagaaaagatttttcactggagcagctctcttaaggagaaacaaatctatttagagaaacagctggccctgcaaatgtttacagaaatgaaattcttcctacttatataagaaatctcacactgagatagaattgtgatttcataataacacttgaaaagtgctggagtaacaaaatatctcagttggaccatccttaacttgattgaactgtctaggaactttacagattgttctgcagttctctcttcttttcctcaggtaggacagctctagcattttcttaatcaggaatattgtggtaagctgggagtatcactctggaagaaagtaacatctccagatgagaatttgaaacaagaaacagagtgttgtaaaaggacaccttcactgaagcaagtcggaaagtacaatgaaaataaatatttttggtatttatttatgaaatatttgaacattttttcaataattcctttttacttctaggaagtctcaaaagaccatcttaaattattatatgtttggacaattagcaacaagtcagatagttagaatcgaagtttttcaaatccattgcttagctaactttttcattctgtcacttggcttcgatttttatattttcctattatatgaaatgtatcttttggttgtttgatttttctttctttctttgtaaatagttctgagttctgtcaaatgccgtgaaagtatttgctataataaagaaaattcttgtgacttt

SEQ ID NO: 1996 - DNA, 1733 bp, Homo sapiens
gcctttggctccagagtttctttctgaagtgctctttgattaccttttctatttttatgattagatgctttgtattaaattgcttctcaatgatgcattttaatcttttataatgaagtaaaagttgtgtctataattaaaaaaaaatatatatatatacacacacacatatacatacaaagtcaaactgaagaccaaatcttagcaggtaaaagcaatattcttatacatttcataataaaattagctctatgtattttctactgcacctgagcaggcaggtcccagatttcttaaggctttgtttgaccatgtgtctagttacttgctgaaaagtgaatatattttccagcatgtcttgacaacctgtactcttccaatgtcatttatcagttgtaaaatatatcagattgtgtcctcttctgtacaattgacaaaaaaaaaaatttttttttctcactctaaaagaggtgtggctcacatcaagattcttcctgatattttacctcatgctgtacaaagccttaatgttgtaatcatatcttacgtgttgaagacctgactggagaaacaaaatgtgcaataacgtgaattttatcttagagatctgtgcagcctatttctgtcacaaaagttatattgtctaataagagaagtcttaatggcctctgtgaataatgtaactccagttacacggtgacttttaatagcatacagtgatttgatgaaaggacgtcaaacaatgtggcgatgtcgtggaaagttatctttcccgctctttgctgtggtcattgtgtcttgcagaaaggatggccctgatgcagcagcagcgccagctgtaataaaaaataattcacactatcagactagcaaggcactagaactggaaaagaccacagaaaacaaagaatccaaccctttcatcttacaggtgaacaaactgtgatgatgcacatgtatgtgttttgtaagctgtgagcaccgtaacaaaatgtaaatttgccattattaggaagtgctggtggcagtgaagaagcacccaggccacttgactcccagtctggtgccctgtctacaccagacaacacaggagctgggtcagattcccctcagctgcttaacaaagttcctcgaacagaaagtgcttacaaagctgccttctcggatactgaaaggtcgagttttctgaactgcactgattttattgcagttgaaaaaaaaaaaaagctattccaaagatttcaagctgttctgagacatcttctgatggctttacttcctgagaggcaatgtttttactttatgcataattcattgttgccaaggaataaagtgaagaaacagcaccttttaatatataggtctctctggaagagacctaaattagaaagagaaaactgtgacaattttcatattctcattcttaaaaaacactaatcttaactaacaaaagttcttttgagaataagttacacacaatggccacagcagtttgtctttaatagtatagtgcctatactcatgtaatcggttactcactactgcctttaaaaaaaaaaaccagcatatttattgaaaacatgagacaggattatagtgccttaaccgatatattttgtgacttaaaaaatacatttaaaactgctcttctgctctagtaccatgcttagtgcaaatgattatttctatgtacaactgatgcttgttcttattttaataaatttatcagagtg

SEQ ID NO: 1997 - DNA, 3302 bp, Homo sapiens
atttttttttatcaagagggataaaacaccatgaaaataaacttgaataaactgaaaatggacctttttttttttaatggcaataggacattgtgtcagattaccagttataggaacaattctcttttcctgaccaatcttgttttaccctatacatccacagggttttgacacttgttgtccagttgaaaaaaggttgtgtagctgtgtcatgtatatacctttttgtgtcaaaaggacatttaaaattcaattaggattaataaagatggcactttcccgttttattccagttttataaaaagtggagacagactgatgtgtatacgtaggaattttttccttttgtgttctgtcaccaactgaagtggctaaagagctttgtgatatactggttcacatcctacccctttgcacttgtggcaacagataagtttgcagttggctaagagaggtttccgaagggttttgctacattctaatgcatgtattcgggttaggggaatggagggaatgctcagaaaggaaataattttatgctggactctggaccatataccatctccagctatttacacacacctttctttagcatgctacagttattaatctggacattcgaggaattggccgctgtcactgcttgttgtttgcgcatttttttttaaagcatattggtgctagaaaaggcagctaaaggaagtgaatctgtattggggtacaggaatgaaccttctgcaacatcttaagatccacaaatgaagggatataaaaataatgtcataggtaagaaacacagcaacaatgacttaaccatataaatgtggaggctatcaacaaagaatgggcttgaaacattataaaaattgacaatgatttattaaatatgttttctcaattgtaacgacttctccatctcctgtgtaatcaaggccagtgctaaaattcagatgctgttagtacctacatcagtcaacaacttacacttattttactagttttcaatcataatacctgctgtggatgcttcatgtgctgcctgcaagcttcttttttctcattaaatataaaatattttgtaatgctgcacagaaattttcaatttgagattctacagtaagcgttttttttctttgaagatttatgatgcacttattcaatagctgtcagccgttccacccttttgaccttacacattctattacaatgaattttgcagttttgcacattttttaaatgtcattaactgttagggaattttacttgaatactgaatacatataatgtttatattaaaaaggacatttgtgttaaaaaggaaattagagttgcagtaaactttcaatgctgcacacaaaaaaaagacatttgatttttcagtagaaattgtcctacatgtgctttattgatttgctattgaaagaatagggtttttttttttttttttttttttttttttaaatgtgcagtgttgaatcatttcttcatagtgctcccccgagttgggactagggcttcaatttcacttcttaaaaaaaatcatcatatatttgatatgcccagactgcatacgattttaagcggagtacaactactattgtaaagctaatgtgaagatattattaaaaaggtttttttttccagaaatttggtgtcttcaaattataccttcaccttgacatttgaatatccagccattttgtttcttaatggtataaaattccattttcaataacttattggtgctgaaattgttcactagctgtggtctgacctagttaatttacaaatacagattgaataggacctactagagcagcatttatagagtttgatggcaaatagattaggcagaacttcatctaaaatattcttagtaaataatgttgacacgttttccataccttgtcagtttcattcaacaatttttaaatttttaacaaagctcttaggatttacacatttatatttaaacattgatatatagagtattgattgattgctcataagttaaattggtaaagttagagacaactattctaacacctcaccattgaaatttatatgccaccttgtctttcataaaagctgaaaattgttacctaaaatgaaaatcaacttcatgttttgaagatagttataaatattgttctttgttacaatttcgggcaccgcatattaaaacgtaactttattgttccaatatgtaacatggagggccaggtcataaataatgacattataatgggcttttgcactgttattatttttcctttggaatgtgaaggtctgaatgagggttttgattttgaatgtttcaatgtttttgagaagccttgcttacattttatggtgtagtcattggaaatggaaaaatggcattatatatattatatatataaatatatattatacatactctccttactttatttcagttaccatccccatagaatttgacaagaattgctatgactgaaaggttttcgagtcctaattaaaactttatttatggcagtattcataattagcctgaaatgcattctgtaggtaatctctgagtttctggaatattttcttagactttttggatgtgcagcagcttacatgtctgaagttacttgaaggcatcacttttaagaaagcttacagttgggccctgtaccatcccaagtcctttgtagctcctcttgaacatgtttgccatacttttaaaagggtagttgaataaatagcatcaccattctttgctgtggcacaggttataaacttaagtggagtttaccggcagcatcaaatgtttcagctttaaaaaataaaagtagggtacaagtttaatgtttagttctagaaattttgtgcaatatgttcataacgatggctgtggttgccacaaagtgcctcgtttacctttaaatactgttaatgtgtcatgcatgcagatggaaggggtggaactgtgcactaaagtgggggctttaactgtagtatttggcagagttgccttctacctgccagttcaaaagttcaacctgttttcatatagaatatatatactaaaaaatttcagtctgttaaacagccttactctgattcagcctcttcagatactcttgtgctgtgcagcagtggctctgtgtgtaaatgctatgcactgaggatacacaaaaataccaatatgatgtgtacaggataatgcctcatcccaatcagatgtccatttgttattgtgtttgttaacaaccctttatctcttagtgttataaactccacttaaaactgattaaagtctcattcttgtc

SEQ ID NO: 1998 - DNA, 68 bp, Homo sapiens
agaaccatggcgctgtgtgtttaaagatctacatcattcctaatgaaatccaattcttattttttttt

SEQ ID NO: 1999 - DNA, 134 bp, Homo sapiens
ttctggatttaaagaattatccgtttgtttttccaaaatactttattctctcatacatagtattttcataatgtttgacatgcagtgcttctttctgtaattttgactttagaaatatattggcatcaacaaac

SEQ ID NO: 2000 - DNA, 261 bp, Homo sapiens
tatgttctgaatgtaagcaccgtcaacatcagacacctactcatggacatgtggttgccggattttcttaagatgtttccagaaatgactgatattttatatttatacattttagatgacaaagcttgatatttattgctgttgcacattttaaagttttctttttgggttgctctgtgtcaagagaggttacatggtgttaaatcggtacctgataatgtacccaaatactatggccagataataaattgtgctgcaaac

SEQ ID NO: 2001 - DNA, 1666 bp, Homo sapiens
atgttgacttgagtaaatatatcaccactattgctggagtcatgacactaagtcaagttaaaggctttgttcgaaagaatggtgtcaatgaagccaaaatagatgagatcaagaatgacaatgtccaagacacagcagaacagaaagttcaactgcttcgtaattggcatcaacttcatggaaagaaagaagcgtatgacacattgattaaagatctcaaaaaagccaatctttgtactcttgcagagaaaattcagactatcatcctcaaggacattactagtgactcagaaaattcaaacttcagaaatgaaatccaaagcttggtctagagtgaaaaacaacaaattcagttctgagtatatgcaattagtgtttgaaaagattcttaatagctggctgtaaatactgcttggttttttactgggtacattttatcatttattagcgctgaagagccaacatatttgtagatttttaatatctcatgattctgcctccaaggatgtttaaaatctagttgggaaaacaaacttcatcaagagtaaatgcagtggcatgctaagtacccaaataggagtgtatgcagaggatgaaagattaagattatgctctggcatctaacatatgattctgtagtatgaatgtaatcagtgtatgttagtacaaatgtctatccacaggctaaccccactctatgaatcaatagaagaagctatgaccttttgctgaaatatcagttactgaacaggcaggccactttgcctctaaattacctctgataattctagagattttaccatatttctaaactttgtttataactctgagaagatcatatttatgtaaagtatatgtatttgagtgcagaatttaaataaggctctacctcaaagacctttgcacagtttattggtgtcatattatacaatatttcaattgtgaattcacatagaaaacattaaattataatgtttgactattatatatgtgtatgcattttactggctcaaaactacctacttctttctcaggcatcaaaagcattttgagcaggagagtattactagagctttgccacctctccatttttgccttggtgctcatcttaatggcctaatgcacccccaaacatggaaatatcaccaaaaaatacttaatagtccaccaaaaggcaagactgcccttagaaattctagcctggtttggagatactaactgctctcagagaaagtagctttgtgacatgtcatgaacccatgtttgcaatcaaagatgataaaatagattcttatttttcccccacccccgaaaatgttcaataatgtcccatgtaaaacctgctacaaatggcagcttatacatagcaatggtaaaatcatcatctggatttaggaattgctcttgtcatacccccaagtttctaagatttaagattctccttactactatcctacgtttaaatatctttgaaagtttgtattaaatgtgaattttaagaaataatatttatatttctgtaaatgtaaactgtgaagatagttataaactgaagcagatacctggaaccacctaaagaacttccatttatggaggatttttttgccccttgtgtttggaattataaaatataggtaaaagtacgtaattaaataatgtttttggt

SEQ ID NO: 2002 - DNA, 1901 bp, Homo sapiens
agaatagagatgtggtgcccactaggctactgctgaaagggagctgaaattcctccaccaagttggtattcaaaatatgtaatgactggtatggcaaaagattggactaagacactggccataccactggacagggttatgttaacacctgaattgctgggtcttgagagagcccaaggagttctgggagagggaccagattggggggtaggtccacgggcttggtgatagaattatttctcgattgacttcttgagtgcaatttgaactgtaacatttgcttagtcacctttagtggagtaatctactgggcttgtttctatatttatataaagcagccaaatccttcatgtaatattgaagtccatttttgcaatgttgttccatacttggagtcattttgcatcccatagaggttagtcctgcatagccagtaatgtgctaagttcatccaaaagctggcggaccaaagtctaaatagggctcagtatcccccatcgcttatctctgcctccttcctcctccttcccagtctatcatcaaccttgagtattctacacaatgtgaattcaagtgcctgattaattgaggtggcaacatagtttgagacgagggcagagaacaggaagatacatagctagaagcgacgggtacaaaaagcaatgtgtacaagaagactttcagcaagtatacagagagttcacctctactctgccctcctcatagtcataatgtagcaagtaaagaatgagaatggattctgtacaatacactagaaaccaacataatgtatttctttaaaacctgtgtgaaaaaataaatgttccaccagtagggataggggaaaagtaaccaaaagagagaaagagaaaggaatgctggtttatctttgtagattgtaatcgaatggagaaatttgcagtattttagccactattaggaattttttttttttgtaaaatgaagactgaactctgttcaaatgctttcatgaacctggtttgagacggtaggaaagcaacaaaacgtgggaacctggtgactaagggcctggtgcaaggacttgggaaatgtcattgataatagatggtggggttttcccccctttagaaatgttggatattaagtgatataaacacttcttttaactccgaaaatcttctgagaaatcacaaaattcacggtatgcttggaacgattgagattttctaggtagatgctgaatagcctagacatcaaagttggtgtgaaccaaaatagagtcagctgacccagcatcagccacactctgggttggaaaatgtttgcctgttggaattaatttaagcttaagtatatatcaacattattttattgtgcaattaaaacaatacaaattcatggttttttaaagttaaaaattctaaccactgtaacaacagtttttgtgttattttctgtattaaacatcttgttgcacgcatttgaggtcatcagggtgcaaaatttgtattcctgaaaatgtcatatattttcattaataaataacctaaatatgataaaacataaagcagtgttctggttcatctggaattttgctgtactttaaatctttcagactcagctactgataaatgaaacgttacacaggtgtgaaccaaatccaaataacctcgactggtctactatcataatcacctgaacagaacaaaactttttcctcagctttaagagtccagggcttcggataacagctgccatctgccacctgctaccattgacctacgtgaacacagacattctgtctccaccttgatggtgggtgggctgctccccttttctttgttaaattttgtgctttcatcacattttctctattctgacctctgttatgagaaataaaagtcactgattccatttta

SEQ ID NO: 2003 - DNA, 429 bp, Homo sapiens
gacagaggaggaaaacagagcatcagaagcctgcagtggtggttgtgacgggtaggacgataggaagacagggggccccaacctgggattgctgagcagggaagctttgcatgttgctctaaggtacatttttaaagagttgttttttggccgggcgcagtggctcatgcctgtaatcccagcactttgggaggccgaggtgggcggatcacgaggtctggagtttgagaccatcctggctaacacagtgaaatcccgtctctactaaaaatacaaaaaattagccaggcgtggtggctggcacctgtagtcccagctacttgggaggctgaggcaggagaatggcgtgaacctggaaggaagaggttgcagtgagccaagattgcgcccctgcactccagcctgggcaacagagcaagactccatctc

SEQ ID NO: 2004 - DNA, 466 bp, Homo sapiens
catagaggtcaccattatccatttaatggtcttataactaaatagaatgactatgaaattaaataatgcaaacttaaagctgttggaaatttaccttattttgagccttgagaggaatgtggctgtgtggcctgagttatgtagcatgcaactgcaacttctgctttttcctgtaaatgatcaggaaaggccttgtggcaccagacataagaccccctgaaagtatcatccctcctgatggaatggtaaagcaatctttcttggaacatagcaagtagtaaccgatcaaattgctataacgtgtgtactgaccttatgtggaaaatgctgcaaccctgtttactgcctatgtaagtgaaatcttaacttccccattttggaatgctgactccagtcattaggtgtctgtatttcctgagtggttaccctcaagctttgtgctcaaataaactctatacttaatcat

SEQ ID NO: 2005 - DNA, 273 bp, Homo sapiens
gcacccagatatcagccactttcacatttcatttcattttatgctaacatttactaatcatcttttctgcttactgttttcagaaacattataattcactgtaatgatgtaattcttgaataataaatctgacaaaatattagttgtgttcaacaattagtgaaacagaatgtgtgtatgcatgtaagaaagagaaatcatttgtatgagtgctatgtagtagagaaaaaatgttagttaactttgtaggaaataaaacattggacttacact

SEQ ID NO: 2006 - DNA, 2347 bp, Homo sapiens
atacatactctaggaaattagctctaagtttttcccttcattttgggttctcctgtttgttttttttttattattttaatcccttgtttattatagagctaatatttattgaatagttattgtgtaccaagcattgtgctaaatactttatatgcattatgatgaatcttgtgcggttttctttctttttttctttttaattaaaatactataatccattgagaaatagcaatattctagctattgtaacttctaaaaatggtatggccattagatctgtgctttttatctctgctctttgaatttctcatattatatagtaaatatattcctacgtaaacctttgatacctagatcaggaatactcttccaggagtacaaaattacattattgatagttaagctcttaattgtgtagcttgcaaaagacagcactttttagttacagatgttttgactttgatgaggatatttagctatcaatctaatagtcacctaaaatatcttttttgttggaaaaaagtttataataaaaaagtttgtcatctctagtgacttcaataaagaaaaaactagaagaggagaaaaaggatttcctcaaattttaaatatgtaacttcagggattcaatccccaaatgtttattaagtagctagaaataattatgtggaaaaaaatgaataatggaaaatagtgagtctcaaattgttctctttttttttttaactaaaacaaatctgcaatgaatctagatgcaattaattttattccttccaactaaaattacaatatttttaggttaaaattattgagatataaagcagccattgggaaattgggagaaatgataaacaaatggaaaaagaagatgtccctaacctacacccatagattaccaaggtttcagtgtactagttttgaatctgttctgaatggagtttttataccctcaatttctggcctttggctattttagcatttcaaagtgacttctatgaagctttttttttaatgtgaaattttcagaatgttgtttttttcatgtagatactccaggaagagttaagcactgctttcagttttaatatccaccttgaggggtcgctgcttgagggctcttatcccaggggactttttaattcggatgttacttaatgtggcttctctaatgtagtttctttgattaccgactacacaattatgtaccatcacagtattagtggaaaagtaccatgtgatttaattctccattcctccaatgtaactcttaaaattattatgtatgtgtgtgtgttttactttttgttttttatcatctttaaaatttctattatggtttgattattataaaaataatgaattctcactgtaaatttcaaaaaaaaattacaaaagtatgtgaatttaaaaatgagagcagtcctctcaccctaccacagttccacaccctcaaggtaaacttataacttataatttgatatgtaaacttccagatcttttttctatgcgtaatcagacatacatatatactgcagtgtatctcacgtattaatttttaaaaatcttttgttttacttaattctgtttttattattattattattttgtttgatctattaaggaagaacaaggaagggaatgatctttactcaagaatttcagaaagtcagcactgaagtcctgacctatcagtagacacatttgtccctttcagatattttaggatattctagcaaagcaggccatttctcccacctgaaagtacataacttctatcacttgccacataattaaaagaactcacattaagcggttactcagacagttaatcatagaaaagattatttgcttcatcagttcatagaaaagattatttgcttcatcagttaacttgtttttataaatcagggctgtgttcatacacagaaggggcctgagatttctgcactttaaacaagctcctcctaggtgaggatgctgtggctgttctaattacattttgagtagtaaggtctacagcattgttcctcaaacttggctacgtattggaatcacctaaaaagttaaaacaaaacatggatgtctgggtcccgccccatagagaatgacttaattggcatggggtgcagtccaggcatcatgatttttagatttcccagttggaacttgtgcagcaaagtttgggagctactgatggacatgtgaaaagtaagtataaatggaataaaattaattaggctaataggcttaacccaggaaatcctaagttccttgaatatccagtttgcatttggactcctcatcatatacttggtatataatactctaataaaagctgcctgagttg

SEQ ID NO: 2007 - DNA, 895 bp, Homo sapiens
atcacttatggaaatgtttaatataaattttatagtcatagtcattggaacttgcatcctgtattgtaaatataaatgtatatattatgcattaaatcactctgcatatagattgctgttttatacatagtataattttaattcaataaatgagtcaaaatttgtatatttttataaggcttttttataatagcttctttcaaactgtatttccctattatctcagacattggatcagtgaagatcctaggaaagaggctgttattctcatttattttgctatacaggatgtaataggtcaggtatttggtttacttatatttaacaatgtcttatgaattttttttactttatctgttatacaactgattttacatatctgtttggattatagctaggatttggagaataagtgtgtacagatcacaaaacatgtatatacattatttagaaaagatctcaagtctttaattagaatgtctcacttattttgtaaacattttgtgggtacatagtacatgtatatatttacggggtatgtgagatgttttgacacaggcatgcaatgtgaaatacgtgtatcatggagaatgaggtatccatcccctcaagcatttttcctttgaattacagataatccaattacattctttagatcatttaaaaatatacaagtaagttattattgattatagtcactctattgtgctatcagatagtagatcattctttttatcttatttgtttttgtacccattaaccatccccacctccccctgcaaccgtcagtacccttaccagccactggtaaccattcttctactctgtatgcccatgaggtcaattgattttatttttagatcccataaataaatgagaacatgcagtctttgtc

SEQ ID NO: 2008 - DNA, 1510 bp, Homo sapiens
aaagaatgccccagtctctgtcagcactcccttcttcccttttatagttcatcagccacaacaaaaataaaacctttgtgtgatttactgttttcatttggagctagaaatcaatagtctataaaaacagttttacttgcaatccattaaaacaacaaacgaaacctagtgaagcatctttttaaaaggctgccagcttaatgaatttagatgtactttaagagagaaagactggttatttctcctttgtgtaagtgataaacaacagcaaatatacttgaataaaatgtttcaggtatttttgtttcattttgtttttgagatagggtctttgttgctcaggctggagtacagtggcataatcacagctcactgcaacctcaatcctgggctcaagtgatcctcccgcttcagcctctcaagcagcgggaactacaggtgtgcactaccacacctggctattttttttttttttttttttttcccttgtagagacatggtctcactatgttgctgaggctggtctcaaactcctaggatcaagccatcctcccgctttggcctcctaaagtgctgggattacatgagccaccacatgcagccagatgtttgaatattttaagagcttctttcgaaagtttcttgttcatactcaaatagtagttattttgaagatattcaaacttatattgaagaagtgactttagttcctcttgttttaagcttctttcatgtattcaaatcagcatttttttctaagaaattgctatagaatttgtggaaggagagaggatacacatgtaaaattacatctggtctcttccttcactgcttcatgcctacgtaaggtctttgaaataggattccttacttttagttagaaacccctaaaacgctaatattgattttcctgatagctgtattaaaaatagcaaagcatcggactgaaccaactttggaaataatttatttttataatgggatcatgttaagtagaagtagctttttatgcaaatacatgcatttatgcaatattaatgtaagggctctaaaacaatggagtagagccagaggtataactgaataagaaatttttttaagcaagagaaagacaactgttctgcgggttggagaaaatacaatttttttttttttttttgagacagtctcgctctgtcccccaggctggagtgcagtggctcgatctctgctcactgcaagctccgcctcctgggttcatgccattctcctgcctcagcctcctgagtagctgggactacaggcgctcgccatgtatttagcagagacggggtttcaccgtgttagccaggatggtctcaatctcctgacctcatattccacccgcctcggcctcccaaagtgctgggattacaggcgttagccactgcgcccggcccgagaaaatacagttttaaaaagagaaagctttataacctcaccaatgaatacaaatgtttaaataaaatattgattaaaaaaacattaaaag

SEQ ID NO: 2009 - DNA, 5947 bp, Homo sapiens
accaaggggcccagacctcactgagatgaatcctgcactatttgtttactcgtcaacagattgcacagttaacggtgtgtggactagaggaacacaaccagattttcagcatgcaaataaggccattgtctatctctaaattgtcagttgcattcatgttgtttctattaggagcaaaccaagtgccattctgctactgaaccatctgcataaggtatttgtgttgtctcaaagtgtgcaagtcatggtaaaaatcagttagctgtgccgccatgattcacccttctgaatattttgcttgcctgttccaagattgttctaatgtttaattacactagtaaaatggctcaatttttgtggtgttgcagttttcacatacttactcttttattcttgtttaaatagcgtactctacaagaaactaataattatatcttgaaattattttgtatggaagtatatttagaaaagtggtttttgagccactgtcttgttcttgataagctttttgtgtgaaaaaaagttcattcttgagtgtgcaagtccttttgccaagaattccaattattctgtaacattagagcacaatataattgtagacattctaagcatctgtccgtgtagtctaccaattgcacaaggaaggcatgttagccctccagattgaaaatgtatgtgacctcttgaactgaagttagattcccaaccattcaaaatgttggcagctgatcacatttacttctgataaaagtaatgtgtaagtaaggttaatcttctttcataatgccttatgacaagcaggtgctgcttcatgaaacgtcattgtatagcccatttcatgtatcattacattgttgctgttatttaatgagtgcattatttctctttttaagttggccttaggtatatgtcattgtggcatgcagagggttatgacgattttaaatattaggatttttagagcacataacattagctattttatggatttcaaaagtctcaaaacagttgtagattaaaactgttagttacctttcacatttccaaactatgtgcataaaatagaataaatgcagtatagaactatgctaaccaaaattaataggttaagggtattttattttaaatcctgtagtaattggggaaatgagaagattattattttatacatgagttcattaagatcagaaatacaaaatgtcctgtattttgcagttttgttaagtcttccattcgttttaggattagtctgcaagtcaaagaaagtcttgttaccttaaattatatgaaaactgtcattttaaatcttttaatatttacagttttcaaaaaccttacttggaaattgctttgaaacaaacaagctaacctttgaaacttaggaaaaaatcttgaaagttaggaaaaatatttgagaaatatgacgagcacaatctgtgtgttacacacatttagtttttatactgcatatgtggtaaatgtgtcacattttccagtaaaatgtatcagaaatcaatgccttctgaatttcaaaatgattcttagaaataagatattgtacaactctagcaaacatacaaagtacagctaaatcttaatatatttcactatgtaaaaggctgaaacttcataattatctgttccttctatctttttttgagtcaaaaagtctattaaatttttctgttgttgttccaactttggtgaaaaaggttatggcaatactttaactttgttttgttacattgtttttgttcttggaatggctcacaagcagaatttaaaaggcagattttcattaactataaatggctgaaaaaactgaatttactatctagctacagaaattatttttctatggtgtgaaactgttcccagacatccctaagaacttttacaaattattataaatttgtcacacctaggtcagcgattaaaatagtgttttgcaaatggaattttaattaactcaaaatgaattaagagtgcattttaaaaatcacaagtgagactttgatgttttggccccccagccaaaacttaatggtcataaatgaattttatctacaaaatctctttaaatttggctggttgccttgtcatatgtaatttcactattttccaaggaaatatataggaagcaattatgaaactgagaatagttttatatagaattcttttatttactgataatgcattaacatttttattgaaatgcaatggaatatgtgccaaaacacgtgaaaagcttacataaagaaaggcatcagttgtcgtttggagaaaggtacacatttttttgatggtcctaagtgatatggtattactactagaatcacagatttcttcaactgacttattttggtatattcaactacagctttctaaggataggactactttcatgtctagtaatacactgtattccccgttaattatcccttaagtcagattgtagaatttgcaagaaactaggtatagaaaaaatgtacaggcaacttttgtggttagctttataaatttagggtgcttataaaatgataaaatgaattctttaaataacctataggaatcatctgaatctgtaacatcagagactaaaactaaaagttttctttaatctgttgtttcttaagcaataaactgaaagacctttacttccataaaagattttgttatctcttttatctgccttagaaattataagtataaaagggtcaagggaacttagatataaagaatgactgtggtttataaacattactttaattgaagtaatcacatcagttaatagagaaatcaaaatatgtatggccttttctctagattagcaaaacagctttacaaagtatgaaaaaataaactaaaatgctcattgatgaggtaatactcagtctggagtacaggtaacttgggtaatgccttttaactactcttagaggagtatattatttctttatacattaaacatctatcccatagtaatgtgccacattttataaacgtaatgactttgctcaactacattacacactcaaatgtaatctaaatttaaactgattatttaaggaaaaaaagtgtgttatataatattgtgaactgtttagctttactgaaatatttaagagaaagtgcctcattactaaagtgcatttctgttttaaatttactgcataaagtttgagttatctgtacctgtctcttatgaatggtttcatatctaaataggctcttgtaagttaatttttttggaagattttcataagaatatagatatcaccaaagacattttacagtaaattaataaccatgttggagagacggttttaacagtttggaggttggaaatttttagattgcaatttaattttatatagttaggcaataaccttgattaattgctaaaatatcaccaaagaaaggctttaaactgaattttcttggtgagatcagtcaaatgcaggcttttcttgcaataatcagaacacacttcctttcaaatatgttcattgtttttcagcatcatctaacagatcttagtaaatctaaatcctcaaagatgagaaagaggtaaacacaacaaatagccttcctctgcatgaaaagtgagagaaatacatactttgaaaagaaagttcagatttttaatttgagagggtttttatttcatggaggcagtgttaactaaaattaagcttagatttagctcctgtattattcataatatgagaaattttattaaaggcagactttggtaaaagtgccaacacacttacttgtatagaaaagacttcattctatgggatttatataagtaagtgctttctctatattcaaaatatttcataaggacctgtggtttttttccccttaaaaagcaactctaggccgggcacagtggctcatgcctgtaatcccagcactttgggaggccaaggcaggtggatcacttgaggtcaggagttcgagaccagctggttaacatggtgaaaccccatctctactaaaaatacaaaaattagccaggtgtggtggcacgcgcctgtaatcccagctacatgggaggttgaggcaggagaatctcttgaacccaggaggtggaggttgcagtgagccgcaattacaccactgcactccagcctgggtgacacagcgagtctccatctccaaaaaaaattcaactcttggtcttgtttctcagcacttagtttattgttattagaatttagccatacagccaactttgacaaaatgggtcacagaacaagcatgtacatcaagaggaagttccatatcccccttgtaccatttctccttgggaactcatgctatgggctaccttaaaggtaaaactcatcttatggagtctttctgataggtcactaggtaaaactccttggatagggtgaaaatggatgcacactctattacatactctggtttatcataaggaattttccagaaagctaagctttatactaataagatattggttggtagtaggaacttcaaaaatgaatgagtttgccataactttaattttctggattagaaacacaaaacttgaaatgcaattatcaatattttgtaatatatattcctacagtttgggtagaaataaggaacatgtctgctagatctggtttatgaaaaagtgaaaaatattaaatacaccagagactcaaaccctttcaaggcacacaataactgttctggatttacctgacaaacctagttgagtagcattttgacagaaaatatcagactgaaagttcattcaaatgtacttaaatgtacaatacagtgttcaatagtttttattgcagtgatgtttttccaataatttaagtaattctcttcctagtataatacagttttcataaataatgtttacttgctttctttatattttcaaataaaattaaaatgctcgagcacttcctttcagaaagttataaaattaaaaataattattttaaatgctcattcaaatgtgtctgtatacttgctatgcccctttttctataattccaaactgagactgatttttcagagatttttaactttaataattttaaatctagaatcaagtgaaacagatatgttaaatactgagtctagttttcttccatcttatggagcttcatggaataagaaactaatctagtgcaaatgaagattaaatatttctgggtgatggagagatagtcaacaaatttatttatccatcctctgcacatcagtccactggagcaggagttctacacattaaaaatgtaatgggatcagcctagcattgtttggtgttcttttgttgtattttttagaatgggggtgggggcctaagtgtccttatgaagctgtggtccacgacaggagcttgttgggggagtaccagggttctgctgctttcctgcatctgagcaacacaacagagatcatcagttttaaatagagtagccctcacaatcaaaatatcatagaatatattgtaaagttatgttgctaattttcctttgaaatataaaatattttaagctttttgtcaaaagtggtaacatcttaatacaaataaaaacctttttgtggttgtaagatttagcttataaatcattcaaattgaagtgaaagaattaccaggtcattgttaatgacttagtctattaagaatatatgtatttttgtaaaggaaaagcacttgtagatatttaatcagtacaagatatgtcttttgcagaaataaaatgctgcttagagattctccttaaatattttttatttttgtgctcaaatgtattttctgttgatctatggaatgttctgtacaaagctgtataattgtactgttgggctagatactttttttttttaatctggacttagccaagtatatttcaccatgttaaaatacagtatctttgttattaaaaattaaattgcataattt

SEQ ID NO: 2010 - DNA, 2379 bp, Homo sapiens
cctagaagacttgaaatataatcttttatatgtagcattcacttccctcttactgtgcctttagccttttcatgtttctgtctcaaaacactttgacaaagctcaccaactttaaaatattaagtttttaaaaaatcaaatatgaagtatgttcagcaaaggcataattttctaaaaacacacacagaaatcgcttgagtgaggaaaagtccacatggcagagacaggtatggtccagttcctcttttatatagcactttatcattctccacaagtagtttgtcacaggcattccactgggaaagcaaagtacagtgaagaatgaatttatggtatagttgaacccagtggcagattgtacactgctagcactgctagcacacagtagcaaagcaaacagctacattatctttaacataaggcatgtagccatattttcatatagtggtatacaacacagtatcattgcaaatgcagtttacagggatttttgatatactggcttgggacctataagattcttctcagcagttgctgaaaagcatgtaaataactacataatagcctgagaataatgggattttgatagtgccatttattgttaaagatttatttttacaaagtaaattcagggttttagatgtgtacacagcttttacaaatcaataaagatgattgtacaagagtattttcagactaattggattcaaggttatattcttttaagtgttgttagtctgcatgcacattggcagtaaactagttacttgtgtactctgtaatatttgtataatgatcatttcttcttaaggctcaagatattagaaaagaaatcagacctaaataatcattgatgaagtatgtcagttacaagcacaaaagaatataactgcttttataaatcttttgaatcatgtacaagacttatatctacattttttgatcaccagttgtaccaaaacactaatttttgaaaaagataggttaaagtatttgacaaaagtgaatacaataataacacttgtgtcaaaatgatatagcttagtataaaaataaaattcaacgttttggccaaaatgtttgtttttcactggattctgaatataataaattcaaagtaccctttttttagagtttctaataaagtagtatgtaaaaagaaactgcattttaagtcagacagtaaatgttttttttaatttacagcaaatgaagcagttttattagcatgttacaaatattgccaaaccaagacttctctaccatactttaacagctttccttcagaaaactctgaagttatatttgcaataataatgaaaccagcatttagtaccagcatatggttcatatgcaaataatactttccccaaaatctttctgggctaggctattttcttgctatgcttcctgcacccaaccagcagaattcttccagggtggaggaactaatcagcttgttctccaacagttctgaagccaacccacaaatctttgaggaaaaggggtcactttgtttactattctcttggagatggaagtgattctgctcttccatttgggtatattatttcaagggtatttcttcttaaaaatcttggaaagcctaagagagttaaaggcatcctggttttgtttcattttgctctgttttaaatccatatgcaaataaaactgcttctctcttacactgcttgaactagaaaatcagctttttaatgtaggttaccacttataagcacaaaagaaacatgtataagaaaccagatttaagtgttttaaataaaatgtaaacagtttttatttggtagagatgactcatggaaaaattgtgttggcttggtctgcatgtttaatgatgtgcttgtatatcgattagctgtgtcacttttaaataagaagtccacacaagcaagccaaatttttagatgacgaagtccataaataactagagaatttttgttatctgttgttaagttgaaatgtataatcatttatcactaaattgcacattgcctttatttatttgtgctctgtttttggtttacagtgtaataatacctcatttaaaaaataaaaaccactactgttacattttattaatttaaaaagctagaaaattcatgtagttactttttttacatatataatctgttaatgaattattgatttttgtatctgccacagtaaattaaagcattacacagtatttatcagtattttttaaacatcctgtccttttttaaaatctttgcttagtcagtcatatttttgtctgtatgattagaagtttttacgtccttccttttttgtacaaatctgtattgtattaatttctggatgcaatttttcaaatattaaaattatacagtcagtcag

SEQ ID NO: 2011 - DNA, 1456 bp, Homo sapiens
tattattctgtgtctcttctgtatatcaaaagcagccatacaaatattgtaaaaatcaccttataattaccttagaaactctgatacaattttatagtaaatgtagctggaattctcataaagttagattattttattcttttattttttaattatgaattaagcagcaaatacttttatatccaatccttttttagaaagacttgctaaaatcatgctttacttactcagcaaaaggaggtaagttatttaattatattggaattacactgaatctgtagatcagtggttcttaaacattagcctgtatcagaatcacaagaagggcttgttaaaatacagaatttcagattcagtaggtcttgggtgaagcccaagaattttcatttgtaacaagttcccaggatatgttgatttatgagttcatttatgatgtgacacatactataaaaattatgtcaccattcaaaaaatccagatgcatatttgaaggactaagtgggaatgataaagacagaatgtaaacaaagtctccagaagtttagctatgaagtgaaagacatgttaagaatgaccacattttgagaaccatactgctatagatcaatttgtgaaaaattgacatcttttcaatccataagcatactgtatccttttaggtacctaggtcttctttaatttctcttggtaatgttttgtagttttctggatagaggtgttacacatttctcattacatgtatttctaggtacttcattttttttatcctattataattttattttccaattgtgactaatatatggaaatactttcatatatttatctttatctaaatacagttgacccttgaacaatgcgagggttaggggcgctaaccccctatgcagtaaaaaaaaaaatctgtgtataacttttgactccccagaagcttaactactaataacctattgttgaccagaagtcttactgataacataaacagtcaattaacgtatattttatgttatatgtattctatactatattgttacaataaagtaagctaaggaaaaggcaatgttattaagaaaaaataaggaagataaaatatatttactatatattaagtggaagtggactatcataaaggtcttcatccttattgagtaggctgaggaagaggaggggttggtcttgctgtctcaggtggcagaggtgaaagaaaataatgtatataagcagacttgcacaattcaagcctgtattcaagagtcaactgtactttgctatattcatccattaattctaatagtacatcagtaaattaacttggattttctgtgtacacaatcttgtcatttgtgaaaaaggagagttttatctccttctaatcctgtatcttatatggatatatgtatgtgtttgcattgactgggacctctttcacaattgtgaataaaagaagtaatagcag

SEQ ID NO: 2012 - DNA, 2276 bp, Homo sapiens
atagttattttaagaaactaattccactgaacctaaaatcatcaaagcagcagtggcctctacgttttactcctttgctgaaaaaaaatcatcttgcccacaggcctgtggcaaaaggataaaaatgtgaacgaagtttaacattctgacttgataaagctttaataatgtacagtgttttctaaatatttcctgttttttcagcactttaacagatgccattccaggttaaactgggttgtctgtactaaattataaacagagttaacttgaaccttttatatgttatgcattgattctaacaaactgtaatgccctcaacagaactaattttactaatacaatactgtgttctttaaaacacagcatttacactgaatacaatttcatttgtaaaactgtaaataagagcttttgtactagcccagtatttatttacattgctttgtaatataaatctgttttagaactgcagcggtttacaaaattttttcatatgtattgttcatctatacttcatcttacatcgtcatgattgagtgatctttacatttgattccagaggctatgttcagttgttagttgggaaagattgagttatcagatttaatttgccgatgggagcctttatctgtcattagaaatctttctcatttaagaacttatgaatatgctgaagatttaatttgtgatacctttgtatgtatgagacacattccaaagagctctaactatgataggtcctgattactaaagaagcttctttactggcctcaatttctagctttcatgttggaaaattttctgcagtccttctgtgaaaattagagcaaagtgctcctgttttttagagaaactaaatcttgctgttgaacaattattgtgttcttttcatggaacataagtaggatgttacatttccagggtgggaagggtaatcctaaatcatttcccaatctattctaattaccttaaatctaaaggggaaaaaaaaaatcacaaacaggactgggtagttttttatcctaagtatattttttcctgttctttttacttggttttattgctgtatttatagccaatctatacatcatgggtaaacttaacccagaactataaaatgtagttgtctcagtcccctccaggcctcctgaatgggcaagtgcagtgaaacaggtgcttcttgctcctgggttttctctccatgatgttatgcccaattggaaatatgctgtcagtttgtgcaccatatggtgaccacgcctgtgctcagtttggcagctatagaaggaaatgctgtcccataaaatgccattcctattttctaatataaaactcttttccaggaagcatgcttaagcatcttgttacagagacatacatccattatggcttggcaatctcttttatttgttgactctagctcccttcaaagtcgaggaaagatctttactcacttaatgaggacattccccatcactgtctgtaccagttcacctttattttacgttttattcagtctgtaaattaactggccctttgcagtaacttgtacataaagtgctagaaaatcatgttccttgtcctgagtaagagttaatcagagtaaatgcatttctggagttgtttctgtgatgtaaattatgatcattatttaagaagtcaaatcctgatcttgaagtgctttttatacagctctctaataattacaaatatccgaaagtcatttcttggaacacaagtggagtatgccaaattttatatgaatttttcagattatctaagcttccaggttttataattagaagataatgagagaattaatggggtttatatttacattatctctcaactatgtagcccatattactcaccctatgagtgaatctggaattgcttttcatgtgaaatcattgtggtctatgagtttacaatactgcaaactgtgttattttatctaatccattgcttaatgagtgtgtttttccatgaatgaatataccgtggttcatatgttagcatggcagcattttcagatagctttttgtttgttgggaagttggggttttggggggagggggagtattagtacgttgcatgaaatagcttactttataatgatggaattgctttttcttttgtcttgtgatttttttttttgaagtgaaatttaactttttgtgcaagtagtactattatacccatcttcagtgtcttacttgtactgtatcacattccataccctcatttaattcttaataaaactgttcacttgt

SEQ ID NO: 2013 - DNA, 1388 bp, Homo sapiens
ctatcaaatattgtaaatgcaattgctgctagttcagttacatttctgctgatattcagcaaatttctaagtttatggtgaacttttaactcaatgtgtaaatagatctggagaatattcagcataatgctggctcttgtttcactgggggaaacaagttattctcaaatatttgcactgtattaaatttaaatgttaatgtgaaatggtttaaattttacatgctgaaaagctgcagagcagaggaaccaaaccaggtttatttgtgctaccaggaggtgttcttaatgggaacaggcctcctatctttagtcactttgtacaggatgatatccatgagtactttagtgtttgtatatgttttttcttttaaatagaacttgtttttataattgatttaaaatagggctttttttctataaaagccttaatgagccataattttaagaatataagaataatgactatgatattggtcagtcttagaacatgaaaatgtcagacaatgaatttaatcgggcccttggtggaaacatttatatatttaatgcagatgcatagtgtttttcaaatctttaacatcattttttcaacttttaagatataatatcaactattctaaatacaggtaatggtatatttaaggctaccataacatcctatttagagggtggttttttttaatttatctaatggctacgatatagccagattcaaataacatatgtactcaataggtttcaatcatatatataatatattttttgtaactatgaacatacacagttttccagaaatagattttacactgtttagaattccaacacctacagtggaaagactgtttattgtagtaatgcatggctgaagcataaaagggagagagaatttctttatatacacaaacatacatgaatatgcatatctatatgcatagatgtacctatcctgcacccaaaaaggtgcctggtattggcactaaaatcatgtagttatactgggcagcaataataattgggcatgaggctgattactcaatggtgagggtaggtatatgtagatagatgtgcatgtatgtgtttgtatatataattttataagtttcacgcataaattaatacatgcctgtgtgcatacatatgtatgggatatatttgtatatatatgtacaggtaataaacatccccaaggtttgtggctggccatacacataggcatcagtttaacaaccatcagacctcagctgtacaataacaggtgttttgtttaattaaaattatactgttctgcagcatttagacatttgtcacatttcattagctttgacaaccatactgtaacattaaacctagcattccacaagagaataaatataagattgaaactgt

SEQ ID NO: 2014 - DNA, 2757 bp, Homo sapiens
aactgacttctggttgttctgcagttctctcatccttatgaatctgttgtgttgttttgattccatcattaatgcacttgtggagacttgtgataagctgctgctcctatattttttaagaaatataataaagcacttagggcaggggaaatcatctcggtaatcatggaacctaaggatgtgatttgttttcattgtttgtatgtactacttttatggcagtcatatgaaccattatcttagcatggtaaacctgggttttgttcatattttctccagacagaaatgcaaagatcaaactgtgcaaatattaaaaaaatgcacatgctgttttattcaaatgcctcttttgtacatgttcatgtttagtgttttctcagaatcagcaactcaaggtactatgaggatttttctcactgacataatttgattacatactaaataagaggatatgttaatatgaggaaatgtaaattaaattagttataaataaataaccaaaaatgtatgtaaacattcaaatgattatctgaacaaatgagattttgtggtgttttctttaacccatgtgatgtcctccaaaatgtgtagggtaaaaattcacagggcttccagatcactttttcaatattaaattttatttacataatgttgacatctcatacttcatgaagtaattttgactcatgcagtcgtgtgtgtgtgtgtgtgtgtgtgtgtgtgtgtgtgtgtatttgtgtgtttcagtgtttcatcaggtccttccatctctgggagttttttcaacccatatttctagaaattacagctgccagtttatagtagtttgagcagaggatgatttgcaaaaataaaaataaagttattttactctcctcttgcattgattcagttattgagatattcgttgatcacctcctatttcccaggcactgtgcagagtgctgtaggacatagtggtgaacaagacagacttggtccaagctcttacagagttgacagtctagtttcagcacatagaaaaccagcagtgaataaaccaaggtgaggccttgagctctttgtttttatattaatgaggagaaaagtatgaaaacaagaagtcttaagtaaatattgaggtcattgtttttggcttaagtttattatagaaaatcaacactaatgtttttagattttaattgtcctattgatgaggctagcaccttaatcactgtttagttttgtattcatttttaaaagcaattattgaagccattttcaatagattggccattttaatgttcagcaacctgaatggttatttttgttaattaaaattaaatttttaagagatattttcaaaaccctatttattttcttgttcacagtaatgcatgtcaataataaatgtttccccttactgataagcggccactttaggagtgtagcaaatatagattgagctatgttagtttgcaataatatatgttaactttagtaattaaagactggtttctatagtatgaatgtcttaattttgagttatatgatgtttatttgaatgactgttgaacattcaaatttgtattatttggagatgaagatttgactaacagtgagccttattaagaacactactacagttctgaaggggaaatataacatctatggttatatattttaaaaacttagattataggctgtaattataaaatatattggcttttgttttcaatgtgaaagatacattaaatggacacatatcttgcaaaattttgttgtatagaacagtttttaggcagcctttactaaagttatgcaaacacacagttccccatttactacattaatgcccttgacagggagtagctgcttggttttataggtattagggctcatgaaggccggggaacaactctaatccttttggggcaggagggagggtttttttagggttgcggggagggaactgcaagtgcctgaggaccagagtggcctctagccccgaattgaacacttttaaacctaaagagccttattattattagctcgagaaataccacatgccagtcttcccaggaaggtgacctgcctgaccatgaagcaacaaaagagcataggcagacttaaagttggatagacctgggttcaaatcatagttcagctttcaataactgtatgtatgattttggctaaaggatttgactttctctcaactgcagttttcttaatctttgaaatgcaaataatgtttatctcagaagactatttctaggattaactgagagattaaaggaacagcagcacttaggctcaaaatcgcccctacaaagcagtagttgtttcttaattgctaagtaatctgtttgcactctaggaaaagtaaatggagaggtaaaagaaaggcattggggacaaatgaaagagatgatgtagatttttcggatgggtgggtatattttattttccagtttattttcatatttctttactgtgttatttctggaaactttaatgttttaaacctcttttataaaattcaatgacgactactagaattcttttcaaaagttaacttatctccaaagtggctgaaaatattgtttaccattacatgattatgaaatgactgtgaagaatataaaattaaacttagtgacttaattagtcactgccttgctaactttgctgtaatttttttaaacgtcttgtttttaatatagcaaactatctcaatactggctggattaggttaaataaagaatttttatgttc

SEQ ID NO: 2015 - DNA, 1597 bp, Homo sapiens
ttcacttgggggttggcaattttatttttaaagaaaacttaaaaataaaacctgaaaccccagaacttgagccttgtgtatagattttaaaagaatatatatatcagccgggcgcggtggctcatgcctgtaatcccagcactttgggaggctgaggcgggtggattgcttgagcccaggagtttgagaccagcctggccaacgtggcaaaacctcgtctctgttaaaaattagccgggcgtggtggcacactcctgtaatcccagctactggggaggctgaggcacgagaatcacttgaacccaggaagcggggttgcagtgagccaaaggtacaccactacactccagcctgggcaacagagcaagactcggtctcaaaaacaaaatttaaaaaagatataaggcagtactgtaaattcagttgaattttgatatctacccatttttctgtcatccctatagttcactttgtattaaattgggtttcatttgggatttgcaatgtaaatacgtatttctagttttcatataaagtagttcttttataacaaatgaaaagtatttttcttgtatattattaagtaatgaatatataagaactgtactcttctcagcttgagcttacataggtaaatatcaccaacatctgtccttagaaaggaccatctcatgttttttttcttgctatgacttgtgtattttcttgcatcctccctagacttccctatttcgctttctcctcggctcactttctccctttttatttttcaccaaaccatttgtagagctacaaaaggtatcctttcttattttcagtagtcagaattttatctagaaatcttttaacacctttttagtggttatttctaaaatcactgtcaacaataaatctaaccctagttgtatccctcctttcagtatttttcacttgttgccccaaatgtgaaagcatttcattcctttaagaggcctaactcattcaccctgacagagttcacaaaaagcccacttaagagtatacattgctattatgggagaccacccagacatctgactaatggctctgtgcccacactccaagacctgtgccttttagagaagctcacaatgatttaaggactgtttgaaacttccaattatgtctataatttatattcttttgtttacatgatgaaactttttgttgttgcttgtttgtatataatacaatgtgtacatgtatctttttctcgattcaaatcttaacccttaggactctggtatttttgatctggcaaccatatttctggaagttgagatgtttcagcttgaagaaccaaaacagaaggaatatgtacaaagaataaattttctgctcacgatgagtttagtgtgtaaagtttagagacatctgactttgatagctaaattaaaccaaaccctattgaagaattgaatatatgctacttcaagaaactaaattgatctcgtagaattatcttaataaaataatggctataatttctctgcaaaatcagatgtcagcataagcgatggataatacctaataaactgccctcagtaaatccatggttaataaatgtggtttctacatt

SEQ ID NO: 2016 - DNA, 883 bp, Homo sapiens
tgaccactggcattggcatgttcagaaaactggatttaggaataatgttttgctacagaaaatcttcatagaagaactggaaggctatataagaaagggaatcaattctctggtattctggaaacctaaaaatatttggtgcactgctcaattaacaaacctacatggagaccttaattttgacttaacaaatagtttatgtactgctcttaggttgttttgataaagtgacattatagtgattaaattcttccccctttaaaaaaacagttagtggttttcactatttataaaaaattaattttgaactttttgttaaatttttaagttatagctttaaaggttttaataggaccttcttgaacgacttttctgtaatctgtttatctcccacttaatggaaaggcaaaggggtaccccaaatccagaggtgcctacatttcaggcagccttggagtattttaaaaggaaaacattctttacttttatatgacattcttatactgctgtctcaaatccaaaaacatttcagagctcttgtctcagagatgtgtgttctttttgtcagagatatggttgatgagaatcttaaatgcttgttttgcactatcacttagtacctgtttgaccaaggtgttaaggggatagtacctcccaattcaagcagagaaactgacctgactaaagttaatcgcagatgaactagaagtcacaggttaattaaatgtaagtagattgtagatactgttttatatcaaacaatgtttataatgtgtatatagaattgttcactgtaaaaaaaatggccaaaatgtgttttttttttaataagtaacttgactataaaataaagccgtccgtgggacgactgacctcgttgcaa

SEQ ID NO: 2017 - DNA, 1138 bp, Homo sapiens
acctcacatggcttgcactcagtgacaccaaatccatgattcaatgttgatcttgagcaagtattggtcatgatacagtaatttgtttacagaatccaaaaatacaatagagaagatacatgagggcttaaacaagaaatagtaataaatatcatttgtatggatttttaaataatcgaatactattttatatatggaaaaaaatgaccattttttcacttttaggggaaaatgcaaaagtgtaatacataaattgtcacaaattatacatgaaattgattacaaatacatttgaaaaacatatgcctctactcataagtatttttttctatttagacttgaatgataatctgttttttgatcagtatatggctttggaattcaatcatgtctgatatggtagtatttcactaccattttctgacttttagcttttattttcacctcaatgtgatttaagcagaccaaaatttctaattctgctaattctgaaggggaaatagacaaatcttaaaagctgcctgaaatcaaacttgatttaactcagtaagaatgtgaattatttgttctacttgggtggtttaatttaatcgttctgaatatgaacaaaaggttttggattttctaaagatgcagtgttgtttctgttcatcagggttaatatttctaactatattgcttgtaggtgaccccattctggatttgtttggtttggtttggttccagttaaaagagaggacaggaactaaatggggctaaccacttcaggtgcagcttgtgcgagggtagatggttcctgcacacagaagttaccacaggggtcaggttactttcttcaaatagcagatttcagtactttatcctcattgtggaaacaagccaaaccaaatgaactctggaaaacctaaaacaaatgtacattttcctttgtgtatgtttccgtggtccaaatggcaatataaatccagtctttattctccctttgttgtatttatgctgaatcttccctttgccttttcaggatttaggcctgtaagaaactatgcctgattctgtaaaataagtgtaaagaattatatgtacatctctggattttgtgatgaaatattaaaaatattgagcaagttgttgaaaatgc

SEQ ID NO: 2018 - DNA, 580 bp, Homo sapiens
tgagcttgaatgttcaaacctgagacttattggaagtgtacatatgagtttttaaggagtgttgtgttgactttatatttaatttctaaatgtatattataatatttatgtgttttgactatactaccacaatctttaaatattaaaataatgaatttgtatcatttccaaataaagtaaaatttgaaggtacttttctggtattttaagattcctgttgggtaaaactcaccagtttagtattttcttagtgtatttaaccagattttacaatgcctacctggacttatttgtcatctttgcatctgttttctgtgagaagaaatcttagctgttttttatgttaacagttattagaaaatatatgtctgtgtgtgttattccagacgtatctctgtaaattcttctacagtcacttagattccctatttggaaaattgatccaagttaatttaatttttttttggtttgctgtactttagggaaagatgaacctgaaaaggtaacactgagaactgtcactctaacctctccagcttatctaacatgtcataaacataataaatctgtgttgtccaat

SEQ ID NO: 2019 - DNA, 937 bp, Homo sapiens
caaaataagtatttgttttgatattaaaagattcaatactgtattttctgttagcttgtgggcattttgaattatatatttcacattttgcataaaactgcctatctacctttgacactccagcatgctagtgaatcatgtatcttttaggctgctgtgcatttctcttggcagtgatacctccctgacatggttcatcatcaggctgcaatgacagaatgtggtgagcagcgtctactgagactactaacattttgcactgtcaaaatacttggtgaggaaaagatagctcaggttattgctaatgggttaatgcaccagcaagcaaaatattttatgttttgggggttttgaaaaatcaaagataattaaccaaggatcttaactgtgttcgcattttttatccaagcacttagaaaacctacaatcctaattttgatgtccattgttaagaggtggtgatagatactattttttttttcatattgtatagcggttattagaaaagttggggattttcttgatctttattgctgcttaccattgaaacttaacccagctgtgttccccaactctgttctgcgcacgaaacagtatctgtttgaggcataatcttaagtggccacacacaatgttttctcttatgttatctggcagtaactgtaacttgaattacattagcacattctgcttagctaaaattgttaaaataaactttaataaacccatgtagccctctcatttgattgacagtattttagttatttttggcattcttaaagctgggcaatgtaatgatcagatctttgtttgtctgaacaggtatttttatacatgctttttgtaaaccaaaaacttttaaatttcttcaggttttctaacatgcttaccactgggctactgtaaatgagaaaagaataaaattatttaatgtttt

SEQ ID NO: 2020 - DNA, 252 bp, Homo sapiens
tattatctaactggtctaaacttcaaatatcattttacctttgaagaaaaccagaaaacattcaaaagaacttcaacaaatcatcacgtaacaggatcttcagaaaaactaccctgtgactatgaagaaaatatatattgctagcccaaaaatcccaggggcaaaataaagttcaacaaaagtgcaaaatatgacaaaaataggtacatttttggtgccaatttattttaaattaaaaaatatgcaatcctg

SEQ ID NO: 2021 - DNA, 355 bp, Homo sapiens
gacaccaaattctgtggctgccatcagaaattttctacagtacatgacccggatgaactcaatgcatgatgactcttcttatcacacttgcaaatgaatgcctttcaaacattgagactgctagaaccaagcactaccagtatctccatccttaactgtccagtccagtgatgtgggaagttaccttttataagacaaaatttaattgtgtaactgttctttgcagtgaagatgtgtaaataagcgtttaatggtatctgttactccaaaaagaaatattaatatgtacttttccatttatttattcatgtgtacagaaacaactgccaaataaaatgtttacattttctttcat

SEQ ID NO: 2022 - DNA, 1243 bp, Homo sapiens
agcatcattgctgaaatacatatttttttcaagtacaccatcacctaattcacatacagcatacgcacacatctggaaaatctgcattttcttcattggttgtatttaataaattgcctaaagtaccatttttgaatatagtatgtctttagttaagaatagctagtctgtttggtgtaacaattttttggtagctttggttttggttttggttttttttgttgttgttgttggggtcaagttggtgagaggagagctcattgtttgaagaaaaaccaaaacattttatggctagtaatatttatgtaatttttaaaatgtatttttggtactgatgggatatgggtggggaggctattttagatattcttttagcagtgtagagcctaagaaacttggttctactaccatgatctttataaactatgccttccagacaattgataatgctgctataattagtattatgttgataattcatttgcaaccttattctatttaggaggatgaagttgaagcttagaataggtgcctgcttaatggtgttaataatacaaatgaattggccttattttcaaggattttataaatgattatcatacttgtaactcatatttgtgccttttcattttaatgctggaatttttattatgtcacctctaaaacacttaaattgccaaatttggctagtagttttgtttcagtggcattagcaactgcagctagcatactataattttaattgtcctcacttttttttgaaactgcactaaatttttcttaacattccaagatttcagatctctaaatcacaaagagaaatcttggcatgaccagtgtgcacgtttccatcctgaagtgttttctcttcactagaaatgtgattttctataaattccccttgaatttatagtgtgatgccaaataaaattttctcaggatcttattaggttgaaccatatgtaattgccaagattttactattttaacttagaaaaaccatcgtttcatatgattcaccctaatagatacctccattattctctaaatgaaatagaagactttggagtatatgtttttaaagtaattttttaaaatatggtaatgtattaaacttatttttatagttatgaaattatgtgtaataatgctttatgttatacattaaatgtaaagacttgtgaatccatgtttgattgactttcatagtttcctgcattgaaataaaatcactatgaattct

SEQ ID NO: 2023 - DNA, 422 bp, Homo sapiens
gtgaagatctttaagcaagaagttaaagagtgaacatggtggaaaaaatataattattttcatcagacttaaactggaaattgatgatttctgaactgaagccttcacacatgtgagatccatgctgaggagaagcaaaatggcacagggctagttgccaccaaccaatttactgatgaatgaagcccaggggactgccattttataaatgtcagcagttggaaaaatcgtcacgaattgacttagagcaagggtcagcaagcttgtctgtaaagggccaaacagtaaatattttagggctgggggccataaaatatgttgcaaccacccaattctgccattgtagtgcaaaagcagccatagacaacacatacatgaacgaacgtggctgtattccaataaaactttatttatggacactg

SEQ ID NO: 2024 - DNA, 476 bp, Homo sapiens
agtggagctcaagaatagcttttaaaagttcttatttacatctagtgatttccctgtattgggtttgaaatactgattgtccacttcaccttttttattatatcagttgacatgtaactagtaccatgcgtacttaaatagatggtaattttctgagccttaccaagaacaaagaagtatccatattaagtttagattttcagttaatttttgagactgagtagtattcttggatacaggctgatgtgtacttaaccacttccagatttatacagtcttcctgtggaagtttagtaaatgtctttttccctcctttcttctagtaatgcagttcatgggctttaggtacttcagttatgaagtaggcttttcatggggagagattgggattatgctctctgttgtttaagaaactgtttgattttagagtctatttctatgagatagtttaccaaataaatgttccttataagatg

SEQ ID NO: 2025 - DNA, 323 bp, Homo sapiens
agaagggcagatagtttggctgctcctgtgctgtcacctgcaattctcccttatcagggccattggcctctcccttctctctgtgagggatattttctctgacttgtcaatccacatcttcccattccctcaagatccaatgaacatccaacctccattaaagagagtttcttgggtcacttcctaaatatatctgctattctccatactctgtatcacttgtattgaccaccacatatgctaatacctatctactgctgagttgtcagtatgttatcactagaaaacaaagaaaaatgattaataaatgacaattcagagcc

SEQ ID NO: 2026 - DNA, 362 bp, Homo sapiens
agaagagcagatggcctggctgctgctgtgcagtccctgcagctctctttcctctggggcattatccatctttcactatctgtaatgccttttctcacctgtcatctcacattttcccttccctgaagatctagtgaacattcgacctccattacggagagtttcctatgtttcactgtgcaaatatatctgctattctccatactctgtaacagttgcattgactgtcacataatgctcatacttatctaatgttgagttattaatatgttattattaaatagagaaatatgatttgtgtattataattcaaaggcatttcttttctgcatgttctaaataaaaagcattattatttgctg

SEQ ID NO: 2027 - DNA, 1116 bp, Homo sapiens
attgtggatgaaaactcaaatctcctgcctccaggggaagaaggaaatattgcaatccgcataaaactaaaccaacctgcttctctgtactgtccacacatggtaagaaaattttcttctttcctaaatactttcattgttgctactaatcgtagtgccattattgttgagtactttatgatttgccaaatacttttgtcccaatttttaattttgcaaatttttgagtctccaaaaatgttaaatagtagcactcacctacattcacttcttattaagattttgccccatttacttcatatttgcacatttttgatgagacatttgggagtaaatgcagacattatgacactttgtccttaaatatttcagcagcatcctcctaataaggactttcttcttaaacatcagcaccatcacatctatgaaaattaaaaataattatttaatactatctaatatctagccaatacttagactttctcaattgtactcagatgtgttttataccttttgtaaatccagaattcaatcaaagttcatgcatttatttggttctcatatctctttagttgtttttatctataactgttccaccaccatgtttttcgtgacgtggacattttgaagaatagaggacggttgtgttaaaaaatgcctcactttctaggcttacatattgtttctttataatgagatccaggataaacatctttctcaagactattatgtagatgatgtatatttcttatttgcttatggggggaaacattaggttgtctcattttggatgctgatcattttgatcttttgattaaggaggtgagtgccatttccattgtaaaggtacattttcctctttgtaattagtaataatctgccgtgtaacaatttgagactctgtaaatatcctattctccaattaactttcacccaatcattttagcatccatagatgattcttttctttttggaaacaattattaaaataaagagtggctgggcacagtggctcatgcctgtaatctcaacactttgggaagctaagatggacagatcacttgagcccaggggttcaagactagcctgggcaacatggcaaaactccatctctac

SEQ ID NO: 2028 - DNA, 10883 bp, Homo sapiens
caaaagcagctgaaatatgctggctggagtgaggaaaaaaatcgtccagggagcattttcctccatcgcagtgttcaaggccatccttccctgtctgccagggccagtcttgacgagtgtgaagcttccttggcttttactgaagcctttcttttggaggtattcaatatcctttgcctcaaggacttcggcagatactgtctctttcatgagtttttcccagctacacctttctcctttgtactttgtgcttgtataggttttaaagacctgacacctttcataatctttgctttataaaagaacaatattgactttgtctagaagaactgagagtcttgagtcctgtgataggaggctgagctggctgaaagaagaatctcaggaactggttcagttgtactctttaagaacccctttctctctcctgtttgccatccattaagaaagccatatgatgcctttggagaaggcagacacacattccattcccagcctgctctgtgggtaggagaattttctacagtaggcaaatatgtgctaaagccaaagagttttataaggaaatatatgtgctcatgcagtcaatacagttctcaatcccacccaaagcaggtatgtcaataaatcacatattcctaggtgatacccaaatgctacagagtggaacactcagacctgagatttgcaaaaagcagatgtaaatatatgcattcaaacatcagggcttactatgaggtaggtggtatatacatgtcacaaataaaaatacagttacaactcagggtcacaaaaaatgcatcttccaatgcatatttttattatggtaaaatatacataaatataattcaccattttaacatttaattcatattaaatacgtacaaatcagtgacatttagtacattcacagtgttgtgccaccatcaccactatttagttccagaacatttgcatcatcaatacattgtctagagacaagactatcctgggtaggcagaaaccatagatcttttgtgtttacagctatggaaaccaactgtaccataaagatagttcactgagttttaaagccaagccacatcttatttttccaaggtttaatttagtgagagggcagcattagtgtggagtggcatgcttttgccctatcgtggaatttacacatcagaatgtgcaggatccaagtctgaaagtgttgccacccgtcacacaacatgggctttgtttgcttattccatgaagcagcagctatagaccttaccatggaaacatgaagagaccctgcacccctttccttaaggattgctgcaagagttacctgttgagcaggattgactggtgatgtttcattctgaccttgtcccaagctctccatctctagatctggggactgactgttgagctgatggggaaagaaaagctctcacacaaaccggaagccaaatgtcccctatctcttgaatgatcaagtcacttttgacaacatccaggtgaatataaaaacttaataaagctgtggaaaggaactcttaatcttcttttctgctacttaggttaaattcactagatcttgattaggaatcaaaattcgaattgggacatgttcaaattctttcttgtggtagttgcctatactgtcatcgctgctgttggttgagcatttgtggtgtaccacgctgtgtgctcaagggtattacattcatcttctcatttaatcctcacaacaatctgaagaaggtaggtattacaattcccacttcatagaaacagaaactgaggttcagagaggttaagtcatttgcccaaatggctgagccaaagcctaccatgtacctaacctttattttctttcccgaacataccaggctgtctcctcataacttccaagcatgcacttaaaactccacatgaatacaaggttcatgggacttggtattcatagaaagggaggcagaaagctggtctgttcctgataggcttgtaatttaatatcattctgttcatgtgctttggatggaagcacatctggcatatgatgctaatcagtggttcccatacccctggcttcctaattttaatgtttgctcacagcatagtagattgacatcaaatagtggccgatgatgatgaaaataaaggtcaaataagttgagccaataacagccgcttttttccttctgtctgcgtatacaaagcactgtcatgcacacaatctattctgaccctcacaacaacccataagggtgtaaatagtatttccattttacaaatgaggatcacacaaactactacatggcagagcagatactccaactcatgtcttctggttgaagcctattgctttttcttttctaaacactttccctcagcaagttggaattagacttcacaagtctccttcagagaacacaaatcttttcttattccattcctgtttggttgcctacgtccaatctccccctccccagagatgccaaaaaaaaaatcctttaaggtatttgggagccaaactcaacttgttaaaatctcaaattatggagacaatcagcagacacaacctaaccccaattattttggcaggaaggttggtttagaggcagatccagcaatctgctttgggccactctgggtggggtaggtgaaataagattggtcactgttaactaattttaatattggattggccattggttatcactgattaccattctcccctggattttcacccaggactcaaaacttggttctgctaaccctgttcctttatgaggaaccttttaaagattcctttataaggtgggagttttttttctatgaacctataggggagaaaaaagatcagcagaagtcattacttttttttttttttttttttttttttgagagagagtctcactccattgcccaggctggagtgcagtggtgctatctcggctcactgcaacctccgcctcctgggttcaagcaattctcctgcctcagcctcccgagtagctgggattgcaggtgcccaccaccacacccggctaatttttgtatttttagtaaagacagggtttcaccatgttggccaggctggtctccaactcccaatctcaggtgatcctattgcctcgggctcccaaagtgctgggattacaggagtgagccaccatgcctggccagaagtggttacttctgtagacaaaagaataatgctacttaatcaggctttctgtgtgacaagaaagagaaagaaaataaagaagtttcaattcatccaattcttaataagaaatatgtaaataaaattttttaaaattacacttcattttaatgttgtatcagtcaaggtccctgcaagagatggatggtatggtacactcaaactgggtaacacaggagagttttcagaaagcaactaaatccaaaatactatcaaggaatcaatataaaaattgttaatatttttctcatactaaattttcaaaatattttgtgtctattacatttacagcacatcttaattaggactagctgtgtgttcacctcacatgtggcttgtagctaccatactggacagcacatgtccaaaaaaatacacgtaaagttaaagtttaaaagacacaggaactaagccctcattgtctttcccttgggaggtagtttaaagagctatagatgctgtaacattcttgctattatttattatatatgacattattcctaaaaaagcttttgagatcctaggttgtattcctcaggttttgttgccttcccatgaagatgtgaaggcagggatgcctgttattcagtccaagatgcatgacaagagaccttgggaaagtttcatctggatttaaagattaattcttgatgcttacattccatactcaaaatgtaaatttgaatattaaaataaagatgattttttttttggagctagtcttgctctgttgcccaggctggaatgcagtggcatgatcatggctcactgcagcctcgacctcccaagctcaagcaaggctacaggtgtgcacctaagtagctaggactacaggtgtgcaccaccatgtctagctatttttttttctgtagagacagggttttcctatgttgtccaggctggtctcgaactcctgccctcaagcaatcctcctgccttggcctcccaaagtgttgagattacaggcgtaagccactgcacctggccaagatgaatattttaatagctcacagaacaaagtttgccacataatgataaaattactatgaaaatatattccctttattgtcagtttaaaagatgaactgagtttcacccaaactggtctggcccctctctgattcaaataccaatagttgctctgattcaaattccaactgttagaacatgacagctgctcataactagctttgcttactaaccatgtttctttccatttgtattaggtcctttactttttataacagcctcaaagtttcatgaattgctgcagtaaacattgattttcatgtttgtgagtctgcaagccagctgggcagctctacttcaggtggtaagggtggatcagacctattccatatacctcttgttctccttgtccagtggtttctagggatatgttctcatgatgaaccccgcagaggctcgtgaaagtgagaggaaactaggatgcctcttaaggtcttggtcaggatggggtctcctgtcacttctgtcacaggctattgtaagtcatatgagcaagctcaataaaatataaacaagtcagataaacagtgggaggaatggcaaagtcatatggccaaggccatgagtgattaattttaacacaggaaaaaagtaaagcattaaatgcgattatttaatatacaatgtcttattaactgaaatataaaatgtgtttactgtaaaatataatctgtttatctcaccaaagaaatattatctttaaaaaatgtcattacttctaagacatcatcagtctgcaacttctttccatagccttaatcaggatgctgtggcagctcccacattagcctcgcattctaaactggtagatgtcctaggaaaccatacatctatgtatttttcttattttatacgtttaggacaatgtatagctaattacccaactttttatttgcatacaaatctaatacaactgaacacaatcagttttatcacaggtataatggatttttcaatagtgaggaggtgcctccatgagccttctctttagaaaagtggcattcaagactcttcatttgaagtgaagattgctatgtcttttgcattgctctattttacataaattaagttataaattgacactataatcaactgacaccatgatcagtgatgatgatcaccctcatcagcactagagttgacttgtttttataacccctttgcatgtatgttgaatagcaaagttcatcagagaacatgtattagtcaatggtaagtaagatactctcatctaagaaataacatcacctcttctaatgaagttctaagaagagagggaagaaaaagtcttgggagctagtcagggaatagtgtgtatttgcaattacctaaactgaactctaccattactcctaacccagttcctcctcctgtgttttacatgattaatgccacccctgcctcaatgaaccaagatcagctccatcactgggacctccccattctgcctgtgcaatatttttcttttttatttctccttctaatattactgttattgctccagtaaagagctgtaatatattttacctggactgataccaggaatggtggtgttgcttccaatctgttgctgctagattaatctttgcaaagcacaggcttaatttcattgctgctcaactaaaaccactggtggctttccattgcctacaaaataaagtcaacctccccatcagacattcaaggctttcaatgatccatggccgccagctctctccaggctcatatcccactccactcctctgatgtttcctacactacactacactatactacactacagccaggtagaatgactgttcacccaacaccactcaggttgtcttctcaacttggaatactcttgcaccttcaaagctcatttcaaatgccccttcatttgtgaagccttctccaaatttccaagtcagaatgtctcttccttgtgctaccacaaccctttaactgagcctccattagtgcactgagaccattctgttcagtgtctgggtgaagcttcctggtgaaaaatatgttacctatttctttctgaaaagttggattcagggatattatcacggacctaaggtaatagttctagccaacctccctgtccactgccaggccgactacaaacccttctgttgctggcgagctggtccgcaccactagttctgcttcactctatttatctcttgatgtaaccatcttctttctccaggttttaagaaccagcccaactcctggttccctgatgaagcttttattcccctagccacatggaacttttcctttttggaacatgcctttagtttctgtgtagtttgccatgcagcacttcattgtacacattattaaaacagaattttaaggattagaatgaaccttaaaagatcatgcatctcaaaatttaatgtacatacaaattacccagggattttgttgaaataaaaattatttaattttaattaatataaataattcagtaggtctggggtgaggcctgaggttttacatttccaacaagctgccaggtaaagccaatacatctgtccaggaatcacactttgcgtatcaaaggtctagatgacattatcattccaaagagtttcttttacaggctctcagatcagtgttcatccactacctgactactgtcattcacaggcattctgttccacagcaggccagctaacgtggtatttacaaagctcactcctcttatacaacaatccaagtgtttcttttgtcagttgtctgtgccccaggagatccctctctgccttgccttgccctctgcctttggagaccagcacctcatactcagtgaaggcctggagtgcttaagagggatttcttccagctctcttgccctggtcttcagtgtattagatgtattacctccatgctctcagtagaggcccataggaaagagtaggtaggttatgccagctcacacgcatcctttaaaaatggtttagaagtttagctggtttcttattactcctgtctatggatgtttccttctgtcactctactagggatgaaacagctaatcatgttcaatagttacatttagattggtttttaaaaactatgattgtattagttcgtttccatgctgctgataaagacatatctgagactggaaacaaaaagggtttaattggacttacagttccacatggctggggaggcctcaaaatcaggtgggaggcaaaaggtacttcttacgtggtggcatcaagagcaaaatgaggaagaagcaaaagcagaaactcttcataaacccaccagatcttgtgggacttattatcacgagaatagcacagaaaagactggcctccatgattcaattacctcccactgcgtccctcccacaacatgtgggaattctgggagatacaattcaagttgagatttgggtggggacacagccaaaccatatcattcctccctgggctcctccaaatttcataatcctcacatttcaaaaccaatcattccttcccaacagttccccaaagtcttaactcatttcagcattaacccaaaagtccacagtccaaagtctcatctgagacaaggcaagtcccttccacttacaagcctgtaaaagcaagctagttacctcctagatacaatggggggtacaggtattgggtaaatacagctgttccaaatgagagaaattggccaaaacaaaggggttacagggtccatgcaagtctgaaatccagtggggcagtcaaattttaaagctccataatgatctcctttgactccatgtctcacattcaggtcatgctgatgcaagagataggttcccatggtcttgtgcagctccgcccctgtggctttgcagagtacagcctccctcctggctgctttctcaggctgatgttgagtgtctgtagcttttccaggcacaagatgcaagttggtggttgatctaccattctggggtctaccattctggggtctaccgttctgggactgtggccttcttctcacagctccactaggcagtgccccaacagggactctgtgtgggggctctgccccacatttcccttccacactgccctaggagaggttccccatgagggctctgcccctgcagcaaacttttgcctggacatccaggtgtttccatatatattctgaaatctaggcagaggttcccaaatctcaattcttgacatctctgcacccacaggctcaacatcacatggaagctgccaatgcttggggcctctaccctctgaagccacagcccaagctctatgttggctcctttcagccatggctggagcagctgggacacagggcaccaagtccctaggctgcacacagcacagagaccctgggcccagcccacaaaaccactttttcctcctgggcctctgggcctgtgatgggaggggctgccatgaaggtctctgacatgacctggagacattttccccatggtcttggggattaacattaggctccttgctgcttatgcaaatttctgcagccagcttgaatttctccttaaaaaaaatgggtttttcttttctactgcatcatcaggctgcagattttccacatttatgctcttgtttcccttttaaaacagaatgtttttaacagcacccaagtcaccttttgaatgctttgctgcttagaaatttattccaccagataccctaagtcatctctctcaagctctaagttccacaaatctctagggcaagggtgaaatgctgccagtctccttgctaaaacataacaagggtcacctttacttcagttcccaacaaggtcttcatctccatctgagaccacctcagcctggaccttattgttcatatcactatcagtatttttgtcaatgccattcacagtctctaggaggttccaaactttcctacattttcctatcttcttctgagccctccagattatttcaacacccagttccaaagttgcttccacattttcgggtatcttttcagcaatgccccactctactggtactattagtccattttcatgctgctgataaagacatacctgagactgggaacaaaaagaggtttaattggacttatagttccacctggctggggaggcctcagaatcatggcaggaggtgaaaggcatttcttacacggcagcagcaagagaaaaatgaagaagcagcaaaagcagaaacccctgataaaaccatcagatctcgtgagacttattcactatcacaagaatagcatgggaaagaccagcccccttgattcaattacctccccctgggtcctgtgggaattctggaaggtacaattcaagttgagatttgggtggggacacagccaaaccatatcaatgattttgtactttaaccagctgaatggaagtacaatctcttgctatatgacacaataattatttgcaaaatgagtaaacatatcataaggaaattatttttacaaggtttgaaacctgaaatgcagtctattatcatacataactaaaaatagagcctcaataaacagattcccagttttgaaaatgcaacatttgtactccacattgtcagttttcttaggtatatttataaatactcctataaaaatgtaaagaaacacataatgtagattgctaattttataataacacaagttgattttgacatccaacttattaattatgaaatgacttttggcctagtaacaatgaaaatgggggcaaatacagataaatggtaattcttagaatgaactactcagcaccaattctaagtttttcttgatggtaaatcataatgttccctttctcctcggttctgcaatctataggcataccataattgtaatcaatagcttaaaaatatgtctctctgtcctattctgtatctgtatctcttggatttttacctttgcaatagtcaactgaaccatcttcttggagtactcatgaagatggaagtctacatggagaatacaggatgaatccactctgtctcctgcagtgaagtctgtttgaaggatgtatttggctgtcttctggacaggccattctaataacagaaacaaacaagttattttaaaacttattggaatattcaaatattaaccaaagtagaaaaatataatacacatccatgtgcccatcacagaacttcactgattatcatcatttagccagtcttgaagaagcaagtgctaattacaatcacaaatgaaacaagattcagacttcatgaagagcactgcgctataataaaagaagaaatgagcacatacattcttttactgacagtcaaatggtgaaggtgggcagaatcattatgtgatgcaacatggcaaaagtatacagacagtgcatccagaggaaggcaccttgctgaatgactagaatggaagtaggagacattttgcaggcccccttcatcctgcagggagaaccagaaccacagcagctctatttgcctattcctctttaaattacaaagttaaaatttgggagtagtagaaaatcaattggttatcttatagagtctcctagaatatttcattggcattgagaaggtggaaaatgcaaattatatactttaaaatgtaatttttgcttttcacatatgcttaaagcctaaaacctcttaataaacttcttctgaaatata

SEQ ID NO: 2029 - DNA, 675 bp, Homo sapiens
aaaggaagcagagcaaagtaaaagattgtactatagtcctctagtaccaacaaaaacttttctggtaccttgagattttgctgtttattctcaagtccagctaagtgctgggcccaatttttgattcacttacagagctgggcactatggagactcgcacccctgagtgagtctttgaggaggagtctagatgagcttctcaccagagacctctccaggaaggacctttggatagtctggctttcttgggtcactgtctgcagtaggtcttattctgggaaagaagcaattttggcctcttctcctaagaccaatgtttctcaaattgtagaattcacaccacctccatttgaatcatctggagagccttgttgaaaatgcagattactagatcctcctcaagacccactgaatcagcacctctgggagtgaagctacagactctgcattattttcaacaagctccccagataattctgatgcactgttatgagggagagcccagccttatagaatgttgtcactactaaactaaggctggtacgtttgatgctgggtctgatacaatttcagatggaagctgctcgagtggaaaactaaggtcattgcctctcatggataaaatgttatttcactggtaaagaaaaataaaataaaatctaccatgttgggctg

SEQ ID NO: 2030 - DNA, 2624 bp, Homo sapiens
ttatttgtgaagctgataaccgacccagactgctttgtgacatgaagctatgggtaagcgttttgtaaacttctgttcaaaaggaaagggatctaaatgacatcagaactcttcaggtaccagcaccaggaagactgaatatcctttttaatgcaccatgaatcctgggagactaagcaaattaacagtatgtcaaattctgttacaacaaatccctgtatgacaaaaatgttcaagtcctggctgatggtccaaatatttcaaaaatattcagtacaacagaaaatttggacagacttcaatttgccattttgagatttgacctgtggtagcatctgggcctaatgttggcttctaagtcaaagactaaatgtttatctcatctatggacttgccaaacagtcttttatgaaggaaagttacagtattaatttttgaaaaggttttttttattctgcaattttttatttttgttctacacatgaatttttgactaagtttaaactcatgaattgttatgctataccaatctgcagtaaaaaaaatttttttagatgattctatataacttcgtctcacaaatagtgtaggtatctgggtttatatactaaaattaagggtggagaagatcttattttttaaatcatggtcataatttttctttttttccctaagtgatcaacatcaaatttttagaattaaaatacatttaactcagggaatttgtactacttggaaacacttaactgtaatgcaacatgccttgggaatgttatagtgtgaactacctttataacataggttaaaatacgcttgctagggtgtgttttcaaatgagaacataatatagctcagaatgaagtggtagttcctgtgattcataatacatatgtaggttttgcatatctcagtgcaatccatgatttatactcagaatcgacattcttaaaaagttatttcaagggatggcataactgtaagaggtcagtgctagaataaagtcctgtaggtttattttggaagggactgtggccagggtagttctcaggttgtgctagagcagcactttgttatgtggaagacaggttttttaagcaacctttgaatccagctctagtcagtctaagcaggcaaaggtaactgatgactaaatttcagtagctactttcattggattgaccctacaactgccctgggacatttcactgtaccagtattaactgcaaacagcaataattgtcattacagcaagggcagtttgggggtaaagcattttggaggaataaccttaaaaagttaaaaagtcattgtaataactgataaactgtatacattgtgctcctttctgtgggagaagaaagatttggtggagggaagctttctggtttaaaaattagtaaggtgtgtctttttgttttttttaagatagcacttgaatagaagggaaaactgcatggcagatacgtgactgccacaatatgcatcgaagacaaacttactataaagatgttgtgggtatgcagcaggagtctcagtaatcaagccaatggcctttgtcaggaagggaaggggctcaacacagtgatggactgatccagatggctcccggggatgaatgtgggtgggtagcttctgtcagtatcaatgcttagagaaatatcctttccttaaaaagaaaataacttttatatttagagtacatagggcatgatgtggatttattagtctggtagataaaatgaaaaaccactcaggtaagaacactcactcatggcagtttttaagcatgaaaattgttttctgaaagtatcatcacttttcctttttaaagaaggctgctaattggattttggtagttcttacctcaagaaaacttgaattatttgggggaaagtaggctcaaaagagaatatatctttcacattcacattcagaacccagcaacctggagtccaattttcagtattttaactacctcaataatgctatgaatgtaagatattgggatagagatcccaacttgaaacaacagccagtgcctgtggtaacttaatgtcttgtcaaatacttttattgattggtttatatgccattcttgttatagaagaatatgccttttaaaaaagcttattaataacactttcccaatttatattttaaaaagctaaagaacactggattaataatcttttgggagggtagaataaaataattgattactattgctgcatacccggggtgggatggggtggttggagaaccagaactatttttaaaacattaggtttcaatataaatacaactcacaactgctagctttggggggtgggggaacattgtgtgggttttgttttgtttaatttattgattagtctttaaagtaggcttttttttttttttttgagaatactggaccatcattaaatgtgtactgtgaagagattaatatgtatgaagggctttaccaaagtccactaaataaacactactcaagtacagactgcaaaccaaaatgtatctgtgttacgacattaattgcaaatagcaagtatggtgctaaagtctacaccaatggaattagatgagtgctatgcacttaattttaaaataaaactagttttcag

SEQ ID NO: 2031 - DNA, 2980 bp, Homo sapiens
tttaccataattaccaaggaaaagaaaagtaaaattaccttagaagaaaacaacgggttcagttaccataatgcagacattttctacttcagtatagtacctgaaatcgaacattttaaaagttgattgtatttctgtggaagagtaaaagttgtatgtatgatatttgaaaatgctatccctgcactcaaaagttttgaaagaaactaatcacagcacagaagtaccttgatttaattttttaaacgtgttctcgggaagttagggctaaagaaaattttgataaaacaattttcccactttagttctttagtgactcttagtagagggtaatggctgacacccccattccctctcttcttccaccagccttatgcatctaagtgtagctcctctggagatggagagctctttcatcgtagaactgaaggagtttctcacatttgtgaagatactttgagagaacctgggtaaagaagtcactctatatctgctaaatatagttattttgaaggatattaggctccttgaaagtacatttaactcactacagttacacctcatacaatgcttgaagagtttttggcaagtaaattttttttccagttgaactctgtcacttgttagagattgggaacactctcccaaggtgattttctttttctaagtgactgtgtcaaatgttgcagtagatgggcagcttcaagagaagaatttaaactctttgtctcattgaaagtttggttaaagaacttgaacatatttctaaatttgattatattctctgatgatccctttgcacagaactatgcttatctcatgtttgtcctccataaacaaatggccatttttttcttcttggttcccatccctttaaaaagagtggaacataggagcacttccaagggagtggcttttcttgaaaattaaaattgtttaccaaaacagtattttgaagcaagatcatatttttgtctgtattcactttattatttgaacatgtccaaattaggacaaagcatttctgttagctgcttctcagtgtgactgacaacccaaaacatatatacagattgttggcatttgcaaaaggaagcatcaatagtggacccagaggcagtgcataaaaccttaggatagattcctaagggacatgcccaacagagttttaaaatggatgttttcatgatgacaacagaatcatagatttagatttttcaccttgtaagtttggatcaaattttgctggttctttggataatggagttcttgtgttaacaaattacgtgctatatgattttttgttacattgttacaagtgttaatgacattttcattaatggatgaaaacttcagggcttcttttctgtatataacaaattaagtctgtacatatttttgtaccttttatgtaaattttgcacagaaatttttggcataagtttattttctttcagtttagttcagtgcatgcactaataaaactggttgtttaatttaaaaggaatatataagactttacccatgttattttcttggtttttatttcagatgtagattttgtttttgaggtaaattcgttcttcagggattgaacactattgttagcaagtgcctaaaaaagatgtgaaacagtttacatatgtcaactgtaacagtaggtcccaaatgggcccattcccctaatagttttatttttaaagaaagccatacatagaatgcttcaagctatcttgctatgcacattatacttgtactgttttgtgcagtttgtctactttcttagtgaagtattttttgtataaaatgttacaattgtgtttcttaaattgagcctaagaatggagttaattggaaatatacagtatatattaataatgtacatggtgtttaaagaatggtaagcattgttaatttctgtaatgaacattttcaattaaatttatcttgtttgtgtttacacaataatttttttactgtgctaaaatctgatggaaattttgttctctaggaaatacagattttaaagtgtatgtgttttttcaatgctagttaactctacaagatagataaaagtgtgggattttttttcttcccaaaatcatagatgatatattgtttaagaaaggtaacatataccataattttactatggttatgctggcaaggtgagccatagagaggcttatagtcttcagtaccctaacagcaataaaattaaaatgctctgtttgttacatatagatctgttatgagacatcacctgctgtaaatagcaaggagagagaaggaactttcctgctaatattcgcagcactataacattacatttcagaatagccatatcaggaaaataatgtcgagatatgtacttcttgcctttaagttttaacagccatttaaagtaagctttgtgctccagatattctagttggaactttttctgattttgttaacttaagttattctgagggaggcagacctgcttagagtttcattattgccattgcagaaaatccaaaacaaaagcctgtatcctttattttttgtgtgtggctttccaaagagggctttccaaaatatgattttcagtagttcgaggttcttattacaattgaagagttagttttagttttgcagttgaatttctgtgtgaggaatttgttttattttttctagtttgtccatctccactgaaatgggtttcttactatttggcaagtacttaaaaaacataattcagttttcaaagaatttatcttgctaagtattcagtaacacaaattgaaatgtaatagtttttttaatggaaaatattttcattggggggttagcaaattttttcaataaagggtcagataaataagcttcgtaggccttctagtttctgtcctaactactcaattctcataatgcagaaaaaaaccatagacaatatgtaaatgaattagtgtggctatgttttaataaaacaatttat

SEQ ID NO: 2032 - DNA, 338 bp, Homo sapiens
gaaagtgttgtcaacatttttttcctattcttttcaagttaaataaattatgcttcatattagtaaaagatgccataggagagtttggggttatttaggtcttattgaaatgcagattgctactagaaataaataactttggaaacatgggaaggtgccactggtaatgggtaaggttctaataggccatgtttatgactgttgcatagaattcacaatgcatttttcaagagaaatgatgttgtcactggtggctcattcagggaagctcatcaaagcccactttgttcgcagtgtagctgaaatactgtctatctctaataaaaacaggaggaaac

SEQ ID NO: 2033 - DNA, 2986 bp, Homo sapiens
gaatactgtagagtgccaattactgtacaaactgggtgagcactactgcatcattgttcagctatcattgcttgcacgtaatttcatttactgtgacacttgcttctttgcagattttgcattgacttgtgtgtacagagatgaaatgtgcattctgaatgttgcatattttaaatttttcatgtgcagtatggctcggaatatgtttggccttttgcatgtttctctacaaaagagaattgagttacctcacagagaacagatacatggaagtggactccttgcctgtagagcctgcatgcttttttgtttttttttgttgttgttgttttttcttaagttatatttgtttttactttttaaaaaagaagaggaaacaaagcccccttttagaaactacgtctgtcatactgggagctttatcactgcaaattggaaagccatcttatacaaaattattcacatttttcatctacgattcaactaatcgaaggattaaactaaagaaaaaactaagaagaacaatgaacctttgactttgagaaatttggttattcactgacataattattgggtcatttatagttacattttataattttcttctcactattaaatttatttaaattagcaagctattagtgctcacccagaggggaaggtggtggaaaatgtgcacacactaccttcagaaatgcttcagttaattactttgaacactacctttgctgtaatttcatttgagattttctaagggtagaatttggtctcaccaacaagtgaggatatagccttatctcatggaggacgagctccgtatttactcaggagcagtcagggtacattacataaaacaatggaggatgcctcattttagcaaactaggtttctttgtattcttcagtccttttacagaattgatgtgctaactgaatatcattgcagcaactagactaagatattcaagatctctttattggggatgggagaaatagggaaagaaatgtgtataagtaattatgatattgcaaaagtgatacttagattttacagcctcagtagtctgcccagtgtccacattaatgaaggatccatgtttgtagtgagagaaaaaaaccccaaggtaacccgatatgatttaggatgcatatcagttctaacaattcaatcagaagtcaagctcattggaattccttttttaactgatccaaatactagtagaagggggagggagaggtgttgggttttttttttaagtttttatttaattttgttggttagaatttttttctgtttttggcatcctacataataccccccttcttgactttttctgataattagctgatattcatggttgtttagcacacagttcaggacctttgagatcatgtttgtataagcactccttgaagaatatctaagctttttctgagatgggcttttaaaattataataagggaagtttattttctgcggtttttgcaagaataagcaaagcccatggaatttaatttttcattgtgatcagattaaaattactatttgtgcaaaacaaattccacaccacatgtactgtatattctaatctgctgagaaaggtggtcaggcccttctaaatgcttaaccaaaaacaaacattattggagtttcagtgtaaaataaaattaaaattggagggttggttagattgatttcagatggatactaacagtttgaggggaggtccagatatttccaaggcataaattcttgcctggaaactttggagcaattaattaaattaggttaagttttccctcagcaacctgtgtgttcaaaggttaggcacaccattgctgttactaaaatacatgcactgctcattcttgacatagcttgggtgtgggttcctcttgttttggttattttgtgtagcagtttaatcagtggataactgagcctgtttcctcttagctttctagacttcttaacagaaaaaacagtttgggttcaatagcattttatgattctacaatattttgtcacctagctggaagttgcaataaaaattccttatgaaatatatggttttcatctgtaattgaaggaaatcatagaaagtttgctgaaagcaaagggctaagcttatgaaggaatgcctcctttgttacacactcaagaatttgtcagcacacaattaattgcagccatagtacctttttgcgtaatgtttgggatattcagtagcccaggattgctacaaaaaggtcctttgagaaaattaatttgtgcttgcttttatcccctctcagaaagacatcactaaaggcccattaaaaatctggccctaaaagttcaacttttgtagagtttattgttcagagaggtttaatcctatgtggtagtctatataagtgatgtatgagttgagttatgtaaattttgtcattgtagtgtacatggagtgatcattttactaacataaatattttctatgtgtgtttcagtggatgacaatcgagcagcagaagaatggtgtgcctaccctttaatgctgcagtttaagagaacttgtattgtgtcatttcagattgtaggctgagagttgtaaatagtgaaaatttgagtacttctattatttgttttggttagaaagtgaatttaaaaaacaaaccaaactctaaactttctcagattaaaagtcctgagacctgaagattgtaatattcatgtctgtgaagcttttaaacattacacttgagatcagtcatgacttgatattcaggtaaattttcttttccaagaagcttttgaataagcatatttcctccaaaggtctctctctttctctctctttttttgagtgtagattattttaaagcactaattgcattacattggtaactgcaatataaaatagccattattgttttgtgaagcatggttgaaattagctagtggtcccttttgaatttcatgagcctctcaaaaaagaaaaacttaa

SEQ ID NO: 2034 - DNA, 693 bp, Homo sapiens
ttggaaagatggtagccaagagtaaaactgttctatagaagtaaccttttattttgcattaactaaatctgcttttataagcttatcaagcctttcaaatttacagttaatggagaacaccgtaatttgagatgtcagaaaatgcatctcagatggagaagggaacttgcagagtccttctctgaggctaagggaagttatatattatattctggttgttccttgggttttaaacttggaaccaagcagttttcgtttttaaaagtacagtgccttatttatcctttttgtttttaaatttacaaaagctaaaaagctgatctatgtgattaaaggcttgtattttatacttgatgcacaagcacttgtactgtagccgagaagaccaccatcatgcacataaaaggagcttttcagcagccaccctgcagcatctgcccacgaacagatgcccttctttgcaaaccccagcagtgaacttccctctctgtcttgtttgtttgtttagatgatgtttgaaagctaaaccaaatcattttatggtatgcagaggatttataattataaaagattactatttctgttacccccttttaaaaaagatcatgttcattgttggtccctcctctcacctttgatgttttgtcatttgagagcatgtattctaaattatgtgcccatgggacaagagat

SEQ ID NO: 2035 - DNA, 1622 bp, Homo sapiens
cacgcccggggtggccacagcgccagcctcagactggagggcaaggggttcccttgagggctgcagttctactcaggctggtggagaactctggcttttggaagcgagagtaaaaagctaatgacgaggaaccgaaaaatcgcgagtgtttcgcgggtaactggggttgagggccaaaatatttggaatgaaggactttggccctatttaaggcagattttacagagcgcacctcaaacgtacaagtcagtaggactccttatttggcgtgacccgacctggccgcggagcctgcatttcctcgcagcctctcagtgccctccagccccgcgaccatgtggccacaatccacgcttctccggatcgcggtgcgccggaaccacggaggatgatgccagttacttgctttaccttttcagggctggctcctgatccactttgggggaggagaacatgagtagataatttcagggtgcagcccaatctgccagacttaaaaaaaccatcttgtgtctttggaggtgctgcttaataccaaacatgcggtgccatgaagggaccctttgggggttgaataggagttaacccctgcgctctctttgcaactgtctctcttctcagagtggtgggggaaggctgtacgacacgggtggggaaaggaggtgggggcggggagtattgaatggtggtggaagggtagagaggcgcggagtgaaccccacgccctgtctaaagtgtattttcagagccggcccgcctctcctcggttcaaggtcactgtttcctgggcacgcactgggttgcgggacagagtagccaggttctgccggtgctcggagaagagcgcagtgttttgcaagtgctggagtctcctgaggacacgcgcgtcgccgccaccgcgggtgtgggaaagcgcggacgtgctgggcggctgtgcttcggtaggcgaccaccgcccctggccgcgctccgggctttcacggaaactcccgagaccgggccctgggttcctcctctcctactcggctctgcagtcctactcaagcgggtggctctgggatcctgggggcctgggttgggggctagggagacgccatgtgatggacactccagggacacacagcctagcacagcagcttataatgggctctccggggccatttgcaataacagctgcaattccctggatagacgagttgatttcctccctctgcccctcccccagccatgccagctggcctttgtaagtgcaggaaaccgagtagaaaatgtgaccctccaaatggagaagctgcaggctttgccattgtgaaccatggtgaagtgcttggaacatactgttcactcactctaaaggcgctgagactgtgctgttgttctcgtttttatagtcaatggcttgttcatcatccagatgtggctactgacatatctacacttcgcaccggagtgtctggaattgtggctatcctgattataggattttaacttaactgaaatgcctgctttgaataaatgtgttgggttttttgtttggttttattttatacttgccatcagtgaaaaagatgtacagaacacatttctctgatctccataaacatgaaaacacttgaaatctc

SEQ ID NO: 2036 - DNA, 916 bp, Homo sapiens
aggccggcggggaggatactgtccccaggagcaccctccctgcccgtcttgtccctctgcccctcccacctgcacatgtcacactgaccacatctgtagacatcttgagttgtagctgcagacggggaccagtggctcccattttcattttagccattttgtcgcctgcacccactcccttcatacaatctagtcagaatagcagttctagagcacaggttctcagtctaagctatggaaaagctccccttatccaacagagtttaaaagtagtgacttgggtttttgcgagtgctttgtttactaaggactttggggaggaaccatgctaagccatgaccagtgaggagaagcaacagagcctgtctgtccccatgagcggagtctgtcctctgctcttctgcagtcaggtcactgcctactgcctgggggctctagtcattccagtggaagacgaatgtaacctgcgtggtgatgtgacaactgtttcctccctgaccccagaggatctggctctaggttgggatcaatcctgaatttcgttatgtgttaatttacttttattaaaaaagtatagtatatataatacaaaacaataacccttctggggtttcttgtggcggttgaaatagtcccacatgtggtcatcagaaaataagccattcctcataccaatataggatcagctccttgacctctgaggggcaggagtgcttcctggtgtgtgtattagaatcccttcctgccttgtttcatggcagtgaaatgcctcttggtcctgtccaagtgtatctttcactgatttctgaatcatgttctagttgcttgaccctgccacatgggtccagtgttcatctgagcataactgtactaaatcctttttccatatcagtataataaaggagtgatgtgcaat

SEQ ID NO: 2037 - DNA, 476 bp, Homo sapiens
gctggactgtgtcagccacgactcgagcactcattctgctccctatgttatttcaagggcctccaagggcagcttttctcagaatccttgatcaaaaagagccagtgggcctgccttagggtaccatgcaggacaattcaaggaccagcctttttaccactgcagaagaaagacacaatgtggagaaatcttaggactgacatccctttactcaggcaaacagaagttccaaccccagactaggggtcaggcagctagctacctaccttgcccagtgctgacccggacctcctccaggatacagcactggagttggccaccacctcttctacttgctgtctgaaaaaacacctgactagtacagctgagatcttggcttctcaacagggcaaagataccaggcctgctgctgaggtcactgccacttctcacatgctgcttaagggagcacaaataaaggtattcgatttttaaag

SEQ ID NO: 2038 - DNA, 680 bp, Homo sapiens
tgggcccacggacccctgggaagaggccccgcctggagcactaggcccccaccctgctgctgccttccagtgctgtcattttcttcaggggccctcccctcggtgtggctggtgggtgagccgtgaagggaccctgcctttcagggcactacgcgccaccagttcccggtacccagggagcaggcagccacacacgggccttgcaaccttgtcagagaaaaggcgaacagggccctcaccctgcctgtctcccgaagcaggttcgagccacaagggccaaccaggaggcccctggagcccagatctgtcatctggtgctgccagctgtgctcactctggttttctgctcagggtctgaagcagctgctgtctccctcctctgcccccatcccctggctctcccctgggcacagtgccactcccttggaagggagggaaccacccgtgagccccagggcttgggaagcctgaggcgggcctctgcctctccctgcccccagcacaattggcagagatgaggcgggtggtggacagctgggctgtcgtggcagggtctgcacagggccatgtcctggctgtaacccaggcagtgggaggtctgcagcctggtcatggcctccacagcaggtccctgtggacagacatatctgcatatttatcaataaagccttttgctcctt

SEQ ID NO: 2039 - DNA, 157 bp, Homo sapiens
atgcgtgccccagcccagccagctacccagcccctctctgtgtgcagccggagggtcctaagaatggctcccggagctaactgagggcccagccttttttctgcatgatccaggagcacataccacaaactaccacaataaaaaagctgtttttgct

SEQ ID NO: 2040 - DNA, 1137 bp, Homo sapiens
gggcaggcagggtccatggctggcctgagcccatctcagcctcctgccttgcacttgcagcctgaagcggagagcacagggggatgagggtggcaggcagcggggagccgatagaggctcctttgcctgctgtggtcctccaggcagcctttcacaggcacgcccatgcatatctcctattctaacggcccctgacctctcccttttggatcctaaactgtgtctctggtctgaagactgggaaggagcaatttctcaatttatctttctactgtggatgctttcctacgccctgaggcacatgaagtcagaaaggaagggcagaggggcaagtaggcacagtaagggaattttcttttctttttttttttttttgagacagagtttcactctgtcacccaggctggagtgcaatggcatgatctcgcctcctgggttcaagcgattctcctgcctcagcctcccgagtagctgggattacaggcgcctgccaccacgcccagctaatttttgtatttttagcagagatggggtttcaccgtgttggccaggctggtcttgaactcctgacctcaggtgatccaactgcctcggcctcccaaagtgctgggattacagctgtgagccactgcacccggccgggaatttatcaaaggggggactacttagatttggggcttcaaacctgagtctagcacaatgcagctggaggccagggctactcctacaaacccaagttctgactccttccagggaagtatcagcttaagaaacttgatcaggaaagtgacactggtctttcaaagagccctctttaccctcccatccctgccctccacactgcaagctgcattccagccacaacgcccttttctaaatctattttcattcatctcctattctggtctgtagccttgattccaaccattgaatgcacggagacagcccagtggcttgtcagattggtaaataatgacacctggtggataaatgttacattctagaagactattctggtcagcctaggtctgaaacactaaggagacttggcctgagatagggccatccacttgcctacaggcactctgcttttattattaaaaatagtcactttgttactataataaaatttaacag

SEQ ID NO: 2041 - DNA, 364 bp, Homo sapiens
atctgtgacttcttggaagccacctaaccatggatggagacgcccctgcccccagcaaggctggctcacacacacgtctgttttctctcctatggggccatctatgcaggccagggtgagatgctgtgcccaaatccctactttcttaggctcctcacggggattatgggctctttaaactccatgagtggggtctgccacagaagatggcccctgttggagggagagctgggaggacacagcgcaggtgagatagaccctgaggcccctgaagacccaccaagagaagacagatgggagcaggcaagagccccacactgatgtcattgcctggaacggagccaataaagctttgtgtgccttc

SEQ ID NO: 2042 - DNA, 2688 bp, Homo sapiens
ctccagaggcaggcagaggaaatattgtcagagactggtgggaggaagcctggggagtggggtgcaggaaaagccagagaagccggtggagagcagcacctttaagagccctctctctctgcttgccaccctgctcagagctttccacccacagggagaagcacaatcaggaacagtgagtgctcctcgcccttctgatgtgggggaggctggagctccatgcacgtagtccagatgcctgggaaggaacatctcccttccagcatctgctggtagcaggctgggacagtcccttccttccctgaaaccctgctctattgcaattccctattatattctgcatcagaaaaacaaacaaaacaaaaacaactttaaatgcttgtagcagaaccccgggtcatctcatgtcagaaacctttaatccaggcctaaatttgcatagacctgacattcagctgccttgcagttgcttcctcccatgagccaaggtggtgtcagagggcaactggatgactcgcagtaccacagcactgggacagacagaagccacacctttcttttgggtttttgccaagcctcctccatctcccatcagtgctgtgggctggctgcaagcctcgaaacagttctcctggaagggaggtttttgctttacccccgccagcacttccgcacacaatcatagagaacctctctgctctctgctggcctacagcttgtctgtttctcaagcagaggcaggaagagctagtcttagcatttatattttaataggaagttgactcccagcatgtaaaagtgatccacgcagccggagtgtatgccgggagctaagtggtctatgggtgaacatatcccaccttgcttcctgagtccttggtcccaatcttctcatttgttcctctcgttttaaattttttccccccaactcttttgatgtaagagttcagtttgtcttcgggagtgggtctctgcaagggctctgggatgagtcttggcttccaagaggacaggctattaggttcttggacttttttctgtgctaccgctgctgcttggtggaagtaacaggacgtggattctgcctcataagtggcagtttcccttttctctctgacttgtcctaggccgatttctctatggcttccctgagaaaggtgaggcccaaaggagagaggccttcaaactgtcccaggtcctgcgcagctcagtgcgtatcttcttgcttccatgtgtcttttcccctgctgcctcactccccacccccacttgccaggtgtttgagccatttctacaccaaagcaaagtacggcctcaggagggagtaaaaagggtgccatctgtgtctggaggggcagctgtgttcatgccctgtgctactggacatttcacaattctggcaccttgcgattggtcagtcaacctcagaaagtaactatcttgaaggtttgaaaaacaaccaaagaaagggagtgaggactatggctgcatgtcctctgcttgcccggctgcagagcagagatgtgcagccctctggtcagctggtccaggctggtccccgccggtccccttccagtccagccaccaagagtccacttgtcccgggcttccacctggctgacaggaagaatttctgagagctggatgtgcatgccctgtggacgaaggtacagctcgcctgcctgccccaatcccagccccgacaatcacatgcagctgactcggacactggccttgggaacaatgttcgagagaacacttgccccttgactgtaggagccagaaggggacccaggtgtgcatagctctctgtagacatttttacccaaacctgttggtaaagtgcccatctggtgctcaagagagcctgggggtctaacagggagcccggctgcctcacctggccacagcctccacaccagatctccacattgtcttgatccagaccagctctgtgatcagaaggaaattgggtccagtgtaggagagagctggtcctgggcctggcaggcaagagtgtgggcatcctttcctggcctttctccactctccctcaagcctgtgctcaggttgccttgaatgtggactctggaagagccaggggcccagaatgccgggggaggcttctgagtggcactcatggaacaccgtccctctgccagccataggccctgcctccagtgtcagggaatggaggctgggctgcgagagtgttgctgccccctgtgtcattcttctaatccaatgtagaaattgtacgtaatgtatttaaatcaacgcaaatgtatgaataacaaatacagttctgaccttttttgtccagtttctttgggggaaggaagacaaagaaggtaggaacggaattttgagggcaaagaaacctgtgtttccatggaattgctgagacgtggctcctggggctatttctccctaataaaggatgatccaggtcctcatttccaaagtcccaatgctctgaaaaccaaaagtattttcataacccatttgaaaccaaacctgacctgaacttacactgataggaagctatgggtaattatgatgtgttccttttagtgtgattctttgttgcagaaatgtcaatatattttatgacatggttccctactagggattatacagtatttgctgactacttcctaagagccaaaaataaaaaatctgaattcc

SEQ ID NO: 2043 - DNA, 1595 bp, Homo sapiens
gaagagaggccagggtccaaccaggcacccgtccttgggaccagcagtagaccccccactctccccacccctggcccactgtggtgtgtgctgggcaaatgtggcctgaatgctaggtaggcttccccttccttcctcactctctccagctggattctggagctgttctccatccatgagagtggctggcaatggctgctctcaatcccttgagggagaagagcccctggagggcctggcatgtttgtcctgctctgcctgggactgagcgagtggacttagggctgggcaggcagtagccaccagagggcagcagcgaactaggccaggcctgactggggtctgaagatcagggtcagtgtggctgtgcctgggaattccagacctgaggttgggaaaagaggtttttctcctgcagggtactgggccaggccctcagcctcagagagcctgcagaagggcttgggagtgccacaccccatctctgctgattgaatgtccctccaggcaccaggatctcatcatttccccatcagagggtgtggccaggcctaacaagaccatgggtgcttctagaaacagggttgaagttcccagattccctgagaggagaatgtgtataggagggtttggctgagtccttcagcgttaagtggaggaaagcttggggaagccccaatagctggacagacctcggcctcccctcgaagacacctcaattcacagactctcagcccacacaatgccccagtgtccccagctccgctggagcagctgcagggcacttggatcacaacttctgcaccctctgtccagagtctagggcagtcctccactggcccagcactccagtttcctttccctgcctcttgtccaatggagtgggaggccaggtgagtggagcagaggtcctgaagcccttgacccctgggggcctgggtagtgtaggatctcgctgggctgggtcctggattccagggctattccctggaggacagtctcagttatgggataaggccccctgggggtctccatttctttccaacagtttcatgttcactactggactcttacgggctcagtatctctcccttagccatgagctggctcaggcatcccttcccttccctggagctgccctgcctttctcaagtatttatttatttattgcatggttcctgggaacatgtggcacaagtaatgggatgaggaggaattgggggtgggggtcttctacctaggactcttccctggagtcatgggctgcctgggacccaggacccatgagggggctgagaggtttctacactcgaggagcaggggtccagagaggcaggctggggaggcaagggacccatcctaggcccgctttcttgccgagccaagcagcttagctggggctgtgcagccaggggcttacccaggccagtggaggtgccacagccctggggagccagacaggctttggtatcgtatcgcctctgtgtccttttaagagaggagagttcagtaccccgtgctttctttacactggagaggaactaaaaggatctctgtgtctatggagaattgtcaataaaaaggcctcaagcttc

SEQ ID NO: 2044 - DNA, 2324 bp, Homo sapiens
ctggccgagagtccctgtagggaggtgtatggccggagtgagggccttgcagacctgcggcggctgcgctaccagagcacccgcttctgagtcattctttgggctcaccctgctgcccggggtgggagggagggtgacgggcctcatatttcctgtgggccatcaacctatgccccctgtccctcacccccgtctggatcagtccatttcctgacctgggggcttttccttcccgatggggctggtctgggccacacagagacagatcttcctaggaaggctggggtggggagaacacaacctaggcggcccctctcttccacagcccctctcccaaccctgcgaggggggccgaggcctgccacatagaggactcccacactgcatgacccctcatcccaaacccatatccaccaggactctttcccttgggccctgcgtcccgtggctgtctcccagtatctgttccttctcatgcccctgcagggccccggcctgtctatgatcctgcctccaccaaattcaaggtgtggggagacgggtgccgtggttgggagctgttcagcgcactcctgacctcttctagacctatggctttcctgtcctgcattcagagctagaggccagctcggccttgcgagaagcatccaactttgagactttgcaggctgccaggtgctggttggggggcacagagcctggggctctgggaggtaatatgggggtctgggaaactccgtgaagagacatagccatgcggggcctgaatctcctgaactacagccagtttcctgagattagaacctgtgtgtatgcacatgtgaatgtatgtgtgagtgcacatgtgtgtaagtgcagtgtgcgtaaatgtgtgagtctgcgtgtgttagcatgcctgtatgtgagcgcgtgtgtgagcgcatgtgtgtgcaccagtgcacaagtgtatgaatgtggacacatttataagcacacctgtgtgtgtctgagtacatgtgcacacacgtgtgcacaaatgtgcatttatatgagtgtgagtgcatgcatgtgcatgaacatgtgtgcacaagcatgtgtgtatgagtgttcatgtgtatgagtgtgtgtgtatgcaggtgagtgcatgtgtgtgtgagtgtgtttgtgtgttccccttggctgccaggccaacgactgcttctctgcatcctgctgtcttcgctacctgagggtctgtgacttcttccctgtgtgggtccagcctgaccccctgtaagtaaatgtccaaaagccccttgcccctcccctagggctaccagggaacatactctactgcatatgttctagtggaagagaagccggggttctaggaaagaagagccaaactttggtggcctttggtgccccctctcagctccccatgacaagacaacggggctgcagacactgtgtgttcagcctgcccaggggctggggctctttaaggctttgtaggtgaggtttccatggaccttcaaaggtgccagcagcctgcaggggaaaggcaaactccctccttgcaaggaaaggagatgtccagccaatgatgcccggcttctgaggcccagaggagcaggtgggatgggagcagcccctggggctggtgtcccgaagatgaaatgaagggggctgcctatctcagttggcgggaggtgttagaagtggatgtgcaagaccagccactggaggtagctctctggagtcaaagagaggcctgcttttctaccagacatgggagcagcatgtaggatacaagggcctacccagagaccagagagagtcagcctagtccttgcagcctcaggaagtcctcggcccaagtgagtcctggtccaaggatccccctggagagccgcagttcagtgggctccaccgcagcccctggccacggcctatgccctccctgggcccctgtggggctgggcattgtgtctgacctgtgcatctcccatgggagggctgggcacaggcagtgctatggccttttttttttttttctttttccaataaaagaacttgcccagcgtgaagctctgtgatgctttctctgccccgtgacgatggagggtcagttctatgctccaggaccacatgaggggatactcagctgcctgaactggacctgacatggggagcaggatgaactctgtcttcttggagcttgcagtctactgaagaggcagacacctcagcatctctaatctggaatctttggggcacttgtagccttgggtgggggaacaggttggactgaaagcgaggccaaaagtaatcaattaatgatatcaataaatcctcatttcttg

SEQ ID NO: 2045 - DNA, 739 bp, Homo sapiens
acatcactcaatgaaagggataattccatgaatcagaaaatgtttccatagccttcagataagatgatccttccagagctctatgtacatgcagatgtgcatgttaaagagataaagtgatcgagacaaggactgactgggtatagaaggaagacagactcctgtcttcactcctaaatgcagttctttggaatcaccctactgtggtgggcgtagtagggagccatcagctaggaagaaacgtgggagatgtgaattccaagagttgcctggacagggcaagtcatgttagcgtgggtcacacttccaagatatttaaagcaaatacaaaacagaacagaggattcaaaccgcaagtatgggagatttaggccctgcagaggcagaccattccttagtatctcacaaagcagagtaatactggaggcagagtagggggtggttggagagcagttagtacaaagaggcagaacagtgtctggtttacttggcatacacagaatctgcactgccggttccagaactgcaaagttggtgaactacaggagatgtgggtatttagactccaaagtttatactgagctcagtgcctgggaccgctccagctgcactgcagccaggggggataccagcttcattcctcagagtaaaccaaccttgggagctgtgtgccagttccagtgtaagcagtaataccatgttgtaagagggaacattaaagcccattttatgacatata

SEQ ID NO: 2046 - DNA, 2812 bp, Homo sapiens
cagggcaaagccagcattcactgggtgtgtgaaattccagagctttgggggagaatccaccctcccatcatctgcttcccccaaggcctcccacaggtgacagaatgttctgccttcccttccatctcttcacccctagctgtcagtttggcagattttccctcgttacctccagttcgactcagaaccttgacatggccataacagaaggaggtgcctctgatagaacatgctagaaatggtcttttccacagcatagtctgggactggaaaagagatgtctgactgcaagctgacaatgccactctgggacccctgatgctcttctttgttctttgggtcccctgatgccataggagacctatcgtcttggaacttgccattctttcctccagaacaaaatgttaactttctaacacatttcatgcatagcttggctcagaaggtgccattggcagacaggcacatgggaggctggagtaggaggtctgaagattagttcaggggatggaccaagaatttcccccagagctttaaagaagtgggactcagccatgttggcgcgtgattgacattacagcacagaaaactgttagtgactggtttcctgttagataagggttccagcagcctggggcagtatgtctcagctggaatggaaagaatgtgagatggaacctcaagtcactgtttttaccagggacacatctgttttggctcccaatcagcagtcttcaatcgatcaataattctgctctggaagagaaggaacagggagcagagagacccaactgggagccagagatggaacttcaggtcttaagtgcaaatcaaagcaaaaaacaaacaaaacttacatggaaaaactgtaagtgctgaaagcaagtttagccatgacaaaccaaagagtgcccaggtcagccaagaaagatacataatctcatgggacttcagtgggagttacacaggaatgttgaagaatcattcttctttttcatgcatttgtccttctcccacccccttactacaccctagcagatcagctgagtgtactttattccaagaacttactggatctctggtttttctcctgaagttggggcaggtgcaattccaagcataaccaccagatggcagagtgaccgcgcatacctgcttccaagaataaaacagttctgaaaagcaaccgcaaagccgggcgcggtggctcacacctgtaatcccaacagtttggaagaccgaggcgggtggatcacttgaagtcaggagtttgagaccagcctggccaacatggtgaaaccccatctctcctgggcatgtagtcccagctactcgggaggctgaggcaggagaatcgcttgaacctgggaggcagaggttgcagtgagctgagatcacaccactgcacttcatcctaggcaacagagcgagactctgtctccccccgcaaaaaaaaaaaagaaagaaagaaagagaaaagaaaagaaaagcaaccacagccagccttagggaaaacttggaagtaagtgaaatttgtcttcagaataactatctccctttctgatctgtctcctactctttagatgttctcagtcaagtactcactgaactcattgatcgagtgctgtctgctaaatctccaaaccattcccaaacctttccccgtagtataccatccagcttccctccccttcctccaaaaccctccctcccacctccccacacccattgagtcattcacaggcaggagggagactgatcattcctctgggttatctgcatctcaaaagaaaatgcttacccacaggaactgttaactcaggggttcttaacttggggtccatcaccccagggggtccatagttggacttcagagggtctatgaaacccctaaaactgtcagtatttaatgtatttattcttgtatgttttttccagagcattaaagctttcataaggttctcaaaggtctcagacctacaaagagttaaaacaaacagacaaacaaaaaaaaacactactattttaaatagtggaactttcagcccagcgtttctgcaatgcagagtgaagtggatactgggcagttcgagacaggtttttaatcataagtggtcttttcaaatgtccatcaattgatggggaaggctggcacccaccaagaagtggaagtcctcagaaattctcggcacaccctagagtattgtacaaccaacacccccacataactttgtcccctcttccccaacaacccagagcaggtgttgcagacaggagggccacagcgtgtggaagtaaagactttggagctagagaagccttttccagcaatgattattgacttcaccacaccccttgcctggcctggcctgaggctcagcagtgcatgacttctcgtagataacttcacagtcatccagtcccaacacctgctcttgcctggtaggaacaggcgaagtgtcagccctcaatgttgggtacttagacccaaaccaataaatggtgagttttgaacaagaactaccatcatgcaggcttcttgcccagctgaccactggccccggggtgcctgcctggctggtcttcatcacctgaggccaccaggctcaagccactgctgttgcattacacccatccctttgcaaaatccctatggagcctgtcaccactcccctccctatatacccccaccccacaaagattttcttcaggttaaaaaaaaagtttaaaaaaaagattttaaaataaagcatttatgaaggcttaataaattgtaaataatttttaaataaaatgaaaatgcctttcctgg

SEQ ID NO: 2047 - DNA, 802 bp, Homo sapiens
ggacggggcgggtcacgcggcgggcaccccagcgcagcctggcgccgcgggactgaagctcgagaagggcctgacctaaaggtcaggtcccctcgttaaaaaaatatgtacgtctagctcctcagggcttcggatcgcagctcactcgaggcctggggaaggggactcaggggcgaggaggatgactgggtccggtcgccaggactgtctctgaggcagaaacgccggctgggcgccggggaggacgatggccccgaccctggcagcgagaggagaccaggaggctaggaccctggccgcgcttggttcttccaaagcgagaagggcttctctccctctgcctttccgcggcctccgcgaagcgttggcggggagcccaaggacataacaaattaaaagcatgaaggagagaaaaatgggggtcgtggcttgagaaattccaggccctaccgatcctctgccccctttgcgggcctggagcgccatagcacagtcgatttcgtttcgcagctgtctcccctccgcagcagatacctcggtccagatctccggattgtcgggggacgcaggactcttcgaggaaaaccagccgaatgagatcaaaagttgggggtggggggaggctgaacaaactcaggacctggtggcccaccggaggtgttaccgggtttcctttctgtttcgtattctgtattcagcacatgttatctatctatctatctatataactataaccacacgccgtgtagacacccgctgccacacactacaggagtcaataaacaaggtgcaatattttcaa

SEQ ID NO: 2048 - DNA, 1021 bp, Homo sapiens
ggctggaccaggactagagaagcttgagcacccccgagttgctgctcattgaattcctccactttcttatatagcctcagatgctgtgatgtctgaccttgtggatatttgcccttggaatttctactttactttctaccgtaattccttctccgtacccaggtcttctctgagagaagctataatttaatctgtgaggaactaaatgacaggagattggtgctaatacgggggaccaagctttgtccaagtgaagcaggcttcgactccttctgagaggtctggtgtgttcctagaatctcaccttttcttcccttgctaaagcatgaagtttggcatttggcacactggaagcctggttgaaatgaaatttgtagcatctgatacaaagccagagacattctagcaagtgcagcagccccttctttctctgtaacagagatatcatttatgtggagatccacaacctttaacagggatccaagatctttgcagttcaatcgaccacataggaatttccaggcaccaaaatgatataacttccttgcttccttgacaaagaagccatcatgggtgtgatccaagatccctgtcgtagtgttgatgatgttagtacatgattttaaaggttagaaccccttctaaatgaatggtctgtggaagattttagtatcttatctgatgcctggtatgatgaggatagaaaatttttccatttttatgtgcctcacaggctgtttgggcattaattttgctttttgagccttaagtgtgttagtaggatggagaaactgtgatggggactgggaacctggatttgtctgattttaggtcactgttccctgggcctgtttttgtgagcccttacacaggaagatataaagagagttctttcatttcactgctaaaatcagtatgtagtatggggaatgtatttgggttgtttttaaagaaaaggggaacagaatcaggagagtgggcaaaggcaataaaatcaaagttcttattaattatttctgag

SEQ ID NO: 2049 - DNA, 398 bp, Homo sapiens
ccagacctctctgagagacatggatatcacaggatgaaggtagaactataatctgcaattctctatgacacagctttaaccttcttctctggccaggacagtcgcaatctttgttttaagtttcacatggccatggagaatgtgcccaagaagaaaaagaatttgaaacagagatacagtcacttcctttgcttagtcttaccagtgattgtcatcatggttaaagctggtctgtgcttcttccatagacagaagcttagtctgttttcagtggaattaattgatgaactgggaaaattttaactgcatggtatgaattcagagtgtgacttaagggtcaattcaaagcagtattttgacttttcatttgtaaaataaaaatttccactattacagta

SEQ ID NO: 2050 - DNA, 193 bp, Homo sapiens
cagaaggccccatgggttagaaaaggactataagaataatttcttatttaattttattttttataaaatacagaatacatacaaaagtgtgtataaaatgtacgttttaaaaaaggataagtgaacacccatgaacctactacccaggttaagaaaataaatgtcaccaggtacttgagaaacccctcgattg

SEQ ID NO: 2051 - DNA, 3897 bp, Homo sapiens
gtttggggtccctcaggttcctttttcaaaaaccagccaggcagaggttttaatgtctgtttattaactactgaataatgctaccaggatgctaaagatgatgatgttaacccattccagtacagtattcttttaaaattcaaaagtattgaaagccaacaactctgcctttatgatgctaagctgatattatttcttctcttatcctctctctcttctaggcccattgtcctccttttcactttattgctatcgccctcctttcccttattgcctcccaggcaagcagctggtcagtctttgctcagtgtccagcttccaaagcctagacaacctttctgtagcctaaaacgaatggtctttgctccagataactctctttccttgagctgttgtgagctttgaagtaggtggcttgagctagagataaaacagaatcttctgggtagtcccctgttgattatcttcagcccaggcttttgctagatggaatggaaaagcaacttcatttgacacaaagcttctaaagcaggtaaattgtcgggggagagagttagcatgtatgaatgtaaggatgagggaagcgaagcaagaggaacctctcgccatgatcagacatacagctgcctacctaatgaggacttcaagccccaccacatagcatgcttcctttctctcctggctcggggtaaaaagtggctgcggtgtttggcaatgctaattcaatgccgcaacatatagttgaggccgaggataaagaaaagacattttaagtttgtagtaaaagtggtctctgctggggaagggttttcttttctttttttctttaataacaaggagatttcttagttcatatatcaagaagtcttgaagttgggtgtttccagaattggtaaaaacagcagctcatagaattttgagtattccatgagctgctcattacagttctttcctctttctgctctgccatcttcaggatattggttcttcccctcatagtaataagatggctgtggcatttccaaacatccaaaaaaagggaaggatttaaggaggtgaagtcgggtcaaaaataaaatatatatacatatatacattgcttagaacgttaaactattagagtatttcccttccaaagagggatgtttggaaaaaactctgaaggagaggaggaattagttgggatgccaatttcctctccactgctggacatgagatggagaggctgagggacaggatctataggcagcttctaagagcgaacttcacataggaagggatctgagaacacgttgccaggggcttgagaaggttactgagtgagttattgggagtcttaataaaataaactagatattaggtccattcattaattagttccagtttctccttgaaatgagtaaaaactagaaggcttctctccacagtgttgtgccccttcactcatttttttttgaggagaagggggtctctgttaacatctagcctaaagtatacaactgcctggggggcagggttaggaatctcttcactaccctgattcttgattcctggctctaccctgtctgtcccttttctttgaccagatctttctcttccctgaacgttttcttctttccctggacaggcagcctcctttgtgtgtattcagaggcagtgatgacttgctgtccaggcagctccctcctgcacacagaatgctcagggtcactgaaccactgcttctcttttgaaagtagagctagctgccactttcacgtggcctccgcagtgtctccacctacacccctgtgctcccctgccacactgatggctcaagacaaggctggcaaaccctcccagaaacatctctggcccagaaagcctctctctccctccctctctcatgaggcacagccaagccaagcgctcatgttgagccagtgggccagccacagagcaaaagagggtttattttcagtcccctctctctgggtcagaaccagagggcatgctgaatgccccctgcttacttggtgagggtgccccgcctgagtcagtgctctcagctggcagtgcaatgcttgtagaagtaggaggaaacagttctcactgggaagaagcaagggcaagaacccaagtgcctcacctcgaaaggaggccctgttccctggagtcagggtgaactgcaaagctttggctgagacctgggatttgagataccacaaaccctgctgaacacagtgtctgttcagcaaactaaccagcattccctacagcctagggcagacaatagtatagaagtctggaaaaaaacaaaaacagaatttgagaaccttggaccactcctgtccctgtagctcagtcatcaaagcagaagtctggctttgctctattaagattggaaatgtacactaccaaacactcagtccactgttgagccccagtgctggaagggaggaaggcctttcttctgtgttaattgcgtagaggctacaggggttagcctggactaaaggcatccttgtcttttgagctattcacctcagtagaaaaggatctaagggaagatcactgtagtttagttctgttgacctgtgcacctaccccttggaaatgtctgctggtatttctaattccacaggtcatcagatgcctgcttgataatatataaacaataaaaacaactttcacttcttcctattgtaatcgtgtgccatggatctgatctgtaccatgaccctacataaggctggatggcacctcaggctgagggccccaatgtatgtgtggctgtgggtgtgggtgggagtgtgtctgctgagtaaggaacacgattttcaagattctaaagctcaattcaagtgacacattaatgataaactcagatctgatcaagagtccggatttctaacagtccttgctttggggggtgtgctgacaacttagctcaggtgccttacatcttttctaatcacagtgttgcatatgagcctgccctcactccctctgcagaatccctttgcacctgagaccctactgaagtggctggtagaaaaaggggcctgagtggaggattatcagtatcacgatttgcaggattcccttctgggcttcattctggaaacttttgttagggctgcttttcttaagtgcccacatttgatggagggtggaaataatttgaatgtatttgatttataagttttttttttttttttgggttaaaagatggttgtagcatttaaaatggaaaattttctccttggtttgctagtatcttgggtgtattctctgtaagtgtagctcaaataggtcatcatgaaaggttaaaaaagcgaggtggccatgttatgctggtggttaaggccagggcctctccaaccactgtgccactgacttgctgtgtgaccctgggcaagtcacttaactataaggtgcctcagttttccttctgttaaaatggggataataatactgacctacctcaaagggcagttttgaggcatgactaatgctttttagaaagcattttgggatccttcagcacaggaattctcaagacctgagtattttttataataggaatgtccaccatgaacttgatacgtccgtgtgtcccagatgctgtcattagtctatatggttctccaagaaactgaatgaatccattggagaagcggtggataactagccagacaaaatttgagaatacataaacaacgcattgccacggaaacatacagaggatgccttttctgtgattgggtgggattttttccctttttatgtgggatatagtagttacttgtgacaagaataattttggaataatttctattaatatcaactctgaagctaattgtactaatctgagattgtgtttgttcataataaaagtgaagtgaatctgattgc

SEQ ID NO: 2052 - DNA, 824 bp, Homo sapiens
gggtttcctctgccccctccttttcccactggttcttggcttcctttagagaccccggtaattgtggaacctagggaatggggaacccgctctcccagacctagggatcctgagagggagagactgcaatttctccaaagcttgccactttccagcctgtttccccaattcctctgtgctctcctagagctctgtctgaatcctcgcagccacacctaggtctgagaactcaggctttgagttactgatcttccttggattaggagaacaggtgttcctcctcccctctcctagcagccctaatgtctgacctagcctatcaagccttaggcgctggaagaacccttctcagacacgcaggacccaggtaaagtcaaagctttgcccttttgcccactgtctgctaccagggctcacccactgctgcacctctcttctgcacagctcctcccctgctacctgctgagccagattccccaggaatcttgaatgctttctctcctcttctccctttcctttcccagaaaaactgaggaaactggccccggaaaagcatgtctttggggttggttcctagaggcagaggttgaagatggaagagggagctctggagtgctaacttgaacaccaagggtgctactcatccctatggtatcatatcatgaatggactttactagtggggcaatgactttcctagacaataacccgagggactccagatacataccccgaaggtctaggaaatacgttaagggcagattacagtcatttcctaccctttaaaggtaacttctcccttctcctgacctacttcctcctagc

SEQ ID NO: 2053 - DNA, 5787 bp, Homo sapiens
cctgccaggggtcaaggcctcctgccaggtgactgctatcccgtccacaccgcttcattgatgaggacaggagactccaagcgctagtattgcacgctgcacttaatggactggactcttgccatggcccaggagtcaggtgtttggagcgaggcagggcagttggcactccactcctatttggagggacttcatacccttgcctcttgtgccccagcaccttctctctctgccccccgcctaaagtcctgcattcagtgtgtggagtcccagcttttggttgtcatcatgtctgtgtgtatgttagtctgtcaacttcggaatgtgtgcgtgtgtgtgcatgcacacgcatgtatgtatctgttccctgttccttctgggtcaggctgtcacttccggctctcagccctatctcctgcaacctcagtgcctcagcctgagagagagatgagatgctcttggactccccactgcatctgggctgcagggccagagctagtctgaccattaggtcagtctgcctcctgacagtttttgcgtagtcaagctctaggcggtatgggaatggctaccgggactctaatggggtgaaagagaggggaggcttgcctttgagagcctatatagccttcctgtgagagaggattagatagggttccaactgggcctacaagctcaagccatacataaaaggaccttgggacataagaaccaatgattgtgcataagttctaaattagagacacatatagtttctctctttcagcaccagctcttgcccctatgctgggtaccaagggagttctcctagctgtggcttctctaggttctaggggtgcaagcctctgtgtgtttgtttgtgtgtgtctgtgtgtgcgtatccacactaggggtgcaagcctctgggtgtgtgtgtgtgtgtgcgtgcgtgtgtgtgtgtgtgtccgtgtgtgtgtgtgtgtgtgtccacactggccagcctccctacttaccaaggttctccactgcttaccttttccagtgggacagtacagtgtgagcccccgggaagtactgcctgacctatcctaagcttttacacttggattttagccatcatatgttggccaggtctcactgcagcctgcccgaggctaactggctagagcctccaggccctatgatgctccctgcccaggccatatcctttattcctgctgagcttcctggctgaatagatgaaatggggtcaagcccaggcagctcattcactacctgtgatccacctcagggcacgggcaaacacataggcttgcgtcttaaagccagctcctctgccagaccccgttgtaatgtgccacaacaccctcaatagtcagggcaactggtggagcatggaagtcgaatttccttttctgttaggagctactcctgggaacccctctcagggctgcagcttacaggtgggcagctgtgattgcacaacttgaagggccatcattcacatctattcagtgggagtggggtccctgggattgggcagtgtggtggccctgtgtctcctcacctctgctcctgtcttcatcaccttctctctggaagggaagaggagttggaaggtctctggttttcttttctttttttttttttttgccaaaggtttacttccagcatctgagctctggctctcacccctgaagctcagttatagtgcactgatgaactgagaggatgcgtgtggatgtgtgtgcatgcctgagtgcgttttttggggaggggtgtttatttttagtaccccattctggggttctctgatgcagtgtggatgtgaagatatggtaccttctcaagtgtagctctttcaaatatagtcaatgctgggaaatgtgattgcagtgatctctatctctccacttcttttgggaaagaggagcacaggagcggaggaaaaacttggccacagtcacacttggaaagatagtagattattttcgttctcctcagcaggtctgctgtattcctcgctcagcgctcaaagatgtgggtgatgtgtcaaggaggcatgcactcagctggtccttgctgagttatttgctgacacaggtctcactaaggtggctgaggggtgggagggagaaggctaatcttggaaccttcacaggattggccttgatccttgggtaacacaagagtgattcctgatttttagacacctaatatgtgcctagtgcttttctctttgttcctcactatcctgcaaggtaggtattctcacttacagatgaataaatgggctcagagagattaggtgattagtgacaatcagttgtaacttagcactgttaggctgcaaaccccttgctccttcctttccaccaaactatgttgattttccttccttacctccctccttgtaccacaggttctgtcctcaagatatcaccccactgggcagtatctgaaggcagacccagcccaagatggtgcagaatatacagctcagggtgaaagttcttctgggctcctgctaacaaagtcttggaaaaactgcctgggaagccatattatgaattagtgctagaagaagctgtggggggaactgagttctgtgtctaattgcattacttatgtgtccttgaataggacccataactcctcccggcatgcttttgcatctatagaactgaagctgtagttctagatggcactaagggtcttggttcatattcagctgctgcttccccccaaggaaaagatgaggtttttccccttcgattaccttttgagggatgtttaggctcaaattctgcttgccacagaggaaacatttctgctgtagttgtttacctccatcctagctggcagtgtgggacacacacatacagcaagtgaaggtgggggtttgggcctgtatagaggtcagctacgctgcaggctcatctattcacaccagcaggtacagagaaaactagtgttttgtaaagtcaaatatttgttgggggttggagttctggggttggaggaggggctgttctgggcatcagttgagcagatgcccaggatgcctgggggagaccagcttcccctacaaatcagagctctaaattacaaggtttttaccaacgtgaacagttgggggaagtcgtctgctctcatttgcgtaatggtttctgtcactggtgattagacacaggatgaaggaaaagaaatttgacaattaggaatgagcgatcattaatctgaatctgttaggagacagagaggggaaggatccttatcagtgggccagcccagtatggggagacactccctccctctgcccccagagactcctgggctacatcctctttcagtattgccacaagtgggcagagcttgtatttcttaacaaagattagggacccagttgccagcctgagatggatataggaacagacatctttgggcatgagccaacaaagatagaaatagatgagtgtcaggtacaagctataaggcaaagaataacagtggaaaagttttgacatgtgtttgccatttgtggaaaatgtttttgtaatagtcaacacccctcatagcccacctgtgacaagtacttgttacattccagcactgtagggcgtgaggaaaatctggtccttatcaaatcccaggagcttctgcttagttggggaagaaattacatgaagcaaccagaggttataaggccacacttgtatatcgtgcaccctgtgtggacaagattagggactgttgagagaggaggaaaccagtagagagcaaagctctacccaggctccttgtaagcctctgggctcccccgagagggcctcgctactctacgcttcctagcaacgttgatgtccccacaaccccacatcagtgcagctgtggctgtgtggaggggctctgaggcctctgaggccagatgtgtaaacagtgctgaggttcagtaataggatgagtcttcaggtgtggagcagcccaccttggctcttcccatgtctctgtgttacttctcatattctgctgtcctttcaaacttcaaggacagtattaatttatactagtatttcttcctcagttttgtgacttgaatgcagtgagtgccttagaggatccaaggatgaaggaatgcgggttggtggttctctctttcagaatgggaacttcccaaaaatggggctgcgtctcgcctctcagtaggttccctacctctgggtcttccacccttcaaaatctggtacagaatttagcaggggctgcagggaatgaccctcagggaccagtttcacccagatggggtagatgatgaggtatacctagaagtagctcagggctccagagtctggcctttcagctggtgtcttactcccctttgagaccttcagctgcttgtcttccactgcctgcatacttctctgatgtcttctcaaactgttggctctaaagggatgttccagcctccctctccagagctgcctgcagtttcccttattcagctgtctcctgcctagtctctccagcggcctccttaccaagaccctttttcctaaacagttgtccttccctcagaaactccatggctgcaagtgtgaatagacttgtctttaggatccctctctctggtcatccctgatcatcttagggccgtctcccttttctgatttttgacagctctgtttattttgcccatggctagtcctcttgttttgtgtctgctgtgtgttcttgcccttccattgtcagttctgtacatcctggttcagcttgtctcactgtggtagccccttctgcttgtcttcagccatcttggtttaatcctcataggtcatggatgaatggagccttgctgagcactttgagggcatttctgttgggcacaacctcagaaacgggaagtcttgaggcctgggggcgtgtggtcagtgaggcctccagaggtgggttaggggtgggcacctacaagggccagttgaggggagaggtgcagggattgctgaggagactttgtgagaatgatgtcaggcccgggaagctggtgtggaagaactgagctgtcagaaggagataccaatatcccctttgcagggtggtgatgggcatcaaacatgacgtggaacatgtccccttcatggagggtttccatctaaatgcatctgtgtgccttagggatcagtagttcaggggtggtggacttttttgagtgtctcctaatttctctgaggtgtctttggctctgtgtcaccaaatgtgcctgacctctgcatcccagtggttgctgaaagggaaacagtatattgcgtagtcagatgtcaggagtagagatcttaatgagaaaggccctggcagctggagagatgagaggacctagtggtcagcttatacccagactatctctccactcctccaagagtttgagtcccatagctgatgaaagaatttacatatgggctcccccctgctttcccactgaaaatctattctcatattttgggaaggagcatatgtcctttaactttcaatggtaaacaatctaggatagtgtttaaaggcatggattttggagtcacatatagttggtttgaatttctagcttcactacttaccagctgggtttgaccttggttgatttacttaacctctctgagcctcagtttcctcaactataataacatgggtggagggaggcatgttgaaaatatctacctcagggttgttggaataactgaaacaatgtttgtaaagctttagcacagtgcctggcaagcacttaataaatggctgtggtggtggtggttatattta

SEQ ID NO: 2054 - DNA, 2399 bp, Homo sapiens
gttccccttattattatagtgccgccccccggggctccgcccctgccgctgctgccgctgcctatgaccgccactagttaccgcggggaccacatcaagcttcaggccgacagcttcggcctccacatcgtccccgtctgaccccaccccggagggagggaggaccgacgcgacgcgatgcctcccggccaccgccccagcctcaccccatcccacgacccccgcaacccttcacatcacccccctcgaaggtcggacaggacgggtggagccgtgggcgggaccctcaggcccgggcccgccgcccccagccccgcctgccgcccctccccgcctgcctggactgcgcggcgccgtgagggggattcggcccagctcgtcccggcctccaccaagccagccccgaagcccgccagccaccctgccggactcgggcgcgacctgctggcgcgcgccggatgtttctgtgacacacaatcagcgcggaccgcagcgcggcccagccccgggcacccgcctcggacgctcgggcgccaggaggcttcgctggaggggctgggccaaggagattaagaagaaaacgactttctgcaggaggaagagcccgctgccgaatccctgggaaaaattcttttcccccagtgccagccggactgccctcgccttccgggtgtgccctgtcccagaagatggaatgggggtgtgggggtccggctctaggaacgggctttgggggcgtcaggtctttccaaggttgggacccaaggatcggggggcccagcagcccgcaccgatcgagccggactctcggctcttcactgctcctcctggcctgcctagttccccagggcccggcacctcctgctgcgagacccggctctcagccctgccttgcccctacctcagcgtctcttccacctgctggcctcccagtttcccctcctgccagtccttcgcctgtcccttgacgccctgcatcctcctccctgactcgcagccccatcggacgctctcccgggaccgccgcaggaccagtttccatagactgcggactggggtcttcctccagcagttacttgatgccccctcccccgacacagactctcaatctgccggtggtaagaaccggttctgagctggcgtctgagctgctgcggggtggaagtggggggctgcccactccactcctcccatcccctcccagcctcctcctccggcaggaactgaacagaaccacaaaaagtctacatttatttaatatgatggtctttgcaaaaaggaacaaaacaacacaaaagcccaccaggctgctgctttgtggaaagacggtgtgtgtcgtgtgaaggcgaaacccggtgtacataacccctccccctccgccccgccccgcccggccccgtagagtccctgtcgcccgccggccctgcctgtagatacgccccgctgtctgtgctgtgagagtcgccgctcgctgggggggaagggggggacacagctacacgcccattaaagcacagcacgtcctgggggaggggggcattttttatgttacaaaaaaaaattacgaaagaaaagaaatctctatgcaaaatgacgaacatggtcctgtggactcctctggcctgttttgttggctctttctctgtaattccgtgttttcgctttttcctccctgcccctctctccctctgcccctctctcctctccgcttctctccccctctgtctctgtctctctccgtctctgtcgctcttgtctgtctgtctctgctctttcctcggcctctctccccagacctggcccggccgccctgtctccgcaggctagatccgaggtggcagctccagcccccgggctcgccccctcgcgggcgtgccccgcgcgccccgggcggccgaaggccgggccgccccgtcccgccccgtagttgctctttcggtagtggcgatgcgccctgcatgtctcctcacccgtggatcgtgacgactcgaaataacagaaacaaagtcaataaagtgaaaataaataaaaatccttgaacaaatccgaaaaggcttggagtcctcgcccagatctctctcccctgcgagccctttttatttgagaaggaaaaagagaaaagagaatcgtttaagggaacccggcgcccagccaggctccagtggcccgaacggggcggcgagggcggcgagggcgccgaggtccggcccatcccagtcctgtggggctggccgggcagagaccccggacccaggcccaggcctaacctgctaaatgtccccggacggttctggtctcctcggccactttcagtgcgtcggttcgttttgattctttttcttttgtgcacataagaaataaataataataataaataaagaataaaattttgtatgtca

SEQ ID NO: 2055 - DNA, 3222 bp, Homo sapiens
taggagttgcagcagcaaaaatatgaaccaagagaaattcaataagagcctttcatagaggagtagaaaggattattacagaatccaatgaatgccaagaaaatgtacagcaaatgtgccacttgaatatctagtatgaagctggtaatgaagaaattgccatttctgaagcagatatgaaatatgatctgcttaattgttaaggcaactgacctttcaaaagtgcagagtcttattaaaagaggggaggggtagaagcagaataatagtcatatgtctaacctgccccagttaactcctcttgttaaattataagccagttatcttttttagatagtatttttgtcacttggataatcacaggaaatatataagaaaagagcttggactaacttgagaagttggacatggaaagcaagaccaagttccagttgggtttaattttccctcttggttattttcggacacaaagggaatgcttaaaactgagtttagtaataaaaagcataaatctcttctgtaacttttataaaccacagggaggtttcaatccatgcattttccttcattactcaagattataaatctgtttttaaaatacatctaaacaaacagttgagaaacaaaagtttggcatgttgtcagatccccttaagaggaagaggttaagctgtaaagtagtggccctgttttgatgccagaacattcatatgctgtttgttctggatttcttttaaatgcatgtattttaaatactggttaaatcttagaatcttggctatatcttagaattctggctcttggtaaccatattacagaagtctatattgtaaaagcctaaagatctggacaagtttccaacaaccttgtttccatgagtatataattttggcagacacctgaattctttgggacactgtgtctgtgtatgtgtgtgtgtgtgtgtgtgtgtgtgtgcgcttgtatcttgaagttgttgcacttcaaaaccacagctgctgtaaattcttaaacactggagagccatcctttggtttaaatggtagagggttagtggaagtgcacacgttgtttttagcccaggggtagtaacaaactcttactagccaactagaaaattattttgttgacgagatgtcccttttaggagggtttgtttcctgaaagaatgccaactttttttgttgttctttcagtattggcttgagtgacctgttctcctgagtgctctagtgtctccagttgtgggggggaaagatgatggaggggaacagaaactggacttgatgtttgcggtttgagaggcaagaaaataaaataactttctacctctaaattgaggcttaggagtaaaaagcattttgtcctaaatttatcatttaaaatagcatcagtaacttttgagctcatgtcaatcaagcattggcagtcagagattttatagggaagactaagtaaatccagtttccaagaacctaaactgattgaggctccaagagtcagaccaacaaaagttttattctgtgttgtttactggtaagaatattattatcttgatactacctctcaagggtattgttacaaaatgccacttatggttaaagagatagatacaaagagttctatttgacagaagcttgaaactctggcatctatctgcccaacgatgggggctttcgttctgtaatttaatcctttgtagatacattatttgtgtgtaattttatacgtgttcatatttttctcattttgcattgtgtaaagtgtacaaaatctcaaagtataaaatactgcttatattgcttgtaatttacagtgtgtaaatattttctaattgtgtacattgatgggggggacaagtgggttattcaggtttttttttaatgacccttttgtattgcagtttcaacagataactgtccatcaaatttaaaaccactttgatacatttttatttaacagttccaataagaaaaaaatctctatttttaattatatttctcctttagaaaaaaaatacttcatggtccctctaaaataaatggccagacctcagtttaggcccttgtatttatgactctggtagaggtcttcagactccaggtcatagtccagtcagtatttgcatttgggttctcatgaaaactttgtgactctcttttagcacaagtagcccatggtttttcttccaaatcaagtattttacttctcccttgagtccccatgctttgtctccctcctgctgctattgcccggtgaatgggatggtagagagggagaaatgttcattgcacagagaatgtcaggccactttggggacttggcaaacgaagcttgcactgagtggtggtgtgtttggcaatattactgtgccaaaaatcaccttgtctaattttatggatatgtatggcaaacttattacccttcttgcaagctgcacattaaggtacttgtaagtgtttatgcttttgtgtgtaactgtttgccttttctaactgcttttcttgttactgaaaatataattctactagttttatcacattaagaggctctccatgcacaaaatgcattgatgtagccgtaaagtaacagcatttgtacattttctatctcctgatggcagtggtgcctttgtcaccttttggaaggtttgcattttgtttctgctttcaagcgcaaatagtagcttgctttcagcttcacaaaaatctcctcaaatgtaaaagatacaaaatggcgtgttatcatccaggcttagttggagtatttgcatttttatttttatcaaaacaaatataattggtggggactggccagtaataatgtgtggcgtctttaagccaagagtaatttttaaattaaaaatgaaaattttaagaggtagcccattaaacaagctactgagttggagaattaggggatgactgtggtggtttgtcgctaaggaggcaacagtagggtccaggcggcggggcacgtagagcagttagcatgatccatggttattccttactcatgaacagtgtcggcgcacctcattatctgtgcatttgtttttcctgggcagtcctgtcagccagttaatccaccagctcttaggaagtaaatacagatttttttctttccttttttttttttttaaagattttatactacatcttgttaaagtcctatgaatgtgtgtgtgtgtgtgctattaaaactgctttttctcagtttgaa

SEQ ID NO: 2056 - DNA, 1484 bp, Homo sapiens
gcccagcctcccagaacaaatgctcttccaagccagcctatctgtcccaggctgggccactgcctccctaacacagccaccctcccttcattacccccactccatacccttctcccaactttttgatgtccctgtagggctggccagtcaggcccagccaaagccccctcctcagtctccacagacccacatgtgagcagcccaggcccatcggtgctcctcagaggtaggtgctccctcaggatcaggtgccctgcagacccagagccagttcctatcccctaacctaaacacttataggtgaggactccatcctcctgttccattcatctgcccaaaccctttctctttctcccaggcagggctctgcaggtccatatgggctcaatgtcaccaccctctgcatggccctgtgtgctggatggtcctgaaaccagacaagacctctgccagccacctaagccctgcgtacattcacatgcacacatggaagaatgtttatcggctgggctgcagtgcccccaccctcaccttctcctggtgcattcttgtttcatccctgcttctggacttggggtaccctcccaattgccacatcctatctggtcctcttccccagccccatgtggtgacctctttgtcaagagcttgggaacgggccagcctggggaggtaagactgcatcactcccctcctctcccttcctgtgtggcccttgtgaatcagcctccccactctccttggtcattctcaagagtatgagagacagagctccaggcatgtcccatccccatgcacatgtggtaacacacacctgtatcacacatgtgcttacatttccactcacatgcacctctgagcctcccttgctgtcttggacctgtctgttgggtttagtccgtggacatttcagagggagatccccctcccatttaactgtcctcacaggcccttgcctaggatggatgaccaacactgcactcaatgagccagcctctcttttgggggaatcaagcatttgcttcctctagactacagcagggaaagggaggagaaatctgatgtctcaactggcacatgaagcccattcttggaactatgcaaagggcagaggctgggagtttggacgcttagctcctacccctgtcctacctcaccggggcactttcaggggccaggggcctctgaagtctctaggcctatatgggacaatcaattctgactgagctcccccattcccctcgggtgaggatgactgttatttttgtagctgagaacgtggaatcccacgggtttttactgcccttcacccaacctctcccacctccaccccacaatgaatgtatttattgtgagaatggctacacttctttaggaatgcccccacttacaaccaggtgggtggaacaggcatgtgacagagtggggagcctgggctcagctcctccccctgccgttggttaataaacaccctttttccccac

SEQ ID NO: 2057 - DNA, 891 bp, Homo sapiens
aggccgtgcagagctggtcactgaaatgagcctgataggataggctggagcataaaactctgcaagggctcctctatcctgtggtcctgagctgtgtgcccttctcagtctgaggggcctaacctagagcaggtttccatagtgagaaaattcaatgtagcagactactgagaaactactgtgttgctcaggctttgtttgaggtcctgtatatacagcactgaaaagagagataaagtccctgcctgcatgcattctggcggaagagacaagcaagcaatgaacaaattagcagaaaacctagttttagtgaaaaatgctgtaaagaaaatagaaatgcgatagagtgctggcaggctagtgtagataagtggtctgaaaaggtgtctctgagccgagggcatgtgagctggggcctaaacaactagaaggagagagccacgtgaacatccggcgaaggggacccaggcagagagaaaaggaaatccaagccctgaggtaggaatgagcaggtcagattcaaggcagtgaggtcaggccgcatgaacctggaggggaatcggggacttcatgcgaaactccagcctaggctttcaaagtcaaagggtgatacagtgggtaccaagctcctctgctccccactttgtagagcctagcatgaggtggcatgtactagaattggatcctaggtgcttagccctgcaatatcagggcctcactggtgggagctgcctcgggctgggttgcttggtcatagagccatagaaggaagctgtcagcccggagtgcctgccacctagacactgatgccattgtgtgctgcctcaagactgctggagtcaggacattttatagagccttttccagttttactaaaaaatttttccattg

SEQ ID NO: 2058 - DNA, 660 bp, Homo sapiens
ggccctcagcaaccagctctgtagggagctctgccagaggggcagcagctgcagatccacttaggccccagggtccacggatggccccaaaggctgagggccccaaagccacttgtctcctaggatccaggcctctgggcttctgccaagaactcagggtggccctatgacttggaggagcaagatcagaccgctcaaaggtccccgtgttcactgttacccagaggctcttgttactacccacttcattccccaccgctgccagtgccactgccaaccctgttcacaggcgcttccagcccactccagccaggggagcagggaagaagaaggggctccctcctcttcacattccccccgaccccaaagccagagaaagccagatggcaccagctgctccggatgtgcctgcccacattgggggacagggccgggcctgggctcggttcccaggtttgagctctgcagcctctctcctggagtgagggggctgaagtcagaccaaaggaagaactcagaaatgtcttgtttatttgtgtttgtgaccaagcagcctctcccttcacccaggtttatggcctcgttttcacttgtatatttttcacactgtaaatttcttgtacaaacccaaagaaaaaattaaaaaaaatttttttgttt

SEQ ID NO: 2059 - DNA, 1655 bp, Homo sapiens
ggagggtcagcctctgtcccctccctcacttccttgggctgctgctttagtggagtcatgtcacccctaccacttggctatctgcctagcactgggcaggggccttggtgggcagatggcaattgagggtagcaacctattagggtgggggagggacctccataaggcttttcctcccttctctggtttcaaagatcagagcacataacccctcctgtgcttgagtgtccatgcatatacatacatgatacacatgtgtatgtgtacattgggtcctgaaagctagaagcaggcatgctagcctagtatgttctgacatctggcttcccttctcagcctcatgtccacctgcctgccagccaggctacaggtgtgacttccttctctaaactgttacaccagccaagttatttttgatggcacctcatcccttctagaaataggaggagccccaggatctcaggacagagacttatagacactagtaggacaaagcgggctgaatccttcaggtttctgatacctagctccccaagctgactgggctggcagaggagaacatgttgagacaagggaggcaggggacttatgcatccctcagtgccatcccttgtatcctggaatagctccatttcccctcctcctctctaccagacaaaggagtgcctgtgtcctgtactgccctcgctgtctcccccaccaccctacttgacagcgtgggcatcttcaggcacagccttgggagttcctggtgtgctctgacatcatgacctcaaatctaaatcctccaatcccaactccctttcccaaacaaaaagccacagaggcagagcaagcattcccctttaagagcttccactgcaccccctcccaagggacacagcggtaggaatggtgcttaaactccacaggtatcagagagggtgtaactaggacatcctcaagggcagctaggccccgaatgtacaatgttaagacagggaattttgtgttccattgacttttttttttttttttaatggagtttcactattttgcccaggctggagtgcgatggtgcgatcttggctcactgcaacctctgcctcctgggttcaagtgattctcttgcctcagtctcccgagtagtggaaattacaggtgtgtgctaccacatcttgctagttttgtatttttagcagagatgggggtttcaccatgttggccaggctagtctcgaactcctgacctcaggtgatccacctgccttggcctcccaaagcactgggattacaagcatgagccactgtgcccagcctgttccactgacatttcttagacattcagcaaaacccccaccttaacctcttttctttcttgagggttggtcctgtccccacctccaccctcccaccccctggaagaggaagggcccgggcatcagtggctagtccaaataaaatatgggcttggggatggaatgggtggtggtaagttcacagagtgtagttagatcccaactcccatgacctctggcttcagtggtgggtggggcagggcagatgaaagggcttcagtgggaacctctgagagcattttcctgttccccctatcaaccgcccccagtgataacatctgtgaagccagccattactcaataaactgcaaacttgtct

SEQ ID NO: 2060 - DNA, 671 bp, Homo sapiens
gtccagagctctggcccatgggggtgggtgagcggctatagtgttcatccctgctcttgaaaagacctggaaaggggagcagggtcccttcatcgactgctttcatgctgtcagtagggatgatcatgggaggcctatttgactccaaggtagcagtgtggtaggatagagacaaaagctggaggagggtagggagagaagctgagaccaggaccggtggggtacaaaggggcccatgcaggagatgccctggccagtaggacctccaacaggttgtttcccaggctggggtgggggcctgagcagacacagaggtgcaggcaccaggattctccacttcttccagccctgctgggccacagttctaactgcccttcctcccaggccctggttcttgctatttcctggtccccaacgtttatctagcttgtttgccctttccccaaactcatcttccagaacttttccctctctcctaagccccagttgcacctactaactgcagtcccttttgctgtctgccgtcttttgtacaagagagagaacagcggagcatgacttagttcagtgcagagagataggtgaggccagctcgagatcttataccactctgtattggacaaaggctagcacagggctaggcaccaataaagatttctaatgatgcacag

SEQ ID NO: 2061 - DNA, 866 bp, Homo sapiens
gcctgcccattctgccctgtgggaccccaggcccactcaggggtcactgaggcctgagacccaggactcctccccaccctcctggcctcagactgcacccaggaggggaacactgccctcgcacggccccgaagggcccccacatttgtgccgacactgttctcccttcggtggaagagctcaagggacaaggacacgcgcccccctcccagaggcgtcccgcacctgtctgaactgttaagaaatctgtttttgtttatttcattttattttaatttttaacgtgggattcagagaaaggcaagggaggtaagggaggaggagcttctggggtccccagggctgtcatctgaatttgccctgggaaaccccttctctgtgacccacttctcatcacacacatggaaacccataggcccacacacaggtggtgtcactgtccctcctggtgtcaccccagagccacacatgggcatctatgggagagtgtcaaccagacagagggtcacagtgtttacactttggaccttacgatcaggcacaggtcaggggtgacacagactcatcctgaacagcatggcactccctccagcacaaacacaaggtcatggccacactgtgacacactacaccacacacaacagccaacagctacaacagcctcacttggtctgccaggcccccaccacacatcccagcccaatccaggtacgcacagacaggttttcacataaatgcagcccatttctccagaacccatttgaggggtgggggggtgttaatttatgcacttataaggtgttttctgtgtaaccattttataaagtgcttgtgtaatttatgtgaaaaaaataaataaaagcctc

SEQ ID NO: 2062 - DNA, 4159 bp, Homo sapiens
gacccattaaagttgcggtatttaacgtatctgccaataccaggatgagcaacaacagtaacaatcaaactactgcccagtttccctggactagccgaggagcagggctttgagactcctgttgggacacagttggtctgcagtcggcccaggacggtctactcagcacaactgactgcttcagtgctgctatcagaagatgtcttctatcttttgtgaatgattggaacttttaaacctcccctcctctcctcctttcacctctgcacctagttttttcccattggttccagacaaaggtgacttataaatatatttagtgttttgccagaatctctcttgctttgccattaagcagaagaactagtttccctgtatagcctgctgggagagacccacttctagggtatgggggatgcagcttcaagcccagtgcccagtgtctccctgttaactgcaggaatgccaagcacctggccagagcagcccagccccaatatgcttaggaggagacagagttccctctgtatagcctctgggacaagaaaaagaaaacacaagaatgtatacactggaagatttgggcctcctgcctgccttctctttgtttctgttcctcttcccatctactcccctacgccccttcaaccttttttctctgtctgcttcacctgagaagaaagtgtacgaagagagtgtcctcctctcacatgagccagatcagccagaaaatgcaacacttggaagagttaaatgctgttcagtgaagatttcagccccaggcctttgctgcaagtgaccctgtggcaacagtggattctcagacatgatactctcatcatatttgcaactcttctctctctttcttccccacacccaagaggaggattggtggtagggggcaggcagagggggtggggagaagtttcctgggctccatcaatggctgcatcttttctggactcagcagtctccttgattccatgtagagtgtggaaaggagttgctgattgcatttcctctcattaacaattgggtgtgtaataaaaagcattgtacttcatcttaaatcactggtaaggctcagcctacagaaagatttgaaatggccagagccaatcgcttggtgcattctgcgtaatggtttccatctccgatttcctcatcagggcctgtgaatacccaggtgcctgtatctttgccaagaccgtgatcaaggtagcttaagagagatggtcaggagaaaacactgtttttgttttttttgttgttttgttttgttttggccagttaaatatcatctctcaaatattgatctcaccgtgtcaaccttgcactgcacaaccttccttctgcttctcccacacccagtatttgcagaagggcaaagctgcttaagagagaggatcagggtgaagtttggcacacagggtttattaatggggcaaaaactgccttttcttcctcctcctgaccttattttgctcttcactctccccagccaataaagcgtctgtggcgattggtgaacagcataaacagctggacctcagcaagggtcaggcaaacccagtcactcggaaggcagctgtgtgagctgccaagctagtgggcttcaggtgcaagggtacctgtgccacaccaacctgggagcacacagaatactattaatgtgcacccagctggtctccccaggcaagaaggtatcctcttcccaaggtgtacccactgaatgttgttactacatattgagagtcattttatgcatatgcattctacctttcctgctttatgagtatttttaagcttttagttcaaggttatattcagaaaatatttcccagtataatgatacatcgtagcctaagaaatattttctcaatgtaattcccttcccagctacccaaatgctacagagaaatgttttctacttggccactatcagggttcgtcatctattgtgttgactattaatggctttttgattgggtaaggattttgctatagatgaaggtagagggctgtcagccctgaaaaacacacaggtcagacatttaaaaggcatgggtttcgagctgtctcaaaatattgcccaatagccataattttaccagcctttctgtcatatgctgctattacaaagtggaagctgttgaatgtttattggtgcccagggttttgctctccaatctaggttcagttgaaggaatattgtttctaagactgttttgagacatgtccagtacatcacaaaggagatcggggcgacccctgcagatgtggagccattagcccagttgaggatattctccaagttgtcctctctcctgctgatggaaatgggaatgaagttaagtggtctgaaaaacttgaatcgttcacatttctcagctctgggggtcatttaccagtttgttgtagaagaaataatcaggtaagttaaaagttcatttccagagaaggtaaaccccacttaccatctctgcatgatttcagtgggaattgattatcactaatccccaactgggctagaataaatgtaaagtttgacctttttaaaacgaaaagagagacaaagtctcagcacattccaaggagtggtagaaacagagctgaaggtgtccccattgtagattagtctcttctcactaaaatttactttccaacgtagggcctaaaggaaacctttcttaaagacaggctgaaaccccttcaaaggcagatgaggaggtacagacacgtgaccttttggtgcacactggagctacttggacaagaccagcatgccttgctgcacgtgtgtgtatttcactgctgagaacatcctttaacttggtgtgcaatttgaaaggatgtgaatcatggatggaaggccatttgtacatgtcccttggcaaaattctttctggtgtctcctaacttcagagacagggactctttttggatctctattgacaagtaataaaagtctggccctcataacttgtttccgaactagaaaagtctgtgagacccctacatcattctggtttttttgcttgagtaagaacaatccttttttatttttcttctgtacagtctaaagctacagagaaaaaaaaatgcactcttcccttgccggctcctggtaccattggtctgaacagctgtagttggtctactccttacttagcacttgattgtgtggggaaacaaaggtgggaggggtggggaatactggaaataatcagggcaatttttttctttcccataattggactagataccttggtactgttgaccttctcagcatctcccttttgccttagatggcaacaccctccagtctgtagcagagcagtccaacccagattagtgcagcccggaggcttagggtgcagcctccctggtcttcctccacacagttgttcaccaacagaccagacctcctttaaccacagtgtcaacatagtatcggaaagagagccatttcttaggggaataaaacagtttcgcttctttagctcatctgtggtgtcagaatccttggagctgaagagagaaatcaaaagagcatgatgatggctgcctggtttcaggtggaacttaatgcattgatctttagaagctccttctgttggaagttgagtacctgtgatctaaaatgtcctggaggcagatgacatctaaaatatgtgctttccaaccagcacagctggcgctcttagctcctgattggttgtgtgttttattaaggatcagtgcagttaagtcgtattttaaagtgttacctcccctcctaacccttccccttcttggacactgaaggaaaaggccaactagggtgttagccctctgggcaccaaggaaactaacagctttctcaaagcggtgaccactcaggccagcccagacaaatctgagggatggccagtgcactccaatgatgggacaggcctaacaacacatgtaagcttccccgagagctttcagctggttcacctctttgttctctagactcttaagtactgactgctttgacttttgtgattatgttatggtgatgtgtagtcagtgtaccaatatgttcacaacctaggatcatgataatggagtgtgttttgggttttttttaactgttcagaaaaaaagtaaattacaaatataagattaaagtgaa

SEQ ID NO: 2063 - DNA, 181 bp, Homo sapiens
ttggcccctgagccttatacctccaccacagggggtgccgtgagacttcaaggcttggcccttcttgaccacggcagcctcctgtcttctaggagctatcaagggtctctaagaactgggcatggggcactcctagccagtgagtcatggtcatatttcctgagtaaagtcattctgagtt

SEQ ID NO: 2064 - DNA, 233 bp, Homo sapiens
ctacccttcaggcatcagaacactcagggcctggaggcttgcttgggactggaggcttgcttggacagttcctctgtgtcactgacacaggaaatcatttctaggacacagtgatcagggaagggtgcctgggacttggagggtcccatgtatggacctgtgtatgcaatactgttctgtcatctggagctatttttaagatgtgtgtgttaaatatatacatagtttaatat

SEQ ID NO: 2065 - DNA, 302 bp, Homo sapiens
ccttgggcccttccctgctatcctttttctcctttggaggtgcccaacctcctccacccccttcccctactctaggggagagagctgctagtgagatgactgttttataaagaaatggaaaaaagtgaaataaaaaatatgttgaatcagattttttaaaaggggtatttgtttttttataacaggtattgaaacaagttaacttgcattcctatgtaagataggaggggctgaggggatccccagtgtttggaacataagtcactatgcagactaataaacatcaactagagagaactccc

SEQ ID NO: 2066 - DNA, 1601 bp, Homo sapiens
cctgaggccatcttcggtgaagcaagggtgatgatcggagactacttactttctccagtggacctgggaaccctcaggtctctaggtgagggtcttgatgaggacagaagtttagagtaggtcctaagactttacagtgtaacatcctctctggtccttttctgtgttcctagttttgtacagacttgtttttgagtgttgagtagcagggacaaaataagggaatgttattttttaagaaaattcattttcattgttgtctccttccttttctgtgaaagtcctcatactgagaaatttgtatattttatattaaatcacttactattgatttttgttgtgattttcaaaggtggattcccacagataaaatcttggctattgcccaaaacatagtaaagggtcacgtgtgactttttataataggaagaaaattctgcctttgtgagtgcacatgtccacatttcatccctccttccctcaaaaccctagagaggggcattaaagaattgttgatgtatatgcaatgtctgttaagcatgcactatgtatttcatcctcatttattgggtctgggactgaagtttttagccagcatggacctaacctactttttgggataaaattctctgttttgttacaggcaaaattctggtatggcgtgaatgccatgggtcattctgaatatatttttttctgtaattttatcattacacgatgtttgcaatacgtgctttgttttttaatttgaaagcaaacttttctactgttgaaagacattttttgacaacttgacccttcctagtattgagttctaagttgaggactgcatcttctcgttttttacagtatagagaacaaaatgacatgagtttgaaaaatacatatcacttggtattgctgtcttggttgcagtggtgatacagaattggtttcattaattcctacatggttgagaatcactgatcaagaaagtggggggaaaaaaaacaaacgttaaaacctcaatcctcagtaggaaggtagattacattaggtgaaattataggtaatctatgtatgtgctaatggggttggaaagaaccttacagagcatattacctgataaactggagtgggtttgggagaacaaactaataggattattgtgtctcctagttggtacctgggagcaattgacatgcccccttcagaaccttaactgttagtagcagtggctgtaacaacacaaaccagtgaccagagataacagcttttaggccaagctggcctgacggtatggctgcaggaagtgactgagcagtagcggtactcagccagaccaagacggagagggaagagtccacagctttctggaagctaaggcattctggtggtagaaaagtgtgccccaagccttcatggacgagttataggtcttaagattagtctcctcttgtttggattccatacttgctaaataacctgataataacctggttttccatgtaactgcctctaggaagaaaatgtactgttcatgctgacacagatatttcagtctgcatggtaaaagttctaaatcttactacaaaataataaactggctggtttataatgtg

SEQ ID NO: 2067 - DNA, 333 bp, Homo sapiens
aggtttggagagaacaatgaagctccaggctctctcttctccagggcaccaagaggctgggcttagttttgggagaatgattaggttgccttacctgcatggtttccccagaggatgtgtgccccaaggtggctggaatttttgacagacaagaagggtgaccttgggatgggggtgtggtctgttactttaatgtttctgtttttaatgtgaaggccaagcaggccctgggatgggagtggggcggaggagggtcctaagagctgattatttaatttctatccagaaatctttcttcttcttgctctgtttttttaaattaaagatttcaac

SEQ ID NO: 2068 - DNA, 556 bp, Homo sapiens
ggcaggtcactcagagatcaggaccagtgcttcccaccaggctttccttgaccccacttctggctgtcctgcgggccacaagctcttcaggccaagtcagagctgctgttgctgccacttggatggggacctgaaaaagagaatgttgatagccccagctaagacccccaatcagctgtgggacctttttcctcctctgcgctccattcctgggggttcagcctgagagtgaactcagctgtcatctgcagcctctgcctccagcccggcagctctggggaggcatccgtgtgccggccctgcagtgcctgcccacggtcaggcattgaaaactaagcccaaccactctgcactttgtttcccactcccattagccctgggccacctcctccagttcttcctcttttactaattagttggtcagtttggagagttgactggcaccatggagggtaggcaggtgggggctgggtgggggactgcccacaggagcatgtacatatggaaaaacagaacaacagtggactttttatgatataataaatgtcttagtacc

SEQ ID NO: 2069 - DNA, 147 bp, Homo sapiens
cctgctgcctgcccccagcccccttcccggaccccctgtacagcgtccccacctatttcaaatcttatttaacaccccacacccacccctcagttgggacaaataaaggattctcatgggaaggggaggacccctccttcccaactt

SEQ ID NO: 2070 - DNA, 143 bp, Homo sapiens
cccgcctgccaatcggagcacagctggactgtgtggctggggcctgacactgagctgtagggaaactgaactgtgaggacctctggtgagaggccagtgccctgccccaccctggagcttcaaataaagagctttttaccccc

SEQ ID NO: 2071 - DNA, 1059 bp, Homo sapiens
gagctgtggcaaggtcaccccactgaggatgctgctggcagcctggggaaggagccagttttttttggttttttttttaaggatttcatagttttttttttttttttttggagctgttgcccaaaaaaatggatctgttgcagtggtgcaatctgggctcactgaaaccaccacccaggttcaagcaattatcctgcctcagcctcccgagtaggtgggattataggagcgtgccaccatgcccggctactttttgtatttttagtagagacagggtttcatcatgttggccaggctagtctcaaacccctgaccttaggtgatcagcccgcctcggcctcccagagtgctgggattacaggcgtgagccactgtggccaacctaatttttgtattatttagtagagacagggtttcaccacattggccaggctggtctcgaactcctgacctcaagtgatctgcctgccttggtctcccaaagtgctgggaatacaggcatgagccaccgcactcggccaggagctagttttaccagcaccctgctccactgccttcctctagtgcagcctggaagacatggcagcgggtagctcctggggctgagccagaagcatcactgcagtgaaagtctctgcttacctgtctggctcagcttgggcaagggctgggccatatgtgctcagggacgtgcttctcttgtaaggcaggaggacagaagaggaccaagaagggagggggctgccctgtggtgcacacaggcctgccatggggcgtgggagcccatcccgctgcctgactggagctggccgctgtggtggactcaggaaccacttttaatactgcaactgctcccttttgcccagtcagggaaagctgactgtaagtcccacctcccactccgtccacccttctagtggtttctctgagaggtttctctgcttcagctgtgcttgaagtggcatgcctcctctgctgcagggctcccccacccccacacggcctctaaagatgtttatttccttatagactgattaaagtcagccattctttttcctc

SEQ ID NO: 2072 - DNA, 3297 bp, Homo sapiens
cctgggctgggccctgcagtggccagcagggagcccagctgctccccagtgacttccagtgtaacagttgtgtcaacgagatctccacaaataaaaggacaagtgtgaggaagactgcgcagtgccaccccgcagcccagtggggtgccatgcacaggccacaggccctccacctcacctccagctcaggggccgcaccccgccgctggctaagccttgtgacccatcaggccagtgagtgggcaaatgcggaccctccctgcctgcagcctgcacagattctggtttgaggtttgactctggaccctggctgtgcccctaggtggagacagccctctttctcacctaccccctgccgcacagcccagcaggagggaggcggacagccagatgcagagcgagtggatgcacttcccagctcatctctggaagcctttgctactcaagctcctctggccgcggaacaattcctctgatcatgtttggttttcttcttccttattttattttgtagaaaccgggtggtattttattgctctgcaaagatgtccagaagccatgtatataatgttttttaaacagaacttcattccccgttgaactttcgcattctctgacagaggcctagggctgtatctctccctgggctgccaccagagaaggtgcttggtgttcgcctgccagcccagagccctggaggagccggctgcacagagaggcttttcttcccagctgggcctggtggagcccggggcagggggagagtagagacactcccttgtgcagctttgagcctagtttagctggggccagggaggggtgctactgttttccaagtgaatgggtctcaaagacttggtgaccccagcctcatcttctaggccttttccacccaaccaggcctacctgggagagggtgaggttcagcacatcacacaccatccccactgtcattcagggcctgggtctccagctctgtaaccagtcctgtcccatttcctcagtccctgggcctcccagccttcaggctgtagggctgccttactaaaattgaaaaatccacctcttaacatctctttcactttggttttgctaacactgctctctgctgccctcccatcctccctgtatccattcatgccctatctttcattctccactcctaatccctctcctttctggcatcctggcctctcgtggtcctcagcccctcacccccagtactgcagatctcacagtttgccttccagaagccagcctatctctagcccatggttttggagttcctctcgggttatctcccacgcctgacctggaaccagcaagcccctttcctgccttcttacccccaactctagggatgggactgttacaatacttcaagatcactctttacacctcttcaaagcaaagtcatgacaatgcagggctcctcattgctcccatctgcctctgctgcacacacaggcaccagcagggatgccacaggagtgcccacagggtgcaggactccactgatgagagatccagccaaagagctgcccccaggggtatgagggcaccagctgggttctccagggagcaggagttggacctccatggagccactaggcctggcctcctctacacatccccagggctatctggttaattccatcaagctcagagttaaaaggcatatcagcctggagtatttgggagagactggctgcagatccccgccagccaagatgcaagccactcgggacctgatgtcggcagctgtgcctctactgccctgaggacttaccagagggagccctactggccttcccccaccacagcagccctgcctgtgaagctcttgtttctgacatttcacaggcagagaggtgccatcagttcgcctccattccttgccaccatgaccagcctctccctgaactctctcttgctcgggacctgcctgagggctccctgctgcagttcgccgtacttccatctgctgggtgcctccatcgttggttgggtggggatggggcattttctgagctaagctttgtcattagtttgtgaagcacctggtcagcaacctgccccagacctggagggtctttgtggactgaaggtagacaccagccagcatggtggccctgttctgggggagcagggtaaggcaggaggaagtgggtgagctccgagatgatgagcacatgaagcctgtggccccttcgtacctgcaatatgtcaggagcctcacgctcacccaagatcctgcaggggccaggctccatctcactggctctgagggcaggacagggtatcacacatttctcaccaggcctcctttcctatgggcattggtgcctcccagaggtttcttgggctgctggctggtgagagaggacccttaaagaagatcaagccaagctgaccttggaccctgtccagcacagcttctggcacaggatgcttggtgaatgtaccctttctttccctccctgcagctctgagggagcccctgaccttgtagtgggtggaggaggtaaggggcctccctccctaaatctgcctcttctgcaagctacttggagacttgcctagttgtacccacccctccaggtccctggtgctagagcttctgagaagggcctttccctttcctctttgcctgctatataaggcaggctcctgtggctctgctggctcagtgtgggctgcaggaggactgcagactcagctgcaattctgaggggggtttgggaggcttgtgcgaggtctcaggcctgtgtggggagctggtgcctcttcctgcccgtatctttctcttccaagggcagtgctccaaggcagggactggagaagccaaggggagagtctaaaagggctagagcatttttaaaaatagacacagggtcttgggactggggtttcggattgagttgcaagcagggagaaaacctgaaggtcggtgcccctatggggctgaccagtagagaatttcctttactgtatttttgtgtctggtcttccctttctggcttctaggacatccatgccaggtgaggtgcctgggtccctgttacaagtcaggagccctgtagggagacccctccttttgtacaagtacctgaatgctgcgacaagcagatttttgtaaaattttatattagtttttaatgtcagtggcgactcggttcctggggctgcagccagcctgggacttttgtaagaatttttgggtgactcacttagatgtcgtttccttcttgccccctcttcctctctgtaatctaagtgcattaaacatctttgcag

SEQ ID NO: 2073 - DNA, 965 bp, Homo sapiens
cgccacgcaggcggcggggcgctggggaatcttcctccccagcccccgggctcgggagttatgcatccagagacctgcccttctaccttcctcgcctcccctcttcctcattccattgccccaggtcttttccttttggattttgttttggttttggctttgtttttgatttttttttattatgaatctcctggacgcagaggtgacagtgggagctggcctgggccaggacggcaggtggccctggagatgggaaagtgtctgtgtcgaggcgctgagctctctctctgtttctccttttttcctctactccttccccttcacacccccgtggctggaaggaacctcggcttccctgaaagcttgggggtcccacccttcttaccccacccgggaggaacgcccagggccccgggcttgtttctcctcttgttttccttttgggcagtttgatcactgatcgagtaaggaatgacctttagattgtgcgacttttgtttttgtttttttaaatttttttaaaccaagaatgatttctcctgcttccttctcctcaccatcttcccagacggagttcaaaggccacttctcaagcagcttttggcaccttcagcctcagagtggaatcttttaaagacaggacccctatgtccaggaaaggggaaaaggaactttgccaatgatagtgaccacagcaaaagcaaataataataatattaataataataaagagaaataaaataataaaataaaaaacaatagcacagcccttgttgaggtcagcagggaggaggggctgcccggagttgggtccttgcctggattttgacacagcaacttcctgtagtgagcactttgtatgaatcgtggacttcctgttctcaaggcgcaggtatttattctgtatctgtctagagcacacaccaaaatccaaccttctaataaacatgatggcgcagtcccac

SEQ ID NO: 2074 - DNA, 1423 bp, Homo sapiens
atgccccacttcagcaaggaccagtctattcccatattcaccagctcctccttagctacgtgcacacttgtgtcctccttcccctttgccaacaaggcctgaaggccagggtagattggggggtgggacaatgaatgcctcatacttacaccctggtactggttgattggacctcaggggaaaaaagtgaaaaagggtagcaaaggccaatgtcttctagctgcttcctcaacccctgtcccctggagaccagaagctgaggccctctcagggaggagacatccaagcaaatcatttggaaaagttaggaaacctttaggattctggttccagccagggttgaggaaaagaccttggatcaaaaggaagcttctatacctctttcttcttcgcttcctcctctcccaagcaatggaaacttttacccatgtaattctagctgaactcaggaaaaagaagggggaaaggactctgtccccttggggctcatcacccttccacatcctcctcctcgttgccccctggtcaggcagcttcttttttttttttttcaagatggagtcttgctctgtcgcccaggctggaatgcagtggcgcgatctcggctcactgcaaactctgcctcctggattcaagcgattctcctgcctcagcctctcaagtagctgggattacagggcacctgccaccacgcctggctaatttttgtattttagtggagacggggtttcaccatgctggccagactggtctcgaactcctgacctcaggtgatccgcccgcctcagcctctgaaattgctgggattacaggcatgagccaccacacccagcccggacagcttctttgggagtgctgctaaccttgaaattatcagacacttaggagttattagtgctaaaaaggggaccgtgcaaggcagcagagttacatggttcttcaaatcatgtctgaacctattcttggaatcttctctataataagggaagttctcttaccccactgccacatacctctgttttaaaagataagtccactaactgtgagtaaaaatgatatatataggcattaaccacacactttaatgggtataatttcctggctgcctcccttcctcagcccattaggttaaacaccaaagaaagactggtgtgtactgaataggaaagggaagttttatttggaaccttctaagaggaaatcaaccaggaccaaagagccttaaaggacacacagcaatgcacagccacttcccttccccagcttggctgccctaggtgatttctcaagctccttgggggactgttgtttctcatctggaatcaatgtgtgtatgagttttgtctggtaggattgctgactctgtccaacagatatcactgtgaattgaataaatttgttgaaagagcacacaggcacacat

SEQ ID NO: 2075 - DNA, 2933 bp, Homo sapiens
agcaggtcctgccagcacccagcaacttggcaaagcaaccagggtaggggagaaccacgagagaagcattaagtgactttcaaagactttcagagtacagccacttggttcctttttgtttgttttccttctcctctcctgcattttcctccatctccaggtacagttcggggtgtggatgcctcttcctccacaagggcacagtgttgtggagggctaagttggttctgtgactcattcctcataccctaactccatctcctttctttaaagtcaaatctcacctacctgtttgggtcagagagatgtgttttaaaagcccccaaggaaggaggctgggactgtgccctgacatgattcttggtgatggaataggtttgtgctctgattctagtttaagagaacgttgctgtatctcagtccaggagaggcagcccatcttggccctggatgaagaaggaaacccacagaggcccagggcttgtcattgggctgccagtgtctgccaagccagcattgagctaatcctgtgggaggatgagagctactgggccgttgtatgataggttggtaggggcttgttgatctgtcaaattccaggtgacaagatctatgcaccccatgcgtccttgaggggcctcttccccgcaggctctggctggccgcaggctggttctggtgtgaaaggttatactgccttttctttgtttgtttgtttttttctctaaaaacaaacagcaaaagacagctgaaaacaagaacttcaccggtgggcaggcaagaattctcttctggaaaatgacgtttgtggctctttcccaagttggccttcaaagagcctgcctgctgttgagccagaagatgtctcgtgtgaaggctggggtggcggctgtcttggaacctctgtgagcaggaggccctaagccgcagcagtggatagaggtgcagctctctgcctctctgccctttggtctgtgttcacaggtgacccgtgtcagcctgcatcgcaagcacacaccctgcgggccttcaagtctcactgttccgtatgaggaaacagacagcggactgaggaagcgatggccccagagaaagggcccctgtagcctggctctcacacagtattttatctttgattctgaataaatattttttgtggggttttttttttttttttggtggcagttgtttgttttaaactgaccacttggaagaaacaccttggttatctgtggttttcatgccttgtccctgcctctacccccaccccttttgagtcgggtgactcatttttctgtgtagagactcggtggcccaggcaggaggtgaaagcagccatccggaaggccctggggacccttgtgcctgttgctcgccttcaggtcaccagctgagctgcgataggaaaatctgaatggaggcagcaaacagccaaaacaaacattccccacccggccctgtgcatatgaagtctttcttcccccaactcttgaacgatgatgatattcagacgaagcattgatgttatggaagaaagaaagaaacaaacaaaatatatatatatatgtccaaaaacagacaaatccaagggtgtgaggtaaacgagtgtctgcatttagattccacaaaaccaaaatccatgttgaacaaagttaagtccgtacacagtgactttttgggtgagccgtgtgtgtctgtctgttgtgtgtgtgcctcaagccctgttttcctgtgaagatactttgagtggcagccattctctccacgtgaaccacacgtctggagcacagacaggcctctcaaggtcattgatcttacgcatttactgtttaccgaacaaatgtctgactgtgtactcgggtgtactccgcagcattgtcgactgcagtcccctgtgtttgccagagatactgtgctcgaagtagaggttttactctactcatcactgcgatttgcacattgctccgtggacactcggaggcctgcgttctgttccctataaatggaagcgtgctctgagcctgtctgcctccctcggctgctgctggtcctcagtaccagcgcccgggggtgtccacaaccacttgggacagaagaaggtggaatttcagacagaagcttgactgggtcttcaatgacaggcttggactagctgtggcccagacatcggccctgcccagaattgccaggaggaggctttgcaggctctagaggagccgcagggcctgcctgcctctggtgagtccaacaggcacaagcaagctggcgtgtggccagaggtagccggagtgtgtcacagcccctcagatgcctttccttccacctttttttattttttaagaatcccaaataactcactgaagtgtctcaaaggcgaacaagttttaccaaaatgaatcctttttcagttaacagatcaaatggatgagttctgagcctctcaagttcctttccccagttagagtggggaactgggcaagtgttaactgtgggactcactgcagcgtcctatcctaaaggcacgagaagacggaaatgcaacctgcggagctgggcttggttcccaggtcacagtttggcccccgctacaggatgctgccctgctcagagagagatttaatagggagctgaaggaatcgttagggggccagggagatgtgactgaggctggctttccacgtgaatgagacggggtcggtggagggtttggtgctacagccagtcagaagatttgcaaatgcgaacacattcctgtgtgaggcacgttaccctttgtcagttattgtgaatatgtgtattttaagcaataagattcagctggtcagacttttctgggcagtctcagtgacgcatttcctgtgctgtgattgttctgaagacagagtggctctaaccactgtgagaagcccaaataaaaattgatcccaaaaatg

SEQ ID NO: 2076 - DNA, 484 bp, Homo sapiens
taactcagaggagatacgtgttttatttgtgatagcaaattcctaaatgaacattaggcaagtggtatcattatcaggccagctgcagcctcttgccttgacctgcattcctagaatttctttgttgctgtaattcttgattaagtgaccttgactttcattttgtaattttgctaatcatcagcaaattcacttgcatgacgttactgccaaatatgaaggcagttgaattattatgagtgattgtggcagaggtttgtgccatggtgaaaactttgatgtttgtctgtgttcattggatccatctttttaaatgacattaccatgagtctgttgtcaaacctaaatatctttgtttgaatttaaaatgggactctatattgttgtagttcaggtcttcattgactaagagattgagagaaatctgacataagaaaatattgttttcactgcaggaataaagaggaagtaacagtgaatccaa

SEQ ID NO: 2077 - DNA, 1196 bp, Homo sapiens
atctatagccaaccaggggaccacagtagtgggcaagagtgatctgcatgttttttaacctgcttttccccatagcacagaccataagaaacaacaaatggggccgggcacagtggctcatgcctataatcccagcactttgggaggccgaggcaggcagatcacctgaggtcaggagtttgataccagcctggccaacatggtgaaatcctgtctctaccaaaaatacaaaaaaaattagctgggcatggtggtgcacacctatagtctcagctactcgggaggctgaggcaggagaattgcttgaacccaggaagtagaggctgcagtgagtaagcatcacgccactgtactccagcctgggcaacagagcaagactctgtctcaaaagcaaaaaaaaaaaaaaaaaaagaaagaaagaaaaagaaaacaacaaatggcagagagccaccatattccaaatcactgaaaaaaataaatgaattatttttatttatttatttatttttttgagatggagtctcggtctgttgcccaggctgaagtgcagtggccccatctcaactcactgcaagctccacctcctgggttcacgccattctcctgcctcagactcccaagtagctgggactacaggcacctaccaccatgcccagctaattttttgtatttttagtagagacggggtttcaccatgttagccaggatggtcttgatctcctgacctcgtgatccgcccgcctcggcctcccaaagtgctgggattacaagcatgagccactgcgcccggccataaatgaattatttttaagaggcattgattaaagattcacagcaaatcactagttaagcagattttttttctatttcctacttcaaagttctggtgccacatagtggtcagaaatggaacagagaagctgtcttaagccttgttcaagaagcaggaaaggcatcagaagaagtaacagttggcagagggtctcaggaaaaacatcttccttctgatcttttgcatagcaccttttggaattttcatcatgtttgcttattaaacaaagctcctactgccatcatactaatcatgcaaaaagattgccaaatcatgtttggtaggaggacttttgaggtagcttttgaacaaatgtttttttcttttttctttttttttgcaataaagaaaacaaattaatcat

SEQ ID NO: 2078 - DNA, 1301 bp, Homo sapiens
gccgcgctggctgcacccgcccaggcccgcacccgcccagtcccgagggcccggccctgtctgcccatgacttcactggtgtgagcttgtccgccatgctgtaccctgcaacatcctgagaccaaagaccttgtgcccttcccaggagccgcggaggaggacagtgagggaggaatggaaacgagagatgtgaagttggcagccggggcatggcgttcaagattttggagatgaactgattccgcccaaatagaatcatgtttattttttcagctctcccttttatcattattcacactcctctgccctcgatttgcatgaagttgaaaattgttgcgatttattttttcaagagatcatgtttttaaagtgtcttttgcagagttttaagttgttctgtctgaactctgctgtgatcccatgatgtgaccctgatgggctggacttgcccctccggtagccttccttggccctcccagcgaggggcacccttcctctgtgccccagtgggcatcaccgtcgatctcgctggctgaatgaagaagaccgtgttactgcagaacctgccaagtctgtcatcactgtggggtgtagcctgcctcagagggacctgcaatcacctctctgagctcagtggtattttgagaatttaatgtttaactgtacccctttccctcaggaagatttaacatttgcttgggaatgtgattttgctcccaccctaaggaatttttatcaccaaaatgaatgttaatgaatttaaaacccatggtttatcattggcaagaggcaagttgacttcatcctgtcattccagcctggggtctgccagccagccctcctccccgacccagcgcctaagctcacagagtgtcgtcgcccacctccctggtccttgctcttgttaacccaagatgctgctacacagatgccaaatggaaatcttccacagggctttttcagtaaacacgtgatgtggagtgcaagctcctccccttcccactagaacatactttaacagaaaacgagtcggaccttctagctgcactctgtactgtgtgccgagaaggcatttctagacccgtgtttttaaaggagggaactttggggattgccagcccctgctcctcctcccagggagccaactgtccctcctcccctgtccctgggcccatggggcccggcagtggctgtgtcccctgcctgagggctctgtgcctcctgcctcagatgcggcctgtgccagagaggctgcctgtacagccagggtcagtttggccccaaacagggattcagaaacc

SEQ ID NO: 2079 - DNA, 228 bp, Homo sapiens
aaagaagagacaataagaagcattctttctttcaacatcacagacattggcaactctaggatgtctatacagagggataaaaaggggtggcagttggctgggcgtggtggctcatgcctgtaatcccggcactttgggaggcccagggaggtggatcacttgaggtcaggagttccagactgacagtctggccaccatggtgaaaccccgtttctaataaaaatacag

SEQ ID NO: 2080 - DNA, 1675 bp, Homo sapiens
ttccattgctttgaaaaagttaatgcttaagagggaatgatatgcatttgacttgttaaacagcctattcctgaactataacacctgccaccactataaaatgtcttcaaggcttcagtctcatatttagtattgaatacttacattctctaataagaaaaccaccccttagattgaagtaaactgcagtcctggagcaatcacagatgagttatctaagaatacagctttctgaccttcagctcacgcttcacagtgatcgatgattcaggtgcagaggaagtacaaactaaggtgctaaatctgcgatcatcgtcatttgctgtgaactgaaattaaaactattcatgctacccagccattacccagctaaataatcttactctagatacctaaaacataagatcactgccagagataaactaatggtccacacccaattccactctgatagaattatttcacaaataataggtgtttgtttaatggacacttttcacctccttcaattccatatatccttttcttctatgtaggaaaaaaatagtctagtgtagtattcttcccttttaaacacattttggttcttctcaaaagaacttacccccattcgcgctctgctcagtgggtaaaattagatgcatgttgaccatgtctatgattcgtgtaattacttatccctgcccatttcatattctttcaattctgtaggttaaaaaaatggcagtgatgaattttaagggtttcccccaacatataaaataatgcaaagaatccctagactttaggctttcagcttacacaaatctatttaattaggaaaaaaactattaaggatgtagcttttcacctttactttagaagcacagtaaatatcccaaactgtgatgaagccgaccttagatttagtagtgtaagctagaagaagtgagtgtttctatgagtggaaaaagccaaggtgtcatttatgtgtcagttcatttgtggtgatatagaattagctttttcatccccttacccttagaatccacgtattccccttcccactagcctaggtcataaagaggcgttgctttcactctcctatgccttttacgagtgctaagtgtaggatattttgtcaccagaacacaatgctaccgccccaaagtaaaagaaaccacttctggtcaatcaacactaccagcgtatatataagaaagacatctttctcttttctaaaagacttccctaacacttaccccatggctgcacagttggtggggtcctgccggagaggaagagacactcagaccagagaaggggtgtgcatgcgcctactcgcttgctagaagtagattctggacagtcagctcttcatctgcccaactgtgtagcatctgcattgcccagtctttcatgtgtgccaaggctgatgcaggatttgttctctgtccagcagtcacttcggccagagctgaagagttgccccgtctctgttccatgtctcctttaagagctctggtgataaggacatgatgcttttactgaactttcttatcctagcacatgcttcaatagttcaaggaacttgaaaaatacttttccttacctttaccccatccctgtctttactcctcacacttactgtaagacattagtaacataataaattaaaagtcacacgaatctcacc

SEQ ID NO: 2081 - DNA, 840 bp, Homo sapiens
accatcggtattaaagaccttttggaagctactgtttttaaaaagggagactaaaagcaaatacctcagtgattaatatttaagctacagagaatgtttttgtctatatggatctggaagtatgctgcttggaaaaatctgaacaggacagttccacgtttctatagcaaccacatttgactaatttccgttagttgaataagaggtattatgatcatggaggggacatttatggtgctttggattgtgtggaaactatgcattttctgttcaaatgctattttaatttattacatttagaaaaaaagttgatttcaataattcatcctgcttcaagattcaaattcagaaatatactatcatcttgaattttagctgaagaatcctatgagcatgtatgtttctgctgtaaaaacgtagttactgtatggcactcaaaaactatgttaaatgatccactaactttttttttcttggcccatgattaatggaatgtatgtaactaggtagggttcctttcttagatctagaggaagtacagccacccactgacatctgaatttatatacctgttgagttttgagtgcacccaaacactcgataaaccaggtgaagaaatttagcttccatgttctacttcagctaaaacagctacatacaacctagtacacttgaagtcagacagacatttcagttgcttacctccagtactgagccttgctttgggaaactaaaagatttagaccaagtcactgccagtttttgcctttgttgcattttgtacagtttttatatttttgatatcttgtaaataaagacaaccagcttttccaggttcat

SEQ ID NO: 2082 - DNA, 713 bp, Homo sapiens
tggcaggctggctctgtgggacactgtcaacaatgggccagcccggccccgcctcgagtgcctgggcactcggaaaactgttacctcaggactctatttaaatgctgctttttctgcagcacgcttggggaaatcctgtcaggatgaaaaggaagttgagattttttaaatccctcttcgcttgctttattttcagtaccaacttgttatctttttccttatctgaggctacctggggattgtgggcagcaggcccctggactcccagaaatgctgagggtccctcttccaggggagttccctggggagcaagagtagaggggctattcccgagggtcctgtggtcagggtcctgctttgtccctggcaggctgtcagtccagctggagggggtcagtaggctccagggagtgggccctcccctccgatcttggagtctctgggtgttccttcagcctcagcctcactggtaccttctgccctttaggggaggctatgagtctgggacaggaggacaaattcagagcccagagggggaaatggagaaacctgggctgctgaggaaagccacgggtgttggcgtgaactgatgatgtctcatcccacgcccactatggccacattacctaacctctccatatctgggctattcaaggtcttggaggccagcacagacccagctagttgttgaagccagttcttttttgtcttgg

SEQ ID NO: 2083 - DNA, 2173 bp, Homo sapiens
cccgttgcggtggcccatcccgcatacccatcttctcgggcttcagcccagtcccagctgaggaacaagccagtggggccccttctcttcctcattttggaaacttttcctcctctattaaacatgggaaactgaagcccttgaaggtttggggagaggggggtatcaggcagggagggggcagaggcaaatcaccgggcagagggaggggaggagaggaggccgcactctccctgtctctcccgtctctgcacccagctcctctctgcatgctgagggctaaattgggatctcagcctgccctaatctttccccatctgaggcaggtttctaggaggtgtctgtagtccatgtggcacctttgtgagaattagaaaacatgtaccttcctctgggcagctgcagccctgagccaggacatgtggcctggctagtgcagcatggagtggattttaggctcatttgccctctcagccaactgcccttgagcagtgtacagcctgctcaacaaccgccctgggcaggccgctcctgagctgctgtctccctctctgacctatgcctaccttctctttcttcgttccctgcccactgggcatggcagctgggggtgagaggctggtggttgcctcccgtcctgggcaggctgcagcctcatgccatgtctctctcccactacctgatgggcacatggacaggctgcagagggctccaggttctgggcccctggctgagaaggggaggatcctgtcctggctgtagccttcctgccccaatcatctcgctggatgccattgcccaggggtagcccttcggtatgggctggggagaagggttggtcttctgccagggtccctaagaacaggtttgcagctaccctctctgaccttttccccatatcttgtgctgtccagggcctaggctgatagtcagagcctgtggcacacctgggatgggccagggccctgggtggggaggtgtgggttccctgggccaagaccagcctttttcctcagtttaattaatttatttatttggtttgtggttttgggttttttttgtttgtttgtttgtaggtgagttcccatcctctgggcccctagaaatgctgcctttgtgtgtggggtacctgggaaagggtgtggctgaggcagtcataatgcagtatcttcccctgactccagccacaaagctcatacccagccctaccaatcatgaactggaactccataaggaggggccaaattgggaggccttttggcaaacagtgtctattttacagagaggcaaaccaagcctccttagtgccctggggctgatggtcacccagagccatagagcacccttcctcctgggccagagctgggttatcatggttggcttaggtacctcaggtggcccaggaggtcccccctccataaggacgtcaaacttccaggagggccagtgttcctagtgtgggccaggaacaggacagggagaccttgtgatggcggggcagggagcctgttcgtagggaagatgaggaggcaagggctgcctctcacacctccaggttctctaagttctggggagggagcgccccacctgctgaggtcggtcctctcagccctgcctgccctggcctgggctctcccagcctcccagccctctgccccctcagatggctttttgtttttgtttttttttgcatccatcagagactgcacctctgtgtggcaggcagggcatgggttttagtcctggccactgaccagctgtgtggccctggccgagtcgtagccccctggagcccagcttccatttctataaaatggttgtttcgggagagaggggcaggctttctgtgtgactcgggagttcttccgtgagggctgccagggggtggtgtgccaggacctcaggctgggcctttgtgctggccttgcagtgggtgtgtggggaagtcactgtcccactatgggtctccactacccagtcactgaccctgggagaccccttctgtgtgggagggagcgggggctggctagcgggccccccagccagggatcccagaggctgagggttggggagaggaagccatcatctcattacctctgtcagtgcaggggtggctgctgcttcccttgtgcacttgggtcgctgtgattgtgaataaaagtgatttcgtacc

SEQ ID NO: 2084 - DNA, 1864 bp, Homo sapiens
caaagggaagcattctgtgcgtgggtttggctctttcagtatgtcattctgttctcatcttctgccacagtctctcagatagctcatgaagacaatcacctgcctcaccttctaggtgttttccttttttgttttttttgttttgttttgtttttaagcaaagatgaagggaaaacgaactaagacagacgctaggccatgttggcaaagtagcatcttggtgactaaggtgactttgtatattcatcttaaaaattatgttctttagacactgctacctgaaaactgttggagaaataatgtttaaagttatttaagaaaaactgttacatcactaagtattaataaattcttcttacctgacgtaacttctcaatgcctaaattctgtagttgaagctctgctgcagagagttgggataattttcttttggtggatcagctctcataaaaaagctatgatttgctcaaatatgctgttgactcagtaaatgaatatatttttttctttaaataggaacaacctcttttaaaagagaaaaattatttcagtgatttgtcaaaacgaattacctcttttggcatgagctaataattgagggtgctaattttcttaagatagtgcctaaaacactaaatttcagtcaagtcgtaagtaggattttctttttgatcaacagggacaaaaacatctttagaattaaaaacatggttgttttggaatttttgcttctcttaccgtttgatagaaattttcatcctaaaatacatgtacaaagtttggaaagatgaaaaaaagaggtagcttttagattgcaaactggaaatgtaaaactcatgaaatttaagcaatataggtttagctatctgtgtttattttctaaaataatacctgagctggttaaatgatttctctccatcttagctaattctgtttaaaactctgtcagaggcctgcaggctgtgagttatatttataaatatatcttcagaaattaatcttaaaagaggcattagttcagaatacttttttaaaagtttaaattaaatatttaggcacgtcaggaattacttttccttattttgaaatgaggctacttatgtcttggttttattttgttccatgtttaaatcattcactttgatttgagtgggaaaagcctgaagcctttatcatgtggttgctggtgtgtgtaattattaatgaaatgttcactcctagtcccttatgaggcttagaatttcaaccacgtgtcaggtcagacagtattataaactgtactttgctgtctgagacagcacatttgtgaatgatgcttgctgcctgccattttcaacctattctctcttaagagtgctaggtaccaaattgtgaaagtttgttttcagttatattacttttgaggctggtgaaaaatttaaatgtaactttgtgggaacactgattcatatttagaaaatgtaaatgtctgtagcactttcttgcagttaatttgaaaactttggatgctgaaccttgtttgtcagtgatttagatgatttaaaaatgcatgtgtgatttgaattttataattgttttgacaagcataatttacttggacaacttcgtaggtagccttaacttctggccaagtttgttttttatataaatatatatacatatatacatattatgtatggttgtaaattcatacacttatcacatgaatgtgttactgtatacaaaactcttaatgctttattctcaaatgctgggttgaaaaatgttttgaaagccttttaaaatatatatctttataaagtaatattcaggatgatgataaaaattgtttatattgttatgataaaaatgacagtataatgtt

SEQ ID NO: 2085 - DNA, 680 bp, Homo sapiens
ttcctgatttttgctccagaatatctttgagaatgacaacttaattaaaagatacttaggcactttttttttttttttgagactgagtttcgctcttgtcatcctggctggagtgtgatggtgcgatcttgactcactgcaacctctgcctctcgggttccagcaattctcctgcctcagcctcccgagtagctgagattacaggcgcccgccaccatgcccggctaatttttgcatttttagtagagactgggtttcaccacgttggccaggctggtctcgaactcctgacctcaggtgatccaccgcctaggcctcccaaaaccattagggctcagaggaaggtatcccaatgaatatcaattaagggcactttaatatataaattataaactaagttctaaaaggaaaattagtattttggatagatttgtcaaaacgacatttaagtcatgtttaaaaagtcatttgggcagttctggaaactagttttaatacatttgttttttatgacaaaaagttttattttaaatgttaaaaattgtccaatctggtgaatgtctaaccctaaagtttaaaaatttctgcctcctaagtttatgtaccttgtttccatccatttaccacatatttccatctgatagtctagcaggtaattaaacttatatgtccaaaaccat

SEQ ID NO: 2086 - DNA, 46 bp, Homo sapiens
agggggcaggagtcagcaataaagctatgtctgatattttccttca

SEQ ID NO: 2087 - DNA, 133 bp, Homo sapiens
gtctcactgtccaccccttcgctgtccagaattccccagcttgttgggagtctacgtcacggcttgtcttgggaaccaatccgtctctctttcttttctttgaagttcccaataaaatgaaaacaggaaatgt

SEQ ID NO: 2088 - DNA, 551 bp, Homo sapiens
cctgaagctgctggctgtttccagttgaacaactcatgaaatctgctctgggacattttgggggaatctcaaagtccttggatcatagaactgagtgctgagaatccaggatggaaagaaatgcagaactatcatagtcacatacatataagagggatggtgttttgtctggttcacgttgatattaacagatcataattctctctgttcagttaggctgacctattgcatgaagcaaatcttttgttgctaccccattgattgaaatgtactagaccttaatttctttattacagacattggtgtacttgaaggttttatatttaaaagtatttttgaaatgcaatgtgtcccctctcaccttattaacaataatctattttaattattcctcattaacaagtcattgcatgagatgagaaagaaggacaaactcttaagaatttaaaaagtgttttgagaatgatttctatatggaatttcttttcaggcccggaatgggaaaatctattccaaagagacacactaataaatacttcattataaaaaat

SEQ ID NO: 2089 - DNA, 1861 bp, Homo sapiens
taccagcaagccacgtggtcaaccacctttctgactttttatttttgatgattactattactattattatggaaaaattaaaatgtcttttttaccttttgtttaccaagggccccttcataaatagcaggcaaatgcctagctttgggagaaaagggcattcttagctgattgaaatgagacaaagggaataaatggctgtatttgtgctaagagcaaaggatgcatcttcccacagcctcctcgctttactctgccattggtagcttaaagactttctttttccttgtggtctcccttttttcaaaattgaagttgggttggctctttgtgaacctctcatccccacagcagaatcaccaacactctccgcttcccccagcacacacacatacaacacagatcatttcccagttagatccgcaggaagtaggttggtgggggtggatgtagctgcagaaagcatgcacaactttgtgaaagaggccctgccttgtgcatgtccatagtgaggctacagatggcttattgtatataattacaatgtaaatagctttttatttcctaagaaataatttaatgtttagtaaaaaagaaaacagaaaaaagaaagatgcgtgtgttggcttacgcactggccctcagagctgaccaacccgccaggcctgctcaatgcattgggtttggatgctctcctgttgtctgtcacacttaactcttgcatctccttgtccatgccatagctggtttctacttatgtatataaaggggggtggggggaggggcttctctggggcaattgataaaggaaggactctagtgacatcatagaacatggcagtcgtttttgttccaagaatgatatgaaaggtgaagaagaggcccactagaggcttcatactgagacccagatgggggaaaacagcttcctctctaaaaggaaaaacttgatatttatcagtctgagaaaatatttttttctaaagaaggcagtcagtggatcttaaaatgacaatctgtttttaaattggattctatgaaaatgcataatgcttatggtgaattctcaggctattctgagctcagaaaagtcccctgggcactaggtaaagcccagtgaatgtctcttggcatgggaggagttaaagaggttggaagggaagaggcatttgtggaattatgagttcatgcaaaactctccaggccaagtaggggtctagcctttaatgatattagtcaaaggcaattttagcaaagctgtgctatttgcttgtcagatgtacacaacttccttaaagtcaaatgtctgccttcagttcccttaaggtagttcttgcctctggggtgagtggctttcaaagccttttagcttttccagcacctcagccccttcacacatttacacataccaatttttttcaatagggtcacgttaagccatgctgtaagcattgtttttattttcaggcttagcctgagcacacttatttttgaaaatgatataatgtatatatatgggaggaaaggccacattttgtacctgttaatttttgtgggatgttgttcccattcttctttgtgagacagagagaatgtgatatagagaaatctggctggctacagtgtagatcagtattaggaatatttctaaagatcctgcttttttgtttcaagggttaaatggggcagacaattgcaatacttgtactaaacactggaatacaaatgcatgactcatatctatatatacagtatatgtacatatactgttcttggttttattgttccacttgaatatttctactgtaaaaaaaagacagtggttttgaaattgttgaaaataaatgtatttttgtacatc

SEQ ID NO: 2090 - DNA, 1944 bp, Homo sapiens
ataaagtctttttataattattattataacaatgtgacattgcacatctaaataccacatttaagttgatcattaatatgcaatggtagatcagattgggggatgtagcaaactggactttaagaactggaaagaggttttacaaaagaaaaactttcagattcatctctcattttatatgtccagaaatggctttgaattttaagcaattactagttttaattagctctgccctcatgaagtattattataattcaccataaacagctatctgtctgaattacttcaggccttctccataatatctgttagaaagaaattgccagtgagcaagtgagaatttttatttctcaatacctgcttcacttgataatcatattataattttttatcatgattattgactatatttttggagtcccattgtttcagtgggcattaacagaatgctttaaaaacttctaagacaagaatctatagcattagtatacactggcacataattttttaaaaagttttaagaaaagattcatttggaattttattcacagtataaaatttcctcacctgaagtaactttgtttgccaaaaaagttgttttaataaactataatttttgaaaacttccttttttattagtttagaaagccccttatttttcaacaaaggggattttgtacacataacatgggttatttagtttaactctggcaaaaaaaaaaaaaaaaattttgtatgttgatgtttgtataccgttcagtataaaagtgtcctaagcatattagccaatcttttcacagtagagcatacttaaggctgcttggtactgagtatacttaaatataactccagaatccagggacttggtgttaaaacaggattagagcatgtaaaggtacatctagattcatatttgaatcttaaactgtatttttctcttagtattgctaatgagtaaagaaaagtctcataaggtagccaaatgaaaaagaatgaaagggaaagtgaaaaattaaggggacaaaagatgggatgtgaaaagaagaattctagtttgatggtgactcatattcacgataggatacaaagtgtgatttgttggaaacatgtcccaaatttctaaaattctgcttctctgccaaaagcaatgtctttcttggttgatatttgagttttaaaagggtcaaatctttctaattttttgtatctttagagggcagcactagaagaaatcagcaggtctaatcccaccagtaagaaaactaccacttcttgatttttacagatttaaaaaaatcttttcagtgacctttctttttaatgtaaatacaaatttaaacctaggcttaatataggcgtttcccctttcacccaagtgatgtcacagttcgatgcaaaatcaatgatccagaatgatcgtgggtaaaaataactcaaagtgtttcttaagggtgagttggcatgcaaaaaattacattgattacagtgtgttttggagctggctctgtttgtgtgcatatgataatgcagagttgagccagagcctggaaatgtcattctagatctcactaactactggaatcagtgttttaatctcttggtggaaactttcagttgcttaactctctattggaagatttttttaatgttctacatcatttatgttgtattacaatgtatgtagaaatagtaacctgtgaactatgcttttccataactttttaaaaatatatatatctaaatgaatgcaatgtgcataaatattttttaaacataacagtgaactattgcaccttttgctaatgcctctatttacttgctttggcataaagaatgagccaatgaacctctgtgtcctgtggaaaaatgtataaatgttatctgatattgctcttagatgtaatgctaattaatgttaaatcacaaataaacagtattttaaat

SEQ ID NO: 2091 - DNA, 2376 bp, Homo sapiens
aacccagcatgacataacagtgcagggcaaaatattcactgggccaattcaatacaaacaatctcttaaattgggttcatgatgcagtctcctctttaaaacaaaacaaaacaaaacaaaactatacttgaacaaaagggtcagaggacctgtatttaagcaaatacttagcaaaaagtggggcagagcctcccaaggagaacaaatattcagaatattcatattggaaaaatcacaatttttaatggcagcagaaaacttgtgtgaaattttcttgatttgagttgattgagaagaggacattggagatgccatcctctttctcttttctagtttgctcatactacattgagtagacacatttaaggatggggttatgaacccttcctgagctttatggtcctaaaagcaaaataaaaactattcgaatgaaaagacaagaaaatcaggtattaatcttggatagctaataatgagctattaaaactcagcctgggacagtttatcatgaagcctgtggatgatcaatcctttattattattttttttttttgaaaaaagctcatttcatgctctgcaaaaggagagactcccatgaagccttttgaaagggatcatcatgcagctcaactttctgttggattccatgctaagcaagctaaccttatcctgcattgttagcactaggcacccagctgccacctctccatcctgctgcccttaggccacatgggagcagtccatgcatgacagcctctatcctacaaggcctatgagtatggattgggggggccaaaaggaaaaagctccatgtgcctctttgtctgcgtgggtcagaagagttgtgcacgcagattagcaggccaaggtctgagccacagcagcatttttatttcagattttgataactgtttatatgtgttgaaaaccaaaatgacatctttttaaagcttatccataaaaaaaaatagatgtcttttatagtggaaaaacacatggggaaaaaaatcatctattttgatgcagcatttgataatgataaaacacctcacacctcactctttatagtgcacaaaatgaatgaggtctgggctaggtagaaaaagggtcaatgctatttttgtttttagaatcattaccttttaccagcttttaaccatctgatatctatagtagacacactatcatagttaacatagtaagttcagcacttgtctcattttaatgtaaagatttgcttccattttcctacaggcagtctctctcttcctcacagtcccactgtgcaggtgctattgttactcttacgaatattttcagtaatgttattttcttctaagtgaaatttctagcctgcactttgatgtcatgtgttccctttgtctttcaaactccaaggttcccttgtggccctctcccttaccctgggaaggcctcttggagaccttacccctggctgtttggactttgtatactttaaataatttaactacccttaattacttaaaaaaaaaaaaaagctttatgattttcataacttattgctgattttaatggattgttaatttcagtcctgtagttttattttatgtttagatagggctgggcaaggaaaaagaaaataaagacaaccatatttagcagtgcagttgagttgtgtgttaatgttagactatccctttgtgagtgacactttaacagcattcactgcttctatatatagtgtaccatcttggtcatacattacgcctcaacatatacttgtgctcttcctttgcctccagaagaagtttttccttgattgtgctatgtttcagtggaagaaattctttgaagtagatgtgagtgaaaaactgcatgcctttagaagcccagtatcagaacttgctacgtttcaggtgctagggacttaatgaaaaacaggacaaaacaattcctttttgtggcccaggtaaattatttctggtttcacttataattactaatggctgagtcaagatgttgtctctgtgtttgcttactcttgatcaagtgtgagacagtttgaagactgtgctaccatacaaagtgaatgaagccagtgactaagcttctgtttgttttgttattctcatggccttcgcttgcattatttgggccttcattcagatgaacttgaggtgccattttgttgcatatgtacaggattatgggctggaaagcatttgttataaacctatagtgcacattttaactgccccctaaattacccttccctgggtttgttttccttggggtggtgtagattgtatgagtaagaagtattaattttttaaaagacaaatcaactttgaagacacaaaagttaattggaagaaataaaaactgtgaacgaag

SEQ ID NO: 2092 - DNA, 1116 bp, Homo sapiens
aactgggatggaggaatcggcccagccccaagagcaactgtgatttttgtttttaagactcatggacatttcatacctgtgcaatactgaagacctcattctgtcatgctgccccagtgagatagtgagtggtcaccaggcttgcaaatgaacttcagacggacctcagggtaggttctcgggactgaaggaaggccaagccattacgggagcacagcatgtgctgactactgtacttccagacccctgccctcttgggactgcccagtccttgcacctcagagttcgccttttcatttcaagcataaggcaataaatacctgcagcaacgtgggagaaagaagttgctggaccaggagaaaaggcagttatgaagccaattcattttgaaggaagcacaatttccaccttattttttgaactttggcagtttcaatgtctgtctctgttgcttcggggcataagctgatcaccgtctagttgggaaagtaaccctacagggtttgtagggacatgatcagcatcctgatttgaaccctgaaatgttgtgtagacaccctcttgggtccaatgaggtagttggttgaagtagcaagatgttggcttttctggattttttttgccatgggttcttcactgaccttggactttggcatgattcttagtcatacttgaacttgtctcattccacctcttctcagagcaactcttcctttgggaaaagagttcttcagatcatagaccaaaaaagtcataccttcgaggtggtagcagtagattccaggaggagaagggtacttgctaggtatcctgggtcagtggcggtgcaaactggtttcctcagctgcctgtccttctgtgtgcttatgtctcttgtgacaattgttttcctccctgcccctggaggttgtcttcaagctgtggacttctgggatttgcagattttgcaacgtggtactactttttttttctttttgtctgttagttatttctccaggggaaaaggcaataattttctaagacccgtgtgaatgtgaagaaaagcagtatgttactggttgttgttgttgttcttgttttttatagtgtaaaataaaaatagtaaaaggagaaaag

SEQ ID NO: 2093 - DNA, 330 bp, Homo sapiens
ttggaaaatactacctactggtttgggagatgtatatagtaatatgattctcatacccaggaactgtaaatttaaacctaaatatttggccaatagttttcagacttaaagcatcatagtccttttatatttgtctttgtattttataagatactctgtaatgtcatgtttgtactgatagtttaagaatttaatttcctgtacaactttttgtaaaatgttctgctcctattttaaatgttttgaaacatgctaaatattctttcctaattattttatcacttatactaccttttttatagcttcaattaaataatcggttttatgact

SEQ ID NO: 2094 - DNA, 1917 bp, Homo sapiens
atataagaactcttgcagtcttagatgttataaaaatatatatctgaattgtaagagttgttagcacaagttttttttttttttttttttaagcacttgttttgggtacaaggcatttctgacattttataaacctacatttaaggggaatttttaaaggaaatgttttttcttttttttttgtttttcgagggggcaaggagggacagaaaagtaacctcttcttaagtggaatattctaataagctaccttttgtaagtgccatgtttattatctaatcattccaagttttgcattgatgtctgactgccactcctttctttcaaggacagtgttttttgtagtaaaatcactggtttatacaaagctttatttagggggtaaagttaagctgctaaaaccccatgttggctgctgctgttgagatactgtgctttgggagtaaaaaaagaaagttatttctttgtcttaaagaatttttaaaaaattagtcatgagacttattcatctttccagggaacatactgattggtcttaaaagactagacagttaagtaaaaggtggctggaacatctatttttctacaaaactggaaaaatgaacctggttctagaagaatgtacaccaaaataaaacatgtgaagcagtattgattctttattgggagtacatttttttaggtctcttaaactttaatttcacacagtaaattttgaatctcataaggaagcatatttgaacctagtcaatttaatcttagtgttcccttgaaaactttttttccctacaaaattttaagtgaaaaatacaatagtaaattaagattacactggggaaaaaaatgcaggtatcactttactccattgttatctgacctagagcttaattaagttttagaaatatgtaataccttccatcattccatcatccttaaattctgttaccaaataatggctaatgttacaaaaagttatactccagagacccaaagcttgacatttacctaatgtatgagaaaatattaccaattaacaataaagaatgatcatatttttaacctcttttacatagcctaataactcagcaaggcctcaacgtctgtgctaatttaaactgccaaatattgactgcagcaaacaagaattatattcagaatttatgagggtactgttaggagtatactgcttacaggtttagatatagtctgttagaattaaaaccaagtttagtgttcatatttacctcatgggctttatcaagcccatattacctcagcttatatatagttaccatttttaggtttttaattgtttgacacttggatgataaatgcagtcattttattctcaagtgcttaaaattaatgtaattaaaagcttagctgactacagaataggtgagggtttcttaaaaatgagatttaagggctgggcacggtggctcatgcctgtaatcccagcactttgggaggccgaggtgggcggatcacttgaggttgggagttcatgaccagcttgaccaacatgaagaaaccctgtctctattaaaaatacaaaagtagccaggcatggtggcgcatgcgtgtaatcccagctacttgggaggctgaggcaggagaattgcttgaacctgggaggcagaggttgcagtgagtcgagatggtgccattgctctcgtttgggcaacaagagtgaaactcttgtctcaaaaaaaaaaaaaaatgaggtttaagacagttttgtcattactggtgggatctggtcacacaagatagcattaaacgtgacatggcacataaaattggttaaaaaattttgttttttaattacgtaatgtaaaagcccaacaaacactttatgcaagattggaatgtatcttcaaattcagatttaataaacatgtaaagatcctctgt

SEQ ID NO: 2095 - DNA, 1846 bp, Homo sapiens
tataaatctgctggtcccacacactgttcaaaaatagactgccattaatgtttcttatctatatctgtatctatttatgtagatattggtatatggcagatttataaaaattgcattatgtgtttctgctaatagaggaatcatagccatttagaattttttttaaattctgtacaaaaggcttatataagttttctttgctgaatttgatggatgtttttctgttgtgtaatctgatatgccagtttgcttaaaacatttgccaacacattatgaagttattaaatttaagggacagaggtagtatagttagatatactttctcttaggaaaaataatgggcaaaaatttttgttgcaacttttcatatatattttccccttaccaattgttttatccttatagtattgtaggccctgaaagtagaatttttctttaacttattttgagatttgagatttaaattttatgtattgtttacagtcagagtaaatcactggatttcttttgtttgttttgatttgctctgttttattcagtcaaatctagagtttgaatcctctgctaaagaatttgcatccactggtgtaaacagtgaaaggtatttgcttgttgaaaaaaaaaactggcaaagtgaaaagatacagtcaaaaatctagaatttctttaattttgcttctctgacgagttgtgaagcaaaatacctgaagtgagtctttgggtaggggaagggtattgagaccttttctagtatgaatattttttaagtttgggggaagagaaacttgcagtgaaaaggagttttttcattcctgaaagttgcagatccacaaaactaacaggataattgggcaaataaattacatataaacacacacaatctatatatgtatatacaatgctatatagatatgtatttattatatcataaactacagtaggtaactttaaggatttcttcctatccttgtacaatgacatgaatgtctttctttgaaaactgcaatgtatgtatgtttcaaggttatttaacagtgtactatggttttatatcttgacttgccttgtacatctttcaattctggaatatctgtgtctaagcacaatatcttcacactgtgctgtattgctgctgaactaaatgcacttttccccacatatggggcactggcttcaaacaattcagttcagtatcattacttttaatctcatctttcctttcttggtagttgttaatacagttatggaaaagaggcacattgcatagaagccattggggagttcagtggaagttctgtaagatgtgcatgtactatttgatgcgttttctttgcttcactgcttttaatacttagcagtattgttggtctaagtcaatttgattattgaggagtctcagagcaaggtgcgttctagatgtcatcctaaaaaacacttcatatataattaatcactattttgtataattacatattgctgcttgtgtgtttttttttttttccatttagttgggcgttgtgttttacacaaaaccatttttgaattaaggctatgatattaagatagaaatttggactgttgttctgcttttcctggcactcaaattcatgactagttttgaggtcaaacctatgttcgtaatgagagattttataaggatcaactaagaaatggaaggcaggtgaagatataaaaccctagaatgcttaaatgtgctgtaaaactattgtagatgtcactggattttaccaagtaatatcctttcttttttttttccccccatctgctgtggcttttcagttaaaattttgtttataaaaggaatttgtttattacagctctacct

SEQ ID NO: 2096 - DNA, 1418 bp, Homo sapiens
ggtttccgctggcgcccgcgtagactcacgctgactgcaggcagcggggggcatcgaggggtgcttagccccagggcactcagaaacccgggcgctgcctgctctgcgtttcctcgtctggggtggctctgcagcctcctgcgggcgggcgtctgctgctcctacaagggaagcttcttgctgccaggcccacacatccccagttgttggtttggccactcttgacctggagccatcttcctagtgggccacccctaatcactattgcttcctaaaggtattttcaccctcttcgcctggtacagccctcacagctcttcagagcaagcactggactacaagggcatggctcacaaaaggttaatggatgggggttacctagccctggctaattccccttccattcccaactctctctctctttttaaagaaaaatgctaagggcagccctgcctgccctccccatcccccgctgtaaatatacactatttttgatagcacacatggggcccccatatctcttggccttggttttgatgttgaaatcctggccttgggagagatgccttccaggcagacacagctgtctggttcaggccaagcccctttgcaatgcaagccctttctggtgttatgaagtccctctatgtcgtcgttttcaccagcaactggtgactgtcccttcgacacggacctgctttgagatttcctgacagggaaaagatttctgtccatttttttcctgtgcctaacagcataattgccttttcctatgtaaatattatgatggtggatcaagacataagtaaatgagcctttctgcctcacatcagccctgtgtataaagccattattctctgatgcactgtttgccccagtaactcactttaaaacctctctttccagtgttccctctctccctccagggccactgcttgaagaagaatatgtatgtttctatcttgtatgtctgtgtgcccctcctgccccgaaagtgctgactatggggaaatcttttagctgctgtttttagactccaaggagtggaaattatgtggaagaagcaaacctgatacaatttgcccaaggtaaacagtttgaaaagacaaatgggcctgccaaactgtacagtttcttccccaagagctgttaggtatcaaaatgttgtcctttcccccctccgtgcttttctggttgagatcatgtcattgatgaactgccaaagtcaggggaggagggcagagactttgtgtttacatctgcatttctacatgttttagacagagacaatttaaggcctgcactcttatttcactaaagaaaaactaatgtcagcacatgttgctaatgacagtggatttttttttaaataaaaaagtttacagatcaaatgtgaaataaatatgaatggagtggtc

SEQ ID NO: 2097 - DNA, 1021 bp, Homo sapiens
gataaggtacttaagtacctgccggcccactgtgcactgcttgtgagaaaatggattaaaaactattcttacatttgttttgcctttcctcctatttttttttaacctgttaaactctaaagccatagcttttgttttatattgagacatataatgtgtaaacttagttcccaaataaatcaatcctgtctttcccatcttcgatgttgctaatattaaggcttcagggctacttttatcaacatgcctgtcttcaagatcccagtttatgttctgtgtccttcctcatgatttccaaccttaatactattagtaaccacaagttcaagggtcaaagggaccctctgtgccttcttctttgttttgtgataaacataacttgccaacagtctctatgcttatttacatcttctactgttcaaactaagagatttttaaattctgaaaaactgcttacaattcatgttttctagccactccacaaaccactaaaattttagttttagcctatcactcatgtcaatcatatctatgagacaaatgtctccgatgctcttctgcgtaaattaaattgtgtactgaagggaaaagtttgatcataccaaacatttcctaaactctctagttagatatctgacttgggagtattaaaaattgggtctatgacatattgtccaaaaggaatgctgttcttaaagcattatttacagtaggaactggggagtaaatctgttccctacagtttgctgctgagctggaagctgtgggggaaggagttgacaggtgggcccagtgaacttttccagtaaatgaagcaagcactgaataaaaacctcctgaactgggaacaaagatctacaggcaagcaagatgcccacacaacaggcttattttctgtgaaggaaccaactgatctcccccacccttggattagagttcctgctctaccttacccacagataacacatgttgtttctacttgtaaatgtaaagtctttaaaataaactattacagatactt

SEQ ID NO: 2098 - DNA, 3359 bp, Homo sapiens
tgtatctgctctcccttgataaacagcaacaacagcttgttctgagtaattaagacaaaatggtcacatgaatcattctgttgcgctgacaggccccaggtgaccctctctctccctcaccgccgttgggctgaagtgcaaagagtgtaaaaatattttctattcctgtttgcatgtgggttggtttccttttcgaggtttgtcttcacccagattcgttttttagaggggaaggtgaatgtttatttacctttttgctaatgtcatcaactagccaaaatagccccagtgacactcctagccctctggacgtgtcaagggccgtggtttgggagaggacatgatgagtcagtcacgagagcttctgtttgtcacccgcctcttgttgctgaaaagctcttctgtgatgtctgaggataaaaatgcagcaaaaagcaggggatggagtcagtgaccccgtccagcaagccagccctgttcctacacaggcctcatgaatatagtcatcaacctgcctgagtgctttcattgtaaaggtcggtatttaatgtcggttgtacaggaaattgacttagcactttccctgtttttctattgcataattttttttttaacccaaagatattttttttgctgagcctgcccagtattcactgttcacaactttgattactggctacaagaaatattttcttgccttccccaaatcccatactccccagaatctgctggcaaagtgagccctggtacaggatttaattgtgacctcgtcttccctgacctgtgtaagcatctctgtatcctttcggttttaatatctgcactgccaaaagcagtcctcatacttgcaaaaggtctgacaaggttctctccacatacattccagtatgtaaagagaccatgaatatttcagtaagagcaagaacatgactccatcagtgtgaaatttcaaatgtgattataaatatgggagagtcctataggagggtccaccagagataaacttcacggaaaacgttccctaacctcctttaaaagaatagaggatggcagattgttccaaaaggaatggcttgggtttttaactaacaaatgttagcaagcctttcttgaattcactatgtattcaaacttctaatatgctttgtgatttttttctttcatttctttctgtctgaggtaaccaggaattgcgttcaaaatgagctcatttgtgatcaggcttaaaagttgcccaagctgaggtcgtttccccccagtcacaaagcagaatgtttttctcaagacttcataggcacttactggtccgtactatctttggaatataattagaagctttgaatccttgaaaagcaaacctgttctcttcatcaaaaatgctaaccacctgtgcccgtggatcaatatcacctggatgtagtgcttgatatttttcccaactcagaagaaaaccattatggtttagagaggaaatgcagaatggcagaatccaccagagaaattgcacttatcgaaacaggccaaggcctgcatgtgttcggataaatcatttagtattgtgtaaataaagctgcagcctttacttcggagggatggtgtgggattttggccgagggaagcaggacagagaaggagcaggaagctatgctaattttcctgtcagcttaagggatccgtctcagcaagaatcttgtattctgataacggaatgctgtacgtgctgaccacatctaagaaccattaaaaagcaaggaaacaaacaaacaacccttttctcattccgacacacgaatagtcatcgagtattacaccagcccctctggtggcttccttcaaaactgttgatcttagctaaagtgtataaccagttaccagctgcacttcgcacggccatcccgtccacaatgcagcagactcttcccaaggccacctagcaagcaaggttgatcggatcatctaaactggccgcctcctgaatatttcactgaatcctggcgttcatgttgaagcagacaaaatgagaaaggaggagggcattgctcacctctcaatagcttttttcgttcaagttctatgtctttatcagctcttgcctgtgattttaccccaattcaaccttgggagtgggaagaatatgaacagataacccttggcctaacagctccatcaaacctccttgagagcaactacctaggccaggctagtgagtgctttgtgaggaagctggtcagaaggttccctcaactccttcctggtcctcctggacactgcagaaaagacttaggggatccccagcagaggccaattgctctccttccttccctgccccaccaggaaaggaataacgtccacagacttgaagcagatagtgaagtagatctgtgagaggttctaggtacttagtgtgtagactttgacgaatatttctcaagttgggagcccttgttaaaaatgatgtttaagggagtggttggggggaagatgaaggcatggaggaggaagaagagaaggaagcccttgccatataaaattcatgcagactaaacagtttccctgacagaataaataaagtggatgctaccccactccagaatcaaaagcaatttaattaaagtctcttaagttgtaaagagttttaaatgatccgtgttgaaggcgaatgcctgcaaatgcagtgggtctgacgtcagctgccgggcctgggctgggaggccatttgctattctgtttaaggcaggctggattgtcttattttggaaccagcttggtggggggtttgctttgctactgcttctgagccctgagcttcaaaggctgaaattaatggtgaacaaaattgtgcggctctggccatcccatgcggggcaagcccattgagggttatcattaagtaaagaaataaagagggggaaaaaagcctgcctgttccaaaaacctcatcagataatgacctcagtgattgggttttcattaccaaacagcatccagagattatcaacccatagaagaagggaggggaaaaaaaagaaagaaaggaaaagcaactgtctttctctccctctctttctcctttttttttgcacatcttttctttaaaactgtcagatcatttcagtatttcaaatccgaggaaaacagcctgcctgctgctgtatttgaagttgtaatggtgtcaaaaagtcacgactgactgacagccgtcagtcccagaggggctcattaaatcataaaaacttgacaaggaaataattgcgcattgccagcaacttggcgcctgtttagacgtttttattttctttcattattagtccccaccattacgttcattaacaaattgcattaaacaactgttaagggct

SEQ ID NO: 2099 - DNA, 339 bp, Homo sapiens
ctttagcgtcgtgaaccccgctgctttgtttatggttttgtttcacttttcttaatttgccccccacccccaccttgaaaggttttgttttgtactctcttaattttgtgccatgtggctacattagttgatgtttatcgagttcattggtcaatatttgacccattcttatttcaatttctccttttaaatatgtagatgagagaagaacctcatgattctaccaaaatttttatcaacagctgtttaaagtctttgtagcgtttaaaaaatatatatatatacataactgttatgtagttcggatagcttagttttaaaagactgattaaaaaacaa

SEQ ID NO: 2100 - DNA, 1230 bp, Homo sapiens
ggtactgtcttctggacctcagagcccactctccttggcaccctgacaccgggaggcctcatggccaacaatggacacctccagagcctccaggggaccacacagtagactatccctactctaagcagagacaactgccacccagcctgggccttcccagaccagcatttgcacaatatcaccaggcttcttctgcctcccttggtaacccaaggaatgatggaatcaacacaacatagtatgtttgctttccttacccaattgtaccttctagaaaatcagtgttcacagagactgcctccaccacaggcatcctgcaaatgcagactccagaatccccagcatcagcgggaaccaccatcacatctttattcctcagcccagacactcgaggcactcaacagaatcagccatccacgtctaggtatcagagaggaccacaaatacaacattctccatctgctttcagagttattattttaataaaggaagatctgggatgggctggtgggccattccagcttgccgaaatcaaagccatctgaagcctgtctctggtgaacaaacttcctctctggcctctcaggaatcagggtggacatggctcacaacagcagggccttcttctttttgacgtgcagaatctcagtggcatctgggttcacctccccactctgatgatctccagcctccactgcttctgccccccgctgctgaaatcaaacataccccaagttaaaatgaagctcccccacccccactcccggccccggttcccacaggacacgctaagaagcacagggagcatttaacaggctcaccctccctttccttttcccctcttctaccctccccaagaaaaagggccttcaaggcaggaatgagaaagcaaagccaatctctcatttagacctggcttctttcttctgaacaaagtagggttcaaaatgcagactgtcatatccagcgagtccctgaccctttctgcgaatgtaacgagcaagcagtcagcacagcctgggctgccctggcccgggattgatgtagccccggtaggtttgcctctgcagaactaatggctgtgacttcagagaaagccctgcaggaagtttaacctgcgtgtcatctgcctggtcatctcagacccatgaaattaggcgccttgtttgagctgcgtttcacacttctttagagctagctgacctttggccaaaaataaactttgaaaag

SEQ ID NO: 2101 - DNA, 1479 bp, Homo sapiens
atgacagagttgccaggcactttgagtctcagtctgatgacccacacttccatgagaagaagcagatcccctgtgtggtctccatgctcaccaaggaactctacttcagtcaatagccatatcaggggtacattctagctgagaagcaatgggtcactcattaatgaatcacatttttttatgctcttgaaatattcagaaattctccaggattttaatttcaggaaaatgtattgattcaacagggaagaaactttctggtgctgtcttttgttctctgaattttcagagactttttttataatgttattcatttggtgactgtgtaactttctcttaagattaattttctctttgtatgtctgttaccttgttaatagacttaatacatgcaacagaagtgacttctggagaaagctcatggctgtgtccactgcaattggtggtaacagtggtagagtcatgtttgcacttggcaaaaagaatcccaatgtttgacaaaacacagccaaggggatatttactgctctttattgcagaatgtgggtattgagtgtgatttgaatgatttttcattggcttagggcagattttcatgcaaaagttctcatatgagttagaggagaaaaagcttaatgattctgatatgtatccatcaggatccagtctggaaaacagaaaccattctaggtgtttcaacagagggagtttaatacaggaaattgacttacatagatgataaaagagaagccaaacagcaagaagctgttaccacacccagggctatgaggataatgggaagaggtttggtttcctgtgtccagtagtgggatcatccagaggagctggaaccatggtgggggctgcctagtgggagttaggaccaccaatggattgtggaaaatggagccatgacaagaacaaagccactgactgagatggagtgagctgagacagataagagaataccttggtctcacctatcctgccctcacatcttccaccagcaccttactgcccaggcctatctggaagccacctcaccaaggaccttggaagagcaagggacagtgaggcaggagaagaacaagaaatggatgtaagcctggcccataatgtgaacataagtaatcactaatgctcaacaatttatccattcaatcatttattcattgggttgtcagatagtctatgtatgtgtaaaacaatctgttttggctttatgtgcaaaatctgttatagctttaaaatatatctggaactttttagattattccaagccttattttgagtaaatatttgttacttttagttctataagtgaggaagagtttatggcaaagatttttggcactttgttttcaagatggtgttatcttttgaattcttgataaatgactgtttttttctgcctaatagtaactggttaaaaaacaaatgttcatatttattgattaaaaatgtggttgcttaattcct

SEQ ID NO: 2102 - DNA, 1830 bp, Homo sapiens
aattaaagcttaccatcggcaggatcccaaattcagagacattccatgctgcatcctgtatgtgtccctcaaaatgccaaagtgctgcaccttctcagctggataagcctagactgaacagagctcccaagaggagtccggccattaaaaagagccagcagaaaggagccagggagtaacgcaccccagacccatggcagcagaaccaggatggagctgggactgtccagctctgccccctgctgctgccatgtgataggagacagtcggcacccccctctgaatttctgcatctgcatcttaacaatggggatgactatcccctctctggttattgtatcagagatgctaagagggtcatgtggcatgattggagaacctgggggaattggaaggccttattatctcagctattgtcccaaacaccacagacacagattgggtcagtccttcatgtaatacatgctgtgttctgtgaggatgtggtccacacaattccttctttgttaagggacatacagttgcaaatactcactgcatgaaggcaagattcccaagggagatgtgatagctgatcaggcttcccagacacctccttcccaaacacctccttcccaacacctccttccccaacatccttcccaacacctccttcccaacacctccttcccaaacacctccttcccaaacacctccttcccaacacctccttccccaacacctccttcccaaacacctctttcccaaacacctccttcccagacacctccttcccaacacctccttcccaacacctccttcccaaacccctctttcccaaacacctccttccccaacacctccttcccaacacctccttcccccttccccaacacctccttccccaacacctccttcccaacacctccttcccaaacccctccttccccaacatccttcccaacacctccttcccaacacctccttcccaaacacctccttcccaaacacctccttcccaacacctccttccccaacacctccttcccaaacacctctttcccaaacacctccttcccagacacctccttcccaacaccgccttcccaacacctccttcccaaacccctctttcccaaacacctccttccccaacacctccttccccaacacctccttcccaacacctccttcccccttccccaacaactccttccccaacacctccttcccaaacatccccttcccaaacacctgcctctcttcaaccccacaggccagagtgctgagacagagtggccttttggattcaataagtatcttgttctcttaaagactcagcaacgattttagaagtcgcagcagttttacatcacatgcagccaagatcagcttgctctacaagcaataacagaactacttagcacttcaaggttgaaagttcttcactaatggatccattgactaattgatcctggaaggccaaaggaataaaattcttttatataaataggaaaacaaaggcagagagctaaagcactaatcaaatcggggggtgttagagcaaaaacaggcttcagaaagagtattttaccatgcttcacatggaaaaaatcgagccccggagcgatgaaaggcatattttctttgtttctccaagtttcataaccgttcagttgcagaaccaagaatctaaaaccagctctgggaaacaaatgtccagatgccagcctcatagttgaacttggatttgaaaataccttcagcacttagaagagacattcaaatacatttcatttcctgttacccagattgttcggaaagtattaaaaatttttcatttacatgctg

SEQ ID NO: 2103 - DNA, 157 bp, Homo sapiens
ccagccagctagctagcaacccattgccaccacctactgtctcccatcctgactatcactgtaatttaaggaaagaaaacttcagttctgcctctggataccaagatgcccattgctcagttcagacaactgatattaaaataaagctatgctcctt

SEQ ID NO: 2104 - DNA, 1340 bp, Homo sapiens
ggcccggcgcggggcgcggactccgggcacggcttcccaggggaacgaggagatctgtgtttacttaagaccgatagcaggtgaactcgaagcccacaatcctcgtctgaatcatccgaggcaaagagaaaagccacggaccgttgcacaaaaaggaaagtttgggaagggatgggagagtggcttgctgatgttccttgttgttttttttttcttttcttttctttcttcttcttttttttttttttttttttttctgtttgtggtccggccttcttttgtgtgtgcgtgtgatgcatctttagatttttttcccccaccaggtggtttttgacactctctgagaggaccggagtggaagatgggtgggttaggggaagggagaagcattaggaggggattaaaatcgatcatcgtggctcccatccctttcccgggaacaggaacacactaccagccagagagaggagaatgacagtttgtcaagacatatttccttttgctttccagagaaatttcattttaatttctaagtaatgatttctgctgttatgaaagcaaagagaaaggatggaggcaaaataaaaaaaaatcacgtttcaagaaatgttaagctcttcttggaacaagccccaccttgctttccttgtgtagggcaaacccgctgtcccccgcgcgcctgggtggtcaggctgagggatttctacctcacactgtgcatttgcacagcagatagaaagacttgtttatattaaacagcttatttatgtatcaatattagttggaaggaccaggcgcagagcctctctctgtgacatgtgactctgtcaattgaagacaggacattaaaagagagcgagagagagaaacagttcagattactgcacatgtggataaaaacaaaaacaaaaaaaaggagtggttcaaaatgccatttttgcacagtgttaggaattacaaaatccacagaagatgttacttgcacaaaaagaaattaaatattttttaaagggagaggggctgggcagatcttaaataaaattcaaactctacttctgttgtctagtatgttattgagctaatgattcattgggaaaatacctttttatactcctttatcatggtactgtaactgtatccatattataaatataattatcttaaggattttttatttttttttatgtccaagtgcccacgtgaatttgctggtgaaagttagcacttgtgtgtaaattctacttcctcttgtgtgttttaccaagtatttatactctggtgcaactaactactgtgtgaggaattggtccatgtgcaataaataccaatgaagcacaatc

SEQ ID NO: 2105 - DNA, 787 bp, Homo sapiens
gacaggaaacagcaaaggctagctttaggagagaaagtacagcacctggtgtttttatttatgagaaccttttctttgtccactttctctgtaatgaccttctatccctccgtttttgcctgcctgccattctcctattaggttggtggtttttattttcctctaagttccttccaccaaataaatattacgtaaaaaattcataccaaatcaatgagaatactggcaaggaatacatagggactttctgctatatatgtaactttttattacttaaaggtaccgaaggaaggccaggtgcagtggctcacgcccagcactttgggaggctgaggtgggaggatcccttgaggccaggagttcaaggttacagtgagctatgatagtgccactgcactccagcctgggtgacagattttgtcttaaaaaaaaaaaaaaaaaagttgatatgagttttattttctgtccgtttgaaatattttgtaatattccctgcattctctgtcgtctgcctcttccacataatgtcctttgctttcatgtttgttatcttctttttctgttcactcagaggtcatcaatttctttctctccgtccttaattggattatttttcttttggcctttgggcacagagtctgacctctggaccactctaactggagaaggaactttatgttccctctcctgctgtgtccacaaccttagaaatctgtagctagatttttgttgttatagatagaatttactgtttctgaaacccaaatacagttatcagtttaaggtt

SEQ ID NO: 2106 - DNA, 447 bp, Homo sapiens
gccttcacatacatcatgacgaggatggcagctcttcccagctactgagcacttgcttcccaagtgccaggttctgtgctaaaccccatgctcacataaaatcctacagtaggcataaccatcctatttgacatttaaggtacagaaagtttaactaacatagataactccccccaaacttgagaatttatgcattccctttaaacagaacacacttttagaatatccacaagcttcctaagggtctaaagatcccacattcacactgacttgggcagtgacagagcccagagcaaacagggccaggccagcccaaatccagtgacctcctcttcaccttcttaaaagagacaggagaatcacttgaacccgggaggtggaggttgtggtgagccaagatcgcgccattgtactccagcctgggcaacaagagcaagattctgcctc

SEQ ID NO: 2107 - DNA, 2965 bp, Homo sapiens
ataacatctttcatgtaactgggggaacagaactactgtgtacatttcaccaaaaaagactcagttccacccagccacaagaggataaaaagcctttttaaacgcagtattgctgtaaactggacagaaccattaagaacctattgagtggacattcttggtgaaatgttgtataatgttgttttcattggctttatcataatggttctatatatacaattgcacattgttgaatccaggatacaatcaaaggaacttcaggaaataagcatttctaatgactgtgaaaagctgcaatatttccaatgtcatgactttgatgatatttctgttatattaatgtccttttaggtagcaaggcattttgacattctctgggactcaaatgcttgtattcttttggattaataagtagcaaaaaaaaatcactaattttataactttttaaggtcagaattcttatcaaacaaaatatgaaaactgtaaatgagaaaaaaatacaattcagaaaccattgaatgaattaattataggcgataaaaatgtgtagagcaccattaactttcttcagcttttttaagaataacaatttaatatgataaattcttgattaatataatatatctatatttttaaagaaatgttcttttactcttttgtgcacatagccatgttagtgattttcttcatgtgtgggtcccagtttatttaaactgtgtcgttttcgcagcagtgttcaatttgctcaccattggtagtgtttgctaaaattgtatttttttaagctaagtaacatgtactgggttgagaacctttttcccccctctccctctcagaaaattgctttataaaattgctttataatttgattttcttactgaaacgcatggtggtgtctaggtggggaactgactgataacccttggcagcaatcaaagtgccagtggctcctcgatgtttacatttttttctattttgttcagtcttttgttttaaatgattctaaagagattaaagaaaacagagttttaaatgtcctatttacatgttaaaggatttggggaaattgggtatgtatgtgaatgggtgtacatgtaggaacctgtagttcagcaaagctgcgctgggcacagcatgcttgtacttgattgacaaaatcgtgtttgccagtccactttctatttttcctttaagtgatgctgatcactcaaataatgcttttaagctattgtttgtttttatttgacatgttaagccgcagcactttcttcttcatctttccatttactgatatttgggggaacaggctatcaaaggttccggcttgaagggaactgtcactaccccctctaggaagttattttatgtagcatgtttgcatatacgcattgtgtggcatgtgcatagaggcttgttttacacctatctgctcattttgttgtgttagcttttctggtttatttcatagtttgttcttgctatttattaagaacagaatatcaaaagattatgaatagcctcagctctagaatgcttaccactgttaaaacaacaaaaagactaaacctctaatttcatgcaaatctttgttagcttattctaagaaatttattaagtaaaacaaagaaaaaacagaagtgggagatagttattttgtgcgtaattttctttaaatcattttgaatgatgtgaaggcattcagtttgctgtatttttttaatcacttcatacaaggaaaacttcgacatttacatttctagatgtagtaacagtctactttgatatatgagtatttaaactaaggcattaagagatattagatatttcttaatgttttcatagtgctcaataggtgtagtagcaatgatattacctctgaaaccaaatactcttttatccttgattccactatgggaccttataactagtccatgaaaccaagctcagaaaagctttaactcttatatttgtgtatatgtatgctgcttctgaaaatataatttttctaagttgttgtaatgactttaatttgtaatcagctaaggcttaagatttcatttgtttctaagtttctgtttttcatcccttcttttttcttttatatttagttcagacctagagccagtagaagctctcacagtgagttcaatttgttagtgaaacattgtactgcatcaccagtttttcttaccttctgttgacagctgaatatttctgttactcagtacttgcaaaaacagtaactaaaatgcactatgctgagtggaaagcaccgtcataacaattgattgccatagcaagttccaaagtgaatttcagccttgcttcacatttgtatcaataaatatgcacattttttaaaactttctaacaatatagtctttggatttgtttttagttatgagccgcattctttacttgatagaactcagatttgtcttagcctattgccatatagtactcaccttataactatgtaactttctcgtaatgtatctgtttgtgcaatatggaagctgtgagtggattcatagctttttggtttaattgtacattattgtgtgtgtatatatgtatatatgtatatatataaggaccaaaattcttagctcgcttacactgttgctagtgtaaacattgttacacttaattttacagggcacaaattatggaattacttcataaattcatggtaatgttttcataaattattgcattaacatacaattgccatttaattatgaagtccatcagtattgacagaagacgttacagtgaagtgctaaaaccacactatatggtaattatattttgggttatgtagtaaatcaaatatgcatgtcattgtgacactttatgtgttaaaacatggtagataatcacattttctgggccctgtaaaatagtgttactgtaatactctgttttgcctcctgccttgtttacattaaacaggatatttggt

SEQ ID NO: 2108 - DNA, 2300 bp, Homo sapiens
gattggcctgggaatatcatcattttctagttgacatttgaatcctgtgtgcagatgcagaatgacaagctgcattcaaaagacaaacaatatgtcttttttttttttgcatgaagaaaaatgtctatcatttacagtttcaatagcacataatttattttctatgcattataaatggccttgcagttggctcagttgtttgttgtgttgtgaaatgttttaggattttttgtattgtgaaaatatgaatatgattggattcagaaaaattaactttctgaatttgatctgtcttcagtcttgtgaaaaagttgaacaaatttcctaatcaaagaaaaaagtatgagctccatgtttctttagtttcacaaaaatgaccataatttagtgttatttttactttatttaggcttcctggtggcttcattttattgaaattctttaaattgtttaaagtggccattattgatctctttcttctgttttggagagtttattattaaaaacatttctttgataaaatggccatcatctagtaatacctgtgtttgtttagatcttggaaatgaataagctttgataatatttgtaaatgaaccaaattattactgctaccactaacaggttgtaaatagaagactaatacttaattaaagtcaccttcctaccattagagcagaagacagctcctatagttttgtattttggcagctatgagatattttcatggtaatgtcaacatggtcaagcactttgtaccaagttattaagtaacataatttttaaaatttaaagaatgtgtcttcaactaaaaactttattctttagcatttatttatatttctctgtagggtgttccctgtgacattgtctctttagtttgctctttcaagagatacttacagatgttgagatggctgccctgcatttccagctaatctcttctgctctaaatatttaaaaacagttcttctcaaacattttcattcagatagctttctgaaagttccctatccctctttaccataattttttaaatgtagccacattgtaatagtaaacttcatatataatgagtgcttcatatttttgttatgggaaagcaatatattatgcagccagtctgtagaaacattcagatccctcttcctttactcaaatacagtttcaaaaggaagactcatgagaaatttcataaaatacaagtttttagatgtttatgctttgcctttctttttaaaggtgttttcctgctttgtagtctctaactctgaaatttaaaatatgtaaactaaagtggttttatttgtgcttaacccaatttaaactcaatgtaaaatgttatatatgcatcagtacagcattttcaacatattggcaacatattttaaatgaaaacactaaaacaattcttagtatgagacaaaactgtaaggaaaaagagtgttaataccatgatgcattaacataaaatatcaaacacacaaagtcataaaatgaaaatttacagttttacctgttcatatctagtgccccacagtgtgtgtcaaccaaaggtggcagtggctacatctgcctgttggactggtacaggttacaatatgtcctcttccattgcaaattaaagtccaaatagagaaatacttaggttttagaacacatcagaggtatttctgctgtatttttcaccttaaaaattgacacagagtttactaatagaggagtagagattgttgaccatttttaaaaaacgatagccactctttttcttttatgtttaaaactgaagttttgccaaatgggaaaattactgttacctctaccatcttaatgtagtaactttagaatttaaatttttatattactattttcctttttgttgttcacatagtcttaaggcacctatacttttaaattgactttttcatttgatattatctatatgtatgtagttgtgataatgattattttaattatattactttatactcttaatttatttagagtatttctctattgctgaatacttaagtagttttaaattttattatgataaattcctgggagggggattatttagtgaaataatatgaagaactttatgacttatgtttgccttattgcattcccaaagagttgtaacattttacagtgttaccatttgagtaggggttttatatgttgttgctaatttagtaaacataggagagaaatcaaagtttttctgatttgcttttatgtgatttatctgtatactttgttcatttatataaataaatgtcttaatggtttctatacat

SEQ ID NO: 2109 - DNA, 4204 bp, Homo sapiens
gaaatggaaaccgctcctgtatattctgtactgttttacttcgggcttctgttaaagctgttctatggccttggattttatggaggcagatctctgtatcatccagagcctgagtacagtttccttccaaatggacaatgacccaggtggccaaagaatgttcatgagttttataaaagtattgatggtcacaggtgataaagtcagtttttaccactatcttaggcttattatagctaacattaaattactctggaaaaagatgtatattgtttcttaatgaagatgaaaaatatgtaattcatataaatcaactgtttatatcccaagacttgaaagaaagacattttttaatgcctgaatgatgagaattgtacagtttttgcctcataagcaaacttgaatcacctgtgtatgaacagggaatgaacacattgcaatggctttaaatgctcttttatctcgttgtaaaggtaaggcaagattttgatgtagtaggatgtaggtaatgtatttaaatatttcatatgaccatatcgtgtccaaactcagtctgagaatgtgacagctttccgcctaactagaatgcagaccagaatgagttcaactcattctgtgcaacttcacagggggtttattagaatgctcagtgtagaggacattcctgtcatccatgccaactacctaactcgttatcagagctgatagagcatggaaaagtctgtccagcgatcagttgttcccctccttccaaaaacagcctccaataccacaacctgaaaagagccgaaatggttattttacagcatacaagcttctgctccagtatgataatttttaattgcctaagaatcattggatcagacctaaatgatccatctgcatttttataagaatggatctttctttgcccttcctctcctagctgctagattttaactaccttttacaaatgttacaaaatgtattttagaggcgacatctctcaagatgacctgagttccttcctgccaactgttccacctagaatacaagtagagaagagcactggctggcaagcatcaacaggagtcttcttcccaacacgagcgcatccatgtcctgagaaaaagtctgtggtttagaaaatatgtccatggttgcccacagtcagcacactcttagtgactcaaaattctgaattatggcagaaaggaaaaataaaacatacttcacattagaacacagaatcatttacatcctaatactgaccacagttcactaaagctcagtagcattaacagatatagtttggaattgcagtttcctcacttcagggtgacaagatatgtataacagtgacagaaatctccaaagctgctgtatatgatatagctttgttaaatatgaaggtcctttaaatacaattgatgtttagtactatatatgtacttttcacattctttggatttctggaaggttatgacactttactgtttacagctaatgcatagttacttgcatgccatggttgtacagtagcagactatgaccctattgtgatattaagtgtttatttcataatgccatttatacatagctgaatttgatgaggattgaatgtcatatataagaggaatgatcatacaatatgtagttgcatcttatataagatttctaggttgcatctaaccatgactatgtcattattttgataattaggcatttatgaattatagtatatattcctcatgttggcatgataattttgctattttccatgcattaaaaataagacaaattcttagagtaattttagtaattttatctataatctgtggggtttttttggagggggaggccactggttgtttctacttccctgtgatattttctctctcattaaaggaatgagctaagtttgtaaatatctcctaaaaacaatcaagtaattttattagcttcttttggaccctctaaatattgacttctctcatgaaaaaataaattgatgaaactaatgattacaaagatataatcattttttaaaaagtgattgcccaatgtatttctctaacaattgtcacaagagaaagcataacaataaaaatacaaaaacatacagatttagatgtaaaatctatataagctatatttttagggaggctaagcagatagtattactgtggaagaattatcaagttttattcacctcaaatcccactgggttcttaaaacttgaaaattcaaattgtagagaattatgagacacaatgtgatgtttagttaaagtcatgctatacctttctgggccacatattgctaactctgtggctaattatgcaattaattctcaacgtatcaaagcttttcactggcagtaaattctttgccctcaggtgaagtggattgaaaagacatcaaggatcaaggataatcactttgaatctgttggtttttccccctacattccagacactttaaatttggatgctttcattttttttaaatcaaaccacacaaatatgcagatactttcccagaatttcgcagttaaatggctgatcctcttgaaaactaaccttaatggaattctaaacatttcagtttagaatgactttgaaaaattccttagatttttaggatgttttattctgccaagtatgaaaaaaaaatggttaaatacaatggagttttaaaaattaacctggggattctatttgaactagaaaattcctattggaaaagaatttgcacatacttacagattcagctaataaattttaagaggattaggattctcataattctttaaatgaaaatttgttttagtgatacacagagatgccgtatactatagtgttatgttcagtaggaaaacttcaaatagttcgtatttaaaaaggtaattgatccttgctgtacttcccaacatctcatcttcttttagctgcagtaagatagaggtgactgtatggctacagttcatggtataaggtcatttagggtgcacactggcacacaggctggaaaacgggcactggacccagctttcaggtgtgtggtgctgggtaagtttcacctttgaagcctcagccttccatctgtaaagggcggtaatggtgcccacctttcgaggcattgcgaggctagatggtaacacacagaaagctcccacagtgggaccttgatgcagcgtagctggtattaacaaccgtggggacaccaggccactctttttctaccagttgttttatgaatccacctattaattttcatccatcttttggtcgtaggtaaaggtcaatcaggtttttcaaaaagactccctgaataacttaagttcctgtatttctaagatatagggatttctacaaaacgactttgacatttagtcaataaagacttaaactcttcttaaatctatagttttaggagagtttttcttaaaattactgactgatgacattgagacaagagcatcaatgatcacctttcacgtacaaactaggcaagacagggtcagtgcttacattttgtggttatacatgatacatcttttctcagtgaacataaaactatgatttgaaaggtgtcttatatttaaaaaagattgtaaaatgaaaactgaccaaatgaactaattctacccacctatggtctttttaaatgtcgagtttcaaaacccatttgccgtatactagagtgagcttggaaacttacctgattacaggaattgcttgggttcaggcagattcccactttcacctctagagatttagattcagaaacactggggtaggccctggagagcagtactcttaacaagctcctcagtgcttcttaccattaggcaaattagggaaacactgcattgggtcaaagtgctgcctttaatcgaccattagagggagttctctaaataacaaagttattactctaattcaaaatgctttaaagaattttccaaggaatacaagccatctggttggtgttagttatagcagtgatttcattagagtgtacatttaacattttagttttatcaaaattttttgaaattaagaattagaaccagagctcctatcagtatatatgtacacaggtgtgcatgccagtgttcaaaagattgtgtaaaagttcaagcccgttttagaaagccaacattttatgttataatatgctgttaatcaggactttattaaataaaaacattggctcttcc

SEQ ID NO: 2110 - DNA, 671 bp, Homo sapiens
cttacagagaattgatcagccatctgagatttgatcagaatatctgagaatcaaatctttgtgatagatatatgaatggtacccgttacaacggatccttgtgggaaatatggggtttaaaatattcaaattgttattatctagaaatgatgtgttagccctttaagataatttttgtcttgttactcaaactttaagagttcttctgtggtttgattttgtttctaaaagaaggaaaaggagaagaagtagataccgtgttcccaggcttcttatatgcccctgaacctcaagctgtcctattctttctaatctatataatatggtttggatctgtgtccatgcccaaatctcatgttgaattgtgatccccactgttggaggtgggtcctgataggaggtgattgggtcatgggggtgggtttctcatgaatagcttagcaccattcttcttggtactgtccttgagttctcctgagagctagttgtttactagtgtatagcacttctccactttgctcctgctgccaccgtatgagatgtctcactccccctttgccttcagtcatgattggaaacttcctgaggcctccctagaagcagaagtcactatgcttcctgtacagcctgcagaaccgtgggacaattaaacttgtgttctttgtaaatta

SEQ ID NO: 2111 - DNA, 801 bp, Homo sapiens
tctcagatacagtcttgatggatttctttagtaggagcaatgaagaaaagtgtctccttccacctggcatccagaccaaatttgacccttgtaaatgacttagtcatttacaagggtcttactcagagtcaagtacgggtttgctttttttctgtgtagaatgttcatctaactgcaccttaaaaacacactgaaccctgggacaaaagataattactatgatctgtaggaatctggatatcattgacaaaatagagctgttttggaattttcctgaataagaggaggtgatgcaaatgtatgttgagtgtataaactcactggacaaaagtaagcctctggcttgctgagtttttgaagtatattttcaggtataataatcattgttctaaaattatataaaactatttgttatgttgttaaatcttgctgagacaaattatgactatagtgcatgatatatagtagattataaccttgtgggttgatgtgtctatctagtaataataaaaactaatgagatggcactagtatttccaaggtgttccttggtgttcagggtgtgcacaagagagattttggagcttatctgttatgtgttcatcagttagcaatgggacctgaagttcaacaacccagggtatagcccccttcctccaaagtccctgccacaggagaattactcctctccctgggtcttgaatgctctatggtgaatttgtatttagcctcaaggcagcatttcatttgtaaagcacttgggtaaccctttgttcttgcaataacaatattataatattt

SEQ ID NO: 2112 - DNA, 56 bp, Homo sapiens
gagactactgttatttgaccaatgaattgacttctaataaaatctagtggtgatgc

SEQ ID NO: 2113 - DNA, 46 bp, Homo sapiens
aaacgtggtgcagctattgcggtaataaaatctttaatgcactcgg

SEQ ID NO: 2114 - DNA, 58 bp, Homo sapiens
gctcccggggcgacgaggctgctgcgttcacactaataaaatccactggtgcatctgt

SEQ ID NO: 2115 - DNA, 318 bp, Homo sapiens
gatgagatcctcaaaaatcatcaaagtgtttaattgtataaaacagtgtttccagtgacacaactcatccagaactgtcttagtcataccatccatccctggtgaaagagtaaaaccaaaggttattatttcctttccatggttatggtcgattgccaacagccttataaagaaaaagaagcttttctaggggtttgtataaatagtgttgaaactttattttatgtatttaattttattaaatatcatacaatatattttgatgaaataggtattgtgtaaatctataaatatttgaatccaaaccaaatataattt

SEQ ID NO: 2116 - DNA, 1310 bp, Homo sapiens
aaacataaacctaaccccacagaaacggacaacatggagcaaaagagacagggagaggtggagaaggaaaaaaccctacaaaacaaaaacaaaccgcatacacgttcaccgagaaagggagagggaatcggagggagcagcggaatgcggcgaagactctggacagcgagggcacagggtcccaaaccgaggccgcgccaagatggcagaggatggaggctccttcatcaacaagcgaccctcgtctaaagaggcagctgagtgagagacacagagagaaggagaaagagggagggagagagagaaagagagagaaagagagagagagagagagagagagaaagctgaacgtgcactctgacaaggggagctgtcaatcaaacaccaaaccggggagacaagatgattggcaggtattccgtttatcacagtccacttaaaaaatgatgatgatgataaaaaccacgacccaaccaggcacaggacttttttgttttttgcacttcgctgtgtttcccccccatctttaaaaataattagtaataaaaaacaaaaattccatatctagccccatcccacacctgtttcaaatccttgaaatgcatgtagcagttgttgggcgaatggtgtttaaagaccgaaaatgaattgtaattttcttttccttttaaagacaggttctgtgtgctttttattttgattttttttcccaagaaatgtgcagtctgtaaacactttttgataccttctgatgtcaaagtgattgtgcaagctaaatgaagtaggctcagcgatagtggtcctcttacagagaaacggggagcaggacgacgggggggctgggggtggcgggggagggtgcccacaaaaagaatcaggacttgtactgggaaaaaaacccctaaattaattatatttcttggacattccctttcctaacatcctgaggcttaaaaccctgatgcaaacttctcctttcagtggttggagaaattggccgagttcaaccattcactgcaatgcctattccaaactttaaatctatctattgcaaaacctgaaggactgtagttagcggggatgatgttaagtgtggccaagcgcacggcggcaagttttcaagcactgagtttctattccaagatcatagacttactaaagagagtgacaaatgcttccttaatgtcttctataccagaatgtaaatatttttgtgttttgtgttaatttgttagaattctaacacactatatacttccaagaagtatgtcaatgtcaatattttgtcaataaagatttatcaatatgcc

SEQ ID NO: 2117 - DNA, 3662 bp, Homo sapiens
aggcccgggctcccggccgcccagggtcgccgccgcccctcgcaccgctaggtctgcgcaccatctcgcccccgccgtggggaggcgtgcggctcagcggtcggctcgacatgggacgtcgtcctggtggtttttgaaaagcagccgaccgtgtggagtacttccgtgctgaacgattgggactagacgctgaaatccccatttgtcttcagtttctagtttgcacatccagaacggcgaaggctgggtgtgtattccactaactgaaatatggcaacttagaggcgctgtttatttactgtatacgtcgacctattttagatgcgcatcagtatgaaattgtctcaatcttggatgtttcattttatgaatggaggcactttactaggtctagaatatttttttaaaagcctctgaactgagcttaaaactggcgattttatgaaatgtcggcaaaatgactattttattgtttgaagcgagttaatattctcagttgtctttaaaaatcagttactctaattccaggtgaagcaagccgctggtagcatcacccttatgagaagtgaaggttttgtaaactttccagtattaatttgggcgggtattccccgcttgtggcttgtttctgtcctagctggaggtgtaaaatgcacaatgtgtagcaggtagaatacagctccttatcgttctatgtaccaggtattttattactgaactagcaactagccttttccacctttaaaagttgtgccaagtcataatcatattgtgtataacttggaaatggtgctgtttaaaaaaattgtgtatttatacagtaacagtatgaattcattaatctcacctgtaactttcctacttggcattttctctacacactcaccctcttccagttctttaaaaacgtttatgatattaagatcaaagggaggaagggaagacagcagtattaattcaccctagattactcaatttcagggttcctagtggaggaaagcccattccagctgttgcctgtcaaacaaatagaagatggatctctagctctgagctattcgtgtattaactcgtattcaagaaggttccaccgtgggctgcgtctgactttaatacaggcagtgctcaaactagaataagcactaattaaaggaattgttgggggtccttcatgtgttcccactcctactggaagacccatgtcggtttccggaaccccaccagtttacccataagcaagactaaacctgatccttgggcaaaagttcctaacccctactttaccctcccaccctcacttttaaatccaccatactgaatgccacactatggaatgcagctacctgccaagcaaggcaatagaaggcaaaaaatggaagtgaattaagatgaactcatctgaaatacacaaatgcattactatctgaagataccagcaagagtttagtctacgtgtataaggctcccagtaggatttagctaggctactagaagttagactgctttcgcattaaacagctaacttcatccacagcaaattgactcaatcaggaaccttcatttgaaggtgtgttagaggatggggtaaatacccgatagctgtctttttggtgaaagaaaaggtgcatttcaagaacttggggggcaggaggaaagcacaatgtttcttagccaggaaagacaaataatccaacgctgctagtcttaaccccagaccagagagaactgcagatctgactgggcctaaattaagtagcttaatgaaaccatgtaattacttgttctcctttcttttgctatagaaaatctaccagtttaaatgagcttcaccttctgggtgaagtttctaaggtcaacatgaatcctcttacctctctcactgctcgtgttctgccttttcaaaaggaccactatgaacagatcagcgcattctctaggccaaaagggctagccaggtggcaagatcaatttagctactttgtattttcagagtcaaattacagacggtttccaaaggtcttgagcatggggctttggcatagcctcaatatatgggagtcactgtgatgagatgtgcctaatgttaatttgatattctgacattgctattttaccagaactaagaacatattgagctggagcttcttgagggcaggagagtattggaaaaggaatccagaagaccctctccactactcaggcagccactattcatctatttttaaagtaccccattttcaggccgggtgtggtggctcatgcctgtaatcccagcactttgggaggcgaggcgggggtggatcacaaggtcaggagaccagcctggccaacatggcgaagccccgtctctactaaaaatacaaaaattagccgggtggtgtggtgggcgcctgtaatcccagctcctcaggaggctgaggcaggagaattgcttgaaaccaggaggcggaggttgcagtgagcccagatcacgccactgcactccagcctgagcaacagagcgactctgtctccaaaaaagaaaaaaagtaccccatgttcagcccctgtgccaaatttgcctaggttttccagctgacaatgaatactgggagttaaaacgcagagtattactatagttaattttctagggttctcttatgaaaagtatatgtaaacacattcatttaaaaatccttggaactcaatgtggaactttaaacattttgcaaaattacatttagagaaacccaatttttcaaagtttaagaaatatacaaagtatgacaaaattatcttcataagaacatgctgcatacttgcctagtagcaaaacaatacagggaagagtcaaaagggcttctccaactgtagaggtacagattgtcttaacctgttcttttctgtacagacttaaaatttctagtggcttttatttttctttgtattttaattttcctacaaagtcctttttggaagttgcagaattattagctttgatgagaacaacttttgtcatagatttgatttattaaaccaaaattatacatattaaaattatatcacaaatatatatgcttccagacaaagaaaagtttgttagtcctgattttctaatcgtagccactcaaggaacagtcctttcatagtaccccaagtatttcaattagacttataaaagtataagtcaatctatggtcagtgtctttggttaaaaaaaaaaaaaaacacaggcagttctttacataaaaacgtcccacacgttatagatgccagccacctcctggtagtcactatggacaactaatgagatgcaaagtcttttggaccgatgatgtctctactactggatctatctgtattaacagcaatgttactctcaatgaaactgcagaagccaccatgaacatggaagaccacctagcagatcggtgagtaggctgcttgttcagctttcctttaacacctgttggtaaatactaatgggagtagacagagttgtatggcctggacagtggaaaccaagagcaggatcgcaaagtaacagcatcagactcttctgccctcctcttgcacttgggttctgactcccagaacaaagaacttgggagaacagtacgggagactgagcagaaaggatgggtttgctgactcgccttgaaatctaactctaacgtaggcag

SEQ ID NO: 2118 - DNA, 1056 bp, Homo sapiens
ctgtgtgacagaacgtatcactgatgactgatagaaagccctctttcactctgattacccactcactacatgaagtcctgaaaataacagagaaactgttatatctttttaatgatttatttgcaagtattgagatttgacctgaaaaacaatgaaacacatgaacacacttccgattttctcctcgctgattagcttcctgcctgctgtcagtgctggacgaagtgctataactactttatgtaacattacagaacagctagaggtcctggggtaagagaaaaaaagcacatcacaacaaatgtgaaagccttcattattacacgttccagtttgtctcgctgtgtaggcataagctaatggtttattttcagaaagctgcctgaaacgttgctttgtattcttctaggaagaactttaattcctcctgaggaactctactttctgagccaaactgctaattttctgcggaactgtctagaagatcattcaagagaccctgcagttgcactttctcgtaaaagttaaaaaaaaaaaaaaaaaaaaaaggtttttcccggcctttgaacattttgcctatgagagttttgcatatattttatacttgagtagacaactttaataatccatatttatactatcgcagaagtaagcatttggcaaacgttcagccattagcactcatttaaccctgttagcaatattcttttgaaaaaagtgccagtccttatgtgataaactaagaagcccattgaatataaaagtgtgtaggactgaaacagtgaccttatattattgctaagggaatatgagattaacttcctacaggggccaaaaccagagaaaggcttccagcaacttcgatgaaagtagtttggccacatgtcaagccaattgtttgtactatttatgtacctttttcataactggaattgccaaataagcatggagatctaaatgatgtacttgttagtgtattcattcatattgactgtaaaggattatttttcactcagtactgatgtccttggaaatcttacctggaaacatgtttgc

SEQ ID NO: 2119 - DNA, 551 bp, Homo sapiens
tttcggctctggcctccaagtccacagtggaaccagcccagacccttctccttagaagtggaagtagtggagcccctgctctggtggggctgccaggggagaccccgggagccggggaaggaggccgtccatcccgtcgacgtagaacctcgaggtttctcaaagaaatttccactcaggtctgttttccgaggcggccccggccggggtggattggatttgtctttggtgaacattgcaatagaaatccaattggatacgacaacttgcacgtattttaatagcgtcataactagaactgaattttgtctttatgatttttaaagaaaagttttgtaaatttctctactgtctcagtttacattttgtatatttgtatttaaatgaaagtgagactttgagggtgtatattttctgtgcagccactgttaagccatgtgttccaaggcattttagcggggagggggttatcaaaaaaaaaaaaatgtgactcaagacttccagagcctcaaatgagaaaatgtctttattaaatgtagaaagtgatccat

SEQ ID NO: 2120 - DNA, 533 bp, Homo sapiens
cctctgccctgtaaaaatcagactcggaaccgatgtgtgctttagggaattttaagttgcatgcatttcagagactttaagtcagttggtttttattagctgcttggtatgcagtaacttgggtggaggcaaaacactaataaaagggctaaaaaggaaaatgatgcttttcttctatattcttactctgtacaaataaagaagttgcttgttgtttgagaagtttaaccccgttgcttgttgttctgcagccctgtctacttgggcacccccaccacctgttagctgtggttgtgcactgtcttttgtagctctggactggaggggtagatggggagtcaattacccatcacataaatatgaaacatttatcagaaatgttgccattttaatgagatgattttcttcatctcataattaaaatacctgactttagagagagtaaaatgtgccaggagccataggaatatctgtatgttggatgactttaatgctacattttaaaaaaagaaaataaagtaataatataactc

SEQ ID NO: 2121 - DNA, 1366 bp, Homo sapiens
cttttagccataagaatccttccatggcttttatttaaaaatatgaaattttcacctcttggggtattttaattgtactgtctgaacccagggatcacaaattctgttcattggaaagggttttaaacggagtcggaacctgagtagatttccaaattttacagccaggactacagaagtgcatcattctagaatgtgtagacctgagtagcttatacactacagagcactttgcttatttgaaagtaattcagcaacaggtcactttgggatataacctgaacctttttttggagtggggtgggtagactacagtagacacaagggctggacatgcagatgcttaggggattagcgtttttcataatttgttctgtttgtcagttcattcctgtgtgttcttacctctacaaagtaaattacacatttagtttttagtgactttaacatgttactgaagcatttgaatataaagctattttagttttgatggcttaactgttccctgaggagttgagggttattgacactagagaaatgaattctcatttgatcctaattttccccgtattctacttgaacacattaaaaatactctgctgcctatacaatgtaaacctaggagcattaagacttgtcacacagtaaacctgatacatcagaggtgaataccagcacctattaggtttcattttgctgttttcaggaatgtaagaacacccatattggctactggaaattctagaagtcagtcaggttttaatttattccaggaggggcatcctcgacatcttatgtagatgatccacaacttcaaaatttagtctgggcctagtgcagtggctcacacctataatcccaacactttgggaggccaggagttttgagaccagcctgggaaacatctgtctctacaaaaaaatacaaaaattagctgggcatagtggtgcatgcctgtgtttctagctacgcaggaggattgcttgagcccatgagattgaggctgcagtgagctgtgatcgtgccactgacctccagcctgggggacagagcaagaccgtgtctcaaaaacaatttagtctgaaacacaattgtgctgaatctgtctgactataactctgaccacacagaaccagggctgcccctgtaatccccacagtaagaaagttgtatggcatattccaacaagtattggttcgtctggtgtctttagagctttactctgttgaagtgactgattctcaactgaacattatgtcgttactttgataagcattccacttttgttatttattagtgctatcttttttttttacgtgttaaatcttgtgattattaaaataaagtaccattgtaatttaaagtg

SEQ ID NO: 2122 - DNA, 1148 bp, Homo sapiens
actttcttgtctgcacagaaagtcccagtacaacttccattgctgagaaaatcctcagaggactttcccacttcgctcctgtgatggatgacagaagagtgattcattaacaattgctcagccacaattctcggatatagggattcaaaagacaggacacagaactaacacagtgaaaaaaatcagtaccacatttggacagtataggtgagaaaacataattataaaaatgatgccatgaaaaattccacagatcagtttagttgtatagttgtcaaagttatatgtgatatcaatgaagaaatatttgtagcatgtaaacggttatttctgtttcttaaaaagtattgttagtgggctattaaacttggatttttctttttattaatgcagtatgttctttttattcaagtatgaacttgttgagaaactatagtaatatgatttttaagagatttatgttctacttaaaatgtgaattgtacttctgagctgccttaatgcaaggtcatttatatttgttaagaggaaataatcaagatcactcatatcccaactgaatctgaggttttataaatccctcaaacgattgctgagagcctgattgtggaaagaagtgagatgcaccttattttcaagaagtcctgggaagcgctctcctagcacgtccatttccaggaggagaagcaagcagatgagaggttttccattttgtcatccaaggtagctgtgcacttgccttgttgctgaagttccaataatgtgaaaaccaaagtagaggtttttttcttcttctttttgttttctattaatttcacttataccaaagtgtttgaaagtatgaaatgtgttgcttctgagttatataaggctacttcatgacaagactgctttgtaatatttcactttgttttactacaaattcagatcactttgttttactataaattcagattatccaaatattttcctaatactatgtgggaatgctgattttcttttgttacgtagtggaaacattttgcattgtttacatagttctcatggaacatggaaatttttgaaagtgatatatgatacacattttttgtgtatgtattctaattagtgtgaataaagcagtaacattaatgcattttttaagcagc

SEQ ID NO: 2123 - DNA, 353 bp, Homo sapiens
ccagtgtcctgggaggatggacactaagccctgggcacatctgccaccctgacatcataacacaatagaaatggttttctgtagtgtatttttcatcagttgtttctcaaagtcatcgtacttctgcttctgtttcactgatggtgttcctgctactttaaatgtctacttccaacatccttgaatttgcaagtgaaggacaacaatctctgagagacgtgtggaagaggctgtgaaggtggggtttggggagcttggccgattcgtctatctgaaatgtttgctgtaacagccaccttcctatgttttcatggttgtaaaacataataaaacctcccacgtggaagacttgg

SEQ ID NO: 2124 - DNA, 810 bp, Homo sapiens
cagcttaataaatgccagggaatctgacctggaaggcagatgggagggggctggtctggctgtggccaccgtcacagtccaggatgaagaggagtacagggtcctgtgagctgtttgaccactgttctaagactatgtgtgcccaaaagcacataagcatctatgttgagagtaagtttgtatcctgcgttggtctcagaaagaacgtgaatgcttaagattttgaaagtacataatattttatactttgggagagagctttaagagtccctggaaatactttttaatttttttaacttaaaattcaagagactgaatcacttttctcattgattaaatgtaaagattattgagaaacctatagtaaatgaaatttgtgagatgttttctcaaatatatgctgtgcctgtacttatatacagtctttcaagagagatacaaacaaggcagaaacatttaaactagtattaaaggtagtttaccaaagcattttttgttttcttaccttgaaaacacagaaccgttaattccttggtttaagcagttgctaagttttgtaattttaggctcagaggaccataggaggttttaagatttatgtttagtccgataggtgaggtctttgatattttgaattttaactccttttatgatacatcacagtaacctcatttttgaagtctttctttgtactttaatgttctctctgttctaatagttgaagtatgagatgtaactattataaactgttgctgaaaacataaatgtctgtaacttacaaacatgataaataaattaaaaattccatcc

SEQ ID NO: 2125 - DNA, 486 bp, Homo sapiens
ctctgaaccgaatgttttggacttaactgttgcgtgcaatatgaccgtcggcacactgctgttcctccagttccatggacaggttctgttttcactttttcgtatgcactactgtatttcctttctaaataaaattgatttgattgtatgcagtactaaggagactatcagaatttcttgctattggtttgcattttcctagtataattcatagcaagttgacctcagagttcctgtatcagggagattgtctgattctctaataaaagacacattgctgaccttggccttgccctttgtacacaagttcccagggtgagcagcttttggatttaatatgaacatgtacagcgtgcatagggactcttgccttaaggagtgtaaacttgatctgcatttgctgatttgtttttaaaaaaacaagaaatgcatgtttcaaataaaattctctattgtaaataaaattttttctttggatcttggcaa

SEQ ID NO: 2126 - DNA, 76 bp, Homo sapiens
cagtttccagaagaatctatgggattttccccccactggtctgcataaaagaaaataaaatgacataaaagggagc

SEQ ID NO: 2127 - DNA, 2412 bp, Homo sapiens
ggcagaagcgcacggagcctgcctgcctctgccgtcctcagtttcctttcatgaggcttctagccaaagatgataaagggggaaatggtttttagtgcgtatattatactgcctcttaggtgtactctttataagctggtaaaccaagaatctagggagtggccaaactaaatataatttctttaaaaaagaaagaaaaaggaaaaatccaaaatatctcagtatcatctgtctgaagcattgtgtgttctcattcgggtggtaacaatgtatgtgtaatatttttttcttagtgattttgacagtttaaatgtttaacaacttaaagcattaaaaatgcttattaataactttggtcatttaaaaaatgctacaatgacttcctattaaaggttcaatatttacacattcttattggttgatattaccacatgaaatattgccagaccaagatacctaaactcatgatgtctgtggtgctgtaaaatttatactaaaatgtggactattttgaaattataaccatttttgatgccctgaatcttgaggtgacttattttgcatagaggatatggatagaccaacagtaagggttgtgggttataccggcatagagaaaagaagaaaactagaattgaaacaactgtgtcttagacatttgtttgaaaaagcttcatcaggccttggagcagtcactgctttattccgcaaaaattatttggtaggaaatttttgggagatctgattttcttatccaagttttgtaaatagttgttatttctatatttggattggtgaaagacctcaagtttatatgtaaagacataactgcccttagtcatgaaattgttgtgacctctactttttgtcactaatagcctacattcaagtgcctgtgttttttcatcttgtttaggaatgttttgagattaatgtgcttaaaagtcctacgtgactgattttaaacattgtgataaaattaattttcagtagaatagttgaatgtgttaagataggattttatgttagagataccagaatgctggtattctactacttgtgcaatatatatgttttaaaaaacaaatttgagaatacatttaatcatagggatatagatataagcacctctctaaagaatctttagtttccgacgttgaattatagaccagtttgagtaagtactgctttttttttttggagacgggctctcgctctgttgctcaggctggagtgcagtggcgtgatctcagctcactacagcctccacctcgtgggttcaaacagttgtgctgcctcagcttcccgagtagctaggattacaggtgcatgccaccacacctggctaatttttgtattttagtagagatggggtttcaccatgttggccaggctcgtctcgaactcctgacttcaggtgatccacccatctcagcctcccaaagtgctgggattacaggcgtgagccaccatgcccggcccataagtaccgtttttgaggttcagtcttaaacatttgctttaagaaaacagtcttgaatttcacatgctgctatttttatattttgccattttacagtactgttttgttttgaattcatgcatatcattgaaaatttctcgttttcattttcttagatgacttcttgtctgagacagaaaaatttcctactacagcagtgcagtccagaggttaagatgtattagaattatacaatatcagtttaaaaatctgtatgcataaagaatgcaccactcaacttttttattcataagctaatatttttttaaagttacattaagattttttctcttttgcagctacatttgaaagtgatagaataaagagattttaatgagttatcactttttcagctgatatattcattttaatggcttttttgaaagttcctttttcatgaacacacccgagaaatcttaaatagacactttgcaatatttaagaacctaatgctgtttaattttggtacagcttccacattgcatgttcactttagtatttgcaatttgatatatttcatggtggcaaaatattagctctgttttgggacattttaaaatagaactatccttgttcgatagcataggaaaatgttctggtgattgtcagggtctcctaatatttatctcaattcttttataagtctatggaaattatttaattattttaaaacgtacacacttttcttgtaaatatgtcacatctgagttcaaaaaaattactttgaataccttaatatttgctgcatttttttccgtatatataacatgtcttctttcagaatgggaatatatgtgtgcctcccaacatttactgttaaagtgtgttatctttatatgtcaaactggttgaacactgtaatgagaataaactgcacagagtttattctg

SEQ ID NO: 2128 - DNA, 548 bp, Homo sapiens
gcagaggcatgagctggacttcatgtttccctcaaagactctcccgtggatgacggatgaggactctgggctgctggaataggacactcaagacttttgactgccattttgtttgttcagtggagactccctggccaacagaatccttcttgatagtttgcaggcaaaacaaatgtaatgttgcagatccgcaggcagaagctctgcccttctgtatcctatgtatgcagtgtgctttttcttgccagcttgggccattcttgcttagacagtcagcatttgtctcctcctttaactgagtcatcatcttagtccaactaatgcagtcgatacaatgcgtagatagaagaagccccacgggagccaggatgggactggtcgtgtttgtgcttttctccaagtcagcacccaaaggtcaatgcacagagaccccgggtgggtgagcgctggcttctcaaacggccgaagttgcctcttttaggaatctctttggaattgggagcacgatgactctgagtttgagctattaaagtacttcttacacattg

SEQ ID NO: 2129 - DNA, 338 bp, Homo sapiens
gtggtcgctctcagaccccactgtccaccggggcgcagacccctgactcggggacttgggatgttcctcttggtgtcatattccaactcagattgagccctacattgtgctgcacctggtcatacggagttgaatcagacctggttcccgcctcccccaaggctcatggtccttggaggacccgttgcagggtgaggtcaagagagttctgacctggatggcccatagacctgacgtcccagaatccatgcttctcatctgcaaaatgaaaatgtcaatacttacttcttagcactgttgagagggttacttacataaaggaattttggtgaaactgc

SEQ ID NO: 2130 - DNA, 155 bp, Homo sapiens
cttgggaaagctgggcacaaaaatcttcatgagcaatatttctttcttaatagaatgttttattattcaagtcaagttctagagtgtttacatactattatataatgtacagtgttattttctgtacttctgaataaatgtgcaatattggaaat

SEQ ID NO: 2131 - DNA, 215 bp, Homo sapiens
atgaacaagtgcttcctcacaacttgaagcttctagcagaagaacttaacaagctcaaagcagagtttttggaagacctaaaacaaggaaacaaaaaatatctgtgctttcagcaaaccattgacataccagatgtcatttctttttttcattatgagaaagataatattgtacagaagtatttttcaaagcagcattaaaatttctgaactgcc

SEQ ID NO: 2132 - DNA, 4524 bp, Homo sapiens
cgtctataggagtgggacccctccctggtgtcactgctgtaaaattttaaacggttgtgtcttgttgggagtaagtgccttgcgtgggaataaacttccacagcattcgaatattttaatgaagcccttagtcagggtcctggtgttggcctttttggttttctcttttcaggctgtttaacttaggcacaggagatccacttttaaacttgggaaataagcacctgtatttttttccaaaactgtttttaaagctgtatacgcatacatatatatatttttactctgtcttactctgtcacccaggctagagtgcagtggcgcgatctcagctcactgcagccttgacctcctgggttccagtgattctcatgcctcatcctcccaagtagctggaactacaggtgtgcaccaccatgcctggttcatttttgtgtttttagtagagatggggttttaccatattgcccaggctggtcttctggcttctggatatcgcccaccttggcctcccaaagtgctgggattacagggatgagccaccgtgcctggctgggtatttatattatcattctagtttcagagtatacagaagtttcatcccatcatttggaaaaataaaggcatctgaagtacaatattacttatagaaatagtttatattcctattaaatcttaatcttgtggcatcagggaaatatttgttacatagtaggcaatttttatccagtactttatagattcaactctaagttgcaagcgaagtcaaaactgatgaaaatttatttagaaaaatctaaaaattctggttttaaatatgagaatcagtggaaaataagggtataattttgtaggtcatatgattgaagaaaatattattttaacaatgtaaagcaatatgatttgttactataattaacctgtataaaagatacattttatggtggtttcagtaggtcattttaaaaaccaatgtgcattagttttcaagtataaggtttaagtaatttggtttaataatcagaaaatattcaatacagtgttggatattctgtcatgcactatttttcagttgacaatttctgtattttaattgaatactgtttcttcagtcatggttattgcactttatcctgaataataattcagaaattgggttttggttcagtgattctcaagaaaaagatctcttgcccattaagaagtgtatcaaaatctcataaggaatgagggagagaagggggctgtagagtttgaaaaagcatattcaatattaaaatagttttatatttgggaaggcaaaaatgaatctattgttttgcaatataggttataaacaggcaaaatgcaataaaatatatatctggttgtattagtctgttttcacgctgctgataaagacatacctgagaccaggaagaaaaagaggtttaattggacttacagttccacatgactggggaggcctcagaatcatggtgggaggcaaaaagcacttcttacatggcggcagcaagagaaaatgagaaagaagcaaaagtggaaacccctaataaacctatcagatcttgtgagacttactatcacgagaatagcacaggaaagactggcccccatgattcaattacctcccccgggtccctcccacaacacatgggaattctgagagataccatttaagttgagatttcagtggggacacagccaaaccatatcattctacccctggcacctccaaatctcatgtcctcacatttcaaaaccaatcatgccttcccaacagtcccccaaagtcttaactcatttcagcattaacccaaaagtccgcagtccaaagtttcatctgagacaaggcaagtcccttccacttatgaacctgtaaaatcaaaagtaaactagttacttcctagatacaatgggggtacaggtattgggtaaatacagccattccaaatgggagaaattggccaacacaaaagggtaacagggcccatgcaagtccaaaattcagcagggcagtcaaattttaaacctccaaaatgatcacctttgactccacgtctcacaatcatctctctcaagttcgaagttccacaaatctctaaggcaagggaaagatgctgccagtctctttgctaaaacacagcaagagtcacctttactccagttcccaaaaagtttttcatctccatctgagaccacctcagcctgaattttattgtcaatattgctatcagcattttgggcaaagccattcagcaagtatctaggaagttccaaactttcccacattttcctgtcttcttctgagcccttcaaactgttccaacctctgcctgttacccagttccaaacttgctttcatatttttggctatcttttcagcaatgccccactctactgttagcagtttactgtattagtctgttttcacactgctgataaagacattcctcaagattgtgaagaaaaagaggtttaattggacttacagttccacatggccggggaggcctcagaatcatggcgggaggtgaaaagcacttcgtacatggtggtggcaagagaaaatgaagaagaagcaaaagtggaaacccctgataaacccatcagatctcatgagacttactatcatgagaatagcacaggaaagactggcccccctgattcgatgacctccccctgggtccctcccacaacatgtgggaattccagaagataaattcaagttgcaatttcagtggggacatagccaaaccatatcactggtgatgccacttcttcagtattagggattctcagtcagaagagaccccctgtgtggcctgagtcccctcaggaggaaggtggacaacagagaaatgagagttttgatattttctgaaagaggaacatgtgttagagatgaagaatcttccaaggctcatgcagttgcttagaataatcattactgttatatgagaaacattttagtaatttaataaaaggataatgtttatttaaaaaacctgacttttccagagtaattttgttttgcacattcatgtttattgaagtggactaatttctataatgcaaatcagagttaaatattaaaaattgtgtaaatacaattgacataggaattacattaaaatattaggaagaaacaaggacaaatttagaccttgaatccgaagagataaagcttacttgactttcaaatggagagatgatgaaaacccactcattcactctttcagaacaaaaagacagtcatctgataagagtatgacatggatgaaatgccctacaggggccttggacatctttaatttctgcgattatgtgaaagaggtggactttacagataatggagcagaagccaacattagtaaaaggaatcccaacttcttcccatagaattagaaacatgtgaaagtacaataaacttcttgttcaaattaccagcatcagagagcttcccatttgcatctagaccttgaatttatatttattgatcaagttctaatttgtatgtatattttgtgcatattcaccaataacagttaaaattaattatgtgttatagttaatatatgcacctaccttcttccgttagtgcatcagtaaatgtgttattttgtcatttttccaaagagagtgttgtaggttttccctgtagttcttcctttatagcttttcttctgataaccatgacttcaggagctttaaaactatctatcttgcatttgtgtctggcggagaactagccatcagcctcctgaagcctgccatcattgttaatttgaggactgggctgtcttggggctcagaagataaagaactatttgagcagatgtgtgtgggtggcactggattccacccaactgccaagttagtattgttagagatttcattttacaacacaaaaataagcctgtgtcaaagattttaaaatcatggaaagttaaaatctagaaagaccttagagaaccagccaaccaactctctcattttaaaagtgaaggattcatagcacagattacttgcctaagatcatccaggaacgaagacaagaatccaaatgtacttggggacaagaattagtccccaaattcagtgttcttcctagtattaaacattgcccctttcgacaaattttggatttcattcttgttatatttcagtactcttgctgatttattttaggtttaactggtaaagaatgaacatttcagaagtgttaggattagtcagtgtcatcgcttatgtatatgaatcacttgccaaagacactggctctcctcagctgtaaccagcatgtcaaatgtgaagattattgtgtgggatcctttggtttcattgttatgatgtattttataaatgtactagttatatccttgtttatgtatttttgctgatctttcataaagcagaatggtatgtatcggattgttttaatgttatatattggattgtattcgatgttacaaaaccaatattctatggagaatgaaaaaaataaaggactaaattaactgg

SEQ ID NO: 2133 - DNA, 549 bp, Homo sapiens
ccggcccgccgccccgcgccgcccccagctgcccgcagagccgggcgcgtactgtactgtaagcagggctccggagcaaggcggcgtgtttccagaaatatgaagaaatacaccatgtgtattcattagctcttatttatggtctctgccctactttttgttttgattgtttcgggtatttattggcattccctaagtcagagagcctgcttcctacctagaccgaaccagtacgctttgaaaaccattcggagtgagatgttctcgggtggtggtgggaaagggagttttggccagacaggctgtggttggtagggaaaaaaatcaggaaaacacctacaaaaccaggtacactcctcccccatatatacacctgtatatatgtacatgcatacacgctcggccaagccaggccctcagaggctttggacaattactaaattgcttcttttcgtttccctcatcccgaggatggtagggacgaaaaggggagagttcagatctgtaaatatttttaaaaagaaaaaaaaataaaacattttaaacatc

SEQ ID NO: 2134 - DNA, 1528 bp, Homo sapiens
caagatttcatttacttaagtgccatgttgatgataataaaacaattcgtactccccaatggtggatttattactattaaagaaaccagggaaaatattaattttaatattataacaacctgaaaataatggaaaagaggtttttgaatttttttttttaaataaacaccttcttaagtgcatgagatggtttgatggtttgctgcattaaaggtatttgggcaaacaaaattggagggcaagtgactgcagttttgagaatcagttttgaccttgatgattttttgtttccactgtggaaataaatgtttgtaaataagtgtaataaaaatccctttgcattctttctggaccttaaatggtagaggaaaaggctcgtgagccatttgtttcttttgctggttatagttgctaattctaaagctgcttcagactgcttcatgaggaggttaatctacaattaaacaatatttcctcttggccgtccattattttctgaagcagatggttcatcatttcctgggctgttaaacaaagcgaggttaaggttagactcttgggaatcagctagttttcaatcttattagggtgcagaaggaaaactaataagaaaacctcctaatatcattttgtgactgtaaacaattatttattagcaaacaattgatcccagaagggcaaattgtttgagtcagtaatgagctgagaaaagacagagcatatctgtgtatttggaaaaataattgtaacgtaattgcagtgcatttagacaggcatctatttggacctgtttctatctctaaatgaatttttggaaacattaatgaggtttacatatttctctgacatttatatagttcttatgtccatttcagttgaccagccgctggtgattaaagttaaaaagaaaaaaattatagtgagaatgagattcatttcaatgtaatgcactaaagcagaacacgaacttagcttggcctattctaggtagttccaaatagtatttttgttgtcaaactttaaaatttatattaatttgcaaatgtatgtctctgagtaggacttggacctttcctgagatttattttatccgtgatgtattttttttaattcttttgatacagagaagggtctttttttttttaagtatttcagtgaaaacttggtgtaagtctgaacccatcttttgaaatgtattttcttcattgcaggtccacctaatcatcctgtgaaagtggtttctctatggaaagctttgtttgcttcctacaaatacatgcttattccttaagggatgtgttagagttactgtggatttctctgttttctgtcttacaagaaacttgtctatgtaccttaatactttgtttaggatgaggagtctttgtgtccctgtacagtagtctgacgtatttccccttctgtcccctagtaagcccagttgctgtatctgaacagtttgagctctttttgtaatatactctaaacctgttatttctgtgctaataaacgagatgcagaacccttg

SEQ ID NO: 2135 - DNA, 6447 bp, Homo sapiens
aggaccgcgctcctgctgaagagtttagaatgaggcagcggtgagaagaagggtgggagggcgtgggggcccctgggtggacaccaccagccaccagtccctggcatgcccagtgatcctggttccctggcttgtaggggctccagagcctgcttcctggttcctcaagggcagatattggacactccttatttgtcaccaaaggatgactgtaggccgtgtgctggcctttctttctaagaagctgctttgagctcctggactcacctgaggctccctgggggatgacactcagttctgtcactgtcaaggatgcagagagctggtggtaggtgggaagcatggtgtccacctgcctgctgaccactggacgctgctccatgctgaagaaaagtgacagtctccaggggacatttcagccatgctgaaagggaggctggcagtggtcatttggcccggatctaacatggcacctcgtctccacagggtagtggtggctgcttcaacccaaatattattcagctggtactaacgacattgtgcccagctgggactcttgggctctgtgcctgagggaaaatgtttcacaactagtggctgcccaattgctgctgaccagttgtcttagaaatggtcaattggattcaactttagtcctctccttccccctaaaagcgaatgtttgtgtgtgcagacaatcttagcatgaaaatggtttaaataggctggtcctacatgtattaggttctttcaagtttgactgggaggtcacctttttctgatttacaagtcctaattgttggagctcagtaaaggtaggaggaaggtggctggttggtcctcccttccccctgtttgtgacctgaatttacaggaagtgtttcaacttgtcttatgcatcttatctggcatgtcctgggagatggatgggcaagaactggcctgagcagggatttttgccttgattttaagtcactgggttccattgtcctggcacctccatttccttagtttctgtaagcctgttaacagaaagtagaggctattcaaggttatcaagaaagtgccctgtgctaatgatgagacagtgaattttttttttttttcgagatgggagtttcactcttattgcccaggctagagtgcaatggtgcgatctaggctcaccacaacctctgccttccaggttcaagtgattagagacagtgaaatttttatggaatactgcacctataaaacacatgccaatctgttagcagtcctgacttgatttaataaaaaccaaggagagccacccctgctttctggccatctcttctttgtctaccatttcaaattgacttgtgaatactcagagcagttatttttcaatcctccactctaagtgattcctccagggtgggaagcacggggagcaatggaatcagatggctcattctctccttccagctctttacatcctaactttggaggtatagaaggaaggatgtggtccaacgggaaggaagtgaagagtctattggtttttacttctaggcagtcccaatttttaaaggcagagaagtatctgcatctttatttgaaaagacgtcttattaactcttagctcctcagttagaaaacaattcacctggcttagtcttgtctagtttcaaagttaccatggagactagaatggagacaggtgtagcttccaaggaggccttggcatcttgcagttgctgtcagagatgggctcatatctgcttggggaagccaatggggcacaatccttcccaatttcatgatctggggcatcatgtcggtagctgaagtcagccacggtgggagtgtttataccatgaaaatcagcaagtgctgtaaatcaggccttttgccccacagagagctgattgtgaaacatctactagcacaccactgccagacatgactgtgtgtgtccctgaaacaaaattgctctggctcagagctcctttggccactcatattacaatagcaacagacatttgcttcctggtggcaagtaactgtgcaccctccaacatcccaaccccagaggaaccagtgggattgaaaaccagcagaagccaagacaggatgcacagctgaattggaggagagtagctcccttctcacacaaacgctttcaaagttgggcaaaagtggcccagtgcgtgaggtcagtcaacagccaaattccagcagcaaaatacattttcatcaatatcactttgggagaataactgtggcacatgctctttctgctttctctgtactgtataggcaacatgttgtactcccagtagcaactagatctcttttacctcttctttagccaagaagcaagatctgtcacccacaacaccacatatcttgaaaagatgcttttcataattttcactatacctctaaaaccaattgtaccgacatcacgtagacaaaaactccagataaatccattgattgggtattttcattattatttggacacatgaattaaatcccaagggaaagtgagaagaaaattaatgtattagcaaccagtgttagccaactctgctgtaattacctttagataaatgtttattttcatctctatacagtctatcaaatttgccccctggctttattactcccaattgaattatctacctcattttgttaatttaatttatcaaaggtaacattgttttctcaggtataacacatagaaacaccaagattttcagcatctgaatcaaactaaaattacttgcttgacttcactccagggtgagacttgacctttaaggcccaaactctggtgaactgttggactgggtagaaatctttcaagaagcttgaaaataaggccataaaggaggggctttcaaattcctaaatccacatatagggctgagttcctagtcctacacaatcagaatttgcctttttaagtcacgctgcaactattccggctttttatatggcacctttctgagggaggggattttacagccgagggacctccaaagggaacgtccatttgcatgtgtgccctggtatttagggtttgtctcatggtcagctcgcctctcaaagatggctcaccaatcacctgcctgtttttacttagaaagcaggcttgggcaggaggggaaatggatttgaaccatctcagaccaactctatctcttctagcactcagctcagcctcctgtccccatgagcaataaaactctctccttatgtctgtgaaattcgttttctttttcatggtgcctttctttctaagaaaagatagaaagaatggggccaggttcatgtcccagttgtcacccttttacatgcttgggtgcaggtagatgaggccttcccatggctacagtgtgacccttggaggaaccaaaggctgtgcattgttagaatttagcccagatgcaggataaactagcttgcctgagtttaatgaggatattatatcaggtgccaggaatcccttgggtcagctcctatcctctggacggggagcatcatgggaaaaagaggtccgagtcatatttagggcttcatgtgtctggaagggagccattagctcttaaattattcacagaagtcaccacggaaggttgtttaagatgcagattccagcatcccctcctcagagatcaatttcagcagggccaggcaggacctgggtttccgcacttttaatcatcgatgcccaggtaactgataggagttttcttcaaaccatcccctaaggagaaatgatcttagacacttggataaactctatagaaaattgagtgtttctattaataactatctaggtttcaattgtcttgtatctttccctaattctccaaacagttcaatctccagctttattcaatggctgggccattttgttcttggagggacaaaattgacctctccatgaaattgcaaaaacccatcttcattcctttttatggggctccaggtcataaggatgagatatatttggggtactggcagaggatggcagagctggctggctctgagccaggaagccttgttagaggaaggaactctggcattcagaggtgtccccttgggggcacttgcttgggtcttggatcaaactctactggggcagcctggctgtgggaggtgatgacatctgccacctctgccactacccagagcttgtcctgccctcttcccagccagcctcacacacaggagctgagccaggctgaggcaaggtcagcgagagacagttctccatgccagtatctgggtgtgggtctcttgttggctcccagctcatcccgtgtggctgacccttccaggtcacttggagcagccagtaatgacagtgtcctaacagctggtgggtatggaggaaagactagacatcaggctatggactcacatggagggccctggtgttggctctgggacctgggctgggccggacctggggagagggtgggtggagcttggcctctgcagtttgcgcttgcaggttcaggggagaaagttgtttgagatcagggtttaggggtagtgtttcccattaatcttcatcataatcttttgatgtaggtgctgttattatctctacgttacacatctgggaggatttgaaagtcctggagacagggaggttttggggagaatgcaaaacagggcagggctctcaaggagggtggaccagtgaccatggggaaactgagtgtttctattaataagtatctaagtttcaattgtcttgtatctttccctaattctccaaacggttcaatctccagttttattcagggactgggccattttgttctcagagggacaaaactgatctctccatgaaatcccctgcacctcactctgggcagctctaggctcagcagatgtttttctgccattaggaaacagccccttactctcagctcctgtgctaacacccatacccaccagctgggcgttgggacctctcccgtcatatggctgccacttgcttgggaaggaattctccagactccttttactttgtatgtgtttctaggggaattctgagggaagaagctttgcagcaacctctgtgcccagaacatacggctcacaagtcctttgtgccgacagggaatctatctaattgttttagtgtgtgaggctcattgtcagcctagatttccctgaaactctgggccagcagcccccaggagcatcagtaggacccagcatttcccctggcaccaaagtggacctctttgcaccttgcagccgggagaactgacttagagggccctggtgttggctctggaacctgggctgagatggattcggggagaggctgggtggagcttggcctctacggtctgttcttgcagattcaggagagaaagtggtatgagagcagtgtggtttgtaagttccccaacttccccgctggctcacactgtctccccagaccaatggcctattagcccccaaaaagttagtccaaccccaggccagctgcctttgctctgctgtggcctaagttctggcctggtcaaaggaaggtggcaggaactccaggcttgctcctgcctcctcacacctcattccacaaatgcggagtgaaagagcaggagccagacacatttgggggttgactgtctagaaaggaggaatcagaggtcccaaggaacacaatcgtgcaacttcctagggaatctgcatcaggagaaagaagcggctaggacacacagtggcttcgctcagcctggccacgacatcactgtgcagaagaagagatctgtcaggggtccagaggagcggagtcctggagcctctgggagggtggcatgtggcagctgcaggctgtggtccagaactatgagcagacttgcctgtcactctccaaacatttactgaacacctactgtgtgccaggccctgtgctttgtcaggctctgggggagacaggtcattactctgcagtgtgggaagcggggctgccctggaagtgtgtactcagtgctgtgggggtacagagggagggctggagaacttagctggtgggaaaggagggttctggaaggcttctcagaggtagtggcattgggccagaacttacagtagggaagagcatgtggcaaggcacagaggagatgggagcctgcctggtgaggggtccagtggtgacagagctcagtgtgggtccagagatggtgtcaggtgagggctgagaggggagggcaagtgccccttgagatgggctgaacgtgatgatgatctgtggccagtgggagatgatagaagtcttgaggttgggaatataagaattaggtctcttttagaaagagaggacatggagaaaatccatatatttttagctaccaaaaaagagaaggaagaaagaaaagaaataagaagagaagcaagacagaaaagaaggaagagagaaggaagaatggcaaaggaaggaagaaggag

SEQ ID NO: 2136 - DNA, 780 bp, Homo sapiens
tggcctcctgggagagccccgcctcctccacccctgcctctcctccacccctgcctcccctccacccctgcctctcctccacccgcccaggagagccccacctcctccacccctgcctctcctccacccctgcctcccctccacctgccccagtgcccagaccaaccaaggccctgacagccctgccttctgccctctgccctgcatgggcaggcatttgttccctacctgggtggcctgctcccctgcctgggccctgacttcagctccctgtagtgaagtccaggagggtgggacaggcctgtcaggcctctgggaatctcccaaatcccagaactcaccactcaccatgggcctttaaatgcagtaaactccacctaaccagattcaggggcactatgcccactgcctcctcttcagactctttgcatttcagtgaagagcctggaagaaacccaggggcctcctatgcacagatcttgcagcccagaaccaagtcagcctccctgcgactgcccaggcacactgcccaccaccccacccccgaaacaatgccagcccgctgctttttctatcctcccagtcacctttgcagacaaagaccaggggcagctcccgagggcactgtgaaggctcccatgccacacagtgagaactgtagcctctgcgtccaaggcacacagggtactttctggacccactgctggacagacttgaaggtgtcatgcccggtgtgtgcaggaggaaactaacagttcagtaaactctgccttgaccagc

SEQ ID NO: 2137 - DNA, 1699 bp, Homo sapiens
ctaaacaaaagaaactctccacctagcactgtttttcttcattgcttactgagagggtttttgagaacttaatctggggggagaactgctttctcagataccttaactcccgagaagagagtccttgtgcacagaacttgtgggagcctccatccgctgctctttacctttggatacagtgtgcaagtttcatgacagaatcattaagataatcaaattgtcctaattctggtgcgattcatggatatactggtaaatttaggcaaagtgaaacttatcagcgtagtttctgttctttaaaataaattggaaattagagactaagcacaattagtctataaatgttctataaatcaaaaacttacctcttgcactatcatgccttgaaatttactttttcaaagggaaacaagtttagcagcagccttcaaagaacttctttctatgatgagccaaattcatctttgccagaaaagaaattttgataattccaagaagcctgattagaacaaatcagatataccttctcttgtctgcatgactttgtgagataaaagagagggcttccaacttttttctactagcttgatatgtattatcacttaaaatggttgcctttaaaaaaaaaaagtagagatactaattaccagtaagtaatcatccaaataaatacgtcataaaataaattaattattttttctttgatggattacagtgactactgtgttgcactggcacatttatggtctctgttctggaatcttggaggacacacagcagtggagaacagaaggagtgagttttataatgaacagattccagacacggtaggtttagctgagttcatacagaggagatataactcatttagatcttctgacaaatcctagtgttagttttatctgtggaggaaagacatttaataataaactgtttgggaatcttggtgaataaagattcattttcaagctgaataaccatacttattttattttaagttgccatttggggaataattgcagtatgtgtagagactctcttgggatgcacttatatttttatttaatgactacttgttttctagttttgcccacaacgtctgaaaccactaagacattcaggagcatgttgagcttctggtttggaaacagcaagacccaccatttatgacaaggacagccatgaggttaatacttggagtttaactgccttccctttgaactagttaaaatctgtaagaataaggaagttgttgaaggcttaaaatctgggttctgaaaaagtagtttcagtttataggatacacatttactcactgagctccagttccaatactaaattagacagtatcatatagacggaaaatgaaatgctagaactgccgttctttggatcgccactctatgggggtctgtcttttaactactctcctggttatgttggccttacaccactgccatttgatttaaaacgctgcagaccactttatctgcaaatgtgttccagttgttatcagctacctactacgcagcttcagcgccagtgtgaatttatttttttttaagtgccattaccgtctcctctgttcagattttgacattcaggaaaatatttttattttgatgccatactgaaatctacaatgtatatctgacaaagcagttaaatgtgacaataaaaaacttatttaatcatggta

SEQ ID NO: 2138 - DNA, 2443 bp, Homo sapiens
aaaaaaaaatcaaacagcagaagaccaaggcatcagatctgtaatgaccctaaagttagtgtggtgctccaagcagagtcgacatcatggaatgaaccaaatctggcaggatctgctcggggaagtgttttcctggaccacacacaccttatggagataatgcctctgctgcgtgaggagacagagaactttagttggactacagtttgtaaaaaaaactaattttattaagacagaactttttttccttccaaattgtaaatctgtctataaatgtaacgcatgtggttgtgtaagacattgtttaataggaaaagttgtaccagcatcttcatattattgagaaaattttttccagcatgggcacttagaaaaagcacatggcaaatggctctttgttcctttcagatattatttcagtagaacctggcattctactttcaccttaaaagatccatctaagtctcagatctggaaacgttttgtaccgattatccacagcaaaacaaaaataagcttttattttattaataatttcgttcctcttgtgcccaatcaaatcttttaggaacaaactgcaagaaaagctaagaatgttttagagtgaactaaatacagacattgcttacttgttttgaagagggttttggttttggttattgtgtctttaagttttctgatatgccccctttcaatatttagatatttatttgttgggaagaataccttaaaatgagggttcttattccagattctgggcagtggtctgtgagtagtttttttcctggatgaaaagggagcaagcccacttgtcactaaatgaattgtgtgaaatgtgctcacttggactccatcaacaatgtgctgctcccagattgccatgccagagggtcttcggattcttccttctatcacctctgctctaagcaaatcttgttagaagggcatgcctttgcttaggcagattgggaataccaattcactacagaataaagattttaaaaatgcaataaggtggcaaatgcattgtatgaagaatttctcagtgtttagtctgagaatttttgcatgttggttaattgtggccattctttaatttaaagttaaaactataatcttaggtagaaaaacttttttataagaagtattatttgaccacttcaggtatacattcaatactgggtaaaaatttcagacctatctcaggaacacagaaatatttggtgtcctgataagcactttctagactattgatgtggccaggaatttggaaagacgacacacgcacgcgcgcgcgcgcacacacacacacacacacacacacacacacagttttttccttccctgtgatgaaaaaggctgtgaaaaccttaaagtatttgcttgcttcttgttttgtttagttgataatgaaatgtgtacaacctcaaatttgctgccagaatactaaaaatagaaaaatacccacaaaactgtcatgtctttagttctttccccccgaaaactcagtaaaaaggtgttcccaggatgaaaagatcattttttgctgcatgctaaatcttgcaggaaaaatgattttttagtacgattctgtagaaatgaatctttgatataatgtaaatgctgctgtttgtttcaagtggtgaatgtgttgttaaaaattggctgtttgctttcattttggccaataagtaatcaagtttgtagaaaatgttagcattctgactacttagcatctgtagtaatttctctatgtatagggataattttttagtgggcagagatcctgttctagttgcctgttaagcaaaatctgccctcccaattgaaaaagccaaagagaattgttagagggaaaagcatgtagccattgcagtctgcattgcagccagcgttgtccagagtacacgctcagcacttagcttctactgtgtgttgtggtctggtgagtgttgtttcccctgagcgctctattatttatttatttattatcaatcagtgaccctgaccacatagtgtgataggtgcagcattcttccctgtgggaaagaattaaagatggttccatttcctaggctacagacaggaatggggctctaaatggttttcatagactggctgttaaaggccaaaaattttggtaaatcaatgctatattatgctcttgaactattaaaacagccataattattgtcccaagatagaatatagtcctttttcaaagatgattatacgtggctaggtgacagacattaatgactgactctggagagtaagtcatacctgcactctgtggacttgatggttctttttctagagcaaacagagcgtggcattttgttttgacttgttcttccttggggtcaaatttatatatatatatataaatttttgtttgggcgaccaagatctaataattaaaacccaggtggaccatggattc

SEQ ID NO: 2139 - DNA, 671 bp, Homo sapiens
ctgcacagagccgtgtcccagacacgctgtcagtgccttcaacacggagccggtttgttcattcggtgctttgtttcattaaataatagggaaatatccatttaaaacaggtatatcagtggaaacacagagttattttaagtgacagacaaattacggttgagttctgtggcttcttcacttgaagtgctaacatcagaatcaaacttaaagcttccactatttatgtctttgagaagtatgtagtacctcggtattaacagacctgctgtgatgcagttacactttcacgtatttttgaagtatgtcaagctacacgggtctaagatatgattattttggataaaatgttactttggtcaagagaacttttatccagatgacattacaggttcaagtgggttaaggagacctcctgtacatctacagtgtttccttttaaattgtccagaaaaaaggtgtgttcttcataagcttcagtgcaggatttttcaaagacgagctgttgtgcaatttgctgtatttaatgcatgttctgaaaggattcacttttgactttatatgacagttgatcaagaacaggtactacccctttttttcatttcaaacttgaaactgtgaataaggtaagaaaactattttgaataaataaactatttatttaaaatgtc

SEQ ID NO: 2140 - DNA, 1447 bp, Homo sapiens
attaaaacatacaagccaggatgaatgaagccaataggaaataaaaaacaggcacacaacattatttggggaaaaacacctctagtgacacattttcttcatctgcactgattatttcagcaaaagaaatctagtatgttttcatacatctgatgtataaatttgctgaactttgagttagttttcttaagataatttttcatattaagaaaattttccttttctaacctattaaaatacctcactatcatttcaaaaggttaaatgagttgatcactatctctgctctgtgctcctcaaaatataatttcaaatggatccgatctaaatctatacctagtgcagatttgcaaaaaaagaaaaggaatagtcattaaggatacctgttaccatggctgcgattgttagcacttcatctacacagtcaaattcacaggacgctaagatagacttcgagagttgtggatcaagaggaaactctgacatgatgattccaaattcagaaagatttccatcattatccagtgctgccagataatctaagtcttccaatgcctgcatcaaactttctggtgctaggaaaggaaaaaaataataatttaagagtctcatatggctaagatggagaaacaggtactggacttttccctcctgcatgaaacaagcaaacaatggacaaaatatgtgaaacaacggtttgcaagccaccaaataccagggagtgaaggatagtgattcttgagagggcaaactcaggaggggagccctgtgattgtccagctcatgctccgaggagggtcccagctgcagtgtgcatgcggggggaacccaggtggagcctgccagcctccctgcagtaggaaaacaatgccagggatccagggagactaaggtggccggaactcgcggtcacagtactggagagagacacacagatctaagtcgggggccagagggagctccctcaactaggcagcacagccctactgatcagcgcatgtgtgtaaggaaccacctcaggccagagaaagagccatgtgagaagattagaaggaacagtggtgctgacacaggacctagggtagggcctgttcccaccaccctagctggaaaacctcatgatttatggggcactgggtagaaaacacaagtgagaaaccctagatgggcactgccacctgacacagctatacagcaggacctgaaaggatcacactgcatcctaggacaaagctcaaaagtacctctgggactacaaaaatattcagtgcccaagaaggtaaaatgtacaatgtctagcatccagtagagaggcatgaaaagcaggaaaatacattgcataatacagagaaaaattaatcacaactgacctggatctcagatgctagaaatagtagacaaagatgttatttcccagtgcaaataaagaaataaagatagcaagctg

SEQ ID NO: 2141 - DNA, 279 bp, Homo sapiens
cccatttccaatggacagtgatgggcttgtttttgtaaaattaccagaaaactcagtggagatttactgaaaaactcagactttattcagattaagttcctctacaaaaagtagggttctgtcccatgtgtctctgacacatttacaaaataccagttttttaaaattttggtcaaattatgagtggttgatttaaaaacttttccaagaagaagaaaagcatggagtagtaatttaaagaactcaataaaaacttctattttttattttaaaataata

SEQ ID NO: 2142 - DNA, 278 bp, Homo sapiens
taagtcagggatatttaggaggctcatagtctcctggagggataaaacatctcggcacctagtaatggtaaattagtcaatatttgttagtttcgtttgagatctcaaatgttaggattttctgaagtctcagtgtctttcagagtttgagataccttgttttcattttttctaatttttaatttaaaagtaataaagaatattttgtaatgattaggatgaaaattttatcgtcaattataagccaaaatttgctaaaattaaagtcagtatacttg

SEQ ID NO: 2143 - DNA, 154 bp, Homo sapiens
tgagagcaccactcatctgcgaaacgcacgtaaaacaaagtgaaccgtgactgttaaactagggatgggaaattctgcatcttggggggctgtacatttatttatttagttgaagattcactgatcccactttgaaatacatctttttacctaa

SEQ ID NO: 2144 - DNA, 1088 bp, Homo sapiens
cgtcgcaagcctctctggaaagagtgtgctgcccctccccatctccatgccctctccttctgtgtcccctgagtctgctgtttacctcattgggcctgtgatgttaacatttcgtgcgactgctttttcttcaaaggagttcagttctcaccatggagtgagtggcctttagcgtcatggagcaaggtgggtctgggaggtagatatgggtccgggatgtgctatcgtagttatcagagttgggggcctctgagtgtgtctggctctgagagagtctgagtcttgcccaaacattctttctttttgtgccaaatgacttgcatttgcaaagagctcaattgctctgagctcagccaagtaggagaggctaggccatcactcttaggaagctgtgtagtgatgatgtataagaatcctcctcactgtcatgggatgttgtatccagcccctccttgttccagccggtggtgtgacttcgttggttgaggtgtgtctccaacctacatcagaccatgaagttcaacccctccagggaagctcctgatttcccctgcataattgaaaataggatatttctcagctattgaacagttactaatttatggggtggaaacagcattaagaatactgaatcaaatggaaaaacaaatgaatacaggaagataagtgttcgttcttttctgaaaaagagtatgtgtaccacaagagctggttttaattgggtgaattgtttttgtcctcattctgtacagaaatttgtatatatgatggttcttagaacttgttttaatttttgtggtccttccgtttattataataggcgtccaccaatgattatccatatgtgttcttaatttttaactgctggaagtgttaaaacacacacacacacacacacacattttttttttgagaactccaaagtcctgaaaattttggtggacaatgatttttaaaaaactaactttgtataacctaatatttgtattctctcatctatatttttttattcactataatcatgatactcttctaatagacttaaaagttaatcattgacaacgaaaaataaaatgttattttaaaag

SEQ ID NO: 2145 - DNA, 2221 bp, Homo sapiens
agggaggctggaggctagccgggtgcgggtccagaggtgctgagctcaggcctccggtttcccctggtgacagccccacgtgttggcgttgaaggccttggtgccctgggaggaagcgcagagccgggggcggctcggccagcagggagctgggctgagcggctcttgggctttggggtgggtggcccttctgctgtgcacccctcacccaggcgaccttcggaacctccctgctctgcctctaagtccagccgccctgggcgtctagaacctgtgctctcgagggatttgccttgaaggggcggcgggtcggccctcagctccagcgttttccaaggaggctggctgactccaaagagccttagagcagatgggaagaaggtgggctgccagagcggcccaggtggtgggggccctttccacctccacccagcttggcccacctggctcagggccttcccttctgcttcagggaagctgccgcaggggctgggggacagagctcaggagcagctgcagtgggctccaggtgggccaggagcctgcagtgaggggatctgagacagttggcattgggtcctgtgtaaggaaggtcttgctaatggttggaactgctggtggtgggagggagaagcactgcgtgggcagaaagcgcccttgggataccagctcccttccctgtcactcagccctggtccttgatgacccccctctaggacaaggcaactccccagggccccgccaccactgaccacaggagcggtgcccagcacccaggagttccccaagggtccaggtttgtgccacccacacccacactcacacccacactcacacccacactcacacccacacccacacccacacccacactcacactcacactcacacccacactcacacccacactcacacccacacccacacccacactcacacacactcacacccacacccacactcacacccacacacactcacacccacacacacccacactcatactcacactcacacccacactcacaccacacccacactcacactgacacccacactcacacccacactcacactgacacccacactcacacccacactcatactcacactcacacccacactcacactcacacccacactcacaccacactcacacccacacacacccacactcatactcacacccacacccacactcatactcacacacccacacccacacccacacccacacccacacccacacccacactcacacaggctcatggaaggccacacttgttttggtctctttcccctccaaacccacagtttgagccaaagctgtgcgtgtgttcagagctcctgaacagcagcctcctgtgtaaattgaaccctgccccacccagttccttcttagggatggtatctttgtgaaggacaaggagcccccagtcactgggaagaggaattttttggcctctgtactccttagaggacctaagtgccccagtcagatgccctgagtctttgtggcatctgggactccctggagatggagacgttggtggggggggggtacccaccttgttgttgatgggggtacctatcttccctgcattttgggggagggtgggaggggtccttcccaggaagagagtggagacaggttactgttactttggagtgggacaggctggtttagcaatcctaagccccagccacgcaggtattcctgatctgcctgcagggcccctcactgcagctgccaccagtgctggaaatgagagcagggctcctgactgtccctagagctgactcatcatggccctgctgaagagtgaggtgtgtgtgtgtgtgtgcgtgtgtgcgtaagacagagagggagggagaaggaaggaggcgggggaacatggagagaaggagccaggagttgggataaacctggccctggtcatatgtttcatcagcagtggctcctaactccacgtgccatctctgctgctgccctccacaagcaggtgagcagagtgccagttgtgttgaaggtgatgatgtcgcctaactaaactcacaaccaacccgcaatctctcttggggggacactccccataagcaatacaattaaagaagaccaggaaaggaaaataaattccttagcttatacatttaaaaagtatcccttgaacctattttaatagaatgaaatgctaaaaataaagaccaatataacatacat

SEQ ID NO: 2146 - DNA, 2992 bp, Homo sapiens
agattcctgccttaaaatattttttaatttaatggtcagtatattttgtaaaaatcatgttaatttatttcatagttgacattaatatcttccctaatttctttgtatatattttgttatgccttaaaggccacctgctatacagttgttaaatcttaaatatgctttttaaaaattggaataatgtattaaggtcaaataatatcccataaaatatatatttctgctaatattagtaaatatcttaatttttcattagattcatatcatttaatttcacatattcaacacctttaaatgttgtaatcttaatatgcgaagtgtgcctctgcaagatactaacacaaagctcatgttaagaaaacagttgaggactcagaagtcagttcgaaaatgcactttcctaacagtgaattcacaaccctgaacagcagcatttttggaaggcaaactgttcgtgatggtacaatgtaaatggggacttctgtaaagttctcagtttcggtccatgtggtttatctttacattttaaagatcaaagaagtctttacaacctgaatccaggtctaaaacacactagagtagctggtgactataaataatattttaaaatgctgtgtctacaccatcaagactgtgtctacactatcttggctgaacgagaagagatgtaaatgctgggtggtcccgttgacccacggcgttgggtacaacaaaaccagccatcggagttacaccccaaagcaccatttgctgtccagctgcctgtcgtttggcccagaccaccctcagaaaaaaaccagctgcctctcccattctcccctcccgttctgccacagcggcctgggctggtccagtgctatgcctggaggctcaacacaaaacttcccatccaaacattcagatgaactgagcgtcttacacacgcagtacagaggagcacacattaggatagaaacagtagaataaccacgggcaattaaactttaaattttctgagcagcattttggtatttaaacatttcttgtaaaaagctgagacagtttgtaagaaaagaatccttaaaatctagatttataccattttttaaagtcccacctttcaatgtttaataaaacaaaaagagaaatccttaatctaaaagctaaattatttttgaatggaaatactactgagaccattgacactggataacagtaatgatcccattaccagataagattgactgacggggaaaaaaaaaaaaaaagaatggggtgtgaatgtaccaacactgaatcttacagcagttatctttctatggccattaggtacctagcagatgtgcacaatataaacaaaaagatatctggcctaccttactactaaaagcatttaacacgtgcatttttggtacttttttttttgttttctaaaagctacataaaggccttatttgacattttcactgataactgatcgcaccctcatgttgcagtgttcgtcccctattcattaacagtgtgtgcaaatgcaaccccaggacacattattgttctgatagatgctcacagggaatcaagcttctcgcccactccacggctctgagccccatccaagggcaagacttggtgcccagctggaaggacgaaagcacactttgtgaccgccatcctcaccagctgcatgcctgggctgcacactgctgaacgtgctcctctctccttctctgtacaatgattcagcatctcggcggaagaggaaaatggagctttttgaggctcgccaggtcccttttgttttcaccattaaaattccaaacccaaagcctttgtttgactgaaggagaagagagggaagtaagcttctgttcagcacctgaaccctagaaaaagagccagtttgctacgatgaaggtgacatttctctggtcatttatttgagagttcgaagtcaaagtcgaggggcaccggctttggttcatgtctaggagccctctgtcagaatccttgaagccctttaatggtctaactggcatctcttgtatcaagaagtacctttaaggtagaccttttcagggtgccctcaggaaagggccctgctcatgtttttttcctgtccccttagaccaaccccaggtgtccactgcaggggttctgcctgttcccaaactttttccattccaggaacaaaggagaagccactttccccaggacgcaagactctcccctccactgtccgggacagcgttcgccctttagcggggaggtcattacagcctcatggcctctaccaaggccccagatcacaggatctcctgggccttggagcacctcacgctgggggaatcaatccctgagggactcagaatcttctccgtgcaacctggaaagttcatctcttgtttccttcagtcaaagaaagtccattgtacataacaaaacagcccccaaacagcccagtgccgacaccattgttcctttcacactttcctttgttgcatgcagttgggttcaaatgccaaatagtgattagaagacgaccattctgatctgtgtgtgatctggtcactatgtgactgcctttacggtttctctccatgtgctatatgaatgaagaatgcataccagtgttttaaaaggtatttttatgtgtttttaaacacttttttaaatgagcctgacacctgtgtttcagcatttggagacatccccatgttattcttttaagtgtataattactgatacttttttgtttgtttgtttaactaagttgtgtttaacttatgtgcagtctttataatgtatgtatgttattacagtttcaactatcatattttctttgattacatttataatttgatcttgctctgattataatgccagtgaatgttgctgaactctttgtatatgcaaattgcaagatttaaaccattctgatgcaaggataaacctttactttgactaccagcctgtgtttttgtctttaaatctcttaatttcattcctctgc

SEQ ID NO: 2147 - DNA, 105 bp, Homo sapiens
gtatgtgcagtaggatggatgtttgagcgacacacacgtgtaacactgcatcggatgcggggcgtggaggcaccgctgtattaaaggaagtggcagtgtcctggg

SEQ ID NO: 2148 - DNA, 214 bp, Homo sapiens
taaatcttaaacttggtgcccaactattgtaagaaatatttaattacattgggagcagttcatgatttagtcctcagaaatggactaggaatagaaaattcctgctttctcagttacatgttttgtgtatttcacaatgtcgtgctaaataaatgtatgttacatttttttcccaccaaaaatagaatgcaataaacatcttcaaattattaac

SEQ ID NO: 2149 - DNA, 584 bp, Homo sapiens
agacgcgaacgtgaggaccaagtcttgtcttgcatagttaagccggacatttttctgtcagagaaaaggcatcattgtccgctccattaagaacagtgacgcacctgctacttcccttcacagacacaggagaaagccgcctccgctggaggcccggtgtggttccgcctcggcgaggcgcgagacaggcgctgctgctcacgtggagacgctctcgaagcagagttgacggacactgctcccaaaaggtcattactcagaataaatgtatttatttcagtccgagccttcctttccaatttatagaccaaaaaattaacatccaagagaaaagttattgtcagataccgctctttctccaactttccctctttctctgccatcacacttgggccttcactgcagcgtggtgtggccaccgtccgtgtcctctcggccttcctccgagtccaggtggactctgtggatgtgtggatgtggcccgagcaggctcaggcggccccactcacccacagcatccgccgccaccccttcgggtgtgagcgctcaataaaaacaacacactataaagtgtttttaaatcc

SEQ ID NO: 2150 - DNA, 832 bp, Homo sapiens
acgcccaggaccggccctgtgagccgtgctggccccacccgaggccgcgggggccccagggcactcgcccccctccttagcattttcttttgtagaagtttctcgaaggtgcttggcggtcttgccttccccctccccacaggctctccttgtggggtcccaggtcctgctgccaagagcccctcaagagaagggctgaacctggggagatgtcactgccagggtgaggtggagccacatggcagggacaatgccggcagcctgagcccaggcaccccagtgcccgctgggcccagcctggggacagggaacctgccgggctcacagtgtgggagcagctggacaccaggcttcttggtgaaccggcgaggggccgagtcccgcctggtgggcatttgccgccgcctccccaccaccagtcactgcctcgcagagccctacactcccgcagccgctcctcagaggcctgtgcccatcgcaggcctgggaggaaagtgggcgcagagccctcctgctcacacagctgctgagacttcagggacccatcagaacttggtgcagcacagccccgcccgtggagggtcccttttacgcaccccaaggcccacacctaagcttccatgtagccctcatccagggaagttttgcgatcctttaggaagacactgtcctcttattacagattgtgtatttccgtaggcttcttagtagcagctttgtacactgaggacactgtagccaggaacctgtgcatgccacccaccgcctggacaggcagtcatcctgcctctgatgtgaatcaggcccattaaagacgtctgggtttgaagcc

SEQ ID NO: 2151 - DNA, 4676 bp, Homo sapiens
caccaggtggctggactgatggagacgtcttcagacaggagccgctcagtcttctttcccgggcgtcgcctcctgtgtggtgccggaagagcgccaggttcagtgttaccctgagggctgatttcgcgcagcctgttgttttccttagacaggtccacgtccctctcctgaggctgtggaagatttcagccgtattaaaagaaaggacactgtgagcacgtggtctcgccttcccttcttcctgcaggttcccgccaagccatgtgacagagtgctcacactcaggcacttgcctctctcctgtcctggagcccttgttacaaaagtactcacagctttccttcacttagttatttgagtgtgggagaggagaccaggtcacccgattcccgccaagccggaagtccctgcagcaccacctttggctaggagggaggggtgacagccaaaaagggcttcgggggagtggttaccctgctccctgcccagtgacaagccctcctttcccctgggggccctcctttcccctgctccctgcccagctacggggccctcctttcagccttgaccccttcctggttgctaccactcaggctgccactcagtggactccaccccagggacacggcagggtctgcagacctccccatgctagatcagccgtatttcatgctctgtctgcccaggctgtgtagattctgtgtgacttagtctcttgtgctgagtgtttgcttggatcttgaaaacatctttggtttgatttctttaacagaggtgagactattcagactttgtttatttttgtgttaattttggtaaatatggtttcagtgagtttcctcatttcatccaagttgtgcaatgtatcagcataaagttcctcttattttcagtatctttaggatccgtaataatgtcccctcttttattcttgacctggtgttcttcatcattcttgctatggatttatcaattttgttcctcttttccaaaagccccaggttttggcttcactggatttgctgtttgtcttctgtctcatgggtctctgcgccctgcacttcgtactttccgagagtttaactggtgcttagagagaaatgcatcacttccaaacccatgtattagagaagaagggcgtgaaatttatcacctaagctttccattcaggaagctagaaaaggtgtcagtgacctgttgcggcccagcggctggagcagcagacgtttgccatttctcacgcctgagggcaggcgttggagcagctcagccggcgttgctggtcagggtctcccgtgaggctggagtcagccgtgggttgagctgctctcctctgaaggtttaactgggcttggggctcagcttccaaggtgctcacctggttgttgatcagagagcgtgtccgttgtgatcccagtcctttgaaactgtgaagcctcgccccgcggcctgccgcaggatatgttttggtaaatgtagactgtgcacttgagaagaatgtattttgagttgttgggtacattgttttgtgtgtgtcaggtgacattgactaatcctgttgctcagagctcctgtacccttactgactgacttaagcctggtttctcagttactgagagaggcctgtgaacagttctagctatgatcatgaacatgtgttttcttcttagttatgtgagtttttgctatacgtgttttggggctattttgtcagatgcctacaaatttaggattgttttatcttcctgtcgaactgaccttgtcattattatgaactatttctcttcgcctctccttttcacttcttgccttctgtggattttgtctgatactaatccaggcacactgctgctgttttggtcagcgttttcataatgcatcttcttccctccttctactgtactggatttaaagcgcaccttatagagacatcatatactcgggactccttttctttctctagctgccagttctgtgtttcagttacagtgtttggccctcacatttaaggtgcgtgtgcgtacggcggattccgtgcccatctcatgtttttattccctttattcttcttttgctgctttctgatagtgatcaatttttttatttatatctcttgtattagagttttagtaatatcttttaatattattctcttgggtgttgccttagagatttcatacatgcccttgagttcattagcatttcctgaatgagccaatgaccctgagaaggtccctcccatctgccagttccctgccattgatgctgttgctctcgtccgcctcccttccacaggtaagcacgcaagacacaggtaccgtgtgccccaacggtgtcttgactcgctgttcctagacatcagtgtttgcttcactttacccatcccgatgctcttccttcctgcagcttcatgctccaatgagggctgattttcatttagctaaataacttttttttaagtatttctttgtatcatggttatgctttgactggccgtaagttctctcagcttttgtttgtctgaaaataaatttagttcgcctttattctgcacaggacagaattctaggtggatgatttttgccattcccagaactttaaagatgggctccactgtcttctggctcccatgtgttttgttaaaaattcagtgttcaggccgggtgctgtggctcacgcctgtaatcccagcactttgggaggccgaggcgagtggatcacgaggtcaggagatcgagaccatcctggctaacacggtgaaaccccgtctctactaaaaaatacaaaaaattagccgggcgtggtggctgtagtcgcagctactcaggaggctgaggcgggagaatggcgtgaacccaggagacggagcttgcagtgagccgagatcgcgccactgcactccagcctgggcgacagagcgagactccgtctcaaaaaaaaaaaaaaaagattcaatgttcattgttatttgttgctcctttgaaggtaatgggtcttttttctttgtcttaaaattgtttctccttatctttggttttcagcagtctgtgctgtgcctggatgtaattttctttttacgtatttttcttggaatatacagaactcaaatctgggagttagcatctttcatcagttttggaaaattcttagccattttttttttttttactattttttcccctgttctccctcttctccctgagacttcagttttgtgtgtgtgtgcacatgtgtgtatgcattcgtgcgtacgagtgtgtgcatgtgtgcgcccgtgtgtatgtgcatatgtgagtgtgtgtggctgtaacctgcacgtctcttctgtcatgtgttctatttttcattcctctctgtacatcaggctagatgcctcctgtctacgtggttttagatttacgaatcctgtcttctgttgtgtcccacagaaaaacccatgaggttttttaacattaaaaacagcagctttatgatagagaaaaaaacacaaacatagacgattgtaccattgcactcagaagaaacatcccaggccctgagcagcgtgtctttcctcggccgagtcaggcttcctggtgagcctcagggagtgcatggtctcagatgccatccttctcttctccagcatttccactcacctccgtgttcttggggagtgcgtggtgtcagatcccatcctgctcctctccagagtttccggtcacctccgtgttctcagggagtgcgtggtcttggatgccatcctgctcatctccagcatttcctctcacctccgtgttctcggggagtgcgtggtgtcagatcccatcctgctcatctccagcatttcctctcacctctgtgttctcggggagtgcgtggtgtcagatcccatcctgctcctctccagcatttcctctcacctccgtgttctcggggagtgcgtggtgtcagatcccatcctgctcctctccagagtttcctctcacctccgtgttctcggggagtgcgtggtctcagatcccatcctgctcctctccagagtttcctctcacctccgtgttctcagggagtgcgtggtcttggatgccatcctgctcatctccagcatttcctctcacctccgtgttctcggggagtgcgtggtgtcagatcccatcctgctcctctccagcatttcctctcacctccgagctctcggggagtgcgtggtctcagatcccatcctgctcctctccagagtttcctctcacctccgtgttctcgttctcatctctgccggaattccacatctgctcgtgcatgccatccaccttttccactagatccttttacatcatcattataatgatttttttttaataagtgttttctttcagttttaaatttcagatgttgtgtttttcaggtctaaggtgtctggtaattttttgtggatgccgattctctgttgaaattctccatcttttcatttcctttatatctcttttcttcttttttctataatatattacatttttctaataagtttttagtgagtgtccagcattgtataagttgacccttgaacaagagtttgaattataagggtccacttataagtggatttttaaaaaaatatatattgcaaaaatttttggaaatttgcaacaatttgaaaaactttgcagatgagccacatagcctagaaatatctg

SEQ ID NO: 2152 - DNA, 794 bp, Homo sapiens
gtcaccgacgatgagggcgcacctgctgtcctggagcttccgatctctgttcggggaccctgtgagccttctggccggctgcgtgcagagcccactgggcacggtggtcggcctggtgtgaggccccccggggaccggcagtgtgtccagggaggggatggccctgagcccagcggctcctcccgctgagtgtatttcttcccaccactcagcgcatggctgccctggctcacgaggcagtcgggactcgtgacttgctggctgctggctgctgctgcctcgcgcgctggggttccatggaggaactgggcctgccgccccggcctcacctgctgcccgcatgctggggtcccatggaggaaccaggcctggcgccccggcctcgcccagcggctggtgtgggcagctgttccctgcctcgcagtgtcctggaggcagctgtctcgcagactcagcttggtctcccgcaggcttcagaaaaacccaattgcacgtgtgggattcttccccagcccttgggtgcggggtctctgtgcacttgagagctgggggacccacccaccgtctcccactccaagttcatcccagagcgtggggcccgctgggcacctggcacctggcctgcagatgctgctacgagtgaccagtgctgtgtggaggaggccaagggcggcccctgggaaaccgggcttcaacagtacaaggaaaagaaacttgctctgttttgtaagagcgtgttccttttcctcttttttgtcactttaaagaccaaaaagaataaagaaagaaaagaa

SEQ ID NO: 2153 - DNA, 259 bp, Homo sapiens
agcggggaatggcggctctgggccctcaaggggcaggcggtgagcctgggaggccaggccgggctgacccaaggggagaggaccctctccgcccactgccgctggccctgggcaggtctagagcctgggggtctccagaggcacaatcccttatctccgggagaaggcagagggcagaggcaggaaacaaatctcctgtcaaaattcctaattaaaatactaagtaagtgatggctccaggctgaaacaccggacactg

SEQ ID NO: 2154 - DNA, 1538 bp, Homo sapiens
cgtggtggtaaatatgactcctccctccagttcagcttttacgcagcttttcctggtgcgtttgttcctttaacaaattacgaattccgtgacagggaagagatgccagcgccacgagaggacacttcgtgagcctccctgtagccgtggaccgaatacgcactcttgaaagctgcatcgagaacccgcccaagcgccacctgctagacggccagccccacacttcgcttcagcctccggaccattccggagcagcctcacatacctcactgtctcgtctgtctatgtgacattaagtagaaatattggttttttttttttttttttaaataagtcacagtcctgttgtcaaaactctaatagacagcaaagagggtctgtaccgtagacttcacagttttcagtttttaatgattgccagtggaggggcttcttcagcacagagaccccccactgtgtccagggaccccctctgccaggtggaggtgtgtccaggggctggggaagccgagacgggcactccctctgccggccggcagcgtggccctgagcatggcaagggggtctgtctctgccgatgctccttccgcggcactgactctgcgccgtgtcacatggtttttgaatcacactgcagctgctttccatttttatatatatataaatatatataaatatatactttttaaaaataatttataaatcttaccaaaacttatgctaaatatactttccagtatgaacgcacaggagagtcccatcagcaggcggcattggagtctaggagctcagctgtgtgtccatcaacacacaaattcgtaaaaaacacacatggcctcgccatcgtgggtaaaatcggccccacagcacgtctgcaccagcgggccgttactcccatgccgttcttctgtgtaatattaagaactgaatgtgaagtttatagctagcctgggtgtaccttttaagaattttgtaaaccgtttgtctgtcttttgttactgttttatggtgccaagtatcctacgttacaacaataatatcatgggagaaatagaaatagcctagtttgcttccaatagaaactgcttttaacatgggctgtatataaaaatattaaagagaaacaaaactgtacatttcctcattgctccgctacagacaacccatgtcataaccttgttgcaaatatttttctcctatagcagtaagtacagcattagaaggtgattagagagtctgttgatgaaacacaaatgtatgttttattgattttactttagaacactacagagttcctggaccgggtgaaggcattagctgggtgtttgtgtgggataaatactaccactgcaagtgactgctgtccgctgcggaatctgttcttggtggaagcacaggtccgtgtcgctgctgtggttgccgctgtccgcggttcaacacggagtccgccccgcgggtttcagctgttggtcgttctgaggggcctttggaagtgaccggtctggttcctaagcaataaaattgaccgtggtgaaaat

SEQ ID NO: 2155 - DNA, 1522 bp, Homo sapiens
ccgagctcgggcctggtgtggaattccagatccgaatccgactgtggggggcgggctgggaggtgggagccgcgtctcaggcccggccgttatcaaggcccctccgcccccgaaccctggggagctggaccaggaggtggaggctcaggggaccccatggggacaggcagagctggtctcctcccagcagacggagccaggacgggcacaagagtcttggaggtttgcgtgtttctgctagaattaaaaagttaaatttaaaaatgaaaatgaaagacagcttcccaggagttttgtgcctgtctgcgcctctcacacacagataagtggctcttacccagctctcagtgactcccccacaaaacagcaacagcctccaccgccaactcaacaaacttcagagtagctcctccctgagcaggtttctgagccagcctgggttggctgagcaacgaagggccaaagctgacctctgagtggccaactgcagctcccagggactccgagacctccggtccgagaccctgcctgggttcaccccccacaacccagacccagaaccgctctccccttccctgcccagtgcccctcctccccagcccagacccccaggtgcccaaggcctgctgctggagcaggcaccttgggctgggcctgctcccccagggcccagggccccccagcttagaacagcccttggtgaggtggtcatgcccgggcaaaggccctgcttcctggaaaggacactcagagcagctccaagacagaggctctgtggcgggggtccctgagagtgcccccacccatctcatgccccagggaccgccactgcccaccgcctccagcagccatgcatgtgcgcccgcagccctgcctccacagctcgccacacactcacgcttcgccagagacaggaagtgcgctgcctccacggccccttgcccttgctcaggttcttggaccccaggcagctggtgtggagccccttggccagggccatgggagtcccgcgcagtcagctccacattggcctctgcagctgggtgaccagagccccgggcacggccccagctccgtggggctctcacggtgccaatcacaagacccagggttgtgcttttgagttttagaattagtcattctttagagcagccagctagtggcatttctaggaaaactgtgacctgtgacaaatcgctgcatttttaatgtcaagatgtgttttcccacataaattcaccggagacatccgggccccgcttcgatgtaacatgagaggaagtcggcgtcctggccacgaaatgcagttcacttttttttaggcttttatatggattatgttttgctgacccacgcccgcattttcagattttgtatctaacagacagtgctcagtgcaaatcaacattccagcggtcaggactgaccccggggcagcactgggctcaggcttcagcgcgactgtccgcatggctccctcccgtcctggcaccaatttctgaataaagtcctttctaccagc

SEQ ID NO: 2156 - DNA, 115 bp, Homo sapiens
gtcccggctgcggccagtctcccctctccaggccgaggcccctccgccctgacccctcctgctgccttcccacccccgttcttgggtatgttcaataaaaggattgttttcctag

SEQ ID NO: 2157 - DNA, 1623 bp, Homo sapiens
ggaggcacctctgactcccacactcgcggtcttgctgatcgcacctggctcctacctggaggactcagttgttctgtttacatcctggtggcacctctcaccctgacccacacaaaggttctggagattactggagaatatatataaatatatatatgtacgtatatatgtaaatacacatatacgtatatataaatatatatatacatatgtgtgtgtatatatatatatatttttttttttttttttttttttgagacggagtgttgctctgtcacccaggctggagtgcaatgacgcaatctcggctcactgcaacctccgcctcctgggttcaagcgattctccagcctcagcctcccgagtagctgggattacagacacccgccaccacgcccggctaattttttctatttttagtagaaatggggtttcaccatgttagccaggctggtctcaaactcctgaccctgtgatccgcccgcctcggcctcccaaagtgctgggattacaggcatgagccactgcacccggccctgagaatatatttattaaagccacctcttcactgaaagttaccgaaagagtcggtttaggaaggaaacgaagggtcagtgaacagagtcaaatgcagaagtgggcttgtcatgggtagggctttcggcgtacgataaaaggatcatttgttttttaaaaggggttggaaaaactggttttccagttggaaacagtaaaggttgtaagctttgtgtgtacaaaagaaaacagggaatgcaggtgtgtttatagcgttgtggttcaagtccctcttaacaagaactccaaagctggaaagcaggagggaacaaaggtgaacatgaaggcgaggatgctggggccctgcagtgcgctctaggctgtgcgtgagccgggactgtacccacagcttgctgagggctgctcttcttgggccagggaaagcagggcagccgggacctgcggctgtgcctggactgaagctgtcccgcaggtccccaccctccaacacgtgctcacctgtccccctcctcgcagcagcctcgggacaaaacaatgactcaaggacagcacttctcgcagaaggtctggaagtgcccagaatgggaggcacggaagcccctcccggggaggactcccgcgttgatggaccgttcttggtgcagactcctgactgcgtgcatgaaacctgagacaagtgcaattccttccatgtcgccccagagtgcccaggaggcaggcagtgcggggtgcccaggcagacgggttcagcctgcagaactggaggcgacctgtgaaacccacccgggcaccccaacaggaacagaagcgtggtcctgcggctgcgtccccagcgagtttcactttccccttgctcgtttctcccttgttgtaagtgtttacaactggcatgtgcttttaaacatcaggtaagaggggaacagctgctgtacatcgtcctggcgagtgacaatgtgacagaagcctgggcgaggccctcggagggcagcagctggacaggggctactgggtttggcctggacagcactgatttgtggatgtggatgggggcacgttgtccgtgataaaagtacaagtgcccctcac

SEQ ID NO: 2158 - DNA, 296 bp, Homo sapiens
tagactcagaaaaggagtggggggcagtcaccactgctgggcgtggcatccgccttgggcctttctccgaccttctggtgtggccgccctgggggccaggccctcgccatcctccccatccttgttcctcagcaaatggcattagcagctgtcatcagaagctgtgagggacccacagattttggaaacgacctggacacactattgggaaggagatgtggacggcctgtctcctcctgcagggcccaccctaagaatgtatttttaaacacatgaaataagtatttttcactgat

SEQ ID NO: 2159 - DNA, 243 bp, Homo sapiens
ggctccaggggccatcactgcccccgccctgtcccaaggcccaggctgttgggactgggaccctccctaccctgccccagctagacaaataaaccccagcaggccgggcgcggtggctcacctctgtaatcccagcacttttagaggccgaggcaggcggatcacctgaaatcaggagttccagaccagcctgggcaacatggtgaaaccccgtctctactaaaaatacaaaaattagccggg

SEQ ID NO: 2160 - DNA, 382 bp, Homo sapiens
ctccagatcctgtttgcgggggaagccacacatcgcacgttttactccacgacgcacggggctctgctgtcgggatggagggaggccgaccgcctcctcagtctgtgggccccgcaggtgcagcagcccaggcccaggctctagctgggcccagcctactctgttccacccgtgtcgggggtaggctgggaccctcatttcttctgacagatttcagtctggcttgaaatttggggatgttaatgagggtcctctggtttttggtaaccagggccaccttctcagttcttgtgtctgttattggagtctggccagggttgacttgagctgagacaccagatgctcacggagatgctggacacataaagcaagttacagccac

SEQ ID NO: 2161 - DNA, 504 bp, Homo sapiens
acttgtccgggtagggagggccggaggcatgtggcctcccagacctcctgacctgggtggttgaggctcaagacagctcacccggtccagaagctccatgctggtcactagggtgctgtgctctctggcgccccacagcctggccagctccagggaccccagttgcagggcccaagcaggtgggagtggacaccaggcttcccagtggacgtccctgagcagctccgcatgcttggttctcccggagcttcctgctcaggcctcttgagaaatggatgctgtctcagaaggagttaaagctataacctgtaacctttaaaatctccagttaaagggcctgtttcttactggcctgtgaggtgcaccgtagtgccttgggcctgtgtgttaaagctgctctcaccagtgaaacctaagaaatgagcaggttggcagctagggtttgtgttggaggctttcggtccagtgtcttgcagtcctacaacaagtgagaggcttgctgcc

SEQ ID NO: 2162 - DNA, 1833 bp, Homo sapiens
tctcgtctcttggcttccatggacttttctagagatgtagacattgttctccgtgtccactgaagcgtgcagacacagggcaacactcaccagaatacagccatttgtggtgagagtggaggaggaagaggaggaggaagaggacttctcacagcagccacgattggcatgggggtgaaatgtgaatttaccactgaatttcgctcagaaggactttggattactgccttcagtttgttggaaaagcccatttcaaaactttcttttcttttctttcttttttaattattggataataagtgctttcttcgtaaatgtggtattttgttaagccgaaatagcaattaaaaaaatatcctgccctccagatgggttcttttaaacaatttatgtagtgtgacaaagaattgttttctctgttttaatgtgtcatgaaatcttaatgacatggatctgttactaatttaagccattgctagatctcatccttttaggaaagtttgaggtacgagaaaaccttccaaatagcaccttccaattagataatagcagctttctttgtcagaaatgtgctgaagaaacaaaggctggtatacggccttcgaagttagtatagaatgagaagaaattataaataaggtgtatttcggcaattatcttgcaaatatctttgtactaaactaaaaagataaaataagttaacttcctcaatatgtaattatgtacaaaacgtttaatttattttgatctctttagaactataaaagagaaaaacattcaagaatattaaagtcttgtaatgtttgctaatataaaaaagtgttgtattatcttgcgtggatagtatcacaacaaatatatatatatgaaatataaattcactaatgaacaaaggagattttaaagtttaagatgcagaacttgtcacttgcatggtgtgccccccgtactcacatacactctgctgttgccagcagtcgcagaccgcaggagccctgtctaaaagtttcttctagaaccagagaccagcaagtgaaattattgccatctcaaggatggcaaaagaattcaaagctcaatgtgcactatttttttctttgctgtgggacaacagtgaatgtgtttatgccagcgtgtgctgatgatactgaggggctttaggttggcaaatagcactgttttcttagctgcaagaattcattgcacaatgtttttcatcatttttgttaatgtcatctttttttggtccttgctacgaaaaggaatgcgattctgtggtcattcgcactgggttgcattgattccccctctgatggccaatgtggagtggacaaagtgtccggaactcacatcggtgatcgtcccctcgtcttaagacccagcccgctctgtgtgagcctctggggctccctcgctcagtgagcacagttccccgggggttcatgccagagctccggctgaagcaagaagtcctccagctgcgtcgtttgccgcctgtggacgagtgcgccccagtttctgccctggcagctcctggccacaccttctcagagctcacctgtgcacttctaaattgaattggcccacggtgtccaaccaagaaggagcatctgcactccgagaaagatgtgttctgtaactgccccagtgtgaccccgcagtggctctcggtgctagatatgcatgactaagattgatgctgggcaaaatgtagatgatctttcattatgttgtgggcagcgtctttctctgcctttgctatatgcagtcagcagtaagccttttgctaaaagagttttgtttgacttctgagatccaaggctgattgttgtt

SEQ ID NO: 2163 - DNA, 3382 bp, Homo sapiens
aaaccgtacgtctgggaggggtcgcagagcgctgtgttaaccacaaacgagacactctcccactcagtgcgagggcgagccgctggttaggagcttgcagtgtctgaggcctgtgggatcctcaagttggttttcttctgtgagttggattctccccctcttgaaaaaaaatcgatttttcaggatttaattaatacaaaccttattttaggttggtgcttaactggaggtgatgcataagtctgatttttttttccaagatagaaaaagcatttatcctaacaaattggtattttttattaagcctccatgtggctctgaatgcaagctatatatagtgagtttttctaaattaagggaactctgctttttttttttttttttaagtaactggtctgtaagtgcatatctctagaacgtccccgcagatgaatgagggccagtggccttggcagaggcaggtgtggcctcgtagaggcagtgctggccgcgccagggcatcagtgctgatgtgggagctgtgcttccacctaagccgttggtaggggactgtggcatttaagaatgtagagagcgcatcctttttgatctcctgggcggagtgaacctgcaggggccaccccagaaaccttggttctgatgcactgcaagcaagtaaccagcttctcactccagtttcaagtggctattatgtaatataaattcaaagcacattgtgaatagaacctacatgaaaacatacactttgttgcccactgacatgttaccagaagttgtaccatgatgttgttttgacccctgtgagctgatggccccggccctgctctgtgcacatttctgtccgtgttccccagcactctggttggagagagtccacatcttcagctccgtgtggacatctccctgtacctctgcatcagcacatggatttaagagttatgtaatcgtgagagaatggtgtttgtggtttttccccctctttggctggtggaggataaagttcctgctcttttacctccaagacgagggcctcattgattcacttccagaagtgctgcacttctgaagaacaaggatgcactaaagttagcaagtttataataaagttaaatataaattattttgttttaaaatgcctcaaatttttctttattctaagcagcaaacattaaaataagaatatttcctgctaaatgtaaccatacactttattccacaaaatgttatttaacaagactgagggttttttttaagaaaaaattatttccatccaatatttaaagacttgaattttatttaaacttgaaaatgactttgccttaacttttgtataagacagcttagagtccatggagcccggccctgggttggcgtgagtgggtcagagttactcagttactgcgtggatctcctgtcgctagttttactgagtaagcatactgtagtacaagagctagtagtagtttttgtaatataccttaaagatcttcaacagttgatcttttttcagaatgttggaaaatcctgtaaatgcaaatagtcaatactgtattaaatacgtgcacttggagtgtgcttcgcttgtacagttgtaaataatcagaacatatgaaaaaggtaccctacagagaaaattctgatacagattattgatatattataaatgttgctgttgagcgggatgtagataaactaaatgttgtggtttgaatattattttgatttgttgagattttcttttttctcttacatcggtgtgttgaactgattctgcctctttgctgcaaaagggaattggaaagtcttattaaaagcctccagatgttttcatactcttttaaaatgtatgtaaatgcatactaatcatatctaatgtgaaagagttttaaagtatatagagagcaaaaactggcaggatcgtaagtgaaggtgactagtaatctaatttaaatcacctgcagctaagcatgattgaccctgccagaggaaaacatgcctatttgaccatttcctttaaagcagttgccattattcaaatacagagaaatagccacagggctagtgtttttcaaatgcattttaaagaacatggggatttttttttgtagttgtcagttcactgaccaaaaaaaaaaaaaaaatcagaaataattgatctgtgaaacccaaactctcaatactcagaaagctgggaggcaacctcgaggcctgggcctacgagctgcatcttcgctacggaagggccagggcgccatcagccattcccaaaacacaaggcctgcccgtccgccagtgagtccttggtttttaataatgagaagtcctttcccccaaggtgtgagcattgcagcgcagtgtgtgtgtgtggttagagccagcttagtccttcactttgtcgaccgaagtgggagctcaacagctgcatgaggagggcagcgcgtgcattagccagtcgccactggagggctctgctgccctccggtcaatacactgtagttactgcctagccagcagcagtcttctgcatcaagaactgaaacgttgctcggaggtgatttttatagcatcctttttaattaaaggtgaaatacagattgctatataatgtctgaaaaaacctgatactacttcaagagtttctgctcagaagaaaatgagagttatcataataggaagctgtggcggtccatgccaactgtgctgtgtcacatacagcgatgagagtggctttcatactttttttttttttaagttaacaccctcctttacccccagcagtatctcaggttatagaatcagagatgcagcagtgacaaatggcattttaacttgtaaaatcgtgtgatgatgcttatcattttgaaatagaagaataaaaacctggtcccgtttcaccagacatgaatttcaagtggagtcgtcgttctctgagagtgagtgtcttgacattttcacccaggccctcctgtcatcacatcaccggctgtcactggcgggtggccgtaaacgtcctgcgttgctatattaggatctctgcagttcaggcttcaaaaccagttcagtgtatccgggcgacgggtagtggtggtgcatgcctgtctgtgtgccccgctggcgagctgtagttgcggcttgcgtgcctcgcggcccactacagggctgcagacaatcgaggcgagggcgctggccgccagcagctcacagcgcgggggtcatgtggtcgctcctcgagggtttcgtttttgttctgcttcattaagactggaatcaagcttacatgtaaactattggtaatttaagtttccttttgtgtcattcagtgtaaaactgtctaatttgaaaaaaaatgtaggttatgaaaataaagatttaggcactgttc

SEQ ID NO: 2164 - DNA, 610 bp, Homo sapiens
gaggcagggaggtcgagtcagccatgtgtaatgccctcagtgcaggcagacgcaccattgaggcaatgatacaccctctccaaaaaacagggcaaaaggggcacttgattgcccatcatgtataaatcactatttcaaccttttcatcaactttgtcatatcttcattttcccttttccttatttccatatttctcatctgcctggttgcagggaggaaatttaacatttcctttgtcccaatttccattttataagcacttgtttgattaacagcagctgatcctgaaagtcttggggagatcttgagagtcctgaagcaggcggactagcctggctggaccatgaggctgtctccccacagctttatccaagcctccaaggtcaggatgggatctctgtatcatgtttttctttttaaatcacttatttcagagtgcaacacaaggctgcatttttaaaaaaaagacacattcaatcttgcatcctaatacaagcagtacggaagatgcgtatggtctcagccaagtgactcgacgtttatccacttctgttcatttgatcgtttcagtaatatgcttacaaataaagacatacttgctttaaaacat

SEQ ID NO: 2165 - DNA, 1161 bp, Homo sapiens
atatgtaggtaaatgattacagaaaaatttatctgcttaacaaacttagaatgactttttccttttaaatttagttctatcattaatttatcattaaatttagttctatcatttggtactatcattaatgtattatatacactgatactttaaaacttgtgtggaaaaaactaacttataattttgtatcacacaccctggatatgtgttctgtttctaagcgacatttgtgagagattattgtaaaatgagagcgagcaaataaaacttaatttaatctttgcagatacatacttatgggaaatttgaacaaatgagtgaaactctgtttttagtaggctgtgataaacatttccggagcacttgcagaggacttgctatttgccaggtgctttatgtatcattaaatttttctcatagttcagaaaaatgtgcaaaggaaactattgtctcgctccttcaaaacagtcttaattaactttcatattagcagattaaactagcagagcaggttcaagggaaattaaatgatatggaccctaatttgtatcattctgagttgattgtgtggtttattcattctggaaacatgttgatacttacagtcagccactgcttttgataagtgatattgattaggttgaatcttcttgtaaatagtatttaccagttagcaaagtctgtgttttcagaattacagtgagcacagaggtgttcataaaatgggaattgagtcccactcggtaagagttgcttaaacttgacactgttgacatttgggctggataaaacccctgtggtggggtctgtgctgtgcattgcaggatggtgagcagcgtccctctcatgtgacacccacagttatgccggatgttgccagatgcccctaggggacagagtcaacccccaactgaggaccactgtcctacagagtcaggaaatattgtagggagaaaaaaataacaacaacaaaggcctgtgttaatgttaaatagatgagattatggaatgtgtatattaatgttaaaaattgtaccttgatcaatgtactttttataaacttgccatagatatctcagatttgaaacctcaagacagatttattattcttaaatgctgtatgataatgaagaaaaataaaaatttatttcttgcaaagtt

SEQ ID NO: 2166 - DNA, 1059 bp, Homo sapiens
gctgcgggctcctggctgctggagctgagcgggacgctggagggatgggaccgtgtctggggggcgacgtggcgggtcggccggttccctgcattcgttttactttggtgtcccagaaacacgcgagtgtgcaatgtttggacgagcaacaacacaaattcagaacgtgcctctttccagatcgctggccccagaaccctgtcccccacacccaggggcacatgcactgttgagttagcgccgactcttcctgtggagtctgagggaggggctccattcaggcaaaggggttttagctgcagccttggaaggaggcaccgacacgacaccaggcaggagtgagcctcaggccccgtccctgcaccccacccctgcgtgcgcctcttggtgatgctggggtctcactagcttgagggggcacatgaagataagccacaaatgaagagaaaagccatgcccaccccagccccagagaaaccaataagaatcctctattattttcactattcatttaggtttttatactccacctcctttcaaaaaagatttaagatgtacgacattaccgaacacctaaaatagaaccagagaaacgaaagccattcccacaaagtgaaggaacagtttccaaaacccctgcgaggcagagttaagacctgtgacgtggggagcctggaaacacccggcccacgcgtgctgcagatgtggggagcctggaaacacccggcccacgcgtgctgcagatgtggggagcctggaaacacccggcccacgcgtgctgcagatgtggggagtctggaaacacccggcccacgcgtgctgcagatgtggggagcccggaaacacctggcccatgcctgttcagtccgtcatggcgtttggtttatggtggccgatactaagagccactgaggtctgggttgtgtaagggttagctaccaccctataacctccctaccaggtaataaggagaccaagtctttgatcaaattctgattttttaactaaattttcattagaaagcaagcacaaaataaaatcaaaacaacctttaccttc

SEQ ID NO: 2167 - DNA, 303 bp, Homo sapiens
gcagccgtggcgctcgactgcacaggagcccgagacaatacacctccgagctgaatatgaaaagtcagaaatgctactgctttttccaagaatattatgtcattgagtgtcgccaaagcccttgactggcgagtcaaaaactcagatctatcttaagagtgaccaggaagaggttcattgaaataatcatgcatgaagcgccaaagatgcaccatgtagaattttcactttgtactggcaggctcgttttacctcattctagaatatttaagaatctaaaaataaagggcaactctgacttaa

SEQ ID NO: 2168 - DNA, 490 bp, Homo sapiens
gggagcagagaggtggatcctgtaggctaaaaggcttccaggctgagagccggccgtggaaggagggatgcgtgttccagccaaagcatgccgttctgcaccctacccagttgcctccagggcctctccttggaaggtcttttgagggctaaaaaggtcctgtaagaagcggcatagcacccgtggtgcatggtatgtgggtgaccctggactcgccactggtacccgcccttccgagcggcgcctaagcctttgccgtgagcatgcacactgagaatgctaatggttgggttgattgtatgttgaggatctattactgaccgtatgatgaggccaactttttttccttgtggttagcaagactgcaagagatggaaaaaaagtagtttgaatgttttgtgtgtaaggagtataccatgagatgagatgaccaccaatcatttccttggggggagggggtgtctgcaccttagaaaaaaaaagaaaaatc

SEQ ID NO: 2169 - DNA, 222 bp, Homo sapiens
catggagggcattgcatgaggtctgccagaaggccctgcgtgtggatggtgacacagaggatggctctatgctggtgactggacacatcgcctctggttaaatctctcctgcttggcgacttcagtaagctacagctaagcccatcggccggaaaagaaagacaataattttgtttttcattttgaaaaaattaaatgctctctcctaaagattcttcacct

SEQ ID NO: 2170 - DNA, 1298 bp, Homo sapiens
atttttgactttgagttgactccagaggacatgaaagccattgatggcctcaacagaaatctccgatatgataagttacaattgtaagtgatgcttgtagattctctcacaggctgttttctgtagtatgcagggaaatggggaacacatcttccctacatcaggaagacaggcccaaattcaggcatggggtgaaataggagatgccctgtagccttcagaccagaggtttcctccaggactcaatctctgacccagcagaaatgtgtctgtaagtgaaactgccaatgtctgcaccattgtgaatccaattcttgaaggcccttactatctgtgcctgggtctagcactcagggcccactgcctatgagtctagaaggctcagtgtgtaggacctacaaacctataggggcccatcataacgttctctttaatttatattaaaatcagaagaaaaatgaatacaataataatgcatatgtaataatgactccatccagctctatctttgtgtttacatcatggcaatggaaacacaatttaagtattaatacaggatgggcccatgaaggcaaaggtgcctgtctcctagggaagccttaatgtggtattccctcttcaggataccaactatttctgcaaaaatttatgtctttcttggccctctttacctaccacaactcccatttcctcagctatataatctcaccatgctgaattgtgaatgaattatgagattaatagaccctcaaatgctagtgactgaggtgtcaatagcctttaccaagataagatcctttggagtttctctggatcctcaaggcatgactcttactccagtgtcatctttgtccacctgaagtccacctctggagagcccaacatcccttgactttggtttatttataaacgtgacgttccagttgctcaactactgcaggatctcaggactaaggagagagaaggctaaatagagaggagtttagaggaaagtttagaagcaggggaaatacaattttggttgccagagtaaagactcagtctccaaaaaagatctgaagaatcctcctttatgtaaaaccacaccaagattctgagaggaaacattttcaatgagaaaaatgtgggaagtaacttttctgtacccagaggctaagtataagtctgtgatctgccttatgagactgtgaatgcattgtcttactcatgtctgtggccctgtgtcaatatgactcctggcacatttaactgcttagaaggtactctttaatgtcacccaattaaaaagaacaaattgt

SEQ ID NO: 2171 - DNA, 418 bp, Homo sapiens
ggcatgtatgatgggtgcaaatgaatgtcaagttaaaatggcatgttttcttttcaagccgttatatgcctagtgggtagttcccctgatgagcagaaaaatgaactcaaatcaggcaagactctaggttccacactaaattaagtgggtcagtaccaacaatgaacacattatttcctggtctactggtacaagtcagctctgctacctgggagcctttggaagcttagagtcctttgaactgctgagtcacttctaggtgggatttttttgttttaccaagagacaatgaaatcctgaagtttatgcttttcctttctggtaccggaagtagaaaacagcacatgttgattacgaatgttttttcccccatgtctacattttttacactgattaaatcataaatattttcagtatg

SEQ ID NO: 2172 - DNA, 300 bp, Homo sapiens
ggctccccgcctgtgtccccctggctgcgctctgagccttcagggccaccgcccgctgctgcttttgtgctgggactctccggggaaacctggtcggtggatgggaaactgcctccccctgggaggaaggctttgcgctccggggcctggatgcggcgccctcgggccgcctgcgagcccctctctgcctccagaccttgggcagaaggaggcctccttgggcctggtccccctttgccctgcagtggaatgagggcccctcagccccgcattgatctaaataaaggactgccgagttcc

SEQ ID NO: 2173 - DNA, 1835 bp, Homo sapiens
attgcaggtggggtccggaccgtggctgcccccgttgtgcccagcattgcccgggtgagggctctgcctgttcctctgaagcagcgtgattgctgtagatagaacaacgctccttcgagtcccttcctgcgatcctgtttaggcttctctcctggatcctggataatgtttccagggtgttgggaaggcctgcgtctcaggtcacagttgtgggtgtggccctgcgctgttctacagaacctaccctctcaatgggcatgggcccaaccatccagttttcctcttttacggaccatcctcaaaggcactctcaggacagacggcgtggggagcacagaggaggctggcagagctggggactgagggcattgttgctgattctcactcaccggggcagcctgccgcagatgcacaggccccaggtgcaggccaccacctccgggtcggcaccaggactgccctcggtgctcatagggaatggctgggcccacggaaggtcggcctgggatgtggcctgggactgctgctctgctggctgctgtgtggatgcttttcctggagcactttccaaggcatcccccagccccaagcctgcgcgcatctgtcactcagggactttctatgggtctttgtgggggaaggccctggctttgtattccccacaagtagcactgagtttcttaggaaatttgtcttcagtattaggtctccaactcttgtaaaaagtttatatgtaggataaaaaccttttagaggacacgtaggcggtaccactaaggttttggtaatgagccattcaaaccgacagcagtgtgaaggtgtgtcaaggtgtatattctcgtggctcggcattctcagtgcaaaggcctgtttggagactctgtgggaattgtttttcatctgtttctatggttgtcaaatgaattcttcacccaccctacagtttgctaactccttgaagctatcaaattagtaagaccatctatcacatccagcattgtcccagtgctttgagttggacgggaatgggactctgcagccaaggcaggataagaaaatcttgcaatcccgtcctgcagtgatagaaacaggtcgttctgcattataagccataggtggagcattcggtagcgtattcagactgcatgggccggcctaggagtctttgccttcataaattttaagaaccccgcccacaacagggagttaaactggaggactttgcatgattagttcagggatgagtggtttctggggcatctgaggtcaggagtttgaaaccagcctggccaacttgatgaaaccccatctctacccattctggagaacaggtcacgcctgtcctggagacagtgtgccgggaaaagggaacgtggtactcactggatgcacccaggccggcccgagcctcccaccgcagacagtgtggaacagagtgagcctgagctgcccaaggcgatgccctttgtgctgtatgactggaggcctctccgcgtgggtacttgggggtggggccacaaatctggcgaaaaacttcatgctggccgccgtgaggttttactccagcgttcccgccattgtcatggcgggtcttcgtcctaaactgagaagaaaagcattcctgtttgatcaccgccttagttaccagttctggatcagtcagtgtttctgcatggaataacaaccattaaaaaaagcactgggttctgccctttcatctttgtaagagattcttgcctctagcaatgacaacctgtgatgtctcacagtagagcacttagcgcagaatcaggtccccacggctgttgctcaataaaagtggcggaataaagtgc

SEQ ID NO: 2174 - DNA, 782 bp, Homo sapiens
cagcagtacatgttattatgtaattaggacacatttaaaatttggcaaataatgcatataatgaaatcaatattgtaaggcctgcttttgtaatgaaaatggagagaatgaagagcgctgtgccagtaaatactccccttcacctttctaattattaacttgttttcatggagtggctattcagcattggcagttaccacattctgttcaatttaaccaaactggctttttttttttctagtgaagttaaacaaacattgggataccgacacagacaacttgagacagtttttttaatcttttaatcagtgtagctatgtgctgctgctgctcaagagctggatccatacaggttgtgtgtcatctgtcctcttgaggttcaggagattctaaattgaatattccacggtttgggacagcatccggaagttttccctatgactttatattttgtattatgtcaaatgttatggcagggcccaaatagcatagccacaagtttggtttatgtgggcataaaattctaaccaaaccccagacatagggagtcatttggagaaagcctgtatgtggtgttttaacctaataaagttgatgagagagaaggggagaggaagcgaacataaagcgggtcaagtgtagtgcatcttttgtatctcaggcgtggcttcttcagtggaccaagctgcaatgcagtattgacttgacagagcctctacttctgtctcaaaatggctccaaatgatttctgtactgcaaaataaagccaaattctggaaact

SEQ ID NO: 2175 - DNA, 964 bp, Homo sapiens
agttgctgggagcctgagcacctttcgtttttcggctcagagaaagccaagtgcaacttgcttcagtcatcctgaacctgagttcaaccaaccgcagccacctacgtttgaccccagcgagatcaaagttgtatatctgaggtgtaccagtggtgaagtcagtgccacatctgcactggcccccaaggtcagctccctgggtctgtctccaaaaatggttgctgatgacatcaccaaccattgactggaagagtctgaggatgatagtgaaactgaccagccacagcagacaggcccagattgaggtggtgccttctgcctctgccctgatcgtcacaaccctcaggaaccaccgacagaaagaaagaaacacaaaaacatgaaacacagtggtagcaccacttctgatgagattgtcaacattgcctaacagatgcagcagcagtctttagccagagaactctctggaaccattaaagaattcctgggggccggttgcggtggctcatgcctgtaatcccagcactttgggaggccgaggcgggaggatcatgaggtcaggagatcgagaccatcctggctaacgtggtgaaaccccgtctcttactaaaaatacaaaaaaattagccaggcatggtggtgggcgcctgtagtcccagctactcaggaggctgaggcaggagaatgctgtgaaccctggaggcagagcttgcagtgagccgaatatgcgccactgcactccagcctgggcaacagagcaagactccgtctccaaaaaaaaaaaaaaaaaaaaagaattcctggggcctgcccagtctgtgagctgccatgttgatagtatcacagatgataccaacagtgaagctgtggaatgcccagctagttaaagaatgcaaaggaaaatattttcacaaagggttatctgataaccaaaaaaaaaaaagacatttcatctaagccactt

SEQ ID NO: 2176 - DNA, 132 bp, Homo sapiens
aggattctgaagacatcacgggcaccctggctcagcagctcccaaggagagcagatgtccttcagggctctggccatagcgcaatgacataaggatgtttccaagaggaggcaataaagtgcatggtaattc

SEQ ID NO: 2177 - DNA, 723 bp, Homo sapiens
aactcggggaaaccagcccagctaagtccggagtgaaggagcctctctgctttagctaaagacgactgagaagaggtgcaaggaagcgggctccaggagcaagctcaccaggcctctcagaagtcccagcaggatctcacggactgccgggtcggcgcctcctgcgcgagggagcaggttctccgcattcccatgggcaccacctgcctgcctgtcgtgccttggacccagggcccagcttcccaggagagaccaaaggcttctgagcaggatttttatttcattacagtgtgagctgcctggaatacatgtggtaatgaaataaaaaccctgccccgaatcttccgtccctcatcctaactttcagttcacagagaaaagtgacatacccaaagctctctgtcaattacaaggcttctcctggcgtgggagacgtctacagggaagacaccagcgtttgggcttctaaccaccctgtctccagctgctctgcacacatggacagggacctgggaaaggtgggagagatgctgagcccagcgaatcctctccattgaaggattcaggaagaagaaaactcaactcagtgccattttacgaatatatgcgtttatatttatacttccttgtctattatatctatacattatatattatttgtattttgacattgtaccttgtataaacaaaataaaacatctattttcaatatttttaaaatgc

SEQ ID NO: 2178 - DNA, 1329 bp, Homo sapiens
aaaaccaaaagaacaagaatttcttggtaagaagccgggaacagacaacagaagtcatgaagcccaagtgaaatcaaaggtgctaaatggtcgcccaggagacatccgttgtgcttgcctgcgttttggaagctctgaagtcacatcacaggacacggggcagtggcaaccttgtctctatgccagctcagtcccatcagagagcgagcgctacccacttctaaatagcaatttcgccgttgaagaggaagggcaaaaccactagaactctccatcttattttcatgtatatgtgttcattaaagcatgaatggtatggaactctctccaccctatatgtagtataaagaaaagtaggtttacattcatctcattccaacttcccagttcaggagtcccaaggaaagccccagcactaacgtaaatacacaacacacacactctaccctatacaactggacattgtctgcgtggttcctttctcagccgcttctgactgctgattctcccgttcacgttgcctaataaacatccttcaagaactctgggctgctacccagaaatcattttacccttggctcaatcctctaagctaacccccttctactgagccttcagtcttgaatttctaaaaaacagaggccatggcagaataatctttgggtaacttcaaaacggggcagccaaacccatgaggcaatgtcaggaacagaaggatgaatgaggtcccaggcagagaatcatacttagcaaagttttacctgtgcgttactaattggcctctttaagagttagtttctttgggattgctatgaatgataccctgaatttggcctgcactaatttgatgtttacaggtggacacacaaggtgcaaatcaatgcgtacgtttcctgagaagtgtctaaaaacaccaaaaagggatccgtacattcaatgtttatgcaaggaaggaaagaaagaaggaagtgaagagggagaagggatggaggtcacactggtagaacgtaaccacggaaaagagcgcatcaggcctggcacggtggctcaggcctataaccccagctccctaggagaccaaggcgggagcatctcttgaggccaggagtttgagaccagcctgggcagcatagcaagacacatccctacaaaaaattagaaattggctggatgtggtggcatacgcctgtagtcctagccactcaggaggctgaggcaggaggattgcttgagcccaggagttcgaggctgcagtcagtcatgatggcaccactgcactccagcctgggcaacagagcaagatcctgtctttaaggaaaaaaagacaag

SEQ ID NO: 2179 - DNA, 1064 bp, Homo sapiens
atcttgcccctccagagacaggaaagaatttgccttctccctgggaactggttcaagagacactgcttgggttcctttttcaacttggaaaaagaaagaaacactcaacaataaagactgagacccgttcgcccccatgtgacttttatctgtagcagaaaccaagtctacttcactaatgacgatgccgtgtgtctcgtctcctgacatgtctcacagacgctcctgaagttaggtcattactaaccatagttatttacttgaaagatgggtctccgcacttggaaaggtttcaagacttgatactgcaataaattatggctcttcacctgggcgccaactgctgatcaatgaaatgcttgttgaatcaggggcaaacggagtacagacgtctcaagactgaaacggccccattgcctggtctagtagcggatctcactcagccgcagacaagtaatcactaacccgttttattctattcctatctgtggatgtgtaaatggctggggggccagccctggataggtttttatgggaattctttacaataaacatagcttgtaacttgagatctacaaatccattcatcctgattgggcatgaaatccatggtcaagaggacaagtggaaagtgagagggaaggtttgctagacaccttcgcttgttatcttgtcaagatagaaaagatagtatcatttcacccttgccagtaaaaacctttccatccacccattctcagcagactccagtattggcacagtcactcactgccattctcacactataacaagaaaagaaatgaagtgcataagtctcctgggaaaagaaccttaaccccttctcgtgccatgactggtgatttcatgactcataagcccctccgtaggcatcattcaagatcaatggcccatgcatgctgtttgcagcagtcaattgagttgaattagaattccaaccatacattttaaaggtatttgtgctgtgtgtatattttgataaaatgttgtgacttcatggcaaacaggtggatgtgtaaaaatggaataaaaaaaaaaaaagagtc

SEQ ID NO: 2180 - DNA, 1483 bp, Homo sapiens
gtctgccctcgggaggtggcccattattgctgggatgcggtgttggtaaaggtttccaggactgaaactttgattttccgggatatgttaaatggtacagccactaagtatcaccagaaaaccagaagcccaggatcttctgcctccgccagcctgtgagctgtttccatgttttcaaagcacagcagcagtcgcttctggggagtgccagttaaagtcatgcatcagaccctgccagacgtgggcctgcttcttggctcacccacgttttgcctttctcctgccccaaatcaggcagctcccttggagcagggtttcctcagatgaggactgcattctttgaaaacaaagaatgtcgccaaggaagaaacctcacgccatgctgtagtgtttcctgtaatcacacgagcacatttatatatgcagtttcccatggataggcgtgtgaccctggttgagtggcacttgcggtttcatcttggtggcaactcctttgcaatgcagctggcagcgacatccttataaaaacatgtgctaaagctctgtcctctgttagaggtgccttttaggaatacggggagtgaaggaaggccggcaggcatctccatgcaactagatggtttgtttgtttgtttgtttgtttgttgttcattttgttgtgttttttgagacagggtcttgctctgtcgcccaggttgtaatgcagtggcgcaatctcagctcactgcaacctctctctcccgggttcaagtgattctcctgcctcagcctcccaagtagctgggattacaggcacccaccaccatgcctggctaatttttgtatttttggtagagacagggtttcaccatgttggtcaggctagtcttgaactcccaacctcaagtgatctgcccgcctcggcctcccaacgtgctgggattacaggtgtgagccactacgccccggcccaactggatggtttttgattgaagcctagaacatctgtagagacaaactctacccagtcttttctagaccctcaactatctccagtgttgttgtttaatcgtagccggatcagggagtgagtcttttaggcaaatgttggattatatatcaaaggaaaagcttagtttcagagaggaggaagggaaagagatgtgagggaagcatttcatcaaccagctacgtcccccttagaaggatcactgcagcaggtcaccgagcaggagtccctctgagcgtcccttctgtctcgttctgccctagctggcagcatatgaaccaggcatgatgcagcaggagcagtgaatctggagtcagccacttggcaccctggtttcgctgagaacaaactctgagatcttgggtgacttctcatcactctggacctccattcctgtgaagtgacaggtgtggaccctgagggtgcggtggtgagcacactgtctcctgctggcattcaccccactcatgctggaaaggaagatccagatcgtac

SEQ ID NO: 2181 - DNA, 3369 bp, Homo sapiens
tgtggggaggccgtggggcagctcttttcatggcttgtacacgcctcagctcctggcaattagctggactccatgacccacccctggtgcagcatagatccgacgtctgtctgggcgaagggtaggggtgggtaggggcgggaagcctgagtgcaaatgtcatttccctctactgcctcttcctgcctctccccaccctgcccacatccacagaggggagagaagggtcatagctaaatgcaacaaagtctgtatcttgtcccaacctgcttttctgttctgttagcatatcataaagtaagcctttctggtgaaggaaggttgctatgaaactttttttcttggtggaaatggacaagtttaggcactctgctttttgccttacactaatgcttagaaagctgtcttttcagtggtgttgcagcccccagatgtgtggccaacctctgctgcaaaggaatctcttgctgagtccaggccaccaatcaggcaaatagcccatacatttgatcgttgtaaaccatgaagtcttttcttgcaagacgtttttcttctgctgtggtatcttgcccttaaaaattagttttcattaaaaagaaatttgattgaaaatagaaacatctacagctcagatactgatctctttctaatgggctttgtaaaccacttgactttgctaatggctattctccaatttgttccaataagctaagggcttttcatacacaggacaactccatgtggttgattttactggcatgtcttggtgacgaagagttggccaagtgaatgatgcatcttttacttggagctctccagcctttgtcatagttcccagaccttttttccttgtggtcatccaggaggtgatcaattacatgtgcacagtgctaggacgggaggcagagccggctcagagcaggtccaccagcccacctatagcaggaagcgtgtcggtgcttaggaaatctaggacttccagcttccctcatgtcagatagaaaaaaagtcaggaaaccagctcgtggacaggggctttggttccaaaacttggacaaacctgatgccttaaggaaaaggttaagatgagaggggacttccagagtcaatgaacgtcacccttcagcggacggataccgggagcgcttgggcgaaacagcagagaaagaaagactgtggtcggggaagtggaatgcttcgatgcaggccagagttcaaggctctggggctggcctcacaagaggcttcttccacggggcttgacaccagagcagcccccgcgtgaaatgagaaggcatgcttagcactgggaggaaaagctgagttaagaaaattctttatcatgtttgccttccctggggaaacattcaggcagtaaaatgacatccacgtgttcctgtcggacgcagcggcttcgggaacaagttagcgctgggggactatctgggctcgtctctctctgcttcgtgaacccaccacaccagggcctgtctgctgtgctatttatttgccttccgtcttcccaacctcagctgcctgtattcatgccagaggtgcaaaggctgccagccagtgctgctgacagatgctttcagactgtagagctcagagaaagggagcggcagctagaggtagccagggagctggccaggctccccggggccttcctattatgtaaatcccagctggacagacagccctggagccaggtggccctgtcccctgtggagcacttggagcagtgatctgttgttccaggtgtaagtctcgacactgcagaaatgaggacgttattaggaaagaccagttcctactgcctgtgttgctactttaagagctgagaaaaacattccaatgagctatccatagctaacttgcttgctcagaaaaacataagtaacaaagttgagctttcatttttaaaaattatattttactttagaaaaatatcaccttttttcttcctcttctttacgtgtagatcttttttttttttttcaaatggggtcagtacctgaaagcccgaaaccccataccaagcttatagttaggacctttgcatttgataaaaaaaaaatatagtattttctgttgtccagaaaatcttcccagatagggaaactgaggcagagagtgccgtggagtggtttttgccaagtcatacaacatacttaatgcagggctacactgaacctccagaatcattttgtttgctttgaccctgtttcaccatctgggcaatcatttattttccttgagcatttataaaccagggcgagggttgttccaaaatgagtaattgaatgagatgaagaaatatgtcataattagaggagataaatctccttgttatcacaatagttaatgtgtcatgatcactgactaactgggaccttgaacaagtcagcatctctgcctttcaaaatgaaggaacattgttctctatcctcccctgacccccgacggccccatgctaggtgcaccatcttcctccatttgactttttaatgctttacaacttcaggctaaagggaggggatgttgggaggagaaaccatcacaagattccctcggtgccacagctgtgctgaggaggccggggactgggaatcggagtgggcacctctgtgtttctctagggagtaacattcaacatttaattgaatcgtgtgtcctgataggtggattaggaacaggattcattcctttaactttaacttttggctaaacgacatgccttggattgagtgtatatgtcttccccaaattcatatgttgaagcttaaatcctgaatgtgatggttcttggaattgggacctttggaaggttattgggtcttgagggcagagccctcacgaatgggattaaggcccttataagaagagacatggggccaggtgcagtggctcacacctgtaatcccaacattttgggaggccgagaagggtggatcatgaggtcaggagatggagaccatcctggccaacatggtgaaacctcgtctctactaaaaatacaaaaattagctgggcgtggtggtgcgtgcctgtagttccagctacttgggaggctgaggcaggagaatcgcttgaaccaggcagtcggaacttgtagtgagccaagatcacgccactgcactccagctggagtgacagagccaaactccgtcaaaaaaaaacaaaacaaaacaaaaaaaagacatgggagagatggtgtttttcctctccaccacctggggatacgatgagaagatggccacctgcaagccaggaagacggccctcaccagacaccatgtctgctggcaccttgatcttggacctcccagcctccagaactgtgagaaataaatgtgttttgtttaagcta

SEQ ID NO: 2182 - DNA, 917 bp, Homo sapiens
taaaaattcagaggaaagaacaacctatgactgggttttgttctgctgtgtccagatcatcctctggaagtcttgattgttgcctttctgctgctgtgctgtacgtgcaagttcctaaagccagggacatcccggagatgagctgtggatatagagtccgcacagcctgcgggagacagaatgtaattccttccaacacacacacacaggctttatggaatgccagaaaagcttcctcttggatgctgcctggagtaatgactttttgaccctcccctcttttttggagcaagcactatctttccttgtaaagaaatttggacaatttgagtagaaatggtgtggtatgtgcacatagaaactctcagaaaactgtcagatgagctagacagttgtcctctatctccatgggtcccgcatcccaaggatcgaaccaacaacagatcaaaaatacgtgaaaaaggaattgcatctgtattgaatgtgtacggactttttttcttgtctttgttccttaaacaatgtagtgtaacaactatttacatcgcatctcctttgcattcattattataagtaaactagagatgatttaaagtgtatagaaaggctgcgtgcagtggctaatgtctgtaatcccagcactttgagaggccgaggcaggtggatcacctgaggtcaggagttcgagaccagcctggccaacgtggtgaaaccccatctctactaaaaatacaataattagctgggcatggtggtgcacgcctgtaatcccagctattcgggaggctgaggcaggagaatcgcttgaacccaggaggcagagattgcagtgaaccgagattgcaccattgcactccagcctgggtgacagagtgaacctccgtctcaaaaacaaaataaataaataagaataaatt

SEQ ID NO: 2183 - DNA, 675 bp, Homo sapiens
gtttgaaaatttgttaacaatacattaaaatcttaaagcatcaaattggtgttcgccaaggcattatgagactctactgtgttagggtatattcttttgtataaaacaaacaggtttttgaaaatattactgtatagttgttcagctaaactttgagaagaatttaattatgtctcatgaggtatcaaactatgtaattttgtccttgttatttttgtttcctttgtaatttacttgatgagtttatatcttcattaaagaatgttattataaagtgttttatctatgacaatttagaatcatgtaattggaggaaatccttcatacactctatattttcagtagtagagtagtaaagttgaactctaagtgtgactaaattttaaatgtcaaactataaatatagaagcagctttattgtggtaataattcatataccatacagttcactcatttaaaatatacatacaattcagtggtttttagtatttttgcagaattgtgcagccatcaccactgtctgattttaaaacactttcataccccaaaatgaaaccctttaatagtcaatcgctatttttcccctctgccctagccctagacagccactaatgtactttctgtctctatggatttgccctttctggacatttcttataaatggaatcatataat

SEQ ID NO: 2184 - DNA, 414 bp, Homo sapiens
agttactaatcccgcggagggggagagagcgtgcctcgggccgcccggggcggtcatttgagcgtgtttacttaaagactttgcaagcagagcgcgcgcgaaatcgtcggatttccagcgaggcagcaaatatttgcaggcagaagaaagaagcggagccgagccgagccgccgagtccctccccccggagccccggagccccggcgcctgcctgggcggtcccggccgcgcagacagaaaagaagccgggaatctgcggggctggggggcggggagcgacaccaaaggccagaaactgcagcacggcccgaggccctggcgagctgggcctgggggaggagaagtcccttcccattccagctcgatcaatcttgctgggctgcgatcggtcaataaaaacggtgtgaagcggc

SEQ ID NO: 2185 - DNA, 1275 bp, Homo sapiens
tccagcagcacgtgtcatttcattaggtcctgtatctgatgttgtggttagtggagtcctccagcaattgaatgagagcagtggacacatctcagcaggtcggtctagagagttgcgaatctaaacctgggacaggctggggccaggaggcagaaacaccagcctctgccaacaccggaacaagccgacgcttccagacaaggcggaaaaggccttttgtaatggaaatctcgcgagggttaatcttctcttgagaatggcagtcaagaaatgagatggttcacttgactactgagcagttacaccaaggagagcgtgaaggagatgattgagccagagaagaaacgggttgtgatggtaatggtgtgggggaaatgaacttgagctttaaacttgatttgagtttcagtgtctctgaattgaacatcccacgttggaagaagatacatttgggggctccaggactacagtagaaaagtatagagcaagcaggaaaatcttctagtaaaacttacatgcaggacaacaaaatgatgaaagatatccaaataccagataatccaccaggaaggcttttgtttaggaatttgtttcaagaggaacaagggatgagggagaaaaatccgttttatccatcagagtcagtgctataaaattgcctattaaggtaaaagaaaaatgtggagactattttactatacagagagcattaattcagatggcttagaaaagtgataccagcccaagaacagggatctaggtgagcccattgtaagtatcattgaaaacaaaacatgcccgtcaacatgtcacagaaaacgaacgaaggacaacaagaagtggatgagaatattttgttgaccttcatgggtttacagcctctgtctctaaacaaagtatggaaacaagtagagcttttattttgcttttgtttttgttttgtttttttttttgttttcccccactaaatagaaatgagggtccttagtctgtttctgacaatctgttaatttcttaggacagctgtctttggtttgctttccagcaggcgtagtatatttagtcggagagcacatctgtatgcgacaacttgattacatctttttttctagctattttgcattttttcttttaccatgtttcagtttctgcatgtagatttaaataaaaaacaaaacttgtaaagttgtaacatttcacatggaaatgctgcccaatcttcaccagcttcagaaatctgacctttgccgatgctgcaataaagtgttgtaattt

SEQ ID NO: 2186 - DNA, 127 bp, Homo sapiens
gcccaaatatgacactggccatttttgtaaacgagaccaccaggccttcttcactaagactttgtattcaacttagtttaatgtagatttgccattagctttttcgtaaaataaaagcacagaacag

SEQ ID NO: 2187 - DNA, 1791 bp, Homo sapiens
cgggcctgggggctgccaggtgtgcagggccaatcctgacggtaattgagaatgagtgaggtttcgtacatgcagctatttcaagggttgtaagagtttttgtttttaatcacgcatttggtagagtctaaatggataaaatgcaaggcttgctttccccttgggtgctggcctcaatgtcagaccccacgcgctgccccttcctggcctgaccccagacgcagtgcctggcagtccagaggcagtgggatccctgagtgctgaatgctcgcctgcagagcagcccagaaagagccctgactggggagagaacattttagaatctctagtgtaaaagacatcaacgtgcttagcctttatttcagaaaaaaatcagggtggttcccagctccccagtccaggacaaccattagtcctgatgagtgagctgacgctggtgctggaacctgctggcacctcactggccacatctttggaaggggatggtggccttgcatccaagatgcctgaaaatcagcacgtgcagggcctccctatccagccagcattttccttccagctgaggcaggtgaagacttcataagctcatcacaggggagggaattaggagcagggcagcaggtaattaaacaagataaattatacctgatttccaacaccagctacaaagagttgaagatgatacctatgggtcgcgttaacacagggggcaactgccttgatcggcctgccatgggtcatcagactgcttcctaaattgagagaaactgagcaatctctcagccactgctatagtctaacttcttgtttgctgagtaattgtttctaatgtctctgaactcaaagtgaggtgctccaagacgctgtgaacttctgcaaagacacctccttacctactgggatcacgtgacctgacctcactcccagccaggctcccaaagggctcattccagccattccaatctcttcttctttatgcaaacacttttcccccacaacaagccttgtttgttccgataggaatacgtgtacgtcagtgcacttgtccttacgtcagttccttacaccaccaaagcacttcacctttctggaaataaaacttttaagacactactataagtaaaaatgagagtattcactagacttattgctcaggcacatttgagtgggtcccagctgtgtgattaagaagtcaactgggtggccttttctgggttatcttctgatcatggcctttcaacccaacaagggcccttccctgctcttccaccagtaaaggctcctggcctctcatcaggatctgccccccagagaccccccccagacactgcagggcctggtgatgctgtcctctgtaccggaaatggcaggcactgtcagatttccactcttctgcctttaggaaggctgggtgcttcttgctctgacagccagtctggggagatgactcttacgttgcttgagtcttggtggcaggctgctgtccacgggggagaagtctctgctctggactggacagaagagagacttttaccctggggcactcacacggccaagcttctgccaccacttcattagctgtattctccatagtatggtgaaatagcaggtgcgtcttctagtttattcctcctggggacatttcctcaaagcagttttgcgcccccgcaagggaatggtcagcctaagggtaatgtacagcccgtgcttggagaaccatggaagctacacccctacaggtgcatactgttctgcttttccaataaatacgagcggcgatttcaaccacaa

SEQ ID NO: 2188 - DNA, 332 bp, Homo sapiens
tcccatcctgaagccggccaagaagacaaagcttgtagcaccattggcatccccgtgttccagcaatctttcccatgcaaaccggcccttcagagggtctcagcttggggtctgcagtggccagcagctcttgaaaagacgcatgcctttccttccagtgtgtgaaagtgtcctgactttcacctctttgcagaccatcttctgaggtgagcaactgcctgcagggcctcctagtaccaaacctacagtggcttcccctggcttcgttcccaagcaaaagaatcagtcaagaatcacatgtttgcttatggcttacaaataaaaacgctgaa

SEQ ID NO: 2189 - DNA, 504 bp, Homo sapiens
aatagccatctgctataactctttcaacagaaaaccaaaaccaaacgaaatgtctaaggaaaatgttttcttaatgagatgatgtaaccttttctatcacttgttaaaagcagaaaacatgtatcaggtacttaattgcatagagttagttttgcagcacaatggtgttgctttaatggaaaaaaaaaacagtaaaagtgaaatattactgttttaaggaaaactaatttagggtggcagccaataaaggtggttggtgtctaatttaagtgttaaatcaatttctttcattcagttagctctttacccaagaagaagtgaatgatttggagcttagggtatgttttgtatcccctttctgataaacccattccctaccaattttatgtcataagagatttttttcccccaaatctagaacaatgtataatacattcacatctagtcaagggcataggaacggtgtcatggagtccaaataaagtggatattcctgctcggaca

SEQ ID NO: 2190 - DNA, 1059 bp, Homo sapiens
tctagacagaaatagctgtttggttttgtttttaaatagatctatttcccttatcacttcaattaaagactataaacaacaaaaatctcattgtgtctacacatcggggtgaccttaggtcggtttgtaagtggatacaattaataaaataaaatccattgcctttttttcctgttacattaactgaagatgcacctaatcttgaggcagcttctgagttgagaattatattgttatccaatactgttgattcattttgaatctttagacacttatctcttgccgcataggctttttaaaggtgctttcacatagcacaggcattacccgtagtcgtgtcaaatagcagttggtgtcttcattttatgtatatttatcatataagtctgatttttttttttaagcgtcttgaatggttttctggagagacagcattggtaagtggcacatgacggtatcccagtcataagagggttgcatgattcctttgagtgtttgatttgaaaagcctagtcttgtctctcaagagcatctcggacccagaacattctccagtagtgcattcagttcaacacagcaagtgcttcattgcatggaaaacactttgaagacaaaaaagaaatcttatttctttttttgtagccttcctgatatttacagtaataccattaactgttttatcgatagcaaaaaaggatactttttgcaatgttattagatgttctatagtgctacaaggaattgccttccgaatggaggttcatgtataatactcatttacaattcaatatataattacacaaataatttttaaatataatcaatagtaaagactgttctgtggatggtagtgtttaatacattttctattttgtacagtgatttcaggccttttgttttcttaaaatcagcagctgtttggcctaattcttagcattattttgtcctttgcgccagtacttttttgtgcacgctttttgtgatctgtgttaaaaacctgcattgccaacattgcagctcgaacttaaacttgttattcaaataaatatttaatttttt

SEQ ID NO: 2191 - DNA, 688 bp, Homo sapiens
aattatcttgcttatttatgtgtgtgtgtatcacccatctttccactggaatctgagccttgtgatgtcaggctgttaagatttcaggccctggtgaaaacatgttcaggatgccctctctcccctttgcccagcaagagtggactgattaaagttggacctgaggtttccatgaatatgcaaccgagtcattctgacgacagtgagtcctggcctcccagtgctgccagttaccagaagtgactccccttctcccatcagcccaaacccagagcctttatcacagaacccaagattgagaggagggtcaggctggttggacagtggccttatcatgggatggatggatcaggagccttttacagcgctctcctttccgctgtatcccattgtcttagatcacgtggacttgccttttcccctaataccgccccctcagtgctcttctataattggagaaattgtgtcaatagatcgaccaaagagatgcaggttgtactccatgagaatttaataaacgctagcgattcaaagcaacttgaatttacacagatcaactcctattatgttttgtaacctcaaatgcgtgaaattgattatccccccgaaagtaatatatacagatatgtgtgtatataaatatttatttctattttgttattggtgaaattaaaaagaatgtttaaat

SEQ ID NO: 2192 - DNA, 3329 bp, Homo sapiens
gagctacaatgatagctgtttcctggattcctccctctatccagaactagctgatgtccagtggtacgggcaggaaaaagccaagcccgggaccctcgtgtgagccagcccggcctaatctgaccgcctcaacgccattctgagatcacctcactgcctctcatttgccttacccagacgcaccgtcaccctgcaccagctttggccctcagcactttttttctcctgtctccgcattccctcccccttgaaaacctgactgaggagacattctggaaggttccggtcccactgtgtgtcccctggcgctcttgcccatagagagccagacaccaatcctcaatggcaccttggtggcttccctctgccatgacagcccctaggccaggaaccatcaggggggccagccggcatccaattcctgcggataagtagcgttgggagagaacgggaaaggggacttgagttacagggtgacccagaaagacgattcagctgtgtccagcctgccacccatacgtaggccaaccaagcacttcatgaagaggaggcctcgtggcatattcagtttacacctgaaatattccttgatgggacagcttgtggggatggctatgggggaaggggaggttgagaaaggaagttctcgacaccagaaatgcatcggaggaccacaatcagttctatgctgccaaagattaaaaataaataaaaacataaaaaattaagaggggccaagaggaagacattctttctgcaaggaaatttcttttaaattctgaactgctactacacacaagtgaaagtcaaccctatgtaaactggtgtcctctctctagccctctcccttactggcccacttctctctccgtagagagcctgaaaaactgccccaatgccacggtaaaggcgaggaagtcttggctggcgttgctgactcacagtcgccatccatctggacacaaagagagacctgtgggagtcgtagagggtactgttagccccggtccatgcagggggttcagccgagcccaagactcaaagctgctttcctttcaggatttgtagtaacgtaaggtgataatggccaaaagtggttctctctcattaaaccaaccagtaaaagcgtatcctatttttttgcacaaggtgtttcattttcgtttttatgggaaaccaagggaaaagcacattgcgatccattcagtgtttaactgtcgtggctcattttctgttcgttagcacttgtgtgacaaaagagctcagatccgacttctcctatgtgtcacttattccaagaacccaactatgcccttaggtagaaagatttgactcgtgtgtctactagccaacaggcagagcagggttgaaaaaaatatcagctcccaaagggcccatgtgtctacatcatcagttactgtcatgcaccacatttgtgtgcagataccaaaagaggaggaaagaagaaaaaaattaatgtgtgggagctgcacgtttacatgttttgagctatgcttcaaacacaactggaaagccatcaatcttcaaaggcctcaaaaatacttttatagtaacaagtgcacgactttagttgggttattcaagatggcacaaaaaggtttccgcagaggtggtatgctgtgcttttggcgcaagtggtggggggatggggtgggggtggaatttttttctcactctaatgacttcctattggaaaggcattgacagccagggacaggagccagggtgggggtagttttgtgggaaagcagaactgaagttagcttaagcataaaaacaaagaaaaatcttcgcttttcatgtatgtggaatccaagaataaccataggctctaccagaccagaagggtaaggatggacactaaaatgaaacaaataccaaggtattccttctgctgcagcctggagaccaccgagagtcgagctggggcacacacacacctggccgggacccggcagggacaaggcgggccgtggcctcctccaccaagtctctctagacaattcagggcctgctttccccagctccatgcatggctggactggtgattccagggtgcagaagggattcatattcccagaacgctttaagtgtacacctgcaggataaagagataccggttacattattaaatgattctagggattcactgggggatatttttgttgcttttactttcatggttagagctacaaagaacagtgattttttttttttctcccttccccattcagaaacattatacattgggccatttttctttctcccaaagaagattcatggatagtcagactgaactgtgtgcaacaggaaaagtcaaaagggaaaaggtagctgatgaggttacatggttacatgttctacatcatgcatagtagcttgaaatctagtctggagaaaactggatcaagattctagcccactggagttgcaaggaatgagaggcaaaaattctaaagatttgggttatattttcaacttgggggacagagagaaatggagagcaggaattacagttccaacaaacatcatgatagtctggtagtcaagacagagattaagtaaaacaggttttactgtttagctgagttcagttaatacaaaatgtacataaaacgttagtcctttgagactgacatgattaatgatcagtgtggtgggaaatgatgtagttattgtacacaagcacttgcaaactctttatccctatttctttaaaacaaaataaggtgaaatacgaagtccttggtctgatataaagcccctattggattcttcggatgcgtaaaagaaattgcctgtttcagccagaagactggtgaaaacacatacatcagactatgttgtgagccaggttgattttttattttattatatgcaggtgagtgttgaaactgttaaaattccaatttgttttcattcagtattagtttagttctaaatatagcaaaccccatccaggtgctatcagatgaccagttactgcttagttaactaggtgtaaagttttacatatacattaatgtcaatagtttattacaagttgtgtaaaatggactctagtttaataatgggggaaaaaagattaggttgctcctgaaactgactgtagagcatgtaaaatgattttactggattctgttcaactgtaatcaatgaaaaagatgtacgttgtagacaaagttgcagaattaaaaaaagaaatctgcttttaatttattctttttgtattaagaatttgtatagtacctttacattttgcaaaacagtgttgtcaacacttattaaagcattttcaaaatgaaaag

SEQ ID NO: 2193 - DNA, 2630 bp, Homo sapiens
gctgaggctgcaccaagacctcgtgtgtcaccccacagagctgtctgtgggtgccttctcaatctcagggcaaaagcccctggagaatatttcagccagcagagaattttgacttgcagtaggatttggtttgattttcctacgatctgggtggatgccttgcctgtgacagttgcagttcctattcgccaaatgaagggcagtgccccgcacgtaagttggaatgatggacctgtgttcagagacttaacagaaccaacaagcaaaacaagtgagaacaggaaaaaggaagaggacactggaatcaattcttgagagttgcactacttggtttttcttccattccaagtttcgtgggacccagagccttttttcttttaaaagctaaaaaacaagtgtttaattcctctttttgttatctgttagataattgagatcacctagaaatgcgtttaatctgttcactcactgtaaattttgaggacccagaattgtcttgtttaatttatactttcacccctgttgcagttaacaccagagaaggaacgtgaatgtcgagcacagccactacccttgttggcacttaatttagaaatagggtgagaagtttaaaagcccatcttgattttattttcattccttttggttctctgtgtaataatagcaggctacatagtgacattccagttccaagaaggtacatcctgtccattcattaattgctttgattactaggagggtttctgttcagttttgtttttaaatgtcttgctgatctagttctttcagatggaataaccttccagtcccttagagagtggaactagtccatataacccagcttcagtagcaaaagtagaagccgccacatcttttcatttctccaagaggagagtggggaaggttcccatgaccagctgggcagtcaggatttctctaggcattctaatgtgaaataagtgtagactgctgtcaaggaggcttcatcagaagatgtatagcatttgaatgtctaatgataatgcatatcattagaatccaagctttgaaaatttctgattaatgctcatgtatttctttatctttgtttttccttgtgaagaaagactttcaccactgtctgagtgatgatgctgttgataaggatgatgtcgatgactactatattgcatctctcaggaacagctgatgggaagggaggggctgctgagttcccttgttctagctagcagcacgctcctcagagagggggccgagttacagacagcagccgcattctcatgcaaaattagttttaaactgctagtgtgggcatcggtaccttttgcctgggtgataccgaagaattgttgaggatttagtatgctccgtagagacagttcagccagtcatttctgcattggagagacttctcatactttctttgaagactcatagaaagctggatctagagcttttgaatccttaattagcacagtagaaattagctttctatgggaatgctttagtgttagcagttgacaattaggcccatattcaatctgaatgggaacaaaagtaaatgcaatgataatatactgctagttagagaaacatgttagttgattatacctgaaatggattatttatctcatcagcaagtattatttgaataaaatgagaaatgcttaagaaaaattgttgctctacagtaatttggtttcgaagaatggaatggtaactattttttcccatcgttcttttgagagaaggaagtgtgatgactgatgatcttgaaaagcccatttctgattgcacgttgactggaattctttctttgtgtctgtggactagcgatgctgtttgtaaaatgaagattcgggactggctcatatctttttatctaactagatgtcagatcttgaaatctgtattctcgaagcaattctgccacttgatcgtattcacaggggccctggtaggctcctttagaaggaccatttctgttcctagagcttaactagaattcattcttcactgaaaaaaaaaaaagttacttaagaaagcatttctttcctaatctcactcaaatctgcagaattatttgtaattagtaatacaaaatctggccaaaaggagacttgtaaatagcgtaaagtggtgtcttatgctaaacggtggaatgtataggcagagaagctctttgaagttgtcagatgagctgggctcacaagcctgattcaaacaggctgtcggtctcctctcaccccttaatactgtgcagcccaaactcctaggactcttgaacatctgagcagttttgtgctttgagccactttttgacaaaaatggctccatttttccacagcgtggttttcttaaaatagtttaatgttttatagtctcatagtagtagtgttgctttctaagctataacagtcgactttattcttctactctgaaaaatcttgacttgtttgagtgtatataatatatataaagggagccttaatggattggttttcataatttaatattttttgtatttgctcttgtataattgtttttaacggaaagtattaaagaattgagggtggaattcttagaaccaaagttattcttaataaaaatcaccacatgcttggaccatg

SEQ ID NO: 2194 - DNA, 728 bp, Homo sapiens
tctccaatgccagcacatttgtgacttgtaattagagagaaaagtgactctctaggatatggacatgttgattaaggataactgggaatgcatcatatttggtctcatgctttttgtgttggtattattcctcagaattttgttacgtgggtttatgagtgaaactaatactactgataacttacatttgcagtgtaccaaaagctaaaagttcctttctcataagtttcttggaatgactatgccagttttcattgcctgtctcctaaaagtgacctactgacaaattgatggagtaaattgattccaagaaagaagaaggcattcagagactcctctctggatgcaattttaaaatatattggactaaaacaaaagacacaacagtcagcttatctaatgcacaacttcaatcccaaatacagaatcaaaagtttttttcaagtgaattttctgttttcactctatattgtagctctctttggtatcagaaatggtcaggcaggagtactcgtttttcccattggaagaaaacccacttaaacctacttaaagaaaatagagagatcaagaaaccgtataagtatagccaatgtttggcaattatatcaacatttacattgttaattgaaccaagctcaaggtctttttcattccttacagtcacatatcagacaagtttttgatggaagattaaagcatattaaaaacactcataggcaacttgg

SEQ ID NO: 2195 - DNA, 1534 bp, Homo sapiens
gaattcaaagcgtttcaacctagagcaaccactaaaaaacctgcacagagatgacagtcaatattacaatagagaaaatacagtacttaaaaatgttcaaataacctggttgggtgtggtggctcacacttgtaatcccagcactttgaggtgggcaatggcttgagcccaggagttcgacaccagcctggccaacacagtgaaatgtgtctctacttacaaaaaaaaaaaaaaaaaaaaaagccaggcatggtggtgggctactctggaggcccttgaggatcacttgagcccaggagattgaggctgcagtgagccatgactgtgccactgcacctctagtctgggtgacagagcaagaccctgtttaaaaaagaaaaaggccaggcacggtggctcatgcctgtaatcccagctacgcaggaggccaaggcaggagaatcacttgaacctgggaggtggtggttgcagtgagctgagattgtgtcattgcactccagcctgggcaacaagagcaaaactctgtctcaaaaaaaaaaaaaaaaaaaaagaaaaaaaaatggtagaactaaacccatacgtatcaatgattacattaaatgtaaatggtctaagtgcatcaatgacaagagacacggaaaaaaccaacataacccagtgatctgctgtctataaagaaagtcaattcaagtgattgataggttaaaaggatggaaaaaccatgtaaacaattaaaaatggagtggttatatggacagtttcctaatgataaaaggtctagttcaccaagaagacaaaataatcctaaacgtatatgcacctaacagctccaaaaatttatgaagctagaacagctgaaaagagacaaactaatgcacaattacagctagggattaatttaacatccctccttagtaacagaactagtatatacacattaatcagtaagaatatagaactgaaaatcataagccgactggattaaattgacatttatagaacacaccaccccaaactagcagaatgtatctcctgaagtacacatggaacattcagcatgatcatatctttgctcataaacacacctgatttaaattgacaaacttggatctagtatgataaactgatggctatagacaaaatcagcaccttatttatccccaaagatgttaagtcacttaaccttgatgtgaatacggtggccaaattagaagcggacaattagaatataaaagaaaatgctcaagaattaaatggtggccaggcacagtaactcctgcctgcaatcccagtactttgggaggctcgcttgagctcagggttttgagtccagcctgggcaacacacagggagaccctgtctccacaaaatgttagccagacatggtggtgtgcacctgtagtcctcgctacttggaaggcttaggtggcaggatggattgagcccaggaggttgaaactgcagtgagctgattgtgcccagcctgggcaacaaagcaagaccccatctcaagaaaaataaattaaaaaaaact

SEQ ID NO: 2196 - DNA, 971 bp, Homo sapiens
tttctgtgatttctttcttttatttattattattattgttgttgagacagagttttgcccttgttgcccaggctggagtgcaatggcgcgaacctggctcactccagccagcgcctcacaggttcaggtgattctcctgcctcagcctccggagtagctggggttacaggcacgggccaccagcccagctaatttttgtatttttagtacagacggtgtttcaccatgttagtcaggctggtctcgaactcctgacctcaggtgatccgcccacctcggccttccaaagtgctgggattacaggcatgagctactgtgcccagcctctatgatttcaattttcatgtttaagtacctatgtagaacctaactgtccataagtaaacacaacaaaaaaaagatttggcttttggtcaaagatcattggaggttacacagggtaaagtgcagtatgatttttatcacaattagaaagattaaaaagagatgacagtgagtttgtgagaacaggtttgtgtttcataaaatgaattgtgtgagttagctatgatgaactgcaagcagcttgcatttccaaagacaaatagagacacaggaatctaattaaaatgctaaagtaatgggaaggagacatccatacgtttttgtccccctaaggttccagatttatagtttgagcatcatctcggcttacattttctctgtggaaaacatcagccattacattacttggctctgggttgaaatcctaacttcatcaactgaagatcttatgacctaggcaagtttattaacctcctctatgacgtgataaaaatagtatctcttgtgcggattagaagacatgttcctctatgctaagatgattattatgtgcggaacacatagttaagtgcttgataaattgaactatggcaaatccagtctcaaccgtggcaaaactaagttaataaaaatgaaacataaccttt

SEQ ID NO: 2197 - DNA, 3423 bp, Homo sapiens
atggatatttttatttctagaactctgacatcatcatttgttaatatttaatgatttctggaactgccattccaaagaagaataaaagcacaactcaagtgaaattgaagtagtcgataatcagaaaagatgacaaaagtccacatgtgacatttgtacgtttctagctagaatgttaaacttcatcctttttttactgttgacctatttgtgggagggatgaaaggctacaaagagcacattcttgtaattttcaaatttttgcctgtctcttgaagaggtattttttcacccttagaaaagggactgtttttctatggactaagtagaagttacagagtcatgtaagaaaatctttgctattgtgtggagagaaattgctgcatttctgtttcttaagtgatggtacatttgtccatgtaacagaacaaaagatccatttggaaattttttttactggtatcaccttacatggtatcactgggaacatttatggaatcaacacttctgtagctcagtgacaggtggtggttgtttaagtgcagagcaatattaaaatgtactggtgactagtacatgtatttctccataagcagagttgccgaatcaataaacatgcaagtttgtactttgatctttaccaggtcagtggattgcttcaaaagcagagttttgtgcaagcactcactgtgctctctgaaagagcctgaggccgggcgtggtggctcacgcctgtaatcccagcactttgggaggccaaggtgggcagatcatgaggtcaggagatcgagaccattctggccaacatagtgaaaccccatctctactaaaaatacaaaaattagccgggcgtggtggcgtgtgcctgtagtcccagctgcttgggaggctgaggcaggagaatcgcttgaacctgagaggtgaggttgcagtgagccgagatcgagccactgcactccagcctgggtgacagagcgtgagactccgtctcaaaaaaaaaaaaaaagaaagagcctgtacccgcgactaactagacttttctgctgttgtgcaaagttcagtttcttctcagcaacatcaaggatatatgaagaaaaggaaataaaaaactgtaaagtcaaaagagatgcctggtggaacttattcgtgctatcagggcattgatagtttgaatgtttttattacttatgcaaaattgcacatactcctctatgctgattttatcatgaaaactgtcatgtgtcatgctaatggaaaatgtcttatttgtaaataagtattcataattttgttactgatggtgtttttaatctagaatttgaaaaactttcatggcttacagatgtgtgtttatattgccaataatctgcgggaaaaataagatgctaaccgaggccacgtagcctggcctcaactcagataccacaaagtagatgccttggctgggtgtggtggctcacgcctgtaatcccagcactttgggaggccaaggcgggcgaaacatttgaggtcaggggttcgagaccagcctggccaacatggtgaaaccccatctctactaaaaattcaaaaagaactagctgggtgtggtggcgggtgcctgtaatcccagctgctaggaggctgaggcaggagaatcacttgaacccaggaggcggaagttgcagtgagccaagatcgtgccactgcactccagcctgggtgacagtgcaagactccgtctcaaaaaacaaaagtagatacttttccctgcttttactgggccagtgcctaggaagttcagtgcagaagttaattgttttagacatgatggcatttccttcaagttatgagtccagtgaaaccaatcatatcttatcccaggcaggggccaccaaactatggcctgtgggctaaatccagcccattgcttatttttgtgtagcccacaggctaagaatgtttttattttctggaatggttgaggagaaaaagccaaaaaatgacatcattttgtgacatgtgcaaattacacaaaattcaaattccggtgtccctcaataaggttttattggaacatagccatactttttttttttttttttttaggacagggtctcactctattgtccaggctagaatacagtggcacagtcaacagctcactgcagccccaaactcctgggttaaaatgatcctcctgcttcagcgtctttttgaagaaaaagaactagctgggcgtgcataccaccacgcctggctaagtttttcattttttgtagagacaaggtcttgctatgtttcccgtgctggtctttaactcctggcctcaagtgatccttctgccttggcctcccaaagtactgggattatagacatgagccaccactcttggccacagccactttcatttacatattgcctatggctgcttcacactacaaagctgagttgagttgttgtgacagattgtgtggcctgcaaagcctaagatattcactctctggtcttttacagaaagtttgttgaccttggtcactacgaaggagttggaactctcctttctataggttgccgtgattctaaagaccaacccacagctgtgacatccctgagactaccaccagagggcgactgggccccacagtagtacataatataggacctctcttggagataatggaagacttggaatttcagatggttccaccctaattgcattagcgttctttcttaacaggagaaaggcttcaagaaacaaaacagtcctcattcactggaacagggtttgagataccagcattaagtaaatgagattttgacttaacctggagtcaaggctctaatttaggactttacttcccactcattttcatgccacaaagtctatacaaagtaggttttcaaataattgcagaatcagccaggcacggtggctcacacctgtaatccctgcactttgggaggccaaggtgagcagatcacttgaggtcaggagtcttgagaccagcctggccaacatggtgaagccctatctctactaaaattacaaaaactagccggacatgggggtgtgcacctgtaatcccagctattcaggaggctgaggcaggagaatcgcttgaacccaggaggcggggttgcagtgagccgggatcacaccactgcactccagcctgggcaacagagtgagactctatctcgaaagtaaaataaataactgcagcattgccagttggaaactttgtcatgagcttacctcacggtgacagttacactgctcctttaaagagtcatttacataatttgttatcaaattattaaccacttttaaatagaataataactacatttgcctccataattgaagcagattactaattaacattttcgagaattaaactgcttgcttatgaagtagctattaaaactaaattgaaatgc

SEQ ID NO: 2198 - DNA, 1267 bp, Homo sapiens
gctatcgcagacccacctgactgtggaatataaaattgccaaatatcctttctcatggaagcgcgtacccgttcgtggaggaaacggaacggcagcccagccgtgggacggacgtggacgtttactgcattcctgtttgccgtgtaaatgttagaaaggaattaaagttattactcggaataaaggatgactttggcggatgtcgcccctgcaaggaggtggctgaaagtggtgtccagatgtccttccgaggactcggcgtatccgccaccagggacattaagaaaccgcacgtgatgtcgctatgctctaacgatcacctcagttctccctcggattctgggaacagatgaaactttttgcatcgcttgagtcatttttatcacaataatcctactgtgaagctgtcgttgagaacttaggttggcacgtagcgtctcaaggtatgcgttctctcaaaggaaagctatgcatcgctgcttcgttgtctgattttgcttagattttgctttggttaggttgcgttttggggtttgcctttttttgttgtcgcttaaatgcaatttggttgtaaagatttgattcctttgtgttcatctgttccgcttctcagcggtccatctcagcgtctcccttcaggaaccgctgagtgtcctctcttaacatccaagccttttaatgaaatcgtactgaaatctgtatcagctaagagtcctccaatcctggtcccattaactccaagtgcctttttgacagtgacaacagacagtccctcgctttttgttgttgttggttttcttaacccctttaatggaactgcctggattttatacagttattaaaggatgtctcttttgctttaaactgcatgctgccaagtgccatttggggtcagcatcctcgtttcaacacagtgtgctctctagttatcatgtgtaacgtgggttctgtttagcgaagatagactagaggacacgttagagatgcccttccctgctccatccctgtggcaccattatggttttttggctgtttgtatatacggttacgtattaactctggaatcctatgggctcatcttgctcacccaatgtgggagtctggtttgagcaagcgagctgaatgtgactattaaaaaaaatttaaaaaaaaaaaagaaaatcttatgtactatccaaaagtgccagaatgactcttctgtgcattcttcttaaagagctgcttggttatccaaaaatgaaaattcaaaataaactctgaagaaaag

SEQ ID NO: 2199 - DNA, 69 bp, Homo sapiens
caagaaaaaaaaagaagaccaaagacctcaaacactggtcctgttcaaagaaaaagaaagaacatgagg

SEQ ID NO: 2200 - DNA, 816 bp, Homo sapiens
tttgtctaagtatttataaggaagatcttaataacagatgttgaaagaaggagtcaagactggcaattggctggattaagctaaacactggtatcactgattaactgtaaataacaattaaaaacacattttcagtgtttatgatatgtttaaattatttgtcctaaagctttatgttaaagattatcctattttaccccttcgtgtgaaatttactagcaaaattaagctttcatcaaagttcatcacttttgcattcagatacttggtcatttacttaccaaattacaaacgcaatactacagcatttgtatattaagtatcacagttactattgataaactacttttgggttttatttcattgaggcactttttttattgtttgaatgattccggcttgtaatatatcagcctctacaatgaaatgcagaagagttcatttttctaagatctgtttttcattagaaatattgacaaataacacattgtcaacctggatcctttgacaatttacttaactctggcatgttcacaaaaagtagaaactctaagagaccattaccatttattcacagatgtataggggatgtattctaaaaactgacagaaaagagaatctgatagtcaacactgttaacttttactgtgtaattgccaaatacacttttccaaatttgtcccaacagccctgtaagccagctttcttctatatttataaacacgataaatgcatgagaagatctgttattacattagtatattacgttatttattatgatcctagttgatggcctaaataaacacctttttcttt

SEQ ID NO: 2201 - DNA, 785 bp, Homo sapiens
taatgcagaaactaagcttattattctgagtttgaacactggattcgtatggctaacgtcagtgaatcaaggatcccaggggatgccaatggcagggcacctcagttgtgtatatgtggggaaatcaaatgctacctgactcacatctgtatcactcagaaacattatgtaaaaaatatcaaagcaagataagcagatgtgtgatccactaccgccaaagcaaatactccttatcgttagtgtccatgtgaatgaagtcctatatagatcacaaatttttatagacaaatctaagacattgaattatttcttctatatatatgatactttggtgtactgtgatcttgctgcttttatccatatgtcagctttggttcttgtgagtttacctgcttattatgatacttggagtccattcatagtgtggggaagaatgatttttgccctgcaggagaaggtctaattgaaataatgctgcttgtccccaaagaaattgtttgccttgtactcttgttaaccttagagctagacctgggaatgattcaacttcaagccttaacctggaattttctggatttgagggaattcccaagcctatgatctttttcacattttctttttcttatatgaattttcttttctctcttttctggtgatagtctttaaaaatagagattgacagtgtatcataggattaccctctaagtgtgaaaatgtgtaattatgtacggtatttagaaaaagcccttatgtgtccattttgtcaactgaatacatttagattc

SEQ ID NO: 2202 - DNA, 2774 bp, Homo sapiens
ggaagggattggcatcggctggccttccagcaccttctctctccaacacttcattctctcttgccctgtctctcaaataaacccaatgctgcgtgtgaggccttttttatttttcttttcactctctttctaatgcttcccaccttaccttttagattcttttgctaggtgggagattgttataaggtctttaaaccatttccatttgtttctttaacattaccaaaagcagggaacaaagctcttattcaactgcgaattccatagtgggctctggcttttcttgaatagatatcacaaggttgcttattatcaaaagaataattaaaatcatgtaaccatttaaatgtcactgttaacacttttcactctttctgttgattcacctaactcattattttgctttattaaaagtcttccttcaccaccgagatatgctaatttaacttacaaatgattttaataaaatcttgagtttgtatcacatgttacttattgactcagaataaaagaacagtctgatcttggggtataacacattttcatttacttttctcccccaaaatcatcttatccaattttattggttatacatgataaacttttcatgaaagaaatgcaaaattaaatcacagttcgtttcttctcacattaatttgtcaagttttttttttctttgaagactttctaaattaggaagcagaaaaacaaatctctaggagattctgccaaaggattttggaaagtagcattccttcgccgaagaaatggtgatttctgccaggggctggtagacaagaactgtgaaagagagagagaaaaaacctcaactgtgtattttgtcacggcggaaaatctgctcgcatcgaagcattcttctaagcgacttcgatgccaaggaagttgtgtaaatgtgcacgcgctacaccacacccagggtggaaaccacagttgcagagtcattaaacaatcaattgtttgtttaacatctgtgataggcagctttccttcttttcaacagtgatacctacgaaaatcaaaataaatgcaagctgaggttttgtgctcactgaaagggctgtcaaccccagaaggccgacacaaaaaaaatggtatgtgaagatgcaccgtcttttcaaatggcctgggagagtcaaatggcctgggagagggggcctgcccttctctgctgtgtcctttcggcttcccagttgagctcccaagaccaggacccactggggcatataaaatctctgctgtatcctttcggcttcccagttgagctcccaagaccaggacccactggggcatataaaaaagtcaaaaatcaaaatcaaacaacaagttctgagttacttaggaaacagacttcgcatttcaatcagagaggccacagagcaaggtctaaacttctggcttctagacaaattcctgatagaacatttaaatgtgggaagtggcttccccaggtcccatcccctgtttagggatagagttgatatcatttttataggtgccatgtatgcctctgcctgaatttttttaattgacttttgagcttttgagattgcacgagggagaacaaggcctttgctgttgtggataggaaagacttaacctaaaattaaaccagcaagaaagcattagtaaaaatctaacaatatgaagggctcttatgagtcatttttttcaaaagatgaaaactccagaaacgcacaggaacgaaatacctcccagaaacatgaagcaatcatcgaagactcactggtaatatttttaaaaagtatacagatcaaagcaaaaagaagccatgtgtaacaaagagaaatgtgcaaatattttttaaggcagtattaagtgcaagaggagtaacatgaaataaacattctttcacatggctactgggaatataaatttcgctccagaaaggccgtagcagtttgacgataggtggcaaaaccttaagattgtgtactggggcccagaatttttatttctaggaatgtatcctgaggaaattatccgagatccccacaaactgcaatgtttaggaattgtccttatagcattgcatacacaagaaaaacagagaaaagcctgatccctgtcagtggaaaaggggttcaatgaattacggtgtgtctgcatgaggcttttatgacattaaaaattgttgaacaacggccaggcacagtggctcatgcctgtaatcctaacactttgggaggccaaggtgggaagattgcctgagctcaggagtttgagaccagcctgggcaacacggtgaaaccccgtctctactaaaatacaaaaaattagccgggcgtcgcagcatgcgcctgtagtcccagctgctcaggaggctgaggcaggagaattgattgaacccgggaggcagaggttgcactgagctgagattaagccaccgcactccagcctgggcgacagagcaagattccgttcccaagaaaaaaaaattgttcaacaataagggcaaagggagagaatcataacatctgattaaacagaaaaagcaagatttttaaaactaactatataaggatggtcccagctgtgtcaaaaggaagcttgtttgtaatacgtgtgcataaaaattaaatagaggtgaacacaattattttaaggcagttaaattatctctgtattgtgaactaagactttctagaattttacttattcattctgtacttaaattttttctaatgaacacatatacttttgtaatcagaaaatattaaatgcatgtatttttc

SEQ ID NO: 2203 - DNA, 1009 bp, Homo sapiens
gtgggtaacaactcgtgttcactcagcactttccctctgcagcacgctggacagcactctgccatcctgatacatgacccctgctgatgccacagagaataagctgaacttgtatggtttttcaccaaaccatggatagaatcaatatttgtaggccaggcgtggtggctcacccccctgtattctcagcactttgggaggccgaggcaggttgatcacctgaggtcaggagtttgagactagcctggccagcatggtgaaacctcatctctctaacaatataataattagccaggcgtggtggtgggtgcctgtaattccagccactcgagaggctgaggcaggagaattgcttgaacccaggaggcagaggttgcagtgagctaagatcacaccactacactccagcctgggcgagacggcaagactccatctcaaaaaaaaaagaaacaaaaaaaaccagaatcaatatttgtacattttctcgaacatagaatatagcttctttagtcttgagtgtgcatttcattctaatattttgagctgaaatttaaaaaaactttgaaagagttggaaatgattatggcatatgtgacatacatttttaaaagttaataataatagccaggggcagtggctcatacccataatcccagcacgctgggaggccatgatgggaggattgcttgaacctaggagtttgagaccagcctgggcaacaaagtgagacctgatttttacaaaaaatcaaaaaattagccaggcatggtggcatgcacccgtggttccagctacacaggaggttgaagcaggaggatcacttgagcccagtaggttaaggctgcagtgaaaccctgtgaattaaccactgtactccagcctgggtgacagactgagaccctatctcaaaaatgacaacaagaacaacaaaagttaatgataatatagaagcataaatttcctgtgaatgttcaattacacataataaacattattgaattgtacacaa

SEQ ID NO: 2204 - DNA, 6056 bp, Homo sapiens
ttttgaaataactctgaaagatggtcatatgatattccttcattttcagagagtaattctgaaattctgttttgaactaattctggtgaaatttaactaaattattttaatctgtccttattaagaaatttggattttattaaaaaaatccatgtgtttcatcaaatttatattactgtattttataaaatacgaactattgttatgctttatggagagtatattttcatatgaaactgataaatatatatgtggaatattctttttaaaaacaattttataaacaaatcaaggagcactagagctttagtgtctacatgagtatcttgtgaagtgtcataacaggcataacatatttttatgttaattaaagaagttttttatttctaattttaaaataatgattctaattctagcccattgaatgttttacttaatttccaatcctgtaaatatttctttatttcatctaaacaaatgcatatgatatgtaaaccaaattatcatcattcagtttatacagcagactgaagaatatgtcaggaaaaataatcctaaatgtttgattacctctccatgaagcggccacagaaactgttggtgcacattatctacattttcctcagcctctatctgaaggacaaaactcatttttccttcttcattttgtatgtactttcctttagttgactattatcaaagcttgtttttgtcttctcagcttctgagttgaatttgcctttgcacgctgaggaatgtagcatgacgttaagatttcagggaggaagctgccctctgatcccatgtcatatgacagtactcccctccccccagttgttctttattgtagcaacatacactctcaatgaacttttatgacttttaactttctctgtctctcttcctcagcagacctcttggaattagggtttctaatcaaactaagtcttgcatcataaattctatggtttgtgataaaagcaagtgacaaagagaagagagatgaaaagaaacaagtccagaaatcatattacaagattttaattcaaatttttcttcttaaaaatcagctatttagaggtggataaattggaagtttgtgcattgcttgtgggaacgtaaaatggttcagctgctgttggaaaacgctatggaggttcgtcacaaaattcaacatagaattaccctatgattcagcgattccacctctggctatagatccaaaagaattgaaagcagggacttgaacagatatttgtacaccagcgtttataacaccattatttacagtagccaaaaggtagaagcagcccaagtgtcatcccattcacccatgaatggatgcaggaattgtgttccgtgcatgcagtggaatagtaccagccttccgcaggaaggaaattctgacatatgcggtgacatggatgaaccttgagtacattatgcgaagtgaaataagccaccctgtggggatggagaatgggtagttagtgcataatggatacaaagtttctgattggggtgatgagaaagttctggaggtggatggggaggatggttgcacaacagtgtgagtgtacttaatgccactgcaactgtatatttaaaaatagttaaaatgataaattttacattatgtatattttactgcaattgaaaaaatcatactctattaccaatttttcagaactcatagataaatatgaatgtagggaagctgtaagccagcccatatacagaaactatcactatctacatttttcatatgtgttcagacagagcctattacaagtctcataaatttcagtaaacaatcacaaattattttggcacactttcatgtaggttctgttcactgctgaaatattctaaataaaatggtttagagttttactgtaactatgaataattatgctataattatagtatcccacattcggttgagcaacattatacaaaataagtgtcgagttactgtgcaccaactataaatacttgaaaggtctgtagagacatttgcttacaaactggtagacagaatgtagcttagtggaattcttaaattatgggaatgtattcacaggaagacggtgattcttgcccttaattcataattgaaaatatgcagtaacaagcataaaactcacatcttaatgaagatgtatctaccagtgtcattcaattagcagatgtatatgtatgcataattaatttggaaaatgttattttatggaatgtctgctatatgcttttggtaataatgctgtatataaaatttgcactggaaattctgtttcctgatatttggacttgtacatttattcagatgttggaaaacatagcttctcattttcaggagaactatgtgtaattcagtcttcaccataccttacagtaaaccgatttttcgttctccttttcccatcatccctgctcttttaaacggcttgccagataattgtaaggtatttattaccctgcttcatatttttagtatgtcttcaggatccaaaactaattctaagagatgaccaaatcaattaatgtaaacaaaatgagtcatagttggaaaatgatttcgaagaggtgggtagtcattgtaggaggggtcagagcctgacaatcctcagtggcaggcaagaaagaggaatgatggcatcaccttcacagaggaccctggccatggtgttctgtctgtgaaatcagaccttcaccatgggcactgccctatgtctggaaagatgagaaaatacctccaaccttcagccaacttattcttcctcaaaaaggagagccttctaaagaggcaaaaacagtagttgaaattgtgaacagtgagggtccacccagcacttttttagaaatttgagggtaaactgttgcttgaaattatccaacttttcaaagaggtaaagttatttagtagagaggcttttaagttgccctgaaaggctgtattgctaccatgtgggatgtaaaattggatggggttagagatgagtgcaggcaattcaacgcattggtaggggtggaagttctcagcagaaatcaccatctgggtttttgctcccatctcaacctagttgaggtctagagtgattaagctggagacttctgaggagagagaaatgaactaaagataaatacaactgatttaattttagccatagcagaacagaacaaagaagcaaccacatttcatctaatatcaagcacctactaaaggatgcattctgcaggccagctgcatctgcatccaaaccaaagtcactctggttgctcttttgctttgataacttaagagtttagaaacaagcggtttctaaaaaagccaagataacacaataaggaccaaattttaatcccacatagacaaagagattaaagtgggttttcctgaattgcttatgttatgaacaggttaccttgtcataatttggccttcggcttgggattctaactgttttaggccaccagttatgacactgacttactaatagctttggactttgaaactgtgtgagggtcatatagcctcagcagttttcttgtagcctgtgattgcattgagattatataatttttaaagacatggcctttggacctctgtctactagttaatctcttccatctaccattcaaatgtgctatatacaactatcatatcagcttcttagcaagcacttttctggacctctgtcacacccaccaagatgtctagttatgcctttcatttgagagtttccctttgctgttttttttgttttgttttgttttgttttgttttgtttttgagactgagtctcgctctgttgcctaggctggagtgcagtggcgtgatctcggctcactgcaatctccccctcctgggttaaagtgattttcctgcctcagcctccctagtagctgggattacaggcgcatgccaccacacctagctaatttttgtattagtagagatcgggtttcaccatgttggccaggctggtctcgaacacctgacctcaagttaatccacccaccttggcttccctaagtgctgggttttacaggcatgagccaccacgcccagcctccctttgcatgttttttaaaaaggcattaagcatcttgcacatgttctttagtttcagtttgcatgagtcaacctgtgtgcatcattttccctttcactatttcttgtctttgctggtgaaattttaaagcttcagtttaaaaaaaaaaagaaaaagtattttttgttgttgttgtttctagcttccgtttctctctttaggctgtctaggaacattttaaggtactcatgctcttcaaaatcttacacaatcaagatccaaactccatcaccattcatgtcttagcttgtgaatttatttctttttaaatatatttgttcaagaaatatgagcatgtacaatgagctgttttggctttgtattccccaagttctcatatacattggctttatatttaccatagattctgagtcttactttcagccacatccagcacttactgaagtctccctcaagtacaccacacttgactcctaaagcttccaaaatctcatttttcctataaatatgagaccggaaattttcacaaaaattacaagataggaactgagttctcccatagaactcttttctgaataagcctagggttttttcatttctttgcttgtacctagcatggcttcagtgtttacttcaaatatttgctctgtattttgtttgcattttgatttctatttttatcaggacagattgaaattataagagtgtacatagagaacatgtttgtttagctaaattagctctataatcagatgagatcacctagagggtcagaggatgagagtgaaagagagaaagagaaaaagaagagcagaggcttggagctgacttatctgaaggttccgtcctcaggtctctttctacccttcacttttcatgccatttttcttagagattctcaccctttcctacaacttcagccattttgccgatgacacccagatgactctaaatctgctgttttcctaagtcctattctagaatcttcatgctgggacatttttaacttggatatcttgctattcaagttgtatcggatttgcatcaaatttagcatgcttgcaacctaagcacactccattctatagtcagttccactcttgactttaatatttatggtacggttagtctccacatcttccaagttcaagcttcataaccaaagatcatcttcaccttccttctcactctgcattccattggtcagcttctgttaaaatggccttcctaaggcaggcctctgaacgatcatttatttttaggaaaacttataaaaagtcactgagatttaaaaacacccacacatatatttgcaatcatatttgtgtgcttggttaaacatgtcaacatttaacagatttgagccttctaaatttaatccagcatgaatgtcgtttttactaaaatatttgctattttactcacttagctggttccttacacaagtccagttaaatttcacatgtgaaaaaaatgactgaaaacactgaatggaatgtgatactccttgtgtagtagaaatgagttgactttcatatttaagagctgatcctatgaatgagtagacaataagctgaatagctgttacgatctgagttttaaaaatggaaaatgtttcatgttttagagaatgtaaacttccacaagggcagagattgttaatacgttgtccccccagtgacttaaaacagtactggcacatagtaagcactcaataaatagttgttgaatgagtgaatgtaggaaccatactggaatcaatattgaagctacatagaaagcaccacactgtggagttcaaacaatgtctttaagttgttctcttgaaaactatttaatttgtctgttactgccacttcttccatgcccagaggaacagccaaagttactcaagtctggaacacatgatttaaaaaataattctgggataggcttttggcttttggaaagtagcgcaaataaaactttttaaaatactgt

SEQ ID NO: 2205 - DNA, 200 bp, Homo sapiens
acaaagtatcttaaaatgggaataattttaatataatgcagtaggtgattaacaatgtctccaaacaccaaaggaggtggctaaagagtattttgagatgagccccaaaatttggtttgaccaaagcttccccactcattttgcaatgatggcaagtcattcaatccttctcatcttcattttttctccttataacatgg

SEQ ID NO: 2206 - DNA, 403 bp, Homo sapiens
atgatctctgcaaacaaggtgctttttccagaataaccaagattacctgagtccaagttttaataacaagaataaacaactttgtgaaatatcatggattgtatggtttcttaaaatataacttgagacacgtggtatttgccagtatttgtgttcctcttgtgccagatctattttttacaagaactgtgcaaatatcagtaacttttgggtaggtattgattattaggaaaataattaggtgtattatctgggggaaaaaaaaacttttgctaagttttttttgaaacatgctcaaagctttttaaatcaatatttagaaattagtttaacgatttactattatacctgctagtgatatttatgtgatatttataaatgaaaataaatgcaaaattataac

SEQ ID NO: 2207 - DNA, 371 bp, Homo sapiens
gagagggatggatgctcagaaatgaaaattccaaacatttgctgtctgtggtttttttttttttaaccaaagtgttgtcaggccaactgaatgatgatgtggttgctatggaaacagaaaaggctgccagctgttttaccagggatccagagacatagaggaagtagggggtggtatgagattatattttctgtttttaaaagattttttttttttatgtatttagtagagtataaagaaaagcagatgcctatagatgtctggagcatattttcatttgtgatctaatgttttaatttgtaaagtgtacaagtcatttttaatgttaaaaattagtgaatctaacaaaaggaataaattagcaatatttg

SEQ ID NO: 2208 - DNA, 4586 bp, Homo sapiens
ttatttctccctgccctttgagctttattctaatgtatcccaaacctaatctttttaaaagatagaagatacttttaagacaacttggccattattttacaatgatgtatccttcctttgacaattagacacacaggtaccaggaagaaggaatgacctctgggctgaaaacagcagcattttcagtaattcctacaaacaaaaatctttgtgtctggacacctggtgctgctaattgtgttcatggtttcctttgattggctattgaacccttctgggaaatgtatttttgtagactttaatagagaagttgattgtcccttaaatgtagtgtgtgtttgaaacttcttagctgtcactttggaatcaccccaagccaattctcttaactctgtaatgcagccaataatttcaaacccgttttgcttttgagtcatgaggcaatttccaatattagtgaaaattgcccaatataataagtgtaaacagtggcagaaggacagtctggttaaaattatattgactggtggccttagggatctagaaacttctactaaacagagaaatttccttgttccctaggctgactggtatctatttatttctcatttgtaccaaggcatctcctactctccatttatattctatggacccaagtctatgctcagttccacagaatgtcaggaccaaataacttcacagctactctgcaaagggcaaattataatgtcattgatataatttccctagtagcatttaccctgttgcatgtcatgtagattcaagcttctgtaacataggcagctgcactgcgcgttcctattattgaagcaaaaagggtgactgatacctaaaagccctttcttcctctagtcgccagctcatcagaaaaacatactttgaaaagatgcttgagattttcctgctgcatcgcactctagttttgaaggatttacatcttaggaaataacatgtatactctagtaaataagcgatttaggtgttccattgaacagctttgattaacttaatgccaccattgatttcaaagtgaagaaaatgtaacagaagccagtgaagcaatggaagctggagtgtgactggaaaaatactcagcaaacaaagttaccaattccatacagagatgatctggtatcttcttttggaaaatggtattcaaattctggaatggaaatctagccaccaaaacgggttaatcaaaagacgtccttttccatttttttttgcttttattttctaaatcatttttaagggaatgaaacaggaatgtcatcagagattttttagtacaggcccaagagcctgttctctaagaaagaaattgttgccatgttttgattttcgaataagtgactttgcaggctttatgctagcccttgctggtgggtcttgaaatttcatccagagtctgcagtccaggtcaccaagccagcggcacccgtcggcaaccctgtgtttttctgattgtgccgtttactgtgacctgcaacggggtggcattcacttagggtctgacttcacagctatgacaaaaccgaaaaagcaaaactgcaaaaaagtactaagatgtacgggtcttggggatatctgccttatatgttatattcaaggaaattaacaaaacatcctgtaaaacatcgtttaaggaaacgtttactagtccaaaggccaaagctaatttatttccactttagaaaagttagcacatgcttttgaaaatctgtgatttcattttattaggctaaaagggtaaataggctttattacactgaagctgcatctatatgtcactgacataaagttgaaaaaataaatgcaggcaaataactagagacttcttttaagggggtttggctggttttctctcactgaaatggccagtcgtgattaaagtgataaaaccccatatctgttttggtatattgtacacaaacctacaaaaataaactgaacttgcaatatttttgcaaaaaaatctgtcgttaaaactgaggataaaatacctgctcaattttattttactaagtatatatttacatttcacccaggcaggccattttcttttgtgattataagaaagagtagttgttgattaaattttcagactaaatataggacaggtacaattttggataaatagcacatttataagaaccgcaatgaaaactgacttgaaataatgcttgtaatcaggaaagtaatttcatccaccgatttcaaaaccagattcactgagcataaaagtcaatacatatttgaggaataagtctcctaaaattttaagcttcacgtaataatgtttgcatagcaaaatatttctgcttcaagcctttaggaattaagatctgatcagaatttaactaaagggtagttgttttacaatgaagactaaaactgaacaagatgttgcatgctcttgaggccataatttggtagtgttggcagttgttaataaagcttgtcaggatgttaagcatctcaggagaaatattggaaaattatatgtataaaaccaaagtgctatttttaaaagcatcatttaaaaaaaaatgacatgcctgaacaacttttccactttccacgtgcttccctcccacctttggtttggcaacaggtatctcgtgcatgaagctgacagctaaagaagattttaaaaattgagttaaagatgactgtgtaaatgtccaagcacagagagcatgcacctgactttctaaagtttgatgtgttctcaagcctgacagaagcacaaggaacagtttgatacacttttaaaaggttctgaaaacaaagctgtatagggatcctctctctcttgagcaaagtatagcaacagaatatattgcttttgttgtaagcttttgtagtacatgtttttactaataattcttgttctctagaaagctttctatttctaacctatggcaaaatgaatccttcatgtcttcttgttattgtttacacacttgcagtgtagcccagtttgaaatatttatttggttatcaactgcccatggaggaggctcttgatgatcccaggtctcctcgacctccatacaccacacaggcatttgtaagcacagtttccacaagcaccttgtaggaatatggataagattagaccagcccctctctgtccactgggtttatttcttgaagaagatgcagatctggtttttccaatgtgccacagtctttccttatcctctccatgctgagcttgacaacactctgggaatgaggaacaagactttttctaaaaagatagtggaagttcaagggatgtacctcgttttcaggttcatccatctccagtggaatgttttcaataaaagatgaagaaaatgtgtgtgatctttaataacacatccctatagaaagtggataaaagatataccaaaactgtaatacagatatatacaaatataggtgcctttttgattactcttgtttgtctagtatgctcttggaaagaaaaccaagcaagcaagttgctgcctattctatagtaatattttattacacatgattgatatttttgtggtagggaagtgggatgctcctcagatattaaaggtgttagctgattgtattttatctctaaagatttagaactttagaaaatgccgacttcttccatctatttctgaaaggttctttgtggatttatatagagttgagctatataaacattaactttagatttgggatttaaaatgcctattgtaagatagaataattgtgaggctggattcactacacaagatgaacttcacttcataaattaattataccttagcgatttgcttctgataatctaaaagtggctagattgtggttgttttggttaaggtgatatggaggtgggagagcttttagttaagtaagaagctatgtaaactgacaaggatgctaaaataaaagtctctgaagtattccatgccttttggaccctttcctcgcaactaactgtcaactgttgatcaaaaaagtcaaggcattgtatgttgcttctgtggttattattctgtgatgcttagactacttgaacccataaacttggaagaatctttgagcaaattttctcagttgtctgtatgacttcagtatattcctgggaatgccataggattttttgtgcttgatacatggtatccagtttgcatagtatcacttctttgtaatccagttgctgttaagaatgatgtactttaaaggaaaagagaaaactgcatcacagtcccattctccagtgtccatgcaatgaattgctgagcatttaggaagcagcaccaagtctattacaggcatggtgtgaaacttgatgtttgacctgtgatcaaaattgaaccattgtacagtttggcttctgtttgcttcaaaatatgtagaattgtggttgatgattaatttgcgagactaactttgagagtgtaacagttttgaagaaaacattgaatgttttgcaaatgaaggggcttcacggaatgttacaatgttactaatataatttggcttttgttatgcaaattgttaacaccagctattaaaatatattttagtag

SEQ ID NO: 2209 - DNA, 59 bp, Homo sapiens
atgtctgaaggacactgtcttataccataccatatacaataaaattttaaatgagcctg

SEQ ID NO: 2210 - DNA, 1107 bp, Homo sapiens
aaattccgggcgagtatatgaggttgagtaagtcccgcttcagggaggaacgaccagaatgacatttctttaagcctaaatcaaacttttattttcgtttataaaaagcagaaggccagcaggaaagggtcgcggaggactggcacatccacaaccgtaggactcttggatccaagtttttaggctgagactgggcggtccggggttctccttcggcgctcacaccccgcaaactcgtgggcagtgcagtgctggaggccgggggcagtggcggacccgcagggtaaccttgtctcgcgcacctcccgagcccccagcagcccactctcgtccgaatgctttgtttatttggtgacaccagggaacgtggagaagaagatcgaagttcagtttttcttttttctttattttaaatatttttcttaactaaatggtatgtttatgtgaacccatcatctcttggaattaagtgtcctcagcgaactccagattcctaggggaaacctacgtgcccagagcaggaaacgcacaagtcaattcaggttccggtgccatccgcagtaaattcccttccttttgctccaaattcctcctctgcgtccaggagagggacccccgggactcccgcacacccaggaccgggagcggcagagcagagggcgggtgcgagggcgcgagggaagggaggcggcctgcggacctggggcgcgcagtttcccggctccgtgggaacctccaaccccggggcgcgcggcctaggctccgccctgccaggcttggggccgagcggcccacctagtgggtcctgacctggggaagccgagtccgcgcgcgggtcgggccgcgacgagggaagctcgcctgggcaagtgccgcgcggggtcagacccaccccaggggttgcaaaccgcaagcgaaagtcgagaggggctggagctttccctctgatccgttttacactgtgaaaaccgcaggcctgtcgcctaggcggccacttttaaattgggaagcaaatagacgaaaaaccaaaacaaacgtacgagctgacttttcccagctaagtttcccctcaataaaaagcccgctttctgggaaagacagaaactg

SEQ ID NO: 2211 - DNA, 1616 bp, Homo sapiens
aaatgttttggaagatattttcttgaaccatattaccttccttttgttgtaaactgcacaggatggtttgtacaagtccattaatgtgttacaccccctttggagtcctggtttatcgcattttgaagacagaaatcggattactttttttccgttgcgggtttttttttttttttctggagtagggtgggggcggggtgggagaagggttggtttacattccacagactacttcaggctaaagactcaagtaaaactcagttattacggtagagctggaacactttactgtttcgatgctaataatgcacccggtacctcaattcaactgctacaaataaatgtcaaaaggttgaataataaatattacaatgagccattaagtttatgcactagatttcagagctgaaagtgtaactgttaattcagtgaaagtttgttaggttacatggttacacagtgaggtgaggtgaggtagcaagaagtttctgtgagcccaaaatgttattttctggagctcttgtttgtggggtatctttttcttttgactccccttattccctctccaagagtagttgcacttaactttttttttttttttttagtggaaagattggggtgtgagtcctgattaaatgctagtaaaagctgcctcatacatactgagtaaaataaatacggaattgtattttttttgtaaagggtgtgattttacttttaaagccactcctttgcaacaggaaaagtctgttttgtgttctcacccaaaggttttaaataaggtgactcttactattgtcctgcttatcttgtggtctgaacatgactcttcaaactcccaaaacaattgaaatatttctttttttttttttttttttttttggagagagtctcgctgtgtcgcccaggctggagtgcagtggcacaatcttggctcactgcaacctccacctcctgggttcaaacgattctgctgcctcagcctcctgagtagctgggattacgggcgcgtgccaccatgtccggctaatttttgtatttttagtagagacggggtttcaccatgttgaccaggctggtcccgaactcctgacctcaggtgatccgcctgtctcggcctcccaaagtgctgggattaaaggtgtgatccaccatgcccgggctgaaatatttctcgtaatagcagaatatttcatggccgaactcttgatagtgacaaatcagtaaatacaaccaagaaaaagaaaatgaggggtcagagttgcaataccccaaatgaaaaataacagttttttcagggctttttggtaccagaactcaggcacttggattttatgaccttatactttttctgcatctctctaaaacttgtgttttcagaccatcctgtgtatagagcaggagagtttctactgcaagtgacaatcagaggtgactatctatatttgcacttaaaatcaaagtagttcaacatgcaaatgctagggtctagccctgggtaagggccatgctggtgtactgtgttgtgatgatggaagcagtaaatcaaaattatggaaatttgcactgttgaaaagcatgctttagctttattttcaattaaaaacactgtttaa

SEQ ID NO: 2212 - DNA, 138 bp, Homo sapiens
atattctgggagatgatgttcaccttcattttccaaaatgaatatcttaaaaatcttatgcagaaatttgcattttgtacctcaatatttctacgtcatgtgccttagtaaaaaaaaataataaataaataaaagatg

SEQ ID NO: 2213 - DNA, 307 bp, Homo sapiens
cctcctgcgcagcctcggacagacatgaacattggatggacagaggtggcttcggtgtaggaaaaatgaaaaccaaactcagtgaagtactcatcttgcaggaagcaaacctccttgtttacatcttcaggccaagatgactgatttgggggctactcgctttacagctacctgattttcccagcatcgttctagctatttctgactttgtgtatatgtgtgtgtgtgtgtgttgggggggggtgagtgtgtgcgcgcgtgtgcattttaaaagtcataaattaattaaaacagatccacttcggtc

SEQ ID NO: 2214 - DNA, 2318 bp, Homo sapiens
aaccaaacattgagatactctggatgtgctgaaggtagcaaggtggaaagataagaagcagaggggtccttggtaatgtcatggagccatgaaagtaaccctggacttgccctgcctctggcctcttattcatgagataacaacccctcagtgtctaagccactgttagttggcttttcagttacttgcagctgaaaacatcccaggacagattgctctgctaacgatctctgtgactctgtgccaaactgtgtttccaaaggcatctgtgacactgtctcccacttacctgctcttgtgcaatgtttctctcccatcaagaggtggaatctgattcccctcccttgaatcagggctgcccttagtgacttgctgataaacacagaatgtggaggaagtgaagctgcgtgacttttaagttaacgtcaaaagaagtcttgcaagttcatccttattcactctgaatgtttcccctctacattgtccctccctgaattgagctaccatgctgacaaaagcccatgccatatggaagatctacatgtaggtactactgggtctccaggctcatctgagcccagcctttgagtcaccccagcccaggagtcaaaaatatgagtggagaagcgtccagatgactccagctgccagccatgtagactctttttatgtgaggtcacaggtcttacagaggagagataggccatccctgctgtgcttctactaattcccgactcattgaatttgttttttttttttctttgttttgctttttatttttgggtctttttttttttttttttttttttagagacagggatctcactgtctcccaggctggaatgtagggtgtgctcatagctcactgtagccttaaacttctggactcaagtgatcctctggcctcagcctcctgagtagctgggactacaggcatgtaccagcacacccagttaatttaaatatatatatatatatgacatgggatcttgctatgttatccaggctggtcttgaactcctgtcctcaagtaatcctcctgccttagcattccagagtgctaagattacaaccatgagccactgtgctggcctaattaatatttaatggaagaagacggaaggaagaaagagaaagagggaaggagggaaaatgagcattatctgtagcagttttatatatattgattttgtaaccaaaaatcttgctaaattcttgtgtttattttaataagttttctatagactctttggggctttctatgtaaacagttatgcaactgagaataaatattttttgtcacttcatttttcatccataaaccatgtaatcatttcagcagtggcctgtctggagcagctgctgcaaagatgccggctgcagcaggggagatatggccagggctgtacactctactaagctggcaggagccaggaacaagcaggagtggtgctcaccttctgagttggtgatgggggagctccacgctcctagaggcagctgcagctgcccagccatggctgcagacccaggcatccctgtgctcttgggggcctaggaagcccccctgctcccacaggctcggaagtgcctactcctgctgcctggcctctcctcactcctggcacccactctgattttgaagcaaagttgtggccaagcccaggcgctgttatgacccagccaggtgtgtgtgtgcttgggatggtgctgacacaccagccctctgctgccttggccccctccagagtttgggtgccaacaagcatgggagggaggccaagggggcactgagggtggcacagcacaggcctgcaggtgtcccttggcatgaacagcctgggcaccatgaacagcagcaggaagcgacaggctcccgagtggaaagggatgtgtcgctggtgaagctccaccttcaacccaggggtggcctgaagcctgggggccaggctgccagttccacagactggagtgagaacttatggtgcttttttcaggcccacctatggctgcccattgaccaatcagcatgagcttcctcccctctgaagcccataaaaaccctagactcagccagactctggcagaagtggggatgacctgcctgcagagaggagttattcgctgtggggtcttctctcagctaagagctgaacagatatcaggatgacctgcctgcagaaaggagctacccactgtgggtcttctcttagctgggagctgagcagatgctgggatgacctgcttgcagaaaggagctacccacttcagatctcctgcaagctgtactgttgctcaataaagcacctctttgcctt

SEQ ID NO: 2215 - DNA, 796 bp, Homo sapiens
actgggggtatgtccactctagcaagtaaaaaaactactgttacacgttccagtaactctgtcaatattttcttgtatcagaattgttattatgcagccttcatttgggctggtttcatcattttgcactgtgaaatagctttacagtgcattactacagccagaagaacatatatatatatatatatatttaaaaatatatcggatagttgtatacaaatgagcaaggtatttgttgcaacttactacatagcatatacccaaaatcactgaagaaaatcgctggcatcagtgtgcagcaaatttgttcttttggtttcatcactaacaaaagtgcctcatcataaaaatacagttggtttttagggtgccatattgttaaaattagataacttacttacattgaataaacgaatgcgttttattggtaacagatatcattacatttaccagttttaacacaggtggatacagaacttccattctttagtcattccaggtggatctgagttttatattcaaacttttaatacagtttttgagttttgtgtgacttgaatttttaatctttctgtaaaatacgtaacttaaatgaacatattaaatgtgtatcttttcttcagataccagatttgatataatgttgtaacataggtgtgtagatagtggatcctggatggaactggcttctttatcgagaagaatataattctgcatgaggacttaatgaatccaaacctgtgtcatgcctgtgtgcatacccaattaaacactggaaataaaaattgttttggtg

SEQ ID NO: 2216 - DNA, 1219 bp, Homo sapiens
agacatgaattctcaccactaaagtcccagatagcatcatatttacgcctgtacttgggaagccagctgtcaagtttgtccccccaggcatcttcactcagcaggatataaaagaaaaaaatgttcaaatgagagagctttcttttctgaggttaatataaagagtatcaaaggttcctaaggaaaagaaagcagtgcttttatttgacttgttccaaattaaacactccgccttgtgactcagcaatgctatctaccttcacactcctgagctccgccttcctttgttttgatacagtcattatatttgattagtattcccaggaatacccccacctagttactcaaatatttttcacttaactttttatactcttattttggtaataagcttacaatattaagaagctggggacttttttttaactgaagacttgagtcccctataccgggaatgcagctattaatagattcccatattttaaaaggagggaaaggacaatttaatataaatttctgtttgtgcatttctgacaggccattattatctgctttgacaaagcctttctgaaacgcagtgtacaatgaatcttaatgatgttatgaaacgagctttgctcggggctcttgattggagcttccggtatgtgatgacggtatgtcatgtatgcatggatgtactcaactgtgtttaatactctgaattttaattagaaaaaaatacaatagcagcaaggccctggtttctaagctgtatccttttattcatgtgggacatgagcaaatggcagaattaggggcgagtgctttcaatgctcgaaactaagcaagtataaatttttcctcttatttgcatgaaaggacaagacactgttatgccctgtcctaaatgtgaagacagaggttgaattttttaaaaaatatctttaaaagactgatcacaaaatccaaggtgctacaggaaacaagcacactcaagaaagtttttttctgaataacatttttttccaatttctccgttttataagacatttcctaatttatggggattttaattgaaaataaacttgagtcccaatagagctgtttttttctcacttcctacaaaatgcaaatgcaaaataaataactaagcagcttttgtttggttctgaaccgtatgtggcgtattgttattaggttctagcttcctttaaactaataaagaataagaaaactt

SEQ ID NO: 2217 - DNA, 2382 bp, Homo sapiens
taccaacagcacaactttgaaaactgttaagtattttgaactggaaatagtaacacgtgccttcttgctactctaaactgtctccaacacattgtttctgagctccacaaatgcaaaagatgtattttcctgtggcccatgacatttgcagttattcccagtgagaaatattttcagtattcgtaacactgtatatgatgaaaggcttctatttggaggaagaaaaattaagaagacaacttacaaaatcaagatgacaacttataaaggcatcattgaggatgattaaggagaatagcctcctttctagcataccaacctcgatactcttattttattccacaactcactatgcatatcttatttaaatgtttttttccttttggtcctttctacttatctattttgtgaattctaaagttacatttgtaagattacataatctattaagcaataagtttatgttagtagagctgttttcaacccaaaaataagaaaaaatagctctaaatatctaaaaggaaaaggttattttatgaaattttaaattagaaaaatttggtaaaatatatgcaactataaaatatcagagaaataacaatttctactgcttacactggtttttatcctctggacaacataaaaaacaaaatatgggagtctttcaggcttttttcacaaacacagaatttggaagccttatagaaaagcttattttggttacttaaagaaaagtagtttatatacaattattttttgaaaattcacttgaaacttgtccatatgagtatctttattcctttattaacttagggcagatataaaataaaggataatatatgacaaattctcacttaccaagaatggttggttgctatttagggtaggctaacagctgtgacagtacactccaaaatgtataattacgtaaacacatattcaattcttgctaacatagcagtactttgctgtgagcaggtcagcaggaacccttttctgcagtcactcagggacccagacttacagagtgggtaggatgcatctgatccagagttagggagaggcacgtacaggccaggcctagaaatgatgcatatcattcccgtttgcatcgctaagtaagcaacttaagttgctttaacaaactaactccaaatctcagtttcctgataaagatacatttttcatttacatcactgtgcaatgtgactaagggtaggggtataagtctgttccatgcagtcactcagggacccagtctccttttgtctggtgactctgttgatccaggcagtctttctctgccaattcaggatgagatgtttaggtaagtattttatttgtgaaatgattgctatacatactcatttttaaataattcaaaatcagtagcaatgcaaaaatattctgattactttagccttatggatattatgctttgaagtcatgagtgggagttgccttaaatgttaaaatgaaaactttgtggttttaacagctaattcttttgctttctgtaaatgtctactaaagaatctagacttttctctatggtctacagtgttgtcctagatgaacattgttgcctttctttcacagagccttcagagggaaacattcccatccattgttcctggaaaggtgatccctaccacgggatcccaaacttggatagagccagttcaacctcccccaatccatacacatacatacctaggtcatcctatcacccaaaagagggacaaacatctgacttggacagctgaccagtgactgatcagattctctctctcttgagagcatgaattaagagacatggagactgcagtcacttgggagtagacacctgaaactaaaaagtcaaacttcattatgcagctagtttgacttggtttctcttcctgttcaaaggaagaatgggtagaataaagatttgatgtggtctggccccttgtctatgatctttttagcttgatttcttgaaatgctgcttcttccctacccactgtaactggcattcccatagtactgaggtactagagacctctgagatctgcacacatggttccctccacccagaaaactgcccttttctttctctcatcctacatagctgcctggcaaatccctagtcttcatcagctcacatcacatttccatgacaatcccctttgattcctcagaatctggccttcctttatagcactggtcatattgtattgtgcatatctggttatttgcctgttttccatgaacatttcaagcttatgggggagaagacactgtatacattttcatctgcattccttagaatctgcataacagctggtatagagaaggtactcaaaaaatccttaatgaataaagtaatggatcgtaccc

SEQ ID NO: 2218 - DNA, 1972 bp, Homo sapiens
tttttttttttcttttgaagtagattcttattactcagtcatactgtgggactattatggttaacagaactgtcttaatatgttttaaaatgtgcccatattttcagaacatgctgttttattggtaaattgaatgtctacctgtaagcataaatctttgaggcagtttatgtattgctgaatagcaatttatacaagaagctgtccataactgattatgcttatgtacttacttacacatttttaactttatgaccagcctaaatattctgggggaagtggggtataatatttaacgaatcatgattcagattgtaccattacatgtttcagtgcagcatggttactaacgctatgtcagactaatattaaaatcagaaaatttaaatgctggtgctggtcagactttttttgttagattctctcatttaaaaaaaatactgtttgtttaaagcatgcataaaaatttatgtattgaaatatacttaaaaattcaagatgcttcccatttgtgtaatatttacctggaggactcgtacttaggtgtcttaacgtgaattgagtctccaaggtctccatgtgaaacaagcaaaaagagaattatctgtaatgttgtaatttgtacctaagttttttaatgagtgaaatttgcattataaactttttccattcataaatacataagtgaaccaaaggtttttgtcctttccttcactgatttgctttaaaaaaaataaaagataatgatttattgcagaattatgattctattttctcaatatgttaacttggaaaaaaattttagccttatcttaatctgtcccaacagcaatgtgacggatttttgcagattcaaaatctgcaatggttatttacaagtcaatctactgaattccttttttaaataatcttttgaaactaagaaaatgtgtcaaattgtgtgcattcattctgtaggtaaaattcttaaggattgccatgtcagtccttcagttgtacagtgaactgttgtacactggttcaatgaaaggaagttaaaagtaccttttacatattgtaaaagtggatacagttgatttgtgagtaggcactctttaatccattacctggcactagcaacattagaattttaaaataaaataattgggaaagaaggtgggtcatgtattaatcagtgaacagagatttacctaaccaacagacttggattgtcttttgacataatcaaaatgcaacacatgcactttgtgtgtctcctcttaattgaagggagggctgagggatgttttctcttcttgtcttgtgtataattctctattgcttaggatattaaagtagagcactcaagtgtgggtttctgtgttattgaggatttgtttggaattcaaattacagttatgtactggatgctacagacttataacagcatagtgaatggtaagactagtgcaaaacagttatttctgaaaattaaagaccattattgctaccaaatcaatgtgactatttcatatgcattttgcctttgttaattttaaacaaacaaagtatcattagtgatcagctagctaccttctactttccatttttcaagtggattgttctcttaatttgtatataacctgttgtctaaattttatgtacagtcttttataataaaccattctcctatatgaaattttggatactgttaaaatataactcatgtggacttcaatgcagacttcacatttttctgacctttactcctacggtaaatcaagacaaaccatttgaattttaacattggttatttatttgtgtaatggccttacatgtggatattaacagtgtaaacaataccacatataaccatcaagataccttgattataatttataggactagaatgacagattcaggtggtttattaattacatttaaaaagttttctgaaaaaacttttgcaataaaaaaaaataaattgcccatc

SEQ ID NO: 2219 - DNA, 1474 bp, Homo sapiens
aagataagattttattactgggctgtttatgtgacattttgtttctcattaaatattaatatatgacatgtaaaaatattaaaggaacgtatttttgtatcatatatgtcagatcaaaatttatatagtattttaaacaatgttacttggcttctttaacttttaagtggattttgccaatgaaaaccaggaatattgagttttacatactcaaactgcccaaatgtgagctgtttaaacagccaaaccactaagttgtcattaatactttagtgcagttaattgatggcttatttgtattttgtaatttttatcactatatgtagtggtagatgtctaattggacttagacatcattttgttgtgcaggaactgtggtcattgttcatgtttggatgtattacaattgttacagtgccatcaaatttacataattttaattttaagcactgatttatatagctgttctcagggagaaacaagatttgcctgattcaccttttctgtttgtttatttatttttaattaaccttttggaaatagccttcagtttagagaaaatttcgaagttttagtacaaagactttctcctccgaacaatttgagagtaaattgctgacattatgtcatcacccctgattactttagtgggcattcctacaagtcaggacattctacataactacagtgcaaaccttgcaatcagaaagtcaacattaatacattctagtttgttacttctctgtaatgtcctttatagcaaaaggatcccattctaatccatggcttgtatttagttgttgtatctgttagatctttcagtctggaacagttcctcagtctttccttgaccttcatgaccttgaatattttgaagagtaaagtctggtaatataagaatgtccctcaattgggtttcatggtgattagatttagattatatgattttttggcaggagtatcacagaagtgacccagtgatcttctcattgcatcttacctgtgaccctacagttttgatttgccctgttactggtaatgttagcattgatcactaacagtggtatctgctgaatttctcctctgtaatgttattttttcaccttgtggttaattagtattttacagggaggtaatttgagactatgtacatatctctactccccatcgaaccctcaatttattcatttgcttgtatcaaataaaccatggattcatggtttattttattcagtgagttataattcattaatattgttattaaaaatttgtttttcttttaagaaatgttatattttgacaacttcagacttacagaaagattataagaggtagtacaaataatttttggatattattccccaaatgttaacattttactgcatttactttatcctttctcccccttctcctcctgtctttctagatgaatatgaatataggtacttaatacagattttttttctaaactgtt

SEQ ID NO: 2220 - DNA, 1521 bp, Homo sapiens
taactctcttgatatggatgcttgctggttttattgcaagaatacaagtagcattgcagtagtctacttttacaacgctttcccctcattcttgatgtggtgtaattgaagggtgtgaaatgctttgtcaatcatttgtcacatttatccagtttgggttattctcattatgacacctattgcaaattagcatcccatggcaaatatattttgaaaaaataaagaactatcaggattgaaaacagctcttttgaggaatgtcaattagttattaagttgaaagtaattaatgattttatgtttggttactctactagatttgataaaaattgtgcctttagccttctatatacatcagtggaaacttaagatgcagtaattatgttccagattgaccatgaataaaatattttttaatctaaatgtagagaagttgggattaaaagcagtctcggaaacacagagccaggaatatagccttttggcatggtgccatggctcacatctgtaatcccagcacttttggaggctgaggcgggtggattgcttgaggccaggagttcgagaccagcctggccaacgtggtgaaacgctgtctctactaaaatacaaaaaaatagggctgggcgcggttgctcacgcctgtaatcccagcacttttcagaggccaaggcgggcaaatcacctgaggtcaagagtttgagaccagcctggccaacatggtgaaaccccatctctactaaacatgcaaaaattacctgggcatggtggcaggtgcttataatcccagctactctgggggccaaggcaggagaattgcttgagcctgggagatggaggttgcagtgagctgagatcatgccactgcactccagcctgggcaacagagcaagactctgcctcaaaaaaaaattaaaataaatttaaatacaaaaaaaaatagccaggtgtggggtgcatgcctggaatcccagctacttgagaggctgaggcacgagaattgcttgaacccaggaggtggaggttgcagtgagccaagatcacaggagccactgcactccagcctgggtgacagagtgagactctgtctcaaaaaaaaattaaataaattattataacctttcagaaatgctgtgtgcattttcatgttcttttttttagcattactgtcactctccctaatgaaatgtacttcagagaagcagtattttgttaaataaatacataacctcattctgaataatgtccctcattttgactataactgtgcttggtttcaaaagcaaaattaaacaaaaatctcagtcccctccgaagtgaactttgtgttaccctgcgtcagaaatgccaagttgtgtttacttttcattcagattttgtgaatatgaacatgctgttataggatctacagatgaatatttaactcaatagaaaaattattttagaacacattgtattggtattacaaccagattatattcttgacgttgacttcattaaaattatctacaatttcctaat

SEQ ID NO: 2221 - DNA, 2215 bp, Homo sapiens
ggaaaatggtgttttcctcaagaagactactggaactggatgacctcagaatgaactggattgtggtgttcacaagaaaatcttagtttgtgatgattacattgctttttgttgtccagtagtttagtttgtgtacatatatacacatatatattttgcactacacaaacgataacattttaaggactaatattgctgatacttgaataatcaatctctactaggttataagtagtatacacagatttaccctgcccttgaacttgaaggacattaaattattaatgatcatttggtaacatgtttacctgattatcttccatagagtaacataagctgcttttcaaaggtaccattgtgataatgagatcaaatttataagttattatttttaattttctaaattaaataaaagaaagaatgcaaaccaggagtgaatttcaaatgagatgtaatcgactttatatcttagtcacggagttgccatggcatgtagtagaaaaccacaggaagaatggtcatattcactttgtgggctgcccataatctttcttgggcattcacaactcttgagtttggtgttcaggcatcattattaaaaagtggagtcctatgtaccagactgagtttttacaaatgatttgcaggctagacataacccactgatggaaatggtgaagaatgagcttcatgtaggtttaaaagtgtattctgagcctgtagatgattaatcaggtttttattcaatcatataaatgtattcctttgtaatcatttttgtttaactgaggatatctagtgtctgcttcatagggtgctttgaaatataaaatgaaaacttatttatactgtttttacaacagtcaaaaaggaaacacacgaaaatcacttttctgcaactgatgaactatatagactggactcttaacctcttagtgcctcagtttttccttcggggtatactattttagatacacctacttcacaggagtactggagggatttgcaagctaacgggccaaatgcttccataggaataaggcatgcccagctaacagaaatttaagtccctcttccccacctctctcatctagaccaaaaagaagactacaatttagatccttggagacttttcctgtatgccttccaaaacttcctgctcacttagatgtaccttgtgctttgaagatttctttgatgcagtctttgtaacaaataatttttttttttaaatggagtttctctcttgttgcccaggctggagggcaatggcgtgatcttggctcactgcaacttccacctcctgggttcaagtgattctcctgcctcactcccaagtagctgggattacaggcatgcaccaccatgcctggctaattttgtatttttagtagagacggggtttctccatgttggtaaggctgatctcaaactcccaacctcaggtgatctgcctgcctcggcctcccaaagtgctgggattagaggcgtgagccactgcacctggcctgtagcaaataatttttaagcattctcaagatgtatgatgttgggtttaacatcatatgttcacagtgttttaaataagaaataatctgtctttagtatacagaatggttctttgtttgcctgaaaagtataagaatacaatttacttttcccaaactctttttccttatttttttctttcaaataactttaattatttaatcccatactgattaaaatatgtctgtctaaagggatctactactatttgcttttaaaaaagtgttccctatttatttaggaaaaagtgaagcaagcaactgaatttatatgtaaaaataacatttagacctgtggatcaaagattattttcaaaaatgagatatcaatttggtatcagtaaaaagtgtcttttctcttagtatataaataaataaaatgcaaattaagagtgtaagcagttgtgaatcattacaagcagtctgggataactaactcctagggataaccatttctatcctgttccaaagtcttattttatagtttgaaaagcactttgcacacagttcttgtatataaaagtaaagatgtaattataggatatagtgttcctgctttgtttaataagaacctcatttaaacttgacagctatggtatttttttaatgataacttcttttctgtttattgtaaaactaagttaaaaataaaaggttaatgagaaatg

SEQ ID NO: 2222 - DNA, 23 bp, Homo sapiens
ttacgacgcatagctgaagactg

SEQ ID NO: 2223 - DNA, 2352 bp, Homo sapiens
gagcttgttgcttttcagatccaatggatgttctttccggtgttttcatcaaccctcatcctaagagccgaagcagggatgaaaatgactctctcccaaacctcttcttatttttaattatcccaaatatatcatttagttgcttctataaaagacatataaattataaaaaactcattttaatcaaaaatattaacttattttatgttactcaaactatgcataaaacatctgcattaccattacagtaagtgccttgcttcccgacaataagctccaacgtgggcatagttgaacaagctatgcctcaaaatgccaacgccatatgcttattagcctgtgtgcatcattccagacgggcctaatcattccaggactgaaaccagaatcgctgaaagcccttgaaatacattcaataattcatatgttaaaacttggatatctgttcagcccaaatgaaatcttccttttaaaaaacgtctacattattgaaaattgttcaatgtgcttttcagagtgacggtgagaattttatgcatgtatcttgcctgcatatttgatatgttacaaacttccaaaattcaaggtgcagcgatccacagaacgttgtacatttaagaagtgattccttcaagctaatttaaaatttcattgaacacatggtgaccaggaaaactttttttcaagcactgttggaaagcaccacaaagccctttagaattaatctggatttgtttctcaagttctgctgaagtttaaaaaaaaactttattatacaaataactcaaaattttcctgtgtaaaactaaacctgtagttttaaaacataatcctgtttgcattagagctcactgtctttttgtgatggaaactgtgttcgtatggaatgactaaaaatcttttatttggtttgtttcaaattacaattgctgatggacaatttgtattgcagcgagaacaacagaatgaaagaaatgtatctctgtgcggctatacatatacatacataaaattgatttttaaatttaaaacatatggaaaacaaaacattgaacagtttgaattttgccaagttggacattaaagtaaaaatgaagtgaaatcatgcattgaaagaaaacattttgtttctaaattagtctaccattgagtgagaataatcaatatcaagaaagaagactatctttctcaactaaacaataatattccaatcagcttgggaagacctgaaacttgaataagcagtggaaatgccaaatataacagagggtatgtgctacagagaagtaaaaagggtttgactttttatgatgggattttttttttctgggtatgtaatctattttttttttaaactggaaagcatttttgtcagtgtgaatgagggtcaatagtgcagccagtggtgacatttttctttattttgcaaaatgcttttaaaaccaaaggctgctctagttgatggacagtatcagtcttgatctaaattgtaggacactttttcatgtaacataacatttggggattgggtttatttagtgtaatgaagataatttgatataaaaatattttgtgtatatatatatatttttactttgttttctaaattgctgtttgcagtaacagtaagcgcaaagcaaaatatataagttatgactgtatgatcagatgaagtatgagttcttttggtttgcatccttaaatagttagagatctctgataaaaactttggaatctttgcaaaacaatacaaaaatgccaaaatgtgagcatgtcaatgaaaactaaagacaaatacttcactctttttcatactattataagttattctggtattaaatatgttaataaaagtgtttttgttttgacatatttcagttaaatgaatgaatgctggttgtattttatttgaatgagtcatgattcatgtttgccatctttttaaaaaaatcagcaaatttcttctatgttataaattatagatgacaaggcaatataggacaactattcacatgattttttttaataccaaaggttggaagattttataattaacatgtcaagaagactttatagtaagcacatccttggtaatatctccaattgcaatgactttttaatttattttttcttttgctgctttaacattttctggatattaaaatccccccagtcctttaaaagaatcttgaacaatgctgagccggcagctgaaaatctaactcataatttatgttgtagagaaatagaattacctctattctttgttttgccatatgtaatcattttaataaaattaataactgccaggagttcttgacagatttaaaataaaagttaatttctagacct

SEQ ID NO: 2224 - DNA, 342 bp, Homo sapiens
aatttaaatggacattacaagctatcaaattctacatgacacaggacatgtcactcccatggccagaaagcctaaattgggaaacagttgttagcaaaccctttcaaccatctaaatgaaaacacacaaattgaaaatgcacagaatgtttttcatctgaaaattgcatggagacttttgtttctatttaatgttttcgagatatgacatgtgataagatggaaagccaataaacctgtgataagtttctaagaatatgagaatatacgtatatgatgtatttttagttcagtgatgcttttgtatttgtggcgattttaataaaaaggatatggccttccc

SEQ ID NO: 2225 - DNA, 3071 bp, Homo sapiens
ctaagagaaatttccataattgtctttttctatagagtgcatgatgaaatcaattacagttttggtagtagggtttttaaatctatatcactgtcatagatgtacaatcttggttcaagttgaatgctggttttgtttgtatctttttacagccttatttcaaacgccatgtgttagtataagatccgaaatcaaaatatgcacagtactgtattctaagcaaaacctcaaaccttctcgttgtcttcaataccgctctatctccaagatgaggctgaaattttcagagagacttagctagaggcttagtatgtatgggagttcagcgcttctgctggtctcaggtgtggctgctgctgtcgagtttgaatgttagctgttgaaggtatcaattcagcagccatgagcagctccagacagacaggtgagctctgctgtttctgggtggatcatcacagatttagccgggcaggcagtaaggtgtcctcttactattcaaaaagtgtagactttcttacatattcgcaatacgttcacagtgtgtgcattttaaaataattcttaaaggagtaactgaaattttaccttgagtgaatggccttcataatatagcttgagaagtccttttgagtacctgtcagtgactcaacaacatttaataagggaaagtagacttttaacagttattatatatgtaacgaaaagcctttcctttgggattaatataagtaagaatggtagccttgtggcaagaaatgattacaaaggatatttttatttgtaattcctcagaagacaatttatgaagtcacccaaaatgttattttagctggttttggatttttccaataaattagaagaaggatttctattctaaaacatgtaaaacctgttttacatattactgatacaattaaagattatttttcatctatgtgcaatagatcacccctctttaaattgctctaagatttattttagaaaacttttcatgtgatgttatttctttgtcatcaaaatgcttgttaacactgtccagacaccatcctaaccttgccattgttaaagaagtttaggaaagactcttatattgtaaatatttagatgggttctctcacttttctttgatactactgattttcagcaagtgaattatataattcaaaatgctagaaatgtctatccgttctataagagagcatatcctgccgttcttgcatgcagtgaagccctgcccgtcgaaaatcattgcatctgtgactttcaaagtggaaaaaaaaatgttatttttttgttgatttgtaaagagagtttaaatgtcatgtgaaaaaaaatagaatgtagtaaaattctatatatttatgaaatattttaaaggcatatttttttaaatatcaaacggggctattcataaaataaactgattgtatgtcaagatgtcctaatttaaaagagtagttttataaatcatggtcaacattccatgtaaatatttgagctttacaaagatagatccaagtgtgcgatctgtgcactgcacatttgatagcattattcactggttttccttcatacttgtcaagttcatattagaagcagagacaaaaaccactccaatggccttgacacatagtcacaccaaaatagataatcagactaagtattatataacaacgtgatccagacagtgagttctaagtgtattaattaaatagcaaaaaattttgtttttaaaaaatgaaagagggagggttgccaacctgaagtcttaagtagattgtttgggtagcatatttccttctttgaacattgtctgaaattttctataaatcaagacttcttgtacaaagaatgatgggacatatgtaataattcaggcaatcacctgagtaatttaggcagtccaaattctttaccctgaaatacccacattttaaaaaaattgcagataattgcttcagttatttactttggggacagagatatagtgtaaagtgggagaaactgagtccttttttggtggtggtaataataagatgttataaaaatataacattttaaaaaagaaaggtccagaccttaagcgcagagctagaacaatattttttaaataatggggggaaaagggggcactttggtaattttagaaatcaggtagtatacttttttttttttttttgagacagggtcttgccatgttgctcaggctggtcttgaactcctgggctcaagcaatcctcctgccttggcctcccaaagtgctgggattacaggcatgatccaccgtgcccagccggtagacgtggtcttaaaaacagtgtttacatggccatcttgatgcttagaaagataattgattaaaatttaataaggcagggccaactccgagagttcattgacaacggcagcaaaaaggccctgaattctgtactttcttcccccagcctccttctccagcaaggagaatagcactcctccctccagaagccagctccctaagttggagccactatgtaagagaagaggaacgttcactttttaaaattcatatatttaaaaatcaagaccaaaaagtaaattctgtactcctattattgactgtagtcaatcaaacataaaaaggtgaaagtaaaatttaattttttacccttattttactgaccaatatggaagttcttggtatctttaaggctgaccttcctggtattgtgtaatgattgaatgtatctaaactgtaataatttgaaactgacaaacataaccttctcagacttacaaaactatgttctttctaaagatacagatttttattattttattttgactaggaaggatttataaataaatgtaatgaaaaatctttgatcttaataaagtaccttcaaacagtgtgtgtacttacttgaaaattgtttttgcacttggatattctattttattatactactattgtgatctattccattatactatttcccatggtagaacaaattatattttctactgtgatatgaagtgatgtaattgaacttgccatgtctaaaattaaatttcatatttttttcaatcaa

SEQ ID NO: 2226 - DNA, 899 bp, Homo sapiens
gtggggagacgccagaggagcctcacggtcacgtccaacaacaccactgcaccagggaaatggatatatatttttggactggtgtttttcacaaagtatttttcaatcagagttttcagaacctgacattgttaaagatactgcttgtcccggagttgtgtattttgtaaatgttcaagggaactgtttggaaacttctttccaccattcaggaggttatcagaattaataaaagtatctgttatgtgcacttaagccgcagctgctatagatagcactgccttcttgttccagctaggcaatgccttttttttttttttttgaagcagttctctttataaagtgttattttgatagtttgtggattctaaaatatatatatatttatataaacaccatataagtcaaatatgtatttaacaaagcaatatgtattcattcactttcaagatttgttttggtgtcaaaataacatgaaaaggtagatggagttgcttctgttgaattagctctgccaccaatatgtatcttcatacacgtttggaaatgtttcctgcagcattaggtatgacttgttctgagtactgcttccggtgctaaaatgaacaaagaatttgtacttaatggcatggactctggagaatctatgcgaatcaacctttctaccttaatatctccccaaaaatgtatagtgccttgtttttatgtacagtttatatacagaaaagtttgctctgcatttttgatgatggtttggaacattatctacaattttactctcaaatagtcaaaataaaaacatctcaatttctaataccggttgtaaacagtacacatgtcattttgtgatataggactcccaaataaaagtatcagaataaacacaacaattaactggt

SEQ ID NO: 2227 - DNA, 779 bp, Homo sapiens
tggctgctacattgtgtaaagaactgggcttagcctatcaaatggtctgtggacttacttggaaaaactgatttgaaactttcacagatctcagctttcatctgatgtcacttttcatgatcttctcattggcccccttaacctggtctgaagttctgggatgttttcagtttgatcagtctgatactcagtggcactttattaaaacatcagctgtggagtgtggcggtgcacacctgtagtcccagctgctcaggaggctgaggcaggaggatctcttgagcccaggattttgaatccatcgtggacaacatagcaagattccatctctaaaaaaaatgaaaataaacataagccacaaggaatgggtgaaagattattgtaatgtgctttaactaaataggtaaatatactaaacaaatgctaaaactcagttttaggatgaaaccattgttgatatccacatcagtccctgtttagaaaacatttaaaatgacttttagttatgtacagtacgttggcaatgaatacattaagcttcaaaatttggtagtgctctcgaatatgtatatttgtatttttcaagcgaagttctcttattcacatataaattaaagtgggttggtactgatatcaaaaaatgtttatgtttttagaacagacatttcagtcactgcattcttaggtattccaaaccaaatatgatgacatcaatagattgcattttaaaaatattgtttgatttttctattttcaaaaataaaattctgtttctaact

SEQ ID NO: 2228 - DNA, 175 bp, Homo sapiens
actggaactggacccaggatgctttgcagcaacgccctagggtttgcagtgaatgtccaaatgcctgtgtcatcttgtcccgtttcctcccaatattccttctcaaacttggagagggaaaattaagctatacttttaagaaaataaatatttccatttaaatgtcttcaccctg

SEQ ID NO: 2229 - DNA, 323 bp, Homo sapiens
gaccccaaggcagcctggggttaaggagagagctctgccgccaccttccttcagagcttcgtgctttatggtggtgcttagtcacaaagatcaaacaacaggattggtgtgagtgaacagaaatgatttttgtacatggttttattttcttaacgaaataaaatataagctctcgaagcatatttttctaactatatgcagtcttattttaaaatacgtactgattcttaatatcttagactttcagaataaataaaaagatcaaaatttgaagattgaaatttagcagaatataggctgttcttcaaatacagctctcagtg

SEQ ID NO: 2230 - DNA, 1361 bp, Homo sapiens
ttcttactgaagacaacctgtggaatagaagctggattccatcagatttcaaatgtttatacacaatgtattttattttttggaccaagcagtgactctttgattttgcactttttttttgagggatcagaagggaaggggagagtcgagatgtgtgttaggccctcatatttgctgctttgttgcaagttgatataactgcgtgtaattatgaattcattttatcctgaatgtttgcatttcatactctgaatttcagtaaaaatcaaaacttaaaattctaaccagtcatatacactggataatttggtaagaaaactgtattttttttccctgaaattggataatgtactttcttctcaagattcatgacttgatagaacaatactttcagttatgttgcaaaggctcttgggcattttaaacaaaatgaagtatatccattttgaaacctgtgtatttctttttcggggtttctgcatgcagtggcagtcttaagtgccaaaattcattataaccccaaaataaccccttgatgaaggcttgctgtcttttactgtgttacacagcatccttactggatatcttagttgcttgtttgggcagcacactaatattacttaaaacactgtgatatactggagttttagttagcggaagtcagttcagggcattttagggctgtcttgctatactgaattgtagctaacaatcctaattatatctagtaccatactgagttattggtatgaccctgtggaaacacacattattttatgtaaatataggctaaagacttaatgtcctttagcttgtgtatataattgtgttgtatagtctcagagtacattctaaccctacatttctaatcattgttattggtaatcttttctgtgaatattaggtttcctccagaaatagtccgttatttgggaaagttaactgtgtgcacttttagatattaactacatttacaggcaaatcactgtaatgagaatggtactggaaaaatactgaatagacttgctaaatggcacatgcactacaagaggaaccttttgggttatttaatatgtacagaaaacattagaaaaaatttattacagaattctaattccagtatgaatagtggaaacccatctgtaaattagatggatgttggatggaaaatgacattgctaaatttgagaatttctttttacctactaatgtagattgctttgtataataaaacacagggtttggaaggttttgttacagggagcatggtctgttgaagatttttaaaatgtatttttctagattaacttctgtacatgaaatgtctaataaaactataagaggtttagagatttttccat

SEQ ID NO: 2231 - DNA, 374 bp, Homo sapiens
gtgttaaaaagtaatcgaagtacgaagaggacatggtatcaagcagtcattcaatgactataacctctactcccttgggattgtagaattataacttttaaaaaaaatgtataaattatacctggcctgtacagctgtttcctacctactcttcttgtaaactctgctgcttcccaacacaactagagtgcaattttggcatcttaggagggaaaaaggacagtttacaactgtggccctatttattacacagtttgtctatcgtgtcttaaatttagtctttactgtgccaagctaactgtaccttataggactgtactttttgtattttttgtgtatgtttattttttaatctcagtttaaattacctagct

SEQ ID NO: 2232 - DNA, 132 bp, Homo sapiens
cttcctccgagtggaactgcagcctggggacttgattaggtgctatgcatcagtagcattttgaatgcaagggatgatggaaagcagcacatgcgtttctgtggcagctgtggggacttgacagcaatgctc

SEQ ID NO: 2233 - DNA, 1243 bp, Homo sapiens
ggtgaaaatcctatttataagagtgccgtaacaactgtggtcaatccgaagtatgagggaaaatgagtactgcccgtgcaaatcccacaacactgaatgcaaagtagcaatttccatagtcacagttaggtagctttagggcaatattgccatggttttactcatgtgcaggttttgaaaatgtacaatatgtataatttttaaaatgttttattattttgaaaataatgttgtaattcatgccagggactgacaaaagacttgagacaggatggttactcttgtcagctaaggtcacattgtgcctttttgaccttttcttcctggactattgaaatcaagcttattggattaagtgatatttctatagcgattgaaagggcaatagttaaagtaatgagcatgatgagagtttctgttaatcatgtattaaaactgatttttagctttacaaatatgtcagtttgcagttatgcagaatccaaagtaaatgtcctgctagctagttaaggattgttttaaatctgttattttgctatttgcctgttagacatgactgatgacatatctgaaagacaagtatgttgagagttgctggtgtaaaatacgtttgaaatagttgatctacaaaggccatgggaaaaattcagagagttaggaaggaaaaaccaatagctttaaaacctgtgtgccattttaagagttacttaatgtttggtaacttttatgccttcactttacaaattcaagccttagataaaagaaccgagcaattttctgctaaaaagtccttgatttagcactatttacatacaggccatactttacaaagtatttgctgaatggggaccttttgagttgaatttattttattatttttattttgtttaatgtctggtgctttctgtcacctcttctaatcttttaatgtatttgtttgcaattttggggtaagactttttttatgagtactttttctttgaagttttagcggtcaatttgcctttttaatgaacatgtgaagttatactgtggctatgcaacagctctcacctacgcgagtcttactttgagttagtgccataacagaccactgtatgtttacttctcaccatttgagttgcccatcttgtttcacactagtcacattcttgttttaagtgcctttagttttaacagttcactttttacagtgctatttactgaagttatttattaaatatgcctaaaatacttaaatcgg

SEQ ID NO: 2234 - DNA, 1018 bp, Homo sapiens
agtaaatgtaatactcctaagacttatgtattagctgtcaggctgattattaaagtcctttctaagtattttattcccccaaaagtttcttactcaaggaatttgcatttagtgaaaaacagaaagcatcctaaatatatcccattgaaacaaaacattgattataagcatgtatattctggttactgtggccagtatttttatttctttaatagttttgatcctaaatctgccttttcatctaatgtgaagtagaatcctaaataatgttatctgtgtagcaagctattcaatggaaagctgcttctttctttaaaacaaacaaacaaaaaaaaccttcagtgaaagccagattcaaaaggttatataccaagcttgtccaactcgcagctcgtcggccaggacatgcagcccagaatagctttgaatgtggccccaacacaaatttgtaaactttcttagaaattgtaattattattattatttttttttggtaacttttttttaaagctcatcagctatcgttagtgtattttatgtgtggcccaagacaattcttcttcttccagtgtggcccagggaagccaaaagattggacacccctgctatatactatatgattccatttagaggacattctggaaaagcaaaactgtaggggcaaaaatcagtggttgctaggggctggaatgggggaaagtgttgaccacagaggggcgtaagggatcttccttgggatgatcttgattgtgggtggatttatgtatttgaaaactcacagaactatgtactttaaaaagatgtatgttcctctatgaaaattatatctcagtaaactttggcttataaaaatcttaaaagccctaagtgaccgaaaggttatgttagcattgagtgctttgaaatatggagtcagagggtggggtaaccaaatgttggcctttgtgtattcatcttttgatacaagaaagcaatgccaatcttcagtatttttaaattgtaaatgaattttgtagtt

SEQ ID NO: 2235 - DNA, 2578 bp, Homo sapiens
aggcagacagagatgaaaagacagtcaaaggacggaagtggaaggacgggagtgagctggggagctgttgatctttcactatacaggctgggaagtgtgttgatgaccactgagccaggcttttctcaggagcttcaatgagtatggccgacagacatggacaaggagctgtgttcaccatcggactcatgtgcagtcagcttttttcctgttggtttcatttgaataatcagatgctggtgttgagaccaagtatgattgacataatcattcatttcgacccctcctgcccctctctctctctctcctctcccctttgtggattctttttggaaactgagcgaaatccaagatgctggcaccaagcgtattccgtgtggccctttggatggacatgctacctgaaacccagtgcccagaatatactagaatcaccgcatttcagtggactcctgaagttgtacttgtgtataattgcccgcgtcgtgcataggcaaagaaggattaggctgttttctttttaaagtactgtagcctcagtactggtgtagtgtgtcagctctgtttacgaagcaatactgtccagttttcttgctgtttttccggtgttgtactaaacctcgtgcttgtgaactccatacagaaaacggtgccatccctgaacacggctggccactgggtatactgctgacaaccgcaacaacaaaaacacaaatccttggcactggctagtctatgtcctctcaagtgcctttttgtttgtactggttcattgtgttacattaacgacccactctgcttcttgctggtgaaagccctgctctttaatcaaactctggtggcccactgactaagaagaaagtttattttcgtgtgagatgccagcccctccgggcaggcaagggctctgaagatttggcaacgtggcttaattgttctgctttttctgtagttcaatttcatgtttcttgacccttttgtataaagctacaatattctctcttattgttctttcatatggaatgtattttcaaatgtaaactctcttctctttctctctcctatctctctgtcttttttctctcttagaattggaggatttgccattgtccaggaaagaaacttgcagctttaacctgctgggaatggcaaacgattttactagactttatgtttaaaaataaataaataagggaaattcctaactttgccctccaaagtctaactttggttttcttgttaactggttaaagtgacagtatcttttttccttatctattctattcaaaatgacctttgatagaaatgttggcatttagtagaaatagtgataagttgaggaaagaaataatacaaattggctttcaagtgagacccaaaggaagaactggataaaatcttccaaatccaaaagcatgagatttttctatccaaatatgcaaaaatgacccaagagaactttcttattttgctactgagtcacacaagggaagtggaaggaagaacagttaatttaagaatgaaactataaatcctgatgcctgggggtcaagtattttaagataagagggggaaaaacacataaagtcaaacaaatgttttaaaaattcataacagcaaccttgaaaaaatagacttaaatgaatgcttctagaaacttccagcggctcacaaagaataagcctgccttagggctggcaacatctaagcctctaacagcacagggaagcaaatatcttaccaggcagcctatgaattaacccaaagaagctttggttggttttggtggatttttatcatgccatgttggacatgagattttttagatcttccttcccacattgctagacgtctcactcaaagacatttgttgggagtcacatttgcatcatagacgagacagtccattcatcttagttaaattggattgagaatgccttttgtttccaggaaaatattgatcaccatgaaagaagaatagttttttgtccccagagacattcatttagttgatataatcctaccagaaggaaagcactaagaaacactcgtttgttgtttttaaaggcaacagacttaaagttgtcctcagccaaggaaaaatgatactgcaactttaaaatttaaagtatcttgcactgataaatatatttaaaaattatatgtttataaagttattaatttgtaaaggcagtgttacaaaatgttcagtttatattgttttagattgttttgtaatttttaaaggtgtaaaataacatattttttctttatggaaatctataaaactttctgtagtaaaatgttttcattttactggtatattattgcttcatgttttgtaccatcataagattttgtgcagattttttttacagaaattattattttctatgacaatatgacacttgtaaattgttgtttcaaaatgaacagcgaagccttaactttaaatgacatttgtattctcagacactgagtagcataaaaaccacatagaactgaactgtaacttaaattccaaactatgactactacattccaaagaaacagttgaattaaacattttcataaaata

SEQ ID NO: 2236 - DNA, 17 bp, Homo sapiens
aatacgaaatgtgacag

SEQ ID NO: 2237 - DNA, 431 bp, Homo sapiens
tgtcgctctcctccagcgtggtgtgagaagatcattgccatcaccatttggtgtgttcctgtgggaaaaagcaggactgtgcctccataatttggtcatttggcagcccctgttttctgctgtttacaacatcaccagtgccacgtcatgagcgtcaaagaaaatgcctagagatatttcaagctcatgtcattatgacatttcttaaaactttattaaaagaatgagtgaagtattgctgaaaagtggaaattcggttgggtaccatgctttttctccccttcacgtttgcagttgatgtgtctttttttttttttttaatgtatcttaaaggacataaaatttaaaaacttaaatattgtaatatgacagataacctaataattgtatctacattaaaatgacaaacatgatactgctgcttgtcaaat

SEQ ID NO: 2238 - DNA, 1096 bp, Homo sapiens
gcggaggggagggggcgcccaggaggggtggggaggggggcgaggagagccaagtgcagcgaagggacacttgatgggctgaggttcccaccccttcacagtgttgattgctattagcatgataatgaactcttaatggtatccattagctgggacttaaatgactcacttagaacaaagtacctggcattgaagcctcccagacccagccccttttcctccattgatgtgcggggagctcctcccgccacgcgttaatttctgttggctgaggagggtggactctgcggcgtttccagaacccgagatttggagccctccctggctgcacttggctgggtttgcagtcagatacacagatttcacctgggagaacctctttttctccctcgactcttcctacgtaaactcccacccctgacttaccctggaggaggggtgaccgccacctgatgggattgcacggtttgggtattcttaatgaccaggcaaatgccttaagtaaacaaacaagaaatgtcttaattatacaccccacgtaaatacgggtttcttacattagaggatgtatttatataattatttgttaaattgtaaaaaaaaaagtgtaaaatatgtatatatccaaagatatagtgtgtacatttttttgtaaaaagtttagaggcttacccctgtaagaacagatataagtattctattttgtcaataaaatgacttttgataaatgatttaaccattgccctctcccccgcctcttctgagctgtcacctttaaagtgcttgctaaggacgcatggggaaaatggacattttctggcttgtcattctgtacactgaccttaggcatggagaaaattacttgttaaactctagttcttaagttgttagccaagtaaatatcattgttgaactgaaatcaaaattgagtttttgcaccttccccaaagacggtgtttttcatgggagctcttttctgatccatggataacaactctcactttagtggatgtaaatggaacttctgcaaggcagtaattccccttaggccttgttatttatcctgcatggtatcactaaaggtttcaaaaccctg

SEQ ID NO: 2239 - DNA, 2644 bp, Homo sapiens
atgttagaagccttcatacacttgtgaaattggttatacagtttcaaaaaaggagatcagagaaagccaaagaatgtcagaaatttgtagaaaatgacttcttgtttgaatatgtaaaagctttcaagaaaaattaaaacttttcattagaaaatttgtactgaggggaattctattcatctaagtaatatggtgaaaatatttatctggaatttatgttgtttagtgttatattccagacgtgataccaaaattttgttgcaaatataatggacaatatttatttatacccatattcacagtggaatctgaagcttataaaagttgaatgacagcagcattaaacatatatgtgaagagtccccgatgtttgtagaccttatgtgagtatgcaaatatataaatttgagtatgcttgatttgtatattggaactcaacatgatcataaggagaagatacgtacccttaattgagtaactactatggtatttgttaatattttctacactaaataccattggtgtctttataggttgacataattatatatgtgtatgtacatatgtttgtgtgtatatgtaaatatatttctacacacatacttaaatatagtgatgtgctagtataacctcatactgacttaaaagttctgattgttaaattttaaggaattttgtgagccagttattaaaagcagtcattatttaaaatatgtaaacttacagttaaaaacaaaggtaataaatactcagcactcatcacttcctaattattttgctacatttcactattacctttgctgttttacttatttaatctgtatgatgaaaatactgtataatagtgtgcactgcacatctgtctcttcccagctccacattcagtgctgtcttggtagcttggacttagtgggagtgtttacaccatggaaattgacaaactataaatcagggttttaattttctcagagaacctgctgtcaaatatttacagcacatcactgtgtatatatgaaaacgtatttggcaatacaaaccacataccccttctatttcctgacataaataaatggctatggccatttacagctgaaccacgtcttcaagaaagaagccaaaaatatttccgtgaggtttttaactacctctgaatctgtcctactctaaatactaccggagtctctttgtaggttggccagtatatgtttttagtgaaatattatttcacaaagaactatatcacgtacctttcctctgactgtttcctggcatatatgcatgaatatggccattattgaactatcacttcagtaaagaagttaaacagtacttttctgaggtttttcagctacctctgggtcattctgtaatgtaaatgttgttaataagaatggtttttacataaattatgcaaaggttaacaagcagtaacactgcactcctcaaaaagtggcggtatgtaatgaaaggcccttttgatatccttgatttttcattgtgtatctgtttgggcacggtctatgtaacactagttctgcgtattagtattttagagtatctctgcctcccttgtcctgttgtttcttttgcccccttggaacacattggtcagcagttctaagagacactgcccacatgatggccattccctacttcatccttgctgagctaaattttatatttttgtgcatccttctcccagatgacttaggtggtaagtccagattagtcaaagctaatcatggaagttccattttaatgattctgttggggtgaacttgggagcaatgagatgtttgggaagtattgtgtagtacttctgggaaagatctccttgatacaacattgtcatgacatgagaagagactctgctgggctttttcatgtctgtaacatggtattggcttatcgtttttatctctgaagggcagtagcctgaagataacagtgcacaaggtgggaaaagccagctcagaggtgacgttgccgagctactctgctctctatacctgttctctactgggactttttataaccctcaataactgttttttatttggtcttagggctgtctgatacttagagctgaaggcattccagctgacacagaggaatatttttctaagtgttaatgttctatatggtaattagggggaagaattatttcttttcacaagttaatatagggatggctgtttgtatcagccatggttctttctggtggaaaacagaattctccaactaaaaatattttaatggcagactgattacagtggtgtgggccagaaacaagggacagtgaaacacccagagacttgtatcagcaggaagccattgccattctgagccttgaagggcaaggagggaaacagtgttaccagagcccagtaagaactgctgtcatgaaggaggggccaccttgtaagagacatcattactaccagaactgtggtgccaaattgctggtgtctctctttggagaaaccaaccagatacatctgctggagagcccaggtgggcacagagaagggtggagagagaatctgggaagagaaatggagaataagcagcacagtgttattcatttctgtaaattcctatgtagaaggctcagtgttagaaataaagttattctactagttgc

SEQ ID NO: 2240 - DNA, 2260 bp, Homo sapiens
gatgagttgggaaattctcttgactgaattaatccttcaaaacaatcagataattcacacaagaggtacaccttatgaatcgcatcaatagagggaaattttcagctacaatctttgctctctctgtgtatcagcaaatacatagagagattctgtacatttatttgggagaaaattttatcatattttaggcttttctaaatattagataatatagatggcagaagtcatgcaaattgtaaaacaggaaggaaacctttcagaagtcatacttttgttttgcaacatagaagtcacacaggagaaaaatcctgtaagtaaaacgaatgtcaagacattttctgtcagggcagccagctgtagacatccaaaagctcacaaatgagaagctccttgagtatctagaaatctctttacacaattggagctcatgtactagagaattcaaagggataactgcaaagacactggtagatatagaagcctttattaagaattgatgtttcattcaatttcagatcactggtacttggatagatattttaaatatttggaaggtgttcaataaaaattcaaataatttgtactgagggaaacagttatactacaaatcatgttgcagatctgatgccgagattgctctattttaaaaggaaacctgcaaatgtctacatatatgaagcttttaaaaagcacaagttatcaggcaacatcattaaacatacattaaatgtctgttagcatataggattttgtgcgtatgtgagtgtgctataacatgtaacttgcggatgttcagcgtgcatgtggaatccatccataatggtacatagcgaaataatataatcttagttcagtaactattatgtgtatgaagatgttgcacattaagtctcagtagtgactctggttgttaatatttgtattgtaagtgtaatattccttttaaattataaggcatctttttatccttttttgtgtttgtaaatggatatagacagtggtaataactaatccttcaaaaataagttaaaatgtttttgtaaaattttcaaatgtcagtcaagttttgcattagggacacatttatatatagcaaaagcctgagctgtttttaaacagctaaaaacagtagtatttattacaatctccacaatgaaaacaaatagtgcaatgtaagaaatattatgtatcttactgttgatgtgtgagcagggagcagagctatctgcatttgtatttagtgtgagagtcctaaatgttcttcaccaactttttcttcctcatagaagcaacatggcatagttaagggtgtggactctgggctcctgctgcctgggccccgattccagcatggggcatgctacttaatatctctgtgcctcagttcccatcccataaaagagtagtgatagtgacaacatcttaggattgctttgaggtctaaatgagttaacattttcaaagcacttagaatagtgtctgagacacaagagctatatgttagaggttatcatcattatttgtattttgtgaattacgctgcaaaaaaaaaaaaaatgttggctacccaacattcattccccaccttcttgctgccagtgccttgatttggttgtttgttgtttgtttgttttcctacaagtgatttaggggcagatcctgactacactaagtcagggtttgacaaatgacagtccatcagacagatctggcccactacccatttttgtatcctgcaagctaagaatggttttatatttctaaatggttgaaagaatcaaagaatattgtgacacatgaaaattatatgatattcaaatttcagtgtccataaataaagttttgaaaacatgaatacaaacaaaaaacacctatttatgtttgacctgtggctgtctttgcactaccccagcagagttgagtagttgtagcagacaccacatgcccttgagcctaagatctagcactttacaaagtaagtttttctgttacttagagctgaaaataaaagcaatgtagagttacgcttttataagtatttcatgtttcagaaatgatgcatacagcaatttgtaggtgggtggttttttgcagtatatttattttgtgcattatatttatatgttaagagcctgagcttagaagtatttttttcaaagaaatgtgttttttacttgctaaattgtcataacatcaaaacaagaaatttcttgatggaatgtagcagtaaacatatgaaataaacattgtctaaatt

SEQ ID NO: 2241 - DNA, 3506 bp, Homo sapiens
attggatattagaaatttccagccacaagtcagcctccataatgcctcagagtcttcacactgtggagaagggcctgttgacatcctgaatgttcaataactatccacaaactcgccttatgttactccaaagtaacagtaggggataaacccatagactacaacaactataggatggcttttgttaggaagtgatattctgttgaatatcagatggttaatactggcataaaacctcacagatttttttgaatttgtgaaagtttttggcaaaactacaaataggattatgttagcatttacactgaggagaaaattgtcaatttaagaaatctaaagtgaaaattttgcttagaaataaaatatgacaagttctgttttgagtttgatgccataatagtttttaaggtatctaacaataatttatagatgtacattgtggaatgtaaagctttaagaattttttaagaagtaataattaaaataacctcacaagaagttgtaatgagtacagagaattcccgtgtacccttcaccaagcttcctctaaggataatatataatcatagtatatggtcaagtccaagaaatcgatgttaccttgctagtagatgcagacttactcagattttgctatggtttgcgtgcactctgtgtgtgtacgtgtatgtgtgtgtgtgtggttataacaaactggtacttttacatttgagtaaccatcaacacaattagtttacagaatggaaaaggagtctgagatctgtactgtttcaggattacaaaggaatcaggatttagcctcaagtagttcccttgttgtattaataaccacaccctttctgcatccctgtccctggcatccacttgactatgaagctttttgtaaagcatagataaattgaataatcagggcaacagcattaagcacatctgtgaattatccctgaagttcataggacttacatatgtacaagtggtatgtgatataaatcgtgtgtttcatatgcataatggtatttaacgtaattgtgaataggaagtaggtatcctaatttagtagtggttacttcatcaggcccatcccaggtgtttgtcgtgtcctgaaacaatttaaatagagacccacagagctaatgtttatccatttaaaagttataaatcaaaataacagattatctgaaaaaaaatctatcctgtacgtgtgaagatctaggcctgcctccatgttactccctttctcttactacctgtggctcatcccatgccatgaactgcctggggtacatatgtgaacactccagccttcagcgtaagtgatagtccaaattttctttaagcagctgctctccaagacagggccctggaaagaggcccacacatacagcccagttgctgcccagggctgttggactgtcatttcattgctcattgtacccagacagggatctgggccttcagagacttttgagaatatgaagaggagggttgaggctggagaagagccagaatcaagctggcatggggcttttattgacagtgtgaagattgtacactacattacatgatcagatcatacaaataatctaagattttacagtctggtgaccctagattacacaagtaatctaagcttccactttggaaaactagaaaaagaagagcaaattaaatccaaagtaacctggaaaaaaattagagtaaaaatcagtgaaattgaaaagagaaaatcaataaaacccaaaactgttctttgaaaaggtgggtaaaattgataaacctctagctagattaagaaaaaacagaagacaaatactgctaataccaaaagtgaaagaggccatcatagctgatcctatggtcaccaaaaggattagaaagaaatatggacaactctgtccataaatttgataacttagctaaaatggatcaattccttgcaagatgcattctctcaaagctcataaaaggtagatctcagtaggcatatatatctattaaataaattgaagcagtaattaataaccttccaagaccaggcgcggtggctaaaaatacaaaaagttagccgggcgtggtggcatgcgtgtatagtccaagctactcaggaggctgaggcagaagaatcacttgaacctgggaggtggaggttgcagtgagccaagattgtgccactgtactccagcctgggtgacagagtgagactccatctcaataaaattaataataataaaaccttccaaaaaaagtgccgggaccaaatggattcactgatgtgcatttttcgagatacttaaggtagaaatgataccaagtctgtactgtctctttcagaaaataaaagcagggataacacttcccaaatcattttgtgaggccaggattaccctaataccaaagccaggcaaaaacattacaagaaaggaaaactacagatcaatatttccagtgaacacagatgcagaaatccttaaaatgttagcaaatcaggaatgcaagccttgttcaacatttgatattcagtgcaatccattgcatgcattagcagttcaaagattaaatatgatcatatcaataggtacagaaaaagcatttgacaaaatccaatatccattcatgataaaacctctcaacacagaaggaatacaggagaacttactcaatttgataaagaactactacaaaaaaccctacatctagcatcatccttgatgtttccaactaaatgctttcctactaagatcaggaacatggcaaggaacaccactgcttttcagcattgtactggaagtgctatctaatgcagtgataccaaaaaaaaaggaaataaaatgcacataaatttggaaggaggaaatacaactgtctttgttctcaaataacatgattgtctttgtagaaaattctaaataacaaaaacctgctgacattaataagcaattatagcagggttgtagaatgtagtcctcaggtatatgataaaaaagaattagacatcaagtcattaaaagacatataggaaccctaaatgcttattgttaagtgaaaaccaatctgaaaaggctttctatgttgtatgattgcaattatatgacattctgggagaggcaaaactatcgagcgagtcaaaggaccagtggttgctgagagttgaggggaaaggagggatggcaggtaggtgatttttaggacagtgaaagtactctgtagggtactgtaatttgtcaaaatgcagagaatggaaaacagtgaacggaaaacacagagtaaaccctagtgtcaactctggacttcagttaataacagtgtaccactattggctcatcaattgtaacaaatgaaccataatgatgcaagatgttaataattggggagcctgtggaggatgggagggttaaaggtttatatgagaattctctgtactttttgctcaatttttctgtaaccctaaagctgctctaaaaaatgaagtgtattaagtaaataaataagtaaataaccaaccaacc

SEQ ID NO: 2242 - DNA, 1708 bp, Homo sapiens
ggcggatgcagcccgcgacgccagaggaagcacgtgcactaactgggtttaaattttgactgatgtgggttgagatgaggaggcctcactggttggggtccattttgtatataacttttatgagaaaaaaatggtaattatttcacgcatcaacctttggcacttacaaagttttttttgtttattttaaataacagggcagggccctgctttggggagggggaggggagagtatcatgggagatggtatccatgataacatcttattctaatgaaatgtagatttttattttctacttttgattattaacatcttatgaaaaaaatattttaaaaaacccagccaaaaccaacgtgagccctgcctgctcggacgcctttccagccagtgtctctgacgtcggggttagtgccttagagggtactggggtctggtcttcctgctctgtggtttgggctgcggtgagtcccactccacctgggcgcctgccctcaggagcctgggctgcgaggctccataggagggctggtggctgggaggtcgcgtccgcacacttctggaagtgagcctttgagtacgggctgtccaaagtttacattttcattttcctttcagggatttgtggggtcagggaggggcagggggcacctggcagcatattttctgtgacaatgtgtccagcaaatcattcttcaactacattttagaaaggaggaaatctaaaataaggtaagggagggaagcatggagttgtcagttttctgggctgtgactgaaagacacactgagctgtgatgaagaaaaatacatggccgactccagggtggtgacatttagagctagtcttgaaacctatcatctacagaggggagggcagccaacagccctcttcccacctgggtaggcagcgccctaattggaattggaaacagaaaattcgccaggccatactgctggagcccattcagataaaactgcccaatactgagaggtgttttctacacccagctagaggagcacactccattttcccatgtctgacttcgtggtgtgagccctgggccctactgaccatggcgcaggacagctgtccttcagaaagcacacggtcaatccacgtggaccgtctccctcgcaggaactccgcatccttgtccctctgcattcccagtttccgcaggagccttgatcaatggggaagcctgggtgaggatgggccaggtcccaattcccaaagctcctggaagagcctgaagacattgggaaaggctgggcctggggaggaggcagccctgggcccgctgcccatgcctctggtcctgggtggagcaggaatagttccactgtattgtcacagtgtgtttgcactttctgaggttctagctagtacagattgtatattgatagtacatattgctttgtttatgtctttgagatgagaaaggcttaaaacttgagaatatatatttggaatacagccttagaacggtttctgtacacacccacgtgcacttcacgggtgatcagttctagtacctacttgaaacagtgtctgtctgctactttattttcccaatttgatacataccctgatttgatgttttggtatttgagatgaactctgagtatgaagctgtaccataatgcaggacgtcagttttggtgtgactggacatacttgcttcaataaaagaatacatcactccc

SEQ ID NO: 2243 - DNA, 1020 bp, Homo sapiens
ttttgttaggaacatttgagttacttcaatcattttcacaggcagccaacaagcaattaagagcagttataatagaggaagctgggggacccattttgcaccatgagtttgtgaaaaatctggattaaaaaattacctcttcagtgttttctcatgcaaaattttcttctagcatgtgataatgagtaaactaaaactattttcagcttttctcaattaacattttggtagtatacttcagagtgatgttatctaagtttaagtagtttaagtatgttaaatgtggatcttttacaccacatcacagtgaacacactggggagacgtgcttttttggaaaactcaaaggtgctagctccctgattcaaagaaatatttctcatgtttgttcattctagtttatattttcatttaaaatcctttaggttaagtttaagctttttaaaagttagttttgagaattgagacacaatactaatactgtaggaattggtgaggccttgacttaaaactttctttgtactgtgatttccttttgggtgtattttgctaagtgaaacttgttaaattttttgttaactaaatttttttcttaaaataaagactttttcacaatgactggcacagattactcagcaaaagatagcaaaacgggtggttgaagataattcattttaatcgtaatgtattttagtgtgaatttaaaaatttcatacatcaaatctatgatctcccttatattcttatgatgaggctaaataaaagtctaataaaaatgttaaatatgtgaatggtggaaatggtgactagcagcacacattctgggaagcatcaaatagacacacggccccagccacctgcaacttatgtgcactgttgtaaaccattcagaattttcctgctaggcccttgatgctggagtcacatctgttgatagctggagaactttagtttcaagtactacattgtgaaagcaattattttgtttctagtttttataaaatgctgatttaaactttt

SEQ ID NO: 2244 - DNA, 358 bp, Homo sapiens
ctgacattagcccattcaggtcttcacagcgctcatactgtaaaaactgttaaatatttagtatcactcttactttatattctacaaaggagagagatgtaagggttatttagatatgttccctcactgaaaaatcactcattcaaaatatttaagtatcaagcactttgttatgctgtacaatgaatggattgttcttgtttctcagatgggtagagtaaaagtgtctgtactttacaattcaactacatgttctacccagcattttaacggcaagaactttatatttattctcaagcagggcatgtttccctttgttcacattctctgagaaattgaaactctggtttctcttcaa

SEQ ID NO: 2245 - DNA, 190 bp, Homo sapiens
ccactttcctgaagagaagttctctttatgaattaagagtacaaaatcctctgagatgaagcaacctatccagttctatggaatgaatggagaatctttcagaaagaccatcattgggtagggcaaactgatttttttcctttcccccaaaagagtatgaaaaataaatgtcttgtttattatcattatc

SEQ ID NO: 2246 - DNA, 3169 bp, Homo sapiens
gagggtcagacgcctgaggaacccttacagtaggagcccagctctgaaaccagtgttagggaagggcctgccacagcctcccctgccagggcagggccccaggcattgccaagggctttgttttgcacactttgccatattttcaccatttgattatgtagcaaaatacatgacatttatttttcatttagtttgattattcagtgtcactggcgacacgtagcagcttagactaaggccattattgtacttgccttattagagtgtctttccacggagccactcctctgactcagggctcctgggttttgtattctctgagctgtgcaggtggggagactgggctgagggagcctggccccatggtcagccctagggtggagagccaccaagagggacgcctgggggtgccaggaccagtcaacctgggcaaagcctagtgaaggcttctctctgtgggatgggatggtggagggccacatgggaggctcacccccttctccatccacatgggagccgggtctgcctcttctgggagggcagcagggctaccctgagctgaggcagcagtgtgaggccagggcagagtgagacccagccctcatcccgagcacctccacatcctccacgttctgctcatcattctctgtctcatccatcatcatgtgtgtccacgactgtctccatggccctgcaaaaggactctcaggaccaaagctttcatgtaaactgtgcaccaagcaggaaatgaaaatgtcttgtgttacctgaaaacactgtgcacatctgtgtcttgtttggaatattgtccattgtccaatcctatgtttttgttcaaagccagcgtcctcctctgtgaccaatgtcttgatgcatgcactgttccccctgtgcagccgctgagcgaggagatgctccttgggccctttgagtgcagtcctgatcagagccgtggtcctttggggtgaactaccttggttcccccactgatcacaaaaacatggtgggtccatgggcagagcccaagggaattcggtgtgcaccagggttgaccccagaggattgctgccccatcagtgctccctcacatgtcagtaccttcaaactagggccaagcccagcactgcttgaggaaaacaagcattcacaacttgtttttggtttttaaaacccagtccacaaaataaccaatcctggacatgaagattctttcccaattcacatctaacctcatcttcttcaccatttggcaatgccatcatctcctgccttcctcctgggccctctctgctctgcgtgtcacctgtgcttcgggcccttcccacaggacatttctctaagagaacaatgtgctatgtgaagagtaagtcaacctgcctgacatttggagtgttccccttccactgagggcagtcgatagagctgtattaagccacttaaaatgttcacttttgacaaaggcaagcacttgtgggtttttgttttgtttttcattcagtcttacgaatacttttgccctttgattaaagactccagttaaaaaaaattttaatgaagaaagtggaaaacaaggaagtcaaagcaaggaaactatgtaacatgtaggaagtaggaagtaaattatagtgatgtaatcttgaattgtaactgttcttgaatttaataatctgtagggtaattagtaacatgtgttaagtattttcataagtatttcaaattggagcttcatggcagaaggcaaacccatcaacaaaaattgtcccttaaacaaaaattaaaatcctcaatccagctatgttatattgaaaaaatagagcctgagggatctttactagttataaagatacagaactctttcaaaaccttttgaaattaacctctcactataccagtataattgagttttcagtggggcagtcattatccaggtaatccaagatattttaaaatctgtcacgtagaacttggatgtacctgcccccaatccatgaaccaagaccattgaattcttggttgaggaaacaaacatgaccctaaatcttgactacagtcaggaaaggaatcatttctatttctcctccatgggagaaaatagataagagtagaaactgcagggaaaattatttgcataacaattcctctactaacaatcagctccttcctggagactgcccagctaaagcaatatgcatttaaatacagtcttccatttgcaagggaaaagtctcttgtaatccgaatctctttttgctttcgaactgctagtcaagtgcgtccacgagctgtttactagggatccctcatctgtccctccgggacctggtgctgcctctacctgacactcccttgggctccctgtaacctcttcagaggccctcgctgccagctctgtatcaggacccagaggaaggggccagaggctcgttgactggctgtgtgttgggattgagtctgtgccacgtgtttgtgctgtggtgtgtccccctctgtccaggcactgagataccagcgaggaggctccagagggcactctgcttgttattagagattacctcctgagaaaaaaggttccgcttggagcagaggggctgaatagcagaaggttgcacctcccccaaccttagatgttctaagtctttccattggatctcattggacccttccatggtgtgatcgtctgactggtgttatcaccgtgggctccctgactgggagttgatcgcctttcccaggtgctacacccttttccagctggatgagaatttgagtgctctgatccctctacagagcttccctgactcattctgaaggagccccattcctgggaaatattccctagaaacttccaaatcccctaagcagaccactgataaaaccatgtagaaaatttgttattttgcaacctcgctggactctcagtctctgagcagtgaatgattcagtgttaaatgtgatgaatactgtattttgtattgtttcaattgcatctcccagataatgtgaaaatggtccaggagaaggccaattcctatacgcagcgtgctttaaaaaataaataagaaacaactctttgagaaacaacaatttctactttgaagtcataccaatgaaaaaatgtatatgcacttataattttcctaataaagttctgtactcaaatgtagccacc

SEQ ID NO: 2247 - DNA, 1570 bp, Homo sapiens
gcacaacagccaaaaaggactttccgctagacccactcgaggaaaactaaaaccttgtgagagatgaaagggcaaagacgtgggggagggggccttaaccatgaggaccaggtgtgtgtgtggggtgggcacattgatctgggatcgggcctgaggtttgccagcatttagaccctgcatttatagcatacggtatgatattgcagcttatattcatccatgccctgtacctgtgcacgttggaacttttattactggggtttttctaagaaagaaattgtattatcaacagcattttcaagcagttagttccttcatgatcatcacaatcatcatcattctcattctcattttttaaatcaacgagtacttcaagatctgaatttggcttgtttggagcatctcctctgctcccctggggagtctgggcacagtcaggtggtggcttaacagggagctggaaaaagtgtcctttcttcagacactgaggctcccgcagcagcgcccctcccaagaggaaggcctctgtggcactcagataccgactggggctgggcgccgccactgccttcacctcctctttcaacctcagtgattggctctgtgggctccatgtagaagccactattactgggactgtgctcagagacccctctcccagctattcctactctctccccgactccgagagcatgcttaatcttgcttctgcttctcatttctgtagcctgatcagcgccgcaccagccgggaagagggtgattgctggggctcgtgccctgcatccctctcctcccagggcctgccccacagctcgggccctctgtgagatccgtctttggcctcctccagaatggagctggccctctcctggggatgtgtaatggtccccctgcttacccgcaaaagacaagtctttacagaatcaaatgcaattttaaatctgagagctcgctttgagtgactgggttttgtgattgcctctgaagcctatgtatgccatggaggcactaacaaactctgaggtttccgaaatcagaagcgaaaaaatcagtgaataaaccatcatcttgccactaccccctcctgaagccacagcagggtttcaggttccaatcagaactgttggcaaggtgacatttccatgcataaatgcgatccacagaaggtcctggtggtatttgtaactttttgcaaggcatttttttatatatatttttgtgcacatttttttttacgtttctttagaaaacaaatgtatttcaaaatatatttatagtcgaacaattcatatatttgaagtggagccatatgaatgtcagtagtttatacttctctattatctcaaactactggcaatttgtaaagaaatatatatgatatataaatgtgattgcagcttttcaatgttagccacagtgtattttttcacttgtactaaaattgtatcaaatgtgacattatatgcactagcaataaaatgctaattgtttcatggtataaacgtcctactgtatgtgggaatttatttacctgaaataaaattcattagttgttagtgatggagctt

SEQ ID NO: 2248 - DNA, 21 bp, Homo sapiens
ttatctgccacctcgagatgg

SEQ ID NO: 2249 - DNA, 1131 bp, Homo sapiens
cccctccccagtaaaggcttctgtagagagcatgctgggtctgcatctcctctcgtctcctccatggtggtcactgcccctggcaggtctctgaaagggaaatgcttttctgcagaggcccctgcttgggcagttcacagtgagaccgaccccctctgaatatgataacagcctgtttcacatgaggagatgttaccaatcccgttcgctctgacccttgctggctgatcaccttgagcaacttacttaacatctgtgttcctcagtttctcatgggtaatatagggataattactggcacctgcctcccaggccattctgacgtgtaaccgcatataggagcccactggctgagtagctaccatcatcgctggtggggaaactggtggtaggggtgtgagggtagtgggggtgtcagccccccaggtgtttcagaacaaggcctcgggcactcccaagtctgcctcttggctcccaccctcaaagcccatgttctgtgaggcccaagagaacacatggagtcttagcaaatgcactaatgtattccgggggactgtcacctggcaccactggggcactctgctggctacaactcatacgtcctgtggtggcattgggagagttcccccatgatgagggccaagatagaatctgtaccactcagtgctaccatccccacccctacaccacttccacacaggggcctcatggcatggtcagggtcccagctgtgggtgagagcagggcactgtccagctgtccactggggaagtcaagatgtcctaaggcccaggtcagggcatctggagtctgaaggaccctagttcctagaggcatctggcagcaagaaggtgaggcatcagggaacgggaatcaggctgggactgatcagaggtgaagggacagagagaggagaggaggaagattgagctgggggcaacagccaagctcacctgggcaggtctctgccacctccttgctctgtgagctgtcagtctaggttattctctttttttgtggctatttttaattgctttggatttgttaaatgttttctgtcttctgttaagtgtgttttctctggagatagaatgtaaaccatattaaaaggaaaaagtttcagacaagcaa

SEQ ID NO: 2250 - DNA, 782 bp, Homo sapiens
cttgtgtcttctgaagtttttgtccttggagactgcagttttagtggagtctgatgagcaagtttctggactgggaggtaaatagacttgttttttctaacccagcagaacctgtgcatggatgagctgggagtgctggttccctgagacttggtgatggggggattgcggtaggtgtgacccaccagcctctgagacaccagatctcttggtctgactccaaggtggtgtcagtgctgagttggcagagaaacacagggcctaggaggagaaaagtgttccttgtgttttcaactcatagccacatcaaacattttccttttgtatgtacaacactcagggtgtaaattctaaaatcacacctagaattcagctgtgtgggtctaaaaagttaggcagaattgtggaccccacagcccctgaagggttgtcagactgaagctttgttttaaggtgaccactggcctctaggaaaccttctacccccattatcttacctcaactgtttcctctggagccacttggacttcaaaaatagtttgattttaatgcaaactgttgtttctgcttttgtcttttcttcttactaacacttcagattctgagtatctgacctacctaattggcctggagcgaggacagctgccatgagtcagctctaataagttaaacggcattgtagtaaggcattgctatccttccattgtttcagataaaactgggtgaacgaatcctctgtgtctaataaagacaggtcttgtgcttgtgctccatgctattac

SEQ ID NO: 2251 - DNA, 870 bp, Homo sapiens
ttgtgtgcgggttgtcattttcctggacatccatgaagagctgaaggaaattgtttactgccaattgtatacctttcttatgtcctttaatagcatagactggacaggtgactatttatagtggcttctctttttctaaaccctccttagtctcctagaaaaccttcctgtgggccaggcatgcctgggtcctgcctctgcctggcagctctgtgggaaagtggaagaccccatgatgacatcatggggagccagcagagttcctgcccatggtcttgagctgaatgagagaataaaatgccaatcccaagggaagaggaggagcaggggtgcccaggccctgatacccagccgcctccagcttgcagtggtccccagcctggagcagagcattggggagtgtctagccatgacgagaagattccctctgcatcacggcgaaccccaggagatggtattgaaacagacccccaaacacagactcctgcctgccctctgccgatgctgcctcctccatgctcttgagcaggtggagccatggtgctctgtggtggcgcatgattcactgagcaaacagcactttacagaagaaaatctttattttgtaatatgtgtgtccagcgggattgacactcaaaaaaagtctcacttagaaatcttcccttccttacctttgtatctcctttacatcatgagagatcaaaaatccattttgccttacatatgctaagaagcgtggcattctttctgttcataaaacagactcatgacttttaagacaggacaagcaggccagaggctttttttttaatcacagatctcatgggaattagtggatgctaaatggcaattaaagcatgattcctatgc

SEQ ID NO: 2252 - DNA, 840 bp, Homo sapiens
ctcttcctctacatcttactgttctgcccgggattcgtattataatgacagaagaaatgttgtttagactattatttttgttcgactctaaaagatttgccaaataacaaaagcatacaatgcatactgttggagaacaagaatgctactgtattttacatctttatttcttggtgaaacaaaagttttaaaagtagttttaacaactttacactggaatgatttagctttgttattgcatgtcttgtgttaagtgttttgtatatgatattgcagttttactaggcaaatcttcaaaagatgcactttaggaaacgaaatatttcctaaataaccaggcttccacattgtacagaatgagcagtcatgtaatgaatggctctactcagattgaccatatgggttttttctttttctttcttttattcttctccttctttttttttcagaggtgggatgggtggagattttttaaaaatcccacgtgtgaaagtttactggctttattagcaagttcctttttacttcaagctactttttataaaaaagaacatttttccagtgtggtttttaacagataatacatttcttccacattcagattagtattcggacatgaatccattctataaaacacatcgtgttcatgatagtgtatattttactactttttgaatgttaattttaaaatagaagatgtcccacttgccattaaatatagaagccaactttttaccttttgaaatatggctacatttaaaacaaaatctcacagctcggtttttcttatttgttgagtgctattaccaggagaaattcaaataaatattcaatttcatt

SEQ ID NO: 2253 - DNA, 313 bp, Homo sapiens
tatctgttttatttgactgcagtctccttggtgcaaaaacaaaatgggaaaaataaggataactcagaatttcaaaaggaaatcacaaattcagctaataatagcattttcagtacttttcgtaaactaagtaaatacacaaaatgttgatttttctgaccataagacgtattttatgtccttttgccaaggtggatttgttagtctcaggccctcctggccacattgcccaagtcacacaggcttctgtattatgtatttagataaaatgtgtgaaaatatatttgaaataaagttcataaatatgcattga

SEQ ID NO: 2254 - DNA, 1610 bp, Homo sapiens
agttcttcggaaacttctgactttggattaagaaagacttctgttgcctctcacttgaaattaccaagtgggtttgcacctcctcataaagaacatgtttgcactgtgctgaagggctttgctatgcatacaatctgctttcttggtttatcagtttattttctttctaaaagctccctgaagggcaatatcatttggcttggggtgatcagtgtttacttattgatcttgctagacaatatcaaaataacttcccacattttccagtgaaacagatgttacataaaacgattgcagcttggctatttggttgaagggattacagagcccaataaaggatttaaaatatattcattaagattttatttggaaaggtggctggagagagctgaggatttccaggactttgtaagttcttattctgggagaacataaggccaataatcatgacctcttccaggcatttttaagacagatgtctattcatgttctttagctagagcctgtactttttgctggcatttgaataacccagtttaaaaagagtccagttagggtggactaactttggacacaaattggcttccatttcctacattttcatactgctgccttcctacagctgctagaccaagacctgttggtctgggaagcatttcatggatagggagagctcctctcggtgaacagtccaaaactaaaatagatgtttatatagaaagcccaagaggagatttttgccatgcctgagttctttcctatcccaccctaacacttaacatattacttagtctgctttgttaaaagcaagtattacctttaacttgcctcttactctttgccctttagctaactaataaagtttgatataggcattattatataattctgagtcattcatggtatatctcatgtttgatgtatttttcaaactaagatctatgatagttttttttccagagttccattaaatcatttatttcctttactttctcacctctgttgaaacatttagaaactggatttgggaacccaattttggaaaaccagattcatagtcatgaaaatggaaacttccatattctgtttttgaaaagatgtggccattattacagtaattttattataggactttgcctcgtacaattaatagtgatattttggacaaggagttctggtgacaagctatacctaattataagctataaaacaatagatatgagtgtttgtacagtttaactcaatggagatcagaatattctatgtattgagaaaatgtttaatatcaatctataaatcttgaatttctaagaggcttattttgttcttttggctgaatgagtatatttgaattggttgaataattaataattctcattgtaaaaataattatatgccaaaaatatatttgatgttaaatcaaatagatgattctgtttacattgttcatatgaataataatctgtgttaatttcattttgataattggcctttaatatttgtatctctaattttattttctctctgttactgtaaaataatagctataatgtataacaattttcttcagaagaattctatgctattattaaaataaaatatttactgtg

SEQ ID NO: 2255 - DNA, 3442 bp, Homo sapiens
cccttcgcccagcaccgcggttccgctttgggagccgaccatcctcgcagttgcatgtgacagccacagccacacgcatggacgtttcatccaacagctccccgagctgccagccagcccgagccaggaggacgtgagtgctgatatgcaggagagaagaggggacaaagaagccctggcccggtcagcggctctggccatacagccttccgacacactccctcctccttatctgcggggctgcctgggctcggaatcccggctcctggtcctcacagccctgatttggaccagaatctcagatgctcagaagaaagatcctgtttagtgatgacccagctctacctgctgaatggacctgcagggtaaacttgggtgcctccatctgggaaagctgatgatgtgttcatgcagtcgatgaccctcactgctttttcagccagggtttctctgccttctgcctggcagagaaaacacactgctatggggaaaatcacagggagggcgctgtgaccagcgcactcaggcaccaagtgtcggcatggctcactgtgctgggtgaaggcctccccgagcattaggtcctccacggggctgtgtcaaatgccctcccacattgtgtcaagtctgcccatggcccaccctccccacagtccaaaaccacacagccctggttctccagctgttctgctgctgtttctgtgctctccctgattaagagcattcagttcctgggctctccctttgagcaggaaatggtgaaagcatgtggctatggtatagcccacagggctgagattgctgtgttgcagtattgatgtaaaatttgttaagaaggaagtacccacagatcactgccatcaactccccagaagttgcactcaagctagtgagcagcccttgtgcttgtcacagttactgtaacaggtagtgtgtatttgcacctggcatcgtgcagcctgcacgtcaacacgttgttttgtgtaactagaacagcacatggaaccactatctctttctcttttttccttctttttcttttttttttttttattttaattttttgagacggagtttccctcttgtcacccaggctggagtgcaatggcgtgatctcggctcactgcaccctccacctcccaggttcaagcgattctcctgcctcagcctcccaagtagctgggattactggcgcccgccaccatgcctggctaattttttttatttttagtagagacggaattttaccatgttggctaggctggtctcaaattcctggcctcaggtgatccacctgcctcagcctcccaaagtgctgggattacaggcatgagtcaccgcacccagcccgaccagtatctttttcttatgcagtgaaacaactttagcaaaagaggcaatgaatgttatactgagtttctacctctttaactccacctccaatttctgtcaatctacaaacacaagtgtcgcctcgcagtgtttcgtatgaacagaatatcttgtgtttgctttttgtcacttatttcacttgcacattttttgtttgtttgtttgtttgtttgtttgttttttgagatggagtcttgctctgtcgcccaggctggagtgcggtggcgcgatctaggcttactgcaagctccgcctcccgggtttacttacaccactgtcctgcctcagcctccggagtagctgggactacagacacctgccaccacgccctgctaattttttgtattttcaagtagagacggggtttcactgtgttagccaggatggtctcgatctcctgacctcatgatctacccgcctcggcctcccaaagtgctgggattacaggcgtgagccaccacgcccggcccacttgcacattttcaaagtagtccgcaaagctgtagtttctaatagcttcatagctcacatgtaataggggttctctgtgtgtttatagagcaggctactacagtggaactgtttctgtttcatctgacatccggatagatgccagccacccccacattccaaggtgagatttctgactagcagtgacttttctagggccgcttggaaaagttgataagtatccttttctgcaggacagagtagactggtatctctgactcatccctgaaaaatctaaatggcaagagactagctggctctctgctctgatggggaggaggttgttgtttgggctgttctctacagacatagtcagggcaaaaagcatacgcatgcttcccatggaccagagaaacctggcctgggttgtctcaaatcctgtccacaaggcaactccagaagaaagaagccctttacatttccataaaacactttagaatcagctagtcaatttccacaaaataaagtgctagaatttgattggatttaattgattatgtagaacaatttgggggccatttgacatcattaaaatattcaatcttcctattcattaacatggtatatctcttcactttaagtcttttgtatgtttctcagaactatttttgtggttttcagtaaagtgttcttgcacatccttcaatagatttattcttagacgttttatatttgtttatggctagtatatacagattctgttgctacaaaactatgttgaccttgttatccagtgagaggctttgtgacattcatttaaattgtaataatttgcagattatttttgtataatcatgtcctctgtgaatgacagttttatttcttcctttcttaatctttatgccttatttagctcttgccaaactgcagtggctgagcaattggacaagataaagaaataaaagtgatccagatcataaagaaagaagtaaaactatatctgcacatgacataatcttgtctatggaaaatcctaaggaatccacacacaaaaaaactactagagctaataagtttggcaaggttgcaagatataaaattggtatacaaattgcagtggctaggacctccagcagaatgctgactataagtagtgatagtgggtattcttgtctcatcctcaatctcaggggtggtgggtgtggcatgtggagagttgtcaatattcaccatgaagtttgatggttgttataggatttttaatgtactcattaacatatattctcaagctgttaaaaagatttttttaattacaaataaggttaaatttctctcaaatacttactctgcaccttttgaaataattttatttttctcctttattctttggatgtgatgacttatactaattgactgttgaatgtcaaaccaaacttaacattcttgtaatagaaaccagcagggtgtgtacacttttgtgtgtgtgcgcaggtttatacacataaacacaacaatacttggacttatttatttaaaatttagatttattagagggagcatggccataaaataaaataaaataaaatttagatttaagtcg

SEQ ID NO: 2256 - DNA, 182 bp, Homo sapiens
attccagttctttgatgaaagtctctattccacccatcaagtctgtgtctgataacaccaatatctgggtcattagtggctccgttttgttgtgtctgttttcccctccttcctgttttgtggtgtgtttgatcacttattgttgaatgctaaccattataataaattttagtggctccagg

SEQ ID NO: 2257 - DNA, 416 bp, Homo sapiens
ggaagggccccataggcagagccccagggcagacagaacctctgggacacacaccaagggcactcctgcaggtggcccggcctgaggttcccaggagcagcaaaggggcctgctgagctctggttaggttacagctggaggtgtgtatatatacacacacacacatgtatatacacatatatatgtgtatgtatatatatgtatatatatatggctttccaataaccacctaaattttaacaaaggttccttctaagtggtagaacttggggtggtatttttaccttccttcttcatactttgctctttttcttaaatactcattaatgtgcatatatcattattttcagatgcagctatcattattccaaaatacaaaataaagaagataaaataaattatatacccgagccatt

SEQ ID NO: 2258 - DNA, 486 bp, Homo sapiens
tatctgcctgcggggctggggaggcaggccaaaggggctccacatgagaggtcctgcatgcccctgggcacaacaaggactgattcaatctgcatgccagcctggaggaggaaagggagcctgctctccctccccacaccccacccaaagcatacaccgctgagctcaactgccagggaaggctaaggaaatggggatttgagcacaacaggaaagcctgggagggttgttgggatgcaaggaggtgatgaaaaggagacagggggaaaaataatccatagtcagcagaaaacaacagcagtgagccagaggagcacaggcgggcaggtcactgcagagactgatggaagttagagaggtggaggaggccagctcgctccaaaacccttggggagtagagggaaggagcaggccgcgtgtcacacccatcattgtatgttatttcccacaacccagttggaggggcatggcttccaatttagagac

SEQ ID NO: 2259 - DNA, 781 bp, Homo sapiens
gaccactccagggtggaaagaagccacgcccagcagagctgccttctcggagccttctgcaaccaggacttgtggtgcagctgcagacacagagcacagctcatgggcaacatcactggggcccagagagagctgtccgccagtgcatcattagggggtctttcattgctagtgactagccccttaaatgccagcctgagtacctgaaggaatctgggaattagccctggcctgaaagtggcccatcattcatacccactgttctgaaggcttgaaaacaaaacatatccacaacattggcttgatgtgatcatcatctcataactgagcaagaagactatgcaaatcttagggcgctcgctccctgcacacggaaagaactctgtttaaatgctcagttcagaacactttgggccacatagtgattttggaaaacaggataatcgtggtgtaaatgagtgtttcctttcaaagtccactgcagagcttttatccatatggtatgcacatgtagccaatattggtttctttttcttaatatatatattttattttaaaacaacaaaaagggagggcgttgacaccattccccacagagatagtcatgctgagtgtgggttgtttaaacatgcatattgaaataacacatatagtaacgtgggaatactaaaaaataaccaagattttatatttttgtaaattatactttctatactgtagattgtgtatgttatgtgtttttatggaaagctaataaattaaaggtacagtggtatcttga

SEQ ID NO: 2260 - DNA, 1610 bp, Homo sapiens
agttcttcggaaacttctgactttggattaagaaagacttctgttgcctctcacttgaaattaccaagtgggtttgcacctcctcataaagaacatgtttgcactgtgctgaagggctttgctatgcatacaatctgctttcttggtttatcagtttattttctttctaaaagctccctgaagggcaatatcatttggcttggggtgatcagtgtttacttattgatcttgctagacaatatcaaaataacttcccacattttccagtgaaacagatgttacataaaacgattgcagcttggctatttggttgaagggattacagagcccaataaaggatttaaaatatattcattaagattttatttggaaaggtggctggagagagctgaggatttccaggactttgtaagttcttattctgggagaacataaggccaataatcatgacctcttccaggcatttttaagacagatgtctattcatgttctttagctagagcctgtactttttgctggcatttgaataacccagtttaaaaagagtccagttagggtggactaactttggacacaaattggcttccatttcctacattttcatactgctgccttcctacagctgctagaccaagacctgttggtctgggaagcatttcatggatagggagagctcctctcggtgaacagtccaaaactaaaatagatgtttatatagaaagcccaagaggagacttttgccatgcctgagttctttcctatcccaccctaacacttaacatattacttagtctgctttgttaaaagcaagtattacctttaacttgcctcttactctttgccctttagctaactaataaagtttgatataggcattattatataattctgagtcattcatggtatctctcatgtttgatgtatttttcaaactaagatctatgatagttttttttccagagttccattaaatcatttatttcctttactttctcacctctgttgaaacatttagaaactggatttgggaacccaattttggaaaaccagattcatagtcatgaaaatggaaacttccatattctgtttttgaaaagatgtggccattattacagtaattttattataggactttgcctcgtacaattaatagtgatattttggacaaggagttctggtgacaagctatacctaattataagctataaaacaatagatatgagtgtttgtacagtttaactcaatggagatcagaatattctatgtattgagaaaatgtttaatatcaatctataaatcttgaatttctaagaggcttattttgttcttttggctgaatgagtatatttgaattggttgaataattaataattctcattgtaaaaataattatatgccaaaaatatatttgatgttaaatcaaatagatgattctgtttacattgttcatatgaataataatctgtgttaatttcattttgataattggcctttaatatttgtatctctaattttattttctctctgttactgtaaaataatagctataatgtataacaattttcttcagaagaattctatgctattattaaaataaaatatttactgtg

SEQ ID NO: 2261 - DNA, 757 bp, Homo sapiens
gcaccttctctgcatgtctgcagtgctgtgtaaaatgccctacctttgcatggactattctttctaatcaagaggcgtgtgtggcgaacttggggcagcccctggaagtcttgttctttgaccattacgtctgcggctgcatcaccagataatgagcttcaccactcgtctgcctcctgtgtccttccgcggggagtaaatgtcacttcagcttgccgcatctctaaataggcaaattttcagtgctcagaaaaggacctgatctttgcacaaagtgctttgatggttgcctgcttgagtcactcccaatcccttcctgaagccctttctttataattcttctgttgaaatagccatcatattcacagtactaatcacagcatctcacatttactaaaaacttaccccataccaggaacccagagttgggggggctgtgtcagaattatgtaatttacgtgtcccaataatcctagacgcttcttgaccatctagttttgtcaaatgagaaaactgaggttccaaagaagtcaataaacttgtccaaagtctgaccgactctgcttgccatgtgacgagtctgtcttagaactgggtcattgccctgcttgcaatgctgtgccctctggcaagcccccccatccccccggtctcctgagctcggtaaggtgctccagctgcttctatcatagcacttcctacatggactgtaacatttctttactgctccaacttctcattaaattgggggctcctc

SEQ ID NO: 2262 - DNA, 354 bp, Homo sapiens
aaggaatggcagagctcacttctgtaccacgtctgctggtctccagccttgtatggagttagaagcgtctgtatctctggagcagccaggcgctctggagccagctggagagagagagatcctgatacctctgtggggactgtggggacttttgggaccccacacactccaggtgggatcagatgctgctccaaccatgcagttcctggtgagggtcagaaggggacggtaccaagagtagcgcttagcccttacccaggaaatatccttcatggccacagaaatggagggcgcccaggatccaggcagccaccgggaacagtcagctttctttattaaatgtgctcacaaagc

SEQ ID NO: 2263 - DNA, 751 bp, Homo sapiens
agtagctgtggcaaaatcttgaagactactcagctaacagaataaacgactctgaagaggagaagcccccagttaggagaagacagagtggcaagtgagatgttctggaaaccaggctcgccggagctggccaagccaccgacttgcttctcaaattcacttcacctcccttagctttagcccacctgtgtgtgaaaatgactttgggaaatatttgatgtggtttttaaaatgtatatagaaaaaaatttaagaaaattacagattatatattatagacaactaaatatttaagactttaagacttaaaaggcttactgcctctacatttcactcagactagtacatctcaatgccagtagtctgtgataaatttatgtaggtataatgagatactgatatggtttgggcatttgtctcctccaaacctcatgttgagatttgatccccagtgttggaggtggggcctaatggaaggtcatgggggtgggtccctcatgaatggcctggtgccatccttttggtaatgagtgagttctcactgtattagatcctgttgaaaattgattgttaaaaagaccttggcacctccctctcctctctctctcttcctctcactatgtgatgcctgctccccttcaccttccaccatgagtggaagcacctataccccaaagccctcaccagaaggaggtgccggcacctgtacagcttgtaagaaccatgactcaaataaacttcttttctttat

SEQ ID NO: 2264 - DNA, 1570 bp, Homo sapiens
tgtgagataaaattgcttgtctttcactggaaactcccagaaagaaaggctggtgcctggtctctcctcatttccctgtcatgaacacctcgcccagcacatggagggtgacttgcgatgatatatttaaaaaataactcccagttctgagaagagccataggagtgttggctcttattatctgtcctgatttccatatgttggttgttttctattgcaaaagtaatatagtgtaatatagttcaattatagaaaacatggaaaaatactgaaagggtttaaagaagaaaataaaaatgacttaccatatctctactcaacttaacatttcagtgcaaatccttcctgtcattttatgcaaattaaaatttaaaacctaatttcaatcttactgtaaagagtgttctgtgactcgcttttctgatattactaaatagtgtgcacattttcccttgttaaatatgcctcaaaaacataatgttaatgatggaataatgttccatcatgcaggtggacctcaatttagcttcctgcttattgttactggacatttgaagctgctgtaaatctttgtcaataaatctccatgaatatccctgaccttagcataaaatcctggaaataagattgccgggtccaaagatctacccaaattaaaaatggacacaatttcaagaagtgaattgacctctaaaatagtttacaaatttatattaccaccagcattgaaaatgccttttccccacggattggtctacataagagtgttggttaattttatgtgttgacttgactaggctaaacgatgcccagatagcaggtaaaacattatttctgggtgtgttcgttctgtttctctgggatcccagactaacacaatcatatactttttgaggatgatgatgataacaatgaatgcctgcaacagtgcctggtacacagttgatcctcaatagatacttgatgaatgaataaaatgttctttgtcaagtgtcattagcaactgttgctgtggatgactttgaagtaggcgtgacttggtggatgtagtcaccctctctgggatgccttacctctctttcccttgacctatttcaatcatacatattttttggggctccacatccagctttcatcttccatcaatgccttctttgggcatgccagcccatggagtgctctcccactggcaacatcttgtagcttctgtttttagcactgtagacacaacattatgtggtcatgccgttgtttttcaagctgctgtggcacagtgatgatgtcaaaaatattatacataaaagagttggccaggcatggtggcttacgcctgtaatcccagcactttgggaggccgaggtgggtggatcacgaagtcaagagttcaagaccagcctggccaacatggtgaaaccccatctctacaaaaatacaaaaattagccaggtgtggtggtgtgcacctgtaatcccagctactcgggaggctgagatgaagaattgcttaaacccaggaggcaaaggctgcagtgagccaagatcccgccactgcactccagcactccgctctc

SEQ ID NO: 2265 - DNA, 1443 bp, Homo sapiens
tacagcgtccacctccaaggttctatttaatacctgccacccagtgatttatgaagccttggagacaaagcccttatgtctgtattttcactcatgccttctgagtggtggggagccccttttcagcagcattctgggtgcctttgaagaggtacaagcctgctctccccaaaagaatcggggccacagctcttgacagatctcccgggacaagatgcgcctgggtttgagccctgagcgtaaggattctgatcctgagagcagccaaggagattttctgctgagccaaaccccttcacatttttctcctctttccccaggttttctttaaaatcgtttttaaatcttaattttactctctactcttcctgtatccacgatacaagctcacagtatatagctagaggaaatgccattatggacccaactgtaagatggcacatatgttggttttccaaggatcagatggcattgccagggccacagccaactgctgattgccagcaccacctgagatggcatctcttgttttaaatagatgcactaaccctgaagattaaggccagaggggcagactgactagagaagtataaggtctgtctctgaatgccatggtgcccacctatgagaccctgaggccgcaggacaagaagaacaccattctagagggcttccagccctttcacaaggtggacctgtactgatagagaaacacactctctaagaagtgcttactcacccttttccaaaggagcacaggtgttggccatcagaagacacactggagcgcatgggcctcttcactgtgtgccaagctcagtcacctctgattcagcccctgaaggtgtctgctgccaggtgccctcagggtaggagagtgggaagtacacgccaagctggaaagtgtgttctgaagaccctcctcttgccaagtgccttgcccattgcaaccttgtgtgtgaattctaatgggtttgaatgggggtcagggtgcatggggaagttgctctgtggacctttgggacacaggaatcttggacttactggcaggggatccattctgaaagcaccatcctgtcaactgtgttattgaggacatttcttgatgtgagtatagtctgggtggctatttactgcccactatagaaattgtttgactatgtagtggaccatgtatatatgataaattatctattttaaacacagctggggtatgagttgtgccctctatatagctgtgtgaacttggctaaatttcttatcccctaatgacctcagactccatgtttgtgtaaagacgacttaacttcccatagaattcttgagggtaaaatgggataatgaatcttgccagttctagaaactgtaaattgctacacaaatgctctgtgttgacattcatgctaaagccagtctgcattttcaaaatgaaaatttcttcac

SEQ ID NO: 2266 - DNA, 152 bp, Homo sapiens
acaacattgcttcctaaactttcaagtccctttttctaacgggcatttctgattattaatttattattaataatcatgtttgtcaatggaagttggctgcacttgatgtttgtttgcatgatgtctacctcagaattaaaactttaaggaag

SEQ ID NO: 2267 - DNA, 135 bp, Homo sapiens
caggtgtcaccacctcctgagataagaaacatagttttatacattatgtacagtgtagcagtggttttgcctagtgttccaattttggaacgtcacataacaatggaacataataaatttttttttctcttcaaa

SEQ ID NO: 2268 - DNA, 563 bp, Homo sapiens
agctgggcaaaacctgtgtaggtctcgctgtgggtttgctggggaccaagggggtgatgaaaaggggaggggcggagctcctgcccaggagaggggctgtggggccccaggataaaacagacacagtgacagggccaagagccagcactgctggccttggtgtcatgccagaatctaccaggactgagggagccagaggagtcctataggcaggctactgtgctggagcatcccccagctgctcccatcttgctggaatttcttgggcggcttctccacctgtatctcaagacagacacccgggggcctgtgtctgtggccgctcccatcccggcagccctggctgctgctcgccccaccctcgcttatctgtagattcaaagcgatgttctcttctgtgctcttagaagtagggagttcagcagtaacagccaggtgaagcgaacctgctgggtgatttgtttgcgctctgttttatggggcattcctgcgagatgtgtcagcttctgtgtgaaatgcagccacagctcatgtgtaccaaagtagaaaaccaaatcacagag

SEQ ID NO: 2269 - DNA, 1059 bp, Homo sapiens
ggagccgagcgaatagcatctcctcccacctcccaccagagacgtcctgtttgagctgtcaggtgtaatatatgaattgacttaagttaatataaatgtgtacataatccacatttgtagtcaaggacgcaatctcttccacacatgtgcagttgtcagttggtacatctaaactccctccatcctgactcacgtggacttagatatgttttgtttctattttcttctatttcagtttttcattctttgatgtttatttcttttgtccatcagatctcttgtgaaatcccatggaaggttgtgctcagcctgtcgggtctctttcttcctgcccatatattataccagttgcttctgcagcccgcagatgccagcgatgccaggaaacaagttgaaatccaggaatctctttaactgattttgctaaaaatctccctgtgagccttccactcaactcttaatatgcttgcattgtttaagtttttaaattctgaaaattaataattagggtttttttcatatgtgttgcataatgcaaacctcctaggttaaaatagtttctttatttaagatagaataatttccagaaattgtacttttgaggtatcatttttatctgtaatggtttgtctgtcttttttcctctgatcagtatttttttataccagttttggagactggctgagatgaaaggaaatgtggaataaaaggaggttttcctgatgtggtgtaaagaaaacagattcaagagaattgaagattttttttgtttcttggtacttttttctttttaaattaggactaatgtttcttttgtggtgcttgaggcatattcatataaccaaagtttgagaactgggaacttcatgctgatttgtacatattgaagtttctctggtattcaaaggttatatagtgaatgaattttcattaataaatcactttgtcagaaactcccatatcatctatattttatatatgtatatataaacgtatgctctttaagtgtgtctatatgtgagcacataaaatctaaataaaattggactggtgggaaac

SEQ ID NO: 2270 - DNA, 414 bp, Homo sapiens
agattttgccaactcatgaatggaggacacttcagtagtcatctagatccttttataagacagtttggagttattctctctcttctacctacaattagtttgaaaaattggagattttgatttgctgtgatgaaaatcctggatggctgaccaagactggcacttgttccagccattagtgagttgaagccaaagccctttggtgactcactgagtaccatggttctgttctcctctggagatcttgcacgtatctgttttcctcccccatgaactagaaaaccacttactcccagaattcaggtcgtgcttgttagtactatatcaccaagtccattcatttaatgatccaaaactgtaatgttgcactgtattccaaataaagggtaaaaacagaaccaaagttataactcc

SEQ ID NO: 2271 - DNA, 1556 bp, Homo sapiens
cagctgtacaaagtggggaaaagacaaattgtccgaagtgctaagaactccatgagagaagatgccataaaataaacacctccctaatcctattatctttcaatggttaccttgacttaacctattgagttacctggtcagcactgtgatctttttttctctccaaaggacctgcgttggacaacaataaagaaaaatttaacctatcatgcactgtacacatttcctgttcataagtttgggatttacataacccgcaaccaccatgttcctttgtatatgatgcagcagcataaatgtaagcttttatatcataagttctggtctttccagtcacatctggaaataaagcgtattattttcttgggaaaacatacttttcatatctcttgccccaaagattgggctgtaagccattttctagcaaatgtctctatgaaggtttctaagtacctgaatggggtttgattctgaaatctttctacctgttgcaccgatattcaaataaaaatgatagacacagaaaggtttggtaactttgggttttgtaaaatcagcaaaggcagtgtttcaaaaagtgcaaaaaaaaagattctgttataaagtgattttctaagtatttcctaactttatttttcaaaatgatgttatgaacaccaaatttaaagatttttaacatgtcagagagaagagagttaaaatttaaaaatgcatcttgggagagaaatttgtctatgtttctagtgcctttcttgtcttgattgtatggtcagtaggcaatcttaaatgtttttatttaaaataaagtattccttgaaaatataaatatatgtatacactactaaattttgcatttatagctaaattgaatcagaagactgcttatggttttaaaattgcaatgacttaaataatgaggttgttaattagagtcagagcctgttcacatattgtgatcaggtagcaatgacatgtaccacttaaattattttatcgtcgatttggtagttcaattttaactactcaatgaaaacagccatgaatatcttttcttaaagagagttttgaaaatgatcacttacctaaaacttgaaagctatgaattagttatccatactctcatgacaattttgttggtgaacaacaaaaaagagatctatttctttaaaagatatttgtgcagaaactgcatgtaactctaagttttactcctaacatacatatgtttggggaagtattctattctatacttgccaatgtggagaacaaaatagttttttaagaatgaagaagtatatatatccattctgtattttacgtgcagcagaattatcttccgtaggatttttttgtgtattcacaaggtgatatttgtattgtaaaacaataatggtgaaggaaataaaaaggcttttaaaattttgtttgttttaaatctttgtaaagttattattccagagagtatactggtatcttacagcttacctagatcataaattaatcaaaatgcactttttaataaaaactgatacttaaaataaatggctgttatttct

SEQ ID NO: 2272 - DNA, 162 bp, Homo sapiens
agatgcttttttaaatttaagaataagacacacaaaactctattaaaaaaaaaaaagaaataaacctctaactcggtccccaatgatcataaataatatgtttcctaaagaaatgcctttccagagactgtatagcttataccaattatagaatcatgaagt

SEQ ID NO: 2273 - DNA, 2212 bp, Homo sapiens
aaggttttagaaaatatttggctgtagtctcaaattttattctgtagcatggagaatgggtgcaaaaagctgacttctgtatccccacacttggattagggtttccctcctcctagaacctaatcttattttttgttctttttctttctttctgttttccttttttttttaattgagggtggggggaggagggagtgcgtctgttcactttaagttactttaaaataactctgaacatgattatattatgccaaataagattacaaagaataagcagcaatattgaagcatctacagtatgttaactacattttttaaatgtcgagtaaaacttcgtgaaaactgctcataaagactaaaagttgacctgttaaaacgttaatgtactaagatagttttaagatttttggttgtataacaaaataaaagtttacccaaaagtataagatacattttttggtaaaccatttaaaatacaaaatcctattttggaggcaataggataagcattgtcttagtgttttagaattatttttgaaacagagttaacaggataaggttacacttgtattagaattgtttttttctaaagttatgttacctgaaaaatcaaggagtgcacctgatttactgttgcttcatttatcccatccttcagagaccagcaaggttctgccaggccccaagcatctgagcatgatgattttgctgtgacaattctaagatcaaccaggttacttaagtccgctctgatgaaacccagtctctcaataccttcctatttctcaatagtctttaagccctaaatctgagtcagtaattctctaaaaatccttcccaaaaatcagtgtctagggactggttgatctagatgagttataaatggtatttgacttttcataagtagtggaaggtttcactaagtaaagatctgagtttcttggtatctgacgtttgtatacagatggtgtccatttgctcaaccagacaggagttaacttgtattagaattgttttttctaaagttatgttacctgagaaattaaggactgcacctggtttaatgttgcttcacttatcccaccctacagagaccagcaaggttctgccaggcctcgagcatccaagcatgattttgctgtgacaaatctaaaatcaaccaggctacttaagtctgctctgatgaaacccaataatctctcaataccttcctatttctcaatagtctttaaaccctaaatctgagtcagtaattctcttacatccttcccaaaaatcagtgtctagggactagttgatctggatgagttatacatgatatttgacttttcataagtagtggaaggtttcactaagtaaaactctcagtttcttggtatctggctttcttatacagatggtgtccatttgctccaccagacaggagttaaaaacctttaaagagcatttaacatgccttttagttttcttatttcataatctacttttctatcattaatcatcttaccaggaataatcaaggcccaggtaggtagaagtttttatatagcctgaatactcacttgacttactgctcattttactttttgcatggaatacagccatttagtcctaatatacataccaatgagacaattaaaaattggttggaagatggagcttatcacattgtgctactacgactttattttttcttgaaaataaagccttgaggatgtgaacataaatgttggtatcataaaacaagtagtaataaaagcataaattatcaaatatcaggtgatcttactatggagaagaaaaaccaatatctagttacagatgaaaaaatgtttaatacaaagagctgaaaatgtagaaattgagttatcttccctttgcaaaatttttacactttaaattagtaattctttgtttgcaaggttttcatccctatgctgttgttttctactacctgttttactcttgttcatactgctactttcccatgtttcctatatgcctcccctatattggagaggataactcgcgtttacatatgtgatagttatgcttaatactaattcacagagttggctcgatcattttgagattctagttgctttatctcaaagctttcactgaagggctgtaactgaaaattattaaatgttagtctttagtcaaatctctgcattgtttcatgcagaaaataaagatacaattaaggctg

SEQ ID NO: 2274 - DNA, 2756 bp, Homo sapiens
agggtcatatcactcaggccctccttgtctttttactgcaacccacaggcccacagtatgcttgaaaagataaattatatcaatttcctcatatccagtattgttccttttgtgggcaatcactaaaaatgatcactaacagcaccaacaaagcaataatagtagtagtagtagttagcagcagcagtagtagtcatgctaattatataatatttttaatatatactatgaggccctatcttttgcatcctacattaattatctagtttaattaatctgtaatgctttcgatagtgttaacttgctgcagtatgaaaataagacggatttatttttccatttacaacaaacacctgtgctctgttgagccttcctttctgtttgggtagagggctcccctaatgacatcaccacagtttaataccacagctttttaccaagtttcaggtattaagaaaatctattttgtaactttctctatgaactctgttttctttctaatgagatattaaaccatgtaaagaacataaataacaaatctcaagcaaacagcttcacaaattctcacacacatacatacctatatactcactttctagattaagatatgggacatttttgactccctagaagccccgttataactcctcctagtactaactcctaggaaaatactattctgacctccatgactgcacagtaatttcgtctgtttataaacattgtatagttggaatcatattgtgtgtaatgttgtatgtcttgtttactcagaattaagtctgtgagattcattcatgtcatgtgtacaaaagtttcatccttttcattgccatgtagggttcccttatattaatattcctcagttcatccattctattgttaataggcacttaagtggcttccaatttttggccatgaggaagagaacccacgaacattcctggacttgtcttttggtggacatggtgcactaatttcactacctatccaggagtggaactggtagaggatgaggaaagcatgtattcagctttagtagatattaccagttttcctaagtgattgtatgaatttatgctcctaccggcaatgtgtggcagtcctagatgctctatgtgcttgtaaaaagtcaatgttttcagttctcttgattttcattattcctgtggatgtaaagtgatatttccccatggttttaatctgtatttccccaacatgtaataaggttgaacacttttttatatgcttattgggcacttgggtatcttcttttgtgaagtacccgttcacatttttgtattttgtttaaattagttagccaatatttttcttactgatttttaagttatttttacattctgaatatgtcctttttaatgtgtattacaaatattttgctagtttttgacttgctcctaatgttgaattttgatgaacaaaatttcctaattttgagaaagtcttatttattcatattttctttcaaaattagtgctttttgtgtcatgtttaagaaatttttgcccatcccaaaatcataagatatttttcatgattttgaaaccatgaagagatttttcatgattttgaaatcatgaagatatttttccatttttttctaatagttttattaataaacattctatctattcctggtagaatagatatccacttgagacagcactatgtaggaaagaccatttttcctccactgaactagggtggtgcatttttgtaagttaggtaactgtatgtgtgtgtgtctgtttctgggctgtctattctagtctatttgttgatgcttgtgtcaaacagtacactatcttaattattgtacatttatagttgtaactatagtccagctttgttcttcttaaagtcaagatttccatataaatattagaaacagcttctcaatttctacaaaatcctgatgaggtttctactgggaccacattgagtctatcaatcaacttatgcagaactggcaacttactactgaatctctaatcaatgttcatcatgtatcgcttcatgtaactagaatttctttaacttaattgctatgttttgacatttttagtttaaaaaccttgtatatcttgttttggtggttttagtgattttaataatatattttaaatattttttcttttctattgttgtacacagaaatacagttaagttttgtgtgtagtcttacgatgtttagtaaactcaataagtttatttcttaaatctagtaatttgtagattcctctggattttgtatatgcatagtcatgtaagctgaaaatatggcaatacttgcttcttcccaattgctttaccttttttcttaccttattgcactggttagcaaccccaatacagagaccaccagatcaggtatagactcctgaaagacaatataatgaagtgctccagtcaggcctatctaaactggattcacagctctgtcacttaattgctacatgatctagagccagttactttgtgtttcagccatgtatttgcagctgagagaaaataatcattcttatttcatgaaaattgtggggatgatgaaataagttaacacctttaaagtgtgtagtaaagtatcaggatactatattttaggtcttaatacacacagttatgccgctagatacatgctttttaatgagataatgtgatattatacataacacatatcgatttttaaaaattaaatcaaccttgctttgatggaataaactccatttagtcac

SEQ ID NO: 2275 - DNA, 758 bp, Homo sapiens
tgttgcttttcttattttagtcgggcaaacctcttgttgatcatagtcttcaagttgaacatcaaatttgaacgtcaaagaagactctattattttaccccaaattcaatgaaatgcagttttttttctcgtttttaatttaaaaagatattaacctcatcactactaactcactcatataatagatttaccttactttttaaaaactacaaagtagcataatttgttctacatttatttgaaaagtaagtaattttaatctcttttttagtgggaatatgtgggcatgaaaattagatacccaacttaaaccaaaggcatgtctatcatgtggatgcagtaacatttacatttagtttttgatcgtagttttatatgaatgttccaagaaaaaagcagactgttacaaataagttaaaactgatatgattgataggttctgttttttcttgaagcctatgtatttggtaagaagaaatactaccgaagtaaaatataatgtacctagattgtaggagatgacagacataaggtatttcaaaataaatctcaggtgctataacatgtagtcatctgttttctgataagaacatcttttactctgacttgcttttatcttagtagtatgcttatggatttagtagtatgcttatggatttgataaatcttatactttttcagttgctgtcttattctctttatttctcattgtgctttcccttcccttctttataatgaaaataaatcttgagtcgttg

SEQ ID NO: 2276 - DNA, 980 bp, Homo sapiens
cttcctggaggacagcagcatggagaaagatcctagaaaaggtcagacccaactcaggccttggtgtccctggactgcaagtgtggaaggagggaaagcctggtttacctctctctgcatctgagctctgctacccatggagcagatggatggtgggaacaggaaagagcttatgttacacctcattcccatgcttagcccacccagagctaacccctgtcttcttccccaggcctctgacttccctcacctcccaaccatcattacaggaaagactgtgaactcctgagttcagcttgatttctgactacatcccagcaagctctggcatctgtggattaaaatccctggatctctctcagttgtgtatttgttcatcttcatatgctggcaggaacaactattaatacagatactcagaagccaataacatgacaggagctgggactggtttgaacacagggtgtgcagatggggagggggtactggccttgggcctcctatgatgcagacatggtgaatttaattcaaggaggaggagaatgttttaggcaggtggttatatgtgggaagataattttattcatggatccaaatgtttgttgagtcctttctttgtgctaaggttcttgcggtgaaccagaattataacagtgagctcatctgactgttttaggatgtacagcctagtgttaacattcttggtatctttttgtgccttatctaaaacatttctcgatcactggtttcagatgttcatttattatattcttttcaaagattcagagattggcttttgtcatccactattgtatgttttgtttcattgacctctagtgataccttgatctttcccactttctgttttcggattggagaagatgtaccttttttgtcaactcttacttttatcagatgatcaactcacgtatttggatctttatttgttttctcaaataaatatttaaggttatacattt

SEQ ID NO: 2277 - DNA, 223 bp, Homo sapiens
atcctctgttgcagtctttttaaggggtgggccaatcataatgaagaggggcagtcaatatctgcacctttaatgctatgtaaaaaatttgtattatgagtcgacattttatttgtctttatacttttggaagaatggttaacttttttataatcttactcaggaaaactaactatttgttcattagaaaactatgaagaataaagaaacttaggaatgttaa

SEQ ID NO: 2278 - DNA, 1480 bp, Homo sapiens
ggttcaggaaatgttatgatcactttcacccatgatataaagtaaagtttattttcctctgccatccttgctaagtagttttgacacaatgaaaatggaagcactttagtggtagtattagctgtttttaagaaggaatagcaagtttaattatatacaaggagaagggatttaaacggggggaagaatacaacaggtagccatataattgggaaaaaattcagtgtcctccatgccaagcagaaaactcatagtcaatacaagtatttttaaaaatgtctaatattttatcaaatctaaataacatagctaggacacttgttagggaaagtttatttagtatccaaagactgtttatgttgatgtatggaaaagagcatgattttaaaaaatcaatcataggaggaaaagaaattcgcttttcaagtaggaaggaatacagctagcaagaaagcaatttatttgaaacttctaatggatttttgagtgataaaacatttactaccttgtcctttaagtctgctaggctctcagtaccctaaaataaactagattgtgttgctatttttttctttctctataaaaataacacattattttatccgttatttgaaattttacatttctggttaccaaagttcattctgatagcatgtactttgtgaattattatctttgtctataactgacagatgtttatattaaaataaaatattgtattaaaaatttaaaataggtattttggatagatatgtgtctgtagtatataatctaatgtgtccatagtattattgctaatcttttggtttactataagatgatataactattttttcattgggaatatacatttttcttaatgttccaacatctatactttgtaaagtcaaaacatttcccatgagctgtagttattcatccttctgtacaaaatgaaaagtttggaaattgtttgccctgataccttgaaaaagaagccagaatatttatttgcttcatcaacttcagtgtatatcattttgtgttattttatacgaaaacatgtttattattttcatttttgtaaaaggaagtaaaaggtcaacattttctctcatgtaccaaccttgtttgtatttctattttctgtaatgtttaagtatgatgttgaagaaattcacattctcttatagtttggatgggaagactattgactatttcagaaacagacttatttcagaggcttattgttttctctgtatttacctaatattttataacttttatgaatcagaataatgtccttcataaatttgtttaattgaagtcatctacttctaacaggacagatacacaactatttgaggtttacaaattacatctttgataagggaaatggtttcgtgacatgtacacagttgctattaaaatgtaactctatatattctatatgattgtaaatattttatacaacaatacaaataaaatatttttctattat

SEQ ID NO: 2279 - DNA, 2007 bp, Homo sapiens
aagaatattggaagacactatttttgctattttataccatatagcaacgatattttaacagattctcaagcaaattttctagagtcaagactattttctcatagcaaaatttcacaatgactgactctgaatgaattatttttttttatatatcctattttttatgtagtgtatgcgtagcctctatctcgtatttttttctatttctcctccccacaccatcaatgggactattctgttttgctgttattcactagttcttaacattgtaaaaagtttgaccagcctcagaaggctttctctgtgtaaagaagtataatttctctgccgactccatttaatccactgcaaggcacctagagagactgctcctattttaaaagtgatgcaagcatcatgataagatatgtgtgaagcccactaggaaataaatcattctcttctctatgtttgacttgctagtaaacagaagacttcaagccagccaggaaattaaagtggcgactaaaacagccttaagaattgcagtggagcaaattggtcattttttaaaaaaatatattttaacctacagtcaccagttttcattattctatttacctcactgaagtactcgcatgttgtttggtacccactgagcaactgtttcagttcctaaggtatttgctgagatgtgggtgaactccaaatggagaagtagtcactgtagactttcttcatggttgaccactccaaccttgctcacttttgcttcttggccatccactcagctgatgtttcctgggaagtgctaattttacctgtttccaaattggaaacacatttctcaatcattccgttctggcaaatgggaaacatccatttgctttgggcacagtggggatgggctgcaagttcttgcatatcctcccagtgaagcatttatttgctactatcagattttaccactatcaaatataattcaagggcagaattaaacgtgagtgtgtgtgtgtgtgtgtgtgtgtgctatgcatgctctaagtctgcatgggatatgggaatggaaaagggcaataagaaattaatacccttatgcagttgcatttaaccttaagaaaaatgtccttgggataaactccaatgtttaatacattgattttttttctaaagaaatgggttttaaactttggtatgcatcagaattccctatagatctttttgaaaatataggtacctgggtatcacacatagaacttttaattctgctggtgtaggctgttgcccaaacatctataattttactgagctcttcaagtgattctgataacacagcctggattgagaatttttataagattggcaatggaaaaacatttattcttttaaataataatttttttaaaacccaagaggtcaggggattttataaaccaatagccaagtgttctttaaataggaggcacccttcccattgtgccaaaatcatcttttcatttattttgaaatttgtatgattattttatacttgtatgttgcctttcttcgaaggcgcctgaagcactttataaacacaaatcctcacaatacctctgtgaggtaggtaaatagtacttttctatgtagtaaacctggaatatggagaatttcataacagttcattctacttaataatgcaataatggagctccaagttgtcttggacttctacaccacactcagacttctggaaagttttctgtacctcattctttagtccctgtcaaggttagtaaataaaataagtgacataaaaaaaaaaaaaactaaactacttgttgtgttgaaagttcctttttgccagttatgttcaggaaacccaataacctgaaaaagtttgactttgatgtgacatcttcatattcatcaatgctgataattgtccaaaggcatcttcactatgtctgctaaataacatccaatgtgggcgttatctgttgtctaggggatgaattttaagttacaataaaatatttttctttgttttgc

SEQ ID NO: 2280 - DNA, 4153 bp, Homo sapiens
tgcatgagcttagtctgaatttcaagttgggactcatccaatggagccgtctactcaacgccaaaggcttccttctctggcatatttggatatgacttatttgcactgaggttatctaggcttcactatccattgtgttgtaaatgtttgtcagaaatgcagccagtgttgtgggtctacaacactaaccagacgactttttccatcagtgttttacttgaatcttcatgtacgtccattccctggctggaaccttcgctgtttggtatttggtatttcagcagcagtgtgcaatttttgcttggcccagagcttcattctcctggcttttaggtttgtaaaagaaaaagggatatcttttttatatttttttccatgaatctgcagaaaattactgagctgttgttaccctcctctcattataatagtgtttaccaaacataccaataattcagcactacaattcagacctttgaaaatctggctttcagtgtagaacagaaagttagatgaatcagtgcccaagacatattttctgtttaacagaactttctacagatacattttttacaggttattttcattgtgttattgacatccatgtctctcgtaaaacagatggcccaaagtaatgaatcatgtggctgtaccttctccacataaatgggatggataattatcgtatattaagatgtgattctcttttttatccttaatgttaatctacttaacctggccccctctaacatgagtcgataaatgttgtcctactcaccggtggtttcaatggctaattagaatgtgttatttgatttctgctgcagaaggcagtgtgattgtaacaaaaacaatgcggcttccccctttcgtacttcatttgtgttctcttaaaatagagtttgaacaaatattttaaaggtgcaaaataccattagaaaatactatttgaaatggacattatcgcattatcttggcataatggccagaaaatattgtattgcttggcagaaaagaaaataaggtctaaaggaaagtagcacattagcattgatggctgttcatttcacccagtataagcaagtgcagtgtacaaagaagtatattctgaatacattatttccattcatttagcacaaataaatcatttggtttcactttgcagtggaacactgagtcactcttttcttaacacgtgcaacatcttaatttttgtttttcagcagttgctgttttgtactttggtagtaaagtgatttttaccacctgtgtttgcatatttatatatgctgtggatgaaaataacttactagagaatgtatattttatgacaagaatgtgtatctgttggatataatcagagaactgaaaagtaatttatcagtaatttttaagagtccatgttttgtgacaaccatctctaatagccaactctttattaaacacactcctaaaaataaggaaccatgacattgtagatatttaatattgtacagtatagaaacctccatttttgccttcgaatgcatatttaagagttaacagaatgaaaaaaaaaagtcttgttggataatagtgtttgactagcgttttaagaacttgagagtaaaagcaacaataagattttttcacctcttcctgcttccacccccaaactgagaacatcactcaattgtttggaagaaactgtaggtctatataaattttatttataatgtatgtgtaatatacataatcataatacagttctcagatgcagggaagaagtttggcatttaatcattgaggctttaggtttttgatgtgatcagactgggccatgtcaaacccggaattttcaccaacagttcactcaccctcctggtacattgccattccaaggaattctgagagtaggcaaacaaattttgccttcatggtacagttctcagtttttcttataggagaaatatggtatatgtttataagaatcttttatgagattatagatttcaatgctgtggatagtgtcttgcacccaaacaagaaagtccataatggaatgatcttccctcagcttcctatcgatttagttacctcttgaaagcacaaaaattaaaacattgccatatgttgaatttttaaaaagcacttggagtgagcgaacatttcctgataaatgccttttagagataggttcttgatattcagacatctgcagaaatgttctggttcccaaagtcatttcacttcgaaataaaacacagctccttcaaacagcactttttccacataaatctagttgcctctccctgtggacattcagaactgatagaacaaacactactcttttgaatttgatggttcgtgtcctttaaagtgtttgaggacctatgcagagcctgtaacacttgggtagtacctgctaggacaatttcttggcaattgtcttactactagggatcagtaagatttagattctgagcccataatggcaacagccccctcacctatgggaagctgacttccctcagtcgggcacttctcatgggggctgaacatggttcctgccattctgttacccactctcccaggtgagccctggattggctcccagaaggcctttgtaaaatcagtagccgtcctgcaggcaggtgggagcaacaggggcttcagtagcttcattttcctgtcttgcagacagagacccttggctaccactgtgctgctaataggataagtactctgttgccagattaccatgccttttatacaaaaccaaattaacttacctaatacctgacacctctttgggctctgaactgctttctctcatcaagcatgctagcactctagacagaattctagaaatttggcagatagtggaagcctttaattgaacttactccttcgttgactgaaaggagttttaaattctgagctcctgagatactgactagcaaccatggaatgaatgtgtgaccagaaagtggctttgacaccaagtgctactgtccctttgtaattggcttctaacagaattcaaccagaaataattgataatgtgaatttttgttaattgttcacttgtaggaaaatagaacatgtatcaccctttgttaggtagacatgaacttttcctgcacaaagccttgcttttagagaatgcccaataaggcaagaaaaagcatagtaacttgtgctttgagagctcaatatttgtatcttatcagtacagaagaaatatttctgtgtaacttgatcttctgtctagtacttgtcttataggtaaccaacactgaaaactttgtagtgatgactaccaaagaaatacatagtaaaacaaccttttatttccaaattgttaaagagccagccattgatgctgctacatgagttccatgctcaagagccattgtaagagattaaggggtttctaggtttttggtgattttttgtttgtttttttctttgttttttagggtttttttttcttctttaattttttgattaaaacatacacacagctgttagcataaagtcgtggggggcattttctggaatgctcagcagttctgattaactgccaagcccaggttgcctctcatgaggcaactgaaaaaatcctgtgtcttgatagcatgggtgctgtgtgtgtgcatgtgtgtgtctgcattcatgccttaactcgggttactgcacaactttagttcttgacttagtctgcaccgtcatctagattgtattgtacatctcggtctgaacttcatcctggcaaaaacaaagttgcaggcacaacagtttaagaatgcattcctccagaagagtatctggtcaggttgacccctgagccttctttggacttgatttggaacttagcctggaaagcgaaagtggactgtccaacagaaagatgtcaacaaggaaaagaggagagccaagcgctagcatgccttttgcctctgcatatctgtgcacactgtatgttgttcatgatagcttgtctacaacttgactaggttggagttctggtaatagtggcaatcttgacattcttggtcagagtttagagagatgtaagactttcaattaatgtcttatttactcctttatgttgattagtctttgatacatgtgctgaatcagaaacctaaataaagataattttttaaaatgt

SEQ ID NO: 2281 - DNA, 1425 bp, Homo sapiens
gatcataagtttttactgccagtattgagaaattcgtggaagaaatgtcagcaggaagtaaaaattcaccgagaagtgtgtgtgtgttcgctgcttccacacattaatggcatgattttttttatgcaaaaagaaaagaaaagaaaaccacccacattttaatttagcatgagccaatttacagagcatggaaatcactttcatttccggattggcgcgtgtgcaattagcaatgcagtgtatatacaagaagccatgctgttaacagtttatctcaagtaatttggtgtcatttacaaaaggaagaaattcctgccatcagaagggacagaaggagatggaatgatcaaatcacagagaaacactaaaattactaaatctacaacagctcgccttatttttcttggacccaaactgtcagggtataaacactatttgtttcttttttaaaacatcgatagttttgctgtaaataataacactgtataaattctaacagaaaaatagaataaaatgttgataaggcactgcctcttagaacacaaacagaatattgcaaatgcatttaacaaataggggtctcaagtgacttcaccctagaagaggagggagggattctgggtgggggtgactcttcactgattcttgtatattagcaattataatgtttgtatatgcaaaactgctagcttgattttaaaaaaaaacaaatctttaaaatctgctgcaaatttaaataattcccaaaatgaggaattctgtagttctgtgaaaaatttttttcttcagaatactaatattttgatgcatgtgtatcaccttattttgattaaatcttttccaattttgcaaacactacagtatactgcaacacaaaagattttatctgtaaacacaaagcccttcatctaatatttgttgctattgccaatttttcaatgaaatgacctaaaaacaacaaaaaaaaataacctatacggtagttgctttagggggtggggggatgctatctgttagtgcttaaaagggggtaaatgcttgccgctttagaggtggatggtgctcataaaaggccccagtcgggggtatttaaaaaggactgaacagaaatccttagctagtagaatggcagcacgctgtaaaattattactgtattgtgtactggctataagatgtagacacctttcagtaagccaatcatttgtaaccattctagcagtgtcatattaggttaataaggctgctgtgttttaaagggcatttttatttgggttttggtgaaattctttaatttgttgattatattcacataaaatcagcattcattgacacatagctctaatgacatatgtatgaaaaaccatacactggatgacctagtcgattatttaagcataaaataaattgtgttaaactcttcacct

SEQ ID NO: 2282 - DNA, 2040 bp, Homo sapiens
agaggaagagaaaaaaaacaaaaaacagaaaccaatcggtaatctgatccaccacttttcaaagcactactataaaattcgtcttgttagagatacgacatagttcaggtttcgggcactgatcttcctccacttttgtgcatttatctttgttaggatcaaagcacaagctcaccatcaatgagcctggacaaaaagggaagctgactctcactgcattccttaaactgatatgtatattttttttgttaggaggcttaataaactttagtctgttattttgtttctttttatacaaagaaaaaaaattcagctttcatgtttctgattccagattggaaaatatttttatatggtctgttgtattttgttgaaatgaaaatactgtgtattactttattttacaggccacaattgattatgaagtcaccctgtgattctctttgcccacatgaccaccgagcattattacgtaattagagggttatccttttgttgtgaaaggaaggaggggactgaaatctcccaaagtgcaaattggagagtgtttaatctttgttctgttgaataacatcggtgtaattacaaagtcaactccaagaatgtgtatttacaatatttgccatgttaagtgctggtaattatatggttatatgtgccatgtaaaatatagtgatatcaaatattctgttgtttccaatgtctagtttcaagaggacaatctttataatcattagaagggcttattaaatcccagcattatccagggcaaactcactggtggacctgaatacataagataccattagtgcgctggtgttcggattgctgtattagggtttacatctctcagtattccttgaacttgccatgcttctgcatgcagattcttcactgacttgaattgagatgggcaagggaaaaggtccctggactccctcctgccatctacaggcttgtcacatctcaccaccagaaacaggcttcctcaggcttctcacctgtggccaacttcactttgtaagacccatatttttaactcttcccagggaaaattcatgttgctgcagaagtaggctaaggcagaccacccacttctgctgaaatgcattgggagcctgtgaaagcacaaagctggaggctgggcgcctgcgttctcctacacggaaaggaatctaattccaagagtctaggaaatggtgctattgtgagttcgttctgactctttctcattctgagttttcagtgttaaactaggaagtgtgacagcaggggagctttcgtgaggcagtcagtcattgcttctctgtaaattaaaatgttacagcacacacatacacacacagagagcatttcaaggccacagctccacacctgccatgggatgttaatgtggcagggggtggggctcattctgttgggaggtcaaattaccaatgccaaggactgttgattttgtttttatttttattttttcttctagcttttcagaagatggaaatgagacagttgagtccaaaccccaatgctgacagccatatgcatttgaaaatctatctagattacagatgggcatttattactggcagtggaaacaccagatagaagatcttaggagaggcccagaaatgcatcaccttgtcatgacaaaagagaaggcagtagagtagggatagttacaaatgcatccatcttaattattttcaataggcttgtaaatcttatcgatggaaggagaaaggagacaagatgtggaagaattgacatgtatcccaccataaaatggtagaagatgagttttcaatgagtagtcatagttgaaattttacaaccaaagctcccatttgattgtaatcttgccaaaatataatggatgtataaatgaacttggggtataagcaataatatccactagtgttgttatcagctactgtaaccaagtggctggttcatttggttgatgctgattatggcctttaaccatggtggtttgttgtgtgttttttatttcacaaaaagccaataaaattgtttagctat

SEQ ID NO: 2283 - DNA, 3672 bp, Homo sapiens
ttattgattgacagtggtctgcggctagaacctgactccctggttcttcttacagggaggatcctttttctcctccaaccttggcgtataataattttcaaaagaacaacataaaaaggtgatcttaaaccaaagctgaggaattttcttttttcaactgaatagaaggaactttgattagtgactattgctacaacttctgtgtgatggtatcagatgttatagttgttcaacgactaagtgatttgtttgtcttgaactgtttgaaaagctatggaagaggttacagtgacatgccctcgaaagatttggtgcagaccaactgtcgcggctgttacctggaaatagagaagctttgaactttgcctccattgtcagactatttcgtctgatcttttctgcaatgttcctctgacatcaaaaaatgtacattcagtgaatgcagaacaaatgaagggaaaagtgcctttaaaattacctcactgtgggctggaagaagcgaaaatctctgcccagcttccgtatcatagagagccctattcatcgctgcccaggccttcccaggaaaatcattttttctgggctgatgttgtattctgccatggcgcatatgttcttacagaaattttattgcttttgtcttgggtgctacaaaattcacagcaagccattttggttacatatctactggttgcaaggcaggaaatattggtgaaatgctagcaaagtcacaatttctactctgaacatgatttgcagtgttcatcagtatttttctgaaccctgctttaccattttctatattgccaagttgaatcatgtgggctgatgcagggaagctctgaagcagtgaataaaggtgtttcgggccctgtaagtgtttccatggtttctggtgtctgccagcagtagtgaacaaagctgcagcttctttgaaccgcgactactggaagtggcctttgctctcagggaacatggtgatggagggttgcatcagctccacccatggccaacagcccttgttgagtgacgggagtcggaatgtgctaccccgttgtgggaatcaggcaattcgctttattttcttgcattaagacttcattttcccagtattgaaatagccatacttttcctttacatacctctatactttccagatggaggtgattcagaaccttttaaagtgatttttgcctttaaagatacagtgtgaaaatttgctcgggtgtgtagcagtaattacacgaggcaaacagttccaaaactgttcttttaggttcaaaacctaattcccccagattagtatactcgagaattcaaagggacatttaaggtggggtatgcccttaatttggtatgacttattgacaaccagttgggacaattttatctgtaactctctgggtgacatgatacctattcgaaacattttatacaaacttttatagacaaattgtgtttttatacagagtcatgcatattttctcataaatggcttcttcagtgccattgttatatgttttttatttctttcttccttgtgcttctaattttaacaatataatgactataaaatgacacatggaactaatggaatacatttatgattttccataataattttatgaaagttaagatcaagaaattatatttatatgaagtaaatcacttgacaacttttaagggcatgttatttgaagtgctcagcagttgaaagcaaaataataactgctatttataaaaatgcctcagcagaatctgtttttatgttgactgctttatgttgaatattttcttccacaacatgtatgtgctgcttattattgcagatttgctcatggcatacttttcatgttttaatttttttcttccagcaaaataaacactgaggccctaaaaatagataaagtataaagtagtacggctgttgcaaggatatttttaaatgctttcaaatctgagacttggcttggcttcgtgaatgagtttctagtgtttaaattaaagtattttgtaattagactcctcgtgggcttgagaaataaaaagcctgtccaaagtctagctttatttagagggtcaggaagtcaaagagcacccaggaccatcttggcaattaatagcggcaaaaatagacccagcttctgcaaggttttccaggaaaatctgcttggggcagcatttgttaacctagctgccagtactcctactctcttatactggctgcttttataataggaaaaaaaaatatgcatttgcttagtttatttgaataaaagctctaaacctaggttatatattagccattcctaagactcctgattaaatattacaaatttgttcagttcatagcgtagactgctaaatactgtaatgtttcaaaacatccaactgtttgttataaagtggctagaacatcaattacctcccatgtgtggacatcctgggacttgtttacattttatctgtaataagataactgactcacaacacctgtataatgtgatgcaagtcatcctctctatcataacccctccccccaacacacagtaggtcactccccaacccctgaagaaagtggcttatttgaggttgttggtgctgttggtattattgccatagttgttatttaattgcttgattaaactcagtcaaatatccttcctaaaaacatgtcattccacttgtgaaagaaaacacaatgtgcatgtttcaatgatactgtgcggaaacacacctcatgatcatcttgtgggtttcttttgcccttactggatgactctcagaggacatgacttgacatagtaacattagtaaactgtctttatctttgattattcttttaatttttatttgagctgtttcaatagcataatgaaataaaattttgaattggccaataacatgctttataatcttccagtgaagagtctgatacaaatttactcttggcactgttgtagttccactaacaaatagcacttcagaccttatagaaccatatagatatggccaaggaatagcaggattcactattataatactaattgttaactcattatttaattgaacatttccaaagctctggaaaggcatgcatttgtaggtgcacatgctttaagatttctatccatctttcagagttgaatgtaataatgtttggtatttaattcttgataattcttaaccaacttttcctgttacaggagagaaagaattgcaaatgccaggcatctgtccactttagccctcctccaatgctaagaaagagggatggtgacgtatactacagagacgcaaatgaaacaccaaacagtcttgaattacaagaaaaaaaggggattttttttttttctaatttcagacttggctttttacttagaggacattctgatttgctctcagaaacatctgatttggggttaaactaggcggctggaggatgtttacagctttgaggcttcaaataagtttccatatgcagggagtaactttaaacaatgtttgaataattaactgctaagtcttatattttatgtgtatctatttcatcctctgtctctttcttactagaataccatataagaatattttctctgcagtatttatatttatactattttgctatgagtggcctttgtattttattatatgcattaaatagtgtgtgca

SEQ ID NO: 2284 - DNA, 4711 bp, Homo sapiens
aaaactcttaatgataaaacatttaacaaaatctataactgtgaagcttaattcagaggcattatagaataatgtgtaattatataggtaaatatagtgatttataccaataattaataagctattaggtatagaaaaacattttataatgaagaagtggatttctcttttactcctgatttgcagaatgtaagtgatttctccagcagtgtgcaagaggcagtttctagacaatatcctaattgttggaagggttaatttattcctgaattagtaccaggcagtgaataagccctaggcagaataaagcattaaaatttcttttggggagagactgtctagtaatttaaaatgtgttaaatatgaaccatattctcattgtgagaattttaatactaatggaatgtttcaaaggttttattcaaaccacaaattatagaatccacccaagaaaattttcttagcattctggaattctcatctaatggttcactggctctcatctattgtttaactcactagtttataggcctgaccttttaaattcctgggataaattttagaatattaaattcttcatctttaaagggaatttgtaatgtgctattcaaacttgtttccttgatgagccctgaaatactgttgacattaactttcataaatgaagcataacacttactagtttagagaaatggtagatgaaatgctctttacattcaattttctgtgtgtggtgctaatttccattgtgactttggaatttagggaagtgagtagctgatcaacaccttaaaattcatttaatacttatttaaaaagaagatgagagattcaaaaatatcagaaaagttggccatggtaaataattttcagaattcttttttaaaattttaattagatttccttttcctagtaagagttgatgtctgctagtggtatttttcattaaatgtcatattcttacaacagtgacattggaatcatttccataggaggtaatttccatagcaactaatcatagtgacccaaacaggattataaagtcaagtgaggaataaatagcagaaaaataccttaaaggaacaaaaaatccattttttataataatgctttttgtaaacaagagcagaacagttttaaaaatctaattagaatttccaaataaaacagtttccataaggtgtcagcaacagcactaaaaatctcaaatcacactgaaccctaaatgtcattgcaagaaataaaaatttaagaattaaattgctgccctgtgtataatctcttgagatctttttaaagctagcaagaactctatttggatcagaactacattattacaaaacaaaatgaacacttgaccaaaaaaccacattaatttaaatggagcctttcattattttcagatagcggggtcttttccatttatagagaatgatgtaactgccaggacacttttgtgtttgcccaggactcctagtaagaattgaatcttgagggagtaatgataacaaaaggtttcttgtgactggtaacatcaggacagacagagtttttggtgagaagaaagtactatatgcctgcttgatagcatgtagagatcatcacatgtatggaaaccttaaaaagtaaacttattttttctaactagaaggctctcataagtttctgttatgattgccatttcaataaatgacattaaaaatctaaaggatattattgtttgaatttttgggttattttttaaaacttcattgctgtttttgacagcatttgtgactgtcattgccactaaattattgagctagaagatgctgcagggaaaattgttttgaagctggcatctaagcattcttttttttttcctagttgatgccttcctttattacaaatcagtattaaaacttccagattatattcttgtcatttttcctcatgcagataacagcaggaaggacttaaggtgtataagaaaaagaaagtattcatacagaaattacctagcagttgtgccctcagagtagaactttgaaacaggactgaagccctttttacctagaaccatttaaaagcctgagcaaggaccaccaccccctccccaccaaattattcggtctctttctggggggcccagcttactgtatgttacaagtctttgaaatgggtctggtgtcttcagctcctgaaatgctaatttaccccttacctaaggagtgtagttataatacagagttggtttccttccttccttccttccttccttccttccttccttccttccttccttccttccttccttccttcattccctctgtccgtctctccttccctccttccctccttccttcctttttgtctttgtttctttctctggccccctgtcctctctctctgtctcatccccttttcccactttccttctgtctctccttcctcccttcctttacagtttaaaaaaaaaatctaaaaatagttaagcactgtgtcaaagagtgtttcaaaagaattgtttgttttctcatttcttaaaccagaagtttatgacaaataaatatgccatgtaatatgaaagctgcttcagctttttatgagctttcacattccttgtttgtccttttaatttgtttcttgatatatgaagactataaacttgaaacaaagagttagctgtcagctcttgataatataattggggaaacagaatagatattttatgatatgataattctgatgatctaaagataatgtcttagacaattacctttacatttcaagctctgggatataaattacgtagtcagcattaagatagtattatttttaattgctactaagtggtaacttttgtattttaatatcttgcaagggcaaagaaggcatttttaaaattctaaatgcacacctcctaaggtaaatagtctttcaaaaatatcaggcgtgccaactcttgctgagttttgttaaatcctccttaactgtctgcagtgccccctgacttcttttaaatggatgtgaatatatgtggaaaactaaatccatttattataaatgccttatctttaccctttgggatcttactaaatgcattttacctgctactatttattaaaaatggaagctgtcttgaattagagatacctcacgtaaggtaggttaagcagtcaagtatttctttaggcttatgttcagcacctcagccccctactgagaagttaattaattcagtccaaaatgaaattatagggcagtttggtgcaatttatgttaaatgccatttgaatgtaatcacctgtgttaccacgaatgaggcacaactatactacatggacagagtactgcattgcaccatgagcaagaactgctctgcaagaaaaatatctgtccctgtggtctgaatttatcaaaactcattttcttgttaaagagtgaattattgaatagtaattaaactttaactgatgaccatttatattctagtagccatcttcactgttagtcttaaattataatgtaaagttgacattttccccttacatttcaaaggcatcactatttttaaatgtttacatatgtttacatgtttgtgtgcaactgcttcattgctattaatagttaaatgaaatctgcatattctggatcatagatgttcttagttaactctgggaaagatgttacctttgggtttttaaaagacaagtcatcatttgaaaatatattagggtgtgttgattttctgacatgcttgtgtaattggctttgtttataatttttattttttaatatgggtcagacttttggattaaaaagtattatatcatggacatacattttttaaagtaccaaaggtatttggtaagcgagcccaagtcatgtaattgaaacttctgtacattaaaagaactgattcatgaagacgttttctaactttttctctttaagtgctcctctagactagactgattgaagtagacagtgtggtggaatcagtttaatcagaaaaagacataccaagtagctggtgctaattattataagactaacattctgataagccatggtataattaacattattaaaatgtttacatataatccttcttaaagtatactcttttaaaaatccattgacataaccttacttttagtttagtgatccagaatttccccagagcttaagccactgcagtaaattaggtacgtaggatattcagtcgctactagccacaaggagtctccttattttaatgtacctccctcagtactttattcctgcagagcgcctcagagtgggggagagaaatgagcaatcctggctcagttggattatttcagcattttatttctaaatctgtagtgtgatcagaaatatttaaaattaaaaaaatactttacagagagaggcctactaatcaatgtgcttagagaaacaaactacctttacattcaattaacaacaaaaaaagttacagaaattttaacaaacatttttctttatctgagtatgggagaaaatactaatgctgacacgtttaataattagaaaagatcattccagatcttatggaaaattgtgttttaaattccagcagtttgctcttgagacatggtaatctcttaatgtaactactaaaggagaggtagattgaaaagatcttgtatatacataattatgtcagatggttcaagatatcaaaataaattgttttgttgaaaat

SEQ ID NO: 2285 - DNA, 1210 bp, Homo sapiens
gatgagactcaggctgatacaccagctcccaaaggtcccggaggccctttgtccactggagctgcacaacaaacactaccaccctttcctgtccctctctccctttgttgggcaaagggctttggtggagctagcactgccccctttccacctagaagcaggttcttcctaaaacttagcccattctagtctctcttaggtgagttgactatcaacccaaggcaaaggggaggctcagaaggaggtggtgtggggacccctggccaagagggctgaggtctgaccctgctttaaagggttgtttgactaggttttgctaccccacttccccttattttgacccatcacaggtttttgaccctggatgtcagagttgatctaagacgttttctacaataggttgggagatgctgatcccttcaagtggggacagcaaaaagacaagcaaaactgatgtgcactttatggcttgggactgatttgggggacattgtacagtgagtgaagtatagcctttatgccacactctgtggccctaaaatggtgaatcagagcatatctagttgtctcaacccttgaagcaatatgtattataaactcagagaacagaagtgcaatgtgatgggaggaacatagcaatatctgctccttttcgagttgtttgagaaatgtaggctattttttcagtgtatatccactcagattttgtgtatttttgatgtacactgttctctaaattctgaatctttgggaaaaaatgtaaagcatttatgatctcagaggttaacttatttaagggggatgtacatatattctctgaaactaggatgcatgcaattgtgttggaagtgtccttggtgccttgtgtgatgtagacaatgttacaaggtctgcatgtaaatgggttgccttattatggagaaaaaaaatcactccctgagtttagtatggctgtatatttctgcctattaatatttggaattttttttagaaagtatatttttgtatgctttgttttgtgacttaaaagtgttacctttgtagtcaaatttcagataagaatgtacataatgttaccggagctgatttgtttggtcattagctcttaatagttgtgaaaaaataaatctattctaacgcaaaaccactaactgaagttcagataatggatggtttgtgactatagtgtaaataaatacttttcaacaat

SEQ ID NO: 2286 - DNA, 815 bp, Homo sapiens
gtgtgatccagtttgatatttttaggttgttgaactgggattacttaaccttgaatgatgatatgtatgcacactgactttaagcttcataaaaccatcagtgccaagaaattctctttgtagtaattacttgttactgacaccacagcagtatagcatatgtcacagctcctgtgattcaatgttataaaacaagcagaattttaaaagcagcactatatagctgttttgtattatagtgtatatgatgtttgtgaaaatgccagatttaaaatgatgtatttatttttggtaaaaaataaaaaattctatgctatattgttgatcaagtgtaaatgtgaccttgtacagtttactaaaattactgatatttttcactacattgagacagttactgtgagaataggacacaaacaccagctattgcctgcatctgggaaattgctgaatcgcacagcagtcatgtcataatcagaaaattactgccaaataattgtaaaatttgtaaagtataaagtatataaagtagatactaaatacagacacttcaatattttgttgaagctattgactgtacaattaaacattttcaaaaggtgtaatttatttaaaattgtctcattttggtaaaatttatgtgaacttttaaagctaaatattaaacttaatatgctatgtaaatatatacatatatacatttaatgatgtatttttttaaaacattggcttgcttttgttaaagtgcaagtgttacatatggctttgtacattaaagttgaaaggggttttacattttccattaaaaggactttatc

SEQ ID NO: 2287 - DNA, 157 bp, Homo sapiens
aaccactattctacatatagtgcctatatgacaaaatcctgcctaaccacactgctttattttacacttaagaagttctgtaatttcactaagttttggtgtttaactcacaaataacataaaatattgggcgctaaatcaacaaaagcaatatata

SEQ ID NO: 2288 - DNA, 446 bp, Homo sapiens
aatatctctgcttcaaaaaatgaggaagagcaagactgtcccctatgctgccaacatgcagtctttgtttatgtcttaaaaatgtcatgtttatgtcatgtctgtgaattgctgagtactaattgattcctccatccttgaatcagttctcataatgctttttaaataagaaaaattcagaagatgaatttcttccaatatttgaataaattaaagctcttagatacagagtagattgtattatatgctttttcctattaatactacttatagaaatccattaaaaagcaatctctgtacagtgtatttaaatatttcattgacatactgtgatctctattagtgatggatgtacaaaaaatgttttcttacccttgacttacaatgaaatgtgaaattacttgtctgaaccccgtggggagaaataaataattttcccaaagttc

SEQ ID NO: 2289 - DNA, 287 bp, Homo sapiens
atttgtgaagctcaggatgcccatggattagactcatgtagtagcttaaagagtcattaggcgataggagggagaaaaccaagaagttagcagagtctggatataattcagtgtccgtaaatcccatgaagagaagctcatcagaataaaggcaatgaatttgtgccagaagagcctgtgactacatttctttcaatctctttggctgtttgtttcagtatacacactccctgttattgcttactattttatgagctctaataaatgtacttctcaagttgctcatg

SEQ ID NO: 2290 - DNA, 1032 bp, Homo sapiens
ctttggagttataactattcagtttagtgcaaaagcattaaactatttgtgtttttcttgtggtgatgaattcagcaaggtgacagaggtactattataattcttacttgcagaatgttcaatctacgagtgttcatggaagccaaaaaatattaaaggaaaatgaacaaactgttaatattattgtacagaaccatggattttttttgaccatcttctaataaacatagcaagtattatgaatacattaaagttttactaacatgaattttaagagtttgcatatttcagaaatgatctggtgtgagtgcatggaaatattgcttaatttttcttcaatcattgagtgaaaaacctttaactttggcctgcaatagtcatttgattattttttcattttgtaaataatgttaagttttgtaataaaatagttatgttctgataccagtacagtttctatggttgtaattgaacttgaacagacttttaaaggttaaaaattatgatttaaatcttactctgagactctataaaaagaaaaaaaaggtagcatggtggaaacactatcttttcttttttgctagaataagtgtctttgtgcaaacctaaatcacagatagggaatatactacataacctgcagttcttttctttgtgaatcctgacacactgatagatgggggattgtcgatcagagaacttattaatatttagtactggaagaactctgtctccacagttgccagtaataaaaagaaacattggctactatgagcaccaatcactgggttatagctttcaaaattattgatgctgcagtgctttagagctatttccttgaatttaagaaacaaatcttaacagttttatggtgctgatgcttagttgtctcatgccattaaattgtaaaagtgagttgatgcaatacatgtgactttctgctataatgcaaatatttattttttaaatttattttaaaatgccgtgaaaactgtttaataaagatttattgttttaatatttaaactttca

SEQ ID NO: 2291 - DNA, 590 bp, Homo sapiens
ggcgcgcgcctccgcgggggtgggtgtccggcagccgctccgagcctcggccctgccccaagtagcccagaagcctccggcggcccaggattctaaggatgcaatcctcgaggaaaattagtcgattctcagattacctttattcgcatcatcagacctatggacgcaatcatttaattgcctttcttttcccctcctcctttgtattttgtagatttcattaatggatcttgtgaatgggttgattgctgtgaaaataatgccccctttccccttttctgggctactttgagggaaaacaatcttaagaaaaataggattaagctattctgttccagtcctcagagaaataatcactttcttaaactttgtgagtttgtcctgttcgggtgaagttacagtatccattacttgtgtttgctcacaacagagctaccttcctgttgtgtaaatgcgtttttgctttagtgcattgtgtgtgcaagcatgaagtagaaacactttttttttctgggtacagtacatgggtatcggtgctctgtatttttttaaactgtgtacacattattaaaatatacattttataaaat

SEQ ID NO: 2292 - DNA, 1517 bp, Homo sapiens
aggtggttatgctgtgacgctgctgtctctaaccaccaagtattttctgcttaaaaagaaatgtaaggggctgcctttagcaaatgtgcgtagtagtctacttaatcctcatgttaaaaatcgaaaaatgggccaggcgcagtggctcatgcctgtaatcgtagcactttgagaggccaaggtgggtggatcacctgaggtcaggggttcgacaccagcctggccaacatggtgaaacctcgtctctactacaaatacaaaaattagctgggtgtggtgccacatgcctgtaattccagctacttgggaggctgaggcatggagaatcgcttgaacccaggaggcagaagttgcagtgagcagagatcacaccactgcactccagcctgggcaacagagtaagactccatccacacacacacacacacacacaaaattgaaaagtgaagacattttaatggagatttaatagtgcttccagactaatgaactaatggagttttggctccactcatgagtgtatttgaaatgtaagtaaccagctacaaagaataatgtcacttcatttgattatgactaccaatcaagagaaggaggaatacatttctgaggagtgatactaaaccatttgagcttaaatgagtacctgattttgcagccattaaaatgagtcaataactatgtggaaatatagaaaaatattttataatataatactaagaaagaggacagtaggccataaagtgttagcagtgttatgctatgtctatataaataagcatgggccattaaaaatagcaaactgaaaacagttcatgtgtggggggcaagtttagaagtaattttaatgtatctaagaagtgatttcctttattgttgtactcaggtacgaagactaaaaatcaggatgaatccagaaaattaacacaaaaaagtatgtattaggctacttcctgtcatagtgaaattaaacactcaaagtaatgtaatctcagctgggcgtggcggctcatgcctgtaatcccagcactttggcaggacaaggcaggaggatcacttgaacctaggagttcgagaccagcctgggcaacacagcgagaacttgtctctattaaaaaaaaaaaaaggaatgtaatttcaatctttttcttgatatatggcttgagaatgataatgtaaaaggaattcttctcttacttcaataaaatgggttttaacataactttaaattcagttaaatatacaatattgaatacctatagttgactttgggatggggactttttcaagtcattaagagtgtttgtttaaggtgatctcattgatggtagttctcagccgtctcaaaaactgcaagctaatcagtcagacattctttaatgaccccaattttttcactttaattgttaccatgttttctatttttactgatttttgctaaagcatgtaagagtgaatttattatagcagtaatcttgtgtttctcctgatgtgcaataaatcaataattcaccagc

SEQ ID NO: 2293 - DNA, 178 bp, Homo sapiens
tacaatgtcatgtatcacccatgtgaaaatgaaaggttttaaaattccttcacccttaaagatcctccaccccaaacagccttcacctctgcctcccccaacatacagagactgtacagacacagatacagtaactgcccaataagtgtttgttgaataaaatagctgtataactttg

SEQ ID NO: 2294 - DNA, 2248 bp, Homo sapiens
gactccagaactaaatccttatgtatgaaattacctacaatgaatgttatgatgttgtatacaaaggtaaccagacagctctccttaagcggctttcggtcagtatttggtaccagtttatcttctacatattcagctcatggaaattacaagttatatatttccttccccattgtttttcaaaatgtattttcaacagagcatgcttaaaaatcatgtaactcattaaaaggccagagagcagagctaacacaacttgccttatcttgtaaaggccttaaaaataaggcttcagattgtttttttcttctgaattctgtcaatttggtatttgatggtgcctgcagttctcttaatgcactttaaagcttcacagttctgaaactggaaacgcataaaacttttaaaattattaatattctaattcaacagattttcattatctttgtaagatttcaactatatttatttgccctttcttctccccctctccctttgcctcttgcattagacagggccaatattttgtcctacaaaatttcctcttggtctctttaaaaatcagttattgtcgtgcttgctgaagattttcagctacagtggattaaattaaagggggcattatttggcctcggcctctacttttttccttttaatcttgaaaggaagttacatataaccatctttcttttcctgatttataaatcttcccatatgctgtttcattaaattgctgtttttttaaggggtgactcagaccccaattcaaagatgaaaacacaaatccttccccagaaaaaaaagtatgtaatagtaggggatgttacaggctccttataaaggtcctctcctctaagcattaaaagtgagaaaaaaatcaggactttgctttggtaatgtattagagttcagttcaaaaaattttgtattaacattttcattggagtaaattttaggaagtatcacattgtagtggcctacctgtatacatccacagtaaaatttcaccatgtccattgagcacctctatgccaagggtgttgagatgatgaaatatacacttgacctatttctttttttttcgagatggagtttcactcttgttgcctaggctggagtgcaatggcacgatctccacctcctgggttcaagcaattctcctgcctcagcctcccaagtagctgggattacaggcgtgagccacagcacctggccagtacacttgacctatttcaagctgactcaatgaacactaatccaagttatattgcttatggcatactaagaatttaacttgtataaattacctctgaatagttacataaacactatcaccattcagtatcctattttttacattaatttttaaccatgcactttaagtttgtgagcctataaaaaatacatagaaaatttatggattaagagcattatatttagtggttaatcctaggtacctccctgcctacaaaggagttcttattaatactgcaggatcttttcttcatgaatatatgcttccatgaaatttaaatttttctgaatagcctaagtatgaaatgaatattttacttgaagatctattttttccaaaacccgtaaatttccagtcagcttttgaggtgtcagatgtgacacagatttctagatggtctttcttgaatactgacagaaatgtcctcaagagaggattatattcttgaaccattttgtattgataggtgggatgggctaacatttttatgattactgaataaacaaaaaatgaaattttcaaatatgcttttttattactgtgcttagaacaaattttaaaatgtgacttaagttgcttaaattccaaggctaatttcattcaacaaaccatgattttgtcatcctttaagtaagtttctcacttttcaaaactcatgtatcaacactgactgacttgctttttttttttttttttttttttttaggcagcttttatgacagcaacttgctccatgtagttttggcttatttaaaaactatactaactttggatttttctgttacaagacttttaacaatctgtatttcgtgattgtgaactcgtattcattttacttttcaaaaacagacttaacataccattccctcacctagcagtactaccacaataatgctatcatggtgccagggaattacaattgtaattcttctaacctataatgtttaaaaaataaaatgtgaattttatgaactaaataaatatttggaaaat

SEQ ID NO: 2295 - DNA, 1091 bp, Homo sapiens
aaaaaaattatggttggtttttcttaatacattctcagagggagaaatgaaacattactataattgtggggggaacattacttgaatggggatatttaccctgtcacaagagccactggtattttagtacttgattattttttctttagtcacaaatcagaactgcttaccatactttttgatgccaaacattataccttagaacattgaagaaaatattcctaagctgatgctggctaaaccgctttaaagttttatttggaagtagaactagctttaaaacggggttcaagaggttgccattagctttgtcatgctgttcaaagtttttaattgttatcatggtttttaaaagactgacagtgtttattattattaaaataaacagggttggttatattgcaatagaataatgagaattgaatttttaagttctatgaaacagccagcattgacattttatttttgttatctctcttctcacaattatgctccactggataataggaaaaacacttctttccttcattttttaaataaaattaatgttgtatttaaaaggtagccatgtagagacacaaaaataaatgaagaagctggacatggtgggatgggcatgtggtcccagctactctggaagctgaggtgagaggatcacttgagccctggaattccatgccagcctatgcaacatcatgaaaccccacttaataaatgaatgaacgactaagtcttgctcaaatgttattatgaggtactatgagtgacttacatgtgttttaaaatgtcagtgtgtttcccagaggcagaaataaaaatactgaatatctttgctcttaaaaaaaaagtaacactatagatttgtttttgttagatgatttgctctatagtagaatatttaagtagactgtgaaatatttattaatatagatgtgaatatcaaaaaatgtttctaaggtattatgatgcatcaactagttcttccatgtaaaataattttagtgcaatatgaagacgtagaaatgtaaaatatgatttgaattgttatcctttatattaagaaaatgttttaaaatgtaagaattccattt

SEQ ID NO: 2296 - DNA, 363 bp, Homo sapiens
aaggacctgtctgtcgctgggctgtgggtgctaagggtaagggagagggagggagccgggagccgtagagggtggccgacggcggcggccctcaaaagcacttgttccttctgcttctccctggctgacccctggccggcccaggcctccacgggggcggcaggctgggttcattccccggccctccgagccgcgccaacgcacgcaacccttgctgctgcccgcgcgaagtgggcattgcaaagtgcgctcattttaggcctcctctctgccaccaccccataatctcattcaaagaatactagaatggtagcactacccggccggagccgcccaccgtcttgggtcgccctaccctcactc

SEQ ID NO: 2297 - DNA, 1904 bp, Homo sapiens
tggagaggccaggcgggagaactaccgcagcaggtgggcgtacggactgcttggcgcatggcacccgcctggcaagtgctagaactaatgctattcttctggaataagatgccaatgatgtggtggctagaaatgcaacttgtataaaacaaaaatgggagagagagaggtattaaacaaataccccccttagaggatactttctgggtttggaaggtgtgcttgctgtggtactgggtgagcggctcatgtgtgctggctgcatggtgctggggaggccacagccagcccttcctctgcacctgcctcctctgggatgtgcatgtgtgtgtacgtgcttgtggtcatgacgcgtgccatttagagctctcagagcagggcagattgctgggctctggtggccagtgtctgtctgtgagggcaggaaggagagctgcacattgagaacaaaggagggacctgaggtggagagaggcccagcaccccaaatctctgccatcacacggtcggggagcccatacattctgcaacaaccagggacttcacaggagccttgttttcaatttgctaacaggtgcataatccctgtgctccttaagcctcatggccttcctacatttccactttatttgtttgtttgtttatttatttttgagacagtctcgccctgtcacccaggctggagtgcagtggcacgatctcagctcactgcaacctacgccttctgggttcacgtgattctcttgccttagcctcccaagtagctgggactacaggcacgtgccaccatgcctggctaatttttgtattttttaaatagagacggggtttcactgtgttggccaggctggtctcgaacacctgacctcaggtgatccattcgtcttggcctctcgaagtgctgggattccaggcgtgagccactgcggccagcacatttccacttttagatcctactccataccacaggtttcatttaagaagaaagagctagataaatgtgctcttctggttaccccaccctgacagagtgcatttttacacggctagcaggggttgagactgcagcctggcctgccagccattggaggtgtttaaggaagggcagataatgtgactctttgcggggtgccatctgcttacccattagcgagcagagggggtttctgcgggtgacccccagcatatttctaggttacttatgggcagatttgtaagtgacaaaactccagctgatgctgggaatggggagagggcccttgagggactttgtggttttgtgcttctggtttcctggccaaccccagggtcacttgtctggaggcccagctgggcactaatgtctgccaccgactatgttacagtgtataaatgattcctctatttgggagagatcttccaatccagaggagcccctcttggactgcctgggttaaatctgcatagcagaagtggttgatgagttcatctgaagaaattcaggccccacctccccaccctgcccctccctgctcccttttgatggtggcctctgggtactcgggcagagtccttgggacaccagcctctctggggttctcaggccatcccgttggggctgtcgcccaggcctaagtgagtcgtgtgcctctattggaggatggctgttcccctggtggttgcatccaagtatctgtctttctttatggaccacgaagggaagcccaccttcctggaggcaggaccttcggcctaagaaacacaggccctggtgctatctgacctggggtccagcgaggtgggaatcccagtgtgtgagcgacaggccttcttctattgacttacaatattctagaaggacctacgtgtggggacacagttttccaaactgaggaaaatgttgcaataaaagaatatgttgtaag

SEQ ID NO: 2298 - DNA, 1945 bp, Homo sapiens
ggctgtgttaccacctttggaaagaagagtgacctttttctgctgtaggaagtgatgttgaggtgacggtggcctcaggattcagggcccagcccctgcaggggcccaggctgcctctcatctccacccactgactgcagactgggctttgggctctggggcaaacttctcttcagccccatggatccttaacctggcagcccgttttggggtgctttcttgagcccccagttctctgtcccctagcactagactcagctgtattgtttttccttctggggagcccactccaactgcacagaagttctgggcctgacaggtagattccagctggaaggcaggcccgtgcctggttttgcgtctgttcccctgagggccatcgtcatcctggagcttcaatggggccttggctcctgtctgcctctcagtcagagtcagggctgacaaaggactcagcttccttagcatctcagcagaaaccttgctctgaagaccagagacagaagggacagaaacaggagtgcctcctgctgtgccaggcccatgggcagtgcaggcagatccctgaaggtcagcactcctgggtcttcatatgccaacaggggcgctcttgacactgtgccttcattttccagcccacagcctgggtctcagggatcttgaggggtagaacatgtctggttggggcttgggaataaacatgatctattgaaaaacctctgtatttatatatcaaattgtttctttttttcaggagttgaactgggaataggcaagtaccaggcaaagaaacacaccctttccttttttttttttttttttctttagagctgtggtcttgctctctcacccaggctggagtgcagtgttgcgatcacagctcactgcagcctcaaactcctgggctccaggagacctcctgcctcagcctcctgaatagctgggactacagtcgcgcaccaccacgcctggctaattttttatttttgtagaaatggggtattgctttgttgcccgtgctggcttcagccttctggtttcaagcagtcctcctgcctcagcttcccaaagtgctgggattacaggtgtgagccactgtgcccaacccagaaatacaccctttctgtgctgttttctcagcagggtgtgagctcacgggatacggtcctgccagactggccctcatagctggtcatgtgccagtcagagctgggtggggcttgcaggtcccggaaggtggtggtcttgacctggcagcagatgcttaaagaatgcctaaggtgggtggcagttggggagttcaagggtgaatgaggccagggcagcccccaggagctgaggccaactctttgagtcaggactgtgccgtgtgcccagggccttgcatgtgtgggccctcgagtgatttctactggcaggctgaaagccctgtgaggggcggctgtgggcggaggccacgcaggaagagtgcttaggagtaacttgtttctaacacctgtgtgctgagtgccaatgctgggtgtggtgttatgatatatattggttttcatccagcattcctgactcgtaactctcatagtccttgttccagtctttgttagaatactgggtatgttagggcttgggacaggcctctgacctctgggtatcctttcactaatgttcgcccacctttttcacagtgggtcctaaagaccttcccatgagagggtctcaatcctaggggaaggaatgttgatgtcatgaaccttccataaaaacccaagaggacagggttcagagagcttctggatagctgaacacctggcacttcctggagtgtggcgtgcccagggagggcacggaagctctgcactccttccccttccctcattccttgctctatgtgcatctcttcatctgtatcctttgcgatatcctttataataaaccggtaaacataagt

SEQ ID NO: 2299 - DNA, 2264 bp, Homo sapiens
tgtttggacggtgaaaataaaagagttttacttctctggactgatcctattcacagcttcctcatgaacttttctaatagaacaaggaaagctctccaaccatgtctggcgttgagaagccaagagtctctgtcaactctctcattgcccagtggtgacatgtgctcttctccacactgttgggaggtaatgctgccccacgtgctggtgcaggtcagtatcctgggacttggaagctggcaggatttgccgggtaaagctgtatgccatcatggggcacctgaaaagaaaaacacgtctcaccactgtggttgattcaaaagaaagtgattctattttttaaagaaagcgttgttaatgtaattggtatccctcctaactttttgagttcacaatttacttggtccagagttttctattcttttttttttttaaactaatgaatgacatttagatacttcataaaattatgaacagatatggaggccagagctcatttgggtaaacttactcctgctgagttagcaggttggtgagagaagctcccctgagctcacctgtctctctgactgccttggagtaggtggcataaccttgtgcacagagaactagaaaaggggcagaaccccggccttgcagttgtggcaggtttccactgtggtaagctaggttcattcctcatcaaggaatgtgtagcagattgttcactgtggaggagttaattatagaatgggttattgttgttattcttactcatgaagttacagattttagccagtctttgcttttatacttttgtgaaatttaatttctctctatagcaccttcctttttcgttttcagttatcaaaagtgactttgacctcataaaagagttgagaacatctctcgtgtcacatactgcaggtgcatcagttacttttgcacagattctagggggacatttttctgaataggaagacaggacaaagttaacagcttaagggctcttaattctgtgagttgaggacttaaaagtattgtagcatttgtttggatccatgaaaaatgtattcagtgggctttaaaatttccatttgcagaatttggtctctcaggctgtttgggagctcttttttttacattttttctcctttgacacctattttattggtgtttaaagtaaaggttaacatctgtagcttttccaggtttttttttttttttttttttttttggtatgaaattgtctttctccattgcagaaataagctagggaaacactaacccaaaaactttctgtagagctgttcctttggaggcagcatcacttattggcagtaaagactcagtataaaagcaccggcatccctacttgggtgatggggattaattttatagcattccattttcctagtgccacatgtgaaattggattttgatgatcttaatctatattctacccttataataaaagatcaaaagatatatctcctatgaacagattggagataggagatgaaaagttgggaggatgtctttattctaatgtgagggtagggaaaatgtggataacattactggggtgagggaggcattgttctttagttggagttctcattcttattctccagtactgacttgtggggaaagcatactttttcactgccaggtactgaatgcagaggctcagtgaagtatatatgtgggaagtgcatgcatttcgtttattagcaaacatagctggattaagacaaagttgttggtttggaaaggggttaaagccttaagtgaacaaatctagctaacagtgaatgaactaggtaatataacttgcatatttttaatttcctttggttaaaggtcccccatacttctctgttcggagacatgagaagtatgattacttcagtgttagttttcttaattttttttttcccctatttgtcccttgtcactttgttgcaagctagaaatctgtgggttatacatagggcagctctttgtgaaagtggtttattccactggagaaaggggattgaaaatcagttagaaccaatgtatttcttgccccacggaacactattcctataagatagctgaaagaagctgctgtgaggagctcagctccaaacacaggatcagcaccttgtataggaattcccatgaattatgacttctcattctgttttatcagagtgcatatatgtcctacttcaggaaaagtaaaacagtcatttacgaaagaaagtcaatctgtatcctaagcattttaataaaaagtt

SEQ ID NO: 2300 - DNA, 325 bp, Homo sapiens
tgagatttctctggaatacaagctgatattgctacatcgtgttcatctggatgtattagaagtaaaagtagtagcttttcaaagctttaaatttgtagaactcatctaactaaagtaaattctgctgtgactaatccaatatactcagaatgttatccatctaaagcatttttcatatctcaactaagataacttttagcacatgcttaaatatcaaagcagttgtcatttggaagtcacttgtgaatagatgtgcaaggggagcacatattggatgtatatgttaccatatgttaggaaataaaattattttgctgaaacttgg

SEQ ID NO: 2301 - DNA, 2381 bp, Homo sapiens
gccaccctcctcatgcccacccagcaaggggcagaggccacaggcctggaaccctggaagggagggaggcccatgggaggccaagcctgggggctgggggcgggtgggccgagcagcacgtggtgggtggggtgcagctggtctggatagatagcttacagcagtagtgggctctggaatgcccaagggaagaggcaaggtggggcctgcagcctggactcggcactcacagctgctgtgcaaactcaggcagatctcctgccctctctgagccttgtcacttgaaaaaaacaggaccctttccctcctttgggctccctggaggtttttaagcagtacgtgcctccaagttacctccagatcagcaggcacaggtgggcattgccaggtattttctgagcccctgcgggtttgaggccttgtttttagtgctgagagccagttgctgccctgagaagagaagacaacctccatctatttattgcttcctgagaactgacctggatgcggccctctgcagggcccagtcttcagtcctgtggtccctggactggtgggaacctgaactaggagtcctgggagagctgtggtgggaatatgggctggcactgctgcagggcaagaacattcatgtaggagcccgaggaccagcaggctgggaatggggagcaagtcacgtcagctctgtcattccccacagttaacaaattggcggggtgggaagtcctgagtgctccgtccctctagcatcactcctgagctgcgggagaggtggcccagagaacagcagagtcagttacacctgcagctcttgtctaaagtgattagatggccaccctcaccactgtccagtccagcagcagcctggctgccttgtcatggcctcctgggggcagaaggcgatgtggaccacgggatttgtagccagccagctcccaggccaacgcccaaagccctgatgacctggttcttctgaggccctcaacctggcatcttagggtatggtcaggcaacagggtgaccagctgtcctggtttcccaggacatggaactttcaatgctaaaactgggacagtacccagcaagtggggatggttggtcccctaccaggagagggcctggggctcttgcttcccgagaacgcctgtggcttgaagaaccttgactgcttggtcctcaggtatctacctcccaccttctcctcatctgtggagcaagccaactcagtgccccagaccccacctgatctgcatctttgtttgcatctccagagacacctgaggccccagagcttgaggcaaagccaggccgtccaaatcctgtgtgccgtggacgagtggccactttactactcctaaggctaagatgttgagagctcagaccactgctcagagcagtaatccctgctcagaatgctcccagttccctcgtccctgcccaggtctcttgtctcttgggaaggaactgataggtcgggccattgttgggccatcactgagcgctcagtatctcaagagactctgttcattctgctcgtatcccaaggcctggttggtcaaactctgggcaaagggttttcaggatgaggaggtcaagacaggatctccagagctaccgagttcatctgtgggtgttgggggcaagtgggggctgaagtcctgtgcaggctgcgctggccccacctgccttgtgccctggagtggggtttctccttgttgaagaagaggcatccttctctgatgtgcacaaacacaatgtatgaccagagccttgcaactcaaagtgtggtctgtggaccagcagcggcagtgacacctgggagcttgttaggaatgcagagtctaggcctcaccctatacctcccgactcagaccctgcattttagcaagacccccagctgattcctataagcactttagagtttgagaagcaaggacctaggctggggatgtcctccgagcagagggtgaagtttctctcagttctctccctgccacttccagggatctgagcctgtgctcagcctcctccctaacccaccctgggagacacttggcctgttagattgttccagagtctgcatggcactcctgaagaagggagtgtgacctgcagtcaccaggagatgagggttaggtgtgcccagccctccagacccggcctttctggttaacccctgcatgccaagctgcctgctgccccaggtcctcacctcaggcctttgaaggggcagcttctggaagttgttttctcctctgcttggagagtttgcccttgtctgtcttggaaagtgtgggcagccacagatgcccccaaatcagagctcacagtgagtgagcccctaagcttcagtctgcaataaagaatgcattggtttcatc

SEQ ID NO: 2302 - DNA, 621 bp, Homo sapiens
tgacatcctggagggagactggatttgcctgcactctggaaggctgggaaactcctggaagacatgataaccatctaatccagtaaggagaaacagagaggggcaaagttgctctgcccaccagaactgaagaggaggggctgcccactctgtaaatgaagggctcagtggagtctggccaagcacagaggctgctgtcaggaagagggaggaagaagcctgtgcagggggctggctggatgttctctttactgaaaagacagtggcaaggaaaagcacaagtgcatgagttctttactggattttttaaaaacctgtgaaccccccgaaactgtatgtgaaagttgagacatatgtgcatgtattttggaggtgggatgaagtcacctatagctttcatgtattctccaaagtagtctgtgtgtgacctgtccccctccccaaagattaaggatcactgtatagattaaaaagagtccgtcaatctcattgcctcaggctgggttgggggagccccacagctttctggctggccagtggcaatctactggccttgtccagaggctcactggagtggttctctgctaatgagctgtacaacaataaagccattgtctagtt

SEQ ID NO: 2303 - DNA, 705 bp, Homo sapiens
gaacagtgagcttggaaaggaccagtatgcttggactgaaggggttctcacagtgggagccagggctgtcttcgtattcccattagaccaagcttgtccaacccgaggcccgcatgcggcccaggatggctttgaatgcggcccaacgcaaattcgcaaactttcttaaaacattatgagtttctttttgctattttttttttttttttagctcatcggctatcgttagtgctagtggattttacatgtggcccaacacaattcttcttccaacgtggcccagagaagccaaaagattggatacgcatcagacagatggaaaagggagattcagactgtttttcagggaggtggctgggtttacacgctaatcccgattcaccctgtccaaactgcctaagccctccgccattctcaagccctgcagtcacagctacacagatcacagcttcagccaggagctgggcagaaggccaagaggctgttcccaccaggctgctcagggctggtcttttaggacccttcccttgagccctctatggtgtggcaaagccttcattgccttaactggagccccatcagctccagctgctctgtcttctttgcccacaatgctttgcccctgagacaaatggaggcctgtcctgacctgtctcaccatgtacatagcttgataaagggccaataaatatgatgttatggtga

SEQ ID NO: 2304 - DNA, 137 bp, Homo sapiens
ggggccctaacacttgcacctgccttgctcaagagcagccccaagggttcaggggtgtttctgtctccaccaccttcacagcagtacctgattccctaccgtgaaaactcttactaaataaaaccgtcttccctgag

SEQ ID NO: 2305 - DNA, 440 bp, Homo sapiens
accctgcccttcctctttgaattcttccgggggaaggggtgactgaactgggagtccagggagggagctgaggagcccttaccctcccaccactcccctcccaagacccagccgccgccgttgagggctgagtccttgctgtgggatgtgccagtgtccccaccaacaccaggaatttagaccttttccctgcaccactctcttcatcctgggggctctgttacactaatttgaataaactctcccctttctttgcaacttcccagcaacaataatgattttcttgccaggccgtctcttgctccctaattcatttcccaggaagctgtgatacagggtgaaataaagtcttgtcttagaaaccaggaccctaaaccccacactatgtaatagaaacacatgtgtttttatgtctcaaataaaactattatatcacttgg

SEQ ID NO: 2306 - DNA, 3697 bp, Homo sapiens
cccagctgggggacagtgggctgttgtggctgggtctggggcaggtgcatttgagccagggctggctctgtgagtggcctccttggcctcggccctggttccctccctcctgctctgggctcagatactgtgacatcccagaagcccagcccctcaacccctctggatgctacatggggatgctggacggctcagcccctgttccaaggattttggggtgctgagattctcccctagagacctgaaattcaccagctacagatgccaaatgacttacatcttaagaagtctcagaacgtccagcccttcagcagctctcgttctgagacatgagccttgggatgtggcagcatcagtgggacaagatggacactgggccaccctcccaggcaccagacacagggcacggtggagagacttctcccccgtggccgccttggctcccccgttttgcccgaggctgctcttctgtcagacttcctctttgtaccacagtggctctggggccaggcctgcctgcccactggccatcgccaccttccccagctgcctcctaccagcagtttctctgaagatctgtcaacaggttaagtcaatctggggcttccactgcctgcattccagtccccagagcttggtggtcccgaaacgggaagtacatattggggcatggtggcctccgtgagcaaatggtgtcttgggcaatctgaggccaggacagatgttgccccacccactggagatggtgctgagggaggtgggtggggccttctgggaaggtgagtggagaggggcacctgccccccgccctccccatcccctactcccactgctcagcgcgggccattgcaagggtgccacacaatgtcttgtccaccctgggacacttctgagtatgaagcgggatgctattaaaaactacatggggaaacaggtgcaaaccctggagatggattgtaagagccagtttaaatctgcactctgctgctcctcccccacccccaccttccactccatacaatctgggcctggtggagtcttcgcttcagagccattcggccaggtgcgggtgatgttcccatctcctgcttgtgggcatgccctggctttgtttttatacacataggcaaggtgagtcctctgtggaattgtgattgaaggattttaaagcaggggaggagagtagggggcatctctgtacactctgggggtaaaacagggaaggcagtgcctgagcatggggacaggtgaggtggggctgggcagaccccctgtagcgtttagcaggatgggggccccaggtactgtggagagcatagtccagcctgggcatttgtctcctagcagcctacactggctctgctgagctgggcctgggtgctgaaagccaggatttggggctaggcgggaagatgttcgcccaattgcttggggggttggggggatggaaaaggggagcacctctaggctgcctggcagcagtgagccctgggcctgtggctacagccagggaaccccacctggacacatggccctgcttctaagccccccagttaggcccaaaggaatggtccactgagggcctcctgctctgcctgggctgggccaggggctttgaggagagggtaaacataggcccggagatggggctgacacctcgagtggccagaatatgcccaaaccccggcttctcccttgtccctaggcagaggggggtcccttcttttgttccctctggtcaccacaatgcttgatgccagctgccataggaagagggtgctggctggccatggtggcacacacctgtcctcccagcactttgcagggctgaggtggaaggaccgcttaagcccaggtgttcaaggctgctgtgagctgtgttcgagccactacactccagcctggggacggagcaaaactttgcctcaaaacaaattttaaaaagaaagaaagaaggaaagagggtatgtttttcacaattcatgggggcctgcatggcaggagtggggacaggacacctgctgttcctggagtcgaaggacaagcccacagcccagattccggttctcccaactcaggaagagcatgccctgccctctggggaggctggcctggccccagccctcagctgctgaccttgaggcagagacaacttctaagaatttggctgccagaccccaggcctggctgctgctgtgtggagagggaggcggcccgcagcagaacagccaccgcacttcctcctcagcttcctctggtgcggccctgccctctcttctctggacccttttacaactgaacgcatctgggcttcgtggtttcctgttttcagcgaaatttactctgagctcccagttccatcttcatccatggccacaggccctgcctacaacgcactagggacgtccctccctgctgctgctggggaggggcaggctgctggagccgccctctgagttgcccgggatggtagtgcctctgatgccagccctggtggctgtgggctggggtgcatgggagagctgggtgcgagaacatggcgcctccagggggcgggaggagcactaggggctggggcaggaggctcctggagcgctggattcgtggcacagtctgaggccctgagagggaaatccatgcttttaagaactaattcattgttaggagatcaatcaggaattaggggccatcttacctatctcctgacattcacagtttaatagagacttcctgcctttattccctcccagggagaggctgaaggaatggaattgaaagcaccatttggagggttttgctgacacagcggggactgctcagcactccctaaaaacacaccatggaggccactggtgactgctggtgggcaggctggccctgcctgggggagtccgtggcgatgggcgctggggtggaggtgcaggagccccaggacctgcttttcaaaagacttctgcctgaccagagctcccactacatgcagtggcccagggcagaggggctgatacatggcctttttcagggggtgctcctcgcggggtggacttgggagtgtgcagtgggacagggggctgcaggggtcctgccaccaccgagcaccaacttggcccctggggtcctgcctcatgaatgaggccttccccagggctggcctgactgtgctgggggctgggttaacgttttctcagggaaccacaatgcacgaaagaggaactggggttgctaaccaggatgctgggaacaaaggcctcttgaagcccagccacagcccagctgagcatgaggcccagcccatagacggcacaggccacctggcccattccctgggcattccctgctttgcattgctgcttctcttcaccccatggaggctatgtcaccctaactatcctggaatgtgttgagagggattctgaatgatcaatatagcttggtgagacagtgccgagatagatagccatgtctgccttgggcacgggagagggaagtggcagcatgcatgctgtttcttggccttttctgttagaatacttggtgctttccaacacactttcacatgtgttgtaacttgtttgatccacccccttccctgaaaatcctgggaggttttattgctgccatttaacacagagggcaatagaggttctgaaaggtctgtgtcttgtcaaaacaagtaaacggtggaactacgactaaa

SEQ ID NO: 2307 - DNA, 1142 bp, Homo sapiens
gaggaggaatattccatcttggcagaaaccacagcattggtttttttctacttgtgtgtctgggggaatgaacgcacagatctgtttgactttgttataaaaatagggctcccccacctcccccatttctgtgtcctttattgtagcattgctgtctgcaagggagcccctagcccctggcagacatagctgcttcagtgccccttttctctctgctagatggatgttgatgcactggaggtcttttagcctgcccttgcatggcgcctgctggaggaggagagagctctgctggcatgagccacagtttcttgactggaggccatcaaccctcttggttgaggccttgttctgagccctgacatgtgcttgggcactggtgggcctgggcttctgaggtggcctcctgccctgatcagggaccctccccgctttcctgggcctctcagttgaacaaagcagcaaaacaaaggcagttttatatgaaagattagaagcctggaataatcaggctttttaaatgatgtaattcccactgtaatagcatagggattttggaagcagctgctggtggcttgggacatcagtggggccaagggttctctgtccctggttcaactgtgatttggctttcccgtgtctttcctggtgatgccttgtttggggttctgtgggtttgggtgggaagagggccatctgcctgaatgtaacctgctagctctccgaaggccctgcgggcctggcttgtgtgagcgtgtggacagtggtggccgcgctgtgcctgctcgtgttgcctacatgtccctggctgttgaggcgctgcttcagcctgcacccctcccttgtctcatagatgctccttttgaccttttcaaataaatatggatggcgagctcctaggcctctggcttcctggtagagggcggcatgccgaagggtctgctgggtgtggattggatgctggggtgtgggggttggaagctgtctgtggcccacttgggcacccacgcttctgtccacttctggttgccaggagacagcaagcaaagccagcaggacatgaagttgctattaaatggacttcgtgatttttgttttgcactaaagtttctgtgatttaacaataaaattctgttagccag

SEQ ID NO: 2308 - DNA, 3725 bp, Homo sapiens
acgccctcaggagccggctgccgggggggactcaacagcagagctctgagcagcagcaggcaacttcgagaacggatccagaaatgcagtcagaaggaccctgctccacctggggggactgggagtgtgagtgtgcatggcatgtgtgtggcacagatggctgggacgggtgacagtgtgagtgcatgtgtgcatgcatgtgtgtatgtgtgtgtgtgtgtggcatgcgctgacaaatgtgtccttgatccacactgctcctggcagagtgagtcacccaaaggccccttcggcctccttgtagctgttttctttccttttgttgttggttttaaaatacattcacacacaaatacaaattgacaggtcaaaatccatgaaatgagatcccccagccgtgtcctccagcccagccctgaccccttggtttctaccctggctccccttggtttctaccctggctcaaccgacccctgtctgcccttctccctcttgcttctgaggtcaagctctggcctgcgagcctgtccccattgcaaaggggagggaggggcagggagctgtctaccagctgaggtcctcccaaaactgggccgatgtggtgtgacatccccaccagcctcagatgagacgggccaggacgcccagccacagcaagccctgtccctttgccggatccccaaacactagagaagctctcctaacccaaggcggagaatgaaggtggtggcggcagaggaggagggcagcagctgagaggccagggacagggtgcctcgccaagctgtctgaggtctgtcccaggtggcccaggtggtgcaggtagaacagggtgaggagagggggtcggctcagcaggaggaggctgtggctgcagagcctgggggagcttttaggtgttgagatggggcagctctgaatcctagaccctggaatagcctgtcccttttctctgggtctcgtggtggagccatgatctgggctgctctcttggggacactgggtggtggttacacagttgacctctgcctggctcccccttggtgcaactcctgcctccatcccccttgctggggtcccctcatccacttgagggcgcctgagggccaggagcagcaggcaaggagcctgggtctaggctaagggggtgtgtgcccacctcctccctgacccttaacactcctgtcctgcccagaccaacagagagagctgtccctgagaccccggagagaagcagctgccgaaagctgcagcctttccgcactctgagaccatgatcttcctcctgccaggggagagccacccacaggccatgtccagccccacttccctcagcccccagggcttccttctggcccctctgaggattccctagggctgccccgcagaggggcttccccaagctctgttttgaagcctgcaatgtggaaaagtgagaagtcagagggaacaggacaggtgcagccgggctctgaggccacacctcacacctcgctgttccccaacatcccctgagcagtgtgagctcatctcaccagatgagaagaggccctgtgcatttcttttgtttgtttgttgctgttttcccccacccatccagttctcctcagcaaagcaaattccttaacacctttggtggagaatttcttacccagacttggggctgtgatgcccttcagtgcgtggtgagtgcagcgtgtgtgcgtgtgcctgtgtgtgaacctgggggccatcctggtggcctgggagcgtgaggagaggccccctgtgtgctgggtgagtggtgggtgtggggtcaatgcagtgaggctctctgggtgaggctcccaacctggcagtccccagcctcccagcatctgtgagcgtctgttggactttacagaagagcctcatcctgtctgcccctcactctgccctggaatcaacatcttccgagtccttcttgggggaaatagcagagccccacttaactccataaactgcttcccattccgcagcccagttctgattgttgaggtgtcgcgtcgttccaggtcccccagtcccctctttctcctgtcctctctctgtccttcacctccccactccagccccggctcagttcagggaaatgctgttccacatcagccctctgctctctgaggcagccgcgcctctgactcggagctacttgaaacttctgctcttgctaggattggagtctacctatctcttccatttgtcccagctggagttctggaactttcctcctcggggtgggggtgggggttgttaaggatgctggggggcctggggaaggaaggagttcagaggaagggtgtcccctgtcctcttgatgtcaccctccgctcctgggacacgtgctctctctgtctctgggtcttctggctgtgcacgtttgtgtgtccttgtaaatatgttttaggaagaaagcaaaagggactgaactagcctctggtaggattgcaggggtccagccttgcctgtttccgaagcccccacactgcctttcgccctactgagactggtcccctcaaaaggtagacaaaacagcagctccctgtggagctgaagggcggcctcaaagtggctttttgttagacaaggttaaggtttcctcatgagcaaggttgcagatcggtccttcctcagctccttgatttgtgaccttgaccaaggggcctgccacccagcccctccagtgccctctcctcgatgcctcgctccttcctgcccccactcccctggcttaggcaggtaggggaattagggccatgctggaagaagcttaaccatgtgttcaaagaacggtttcttgcttgcttggtcctggaactccccttggctgccccaggcctccttggcccatgggtgctgggggaggtggatgtcagatctggtaggttgcagcagagaaaataaatgtgccttgagagaccactcagagagggtccaagggtgatggagaaggaagcatggcctgggagcttggaagggaggggtggtgggtggcggcatcttgactgccccctgttgtcccacacgtggggggtggtcaccccccttcactccagcccgcctgccttcagccttccatgagcttcacctgcttccaacttcactttggagggggtggggtccgttggcatcaacacggggaccctctgcttcaccaaagcccgagccctcagcccctggggagaacaaatggctgagctttgatacctggggtcgtcgagaggctgcgggctggcggcagtcccaggggagagacaccacagaaggagacccagacatcccgaggaagttcccagcagagcaaactgctttccagcctgaagcctgcttaaactgtgtgatgtgcaataactgagcttagagttaggaattgtgttcaagtgcttggatttccgtctgtagatttaactgctgaaattgtatctctcagtaattttagatgtcttttaaaaaattgaaaaacaaagtgttagactgtgtgcgtgtgcgttgatgggcactcaagagtcccgtgagtcatccagccctgcctttcccctgcgcccccatcctctcacgtcccgccccgcctccacttggggaccctgcctcgtgtcgtctttatctgcctattactcagcctaaggaaacaagtacactccacacatgcataaaggaaatcaaatgttatttttaagaaaatggaaaataaaaactttataaacacc

SEQ ID NO: 2309 - DNA, 814 bp, Homo sapiens
ggtggatcttggaaagcactagaaactaaacatcttcaccaggtgctgaagaaaagtgtcttcgttttaattgccaagcagggatgtggacatttggatggtgactttcctgggtggttccccatagattcaccattgcctctaatggtgtctacacccgtcatactaccagctgagatggtggtgggcataaggagaatttgtgcctataacccttagtgtgttctggttttttttcttttaatttttaaattgtcgtaaaatactcataaaacatactgtcttcaccatttttaagtgcacagttcagtaacgttaactgttaatacattcataatgctgtgtggccgtcaccgccgtccatctccataggcttctcagcttgtaaaatggaaactgtacccattaaacagtaattcccactcctcccagcccccgcagccaccattctgctttctgtctctctggttttgactattctcagtatctcatataagtggaatcatacagtgacttgtctttttgtgactggcttatttcacttagcataatgtcctcaaggttcatccatgttgtgtcaggtgacaggatttccttcctgtattatacatataatggaatgttccgttacatgtgcgtaccacactctgttcctccatcagtgaacacttggcttgcttcctcttgactattgggagtagtgctaatacagacacgggggtgcaaatatctctttgagactctgcctttaattcctttaccacccagagttttatctttagcaaaataaccattaaagttgtttgccttttac

SEQ ID NO: 2310 - DNA, 2980 bp, Homo sapiens
tcctgggccagccacaccaccgaggtccaagtatgagccagggctgcctccaccctgcaactcctggcagctttggccctggtcatgagcagaggagggagggggagaaagggaggaagcctggtgattgtggcaaagactcctgtccccagcctgacctccagcctccagagaccgagcagctgtggggcctgctgggaaaccaaggtcggtttccgccctctagcgatgctgtcctccccactcctccgctctgctccctggctccaggggtgtgggggaccccagaaccaggcagagtgggaacttgaaactgttgctgagggccacccggggcttcttggtccactccagccatcagtcagcacggccctttctccagcacagcagactattgtccgtgccctggtatttaggccatcacatatggtggggcccaagagagccccatatgcacactgcctgcctgataccaggaagaaccatgtgggaataggtgggccaagagccctcccctttctccatccctccagctaggaggaaatggagcaagatgaacaggcagccacgaggtgggtgggagctggcagtcttggtggcggcaggggccgcgggccctgaccacccccctctggtgggatctgaggcactctctcgaatgccgtcacacctggcagcctggaagccacaggcatccggccttgcccaggcatctcgcctgcggtctgaggaagggaacagaaggtcatgagttcagggtcagacgcagccgctcagcacaggaggggtggaggggaaatgagagttgctggtagcaggctccctccttctgcagcccggcgaatgggggcgctgggctctgttcccagcgtttgccagaggtggccacttcagccaagcccagagaagtgtgggcagaagcagtgaaggttcttctctgtgtgggtgccctgcccaccccctcctttgcctgtgtcctcccggcctggatccatggctgactctgcctggaggccatttgtgcctgcctctgtgctgccgcaggagggcaggccgcaagtggggttggtgggggtcgagcgggcagcacggtgcagcggtgcagtggcaaggggggctacttgtgtggcataagctagaggagccggtgccgcctgaatgccgagctaactgttgccactctcctccccagactatgaaatccctggagaatttttggtgacatgcactgagccaaggtgatggactgtatatttgaggaaagacaaacaaagaaacaaaattaaaatggaattggaggccgaacgctgcacagctgccctctctctcacccagtaaatgcagaaagctcttaggacagacagaaaacctgccatggggctgcttccctccctcgcagggctggcggaggctccgcatcgcctctctcctaggatacagaaaccatggcaacgaaagtagaatgtaaaactcgcagcagatatcagtgggaagggctgggggagggggcacccagctgcctttcctccctcacaggagccaccaccagccacctctcaggagaagccagaggccctggccaaagataggaggaagaaagagaactctccatagaatgtaatttatagatgcgtgtatatgtatatatatctatttatatgtaaataggcatatatgaagatatatatatatatagtctactttttaaactctgcagggatttggttaagttgttgagctgatttcttccatgttttagaaaatgaggcctgtttggggaaggtaccctggtgatgtttttgctagacattagctgtagctgacagcataaggagagtcgcatcagagcttttcacagccccccgaaaccccagcctggttttgatggcagcagtaatcatgatagtgtgaacccgcgaaggcctcaggattatggttaacctggagaggagcaggccatggaggcaggtgccaggtcagtattgagtcacagtagaggccccacaaggacctgcttgggtgagaccacctctcccctctcagcagcgctggtgggctctttgtcctggtgcccaggagccctccagccccctgcccacagaagggaaggcctgcagagggggccaggatctacctaaccatttccccacccctaagtccctcagtgggctttgccttataggtgccacagggcacagctccatcattgccactggtttttcctaagtcatgcaccaaggacttcagaaagttcttcctccgagtcagtcagtggtgccgggaccccagggcagcctcctcgactcctgaagaaaaggcagtgcccgtggctgcctctgtcttcactcgctgttgatgtgaccgccaggcctcctctcgtaccttggacaaaggatacacctgaaccagaatagttttcttaccctcacattgaaatgaggattttgcttaaaacagcacttgccgccagtgggaggagggaggttttatttattcccacagtttctcctgggccttctggaatgaccatgttttcctgtggcggtgggtgtgtcattgcgcccgccgtcttccaaagccttacttccccaagctgccagccaggaggtgataaccaccctcccagagtttctctcggctctttttttaaaagtcccccaacaaataggattcttgctgggaaaggaagttcggtaaggaaatgtcaaatctggtttttaaacaaggtccaaccctgcaatgaagcagccacttcagcccagagagattataagaactgatgtggccagagtgcctacccactgtggccccggtgctctgcccccacgccccgaccatctggtcttggtagatgtccctagacgggctgagccatgtgcaataagaacatagatcctaaaggatcctctggaagctgtatttcttgaattagaattctcaaattgtacatctgttaatatatgtttattatgtgactggc

SEQ ID NO: 2311 - DNA, 855 bp, Homo sapiens
ccccacactgcaagaggggacccctccacccccagtaccctggaccccctccgcagagtctcggcagagccctttgtgctgctgcttctggaagtagtcccccttcctcccgggatgacctcaggactctgtcggtttcccctctttacccttccccgtccccgtgttctgctgggctctgattctgcccaatgagtatccccataggttctcaaaaacatgaacaagtctgtaaagctcagacatttgtcagcctcaacagcaccacccattcaagcatcctgtggataaagaattcagggaaccatccacacacctgccaaccctgggaagcatccagttctcaaatcgtttttgctatggatttatactaacaagaacattccttgacttccctcctgctggtgttttaaagccacaagtagggaagatatctggcaggcagaaagaagtctgtgatgataaacaatgatgaggatgacctaggcaccctacgctagtgtgagaagcctgcgccccaggaaggatctgtgttagtccctgggatggctccaaggcctgctctaggaaggcagcatgctcagtgggaacacagcaagattcagaatttaaagtagttgcttcatggctctgtgcactcccttttcttcctcgcagcctccctaagatgactccagtgtgaccctgtgcttagtgagcaatagtgattgagctcatgttccctgcaagtgccatttcctctccaggatgggcctctaaagctgaggcctggctcagagcctgtttgccctctgtcttaaacaattgtaaatatcacttaaattataaccatttgcaataaacatccccaaagtt

SEQ ID NO: 2312 - DNA, 437 bp, Homo sapiens
ggaagaagtgattccttcctggttttgagtgacaccacagctgtcagccttcaagatgtcaagtcttcgagtcagcgtgactcattcattcttccaacagtttggacaccacaaagcaggagaaagggaacatttttctacagctggaaagtgagtcctatcctttgaggaaatttgaaaaaagacatggagtggtttgaaagctactcttcatttaagactgctctccccaaccaagacacatttgcctggaaattcagttcttagcttaaagactaaaatgcaagcaaaccctgcaattcctggacctgatagttatattcatgagtgaaattgtggggagtccagccatttgggaggcaatgactttctgctggcccatgtttcagttgccagtaagcttctcacatttaataaagtgtactttttagaacatt

SEQ ID NO: 2313 - DNA, 998 bp, Homo sapiens
caaacaggcttccctttttctcctattgttgtactcttatgtgtctgatatacacatttcctagtcttaactttcaggagtttacaattgactaacactccatgattgattcagtcatgaacctcatcccatgtttcatctgtggacaattgcttactttgtgggttcttttaaaagtaacacgaaatcatcatattgcataaaaccttaaagttctgttggtatcacagaagacaaggcagagtttaaagtgaggaattttatatttaaagaactttttggttggataaaaacataatttgagcatccagttttagtatttcactacatctcagttggtgggtgttaagctagaatgggctgtgtgataggaaacaaatgccttacagatgtgcctaggtgttctgtttacctagtgtcttactctgttttctggatctgaagactagtaataaactaggacactaactgggttccatgtgattgccctttcatatgatcttctaagttgatttttttcctcccaagtcttttttaaagaaagtatactgtattttaccaaccccctctcttttcttttagctcctctgtggtgaattaaacgtacttgagttaaaatatttcgattttttttttttttttaatggaaagtcctgcataacaacactgggccttcttaactaaaatgctcaccacttagcctgtttttttatcccttttttaaaatgacagatgattttgttcaggaattttgctgtttttcttagtgctaataccttgcctcttattcctgctacagcagggtggtaatattggcattctgattaaatactgtgccttaggagactggaagtttaaaaatgtacaagtcctttcagtgatgagggaattgattttttttaaaagtctttttcttagaaagccaaaatgtttgtttttttaagattctgaaatgtgttgtgacaacaatgacctatttatgatcttaaatctttttt

SEQ ID NO: 2314 - DNA, 58 bp, Homo sapiens
ccagcacatttagcttctcttttttctttttaaataaatattgaatatgattctgttc

SEQ ID NO: 2315 - DNA, 574 bp, Homo sapiens
tggaatttttctcttcaaaggtccttaggtgtaaattgatgccatcgtaggcaaggtgcaggcaggatttgaaggcaaaagtcaattcagctcttgagaaaaggtgtctttccagcctgaatttttcagattgactagaccaagcagaatctctcaacctgatcttagtatttcctagaaagcacttgacattgtgtgaggtctcacctgaaggaacttggtggtgacatttgggagggtggagggaggcagtgtccttcctgacagcacttgcctccatggatcttctgtacacagaactcttatctaggatgtggttctgttcatgctgctttctgcgatgtgcgtgtctgttagaataggctctctacccagctagaacaccttccagacacttgctggacagctatcttccacatacttcccagtttacatttggtcttaatgatcttgaatagatcctctcttcattttactcagccaggttttgtactgatgtacaggtgttaaattacttcaagcatttttgtaagaggtgtatataattcaataaaaaaggtaaaacatgatgatt

SEQ ID NO: 2316 - DNA, 2007 bp, Homo sapiens
atgagctgactttagtgagcatagcagtgggaacaaggtcaaggtccttttgaaacactgcagcgatcttaattttgttagatttggagttcaataaatggagtatcctgagttgcccttgctcttctggcctggcctgcacagggcccagggagagatttgttcttgtgtgacttagagctgggtgtgggtactaattagcttttttcgactttgtcttgggatagacagtggctatgggaggattggacttttgagttgggctctgggtctcttggacaactttacaatttactggcttccaagacttcctgcttcaaaacccccagccagactattcatggcccattcagatcttcatgttcatcccacaagtgcaagaacagttaacctttcttaattgatttttgtaattggaggtttatattgtcttgcctaatgcatattctctttttttttttttttttgagacggagtcttgttctgttgccaggctggagtgcggtggtgcaatctcagctcactgcaatctccacctcctgggttcaagaggttctcctgcctcagcctcctgagtagccggggagctacaagcatgcaccaccacacccagctaattttttttttttttttgagaggagtctcgctctgtcgcccaggcttgagtgcagtggcgcgatctcggctcactgcaagctctgtctcctgggttcatgccattctcctgcttcagcctcccgagtagtcccaggagtagctgggactacaggtgcccaccaccacacccagctaatttttttgtatttttagtagagatggggtttcaccatgttatccaggatggttttgatctcctgacctcgtgatccgcccgccttggcctcccaaaagtgctgggattataggcgtgagccaccgcccgggcaaatttttgtatttttagtagagatggggtttcaccgtgttggccaggatggtctcaatctgaccttgtgatctgcccacctcggcctcccaaagtgctaggattactggcgtgagccaccactcctagccttaatgcatattcttaaatatacaaaggtagatttgttatgaaaattgctttggggctctaataacctaccttttaagaatgagaaactgctgggcttaagggagttcagtatgaatcaagattgaaccattcaaatgtggctgtgatttctgcatatatcatagatgggatccttctgagaatactggaatagggaattaggacaccaagccaattcagctgtgaaccttattcttgtacttttctttcttgctggtaattttatggagcaggttaagaaggctgctctgtgttaggataaactgtataccaataatgttgacaacctgtaatgagtgttgcattttacttcttgtatcttttccttcctaccttgatgccagtaatctataagggatctttatagtttgaatgtatttgaataacttcagtatactttagttctacttttttatttgactcacaaccattcttaggtctcaagtattcccatgtgttttaaaagcctgaagtcagtgagatgaaattcaacatcaagaatttgaagtaacttgtaaggaaaaataatataaagataccattggggcagtggctcacacctgtaatctcagcactttgggaggctgaggtggaaggatcacttgaagccagagtttgagaccagcctgtgcaacacagcaagaccccgtctctacaaaaacttaaaaaattagctggctgtggtgttgctcacccatagttccagctactcgggaagctgaggcagtaagatcacttgagcccaggaggccgatgctgcagtgaactgtgattgttccactacagtccagcctgggtgacagagaaaagaaaaagaaaacattacataatttggctagagcataataatttgattttctggtttttgaaaatttgagttgcaataaaaggatatttcagtgtgcgatttc

SEQ ID NO: 2317 - DNA, 212 bp, Homo sapiens
tacccctccagctgaacaattttctgcatgggactctgagttcctttccttcccagagagttttaccgtatgaagcctggagctggagaacgaaagaatcttcactataaacagagacccattcatttatttccattggctgtgttactggatgttttactggttgacgagaaactgggtcacaataaaaaaatggagatatgaaactcaaa

SEQ ID NO: 2318 - DNA, 649 bp, Homo sapiens
gagggatttttttttttttaatgaaaaaaaatttctattcatagcttatccttcagagcaatgacctgcatgcagcaatatcaaacatcagctaaccgaaagagctttctgtcaaggaccgtatcagggtaatgtgcttggtttgcacatgttgttattgccttaattctaattttattttgttctctacatacaatcaatgtaaagccatatcacaatgatacagtaatattgcaatgtttgtaaaccttcattcttactagtttcattctaatcaagatgtcaaattgaataaaaatcacagcaatctctgattctgtgtaataatattgaataattttttagaaggttactgaaagctctgccttccggaatccctctaagtctgcttgatagagtggatagtgtgttaaaactgtgtactttaaaaaaaaattcaacctttacatctagaataatttgcatctcattttgcctaaattggttctgtattcataaacactttccacatagaaaatagattagtattacctgtggcaccttttaagaaagggtcaaatgtttatatgcttaagatacatagcctacttttttttcgcagttgttttctttttttaaattgagttatgacaaataaaaaattgcatat

SEQ ID NO: 2319 - DNA, 972 bp, Homo sapiens
atagatcataactggacatctggaaaacggggagtttgtgatgaaattaccctgctaatgccaggttcttgcaaactttgaaaaacattatattctaaacctcatttactgtttgggtaaaaattctaagctgaatgagagtttctgtataacataactggtttctttctttttttgagatggagtcttgctctgttgcccaggctggagtgcagcggcatgatctcgactcactgcagcctccgcctcctgggttcaagtggttctcctgcctcagcctccctagtagctgggattacaggtgcacaccaccacacctggctaatttttgtatttttagcagacagggtttcaccatgttggccaggctcgtatcaaacccttgaccccaggtgatctgcctgcctcagcctcccaaagttctgggattacaggcatgagccaccatgcccagccaatgtaactggtttctaagagtttagccacagtagcttctagagataggaaattagatttagtgggtgggaagaggccctgatgctggtctttccagagcttatagttgctaacacttttctttgtaaagaagtttaccttttgactggaaccagatggcactgagaaaaagaatgagaaccaccttattcttctgaaaaagactttcttctcatccagtaatttgggctaaaaaatggaaagatgttgatgacttgaagtgatgcaagaatggacaagtcagggaagtcattgggaacatggatgaggttgtaagcattggtacagtgtcctgtttcctgacttttttgagagaaatgtctacttttcctgttttctcttggggacttttgaccctagagtagccctggtgttatattttagatatcccaagctatatcagactttacctgaatatactggagttacttattatcccccattctataccccaataaactcagtttggggcttctt

SEQ ID NO: 2320 - DNA, 1388 bp, Homo sapiens
cccactacttcccagggactctcacatctcgggccccaaatggacagatcacccgaggagctggaggggtcggccaagctgactgtaaatttcacagtctctctgaagaaaccattgtgcttctgagaccctagcccccttcctggatggaggcttgagggccctgggacatgtgctatctgataagattgggtcatcgctgccaaggtggagagcagtgagcaaggggcttggggcaatttccagtggagggcatccacacctccattttatgcttgtggttcacacatttaagtttacaaatcagatttcttttccccttcagtagaattagattttgtttttcaatcatgatttcaaatgcaatcctaagagctaatgtggacttttctttttccatgaaatgtctttaaaggatgaattagcatggtcttaaaatacatttctgaggttactagctgtattttgaattgtgagcaaaatgccgagaaacccagttggcatttatacaaaatgttgacctcaggtctatagttcttaaatgtggctaattctgtaacatagtcttggtattttttaattatgaatgcatatcctatttccaggcaggctctcttacttgaacacaaatccaaaaactaatttagagtcttttttgcccagatcttttaagacttacaccccagagatttaagaagaaaacctctaaatttcaaaattatgaagaattacagaattactcatttaaggtactttaaaagaagtttgtacattgtcaaagtaaattttaattcaaatcatgtctgtaaaacttgacgtattttgtgtatgcatgttttcattttgcaaatatttaatatatagacctatgatgtacaggtacgacatgtataggttacctagatgttatgagaaattttagtttattgtgagtactcaagttgcttagagagccaccagggtgatttgctgctggctttctatcatttttatgttttaatgcaaaggaaattttaaaatgttctggaagtgtttttgattaagcaatgcagcctagaagcaatggttctgttcaatcattcagatgttagtggaagcataaaagtcaagactgcatgttgaaacctttcttttgatagttactgaactgcttggttaaactaaatggaaccatgtgctaatttttcacaattattgacctgtattgattgccactgtagtttggtatttccctttactttggtggcctgcttccctcatgccctggaatacaactcagagctccaggcagcggaaccatctattgttttgtttgccagaaagtgcaccctgtatggtctcctgtctaagttggaaatattatgcatgtgcaggactattcgagtatt

SEQ ID NO: 2321 - DNA, 1091 bp, Homo sapiens
aggttattcctttcctttcctggagctacacctttctttgtaaaactgtactgtgggccgggcgcggtggctcacacctgtaatcccagcactttgggaggctgaggcgggtggatcacgaggtcaggagattgagaccatcctggccaacatggtgaaaccccgtctctaccaaaatacaaaaaattagccaggcgtgacggtgcgtgcctgtagtcccaactactcggaaggctgaggcaggagaattgcttgaacccgggaggcagaggttgcagtgagccgagatcgcaccactgcactccagcttggcaatagagtgagactccatctcaaaaaacaaaacaaaacaacaacaaaataaactactgtggcagcgttggtaccctgcatcactgccatggttgtgctattctcatctcaacatagaattggtgggttctcctaagggtgtcaggaacctctaaaaagatgtgattctttgggaggggatatttgaaattccaacttccattccccctagcaaaaggaagcagctgctgtttaagggttttatctgagccactttaaagatgaatccatggtattactctggatactagccattccttaggattttaaggtcacattttattcctggatgctttatgtccccacctccacctgagccctcatcctctgttccctactatactcccaacttctactctttgttttatccacctatccctattacctgaccctttgtcttccctgtctcccatccttggggggacatgtagccctgtggtcatggttctgatgacatcatcagggcagcccccctgcccaggtattatggcctgtcagcattccctgtgccctccaaaccttaggcctagaatgcggagctgccaacataacattcacccttttgaacagatggagtcaggcacactaacacagccttctgtcctcaataacacagccattattgccacttgctcagtcgtcaatgtaaaccctcagagtcagctgaactattttaggccaaacatactgtttttgtaaagtatttttcattaataaatctataagacagttctatttaa

SEQ ID NO: 2322 - DNA, 273 bp, Homo sapiens
ggtgtttcctcctctgatttgcatcatttcccctctctggctccaatttggagagggaatgctgagcagatagcccccattgttaatccagtatccttatgggaatggagggaaaaaggagagatctacctttccatcctttactccaagtccccactccacgcatccttcctcaccaactcagagctccccttctacttgctccatatggaacctgctcgtttatggaatttgctctgccaccagtaacagtcaataaacttcaaggaaaat

SEQ ID NO: 2323 - DNA, 1186 bp, Homo sapiens
acaggcacaggtcccaggaccaaggagaggtggaacatccagttcctaaagttgcttctcctaccctatcccatcccctgtcacgcatctggaagctaaattgcctcctgccagagatggtttccaagttgatgtccccttcccccaccttcctcctcactctctacctccctgccgctttccaaccaagtatgtctgctttggtatctttgcctctctttgtctctgcatttcctttcctggatctctgtctttatttccaggcttctccacccatattcctccacagatctctcttccttgacatttgtgcttttctccctgggcctcattttaatgttcagtgagaagtaaacagagcagaagtgaccactgggacttcaggcaagaagctcaccaccaggcacacagcaaagggactgaactgacccctgtttgcactaagccacccccaccccccactctgctttcccaagcttgactggcatatacctaggcctgtgtgtgtgtgtgtgtgtgtgtgtgtgtgtgtgtgtgtgctcttccgtctaaggcatgaataagaggggaggtcaaaataaagacccaatctgaggccgggcacggtggctcacgccggtaatcccagcactttgggaggccgaggcgggcggatcacgaggtcaggagatcgagaccatcctggctaacacggtgaaaccccatttccactaaaaatacaaaaaattagctgggcgtggtggcgagcgcctgtagtcccagctactcgggaggctgaggcaggagaatggcatgaacctggaaggcggagcttgcagtgagctgagattgcgccactgcactccagcctgggcgacggagcgagactctgtctcaaaacaaacaaacaaacaaaagacccaatctgagtcttatcgttgtactgatagaagggtcagatatccccacatggagttgagtgggagaaagagattcactagagaataactccttagagaccaatgtctgtagcaggtgtacagcatcttgtgaaagttatggagcatgaaaagactgaagggccaggacagtttgcatgggctgagttataccagctagaccaggaatagaacaaagaattctatacctcaggatttcaaaaagttagcaacttgagaggccagtgctgagcaacccagtacccagg

SEQ ID NO: 2324 - DNA, 2005 bp, Homo sapiens
gggctttaggagattccagccggaggtccaaccttcgcagccagtggctctggagggcctgagtgacagcggcagtcctgtttgtttgaggtttaaaacaattcaattacaaaagcggcagcagccaatgcacgcccctgcatgcagccctcccgcccgcccttcgtgtctgtctctgctgtaccgaggtgttttttacatttaagaaaaaaaaaaaagaaaaaaagattgtttaaaaaaaaaaggaatccataccatgatgcgttttaaaaccaccgacagcccttgggttggcaagaaggcaggagtatgtatgaggtccatcctggcatgagcagtggctcacccaccggccttgaagaggtgagcttggcctctctggtccccatggacttagggggaccaggcaagaactctgacagagctttgggggccgtgatgtgattgcagctcctgaggtggcctgcttaccccaggtctaggaatgaacttctttggaacttgcataggcgcctagaatggggctgatgagaacatcgtgaccatcagacctacttgggagagaacgcagagctcccagcctgctgtggaggcagctgagaagtggtggcctcaggactgagagcccggacgttgctgtactgtcttgtttagtgtagaagggaagagaattggtgctgcagaagtgtacccgccatgaagccgatgagaaacctcgtgttagtctgacatgcactcactcatccatttctataggatgcacaatgcatgtgggccctaatattgaggccttatccctgcagctaggagggggaggggttgttgctgctttgcttcgtgttttcttctaacctggcaaggagagagccaggccctggtcagggctcccgtgccgcctttggcggttctgtttctgtgctgatctggaccatctttgtcttgccttttcacggtagtggtccccatgctgaccctcatctgggcctgggccctctgccaagtgcccctgtgggatgggaggagtgaggcagtgggagaagaggtggtggtcgtttctatgcattcaggctgcctttggggctgcctcccttcttattcttccttgctgcacgtccatctcttttcctgtctttgagattgacctgactgctctggcaagaagaagaggtgtccttacagaggcctctttactgaccaactgaagtatagacttactgctggacaatctgcatgggcatcacccctccccgcatgtaacccaaaagaggtgtccagagccaaggcttctaccttcattgtccctctctgtgctcaaggagttccattccaggaggaagagatctataccctaagcagatagcaaagaagataatggaggagcaattggtcatggccttggtttccctcaaaacaacgctgcagatttatctgcacaaacatctccacttttgggggaaaggtgggtagattccagttccctggactaccttcaggaggcacgagagctgggagaagaggcaaagctacaggtttacttgggagccagctgagaagagagcagactcacaggtgctggtgcttggatttagccaggctcctccgagcacctcatgcatgtcccagcccctgggccctagccctttcctgccctgcagtctgcagtgccagcacgcaaatcccttcaccacagggtttcgttttgctggcttgaagacaaatggtcttagaattcattgagacccatagcttcatatggctgctccagccccacttcttagcattcttactcctcttctggggctaatgtcagcatctatagacaatagactattaaaaaatcaccttttaaacaagaaacggaaggcatttgatgcagaatttttgcatgacaacatagaaataatttaaaaatagtgtttgttctgaatgttggtagacccttcatagctttgttacaatgaaaccttgaactgaaaatatttaataaaataacctttaaacagtc

SEQ ID NO: 2325 - DNA, 540 bp, Homo sapiens
tgtcccagcctcccataccagcaaaatgccccctgcttccctaaggggcaggtccagagcagggcccacaagggggattagagtggcctggcccctccccctctacctcagtagcccccaggcctgagatggctgagaagggaagggtatccttttcccacagttctgggacaaataaaggggcttcctttggtaccccacataatagtgctaggtacctttgacccatcatcttgggaggtggggaggaatgagagggtccaggcagggtgtaggggaatgtattagtccaatgagatttccctcttcatccgcagcagtgtatctattctatacctggctatgggagagaccccttgcatgggagggaccccttgctatggcccctttagccaggcagtgggatctacctgtggcccggcctccctaatgtcattcacattgaatggggatgaggtcggacagtggctcatagagccgagtatgagccctagctgtgggctagaaatgtccttaataaacatccttatttttctgttt

SEQ ID NO: 2326 - DNA, 1709 bp, Homo sapiens
gcagcccctcctctcccctggtgctgatcagaggtccttgggcagcatcagtcaaagcaagagcgcactcactttggagtcgctcacgaccaggacgcagagaagcaggcgcgccagcagggctctcatggtggcgaggtcggggcgctagacggcggctctgcaaaggaaggagaagtcagggcaagaggcggaggaacgggaaggcaggccaggcgggcgactgcagcgcaggggagatgcccgcggtgaccaggctccccagctgtctctctcctctctgggctccggactccgggcagcctggatcggcacccgcgggggacgcccgggacggggcgccttgactccgtgcagccgccggggagcccagggagcccgggcagcccagggcgggggaggcagacgctcgggagctggggccgccgcgcatccggcccggggatctcaggaccgcggcactcaccggtggctgcggcaggagggcgcgagccggcgctgcggggacaggtggaccctggcccgggctccggggctgcggtctccgcactgtgctgcgacccgcggcgcctgctctatatcagggcccgccccggcgccgcccctccctctcccgcccggctccctcccctgtcttgcagcgctcagcgacccggaccccgcgtgcttccgcaacgctcacaaagatttgggggaagcgcgatctccagcggaggggacccaacagcgtctggactgaggaatcgagaggcttgtaaattctccgtgcttcctcccatgcacctggccgggggcctgccccagtgcaaggagtccccgaattgcagagaggagagaaggcgcacaggagactctctacctcgcccagctctgaagcctcctggggtcctctaatcagttcttctgcaacttctccccgctgggccccaacttgcctaagactgcctcagacccccttgcccgcagctgatggagctgtgaagtcttcatcaacgcgacaaatgtacgagacatactctcccagaagcacagacagaaaaacccctgcctgtaggggctccctctgtgcgtctgttcagtggcagtccccagatatcaccaacacaaccagtggatggaacaaagccgggcttattgctttcggcagtaagggggtttgtttgatggtgctatcagagggggaaaggcaaggccagattactgaaaatttgcagcttggtttaaagtccgtttttgacagggcttgataaggattgggttaggtgtcgtgatatgatgttacaggattgtgggaacaaagtcctagggcataaactgttggtgcttcctattgaagtgttaacgggtcttttgggaagtttccataatgagcaattcatttatttgtgcaggcaagaataaaagtaaagacaatggaaacatgtagacagttctaactgtggaggttctggagggtgtggaagttctgttctcacctctgagtagaggaattgggagactggaggacaaaataagaggaagatttatttttcactgtttgtccttttacactcttaacattttaaaaagcacatctctgtatagcccattccaaaaagataattatgcattttttaatgcatgtgtatttagtgttttacttcatcatagagccttgtttattctattcagatagaaacaattgtttatcaaataaaattgtcctccag

SEQ ID NO: 2327 - DNA, 3552 bp, Homo sapiens
gaagaggccaaaattcctcaggaccagtttgttttccaagtgtcattacgatgtatcactattaggtaccaagtgagtgggaatacatattctagttaaagcatttgtgtctagctacacaccgctaacaaagttacttagttatcaatgtaggattcttaaggagctttaagctaaggaaaccttttagtgacttagcttattttgtatcttttcacttaggaagattttggaggtgatttttttccataggaggataccatctggcggctgcacattgtaacagtaaaggcagaaagctgtagtgataacctctctcctaaaagagttaactggtctcatccagcagaagctatcttaaatctgtgatgtgtcaggtgcagccaaatatcacaccttctgatcttagccatcccaaaccagtatctgtcccgagaggaaattccccccacccccagaagtttacagaaaactgcctcttcaagtgtttgccttattcagcttttcacttgtgccattaagcaagcactgtagcaaaagccacttccacatggccctggcagggagcactgctgctccatgctccattctcactgtacttggtattgtattttttataaataagatttttatgtaaagcttagaatttgatttacagggaccttgctgcagtaaataccatctcaattttgtgccactggttcagctgttagcacagtaaaaaaatcatttgtatcaaaggggcaaatgctttattaaggtagtaaaagggaacattacttctgcttttaggaagttactgcaagcacaagcatttgtgcttttaagcaaattaaagtagtaaaagaaaaacttaagtgaaacctttgccatcttcatgttttataatataaagcttacccaacaccagttaagccatggttaacctaaatgcctcatgccccagttcagcaaaaggaggaaaatgtgcctgcctcacagtcatcagtctttttaaatcttttttgttgttgttcttaagggtttgaatttgtctgcattccttgtctttaggggaaattcccttttcatattgtgtgcttcccaaagctatagtcatagatttcttccagaaactattgtcataattgtcactggagtgcttaaatatacgtactatactgacaaaatacatggaagtgagttataatgaggcagaaacaaaatcctcggtaacattgatgatactctaccgatcaccgtggttttggaaagtcagtcaacagttgtattattgcactcaatttcattgtgacattttatttaacttcttcatcttggtggtccttgcccagttattttgcctcattagacatcaagaaatggagaaagactgaaagttaatatcttaagtgcttgttcttcatgtttccttcttgttatttatgctattctctttgtggctccattcttctttcaatcttctcagcttataaccgtctttcccttatgctaaggatagcccttacactcatcccatctatgctgtcaagggctgctggttggtgctggtacaaggagcccactcagcagttttcttacctttgcctgccctgcctttcatggaataagaaaggcaacgttttgcagcttccaaatttctgaagaaactaatctcagattggcagttaaagtcaaaatgttgccaaatatttattccttttgcctaagtttggctacccggttcaattgctttttatttttaatgtcttgactcttcagagttcgtacctcaaaagaacaatgagaacatttgctttgctttctgctgaatccctaatctcaacaatctatacctggactgtccagttctcctcctgtgctatcttctcttctatccaagtagaatgtacgccaggagctccttccctctagcaatttctactaaaatgtccaagtagaatgtttccttttacaatcaaattactgtatttattaatttgctagaatccagtaaatcattttggtagctctggctgtgctatcaataaaaagatgaaagcaacaagttgattttttttaggtctactattgattgaacattctccaatgggcaaggctcattgtcaaagcagggtgaacatgatcagattttcttctgcatcatcacacaagctgcgagtgttgctgcaaagcacttctcagtactccttccctaacctcagtatgttaatagccattcatacttggcttaagcatcaccattctggccacagtctgagagattagtgatcaaagctcccttccctatcactaccaccacctactgataacaaagatttctgaatacttagtagtagtaaaatatttttcaagcacagagttacagctaatcctggatcacttgttctaaattcataagggagtatatcaagagcaaatgaagtaaatgattctttcctgcgtgtgggagtcaccatcattttattcaaagggagttcctgtgataggttcattccttaagtggtgctacagaaggaccctaggaaaatgctgatcttgtcctgagaggcaactgatttgagaaaatgattatactacagcaggaaggcagcaccagtgaacatatggtaaatggcaaaaacaagacagttttagaaactgctaattcagtagcagccttggcctttcccttaactcaagcaggctggaatctgtctttatagtcggcaactttccaagataaagcagtgataatagcagttggcaacactaaatatcaatatcatcaccctttaatgacatgttacccctttcagatctagaaaatcagggaaaaagtgatgtcccaactctactctaaaaacctgctcctactattttagtcagtgtttctttaaggaagaagaggactatgtccccaaaagctaactctgttttatagccctggtggatccctgaaaaccctatttattctatactgggctttggaatatgaaaaatggacctgtgtggccgggcgtggtggatcacacctgtaatcccagcactttgggaggtcaaggtgggcggatcacttgaggtcaggagttcgagaccagcctggccaacatggtgaaactccatctctactaaaaatacaaaaattagccaggcatggtggcgcacacctgtaatcccagctacatgggaggctgaggcaggagaattgcttgaacccgggaggcagaggttgcagtgagctgagattgcaccactgcactgcagcctgggcaacagagcaagtctctgtcttgcagcagggggaaggacctgtggtactcctacaaacttaacaactttagcttttcggggaacagtggtggtctccacagatagctagaatcttctaagatgaaaataaactgtttcatccagctgctttctgcctgttaacctttgccacttccattccttcaagtgtgtaatccccagggttgtcttgtattacacacatccttgttaagtaaatataccactgttgatttcttcttccagtgcaacatttggattaaataaaaatctttagtttcc

SEQ ID NO: 2328 - DNA, 444 bp, Homo sapiens
gccgcgtgctggtacactgtgccatgggggtaagccgctctgccacacttgtcctggccttcctcatgatctgtgagaacatgacgctggtagaggccatccagacggtgcaggcccaccgcaatatctgccctaactcaggcttcctccggcagctccaggttctggacaaccgactggggcgggagacggggcggttctgatctggcaggcagccaggatccctgacccttggcccaaccccaccagcctggccctgggaacagcaggctctgctgtttctagtgaccctgagatgtaaacagcaagtgggggctgaggcagaggcagggatagctgggtggtgacctcttagcgggtggatttccctgacccaattcagagattctttatgcaaaagtgagttcagtccatctctataataaaatattcatcgtcataaag

SEQ ID NO: 2329 - DNA, 101 bp, Homo sapiens
ggctggcccctagtgagtgggctcgagggagggttgcctgggaaccccaggaattgaccctgagttttaaattcgaaaataaagtggggctgggacacacg

SEQ ID NO: 2330 - DNA, 591 bp, Homo sapiens
gggcggccgggagggcgagcgagggagaggagggagagggggaggggaggagtccagggagaggcgggatcacggcccaggctgctgacacccgcgcgtggggaggactcgggccacgaaaggaaagaaatgtataccgtatctatctacccgacagcagcgaccgagacccggtgggacactccccttctccccactttcacctccccacccaaactttataaaagttgaaaaaatatcatttgactttttatagaaaaaaaaaggaaaaaataattgagaaagtgttcatctgaggactgcatcggtggacactggtatttatttatgttagctccaagcggaccggtggttcaaaagtgcattatttagtttgagctctgtaggtaaaaaggaggtgggaaaaattttaaaacttgagggtaaaaatgtggaaaacaaaccctcccatcccttgtagattataaataaaagcaaaaccgccacagaactagaggtcttctctttaatgttactttaaaattgctatgattgtattgtacgttatttaatgtctgattgaaacacaaatttacatgcatgtttgttaca

SEQ ID NO: 2331 - DNA, 8263 bp, Homo sapiens
accggataatgcctatcccagaaacattcaaatcaagcccatgagtacccacatggctaaccagatcaaccaatataaatccacaagcagcttgattccaccaatcagagaagttgaagatgaatgttgactcccaggagaccagaactatttttttaaagcctgacaaacttcataaatggtgatgtgacttttcttcttacatgctgaatcactggtggaaacgttaggataagcaagaattgccagaaaataaagtagacagatctttctctttgtctgccttgaatattgcttccatgtattttggaaaagaaaatgatttcatttataaatgaacatactaaaatagtcatgtatagcctctagcattttaaattatttttatttattagaaagaaaatatattttttcttttcattgtcaaatatcttccctatatctaaacaatgcaaaatctaaatgaataagtggtcagactccttaatgtgtttttctcttctttctctctttttctttgaggagaatgatggtcaccaccacaattaattgtaattaagggaaatgaattattaaaacaattttaaaatggccaatgatgtatacatgtattttagtaaatccagaaaagaagactaaggggacaggtgaatacctgctcctcgcctggatgggtgtgtattttgatctgcattgacaccagctcttaataaatggaaacttatttattttcacagttgaaagtcatatttttgtagttctagttttcattctgtagttctcacccctttgttcatatttttaaagggaagaccttctgctgcttttctacaattggcagatcaggtttgtctggccaactaaggacaccaggagggttgtgggcacacctgggatgtggaagctgaggaccagatgcacacaaggcattgctctgtttgctgttctagtggtggagactcctacgtgctgttatgcttctcattttatatttccaaaccacctgagcgagtaatgtcaacttcgggagggtctggtggactttctccccactccccaagtctcagagcttttagcctggaagtttgtaaaactgattagtagttttactttaccataggatgtgagagggcagtcattcttctcactgagtttttgtttaaaaaccaggaaatttctacaatcatggagacagattttaatttgcatgctctcctttatttagttgctggggccaaacacatgaacttgttacaacaatttaaaaataataataacaaaaggaaagcaacgaatgcacttcatatagactgttagaaaaggcctttgaaaattaccagcagtgaaatcaaataaattagccactttaaactgcggtcaaaagatttttctagccatcagatgcaattacgatgtctcagagctctgctatcgcttgcatgctcggtgtacagtctcccggcaactgttttgttccaatcaacttagcaagtctttcaactttaaaattatcaatctttgatatgatcatcaaggtctctggagaagcatggatgtaatagtgatttctattttcttaaaaaatgtaaactgtggacacttaatggaaccaagctaaccaaagtatctccccgaagtttcatgatatctagtccattaactctttgggccatgacctgtggtacctagttatggtagtgcaaatcagatcagagcaaagcaatgagatcatcatgaagacatatgtccactaagtactccaattaccagcgtaggcaaaatgagcttccacctctgtccactccctgcagagccaatatagtcgtgcttccacctcgtaggcattgtcctgcagtgatttgtcggactgtggttactctgtcgtcacattttgtagaattagttctataaaagtattgtgaatacaatgtatgtccaattggattgtttaaaaactacttataattaatcactagcctactcagcagactaaaatgatgtcaacagtctatattcaggcttataaacatttcttggtttccaacagaagtcaaatgtgtttgtggggagaacgttttgctaggattttgacaactttcctgaaagctaggccttttttacataatgattttgcattggggtcaccttagtatattcacgtcaatccacgctcttctttccttcgtgaaccatagtgggctcttcactcctgctcgtaataaccacctccaaatttgttagagtgatttggtctcctctggcaggctgtggtggccacataaaggatcttccattagagggacacaggacacaaagctccattcccatgaccctctcttccctgtgtctcccctaacaaggcaatctggaagcagaaatgcaaactccagccccaccacacatccaccgatgcatttgtggctagaaattttaatctaaactttttttaaaaaaaatcataatagttaggatagtttcctatagcaaagggctccttgattcataagcacctcccccccaaaaaaaccaaattggtaaaaattcattttcttttaaatagagcaataagttcatactgtgttgccgttgtaataatgaattgttctggactagaaaacaaaatgaggcattttgttaagggggtaggaaaatgactgattgttgggccctttggcaaaagctggtgcctggtaagtagaaacgaaatggaaacagaaataacatttgtgaaatcactggagggctcaagcaaatgccagagcttctccctggcttgttcctacttgttgagctctttggccctgagtcccatccatctccactgcaacagtctgtctttctgcctacatccgcctgagaccaaggagggtctttggtacagtccacattatgaggctctgatttcctatcccagtttagggctccagaaaagccattctcccaaactaatgattcttgggtgctgtgggtcaccaacaggctgtttacaaagcagaaaatatcatcaccatcataacctttctccttgagaaaacttttatttttgtctaagcaattttatattttagaatatcatcttgaaccattataaaacaccttaaataaaagtgattgtgactaaggcacgttggagaacattccaatctttcctcccaagggttctggcaccttatgatgtactttgtaaaaaaattgattgaagattttaaataaacaggaaattagaagtgttagggttagataaaggaaaagtgaaaaagcataagaaatttgggactttttcatgttgaaaggagaaaaagcacaagttccctagttaccatttaatatgagggtgcaagagccacatttacaaacaacaaacttgatctttaaaaatgtttttaaaactctctgagtctcagtgacttcatttgtaaatgagagtgattcatctagatgactctaaggtctctttcaggtcccaggggacgtgatctaagttaggagtgggaacatgggagtggctgcttctccttggctaagcccatgcagactattgtgtccaggactggaataaaggtcctttttgctgcatcacccaggcaacactcccagccttactcaggagtggtgaacattttctgctctggacatagaataggtaggttcattcctggtcttttcactttagattctctttaggttcaagatgcagatttctcaatttggacacacctgcatcacgttggtcaaattttgctgcctgtttctagggttttcttctcagtttcatccctgccttcccttttttgttgttttttttttggttcaaggcccagcttcagttaatcccttcatctctatgccatgtctccaattcctagtatgtaactagaggttcaagagaccccaaattcctgccattttccccatttatgtttccccatgtgaatcttcaggaagtaaccagtcttccttctcacttcatttcctgtcctctgtttatttggttattttctttcattaataaactaaccatctcttagctacttacattcacaaatgtaattttaatctattgtgtttcattgtgaaagagaatctcattgaaggaaggaaggaagaaattgaggaataaaggtaggaagggagagaaacaaagactatccaaccaattgactgagatgtgagccggcttgactcctaggagactaagtagatccattcagcttgaacactgagttccagggcagaatctgtccattttctgttttgttcttacttgctgcttttggaatggtggtaaagccaccagtcaccatgagccttgaaaggaccttcactaatgaggacttgactcaccctctttaaaaagcaaaagaaacagaatttacttacaatcttctggtaaattacctttctgatcctctccttattcccaaaaggcaatttttttaatccagcagagatgatttagcatataaatcccaggtcatttgaggaggtgatgacgctatttggatttatttatgagacagtagtaattataaatgattcctaggcagtttgtactagtttggtcatattggttgtttaagtggagtctcttctgattgtttgtttccaataaagtatcagttgttaataatttcaagatttccataaaaataagaaaacttggaaaacatttttaattttatttcttaagagaccacagagcctaattttcaatttttatggtaagcttgcttaaaacatgtataaaaagaagcctacatgctcaaaggcagaggcacctttagccctacaacagttggaagctccatgatatcacagccccacatggatagattggagaaagaattctgacttagaccacctgtagcagaccttcctcttttggcatatttttttaatcacaaaaaggacctgagactccctatctaaagataagccaaacttggggtatacattaagaatctgggaagaaagaaaaaaaagaaaaagatataataagcagtattttaaaataccatgagttatgggcatgcatatggtacaaagagtagttctttgggttgaaagaaagaagagtttgcattgaactgcgtaggctggcaagaatgcagaggtatacaatgtttgatgggctttggaggcatttcaatagtaaatgggtgacaggactggaaagatgtggaatatgagggttttccagggagatgggacttaatgggccatgatgtatttgtaggaatgtgatttcaatagattgactattttgtctactgtgataagtttgtgtaggggaactgaggaaaactgagatgagacttcatggaaggggctacaaagtacagtctaaaggcctagataaagtttgaaacttgatttagaaagtcatgaaaagccactcagagttttaagcaaagagtgatggggcagcaatggctgtgcatttttcaggttgaaagtagtgagatgtcagttcttcctggaagatatcatgagaatgcacacaaaactgaacattttctcagcagcaaggagtgctaaagggtgcacactccaagtcaacaactcaccgtgtgcagcaccttcctcacacattttgctttgctttctgtcacaggaccatcagacgtagaacgtcctgactctcctgaattactagaatgtcagcaacaaactcacaaagtagattagagggtaggaatagatacataaatttttaaaaacctgccaatcatactgttttctagacagtaatataataagaacatgaggcaggacatccacaaatagtagagaataattaatagtccagaactgccaaataggaattccccttatgaaaacacccttgcagctaatcaggtagcccttgtttagaaaccaattagcactcataaaatatttgtacaaggagtgagtgggggagaaatgagcacaatatgggttctgccatcaatcagcttataatacaactaaagaaagaaaacatgctcaaagcaccattagagaaagggtgagccctaatgacatagtttcacattcaatatggtaggagttgaaacaagggagaaatgctgtggtttgaagtggttcaacaaggtaggatttctagagaaaggggggtttaggagttagataagtagaggatcagcattctaggtatgaaggcaggattatctggcatgtggcagggtgaatgatgttaatcagtaactgctaattgatatttactgagcagctgctgtgtcctcacgatggtaagactattagaggaagacagcccacctgcctaactgggaacacaaggcacacatatattggaaagatcatgttgcacaaaacaggtgttcaataaataatttttgaataaatgtgaacactgaatagcaaataaatgttatagatcgtaatagttgtagaagattggttgggattgtagggactggatgtggggcaatggctgtgggtctagagtatattcattgtgcagtggacacacacctaatctgtcctcaaggacagaaccatgtggaggaataggaaaacaagagaagcaggcaagaagcggaggcagtgagtacagcagctaagaaatgttacattgggttcatccagagcaagaaaagctgagagctgtccgtgagggaaggccacacaggcaagaggagtgggacaggggagtaaaggagtgggctacaacaggccctgcagatgtggaagccagacccacagaggcacttagaaagtgaggatcctggatgaattattttagggagaaagtgtaggtttagatcagctggcagatgtgtttgtgggctacagccaagtttttcaggactaagaaggagcaaaataagtagaacttcttgggacaggagatctagggtactccagaaccagggaaatgagaaacaagaggggaattttaagaaagagagggaagatcatctatgaggttggagatgaaaggtgttggagatggtgaggcacaagtcaaaagactcactcgaagggcaggaactctgcttatttgtccatattcccagagtttgtcatgaggtctggcccacgtgggcagtcactcggccactatgtatcactgtggctgccatggtggatggaggctggacagaacctgtggtgatcggcagtctttctggaggactcaccagggaggggtctcagggtgggcatctcctttcaccttcctgtgcatgtcactgcactgttcttcttccctccctgaacagcacacacactgcatccttagtttcaggggtctgaaaacaaatgctacgaccaccttgctttggtggcttttctgaacaggcattgtgagaagagatgttctggccaggtgaaagtggactttatttttaggtaggtttttcagtttagaaaggtttcctttgcttatcccttgaggacttctgtgctgctgcttctcctccatcttgctagttaacagaacaggggcagaagtgacaccaatgctctcggccatgcctgccttgggaagcactaccgggccccactgtttagaatcttagatggaaatgtacacaaggcattgacacacgcctgcgggagtgacccagtgcttccctcccatgggactcagggtcagcgtgggaaggcagctggcagggacaggagccccgcccgcaaggtggactgagcctcacttccacacaaaaccagagtcccatctgccccagagcgctcgctctcctccccttccttccgctcaatgcagcctgacacgcctttgaccagaactgcaacatttcaaacacaaacccagatctgttgggaaatcctaattaaaaacgttgcattcccaggtggcacaatcacatcctgcctaaaacttctggcccacatcccaccacccagatgttgaaaagaaacctttctctgcttaacaccaaaacctgcacttcaaggtttctttaggggacaaagaaaaaaaaagtacacacatgcagagttcagcctacatgttcattgaggaaaaagagcgtggcttattcatctttcaatcttttgattgttggcattatgattatgattatgattaattactctgacctgacaggaattgaagaagagactatatgctggtgctctgaaatgatctacccaactctgtcatctgtaacaaccagtgataactctcttgtcttgtaaaaagggtttgtacataacttgtacatggtttcattttgtatttttcgcagattaaaaatttatgtatttgtgttct

SEQ ID NO: 2332 - DNA, 2388 bp, Homo sapiens
tatgtgtatccaccgccactgtgtgaaactgtatctgccactcatttccccagttggtgtttccaacaaagtaactttccctgttttcccctgtagtccccccctttttttttacacatatttgcatatgtatgatagtgtgcatgtggttgtcatttttatttcaccaccataaaacccttgagcacaacagcaaataagcagacggaccaaaagttatttatgattctgggggaaaaataacccaaaggcatgctccagacataaatagctcactgcaggaacgagttcacagattagaagggagcacttgtgatcaacgtcagttaggcagagcaagtttatttaatgtaaaagaaaagttgattctgatttatcaggattatcagggtgctttgggttttgattttgttgttgttgttgttttcctttctttctttttttatacacacaataagttagcacatgtttatttgaaacaagcaaccaaacagcaatgaaaacatattgattgtttccagtctctgggccgaagtattgcgaagcatttgaaaagctttcacgatttgtgtagatgattatgaaggacctgcttgttgcaagagaacatcagtgatttttttagttactcaccaaggccttttgtcccagagccagttccctctgggagttcttatgaacatttctcaccttaatatggaggagagaatagtattccaatcatggatgtatcaaattctagtcatttagtttaagtgaaaagaggtttgattgcatattaaattgttattctgtctccttatgttgccatatgaatagctattttttttctttcacttttgacatttgggatgaaaagccatatgtatcataaatatcagatgtaagtcattaaaaactgccttcctgggacttttacatcttttaaaaggtgaattacttaccttatgtacagaataaataatgctcaggaaagagcaagtatttttccatgcattctcaggggatctttttactcccctttgtttgattagttagggccccaatgccaggtaggaggaagggctggggcaatggtagagtgagaggaagacaaacccagctgcagatcatgcttttctaggagccgacatgctaaataaattagaatgtaggaggatcagccacagttgactcaacaaagacaaaagccagccaccaccttcaactgttggcacagctgtgcggtgctggctgtcccaatgcagaaagctggtgggaaggaattcctcatcatcactttctttaatgtagccaatttaggcagggtaatgacggcaatagagagctgctccttgtcattatgagacgtgggataagaagagtgcaacagtgagccaaacacattttggtatagttatttttttcttcttttgttttctttcttttttaacacttagtaagcatgagaggagaggtagaaaaatacccttttttcaacatatagttgtcagatgctttgtgcatgcaaatcatgctttaggcagtgcggtatttcttaaaaactggccaattcaccataaccaatttcccttatggatggactaggctggtatatacatatttgaaaagttttacttcaaagaattccatcgaatagaataggggtaaaagggaggaggaaaacatgtcacagctgtaccatctctaaaaaggtgtttttatggtgaatgttttggatttagattttggatcccccgtcccctcaagcatgatagttttggatatttgcttgctgtgtgaattgacaagcacttttactgacaaatggtgaggctcagtcagaacctccaccctcccccacaccaaagacaggggcagcgtagtattcaaaccagtattgtggtggggaataattgtatacatgtaaattatcaagccctatgagtggaagaattttttcaaattatttttgtccctctatatattgatttatattatgtataactatctctttatataaactatatataattatatatatataactatataattatatatatataactatatatataactatatatatgtatcccctagtattggatcatgaagagctcttcatgcattctttgcaaaggaggttataaagttacgccctcagaacatttataactataagaatgtgccagttaaagtgctcaacaggaaatatgacagtttaaaagcattgtaaaactcacatagcttacttctctctctaaagtgcaacaaggatgaatagaatgggccaaggtatgacaattaatggttctgcatgacctagccactgctgggggttttcttctataacgttgtccttgtgaaaacttttgtgaaattaaaaaaaaaggagttacaaatttt

SEQ ID NO: 2333 - DNA, 1647 bp, Homo sapiens
gagaatgctgtgctgtggatgactgcagctggccgcctgaggggacaccagactcagctcttttctagcgactgaaagtagaagtctgtccgtctatgaacatgcgggggaaggatccggaaccaggacccagaagcacctcctttgtagacagagggccacggctgcgtgcgatccaggcccaggcccacacactctgcccgtgtcacacgtgtgctttaacacaaaacagataacactaaagacgggttcagcacccacctttctttagccagctgatcagagatgctgcaaagagaacctttcggatcactcgtttacaagccttttctaagtatttggtggtttatgtttacttgaacggctccatgttgccggtgcccagcccctgtcccctctgtcaaccccctgtcgctttggtgttggtttcgttcccgtcttcagcaaaacgaccttggaacctcaatgggggctgctttgctttgggaggttcttgttggtgggaccagagctttgacaaacctcctgctccttggtggcacctctcctggaaggacgtcacaactccaggtgctcagactgcctgtggcagcagaaccagtgcctttggcattttcctcccacaatggggaaggtgactttggcattcttacaaactcgtctctcggcctttctctcctgccttccacagcctctcgtttctcctccatctgtgcttattacttgaggactgtgtctgctccgtgagagctgcgtgggcagggctgcagtggggtccaggtggtgttcagctgtgctgatgcctgccattgggtcctccttaggctctgtaagtcgtgacagccttcatcagtgcaatgtttgcagggtaattcttaaactttttagagggtggcaggtacatcagttctttttgatatgaaaacattcatgtttcagacattgaattgagagcttttaggggaagcataatggttattgtcactatcaacagtctaaaaagaaaaactgaggtctttttaatcttgattacagcactcacggcatgcaccctactcagtgtgggtgtcttcgtttgggggctttttttttttttgcacttctgaggctagatatgtctggctgaagatttgatgtggttcctccttaagctatgcgtcctgttaataataggtactgtactgggctctgtgtaagtgtcgttggggtaggacctatattttaatactgttcctaacatttcattttactagcgagaaatctttgatttcattttattctttgtaattctagacactagattgtagtttagccataactgatgttttttaaaaagggatatattttcttgcacagttgttcaaaaaagagacaagtttcagtcctcaatgctgtcctttgttttacaggtacaagttttctagctcagacaaactatgaaaaactgtagactattctcaaggtattaactcgcagaccctctgggggtaggggctgttttctaagttacaggcagagtgggactgagatggtacagtgtgcacagacaggtactgagctgacagactgggattttctgtactaaaatgttactttgtatcaaaagttaaacaggctttagtacaacaaataaaggtcaatttctgt

SEQ ID NO: 2334 - DNA, 1330 bp, Homo sapiens
tccaaagaaagaggggaccatgcctgaccttgactccttgtcctgtctccagctgatgtataaagagttttgtgctccctgggacgggggtcctgaggtccccacctatgccagcaatcagagaagccctcttggcatccccaggagcagcttctcctctgatagggtgcagctcacaccagtgaccctgactgtgccacgctgctcgggagagctgagggttttattgtttgcttgcttgaaacctaatctatagacggccccacagctcgtgcacacactgcttccctggacttaaagcccagccaggtgtcatggtccatcccagctcactgcatacatccatcggctccccatggtgtcttcacacctgacgatgagccaggcctgagccccacacaggccagggcacattcttggattttccattccttggtcatgctggaatctctcaatgtgacatacttatgtaaatattgttactattatttatttgttccatttgagggatttggaatttttgttattttagttttatttttgaaaccaagcatctatagaaaccaagaaagtcagcatgtaagcgtcactggaaaaactggtttaagcaaatagagccgtctgggatttgtaactgaggtgcaactgtcatgaggcccaggcagctctgtaacatcttctatagatgcccctggctaccctgttgttttcatctacctcagacccctatcatggggctctaccctgtgacaagagccaaacccattctccatggcctatggaagcctcactggagtttggggcctgctgcaatggggatgagatggttttttgtagaattatacttacgttccttggatgatctctagttgattttttaagttctgagttgatgctgttaaggtacccggggtagccattggttcttggatctgtgttagaatgagtgctttcccttcctactgatgtgattgtggattaggaattcgtgaccgagtgatttttggccagtggttgggtttaaaattctattaaaatttgtagtttgggctgggtgctgtggctcatacctataatcccagcactttgggaggccgaggggggcagatcacttgagcccaggagttcgagagcagcctgggcaacatgacgaaaccccgtctctacagagaatacaaaaattagccaggcatggtggcccatgcctgtagtacctgctattggtaaggctgaggtggaaggttcacttgagcctgggaggtggaggttgtagtgagccaagatcgtgccactacactccagcctgggcaacaaagcaagaccttgtctc

SEQ ID NO: 2335 - DNA, 4018 bp, Homo sapiens
cgggctgcccgcccgcacccagagccaccccccgccagcccgaggagacgctgcttccctgtgctactccgaggggctgcgtgtcgccctgtgcatggggtgccctcgcaggcctgcggggctgggccgggggctcttagcgtccttgtcttgtgtgtgttgacaaacagtgttactgacattgctgccccccacaggccagggaaagcagggagtctggggctttttgcaggcgggcctggggtctcagtggaggggacaaaggcaagcaaaagcccatgtccaggagccctgggtgtccccacaggctcgcctctgagagcctctttggggtgagcagccttgtattggccacaggtgcactaaattgactgtgaatcccaaacctccccagaccagccaggccgcctgcccccacccagaaccttccggtttgccctgtatggaaagccactctcagaaatccctctttcctgagtcagcaatcgtggcaaggggacatgtgttccaacagcggctggggagtggacctctctgtcccttgcccaccttaagccccaaatccagaccccctctgacatcactggcattgcacctgggtgtgcccccctccccacgctatggacccagataggaggggttaggcatgggggaggcacagaatgctggagagatgcgtcctggtgaacgtggggcagcccctcccacgacccccaccagactgccttaggttttgtcagccccactccctttccttcccctctgcctcccacccactctgggggtccacatcaagatagctgggcccagtgtggaagcccagcgtgtctgttccagcagaaaggacacaagcctggtgttctggagacctcggctcaagtctttgccctgctgccgacgcattgtgtcaccttgggcaaggacttcgcatctccaggcctcagtttccccattagttaaatgacagcataacactagagagcagagggcccatttcagctctgttgttctgggattcaggctggccggtgctgtgtcctggagctttatttggggagtttcacccagaatggtgggagaaacctcccaggtgccaggtaccccgcatcgtgacccttcacttggtgtcttaggaagtcaagctgagggatgctgagtcctcccctgctggcccctgcagccccagccctgcttttcatcccccacccctgcaaacatggaggagccccctccttctcacctcggtctcctagcccctgacatggagaaccctgagacaagccacagaacccctcttttctaaaatggagacaataatttcctacctcccaagggagcagagaggcctcgtggcacgtccgtggccagggagcccactgtcctggctggcggcgggatcgtgcgctcctctgtctcccggatgagaagccccgtttccatggtcttgacccttcctttctcccggctgtcagaactgggtctcttgattttgcccctacattatgcctctgtgggaaaaaaaaaaaatcagaccaagaaatgagcctgaaattcagtgtttaccatggctcaaggatgcccatctggtgtccagttgccttttgtattcaaatgaaaatgctttgtacaactgaggagttacagtgaagtgttaaccaggggtccagggagcgagttgaaaagatggagtgagtgtatttgcagccagggagctgcagggtggatttgaggggccataccctctgagcacttaaaaaaggtatttgctccaggccaggcagcaggctgtggacacccttgccaccactggggactgccactgaggactccccgagcacgttgttccccgtcttctccaaggtgttgaggtgagctggggttggccccggcccaggcttctgtcccaaggagaagctgccactgacagtcatcctaccgcactgctaaagagaatgttcgcagtggtgggcggcgtgcctgtgccaacccttccagggacccggccatgggggaccttggcccaaggatgcctggggcctgccagctgtgctgcaaaggtggggggcccacaccctaaaactaacccaggccccagaccactggaggccagggcttccctgcacgggctaaggggagttgggatatcaccccaaagtgaccttgccagtgagctgttcagcaggtagccactgccctgccatctgtgcagagccagccaccttgggggctggggttcccgctttgaggcccaccttccatactccccttgactcggctctggctgaactggggaactctcttgtggtcagcaaagcccctgccatgcaggccaggtgccattgagaattaagtgctcagagggccaggagcccaggggatgggaaagtgtgtggttttagtacgttcaaaagggacaatcgcttgcagttggtagatctagcgatctagttgggagataatggtgtttaccccatatgaagtattcaatagttctacttgtgaatttgtatttattttgagttatacttgacacagaattccttttttaaaaaaatatgtgtgtattttggaaaaaaaattcatagatgttaaaatttctgcatggttaccagtttttctcacaacactgaatttggtagcttttcccgaaaaaatcttcacagtaattttttgtctgtatatatttgagggcctttttttaaaaaaaaaaaaagaaaagaaaaatataattgtttgatttttgagattaaaacaaacaaaaagagaggcattttcaaaatttcagaactttcaggagggcaagagaatatcaaacaaagatttctggaagtattttgccaaccttctggttgagctgcaagaaaatatttatggtgagaacttttctgtttcccgttattgggtttttggttggtttttgtttgttttttactatgctttggtctgtaaaaatatgcaactgaactacattcagaaggaaatattgtctacatagaatattatatgaagttggtacataattctgatgaggaaaaaaaatctttgcaattctttaagccatattgttgtttttctgtgttgttttccctggatgaaaatatcagtattaagtagacagcatattattcaagtgtttagacttattaatatgttcttgtcctgtatttatacatatgtgtattttggaaagtattgccttttttaagggaagctataattcgatacatagtgaaaaagggaatggtgacccctttgtgcctcttccactgaggataacaaacagcattgtaatccattctcttgcaccttcttcttcttatcttgttattacggttttattaattttgtagagggacagggagtgggcaaggggaagaagcagcttatttgactaaccagcccctctgtggtccaccagcgtcttggcttggtgggagggctctcaatcagcagggccccaggagggaagaagaagtggggcaaagcctggcctcgccgctcgggagctttgccatctgagccacgcctcctccaggccatgctccttgaacttggaaatgtcaaccggagcccttacaccagccctccagcatctaatagacttgaatctactctaaacgaatatttaatccaacctcactacattgtagctcagtccaacgactaaccctgaaatgggggtgttccagccttcagcgagatggccaagcggtcccctgggggctgtggcagcgggcttatccttctctgttgccaaccttgccgtccgacctcctccgcccccatgcggtgaccccgtccgtgtctgtgtctgtccatacgtgtgagtccagctaaaaagacaaaacagaacccgtgggcccagctcggaaggtgcgtggagaaggctccgacgtctccgaagtgcagcccttgggatggcattccgttgtgtgccttattcctggagaatctgtatacggctcgcctatagaaatatagcctcttcatgctgtattaaaaggacttttaaaagcaa

SEQ ID NO: 2336 - DNA, 1343 bp, Homo sapiens
gaggcatttaggccatgggacagggaggatcctgtctggccttcagtttccatccccaggatccacttggtctgtgagatgctagaactccctttcaacagaattcacttgtggctattagagctggaggcacccttagccacttcattcccctgatgggccctgactcttccccataatcactgaccagccttgacactccccttgcaaaccatcccagcactgcaccccaggcagccactcctagccttggcctttggcatgagatggaggcctccttattccccatctggtccagttccttcacttacagatggcagcagtgaggccttggggtagaaggatcctccaaagtcacacagagtgcctgcctcctggtcccctcagctctgcctctgcagcccactgcctgcccagtgccatcaggatgagcagtaccggccaagcataatgacagagagaggcagatttcagggaagccctgactgtgtggagctaaggacacagtggagattctctggcactctgaggtctctgtggcaggcctggtcaggctctccaggtggtcagagggcccagtggtgccccagcacggtggtgcccaagccaaccctgtgactgacatgtacgattcactcctttgagtctttggatgccaactcagccccctgacctggaggcagccggccaaggcctctagggaagagccccccactgcagacatgacccgagtaactttctgctgatgaacaaatctgcaccccacttcagacctcggtgggcattcacaccaccccccatgccaccggctccactttccccttttattaatacattcacccagataatcattaaaattaacatgtgccaggtcttaggatgtgtcttggggtgggcacagtacccggtgactcttggggatatttatttattttccctgagcctatatcttcatctgtgaaatggggataaaaatacttgttgctgtcacaattattaccatctctccagctagcaaaattactaccagagccgttactacacacaaaggctattgaccgagcacataccatgtgccacacaccttgacaaaatcttttaatacagtttattatgtactattcaatctttacacaatgtcacgggaccagtattgtttacccaattttttataaggacactgaagcttagaggagtgaaatgttttgagtgttatttcagagagcaaatggcaaagactggatccaaacccatcttcctggacctgaagttcatgctcccagccaccccacccctgagctgaataaagatgatttaagcataataaatcgttagtgtgttca

SEQ ID NO: 2337 - DNA, 1343 bp, Homo sapiens; identical to SEQ ID NO: 2336

SEQ ID NO: 2338 - DNA, 110 bp, Homo sapiens
gccaactggggtgggtggggcagtgcttggcccaggagtttggccagaagtcaaggcttagaccctcatgctgccaatatcctaataaaaaggtgaccatctgtgccggg

SEQ ID NO: 2339 - DNA, 729 bp, Homo sapiens
acagtgactggtggctcacttctgcccacctgccggcaacaccagtgccaggaaaaggccaaaagaatgtctgtttctaacaaatccacaaatagccccgagattcaccgtcctagagcttaggcctgtcttccacccctcctgacccgtatagtgtgccacaggacctgggtcggtctagaactctctcaggatgccttttctaccccatccctcacagcctcttgctgctaaaatagatgtttcatttttctgactcatgcaatcattcccctttgcctgtggctaagacttggcttcatttcgtcatgtaattgtatatttttatttggaggcatattttcttttcttacagtcattgccagacagaggcatacaagtctgtttgctgcatacacatttctggtgagggcgactgggtgggtgaagcaccgtgtcctcgctgaggagagaaagggaggcgtgcctgagaaggtagcctgtgcatctggtgagtgtgtcacgagctttgttactgccaaactcactcctttttagaaaaaacaaaaaaaaagggccagaaagtcattccttccatcttccttgcagaaaccacgagaacaaagccagttccctgtcagtgacagggcttcttgtaatttgtggtatgtgccttaaacctgaatgtctgtagccaaaacttgtttccacattaagagtcagccagctctggaatggtctggaaatgtc

SEQ ID NO: 2340 - DNA, 1960 bp, Homo sapiens
agccagggggagctgggcctggtctcaccctggaggcacctggtggccatgctcctcttccccagacgcctggctgctgatcgccttccccacccaccaaccctcagggcaaagccaggtccctctcatttagcctgtcctgtcatcatcatggccagctggaggcaggggcttcctggtgctggaggttggatcttgatgtaaggatgggcatggtgttctcctgctgctccctcagactggggcaatgttaatttagtggaaaaggcacccccgtcaagagtgaattccctcactcgtctcccccaacagctggaccctgaccagctccccctccctccccttgcctgtgccaggtgaggtcagcacatctcaacaggcctcagggctccttgtgggcctgggctcctggacccccctttcacaggcagccagtgccctgagccagggtctccagaaagccccacccaggccaggcatgtggcaggggttagagcaggactgatgtctcctaagcacctgtaatgtgcgagggacccagctaataactgatctcgttttttcttcactgcaacatgatgaggtagtaccttttatatcccatttatagatgggggaaagcaaagcacagagagtctggataacttccacagggtcccacagccacgtgtttagacctagatgtataactaggagctttgactcaggagcctgtgacataccccctcccccaccgttgtctcatgccagtaacaggctcaaacaatgacaaagcagattcagaaatgaggccatggactctgtcctgaaggcctgaggttactggaaattaggggattaacccactagctcttgttgagccgtgggcaattgtctgaaaagtgaagacagaaccacagggctattttgtttgcttcatgtgtcccagaagatgactgagggtgagttggcttacctggcccatcagggtaggctggagttagggactgaccagcagctttagaatcccagccccctgaccactcagagacatgcagagattgggtttttggacttctggggtaagtggtctaagtccagtccagtcctatctgggcttcctggagcagaagcagcaacttgtcctagcacagatggccagccccttagacagaggccctcaagtctttctctttccctggtcccttgtatcccctgcaggctgagtgcatttggagggagtgagtggccctttcggatccagggaggctggtcctatggcctcatgttaaataggcggggcttgccttctggtgttggacaagcttctgagacgtcatgaggagattctgcctttgccaggtgactgtctggggagcgggtctgctcccaaggggcctgagcagtccttggcctgctaaggtcttggaacttgcctgcctttccatccatggccagcagcacctgccctacctgccccacttgtccttagcctggacctctgacagcagcatctctaccttctccccagctcccaggaccacaggctcaggcaggggcctccatgggccccaggggaacactggggacttggcctctctctagggtacatggtgctgggagaggcagcccaggaagtctcatctggggagcaggcagccagcatctgggccttggcctggagcacaaagaccctggctttcattttctctcaggtgaaaggaaattaaggcaacaaaagaagcccggctcctggtcacctaggaagcctcagattccttcccatggagggagggagtggtttgcaggtggccaagttcctctaacttggctcacactcgacatgaaaattcagaattttatactttccctaccctctagagaaataagatcttttttgtcagtttgtttgtatgaaactaaagcctttatttgttaatagttcctgctaaaacaatgaataaaaactcaaggagcaact

SEQ ID NO: 2341 - DNA, 50 bp, Homo sapiens
gaccaaccaacctaagagcaataaatgtttttgtttgtttcaaatttcaa

SEQ ID NO: 2342 - DNA, 1425 bp, Homo sapiens
acaacccaggccatggggtggaaacggcttgggcttcaagcctctgaaaccaaccctctgcagcagctccatccatttatccagcaagtatatattgagcacccactgtgttccaagcactgaacttgacacagggggttcaagagtaaaaagggaaacagagtctttatcttcatgataaaggggacatagtcattatcttcgtaaagttaaagtcaatgaagatttgtccatcaaattaatcattttattatacatggtgattagaaatcactaaatattactctttgcatatacttagcctataacatttacatgcttatacgtaatgtctacgtataatattttacatatattatcctgtaaacgaaggtagacttctacccactttttataggtgaaaaactgcagcctggacagttcaatgatacacccagagtccacatctggcaggaggcagaagccccattcaaaagaggttccagttccatcgtttccttgaatgcctgttttgcggtattcttgtgtctttcattgtttataaagtgtgaccctctctcttcatgacaaactcctaatgagatcacataaatgtgatgttccaaagagctgcccatcagggtgatgagagctgttgggtaatgtgagtctctttttgtaggtgtctgttcccctgtgagcacagcccttggtgctgctgggcaggctggagccatcagcaccaaggaagagtaggggattggctgcagccctgggtctggcagagagcagactctgcagggccatacccagaaggaagagcacccatacgtccgctgctttcccctagtcaatgtctaaagccctcctatgaaatccatgagaggtggtcatttcctcttagccggacccatgtggaatggaggggccccaagaatcccaacatcagctcatcatcccactgaacagcccttctaggggagaccattcccaggatttaattcacatctgtctccctgccgtttccctcactggccacatgcaaacctttctaagagtgtaaacatgaactagactcattgtgacatctccacacgtttcctccttcccaccttttttacccattcctaatcatccttttaggcctctctcaagtgtgtacattacgtcttccacagagctttccttgacttcacacctctggggaaaaggacagtatgcacattgtgtccattggttgtgagacatttgcaggcaaagactgaccttcctcacggtggccactgcactcgtctaatacctggattgtgttcataatcaatgttagttaacaataaattttaaaaaattgaagatggctctcattttcagactaattgtccgctcatttcttcagattctactcatttgttttcttctgggcattagaaaaaaaaactctaaatt

SEQ ID NO: 2343 - DNA, 407 bp, Homo sapiens
gggatatgcctccgcaactcacacacctgcctgcccacgctccttctttagctctgacacctgagtacacgatcacccactcttacctgctcgggtacctgcttactcagatacttacacacaacaacagcagcagcagctgctactgcaacaaccgctaacacttgttaagcacttactacagactagaaagtgttctaagtgctaaattcttgtaacaatcatttgcagcaggcatcactattctctccatttccctggggtggggggttaagaaacttgcctgtatcagtcagcttttgctgtataacaaatgaaagcaaaatcttggtgatgtatagcagtgaacacttattttcacactcacaggcctgtgggttgattagggtggctctgctctgtgtgtt

SEQ ID NO: 2344 - DNA, 2718 bp, Homo sapiens
ctgcgccgcctgccctcctgcccaccctcccacccacccgaccagcagagctttttaatacaagaaaacaacaacacaaaccacacacactcgcacacacacacatacacagagactctttcatttttcttgtacatatgtgtaaataatgacagaatggagtggggtaaaagtgtattttgaatattcccaattttcgaagtcagtaaaaaaacacaaaaactgtatgaatgactttgtaaattttgttctatatgaataaaaaggcaaattacttgtgatcattctgaagtgccaaaggagcccccccattcctgggcctttctgagggcaggaggggcgaccagataaggagcccctctctgctgggggagaagggaagacgaggaaccccacatgccactcgctgccttgtcccacagcttgctgccccatttctttgctcctggcacctcgtcccttttagtccctcagcttgataaagagtgagtttggagcccgcattgggctggcccactgggttgctgtgctgtagggtgatcggctgttctgggtagcctggggctgaggaggtgccctggactcagggctatcctgtcctgtcttggatcttgcgggacgagttagtcaccgctgtgtgtgttgcagtgtgcctctgccccatgggcccgagagaagctgacaattacccatagtgaggtaattgagggctttgatactgagctgttctcatatcatactgttggccttgtttttcattttcttttcaaaattagaagaatcaaaaagtgatagaatattgggggaaggagggcagactccatcgtttcctcagggagactgggcggaggtggggttggtctggaagaaggtccatgggggcagggagttgcgaggtggggttagttgcatggaccaggtgaggtggtggaacaaaaggccaggtagaggaagaatattcccttgggtttggacccatggtcccaggtgagagaaggaagtgaggccatagatgcagggagtagaagctttgtggtgtcaggcaaacggactctgttagtaagagttgggggaggtgcccaggtgggtggaccagtactccaggtgatggggcatgctgagaaatagagaaaagagaccatgtttatttgggtaggaggaagccttgccttgcgccttaggtgagaagcataagtgtaactcccatccaccagggaagttgcttgtagccccaaaagtaaaggcctatctctgggtcataaatcctgcaggcagtccaacaaacagggctggctccagcacaaactctcccttccacctttacgaccctctccagaccagacctggagtcctcttcaagcagcaatccaacccagagcaggggccctccccactcaggcatctgataacctctgagatttccaggcctatccctgtgcaggtacagctgcagggaagcccagttttctaagcctaggaccacctaacagcgccccctccttcagttgccctttctgaggcaactaaactacagaatcagggaaagaaccattaggagtggaactgggggaatctgagttgtgtcacttcagttcctctcctaaagacaaaggttagtctgatctccagacccgtcagaatggaatacacagcccacatctgtcactgaaggaggtggagctcccacagccagcagtaatcagggagctgagagcctggttctgtgatcatggagaaatacaaagtcctattgattgcttcttctatagccttgtagagtttctagagagatgtatttatgagggtgataactagcccaggattgatttctttcctaaagtccctagtgacatgattgagcagtaaagaacggccaaatcacacagtcagctaaaagcactgtggggaagagagtgtttataattatgttatttattgctggatgctgagaatggtctgatattcgtgctacctaggcaatccattgacatttctccaatcagagcatgtggaccttggagccaggcatgctcagagaagcctaggtgggctaccatgaccccgaggaagagcaggctttgttttccatcagcacgttgggggccctgccctgaatggtcaatttttcacatatatatctctctatttttttaatcaaactctggtctcactgccttatctcacaccaactctgtttcctcattgccccctgagatggcctgtcttctggggtatagcttggatgtcttcttggatggttctgcttagaatgagtgtcaaggaggaaagagagggagatggaggatgtgtttgtgcgcctgtgtgtgtgtgtttgtgtgtgtgtgtgtgtgtgagagagagagagagagagagagagaccagcatcttcaagagaagtattctgcttatacaaaatccttaacacctcatggtgttattcttcaccatgtttatatatatatatatatatttttttttttttttagaattttctacccttggcatgaggggaaatgattgatattcaagcaagttctctaggaaaaaaaaaaacttcccaactcagatttctgtgtcagctcagaatgtatctttttttcatgctttgctctttggatttataactctgtttagactattccatacattttaggtatattttgtgccttcagacactgcaaataataatcagcatttggattaaagttgtttaataat

SEQ ID NO: 2345 - DNA, 2287 bp, Homo sapiens
ctgctttacctttgcttcaggtgctcggtaatgctggagctatccttagacaaagaaaagtcaagtcatgaaagaagtccttgaagatataccaagaacattcatcagtatcattcgtgtttggatttttaaggccacctgatttcttcgtcatgcattcggcatttgctaaatgacagttactacatcaatctgcaactatcaaaaatgaggggaaaaggttcaggctgttaacaattccatgcagtatttaaatacatttactttggcagagtttataccctccccttgttttcttgctttattctgggcaagtttgaaggggaaaatttgtgctgctgttagtgcaactgctgtgtatgttgagccactgttgtcatgccagccaggtgcaaaggcagcttagctactgaggtagcgaatgttctgaggacattctagacaacagcttagttcctttttcaggctcatttgcttttgcttttttgttgaatgattccaatcgtaaataaagcttttaataattttgtgaattttttggttgttgttccctgaactactgtctatatttaaaattagatggaatccaaagatacacgggattaatagtatatttttttattcttgattaggtttgggttattgaactattttttacttttgagaccacaaccatattcaatatcataccataatgtgtcatagctataggcacaagaaaaacaacagtttgagagaatattatataagatgatgtgccctgttaaaaggaggaggcaaaatagtcaaacccagggtagtttacacttaatgctagggaggctcttaaaacattattagattttgaggaaagactctctagatatattttctaatgttcagtacaataaatataaggaagctaaaacaccaatgtggaattcctgtttccagataacatgtatattcttctatagagtgacaggatcaattgcataagcgcaaagccttaaattgctggtttagagaagacccttttttcattcagattctttgttcgtagagcagttatttgaaaaacagttatggaacacaaaacattttatagatttaatatcataacattgcaaatttttcttgtattattcacaccactggttatacttttttttttccttttttattgattgggcctgaatacaggctttctagagatctttttcattaatacttttaaatacctttcaggtagttacatcatgtttcttcattggatttgtaaaacttgaagccataaaaatattagtttggtgtgtattggggaaaatagctaaaagtctaatttttacccatttagactttgttatttccttgtataaagtgacaaatcggggctcttgtatcagtgccagctgtaatgtttttaaatgcagtggctgccttctattgtcttcctatttttgataatgcagattgttgggaaatctgtaaggaagtaactgattccaggcaaattgttttcttccttctacccaccccaacccctacccatcaccttttaagaacatagtacgccagtgtaacgtgggaaccattgagattgtatttgccctgagtattaaagctagcttagcaaaatacttttaaaaacatattggtaaatgatacccgtaaaattaaattagttatattttattttaaaatgcaaaatacattgatatttattaatcattggatttagggaaagggacagatttttggtgaacctgacttgtggcagatggtaaggaatattataaaacatttggatgagaacaatcagggcgaactgcatttttctgttacactggtaatcatttgaaaattgatttacctcagtgtttaacagttttttgttttgttttgttttttaaataataactaattgtcgagcactgatagagatgcagattttggtggggggaggtggtgggggagataatcacttcaccaactgcagtgcatttgtgtgtttttaaccctcagagaactctgcattttagggtacttgaggctgacttaactaaaagttttaaagtaaccttttttccattgtaaatatttctgtaaatactaccaattggaaattagaacagtagagtacttttctgaatccaatcctatttttattttatacagtatttctcagctgtgatctttggagcaaaagccaacggcaggaaaaaatagtttgtaccagtttcatgaagtatgtctttgggtttttgtaaataattttaactcaaataaaattgctactttcaataca

SEQ ID NO: 2346 - DNA, 904 bp, Homo sapiens
accccagccccaatctgatcagacatcatggactcgcccagctctcctcggcctggggctctggccaaggatgggctggaggtcattcagttggtctgtctcttccctggaaaccttctgcaaagatggtgtggtgtacgtggcttccctgtaaccacatggggcttggccatttctccatgatgagaaggactggaatgcttctccgggcaggacatggtcctaggaagcctgaaccttggcttggcatgccttctcagacagcacggcctgggctccaactcttcaccacaccctgtattctacaacttctttggtgttttgctcctcctgtggttggaaacttctgtacaacactttaaacttttctcttgcttcctcttctcttctcccttatcgtatgatagaaagacattcttccccaggaggaatgtttaaaatggaggcaacattttggccaacattggaaagcactagagggcaatgggattaaaccaacctgcttggtctctattagtcagtaatgaagacgacagcctggccaaccaagggaaaggaaattagtatctttagtttcagtcattccttgtaggatatggtttagctgtgcccccacctaaaatatcatcttgaattgtaatccctataatccccacatcaagggagagatcaggtggaggtaattggatcttgggggcggttcccccatgctgttcttgtgatagttctcacgagatctgatgattttataagtttgatagttcctcctgtgttcattctccttcctgccaccttgtgaagatgccttggttcctcttcactgtctgccatgattgtaagtttcctgaggcctccccagccatgtggaacagtgagtcaattaaacctctttcctttataaatt

SEQ ID NO: 2347 - DNA, 1265 bp, Homo sapiens
atggatcatggctgacttcctcactatcctcttcacatgtaacttctgcagacctatcacaagtttacatgtaaccacagaaatccctttctctcctgactcattaataatggataccattctcaacaagtcaatccaagtcagcccgttaaggagaaagaaattaaggttagcggatcatgtacaagctgagtgtgaaagtagaaatcacctacaccagagagccattttggtattttgcctttaaataaaaagcctcctttatctggctgtgcagccttgctctgtggcttttcccaacacaatcagtgctagtgctggggaggaacagtcaagagcagtcagttgcttgcttattttttctggatgagtctgggacacactgtaactttaacacatttaagaagtaggtgtgtggccttttcagaaggtggcatggtcctcaagtgagttcttagtattttatatcagcaaaataattcaattttgcaggttgcaaacaaatataaaacctgtttctgtttatgaatattattcttttagaatagaataagtacatgctgctgtaataaaattgcctttaatcacttaacaagcctaaccttgactcaaacagtgaatgcctatagaaataataaatgaaaaaaactagtatttttatatcataaaacaatgtcatttatagcttatcattcatgtattgtccagcagacattaaaagccctgtggataattaagttatcttcatacctgcaaaatggtggaggctattttcattaaaactgtcagaatttgcttactataattatgatacagtccaaagaatgcagtcactttttatcatgttaactaattgttctcttttgaagatctatggttgactaattaaacaataattcaagtagagtgtcccagaaaaaaaccacttgggctccctgtttggagtctggctggctctgagcattgccaatggcccctactcacctgactttgtatcctctccttttagaggctttgcattctgcacccagcttcactaacagtgggctgaaaacatccttgggttgagtgtttcatttgggagttatttggccagggccttttgaacagtagtgtccccatgaagtgctagataatatatgtgtaagagtcagctttttttttttttttaactctaacacccttcagaaatttctaactactttgtaactgcatggcttaacctggtgataaaagcagttattaaaagtctacgttttccaaaa

SEQ ID NO: 2348 - DNA, 1569 bp, Homo sapiens
gagtaaagatcatttgtacagttcagtgatctagtttggtgtgtcctcttatcagttagtggaaatagaacggaaagagtgctctttaaacaatgagggagctcagtgtttatggttttatactctgaattctaagttattgagatatagttgttacataggtggtattactgttggtcaaaaatcatgaggaggaacagttgaatccagcctgaacgtgggtgcttgtgtttgaccttttcagccatatattgtacagccttatagaatctaagctggtcttaaagtcataaatgattcattgggtcattagtgagaaacggggatgtggttaggtgctggttcctagacatgtgagtatgcgtttgtgtgtgtgcgtgtatgtatgtgtatattaaatgtatatatccacacattttatattgacattctgtagatatgtttgaatatagaaactttttttaccccaactactgaatccaggagtaccaaataatatatagtaaaactaagatttaaggttgtgtcaaaaaggtacagtgattcagccatttccatttgtcatttgtttcaaccttttttaagttgagtgtttttatttctgcagttattagttggatcctccacatcttgcatatatacatgggctcaattattatgtttgtcaggataatcaaatgaaaatactagttcagtgatcagcattgaatggttgttaggcagccatgtgctcaacactgatttcacctcttgagtataaactttttaaatttaaattggtttacatgaaagtggattaaaaggcctttcaaaagaatgggtttgaaaaacctcagtaccctttaatacatgtacatttctttccttttttcatttaatgtaacatgtctgttgtaactatgtttcttaaatattattttaaggttatgtgttctttaattatggtcaaatataatttggtcaccaaaaatgaaataatagtttaaaacaagtagctgttactaagtgtgctaaaaatactcattttataattaattttagttttcttagtatattattataaattgtgccctaagtcaggtacaaatgtacacatcaaaatgcccatattgtatctatctgtagtcgtttaatgtgaattatatgtgaatttttttcaaaattttactaaccagaattctgttataggcacctaaccacgcagcatgaggaaaacggcacaacacaatcttgaggtgccttctgaatcatcagattaaattatgcttcatatgtttttgcttttactgtatttctttaaaaactctaaatctttattcatgtgtcactggattaatttatctgataatgtgtctcacaagaatctgttagatcgtttattcttcagttgtactttgaatggtggggtggaagtttcaggtgaacaatggataacaaaaagcaagttatggaagattgtgaagaggatggaaaaactgaatacaagataccaaaaatgaaaaaaagtgtcccatttttaataactatattctattattttataaatgtgtaataaaggggtccctcttt

SEQ ID NO: 2349 - DNA, 1097 bp, Homo sapiens
cttcctggaaattggagcacacagtcaggttttatttgatttttttttttaaggataccacttcacagcctttaggatagctattatttagaagcaaaacagaagataaatgttggcaaggatgtggagatattggattcccttgtgcagtgccggtgggaatgtaaaatgatgtagctactatggaaaatgatacggcaatttctttagaaatgaaatatagaattgctgtatgatctgcagttccacatctggatatctatccaaaagaagtgaaagtagggacttgaacgaacatttgtacaccaatgttcacagcggctttattcacaacagccaaaaggtggaagcaacccagtgtccatggatagatgaatagataaataaaatgtggtataaacatacaatgggctattgtttagccttaaaagggaaggaaattctgacatgctgcaatatggatgaagcttaaagtcattatgcaaagtggaataagcctatcacaaaaaataatattacataattctacttatatgaggaatctagagcagtcagtttcacagagacagaaaatagaatggtggttgccaagggctgggagaagagggcaatggagagtgagtgtttagtgggtcagagttttagtttgggaaggtaaaaagttctggagatggatgatggttatgggtgctcaacagtgtgaatgtacttaatgccacagaactgcacatttaaatgtggttaaaatcatcacttttatgttatgtatatttaccacaataaataaagaagttgatatttcttatacttacaaagaggagaagggcatttgcaaatcaacaagaagtgtgaggcccctctctctagcagaaaaatagactaaatctatttctttatcttttaacatcctgtttaagggaaatgccaaaacaaatgggaaaaaatacacacacacaaatatatatgaacatgttttgcctcatgagtaatcaaaatgtgtacatatgtatgtttatgtatgtgtgtttatatttaaaatcgtgttctgccttatgagtaaacaaaaagtatacaaattaaaaactataatgaaacgt

SEQ ID NO: 2350 - DNA, 395 bp, Homo sapiens
tgcctatatccttattctctacatgtgtattgggtttttattttcacaattttctgttattgattattttgttttctattttgctaagaaaaattactggaaaattgttcttcacttattatcatttttcatgtggagtataaaatcaattttgtaattttgatagttacaacccatgctagaatggaaattcctcacaccttgcaccttccctacttttctgaattgctatgactactccttgttggaggaaaagtggtacttaaaaaataacaaacgactctctcaaaaaaattacattaaatcacaataacagtttgtgtgccaaaaacttgattatccttatgaaaatttcaattctgaataaagaataatcacattatcaaagccccatc

SEQ ID NO: 2351 - DNA, 3039 bp, Homo sapiens
tccttgtgaccacaccgatggagatacagaaaaagttaacgactggattctatcttcattttagacttttggtctgtgggccatttaacctggatgccaccattttatggggataatgatgcttaccatggttaatgttttggaagagctttttatttatagcattgtttactcagtcaagttcaccatggccgtaatccttctaagggaaacactaaagttgttgtagtctccacttcagtcagaaactgatgtttcagctaggcacagtggtacatgcctgtaatcccagctacttgggaggctgaggtgggaggatcacttgaactcaggagtttgagagcagccagggcaacacagcgagaccctgtctcaaaaaaaaaaaaaaaaaaaaaagccctggtgttccaaactcagtctttcctgaagaagaggatctgagttatcttctgaaacagcgttctcccttcccagttgtatcactcttataaaaagactgtccagtctatgtcatgccctaggagacaaactgttcctcccagccccctttgagtattgagcagaagaatcaaattattaaatacgtatgtttgtacagaatggtatttgtgtatgtgtgtgggcttagagattcacaagtaaatattcctttggtgaaggaatttcaataaaaacatctatcaagtgtcagcggtgagtgtgtttacaccacagaaattggcaaattgacaaatcagagtttgtttttgtttttttgttttttactttccataaagttcgtttaccagcataccactagagatttcggtttacaaataaaagccatcttggtttgagcaagactatgcaactatgaaaatgttcgtttaaaaaaatcttcatgatccttttgtaaatacaaggtggttgccaagcttgttagttttgtttattttattgatagatgtaaaatattattgtaacttatttggataaagttcttcaaaagaaacagagctatacaatgaggtaggatctggattatttgtctaagtgagagattgcgaatatcaaaatatctgtctcacttcttctgtgaatgacacagagtagaaataaattcactttaaaaatatgactgaattttgaaaatcaagactgaatctcacatagctgcagacaggaactaagccagcctctttgtatgtggtaacaagtacagtataagaatgaaagatttaccatccttgaaagctctaatgaaaatcaaatccagcaatatatattcaactgtgtacaggatttaagaaacttattttatgaaggaagtaatagtgtgtagatatagattctgaagtctttaaacgtgtcttaataaattaagattcactggcattgagctgagctaccaggtgacccttggggacaaaaaacccacacaagtgaatttcacacaccagtataccttcaacaatatacttttgacacacacaaacctttgatttggtttcagagattttgcaaaatagtaccaatgtaatttacaactgtcatctttgaaattgtgtaaaagtggaataattttctgaagaaataaatcatggtttgtcaatgagttgcagagactgtctgacattaactttgtcaagattaaaggataaagtatatgacaatttgtttcatcatgctcatgacattatgcaattttctccctagcttttaatttttggaggcagaaaattgagccagaaatttttagtcattaggtctcctagcaacaagctgtaaaccttccaacaagcttggactagaatctagacactgaaatgcacatacatgctttatgtaatgcagaatgcatttattggagaactcataaacatcctataaaattttcttccctgagatgcaactataaaacttggccttattctgagaatgcttaacatagatttcatccatactgtaacactgattttgttgttgttgtccttaaagcagctcagcttcctgaggtagtgttatgtctctgtggcaacaaggtgaaaatgtctagcttattttgtcaaagtcaacaataatccacagactccagacctcaatatctgtcccaatttgccattttactttagtgctccaaaaatatggcttatagaaaaaacaataggtgttttaaagagatttacctgaatgatatagagaatgtctagatattttctggctatcaggtaaaacctacccttcaagatggtagaatatataatagcatacaaaacctctatttacctaataagtactttaatttacagaaaaaaaatgtaaatgtaagtgtcggatttagtgccaagtgcagggaatctgaaaaatgtatactaggtctctgctctccgtaattctgccttcatgggtcctagccccatccctcaggaggttgtcctaagatcgtcagtgtcagatgcttcacaatacggcctcacaccgtccctgggaaaggttggtctcctcctgctgcatcagatggatgatttcattgtacatacggtgaggagcatccaaaccccagatgaaatccacgtgagcccattcaggaatattcttatggtagatgaggttggtcacctcagagagcagcattttcacgtcttctggatttgaaagccagtcctgacctcctgtccacattgctgtagggaccgtcatatctctgactctgtaccttacaggagttggctagagaaaaggaatagttcttaactctaggtaacatttggactttcaggctcataatttatgtttcaaatagacataataaacatgccatctgttgtggtgaagggtacatgggtgttagagccacacaactctgttaagaatttctgttcccgcccttactttaaggtaaaattacttaacattattgaacctcagtttcttcttctgtgactggggataatatctgtaataacttgctagatcaaatgacaaaacacataaaaacatgtaatgccttgtatttcttttttcttcctattaaatattttgtaaataaattgtttttaa

SEQ ID NO: 2352 - DNA, 147 bp, Homo sapiens
aacactttcctgctcctctctgtctctagcacacaactgtgaatgtcctgtggaattatgccttcagttcttttccaaatcattcctagccaaagctctgactcgttacctatgtgttttttaataaatctgaaataggctactggt

SEQ ID NO: 2353 - DNA, 1253 bp, Homo sapiens
aagctggacttgagctgtgtaccaccaagtcaatgattatgtcatgtgaaaatgtgtttgcttcatttctgtaaaacacttgtttttctttcccaggtcttttgtttttttatatccaagaaaatgataactttgaagatgcccagttcactctagtttcaattagaaacatactagctattttttctttaattagggctggaataggaagccagtgtctcaaccatagtattgtctctttaagtcttttaaatatcactgatgtgtaaaaaggtcattatatccattctgtttttaaaatttaaaatatattgactttttgcccttcataggacaaagtaatatatgtgttggaattttaaaattgtgttgtcattggtaaatctgtcactgacttaagcgaggtataaaagtacgcagttttcatgtccttgccttaaagagctctctagtctaacggtcttgtagttagagatctaaatgacattttatcatgttttcctgcagcaggtgcatagtcaaatccagaaatatcacagctgtgccagtaataaggatgctaacaattaattttatcaaacctaactgtgacagctgtgatttgacacgttttaattgctcaggttaaatgaaatagttttccggcgtcttcaaaaacaaattgcactgataaaacaaaaacaaaagtatgttttaaatgctttgaagactgatacactcaaccatctatattcatgagctctcaatttcatggcaggccatagttctacttatctgagaagcaaatccctgtggagactataccactattttttctgagattaatgtactcttggagcccgctactgtcgttattgatcacatctgtgtgaagccaaagccccgtggttgcccatgagaagtgtccttgttcattttcacccaaatgaagtgtgaacgtgatgttttcggatgcaaactcagctcagggattcattttgtgtcttagttttatatgcatccttatttttaatacacctgcttcacgtccctatgttgggaagtccatatttgtctgcttttcttgcagcatcatttccttacaatactgtccggtggacaaaatgacaattgatatgtttttctgatataattactttagctgcactaacagtacaatgcttgttaatggttaatataggcagggcgaatactactttgtaacttttaaagtcttaaacttttcaataaaattgagtgagacttataggccc

SEQ ID NO: 2354 - DNA, 535 bp, Homo sapiens
tgtggctgcggtgggtgcccctaagactcgggactgctgtgcctttcacacttgaatgaagagaaacacctgagctatatatttttttaaagcaactaacttattgctttatgtttatctatgaaaaccatagataaaatctgatgcatttttgtaatctgacaaagtaatttacatactgtttgtgtatcaatacaattttgtgttcttggtattcttagtctagctcacctcaatagccttgaatcctgcatatgaattagacattcatcactggcatatttagaatatctctaaaaggacttgtttgtagaataaggaattttctatgtttcaaagtgttctaaaacctggctaaaagaatgtatttttgtggatggtgttgacttctgactctaaaagcaatcaaacatgtttctgctggacagtgaccaagaattatagtaccttcttatatttttttatagaactgtatatttattttgaaagaaatgttattcgtgctttaaaaaggaaaaaaaaccatgaatcaaat

SEQ ID NO: 2355 - DNA, 2048 bp, Homo sapiens
ccaaaggccttgagccccagaatcttcaggtttgagagaggtggggccaccagattcttcatgtttctgaaactttttattttggcagaaggattgccttccaaggaaattattattattgttttgttaacatattaatatttataagggaaaacagcacataataaggaaagctggactagcccagagccttctcatttgggatttgtgctcataactgaactcgtatcttttggtcaatgggcatagctctgtaagaaatgtaaggacacagctgatataattagctgtaattagggataatttcaaagcataaccaaagcagatgacactgggcagcagctttgttccagtctcaggcccttcatgttccctcctcagaaagaaaatggaaacattaacgtgtagctttgcttaccttgttctggttagagaagggaggtcagcttgggtgtggtggtgaagagtgaagatgccatactttttcatggtggagtttctcattagggttttacttgggattgttaaagaatacttgagattcttcaaaaagtggtgattaatatagaaagaaactcttattttttttttctcttagtcttccagccagcccttgcctctgcccaagggtagacaccactatgagaatccaaataatcatggaatgccatggttggaatagatcttaaagggcatctggtaagatccatttgaaattgtccactggaaaccgaaagctcttttcctaagactgggttccaggctctcacatttgttaccatcacatataatacttactctaaatttagcagaacacacttagtcacaaggacaacctctcaatcttacctgaaatgtcaacaacaccaaaacttcccgtcttttaccttcagagaagaagctcttacttagactgcagacgcattcctgttaggttggaaaaatgttggcagtattccaattgggcaggaactgaattcttgaatcagcaggtctctggtgagagttttctttgcagatcagacatttagttttatcattacccaaaagaggattggagggagtcagttgtctgaaaaatattatcctagagatattctaaaggtgagattcctttctccctgtgttaattcttgttccactatccactgctcttcatctctttatagataataattagaaatctactcattggattataagtttattcattctcaaatactccacttttctatggtttgggataatttctgagtcttcagattgaagagggaaggcatggagggaagaaaaagtccagatcccccagcttgtttccaaccattttaagtccaaagaattataatcctgaatctcacagtgtgtcacacctgtaataggagtaaattatgcaatcaattttaattaccaggagtttaaaatccaaatgtcaaggaactgttttgaccctgaaggctatttaatccactgtcccctacaaggcctcacaagtgctgggggaaaaaaaacagcaatgaggatgatcctgagttaatgtgtatgctccgcaagagagcttgcctataccttgattatttcataaaatcacatgttaatacattgctttcagaatgaaatactgacttgatctgataggagaaaatggtaatatttcatagttgttttccaaagacaaatttaaatgttgtctgttatctccttacttagtttaagaatttagttttgaaccccattgactttgtcatttgcaattttaaaaatatttgggactgggcatggtcgctcacgcctgtaatcccagcactttgggaggctgaggcgggtggatcatgaggtcaggagatcaagaccatcctggctaacatcgtgaaactccgtctctactaaaaatgcaaaaaattagccaggcgtggtggcgggcgcctgtagtcccagctactcatgaggctgaggccggacaatcgcttgaacccaggaggtggaggttgcagtgagccaaaatcatgccactgcactccaccctgggcgacagagcaagactccatctc

SEQ ID NO: 2356 - DNA, 1414 bp, Homo sapiens
agacgagcagtggaggaaacagcctcccaaaaggacagagaactaaaaaattgctgctggagaaggtgaaagtcgctttgggacggaagccaagccattatggcagatgaacctgctggatttgtaaataatttaaaatccttccagatgatcttttactcttaggttttgagctaatgattcaaaacgggggaatataaaaggttttttttctgtatactgtatttttttaaaaaaatggtgcagcgtggccaaacctaccaattgtatgcattaactttgaaaagttgtttgatgtttaagaaggacctgatatgtaagcgctggtcatttttcttctggggtttactgatcagtgtggtgattttaacttcatttagtaattactctaggagattttaccttgacttatatttttcatgacgtttcatgatttgctgttggtttcaaatgaaactacaaatctggcatgttttactgtgaacacttttgttatttgttttgtacccttttttgtcttgtttttctgttttagttgtcttctgaaaaaagagtcgttccctctgtttctgtcctcagatgatgtccctccccctacctgtaacctttctttgacataattgttcatatcaatgaaggtgctgaccagctcaatacaaagttaagcacaagatctaaagctcttgaaaatgcccgtgaagagaagactgaatgtgttaatgaatttaatgagtctggcaaaagttgcaaattatatgcaagtttgtcctatcgcttataaatgtagtgtttcattggatttattttatgctaggttatattaagttgaaatagtctgtgattaaatgtcctcatccatgcacagaatatgaatggcagcaaatctttgtgcaagaaatttgaaacttattgggaaaagcctcccagtagattaattgttcatatcaggagatttagggtaagtcatgggttgaggtgtcagatagtaatatctatttgttttgtacatgtatatatctaggaactttgtaacaacacatctttaataatgttaaaggttttttcatttttaatattttaaactaaaaactgtacttcaatctcagtttctaaaattaaaaataatttatactgatctatatattttttctttttgaaagatttcattaagactgatgggtaactttcaaatgagggtcatgtacaaatattgggatgcatgagatcccatgatcttgtgtattgagcttattgttgaaagggatttttgaaggacagaacaattactccatgatgaatcttcctttctctgccttctgagcaccgtctttaatttccatatcttcaagtcttgaagaagttgatgttaattgaagaattcacttgtctggttgaaataaagcctgtttctgtt

SEQ ID NO: 2357 - DNA, 1708 bp, Homo sapiens
acaaaatgctgactactgtagaaaaaaaggtcatgattcatgattgaaagcagaacaatggagatgaaataaacaaggcaaaatagaggtggaaacagaaggaagtcatttgctgagtctgcagaatggaatgcagcttctgtcctttcttgggatgtctaaaacatgacaaacagggtgatctgttgtacacactatcttatgagggagatggtgacttctccttttttctgtggatcagtgctattgtgtgttctcagtttaagatagcagatcatctcagcagtaagcacaccaacagaactgagttccagaaaggaagcagtttctggtgctttgcatatgtccaaatccatgcaagtgggagaaagttccagtgcacacttcccatgcttctgagtctaggcgttgtggtgaatatgcaggaatcattcatgagacagaatgtattttgttgtatgacagaaggcttttccaagcaaactgcggtgagcgtagtgttgaatatgttgcatgtccatgttagaaaacagaatccagtcatcagctaatacaaatgatttcccagagcagtgtttgtttcaagcttctgtcaaatagtttggcttttctgcagggtctctgtgatttccccacctatgtacttttctgtgttaactcacttattatggtataactcaggaacaggtctcaggatggagagaagcatacaacatgagcaaagctttttctcgtgctctgaagggtcttgagaggggagtgggatgccttctgtgaggatttttatcgcagtgaagctcaagtggtacccaactgcgttgtaattaacatgattattggcatgtttttgactctcattttctacaaggctgcagtgggcccacccatgggctggcccataactgtatgttatgtggaagaagtgtgggaatgatgggttttccatgaaatgtgatgcttctggagatggggcataaacatgttcattcttgttgagctgcattgtgttaaaccaaattgtgtgaagcgaggtcacctggaccactcttgggaaatgcttcagaacaccagtctgttccttctagagaatttgtttttgtgttctatgtatcttaaatcaaatgtgtgcctaagcaattctgtcctctgattcccacccctacccaccaaaaaatggtagacatgaaaggcaggtgaggaaacagaaaaggtctctttgcagatatatattttttaaatggcactatgtagtaattaagagctaaggagacagaaagacagtagatgagaatagaagagtacctgtacctacaaggggaaaaatgaatgcaattctttatttgataagagtgaactgaaagagaatattattttcctacaataaagcaagctgtcctctcacaggataaagtggaattctgacatggattatggacttcttctaactcccattgacattgcttcttaccagacatggggaaaagctacctttcctgaaaggggaggagggcactgtcctttcagacaaagcttgtacaaattcctgaaccgcaaatttgctgaagtgaccgtatatattatattcataatttaaatgattatttatggtcagatacatattgttaaacttgaaaatgttttattacattacatcaaataaagtttatttgtagctgaaataaagcaacgtaagtaacaatttttaatt

SEQ ID NO: 2358 - DNA, 766 bp, Homo sapiens
ggcaaacgacagactcttaatcagtaaatgttcactggcattttgaaggcatggcccaagagaagagacactagccataaaatctagtttctatttatcaacgtgttgtgaagatgtacctaatgaagttttgagaaagcacagggttataggtgtttaaatttcctttagtgaaactcttatttatttttatgtattcctgtttatttatttactgccacgctactgatattcagaccttcatgatcatccatctggtgagcagagcttcatttgtatataacactttcagagccttcccacccataggtagttcttaaaccaggtgaaagagcaaagttcaagtgcctacttatgtgtcattcgctcatgtaagagtttttaagagagggctgattatcacagccctcttttctcctgaatttttaatgcagaagtttgaatgaagcaagggaaggcatgtagggacaggaaaggaaacaatggaaggaaagtgattctgtgaaaaggacagtgaagccagctattttacccccaggctggattttttttttttttttttttttttttttttaccgagtacacagagtacccaagtgaagagaacgtcatgagtgtaagtgcaaatcagtggaaggagcggcaaactgggacatgcagaattgaatttgctcaaaaaagatgaaaggaaatgcaaactgtaaatgtataaatgtatattgtattgtatgtacattttatattcataataaaggcaatcaaactc

SEQ ID NO: 2359 - DNA, 1485 bp, Homo sapiens
attaagcaacaatgtaactggtcttgacttgtcatattcccccatgcaatcctaggtctgtattgctcaattttaggaagcctttgctactccatcagtaggtttagatttgagcttttgagacctggctatggaaaagaaagacacttgagaatttagtgttggggtctgtacagatgatgctacccaatttggctttgaaggatcaagtaacaggttgaaaactatttttataaaggtaatactttttcagttcccttcttccttccctctcaatccactagctttcatgttgggcaaggaaaagttgaggaaggatggctgatggtgatggaaagctgtgttaatggtatgaggaatgtgtgaaaagtatacacaaagggctctgaagctcaagtcagaggagtgggaggtctgatcattgttggtggaaaaacgtaaggttattttgtgtttttaagttggttttacaattctttcctggggaaattatttctggaggggaaaaagatccattctacgtatccttgtggagaaaagctaaataacctttaagaatgtgggtggtattggagaaagaagatgaattatagctccggagaatcaagatcttaagtgaagcctttctgttcagatgtgatctataaaaaatcataatttggggaaagtttaagcaaatctggctttgtagtcctgatgttataagtgactttgtgatcaaactgtcaggcttgggttcttgttatagaatgcttggtatagaaaaaccatgccatcattaatggctaacaacacgtagggacttcatgtcatgtcaaagatagctctttgcaagtgccttgattaaaccagaaaactgtcatcgtttaacccaaatatctgaatggtcatctggtaactcatgggtttttggcctcataagatggtccactctgtacacaggcattcctcctgcaataatgttgtatctttgagaccgttgtcagtgtacacaactcacatccttcatattgaaggtgactcatttttctgcacacttttttgatgtgatgcttgacgtgaggcccgacactaggattctcaatgcaagaatccagtaccttgcacatagaagtagcaacccatcccttgcctattttcatcttgctgttttcttttttttaaaaaaatggatgtgacttgttttgaatgttttgtattatacttgtttttgtgtgtgcataaattcattctgtaggatcttaagaaaaagagtcccagaatgttgcttctattattgtgcacaaccattgagaggtgttacaagaatgcagttaattttaacatgtgtgatgtgccatggtggaaaagtactatcggaataactctgcagtgacagaatttgaagtttggctagcatccatacttttctactgtaaatatttcactctcctctagctatccttgatgagcttctcactttaagaataaatgtgtttgatataa

SEQ ID NO: 2360 - DNA, 1604 bp, Homo sapiens
gactgcctgccggcttagggagggttgatgggggaggcgtggggaagggaaagctaagggcgtcttagaccggggggtactgtgatagagattggggagaagtccaggttctcgaatgggggtgggggcaagggtaagggtgagatgcttgggatgagagtgtaaggggtatggagaatctctgggatagcagagaagttaaaaattttgaaaagtctcagtcctgattaagagcaggaaaaataatggaaacagaaataggcgtactttaaatgtgcaaaaactggagactggggagagaaatcgatgcagagggaggctgagaataagggggagatagagtgactaaagtgatgtgagtcccatgtggggagggggatgcaatgtttattgtttaacatttctattaaatgcagccatgagcaattgccaacctgagccaggttgaatcaatgtcttctcacttaatcagctaacaagactgcagactttttttccgtttctgaattggtataaacttggatgcggcgtggtgggtgtcatagataacctctatagggacagaagcctcacaggtcaaaactggctccaaggaaagttttgcagaatgatttcctttccattcttttagaagagctacctttttttttttttttccctgacagggtctggcttgcccaggctggagtgcggtggctagtcacaggtgtaataataggcactgcagtctccaactcctggcctcaagggatcctcacatcttagcctccagaatagctaggagtaggagtagctgggactacaagcatgcacagctgcacttggcttagaagtgctactttatttttatttttgagacagggtcttgtgtcatccagactggagcagtggtgcaattatggctcactgcggcctcgacattccagtctcaagtgatcctctgcctcagcctccggagtagccaggactacaggggtgtgccactagaagtgctactttttaacgaaatggtgactaatgttctggaactttcccattaaccttctgcatttagaaggaattatagatgttgagtgctccagtaaacagtgattctctttatatctgatttttttttttaaacagctaaaatgtaagtatgtatctcagagtcattttgaccattatggaagttgtatctctctgtttcatgtaactaattattaatatatttcatttttagtgtgatgtaatgagagactgtgtgtgtatgttaggtgctcaataaaaactgtatggttagatttaaagaagtggcaaggcaatggaaattctacctgcatttgatctacttccaagtacaccttgaattaagttcttaaacacatcttgaattgctgggaaaagacagaaactaagaagttgacataaagcaagagtcacaaactggcagccacctggccttatcattgttctatttgatttgcaccctggttctctttctttttcccttcctccccaccttcctcccatccattgttgaatctgtggatgcagagcccacggatgtggaggggcaactatatatatgtttttccattatatatataaatgtgtgtgtgtgt

SEQ ID NO: 2361 - DNA, 3570 bp, Homo sapiens
gccacgggccgacccagccacaagtactggagtagataacaaggagggaaaagagagggcactgcctcagggcttacagtgttctggaaatctgtgcattcgttctcgatttttaaagaagaattgggtctttttattattattattattatttacagtcatattactgaactcagtgtccagtataatgcagaattgcagagtgtagaatggtactgatttgcactttgattcacacctttgtctgcttggtaccttaattttttatacctgatttgtcactcgtgacagtatgtagactgccattctcatcagcggccgtcaggctactgtctgtgattcttttgtttgttgttgtggtgttgttctgattgttttgaactggagcatgcacttattttcagaaacttagagagttgcccctaggacaagacttaccaaaggtaatactcgtgagtaggtggcagatgtagcaaaaacttcacaacaattcagcaatcattagctcgggtcacttagagtaaggataacccttcatgaaaataagcctttagttgctctctattttgacttgtaaggatacctcataagctggatcttttatttttccttcatgtttgatttttgttttgccgaggattttggttagatcttttagtattatgtaaatttatgctgcaatagcttttgctgctattaaaatggtattattaataccataatactctattcaggctaggatatcaattaaacacaaaaacccaacaacacacttttgtgattttagggatagagtcagctgccgaacggagatcagaatagacttcagaaagcttcggtggaaggtcactatttctgactgcatgtttacttaatcaggttgctgcatgcaataaattttatatccaatgtctagtataaaacgttcccacaatgcacaaattaagaatctatataagctataaaaatactcattttttaaaaaaagtttttttcattcaaagaattggtaattgaccggaggaaggcatgcctcaataaatggaatgctctgaatgggaagagcccataacagaatgacctatattacaaccgatataaaacctaggtgtaggatattcttcaagcaaatttgtggatggtagatgaagtactttgcggtgctctgttatatattgtgaaatttattttatatagtaaagtgattatgtctaactgtgatcaaacttaactgtttaaagcctctgtcagacattaatgaacttgacagttcataactgatatattataaactaacacatgagctcttagttacaatctcttagtgcttgcaccattttacatagcttcagaccttgtccagaaaaccaaagagctcatcttagcttacaaacactaagaatatatacaggatatagagataagttgtcagattgacaaactaggcacatttttaagaaagttgtgtaatggtgatgctaaagaaatgtctgtacaaaataagatggcctgggcagagttggttgtctgagtgagaaactaactacttaattccctggatttatcctgttaagcttgagtagaatgaaggcctgctagcactagcgtggtctagaatgaaggcctgctagcactagcgtggacatttttctagcattcacccttgggctgcagatagtaatatataaacacacacaatgattgcaagactatgtaaatctttttttaatcttcttcctatgttttggaattctggggacaatctgactggatatgacactgcagaatagatttaagtcgctgtgttttctgtgctgtgatgtccttgtactgtcttaagttagtgttgcttgtttttgttttgttctcccatgtttagttgcaattactggctctcaagctatagtttgttttcaaaaaggaaaaacaaaatagttttttactggattaaaaatgcttattttagaatcctcccctttttgaggctttttggtaataattgcttttttccagcccaggtgtggttttgtttgtttttttctatgtttgtgggttttttttcatctgtacaagaaattttgttatgcactactactttttgtattctagacagttttcaaaagttggcagatttttttttttgtttttaaggaaaaaggcatgctttctgactgacatgatcttttgcaatacctcaattttgaaatataggaaagaaaatgatattttctaagtaagtttattcagaaaaatatatattaatttaattctgcaagaaaatgatttaacagatgggtaactttatttttttcatgcttatttgtgttttttgaaaatgaagaagttagagctttataactataatattaaagatcatatctaacctacagaaatctacctaattatgtgaaagaagcaaaactttttgaagaagcacccctctttcatgtattaaaataacactgagatttttttaaaagctggaagattgtacagcataaagctaaagtgaaggcaaaaaacattgtcctgaagaataggttacaaaaaataaactccatttggtgctgaaagttgtgaatagatggtggaaactactttcccttaatttgtatatttctaatcaagtgttgattgtgcgcgactgaccaggattgtgaaagagttcttctgtttgtatttttttaaagagaacttttttagtttattaaattataacatgttcccttttgttttgtaaataaatgtgcccccaagttgttaatgttatattaaaagagagggtccttcaaaaaaattattttttaaaacacagaggtgttctgacctgcaacttgactgggaagcccctgggtaacacaggtcctgctgtggcctttccttggtgtgacacttgaactagtcgattttttgaaggctataacctaacctcgactatttgttgttatgtgcaatactgtttgtactgtttgtataaaaaatagaaaaaaaaaagaaaagaaaaaaggcataaatctttattgcagatttattttcattgcaaactttagacattgtgattcactgaaatcatttttctactgtcaaatatgtaccttttcttcatgctggtattttttcaatagtaatgtagcctttgtactgagacaaattttcattgttatttttagaaagattttttgctaagaaaaaaattaaacatatttacatatttttcattttatttcgtattttctttaaggagtgctttctcaatcattaatagagttgtttctgggagggactttcatatctggtcaatgtcataatattattttgtatttttattggaataaattaattttatgatgctaattctttaaaagtttatttttttcattttcagttatttttgaagctaaaacctttgtaatattgttactaaagtgtctagttttttgaaatgcaaagctttatgtattaacttgctgatgtggtttacaatagtgtgacaacgatgaaaatgcttggttatgtaaagtgattggaaatgtaatggataattgggtaataaaatgacagaatgagcag

SEQ ID NO: 2362 - DNA, 601 bp, Homo sapiens
agattccccatgcatgggaaagtgcaagtggatgcattcctgagtcttccagagcctaagaaaatcatcttggccactttaatagtttctgattcactattagagaaacaaacaaaaaattgtcaaatgtcattatgtagaaatattataaatccaaagtaaattacaaaatcttatagatgtagaatattttttaaatacatgcctcttaaatattttaaaatttttcttttgattactgagagaaatttccccaatataacaatgcttaaaatgaatgatattcctatagaatcttccttccctattctgtaaaatagtcacttgtccgaagaaagttaaaagttagctcttttctaaaagcctcctagcttgacatagaaggcttcacaacatttagaaaggtaataactttttaaaaattgatcctcaaatttgctttctacttgatggtttcatgtaaatcagtggaaaacattacatttggcagatgataaagcaatgtcatcttttattagtgaaatgctggttatataaggcatggttttaatctttttataaaatttgaacatgttttttatgccaactcgtaaaatgctag

SEQ ID NO: 2363 - DNA, 534 bp, Homo sapiens
caaaggcaaaggcttcatttcaagagtcatccagcaatgagagaatcctgcctctgtagaccaacatccagtgtgattttgtgtctgagaccacaccccagtagcaggttacgccatgtcaccgagccccattgattcccagagggtcttagtcctggaaagtcaggccaacaagcaacgtttgcatcatgttatctcttaagtattaaaagttttattttctaaagtttaaatcatgtttttcaaaatatttttcaaggtggctggttccatttaaaaatcatctttttatatgtgtcttcggttctagacttcagcttttggaaattgctaaatagaattcaaaaatctctgcatcctgaggtgatatacttcatatttgtaatcaactgaaagagctgtgcattataaaatcagttagaatagttagaacaattcttatttatgcccacaaccattgctatattttgtatggatgtcataaaagtctatttaacctctgtaatgaaactaaataaaaatgtttcaccttta

SEQ ID NO: 2364 - DNA, 238 bp, Homo sapiens
caatatcaagaatctagtttcatctgagaacttctgattagctctcagtcttcagctctatttatcttaggagtttaatttgcccttctctccccatcttccctcagttcccataaaaccttcattacacataaagatacacgtgggggtcagtgaatctgcttgcctttcctgaaagtttctggggcttaagattccagactctgattcattaaactatagtcacccgtgtcctgtg

SEQ ID NO: 2365 - DNA, 1254 bp, Homo sapiens
gacgagagagagaagcctccgctccttaatgtgaaacttcatgaagttttaaacttcatgcaatttgaaattccatataagtttttatctgcaagttacagcttgtgtggtttgtctttggaaataaaaatccaggttctctcagaatgtcagaggctttggaagttcattagttcaattaaagactttcctgtcctttaaatatcttttcaattgcttatctacaattctgttttatttgtagctcctagaggatagagctggacagattccattgttcctacattttgtaggttttttttcactgccttcattatgtatcttctcttgccttcattattttattttattatttcttctttttctcttttttagagccaccaatactggatttgtttgtttttcatttttttcttttgtggaaacggagtcctcctgtgttgcccaggctggtattcaaactcctggccttatgcattcctcccaccctggcctcccagagtgctgggattacaggtgtgagccaccatgctctgccaattattttaaattactaggattaaagtatattatgtatgtctttaacttctttctttcccattgataaactggcacccttcttttaagtacctgctctcccattaccacctatttccagctgctttttgaggttttttgcttgcctgtctcttgcttccttcttaacctctaccacttaagagagtttgttataatcaaatttgacttcctagcctgtggataatttactattaagtaaattattaccacagggagccagtgaggtcccagtagtctaaaacagttcatgtgttcacaaaaattgcctccccggcagagattatgcagtaagataatttaactgaataatactatgtgcatgtatcttgcctcagatatactcatgcaaatatgaatatacctctgatatggtttggctctgtgtccccacccaaatctcatcttgaatgtgtactcccataattcccacattttataggagggatccagtgagagataatttgaatcaagggggcggtttcccccatattgttcttgtggtagtgaataagtctcacaagatctgatggttttatcaggggcttctgcttttgcatccttctcattttcttttgctgctgccatgtaagaagtgccttttgcctcccaccatgattctgaggctttcccagccatgtggaactgtaagtccaattaaacctctttttcttcccc

SEQ ID NO: 2366 - DNA, 945 bp, Homo sapiens
tagaggaatgaagtcagtggactttcttgtatatttgtgtgtgcagatgtacataaagatgagttgttaacttaggatcttttctttttatacaaggaaagcttcctaagaatgtctaggaagaagaggaagaatgaccctttgcatggcacagggttctgcccctattctgaatatgtcattccatcaaggagatcaaaagcctttttttctccccagtatttggaaattactttcttgatgatgctgccttttaaaagcttcacgtacattatagttttttaaaaaaatctttggactggatcttactgaagtgcagttgctatattaaaattagggcatagagcacagaaaaatcaagaccatgagaagacattttaccatttagctactttttataactaaatactctttaaatatttttatttcaatactgtggatggaaatgagaagcattctaaatttgagttaatatatttttatgaagatatttgagaaaagaaaaaaatagcttgtattcaggttcattggcttttgctggatgatccacctaaagaagttacctaatttggccttttaaaaaaggtgttagtgtttattatagctactttcaaggaaagtttgaatatgattctagtctctaaagttcttcacgttttctgacattccctggagggtgactggggaagaattgctccagggtagaagaaccaggcccaagactttaccattctgatctagagacaaaggatactcaatgaggagcttttttcccctcttggaacaggtaaaatgctttttcttattaatataattataaaacagtattttatgtaacagctattcccatattctaggagtggcctaagaaatgcgtgtttcagtgactagattataaatattctctattgtgaatagttgaataaaacagctgtttttttctgc

SEQ ID NO: 2367 - DNA, 355 bp, Homo sapiens
agaatgctagcccatctggctgccgatctgctatcacctgcaactctttttttatcaaggacattcccactattatgtcttctctgacctctcatcaaatcttcccattcactcaatatcccataagcatccaaactccattaaggagagttgttcaggtcactgcacaaatatatctgcaattattcatactctgtaacacttgtattaattgctgcatatgctaatacttttctaatgctgactttttaatatgttatcactgtaaaacacagaaaagtgattaatgaatgataatttagatccatttcttttgtgaatgtgctaaataaaaagtgttattaattgctggttc

SEQ ID NO: 2368 - DNA, 350 bp, Homo sapiens
gccagcagatctgaccactgttctccagcaggcctctgctgcagctttttctctcagtgttctggccctctcctctcttgaaagttctctgcttactttggttttccctctgcttgtaaaacattgagtcccctccctgccttggttaattgactcacaccagctgtgcgatgcccgcttttacaattaaaggaaaactgttttgttcagtgtcaccttgtcagcaacactgtgtcccttcgccccaccgttcttctctgctgcatttggacatcagccaaatttgaacccaatcaaatataacgtgtctgacactgattttgtttttactcaataaatgtatagactac

SEQ ID NO: 2369 - DNA, 3286 bp, Homo sapiens
gaagactgaaaaccatggagattatttttattggaggaggaagcatcattcatgaaccgatctttttagttgagtcagtaggaaaattaatacagtggataaagtaagaagcaaaagacagggacagagaagtgttgtgtttaaaacccaagcctgtctaaggttactgtgtattagacagggccgaactagtgtgctgagcaaaaagaattgaagcaaattgtatttacttagccgcttctgggagccacttcagcctttcccctcccctccacttcttgggtaatctgacctgaagcatagtccaggagcagagttagccagaaatgcctcctgctgccccagccttagagagctcccatctcaatcattgagcctgaaggcttcaagcccaagaatgcaacaagacccccagcctacatttctcagctcccctggagccagctgatcctgtaacgctgctggaggtcagtctgagctaccaagactgtccctagacaaaggtggagtcccccacactgcccaagaccaaatccctcactcaacctgctgaggtgtggatggggaaacagaggcaaaactgaggcacctgatgcattcagcctgctgtgcagcagtgccattgactgccctgatgttcagagagaaacgcacacaaggtttgcccatgagaattggggagcagatggccaagcagataggttatgtctgttttctgagtgatgaagtcaggaagccctgtggctctggaggccacttgtggttcattcttttcccatatccttggcttttagaaatggttaccttcaggacagtgcagctgcatttatcagagcactattgctaagttttcttttctggcttgtgtttttctgggacagtttagaattgggaggcctattctcatagaacaccaaaaatgatgttcagtgattcatttaacatacaccaatgtactctggctgctggggggacaaccataagcaagacatgcccagggtttgccgtggctccagatctactccctgtaggagttcaaggatcacacaaacggtagtaaccagggttgtgaatctgagtacaccctggcaaggcttctcttcagactgaagcagcaattctgccactaccagcagcaaccaggacgtctgttctttgtgggggccagatcagaagagagaggcccctgtgacgcccgggctgcttggtcacaactctgtccaattcaaggatgtttatcggcctctcttagatcctgagtgagacaaatacagaaatgacccattccctgcccaccagaaactcagaggtgattggggagactgacacaggaaaatgaacttaatcaagagagactgtgatatgtgctaagaagggtgtgagggagggagagatgaattttccctggagggatcctagaaagcattgtcatattgccatctccattagctcacttttaaacaactagggtgctggaagaacctttgtctgagggtagttcatagctggaaatacttggaatattttccagagtctctaaactctcatcttcccccacagatacacatccaagctcacaaataggagtagcaattctaggtggtagggttgtgtacggaacccctggctgtctgcatatatctcagaattaccccaggaccattgtcccaaagtctagagtctttacaggtaggcaaaatttgttttcaatgcctgtgcctcagctgctgtcacaaatacccatcttaggatcccatcagcttcccatcccccaccagacagccacagtaccctcactttctccctattgttctttcaaatcctgttctcaggaaagaaactgccactaattcattcacactaaggtgtaaatgattgataataggaatgagttacctcttcccacagacatttgtttttaagtatgacagagcagggccttaatcccaagggaaaaggttatggaactggagggggtgagctttctgggtagaaggagacttcctgaatttccttaaaacccagtaagagtaagacctgttgttttggaaggtctgctccaccatctaagagcactgtttttttttttttgttgttgttgttgttttacggtctctgagggaatatagtaaaaatgcatatgcacgtgcaatttgcacggcagcatttcaccgattgtggactgtattggctaatgtgtttcctggtctttagatgcaaaccattaataacactatcttatctcatagttttttcaggggtgcttcttgattagtagggaattttgaacacctctttaaatacagctagaaaataaaaccaatttgtaaagccacatttgcatatgatgccagcctcacgcatttgtatatctccagaaattcaggtatgcctcaccaatttgcccgtctttaataaaatcttgtgttaaaatttgcatcacgtcgccttcctatgtatgacgaaacaagaaacagagatttccaattgctcttttgtcttcagacatttagtaatataaagtacctatttttatgctgaaatgtttatacaggtttattaatagcaagtgcaactaactggcggcatgccttgcaacacattttgatatattagccatgcttccgggtaaaggcaagccccaaactccttatcttttgcagtctctctgggatcagtaaaagaaaaaaaaaataatgtgcttaagaagtgggactgtaaatatgtatatttaactttgtatagcccatgtacctaccttgtatagaaaaataattttaaaaatttgaatggaagggggtaaaggaagtcatgaagtttttttgcatttttatttaaatgaaggaattccaaataactcacctacagatttttagcacaaaaatagccattgtaaagtgttaaaatttacgataagtattctattggggaggaaaggtaactctgatctcagttacagtttttttttcctttttaatttcattattttgggtttttggtttttgcagtcctatttatctgcagtcgtattaagtcctattgctagaataggttactacaaaaaaggttatattctgaaagaaaaataactgacattatatataaccaattaatttaaagtattgccatttaaattacacactgagagcatgtcctatgcagacatagatttttctgttcatttatttttcttcattgcagtggattgatttgataaatagatgtgttgaattactacatttgctgtacatattatttaataaactttattcagaattgcgtggca

SEQ ID NO: 2370 - DNA, 832 bp, Homo sapiens
aaagagccaggaaaacccgggaattttccaaaaggtcttcacgttaaacttgtcttatctcaggagagagcccgctcttgtctcccagttcctggtagggtctgcctgttggaaagtgtacctggatgcttctgggctccgtttggcaatagcagtcttggctgatgtgcacagtctggctcccagctcaccctttttttttaaagtaagaaaatagttgctaccgatagggactttgccaagtccaattatcttctaggattgaaaggtgcattttccccataaaaaaggcgaggaaaacccatggctgctttgtgtcacctcagtgacttacagtcccccttggcatttagttggtactagagccagtcatccttaacaaatcttttcacattttatttctttcacatgtagtcatcttcaaaaaggaaagatttggaattttagaaaaggggcaactcttctttttagcattctcatcagaaagtcacaaaaatcgatggaatcatttccactgggaagattgaccttttgtatttatttgtggggtaaattaataagcattccagatgcttgcagcttcctgcatccaggagatgctgtgttccccgtgatgcagctggaacccaagctgcagcaggagatgcaagtttcaggatgttccccactgagctggaggaatatctacagcagtgatgcttgaaatttttgtatgaattattttgtcgtcctacccttttcctccaaaacaaaaattagaggattattttaatactttggattcttcccccttttttgagaaataaagttttttatgaaaagcctgtgcgtg

SEQ ID NO: 2371 - DNA, 650 bp, Homo sapiens
agaaaagaaaataatcagatttcagttttccctatgagaaactctgaggcagccacttatcttggctaaatagaacctcacctgctcatgaccagagagcatttaggataatagaggacctaactgaaggaatccttgtatatgaaaggagttattttagaaaagcaataaaaatattttattcatcatagctctctgctttgggctctgcaggccaccagatacacatgaggcccctacttctcaagctgggaaggccaagagccttccttcagcctttctggttatgttacacctagctgaatgtttacaaggtctggatccatcagccctcaggcacagttgggccaagcagaaagagagaaacacttctgctgtcaccttgaatgaactcaggaatagcttccctctggactgtagaggagctaactgtttggaacagaaaactgctggctgttgattttgtctggttcctttgccaacatctgggcacaccctttgcccagacacgagtggggaaagcagttctttctcctcagtttccaaagtaaatggggaatcccagctttcttttctactagcaaatgaccctaccatttatttctgcctttttcttccgttcattgtgaggaaaaataaaactggttgag

SEQ ID NO: 2372 - DNA, 266 bp, Homo sapiens
agggggaaaaaaaagatcaataccattgcttcagacactttcccaaagtttctccttttgagaaaaagtcccaaaacttcatattttggattatgaatcatccagtaataaaatggaagatggagtcagctattgaagtggtcatccatttctttttaagaagctcatgtggacttgttctattgcctgacctgatgaactgttaatatctggtgaggttgagttatcatgctactaatattttccaaataaatatttttattttt

SEQ ID NO: 2373 - DNA, 2721 bp, Homo sapiens
tgcagctcagtcaaggagcagcagacctggcactggaacagggttgaaaacccagggttttgtacttggagaggaaagatgccaagctgcttcttaatcaatccaaatttcatttacagctctggaacactttggggctgatttgtctctttaggggacatccccaacatggttaattccaactctcagatcttgtgctttagttagtacatgtgactcaccagatggggtccttagatcctattcctgctcccagtgggaatttgcttttctttgtcattttgggaaaggggcttggtttctgagtgtcttgccttctcatctttttttttcatatcctttttctcaaaaaagccatcagatctgactttcatggaagtgttgctgaggtcagcctggtgcaagttgggatacaaatgaaacttatgcaggatgtgtgagaggaagcagttaattgtttctgaatatctcagggtaggaaccatgtggagccacacattccctgaccacagggaagcacctggctcaatcatgtcacacagcagtggaaagaatacggactcttaagtcacacctaccactgagcagctgtacgactttggagaagttgtttaacattttcaagcctcagtttttgcttttttaaaggaggggaaatatttgcctcatgtcataattgaaaagattaaataagaaataaagggaagtgtctgctacttagttgccagtcaaaatgttagttctctctctctaccaccttcttcctacctcttcccatattgcttgcctgataaaacagctaatcaccagcatttgttccccatagtcacagggccacacaagggaacatttaggacaaactttctccatggcctatgatccaaattgttatctaaagatgattctaggtgttgctggtagtatgtgaatcttccaatctaggtgtgatcgtgtcctcatatgaatcaggaaaaggcagtttcttacaagttccgaattccaaatacagagactggtggtgttacatttaaccttaaagatgttaatgttgatggaaattcatgtttcatattaaaacaacactttgtctttacaatgaaacattttgcttaatttttaaagtaagacattatgatacctctgatggcagttcctcaaataactttaacttttgtgctttagggatagttgttaaagttacaacttcttttattttattttttaaaggcttcagattaaacaagagcccttaagcccacgcatagcattgccgcttcagcttgctgaggactgtctccaaggaggccaaatggaaaaggagaggctacttcaagtggtgttggcccattgagcctattgggcaaactataaccaggttgccttattttgggtggattactccaggagaggccaccctccagctttctcttatcccagtaactcctcttcccattttccaatccatccccagccttttttttttttcttctgtactcttcttttgccttcaatatgagtttcatttcctctgtgtctttgggcagacttccttctaacatgtgtcagctaccctaccacacacctggcctaggagacacatcattcattgctcctacttgtgtctgtaatcagagagtatttaaggagggcagttctgcgacggactgtgtgtgtgttgaaagtaaagatggggggccgcggggaaggcaagagtttttccaaaagattattagaaatgagggctgtatctactctgtggagtagaaccaagtctacttggagaaaagaaccaagtccttggatatctaggggaaagctgtttggcagaaagaaaaatcaagaggacccaaggggatggagacaggaccacaggaatgggccaaggagcaacgtgcctgccattcagccagcttgggacaggctttcactttcactcccatgaggaggcttccaggcagcctggttcccccatgtatagccattgccctctagcaggccaggcctcccagtgggaaggcctgggtccagggcatcttaagttcatccagcagctccatgagccacacagatatcctagaaaatattcctttctcacacagggcttctgattactcagaaacatgcccctcttccctgaataaccaagaacatgttctatgaacccaatctctgccacatgtcaatacctgctcttcaaagccccttttgaaactcagttttgtgccaagtcctctggatctaattaccttaaacaagcagatttagccatttttaaacagacattcccagtcatcctggtgcttgtacttctcctacatgtcatgaaggaccttggatttactgagaactcagccgtggccttggctttgatacttataggtgtcagcccttgggccgattgttgatcatccagagcctcagttctgtacttgtaaagtggagacagcagttctcatcctccatccttttagcccatggggtggttgtaaggctggattgaaatatgcatgtgactaagccatgtagctataaagtgagggatgacttgtgttttggatcacttattttaattctacttataatccacggcttagaatatttaaacattgtttctattaaactagaaaggttcagcatttctgtcatttacttctgctatgatacacaagaacttatgttggaatgaagtgaaaagtaaaatggccattcttatgaacctac

SEQ ID NO: 2374 - DNA, 3479 bp, Homo sapiens
tgctgatgttcttgaaagacagaaactgagaattttttttgttttgttttgtttttaacaacaatagcaccttgaaaatctgccctaaaacagtgtacagtatttttctcaaacaaaaactcagaatccagccttagaggtatatatttgaatgaaagtcttgtaagtttggccaacaaggtggagagaaaaatgttcttttgcttctgtctgcaatgttatcattcatgaactgttaaagtgttaaagattaggattgaagtcactgaccattccggctatgcttcttcataccattctccttgtcccttgctcctatgtggcaaaaggtcagccttggggttggccgttcctctaatctggacttgcttgcaaaggtgccaggctgtcttctgtccatgttgggcataagggatgaaaacttggccgagactaatgtgtggcccacagctttggctggaatcattttctttctctctgccagggacatgtcaaccaagaaacctgaaaatatggatggatgtcaggactaaaaaaaggcatcacagtgagcagtgagcacagagggagtttcgagtataagaatcattgtcatgaagttaggagaccacaaagccatttctcagagtcattcactctccttgtccctttggtttccccccctccctaattgcagtgggggctaaggcatccattatgaatacagcagaacatttgctggcgagagtcctgtctgctgagaagacaatattgtggctcgtcctgatatttttttcattcattgactttgagaagactccacctgtgcttggaattccatgggcttcaaagaacatttcttcttttagctttggaggcacttgccgtggcacacctggactccttgacatccaattcaaactgcatttgcaaaatgtgcaaagacctcttatgagggaccaattcaggtcccttatggggtgaacactgttgaagactggttaattataagttatgtaagaatcatcgccttgtggaacaagtcaatcagtgactagcttcctgtagccaatcaggttaaagagtgcgttggtaactttgctctgattaactagtattcaatcaccaacttgcaaacagaattcataacacttggcacttgttctagagaagtgtagaggatgatgtttacataattttagcacctcaaggtataatttaaacagtgaggtagttttgaatggcatttcattaaggcatctatgggcattatgagctaaaagctgtggtatgttagctttaaaagagtatttatgttggaataatttttaaataatgtttacataactgtaagtcctgtttggttgttgttggacgcagggcggcacatgagtgtttttggttagagccaagatagctcccatgcaccggaattcctttgggatgaatcagcatcattttaaacaaagtatatgtaaaaggtgaaaggttatattttttacagatcagaatgtggcaccagaggactgtgtctcattaaagtgattgctgggagcaaaaactagaatgatacaaagaaaggtcagagaaatgcatgggaatattttttccttaaaacagaaaaaaattaaagtattattaataatatatgtctgtatatatgtatgtatgtaaaagatcagctgtcaaagccttaatcaatgcagtgtggaaaatgccaacccctggtcctcgctttactgtgggccctgcaggactggctctccatttcctgcctctcctttcaccaagctctgttttggcctttctcggccctggactgaggctcagcctacacgctcatattgtgcatatggcagaccctgcccagcgtgcgctttgatacagcaaatggagcagctgacctcatggctccaatcccacctgcctgttagggtagattccatttatctgatttttgtattttctgaggttttatttggtctcatcttgtctatgagagttgaaactggaactgggaaacctaagatgggtgttatggttctttctccaaggaaataaaaattctgcagttttaacctttagaagtctaagcaagattaacaaatttcatagaaaagtgggagggagtcagaaacagagttggtgctgctcagcaggacggtgaaacaatgatacttctttttatctctttagtatgaacattttcaaaaacacacagcttcaacaattgtcaccatatggccaatttgcaacaatgggactcttatgaaaaacctttatttaggccttctgtgtgacgtatccacagaaaagagaagctctgattcagctggggctagctgggccgctcctctggaagcccacacttgtggggacttaggcatgacacaggttcttgcaaagaaactagaggctggcttcactagagagagtccattcagcagaaagtcccaggcctctgccttggtgcttccaattatcagtgacctgcctgcaagcatccccagaagcaaacagcagaggtagaagatatcactgcagcctgctttgtgctttaattgggtaccaagctttggggatgacagtgagttgcaagaatagttttagttcagagaattgtcttaggacaacaggctaatgaaggatttggggtctgggtttttagcctggctccgttctggtgtaacccggtctagcaaaagctaagcctggattgcagggcaggaaaaaatctggaattaactttagccagtggaatttcttcaaacagagaaagagaggctgttcattgatccactattccctctattttcctctaaggtaaatatttagaggtatttacctgtaaggtgaagtttcctttttatttctactttacaatttctctctaaagcaagcttgtccaacccttggcccaggacggctttgaatatggcccgacacaaattcgtaaactttttaaaaaacattgtaagattctttctgtgatttttttttttctcgtcagctatcgttagtgtattttatgtgtggcccaagataattcttcttccaatgtggcccagggaagccaaaagatgggacacccctgctgtaaagtttcatatcactcatgaattgctcagctgatttaaataatttgtaaaatcctgctaactagcaaattcacattgagattttctattgattgggtccctttgatagctttcagattggtattgttagcgttccatttgtgaacaaatgttcccttggctttagcagatgtttttaaagtttcttttgtagaccgaacttctgaagagtaataccaaatgcctaaaattttatttttaaaaaggaaaattgtttaaagtattatatgtaaacatatgggtattttttattttgtgtaattttacatttcatgaaatgatgtcagtttcaaagagaaagtggagaggacctaacatatgtctctacctagaacggatggtttcattaaagaatgtggattt

SEQ ID NO: 2375 - DNA, 1590 bp, Homo sapiens
agacccaagaaaacctggaactttggatcaatttctttttcataggggtggaacttgcacagcaaaaacaaacaaacgcaagaagagatttgggctttaacacactgggtactttgtgggtctctctttcgtcggtggcttaaagtaacatctatttccattgatcctaggttcttcctgactgctttctccaactgttcacagcaaatgcttggattttatgcagtaggcattactacagtacatggctaatcttcccaaaaactagctcattaaagatgaaatagaccagctctcttcagtgaagaggacaaatagtttatttaaagcatttgttccaataaaataaatagagggaaacttggatgctaaaattacatgaataggaatcttcctggcacttagtgtttctatgttattgaaaaatgatgttccagaaagattacttttttcctcttatttttactgccattgtcgacctattgtgggacatttttatatattgaatctgggttcttttttgactttttttttttcccaatccaacagcatccttttttttaaaagagagaattagaaaatattaaatcctgcatgtaatatatctgctgtcatcttagttggaccaacttcccatttatttatcttaaaactatacagttacatcttaattccatccaaagaagatacagtttgaagacagaagtgtactctctacaatgcaatttactgtacagttagaaagcaaagtgttaaatggagaagatacttgtttttattaaacattttgagatttagataaactacattttaactgaatgtctaaagtgattatcttttttccccccaagttagtcttaaatcttttgggtttgaatgaaggttttacataagaaattattaaaaacaaggggggtgggtaataaatgtatataacattaaataatgtaacgtaggtgtagattcccaaatgcatttggatgtacagatcgactacagagtacttttttcttatgatgattggtgtagaaatgtgtgatttgggtgggcttttacatcttgcctaccattgcatgaaacattggggtttcttcaaaatgtgtgtgtcatacttcttttgggaggggggttgttttcttctgtttattttctgagactcctacaggagccaaatttgtaatttagagacacttaattttgttaatcctgtctgggacacttaagtaacatctaaagcattattgctttagaatgttcaaataaaatttcctgaccaaattgttttgtggaaatagatgtgtttgcaatttgaagatatctttctgtccagaaggcaaaattaccgaatgccatttttaaaagtatgctataaactatgctactctcatacaggggacccgtattttaaaatctccagacttgcttacatctagattatccagcacaatcataaagtgaatgacaaaccctttgaatgaaattgtggcacaaaatctgttcaggttggtgtaccgtgtaaagtggggatggggtaaaagtggttaacgtactgttggatcaacaaataaaggttacagttttgtaagagaa

SEQ ID NO: 2376 - DNA, 2263 bp, Homo sapiens
ttccacctcctaaaacctgcctacttcaggactttaagactcacagtcttcagcctgttaatgatgtcttcatgttgagttttatagcatgactgttgaccttaagatccattctcattgctgataatgctgcagccctgctggtttgggcttgcctcgaagattttattaaggcacgaagaagtgaaaaactaagggcttcattcaccatcaccaagtatatcgaaccatatacttgtttgccaaaaggatgaagacttaatcgaaatacttacctctaatttgccatatcagaagcctaaaaagaatgatcataaatgtacttcaccagtgattttactgaaatgcacttatattagtctttatgtatttgctagttcagcctgatttctagaagaggttatagtgtgagacttgtagtattcaagtaagataagtgacctaattttaaaataattcttctacttttctgtatattcagcagggtatttaagtgctagggctggtcacacacaaccaactgaaaaagactagagggattagtacaaactcctcttatacagaaggcaaatctgaggttccacagaagtctggaaccaagactattcagttggttaaataaagaggttagtctagactgggcctgctcattctaggtcaccacattttccatctccaaatagccaggccctctctccctcaagaaatgcccagatgtagaaattcatcagtgcctattggtcttccagaattttccatcttccgtatctcccaggcatgagactaccaagtttgtttgttttctttccaatttgggaatttatacttcagtatggtttcaacgcagttatgtttccagagaacatctagaagtggctggaaaccagaagctggggattccagggaccccacttagtgctctatttcctttataggttttatttctggtcatagagagagaaggacctttgactttttcttcgttgaggcttctgaggaggaaaaacaaacctaaaatagaaatacagtcagcctttcaaatccatgggttctgtgtccgtggattcaaccaaccttggatcaaaaatatttgaaaaaaaatctacaaagtttcaaaaagcaaaacttgaatttgctgcatgccaagaagtatgttgaattcatgtaaatgaagtgatgtgtaggcattgtattagatattataagaaatctagaaatgatttaaagcatacaggaggatgtgcataggttatatgcaaatactatgctattttatatatgggacttgagcatttgtggattttgatactgggggatcctggaaccaatcccccatggataccaaagtacgactgtagttatctattttttacatacttattattaccaccatgctcagtaagtccatttttgcatggaatatggagccttaaaacatgtcatgaatttggagtccctggcacataaatctaccttcaaatcagaggtccttaatgatgcctaaacatacagtaaaattagaatcagaaatacttctttaaaaaatattcaaaatgtgtttgtttcccatgggattattctctatcccacacgaatgtaaaaaaatccacattaatgatccatttaagtatagttttattgggtccttttctaatgattaaaggttctttctcaatttcattcctcagtcctgcaagtaaggactcatactgaagagtactgaaacaaggacttcttgtcagaaacagcttctggaatcttgggttttgtttttgttttttgacaaaatacactattggccatgtccatcacgagagtgtttgtagtaattaattaccttgtacaggacctggcacttagtagcattcttcaaatgttccctcagtgatccttttactctccttgtcacttatttgggagaaataggggcacgtgagataagaagaagaataattttgatgttggtatgcttgccctgttacttatagacagtctttgtcataggcaaacttgaatttgatttaaaatagggctgggaaaaatattcaataactgtaagcccccttttggatgccaaacttagaattttgtacattctctgatgaacaagcatttagatcgtaacatggtaaagcctattaccagccaatgttgttagcatctttgtatgcacatcactgtttgtgcaatatatgaatattttgttgcattgtattcttatataaaaataagtagaaaacataaaattgaaattgctgatgag

SEQ ID NO: 2377 - DNA, 256 bp, Homo sapiens
cgctgggcgtggacaggccggtgagggcgggcaaggggccccagccgctgcagcagcggagacagtcgccagcagctgggctggggtgcaggtcatcacaggacggctcctgggcagctgggccctcctgggtggggtggtgccagagcagccttttaaaagcaaattgcgccatagctgggggcagcgggggtgggcgaggcctgagctgcgggctgccctctccggaagtgccttgcacaaataggcgcttaat

SEQ ID NO: 2378 - DNA, 3948 bp, Homo sapiens
aggatccagagttgtctcctatggtccatgcagaattttctgtttagtgggcaggtgttattcctgcccacagcaaagcttggacttgcagcttgcttgctgcattttgaattgtcaaagccaactaataccgtgacccgactgatacctctaaccccactcactggatgatgtttgcaagctgtgccttctgagagagtgcttaggccctgtctctcttttttaatattatggggaaaccactaactatccaaccagcttatacagcacactaaggtgggcttcagtgctcactcaatgtgtttaggcagattccacttttgaaaaaaaatatgaaatgtgtgctcaactgccagtaattttttaaaaagcactgtcccagtggattgatgttgtttttaatggatattttgggtttttctctgttttgatagtattgggtatttggttgtttttgtttgtttatttctttgttttaaaagccatgtttttggttgggctctaagctagatatctttccctctttttcactttgagctttgggaaaactctttatcttatgaggctgtattcctcaatacctaatttgtgtccaaagaatttatagcttttctggacattttttattatttcttgggtgtgacatcagagtatttgacctgcagtattgaaaaaggagaattcagaatgatacagtattttaacaaatcttaattattaaactcttttccttccttccatttctccctcccttgtccatctctctctctctttccctttcctcagtgatgtgaaaataattgtgttttgctgaacttgttatcttcattcaatttcctcttgactaaaacatctctggtgccaacgtaatacttctgaaccaaatcactgtgactcaaggaaagtcactgacagcataagagaagtttgctaaaatatttgtatgtgggggaagctctggagtgtgcctaggagggggctggctgcctttatgtcccaggatgactctttatgggtgggattacattgcaccctctgagggtgcaggctagaccgtctcctgagaggaagttaggatcagaaagaagaagcaagcagcaacctctgcagggctgacaggatttaaaggagagaatgttcttatttggaagcagctgtggcttgtcaccaatgttcaaggagtgttactgttccgccctctctttgtcagaagggacacaggtggtaatttggagatggggccagagcttctggcttttggatttggtgtgttcacttgtgttggatagagcagtggcatggctttgacctagtatgaactggtgtctgcccagagagcagcatgtagcaggggggaatgctcaggtttgtgcctggctctgtggagctgtacaacccttctcaccctgtgggttggagccgagtcaggccactatggggaagcagttgccccacaaaatgtggtttgctgacctatttctaaactgttgaatatgctgcaccattgctgaaatgaaagatgactctgggggagcagagcttggccttgtgcccagctggcagccccctctgccagcctttctgctgcttttgctgctgtaacagcaatagtggagaaaaatgtaaaatttggtcttccagcttaatgcagtgtgaacaatagatggttaggaaaacaaaactgcttagaagcccctttctctagagcagttttatgtcatttgtaaaaacacatattagcaaattcgtttgcgtaggtttctattaaatatttgactttttttttcttattaagaaaatgaaatcccttacaccagatatcagttaattcaaacagaaaaccctttgggtatcaccaaattgaaatggtattcttccttaactcttccttctttcctttatttgtttagacgtgcttcatcccgaagtggtgctatggtctgttaaacagggctggcatcaggtagagggagcagagtggtgacctgatagctcctgtcatcgtgttagtttttgattctatttaagggaagtagctgagatttagacggatgtagatgctctttgggtgaatggaatcataagcaaaggttgtgttctggggtgaggatcatgagagagatatttatcacatgcacatgcctttatatagctggtctccttgggtggtttatgtgtgttttgtttatttattgaatatgttttcccttgctttaggggttttataggtcatttttcttaatagaagctgtgatcgacttagaatccaaatttgaggagtaagcagcataaccttctaccttgtaatatgtaactattctaatccagtggaatcttacggaaaacacagagaaaaccccttttatcatttgccacagaaggctgctgtctcccttctgatttggtgggcaggtattgtttttgagccagtatttaacagagttttttaatctataagattttttttgaatctatttcattgtgtttgtttttcatgttggaacaatctctctggaagtgcctcttcttgtggcttttacaacttcatttctttctggggtcacctgtgatgggctttgatgtggtgtcaatttggggccttgtgtttgtgccagagggatacacatattaaactgcaggccaccttcctggtccagactgtactgtgtgaaccccactgactaaattagtgagaaccataggcgttggaatttctcaccttttacaatgatagacttttgcattgggaccaatgaatctggtgtgaaaaaccctgctgtagtagtgaaagagcatcaggagatactgactgtacctgagggccaaaacaggagcaggtaacgaaccgtaaaaaaaggagcaggtaatgaatcgtaaccaaaactacagttgatcctccgcaaaggaaagctctttacccagaatgtccttccagagtcattcaggaaggacaagggaacacccttgggaaatgggctagtggagggctgttgactgcagtgacacctgggtgctccggaggtatctgttctgttgacctgtaaggaagcagtcgatcctagagtgtcagaacagagccattctctcctcctgagtaggaacgtttctgttcagtttccctcacagcagcctgtgttagcatgcagttgaaaatactgccgtctaggagaacctgtggtcactgggaacgtgccccacagtgactggccatgcaaccaggtgatttttaggaatagatgtctctagactctgtctcctttcctacaaggcctcacacagatgcttgaggctaatggcccccattctgaggtcatttttgtgtagaactcctttccccaggagagagccttatctctgccctcctttaccctgaaggcttcaaacggaagacaggacctagatctaaacctagatactagcattttgtgggattgtctagaatttggggaagatttgggttcctaagatgcacaagcgttttacaccagtggtgattaactcaactaaaacccactgtaggaagttagcttccccagacagctaatgccgagatcttctaccagcgtagagttgacagaagcaggccagcgaggaggtgtgggacataatagcctgagtgcttgggttaccatggagactggagtgtgtgaggccacagcctgtgctaaagagccatggagccctcccctggccatgtctggggacagatagaacctgttgggggaaatattccctcaccccagggttctttctgcagagcaagggttgcctttgtcctatccctgagcttgctcaacaagagaaacaaggtttcttaagtgttttggttaaagttttcattcttatttgactatgtatatgtaattgtaaagaaacgatcctatgcattgtctttcttttatattcttgtaatattctgaaattaaaattgttttgtttcatatccag

SEQ ID NO: 2379 - DNA, 368 bp, Homo sapiens
gccctcagtcctggcctagactgttctgacaatctaacctgggattactaactgttgagccatcttccccaaagcagggaaaccactggtctctgactgcctttcccacagacacagcacaaatgctaggcctctgttgcatggctgtacaaagaacataagagtccatatttctagtggatttgtaaaataagtgtgtgtgagacacttgcgtttgaagaaagatctagggtcctgggtctcttgcatttatatgtcagaaaaggggcgatatgctgctgaggggtgagtgcatatgagtgtggccctgaggaccagggctggcagatgttgtctacctgctgaagaataaagatttcttttggtaa

SEQ ID NO: 2380 - DNA, 1373 bp, Homo sapiens
cgcaggcctcctggaggaggaagtggaggccgctgcgtagacccaacagcgtccagttcctactaactctgagctgaagccgacgtcgccagcctgggagcgaccactttggctgcggggaggcgcgtggggagagatctcaaccagagaagttaccagccgcggcgaggccgtcggagaaaacttaagcgtggagaaatgtatgcgccagggtgcttccgtggggcatgagaatttcccgggccatccaagcccaaggacctgggataaactgggagaactatggcagctacttgcatcgacttgtacctcacttagcccttgggggcgtcgtgagcttggattgtttaaggagggctcaggggtaggaatcgcgatggctttataacaatacttgaaaactaacgacacgcatacattttcttattttctggtggaggagcttagtaagtggtgctacaattgctgtgcaaagaaattccagaggggagaagaatgtaaaagtttggtggtgggtggcttggcattgcccctttttcccaccgattcggtggctggtgaaggtgggagatgtgaactccaattaagggactggagagaggtgaagaattttgcaggtgggagatttggatttgaatgtggacttgtaaatgacttgaccttgccatctgtgttcaaggtcacggtttgctgtggggttcctgggagagcttactcaccccggagtcttttctttctcttgctccaagaagagccctgttggtgctttaccaccgcttggagtctcccgaggacacaaacaggcagagagggacgtgtagggagagttctttcctgttttctgtgctttcctttttacaggactcccggaaggccactcatggccatgccaggagctttctcagaaacagtcataaacgatctcttgagtctctttcttgtcctcccagctgagctttcttattccaccctttctggtgtctataggaatgcatgagagaccctggacgtttttctgctctcttctggccctccatggagtcatgggcctcggcctcggcggctcctcaccctcacaatttatttcctcctcccgtgccagcccttcttttgtgtctgaaaccggttttaaaatgtgactctcccagagaagaagccgctggctgtatgaaacttgacggcgcttttgtaaggtgccacccccaaactttaaggtagctaaaccaatttttaaaagattcaatggcttgttcatcctccagatgtagctattgatgtacacttcgcaacggagtgtctgaaattgtggtggtcctgatttataggatttcataattaaaatgtctgctgaataaatttggcttttgttttgg

SEQ ID NO: 2381 - DNA, 392 bp, Homo sapiens
ggcccagggcccctgggctgccctgtggtccagtctgaggccctttcagcccccaggctgccttgccaccagctccaggtgctcaagattctggcagagcctggactcaggatgacttggaactagggcttggctctcagaagtcctggattttggaaactccaaatggaatcacccttcagagacatccctggtgcctggagatgggaatgtggcctcagtgcctctgagtaggtgccatgaggcacctttgctttctgcccagagtggccatgagcaccagaacagatgatctccatttccgccagctgcctgtagccacgtggcatcctgcctgtggtctgggtgagatttactgtgaccagatgtagaataaatgtgtctcatcctgc

SEQ ID NO: 2382 - DNA, 535 bp, Homo sapiens
gaagccactttttaccctatggaagggggtaagctgttcctgagtataacaccaagatgctgctgtctttattcaaacacctggcgtcggccaacagccacttccagaaaaatcttccagtttacgctgtagatggaacatgtttctgtgaacctatcagtggatttcattctcttgagtaataaatcttatcttttcaaggcaccaacaaacaaaactgtgatattggaaatagcctatccctcctgacagtccttataaatacatattttttgctatgataaaacttttttactaaaaggatgttatagagtctgttgtcttaagcagagaaagacatctaaatggtgtcaggacatttcagtacttctgcttattgagtacttactgtgctaggcactgagtcaggtgctttacatacgtccccttcatttaggtacattgtgatttaatgaaaatttgaggacacgtggtgatacagatagcatgtgaggcaggcatggtggctcatgtttgtaaatcccagcactttggg

SEQ ID NO: 2383 - DNA, 1710 bp, Homo sapiens
cagcgcagtgggcaccagctgataagtattgggtaaagccagtgcccctgttgttgattcgaggtgaacaaatgaatcagagctgagatgagttgacaatgacagtggagcagaggccttgtatgtgccctgtcacctgccattccagaactggaccacagaaaagtgctgaggatgctggccagcagaccctgcagcagtcattggtggttctgtctttccctaacccttatgtgctggaggacagaggagccacctcttctcactggttgatactctgttcctaagacctcaggttacccagtgtagcctgctgtgacccttctgcttcattttctgccaagtgatacagaaccttcgttctgctgctttggggacaggtgatcctagccccagcttagggccagtgctctgtgccactctggagaaatagggaaaagataggggtggctcagtacagcagccctgtgaaagtcaaggccagagcttttcttttttaatttttttattattattattattattttattttttatttttgagatggagttttactctcgcccaggctagagtgcagtggcatgatctcagctcactgcaacttctgcctcccaggttcaagcaattcccctgcctcagcttcctgagtagctgggactacaggagcgcgccaccacacccagctaatttttgtatttttttttagtagagacggggtttcaccatattggccaggctggtctcaaactcctgacctcgtgatccacccgccttggtctcccaaagtgctgggattacaggcgtgagccaccacgctcagcctttaattttattattataaaaaattgagccagggtcttgctatgtggctcaggctcatctcaaaatcctgggctcaagtgatcctcctgcctgggcctgccaaagtgctaggattgcaggtgtgagccactgtgcctggctggcagagcttttccatatgttactcctcatgctggttggaatcatggctgcaggcttccacttggtctgatcagactggtattcattcctgcctatgtccccgtgaaggattcggtaagagtgctatttcctcctccctttagaagacaggctgtcttctttcatcaacttagagcagataatccccatgtgtgcctctctccttccttagatggggaacaggatccctttttgggacaatcaagaaaaaaactcatgtaaacagtaatcttattacttgtatttgtgactaactccagggaaaagggtagaatatttaggccacttcaggcactaccatggagtgaactgaattcatacggatggcttgggctgacacagtttcttcccagtggaccaataaatcagactcacccgaacccctggggttttggtagaattggacctactctaggactgtggggaactaaaggagcatttggctcactgtagctcttctatcatgagccttgaccgtcaggccgcaatcagaccttactgatgggatctctgcagtttattacgtaggcctcccgttaccctggtacccaaatacgtcccccacctctagctccctagcctcacattgaatgtctcttcaacagcagattgtggtggaagttatagccgtgtgcctctatttattctctgaattgtactgtagaaaaaggtgtttataaagaataaagaaatcaccagaactgccta

SEQ ID NO: 2384 - DNA, 443 bp, Homo sapiens
tccagggaaagagccaggaatggcagtgtcttccctcttgccaaaaggcctggggaggtgaaggaagagagactttaggcaagcagcccaaaggggtaaatgaaagcaagaggctgctgccactgacctgctccattcagaacaagactggatgcttctgttgagctctccattatgtgggacccattcctcaccaaaatgaggagagacagtgactgttcctgccacagtccttcccagtctaacactattcctgggctgcatgatattcccctgggagcaaagtgacaggcacttagatgcagcatttcaccactcatgctactaatcatctacctgctactactgtaaaccatggttccagcagcctgttccacacccccacaccatcaggatagcacagggaaactgtagtttaagtggcaaataaaaacatttgcatc

SEQ ID NO: 2385 - DNA, 753 bp, Homo sapiens
agggcactcctccttgccctgccagctgtgccttgcttgccctctggccccgccccaacttccaggctgacccggccctactggagggtgttttcacgaatgttgttactggcacaaggcctaagggatgggcacggagcccaggctgtcctttttgacccaggggtcctggggtccctgggatgttgggcttcctctctcaggagcagggcttcttcatctgggtgaagacctcagggtctcagaaagtaggcaggggaggagagggtaagggaaaggtggaggggctcagggcaccctgaggcggaggtttcagagtagaaggtggtgtcagctccagctcccctctgtcggtggtggggcctcaccttgaagagggaagtctcaatattaggctaagctatttgggaaagttctccccaccgcccctgtacgcgtcatcctagccccccttaggaaaggagttagggtctcagtgcctccagccacaccccctgccttccccagcttgcccatttccctgccccaaggcccagagctccccccagactggagagcaagcccagcccagcctcggcatagacccccttctggtccgcccgcggctcgattcccgggattcattcctcagcctctgcttctcccttttatcccaataagttattgctactgctgtgaggccataggtactagacaaccaatacatgcagggttgggttttctaatttttttaactttttaattaaatcaaag

SEQ ID NO: 2386 - DNA, 547 bp, Homo sapiens
gcaggggtgggacatgaaccagcggatggagtccagcaggggagtgggaaagtgggcttgtgctgctgcctagacagtagggatgtaaaggcctgggagctagaccctccccaagcccatccatgcacattacttagctaacaattagggagactcgtaaggccaggccctgtgctgggcacatagctgtgatcacagcagacagggtcgctgccctgatggcgcttacattccagtgggtctaatgaccatatcttaggacacagatgtgcccagggaggtggtgtcactgcacaggaagtatgaggactttagtgtcctgagttcaaatcctgattcaggaactcacaaagctatgtgaccttacaccagtcacttaacttgttagccatccattatcgcatctgcaaaatggggattaagaatagaatcttggggttagtgtggagattagattaaatgtatgtaagacacttggcacaaaacctggcacatagtaaaggctcaataaaaacaagtgcctctcactgggctttgtcaacacgtg

SEQ ID NO: 2387 - DNA, 1235 bp, Homo sapiens
agctgtcactgcacactcctagctgctgccgatacaccagatacctcagcttattggagccatgcccttcacagagtcccaactcagaggaaaagggccagtgccaaggggcaccaagaacctgctcaggaagccttttgatggcaagatcaccaatccagatggtattgctccctcaggatggctctgggcctgcccctaagggcctgtggcctatggaatatgtcctccaggctttgctcagctgagctcctcttctgtaaggaaacccagtcatccctgaatcttgccacagagatccgggattcaggagctctcagtttcttagggatggactatggcccagtcccccatctaagtggtgctttgcaaatgtcttggaggagtataggacagaggaccaaaatacacagcaggtagtgttagctctctgctaggagctcaaagcaacacaacttgtatcaaaatcacaactggcagagaagctggtggatccaatcctttcttcatctgttgttatttagaactcacctctcacactctgttctttagtgtccttacctttatcttaccacacacatgggtgtttctattatccttggaagcacagacctcgggcatccccttattgcctgatgggccaacaccaacagttacggagtgcttgagaaggggcaagtttcacagaaatggccagatagggccttcctacagagcagcaagagtaggccaagcagaaagactgctgaggtaacacggaccccagcccctgtcagggcctctgccaaggaaataatatggaccatttacctggcaggcagtctgctctctctcaggatcaccacgcatctcaggattggtctaaacttcaagtctcaaccaagtgtctgaagtgaactttgcattgaataaatttttgccatggaaagaacatcaaacaagccactcatctctacagagataagaaaacaagtttggcagagcaagagacagaagaccgtggagaaatcagaagggggaacagtcagtttagttaaggatggaacctgggaaaggccaccattcctgcttgatggggctctgatttgctcttgctcaagtggaataaaaccccatggtcttcttgacatgattcttgatcttttctccactgagacacacttaagtgatgatccttacaggactgacaccctaatgccaataaaagttgctcattatggactgctacaaagacc

SEQ ID NO: 2388 - DNA, 231 bp, Homo sapiens
ccctgaaccagctctgacccaggaagaagactccacccctgaattccaagtgctccattggatcagcttcccaggaagttcagcttcgggttagtacataaggccaccacaatgctcaagaaattattttagaaaaaacgtacgagttacatttagtgcaagttgaccttatgcccatgcctccatacatggactggttctgttttattaaaactaatatttcatacagat

SEQ ID NO: 2389 - DNA, 1365 bp, Homo sapiens
gccaaggtggccgcagtctgcctttgcatcctgtcctccagccacccttgcttgccactgttccccatgacgagagcctcctgtctgcagtggccatcctgaggatagggcagagtgcccagggtggccccagggcttctaaaaccccacctagaccaccctccatgtcaggtactgagcaaggccccagatccttctctctggaggaagagggaagcccaggggtcctgtttgtaaaacaacggtggcaacagctcctcttccagagctgcctctgcctttatcctgggagatggggaggaagccccatctctgctgttccctgcgtggaggaagcccacccagcaagctctctcctaccccaggtaaaaggtgctcctttgcctgggtttgaattccagcgctgccacttcctctctgcacctcctggcaagtttcttctattccccacgtttaaagcgatggcacctccgtcccagggtggtgtgaggattacccagtgtggtaggtgctcaataaatgttggtcattgttatcactgaagcccaacatgctagtgcttctagacccttctgtcagtgctgataagcccttgctaagtcccagccccttcatgcttggctggcgtctgccctagggctggggttctcaagcccctggccctggcccagagatttggattcccttggcggccgtggagcccagcctttgatgtctttcaaagcttctgtggtgcgccctggattgagaaccaccacccgaggggtacagcccctctcttccaaccgagaagttcctgtcccagaatggacccagggacaagagaccctgagagccctgggactgggagtgtctgctcctctgaggccaggaggccggtgctgggccagagaggacggcgtggcgaaagtcagcgtccactgcagcacaggatcagatggccgtgtgctgtgcatgcaggagcctcgccttctgtgtctttagtcttgagccaaaatttgctcaaagactgatctcttccttgcagggaacagctttggggctgggggaactagaacccacatgttggtctaaaccctgagaaggtggcagtgaggaagtatcccctcaggtgactggatctgtgttcctccttaacatcatctgatggaatggcaatgaaaagcgtggattgtggaaaatacagaaaaacataaaggaaaaaactccaatcccctgagcccaccactgttcaggacccctgcttttgtcacctactatttccctttagtttttagcagcggctggatgtgatatgtctagtttaaccagtccccttgatctttctatataataaataacacaggagtgaacatcctgaatcag

SEQ ID NO: 2390 - DNA, 387 bp, Homo sapiens
ctgcgagcgacaggcagcccaggacatctgtcttaggctccagtggacccccgtgcctcctaaggcttgagtgcaggtacccgtgttcctagagcacaggacgctgtctgcggctccccatcttccctgccagctccagcctgaactcaaggattgttaagaccactccactgatccctaaagctgttgatgacaagttgattcatttaaaacttctgtacatgcattctcagactcatcttttttgtaattaaaattaaaaattaagttaaatttagtaataatcatctaatttctatacattctaaaatatattcagcatctgtagtttatactttgtttctccaaagtatgtgggtaaacaataaaaaaaaactataaatattc

SEQ ID NO: 2391 - DNA, 454 bp, Homo sapiens
gctatcctcacactcacggctaccagtgggcctgctgggctgcttccactcctccactccagtagtatcctctgttttcagacatcctagcaaccagcccctgctgccccatcctgctggaatcaacacagacttgctctccaaagagactaaatgtcatagcgtgatcttagcctaggtaggccacatccatcccaaaggaaaatgtagacatcacctgtacctatataaggataaaggcatgtgtatagagcagaatgtttcccttcatgtgcactatgaaaacgagctgacagcacactcccaggagaaatgtttccagacaactccccatgatcctgtcacacagcattataaccacaaatccaaaccttagcctgctgctgctgctgccctcagaggaagatgaggaaggaaaaaaactgggtggacctacaaaaacccatcctctccc

SEQ ID NO: 2392 - DNA, 676 bp, Homo sapiens
agaaacaccacccgtccagtaccaccaaagtagttctctgtcatgtgtgttccctgcctgcacaaacctacatgtacataccatggattagagacacttgcaggactgaaaggctgctctggtgaggcagcctctgtttaaaccggccccacatgaagagaacatcccttgagacgaatttggagactgggattagagcctttggaggtcaaagcaaattaagatttttatttaagaataaaagagtactttgatcatgagacataggtatcttgtccctctcactaaaaaggagtgttgtgtgtggcggccacgtgcttctatgtggtgtttgactctgtacaaattctagtcccaaagatcaagttgtctgaaggagccaaagtgtgaatgtgggtgtcggctgcggcattaaattcatcatctcaacccagagtgtctggtctccctgctctttctgcatggttgtgtccctagtcctaagctttggttctttagggtgactgtggtaagaaggatatttaatcatgacatgcacggacacgtacatatttaactgaaacaagttttaccaaacagtatttactcgtgatgtgcgtagtgcattctgatatttttgagccattctattgtgttctacttcacctaaaaaaataaaataaaaatgttgatcaag

SEQ ID NO: 2393 - DNA, 331 bp, Homo sapiens
agtagcactgaacgaagccaggggttcagatgacactgctgcatcctggtcacattctctgtctcctggaatgctcccacctcaagtggagttagaaggaaggtagaggggctctcccccaggattttggtgttttgactaacaccagttcctgccaacctctgttgccaccacctttccttccaggccctaagcacgtgcagcaaagcacaccacagcacctttgataacctctctccatcctgggcctgatgacctgctctagactgttatagagggataagcagctcattcccctggttcctaataaaaagcctttaaattaaatggt

SEQ ID NO: 2394 - DNA, 2740 bp, Homo sapiens
ttcttagaggaccagcctcctgggactgtgactgcttttgagagctcttcagagatcataagaacttgggcttttctacgagatgaccttgacataccaagtggtttccaaatggtcaacttacttaaaaatcttttcctgttttgagatagtcactggatcaagaatgcattaagtgtggttaccctaaatgttcccttttaaatctgcttttcatgttgaaaatcagttttaatgtagagaaagaaatgtctgccatttgctgcttaacaggctttgtgtcaggtttttcagtgttggcaagctcttggttctacgtggatgatttctacgtggatgttctcctgagtccttaattctgcctaaatagaatttctttatgatcttaacttcacttccattaggtgaagattgaaaggataggattgacatacccaaagtagccagctggtcttcagcaaaaaaaaaaaagctaatgtcttctaatatcctgattttcagaaatggggaaattgcagattttgacaagcttaatgtgtatatgtagcaaaatggtttttaagtacttggaaaaggaggtaatcgccaaatagttccatttttttttttttttttgagacagagtttcactcttgttgcccaggctggagtacaatggcgtgatctcagctcactctgcaacctccacttcccaggttcaagcgattctcatgcctcagcctcccgagtagctgggactacaggcacaagtcaccatgcctggctaattttgtatttttagtagagaaggggtttcaccacattggccgggctggtcttgaactcctgacctcaggtaatccgcccatctcggcttcccaaagtgctgagattacaggcatgggccaccacgcccagctagttcctcttttgataaggctgttaacattacaaggtcagagagaggaatggaatcgacagtataaattggttcctgagagggtttcctaacagctttgtaataagaaaaatatggccttgatggtgtagtgcatggacatctacccagataaacaaattgttgactgctgaattaatgtgattttggtctctattgatatttcatagggccctgtcttattcaactttacttttaaaatcagtgatttggatgaaggcatcagaaacatctgatttgaggatggagcaacccaatattgctaatataatagatgacagtggcaactgaaaacagtcccagaatgaccccatcgagatgaaattaaacagattagaaatgtaacatactcatttaaattaaataagttgtataagtttgggctgaagaaacctggccttatatcatttcatataaaaaagacgggattttagttgtcctcaggttcaatatgaaccaagtagtattcatgttgttattatatgataacagaaaaattagtggtacttcaggttttatcagtagaagtgtcacagccatagtcaaaatacccctaacatactgcatttcactctgggtaccaaatttaagcaagatattgatggccactaagtgtgtatccagaagaagagatcagaatgatgagtccagaacccctgtcacacagggaataggtgaaggaactagggatatttaactggagcagagaacatctggagagagagcaagattcctgtccttgagaagttgaagccgtctcatgcagaagagggaatgagcttccattatgctgcagagctggcagcaatggatgaaagttgcaggaagttagttttagttctgtagaaggcaagagtagggtagaccaaatcaaatgctcactggggtcaggctgatggagacagtaacactggcgagcaggtgccccagctcggactatactgctgagttctggtctgttgctgccactctacaggtccagggttgttagatcttctgggtttttgttttgctttttgaaataaggaaaataagcttatcttaagtttatttttccttggatatacctagattccatacagtgacaatacaaatacaaaggaagaacatctggatttcatccttgacctcatttacaaagcaaaaagagatgctggattcagatataaatgtttaattttgcagtgtttaagtcagcaaatcttctgttttttaaaaataagccacatatctagatttttctgtgaaagctctcaattaagtgttgggaactaatttcaagattttaaaaaatgttatgcaggcttaacgtgtctgagagccataaatgacctaacgtttcccgttagtctctgaactaggtgatctcagttctctttcaactccagtactctgtaagtttctgtgacctgtagtgtaccattctcaggtggtgatatggtttggatgttttgtcccctccaaatctcatgttcaaagtgtgacattcagtgttagaggtgggcctagtaggaggtatttgggtcatgggggcggatcccttatgtatgactttgtgccatccccatagtaatgagtgagttctcactctggttgtttatgcaagagctggttgtttaaaagagcctggaacttcctcctctctcgcttgctctctctcaccatgtgacacactggctccccttcaccttctgccatgattgtaagcttcgtgaggccctcaccagaagcagatgccagcgccatgcttcctatacagttctatgcagaacagtgagccaaataaacctcttttctttctaa

SEQ ID NO: 2395 - DNA, 119 bp, Homo sapiens
aacccacagtgccaggcaacccttcagaaaggctttgctcctgctctcagatcagatcaagcattctttctattttattatctgggacatatttaaatacaaacatattcagaacaatt

SEQ ID NO: 2396 - DNA, 2041 bp, Homo sapiens
tgcaagaggtggaaatgttctccatatcaagatgtggcccaaggggttaagtgggaacaatcattatacggactcttcagatttacagagaacttacacttcatctgttccacctctcctgcgatagtcctgggtgctccactgattggaggatagagccagctgtctgacacacaaatggtcttttcagccacagtcttatcaagtatcctatatgtattcctttctaaactgctactcatgaatgaggaaagtctgatgctaagatactgcctgcactggaatgttaaacactaaatatataacaagctgtgttttcctaagctgagatctgttgaataatgtttacattcgtcccccggggaaatgtatgctcagccaccattcaagagatgactgagaaggagatggtaagttcaagaagactgattgcacctgggacccaggccctttctttgggatccagtcccagccttcatccatgtgattaagatccaggccgctgaagttccccaggaaatgatcttccacttgagcaaccttttacttgatacgatttgcacctttctgttttcctgcagtcagggtggtggcctgcagggacctgagctttgctacccaaccagattcctcatagagattcctaatcactagtttcttgtattcataaactcagagatacagagggcttggtttgaagttggggtgagatgaaacctttgctctgagccaaagctctggggccttgcattccctgcattgggttgatgactgtcagcatcactgccgcaggccatgcttgactaaggtacctggttttagccacagccacctccttgtatgttacctttcagctctggccaagagtgggacagggttttaaccacaaataggagcagcatgcaattcctagtgacttgctgcacagtattgtatcataattacaggaagtttttatttttaaaactggatctggggtatattcatttgccccatcacctctgtctaaaggcccaagtcctagggctgccatggtcacaagcacactgatgctccttaagattgtttatctggagcccacatagtgtggaacaaaaagtcacctagaaagcatccttggtcatcattgtctccttcccacctggcccagagatgcttaaatccaagttgtttctccagctgtcacctcccccaggagatcaggattccactgacgtcctgggcagccagtgaatttaattttccatgagaaacaacagagttaacctgtggcattaggagacctacttcatgtggaccctttttttccttcagtttaacttttctggagcagtgtgctgcgtagttcggcctgagtttgtgcagcttgttaagacaactcttgtgtacgctatgttgaagctcaacaaaaaagtcatgggaccacttctagaaatctttcagctgtcaggcctgtcagtctcatgacagtttgttggttgtgccaaacactttatttgggaaaggaaagcccagatttgaatgggtctttcccctgggccttatcctatagaggcatttgtaatatggagaaaataatttttcatttttgctcatttaattctataaattctctttataaatgaattttgtgttctttagttctccttaaaagaacttttgaattataaaaataaaatctttacctgtcgaattgttgctgcagatgattgttgtggaaaatctggatcattgacctctgtgctttcattcctagagatgttttatagttacatgagcaaaagctgttgccccaaagtgatggccctggaggcggggctgaggaacagggaaatgccgctgtgaagtcttaaagcacttctgcttaaactcccatgtgtgaggagtgtgcctccctgtgccctctcagctctgaggctggccgtctttcggggtgttccttttggcaaatatacactgtaatcttgagtctaaatttatatgttgaaatgctaccttttttaaaataagaaactaaataaaattattttactatcagtga

SEQ ID NO: 2397 - DNA, 1230 bp, Homo sapiens
gttgtcacttgttcactgtccccaaacctatggaagttgttgctatacatgttggaaatgtgtttttcccccatgaaaccattcttcagacatcagtcaatggaagaaatggctatgaacagaaactacatttctactatgatcagaagaacatgattttacaagtataacagttttgagtaattcaagcctctaaacagacaggaatttagaaaaagtcaatgtacttgtttgaatatttgttttaataccacagctatttagaagcatcatcacgacacatttgccttcagtcttggtaaaacattacttatttaactgattaaaaataccttctatgtattagtgtcaacttttaacttttgggcgtaagaccaaatgtagttttgtatacagagaagaaaacctcaagtaataggcattttaagtaaaagtctacctgtgtttttttctaaaaaggctgctcacaagttctatttcttgaagaataaattctacctccttgtgttgcactgaacaggttctcttcctggcatcataaggagttggtgtaatcattttaaattccactgaaaatttaacagtatccccttctcatcgaagggattgtgtatctgtgcttctaatattagttggctttcataaatcatgttgttgtgtgtatatgtatttaagatgtacatttaataatatcaaagagaagatgcctgttaatttataatgtatttgaaaattacatgttttttcatttgtaaaaatgagtcatttgtttaaacaatctttcatgtcttgtcatacaaatttataaaggtctgcactcctttatctgtaattgtaattccaaaatccaaaaagctctgaaaacaaggtttccataagcttggtgacaaaattcatttgcttgcaatctaatctgaactgaccttgaatctttttatcccatttagtgtgaatattcctttattttgctgcttgatgatgagagggagggctgctgccacagactgtggtgagggctggttaatgtagtatggtatatgcacaaaactacttttctaaaatctaaaatttcataattctgaaacaacttgccccaagggtttcagagaaaggactgtggacctctatcatctgctaagtaatttagaagatattatttgtcttaaaaaatgtgaaatgcttttatattctaatagtttttcactttgtgtattaaatggtttttaaatt

SEQ ID NO: 2398 - DNA, 929 bp, Homo sapiens
aacaaagggaagaactttttatgaactccacaggaagtagtaaagcttttttttttttttaattaaaagaattttttttgagacaaagtctcgctctgtcacccaagcaggattgcagtggcataactgtggctcactgtagcctcaacctcctgggctctagagttcctcccacctcagcctcatgagtagctgggaccacaggcgcatgctaccatgcctggcaaacttttttgattttttatagagacaggagggtctccctgtgttgcccaggctggtctgtaatgcctaggctcaagggatcctctgccttggcttcttaacctgctgggattacaagcatgagacaccattcctggcctagaagcctatttttaaagaaactacaatctcccatggggactgtttccctgcctcttttgtgcagtcccatggaacttgcctacagcaagaggcctaagattgaatctttttggggaaaagtcattctaggatgaaaatcctatgttaaggccgggcgcagtggctcacgcctgtaatcccagtactttgggaagccgaggcaggtggatcacctgaggtgaggagtttgagaccagcctggccaacatggtgaaaccccgtctttactaaagctacaaaaattagctgggcgtggtgccaggcacttgtaatcccagctactcaggaggctgaggcaggagaattgcttgagcctgggaggtggaggttgcagtgagccaagatcgctccattgcactccagcctgggtgacagtgaaactccatctcaaaaataaaagaataaaagtatgtctgtcatccagctcctatgtctgttatccagctccaagtacagcttgtgtatatcaacattttcaaaaacctttaaactaccaaatgaaatccagatgtttttccatggtt

SEQ ID NO: 2399 - DNA, 1506 bp, Homo sapiens
gaaacttatttctatgggacagagtcttttttttttaatgtggaagaatgtcttataaaacctgaatcctgaggctgatgaattgtgaaaattcctcaaaaggaaattatgctggtcatcacaggaacatctcaacgttcgagtaaactggaggactgtggctattcctgaaccttctttgagacagaatccctcagaatctcacacttataacttcctaccttttacttgaatgctttgccatattcaggacagagactctcacaaagttcagaaaacagctggacttaccagtaaaatcaaatgagaggacctattttctctggtagtggttgattactacattattttcttaagtggctggttttttagttactatgtaaatggtcgtttttctgttaatgatgctaatgtgttgtaaacaagattctaaatttaaaaaggaaaacaaaacaaacttgttctttgcagcttatcaccttgtgaatgtcggtaacttacttttccataatattgcaaataacataaaatcttaaaataattccaagctgagtcttctagattgagcagaaatggtgaaaggagtattgataacttggcgtatgtgatgggcccctcttgtttattttctatgtgagtcacattgacatgcgatcagtttgggaaatgtgatgaaaacaaagactagatgggtatgtgtgtttatgtgttgggtagggaggtgacgattgccactcataaaataaaggattttataaaataccttcctactgtgtatgtaggatttggggggatcttagggacctaatcgacttctttgcacactaaaaacatcagacaatgggacatactgactgaccagtctaggttgaaagataggcagccttacccagaacacaacattagcagctgggaaggtgtctgaggtccccaattacatatcccaaagagtttcttacttctgtttctgtcatttcccctctgttccagacagtcatcatttatcctctgttcttcctggactgttgctgtggtctcttctcatcttaactgtcccttccaaccaccctccacactgctgccagagcaatcttaaaaatgtaaactggccctattactcctgcttagaaccctgtagtgacttatcatggcctctgaaaaatctagactttcattatgcatacaagtcccttgtgtttttttgtttgtttatagacagggtctctattgtcacccaggctggagtgtggtggtgtgataatagctcaccttgacctcctaggctcaactgatcttcccacctcagcctcctgaatagctgggactaccagcacgctccaccatgccttgctaattattttttatacagatggagtctcactatgttgtccaggctggtcttgaactggcctcaagtgattctcttaccacagcctgccagagtgctgagattgtaggcatgaaccaccgtgcctaacataaggcccctatttaaacatttttctt

SEQ ID NO: 2400 - DNA, 250 bp, Homo sapiens
gtgtgaggcactcccggagcaaagtctatgaaggatcttctgcaagaggctgcctcctggtccactgaacctggaaactgagtgggctttaaccaggagataaaaatggagcctgaagggaatcaggcaaggaaatgaactcaggattcagagatctttgaattaatatgtggtgggttctgacattattcttccataagaccatgtgggtttccatggtggctatcaataaaactccttaggaaaactt

SEQ ID NO: 2401 - DNA, 970 bp, Homo sapiens
accaggcagcctctcttgctaggaggccacttctgctgttacataactcctccctgcagaagaggggacttctgcaacagattctgtttctttttcccgactcttttccttgctgccaggtatgtgatgctgtaggcttggctccaaaccagctgagtgcctgctttttactcctttatgtctggccttctaggatctgtccaagacactctcaggcctggaggcagggcatagaatcagttcttcactctccctaatactacactctgtaaggacctggggcaggatatcttctcccccagggatcttctatttaagtggcttctgagagggtgaacaggattgttacttttaagcctacctctgctgtgacccatcatgtgggtcttttgtttctcccttctgtggtttatgagcctgcccttaccttttccctgcctctgacttggtatttccaggtccgtatttctctgtagcccagggtctggggtagagctgactgctgttcaccctttgaacaactcatggacgtgagggatgggtgctgagcagaaccaagagaggaaactttggcgctgttaaaatggaatttctcatctgccggcattattaagggtgggctaggttggatggaaggtgaaagggatgaactgccttttgctggaagctgtcttaggctgtgagacaggagcaggggaaccacagcctatggggaactgcccttgactccacctatgttggagccttagcccaaggccattccttctgtgatgataaagcccagttctggaattggagccatattaaggaatgattctcttccagcgctgctcctcaagggttgggggtccttctccctcgcagccaccacatgtctcagggctaccttctccgattggatttgcatttgtggcactgtctttgatgcagtgatgtacttaatggtgcaataaagctgcttcgatttggt

SEQ ID NO: 2402 - DNA, 96 bp, Homo sapiens
ggaggcttcgtgggcttttgggtcctctaactaggactccctcattcctagaaatttaaccttaatgaaatccctaataaaactcagtgctgtgtt

SEQ ID NO: 2403 - DNA, 1431 bp, Homo sapiens
aggctgcatagaagtgtgtacggcttgaggtttcagcatccaggctgcagaccccacgcagtgtctcatacagtggaatgtggcagatgagacgggctttcaggaaggaagtccacttcttctgcaggatcttcttccctcccaggtctccctggggaggtagaggcacgggataaggggccagggtcagaggtccagcctctatacccgtgccccaacgtcagcccaatccaccttgcagacacgagccacacgggccacacggtgactgctgcggctctgagtgaagctgccagagccctcctcagtggcacgctccgtgaagaagtagtacaccttgtcatcatcacccactgcactggccttgctctcccgcacgaggacggagaacacaaactccgcatctgtgggtcaggcagtttgagaggcttttgagacaggctggggattcctttccctcactctgaggctgacccctcacttgacaacacacaggaatggaatggacaggctcacctggggatttgggggtggggtggtcagctggccaagggagtaaaaatgaagaaatagtcccctaccccccatcatcctgtgcctcatcctcctaaccattgagccaatgcattggtgtctcctcagttctcagggagtgtgggtggcggctccggcggatgtcaggaatgctccggaattcatacctagtggctgtgtagaggcctccatctggcgtggggatattccaggcatgagagacatgtcatattcaacagggcacatgacatatacatggtggcaggtcctagagatgagatccacatcctaaaaataccatgtctgtgatagggaagaaggcctgctcaccaatgatgaggcctgtgaagccacgggctgggtcataaggacacttctccttcccctcctcgaagctggttggcaaggtgaaggcctcagcatcctagggaacaaggaaccagcagtaagtggttccgaagacaggcagggacagtggctcaaagtcagatcagtctggggtcagggatcagcgatcagggataggggcaggttgtatggcagatgcacctgacagcaataacttaagcatcccctgagaatgaccttatggcctcaaaacaatgtatgtttggagttccaaatctgcaagtggccaacctagagattcactccttatctatgaagaacatctgagcccctagcccatcctgtggaacacatgctgtccaggggatcaaggccctttgttttgggttaaatgaagtttgccaggtggaggtgattagggggaggatgctaagtgaaaatgctataaaaactgcatggtttttacaaaggggaatggttctccagtgcagcccgccgccactggagtgccctgtatggaagtccccttaataaaccatccgtctcctt

SEQ ID NO: 2404 - DNA, 464 bp, Homo sapiens
agagttgccccaccaactgcagccccaggctttggactgttactccggtaaaggtggttcttcccctttgggattccaagcccaggcaaatggaacccatcaatgggcaagttgacagaggttctgcttgggataatgaagagctgcctgtttctttccagtgcctgcttctgggggcagtgaccttgtgaaccactcatttttatgcaagtggcatccctaaaacctgagatgaggaagacttcaagggttttacagggcccttgttttttaaatccaaattgataataatgatctcaaaacacagtgagaggtctgaaggctggcttctgaagaatccctgatgtcttattggaacaaccactgagctacggagagctctgctgtgatgggctaggcactttatatctgtgtgaatacagatttataaaacaggttaataaacttatccaaggtcacatttc

SEQ ID NO: 2405 - DNA, 114 bp, Homo sapiens
acccttgtcatccactacttggctataagctccagaagtgacaagacacttcacatcttaaatatgtttcctagtttataattcatttgggcagtaaatgtttgttgagcactt

SEQ ID NO: 2406 - DNA, 251 bp, Homo sapiens
tctcaaattcctggactgaagctatctacccgccttagtctcccaaagtgctaggattacagcgtgatctaccacacctggccaatcccaactactctggaagctgaagcagcaagatcacttgagcccaggagtttaagaccagcctgggcaacatagcaagaccctgtctctaaagaaaaaaaaaaagtaaaagaaaaataaagcacgtcttggctcagctgctgatttaagctgggtctaaacatctg

SEQ ID NO: 2407 - DNA, 293 bp, Homo sapiens
gcggcgccccgggtcttccgccgccctgggctcctagcgctcgaaagcccaacgcctcccggaccggaccgccgaggggagctgggacctcctctgccaactcccgcctcctcccctgtccccggccccggactcggctcctggcagccgcctcttccctctcgaagcaataaacccaggctggccggccgggccggccgccaccagcggcctccgccgccccggaagccctcgccgtgcaattctgtatggcttctatataaatatttaaacctatatagcgggttcttccc

SEQ ID NO: 2408 - DNA, 569 bp, Homo sapiens
cccatggctgggggtgctgaggagagccgagttggactggctacccctcctggccacccagtactccctccagcctcagctggctgaacctcgccgctccaaccaccagcttcctcagcgagcagggcccagggctctgggcctgaagcaagagccagcccggctcccagtgtctgcccggctcccagtgtctgcccagccctctcccagacaggagcaggctgccaccccttctacctcaccactgcccctcgaagaattttgcaaatggccccttgccccattttaagcaggagcaggtggctggtttgaagccccaggtatcccccttccctgctatgggaaaggccaagctgctgggtggggacagaagctgcaggggagagggaagcagccgtgctgtcaacatcatccggcaccctctggggtaggagaacagccattccacatgtgttccctctatccgtcctgcttcctgggcagctggtggtgctgggaatggggtgccccagccttggtgaggacagtgttgggaggcccaggggcccagtaaagtgcatttgacattg

SEQ ID NO: 2409 - DNA, 626 bp, Homo sapiens
ccgtcagggccacccctgcctctgggccagggaaaccagctactcagggacttctcttgcctggagggtgcagtgatagctcctcctcactgccccactgtgctcctgggcctgtgaccccagtgctcaggcaccttgcactagaggcttctgactcctgggactttggagcttaccagagatgcagtccctcccaggaacctgttggagaggcaggacctgctgctttagagtgcggctgaacccgggccttgcgtccctgtttggccagagcaaggatctggcctggagaggcccatcctataccccttattagagccatgacagcctacagagtgaggtgaggtgctcccaccttcccagatggttcctttctgccccttcctggaaggaaaggtgaggctgccaatagcctcctggcaccagccagacctcacccttgaccaacctctcggggctgggggttcattcctggggcactgtggcctggttttgctttgaaaccaagaaagagcaaagggaacccagcagttctgagtgagttctgagccagccctacctcaggctggctgttgagacatgctacaattttcatttttgtaaaaataaagcttgattgttcacag

SEQ ID NO: 2410 - DNA, 199 bp, Homo sapiens
gtgctgcctggccctccccacaatgccagaccgcagagaggctcatcctgtagggcacccaaaactcaagcaagatgagctgtgcgctgctctgcaggctggggaggtgctgggggagccctgggttccggttgttgatattgtttgctgttgggtttttgctgtttttttttttttttttttttttaaaacaaaagag

SEQ ID NO: 2411 - DNA, 410 bp, Homo sapiens
ccctcctaggtgagttgcggggagaagtgcctagcaggctctgggaaggggcaggagaagcaggtgagggcctaaatgctgattccttgtttcctcttttcaggtcagctccatgtgccatgcaccgccatgcaccctgttccctgacaagtttcaacaattgtaaatatttcttccttgaagaggagagcttgggtgggggttgggtgggagggacttgggtctttggtgctaggagagggcctgtgctccacacagccgtggttttctgattttcaccatgcccggggcctcccttcccacctgcctgtgagaattggaggttagtgcctgaagctcagagctacacatttttaatagtttttacatttttggataaaggttgaaataaagtggtgtggagtttttgc

SEQ ID NO: 2412 - DNA, 1999 bp, Homo sapiens
catttgttgacactgtgaactgtccaaaagtctcttaactgcaccttgtgaatggtagttgaggtcttcatacagttcagcctctagaatggtaacaaatcagccaattggattcgaaacaaagaagactatgtaaaactcacccatcacactttgagactactcactggttggaagaatatagtattgcagcaaatcctgtatgaaagagagatgtgggcttcctttttgagtcttgtgttaggtgctgagaccttttacatgggcttatacagggagagagtcttcaataaatgtagtcagcactattttctgcatccagtgtggttgcgtttctcacctgagagtaatcaagataacatctgtcatcttccttggtttattgagtgaaatgcctctcagtcttaggggacatggcagagatgaaagaaagaaagagtgggtttcagaagtgtcagggtggagtgattccaagtgggatggttgtggcattagtttaagctgaataaataatttcaatttggggcagttattctgctttttgtaaagccgtggccaattgtctcctgtaatgactgttggttcaggcatgttgtactttgtagggacaaatgtgcatttgtttgtggcaaaagcctacaattgacaaacttgtaaatttctttgtatataaactagctgtaacctgactatcctttgtgtttactgtttttgtaaatttttttcctctataaatgaaagggtgttggttcagaatggcactttgaataatgtaaaccagtgaaaagtggattttctttacttttgtctttgggtttggggttgtttttgttctttttgaagttttattatttttaaagtgcctcccacctaggcgtaggccatgaccatttggggtacgagagcctaattttgtaggacttaatctgttgaaaagtgcagttacttctggaaattaacctcaatattaggtcagcatgtgaaatgttggatttgacatgtcaggtagggttcagggactgattggtcccatttgccctcaggtcagttgtttaatctcaagacctgttactactgattttattaaatcagagtctttaattcttgcatgtttgtatctaatttctgaatgaatgagcacactttaaccagttatttacagttacctttttcctttaaccggattgtgaaagcttcatgtattttaatttagattctgtgtttttaagggttctgagcatgaagctggcagatagtcggcaggactcattttttcatcatggctggctgatttctccatagattgataacagtattttgttatcttgcttctctgtagttttgcatcagctgtttaactttgagctgagtgaggggagaggggtaaagagaaagaaacttaagttttctttcacagaactccaccattgtgggctttgagagagccctaaagcattgtacctagtggtacctagtgacttccaaccaaagcctttgagtatgcactaaataggtgagaagaaaggagagaaggtttttaggttagaaacctttaaccgatagaaggatatggtatgttgtaaagctggaaccaagtttgcatttttgagggcttgagatgaagggaagactcttaccagatagtaagacagctgagttttcctcagttttctcgtcttaacactagtggacaattctagcattttgtttggaggatttcagagttaacctcatggaattcaggattttttagcaagtttgcttttggttttatcttggcttttagtaatcatgttggctggtctggtcacaggtgactgtgaaacagatgccctggtcttgctttcatcactctaggatcatgaagtgctatgctatttcctggttatgaatattaaggttggaattacatttttattgattgtttggatcagagctcagttcctgtagaaaacgaactgtaaaagaccatgcaagaggcaaaataaaacttgaagtg

SEQ ID NO: 2413 - DNA, 1667 bp, Homo sapiens
atttagtaatgcagggaaaagcttctttgggaagaataccaccttcccacctcacccccatatttcaatcctattcctttgtgggaggcttaccccttccctacctcaggtctctctgggcatctccttcctctgtgcttttgaatgtccccgtctgtgactcagtgtccctctcactgtctctgataagctccttctctttctctctcttcaatctgcctcgctcacatcatggccacaggatgagaacatcatgaggtccatgcagctctttgacaatgtcatctagcccccaggagagggggtcagtgtttcctggggggaccatgctctaaccctagtccaggcggacctcacccttctcttcccaggtctatcctcatcctacgcctccctgggggctggagggatccaagagcttggggattcagtagtccagatctctggagctgaaggggccagagagtgggcagagtgcatctcggggggtgttcccaactcccaccagctctcacccccttcctgcctgacacccagtgttgagagtgcccctcctgtaggaattgagcggttccccacctcctacccctactctagaaacacactagacagatgtctcctgctatggtgcttcccccatccctgacctcataaacatttcccctaagactcccctctcagagagaatgctccattcttggcactggctggcttctcagaccagccattgagagccctgtgggagggggacaagaatgtatagggagaaatcttgggcctgagtcaatggataggtcctaggaggtggctggggttgagaatagaagggcctggacagattatgattgctcaggcataccaggttatagctccaagttccacaggtctgctaccacaggccatcaaaatataagtttccaggctttgcagaagaccttgtctccttagaaatgccccagaaattttccacaccctcctcggtatccatggagagcctggggccagatatctggctcatctctggcattgcttcctctccttccttcctgcatgtgttggtggtggttgtggtgggggaatgtggatgggggatgtcctggctgatgcctgccaaaatttcatcccaccctccttgcttatcgtccctgttttgagggctatgacttgagtttttgtttcccatgttctctatagacttgggaccttcctgaacttggggcctatcactccccacagtggatgccttagaagggagagggaaggagggaggcaggcatagcatctgaacccagtgtgggggcattcactagaatcttcaatcaacctgggctctccccaccccaccccagataacctcctcagttccctagggtctcttcttgcttgactcaatctacccagagatgccccttagcacacctagagggcagggaccataggacccaggttccaaccccattgtcagcaccccagccatgcggccaccccttagcacacctgctcgtcccatttagcttaccctcccagttggccagaatctgaggggagagcccccagagagcccccttccccatcagaagactgttgactgctttgcattttgggctcttctatatattttgtaaagtaagaaatataccagatctaataaaacacaatggctatgc

SEQ ID NO: 2414 - DNA, 1929 bp, Homo sapiens
ggccacgcctacctgagcagcctctgactgcccttacccatgaggatcatgggctggagggggagcgaggggagagggggctgcccccgaggttggagagaaacacagataccaagttctcttggtgaagaccgcacttcaatggagcttgggcagcaggggcaggagggtcaagccagggataatcttatttggggaggaatgggtgggcacagtggggagaggcctccaggaatgtggggacttccagagtgggctccctaaacagcccctcacatttccaatcttgaggttacaagctgtagctactgactaattttcgggagctggtgaggcaagcctcagggtaatgccagcaccctgaaagtcagtggctctgctcggcttctgaaaacagatcaactctcagatatagctggagctacatcctgcttcctttgggcctggggctgtgcttggcttgaaatctgtgtcccctgcctgcactggcactttgtccagtcatcgggacctttggctcagatttagggtaagataggaatagggtacctttttccttttttttctgagacggagtctcactctgtcgcccaggctggaatgcagtggcgtgatctcggctttactgcagcctccgcttcctgggttcaagcgattctcctgcctcagcctcccgagtagctgggactacaggagcgtgtgccacgcccggctaattttttgtatttttagtagagatggggtttcaccatgttacccaggatggtctcaatatcctgagttcatgatccacccaccttggcctcccaaagtgctgggattacaggcgtgagccaccacacccagccagttttcctattttctgaattcagaattgacttctctgggaaaactggagatgagaatctgcccagtgctctgctgtccagtcaccgccttttgaattttagttttggcaccaggagtaccgttagctttccccttcttctggcccatttgactcatcagcacaatagggtcaccaccttaacttttaatttctaatctgctttactgtctttagggtgtgtatgaaataaacattgacaggctttctggagccctcaaggtgcctactttgctggttccctttccagcagctcccccacctcccttagccccccctcctctggcagcctctcctgcctctgctgagctcccctccacgtgttccacccccttaccctgctgttgtttacatccaacctgcctgagaatttcctctggggaggaatctattcctgtcatggtctagtgcctgggagggagagaactttctgggggtagggtgccctccatctgaaacaggccaggtgagcatcatgcataaggcctccattctgtccgctcagattctgggtggggccacaggcaaatctcctgacttatggggagttggcttgtggttcctcccttggatagcctccatggaaccactataggctttcccaacagctgcctctgaaatagctgctgcttcgagatcctccctttttaaagcactttctaaagccctcaggatggcgggagcaaacagcactggtatattctaggagtaagtgcaggaattcagcagtgagagcatgtctgggaccacctggactgccatccatttaacctcaaatctctttgggatactcgccctccctgggaaccagagttctggctctaacattgagcagctatgcactagttccagagaagccactaacaggctgccatgtgtagatgtaggttcttaagagatcacaggctgggtcatctgatcactggatggatagctcagcctggggcatttagtgttttccctggtgataaatccccaaggcagctggatttggagctggtggcaagttgaaattattaaaaattgatttgtgtgggactgtc

SEQ ID NO: 2415 - DNA, 523 bp, Homo sapiens
aaggccctgctgtggccacccagtgctctgcctacctgccccacccctcacagccccagggagcagaagacagaatgaagagactgagcatctaaaatgggcagcctccatccacccgcttcagggaggaactggactctctgggggcaggtgccaagatttgcccccccagtggccctgggctgggcctggcctctacagagccttttagggggagggggtactcatgtggatgcctacttggaacctgggcctctgagacatgtcctgaccaccccccagggcatttgcctccatcttcaccccagattgtgggtttcccatccccctgactttacccctttcaagcctggggttgtctatacccacagcccttagggacttaaagttacggggcttcgttgaatgctccttcccctaggcagctggtaatagaggggtaaagctctgggcccctcctccctgctgccacttatcccagctccaagtttttttaaaaataatattattaaaaatgtaagtt

SEQ ID NO: 2416 - DNA, 325 bp, Homo sapiens
gcggccccgcccgtagatcatccccgagggcgggggcaacgattcacagcctccgcggactggggtcattttgactggcttgctcccgccccagggtctgaaaggggtgtttgggcagctggggggcaccggctcaggagagggccttcccctcccagccctgaggggtggactaggccctacacacagaccgcgcccctgggactaaagccaggaacagggaccagctccccgggggccaactcacccttggcccatcccgccttctccaggcttcccctccctcgttttcaaagataaatgaaataaacgtgcgcggactgtc

SEQ ID NO: 2417 - DNA, 1633 bp, Homo sapiens
tgtcgggacatcatcttcacctctctctgaagttaactccactttaaaactcgctttcttgagtcggagtgtttgcgaggaactgcctgtgtgtgagtgcgtgtgtggatatgagtgtgtgtgcacatgcgagtgccgtgtggccctgggaccctgggcccagaaaggacgatgaactacctgcagtggtgatggcctgaggcctggggttgaccactaactggctcctgacagggaagagcgctggcagaggctgtgctccctcctcaggtggcctctggctggctgtgggggactccgtttactaccacagggagacagagggaggtaagccatcccccgggagaccttgctgctgaccatcctaggctgggctggccccaccctcacccccacccccagggtgccctgaggccccaggcagctgctgcctccactatcgatgcctcctgactgcacactgaggactgggactggggttgagttctgtctggttttgttgccattttggtttgggaggctggaaaagcaccccaagagctattacagagactggagtcaggagagagcaggaggccctcatgttcaccagggaacaggaccacaccggccactggaggagggcaggagcagtcctcactctgaatggctgcagagttaatgttcccagcccagtcccctttcgggggccttgggagagtttaaggcacctgctggttccaggacctcgctttccatctgttcttgttgcaatgccatcttcaaaccgttttatttattgaagtgtttgttcagttaggggctggagagagggagcttgctgcctcctgccttgctacactaatgtttacagcacctaagcttagcctccagggccccacctctcccagctgatggtgagctgacagtgtccacaggttccaggaccatttgagattggaagctacactcaaagacactcccaccaggctctttctcccttttcctcttgctcactgccctggaatcaacaggctggttgctggttagattttctgaaacaggaggtaaaatttttctttggcagaggcccctaagcaagggaggggtgttggagagccagtgcccttaagactggagaaagctgcaatttaccaagttgccttttgccactgtagctgaccaggggactaggttgtagaggtgggaaggccccctctgggctgatcttgtgccattcttgaccttggacctgcttggttaaggagggagtgggccagaccagagtgccaggagctaatggagccaggcctgactcctaggagtggtccaaaggccttcagcctagatggtgcaaagctggggccagcctgtcttcaccggcaccctcacctgtgacaccaagacccaccccaatcccagacttcacacagtattctcccccacgccgtcctatgaccaaaggcccctgccaggtgtgggccacagcagcaggtatgtgtgaaagcaacgtagcgccccgcggactgcagtgcgcttaaccaactcacctcccttctcttagcccaagcctgtccctcgcacagcctcgcacaaaccacattgcctggtggggcccagtgtactgaaataaagtcgttccgatagacacgtc

SEQ ID NO: 2418 - DNA, 581 bp, Homo sapiens
gatgaggtttagggtggggagtgcctgctgggcacctgaaggatgacatggccctgcctgagcccgggccggcctcgggccacccacgagggcctcccggcctagggcccgaccgcgccggacgcggtgtccggggcagggcagggctggggcctgggcctcaggagcctaggctaggggcacctccgagagcccctttttgtgataatgttttgcactttttcgtacagggtgggcgggggcgggaggggctagcgcccctgaacttttgatgctttttttttgtgtgggagaggcctgatgccgtttctgctttctgctgagaccacccccaccctgacaccatcagtccccctctgtcctggggcctggcttggacagagaccaggatttggggctgagctggtttcccctccttcctccccaagggcttactctttctcttgctggaggtggaggaagggcgtccatgccaaggccccatacctgggccgggggcagcacggcctggctttcccccgcttcagtgggccttgccctttgtacagcctccacccccattaaaactgctctggacttgc

SEQ ID NO: 2419 - DNA, 181 bp, Homo sapiens
ggcactcgccggactctgcccgagccttctaggctcagatcccagagggatgcaggagccctatacccctacacaggggccccctaactcctgtcccccttctctactcctttgctccatagtgttaacctactctcggagctgcctccatgggcacagtaaaggtggcccaaggaaggtg

SEQ ID NO: 2420 - DNA, 620 bp, Homo sapiens
gctgaagccgccgcaaggcctaggggcgggcccgcgtgcacgcgcttggctctttcctgtgtgtgccgccgccgacaggcagaagtgagccctcacctgtgcgcgggaggcggacgcgctgctcacctgtctttttggcttctcccatgactgccggccagtttcctgcacttgtttctctcgctttattgctggacggtgggagaagggcaagtgcaagacggaatcgagggcacctctgggtgttctgtacctcttttcttcttgcaccttgggaagtggaggacgtgggatggaagaagggcctggacctccctccttcctcctccccaccttctcctaaggagcttgccctgcagtaagccccaactttcccttcctcttttccctctatcagagtcgtcgcccacccccctttcccaccgctcccctacccccgccttcctgccaagccgagggcgacggtgatccccagcttagtaagaaaagtaaataggccgggcgcggtagctcacgcctggaatcccagcactgtgggaggccgaggcgggcggatcgcttgagcccaggagaccaggttggagaccagcctaggcaacatggcgaaaccctgtctctac

SEQ ID NO: 2421 - DNA, 3162 bp, Homo sapiens
aatctagacgaatggagatgcaggagctgcgggagccgaattcggtcctgaaaaacactaatttgctgctttctgaccaaatgtttttccatctgtgtacagctccagctgtttgaagagagggaacaacacggtttagaaagaatccccattccagcagtagatttaactgatctctgaggttcagtatcatttttcaaataaaggaattatattatttcctctgcataattgaaatagtattaaatgtctcaaagcacatgattagaaaatgagatcttttaaatgagcaagagattgcattgcagtttagacaattccagtgggcttttttttcctctcaaaaaaaaaaaaagaaaaagaaaaagaggaagaagcagctttgctgagttcatttatttactgacccgtcccttgcattccctccatggttttgaaaccacagacagtgtttgctggtgctgtcagtgatttttaccgtcactagcccagccaggcttcagtctgtccgacaggaagctgctgggtgggggtggggggagaaaaggcagataattaaaccatctcatcgtcttgcaggtcggagactacgtatgtaatcctcactctttggacagaaaaaaaaaaaaaagtctttcttgcagacaagtcactacagaaacataccccatcccacccacccctgcctctgccccagccagccacacagagaagcaaattcttatgacttttgactgtaatgacatctggaatgtaaggagaggtgggaggtttaattccagaaaaattacaaggtccttaaaaagctctcacatcgagggctcaggctagcgtaaacaggctttctccagctcagtggagcagtgagcagccgactctgagattagctggcttctccacggccgtcctatagacaggatttctaaagctcaaagaattctgtgtttaaacgatcacaataggccgctgctatcagattttagaaataaatgcagctttaccatgaacctgctccactgagaaaagccaggcagatcgatttttagatcaatttttacagtgctggcaacttggtggtgtgggatgctcctggatggagagggtttgctgctggggaggacatgggtgtgtgtgtgactgcaggggtcgtgtccaaggaatcaagagtcaccccagctgctgggctcctctgcctctctgcagcagaatgtccgtcctctgttgattgattggagaggaatagcagaacatttctcctgcccctcgttgcaaaacgagcttgtttccctgaacctcagaaatcctcagcttcaaacatggggaaacaggccagagcattgcccggctcctgaattaaactctgttctggtgcctgagctcaggggttttcagagaatgaataagagactgtccagtgactggtgggtccctgggggccagctgccttctcatcctgggaggtggcccttcccaagcccatcagggcgtgtgagcagactgaaggggccgctgcagcccctggccctcaatacccagctgcttctggctaagagtgcagcagagactgaggcatagccagcttcaaaagcgatctgacatgaaagtcattaacaaagccagccgtgaaaaggtgccccagagttgctgtggacagacctgtaaggacttgcaaaacaaaagaaagtgaggggtttttttaacctcagagctagctgctctctgcagcctcctccactggcttctctggctcacccaagctctcccttacagaggcaacacagaattataaggaatcagaaatcccccttctaccaggctgcaaatgtggctctagcacttgcaaattgttttttcttccgaatagttcagcagggacaagttatctgaggggcaaaatgcctgcttggaggtctgcaattttggaacactgcagtatggaactttggcattggagggtctgtaaaatatttttgttcttttaccaccaacttaggggactgttttaaagagccatcccaaggcctctcctagcaggcagaagccactcctctgataacggcctctgtaaatgttctgatttgctctcagctgcagagacacagagacactgcagatgtcacacgctttcatcttccctttgagcccttttgaaccctcctggggctctggggtagatgagagaagcctgaaaaaggcagagtttgaaagctcccatttaaaaacaaaatactttttaaagccctcttgcctcttccctgcccactcctgccccctgaccagaagacagaatttgaagctggaaagggaagaccccttttcccctcctcctgtccccagtgagtcttagcgagacttttgccctgcgcacaattgcatctgaatgtgcgggggagagggctgggggccggagggcaggcaaggcctggggggtgctcgtgatatgtgctcaagccagttgtgggaaaaactcgagtcctcccctcctcccgacctaccccgtgtggctgcttttggctggattccctgcacccagtgcaacacaccctttccccttcactctcccttggttactatggaaacaagggtgtcattgatgtgggctgagctggggaacatgtcggtgcacagctgaaagtcagcgattatgccggcggttagaaatgtgccagggttaaaggagtccgcagctcccacggctgctgggaggacatggtcctgcccccttccttcctccctccctccgtctccacttctctctccttgcttttgacaaatttctttattcccctctggactaaagtagtggctatttttgtgccactctgcgccccaccctcactgttggccgctccttatccggcctggcctggagggtgacaccatgtcaccctcaccaggactcgtctctccattcccgtcagagtttgctttgatttccctttcctttccttctcggggaccagttcttacttccttttatttttagctctgcactccatgtggtttcagggttcagtctgatccatcaaaaggttctttttttataatcccttttgaaaatgataatcaaaggaagagatgtggtgtttggtcatgtggaaaactcaatgtataatttagacgtctgtcaaaaatccgacaaataaaatttagctggaacga

SEQ ID NO: 2422 - DNA, 169 bp, Homo sapiens
aggctgtaactcacagcccctgtccaccctatgtggccccacaacacagatttagagatacaaccccccacccttctccgccattcttccctactcccaacccactctgccttctttttcagcttgtggcaatgccagtgatgtgcataaacagtttttttttttccat

SEQ ID NO: 2423 - DNA, 110 bp, Homo sapiens
gattttaaactgtctacggttcttaacctcatctgttaagttcccatgcctggagaagctaatgccaactcatcatgtgataattcaatttgtacaataaattatgaacc

SEQ ID NO: 2424 - DNA, 1515 bp, Homo sapiens
ggaggaaaaccaaaaccccaagcacccattaaacaagtcctggcaggactcacaggaacaaacgaggtccctgttagggttctactcgggggagggagggggctccatgaaaggtacgtctgaaaagtttctgaagattttattatcatagatacttgttttggttttgtgtatctgtactctctgcagatggtccaaaattgtaatggagtctgtattagaagaaaataagggtaaaatcaggctgaactgcatgtatatggctccactgtggcttgtgacacttttaaaatcatccgtatgtcagtgtatctggatacacgaggaaaaggaaagagtctcagagtggaacaaagagtgggaagaggtgatctgtaatgttacaaattgtgctattactccaaggtccaacttttccagtgcattacatggtattgtatatcagtggagaaatgtattatttccatgatcaaatgtagtctctgttaaggtcaagttttcttttataagcctttaattcatcctcagtgactctggcaaggctgcttctctatcactggctttgcacagaagtatgctctacttgcgttgctttagggcaggattctattttgagggaaaagacagtatccttattaccttttgtttgtttaatagcacaaatgcttatttgttatccaaaaacaacctccttcttatctgtgataaatctatagaaagaatttagctgcaagtggacaaaggaacaagcccccagaaaagaaagggaagaactgccttcttatactacagaacatgcattagtgtgggctatatagctgtggctcatgctacccaattccagatttctttgtcctctaagagttgattgctgtatattaaaattgaacatcagaggatgggaagagggctctgtaagccagaaccttactaaagtagagggcacaatcagtgtgaataaattcacttcagaatctcaagtcaaggccaggcacggcggctcacgcctgtaatcccagcactttgggaggccgagacaggcggatcacctgaggtcgggagttcgagaccagccttaccaacatggagaaaccccatctctactaaaaatacaaaattacctgggcgtggtggtgcatgcctgtaatcccatcatctactcaggaggctgaggcaggagaattgcttgaacccaggaggcggaggttgcagtgagccaggattgtgccattgcactccagcctgggcaacaagaacaaaactccatctcaaaaaataaaaatcccaatcccaagtcgaaatcacctcttgttttaaacaagaatgaatcattactgtgtatgttagggtattaaaactgtttcaccagtacagtgaaagttgtttcaacattttaaacaaacagtggttatagactctttctttaaccattgtatattttcttccattcttgtcattggtcaataggggagggtagattagctgctccagaattcaataaagtgtaatatttct

SEQ ID NO: 2425 - DNA, 1108 bp, Homo sapiens
agattctaggcacattatgaggagggaaacaaaggaggcttctgcaggactgcatctcaccaaagatttccatgaaatgtaattgctaccactttgctgttcaagacataacttacctatttttagcaccaagaattatagcgtttataagtacaacttggaacgatggaatgcatctgttactagagactgtatataaaaagcagccaaagctcaggggaaatttttcaaaaattgaattttaaaatttcttatgattttaaataccttgacattgattttgcttcccatctttgaagtaattggttagttttctttgttcagccatttcaagttggtggttgggatatctgctctctgggatggcatcagttgggcagtcatctttttggaagagaagtgtgcttttgagtggaagattcaaagccagtctttgttaaactgcagggtgtactctcaaagaccaaaactattggccacttttgtatgttgccagcatattttgaacttgtacctttttttatactagcaacactacaaaggagaagttactcatttcaaaatggatgaattgttattatgtgtgaagagactctgagtttatgatctgtgccataaaatttcagtgtaataagacttcttcaatacatcttccaataaggggtgcttctttgtgacagtatttttatttctgacattcattttatttgggtacatagtgtggttgttgataccttgcaatagtattgcttctgaaagtaataaaaaattttaggagaatttgagaagtttacagaattacttattcattgttttcttagtaagtcagtttaatgtttatttttctcattatttcatcactgcaataaagaataagggtgtttgagctcacctccatgcaaagacttcagttttaaaacattatttgcctaaaattagcattgtgatgctttctgaaagaaatattttataaatcctgtttaacagcagaatttctgaatgtgtagagactactacaaaattggaaaaagattggcaattctttgtaaagaatttgtgaattgtgtataaatttattctaacatttaataaaaatgtattttaacct

SEQ ID NO: 2426 - DNA, 362 bp, Homo sapiens
ggaggtgcttcccatgctctttgtaaatggcactacttggtcccaaactgaaccccactgcttgctcacatccatatcagaaggggatttttaaaaaactgttatcttcttggccaggggaaaggaccacaaggcaatctggggtgtggacagacccagtagacaatggaagccccagccagcagggccaggtgacagtgaagctcaccagtgggctcctttatggtactctatgcagttaacatgtatctagctgcatagggacacccagcgcagcagtgcaccactgggaagtggcctccagtgcagcctctggccttattttatatatttaaatttttgataaagtttttcttactaaa

SEQ ID NO: 2427 - DNA, 1875 bp, Homo sapiens
ggtgtggccagctgaagaggcaggaacggggatctgagcccacagcccctccaacccccaaaccaggtggaaaaaggaagggtttcagtgctgggcagtactcccctaggcagatccacactccctagcactcgcctgcccattggaggcaggaaatttggagctggaaggggatctgatgccttcaggtgtgacactgccctggatggccctagggcagtgggcccatgagcagtattagtctaaaggggtcggaactgtcatggcaggtacagggaccaatggctcccctctgcccagcccttcccaggctgatgttcactgtctcctcccaggttcaacagacatccctgccccagggtccaccctcgtctgtggctgttcagtacctctcttcctttatgctccgggctcggggagtgggaatcatcaggcgtctcatgaagtgggagccctctgatttgggcaagcgtgtcgtaggtgagactgggtgtgccggggcaggtccataaggacatgacacacagcctacctggtgtgacacacctggggtgacaggcgatgagacaagatgtcagaagctaggttcacatggaagaggtcagagtgtgtggtcaccatgggggtcatgtgacaattgtccaggtggactgcatgtttatttagcacaaaccaagcacaaaagtcctcctgtagaggggtctttgaaaaaccaccttaatacccccgtcacatccaggtctccaggggaaatcagaccatccccaaggcttgagaagttagacacagaagctgaagtctctccatttttctcaaagaccccacctcttggggatggagttctaagaggctaagaggagctccaaggctctagcccaggtgggatgagggtggaggagagcagtgtaaagagaaagcagctcagattccagagtgagacagaactgggtcaaatggtgtctctaccactcacaaaccctgtccctgggccagctgcatcactgcctgtgccttcgtttcttcatctatacaatgaggatgaggcccccccggcccgccatcatggggttgctgtgtgtaaaagcacatggcacatagtaggcacccagcacagggtggctaatgtatttgttgatttctgaacctaaggacttccttcctcctcccctgggcagggatgagacagcaacacaaacactcgagcttccatcttgttgaggaggaaacagaggtacagataggtttctcagcaccgccctcagctctgagacataagtcccaagcatctaaggattcattttgatcttggcatgattccatccttttttatccatccttccctctattcccacttctggggtccagtttccctcctcttaattatttgggaggagttgctcagatctttgtgggccaaggtgggctgggagggctcttccaggaggtaggagttggtatgggccctgaagtcagggaggattaggatgagcaaaaaacaaggtgtatgttggtgggtggcagcacttccagtgggaagagaaggcccggaggtatcaggaggtacaaatgtgatgaagagcaaagctttgggtcaggcacacctgagttcaaataccagcactgcaggacttgtggccagtcacccagccactctaagcctcagtgtgtctgtctataaaatggatattagaagacctgcttggccaggcggagtggctcatgcctgtaatcccagcacttgggaggccaaggagggaggatcacttgagcctgggagttggagaccagcctgggcaacatagcaagactctgtctctgtaaagtaataataataataagaagaagaagaagaataaagagaagatttataatttt

SEQ ID NO: 2428 - DNA, 7787 bp, Homo sapiens
cagagggcctgggctcttccagcctcagtgtgcctctctggccgcccactggatgagcggtgagacgaacaaaagggaaaggaaaaaatgggggtggggggtggggggtggacaacattcaacactgcagaatgggtgacctcaaagatgccccctgtccaagccatcccacagctggaaggtaggggatgggggtgcccacactgagtgaggaagggaatggaccagggagtcccaggcctgggacccagagccaagaaagctgagatatcctgtgcaccatagggacttcaccaatggattacatgccatctgggacaggccatgtgggagaccccagttgtgcctttgctacagatctggaaaagacaaggtcatgggggcctccagtgtcctgcccctgcttggcccagttttgattgctggcatcttgccaccccaggtatccctggtattgtcctaagctgtatttgtgaattgtgctggtttcctgggcattgccacgcctaccacaggtgggtacattagaagccaccactggctttcaggcttgggggtgtcttctgagctcaagcctgcttctgggccaggccattgtcactgttagttgaagaaaaagcagttcccaggtgccagcaaagaccatctttcataactgtcactgtcttggccttgagaagagagcccgctctccgtggggcaccccatggaggacacagtaccagagtttacagagagggtgggcgaagccaccggtctcttcctaatctgcacagactattttgggtatttctgggcgggcagttcctttgcatgtttcgggagaggtttgttgatttggggcttatatgtcaggcctttggtttgcgtcttattttaggggttgtttgggggcctgggtggtcggcctcacatgggaaggggatgggtagtggatggggtttctgttgtatcttgtgggcgggtgattttgcttttgtttttgtttcacattcttccccctccacaagccaaagtcgtttcatttggtttccactgtgtggactgtgctggagcttggcgcctgccagaaaaatttggggctaggcaagccccaggttgcagacatggtgaagcagagaaactgttcttctggttcctgcacaacctcagaggggcaaaaaccctccccaggaaggaggagggtgttcaggagccagacttttggagagaaggcagctcccagcctgctgggtgaccgccattctgcgtgtgttccccagctgggcagggctggaagccttacgtatgaagcatggagaagcagccattgtccccactatgggcagaggggggacccggctggccccttgggtcagactggagccaacaccgccagccaccccctctggcctgctggcaatgccacaggtgcccaagaagatggaggatccctgtgccaggagccaacctggtcttcccgagggtcagtgccccagtgaagacagaagcgagagaataaagttccctgtaggtcctctgtcacctttgggttgtgtttttcaattgttgacatttcagaggggaccctccagaagcccagccggcttcccccaaggactcccccttcgctgggagtggatttccacacgtgcctttgatttcggacagattgggcctcacagccaccgattcagctgccagggtccctggactgggggttggtgttttctatagaggaggaaaggccctccctcaccctgctccccacccaggcagggcagcatgggacccagtgtctcagtgccttcaaaacccacccccacccctaccctaccccaccacaccccatcccagaggccttgcctgggcaaccctaagcccctgtccctcgccatacactgatgcctggcagctagagcaaatggctcgtgttctttgtcgaaggcctgtggtgagattgttttgtttccttttgttttgtgagtttgtttaaaattgaaattagttattttcttctgctggacagtattaaatagagcaggatgttgagttaatctgctagattgcagtactaatggtagtggtttagtgtcttcatgttaatattatttgtacttatttgaacaataatgataaagaagtggttcattattttttaattaatgcactttaaataaggtagaatggaaaaaacccagagagcaaagtgcattacttaaagatgcagtatatacttttctcatttttaaacagcacatatttattaagagaaaaaaagtaatttatgactatttaaaataaaatttaaaagtagagtgactgtcaggtaaagaaccttcaatgtagctatcttccagggggagggccctgcagcctcgctcctcagatgtctgcactgagccagttcagtcactagtgcgccagccaggccaggagggagtgcagagcatgtctgccaagcacagagcatctcagttggactggaccacagtgctcccgagagcctgcctttcctgcccttccccaccacctgcactgccccccacattctcccagccccccccaaggaccccctctccttgacccccagtgctgtaagtaatagagtcattaaaatgcaggactgaaagagacctcagaggtctctatcccatcccttcctgttactgcggcccaaggacaggaaacaacttttccaaaatcccacagctagttaatgacagatctccccactacattaatcccgtgctcctcctcactgccattatagtttattgtgtggtcatgtttacattgtgacatccagccccaaggatggctgggagttgctcaggcatccaggaaaagtggggaatgctgccatctggtgacagcatgtagatttgggcagtgaacagggattgccatgccccagtcttcgcacctcgccccctcaccccctaactcacagcacaaaccctgcaaacccaaagagaatattaatacttgaagcaagaagggtgcatgccagtccttctccgacatggccagggggtaccaggccttgtgcgcctggcctcctagccctagccagggcgagagggcctttcccttgagctactgagctgctttgtgatgctgaaggatactgccggcagcaggcagaggagggagggggcctagggctctgacccatctggaggaaaaccagatcggactaaaaaaggaaaaagaaaaacaaaatctccgcagtgtccaaacctagtttcccatgagttgcgactgaaaatgtgaaacgacactgtattgctgtatactgcaactttaaccataatgagcccttctgaggtcattattgaggttcatataatgcccgaagatgcagcatttggtgctttgttttcctttccgtttcaagacctttttcttttattgcaaggggaaaaaaatgtcatctccccccacctcatccctctttgtgacagcagacctggctgtgttgcccctctcctcctcactattctcaccaggccatgggactttgggggcagtgagagagagctggaaaggggcaaccctgagcagcaggtgtgccccatgccctgtgggtttcccctatgtccaatgactgtagacgggctgtcttgccaggcctcagccccgtctaccctaagcctggccccaaaggtttctctttcttcctccttgattttccatcttgacgaaggcattatatagaatcattttaatcactttcagatgttagagcagcgtattttacaggcatttatatccattgctttcctcagcaaggcatgttactacttttatcatctaaggaaaaaagacaagggaattccagtcaggcattattttcctattactagtgtttgcagaataggtgtaggactatttaagtttagaccttggtttggtagttcttgtttttaataaggggaaaaagataaaataacccctatttttcctgttattgtatttaactaatatattatttctttaaggttactcacttcccctacccctccaaataccttgcattctcaatcaaaaatggaaacaatctgagagacaggaaaagtgcaatattaccaagatggatgccagggctcattggggacaatggagggaataccagtggcgctcagagagcaagaggcagggagcggggtgctgaaggaatcctagctgtggaacaggtgggtgggttggtggagtttgatcttgtggcgttctcctctcccccttctttgggaagatgataggggtccctgccagatccacccagaagaaagggattcaggcatggggcccttgacctctaggccccagtccctggagcagaggcaggccctcgggagctgttccttgttttgatttctgttgtggtgcagccagctgctcagagagacctggcctaaaaatgactcccagcagccctctctcaccccagtgtcctgatatttgggctgtgatccttctggtgtatgtttgaatctttctaaaactgggtgccctcagttcagtttctaggcaggaagcctagaagtcaccagatctttttgggggatgtgagaaccttgagccgcgcacaccctggtgagacaccaattcccacaagcctgcagcagggcctggggctgagcctgggctgcccattcatctcagcgacttcagcctgagaagtgagccctgcctgggctccacacccagagagtccatacaaattctgctccgggaagagtcggggggtctattcaagtttctctgcagacaaaacttcccacaacaggtaccaatctggcctccttcctcagcaccggtagagaaagcaacagaatgggaagtttcctctgggttggagcctcagagctctgcccctcaaggtgacagggacgtccctgtggcttgttccctccacctccagtactgtatgcttgctacttcaaccccctatttggtgaatttctgcacagacacagatctctgtgcctggaatgggactgtgccctgtgcgggtctctcccttggcgtatatccatctagatatttagtctttgagaatctcaaagcagagctctctgggaagagaactgtccacattgctaaataattaagattccctcacttttttgagggccatgtgttgtgagagagagagagagagagagagtgtgtgtgtgtgtgtgtgtgtgtgtgtgtctgtgtatgcaagtgttggtaacttcccacttgaactaaataacatggggttagagaaaaaaaaataccaggcaagctgtctccattgaacaagtccttggcaatgggcaggtcccaagggactcacagcttctggcagcaagtgtgtcattcacacacatcattctggctggagagtgcaatgtgtcatttttttttctttttgtaattattttattaagtatttagttggaaatttcacactggcattaacaggtctagcataagtggcctaggcagtcatcccaggctccaaaatgaagatgtgcaaaagagatgccactgggaatagaaacactgagttggttcagttaggtcatcccctgcagacgtgtcatcgagcaggctgactcccacccctcagccatgccatgggtatgagaagccccttataatgaaagctgccagccctttcgtccttgtttcagagggtgggtcaggtggttggggtgagaacttgctcacggtgcacccaacaagacctgcaggtgcatataagtttagtcccaactgcagggccagaccaaacacttcctgggaagtgtgtggagggctgtgctagaccttcctgagtttctggctaaatcatcagccctgtttggtgcagtctcatgtctctgtggttcccaagctgcatgatcagagccagtgagaagacaggatcagtgacccacagctttggggaaaaacagccccactgttaacttccctcctgcaaacctgggtccccaggccataaggtgggcacactggtgcttacagactgggtggagagccctaccttccaaggtcttgatcccagcctgcctataaggttgggattagcatgcaatcccccttccccaatcctgtctttttaaaatctcaagtttgcacttaaccttgacaacagcaccctctcctactccagtcctagaactcagtggccttagagaatggggtcccctgcactgaaggtccccgccttgctcccagttccatcctggccaataggctgcgcctcaagaggtgaaagagaaaaaagggagggagggaggaagaattatttagaacaaaaggatggctcgagcacgttagaggcaagtgagaggcacgttggtgagaagagcatgtgcatgtttggggtagctggggcctactgtcccttcattagggaaggaggcttccagaagcggatgtcttctagaaagaaaaattgtgtgaaggctgaaaaggggcttggagttttgtctttgttgattagaaagaaggaagaagtcagctctgagtgtttcaggaagaagagagcaggtagaaagggaatttagtgatttaacacccaagggtccagccatagcaggttggaaaatcctccaaatttggccacagaaactggctaggaaaaaactgccactcattgggccacacgctgggtccccatcagttctcaatgaatggtcattgatttacttagcagagagaagtcaccagccacaaaccaatctttgagtttgcaggccctgattccagaatatatgcatccagctcccgggttctcagctggttttgcccacttccctttgactgtccaatccaaagccagtctctcaagttgtatggctcaaagagcagtgaccacaatgggtcatacagtagggacccacctccacaaattagaaccagagttcagactccattgggcacatctgggaggaaggcaacctcctttgtcgtcttgttggtaccagtcattctcaagtatctctgacacctgtggtggttcagtttgctgagcctgccacctggtatgaattagactgggtgtgatgaacattcatccatggatataccctaccattttgcgttgccttataaccaaggcacactccccataagagtttactgcagagaaagaacagcaaaacagccaccctccttgaatttacaactcattatctgcaacaggttttctttaaatccaagacacaggatgggaaatgggtttccccaccaggtactcagaggtctgcaggaagtgactcccgggcaaggcagacttcagtaatccctgaagcgtgagcatgtggactgcatggctgggtggggactggtggatgtctctggagctccagaaccttggagaattcctcatggaattcccctcccagctcttagtgggctctgtggggtcaggaggagcccttcctccaggttttccttctttcctcctcagcagagaaactggagaaaggacattaaactcagtgcagtcgatttgagtgctgaaatatttccagaatcaatggtggtgctaaactatctccatgtttctagcatttttaatagtggagttggtttgtttttaatctcatcacaaaaatgcagtgcccttggggaagggaccagccccttggcctgccactttccaggtgtcctttatcactttgacgggactctttggtctgcagaaaatgctctgtcttggcatgcttctagactgtaagatttgggttttgttttgtattttatgtttacatgcatcttatatttccctgaaaactaaataaagttttgggcctttttaaccg

SEQ ID NO: 2429 - DNA, 141 bp, Homo sapiens
gcagagacacgcagaccagctgaggaggacaaagataaggtggcattcacccccaggctctgactttcagcatcatgcaggggcttatctgtctggaggcagttacctcataataaactataaaatatagtcatcttggga

SEQ ID NO: 2430 - DNA, 947 bp, Homo sapiens
gctagccatggcaggacagctcctggaccaggtctcataatgcatgtggcacttaggtccaaggtctccagagggtgaaagctggagtctgtcaatgtcctactgagacagcacagccaacctagctagcaacatttgttttagtctgaacaatatatacttatagaattcagtcaaagatacacaatctgaaacagcttcatggggtggactctaacagtagttgcaatgttttagaatgagacttacttctctgctatctagatctgaactccttggcttctttacttagttcaagccccagcctaggaaagccagttacataaaagttggctcaggagtcttagagctttacctaaatatgagcccagaaaacggaggatgggggtggggcgccttcctggaggtgacacttgatgggggtgtgttctggttactgttctaaggctgtgccatcagctccttcctcccctgttcattctgcattctctagtcagttggctaagaagtgactcttgcaactaaaaaaattaagaaattcacttcccctctaggaggtgatgatagggtttctaatggttatatgtatatcacattcccatttgcttagaaagtctgattgtagctatgattgtccgtaggcccatactagagttcatggatatgttatactgaaccaggccagagcaaacagaaaaagaaggttgagggcaatggacaaggaaggaataaagggagaagagggaaaacagaaaacctgatgctggggacacagcatcagctcaagacgtcaccctccattctgcactcagaaaatggcacttgggggactgggcgcagttggtctttaaccacttttcaatgtctaaaaacatttgtttgtggtctataagatgaaacatcatttcaatcgtaaaatttcccattaaagaagtttttttttctaa

SEQ ID NO: 2431 - DNA, 250 bp, Homo sapiens
aaacgctggcaggaaaacacaaggccaaatcaatcatttaaaaaatcatttcatttgggtaaaatgatttccttttctttcttactgggaaattgaagtagcatgtcctctgagttgcatgttttagataaaaaattgtttaattttagccttaattgtatacaaatttttgtcctgcatgaataaatgtgtaaaataccatgaattgctgtttttattcaagaataaacaagacttgaagtcagaaagt

SEQ ID NO: 2432 - DNA, 2265 bp, Homo sapiens
cgtcttttacagaatgtgggatcctcgagctaagatgagggcatccctcacgttcacacccctggtggcatctgccagccctgttctggggacaaggcgggctttcgtgggagccgtgctcagcctgccaggaagccaagccctacagtgcagaggaaacagaatttcaacgggaagctggtttgcttcataccattgggatctgctggtaaagctgttatttgggtttagggactgatcccttgcagtttacttctggatcaccatgaatggccaagatggtggcagaacacgctgtggaccctgagttagagacaatgcaaatgttggattgggtgtaattctttttgaatcccagatccagtctgtacttgaatatgagcagaggatctacaagaatgctgacagggaaccgtgttaagacccagcacccctattcccaggagcttctggcctgaccatctgcagccaaagcactaacagggacagatatgggaatgtccacctttgatccgcatcctgcacaatagtggtcccaccatggctgccacttttttatactatttggagaaaagaccttgtataaattcgaggcccaaatgactaacgtctctgtcacacggaaatgggtacttggtggcatagagaaacacaattagccactttttcagctacacttctcactcagctgcaccctacacttctcactcaggtgcacccccttctgctgtcctttccccaacgtactgggtcccgagcgtggtgggtatttgccacactgggtgccagctcagcagccccccacctctctttattctctccaaagctggtctttctgactatcattgtggtagggggaggacagatgctaaaggtggaagctgacctggagaaagagacacacggggtgactgtggcaaaggacagctggaaaagaaactctatcacttcttcattggcaaccacaaggcacctgaggccatggcactcccagaggctgtgcgcagagccaagcctctcaacctcttctggccctgcgtcctgcagcgaagtctctgctgtaagacagtagactccttcgatgaggtgctcaaaaatgctacccggggtggtggtgtctggcttgcagtctggcccagttcagagaaagttgcagagatcaggggccaaggatgtcatagccccaggttgtcctcagggtcccaatcctagggcagggtgtgcatggaagcaagaactatggaaacctagctccagtctgcaggctctgagcccctagttcctcactccagcggggctccctcactgcacagaacccaccccttctgtgtgggcactgctgaccacacagatgacccagacccaaagagcctggcagaagctctgtggttggagctgggctccgtctccaggtctggttcagggggatcaggaaggctcttttccacctgtggcttcactggccctttgagatttcctatctcaccgttacttcagttacccttgcagggggccagggagtcaagaatataccgtgttcctccagggtttaagccggccatgccttcccgagagcataaccaacttgacaggggtgcccagttaccccacaaactgaaggaaggagatccttcccccatccccaggagtgctctcaaccagcctcagaaagcttgagaagatggaccctttgcccaccagggttaattcctggtggggcagctcggctgtgatcagggcaaccaaacctataggaagccttccagtgtgagctggaattagactgaacatgtgcttgggcctgcctctccctagacgcagttgcggggcactccagggaatgaaccagctcaagtgtgtccctaacagcagcctggagctacccccaatccctcacagcctgaccctcctcattccatcagatgcatttgtagaatcggggcaaatttccttatttatttatggcccatgcctttccccctcttcatcctgatcccgttttgctttgaagagaccccagtaaccaaaaaacagcctccagaagccaaaaccatgcctggatctcccatagcttctcctttgcttccaggagaaagttcactgaaaaaaaaatatcttctggcttcttgtgtgtacagagacaacagaactcggtggggaaacgggaatcttttctgcaccaaagctgcttctaaagcagaaagcagtggggctcttggtgtttcatgctgccttatttatattaaaggaagaattaaatcttgc

SEQ ID NO: 2433 - DNA, 3756 bp, Homo sapiens
ggaaaacccccaaaggctacaggcgacctgctgatcaggaaagaatttcgctcttgtcaagtacatcatccttcatgaccactaactttgtgttttttttctttcctttgttgttctgtttcctattttgccaggaagtatttccatagttgctgagaatcaaagcacaaaagaaatccctacctatgtaaatgtttgaatggaggacgccagtaaaaaaacaaaaacaaaaacaaaacaaaacataaaatataaacaatcaaaatccaaacaaacaaacaaacactcactgcatcgggactttttaattcttcagacacagacaacaagggtttttagctttaagcctgtgcatgtggacaatactctgagaacatgtctggaggggcagtgtacaggtgctctattttaatggaaaacactcccctctccctctttcttcttctctctcttttttctgatcggtcgtgtttgtagaaaattcataacatatataggccaaggaaatctgcatgtatttttggaaatattcttggctctagatttatcagctattttagcattaaaggctgatgggtggattagctaccccagctcctttcataagacacaaagacgtgcacaggagtttgaaaccctgagctgtttctctgttccactttccatactgtcatttcccttctaagttagctttggtagctctgttggtcagcagtggccacaaggctgctttctgcactctctgtggccacaggaacaaagatgcgagttgaagatccctttgtgccggtagaataaggaaggaagggaggcagggaggcaaagcatgtcagaaacggaccttggtttcctgttcacctctttccaccatgattgcctccccttgcagctttccctactcctgccccaactgcagtaggaaatggaatcccattagttacccattgtcctgtcttcacatttgtttgtcatccatgtgtgaccatgatctgttgatatctttgaatctcttccctccaaaccccaagtaagttgtccttcaactgttctcagtttttcttcccaaacatattgctagattctggacattaaccctgacgtttcctaaatactggcctggcctgtgccgcccctgcccccactactcacaagtttctgagccctttgtcagttttgtacattcccaagcatgccagcttctgtgcccatggaccttgctgcatcctgcacagcagggttcagtttcatgtatctttgtcttttcctctagaacctgcctttttcaaatatccctgccttttcccacctggaaacatatactgtatgcgaaagagttgatatatgcaaagtaattcaaacctggccatgtactttggaaaagaaagcatagagatgaattgtggtgttctcacaccttaacgaaaatctcgtgcgatctgattccagaagattcttgtgagaaatgttttgaatgtgtgacaatttcgcagggcaatttcctcctgtgacggttgctgttacctggtatttccactctcacagtagaatagaaatgtttgtgaaataaaactgattttaactggaaggagaaacaggttaatggactttgtgtttaagagtgtcaaacagtctgagagaataaatgggggtcttgtcttacattagggtgagagtttgattatttaggatgatcccagtgatttcatgtgtgctctctgacctctgagtatcatagtatcattaaagtaaagatttaagtctgtataaaggaggagagttactgattggcaaaaaagattggcacaaagcatgaagaaaccccatttttcccagggtaatcatgaaagaaggctcagagaaagagggaaacaaaagcctgttcagcagaggcccctttagtattatggactgggcaaagcccactataaactataggagaaagaagttctgataaacctcttagtatgctcagcctccttctttgctatgtccctaagccaacagggtataacacaggccctggtgataatgagggtgtcctaaagatcctgatgtccatgacttcatgtagttcaggcacagaaagaatagcaaagctgctgtcagaagtttgtcaggcagagatgtttatggttgaggataccccatatgaatctgggaaatgggctaggcctgaggcagtcacctatttgtagaactcaattgatccccaacctgccaggcttcctatctcataggaaacatcctcattgatcctcttcagttggagtctcccaaatttaatgtggaagacaaagtgttggaaaatcaaaagaggctcactcaaaccagcacagggagtcctcagagttgcagttcaattcattttaattagaaaagtatgaaagaggtataacactcttattctagcacagtgccttgcctagagtagtagtatgaaaactatttgttgaagaaataaatgaatggaaagacatagggaagaatgggctgtaaatcctaattaaaaatagaggtcgacatgagatacctggcattttgggaagtgaccaaagatggccagctagagattcagcatctccaggatcctcatgtgcctctcctcaaagctccctcccatctgtaggagattagtgaggcaaggtgctgctcagagaggaggacctcattgttcttaggaccttggccagttgttctcaaagtgtggtacctggatcagcagtatcactatcacttgggctagttagagatccagattctggatccataccccatacctactgaattagaaactctaggggatgaatagtggtgttctctgttgctaagtgacagtgggcccagccacctattttaacaagccctcccagtgattgtgatacatactaaagtttgagaaccattgtactaggccattccagctgaatctcaaacagaaggcagtaatgagagcctacaaatgggagggacctaagtgcctacctactcgctaatcgcaggtgcaaacacacaaggagtttggtgggcttaaggtcagaggagtgtgtagggagggatgtatgtggaaggtaagattcagggcaagctaaaaatccgatactgcaacgttttccaaaatcccagaaggcaaactgtgcatgttctaccctgaaccacccaagcaacactttctaccttgccttatttttaattggattcactgtccaaaatgcagaggtttgctttgcttttttttcagaagttccaaacagcaactttgagagcagtggggtgcttggcagctgttctgtgttttccaggaatccaactgagcattgaaatctctcatttgccgacttatttttataggaagccaattaaaaaaaaaaaaagttttcttatagtattggaactacttctaattttaaaatgacttttttgatgtattttttgttaaatactatgtagtgtaatgtataattgctcttgtttattgcttttacaatcatatttattaaacagataatgtctctaaagtctttgcctcaggtatttttttttttaatcctaaacccttggtgttcattctaaatatagaagtgttgcatgtataggatttcataaaggctaattgcataagaaagagtaaacaccacaggcttgaggtttttggctgttttttactaacaaggcagaatgtatgtactacctgaattctacctgcatttcaattaactatacaatgtctgtttattaaattactttgatttaaaaatt

SEQ ID NO: 2434 - DNA, 418 bp, Homo sapiens
taaatacctccccggttttgtttttgtaaaatgctctggaggaaggaagaaacgtggcagatccctgacatctttcccctttcctttccttcttccctacctcccctttttactttagactttaagaagaacagaaaatcttcttatcctctttgatattttattgcaaacactcagtcttttatgattttttaattgttgagaacaagccaagaataaaattgctgcaccagaaggagggtccctccaaagttgaacacttggtgaaaggaagatgccccgacttctttggccagtgatggggaatcagtgagtgctccatgatggtcatgttccaggtgctagtacatcattcatgatcaccttaatgctcatgagactatatttatgatcagtgaataaaaatgtcagaactgtg

SEQ ID NO: 2435 - DNA, 1109 bp, Homo sapiens
tcagaaaaactgttggatttcatctctgcagggctttacatttacctttttatccttatatttttctaaaggtaaattatttgttagatgagtaagcaagataccattgtcgtcattggttggcttcagtagaatgaaacgtgaagaaattgcatttgataactgctattcatttaacttttctcattatcagtaccacggttccctcaaagtttgttgaataaagcaacttttgtagatgctgtttcatacagcacttagatgaattattgatcttcctaatatcaggcgcctacttaacctatggtgtgtactttttgtaagttgtaacttgaaattttcagatgctttgaacttgacacatactctagcaattcattggaacaccaaggcaaaaacaccaacctgctaaaagagatcttttcatttttcttattttcagctttaaaacttagctgtcgttcagttaagcttaaagataggttaatttgtaaatggcaaagtttgttttgaggtttttcctcaataacttgtttcccaggcctattaggccatctctaaaattgatctagctgttttatttttatgtactcttagttttatgtaagaaaccttaggatgagctcccttttctaaggtgtttttgttttttgtatgtttgcttttttcctgttttttgttttttccatttacggcagtggtaccatgttttggatgtgtgatgtttatatgggagaacaaaaagctgatgtatagccctgtatacagtgtagatactatttttgtaaaaacacaaggctaaattaatgaacaagaatactgaatatttcatcattaaaaatttcttgtatttcttgtgcattaatctgacgataatttccctgtatattatgttcatttagctgtttgtaatttttgttaattagatcaggttgtctgcatttgttggtgtaagtgaacatcatcacagttatcctgagttgagtttaagccaaatacatgcatagaaaagggtcttcctattaatggaagaaggtaatttttaggatgtgtattatttcagttttgtatgtttaacttttattaaataaagtgtttttaaaatctcc

SEQ ID NO: 2436 - DNA, 3686 bp, Homo sapiens
gtaacgtgtggcactgctggcaaatgaaggtcatgagatgagttccttgtaggtaccagcttctggctcaagagttgaaggtgccatcgcagggtcaggcctgccctgtcccgaagtgatctcctggaagacaagtgccttctccctccatggatctgtgatcttcccagctctgcatcaacacagcagcctgcagataacacttggggggacctcagcctctattcgcaactcataatccgtagactacaagatgaaatctcaataaattatttttgagtttattaaagattgacattttaagtacaacttttaaggactaattactgtgatggacacagaaatgtagctgtgttctggaactgaatcttacatggtatacttagtgctgctgggtaatttgttggtatattatctggttagtggttaatgcttcctttaaaaataattgagtcatccattcactctttttcagttttatctgtcaatagtagctacatttttaatgggagcaccttttatcccaaagtgctttataaattgagtggactgatatatatcacacccaggtatcactgtgctgtcctttgctgtcagatttagaaatgtttttaagagctatgtgaaaacagacaatattagtttaggtcgggaactgagatattgtaatcaaatagttaacatcaggaagttaatttggctggcaaaattctagggaaacttggccagaaaactggtgttgaaggcttttgctcatataaacaagtgccattgagtttcaaatgaccagcaaatatatttagaacccttcctgttttatgtctgtacctcgtccacccctcaggtaatacctgcctctcacaggtacagctgtttcttggaaatcctccaaccaaatagcagttttcctaacttgattagcttgagctgacagactgttagaatacagttctctggccacagctgatgagggctttctgtactgcacacagattgtgtactgcaccccagtccaggtgactggtacccactcgagttgtgccgtgcacaacctgtccagtatatgcatgtggtggccctactgactggtaatggttagaggcatttatggatttttagctttgaggaaaaaccatgacttttaacaaatttttatgggttatatgcctaaacccttatgccacatagtggtaaataattatgaaaaatggtctgttcataattggtaggtgccttttgtgagcagggagcataattattggtttattatggtaattatggtgattttttaaatatcatgtaatgttaaaacgttttctaacagtttactgttgcttatctccaagatattatggaattaagaatttttccagatgagtgttacatagattctttgaatttagtataaaagtactgagaattaagtttgtacttccataagcttggattttaaacactgatagtatctcatgagtaatgtgtgttttgggagagggagggatgctgattgatatttcacattgtatgaaataccatgtttgaaactcatagcaataatgctatgctgttgtgatccctctcaagttctgcatttaaaatatattttttctttataggaattgatgtataccatgaagtcattgtcagttgtagtagctctgatgttgaatgagatatcatgttttagcattccattttactgactagggtagaagaacacttttcttggctacatttggaggatacccagggagtcttgggtgttccttatctggggaagcaaacatttcactagtctctttttttcatcctttaaattgtaaattaaggattactcaagctcaccattattcaagattgggactcgcttcccagtcgacactctgccctgcctgtcattgctgcaaagagctgctgctttgccaacctaagcaaagaaaatacggcttctcttgcattattttcccttttggttggtttgttttctagaagtacgttcagatgctttggggaatgcaatgtatgatttgctagctctctcaccacttaactcactgtgaggataaatatgcatgctttttgtaattaactggtgctttgaaaatcttttttaagggagaaaaatctcaaccaaagttatgctcatccagacaagctgacctttgagttaatttcagcacaactcattcttcagtgcctcatgactgaaaacaaaaaacaaaaaaacgaaagcatcttcacaatgaagcttccagatagcaccgttttgctaaaagatacattctcattgttttccaacagtgatggcttccacataaggttaaacaaactaggtgcttgtaaataatttattacagtttactctatcgcatttctgtaacatgaaatgcatgcccttcttcaggggaagactgtggtcaagttaaaaaaaaaaaacaatattaaacaacatgaaactgcagtctgtttttgaaaatgagaatgtcctaagtgattcagaagagaggagggaagttgtgcactctgaaaatgcatgaaaaacaaaggcaaaaactagtgggaaatgtgtagaactgttaactgagatggcttcgagtcttccttctggaatctgttaaatttcacaaagtcatgagggtaaatggagaaaatatttctgggattacaatgaatgtaagcccaaattgtggaattgccagtaacctggatggggaaaagcatttcccatagcactccatgtaatatgagtgctctgtgagatgttcatcagtgttttatagaaatggtgttgctgggaaaccaagtttgcacctggaaacttacaatgcactttagcgcagtaagggcttggcatccggtagtgaaaaactgtctaacccagcattgcccaaactattttgacaccaggacctttttctcctttgggatacttatgaacctctcactaatgtcctgtggagaacattttgggaaacactatgttagatagttctttaaggagacaaaacggtaatgaacagatagcactggggcagaatatgcatgcattttgtaacgtccagtgtggcgttgaatagatgtgtatttcctcccctgcagaaaataagcacagaaaattataatgtaggtgatcggagctctttcctttgatagagagaacagccccaatgatcctggctttttcactgaacgtatcagaatacatggatgaattggggtaaataaggttttaattcagatctagaagaaagtattgtacgtttgaatgcagatttttatccacagatagttgtagtgtttagacatgacaggacctatcgttgaggtttctaagacttactatgggctgtaaacctgttttttaaaactattttagaaacctgagacttgccgtctggcattttagtttaatacaaactaatgattgcatttgaaagagattcttgaccttatttctaaacgtctagagctctgaaatgtcttgatggaaggtattaaactatttgcctgttgtacaaagaaatgttaagactcgtgaaaagaattactataaggtactgtgaaataactgcgattttgtgagcaaaacatacttggaaatgctgattgatttttatgcttgttagtgtattgcaagaaacacagaaaatgtagttttgttttaataaaccaaaaattgaacatac

SEQ ID NO: 2437 - DNA, 502 bp, Homo sapiens
ctgctgttaaaacaaaattatcctttaagtctgcttaattacttgaaaattgtacatattactaaagaattatgcaatgagcctactctggttaagatgttcttttcctcaaaggtgccctagtgccatgatttaaatatttttattaccattttgaaatggagaagccattctgcatatgcctttgaattcctgcccctctttaccacctcttcctccccctcaaaggaaaaacatttcatccaagtaagttaacggcattttctgtaggattttcttatgcactgcacactctggacctcacctgcagatacagttccccccttgccaggagcatctgcatgtggtacttctcttttccctcagttgatatttcttatatgatattctagatactatagaactcaatttgtcagattcagtataacctcagattttgttacctgtcttttaaaaatgcagattttgtcaaatcaaataaagatcaatggatgttgggtat

SEQ ID NO: 2438 - DNA, 150 bp, Homo sapiens
gccatgtccaccctgattcctgagaggccagagaggaagtttgttcaccagagacaggcttcagatggctttgatttcggcaagctggaatggcccaccagcccatcccagatcttcctttattaaaataataactctgaaagcagatgg

SEQ ID NO: 2439 - DNA, 427 bp, Homo sapiens
tgatacctccgaggattcagtagtagttaagttccttggatgtagcttgttagtagttaaatctatagaaatgtgaaatacactttgtgtggaaaaacctcatgaagattgttcagatactttattttctcatttatgtttgaacaacatgttcgtggtgctgaatgcctctcagcatcatcaaggataactgaaactgggtctccctgggacccttaatttcttgtcccctgccctccatgggcagttatattctgcatcaagccttagaagaggaagcaaaggcagattcagggaccaaaaggattaatgataattaataaagtagtttgaagcattatatatataagtaattatgtgtctttaaaattatgagatgaaacttttatatgacgtgtatacttaaataaaattaatataaaatttg

SEQ ID NO: 2440 - DNA, 2928 bp, Homo sapiens
aacaagcctcttgctcagtaaagagacaaaagccacacaggagtaggtgccactgacctctattgttggagactttgttccactttttgtttcagccagtaaaaatattgttttgcttcatctgtacacaaaaaaatacccttttacaatatgaatgcattgctgtatatactgtaagactgaaagctttgatgaaatttgtttttgtatggtgcaatatgacagcctgtcattgaatctaaacaacttaatttgcttgtattcataagaagtgttgaacattacaagggcttttataaaaaaccctttgttcatatttcttccctttaaaatatgtaatgtcaaaaatgactcaccttttaaaaattatgcatgaaaacaggtggtaaacattcagtaatacgctatttctccaacatcaagacaactaaaacaaatgataaaaatgtttatttttacactccagcatatcgggtgagttttagggatgtgtatgaatatttaaatcttttaatttcagttttaatgaaagctgaacttaataggaaagctagctcttggtaactagcaatgatcaggcattgtttgcctctgtcaggttttcttatctgttttaggtacattttttcagattctgattgtttgagttaatggttgaatttttaaagtttttagttacttaaaatatgattttaaattacatattaatttagaaaattcctgtgtttacttatattttaaattgtgaaatggatccaatcattagaacagagagaatagttctttgaaactgaaatactttagttttactgaccttgtgtaaagataatatgaagaaccagcttccaaaagaaaccagcatatggcactataaactatttcatttgagcaccattctttaccatggatatattaattatgtattatagtggagtgatcatacagttcccccaaatgtgatgtttcagtgtatttatttaaaacataaagtagaccaggtgcagtagctcacgcctgtaatcccagcactttgggaagccaaggcaggaggattacctgaggccaggagtttaagaccagccttggcaacatagcgagacccccatctctacaaagaaattttaaaagattatccaggcatggtggtgcatgcctatggttccagctactcgggaggctgaagcggtagaatcacttgagcacaggaggtcaaggctgcaggtgagccatgatcgtgtcactgcactccagcctaggcaacagagcaagaccctgtctcttaaaacaaaaaacctcacacatacctaaaataagtatatatctgtaaccaaaggaacttaattttagagccaaatttttctatcttgttggattttttacagtgtttaagatagacacttaagtgttgccgtagtatcaatatttctgtcattgaattttttctcaccccttattatttctcacttacaatttctgagcatgatttttcataattcattatcttcagatcattactataataagataccgtggctcttatgcagatattgcagcaagccttgtttggtttggatttttgcatccctttttctcccattaagggaattaagttttgggatgatggattaaaagcctgtaaagaattgtttgggctctaaaagttgggctcatggtggcaatatccttttaatgtgttttaacattttttaatcaacatcgtttaaaaataatttactaaggattagattatttaatgaatgtctttttttctatatattgaattagatgttatcccaaaaaaaatatcttttcacttcaaaatgaaaatatatgttcaaagatgttttatttttagaatagttataaaaagtattagtcttaacataatgtgtcttgttctttttaccaataataatttatcaaaataagagggaaagtgcaatcaaatctgaattattttactatttgtttctagacacactacttaacactcctaaagactactttgagtaggcaacataactaaatttttctagtttcttatgatacaggttcataaactacaatatttggatttttttccccaaggcacaaaatgtataatggagaccaaatagtgatctgatccatagtatcctatgcctatacactttaaaatgtatatacattttagacaaaaatgcacactccagtattaatatttgtgctaccatctacttggagaagtttaatgagaaaattttagaagaaaagtattacaaacaatattttgactctattacctgttttgccttatacattttagaaactggaaattttttaaagaaaatgctttagttttcttctgttcttcactgtctacagtgtgcttttgtatatggatcaggactgagcaaagtaattacatgtatcagagatacttatctctatactaattcacagacagctcctgatgtaaggatttagagggccttctgccctctgaatatatggtgaggagaatggggtatctggaaaaggaaaatgatctggataaatctgagacctggggggaagtttgttttatatgttcattattggttgttacatatcaaggctgttttggttatgtatcaatattgtggtttatttgagctggaagtgattttttctgtgtatgtatatgtatacacttcaataggttttaattttgaagtgaatatttgccatgactccattttccccataccacttcagactttagcctgtttagttttaaggactgaaaatggtaggtttgggcagaagaatgaatttgaactttgatggggtttttttgtttttactttctatcttcataaccatttaaagcgatttagcttgaaattaaattttatcaggctaccaacatgttatttatttatttaataaacacatttattgaaaacc

SEQ ID NO: 2441 - DNA, 1216 bp, Homo sapiens
aaaacaagcttcatctaaagactctcatgtcaatgtggaccttggtgacaatcctgctttgttaaagcaaaaactatgcgaaagggtgagtctgtttagaagaaaaagcaaagactgaggtactgtgaatggagagcttcagctaagaggaggctctgtcccttttcagagccaaaggaaataatacaacaaaaaggaggcttctttggagacctaagtctattggatgtaaacaagacgttgtatttagggatgttctgtgtttctttcttttttgaagttgtcatcaattgctttactaagatttttaaatagtgaaaacctcctgtttagactttggtggaagatgaatcaaggaagcagggccctgtcttatgggtcacgtgtctttggtgagtgagaagacctaaactcctggccatcatctcttatccaatacttagcagttggggattaaaccatccttgccttcagttctctccaatattaccaggcccaactcagtcttcagtgattttaaacagcattgacatcatctgtaaaaccatcatctgtaaaaccatctatgacatgagttttgagaaacaataatggggaaaatatttgggaccaagctgaagcactaatcccactaagttaaagacttctttccagtccaaggcaggcctgaatcaactgtctttaaataaaattttaagtgatgctgtattatatataggaaaaaatgcttaaaatcctgtcatttagaacagtgaaaagtatcttttgagattaaagtgactctttactgtaggaaaaatattactctgtgtttacagattcattgctgtggtcaggccatttttaagggaagagttatttaatataaatagtctctgattttaagttctgtttaatgttcattctccttccaagaacaaagtggtgatttttggttagggtgatcgccctcttaaaattggcagtgctgttccttgtgctgcccctgtcttttcctctgatggcatttttttttttttttttttaacacaggttgaaacatttcatctattatctctgcctcatttctggagggttgtgtatcagttctctaacacttgttcctgagaactaaatgtcttttttattcttatttcctctctcataaacatttggtgaccttttaccaagtggtgagttagttaggttttttaaaataaaatgttcattgtatttg

SEQ ID NO: 2442 - DNA, 5149 bp, Homo sapiens
gtcccactcgtgaatggcaattagagaaaggactgacagtggcggtgccccataggatgtcatattgaggcccaaacttgattggagaatttgcaaactaccgtcgctcagcaacaccaaaaagagaaagtctggttaaaacaccatgagtcaaatgtcgggccagccaacagtaacacttgccaagaagcatggcgtagaaatttctatgttccgaaacacagagtagtgtccacatgtgagcttttcacattaccttatgtatacaacaggagctgcgttgttttcttctttttcttttcctttatctgttgtccaacaacagtgctgactgtccggataagagctggcaagtgcccttaggatgccgcatgggaaaaatcggttatcataatttcaaagtataaatatatttattaagtagcgctgcggctaagaaggaagagtgaggggtctgtccatggggtggcagtgatttcacacccgcctttcttgaatggcttcgtgttactcagccgtgccctggcaggaatggaactccatcagggaacagggcagctctgtttgaatggggtgaaaaacagcaaaattaattcttagcaagctccttgttctctactgttcaccgggacctggctggcaaatgacttagctattagtatatttaaaaactgttcaaaagcaaaagagaaggaacaggaatgaaaggaaaccttcccttaactctttctgcttcccatagcaggtctggttcctgctccccgcctaggacaggagctgtctggagctccacctttgcaaagaaaggaaaaacacaaattgcccccagattggcccagtggcatgccattaggtgattttgcataggggccatatcattcatggccaaaaaaaaccaaaaagcaaaaaacaaaaacaagtcccatgtcctactgactctagttcttccagtcgttatcctctgctgtctctctggcatcctatgaatcagatcaagcccatgctgttgttggtttttaaggtttctttcaataataggctaaggaaagacatgtttttctcttttaaatctctgcaactccaaagtagactccttcgaacgtatttaatttggccttttcagctttcttcttgcccagctctgtcgaattcatgggtgtgtgtgcacatgttggtttcactcacccagagtaattttgtgagcatgcatgtgctttttaatttctgcttgaatgtttgtcctgctgtgttgcagcttctaaagacattgtcaccgagtgtgtgtgactcaaagatcaagagtgaggctaaactgcgaccccaacatcacttccttcatggaaaggtgttggcgctgatgtagctcatggaaggatcagactgggaaccacagaggaaggatgaggtgggatgtggaggtcagagcatctcacgagagtccctcaggctctgcaacactagattcgaatatgagcctagggtttccccaacacgtgcgtgcatatgaaaccacatcatgattcccgacgtgagttagatgagggagagtttgtgtaactccacacccaggagggtaagccactttattatcatgctttggggctgtgcttaagaatttaagctctgttttaaagccgaagaagaaaacatttgaatttaccttcatatgccactaagaacaaaagctctgaagttcttcctgctggcaccaaatattaggattacaagctgtctctctgacaccagtggtaaaaaagcaagtagaatagtttctgagtctgtgttgcagcctctgacacgtggctcaccgctgtcatttgggggatggaatgaacagtcactgttctatagcatcctcctgtgctcttacctaaggaatctaaattgtcctagccttccattgctatgcactgaatgaggactactctcgtgtgtgtgtgtgtgtgtgtgtgtgtgtgtgtgtgtgtgtgtgtgtgtgttggatctactaacatgtttagcaaatggctctgacagggtggccatgagcagatgagaccagctcttgcttggttggaagccacactgcagtttgcagtttagcctttggtgtctcagtggcttcttgcttattccatgctttttctatcccatcctctctctgtgccctcctgcaatggcagccttggcacaatgcctgggtgtcctcatccttgctttactctggaaagtgtggggatggagaggatggtgcatttccagtgcttccttacctgtcaataacaatggtggccacctgggtcccagcacttggctggtggagagatttttttcattatggagctaataaagggtccctacgttttacattgattaatgaattatcacccagacatgtgcagatgaaatgtcaatataagaaaaatcaaggtatttgggaaacatgggcataatcaggtagttttgctaaaattcctcttccttggtctacataaagaagacatgggtctgtcatagaatggggacattagactgaaaactgggacaacccccttccttattttatagagactaggagttaaggggcctgcctaagattgcagtgataaagaactgaaccctaaatcagctcccactaatgaaaccctgctttccttgtatcttttaaactcagttctgcatccaacttgagaagaaaaaaagcttctttccatatcaagtaccatatgagttcatttaaactgcaccttgcagaaatgcattgccagaaagcaccagtagcctcctatctgcaagcagagtagtgctctgctctggggaggggtcattggaaaccataatgcagagtgggccccctactccatttcccagcaaaaggctccagctggagggatgggttgtggggcaacctggttcctgctaactgccagattgaatgtgtgggctagaatgcctgcacatttagttaaactgggctcagcatgcttgtcctcaaaatgtccatcctggtcacagcacacaagatggctattggtctgcttttaccctaccctgtactatacatgaaaattccagttattaacacactcaaactggtggagcttgttcaccctaggaaggggattgtatatatggcaggcttccctggtgccgatgtaaagggctacatttgggaacatttgacttccttgggactcttaagtgcataatgatggcatgaagtaaaaggggcctcaatgatgataggaaaatcagttcttttaaaatttcttcaagaaaatccaggctatcacatagtctttctgtgtgacttattaggagataggaagagcattgggaaacttgcacagctagctatgcatctacattttggtttggggttagttatgaaatgttcttaatatgacgtgttcaataacttcacataaacttcctgttctccaaaacctcaaagagatagagttaatgagttgttgtttttttttaaatgggggtagttttctatctgtcatgggctctagcatctactccgctacccaattctgtcatctccaagctgagtttcctcttctgaggcagaggctggagcagttctttttcagttctcatcctctccatcccaatccagtatatcaatcaactctaactcggagacgtctagctggcaatgtttctaaaactttcactggatttctttagacattgaagcaaacatttttttctaagaattgcttctcagatgatgatatcaaatgtatatgcttttgcaagtttgaaaagttcaaattaaccacttttgactaggtaagtctttctaaaaaccatttaaagctaactgggtcttagcatcctcctgtgtatggaagagacaggtgaccgctccaggttgggtgctcacagaacccttttcctgactctcatggaagatggtggaaggaaaatagactgtctcatcaaccctcctgtgtcctctgaagcaatctcagtttttattaaccacctcttctgtgtttctggtagctatttaacctgtatttaatctgtacttcctatgccagcctcaattttatttgatttttacaattattctcttctaaccaatgaagtgtttgtcagtatgccccaaagcttgctcttttgtgctcccttttgaataactttctatccagaaaaagagattatttgggacttgagatttgcagtgataccaacttatagcaatgatgtactttaagggaactacccaactatgttgtgatagaagaaagagaaaccttcactttggcatttttttttaatcactgtttatttttctgtttgcggcccaggaagcagtgggaggtggtggcagatatgctttgcatatggattgttatgtttttatttgggcaagtttaatcatggaaaactcaaaaagaaggggggaaatggtcagtttaagccaaaagaaactttctaaacaatgtataggtacacagcaaaattaaacaaatccaacaatttctgaagcttagtgtaattgagtggtggttgttattcaataaaattattcccaaaagtgtttctcctaagagtgcagttcccatgagtcacttcctgaacccattgaccaaaggtggacagagacaatcctgtagaccttgacattcagaaagatgtgagctgcttactgatcatatatgcatacgtttctttacagcagaggaaaccattgtccacaaaactgatgttcttttggggttttatgtacagacttgtccaatcatgtgtgtggttcctgcgagttgctgatgactccgcattgaagctctctgagttctttgattttaagttgggtttatggaattttttcaaatgttggaaggtgtgtggttcttcctgccctccctccccttttggaaatatgaaagcaaatgtttagaagaattccttttgaaaagctgtgtcgtgttccctgtgaaactgagcaggtgtgtgttggcgcgctaagtgccacatgcttgtgtgtagaggaggaggtggccctgccggctccgcgctgctgtgcctgtgatccctacctgctccccgctcctgttgccagcagcactcactgcactcctttgtcatatactctgcatcactgtcatactcacaacttcgtgaataaagttgtgtgctttattcgtag

SEQ ID NO: 2443 - DNA, 956 bp, Homo sapiens
ctgcattaaaaaaatacaatatggacatgtaaaaagacaaaaaccaagttatctgtttcctgttctcttgtatagctgaaattccagtttaggagctcagttgagaaacagttccattcaactggaacattttttttttttccttttaagaaagcttcttgtgatcctttggggcttctgtgaaaaacctgatgcagtgctccatccaaactcagaaggctttgggatatgctgtattttaaagggacagtttgtaacttgggctgtaaagcaaactggggctgtgttttcgatgatgatgatgatcatgatgatgatcatcatgatcatgatgatgatcatcatgatcatgatgatgattttaacagttttacttctggcctttcctagctagagaaggagttaatatttctaaggtaactcccatatctcctttaatgacattgatttctaatgatataaatttcagcctacattgatgccaagcttttttgccacaaagaagattcttaccaagagtgggctttgtggaaacagctggtactgatgttcacctttatatatgtactagcattttccacgctgatgtttatgtactgtaaacagttctgcactcttgtacaaaagaaaaaacacctgtcacatccaaatatagtatctgtcttttcgtcaaaatagagagtggggaatgagtgtgccgattcaatacctcaatccctgaacgacactctcctaatcctaagccttacctgagtgagaagccctttacctaacaaaagtccaatatagctgaaatgtcgctctaatactctttacacatatgaggttatatgtagaaaaaaattttactactaaatgatttcaactattggctttctatattttgaaagtaatgatattgtctcatttttttactgatggtttaatacaaaatacacagagcttctttcccctca

SEQ ID NO: 2444 - DNA, 473 bp, Homo sapiens
ggagaaatgtctctttccttcctactaccgttttaaaaaggggatgaaatgtttgcagtggcctttctgcttagctgggccagctccctgcaactcacacggacggttcctctcctagatggaagctgccctgcccttggaaggcccctgagagaggaccccaaaactccgctgacatgtggctgtgctcagaggccaagtataccatgcagtgggaagatgtatctagagccactgtcctccgcaaagtatgcagaaggctagaagcgcagagtctcccaaggaggtgaactttaagtggggcttccaaaacctgccattctcatgttggaatcacgcccagtgagcaataaagaaatttagtaacaagaattttttaactgccgcctgcatcctgagtggttgacggttgcatgtcattaatgataaagaccgttttttgtcatgtgggaataaagaggctgcttctccgc

SEQ ID NO: 2445 - DNA, 1758 bp, Homo sapiens
cattggatgcaggaaaaaatacattgacggtgaaaaacaagccgaaccagttgtagttttagatcctgtttctacacatgaaccccaaaccaaagaccaggttgctgaaaaagatccaactcaacacaaggaggatgaaggcgaaattcaaccagaaaacaaagaagacagcattgaaaacgtgagagagacagacagctccaactgctgatccataaaccagaagcctgacatgtttggaagtccttttcaataagcacatgattagtgttgttatattggcaagggctgtagacattctgctctggtcactgtattcagaatacaggttcttttctggtgtcacttttgtaagtagcaactataaacataagtaagctgtttagcaaaacacacattcctagtaggttttggttttttgatctttataaagatgaggtttttttcctagttactgtattaagtatgacttcttttagaaggttacaaaaaaattcagatgttgatacctttttaggaaatgtgcataccactcatcaaatggaatgctgaaagtttgaggtgcttgtatataatcggataaacaaaactgatcaacccaatgtgattttaaaagcccccaaagaagcttctgttttgggtctgatcctcttgatggagaaactgcagcagcatggaaattgttgggtactgtggcatacaagttattttctacagtagactgagataaactgaaaactcaggagctggcatcaaactcgtagtcccatagtcagtgttaattacacacattgttaactattggatgaaaaatacatgctattgattgtgtccaaagcctcccgaggacctccgtggggatgctctggtagcctgaatacagaactgaggtgaaagtccaaaccttgaattttacagtagtaagttggtaaaccatgtgctctgtgctatgagttaattatgttttcccaaatactaatgtggcacaagtaccatattttatcagagttcttatgtacagtatggtgaagataagtgacaagcacacatttttcttgcttcactgctgttctatattacacaggtttgttgttgttttttttaaaaaagaaattaagcagtagttagtctctaaaaatacaatgtttcaggctaccacagtgaataaatagaaatgtaatcagggattaaaaaaaaaacttatgcagcttttcaaagttgattgtttcaaaattggtgtttatttaaaataagtggtaatgtacttgaatgcactttttatgacaatgattcagtaatggtaattttactattaaagaaagtgaaaggtttagttttgttagcatggctcagcatgtagctgtcaggtgtttttcacctaagggcaaaagaaaatgatagtaataattgcagtagttgtattgtattgtatttttgcacgtgtggtaagcataggcttgaagaggtgggtaggcaggtacatgtacttcctaaatttggagataattatctttctgtaagttcgttatgcttgactgtttccatgttctcccaataatgattttatagttacttatcactttactcatggagaattaaaacgtaatgtttttcaactgtatctttctttaactggataatactgctatatgatatgcttactacagactgcattaattcacgaaacgaattctgttatgctgtaatttgaactctcctcaccacaacttattaaaaaggcaccaatagtttcccatt

SEQ ID NO: 2446 - DNA, 3688 bp, Homo sapiens
tgcggggccctgcgactggtaccgtgagcgcctgggatgaggtttgggcggatttcgggtttccggagaggcagagacgcctggctacgacgatttgttccacttccttgagtgtttcgctctcgatttctctatctgtccctctgaggtcggcccctcagaccctcctccttaatttcccactgcgtaattcttagtttatttaggaactcatctctgggcactataaagtctctgcctcctaatgctaggtttctagagtcttccagctgcatcttcatgccggcagcattttggattttgtgcaatcatgggcccagaataggcaaggttttattttcttctgacttagaatataagtctcgccatcgtcaaagagaaactttgaaggagcaggagactgaaatcgatattaattcctgcaaagagacctcctcaccctggtgcttatgcggtggtgacgggtgtagacgttgcaaacaaatcttgggaagcgaggagggccggggaggacacttccggacacgctcttctaaagcgtgtgcagcacggggcgaagtccgcgctgcgggggcagcggccccggctccttcttgtagcgcctgcacacctgggtgttgcagggacccgcagctcccgtgcggcaccggccctagccaggccttactgcccctactcgtgtactgtgcctgaagctgaagttggaggcatccaaaataaggcggggcacagtgtgggcggcggagtccctgagccttgagctccgctttttgctgagatcacagcagccgcccacagacagttcacttttatttctcaaagttgctgcagatccctcagcttggcttctcttggctcttcccctccctgtccgcctctccttactttctcttgcttgaaactgcttttccttttctactcttttcttccgcgctcctgtcccgtaaacgcctgcgcttcctttaaggagttctctctctgtggtgtgggctcccctctcgttccccctgtctccctcctccattacttcttccttccaggtctctctctctcttttggttttctggtttttttctcctgctcaaggggtcccaaaggccaaggcagtgggtggctctcgctgcagcttcaaggctggtggctgggaccctccaggggtgagaaggaagggagaaggtggcataactttttggaacaaaagaaaacacaaaatcctagcttgggattcccaacaaattcagcctcctctcccaggggcctcagcctgggaagtcaccaagcagatccctccttccagcttcctgctctttctcctttttgctttcttacccctgaaagagggaaggacaagtcacctcataacttctgctctcacctcccttccctccctggctttgggaagagctgctgagctctttgcctgccactcagggagtgcaattgttcttaaagagcctcttctgcatagaaaaagaattgcaattttaatttaaaaacatttatagaaaattcatttaattttagtgactatcttcttttccctccttccccaagggcctccagtaagctgccttggtccctggaggcttctggcttccaactggagactcacaggccttggaggaggaggcaggtaccctctatgccaatagctgggcctgcctggggaaaggtggaaggagaaacagctgcaggaggggggagctgaaaggaatctgatgctcaggcctgcacaaagcaaccgccaaattgtttcagagcagaaaagaaaaagggagaaaacctcttagcaaagccctgtgagtttgggggtcaggttcaagaaagatgtgggaagtcacttggagagctaaacgggacacatgctcctatccacacttgcagttggtctaaccttcagccagaatgtattcataagtagcatttggcaaccctttatagtttacaaatagcattttacatacaccattctactattcctcatggtggctttgggaggtccagctccgttttaaagactcacacaggactgaagcaaataacttgctcaaagccacatagctgctcagaacccaagattgtaagctccccctagggccagaggcctctttctttcagtttttttctttcgtccccctttgacccctctttccttcttccctttctcccctccttcctcctttccttctttttgtgcccacagtgtctggatcatggtacctgaattctttagcctatttgcacccacatctgctaatgtccatatctagccatctattacaccagctgctgaggatttacttggtgccctcatcaagaagtttgaatttctccctccttcctttttttttcctgccactgtcccaactctttccctctacgtctctctagaatgacatctttaaaccccttacactctttggtcttacacatccttaaaaatgattatttataaattgaattataatatccatgaggtaaacactcatagggtaaagtacacaaagcttaactatacaagttgatgatttacacacacacacacacacacacacacacaccccttcttgaatggctccaaggatacccttttaacttcttcccttcagccacataagccatatgatgacacacagtgtctttctcctgtttgaaaagaaattgtgtcatattggtgtgctgttcttgcatagaaagccttttttaagaagtctttttaagatttcttgaaggattttagaaatcatatatctcttctaaccccctgaaatcctgagtttaagtggcttgattaaatggctgatcaaaacttaaaaacacactaggtcaatgtttttcaagatacaactgaggaccagctgcttcagaatcatctggggactggctaaaattccaggttcctaagccctagtcccatctgatgaatcagaaactaggttggggcttaggaacgtgcattttaaacacttttccaaagtgattcttatccagactaatatttgagaagtactgtattaaatggcaaactcccaaaacactgcagcctcctgcatctggcccagggcctggcatttggtaggaatacaatgaatgtttgttaaacaaattaatccacagtttctgacacagtttagaatttcttggaccacattatgctattgtaatttaacaccatttctacgtcgggaaatctttacatttcagtctttttcattttcatggaggtttcattttaatggagcaggagagaaaagagagatctactttggtggtttctcaggtctcagggaaggtcttttataaactcaatggggaccaccttcctggagaggctgctcccttacagacctggtagtttggggaaaggaggaggagagcccttcaggtttgctgaaaagcattcagatgcacacccttcttggttggaactgaaagcttctgtttgaagagacatgagttctggaaggagcaaggccaccaggtccagagaacctggcatgcaatggacatggaagctgaaaattacttgggtattctctgatttctagctaatatgaaaataattttctttctagaaacacatttgcctatcttcttaccctgaaacagaaaataaatattgtgctttatgtggtagtgttgtacccattcttaaaaataaatcacatcatatatatgtgtaaaatat

SEQ ID NO: 2447 - DNA, 173 bp, Homo sapiens
cagacaggtctatttaagctttcaaatgaacagggtaaagttgcatctaaagtaccacagatacaaccatgtttaaatcctcgtatgcactctggcctgcttctccagttacttgcttgtgtaagaacaaaaatgagaaaggttgttttccagtaaaaacatgaccagcttac

SEQ ID NO: 2448 - DNA, 4080 bp, Homo sapiens
taaagccaattgtattgtattgataattggacaaagagagagaaagaaagaaggaaggaaggaaaaacttgttactgaaagagactacactatcaggtttcattacatattctcctttattgtgaagagtagttttacctgtaaatattagcagggactatcaagagtgacctttgaagcaagctaaatcatttaaatgtttaaattgaaaatgggccagattctcaatgaataagtggttccttaggactcactcaggtgctggtactgacccactaatctgccataggcccagaaatatcttcagaagtacgtgagttgttcctcaggaatagatttttcataaagcagaattgatcctgtggctggtttctcagaaatcagtttgtagaaatatttagcttcaggaatactgctcgttataaacactactaaaaaaacagtttatattttatatacacatatgtacatgaatatatatatattcatgtatcttgtatataaaatataggcatatacctcatatatacatgtgtttttagaacatttagaaacaattgattgcctctaaagttaggctaccaatttcttgatttgaaaatgtgtgtgctctattgatgcaagacaagtcatccttcctactgtcatggtttgttatagagaagctgcttcaaatcactcttgactacatggaccttggtttcaaagtgagctgctatatattattctagcatcaaagtttttctctttccccaaaagtgatgatctcaagtccttttttaaagaatgacaaattttaggagacttcattaacttcataacagcatgaatttatttgaattaattaacatttgagtttgtttaaggtataagcagaagataagctaatatagcttgttttgttgaaattctgcatgcctttaaatcactagcaaagcaaatattataaagttatatctgaaaataattgtgggaagtatgtgattgcctggtgtgtctgataacccaaagcagcgggcagattccaggaatgaagaattaggcttggtttcaggttacataaataatagagcagatggttgcctttgggtcttgaaccaaaataagacttactaaaggaagagtgagtttttagaagagaactttacgagcgtgacattatgcattactccacatccaccctttaagaattgatttattacaaaattatgttctattttaaagtccactcccccaaaatactgatttcttccatggattatttttatatgatttgtacaaattttttctgaaatttaaattgacaagcaatgttataaaaatattgctaatcttctgcttatttttcagcctttaaagtctgaaatactataaaacactgagagtatctatgtctttctgaatttaaaatgaaaattcatgtccatatggagacttacatattccccaatctttccatgaattgcatttttttctaatacttatctctgttaagactccattgaaagttaaacaaaaagccgatataatagtttgggttttttttttttgcttattttagtattttgaatcagagaatacttggccaagctcgtatttgtaaactaaaaccccttgttatttgtatcttctgcatttcagttttactgtaagaacatacattttgaaattatgaacatttttttcataaaaattaaatgctttaagaaatggagaaggaaaaatagcttttatcaatttttttctcctcaagattctgtaataaacctcaaagtctggtgtagaatggtattttcccgtttgaggtcttggtagttttttttttttttttaaacatggtgccacttttaattaactaaatgttacaaaattctcagcatttgtttttgtctggtagtattattgagtcttttcatacacttcttaaaatgtgaaaatctatgttttcagtattatgacagtatctgcagatactataataatatgctttggccaaatttgctgtttatagagtgaaccaagatgtcagttttgtattggggatatgttttacataaatagaactcatttaaaagtatggttcaagtactgctcttctttttatggggaaattgatttttaaggagcgattcttttcctatataaaagctattgaggcttagctttattcatacatgagtgatttggttataactcaatcaaaatttttatctttaaatctgagacaagtattatatttaaaactagatctattaatacattcatcactgcctgaaaatttgctgttctaatgtttgtgaattttcactcattacctagagtaaacttattgcatattttcataatcagtcaaaataataaaactaaaaacaaaaagtaaaaattagttcccaagtaaatatatcagtgtttcctgtgtttgggcagaagtgcaaagtagttttaatttctcacgttgtagaaaaagaggccaaaaaggtcaccttagtttatttttccaaaacataactttaggtattctaatgtattttgttagttgcttagaaatggaaataaaatatatgtgcttattaaataatgcacagtacactagattatagagtttatttttgcttttatgctttaaagaatgcatgcccaaaacactactaccaacaagaggattttttaaaatcacagaattgatatttatctcaagactatcttaagctaatgtacttctgttacataattaaactatttctgctattatttttaaagcagtattattttataaccaattctaaaattcagctttaaaaatattgaacataccttcctaccacttacgcttcaagtttcatttattgaataccagggtcatatcttagaattgtatataaaacaacatgtaacccattcatgaaaaacgtttttaagtattgctttttgctgctatgttctgcattgagcctagttttgccattgtcccctgaatgtagtattatctatagattatacataactacatctattgcttttggtggtaaatcaagatttagttgtaattttccagctgtgaaaatgttgccttgtatttaaaagggtttcatgaatggaaacctaagtaaaactaagctcattagtgacagacttgttttcttcttgttattcctccagcaactccctcaccaccacgcctccctgcctaccatccccggaagggtgcttattctttaacaaagagaatctaaaaaaaaaaacaaaaaactgttgtctaatatatctacagtaaatgttacactagagcttttattttcctctgtagcttttcagaagaagcaatttaccttggatttgtaaatcaagctgaaacttttttgatgttcatgtactcatatgtcttgtaggtggtaggtgtcacttgtgtgtatgtgtaagtgaagtatgatgcatgctcattcacttggtccctttgaaataagggaaaggatcacagtgctgctgggccatgatggtatgtagaagggtctgtcagcacacatggaaagcccccatttgcacagatgtagaactttaataatccagatgcaatcattggaagtatttaatatgcaattggtagcaccttagctaattaatctgcatatgaagcattttctgatatatttaataagaggtatagaagctcttcaagcattaaaatagagttgatgtttcattccatttgttttatccatcaaaaaatgcactctcacagtggagttgaagtctaatacatgatacatgtgggcctgttagtcttcgaagcttccagatggtttgtgttttgaggtacaaaaaaatgctgcagatctagaaatgcatatatttagcgggtatttgaaagatagaagcattatttataactgaagagtataacacttatcttcttaagtaaatgctctcataacttgtatacatttttgcaggtacaaattcaaaagtatgtaagcattgtataatgtgacaattgtataatttatgtaatctgatgcatgaatcagaatttttatataatatatgattattgacttatagttgattaaagtgtttaaactt

SEQ ID NO: 2449 - DNA, 1797 bp, Homo sapiens
cttgccagagtgcttcaagacatttgtagactcaaatgctcaatttactgagaatgttttcctgcctatgttaatatgtcagaaaattgatagcactaaaacaaaaataagcataaaatttgggattttgattatcagctcttttcagtctttctttaaggactttgtcctattgaagtgaataaaatgaagcattctgttatttgtataagaaatgtaagaaaaaaaatatagaaagaagaggataggattttgtttatttgtatggatggacccttggtataaaatcacttttggcgctttccattcatttggtttagcacagccagtgagcttctcgtactttctttctttttttttttttttttgagacagagcctcgcttgctctgtcacccaggctagagtgcagtagcacgatcttggctcactgcaaccactgcttcctgggttcaagtgattctcatgcctcagcctcctgagtagctgggattatggacaaatgccaccacacccggctaattttttttttttttttgtatttttagtagagacagagttttgctgtgttggtcaggctggtcttgaactcctggcctcatatgattcacctgcctctgcctcccaaagttctgggagtacagacatgagctaccatgctgcccttgtattttcttatctgtacccagtgtaactacacgtttactggaactgtgtttttaagactgacagttgtttataatggattagtcgtaagtaccaaaaagtctcagttgatattatctttacaaatgacttgaccttaatgttataaaagtagttactgtttttttttaattggaggcagacttgatatttcagagttgcatagtaaaagcaatttgttaatttttgtgtactttcagataaactattacaataaagaaaggagcagaatgtagtatttggaagatgatttaaattcagcaacgcctaaaaatgtcttcctaagtatttttctcagccatgtcattctttaaattatgagatggttcttagaagagaaaatggtgtaattgtattaaacagacaattataactcaagataatataactttgaaccttctaagaactgatttgtttggttttcctcccattccccattcctccttaaaagattgaatgaattaatgagcagaaagagaggattggtaacatgggaaatcgttttcattagatgtacatttcctggttctgacaggaaaggggctccagaaaatcataaaacaagcaggtgaacaagaccaggtgtgtcggcacctccctgctcagtgcccagcggaggtaaagaaccactcagcatggtttttgtcagttcacctcttctgtcgttgtcagaggtttcctacctgtctgatataaactttctctgggttgataatataaattcagaaacatgtaaaatgaatcatgattatattactgttatttttagacttaaaatagtaacaaaattttatttatggtggcacatttaatggctttttttttctgtgttctggaataagagaatacctagctactatttaagcatccaaaaatcatatcttgctttcatttagttgagaaaagccagcatagagaaagcaaagttttagaatattatgtgtcatactaattcagtatccagaccaaatgttggaaagtcttattttatgatttaatatcccttgttccattttacagatatgatcatgtaaaacttacctacaatattcatttcaaactgctaaattaggtaaatacagacttttagtat

SEQ ID NO: 2450 - DNA, 728 bp, Homo sapiens
tgccacttagccaggccttggtcaaggagctccacttcaactggcctcctagggcaccactcgaggtcaatctggtgcttattctcagcaccagagctagctaagccaacatagggcaacatttccagcccagccctcttgtccggctgtctgtcttgtccttgtgtgtttgtaaaatgttaagcgggctttggtgagagtcttgctctttgcttgggggaggccaaagagagggaagaggatttcttatttcttctttatgcccttgaaggacaaacaaaactttttctccacgttcagaaaagtatttcagaaccacgattgccttcctggcgtcccctcctcctgctcgttggtgaaatgaacaatatgaatgggatttaaaaggaatgcattgggcttggtaaagattttcagtttgcctttagaaaaaggacccagctgagagtaccatgatattgcttagtccatttgaacccttgcattcctagaatttcaggtaaatatgtattaaaactctacatctaggatttcagcatttcctgagtaagacctttatatgccaaaagggtttcgttttaaaaccacttgagtttatagtacaaaaacacctacaagctccctttagaaaggtcttgctattgtttctcccctttcctccccaactactatttaaaaatgatgagacgaattagtcaatgaagagatagataaataaagaggaaaag

SEQ ID NO: 2451 - DNA, 5146 bp, Homo sapiens
tgaatgtattgaatatgctttccttcctgaaaagaggacacactggagctgcagagactgtattcagagcacagtgggggctgcacacactcaggagctctgtcacaaagctgttcatggaagaggatgttggacttcttacttggtttgtaattttaaaacaaaaactaaaaaaaaaaaaaacgttgctgctagacttgggggtgattttgaaatgggacaatcttttaatgagtttatctacagattctgtgaggaaaaagcatctcagaaagtgaccatttctaagtgaaatctgacagccaaaatcagcagcttcctccaaaaatataagagcagaagaattttttttttaagcacttgttttgttcatttgtggacttggcattttggtgtattggtttcacatgtcaggatctcttttgctttaaaaccaagcagatcattacagtacagtatttttcacccacaaccaaaacaaccccttttaaaagagttggtctttgtttagcattagaaagtcttgttaaaggaaaatgctaactctgcttttgctagaactttcccccatcagttcacaactttcttctactctgtgccttgagctttgtgcactttgcaactgtgtgaccatgttgtcaaactcctcctggagaagtgtatggtatctaaactcacccaccaagatggcaggtgtggccctgtagcaggatgctaattaagtgggaaaatagaaaccttttgcacatgggtcggattttcccctggttcaccagagcatattcatattaatgttggggaccaactctcctagagcatttccattccctgtgccacttaacacgatgtctgtcaccagctgctatagtattggcagtactctagtttagggatgggcggtactttagcacggaagcttcccttagtattattgagagctacttcctgcgatgctctaggaagcagatacagttattaagtccaaatacacagtggtgtggggttcctgatcacttcattttaaatgaatgagataattacttaaaaaaagtctgtcatttgaacattatatttgagtgtgatagggaagaagtagcactgctgtcctaaggctcccttccagctgtggcaaagctatatttctgtttctccacatccacagtgctttttagtccatcataaaagtttctgaagcttattctagctgttgttgaaagcccaagaaaaatagatgtggcaagagaaaaatacttttcttctcaattttgcttgaatcttaattgagcataggcttctctactaggcaacatcagactaatagtatttacctcttcagagaacttgaggggaaaagaaacatcccagggatgctgtcgcatgtctgctctgcaggttcttcatacagctgcctctgccaattcagtttattttttggggggagtggtgtgggtgggagagttagaagtgggatattgggagcaagtaagtcacccaataattgaagtccttgatttgtaaaactgttatacagagaagtaaagataaaggttgtcagatttattttttaaagtacttaaccagagttcgtggattttgtggactttaattggactcaattcactctgtgagcatcctggattgcatcgatgaacactgaattactgtaagaacatagacaggctctcactatgacctggacagtttaagttgctacactggtaacattctagtatcaaggagaattccattcatcatgacattcacattttacttttctcaatggaatgcttgcttcaggcttaccaatcacacctagaactgaagtctgagtgagtggtattaataatttttctgaaaggaataaaattggaatgtttctaaatgtggagaaattcttcagtatcctaataatatacccaaatgctttttctgggagagagcattcttttacaaaagaactttccctataaaagcatcacagtataatgtgaattggcattaaaatctttggatgcttttgcattattaagttcatggagaaatatattctttttactatgtatgtattaataaaaagtgggcaaagtaaagtttgcaaaatttagtttctctaaatttttgcacagtgactgcagctggctatgggtcagctcttaatacaacaaaaccttgactggaagtcactatagaaaggttgtacatagtctcccagtctacatgtcctggctgttaatcatcttggccccttgaggcacatcacagtttgaaggacctgtttaagttgaaatagactttgcttatttattgggattctaaaaaattctgagtgagtttgcagtatgagaggaaataagatttcctcctccttcctctcattttatattgactgtttgccagaaactgttttcttctgttttcttatattttgtttttgagatggagtctcactctctcacccaggctggagtgcagtggtgcaatctcagctcactgcaacctctgcctcctgggttcaagtgattctcctgcctcggcctcctgagtagctggaattacaggcacgtgccactacgcccggctactttttgtattttgtttttagtagagacggggtttcaccatgttggtcaggctggtcttgaactcctgacctcaagtgatccacccacctcggcctcccaaagtgctgggattataggtgtgagccactgcacctggccttttttttttttttttttgtattcttgccagtacagtatatggtttttctaccccaattacatactgggttttgtaccacatcactaaaggcccaaatcattgaagatacaaaaccgtacatgcaggctggttgtctggttagtcaatggctgatttgcttcaactgtctagtatgtatgtgcagcctgaaactggctccttaaaaggaaagccgggtcagtcatcttgaaaaaatgacatgtaaaagtaaatcgataattgttttgagagacggtacatgttttaaaggttggccttaagcttcagtaacattgtcattttgtgaccttttgttgtcacacctgtaccctaacctgacaggaattaactactgtttttttgtggggcagaaagcaaaacctggtgttgtgacttttatcctaatggttcttaggcaaggttagtgagaagaaacacaaacccagatgcatgcattgtgcattattttgtagacaagctactttttcttctgtccctttaacaaatttgcagcaattaccctccctttggggtctagagtgaaagctaatttgtgggtagatgagattgcagaagaatggatgtccatggctgtgaacactgcacactgcacatccatctccagtgctcacactgtgcagctaccactccctggctgcgtgccatgctgtcgggttgcagatttgcacacataaattcctcaggaagagtttgcatgagcatcacctcgcaatattctgtactgaccaaacaagggatttgaacgtttttcagcacaaaaggataacttccgagtggtggtctgtacgcatactagcaaaggtaatggtgatctagcaaacaaaattggtttctgcagttagaagtgagcaggagcacttgtattatagtatttaaataatcctggttaatctctttttaagccgagtaacccctccagattttgcctttttattattgaggctggctttattttcttctactttttttcccgttttatagcagttaattatttttgtgattattatgcaagaagcattgcccttgagttaaactgttattgtttcataagcagctattaaaataactgagcattgttttatgaacatacactaatctgagatactgaaaagctttgcaactaaaaagcaaaacaacctacattagtcatctagccattgtttggatgttttgagttgattttttatggtgcctcttttagcttggaatattacgtttactttaatccaagtctaggccttttaaagggtccttaaaattaaagttcagaatgtgaatccctttgacatctattacaggtttataggacctttttggttgtgattactgttttcaatacgattgtataaatgaagttaactttgtcagaagttaaaatggaggtcataggagttcctggagaaatggctctcctgtttctttcattaccccactgaagttcaccccagtttctggccacaagaatatgagaaaggaaccctgttgttttccaagggaaatcattcctctctgtccccactgttgattaactaaagtcctggacaccttccttcctccactggccaagacccaccttgacccaccttgaacctcttttcagagccgagtggcatgaatatgtgtactgtttctgcttctgttgatggagtggctgtgggagaattaaaggaaatgctaatttgagcttcattcataggggaacctactatatattgcatccctgctggttggaaattatcttcatctctggactgcattgtttagaaaaatgttaatggcttacaattctgagaactttattgtgtggctctggggttaagaattctgtggtttgaaaaaaaataaatattttgtattgattctcacgtcatttcaatgttgtgactatgtactaaatgcactaagactgggtattctcttagaagagtgcgttttgttaaacagatggcagttcactctcattagttctatttgtcaatattacagccacacacttcaggataacttactcaaatgtgaagtcatgggaagctatggctagtaacaggaatgcttatgaaaaatttggagggcaagcacgagcaagaggcttttgccactcactagcacagccagagcaaggatgaagcaatgaagtcttgttcctagtggtgcttgtatgtcagaagccatagtgagctcagcacagggcgttctgcacatcatctctttaatccaagaaaaacaaaatggcggatgaaactcctattgacctgggatacaaagccactgactttggctcttgatcttttggtgggttctgaatcactccttctgtattagggcatatactttcactctaaaacattgtggtaaatgaaataaatcttgtacagatgtcgttggc

SEQ ID NO: 2452 - DNA, 1009 bp, Homo sapiens
gtctcaagataatggatttaaactggtgtcttaaataggtttgatcacattcaaggattattatacttgtgcttcaaccaatctaaattggattctttaatgttgtttcaccataacacaaaaagcatgaacttgtattaatcctatataatagattgatcatgcaccatatccacaggaggttggaaaaaccatgccattttctggaatttaagggtgttgcattatttcatcaatcatttgttgacaaaaaagaaaaactaaaaaataaatttaaaatgtgacccttcaggtattgagtaacacctttatcttggtatagaactgatactttttttttgattttgaaatatctgataataatttggaatgaagtaaggttctgttaaaatatatttgaagaccctttaaagcagtgaatctgaaacaattttcacacccttaagtggttgatacgtacctattttaggtattttgaggtatttaccataaactaaatttagaaattttttagattcacttgaagtaaacattacaaacattggatacggtggggttttctttagattttacttgagagaaggtgagtacaaagcaatttgcagttgttgtaatgacaagattactgcgcaagtgtgaatccaaacagtatagcttttaaattttaaagcatttggtaaattatcgctgagtttttttctgttgccaatagcaaactgcttttccattaatggagaattcatgcctttcaagcattttaaatatgacaatatttataaatgtatggtttggaggaatcgtttaaattctctttcctaattttctttcttttgaagatagattctttcaacaagtaatttgtagtaatgactgtgttgacttcaattttggagcgcagtagctatgttaaagatgaactatttggtctcattgaagccaacacagaacttgctgctgtgttttttcttcagtgataaataaaatacttacagaatttgttttagtgttg

SEQ ID NO: 2453 - DNA, 323 bp, Homo sapiens
gcgtgagttttaggtgaatttatgtggttcctgcttgaaaaccttcccctctccaggttcggtttagagaactttgccacaggtcttctggggaccccagaggtgtctgtgctgacaaggcgacttcagattccatactgagatcgttcccaggctggcgtctctggggtttttaaggctggctggagaagacagtgggagggtgccccgtctgacacccctggggttgctgagggaacggttggagtggggatcggcctgcgaaaggatactgtgaaatcactaattaactaataaacctgtctcaagttgaggatttgaag

SEQ ID NO: 2454 - DNA, 776 bp, Homo sapiens
atcacccatgtgtatctgcaccttctcaactgagagaagaaccacagttgaaacctgcttttatcattttcaagatggttatttgtagaaggcaaggaaccaattatgcttgtattcataagtattactctaaatgttttgtttttgtaattctggctaagaccttttaaacatggttagttgctagtacaaggaatcctttattggtaacatcttggtggctggctagctagtttctacagaacataatttgcctctatagaaggctattcttagatcatgtctcaatggaaacactcttctttcttagccttacttgaatcttgcctataataaagtagagcaacacacattgaaagcttctgatcaacggtcctgaaattttcatcttgaatgtctttgtattaaactgaattttcttttaagctaacaaagatcataattttcaatgattagccgtgtaactcctgcaatgaatgtttatgtgattgaagcaaatgtgaatcgtattattttaaaaagtggcagagtgacttaactgatcatgcatgatccctcatccctgaaattgagtttatgtagtcattttacttattttattcattagctaactttgtctatgtatatttctagatattgattagtgtaatcgattataaaggatatttatcaaatccagggattgcattttgaaattataattattttctttgctgaagtattcattgtaaaacatacaaaataaacatattttaaaacatttgcattttaccacc

SEQ ID NO: 2455 - DNA, 285 bp, Homo sapiens
gcccccaaaaagccgggactggcagctttaagaagcaaaggaatttcctctcaggaccgtgccgggtttatcattgctttgttatttgtaaggactgaaatgtacaaaacccttcaatgggatgtgtgttttattaactgcttcaccagtaaattttgcatgatggctaagctaacataaaaaaagaataataataacttggaagttttagtttacaaaacagagattccttcaacactggacacgtcgagcattttgtagcttaattaaacctcatgtaaggcc

SEQ ID NO: 2456 - DNA, 2197 bp, Homo sapiens
gccgggactctaaaaaaaaattgtaattcatgataggcttcgatttcctgtgacactctgaagacatgaaagtagacatcggaaaatgaaaatatttattttaaaaattgaaatgtttggaacctttagcacagatttgctttggtgaaggacacgtgtcttctagttctgcctttttaagtttttgttcatgatggatatgaacatgatttttctttatgtacaaaaactaaaataaagtcaataaagacaattctgactacaaattttgatataataggaaaaatggctaatacattttgattcttagatactattccatttttatcttgctgttcagtattttaactcactgtgtttttaaaagagcaaaaaagggaggatcgtgaaaacctgggaatcacatataagttcatcctgaatcctgatactcccctccccttccctgaggtggaccacatttgaagtcagcagagaaaaagtgtgatattcagaagaaatgcgtgattttggagtcgctttggaggaaatattttctttctctatgcctaaagaaactgaagccagactgaagttttgcaccctaaaaaaggaacagcattgtttgagttacttgagcaaatgttggtggtccacgttaagacatatttttaaaacttccaaaagtgtcgattattaaaattgtagtattttacatttcattttggggggaaatccaagtatggtgtttgtattgaagtcagacagtcatacttgtgcttttacatgaagtttaaatgatacatattgtaaatattcaataactacagtgtttaaaaagcatgcttcaacatagaagtagcagcaatgtaattatttgaagtaacacttaacacactccgctgcattgaatgcagtggattgatcagaatgttaagactgacatttccaaggttggctactatgtaaaattaaaattacacaaattgtgcagaaaaagccttaattttaatttcatacaatctttgatgcattagtatgttctaaaatgtcattgggaattagttttttgtttttgtttttttttttttttttttttgctttacattacttggtatgtaaataccttgattaaaaccttgtaaaccaatttcaaggttactataagttgtatagtacaagtgttttttaaaaatcttggggtgtttttaaaaattaagatatattttgcccaagaatttttttaacaagattgctaaaaacatcttatttagacacttcaatgtaccaatttataattggatattcagtttaaatagtacacagagttgtggcttttattttcaattaatttttttccttgtgggcagtgtgcatggtataataagcctgagcagaggcttaagttgtatgtgtgcagagtttgtaaaggaatcaattggaagatgcagaagaccgaggtttgctttcaaggtatttttcaggctgtgtgggtaaaatttgcctcaaatttctatcaaacaggaatgtaaaatagataaaatcctatgtatttgaattgtcagagctagggagtgcaaatgttttggcaatgtattcaaaatgctggcctgggcaccaaagagaaaatagccttttacagttacatagtaagatgcgattagtacccacaaattactgttttctaaacatttgaagttttacgattagctttaaaataatgattttataaattggtggtcacaataattttggtattactttcctccttttcccacttagcaatatagccaaatgtattcaacataaaaattcatagggtctgaaattcatagctgggccaaattttttatggcaccttagttttaccataatggtcatctattacactcttctgttataaaatatacccttatttcttttgtttatagtatctttgaggaatgtttttggaaaagttaatttatattttatagggagaacactcaataaattatgttaactgtgcccccgagttaaaaattttatgagtatatgtgaaacttgaacaactgaagactttttttaattgataaaaatgcttagtatgcctgttttggtctgccagtaaattaagtagcttattgagataactaacagctaaatatagctgtagtgtttcctgactgtatattctatgatttaataaaattatccagactagttatattgccacagt

SEQ ID NO: 2457 - DNA, 2014 bp, Homo sapiens
agatgtaatacctatgaagagtaatgggcaaactgtagccacataattgtaaaattcagatattcatttataccacattgttttataggtaatttctatcacaaaccagtgacatttcctgaaatcaagcctggtaacacctgatgtttatatgatattcagtaaggacttttaccttactgatttcatggagcttttgaagtttgttttataataattatataaattagtaatgatgtaaaaaaagtatttgatattaaaagtttaatattgataatgttgctgattgtaccatttccttagcttcagctgagtcataggccagactgttgaaatgctgaaatgaagaaggttgttgcagtttcaaagtcagaggaatcgtgcttcggatttcttatgttttctagttctctgtttttccagttcacagtgggttggggtgcattcagtagtccatctttggggaacggaggcgtacttgccattgattcacatgactacatgaaattctgtactgtcatttcccagatgtttggccacagaaactttttcccacttaacatttgttaacagcctgcaaaactaaacttgtacatggcagtggttcccagacttttgtattttatggaccggtagtaatatttccaaaaatctggggtactataaggttgccaatttaccttgccaagtaatccgaataaatcactgtattatcaccatttttttcataaaaggaaaggacaatctatctctgaataagaggagtcctttaaacggaatgaatgtggcttttgggggcaaaagaaaccaagacactacattgtctttattttctcctatcccagtgcatttgagaaccatgcataagggaatgctgtgctacaaagctgtgcccaaatatgaaaacaaaataggaaacttaaaaagcaataccccctttagaaagtttttattttcttaaatgtcattgagttgctttgattctattggatttttggcattttttatgggatcatcagttggttccaagtatgttagatcagctaacatctgctactccagtaacagcctcgtacaactgcaggtaggttttctccagaccaattagttttaatagagcaaactaacaacagactgtagtagcatggttatggcaaccagaatcttcagaaaggttaggacattactttttaagctgtcagtggtatcaaataacttacctagttggaggcagataaaggatcccttacgttttttcctataaggcctaaattgaaattgttaaccaaggaaacagggtcagccttgaaaaatcaaggaattcattgtacctaataactgaagtaaaaataactagttgttcaacttttcctaaactcaaatctatttttataaacaaatgtaaataatgtttatattagagttgaactggttttcatttttataactggtagactagaccttccttaaacttttagaaataaaatgaaggcttcactggatttgtgaggataaaatacattttctttaattgtcctagagcaaagtacattagtcaccatgtgttttttgtgccaatgtaaattgtaatttaccaaagaaaaatacatacattgcttggtcttgcagaaaagttcccttgaaagaacctttccaataaataaaacgtcccaaattagcagtaccttgggctgtttttcatgagtaagaagattcaccatcccatgtgatctgtgtggaaaaagaccatgtcctcttggtggaagacatgagagagctgaactgaagtggaggaggtggtgcaagagggaccttcctgctcaaggcccgcccaggcagcggaatggagtgcagtgcttggctgcagaaaccctttgtccctcacctatatatacacggacagtcaagtttgttgctctaacgtaaggcacagcgttaatcctgtatggccaggaaactgagtagactcctgtgtaaccctgtttggaactttgccttcttaaaatgatttttc

SEQ ID NO: 2458 - DNA, 1515 bp, Homo sapiens
atgactgtgtctgcctgtccccaaacaggacagcactgggaacctagctacactgagcagggagaccatgcctcccagagcttgttgtctccacttgtatatatggatcagaggagtaaataattggaaaagtaatcagcatatgtgtaaagatttatacagttgaaaacttgtaatcttccccaggaggagaagaaggtttctggagcagtggactgccacaagccaccatgtaacccctctcacctgccgtgcgtactggctgtggaccagtaggactcaaggtggacgtgcgttctgccttccttgttaattttgtaataattggagaagatttatgtcagcacacacttacagagcacaaatgcagtatataggtgctggatgtatgtaaatatattcaaattatgtataaatatatattatatatttacaaggagttattttttgtattgattttaaatggatgtcccaatgcacctagaaaattggtctctctttttttaatagctatttgctaaatgctgttcttacacataatttcttaattttcaccgagcagaggtggaaaaatacttttgctttcagggaaaatggtataacgttaatttattaataaattggtaatatacaaaacaattaatcatttatagttttttttgtaatttaagtggcatttctatgcaggcagcacagcagactagttaatctattgcttggacttaactagttatcagatcctttgaaaagagaatatttacaatatatgactaatttggggaaaatgaagttttgatttatttgtgtttaaatgctgctgtcagacgattgttcttagacctcctaaatgccccatattaaaagaactcattcataggaaggtgtttcattttggtgtgcaaccctgtcattacgtcaacgcaacgtctaactggacttcccaagataaatggtaccagcgtcctcttaaaagatgccttaatccattccttgaggacagaccttagttgaaatgatagcagaatgtgcttctctctggcagctggccttctgcttctgagttgcacattaatcagattagcctgtattctcttcagtgaattttgataatggcttccagactctttggcgttggagacgcctgttaggatcttcaagtcccatcatagaaaattgaaacacagagttgttctgctgatagttttggggatacgtccatctttttaagggattgctttcatctaattctggcaggacctcaccaaaagatccagcctcatacctacatcagacaaaatatcgccgttgttccttctgtactaaagtattgtgttttgctttggaaacacccactcactttgcaatagccgtgcaagatgaatgcagattacactgatcttatgtgttacaaaattggagaaagtatttaataaaacctgttaatttttatactgacaataaaaatgtttctacagatattaatgttaacaagacaaaataaatgtcacgcaactt

SEQ ID NO: 2459 - DNA, 569 bp, Homo sapiens
cctgttcacctctgccgggaagttcctgtgttgtgctgatgatttgtgccaggatacatattcagtacctgtggggaaataactgtcaccacccacaaattagacattttttattttgactatctatggcttttaaaaaatattttgtggcaatgtatctgtgagaatctcatagttaatataaagattttaaaactgcattatgacctagcccccataattgggatttatcattttggaggattctttctagagcaagatacgctcaaattctcctgtttgtattttgtaaaatgaagaagtgaatctaagtaacttaatcacagttgtgcattttttttggttctgttagagaaattaaaacagactgtttcctcaggcccattttaaactgaacttatgctaggaaaccttaagtatggggaaggtagaaagttcatttcatcacttagaaaatatgtcttctcaagaacaaaactgtgctgttacaactcagtgttcaatgtgaaattgctgccaaatgttatgtagtttaatagagaacttgaaaaaataaaacattaaaatgg

SEQ ID NO: 2460 - DNA, 166 bp, Homo sapiens
gactcaaatggatagtgaagtccaaaacggaaagcggcatgtatcgtacatattgtatgattcaacatttttaaaggcagattgtttttagtaaaatgtagcttttgatagttaataaatttgtcatggttgtctttgattaaaggaaactcaccgccatattcac

SEQ ID NO: 2461 - DNA, 22 bp, Homo sapiens
agttttatttgttgcccagggt

SEQ ID NO: 2462 - DNA, 119 bp, Homo sapiens
ctaacaggtccaaccctaagtgagacatgtttctccaggatgccaaaggaaatgctacctcgtggctacacatattatgaataaatgaggaagggcctgaaagtgacacacaggcctgc

SEQ ID NO: 2463 - DNA, 145 bp, Homo sapiens
gttaggaaaggtgggcacaaaaatcttcatgagcaatacttcttagtagattgttttgttattcaaatcaagttctagtgtttttatgtgagattatataatttacagtgttgttttatatacttttgaataaatgtacactatt

SEQ ID NO: 2464 - DNA, 917 bp, Homo sapiens
gctctcaacataaacagtgtactgcagatatttattacatatttattacaaagccaaaacccaaaaatatttataaaaagcaagtatttaatgtcctttgagggatcattgtcttacacaaagtgacctcagttttcgtttttactacacttgttattttaaatccagtactgtacactgagttaatatgatacagtcaaattatttttgctcacgatatttttcagtcttacagaaatgtatgtatatttgtgttaagagtttaaaatgcttgaggatttctaatacagttcattagtttgtattgtatatgtgtttaagtataatttttatttatacaaagatcttatagtcttagaagtatgaaaaataatgcttaagagtatttgatttttttctttttctaattatcttggaaaattggatacttaagacttggagcctttacttcagattaccagtttacattttgtattgcttgtgtgagataatgaataagatgtgatatttggcatgtgtaaacttagttcactctggggttgttaatattatttgtttcattacagagtagctgtaggtaggaaagtaaacatcagaactagcctagtccttgttacgattagtactttggatttgatttttcctgtaaaacagatgcagtcatcttgtttgacctcagtaaccccagacagtttaagaaaacctctccttttgagctgatacaggttttttccccagaatccttttctggcatgtttattgtatgaaataatgaggctctccatggaaggatgaacacatatgagtcaagggattgcaattctctctgatagacttagttttcagaccttataactattgtatatgcattgaagggtgatatatttgcatataaaaataaatgcacctgctctggg

SEQ ID NO: 2465 - DNA, 99 bp, Homo sapiens
ttgaaaatagtcatattttacttagttttgctgtttttgtggtttggttttttttgttttttgttttggtcatccctaataaagtgtctgctaattcaa

SEQ ID NO: 2466 - DNA, 1128 bp, Homo sapiens
ccctcctgggcccttgagactcgtctgggacccatgcaaattaaaccaacctggtagtagctccatagtggactcactcactgttgtttcctctgtaattcaagaagtgcctggaagagagggtgcattgtgaggcaggtcccaaaagggaaggctggaggctgaggctgttttcttttctttgttcccatttatccaaataacttggacagagcagcagagaaaagctgatgggagtgagagaactcagcaagccaacctgggaatcagagagagaaggagaaggaggggagcctgtccgttcagagcctctggctgcatagaaaaggattctggtgcttcccctgtttgcgtggcagcaagggttccacgtgcatttgcaatttgcacagctaaaattgcagcatttccccagctgggctgtcccaaatgttaccatttgagatgctcccaggcgtcctaagagaatccaccctctctggccctgggacattgcaagctgctacaaataaattctgtgttcttttgacaatagcgtcattgccaagtgcacatcagtgagcctcttgaatctgtttagtctcctttttcaacaaaggagtgtgttcagaaaaggagagagaggctgagatcattcaggagtttgttgggcagcaagcatggagcttcttgcacaaattctgggtccataaacaacccccaaagtccctgctgatccagtagccctggaggttccccaggtagggagagccagaggtgccagccttcctgaagggccagaaaatttagcctggatctcctcttttacctgctaggactggaaagagccagaagtggggtggcctgaagccctctctctgcttgaggtattgcccctgtgtggaattgagtgctcatgggttggcctcatatcagcctgggagttatttttgatatgtagaatgccagatcttccagattaggctaaatgtaatgaaaacctcttaggattatctgtggagcatcagtttgggaagaattattgaattatcttgcaagaaaaaagtatgtctcactttttgttaatgttgctgcctcattgacctgggaaaaatgaaaaaaaaaaataaagcaaatggtaagaccctt

SEQ ID NO: 2467 - DNA, 2479 bp, Homo sapiens
gagctgaattgttgctgcacgtgctgggcccgccaatgccgtcatcatcaggattttacaaatctctttgcggggaactgtttcactcatggtatggaaaaccccaggactctgccactctaggcacacatgaattataaccattttggaatttccttcgtgatgttcgagagctcagcaatggacccctcacagagctcctctatccgaggccattggagaccccagtttctcaagaattcagctctgctctgagcgtcctggagcttggggatgcagccagctggcctgcactgggtgtggagagaacacctagggaaggcagcctggccctgcccgcctccgccttctggagagcctctgggttctgagtcagcaagccagaggtcatgccacaggcctggctggaacttacacttcacgttccctttttttccccctagagatggggtctcgccgtgttgcacagactgtctgtattcaatggctatcttcacaggtgtgatcataccacattcacttctgaaacactcttgttgcgatcgctaacctcactgggacagagaaccgcagtctttcgagaatggaggctcttcattttttttttctcctttactccaaactcagccctccagtttcttcagatgtaaaccctgttaacgtcactgtttccaaaaggaaaaaaataagtcagtttttggcagcaccttcatctttctgacctcctcctattctgtccttgtggacttatgtttaacatagaaaatgaatgcgtttaaaacaaaaccactttctgcatttaaccagtcctggctctctctctgctgcctcttcatacgttttctcaagaacttcagtttataattggaagagaaatttttgctgttaatgccagaatgagcaacctcaaggaattgaacacttcttggaaaatctaggtaattcaagccctcatcaggtttacaagatcatcagagaaacagaggattttaatttttagttctggccggctacaggctccatttctctgccttcccattggaaatagtttatttccacattctccactgcgtgtggtcaaagttcctcacccagcaagggactatagatactcgtgtcccaattccaaaacacaatgcacaagctgaacttgggctgaacgtggcgtgttgagatttggaatgaggtttctaagagccgtgttcttcatggaattttccaggccacttggcagcttggtttaccgatggatgggctagagatcttgtcgtttcttggaagtcacagggaagattgaagagaacgcttgagcatccttggcaacagcccaggtgggacctggatgaagctttgcactcaagtattgtcaagggaagcttcctgtgaaccaaagttctcaggccaaggtctcgcccaccaaagccagaaagtgcaagcacccgtctacccagctctaacttgtatgtgtgagacagaccaggcttcgggggtaggaggatctgcagttgttcagccgtctttctgctggtgttgtctttctgccatcagagaagggacacacagcccgttcgaaggtgtgcagagggctctgagcgccaggatggccagggctgtttttgctactgaaggagcgtgtgtcctgaactcccacttgcagggacagtccccaccttctctatagccggcactgggagcagccgccagcagggaaatctggcctgagcacaaggatgctttagggagagatcacttcagtgtgtgtgtatatttatttgcagtacagtgcgcgcgtgtgtgtgtgtgtacgcgcacgtgtgggtgagtgcgtcttctgagtgggttctgttcagttgctaatgaggctcctccgctctggacacaacccttttatagattaatttctctgccaattaacttgtcattttcagtacatattttactattccacaccaaccataattacaacaagggatttttcttatgcactcctatgcatgtgaataacatgtggtgtaattctgcttcttacagaagtattactgaaggtattatttccaatattatttggtttattatgcggatcttttttatatatgcagtcccatcccttctgtgccactcaatgccatccagacatggtttttccctccaggggcctttctctccagagggcacttcggctgcctctgcttcctctcattcgaggcccggctcttgctgacagaataggttccgttctgggcggtggttctcgagcctgccattcaaaaccaaagcaaattggagcatttctcacaacatggtattgaagttcctttttgttctcaaaagttgtgaccgtgttaaattgtactcccttagtcctgtaaggtatgttaagtgaatcgcagttacgctgtacttttattaatatttaacataattaaagatggacccataagagtgacgcctgtggagcgcgtgctcttcctctgcagcc

SEQ ID NO: 2468 - DNA, 639 bp, Homo sapiens
gggtagccagctgttttcagtggtccctgggagccagctggagacaggtggtcctgtaaaagctttattcctaatgtgggcacattccactcccatgagtcttcaaaaactttttttttgaatatatttttttcagttgatacataatagaacaacgtttatgaacctgccgtttgctttgtaacgtaactaaataatgtaatggcatctatattcagttgaagtgttttgatgtgcatgtgtacttcctaaggtgaaatgcatctatatacagacagcctctaaatcaagtccttcagtataattgatatatgtttttataatttcctcactggtataagtgtttcatatttgaaaaagttatctctgggtattgcataaaaggcttcatcttataaagtgaaatcattgttattgaattttaggaaggattaatggttaagtgtatataaaatactaatattaagtaaacttcatattggccaacaccagggttgtattctatggatgtcattattttgaattaagaattagtgtttaacattcctaaattgttttgagtgcttgattataatttgtaaaaaatgtttattttcaatacttctttaaatttaaaataaagcttatatttcaaatgtc

SEQ ID NO: 2469 - DNA, 3948 bp, Homo sapiens
gggggtgtgggcccaggcagggctggggtgtgctggcatcgacagcccccactctgggcactaggtgggcccttgaaggggagcccaactcgtgggcctgatgaaagcttcctgagtggtgtcgggtcccagagagggagcccacctgctgcctgggggagagcctggcctggccgcgtcatacagcgggtgtgtcagcctctcaccggctccccgagcgtggcagccaccaggtccacagaactactgcagcccagaggacagctttgaagtttgcgtcttttctgcctctttccctgtgggatgttgggcagtctctgttgtccccggcagagctgggcaccgctctgtatccccctggtggtgggggctgtcagggagggcctggggtgggggccaggggccatctgctatgtcagggcccttcttggcctcactcaggttcacttctggggagtcggccccgcagcttctttcactcagttttactccgtgccttctctcccaggtctccctgcttcaggcttgggaaggttcgggagatgcttccttctgtaacaccagaaccatttggccttaattccaatgtgagagacagaatccctggggtgctggactggccctccagagggtaagccatgtccggagtctcgggcccaaggaacgatttggagggtgcttgttagggcctcccgtgttgggtagaaatttggtggatctgttggctgaaaagacggacttgcttgcctctcctacagcatggagaggctgaccccatggctctgccaccgttggggcagggttagcagatggcagcccttctctgtggctgacaggtcactgagtgataagcatggttggttccggtgagtgtagggatggcacgataccagggcagcctcttgaaaacggcctcgggagacgggagctgcgagcaggtgggcagatgagggccctatgcgcactcaggggtgaagggcgtccgctggccactctgcaggggcccctgcaggattccaggcacctcccgtttgtccttgaggactgctggctgtaaccagggcacatcacccacctcaagacaagcccacgcccttgtcagcttagggggagcccagtcctgagggctgcatctctgttgtaggcccagccaccggcacaaagctggattcatgctccctgcccctaccccaccctggctcctcaccctggggcatccgaggagcctagccccctgagggtttgctctcctctcaaggtttgtagctcctctccggctgccttgcagacaccaccacatgggctctgctctatgggaatctggcttttagcgaatgtggcgtcttctgcaaacaatagcaattgggctggcttaggagcaagtggctcattttcccataaggctaaaaataactggtgcgctcccttgtgttggctgacacgcgcgttcaaagcacttttgtagtcactttgcttttgctcgtcttcatggacgagtgaacgcctcgcttctgcaggttgagtccagatgcttctcaccttctttctcctcaagaaagatgctttttgggaaacgttgtttaaatcttatttttttactacatcaaaaggatggtggttcaagttcccaatatgtgggtggcacttcttaaaaatcagctttaaggagctggcagaaagcccccagccccacagccctgagagatggtgttgctagctcaggtggctgacacatggggtatgccgggcactgggcaggtcccagagccggggaaccagctcacctctggttgctgtagctcctgccggaggcatgtctacttgtgatcccggacagccgaacccaagagctggtggctctgagcagacagagacatcttggcctgtccctgcctgggggtcatggagaccatgtcttcttagagcaaatgtggaggcggccagggcagttgttgggtgaatgtggagagcacatggccatgtcttgcccccggagtaccactgggcgtggggggtcctggcaccacatgcccggtgtggccgagggcacacagcctctatagcaggccttcctgtggaaggcagaggcagtgagggaggtggacggtgccagctgaggctgaggcatgcagcagcccccagctacctttgcttagggctggggtgggaggcacatggtgacaggtatatgtcgtgggactggggtgtgggtgacctgccctcaaaccttgcctgccacctccccattcaggcctggtggcaggaagggacaagctgtggagctggctgagtcacagccacctccccacctccccgcaagctggtcccatcgaccagcaagcccagccccagggcgcttagggagaaatgacccagcctcctcagaccccgcctgcctgtcctgtgcccaccacgcagcagtcaggggagaaaatggtggctatcccttctgcttagagaaagaaatggcctttagctggtttcatgtttgtgttttgactggagggagtagaccctatctataaggtgccaccccatcatccaagctgccacactgcccggagcagcctgttcctgcactccaccctgctggccccaggacttctgatctcagtcctctgggagggaggttcgcctaggaggtgccccccacattggtgtccccatgggcagcaggcagacagctcacccccaccagcatgatggccccagctgggggcagtggcaggagccttacttttgtcacagccttgcccacaaaccctgcctctgaggggagactgaggaagggcagagccagaagcaagccgtgccaggccatctgcctgctcatggggtcctaaagcgcgggctaagcctgcaggaaagccggggcggtggggggggcttagtgccacatgcaccccactcattccaaagccaccaaactgccaggggctgccgtccacccgtggggcccaggggctggggccacagccttgccattttcgttgccataccctcttgccttactcgcggtggaggccggatttgcacgggcagacgtgcacctgggcccgtggggagcttgttctgaccagacgtacagattttcattctcagaaagccttacttttcaaccaaatttttgtagccagttttgtgaatttgtacactgaaagaaaatttaaataaaggggaagtccacattaaaaagaaaacaaaacaaaccctaactaacttccaaatgggtctcctggtgcgggggcgtgagtggccgtgccctgggtgtgctgcctgtctgagcaagcttccctagctgtggaaccccgggccccctgctgcgggctctgccttggtgtcatgcctgctgcacccccgtttccactgacgtgccgtctgtggctatgggggtggtcactggaatgacggtcactccagacgtcagccggcagggatgcagcaggctggccgcgcaccggggctcgggcaccctctggccccacactggcaatgatgccacaccttgccatgtccacgctgttggtcaaacccctctgtcatgcctctttaaagagaaaagaagagaaagattttttttttttttaatggcagaccgaagtggagatcttgtagcctagataggatagtctgaccttctagcatagtctttttggcaaatgatttgtgttttcagtgtgtggggaagctgtcctgggggctggggcgacagatagcacataggctgtttctggggctgcaggggcttccctgagctggatgttgtgggtgttgccgtgcttcaggaagtgtggcgaccagaaagcgtagacccggggcccagggtctgcccgcccctgcagcctggcctccccgcacaggctgtggcttgcactccagccgctctagtctctcaggaatttgcttgttacttgtactgtgtaaataaagcttcctggttcaataccc

SEQ ID NO: 2470 - DNA, 1666 bp, Homo sapiens
atttgaacttctcgaagagctaccaacacccaagttcagctttggaggcagatctggaaacagtgtagcagcattggttttccaaaaaatgtgagactttttcttggacgaattcaggtagctacacagaatctacacagcaaagttaacctgacacagaaaatccttgtgcaaataaatgcttagtaagtacacaggatgcacatgttgaatagagtatactggattggtgaaagaaaataataataatgagcatctaagtggttgggttttagagatcaatcaagaataattttaattttcttttgtatttgaaatgtaaatagttttcttttcgattaaaaaaatttcctataactgctaaacagttaaaaactttaaagtagtaaatgagtttatagaaagcatgtattcttgatttttgtgccttggtaaagttgataactatttatgaatatttgaccaaattattccagcatcagaataataagcaaaataactttgttagtgttttgttagactgtttatgaaatataacaagaaatactattttgtgttggatggcggttatttttaaacttaattaatacctgtgaaaaggcctcttacctttatgtatataattaaacaaaatcagagaaatgtatcagttgctcaagttatcaagcctgcattttgcagctatggtcttctacacactgtaagggtagtagaaggaaagagaactaaggaatgttattatttgctagcgctatgttaagttgtcttattaagtaattgagtcctttcaatgtcttcttgaggtatgtattgcttgttcttgtttctacgtataaggaaaatgaagctgagagaagtgaagtcacttttatgaggttcaacagtacaggatggagccaggatttttatctgggtctgtctgactttaaaacacatactcttctcctagcatattctgcctcacaggtgcttagtctttgcctttgtagcatttacagtacagctggagacccatgatgattacatataaagttcagttagaaaagatgggtagttactttattagtgttcatctgtggagtatcagaatagcagtcagccaactctgtctcatatcatccttcattacttttccccatctccctactcaaagacttgcctctattaagaattttgtcattcttctgtgaaagggtagtgtaagttatataagccctcagcgatacatgcacaaagatgttctagttaggggctaatttggcaagagaaacagtttattaatgtttttgaaaagataagtcatattcatacttaataccattttgtatttgtggtaatattttaatattggagctaaatacaaatttttgcataattttttgatgattttcagctttgtgggcctattgggttacataagtgactttttgtttggcaaatgttactcctgtattgagtaagtctaacattacgtcccttttctttttggggaggggtagccagaggagtgagtttttcatttagatcaacattgatcaaccattaagacaagatagttgaagacatgtatgtggactgtcaacaaaaataacattttttgaaaagcttttattttcaacatgtaaaaagtgagaaattacttcaaaatatatgcaatttaaatttt

SEQ ID NO: 2471 - DNA, 1669 bp, Homo sapiens
cagagaatgccagaaggtaatcactcagatacacttgggaccaagagacagtgaaaaatagatgaactaagagaaaaagaatcggatggtctttgtaactgattctggacatatgcatcattgatgttgcagtgttgaaactacaagagctagaaaactgaagatgtcgtctgcttacggaagcgctgaaagactaggatgtgatttattaacgaccaacttctgttattgtgtgttaagtttttcatctgtgcatcaaatcacaaaaagaataaatagagctttttcctttatcagtcccttgggcacagcaggtcctgaacaccctgctctacaatgttgcatcaagagttcaaacaacaaaataaaaaatattaagaggaaatccccatcctgtgacttgagtcccttaagtctacaggggctggtgacctctttttgctaataggaaaatcacattactacaaaatggggagaaaactgtttgcctgtggtagacacctgcacgcataggattgaagacagtacaggctgctgtacagagaagcgcctctcacatctgaactgcatactgagcgggcaagtcggttgtaagttcagtaaaaccctctgatgatgcaaaaaaaaaaaaaaaagtattaagtttcacaagctgtttgtactcaaatatattttctcagtttcagatcctctgctattttattgagtggaaagtcttgagctaaaagggttcaagaagaataatgttgcatttccttatgtctcaggaaacactttttatggtaacttgtcagattgtctatgaacaaacccacttttttagacattgataaagtcttcttttcttcacgtgatattttatacaagaacacttcagatgtattagatgtgactgattttaacaaatcctattagatttgtatcaactagttacatgttctattcatagtcttttgtgaatcattgcctttttgtttaaaaagatggcctattttgagcctttgtataggtacattcctgtttttgtgacaaaagaaaaactttaaaattgtcccaaacagaaaaataatggctatcagaagtatgttttgttttagtgtgagttaccgttactgtatttgtttattgtaaaggtggacatttagcgttcagtgcagttttcaataaaaagtaattaaaatttgttaagttctgaaattcaagtacatctcactaatgtaaatgttctctacttgagatgtttaaggcaattgcattgtcaattagccaatttccagctcttgttactacagggttccataaccagactcaagaccgctgacaattaattacctgtgataacaaaaagtttaattgaaaaatcaaaacctcacacaagtccatcattatcacgtcatgccatccttaagatgcaatggtgggttagtgctaaatcaattcaaaaaaaaacaaagttgctcaacttttagagttctgactttaatctaccccaaagcaaaatgacctggacctggttcaagggagggaagtgaaccttgaaactgttttgccaataacctaacaaacaaaatgatatttacaaagaagtgttgcaaatagtcccatgagttaagagcttgatttaatggatcttctttttaaatagaattaaacctttatactaaaagta

SEQ ID NO: 2472 - DNA, 205 bp, Homo sapiens
taagaaaaagtaggaaatggagggtcataggacttcgctaaaattctgatactgtttacaaagaaaaccggattttcagtagctgaagaaaatatggcactgtaagttaaaacccaatgggaaaagccttagttgaacttttaaaatacttgatttaaaaacaattgctcaggcaaaacataattcataaactaaaaggtttaaa

SEQ ID NO: 2473 - DNA, 285 bp, Homo sapiens
gtcagccacctagcgctggccccatgcagcctccctgggctgggctggctctggatggagccaggcatcggcaagggctctcgggagctgctgccgtcagactcctgcctcaagcctgagtggaagcacctgaggaccggggatcgggacctgacctggggctggcctcaggcccacgtgcacgtgactgccctctgtggaagccagcttaaaccctagccctgtgagagcttcctgtgcccagcaggaaggaagtcaaataaaccacactgactacctgtgctt

SEQ ID NO: 2474 - DNA, 347 bp, Homo sapiens
ctccccagcaaacacaaggtgcagcagggtcccaaaggtagctggatggctgaactgctggatatgggagatacatgacgcgaagacggatttcacatccacaggacggtcttgaagaaaataacactgtgtatattattttaaaataaaaaatagaagtttttattgagttctttaaattactactccatgcttttcttcttcttggaaaagtttttaaatcaaccactcataatttgaccaaaattttaaaaaactggtattttgtaaatgtgtcagagacacatgggacagaaccctactttttgtagaggaacttaatctgaataaagtctgagtttttcagt

SEQ ID NO: 2475 - DNA, 2423 bp, Homo sapiens
gaagccgacaccttttttcaacagtgaagacagaagtttgcactatctttcagctccagttggagttttttgtaccaacttttaggattttttttaatgtttaaaacatcattactataagaactttgagctactgccgtcagtgctgtgctgtgctatggtgctctgtctacttgctcaggtacttgtaaattattaatttatgcagaatgttgattacagtgcagtgcgctgtagtaggcatttttaccatcactgagttttccatggcaggaaggcttgttgtgcttttagtattttagtgaacttgaaatatcctgcttgatgggattctggacaggatgtgtttgctttctgatcaaggccttattggaaagcagtcccccaactacccccagctgtgcttatggtaccagatgcagctcaagagatcccaagtagaatctcagttgattttctggattccccatctcaggccagagccaaggggcttcaggtccaggctgtgtttggctttcagggaggccctgtgccccttgacaactggcaggcaggctcccagggacacctgggagaaatctggcttctggccaggaagctttggtgagaacctgggttgcagacaggaatcttaaggtgtagccacaccaggatagagactggaacactagacaagccagaacttgaccctgagctgaccagccgtgagcatgtttggaaggggtctgtagtgtcactcaaggcggtgcttgatagaaatgccaagcacttctttttctcgctgtcctttctagagcactgccaccagtaggttatttagcttgggaaaggtggtgtttctgtaagaaacctactgcccaggcactgcaaaccgccacctccctatactgcttggagctgagcaaatcaccacaaactgtaatacaatgatcctgtattcagacagatgaggctttccatgggaccacaactattttcagatgtgaaccattaaccagatctagtcaatcaagtctgtttactgcaaggttcaacttattaacaattaggcagactctttatgcttgcaaaaactacaaccaatggaatgtgatgttcatgggtatagttcatgtctgctatcattattcgtagatattggacaaagaaccttctctatggggcatcctctttttccaacttggctgcaggaatctttaaaagatgcttttaacagagtctgaacctatttcttaaacacttgcaacctacctgttgagcatcacagaatgtgataaggaaatcaacttgcttatcaacttcctaaatattatgagatgctggcttgggcagcatccccttgaactcttcactcttcaaatgcctgactagggagccatgtttcacaaggtctttaaagtgactaatggcatgagaaatacaaaaatactcagataaggtaaaatgccatgatgcctctgtcttctggactggttttcacattagaagacaattgacaacagttacataattcactctgagtgttttatgagaaagccttcttttgggggtcaacagttttcctatgctttgaaacagaaaaatatgtaccaagaatcttggtttgccttccagaaaacaaaactgcatttcactttcccggtgttccccactgtatctaggcaacatagtattcatgactatggataaactaaacacgtgacacaaacacacacaaaagggaacccagctctaatacattccaactcgtatagcatgcatctgtttattctatagttattaagttctttaaaatgtaaagccatgctggaaaataatactgctgagatacatacagaattactgtaactgattacacttggtaattgtactaaagccaaacatatatatactattaaaaaggtttacagaattttatggtgcattacgtgggcattgtctttttagatgcccaaatccttagatctggcatgttagcccttcctccaattataagaggatatgaactgagtttttcttttgttgtttgttcttagctgtaattcctatgcttctatttcagagagccaggagagtttgatattaaaggaggttaaaactgtgatcttatgccatgtcatcaatggccacttaggggccatggctgatgacacattcttatctctacagtactaatgtgttattatagagccatgcattttatttctgaataagaacatatttaaactaatattcccttacaatatggacagtattaatccttccaagatgcagtatttatcaagtgaagcatatttagcagcaaattccattttaacataacttaggaaccaataaccagggtgttttgtggttgggggaggcacggggtggagtattcttttttatatcctcaaaacaaaaaaaatcaatacttatatttc

SEQ ID NO: 2476 - DNA, 787 bp, Homo sapiens
gccctcccatgacatggagaccgtgaccagtgctgctgcagaggaggtcacgcgtccccaaggcctcctgtgactggcagcattgactctgtggctttgccatcgtttccatgacaacagacacaacacagttctcggggctcaggaggggaagtccagcctaccaggcacgtctgcagaaacagtgcaaggaagggcagcgacttcctggttgagcttctgctaaaacatggacatgcttcagtgctgctcctgagagagtagcaggttaccactctggcaggccccagccctgcagcaaggaggaagaggactcaaaagtctggcctttcactgagcctccacagcagtgggggagaagcaagggttgggcccagtgtcccctttccccagtgacacctcagccttggcagccctgatgactggtctctggctgcaacttaatgctctgatatggcttttagcatttattatatgaaaatagcagggttttagtttttaatttatcagagaccctgccacccattccatctccatccaagcaaactgaatggcaatgaaacaaactggagaagaaggtaggagaaagggcggtgaactctggctctttgctgtggacatgcgtgaccagcagtactcaggtttgagggtttgcagaaagccagggaacccacagagtcaccaacccttcatttaacaagtaagaatgttaaaaagtgaaaacaatgtaagagcctaactccatcccccgtggccattactgcataaaatagagtgcatttgaaat

SEQ ID NO: 2477 - DNA, 859 bp, Homo sapiens
ccacaggctgccctgctgaccacactacctggacctgggaggacttcgaatgctggataagccattaaacttagcattatcttcatcatgggaaaacacttattttactttcgattttttttttccataaaggaaaacatcacttcctgaattactgacccaagccaaacagaaacaataaccctcgagaaaataggtcaacaatctgttgtggggaaaccacctccatgtaacccactggatacagtccccttaatgtttttgcttctaaattgtaccttttgcttctgatttcttctcccctgctgtttcctgcccatcagagaggcctgatacaagcaagtttgtttacatccctggggaatcttttacatcaaacttttgggatccaaatccatctccttttaaatttcaatctcagcacctgccagttatgcaaatgccaaaatgtgggtcatcatatagtatatttgaaacctttctgaacatgtacaccacccaatgctagaggctgacttggaaaccggtgggtgcaatgcccgaggctgtggaacaatcagcccatctctttgtgacctggagcagtcagagggccctcagtcaccccgccccattcctcaccagagaaaagaatccatttctatggaagctctgacgtaacttcagtgttttctacaatactcctcctgccccgccccattaaaacagttcttttgttaagaaatagcctaatggtccaactttgctgtctgttcttccaaatgtttataatacacattatttataaatatgtctgtttgggaagctaagaacaagctagtttttacaacacaaatggaaataaatgcaattattataa

SEQ ID NO: 2478 - DNA, 299 bp, Homo sapiens
attctctttcatctcattttggcgttgcatctattgtacatcagccctgagtagtaactggttagcttctctggacaattcagcatggtaacgtgactgtcatctgtgacagcatttgtgtttcatgacactgtgttcttcattgatgctgtactcctgaaaatttttcccacaaggttggggaaatgaatgggaaatgtcgctggtctgtgtggtattcaaagcagtagtatcatgatgagcgtaacgacccttctgacctggtctcacgatctgaaataataaaaggctgtgtcatg

SEQ ID NO: 2479 - DNA, 2530 bp, Homo sapiens
cagaaaaatcgaactgggaaaaatataataaagttagttttgtgataagttctagtgcagtttttgtcataaattacaagtgaattctgtaagtaaggctgtcagtctgcttaagggaagaaaactttggatttgctgggtctgaatcggcttcataaactccactgggagcactgctgggctcctggactgagaatagttgaacaccgggggctttgtgaaggagtctgggccaaggtttgccctcagctttgcagaatgaagccttgaggtctgtcaccacccacagccaccctacagcagccttaactgtgacacttgccacactgtgtcgtcgtttgtttgcctatgtcctccagggcacggtggcaggaacaactatcctcgtctgtcccaacactgagcaggcactcggtaaacacgaatgaatggatgagcgcacggatgaatggagcttacaagatctgtctttccaatggccgggggcatttggtccccaaattaaggctattggacatctgcacaggacagtcctatttttgatgtcctttcctttctgaaaataaagttttgtgctttggagaatgactcgtgagcacatctttagggaccaagagtgactttctgtaaggagtgactcgtggcttgccttggtctcttgggaatacttttctaactagggttgctctcacctgagacattctccacccgcggaatctcagggtcccaggctgtgggccatcacgacctcaaactggctcctaatctccagctttcctgtcattgaaagcttcggaagtttactggctctgctcccgcctgttttctttctgactctatctggcagcccgatgccacccagtacaggaagtgacaccagtactctgtaaagcatcatcatccttggagagactgagcactcagcaccttcagccacgatttcaggatcgcttccttgtgagccgctgcctccgaaatctcctttgaagcccagacatctttctccagcttcagacttgtagatataactcgttcatcttcatttactttccactttgccccctgtcctctctgtgttccccaaatcagagaatagcccgccatcccccaggtcacctgtctggattcctccccattcacccaccttgccaggtgcaggtgaggatggtgcaccagacagggtagctgtcccccaaaatgtgccctgtgcgggcagtgccctgtctccacgtttgtttccccagtgtctggcggggagccaggtgacatcataaatacttgctgaatgaatgcagaaatcagcggtactgacttgtactatattggctgccatgatagggttctcacagcgtcatccatgatcgtaagggagaatgacattctgcttgagggagggaatagaaaggggcagggaggggacatctgagggcttcacagggctgcaaagggtacagggattgcaccagggcagaacaggggagggtgttcaaggaagagtggctcttagcagaggcactttggaaggtgtgaggcataaatgcttccttctacgtaggccaacctcaaaactttcagtaggaatgttgctatgatcaagttgttctaacactttagacttagtagtaattatgaacctcacatagaaaaatttcatccagccatatgcctgtggagtggaatattctgtttagtagaaaaatcctttagagttcagctctaaccagaaatcttgctgaagtatgtcagcaccttttctcaccctggtaagtacagtatttcaagagcacgctaagggtggttttcattttacagggctgttgatgatgggttaaaaatgttcatttaagggctacccccgtgtttaatagatgaacaccacttctacacaaccctccttggtactgggggagggagagatctgacaaatactgcccattcccctaggctgactggatttgagaacaaatacccacccatttccaccatggtatggtaacttctctgagcttcagtttccaagtgaatttccatgtaataggacattcccattaaatacaagctgtttttactttttcgcctcccagggcctgtgggatctggtcccccagcctctcttgggctttcttacactaactctgtacctaccatctcctgcctcccttaggcaggcacctccaaccaccacacactccctgctgttttccctgcctggaactttccctcctgccccaccaagatcatttcatccagtcctgagctcagcttaagggaggcttcttgcctgtgggttccctcacccccatgcctgtcctccaggctggggcaggttcttagtttgcctggaattgttctgtacctctttgtagcacgtagtgttgtggaaactaagccactaattgagtttctggctcccctcctggggttgtaagttttgttcattcatgagggccgactgcatttcctggttactctatcccagtgaccagccacaggagatgtccaataaagtatgtgatgaaatggtcttaaa

SEQ ID NO: 2480 - DNA, 2646 bp, Homo sapiens
gggacttctgtttaccttccgcagcacccagcatcaaaggacggacttcaggggacacgtttagtatattaagacatgctgatggaaacagtatcttcaaaaaaatcagcagcaattgaaatgctacaaaagactttgtttaaagattttatttaaactattaagaatcaacatgcaaacagcctacttcttcatgaacaattccattttattgactgaacttttctcatattttcacatttctcagtcctgaagaataaggaaaacaaagcgacgcctattttgtataaagtttccgactccgtcttggccatgtctagtaattgctatgtgttgggagaaactttgtgaatgcaccattttgatgatcatgaaacgctgatgaaaaatgcctccaaacatttttctgtactcatacttagattcacaatggttgtgtatctctataatgtgaaatatttttttgtggtgataaaaagagggccaaggaggtatgagccatcagactggaaaaaaggatgactatatgatgaggagaaactggggtggcagggagggagggagggtttatcactgcttaacttcatcttcatgaaatgaaactttgtaacttattgtagttagaaattgtaactttgatattgaattctcttgccttcaacaagcacactgacagagaaaaaatgctactgtctgttggttccaatattctcccactgctagagcttcctgttaagcaagtgtgatctgcaacattttttcaacttttgctagcactgtatactattgcattcttaggctactgtgaggtctatgtttcttgtaccagaaattgtccttttgacttctagatccttcttccctaatgtgttttgtatgtggttataaaattgtagacttttgtgattttgccaaagttgtagctaaatatttatacacttgtcttgaatttttttcagatccacttaaaatatttagaaaaacaagttttattccttatgtgtcttataaggaataaaatggtcttcatttgacacttactttcccatgaacacttgcagttgctaagggactttattttgtaacatatcaattataaatattgtatttatctttgaaattttgtacattgcttttcccaccttttcctttttcttctttcttgtctgtattggtttttgatcacggcctggtgttgtgatactgggaagagcattagccaagaacttgtctctttgatctgtttcgttaagctgaaccagtgtctttacatttcatttgtacttcaaaaaatatgctattgtttagactttccatcctttttttttttattttgaggaaaagtcaaattcattgtttatttttatattatttttaagttatctgaacaaatacttttgaaaaaaaagtttgttgtatagtcaaaacaaatcggtgccacccggccgtgacaaatcctagtagattctgtgcatgtggagcggccgcgaagaggtgacaccgtttggggctgtgtccttattttattttatttttttgtagaatgtaaaaagtcattttagatgccacccattgactttgccacatagctgaactgtgtttactggaaaaattcagaggcctaaagtttaaaataaaatttacttctgatgttttaattaaaatgtttgccacattaacttttctgatgccttaaaagtgaacttctttaaagaacctttgtgctattttatcacaggcttacactacaattgttaataaatacttcatttggagatgtatggtgtaaaacacacaaacacacacaaaaaagcacaagcccgctgcatgacccgtctctcctttctgggactatttctgctgcgtcctgcaccctcctgggcccacctccgattcacagaggtttcagggggacccaaatcactgctggttttcaatttttttttaacaatacatttttgtggtcagttccaacagcactgtccgtacttttaaaactggaatgacctccttcagatatcgtgcctcttagtgccaaacccacagtgagaccaaaagtgtcaggtgtttttttttttttctttctcctttgcactaagtgctttgcagacacggcacagcaaacattttgcaaactgcagcagaaatcgaatttaaaacaaaaaggagggactttaaaataccttcttgacaaaaatcaacaatgcacaacttacaaagtgttcattctagggacaaaattaaataaacagaatgtccccaggagtcagcaggtcacagtctggctttgtgatggttgacaaggtctagctacatgggaaagcctgagaagtcactttggaactaaattgcctccattttattttgtacgagtaagggtttgatctacaaaagagctcacatggacgcactgagaacgcctgccagcttccccatgccctcacttggtttgtgttttaggttaagtagtcaatgcccacatcacttcactgtctcaagactgagcacttcactaaatggtagattttactgttaaagaccctacaataagattgttttatctgtacattttttcagatatttaactgtataaaaatgttcattttacacaatatttaattaaagtatttcttgtctgtgaatttc

SEQ ID NO: 2481 - DNA, 770 bp, Homo sapiens
gtttgtgaaaaaatgcaataagcccgggggttgaccctgggcgtgccgggggcgagggggtcacggtggagacggacacgggcgtggggcggccgagacctgcacggcccagcgggcaccggcactgcggggtcttcgttctcagaggattactgtttcatattgaagctctctcttttgtacattcagagtttgatgcatttctaatcaccgtgatacgtcgatcccttaattgttttaattatgcaaattacttgtaatatacacaaattatcaatccactgcaggactgtggggaagcaggaacgggagcctctgtaacaatctcaaggcatttgtgtcatcacctaagacgattggcgaaaacttttctgaaaacctttgtgaattacttcgtttctccaggattcccgcagtgttgaggaattccttactctgtccctaggtctcagtctcgtttctgagtagcagcaatagggttttcatcattcatcatagtgacaactgtgagcattccacacctggaccgtggatcacttacaggtttccaagggtggccgcgcgttcctcccagaggggcgtcccggcctggagcagggagccgtgttggttgccaccggtcctacttcaaaagaattattttgtacaaaatcatcatattaatatttgagttatttttattgtatgcccggagtttgcatgagattttttctcatcacctttgtataaaaaatttttaattttttttaatcaataaatattttaaacca

SEQ ID NO: 2482 - DNA, 824 bp, Homo sapiens
tgaagaactggagtctgacttggttcgttagtggattacttctgagcttgcaacatagctcactgaagagctgttagatcctggggtggccacgtcacttgtgtttatttgttctgtaaatgctgcgttcctaatttagtaaaataaaagaatagacactaaaatcatgttgatctataattacacctatgggatcaataagcatgtcagactgattaatgtctactgtgaaaatttggtagtaaattttcatttgatattagatataaatatctgaatataaataattttaatatactagtcatgatgtgtgttgtattttaaaaattatctgcaaccttaattcagctgaagtactttatatttcaaaagaatgaataacattgataataaaatcgctactttaaggggtttgtccaaaataaatattgtggccttatatatcacactattgtagaaagtattatttaatttaaatggatgcaggttgtctactaaagaaagattatatataactatgctaattgttcataatcaacagaaaccaagatagagctacaaactcagctgtacagttcgtacactaaactcttcttgcttttgcattataaggaattaagtctccgattattaggtgatcaccctggatgatcagttttctgctgaaggcacctactcagtatcttttcctctttatcactctgcattggtgaatttaatcctctcctttgtgttcaacttttgtgtgcttttaaaatcagctttattctaagcaaatctgtgtctactttaaaaaactggaaatggaaaaaaaaataaatctt

SEQ ID NO: 2483 - DNA, 518 bp, Homo sapiens
gccgggacgcccgtggtcctcaccccttgagctgctttggagactcggctgccagagggagggccatgggccgaggcctggcattcacgttcccacccagcctggctggcggtgcccacagtgccccggacacatttcacacctcaggctcgtggtggtgcaggggacaagaggctgtgggtgcaggggacacctgtggagggcatttcccgtgggcccccgagacccgcctagatggaggaagcgctgctgggcgccctcttaccgctcacggggagctggggccatggatgggacaggagtctttgtccctgctcagcccggaggctgtgcacggccctcgtcacaaggtgacccttgcagcacaggccgcgggtgccccaggctcggctcaggtcttggaggtcaagggcatgggttggggtagtgggtggggaggtgaatgttttctagagattcaaactgctccagcaatttctgtagttttcacctctgagaattacaatgtgagaaccgct

SEQ ID NO: 2484 - DNA, 100 bp, Homo sapiens
ggacccgcggggtgggggcgaatctatttttgcagaatccgggggcggccccgggtgggcgcgagtcgctttgtatcatcaataaattatttaacgggtc

SEQ ID NO: 2485 - DNA, 28 bp, Homo sapiens
gtgttccactaaacaaacaacaaaagcc

SEQ ID NO: 2486 - DNA, 266 bp, Homo sapiens
agtccaatttacggacggcgtaaaatttcatgatgctgatgatccagaacatcctccaccagtcccattattggacgtgtaaatcacaccggcagtgcctcgttacccgcagttcactttctgcagtttgttacctgcagacagctacagtatgaaaatattaagctattctgagggagaggccacagccacatcacttctgttacagtatagtgttatgattgtatcttattattagttattgttataaatatcttattgtgcct

SEQ ID NO: 2487 - DNA, 642 bp, Homo sapiens
accctgactttgcaggctcagctgctgttctaacctcaggaatgcatctacctgagaggctcctgctgtccacgccctcagccaattccttctccccgccttggccacgtgtagccccagctgtctgcaggcaccaggctgggatgagctgtgtgcttgcgggtgcgtgtgtgtgtacgtgtctccaggtggccgctggtctcccgctgtgttcaggaggccacatatacagcccctcccagccacacctgcccctgctctggggcctgctgagccggctgccctgggcacccggttccaggcagcacagacgtggggcatccccagaaagactccatcccaggaccaggttcccctgcgtgctcttcgagagggtgtcagtgagcagactgcaccccaagctcccgactccaggtcccctgatcttggggcctgtttcccatgggattcaagagggacagccccagctttgtgtgtgtttaagcttaggaatcgcctttatggaaagggctatgtgggagagtcagctatcttgtctggttttcttgagacctcagatgtgtgttcagcagggctgaaagcttttattctttaataatgagaaatgtatattttactaataaattattgaccgagttctgt

SEQ ID NO: 2488 - DNA, 132 bp, Homo sapiens
gccctggctgtgacaggaaggaagggtgtggggtcagcagggactggtgcaaatgggtccagaattttcaaatcgaatgctctgtgttctgtctttgcagtttaaatataaagcaggaatgattgactcagc

SEQ ID NO: 2489 - DNA, 138 bp, Homo sapiens
cgtcctccgccagctcctgtgaccagcgcgtctcccgatgctctccgccgtgttcgtgtccccaggcgccctcgctgcagccccgcccccgtgggtctctgactctgtcgcttttctctaagtaaagatttcacgtcc

SEQ ID NO: 2490 - DNA, 345 bp, Homo sapiens
agcagggtctcggcaccctggccctgcagcccagctcagtgctgggcttggctcctctgcagggagacggccctctacggaaacctcatcctcaggaagggggtgcttgccctcaaccccctgctgtaggcctggtgaagaccacctgggccggaagaggaactgggggcaccctgagctccagtaccaccactcacaacaggcctcccagtggcagctcccagacctgggccctggccagggctctaggggccggcagtcttggggtgggccctgccaattgggacgagtatccctgatttgtgaaaatgatggaaaaacgttcagtctcaagagtccaattcc

(The sequence listing continues in the following parts.)

What is claimed is:

1. A library of a different expression constructs, each of a plurality of members of the library comprising a transcription regulatory sequence operably linked with a different transcribable sequence, wherein the transcription of the transcribable sequence is under transcriptional control of the transcriptional regulatory sequence, and wherein each transcribable sequence comprises a different nucleic acid segment from a genome, wherein the segment comprises untranslated region (UTR) sequence of at least 10 nucleotides operably linked with a reporter sequence that is heterologous to the UTR sequence such that expression of the reporter sequence is under post-transcriptional control of the UTR sequences.

2. The library of claim 1 wherein the UTR sequence is a 3′ UTR sequence and is positioned 3′ to the reporter sequence.

3. The library of claim 1 wherein the UTR sequence is a 5′ UTR sequence and is positioned 5′ to the reporter sequence.

4. The library of claim 1 wherein the transcribable sequence comprises a 3′ UTR sequence positioned 3′ to the reporter sequence and a 5′ UTR sequence positioned 5′ to the reporter sequence.

5. The library of claim 1 wherein the transcription regulatory sequence is common among the constructs and is heterologous to the UTR sequences.

6. The library of claim 1 wherein the UTR sequence comprises the entire transcribed UTR sequence of a naturally occuring transcript.

7. The library of claim 1 wherein a plurality comprising at least 20% of the UTR sequences of said expression constructs in said library are part of a common pathway that can include:
(a) UTR sequences that control the expression of genes involved in the same biological process;
(b) UTR sequences that are all bound by the same protein, complex of proteins, other nucleic acid binding proteins, other nucleir acid molecules such as microRNAs, or other small molecule;
(c) UTR sequences that control the expression of genes whose transcript levels or proteins levels change upon treatment or exposure to the same stimulus;
(d) UTR sequences that contain the same sequence motif or collection of sequence motifs wherein a sequence motif is string of 2 or more nucleotides; or
(e) UTR sequences that control the expression of genes whose sequences, transcripts or proteins are connected via metabolic transformations and/or physical protein-protein, protein-DNA and protein-compound interactions

8. The library of claim 1 wherein the UTR sequences are selected from the group consisting of SEQ ID NO: 1-17520.

9. The library of claim 1 wherein the plurality comprises at least ten, at least 50, at least 100, at least 200, or at least 1000 expression constructs.

10. The library of claim 1, wherein the expression construct is a plasmid or viral construct.

11. The library of claim 1, wherein each nucleic acid segment comprises at least 20%, at least 40%, at least 60%, or at least 80% of the nucleotides that make up a UTR sequence.

12. The library of claim 1, wherein the reporter sequence is common among the constructs.

13. The library of claim 1, wherein the reporter sequence encodes a light-emitting reporter molecule, a fluorescent reporter molecule or a colorimetric molecule.

14. The library of claim 1, wherein each reporter sequence comprises a pre-determined, unique nucleotide barcode and/or a reporter that reports a visible signal.

15. The library of claim 1, wherein the genome is a mammalian genome.

16. The library of claim 1, wherein the genome is a human genome.

17. The library of claim 1, wherein the genome is a mouse genome.

18. A library of isolated nucleic acid molecules, each member of the library comprising a different, pre-determined nucleic acid segment from a genome, wherein the segment comprises UTR sequences, wherein a plurality comprising at least 20% of the UTR sequences in said library are part of a common pathway.

19. The library of claim 18 comprising at least 10 different pre-determined nucleic acid segment from a genome, wherein about 50% of the UTR sequences of said library are part of said common pathway.

20. A library of cells, wherein each of a plurality of cells in the library of cells comprises a different expression construct, each construct having a transcription regulatory sequence operably linked with a different transcribable sequence, wherein the transcription of the transcribable sequence is under transcriptional control of the transcriptional regulatory sequence, and wherein each transcribable sequence comprises a different nucleic acid segment from a genome, wherein the segment comprises untranslated region (UTR) sequence of at least 10 nucleotides operably linked with a reporter sequence that is heterologous to the UTR sequence such that expression of the reporter sequence is under post-transcriptional control of the UTR sequences.

21. The library of claim 20 wherein the cells are human cells.

22. The library of claim 20 wherein the cells are non-human cells.

23. A device comprising receptacles, each of a plurality of the receptacles containing a different expression construct, each expression construct having a transcription regulatory sequence operably linked with a different transcribable sequence, wherein the transcription of the transcribable sequence is under transcriptional control of the transcriptional regulatory sequence, and wherein each transcribable sequence comprises a different nucleic acid segment from a genome, wherein the segment comprises untranslated region (UTR) sequence of at least 10 nucleotides operably linked with a reporter sequence that is heterologous to the UTR sequence such that expression of the reporter sequence is under post-transcriptional control of the UTR sequences, wherein each member has a known location among the receptacles.

24. The device of claim 23, wherein the library has a diversity of at least 10 different nucleic acid segments.

25. The device of claim 23, wherein the constructs are in the form of a dried nucleic acid or are in solution.

26. The device of claim 23, wherein the constructs are in a stabilized transfection matrix.

27. The device of claim 23, wherein a microtiter plate such as a 96-well plate, a 384-well plate or a 1536 well plate.

28. The device of claim 23, wherein at least at least 10 different expression constructs wherein about 50% of the UTR sequences of said expression constructs in said library are part of said common pathway.

29. A device comprising a solid substrate comprising a surface and nucleic acid molecules immobilized to the surface, each at a different known location, wherein each molecule comprises a nucleotide sequence of at least 10 nucleotides from a genomic segment comprising UTR sequences.

30. The device of claim 29 wherein said device comprises UTR sequences from at least 10 different genomic segments.

31. The device of claim 29 comprising at least 10 different UTR sequences from genomic segments wherein about 50% of the UTR sequences in said device are part of a common pathway.

32. A method comprising:
(a) providing a device comprising receptacles, each of a plurality of the receptacles containing a different member of a library of cells, wherein each of a plurality of the cells in the library comprises a different member of the library of expression constructs, each of a plurality of the expression constructs characterized by having a transcription regulatory sequence operably linked with a different transcribable sequence, wherein the transcription of the transcribable sequence is under transcriptional control of the transcriptional regulatory sequence, and wherein each transcribable sequence comprises a different nucleic acid segment from a genome, wherein the segment comprises untranslated region (UTR) sequence of at least 10 nucleotides operably linked with a reporter sequence that is heterologous to the UTR sequence such that expression of the reporter sequence is under post-transcriptional control of the UTR sequences; wherein each member of the library of cells has a known location among the receptacles;
(b) culturing the cells; and
(c) measuring the level of expression of the reporter sequence in each receptacle.

33. The method of claim 32 wherein the library has a diversity of at least 10 different nucleic acid segments.

34. The method of claim 32 wherein the step of providing the device comprises:
(a) providing a device comprising at least one plate comprising a plurality of receptacles, each receptacle containing a different member of the library of expression constructs, wherein each member of the library of expression constructs has a known location among the receptacles;
(b) delivering cells to each of the receptacles; and
(c) transfecting the cells with the expression constructs.

35. The method of claim 32 further comprising:
(a) perturbing the cells in each receptacle;
(b) measuring the level of expression of the reporter sequence in each receptacle; and
(c) determining whether the level of expression in any receptacle changed after perturbing the cells.

36. The method of claim 32 wherein perturbing comprises contacting the cells in each receptacle with a test compound, exposing the cells to different environmental conditions, or genetically modifying the cells either permanently or transiently such as by inducing mutation, overexpressing a transcript for example by transfecting with a cDNA or decreasing expression of a transcript by siRNA.

37. The method of claim 32 wherein perturbing comprises contacting the cells in each receptacle with a test compound.

38. The method of claim 32 further comprising identifying a compound that alters UTR activity.

39. The method of claim 32 wherein said cells in said library of cells comprises cells associated with a condition.

40. The method of claim 32 wherein each cell in said library of cells comprises a DNA polymorphism such as SNP, STR, VTR and RFLP, or DNA mutation.

41. A method to determine the functional effect of a DNA polymorphism or DNA mutation in the post-transcriptional activity of a polynucleotide comprising:
(a) providing a first library of cells wherein said first library comprises cells comprising said DNA polymorphism or DNA mutation;
(b) providing a second library of cells wherein said second library comprises cells not comprising said DNA polymorphism or DNA mutation;
(c) providing a device comprising a plurality of receptacles, each receptacle containing a different member of said first library of cells or said second library of cells, wherein each cell in said first and second library of cells comprises a different member of the library of expression constructs, each expression construct characterized by having a transcription regulatory sequence operably linked with a different transcribable sequence, wherein the transcription of the transcribable sequence is under transcriptional control of the transcriptional regulatory sequence, and wherein each transcribable sequence comprises a different nucleic acid segment from a genome, wherein the segment comprises untranslated region (UTR) sequence of at least 10 nucleotides operably linked with a reporter sequence that is heterologous to the UTR sequence such that expression of the reporter sequence is under post-transcriptional control of the UTR sequences; wherein a plurality comprising at least 20% of the UTR sequences in said device are part of a common pathway and wherein each member of the library of cells has a known location among the receptacles;
(d) culturing the cells;
(e) measuring the level of expression of the reporter sequence in each receptacle;
(f) comparing the level of expression of the reporter sequence to each UTR sequence between said first library of cells and said second library of cells thereby determining the effect of said DNA polymorphism or DNA mutation in the post-transcriptional regulation of a polynucleotide.

42. The method of claim 41 wherein said DNA polymorphism is selected for the group consisting of SNP, STR, VTR, RFLP, deletions, and insertions.

43. A business method comprising commercializing the compositions, devices of methods of any of claims 1, 18, 20, 23, 29, 32 and 41.
